United States Patent Application Publication US 2015/0141320 A1 - sequence listing, part 51

SEQ ID NO: 2024756 - DNA, 15 bp, Homo sapiens
tgagacaggagaata

SEQ ID NO: 2024757 - DNA, 15 bp, Homo sapiens
gagacaggagaatag

SEQ ID NO: 2024758 - DNA, 15 bp, Homo sapiens
agacaggagaatagc

SEQ ID NO: 2024759 - DNA, 15 bp, Homo sapiens
gacaggagaatagct

SEQ ID NO: 2024760 - DNA, 15 bp, Homo sapiens
acaggagaatagctt

SEQ ID NO: 2024761 - DNA, 15 bp, Homo sapiens
caggagaatagcttg

SEQ ID NO: 2024762 - DNA, 15 bp, Homo sapiens
aggagaatagcttga

SEQ ID NO: 2024763 - DNA, 15 bp, Homo sapiens
ggagaatagcttgaa

SEQ ID NO: 2024764 - DNA, 15 bp, Homo sapiens
gagaatagcttgaac

SEQ ID NO: 2024765 - DNA, 15 bp, Homo sapiens
agaatagcttgaacc

SEQ ID NO: 2024766 - DNA, 15 bp, Homo sapiens
gaatagcttgaaccc

SEQ ID NO: 2024767 - DNA, 15 bp, Homo sapiens
aatagcttgaacccg

SEQ ID NO: 2024768 - DNA, 15 bp, Homo sapiens
atagcttgaacccgg

SEQ ID NO: 2024769 - DNA, 15 bp, Homo sapiens
tagcttgaacccggg

SEQ ID NO: 2024770 - DNA, 15 bp, Homo sapiens
agcttgaacccggga

SEQ ID NO: 2024771 - DNA, 15 bp, Homo sapiens
gcttgaacccgggac

SEQ ID NO: 2024772 - DNA, 15 bp, Homo sapiens
cttgaacccgggacg

SEQ ID NO: 2024773 - DNA, 15 bp, Homo sapiens
ttgaacccgggacgt

SEQ ID NO: 2024774 - DNA, 15 bp, Homo sapiens
tgaacccgggacgtg

SEQ ID NO: 2024775 - DNA, 15 bp, Homo sapiens
gaacccgggacgtgg

SEQ ID NO: 2024776 - DNA, 15 bp, Homo sapiens
aacccgggacgtgga

SEQ ID NO: 2024777 - DNA, 15 bp, Homo sapiens
acccgggacgtggag

SEQ ID NO: 2024778 - DNA, 15 bp, Homo sapiens
cccgggacgtggagg

SEQ ID NO: 2024779 - DNA, 15 bp, Homo sapiens
ccgggacgtggaggc

SEQ ID NO: 2024780 - DNA, 15 bp, Homo sapiens
cgggacgtggaggct

SEQ ID NO: 2024781 - DNA, 15 bp, Homo sapiens
gggacgtggaggctg

SEQ ID NO: 2024782 - DNA, 15 bp, Homo sapiens
ggacgtggaggctgc

SEQ ID NO: 2024783 - DNA, 15 bp, Homo sapiens
gacgtggaggctgca

SEQ ID NO: 2024784 - DNA, 15 bp, Homo sapiens
acgtggaggctgcag

SEQ ID NO: 2024785 - DNA, 15 bp, Homo sapiens
cgtggaggctgcaga

SEQ ID NO: 2024786 - DNA, 15 bp, Homo sapiens
gtggaggctgcagag

SEQ ID NO: 2024787 - DNA, 15 bp, Homo sapiens
tggaggctgcagaga

SEQ ID NO: 2024788 - DNA, 15 bp, Homo sapiens
ggaggctgcagagat

SEQ ID NO: 2024789 - DNA, 15 bp, Homo sapiens
gaggctgcagagatc

SEQ ID NO: 2024790 - DNA, 15 bp, Homo sapiens
aggctgcagagatca

SEQ ID NO: 2024791 - DNA, 15 bp, Homo sapiens
ggctgcagagatcat

SEQ ID NO: 2024792 - DNA, 15 bp, Homo sapiens
gctgcagagatcatg

SEQ ID NO: 2024793 - DNA, 15 bp, Homo sapiens
ctgcagagatcatga

SEQ ID NO: 2024794 - DNA, 15 bp, Homo sapiens
tgcagagatcatgag

SEQ ID NO: 2024795 - DNA, 15 bp, Homo sapiens
gcagagatcatgaga

SEQ ID NO: 2024796 - DNA, 15 bp, Homo sapiens
cagagatcatgagat

SEQ ID NO: 2024797 - DNA, 15 bp, Homo sapiens
agagatcatgagatc

SEQ ID NO: 2024798 - DNA, 15 bp, Homo sapiens
gagatcatgagatct

SEQ ID NO: 2024799 - DNA, 15 bp, Homo sapiens
agatcatgagatctt

SEQ ID NO: 2024800 - DNA, 15 bp, Homo sapiens
gatcatgagatcttg

SEQ ID NO: 2024801 - DNA, 15 bp, Homo sapiens
atcatgagatcttgg

SEQ ID NO: 2024802 - DNA, 15 bp, Homo sapiens
tcatgagatcttggc

SEQ ID NO: 2024803 - DNA, 15 bp, Homo sapiens
catgagatcttggct

SEQ ID NO: 2024804 - DNA, 15 bp, Homo sapiens
atgagatcttggctg

SEQ ID NO: 2024805 - DNA, 15 bp, Homo sapiens
tgagatcttggctgc

SEQ ID NO: 2024806 - DNA, 15 bp, Homo sapiens
gagatcttggctgca

SEQ ID NO: 2024807 - DNA, 15 bp, Homo sapiens
agatcttggctgcat

SEQ ID NO: 2024808 - DNA, 15 bp, Homo sapiens
gatcttggctgcatg

SEQ ID NO: 2024809 - DNA, 15 bp, Homo sapiens
atcttggctgcatga

SEQ ID NO: 2024810 - DNA, 15 bp, Homo sapiens
tcttggctgcatgag

SEQ ID NO: 2024811 - DNA, 15 bp, Homo sapiens
cttggctgcatgagc

SEQ ID NO: 2024812 - DNA, 15 bp, Homo sapiens
ttggctgcatgagct

SEQ ID NO: 2024813 - DNA, 15 bp, Homo sapiens
tggctgcatgagcta

SEQ ID NO: 2024814 - DNA, 15 bp, Homo sapiens
ggctgcatgagctaa

SEQ ID NO: 2024815 - DNA, 15 bp, Homo sapiens
gctgcatgagctaag

SEQ ID NO: 2024816 - DNA, 15 bp, Homo sapiens
ctgcatgagctaaga

SEQ ID NO: 2024817 - DNA, 15 bp, Homo sapiens
tgcatgagctaagat

SEQ ID NO: 2024818 - DNA, 15 bp, Homo sapiens
gcatgagctaagatc

SEQ ID NO: 2024819 - DNA, 15 bp, Homo sapiens
catgagctaagatca

SEQ ID NO: 2024820 - DNA, 15 bp, Homo sapiens
atgagctaagatcat

SEQ ID NO: 2024821 - DNA, 15 bp, Homo sapiens
tgagctaagatcatg

SEQ ID NO: 2024822 - DNA, 15 bp, Homo sapiens
gagctaagatcatgc

SEQ ID NO: 2024823 - DNA, 15 bp, Homo sapiens
agctaagatcatgcc

SEQ ID NO: 2024824 - DNA, 15 bp, Homo sapiens
gctaagatcatgcca

SEQ ID NO: 2024825 - DNA, 15 bp, Homo sapiens
ctaagatcatgccac

SEQ ID NO: 2024826 - DNA, 15 bp, Homo sapiens
taagatcatgccact

SEQ ID NO: 2024827 - DNA, 15 bp, Homo sapiens
actgcactccagcca

SEQ ID NO: 2024828 - DNA, 15 bp, Homo sapiens
ctgcactccagccag

SEQ ID NO: 2024829 - DNA, 15 bp, Homo sapiens
tgcactccagccagg

SEQ ID NO: 2024830 - DNA, 15 bp, Homo sapiens
gcactccagccagga

SEQ ID NO: 2024831 - DNA, 15 bp, Homo sapiens
cactccagccaggaa

SEQ ID NO: 2024832 - DNA, 15 bp, Homo sapiens
actccagccaggaag

SEQ ID NO: 2024833 - DNA, 15 bp, Homo sapiens
ctccagccaggaaga

SEQ ID NO: 2024834 - DNA, 15 bp, Homo sapiens
tccagccaggaagac

SEQ ID NO: 2024835 - DNA, 15 bp, Homo sapiens
ccagccaggaagaca

SEQ ID NO: 2024836 - DNA, 15 bp, Homo sapiens
cagccaggaagacag

SEQ ID NO: 2024837 - DNA, 15 bp, Homo sapiens
agccaggaagacaga

SEQ ID NO: 2024838 - DNA, 15 bp, Homo sapiens
gccaggaagacagag

SEQ ID NO: 2024839 - DNA, 15 bp, Homo sapiens
ccaggaagacagagt

SEQ ID NO: 2024840 - DNA, 15 bp, Homo sapiens
caggaagacagagta

SEQ ID NO: 2024841 - DNA, 15 bp, Homo sapiens
aggaagacagagtaa

SEQ ID NO: 2024842 - DNA, 15 bp, Homo sapiens
ggaagacagagtaag

SEQ ID NO: 2024843 - DNA, 15 bp, Homo sapiens
gaagacagagtaaga

SEQ ID NO: 2024844 - DNA, 15 bp, Homo sapiens
aagacagagtaagac

SEQ ID NO: 2024845 - DNA, 15 bp, Homo sapiens
agacagagtaagact

SEQ ID NO: 2024846 - DNA, 15 bp, Homo sapiens
gacagagtaagactc

SEQ ID NO: 2024847 - DNA, 15 bp, Homo sapiens
acagagtaagactct

SEQ ID NO: 2024848 - DNA, 15 bp, Homo sapiens
cagagtaagactctg

SEQ ID NO: 2024849 - DNA, 15 bp, Homo sapiens
agagtaagactctgt

SEQ ID NO: 2024850 - DNA, 15 bp, Homo sapiens
gagtaagactctgtc

SEQ ID NO: 2024851 - DNA, 15 bp, Homo sapiens
agtaagactctgtct

SEQ ID NO: 2024852 - DNA, 15 bp, Homo sapiens
gtaagactctgtctc

SEQ ID NO: 2024853 - DNA, 15 bp, Homo sapiens
taagactctgtctca

SEQ ID NO: 2024854 - DNA, 15 bp, Homo sapiens
aaaaaaaagaactgg

SEQ ID NO: 2024855 - DNA, 15 bp, Homo sapiens
aaaaaaagaactgga

SEQ ID NO: 2024856 - DNA, 15 bp, Homo sapiens
aaaaaagaactggat

SEQ ID NO: 2024857 - DNA, 15 bp, Homo sapiens
aaaaagaactggata

SEQ ID NO: 2024858 - DNA, 15 bp, Homo sapiens
aaaagaactggatat

SEQ ID NO: 2024859 - DNA, 15 bp, Homo sapiens
aaagaactggatatg

SEQ ID NO: 2024860 - DNA, 15 bp, Homo sapiens
aagaactggatatgg

SEQ ID NO: 2024861 - DNA, 15 bp, Homo sapiens
agaactggatatggc

SEQ ID NO: 2024862 - DNA, 15 bp, Homo sapiens
gaactggatatggca

SEQ ID NO: 2024863 - DNA, 15 bp, Homo sapiens
aactggatatggcag

SEQ ID NO: 2024864 - DNA, 15 bp, Homo sapiens
actggatatggcagc

SEQ ID NO: 2024865 - DNA, 15 bp, Homo sapiens
ctggatatggcagca

SEQ ID NO: 2024866 - DNA, 15 bp, Homo sapiens
tggatatggcagcac

SEQ ID NO: 2024867 - DNA, 15 bp, Homo sapiens
ggatatggcagcaca

SEQ ID NO: 2024868 - DNA, 15 bp, Homo sapiens
gatatggcagcacat

SEQ ID NO: 2024869 - DNA, 15 bp, Homo sapiens
atatggcagcacata

SEQ ID NO: 2024870 - DNA, 15 bp, Homo sapiens
tatggcagcacatat

SEQ ID NO: 2024871 - DNA, 15 bp, Homo sapiens
atggcagcacatatc

SEQ ID NO: 2024872 - DNA, 15 bp, Homo sapiens
tggcagcacatatct

SEQ ID NO: 2024873 - DNA, 15 bp, Homo sapiens
ggcagcacatatctg

SEQ ID NO: 2024874 - DNA, 15 bp, Homo sapiens
gcagcacatatctgt

SEQ ID NO: 2024875 - DNA, 15 bp, Homo sapiens
cagcacatatctgta

SEQ ID NO: 2024876 - DNA, 15 bp, Homo sapiens
agcacatatctgtaa

SEQ ID NO: 2024877 - DNA, 15 bp, Homo sapiens
gcacatatctgtaat

SEQ ID NO: 2024878 - DNA, 15 bp, Homo sapiens
cacatatctgtaatc

SEQ ID NO: 2024879 - DNA, 15 bp, Homo sapiens
acatatctgtaatcc

SEQ ID NO: 2024880 - DNA, 15 bp, Homo sapiens
catatctgtaatccc

SEQ ID NO: 2024881 - DNA, 15 bp, Homo sapiens
atatctgtaatccca

SEQ ID NO: 2024882 - DNA, 15 bp, Homo sapiens
tatctgtaatcccag

SEQ ID NO: 2024883 - DNA, 15 bp, Homo sapiens
tcccagctactaggt

SEQ ID NO: 2024884 - DNA, 15 bp, Homo sapiens
cccagctactaggta

SEQ ID NO: 2024885 - DNA, 15 bp, Homo sapiens
ccagctactaggtag

SEQ ID NO: 2024886 - DNA, 15 bp, Homo sapiens
cagctactaggtagg

SEQ ID NO: 2024887 - DNA, 15 bp, Homo sapiens
agctactaggtaggt

SEQ ID NO: 2024888 - DNA, 15 bp, Homo sapiens
gctactaggtaggtt

SEQ ID NO: 2024889 - DNA, 15 bp, Homo sapiens
ctactaggtaggttg

SEQ ID NO: 2024890 - DNA, 15 bp, Homo sapiens
tactaggtaggttga

SEQ ID NO: 2024891 - DNA, 15 bp, Homo sapiens
actaggtaggttgag

SEQ ID NO: 2024892 - DNA, 15 bp, Homo sapiens
ctaggtaggttgagg

SEQ ID NO: 2024893 - DNA, 15 bp, Homo sapiens
taggtaggttgaggt

SEQ ID NO: 2024894 - DNA, 15 bp, Homo sapiens
aggtaggttgaggta

SEQ ID NO: 2024895 - DNA, 15 bp, Homo sapiens
ggtaggttgaggtag

SEQ ID NO: 2024896 - DNA, 15 bp, Homo sapiens
gtaggttgaggtagg

SEQ ID NO: 2024897 - DNA, 15 bp, Homo sapiens
taggttgaggtagga

SEQ ID NO: 2024898 - DNA, 15 bp, Homo sapiens
ggttgaggtaggagg

SEQ ID NO: 2024899 - DNA, 15 bp, Homo sapiens
gttgaggtaggagga

SEQ ID NO: 2024900 - DNA, 15 bp, Homo sapiens
ttgaggtaggaggat

SEQ ID NO: 2024901 - DNA, 15 bp, Homo sapiens
ggtaggaggatcact

SEQ ID NO: 2024902 - DNA, 15 bp, Homo sapiens
gtaggaggatcactg

SEQ ID NO: 2024903 - DNA, 15 bp, Homo sapiens
taggaggatcactgg

SEQ ID NO: 2024904 - DNA, 15 bp, Homo sapiens
aggaggatcactggt

SEQ ID NO: 2024905 - DNA, 15 bp, Homo sapiens
ggaggatcactggtg

SEQ ID NO: 2024906 - DNA, 15 bp, Homo sapiens
gaggatcactggtgg

SEQ ID NO: 2024907 - DNA, 15 bp, Homo sapiens
aggatcactggtgga

SEQ ID NO: 2024908 - DNA, 15 bp, Homo sapiens
ggatcactggtggag

SEQ ID NO: 2024909 - DNA, 15 bp, Homo sapiens
gatcactggtggagc

SEQ ID NO: 2024910 - DNA, 15 bp, Homo sapiens
atcactggtggagcc

SEQ ID NO: 2024911 - DNA, 15 bp, Homo sapiens
tcactggtggagccc

SEQ ID NO: 2024912 - DNA, 15 bp, Homo sapiens
cactggtggagccca

SEQ ID NO: 2024913 - DNA, 15 bp, Homo sapiens
actggtggagcccag

SEQ ID NO: 2024914 - DNA, 15 bp, Homo sapiens
ctggtggagcccagg

SEQ ID NO: 2024915 - DNA, 15 bp, Homo sapiens
tggtggagcccagga

SEQ ID NO: 2024916 - DNA, 15 bp, Homo sapiens
ggtggagcccaggag

SEQ ID NO: 2024917 - DNA, 15 bp, Homo sapiens
gtggagcccaggagt

SEQ ID NO: 2024918 - DNA, 15 bp, Homo sapiens
tggagcccaggagtt

SEQ ID NO: 2024919 - DNA, 15 bp, Homo sapiens
ggagcccaggagttc

SEQ ID NO: 2024920 - DNA, 15 bp, Homo sapiens
ccaggagttcaaatc

SEQ ID NO: 2024921 - DNA, 15 bp, Homo sapiens
caggagttcaaatcc

SEQ ID NO: 2024922 - DNA, 15 bp, Homo sapiens
aggagttcaaatcca

SEQ ID NO: 2024923 - DNA, 15 bp, Homo sapiens
ggagttcaaatccag

SEQ ID NO: 2024924 - DNA, 15 bp, Homo sapiens
gagttcaaatccagc

SEQ ID NO: 2024925 - DNA, 15 bp, Homo sapiens
agttcaaatccagcc

SEQ ID NO: 2024926 - DNA, 15 bp, Homo sapiens
gttcaaatccagcct

SEQ ID NO: 2024927 - DNA, 15 bp, Homo sapiens
ttcaaatccagcctg

SEQ ID NO: 2024928 - DNA, 15 bp, Homo sapiens
tcaaatccagcctgg

SEQ ID NO: 2024929 - DNA, 15 bp, Homo sapiens
caaatccagcctggg

SEQ ID NO: 2024930 - DNA, 15 bp, Homo sapiens
aaatccagcctgggt

SEQ ID NO: 2024931 - DNA, 15 bp, Homo sapiens
aatccagcctgggta

SEQ ID NO: 2024932 - DNA, 15 bp, Homo sapiens
atccagcctgggtaa

SEQ ID NO: 2024933 - DNA, 15 bp, Homo sapiens
cctgggtaacatagc

SEQ ID NO: 2024934 - DNA, 15 bp, Homo sapiens
ctgggtaacatagca

SEQ ID NO: 2024935 - DNA, 15 bp, Homo sapiens
tgggtaacatagcaa

SEQ ID NO: 2024936 - DNA, 15 bp, Homo sapiens
gggtaacatagcaag

SEQ ID NO: 2024937 - DNA, 15 bp, Homo sapiens
ggtaacatagcaaga

SEQ ID NO: 2024938 - DNA, 15 bp, Homo sapiens
gtaacatagcaagac

SEQ ID NO: 2024939 - DNA, 15 bp, Homo sapiens
taacatagcaagact

SEQ ID NO: 2024940 - DNA, 15 bp, Homo sapiens
acatagcaagactcc

SEQ ID NO: 2024941 - DNA, 15 bp, Homo sapiens
catagcaagactcca

SEQ ID NO: 2024942 - DNA, 15 bp, Homo sapiens
atagcaagactccat

SEQ ID NO: 2024943 - DNA, 15 bp, Homo sapiens
tagcaagactccatc

SEQ ID NO: 2024944 - DNA, 15 bp, Homo sapiens
caagactccatctct

SEQ ID NO: 2024945 - DNA, 15 bp, Homo sapiens
aagactccatctctt

SEQ ID NO: 2024946 - DNA, 15 bp, Homo sapiens
agactccatctctta

SEQ ID NO: 2024947 - DNA, 15 bp, Homo sapiens
ccatctcttaaaaat

SEQ ID NO: 2024948 - DNA, 15 bp, Homo sapiens
catctcttaaaaatt

SEQ ID NO: 2024949 - DNA, 15 bp, Homo sapiens
atctcttaaaaatta

SEQ ID NO: 2024950 - DNA, 15 bp, Homo sapiens
tctcttaaaaattaa

SEQ ID NO: 2024951 - DNA, 15 bp, Homo sapiens
ctcttaaaaattaat

SEQ ID NO: 2024952 - DNA, 15 bp, Homo sapiens
tcttaaaaattaatt

SEQ ID NO: 2024953 - DNA, 15 bp, Homo sapiens
cttaaaaattaatta

SEQ ID NO: 2024954 - DNA, 15 bp, Homo sapiens
ttaaaaattaattaa

SEQ ID NO: 2024955 - DNA, 15 bp, Homo sapiens
taaaaattaattaaa

SEQ ID NO: 2024956 - DNA, 15 bp, Homo sapiens
aaaaattaattaaat

SEQ ID NO: 2024957 - DNA, 15 bp, Homo sapiens
aaaattaattaaatt

SEQ ID NO: 2024958 - DNA, 15 bp, Homo sapiens
aaattaattaaatta

SEQ ID NO: 2024959 - DNA, 15 bp, Homo sapiens
aattaattaaattaa

SEQ ID NO: 2024960 - DNA, 15 bp, Homo sapiens
attaattaaattaat

SEQ ID NO: 2024961 - DNA, 15 bp, Homo sapiens
ttaattaaattaatg

SEQ ID NO: 2024962 - DNA, 15 bp, Homo sapiens
taattaaattaatga

SEQ ID NO: 2024963 - DNA, 15 bp, Homo sapiens
aattaaattaatgaa

SEQ ID NO: 2024964 - DNA, 15 bp, Homo sapiens
attaaattaatgaaa

SEQ ID NO: 2024965 - DNA, 15 bp, Homo sapiens
ttaaattaatgaaat

SEQ ID NO: 2024966 - DNA, 15 bp, Homo sapiens
taaattaatgaaata

SEQ ID NO: 2024967 - DNA, 15 bp, Homo sapiens
aaattaatgaaataa

SEQ ID NO: 2024968 - DNA, 15 bp, Homo sapiens
aattaatgaaataaa

SEQ ID NO: 2024969 - DNA, 15 bp, Homo sapiens
attaatgaaataaaa

SEQ ID NO: 2024970 - DNA, 15 bp, Homo sapiens
ttaatgaaataaaaa

SEQ ID NO: 2024971 - DNA, 15 bp, Homo sapiens
taatgaaataaaaag

SEQ ID NO: 2024972 - DNA, 15 bp, Homo sapiens
aatgaaataaaaaga

SEQ ID NO: 2024973 - DNA, 15 bp, Homo sapiens
atgaaataaaaagaa

SEQ ID NO: 2024974 - DNA, 15 bp, Homo sapiens
tgaaataaaaagaac

SEQ ID NO: 2024975 - DNA, 15 bp, Homo sapiens
gaaataaaaagaact

SEQ ID NO: 2024976 - DNA, 15 bp, Homo sapiens
aaataaaaagaactt

SEQ ID NO: 2024977 - DNA, 15 bp, Homo sapiens
aataaaaagaacttt

SEQ ID NO: 2024978 - DNA, 15 bp, Homo sapiens
ataaaaagaacttta

SEQ ID NO: 2024979 - DNA, 15 bp, Homo sapiens
taaaaagaactttat

SEQ ID NO: 2024980 - DNA, 15 bp, Homo sapiens
aaaaagaactttatt

SEQ ID NO: 2024981 - DNA, 15 bp, Homo sapiens
aaaagaactttattt

SEQ ID NO: 2024982 - DNA, 15 bp, Homo sapiens
aaagaactttatttt

SEQ ID NO: 2024983 - DNA, 15 bp, Homo sapiens
aagaactttattttt

SEQ ID NO: 2024984 - DNA, 15 bp, Homo sapiens
agaactttatttttt

SEQ ID NO: 2024985 - DNA, 15 bp, Homo sapiens
gaactttattttttc

SEQ ID NO: 2024986 - DNA, 15 bp, Homo sapiens
aactttattttttct

SEQ ID NO: 2024987 - DNA, 15 bp, Homo sapiens
actttattttttctt

SEQ ID NO: 2024988 - DNA, 15 bp, Homo sapiens
ctttattttttcttt

SEQ ID NO: 2024989 - DNA, 15 bp, Homo sapiens
tttattttttcttta

SEQ ID NO: 2024990 - DNA, 15 bp, Homo sapiens
ttattttttctttaa

SEQ ID NO: 2024991 - DNA, 15 bp, Homo sapiens
tattttttctttaaa

SEQ ID NO: 2024992 - DNA, 15 bp, Homo sapiens
attttttctttaaag

SEQ ID NO: 2024993 - DNA, 15 bp, Homo sapiens
ttttttctttaaagg

SEQ ID NO: 2024994 - DNA, 15 bp, Homo sapiens
tttttctttaaagga

SEQ ID NO: 2024995 - DNA, 15 bp, Homo sapiens
ttttctttaaaggag

SEQ ID NO: 2024996 - DNA, 15 bp, Homo sapiens
tttctttaaaggagg

SEQ ID NO: 2024997 - DNA, 15 bp, Homo sapiens
ttctttaaaggaggc

SEQ ID NO: 2024998 - DNA, 15 bp, Homo sapiens
tctttaaaggaggct

SEQ ID NO: 2024999 - DNA, 15 bp, Homo sapiens
ctttaaaggaggctg

SEQ ID NO: 2025000 - DNA, 15 bp, Homo sapiens
tttaaaggaggctgc

SEQ ID NO: 2025001 - DNA, 15 bp, Homo sapiens
ttaaaggaggctgcc

SEQ ID NO: 2025002 - DNA, 15 bp, Homo sapiens
taaaggaggctgcct

SEQ ID NO: 2025003 - DNA, 15 bp, Homo sapiens
aaaggaggctgcctg

SEQ ID NO: 2025004 - DNA, 15 bp, Homo sapiens
aaggaggctgcctgt

SEQ ID NO: 2025005 - DNA, 15 bp, Homo sapiens
aggaggctgcctgtg

SEQ ID NO: 2025006 - DNA, 15 bp, Homo sapiens
ggaggctgcctgtga

SEQ ID NO: 2025007 - DNA, 15 bp, Homo sapiens
gaggctgcctgtgac

SEQ ID NO: 2025008 - DNA, 15 bp, Homo sapiens
aggctgcctgtgaca

SEQ ID NO: 2025009 - DNA, 15 bp, Homo sapiens
ggctgcctgtgacag

SEQ ID NO: 2025010 - DNA, 15 bp, Homo sapiens
gctgcctgtgacagt

SEQ ID NO: 2025011 - DNA, 15 bp, Homo sapiens
ctgcctgtgacagtc

SEQ ID NO: 2025012 - DNA, 15 bp, Homo sapiens
tgcctgtgacagtct

SEQ ID NO: 2025013 - DNA, 15 bp, Homo sapiens
gcctgtgacagtctt

SEQ ID NO: 2025014 - DNA, 15 bp, Homo sapiens
cctgtgacagtcttc

SEQ ID NO: 2025015 - DNA, 15 bp, Homo sapiens
ctgtgacagtcttct

SEQ ID NO: 2025016 - DNA, 15 bp, Homo sapiens
tgtgacagtcttctt

SEQ ID NO: 2025017 - DNA, 15 bp, Homo sapiens
gtgacagtcttcttg

SEQ ID NO: 2025018 - DNA, 15 bp, Homo sapiens
tgacagtcttcttgt

SEQ ID NO: 2025019 - DNA, 15 bp, Homo sapiens
gacagtcttcttgtt

SEQ ID NO: 2025020 - DNA, 15 bp, Homo sapiens
acagtcttcttgttt

SEQ ID NO: 2025021 - DNA, 15 bp, Homo sapiens
cagtcttcttgtttc

SEQ ID NO: 2025022 - DNA, 15 bp, Homo sapiens
agtcttcttgtttct

SEQ ID NO: 2025023 - DNA, 15 bp, Homo sapiens
gtcttcttgtttctg

SEQ ID NO: 2025024 - DNA, 15 bp, Homo sapiens
tcttcttgtttctgt

SEQ ID NO: 2025025 - DNA, 15 bp, Homo sapiens
cttcttgtttctgtt

SEQ ID NO: 2025026 - DNA, 15 bp, Homo sapiens
ttcttgtttctgttc

SEQ ID NO: 2025027 - DNA, 15 bp, Homo sapiens
tcttgtttctgttca

SEQ ID NO: 2025028 - DNA, 15 bp, Homo sapiens
cttgtttctgttcat

SEQ ID NO: 2025029 - DNA, 15 bp, Homo sapiens
ttgtttctgttcatg

SEQ ID NO: 2025030 - DNA, 15 bp, Homo sapiens
tgtttctgttcatga

SEQ ID NO: 2025031 - DNA, 15 bp, Homo sapiens
gtttctgttcatgat

SEQ ID NO: 2025032 - DNA, 15 bp, Homo sapiens
tttctgttcatgata

SEQ ID NO: 2025033 - DNA, 15 bp, Homo sapiens
ttctgttcatgatag

SEQ ID NO: 2025034 - DNA, 15 bp, Homo sapiens
tctgttcatgatagc

SEQ ID NO: 2025035 - DNA, 15 bp, Homo sapiens
ctgttcatgatagca

SEQ ID NO: 2025036 - DNA, 15 bp, Homo sapiens
tgttcatgatagcaa

SEQ ID NO: 2025037 - DNA, 15 bp, Homo sapiens
gttcatgatagcaac

SEQ ID NO: 2025038 - DNA, 15 bp, Homo sapiens
ttcatgatagcaaca

SEQ ID NO: 2025039 - DNA, 15 bp, Homo sapiens
tcatgatagcaacat

SEQ ID NO: 2025040 - DNA, 15 bp, Homo sapiens
catgatagcaacatt

SEQ ID NO: 2025041 - DNA, 15 bp, Homo sapiens
atgatagcaacattc

SEQ ID NO: 2025042 - DNA, 15 bp, Homo sapiens
tgatagcaacattct

SEQ ID NO: 2025043 - DNA, 15 bp, Homo sapiens
gatagcaacattcta

SEQ ID NO: 2025044 - DNA, 15 bp, Homo sapiens
atagcaacattctaa

SEQ ID NO: 2025045 - DNA, 15 bp, Homo sapiens
tagcaacattctaat

SEQ ID NO: 2025046 - DNA, 15 bp, Homo sapiens
agcaacattctaata

SEQ ID NO: 2025047 - DNA, 15 bp, Homo sapiens
gcaacattctaatat

SEQ ID NO: 2025048 - DNA, 15 bp, Homo sapiens
caacattctaatatc

SEQ ID NO: 2025049 - DNA, 15 bp, Homo sapiens
aacattctaatatca

SEQ ID NO: 2025050 - DNA, 15 bp, Homo sapiens
acattctaatatcag

SEQ ID NO: 2025051 - DNA, 15 bp, Homo sapiens
cattctaatatcaga

SEQ ID NO: 2025052 - DNA, 15 bp, Homo sapiens
attctaatatcagag

SEQ ID NO: 2025053 - DNA, 15 bp, Homo sapiens
ttctaatatcagagg

SEQ ID NO: 2025054 - DNA, 15 bp, Homo sapiens
tctaatatcagaggc

SEQ ID NO: 2025055 - DNA, 15 bp, Homo sapiens
ctaatatcagaggct

SEQ ID NO: 2025056 - DNA, 15 bp, Homo sapiens
taatatcagaggctt

SEQ ID NO: 2025057 - DNA, 15 bp, Homo sapiens
aatatcagaggctta

SEQ ID NO: 2025058 - DNA, 15 bp, Homo sapiens
atatcagaggcttag

SEQ ID NO: 2025059 - DNA, 15 bp, Homo sapiens
tatcagaggcttagt

SEQ ID NO: 2025060 - DNA, 15 bp, Homo sapiens
atcagaggcttagta

SEQ ID NO: 2025061 - DNA, 15 bp, Homo sapiens
tcagaggcttagtat

SEQ ID NO: 2025062 - DNA, 15 bp, Homo sapiens
cagaggcttagtata

SEQ ID NO: 2025063 - DNA, 15 bp, Homo sapiens
agaggcttagtatac

SEQ ID NO: 2025064 - DNA, 15 bp, Homo sapiens
gaggcttagtataca

SEQ ID NO: 2025065 - DNA, 15 bp, Homo sapiens
aggcttagtatacaa

SEQ ID NO: 2025066 - DNA, 15 bp, Homo sapiens
ggcttagtatacaac

SEQ ID NO: 2025067 - DNA, 15 bp, Homo sapiens
gcttagtatacaaca

SEQ ID NO: 2025068 - DNA, 15 bp, Homo sapiens
cttagtatacaacac

SEQ ID NO: 2025069 - DNA, 15 bp, Homo sapiens
ttagtatacaacaca

SEQ ID NO: 2025070 - DNA, 15 bp, Homo sapiens
tagtatacaacacat

SEQ ID NO: 2025071 - DNA, 15 bp, Homo sapiens
agtatacaacacatc

SEQ ID NO: 2025072 - DNA, 15 bp, Homo sapiens
gtatacaacacatca

SEQ ID NO: 2025073 - DNA, 15 bp, Homo sapiens
tatacaacacatcat

SEQ ID NO: 2025074 - DNA, 15 bp, Homo sapiens
atacaacacatcatt

SEQ ID NO: 2025075 - DNA, 15 bp, Homo sapiens
tacaacacatcattt

SEQ ID NO: 2025076 - DNA, 15 bp, Homo sapiens
acaacacatcatttt

SEQ ID NO: 2025077 - DNA, 15 bp, Homo sapiens
caacacatcatttta

SEQ ID NO: 2025078 - DNA, 15 bp, Homo sapiens
aacacatcattttaa

SEQ ID NO: 2025079 - DNA, 15 bp, Homo sapiens
acacatcattttaat

SEQ ID NO: 2025080 - DNA, 15 bp, Homo sapiens
cacatcattttaatt

SEQ ID NO: 2025081 - DNA, 15 bp, Homo sapiens
acatcattttaattt

SEQ ID NO: 2025082 - DNA, 15 bp, Homo sapiens
catcattttaattta

SEQ ID NO: 2025083 - DNA, 15 bp, Homo sapiens
atcattttaatttaa

SEQ ID NO: 2025084 - DNA, 15 bp, Homo sapiens
tcattttaatttaag

SEQ ID NO: 2025085 - DNA, 15 bp, Homo sapiens
cattttaatttaagt

SEQ ID NO: 2025086 - DNA, 15 bp, Homo sapiens
attttaatttaagtc

SEQ ID NO: 2025087 - DNA, 15 bp, Homo sapiens
ttttaatttaagtcc

SEQ ID NO: 2025088 - DNA, 15 bp, Homo sapiens
tttaatttaagtcct

SEQ ID NO: 2025089 - DNA, 15 bp, Homo sapiens
ttaatttaagtcctc

SEQ ID NO: 2025090 - DNA, 15 bp, Homo sapiens
taatttaagtcctct

SEQ ID NO: 2025091 - DNA, 15 bp, Homo sapiens
aatttaagtcctctc

SEQ ID NO: 2025092 - DNA, 15 bp, Homo sapiens
atttaagtcctctca

SEQ ID NO: 2025093 - DNA, 15 bp, Homo sapiens
tttaagtcctctcag

SEQ ID NO: 2025094 - DNA, 15 bp, Homo sapiens
ttaagtcctctcagt

SEQ ID NO: 2025095 - DNA, 15 bp, Homo sapiens
taagtcctctcagtc

SEQ ID NO: 2025096 - DNA, 15 bp, Homo sapiens
aagtcctctcagtcc

SEQ ID NO: 2025097 - DNA, 15 bp, Homo sapiens
agtcctctcagtcct

SEQ ID NO: 2025098 - DNA, 15 bp, Homo sapiens
gtcctctcagtcctg

SEQ ID NO: 2025099 - DNA, 15 bp, Homo sapiens
tcctctcagtcctga

SEQ ID NO: 2025100 - DNA, 15 bp, Homo sapiens
cctctcagtcctgat

SEQ ID NO: 2025101 - DNA, 15 bp, Homo sapiens
ctctcagtcctgatc

SEQ ID NO: 2025102 - DNA, 15 bp, Homo sapiens
tctcagtcctgatca

SEQ ID NO: 2025103 - DNA, 15 bp, Homo sapiens
ctcagtcctgatcag

SEQ ID NO: 2025104 - DNA, 15 bp, Homo sapiens
tcagtcctgatcaga

SEQ ID NO: 2025105 - DNA, 15 bp, Homo sapiens
tggagccttttagaa

SEQ ID NO: 2025106 - DNA, 15 bp, Homo sapiens
ggagccttttagaat

SEQ ID NO: 2025107 - DNA, 15 bp, Homo sapiens
gagccttttagaatt

SEQ ID NO: 2025108 - DNA, 15 bp, Homo sapiens
agccttttagaattt

SEQ ID NO: 2025109 - DNA, 15 bp, Homo sapiens
gccttttagaatttt

SEQ ID NO: 2025110 - DNA, 15 bp, Homo sapiens
ccttttagaatttta

SEQ ID NO: 2025111 - DNA, 15 bp, Homo sapiens
cttttagaattttat

SEQ ID NO: 2025112 - DNA, 15 bp, Homo sapiens
ttttagaattttatg

SEQ ID NO: 2025113 - DNA, 15 bp, Homo sapiens
tttagaattttatgt

SEQ ID NO: 2025114 - DNA, 15 bp, Homo sapiens
ttagaattttatgta

SEQ ID NO: 2025115 - DNA, 15 bp, Homo sapiens
tagaattttatgtaa

SEQ ID NO: 2025116 - DNA, 15 bp, Homo sapiens
agaattttatgtaaa

SEQ ID NO: 2025117 - DNA, 15 bp, Homo sapiens
gaattttatgtaaaa

SEQ ID NO: 2025118 - DNA, 15 bp, Homo sapiens
aattttatgtaaaag

SEQ ID NO: 2025119 - DNA, 15 bp, Homo sapiens
attttatgtaaaaga

SEQ ID NO: 2025120 - DNA, 15 bp, Homo sapiens
ttttatgtaaaagag

SEQ ID NO: 2025121 - DNA, 15 bp, Homo sapiens
tttatgtaaaagagt

SEQ ID NO: 2025122 - DNA, 15 bp, Homo sapiens
ttatgtaaaagagtt

SEQ ID NO: 2025123 - DNA, 15 bp, Homo sapiens
tatgtaaaagagttt

SEQ ID NO: 2025124 - DNA, 15 bp, Homo sapiens
atgtaaaagagttta

SEQ ID NO: 2025125 - DNA, 15 bp, Homo sapiens
tgtaaaagagtttaa

SEQ ID NO: 2025126 - DNA, 15 bp, Homo sapiens
gtaaaagagtttaat

SEQ ID NO: 2025127 - DNA, 15 bp, Homo sapiens
taaaagagtttaatt

SEQ ID NO: 2025128 - DNA, 15 bp, Homo sapiens
aaaagagtttaattc

SEQ ID NO: 2025129 - DNA, 15 bp, Homo sapiens
aaagagtttaattct

SEQ ID NO: 2025130 - DNA, 15 bp, Homo sapiens
aagagtttaattctt

SEQ ID NO: 2025131 - DNA, 15 bp, Homo sapiens
agagtttaattcttc

SEQ ID NO: 2025132 - DNA, 15 bp, Homo sapiens
gagtttaattcttct

SEQ ID NO: 2025133 - DNA, 15 bp, Homo sapiens
agtttaattcttctc

SEQ ID NO: 2025134 - DNA, 15 bp, Homo sapiens
gtttaattcttctcc

SEQ ID NO: 2025135 - DNA, 15 bp, Homo sapiens
tttaattcttctcca

SEQ ID NO: 2025136 - DNA, 15 bp, Homo sapiens
ttaattcttctccac

SEQ ID NO: 2025137 - DNA, 15 bp, Homo sapiens
taattcttctccact

SEQ ID NO: 2025138 - DNA, 15 bp, Homo sapiens
aattcttctccactt

SEQ ID NO: 2025139 - DNA, 15 bp, Homo sapiens
attcttctccacttc

SEQ ID NO: 2025140 - DNA, 15 bp, Homo sapiens
tcttctccacttcac

SEQ ID NO: 2025141 - DNA, 15 bp, Homo sapiens
cttctccacttcacc

SEQ ID NO: 2025142 - DNA, 15 bp, Homo sapiens
ttctccacttcaccc

SEQ ID NO: 2025143 - DNA, 15 bp, Homo sapiens
tctccacttcacccc

SEQ ID NO: 2025144 - DNA, 15 bp, Homo sapiens
ctccacttcaccccg

SEQ ID NO: 2025145 - DNA, 15 bp, Homo sapiens
tccacttcaccccgt

SEQ ID NO: 2025146 - DNA, 15 bp, Homo sapiens
ccacttcaccccgtc

SEQ ID NO: 2025147 - DNA, 15 bp, Homo sapiens
cacttcaccccgtca

SEQ ID NO: 2025148 - DNA, 15 bp, Homo sapiens
acttcaccccgtcac

SEQ ID NO: 2025149 - DNA, 15 bp, Homo sapiens
cttcaccccgtcacc

SEQ ID NO: 2025150 - DNA, 15 bp, Homo sapiens
ttcaccccgtcacca

SEQ ID NO: 2025151 - DNA, 15 bp, Homo sapiens
tcaccccgtcaccac

SEQ ID NO: 2025152 - DNA, 15 bp, Homo sapiens
caccccgtcaccacc

SEQ ID NO: 2025153 - DNA, 15 bp, Homo sapiens
accccgtcaccacca

SEQ ID NO: 2025154 - DNA, 15 bp, Homo sapiens
ccccgtcaccaccac

SEQ ID NO: 2025155 - DNA, 15 bp, Homo sapiens
cccgtcaccaccact

SEQ ID NO: 2025156 - DNA, 15 bp, Homo sapiens
ccgtcaccaccactt

SEQ ID NO: 2025157 - DNA, 15 bp, Homo sapiens
cgtcaccaccacttt

SEQ ID NO: 2025158 - DNA, 15 bp, Homo sapiens
gtcaccaccactttc

SEQ ID NO: 2025159 - DNA, 15 bp, Homo sapiens
tcaccaccactttcc

SEQ ID NO: 2025160 - DNA, 15 bp, Homo sapiens
caccaccactttcca

SEQ ID NO: 2025161 - DNA, 15 bp, Homo sapiens
accaccactttccag

SEQ ID NO: 2025162 - DNA, 15 bp, Homo sapiens
ccaccactttccagg

SEQ ID NO: 2025163 - DNA, 15 bp, Homo sapiens
caccactttccaggt

SEQ ID NO: 2025164 - DNA, 15 bp, Homo sapiens
accactttccaggtt

SEQ ID NO: 2025165 - DNA, 15 bp, Homo sapiens
ccactttccaggttg

SEQ ID NO: 2025166 - DNA, 15 bp, Homo sapiens
cactttccaggttgg

SEQ ID NO: 2025167 - DNA, 15 bp, Homo sapiens
actttccaggttggt

SEQ ID NO: 2025168 - DNA, 15 bp, Homo sapiens
ctttccaggttggtt

SEQ ID NO: 2025169 - DNA, 15 bp, Homo sapiens
tttccaggttggttc

SEQ ID NO: 2025170 - DNA, 15 bp, Homo sapiens
ttccaggttggttct

SEQ ID NO: 2025171 - DNA, 15 bp, Homo sapiens
tccaggttggttcta

SEQ ID NO: 2025172 - DNA, 15 bp, Homo sapiens
ccaggttggttctac

SEQ ID NO: 2025173 - DNA, 15 bp, Homo sapiens
caggttggttctact

SEQ ID NO: 2025174 - DNA, 15 bp, Homo sapiens
aggttggttctactg

SEQ ID NO: 2025175 - DNA, 15 bp, Homo sapiens
ggttggttctactgc

SEQ ID NO: 2025176 - DNA, 15 bp, Homo sapiens
gttggttctactgct

SEQ ID NO: 2025177 - DNA, 15 bp, Homo sapiens
ttggttctactgctg

SEQ ID NO: 2025178 - DNA, 15 bp, Homo sapiens
tggttctactgctgt

SEQ ID NO: 2025179 - DNA, 15 bp, Homo sapiens
ggttctactgctgtc

SEQ ID NO: 2025180 - DNA, 15 bp, Homo sapiens
gttctactgctgtcc

SEQ ID NO: 2025181 - DNA, 15 bp, Homo sapiens
ttctactgctgtcca

SEQ ID NO: 2025182 - DNA, 15 bp, Homo sapiens
tctactgctgtccaa

SEQ ID NO: 2025183 - DNA, 15 bp, Homo sapiens
ctactgctgtccaag

SEQ ID NO: 2025184 - DNA, 15 bp, Homo sapiens
tactgctgtccaagt

SEQ ID NO: 2025185 - DNA, 15 bp, Homo sapiens
actgctgtccaagta

SEQ ID NO: 2025186 - DNA, 15 bp, Homo sapiens
ctgctgtccaagtaa

SEQ ID NO: 2025187 - DNA, 15 bp, Homo sapiens
tgctgtccaagtaac

SEQ ID NO: 2025188 - DNA, 15 bp, Homo sapiens
gctgtccaagtaact

SEQ ID NO: 2025189 - DNA, 15 bp, Homo sapiens
ctgtccaagtaactt

SEQ ID NO: 2025190 - DNA, 15 bp, Homo sapiens
tgtccaagtaacttc

SEQ ID NO: 2025191 - DNA, 15 bp, Homo sapiens
gtccaagtaacttca

SEQ ID NO: 2025192 - DNA, 15 bp, Homo sapiens
tccaagtaacttcag

SEQ ID NO: 2025193 - DNA, 15 bp, Homo sapiens
ccaagtaacttcagc

SEQ ID NO: 2025194 - DNA, 15 bp, Homo sapiens
caagtaacttcagca

SEQ ID NO: 2025195 - DNA, 15 bp, Homo sapiens
aagtaacttcagcag

SEQ ID NO: 2025196 - DNA, 15 bp, Homo sapiens
agtaacttcagcaga

SEQ ID NO: 2025197 - DNA, 15 bp, Homo sapiens
gtaacttcagcagag

SEQ ID NO: 2025198 - DNA, 15 bp, Homo sapiens
taacttcagcagagc

SEQ ID NO: 2025199 - DNA, 15 bp, Homo sapiens
aacttcagcagagcg

SEQ ID NO: 2025200 - DNA, 15 bp, Homo sapiens
acttcagcagagcga

SEQ ID NO: 2025201 - DNA, 15 bp, Homo sapiens
cttcagcagagcgaa

SEQ ID NO: 2025202 - DNA, 15 bp, Homo sapiens
ttcagcagagcgaac

SEQ ID NO: 2025203 - DNA, 15 bp, Homo sapiens
tcagcagagcgaaca

SEQ ID NO: 2025204 - DNA, 15 bp, Homo sapiens
cagcagagcgaacaa

SEQ ID NO: 2025205 - DNA, 15 bp, Homo sapiens
agcagagcgaacaaa

SEQ ID NO: 2025206 - DNA, 15 bp, Homo sapiens
gcagagcgaacaaaa

SEQ ID NO: 2025207 - DNA, 15 bp, Homo sapiens
cagagcgaacaaaag

SEQ ID NO: 2025208 - DNA, 15 bp, Homo sapiens
agagcgaacaaaagt

SEQ ID NO: 2025209 - DNA, 15 bp, Homo sapiens
gagcgaacaaaagtc

SEQ ID NO: 2025210 - DNA, 15 bp, Homo sapiens
agcgaacaaaagtcc

SEQ ID NO: 2025211 - DNA, 15 bp, Homo sapiens
gcgaacaaaagtcct

SEQ ID NO: 2025212 - DNA, 15 bp, Homo sapiens
cgaacaaaagtccta

SEQ ID NO: 2025213 - DNA, 15 bp, Homo sapiens
gaacaaaagtcctag

SEQ ID NO: 2025214 - DNA, 15 bp, Homo sapiens
aacaaaagtcctagg

SEQ ID NO: 2025215 - DNA, 15 bp, Homo sapiens
acaaaagtcctaggg

SEQ ID NO: 2025216 - DNA, 15 bp, Homo sapiens
caaaagtcctagggc

SEQ ID NO: 2025217 - DNA, 15 bp, Homo sapiens
aaaagtcctagggca

SEQ ID NO: 2025218 - DNA, 15 bp, Homo sapiens
aaagtcctagggcaa

SEQ ID NO: 2025219 - DNA, 15 bp, Homo sapiens
aagtcctagggcaat

SEQ ID NO: 2025220 - DNA, 15 bp, Homo sapiens
agtcctagggcaatc

SEQ ID NO: 2025221 - DNA, 15 bp, Homo sapiens
gtcctagggcaatca

SEQ ID NO: 2025222 - DNA, 15 bp, Homo sapiens
tcctagggcaatcag

SEQ ID NO: 2025223 - DNA, 15 bp, Homo sapiens
cctagggcaatcagt

SEQ ID NO: 2025224 - DNA, 15 bp, Homo sapiens
ctagggcaatcagtc

SEQ ID NO: 2025225 - DNA, 15 bp, Homo sapiens
tagggcaatcagtct

SEQ ID NO: 2025226 - DNA, 15 bp, Homo sapiens
agggcaatcagtctt

SEQ ID NO: 2025227 - DNA, 15 bp, Homo sapiens
gggcaatcagtcttt

SEQ ID NO: 2025228 - DNA, 15 bp, Homo sapiens
ggcaatcagtctttc

SEQ ID NO: 2025229 - DNA, 15 bp, Homo sapiens
gcaatcagtctttct

SEQ ID NO: 2025230 - DNA, 15 bp, Homo sapiens
caatcagtctttcta

SEQ ID NO: 2025231 - DNA, 15 bp, Homo sapiens
aatcagtctttctaa

SEQ ID NO: 2025232 - DNA, 15 bp, Homo sapiens
atcagtctttctaaa

SEQ ID NO: 2025233 - DNA, 15 bp, Homo sapiens
tcagtctttctaaat

SEQ ID NO: 2025234 - DNA, 15 bp, Homo sapiens
cagtctttctaaatg

SEQ ID NO: 2025235 - DNA, 15 bp, Homo sapiens
agtctttctaaatga

SEQ ID NO: 2025236 - DNA, 15 bp, Homo sapiens
gtctttctaaatgac

SEQ ID NO: 2025237 - DNA, 15 bp, Homo sapiens
tctttctaaatgaca

SEQ ID NO: 2025238 - DNA, 15 bp, Homo sapiens
ctttctaaatgacat

SEQ ID NO: 2025239 - DNA, 15 bp, Homo sapiens
tttctaaatgacatt

SEQ ID NO: 2025240 - DNA, 15 bp, Homo sapiens
ttctaaatgacattt

SEQ ID NO: 2025241 - DNA, 15 bp, Homo sapiens
tctaaatgacattta

SEQ ID NO: 2025242 - DNA, 15 bp, Homo sapiens
ctaaatgacatttat

SEQ ID NO: 2025243 - DNA, 15 bp, Homo sapiens
taaatgacatttatt

SEQ ID NO: 2025244 - DNA, 15 bp, Homo sapiens
aaatgacatttatta

SEQ ID NO: 2025245 - DNA, 15 bp, Homo sapiens
aatgacatttattat

SEQ ID NO: 2025246 - DNA, 15 bp, Homo sapiens
atgacatttattatg

SEQ ID NO: 2025247 - DNA, 15 bp, Homo sapiens
tgacatttattatgc

SEQ ID NO: 2025248 - DNA, 15 bp, Homo sapiens
gacatttattatgct

SEQ ID NO: 2025249 - DNA, 15 bp, Homo sapiens
acatttattatgctt

SEQ ID NO: 2025250 - DNA, 15 bp, Homo sapiens
catttattatgcttc

SEQ ID NO: 2025251 - DNA, 15 bp, Homo sapiens
atttattatgcttcg

SEQ ID NO: 2025252 - DNA, 15 bp, Homo sapiens
tttattatgcttcgg

SEQ ID NO: 2025253 - DNA, 15 bp, Homo sapiens
ttattatgcttcgga

SEQ ID NO: 2025254 - DNA, 15 bp, Homo sapiens
tattatgcttcggaa

SEQ ID NO: 2025255 - DNA, 15 bp, Homo sapiens
attatgcttcggaaa

SEQ ID NO: 2025256 - DNA, 15 bp, Homo sapiens
ttatgcttcggaaat

SEQ ID NO: 2025257 - DNA, 15 bp, Homo sapiens
tatgcttcggaaatt

SEQ ID NO: 2025258 - DNA, 15 bp, Homo sapiens
atgcttcggaaattg

SEQ ID NO: 2025259 - DNA, 15 bp, Homo sapiens
tgcttcggaaattga

SEQ ID NO: 2025260 - DNA, 15 bp, Homo sapiens
gcttcggaaattgaa

SEQ ID NO: 2025261 - DNA, 15 bp, Homo sapiens
cttcggaaattgaag

SEQ ID NO: 2025262 - DNA, 15 bp, Homo sapiens
ttcggaaattgaaga

SEQ ID NO: 2025263 - DNA, 15 bp, Homo sapiens
tcggaaattgaagaa

SEQ ID NO: 2025264 - DNA, 15 bp, Homo sapiens
cggaaattgaagaaa

SEQ ID NO: 2025265 - DNA, 15 bp, Homo sapiens
ggaaattgaagaaat

SEQ ID NO: 2025266 - DNA, 15 bp, Homo sapiens
gaaattgaagaaatc

SEQ ID NO: 2025267 - DNA, 15 bp, Homo sapiens
aaattgaagaaatct

SEQ ID NO: 2025268 - DNA, 15 bp, Homo sapiens
aattgaagaaatctg

SEQ ID NO: 2025269 - DNA, 15 bp, Homo sapiens
attgaagaaatctgc

SEQ ID NO: 2025270 - DNA, 15 bp, Homo sapiens
ttgaagaaatctgcc

SEQ ID NO: 2025271 - DNA, 15 bp, Homo sapiens
tgaagaaatctgcct

SEQ ID NO: 2025272 - DNA, 15 bp, Homo sapiens
gaagaaatctgccta

SEQ ID NO: 2025273 - DNA, 15 bp, Homo sapiens
aagaaatctgcctag

SEQ ID NO: 2025274 - DNA, 15 bp, Homo sapiens
agaaatctgcctagt

SEQ ID NO: 2025275 - DNA, 15 bp, Homo sapiens
gaaatctgcctagta

SEQ ID NO: 2025276 - DNA, 15 bp, Homo sapiens
aaatctgcctagtag

SEQ ID NO: 2025277 - DNA, 15 bp, Homo sapiens
aatctgcctagtaga

SEQ ID NO: 2025278 - DNA, 15 bp, Homo sapiens
atctgcctagtagat

SEQ ID NO: 2025279 - DNA, 15 bp, Homo sapiens
tctgcctagtagatg

SEQ ID NO: 2025280 - DNA, 15 bp, Homo sapiens
ctgcctagtagatga

SEQ ID NO: 2025281 - DNA, 15 bp, Homo sapiens
tgcctagtagatgag

SEQ ID NO: 2025282 - DNA, 15 bp, Homo sapiens
gcctagtagatgaga

SEQ ID NO: 2025283 - DNA, 15 bp, Homo sapiens
cctagtagatgagaa

SEQ ID NO: 2025284 - DNA, 15 bp, Homo sapiens
ctagtagatgagaac

SEQ ID NO: 2025285 - DNA, 15 bp, Homo sapiens
tagtagatgagaacc

SEQ ID NO: 2025286 - DNA, 15 bp, Homo sapiens
agtagatgagaacca

SEQ ID NO: 2025287 - DNA, 15 bp, Homo sapiens
gtagatgagaaccag

SEQ ID NO: 2025288 - DNA, 15 bp, Homo sapiens
tagatgagaaccagt

SEQ ID NO: 2025289 - DNA, 15 bp, Homo sapiens
agatgagaaccagtt

SEQ ID NO: 2025290 - DNA, 15 bp, Homo sapiens
gatgagaaccagttc

SEQ ID NO: 2025291 - DNA, 15 bp, Homo sapiens
atgagaaccagttca

SEQ ID NO: 2025292 - DNA, 15 bp, Homo sapiens
tgagaaccagttcac

SEQ ID NO: 2025293 - DNA, 15 bp, Homo sapiens
gagaaccagttcacc

SEQ ID NO: 2025294 - DNA, 15 bp, Homo sapiens
agaaccagttcacct

SEQ ID NO: 2025295 - DNA, 15 bp, Homo sapiens
gaaccagttcacctt

SEQ ID NO: 2025296 - DNA, 15 bp, Homo sapiens
aaccagttcacctta

SEQ ID NO: 2025297 - DNA, 15 bp, Homo sapiens
accagttcaccttaa

SEQ ID NO: 2025298 - DNA, 15 bp, Homo sapiens
ccagttcaccttaac

SEQ ID NO: 2025299 - DNA, 15 bp, Homo sapiens
cagttcaccttaacc

SEQ ID NO: 2025300 - DNA, 15 bp, Homo sapiens
agttcaccttaacca

SEQ ID NO: 2025301 - DNA, 15 bp, Homo sapiens
gttcaccttaaccat

SEQ ID NO: 2025302 - DNA, 15 bp, Homo sapiens
ttcaccttaaccatt

SEQ ID NO: 2025303 - DNA, 15 bp, Homo sapiens
tcaccttaaccattg

SEQ ID NO: 2025304 - DNA, 15 bp, Homo sapiens
caccttaaccattgc

SEQ ID NO: 2025305 - DNA, 15 bp, Homo sapiens
accttaaccattgca

SEQ ID NO: 2025306 - DNA, 15 bp, Homo sapiens
ccttaaccattgcaa

SEQ ID NO: 2025307 - DNA, 15 bp, Homo sapiens
cttaaccattgcaaa

SEQ ID NO: 2025308 - DNA, 15 bp, Homo sapiens
ttaaccattgcaaac

SEQ ID NO: 2025309 - DNA, 15 bp, Homo sapiens
taaccattgcaaacc

SEQ ID NO: 2025310 - DNA, 15 bp, Homo sapiens
aaccattgcaaacca

SEQ ID NO: 2025311 - DNA, 15 bp, Homo sapiens
accattgcaaaccag

SEQ ID NO: 2025312 - DNA, 15 bp, Homo sapiens
ccattgcaaaccagg

SEQ ID NO: 2025313 - DNA, 15 bp, Homo sapiens
cattgcaaaccaggg

SEQ ID NO: 2025314 - DNA, 15 bp, Homo sapiens
attgcaaaccagggc

SEQ ID NO: 2025315 - DNA, 15 bp, Homo sapiens
ttgcaaaccagggca

SEQ ID NO: 2025316 - DNA, 15 bp, Homo sapiens
tgcaaaccagggcac

SEQ ID NO: 2025317 - DNA, 15 bp, Homo sapiens
gcaaaccagggcacg

SEQ ID NO: 2025318 - DNA, 15 bp, Homo sapiens
caaaccagggcacgc

SEQ ID NO: 2025319 - DNA, 15 bp, Homo sapiens
aaaccagggcacgcc

SEQ ID NO: 2025320 - DNA, 15 bp, Homo sapiens
aaccagggcacgccg

SEQ ID NO: 2025321 - DNA, 15 bp, Homo sapiens
accagggcacgccgc

SEQ ID NO: 2025322 - DNA, 15 bp, Homo sapiens
ccagggcacgccgct

SEQ ID NO: 2025323 - DNA, 15 bp, Homo sapiens
cagggcacgccgctc

SEQ ID NO: 2025324 - DNA, 15 bp, Homo sapiens
agggcacgccgctca

SEQ ID NO: 2025325 - DNA, 15 bp, Homo sapiens
gggcacgccgctcac

SEQ ID NO: 2025326 - DNA, 15 bp, Homo sapiens
ggcacgccgctcacc

SEQ ID NO: 2025327 - DNA, 15 bp, Homo sapiens
gcacgccgctcacct

SEQ ID NO: 2025328 - DNA, 15 bp, Homo sapiens
cacgccgctcacctt

SEQ ID NO: 2025329 - DNA, 15 bp, Homo sapiens
acgccgctcaccttc

SEQ ID NO: 2025330 - DNA, 15 bp, Homo sapiens
cgccgctcaccttca

SEQ ID NO: 2025331 - DNA, 15 bp, Homo sapiens
gccgctcaccttcat

SEQ ID NO: 2025332 - DNA, 15 bp, Homo sapiens
ccgctcaccttcatg

SEQ ID NO: 2025333 - DNA, 15 bp, Homo sapiens
cgctcaccttcatgc

SEQ ID NO: 2025334 - DNA, 15 bp, Homo sapiens
gctcaccttcatgca

SEQ ID NO: 2025335 - DNA, 15 bp, Homo sapiens
ctcaccttcatgcac

SEQ ID NO: 2025336 - DNA, 15 bp, Homo sapiens
tcaccttcatgcacc

SEQ ID NO: 2025337 - DNA, 15 bp, Homo sapiens
caccttcatgcacca

SEQ ID NO: 2025338 - DNA, 15 bp, Homo sapiens
accttcatgcaccag

SEQ ID NO: 2025339 - DNA, 15 bp, Homo sapiens
ccttcatgcaccagg

SEQ ID NO: 2025340 - DNA, 15 bp, Homo sapiens
cttcatgcaccagga

SEQ ID NO: 2025341 - DNA, 15 bp, Homo sapiens
ttcatgcaccaggag

SEQ ID NO: 2025342 - DNA, 15 bp, Homo sapiens
tcatgcaccaggagt

SEQ ID NO: 2025343 - DNA, 15 bp, Homo sapiens
catgcaccaggagtg

SEQ ID NO: 2025344 - DNA, 15 bp, Homo sapiens
atgcaccaggagtgt

SEQ ID NO: 2025345 - DNA, 15 bp, Homo sapiens
tgcaccaggagtgtg

SEQ ID NO: 2025346 - DNA, 15 bp, Homo sapiens
gcaccaggagtgtga

SEQ ID NO: 2025347 - DNA, 15 bp, Homo sapiens
caccaggagtgtgaa

SEQ ID NO: 2025348 - DNA, 15 bp, Homo sapiens
accaggagtgtgaag

SEQ ID NO: 2025349 - DNA, 15 bp, Homo sapiens
ccaggagtgtgaagc

SEQ ID NO: 2025350 - DNA, 15 bp, Homo sapiens
caggagtgtgaagcc

SEQ ID NO: 2025351 - DNA, 15 bp, Homo sapiens
aggagtgtgaagcca

SEQ ID NO: 2025352 - DNA, 15 bp, Homo sapiens
ggagtgtgaagccat

SEQ ID NO: 2025353 - DNA, 15 bp, Homo sapiens
gagtgtgaagccatt

SEQ ID NO: 2025354 - DNA, 15 bp, Homo sapiens
agtgtgaagccattg

SEQ ID NO: 2025355 - DNA, 15 bp, Homo sapiens
gtgtgaagccattgt

SEQ ID NO: 2025356 - DNA, 15 bp, Homo sapiens
tgtgaagccattgtc

SEQ ID NO: 2025357 - DNA, 15 bp, Homo sapiens
gtgaagccattgtcc

SEQ ID NO: 2025358 - DNA, 15 bp, Homo sapiens
tgaagccattgtcca

SEQ ID NO: 2025359 - DNA, 15 bp, Homo sapiens
gaagccattgtccag

SEQ ID NO: 2025360 - DNA, 15 bp, Homo sapiens
aagccattgtccagt

SEQ ID NO: 2025361 - DNA, 15 bp, Homo sapiens
agccattgtccagtc

SEQ ID NO: 2025362 - DNA, 15 bp, Homo sapiens
gccattgtccagtct

SEQ ID NO: 2025363 - DNA, 15 bp, Homo sapiens
ccattgtccagtcta

SEQ ID NO: 2025364 - DNA, 15 bp, Homo sapiens
cattgtccagtctat

SEQ ID NO: 2025365 - DNA, 15 bp, Homo sapiens
attgtccagtctatc

SEQ ID NO: 2025366 - DNA, 15 bp, Homo sapiens
ttgtccagtctatca

SEQ ID NO: 2025367 - DNA, 15 bp, Homo sapiens
tgtccagtctatcat

SEQ ID NO: 2025368 - DNA, 15 bp, Homo sapiens
gtccagtctatcatt

SEQ ID NO: 2025369 - DNA, 15 bp, Homo sapiens
tccagtctatcattc

SEQ ID NO: 2025370 - DNA, 15 bp, Homo sapiens
ccagtctatcattca

SEQ ID NO: 2025371 - DNA, 15 bp, Homo sapiens
cagtctatcattcat

SEQ ID NO: 2025372 - DNA, 15 bp, Homo sapiens
agtctatcattcata

SEQ ID NO: 2025373 - DNA, 15 bp, Homo sapiens
gtctatcattcatat

SEQ ID NO: 2025374 - DNA, 15 bp, Homo sapiens
tctatcattcatatc

SEQ ID NO: 2025375 - DNA, 15 bp, Homo sapiens
ctatcattcatatcc

SEQ ID NO: 2025376 - DNA, 15 bp, Homo sapiens
tatcattcatatccg

SEQ ID NO: 2025377 - DNA, 15 bp, Homo sapiens
atcattcatatccgg

SEQ ID NO: 2025378 - DNA, 15 bp, Homo sapiens
tcattcatatccgga

SEQ ID NO: 2025379 - DNA, 15 bp, Homo sapiens
cattcatatccggac

SEQ ID NO: 2025380 - DNA, 15 bp, Homo sapiens
attcatatccggacc

SEQ ID NO: 2025381 - DNA, 15 bp, Homo sapiens
ttcatatccggaccc

SEQ ID NO: 2025382 - DNA, 15 bp, Homo sapiens
tcatatccggacccg

SEQ ID NO: 2025383 - DNA, 15 bp, Homo sapiens
catatccggacccgc

SEQ ID NO: 2025384 - DNA, 15 bp, Homo sapiens
atatccggacccgct

SEQ ID NO: 2025385 - DNA, 15 bp, Homo sapiens
tatccggacccgctg

SEQ ID NO: 2025386 - DNA, 15 bp, Homo sapiens
atccggacccgctgg

SEQ ID NO: 2025387 - DNA, 15 bp, Homo sapiens
tccggacccgctggg

SEQ ID NO: 2025388 - DNA, 15 bp, Homo sapiens
ccggacccgctggga

SEQ ID NO: 2025389 - DNA, 15 bp, Homo sapiens
cggacccgctgggaa

SEQ ID NO: 2025390 - DNA, 15 bp, Homo sapiens
ggacccgctgggaac

SEQ ID NO: 2025391 - DNA, 15 bp, Homo sapiens
gacccgctgggaact

SEQ ID NO: 2025392 - DNA, 15 bp, Homo sapiens
acccgctgggaactg

SEQ ID NO: 2025393 - DNA, 15 bp, Homo sapiens
cccgctgggaactgt

SEQ ID NO: 2025394 - DNA, 15 bp, Homo sapiens
ccgctgggaactgtc

SEQ ID NO: 2025395 - DNA, 15 bp, Homo sapiens
cgctgggaactgtca

SEQ ID NO: 2025396 - DNA, 15 bp, Homo sapiens
gctgggaactgtcac

SEQ ID NO: 2025397 - DNA, 15 bp, Homo sapiens
ctgggaactgtcaca

SEQ ID NO: 2025398 - DNA, 15 bp, Homo sapiens
tgggaactgtcacag

SEQ ID NO: 2025399 - DNA, 15 bp, Homo sapiens
gggaactgtcacagc

SEQ ID NO: 2025400 - DNA, 15 bp, Homo sapiens
ggaactgtcacagcc

SEQ ID NO: 2025401 - DNA, 15 bp, Homo sapiens
gaactgtcacagccc

SEQ ID NO: 2025402 - DNA, 15 bp, Homo sapiens
aactgtcacagcccg

SEQ ID NO: 2025403 - DNA, 15 bp, Homo sapiens
actgtcacagcccga

SEQ ID NO: 2025404 - DNA, 15 bp, Homo sapiens
ctgtcacagcccgac

SEQ ID NO: 2025405 - DNA, 15 bp, Homo sapiens
tgtcacagcccgact

SEQ ID NO: 2025406 - DNA, 15 bp, Homo sapiens
gtcacagcccgactc

SEQ ID NO: 2025407 - DNA, 15 bp, Homo sapiens
tcacagcccgactct

SEQ ID NO: 2025408 - DNA, 15 bp, Homo sapiens
cacagcccgactcta

SEQ ID NO: 2025409 - DNA, 15 bp, Homo sapiens
acagcccgactctat

SEQ ID NO: 2025410 - DNA, 15 bp, Homo sapiens
cagcccgactctatc

SEQ ID NO: 2025411 - DNA, 15 bp, Homo sapiens
agcccgactctatcc

SEQ ID NO: 2025412 - DNA, 15 bp, Homo sapiens
gcccgactctatccc

SEQ ID NO: 2025413 - DNA, 15 bp, Homo sapiens
cccgactctatcccc

SEQ ID NO: 2025414 - DNA, 15 bp, Homo sapiens
ccgactctatccccc

SEQ ID NO: 2025415 - DNA, 15 bp, Homo sapiens
cgactctatccccca

SEQ ID NO: 2025416 - DNA, 15 bp, Homo sapiens
gactctatcccccaa

SEQ ID NO: 2025417 - DNA, 15 bp, Homo sapiens
actctatcccccaac

SEQ ID NO: 2025418 - DNA, 15 bp, Homo sapiens
ctctatcccccaaca

SEQ ID NO: 2025419 - DNA, 15 bp, Homo sapiens
tctatcccccaacac

SEQ ID NO: 2025420 - DNA, 15 bp, Homo sapiens
ctatcccccaacaca

SEQ ID NO: 2025421 - DNA, 15 bp, Homo sapiens
tatcccccaacacac

SEQ ID NO: 2025422 - DNA, 15 bp, Homo sapiens
atcccccaacacacc

SEQ ID NO: 2025423 - DNA, 15 bp, Homo sapiens
tcccccaacacacca

SEQ ID NO: 2025424 - DNA, 15 bp, Homo sapiens
cccccaacacaccaa

SEQ ID NO: 2025425 - DNA, 15 bp, Homo sapiens
ccccaacacaccaag

SEQ ID NO: 2025426 - DNA, 15 bp, Homo sapiens
cccaacacaccaaga

SEQ ID NO: 2025427 - DNA, 15 bp, Homo sapiens
ccaacacaccaagat

SEQ ID NO: 2025428 - DNA, 15 bp, Homo sapiens
caacacaccaagatt

SEQ ID NO: 2025429 - DNA, 15 bp, Homo sapiens
aacacaccaagattc

SEQ ID NO: 2025430 - DNA, 15 bp, Homo sapiens
acacaccaagattcg

SEQ ID NO: 2025431 - DNA, 15 bp, Homo sapiens
cacaccaagattcgg

SEQ ID NO: 2025432 - DNA, 15 bp, Homo sapiens
acaccaagattcggc

SEQ ID NO: 2025433 - DNA, 15 bp, Homo sapiens
caccaagattcggcc

SEQ ID NO: 2025434 - DNA, 15 bp, Homo sapiens
accaagattcggcca

SEQ ID NO: 2025435 - DNA, 15 bp, Homo sapiens
ccaagattcggccaa

SEQ ID NO: 2025436 - DNA, 15 bp, Homo sapiens
caagattcggccaaa

SEQ ID NO: 2025437 - DNA, 15 bp, Homo sapiens
aagattcggccaaaa

SEQ ID NO: 2025438 - DNA, 15 bp, Homo sapiens
agattcggccaaaag

SEQ ID NO: 2025439 - DNA, 15 bp, Homo sapiens
gattcggccaaaaga

SEQ ID NO: 2025440 - DNA, 15 bp, Homo sapiens
attcggccaaaagat

SEQ ID NO: 2025441 - DNA, 15 bp, Homo sapiens
ttcggccaaaagatg

SEQ ID NO: 2025442 - DNA, 15 bp, Homo sapiens
tcggccaaaagatgt

SEQ ID NO: 2025443 - DNA, 15 bp, Homo sapiens
cggccaaaagatgtc

SEQ ID NO: 2025444 - DNA, 15 bp, Homo sapiens
ggccaaaagatgtcc

SEQ ID NO: 2025445 - DNA, 15 bp, Homo sapiens
gccaaaagatgtccc

SEQ ID NO: 2025446 - DNA, 15 bp, Homo sapiens
ccaaaagatgtccct

SEQ ID NO: 2025447 - DNA, 15 bp, Homo sapiens
caaaagatgtccctg

SEQ ID NO: 2025448 - DNA, 15 bp, Homo sapiens
aaaagatgtccctgg

SEQ ID NO: 2025449 - DNA, 15 bp, Homo sapiens
aaagatgtccctggg

SEQ ID NO: 2025450 - DNA, 15 bp, Homo sapiens
aagatgtccctggga

SEQ ID NO: 2025451 - DNA, 15 bp, Homo sapiens
agatgtccctgggac

SEQ ID NO: 2025452 - DNA, 15 bp, Homo sapiens
gatgtccctgggaca

SEQ ID NO: 2025453 - DNA, 15 bp, Homo sapiens
atgtccctgggacac

SEQ ID NO: 2025454 - DNA, 15 bp, Homo sapiens
tgtccctgggacact

SEQ ID NO: 2025455 - DNA, 15 bp, Homo sapiens
gtccctgggacactg

SEQ ID NO: 2025456 - DNA, 15 bp, Homo sapiens
tccctgggacactgc

SEQ ID NO: 2025457 - DNA, 15 bp, Homo sapiens
ccctgggacactgct

SEQ ID NO: 2025458 - DNA, 15 bp, Homo sapiens
cctgggacactgctc

SEQ ID NO: 2025459 - DNA, 15 bp, Homo sapiens
ctgggacactgctca

SEQ ID NO: 2025460 - DNA, 15 bp, Homo sapiens
tgggacactgctcaa

SEQ ID NO: 2025461 - DNA, 15 bp, Homo sapiens
gggacactgctcaat

SEQ ID NO: 2025462 - DNA, 15 bp, Homo sapiens
ggacactgctcaata

SEQ ID NO: 2025463 - DNA, 15 bp, Homo sapiens
gacactgctcaatat

SEQ ID NO: 2025464 - DNA, 15 bp, Homo sapiens
acactgctcaatatc

SEQ ID NO: 2025465 - DNA, 15 bp, Homo sapiens
cactgctcaatatcg

SEQ ID NO: 2025466 - DNA, 15 bp, Homo sapiens
actgctcaatatcgc

SEQ ID NO: 2025467 - DNA, 15 bp, Homo sapiens
ctgctcaatatcgca

SEQ ID NO: 2025468 - DNA, 15 bp, Homo sapiens
tgctcaatatcgcat

SEQ ID NO: 2025469 - DNA, 15 bp, Homo sapiens
gctcaatatcgcatt

SEQ ID NO: 2025470 - DNA, 15 bp, Homo sapiens
ctcaatatcgcatta

SEQ ID NO: 2025471 - DNA, 15 bp, Homo sapiens
tcaatatcgcattac

SEQ ID NO: 2025472 - DNA, 15 bp, Homo sapiens
caatatcgcattact

SEQ ID NO: 2025473 - DNA, 15 bp, Homo sapiens
aatatcgcattactt

SEQ ID NO: 2025474 - DNA, 15 bp, Homo sapiens
atatcgcattactta

SEQ ID NO: 2025475 - DNA, 15 bp, Homo sapiens
tatcgcattacttaa

SEQ ID NO: 2025476 - DNA, 15 bp, Homo sapiens
atcgcattacttaat

SEQ ID NO: 2025477 - DNA, 15 bp, Homo sapiens
tcgcattacttaatt

SEQ ID NO: 2025478 - DNA, 15 bp, Homo sapiens
cgcattacttaattt

SEQ ID NO: 2025479 - DNA, 15 bp, Homo sapiens
gcattacttaattta

SEQ ID NO: 2025480 - DNA, 15 bp, Homo sapiens
cattacttaatttag

SEQ ID NO: 2025481 - DNA, 15 bp, Homo sapiens
attacttaatttagg

SEQ ID NO: 2025482 - DNA, 15 bp, Homo sapiens
ttacttaatttaggc

SEQ ID NO: 2025483 - DNA, 15 bp, Homo sapiens
tacttaatttaggca

SEQ ID NO: 2025484 - DNA, 15 bp, Homo sapiens
acttaatttaggcag

SEQ ID NO: 2025485 - DNA, 15 bp, Homo sapiens
cttaatttaggcagt

SEQ ID NO: 2025486 - DNA, 15 bp, Homo sapiens
ttaatttaggcagtt

SEQ ID NO: 2025487 - DNA, 15 bp, Homo sapiens
taatttaggcagttc

SEQ ID NO: 2025488 - DNA, 15 bp, Homo sapiens
aatttaggcagttct

SEQ ID NO: 2025489 - DNA, 15 bp, Homo sapiens
atttaggcagttctg

SEQ ID NO: 2025490 - DNA, 15 bp, Homo sapiens
tttaggcagttctga

SEQ ID NO: 2025491 - DNA, 15 bp, Homo sapiens
ttaggcagttctgac

SEQ ID NO: 2025492 - DNA, 15 bp, Homo sapiens
taggcagttctgacc

SEQ ID NO: 2025493 - DNA, 15 bp, Homo sapiens
aggcagttctgaccc

SEQ ID NO: 2025494 - DNA, 15 bp, Homo sapiens
ggcagttctgacccg

SEQ ID NO: 2025495 - DNA, 15 bp, Homo sapiens
gcagttctgacccga

SEQ ID NO: 2025496 - DNA, 15 bp, Homo sapiens
cagttctgacccgag

SEQ ID NO: 2025497 - DNA, 15 bp, Homo sapiens
agttctgacccgagt

SEQ ID NO: 2025498 - DNA, 15 bp, Homo sapiens
gttctgacccgagtt

SEQ ID NO: 2025499 - DNA, 15 bp, Homo sapiens
ttctgacccgagttt

SEQ ID NO: 2025500 - DNA, 15 bp, Homo sapiens
tctgacccgagttta

SEQ ID NO: 2025501 - DNA, 15 bp, Homo sapiens
ctgacccgagtttac

SEQ ID NO: 2025502 - DNA, 15 bp, Homo sapiens
tgacccgagtttacg

SEQ ID NO: 2025503 - DNA, 15 bp, Homo sapiens
gacccgagtttacgg

SEQ ID NO: 2025504 - DNA, 15 bp, Homo sapiens
acccgagtttacggt

SEQ ID NO: 2025505 - DNA, 15 bp, Homo sapiens
cccgagtttacggta

SEQ ID NO: 2025506 - DNA, 15 bp, Homo sapiens
ccgagtttacggtag

SEQ ID NO: 2025507 - DNA, 15 bp, Homo sapiens
cgagtttacggtagg

SEQ ID NO: 2025508 - DNA, 15 bp, Homo sapiens
gagtttacggtaggt

SEQ ID NO: 2025509 - DNA, 15 bp, Homo sapiens
agtttacggtaggtt

SEQ ID NO: 2025510 - DNA, 15 bp, Homo sapiens
gtttacggtaggttt

SEQ ID NO: 2025511 - DNA, 15 bp, Homo sapiens
tttacggtaggtttt

SEQ ID NO: 2025512 - DNA, 15 bp, Homo sapiens
ttacggtaggttttt

SEQ ID NO: 2025513 - DNA, 15 bp, Homo sapiens
tacggtaggtttttt

SEQ ID NO: 2025514 - DNA, 15 bp, Homo sapiens
acggtaggtttttta

SEQ ID NO: 2025515 - DNA, 15 bp, Homo sapiens
cggtaggttttttaa

SEQ ID NO: 2025516 - DNA, 15 bp, Homo sapiens
ggtaggttttttaaa

SEQ ID NO: 2025517 - DNA, 15 bp, Homo sapiens
gtaggttttttaaaa

SEQ ID NO: 2025518 - DNA, 15 bp, Homo sapiens
taggttttttaaaat

SEQ ID NO: 2025519 - DNA, 15 bp, Homo sapiens
aggttttttaaaatt

SEQ ID NO: 2025520 - DNA, 15 bp, Homo sapiens
ggttttttaaaattc

SEQ ID NO: 2025521 - DNA, 15 bp, Homo sapiens
gttttttaaaattct

SEQ ID NO: 2025522 - DNA, 15 bp, Homo sapiens
ttttttaaaattctc

SEQ ID NO: 2025523 - DNA, 15 bp, Homo sapiens
tttttaaaattctct

SEQ ID NO: 2025524 - DNA, 15 bp, Homo sapiens
ttttaaaattctctt

SEQ ID NO: 2025525 - DNA, 15 bp, Homo sapiens
tttaaaattctcttc

SEQ ID NO: 2025526 - DNA, 15 bp, Homo sapiens
ttaaaattctcttca

SEQ ID NO: 2025527 - DNA, 15 bp, Homo sapiens
taaaattctcttcag

SEQ ID NO: 2025528 - DNA, 15 bp, Homo sapiens
aaaattctcttcagt

SEQ ID NO: 2025529 - DNA, 15 bp, Homo sapiens
aaattctcttcagtt

SEQ ID NO: 2025530 - DNA, 15 bp, Homo sapiens
aattctcttcagttt

SEQ ID NO: 2025531 - DNA, 15 bp, Homo sapiens
attctcttcagtttg

SEQ ID NO: 2025532 - DNA, 15 bp, Homo sapiens
ttctcttcagtttga

SEQ ID NO: 2025533 - DNA, 15 bp, Homo sapiens
tctcttcagtttgat

SEQ ID NO: 2025534 - DNA, 15 bp, Homo sapiens
ctcttcagtttgatt

SEQ ID NO: 2025535 - DNA, 15 bp, Homo sapiens
tcttcagtttgattt

SEQ ID NO: 2025536 - DNA, 15 bp, Homo sapiens
cttcagtttgatttg

SEQ ID NO: 2025537 - DNA, 15 bp, Homo sapiens
ttcagtttgatttgg

SEQ ID NO: 2025538 - DNA, 15 bp, Homo sapiens
tcagtttgatttggg

SEQ ID NO: 2025539 - DNA, 15 bp, Homo sapiens
cagtttgatttgggg

SEQ ID NO: 2025540 - DNA, 15 bp, Homo sapiens
agtttgatttggggt

SEQ ID NO: 2025541 - DNA, 15 bp, Homo sapiens
gtttgatttggggtt

SEQ ID NO: 2025542 - DNA, 15 bp, Homo sapiens
tttgatttggggttt

SEQ ID NO: 2025543 - DNA, 15 bp, Homo sapiens
ttgatttggggtttg

SEQ ID NO: 2025544 - DNA, 15 bp, Homo sapiens
tgatttggggtttgt

SEQ ID NO: 2025545 - DNA, 15 bp, Homo sapiens
gatttggggtttgtt

SEQ ID NO: 2025546 - DNA, 15 bp, Homo sapiens
atttggggtttgttg

SEQ ID NO: 2025547 - DNA, 15 bp, Homo sapiens
tttggggtttgttgc

SEQ ID NO: 2025548 - DNA, 15 bp, Homo sapiens
ttggggtttgttgct

SEQ ID NO: 2025549 - DNA, 15 bp, Homo sapiens
tggggtttgttgctt

SEQ ID NO: 2025550 - DNA, 15 bp, Homo sapiens
ggggtttgttgcttt

SEQ ID NO: 2025551 - DNA, 15 bp, Homo sapiens
gggtttgttgctttt

SEQ ID NO: 2025552 - DNA, 15 bp, Homo sapiens
ggtttgttgctttta

SEQ ID NO: 2025553 - DNA, 15 bp, Homo sapiens
gtttgttgcttttaa

SEQ ID NO: 2025554 - DNA, 15 bp, Homo sapiens
tttgttgcttttaaa

SEQ ID NO: 2025555 - DNA, 15 bp, Homo sapiens
ttgttgcttttaaaa

SEQ ID NO: 2025556 - DNA, 15 bp, Homo sapiens
gttgcttttaaaatg

SEQ ID NO: 2025557 - DNA, 15 bp, Homo sapiens
ttgcttttaaaatga

SEQ ID NO: 2025558 - DNA, 15 bp, Homo sapiens
tgcttttaaaatgag

SEQ ID NO: 2025559 - DNA, 15 bp, Homo sapiens
gcttttaaaatgaga

SEQ ID NO: 2025560 - DNA, 15 bp, Homo sapiens
cttttaaaatgagac

SEQ ID NO: 2025561 - DNA, 15 bp, Homo sapiens
ttttaaaatgagacc

SEQ ID NO: 2025562 - DNA, 15 bp, Homo sapiens
tttaaaatgagacca

SEQ ID NO: 2025563 - DNA, 15 bp, Homo sapiens
ttaaaatgagaccat

SEQ ID NO: 2025564 - DNA, 15 bp, Homo sapiens
taaaatgagaccatt

SEQ ID NO: 2025565 - DNA, 15 bp, Homo sapiens
aaaatgagaccattt

SEQ ID NO: 2025566 - DNA, 15 bp, Homo sapiens
aaatgagaccattta

SEQ ID NO: 2025567 - DNA, 15 bp, Homo sapiens
aatgagaccatttaa

SEQ ID NO: 2025568 - DNA, 15 bp, Homo sapiens
atgagaccatttaat

SEQ ID NO: 2025569 - DNA, 15 bp, Homo sapiens
tgagaccatttaatg

SEQ ID NO: 2025570 - DNA, 15 bp, Homo sapiens
gagaccatttaatga

SEQ ID NO: 2025571 - DNA, 15 bp, Homo sapiens
agaccatttaatgaa

SEQ ID NO: 2025572 - DNA, 15 bp, Homo sapiens
gaccatttaatgaat

SEQ ID NO: 2025573 - DNA, 15 bp, Homo sapiens
accatttaatgaatt

SEQ ID NO: 2025574 - DNA, 15 bp, Homo sapiens
ccatttaatgaattt

SEQ ID NO: 2025575 - DNA, 15 bp, Homo sapiens
catttaatgaatttt

SEQ ID NO: 2025576 - DNA, 15 bp, Homo sapiens
atttaatgaatttta

SEQ ID NO: 2025577 - DNA, 15 bp, Homo sapiens
tttaatgaattttaa

SEQ ID NO: 2025578 - DNA, 15 bp, Homo sapiens
ttaatgaattttaaa

SEQ ID NO: 2025579 - DNA, 15 bp, Homo sapiens
aatgaattttaaaac

SEQ ID NO: 2025580 - DNA, 15 bp, Homo sapiens
atgaattttaaaaca

SEQ ID NO: 2025581 - DNA, 15 bp, Homo sapiens
gaattttaaaacagc

SEQ ID NO: 2025582 - DNA, 15 bp, Homo sapiens
aattttaaaacagcc

SEQ ID NO: 2025583 - DNA, 15 bp, Homo sapiens
attttaaaacagcct

SEQ ID NO: 2025584 - DNA, 15 bp, Homo sapiens
ttttaaaacagcctc

SEQ ID NO: 2025585 - DNA, 15 bp, Homo sapiens
tttaaaacagcctct

SEQ ID NO: 2025586 - DNA, 15 bp, Homo sapiens
ttaaaacagcctcta

SEQ ID NO: 2025587 - DNA, 15 bp, Homo sapiens
taaaacagcctctac

SEQ ID NO: 2025588 - DNA, 15 bp, Homo sapiens
aaaacagcctctacc

SEQ ID NO: 2025589 - DNA, 15 bp, Homo sapiens
aaacagcctctacct

SEQ ID NO: 2025590 - DNA, 15 bp, Homo sapiens
aacagcctctacctt

SEQ ID NO: 2025591 - DNA, 15 bp, Homo sapiens
acagcctctacctta

SEQ ID NO: 2025592 - DNA, 15 bp, Homo sapiens
cagcctctaccttaa

SEQ ID NO: 2025593 - DNA, 15 bp, Homo sapiens
agcctctaccttaat

SEQ ID NO: 2025594 - DNA, 15 bp, Homo sapiens
gcctctaccttaata

SEQ ID NO: 2025595 - DNA, 15 bp, Homo sapiens
cctctaccttaatat

SEQ ID NO: 2025596 - DNA, 15 bp, Homo sapiens
ctctaccttaatatt

SEQ ID NO: 2025597 - DNA, 15 bp, Homo sapiens
tctaccttaatattg

SEQ ID NO: 2025598 - DNA, 15 bp, Homo sapiens
ctaccttaatattgt

SEQ ID NO: 2025599 - DNA, 15 bp, Homo sapiens
taccttaatattgta

SEQ ID NO: 2025600 - DNA, 15 bp, Homo sapiens
accttaatattgtaa

SEQ ID NO: 2025601 - DNA, 15 bp, Homo sapiens
ccttaatattgtaaa

SEQ ID NO: 2025602 - DNA, 15 bp, Homo sapiens
cttaatattgtaaat

SEQ ID NO: 2025603 - DNA, 15 bp, Homo sapiens
ttaatattgtaaatt

SEQ ID NO: 2025604 - DNA, 15 bp, Homo sapiens
taatattgtaaattg

SEQ ID NO: 2025605 - DNA, 15 bp, Homo sapiens
aatattgtaaattgg

SEQ ID NO: 2025606 - DNA, 15 bp, Homo sapiens
atattgtaaattgga

SEQ ID NO: 2025607 - DNA, 15 bp, Homo sapiens
tattgtaaattggaa

SEQ ID NO: 2025608 - DNA, 15 bp, Homo sapiens
attgtaaattggaag

SEQ ID NO: 2025609 - DNA, 15 bp, Homo sapiens
ttgtaaattggaagg

SEQ ID NO: 2025610 - DNA, 15 bp, Homo sapiens
tgtaaattggaaggt

SEQ ID NO: 2025611 - DNA, 15 bp, Homo sapiens
gtaaattggaaggta

SEQ ID NO: 2025612 - DNA, 15 bp, Homo sapiens
taaattggaaggtat

SEQ ID NO: 2025613 - DNA, 15 bp, Homo sapiens
aaattggaaggtatg

SEQ ID NO: 2025614 - DNA, 15 bp, Homo sapiens
aattggaaggtatgc

SEQ ID NO: 2025615 - DNA, 15 bp, Homo sapiens
attggaaggtatgca

SEQ ID NO: 2025616 - DNA, 15 bp, Homo sapiens
ttggaaggtatgcag

SEQ ID NO: 2025617 - DNA, 15 bp, Homo sapiens
tggaaggtatgcagt

SEQ ID NO: 2025618 - DNA, 15 bp, Homo sapiens
ggaaggtatgcagtg

SEQ ID NO: 2025619 - DNA, 15 bp, Homo sapiens
gaaggtatgcagtgt

SEQ ID NO: 2025620 - DNA, 15 bp, Homo sapiens
aaggtatgcagtgtt

SEQ ID NO: 2025621 - DNA, 15 bp, Homo sapiens
aggtatgcagtgttg

SEQ ID NO: 2025622 - DNA, 15 bp, Homo sapiens
ggtatgcagtgttgg

SEQ ID NO: 2025623 - DNA, 15 bp, Homo sapiens
gtatgcagtgttggt

SEQ ID NO: 2025624 - DNA, 15 bp, Homo sapiens
tatgcagtgttggtt

SEQ ID NO: 2025625 - DNA, 15 bp, Homo sapiens
atgcagtgttggtta

SEQ ID NO: 2025626 - DNA, 15 bp, Homo sapiens
tgcagtgttggttaa

SEQ ID NO: 2025627 - DNA, 15 bp, Homo sapiens
gcagtgttggttaac

SEQ ID NO: 2025628 - DNA, 15 bp, Homo sapiens
cagtgttggttaacc

SEQ ID NO: 2025629 - DNA, 15 bp, Homo sapiens
agtgttggttaacca

SEQ ID NO: 2025630 - DNA, 15 bp, Homo sapiens
gtgttggttaaccac

SEQ ID NO: 2025631 - DNA, 15 bp, Homo sapiens
tgttggttaaccact

SEQ ID NO: 2025632 - DNA, 15 bp, Homo sapiens
gttggttaaccactg

SEQ ID NO: 2025633 - DNA, 15 bp, Homo sapiens
ttggttaaccactgt

SEQ ID NO: 2025634 - DNA, 15 bp, Homo sapiens
tggttaaccactgtg

SEQ ID NO: 2025635 - DNA, 15 bp, Homo sapiens
ggttaaccactgtga

SEQ ID NO: 2025636 - DNA, 15 bp, Homo sapiens
gttaaccactgtgac

SEQ ID NO: 2025637 - DNA, 15 bp, Homo sapiens
ttaaccactgtgacc

SEQ ID NO: 2025638 - DNA, 15 bp, Homo sapiens
taaccactgtgacct

SEQ ID NO: 2025639 - DNA, 15 bp, Homo sapiens
aaccactgtgacctc

SEQ ID NO: 2025640 - DNA, 15 bp, Homo sapiens
accactgtgacctca

SEQ ID NO: 2025641 - DNA, 15 bp, Homo sapiens
ccactgtgacctcat

SEQ ID NO: 2025642 - DNA, 15 bp, Homo sapiens
cactgtgacctcatc

SEQ ID NO: 2025643 - DNA, 15 bp, Homo sapiens
actgtgacctcatca

SEQ ID NO: 2025644 - DNA, 15 bp, Homo sapiens
ctgtgacctcatcaa

SEQ ID NO: 2025645 - DNA, 15 bp, Homo sapiens
tgtgacctcatcaag

SEQ ID NO: 2025646 - DNA, 15 bp, Homo sapiens
gtgacctcatcaagt

SEQ ID NO: 2025647 - DNA, 15 bp, Homo sapiens
gacctcatcaagttg

SEQ ID NO: 2025648 - DNA, 15 bp, Homo sapiens
acctcatcaagttgt

SEQ ID NO: 2025649 - DNA, 15 bp, Homo sapiens
cctcatcaagttgtg

SEQ ID NO: 2025650 - DNA, 15 bp, Homo sapiens
ctcatcaagttgtgg

SEQ ID NO: 2025651 - DNA, 15 bp, Homo sapiens
tcatcaagttgtggg

SEQ ID NO: 2025652 - DNA, 15 bp, Homo sapiens
catcaagttgtgggg

SEQ ID NO: 2025653 - DNA, 15 bp, Homo sapiens
atcaagttgtggggt

SEQ ID NO: 2025654 - DNA, 15 bp, Homo sapiens
tcaagttgtggggta

SEQ ID NO: 2025655 - DNA, 15 bp, Homo sapiens
caagttgtggggtat

SEQ ID NO: 2025656 - DNA, 15 bp, Homo sapiens
aagttgtggggtatt

SEQ ID NO: 2025657 - DNA, 15 bp, Homo sapiens
agttgtggggtattc

SEQ ID NO: 2025658 - DNA, 15 bp, Homo sapiens
gttgtggggtattca

SEQ ID NO: 2025659 - DNA, 15 bp, Homo sapiens
ttgtggggtattcac

SEQ ID NO: 2025660 - DNA, 15 bp, Homo sapiens
tgtggggtattcaca

SEQ ID NO: 2025661 - DNA, 15 bp, Homo sapiens
gtggggtattcacat

SEQ ID NO: 2025662 - DNA, 15 bp, Homo sapiens
tggggtattcacatg

SEQ ID NO: 2025663 - DNA, 15 bp, Homo sapiens
ggggtattcacatga

SEQ ID NO: 2025664 - DNA, 15 bp, Homo sapiens
gggtattcacatgaa

SEQ ID NO: 2025665 - DNA, 15 bp, Homo sapiens
ggtattcacatgaac

SEQ ID NO: 2025666 - DNA, 15 bp, Homo sapiens
gtattcacatgaact

SEQ ID NO: 2025667 - DNA, 15 bp, Homo sapiens
tattcacatgaactg

SEQ ID NO: 2025668 - DNA, 15 bp, Homo sapiens
attcacatgaactgt

SEQ ID NO: 2025669 - DNA, 15 bp, Homo sapiens
ttcacatgaactgtg

SEQ ID NO: 2025670 - DNA, 15 bp, Homo sapiens
tcacatgaactgtgg

SEQ ID NO: 2025671 - DNA, 15 bp, Homo sapiens
cacatgaactgtgga

SEQ ID NO: 2025672 - DNA, 15 bp, Homo sapiens
acatgaactgtggaa

SEQ ID NO: 2025673 - DNA, 15 bp, Homo sapiens
catgaactgtggaat

SEQ ID NO: 2025674 - DNA, 15 bp, Homo sapiens
atgaactgtggaatt

SEQ ID NO: 2025675 - DNA, 15 bp, Homo sapiens
tgaactgtggaattc

SEQ ID NO: 2025676 - DNA, 15 bp, Homo sapiens
gaactgtggaattcc

SEQ ID NO: 2025677 - DNA, 15 bp, Homo sapiens
aactgtggaattcca

SEQ ID NO: 2025678 - DNA, 15 bp, Homo sapiens
actgtggaattccaa

SEQ ID NO: 2025679 - DNA, 15 bp, Homo sapiens
ctgtggaattccaaa

SEQ ID NO: 2025680 - DNA, 15 bp, Homo sapiens
tgtggaattccaaac

SEQ ID NO: 2025681 - DNA, 15 bp, Homo sapiens
gtggaattccaaaca

SEQ ID NO: 2025682 - DNA, 15 bp, Homo sapiens
tggaattccaaacag

SEQ ID NO: 2025683 - DNA, 15 bp, Homo sapiens
ggaattccaaacagg

SEQ ID NO: 2025684 - DNA, 15 bp, Homo sapiens
gaattccaaacaggg

SEQ ID NO: 2025685 - DNA, 15 bp, Homo sapiens
aattccaaacagggt

SEQ ID NO: 2025686 - DNA, 15 bp, Homo sapiens
attccaaacagggtg

SEQ ID NO: 2025687 - DNA, 15 bp, Homo sapiens
ttccaaacagggtga

SEQ ID NO: 2025688 - DNA, 15 bp, Homo sapiens
tccaaacagggtgat

SEQ ID NO: 2025689 - DNA, 15 bp, Homo sapiens
ccaaacagggtgatt

SEQ ID NO: 2025690 - DNA, 15 bp, Homo sapiens
caaacagggtgattc

SEQ ID NO: 2025691 - DNA, 15 bp, Homo sapiens
aaacagggtgattca

SEQ ID NO: 2025692 - DNA, 15 bp, Homo sapiens
aacagggtgattcac

SEQ ID NO: 2025693 - DNA, 15 bp, Homo sapiens
acagggtgattcaca

SEQ ID NO: 2025694 - DNA, 15 bp, Homo sapiens
cagggtgattcacac

SEQ ID NO: 2025695 - DNA, 15 bp, Homo sapiens
agggtgattcacact

SEQ ID NO: 2025696 - DNA, 15 bp, Homo sapiens
gggtgattcacacta

SEQ ID NO: 2025697 - DNA, 15 bp, Homo sapiens
ggtgattcacactaa

SEQ ID NO: 2025698 - DNA, 15 bp, Homo sapiens
gtgattcacactaaa

SEQ ID NO: 2025699 - DNA, 15 bp, Homo sapiens
tgattcacactaaac

SEQ ID NO: 2025700 - DNA, 15 bp, Homo sapiens
gattcacactaaacc

SEQ ID NO: 2025701 - DNA, 15 bp, Homo sapiens
attcacactaaacca

SEQ ID NO: 2025702 - DNA, 15 bp, Homo sapiens
ttcacactaaaccaa

SEQ ID NO: 2025703 - DNA, 15 bp, Homo sapiens
tcacactaaaccaat

SEQ ID NO: 2025704 - DNA, 15 bp, Homo sapiens
cacactaaaccaata

SEQ ID NO: 2025705 - DNA, 15 bp, Homo sapiens
acactaaaccaatat

SEQ ID NO: 2025706 - DNA, 15 bp, Homo sapiens
cactaaaccaatata

SEQ ID NO: 2025707 - DNA, 15 bp, Homo sapiens
actaaaccaatatat

SEQ ID NO: 2025708 - DNA, 15 bp, Homo sapiens
ctaaaccaatatatg

SEQ ID NO: 2025709 - DNA, 15 bp, Homo sapiens
taaaccaatatatgt

SEQ ID NO: 2025710 - DNA, 15 bp, Homo sapiens
aaaccaatatatgtc

SEQ ID NO: 2025711 - DNA, 15 bp, Homo sapiens
aaccaatatatgtcc

SEQ ID NO: 2025712 - DNA, 15 bp, Homo sapiens
accaatatatgtcct

SEQ ID NO: 2025713 - DNA, 15 bp, Homo sapiens
ccaatatatgtcctt

SEQ ID NO: 2025714 - DNA, 15 bp, Homo sapiens
caatatatgtccttt

SEQ ID NO: 2025715 - DNA, 15 bp, Homo sapiens
aatatatgtcctttc

SEQ ID NO: 2025716 - DNA, 15 bp, Homo sapiens
atatatgtcctttct

SEQ ID NO: 2025717 - DNA, 15 bp, Homo sapiens
tatatgtcctttctc

SEQ ID NO: 2025718 - DNA, 15 bp, Homo sapiens
atatgtcctttctcc

SEQ ID NO: 2025719 - DNA, 15 bp, Homo sapiens
tatgtcctttctcca

SEQ ID NO: 2025720 - DNA, 15 bp, Homo sapiens
atgtcctttctccat

SEQ ID NO: 2025721 - DNA, 15 bp, Homo sapiens
tgtcctttctccatc

SEQ ID NO: 2025722 - DNA, 15 bp, Homo sapiens
gtcctttctccatca

SEQ ID NO: 2025723 - DNA, 15 bp, Homo sapiens
tcctttctccatcat

SEQ ID NO: 2025724 - DNA, 15 bp, Homo sapiens
cctttctccatcatg

SEQ ID NO: 2025725 - DNA, 15 bp, Homo sapiens
ctttctccatcatgt

SEQ ID NO: 2025726 - DNA, 15 bp, Homo sapiens
tttctccatcatgta

SEQ ID NO: 2025727 - DNA, 15 bp, Homo sapiens
ttctccatcatgtaa

SEQ ID NO: 2025728 - DNA, 15 bp, Homo sapiens
tctccatcatgtaaa

SEQ ID NO: 2025729 - DNA, 15 bp, Homo sapiens
ctccatcatgtaaaa

SEQ ID NO: 2025730 - DNA, 15 bp, Homo sapiens
tccatcatgtaaaac

SEQ ID NO: 2025731 - DNA, 15 bp, Homo sapiens
ccatcatgtaaaaca

SEQ ID NO: 2025732 - DNA, 15 bp, Homo sapiens
catcatgtaaaacaa

SEQ ID NO: 2025733 - DNA, 15 bp, Homo sapiens
atcatgtaaaacaac

SEQ ID NO: 2025734 - DNA, 15 bp, Homo sapiens
tcatgtaaaacaaca

SEQ ID NO: 2025735 - DNA, 15 bp, Homo sapiens
catgtaaaacaacac

SEQ ID NO: 2025736 - DNA, 15 bp, Homo sapiens
atgtaaaacaacacg

SEQ ID NO: 2025737 - DNA, 15 bp, Homo sapiens
tgtaaaacaacacga

SEQ ID NO: 2025738 - DNA, 15 bp, Homo sapiens
gtaaaacaacacgac

SEQ ID NO: 2025739 - DNA, 15 bp, Homo sapiens
taaaacaacacgaca

SEQ ID NO: 2025740 - DNA, 15 bp, Homo sapiens
aaaacaacacgacat

SEQ ID NO: 2025741 - DNA, 15 bp, Homo sapiens
aaacaacacgacata

SEQ ID NO: 2025742 - DNA, 15 bp, Homo sapiens
aacaacacgacatag

SEQ ID NO: 2025743 - DNA, 15 bp, Homo sapiens
acaacacgacatagc

SEQ ID NO: 2025744 - DNA, 15 bp, Homo sapiens
caacacgacatagca

SEQ ID NO: 2025745 - DNA, 15 bp, Homo sapiens
aacacgacatagcag

SEQ ID NO: 2025746 - DNA, 15 bp, Homo sapiens
acacgacatagcaga

SEQ ID NO: 2025747 - DNA, 15 bp, Homo sapiens
cacgacatagcagat

SEQ ID NO: 2025748 - DNA, 15 bp, Homo sapiens
acgacatagcagatt

SEQ ID NO: 2025749 - DNA, 15 bp, Homo sapiens
cgacatagcagattt

SEQ ID NO: 2025750 - DNA, 15 bp, Homo sapiens
gacatagcagatttt

SEQ ID NO: 2025751 - DNA, 15 bp, Homo sapiens
acatagcagattttt

SEQ ID NO: 2025752 - DNA, 15 bp, Homo sapiens
catagcagatttttt

SEQ ID NO: 2025753 - DNA, 15 bp, Homo sapiens
atagcagattttttt

SEQ ID NO: 2025754 - DNA, 15 bp, Homo sapiens
tagcagatttttttt

SEQ ID NO: 2025755 - DNA, 15 bp, Homo sapiens
agcagattttttttt

SEQ ID NO: 2025756 - DNA, 15 bp, Homo sapiens
gcagatttttttttc

SEQ ID NO: 2025757 - DNA, 15 bp, Homo sapiens
cagatttttttttcc

SEQ ID NO: 2025758 - DNA, 15 bp, Homo sapiens
agatttttttttcca

SEQ ID NO: 2025759 - DNA, 15 bp, Homo sapiens
gatttttttttccaa

SEQ ID NO: 2025760 - DNA, 15 bp, Homo sapiens
atttttttttccaaa

SEQ ID NO: 2025761 - DNA, 15 bp, Homo sapiens
tttttttttccaaag

SEQ ID NO: 2025762 - DNA, 15 bp, Homo sapiens
ttttttttccaaagt

SEQ ID NO: 2025763 - DNA, 15 bp, Homo sapiens
tttttttccaaagta

SEQ ID NO: 2025764 - DNA, 15 bp, Homo sapiens
ttttttccaaagtat

SEQ ID NO: 2025765 - DNA, 15 bp, Homo sapiens
tttttccaaagtatc

SEQ ID NO: 2025766 - DNA, 15 bp, Homo sapiens
ttttccaaagtatcc

SEQ ID NO: 2025767 - DNA, 15 bp, Homo sapiens
tttccaaagtatcct

SEQ ID NO: 2025768 - DNA, 15 bp, Homo sapiens
ttccaaagtatccta

SEQ ID NO: 2025769 - DNA, 15 bp, Homo sapiens
tccaaagtatcctaa

SEQ ID NO: 2025770 - DNA, 15 bp, Homo sapiens
ccaaagtatcctaaa

SEQ ID NO: 2025771 - DNA, 15 bp, Homo sapiens
caaagtatcctaaat

SEQ ID NO: 2025772 - DNA, 15 bp, Homo sapiens
aaagtatcctaaatt

SEQ ID NO: 2025773 - DNA, 15 bp, Homo sapiens
aagtatcctaaatta

SEQ ID NO: 2025774 - DNA, 15 bp, Homo sapiens
agtatcctaaattaa

SEQ ID NO: 2025775 - DNA, 15 bp, Homo sapiens
gtatcctaaattaag

SEQ ID NO: 2025776 - DNA, 15 bp, Homo sapiens
tatcctaaattaagt

SEQ ID NO: 2025777 - DNA, 15 bp, Homo sapiens
atcctaaattaagtt

SEQ ID NO: 2025778 - DNA, 15 bp, Homo sapiens
tcctaaattaagttt

SEQ ID NO: 2025779 - DNA, 15 bp, Homo sapiens
cctaaattaagtttt

SEQ ID NO: 2025780 - DNA, 15 bp, Homo sapiens
ctaaattaagttttt

SEQ ID NO: 2025781 - DNA, 15 bp, Homo sapiens
taaattaagtttttc

SEQ ID NO: 2025782 - DNA, 15 bp, Homo sapiens
aaattaagtttttct

SEQ ID NO: 2025783 - DNA, 15 bp, Homo sapiens
aattaagtttttctt

SEQ ID NO: 2025784 - DNA, 15 bp, Homo sapiens
attaagtttttcttc

SEQ ID NO: 2025785 - DNA, 15 bp, Homo sapiens
ttaagtttttcttcc

SEQ ID NO: 2025786 - DNA, 15 bp, Homo sapiens
taagtttttcttcct

SEQ ID NO: 2025787 - DNA, 15 bp, Homo sapiens
aagtttttcttcctc

SEQ ID NO: 2025788 - DNA, 15 bp, Homo sapiens
agtttttcttcctct

SEQ ID NO: 2025789 - DNA, 15 bp, Homo sapiens
gtttttcttcctcta

SEQ ID NO: 2025790 - DNA, 15 bp, Homo sapiens
tttttcttcctctaa

SEQ ID NO: 2025791 - DNA, 15 bp, Homo sapiens
ttttcttcctctaag

SEQ ID NO: 2025792 - DNA, 15 bp, Homo sapiens
tttcttcctctaagt

SEQ ID NO: 2025793 - DNA, 15 bp, Homo sapiens
ttcttcctctaagtc

SEQ ID NO: 2025794 - DNA, 15 bp, Homo sapiens
tcttcctctaagtcc

SEQ ID NO: 2025795 - DNA, 15 bp, Homo sapiens
cttcctctaagtcct

SEQ ID NO: 2025796 - DNA, 15 bp, Homo sapiens
ttcctctaagtcctc

SEQ ID NO: 2025797 - DNA, 15 bp, Homo sapiens
tcctctaagtcctct

SEQ ID NO: 2025798 - DNA, 15 bp, Homo sapiens
cctctaagtcctcta

SEQ ID NO: 2025799 - DNA, 15 bp, Homo sapiens
ctctaagtcctctaa

SEQ ID NO: 2025800 - DNA, 15 bp, Homo sapiens
tctaagtcctctaat

SEQ ID NO: 2025801 - DNA, 15 bp, Homo sapiens
ctaagtcctctaatt

SEQ ID NO: 2025802 - DNA, 15 bp, Homo sapiens
taagtcctctaattt

SEQ ID NO: 2025803 - DNA, 15 bp, Homo sapiens
aagtcctctaatttt

SEQ ID NO: 2025804 - DNA, 15 bp, Homo sapiens
agtcctctaattttt

SEQ ID NO: 2025805 - DNA, 15 bp, Homo sapiens
gtcctctaatttttt

SEQ ID NO: 2025806 - DNA, 15 bp, Homo sapiens
tcctctaattttttt

SEQ ID NO: 2025807 - DNA, 15 bp, Homo sapiens
cctctaatttttttc

SEQ ID NO: 2025808 - DNA, 15 bp, Homo sapiens
ctctaatttttttcc

SEQ ID NO: 2025809 - DNA, 15 bp, Homo sapiens
tctaatttttttcca

SEQ ID NO: 2025810 - DNA, 15 bp, Homo sapiens
ctaatttttttccat

SEQ ID NO: 2025811 - DNA, 15 bp, Homo sapiens
taatttttttccatt

SEQ ID NO: 2025812 - DNA, 15 bp, Homo sapiens
aatttttttccattt

SEQ ID NO: 2025813 - DNA, 15 bp, Homo sapiens
atttttttccatttt

SEQ ID NO: 2025814 - DNA, 15 bp, Homo sapiens
tttttttccattttc

SEQ ID NO: 2025815 - DNA, 15 bp, Homo sapiens
ttttttccattttca

SEQ ID NO: 2025816 - DNA, 15 bp, Homo sapiens
ttttccattttcaga

SEQ ID NO: 2025817 - DNA, 15 bp, Homo sapiens
tttccattttcagaa

SEQ ID NO: 2025818 - DNA, 15 bp, Homo sapiens
ttccattttcagaag

SEQ ID NO: 2025819 - DNA, 15 bp, Homo sapiens
tccattttcagaagt

SEQ ID NO: 2025820 - DNA, 15 bp, Homo sapiens
ccattttcagaagta

SEQ ID NO: 2025821 - DNA, 15 bp, Homo sapiens
cattttcagaagtat

SEQ ID NO: 2025822 - DNA, 15 bp, Homo sapiens
attttcagaagtata

SEQ ID NO: 2025823 - DNA, 15 bp, Homo sapiens
ttttcagaagtatat

SEQ ID NO: 2025824 - DNA, 15 bp, Homo sapiens
tttcagaagtatatc

SEQ ID NO: 2025825 - DNA, 15 bp, Homo sapiens
ttcagaagtatatca

SEQ ID NO: 2025826 - DNA, 15 bp, Homo sapiens
tcagaagtatatcac

SEQ ID NO: 2025827 - DNA, 15 bp, Homo sapiens
cagaagtatatcact

SEQ ID NO: 2025828 - DNA, 15 bp, Homo sapiens
agaagtatatcacta

SEQ ID NO: 2025829 - DNA, 15 bp, Homo sapiens
gaagtatatcactat

SEQ ID NO: 2025830 - DNA, 15 bp, Homo sapiens
aagtatatcactatt

SEQ ID NO: 2025831 - DNA, 15 bp, Homo sapiens
agtatatcactattt

SEQ ID NO: 2025832 - DNA, 15 bp, Homo sapiens
gtatatcactattta

SEQ ID NO: 2025833 - DNA, 15 bp, Homo sapiens
tatatcactatttag

SEQ ID NO: 2025834 - DNA, 15 bp, Homo sapiens
atatcactatttagt

SEQ ID NO: 2025835 - DNA, 15 bp, Homo sapiens
tatcactatttagtt

SEQ ID NO: 2025836 - DNA, 15 bp, Homo sapiens
atcactatttagttt

SEQ ID NO: 2025837 - DNA, 15 bp, Homo sapiens
tcactatttagttta

SEQ ID NO: 2025838 - DNA, 15 bp, Homo sapiens
cactatttagtttaa

SEQ ID NO: 2025839 - DNA, 15 bp, Homo sapiens
actatttagtttaaa

SEQ ID NO: 2025840 - DNA, 15 bp, Homo sapiens
ctatttagtttaaaa

SEQ ID NO: 2025841 - DNA, 15 bp, Homo sapiens
tatttagtttaaaag

SEQ ID NO: 2025842 - DNA, 15 bp, Homo sapiens
atttagtttaaaagt

SEQ ID NO: 2025843 - DNA, 15 bp, Homo sapiens
tttagtttaaaagtc

SEQ ID NO: 2025844 - DNA, 15 bp, Homo sapiens
ttagtttaaaagtca

SEQ ID NO: 2025845 - DNA, 15 bp, Homo sapiens
tagtttaaaagtcaa

SEQ ID NO: 2025846 - DNA, 15 bp, Homo sapiens
agtttaaaagtcaag

SEQ ID NO: 2025847 - DNA, 15 bp, Homo sapiens
gtttaaaagtcaagt

SEQ ID NO: 2025848 - DNA, 15 bp, Homo sapiens
tttaaaagtcaagtc

SEQ ID NO: 2025849 - DNA, 15 bp, Homo sapiens
ttaaaagtcaagtca

SEQ ID NO: 2025850 - DNA, 15 bp, Homo sapiens
taaaagtcaagtcag

SEQ ID NO: 2025851 - DNA, 15 bp, Homo sapiens
aaaagtcaagtcaga

SEQ ID NO: 2025852 - DNA, 15 bp, Homo sapiens
aaagtcaagtcagat

SEQ ID NO: 2025853 - DNA, 15 bp, Homo sapiens
aagtcaagtcagatt

SEQ ID NO: 2025854 - DNA, 15 bp, Homo sapiens
agtcaagtcagatta

SEQ ID NO: 2025855 - DNA, 15 bp, Homo sapiens
gtcaagtcagattat

SEQ ID NO: 2025856 - DNA, 15 bp, Homo sapiens
tcaagtcagattatt

SEQ ID NO: 2025857 - DNA, 15 bp, Homo sapiens
caagtcagattattg

SEQ ID NO: 2025858 - DNA, 15 bp, Homo sapiens
aagtcagattattgc

SEQ ID NO: 2025859 - DNA, 15 bp, Homo sapiens
agtcagattattgct

SEQ ID NO: 2025860 - DNA, 15 bp, Homo sapiens
gtcagattattgctt

SEQ ID NO: 2025861 - DNA, 15 bp, Homo sapiens
tcagattattgcttt

SEQ ID NO: 2025862 - DNA, 15 bp, Homo sapiens
cagattattgcttta

SEQ ID NO: 2025863 - DNA, 15 bp, Homo sapiens
agattattgctttac

SEQ ID NO: 2025864 - DNA, 15 bp, Homo sapiens
gattattgctttaca

SEQ ID NO: 2025865 - DNA, 15 bp, Homo sapiens
attattgctttacaa

SEQ ID NO: 2025866 - DNA, 15 bp, Homo sapiens
ttattgctttacaaa

SEQ ID NO: 2025867 - DNA, 15 bp, Homo sapiens
tattgctttacaaaa

SEQ ID NO: 2025868 - DNA, 15 bp, Homo sapiens
attgctttacaaaag

SEQ ID NO: 2025869 - DNA, 15 bp, Homo sapiens
ttgctttacaaaaga

SEQ ID NO: 2025870 - DNA, 15 bp, Homo sapiens
tgctttacaaaagaa

SEQ ID NO: 2025871 - DNA, 15 bp, Homo sapiens
gctttacaaaagaag

SEQ ID NO: 2025872 - DNA, 15 bp, Homo sapiens
ctttacaaaagaagg

SEQ ID NO: 2025873 - DNA, 15 bp, Homo sapiens
tttacaaaagaaggc

SEQ ID NO: 2025874 - DNA, 15 bp, Homo sapiens
ttacaaaagaaggcc

SEQ ID NO: 2025875 - DNA, 15 bp, Homo sapiens
tacaaaagaaggcct

SEQ ID NO: 2025876 - DNA, 15 bp, Homo sapiens
acaaaagaaggccta

SEQ ID NO: 2025877 - DNA, 15 bp, Homo sapiens
caaaagaaggcctaa

SEQ ID NO: 2025878 - DNA, 15 bp, Homo sapiens
aaaagaaggcctaat

SEQ ID NO: 2025879 - DNA, 15 bp, Homo sapiens
aaagaaggcctaatg

SEQ ID NO: 2025880 - DNA, 15 bp, Homo sapiens
aagaaggcctaatgt

SEQ ID NO: 2025881 - DNA, 15 bp, Homo sapiens
agaaggcctaatgtt

SEQ ID NO: 2025882 - DNA, 15 bp, Homo sapiens
gaaggcctaatgttc

SEQ ID NO: 2025883 - DNA, 15 bp, Homo sapiens
aaggcctaatgttca

SEQ ID NO: 2025884 - DNA, 15 bp, Homo sapiens
aggcctaatgttcaa

SEQ ID NO: 2025885 - DNA, 15 bp, Homo sapiens
ggcctaatgttcaat

SEQ ID NO: 2025886 - DNA, 15 bp, Homo sapiens
gcctaatgttcaata

SEQ ID NO: 2025887 - DNA, 15 bp, Homo sapiens
cctaatgttcaataa

SEQ ID NO: 2025888 - DNA, 15 bp, Homo sapiens
ctaatgttcaataac

SEQ ID NO: 2025889 - DNA, 15 bp, Homo sapiens
taatgttcaataact

SEQ ID NO: 2025890 - DNA, 15 bp, Homo sapiens
aatgttcaataactt

SEQ ID NO: 2025891 - DNA, 15 bp, Homo sapiens
atgttcaataacttg

SEQ ID NO: 2025892 - DNA, 15 bp, Homo sapiens
tgttcaataacttgg

SEQ ID NO: 2025893 - DNA, 15 bp, Homo sapiens
gttcaataacttggt

SEQ ID NO: 2025894 - DNA, 15 bp, Homo sapiens
ttcaataacttggta

SEQ ID NO: 2025895 - DNA, 15 bp, Homo sapiens
tcaataacttggtaa

SEQ ID NO: 2025896 - DNA, 15 bp, Homo sapiens
caataacttggtaac

SEQ ID NO: 2025897 - DNA, 15 bp, Homo sapiens
aataacttggtaaca

SEQ ID NO: 2025898 - DNA, 15 bp, Homo sapiens
ataacttggtaacat

SEQ ID NO: 2025899 - DNA, 15 bp, Homo sapiens
taacttggtaacatt

SEQ ID NO: 2025900 - DNA, 15 bp, Homo sapiens
aacttggtaacatta

SEQ ID NO: 2025901 - DNA, 15 bp, Homo sapiens
acttggtaacattat

SEQ ID NO: 2025902 - DNA, 15 bp, Homo sapiens
cttggtaacattatt

SEQ ID NO: 2025903 - DNA, 15 bp, Homo sapiens
ttggtaacattattg

SEQ ID NO: 2025904 - DNA, 15 bp, Homo sapiens
tggtaacattattgc

SEQ ID NO: 2025905 - DNA, 15 bp, Homo sapiens
ggtaacattattgca

SEQ ID NO: 2025906 - DNA, 15 bp, Homo sapiens
gtaacattattgcat

SEQ ID NO: 2025907 - DNA, 15 bp, Homo sapiens
taacattattgcata

SEQ ID NO: 2025908 - DNA, 15 bp, Homo sapiens
aacattattgcatac

SEQ ID NO: 2025909 - DNA, 15 bp, Homo sapiens
acattattgcatact

SEQ ID NO: 2025910 - DNA, 15 bp, Homo sapiens
cattattgcatactt

SEQ ID NO: 2025911 - DNA, 15 bp, Homo sapiens
attattgcatacttt

SEQ ID NO: 2025912 - DNA, 15 bp, Homo sapiens
ttattgcatactttc

SEQ ID NO: 2025913 - DNA, 15 bp, Homo sapiens
tattgcatactttcc

SEQ ID NO: 2025914 - DNA, 15 bp, Homo sapiens
attgcatactttcca

SEQ ID NO: 2025915 - DNA, 15 bp, Homo sapiens
ttgcatactttccac

SEQ ID NO: 2025916 - DNA, 15 bp, Homo sapiens
tgcatactttccacc

SEQ ID NO: 2025917 - DNA, 15 bp, Homo sapiens
gcatactttccacct

SEQ ID NO: 2025918 - DNA, 15 bp, Homo sapiens
catactttccaccta

SEQ ID NO: 2025919 - DNA, 15 bp, Homo sapiens
atactttccacctac

SEQ ID NO: 2025920 - DNA, 15 bp, Homo sapiens
tactttccacctaca

SEQ ID NO: 2025921 - DNA, 15 bp, Homo sapiens
actttccacctacat

SEQ ID NO: 2025922 - DNA, 15 bp, Homo sapiens
ctttccacctacatc

SEQ ID NO: 2025923 - DNA, 15 bp, Homo sapiens
tttccacctacatca

SEQ ID NO: 2025924 - DNA, 15 bp, Homo sapiens
ttccacctacatcac

SEQ ID NO: 2025925 - DNA, 15 bp, Homo sapiens
tccacctacatcact

SEQ ID NO: 2025926 - DNA, 15 bp, Homo sapiens
ccacctacatcactc

SEQ ID NO: 2025927 - DNA, 15 bp, Homo sapiens
cacctacatcactct

SEQ ID NO: 2025928 - DNA, 15 bp, Homo sapiens
acctacatcactctt

SEQ ID NO: 2025929 - DNA, 15 bp, Homo sapiens
cctacatcactctta

SEQ ID NO: 2025930 - DNA, 15 bp, Homo sapiens
ctacatcactcttaa

SEQ ID NO: 2025931 - DNA, 15 bp, Homo sapiens
tacatcactcttaac

SEQ ID NO: 2025932 - DNA, 15 bp, Homo sapiens
acatcactcttaaca

SEQ ID NO: 2025933 - DNA, 15 bp, Homo sapiens
catcactcttaacaa

SEQ ID NO: 2025934 - DNA, 15 bp, Homo sapiens
atcactcttaacaaa

SEQ ID NO: 2025935 - DNA, 15 bp, Homo sapiens
tcactcttaacaaaa

SEQ ID NO: 2025936 - DNA, 15 bp, Homo sapiens
cactcttaacaaaat

SEQ ID NO: 2025937 - DNA, 15 bp, Homo sapiens
actcttaacaaaatt

SEQ ID NO: 2025938 - DNA, 15 bp, Homo sapiens
ctcttaacaaaattc

SEQ ID NO: 2025939 - DNA, 15 bp, Homo sapiens
tcttaacaaaattct

SEQ ID NO: 2025940 - DNA, 15 bp, Homo sapiens
cttaacaaaattctc

SEQ ID NO: 2025941 - DNA, 15 bp, Homo sapiens
ttaacaaaattctca

SEQ ID NO: 2025942 - DNA, 15 bp, Homo sapiens
taacaaaattctcaa

SEQ ID NO: 2025943 - DNA, 15 bp, Homo sapiens
aacaaaattctcaaa

SEQ ID NO: 2025944 - DNA, 15 bp, Homo sapiens
acaaaattctcaaaa

SEQ ID NO: 2025945 - DNA, 15 bp, Homo sapiens
caaaattctcaaaat

SEQ ID NO: 2025946 - DNA, 15 bp, Homo sapiens
aaaattctcaaaata

SEQ ID NO: 2025947 - DNA, 15 bp, Homo sapiens
aaattctcaaaataa

SEQ ID NO: 2025948 - DNA, 15 bp, Homo sapiens
aattctcaaaataaa

SEQ ID NO: 2025949 - DNA, 15 bp, Homo sapiens
attctcaaaataaat

SEQ ID NO: 2025950 - DNA, 15 bp, Homo sapiens
ttctcaaaataaatc

SEQ ID NO: 2025951 - DNA, 15 bp, Homo sapiens
tctcaaaataaatct

SEQ ID NO: 2025952 - DNA, 15 bp, Homo sapiens
ctcaaaataaatctt

SEQ ID NO: 2025953 - DNA, 15 bp, Homo sapiens
tcaaaataaatctta

SEQ ID NO: 2025954 - DNA, 15 bp, Homo sapiens
caaaataaatcttaa

SEQ ID NO: 2025955 - DNA, 15 bp, Homo sapiens
aaaataaatcttaag

SEQ ID NO: 2025956 - DNA, 15 bp, Homo sapiens
aaataaatcttaaga

SEQ ID NO: 2025957 - DNA, 15 bp, Homo sapiens
aataaatcttaagac

SEQ ID NO: 2025958 - DNA, 15 bp, Homo sapiens
ataaatcttaagaca

SEQ ID NO: 2025959 - DNA, 15 bp, Homo sapiens
taaatcttaagacaa

SEQ ID NO: 2025960 - DNA, 15 bp, Homo sapiens
aaatcttaagacaaa

SEQ ID NO: 2025961 - DNA, 15 bp, Homo sapiens
aatcttaagacaaat

SEQ ID NO: 2025962 - DNA, 15 bp, Homo sapiens
atcttaagacaaata

SEQ ID NO: 2025963 - DNA, 15 bp, Homo sapiens
tcttaagacaaataa

SEQ ID NO: 2025964 - DNA, 15 bp, Homo sapiens
cttaagacaaataag

SEQ ID NO: 2025965 - DNA, 15 bp, Homo sapiens
ttaagacaaataagt

SEQ ID NO: 2025966 - DNA, 15 bp, Homo sapiens
taagacaaataagtc

SEQ ID NO: 2025967 - DNA, 15 bp, Homo sapiens
aagacaaataagtca

SEQ ID NO: 2025968 - DNA, 15 bp, Homo sapiens
agacaaataagtcat

SEQ ID NO: 2025969 - DNA, 15 bp, Homo sapiens
gacaaataagtcatc

SEQ ID NO: 2025970 - DNA, 15 bp, Homo sapiens
acaaataagtcatct

SEQ ID NO: 2025971 - DNA, 15 bp, Homo sapiens
caaataagtcatctg

SEQ ID NO: 2025972 - DNA, 15 bp, Homo sapiens
aaataagtcatctga

SEQ ID NO: 2025973 - DNA, 15 bp, Homo sapiens
aataagtcatctgag

SEQ ID NO: 2025974 - DNA, 15 bp, Homo sapiens
ataagtcatctgagc

SEQ ID NO: 2025975 - DNA, 15 bp, Homo sapiens
taagtcatctgagca

SEQ ID NO: 2025976 - DNA, 15 bp, Homo sapiens
aagtcatctgagcag

SEQ ID NO: 2025977 - DNA, 15 bp, Homo sapiens
agtcatctgagcaga

SEQ ID NO: 2025978 - DNA, 15 bp, Homo sapiens
gtcatctgagcagag

SEQ ID NO: 2025979 - DNA, 15 bp, Homo sapiens
tcatctgagcagagt

SEQ ID NO: 2025980 - DNA, 15 bp, Homo sapiens
catctgagcagagtg

SEQ ID NO: 2025981 - DNA, 15 bp, Homo sapiens
atctgagcagagtgt

SEQ ID NO: 2025982 - DNA, 15 bp, Homo sapiens
tctgagcagagtgta

SEQ ID NO: 2025983 - DNA, 15 bp, Homo sapiens
ctgagcagagtgtaa

SEQ ID NO: 2025984 - DNA, 15 bp, Homo sapiens
tgagcagagtgtaat

SEQ ID NO: 2025985 - DNA, 15 bp, Homo sapiens
gagcagagtgtaatt

SEQ ID NO: 2025986 - DNA, 15 bp, Homo sapiens
agcagagtgtaattg

SEQ ID NO: 2025987 - DNA, 15 bp, Homo sapiens
gcagagtgtaattgg

SEQ ID NO: 2025988 - DNA, 15 bp, Homo sapiens
cagagtgtaattggt

SEQ ID NO: 2025989 - DNA, 15 bp, Homo sapiens
agagtgtaattggtt

SEQ ID NO: 2025990 - DNA, 15 bp, Homo sapiens
gagtgtaattggttc

SEQ ID NO: 2025991 - DNA, 15 bp, Homo sapiens
agtgtaattggttcc

SEQ ID NO: 2025992 - DNA, 15 bp, Homo sapiens
gtgtaattggttcca

SEQ ID NO: 2025993 - DNA, 15 bp, Homo sapiens
tgtaattggttccat

SEQ ID NO: 2025994 - DNA, 15 bp, Homo sapiens
gtaattggttccatt

SEQ ID NO: 2025995 - DNA, 15 bp, Homo sapiens
taattggttccattt

SEQ ID NO: 2025996 - DNA, 15 bp, Homo sapiens
aattggttccattta

SEQ ID NO: 2025997 - DNA, 15 bp, Homo sapiens
attggttccatttag

SEQ ID NO: 2025998 - DNA, 15 bp, Homo sapiens
ttggttccatttagg

SEQ ID NO: 2025999 - DNA, 15 bp, Homo sapiens
tggttccatttaggc

SEQ ID NO: 2026000 - DNA, 15 bp, Homo sapiens
ggttccatttaggct

SEQ ID NO: 2026001 - DNA, 15 bp, Homo sapiens
gttccatttaggctt

SEQ ID NO: 2026002 - DNA, 15 bp, Homo sapiens
ttccatttaggctta

SEQ ID NO: 2026003 - DNA, 15 bp, Homo sapiens
tccatttaggcttaa

SEQ ID NO: 2026004 - DNA, 15 bp, Homo sapiens
ccatttaggcttaat

SEQ ID NO: 2026005 - DNA, 15 bp, Homo sapiens
catttaggcttaata

SEQ ID NO: 2026006 - DNA, 15 bp, Homo sapiens
atttaggcttaataa

SEQ ID NO: 2026007 - DNA, 15 bp, Homo sapiens
tttaggcttaataac

SEQ ID NO: 2026008 - DNA, 15 bp, Homo sapiens
ttaggcttaataact

SEQ ID NO: 2026009 - DNA, 15 bp, Homo sapiens
taggcttaataactt

SEQ ID NO: 2026010 - DNA, 15 bp, Homo sapiens
aggcttaataacttg

SEQ ID NO: 2026011 - DNA, 15 bp, Homo sapiens
ggcttaataacttga

SEQ ID NO: 2026012 - DNA, 15 bp, Homo sapiens
gcttaataacttgaa

SEQ ID NO: 2026013 - DNA, 15 bp, Homo sapiens
cttaataacttgaat

SEQ ID NO: 2026014 - DNA, 15 bp, Homo sapiens
ttaataacttgaata

SEQ ID NO: 2026015 - DNA, 15 bp, Homo sapiens
taataacttgaatat

SEQ ID NO: 2026016 - DNA, 15 bp, Homo sapiens
aataacttgaatatg

SEQ ID NO: 2026017 - DNA, 15 bp, Homo sapiens
ataacttgaatatgc

SEQ ID NO: 2026018 - DNA, 15 bp, Homo sapiens
taacttgaatatgca

SEQ ID NO: 2026019 - DNA, 15 bp, Homo sapiens
aacttgaatatgcat

SEQ ID NO: 2026020 - DNA, 15 bp, Homo sapiens
acttgaatatgcatg

SEQ ID NO: 2026021 - DNA, 15 bp, Homo sapiens
cttgaatatgcatgt

SEQ ID NO: 2026022 - DNA, 15 bp, Homo sapiens
ttgaatatgcatgtg

SEQ ID NO: 2026023 - DNA, 15 bp, Homo sapiens
tgaatatgcatgtgg

SEQ ID NO: 2026024 - DNA, 15 bp, Homo sapiens
gaatatgcatgtgga

SEQ ID NO: 2026025 - DNA, 15 bp, Homo sapiens
aatatgcatgtggaa

SEQ ID NO: 2026026 - DNA, 15 bp, Homo sapiens
atatgcatgtggaaa

SEQ ID NO: 2026027 - DNA, 15 bp, Homo sapiens
tatgcatgtggaaag

SEQ ID NO: 2026028 - DNA, 15 bp, Homo sapiens
atgcatgtggaaaga

SEQ ID NO: 2026029 - DNA, 15 bp, Homo sapiens
tgcatgtggaaagag

SEQ ID NO: 2026030 - DNA, 15 bp, Homo sapiens
gcatgtggaaagagc

SEQ ID NO: 2026031 - DNA, 15 bp, Homo sapiens
catgtggaaagagca

SEQ ID NO: 2026032 - DNA, 15 bp, Homo sapiens
atgtggaaagagcat

SEQ ID NO: 2026033 - DNA, 15 bp, Homo sapiens
tgtggaaagagcatg

SEQ ID NO: 2026034 - DNA, 15 bp, Homo sapiens
gtggaaagagcatgg

SEQ ID NO: 2026035 - DNA, 15 bp, Homo sapiens
tggaaagagcatggc

SEQ ID NO: 2026036 - DNA, 15 bp, Homo sapiens
ggaaagagcatggct

SEQ ID NO: 2026037 - DNA, 15 bp, Homo sapiens
gaaagagcatggctg

SEQ ID NO: 2026038 - DNA, 15 bp, Homo sapiens
aaagagcatggctgt

SEQ ID NO: 2026039 - DNA, 15 bp, Homo sapiens
aagagcatggctgtg

SEQ ID NO: 2026040 - DNA, 15 bp, Homo sapiens
agagcatggctgtgg

SEQ ID NO: 2026041 - DNA, 15 bp, Homo sapiens
gagcatggctgtgga

SEQ ID NO: 2026042 - DNA, 15 bp, Homo sapiens
agcatggctgtggag

SEQ ID NO: 2026043 - DNA, 15 bp, Homo sapiens
gcatggctgtggagt

SEQ ID NO: 2026044 - DNA, 15 bp, Homo sapiens
catggctgtggagtg

SEQ ID NO: 2026045 - DNA, 15 bp, Homo sapiens
atggctgtggagtga

SEQ ID NO: 2026046 - DNA, 15 bp, Homo sapiens
tggctgtggagtgag

SEQ ID NO: 2026047 - DNA, 15 bp, Homo sapiens
ggctgtggagtgagt

SEQ ID NO: 2026048 - DNA, 15 bp, Homo sapiens
gctgtggagtgagta

SEQ ID NO: 2026049 - DNA, 15 bp, Homo sapiens
ctgtggagtgagtag

SEQ ID NO: 2026050 - DNA, 15 bp, Homo sapiens
tgtggagtgagtaga

SEQ ID NO: 2026051 - DNA, 15 bp, Homo sapiens
gtggagtgagtagat

SEQ ID NO: 2026052 - DNA, 15 bp, Homo sapiens
tggagtgagtagatg

SEQ ID NO: 2026053 - DNA, 15 bp, Homo sapiens
ggagtgagtagatgt

SEQ ID NO: 2026054 - DNA, 15 bp, Homo sapiens
gagtgagtagatgtg

SEQ ID NO: 2026055 - DNA, 15 bp, Homo sapiens
agtgagtagatgtgg

SEQ ID NO: 2026056 - DNA, 15 bp, Homo sapiens
gtgagtagatgtggt

SEQ ID NO: 2026057 - DNA, 15 bp, Homo sapiens
tgagtagatgtggtt

SEQ ID NO: 2026058 - DNA, 15 bp, Homo sapiens
gagtagatgtggttt

SEQ ID NO: 2026059 - DNA, 15 bp, Homo sapiens
agtagatgtggtttg

SEQ ID NO: 2026060 - DNA, 15 bp, Homo sapiens
gtagatgtggtttga

SEQ ID NO: 2026061 - DNA, 15 bp, Homo sapiens
tagatgtggtttgaa

SEQ ID NO: 2026062 - DNA, 15 bp, Homo sapiens
agatgtggtttgaac

SEQ ID NO: 2026063 - DNA, 15 bp, Homo sapiens
gatgtggtttgaaca

SEQ ID NO: 2026064 - DNA, 15 bp, Homo sapiens
atgtggtttgaacag

SEQ ID NO: 2026065 - DNA, 15 bp, Homo sapiens
tgtggtttgaacaga

SEQ ID NO: 2026066 - DNA, 15 bp, Homo sapiens
gtggtttgaacagat

SEQ ID NO: 2026067 - DNA, 15 bp, Homo sapiens
tggtttgaacagata

SEQ ID NO: 2026068 - DNA, 15 bp, Homo sapiens
ggtttgaacagatat

SEQ ID NO: 2026069 - DNA, 15 bp, Homo sapiens
gtttgaacagatatg

SEQ ID NO: 2026070 - DNA, 15 bp, Homo sapiens
tttgaacagatatgc

SEQ ID NO: 2026071 - DNA, 15 bp, Homo sapiens
ttgaacagatatgcc

SEQ ID NO: 2026072 - DNA, 15 bp, Homo sapiens
tgaacagatatgcca

SEQ ID NO: 2026073 - DNA, 15 bp, Homo sapiens
gaacagatatgccac

SEQ ID NO: 2026074 - DNA, 15 bp, Homo sapiens
aacagatatgccact

SEQ ID NO: 2026075 - DNA, 15 bp, Homo sapiens
acagatatgccactt

SEQ ID NO: 2026076 - DNA, 15 bp, Homo sapiens
cagatatgccacttt

SEQ ID NO: 2026077 - DNA, 15 bp, Homo sapiens
agatatgccactttc

SEQ ID NO: 2026078 - DNA, 15 bp, Homo sapiens
gatatgccactttct

SEQ ID NO: 2026079 - DNA, 15 bp, Homo sapiens
atatgccactttcta

SEQ ID NO: 2026080 - DNA, 15 bp, Homo sapiens
tatgccactttctag

SEQ ID NO: 2026081 - DNA, 15 bp, Homo sapiens
atgccactttctagc

SEQ ID NO: 2026082 - DNA, 15 bp, Homo sapiens
tgccactttctagct

SEQ ID NO: 2026083 - DNA, 15 bp, Homo sapiens
gccactttctagcta

SEQ ID NO: 2026084 - DNA, 15 bp, Homo sapiens
ccactttctagctat

SEQ ID NO: 2026085 - DNA, 15 bp, Homo sapiens
cactttctagctatg

SEQ ID NO: 2026086 - DNA, 15 bp, Homo sapiens
actttctagctatgt

SEQ ID NO: 2026087 - DNA, 15 bp, Homo sapiens
ctttctagctatgta

SEQ ID NO: 2026088 - DNA, 15 bp, Homo sapiens
tttctagctatgtac

SEQ ID NO: 2026089 - DNA, 15 bp, Homo sapiens
ttctagctatgtact

SEQ ID NO: 2026090 - DNA, 15 bp, Homo sapiens
tctagctatgtactt

SEQ ID NO: 2026091 - DNA, 15 bp, Homo sapiens
ctagctatgtacttt

SEQ ID NO: 2026092 - DNA, 15 bp, Homo sapiens
tagctatgtactttg

SEQ ID NO: 2026093 - DNA, 15 bp, Homo sapiens
agctatgtactttga

SEQ ID NO: 2026094 - DNA, 15 bp, Homo sapiens
gctatgtactttgag

SEQ ID NO: 2026095 - DNA, 15 bp, Homo sapiens
ctatgtactttgagc

SEQ ID NO: 2026096 - DNA, 15 bp, Homo sapiens
tatgtactttgagca

SEQ ID NO: 2026097 - DNA, 15 bp, Homo sapiens
atgtactttgagcaa

SEQ ID NO: 2026098 - DNA, 15 bp, Homo sapiens
tgtactttgagcaag

SEQ ID NO: 2026099 - DNA, 15 bp, Homo sapiens
gtactttgagcaaga

SEQ ID NO: 2026100 - DNA, 15 bp, Homo sapiens
tactttgagcaagat

SEQ ID NO: 2026101 - DNA, 15 bp, Homo sapiens
actttgagcaagata

SEQ ID NO: 2026102 - DNA, 15 bp, Homo sapiens
ctttgagcaagatac

SEQ ID NO: 2026103 - DNA, 15 bp, Homo sapiens
tttgagcaagatact

SEQ ID NO: 2026104 - DNA, 15 bp, Homo sapiens
ttgagcaagatactg

SEQ ID NO: 2026105 - DNA, 15 bp, Homo sapiens
tgagcaagatactga

SEQ ID NO: 2026106 - DNA, 15 bp, Homo sapiens
gagcaagatactgaa

SEQ ID NO: 2026107 - DNA, 15 bp, Homo sapiens
agcaagatactgaag

SEQ ID NO: 2026108 - DNA, 15 bp, Homo sapiens
gcaagatactgaagt

SEQ ID NO: 2026109 - DNA, 15 bp, Homo sapiens
caagatactgaagtt

SEQ ID NO: 2026110 - DNA, 15 bp, Homo sapiens
aagatactgaagttt

SEQ ID NO: 2026111 - DNA, 15 bp, Homo sapiens
agatactgaagtttt

SEQ ID NO: 2026112 - DNA, 15 bp, Homo sapiens
gatactgaagttttc

SEQ ID NO: 2026113 - DNA, 15 bp, Homo sapiens
atactgaagttttca

SEQ ID NO: 2026114 - DNA, 15 bp, Homo sapiens
tactgaagttttcag

SEQ ID NO: 2026115 - DNA, 15 bp, Homo sapiens
actgaagttttcaga

SEQ ID NO: 2026116 - DNA, 15 bp, Homo sapiens
ctgaagttttcagat

SEQ ID NO: 2026117 - DNA, 15 bp, Homo sapiens
tgaagttttcagata

SEQ ID NO: 2026118 - DNA, 15 bp, Homo sapiens
gaagttttcagatat

SEQ ID NO: 2026119 - DNA, 15 bp, Homo sapiens
aagttttcagatatc

SEQ ID NO: 2026120 - DNA, 15 bp, Homo sapiens
agttttcagatatct

SEQ ID NO: 2026121 - DNA, 15 bp, Homo sapiens
gttttcagatatcta

SEQ ID NO: 2026122 - DNA, 15 bp, Homo sapiens
ttttcagatatctag

SEQ ID NO: 2026123 - DNA, 15 bp, Homo sapiens
tttcagatatctagt

SEQ ID NO: 2026124 - DNA, 15 bp, Homo sapiens
ttcagatatctagtt

SEQ ID NO: 2026125 - DNA, 15 bp, Homo sapiens
tcagatatctagttt

SEQ ID NO: 2026126 - DNA, 15 bp, Homo sapiens
cagatatctagtttc

SEQ ID NO: 2026127 - DNA, 15 bp, Homo sapiens
agatatctagtttcc

SEQ ID NO: 2026128 - DNA, 15 bp, Homo sapiens
gatatctagtttcct

SEQ ID NO: 2026129 - DNA, 15 bp, Homo sapiens
atatctagtttcctt

SEQ ID NO: 2026130 - DNA, 15 bp, Homo sapiens
tatctagtttcctta

SEQ ID NO: 2026131 - DNA, 15 bp, Homo sapiens
atctagtttccttat

SEQ ID NO: 2026132 - DNA, 15 bp, Homo sapiens
tctagtttccttatt

SEQ ID NO: 2026133 - DNA, 15 bp, Homo sapiens
ctagtttccttattt

SEQ ID NO: 2026134 - DNA, 15 bp, Homo sapiens
tagtttccttatttg

SEQ ID NO: 2026135 - DNA, 15 bp, Homo sapiens
agtttccttatttgt

SEQ ID NO: 2026136 - DNA, 15 bp, Homo sapiens
gtttccttatttgtg

SEQ ID NO: 2026137 - DNA, 15 bp, Homo sapiens
tttccttatttgtga

SEQ ID NO: 2026138 - DNA, 15 bp, Homo sapiens
ttccttatttgtgaa

SEQ ID NO: 2026139 - DNA, 15 bp, Homo sapiens
tccttatttgtgaaa

SEQ ID NO: 2026140 - DNA, 15 bp, Homo sapiens
ccttatttgtgaaat

SEQ ID NO: 2026141 - DNA, 15 bp, Homo sapiens
cttatttgtgaaata

SEQ ID NO: 2026142 - DNA, 15 bp, Homo sapiens
ttatttgtgaaataa

SEQ ID NO: 2026143 - DNA, 15 bp, Homo sapiens
tatttgtgaaataaa

SEQ ID NO: 2026144 - DNA, 15 bp, Homo sapiens
atttgtgaaataaag

SEQ ID NO: 2026145 - DNA, 15 bp, Homo sapiens
tttgtgaaataaagg

SEQ ID NO: 2026146 - DNA, 15 bp, Homo sapiens
ttgtgaaataaaggt

SEQ ID NO: 2026147 - DNA, 15 bp, Homo sapiens
tgtgaaataaaggta

SEQ ID NO: 2026148 - DNA, 15 bp, Homo sapiens
gtgaaataaaggtaa

SEQ ID NO: 2026149 - DNA, 15 bp, Homo sapiens
tgaaataaaggtaat

SEQ ID NO: 2026150 - DNA, 15 bp, Homo sapiens
gaaataaaggtaatt

SEQ ID NO: 2026151 - DNA, 15 bp, Homo sapiens
aaataaaggtaattg

SEQ ID NO: 2026152 - DNA, 15 bp, Homo sapiens
aataaaggtaattgc

SEQ ID NO: 2026153 - DNA, 15 bp, Homo sapiens
ataaaggtaattgcc

SEQ ID NO: 2026154 - DNA, 15 bp, Homo sapiens
taaaggtaattgcct

SEQ ID NO: 2026155 - DNA, 15 bp, Homo sapiens
aaaggtaattgcctt

SEQ ID NO: 2026156 - DNA, 15 bp, Homo sapiens
aaggtaattgccttt

SEQ ID NO: 2026157 - DNA, 15 bp, Homo sapiens
aggtaattgcctttc

SEQ ID NO: 2026158 - DNA, 15 bp, Homo sapiens
ggtaattgcctttct

SEQ ID NO: 2026159 - DNA, 15 bp, Homo sapiens
gtaattgcctttctt

SEQ ID NO: 2026160 - DNA, 15 bp, Homo sapiens
taattgcctttctta

SEQ ID NO: 2026161 - DNA, 15 bp, Homo sapiens
aattgcctttcttat

SEQ ID NO: 2026162 - DNA, 15 bp, Homo sapiens
attgcctttcttata

SEQ ID NO: 2026163 - DNA, 15 bp, Homo sapiens
ttgcctttcttatat

SEQ ID NO: 2026164 - DNA, 15 bp, Homo sapiens
tgcctttcttatata

SEQ ID NO: 2026165 - DNA, 15 bp, Homo sapiens
gcctttcttatatac

SEQ ID NO: 2026166 - DNA, 15 bp, Homo sapiens
cctttcttatatacc

SEQ ID NO: 2026167 - DNA, 15 bp, Homo sapiens
ctttcttatataccc

SEQ ID NO: 2026168 - DNA, 15 bp, Homo sapiens
tttcttatataccca

SEQ ID NO: 2026169 - DNA, 15 bp, Homo sapiens
ttcttatatacccac

SEQ ID NO: 2026170 - DNA, 15 bp, Homo sapiens
tcttatatacccaca

SEQ ID NO: 2026171 - DNA, 15 bp, Homo sapiens
cttatatacccacaa

SEQ ID NO: 2026172 - DNA, 15 bp, Homo sapiens
ttatatacccacaaa

SEQ ID NO: 2026173 - DNA, 15 bp, Homo sapiens
tatatacccacaaaa

SEQ ID NO: 2026174 - DNA, 15 bp, Homo sapiens
atatacccacaaaag

SEQ ID NO: 2026175 - DNA, 15 bp, Homo sapiens
tatacccacaaaagc

SEQ ID NO: 2026176 - DNA, 15 bp, Homo sapiens
atacccacaaaagct

SEQ ID NO: 2026177 - DNA, 15 bp, Homo sapiens
tacccacaaaagctt

SEQ ID NO: 2026178 - DNA, 15 bp, Homo sapiens
acccacaaaagctta

SEQ ID NO: 2026179 - DNA, 15 bp, Homo sapiens
cccacaaaagcttaa

SEQ ID NO: 2026180 - DNA, 15 bp, Homo sapiens
ccacaaaagcttaaa

SEQ ID NO: 2026181 - DNA, 15 bp, Homo sapiens
cacaaaagcttaaaa

SEQ ID NO: 2026182 - DNA, 15 bp, Homo sapiens
acaaaagcttaaaaa

SEQ ID NO: 2026183 - DNA, 15 bp, Homo sapiens
caaaagcttaaaaaa

SEQ ID NO: 2026184 - DNA, 15 bp, Homo sapiens
aaaagcttaaaaaat

SEQ ID NO: 2026185 - DNA, 15 bp, Homo sapiens
aaagcttaaaaaata

SEQ ID NO: 2026186 - DNA, 15 bp, Homo sapiens
aagcttaaaaaatag

SEQ ID NO: 2026187 - DNA, 15 bp, Homo sapiens
agcttaaaaaatagt

SEQ ID NO: 2026188 - DNA, 15 bp, Homo sapiens
gcttaaaaaatagta

SEQ ID NO: 2026189 - DNA, 15 bp, Homo sapiens
cttaaaaaatagtat

SEQ ID NO: 2026190 - DNA, 15 bp, Homo sapiens
ttaaaaaatagtatg

SEQ ID NO: 2026191 - DNA, 15 bp, Homo sapiens
taaaaaatagtatgt

SEQ ID NO: 2026192 - DNA, 15 bp, Homo sapiens
aaaaaatagtatgtg

SEQ ID NO: 2026193 - DNA, 15 bp, Homo sapiens
aaaaatagtatgtgt

SEQ ID NO: 2026194 - DNA, 15 bp, Homo sapiens
aaaatagtatgtgta

SEQ ID NO: 2026195 - DNA, 15 bp, Homo sapiens
aaatagtatgtgtag

SEQ ID NO: 2026196 - DNA, 15 bp, Homo sapiens
aatagtatgtgtagt

SEQ ID NO: 2026197 - DNA, 15 bp, Homo sapiens
atagtatgtgtagta

SEQ ID NO: 2026198 - DNA, 15 bp, Homo sapiens
tagtatgtgtagtag

SEQ ID NO: 2026199 - DNA, 15 bp, Homo sapiens
agtatgtgtagtagt

SEQ ID NO: 2026200 - DNA, 15 bp, Homo sapiens
gtatgtgtagtagta

SEQ ID NO: 2026201 - DNA, 15 bp, Homo sapiens
tatgtgtagtagtat

SEQ ID NO: 2026202 - DNA, 15 bp, Homo sapiens
atgtgtagtagtata

SEQ ID NO: 2026203 - DNA, 15 bp, Homo sapiens
tgtgtagtagtatag

SEQ ID NO: 2026204 - DNA, 15 bp, Homo sapiens
gtgtagtagtatagt

SEQ ID NO: 2026205 - DNA, 15 bp, Homo sapiens
tgtagtagtatagta

SEQ ID NO: 2026206 - DNA, 15 bp, Homo sapiens
gtagtagtatagtat

SEQ ID NO: 2026207 - DNA, 15 bp, Homo sapiens
tagtagtatagtata

SEQ ID NO: 2026208 - DNA, 15 bp, Homo sapiens
agtagtatagtatag

SEQ ID NO: 2026209 - DNA, 15 bp, Homo sapiens
gtagtatagtatagc

SEQ ID NO: 2026210 - DNA, 15 bp, Homo sapiens
tagtatagtatagca

SEQ ID NO: 2026211 - DNA, 15 bp, Homo sapiens
agtatagtatagcaa

SEQ ID NO: 2026212 - DNA, 15 bp, Homo sapiens
gtatagtatagcaaa

SEQ ID NO: 2026213 - DNA, 15 bp, Homo sapiens
tatagtatagcaaac

SEQ ID NO: 2026214 - DNA, 15 bp, Homo sapiens
atagtatagcaaact

SEQ ID NO: 2026215 - DNA, 15 bp, Homo sapiens
tagtatagcaaacta

SEQ ID NO: 2026216 - DNA, 15 bp, Homo sapiens
agtatagcaaactag

SEQ ID NO: 2026217 - DNA, 15 bp, Homo sapiens
gtatagcaaactagc

SEQ ID NO: 2026218 - DNA, 15 bp, Homo sapiens
tatagcaaactagca

SEQ ID NO: 2026219 - DNA, 15 bp, Homo sapiens
atagcaaactagcaa

SEQ ID NO: 2026220 - DNA, 15 bp, Homo sapiens
tagcaaactagcaaa

SEQ ID NO: 2026221 - DNA, 15 bp, Homo sapiens
agcaaactagcaaat

SEQ ID NO: 2026222 - DNA, 15 bp, Homo sapiens
gcaaactagcaaata

SEQ ID NO: 2026223 - DNA, 15 bp, Homo sapiens
caaactagcaaatag

SEQ ID NO: 2026224 - DNA, 15 bp, Homo sapiens
aaactagcaaatagt

SEQ ID NO: 2026225 - DNA, 15 bp, Homo sapiens
aactagcaaatagtt

SEQ ID NO: 2026226 - DNA, 15 bp, Homo sapiens
actagcaaatagttt

SEQ ID NO: 2026227 - DNA, 15 bp, Homo sapiens
ctagcaaatagttta

SEQ ID NO: 2026228 - DNA, 15 bp, Homo sapiens
tagcaaatagtttat

SEQ ID NO: 2026229 - DNA, 15 bp, Homo sapiens
agcaaatagtttata

SEQ ID NO: 2026230 - DNA, 15 bp, Homo sapiens
gcaaatagtttatac

SEQ ID NO: 2026231 - DNA, 15 bp, Homo sapiens
caaatagtttatact

SEQ ID NO: 2026232 - DNA, 15 bp, Homo sapiens
aaatagtttatactt

SEQ ID NO: 2026233 - DNA, 15 bp, Homo sapiens
aatagtttatactta

SEQ ID NO: 2026234 - DNA, 15 bp, Homo sapiens
atagtttatacttag

SEQ ID NO: 2026235 - DNA, 15 bp, Homo sapiens
tagtttatacttagt

SEQ ID NO: 2026236 - DNA, 15 bp, Homo sapiens
agtttatacttagta

SEQ ID NO: 2026237 - DNA, 15 bp, Homo sapiens
gtttatacttagtaa

SEQ ID NO: 2026238 - DNA, 15 bp, Homo sapiens
tttatacttagtaag

SEQ ID NO: 2026239 - DNA, 15 bp, Homo sapiens
ttatacttagtaagt

SEQ ID NO: 2026240 - DNA, 15 bp, Homo sapiens
tatacttagtaagta

SEQ ID NO: 2026241 - DNA, 15 bp, Homo sapiens
atacttagtaagtag

SEQ ID NO: 2026242 - DNA, 15 bp, Homo sapiens
tacttagtaagtagt

SEQ ID NO: 2026243 - DNA, 15 bp, Homo sapiens
acttagtaagtagta

SEQ ID NO: 2026244 - DNA, 15 bp, Homo sapiens
cttagtaagtagtat

SEQ ID NO: 2026245 - DNA, 15 bp, Homo sapiens
ttagtaagtagtatt

SEQ ID NO: 2026246 - DNA, 15 bp, Homo sapiens
tagtaagtagtattt

SEQ ID NO: 2026247 - DNA, 15 bp, Homo sapiens
agtaagtagtatttt

SEQ ID NO: 2026248 - DNA, 15 bp, Homo sapiens
gtaagtagtattttc

SEQ ID NO: 2026249 - DNA, 15 bp, Homo sapiens
taagtagtattttct

SEQ ID NO: 2026250 - DNA, 15 bp, Homo sapiens
aagtagtattttctt

SEQ ID NO: 2026251 - DNA, 15 bp, Homo sapiens
agtagtattttctta

SEQ ID NO: 2026252 - DNA, 15 bp, Homo sapiens
gtagtattttcttat

SEQ ID NO: 2026253 - DNA, 15 bp, Homo sapiens
tagtattttcttatc

SEQ ID NO: 2026254 - DNA, 15 bp, Homo sapiens
agtattttcttatct

SEQ ID NO: 2026255 - DNA, 15 bp, Homo sapiens
gtattttcttatctt

SEQ ID NO: 2026256 - DNA, 15 bp, Homo sapiens
tattttcttatcttt

SEQ ID NO: 2026257 - DNA, 15 bp, Homo sapiens
attttcttatctttt

SEQ ID NO: 2026258 - DNA, 15 bp, Homo sapiens
ttttcttatcttttc

SEQ ID NO: 2026259 - DNA, 15 bp, Homo sapiens
tttcttatcttttcc

SEQ ID NO: 2026260 - DNA, 15 bp, Homo sapiens
ttcttatcttttccc

SEQ ID NO: 2026261 - DNA, 15 bp, Homo sapiens
tcttatcttttccct

SEQ ID NO: 2026262 - DNA, 15 bp, Homo sapiens
cttatcttttccctc

SEQ ID NO: 2026263 - DNA, 15 bp, Homo sapiens
ttatcttttccctcc

SEQ ID NO: 2026264 - DNA, 15 bp, Homo sapiens
tatcttttccctccc

SEQ ID NO: 2026265 - DNA, 15 bp, Homo sapiens
atcttttccctccct

SEQ ID NO: 2026266 - DNA, 15 bp, Homo sapiens
tcttttccctccctg

SEQ ID NO: 2026267 - DNA, 15 bp, Homo sapiens
cttttccctccctgc

SEQ ID NO: 2026268 - DNA, 15 bp, Homo sapiens
ttttccctccctgcc

SEQ ID NO: 2026269 - DNA, 15 bp, Homo sapiens
tttccctccctgcca

SEQ ID NO: 2026270 - DNA, 15 bp, Homo sapiens
ttccctccctgccag

SEQ ID NO: 2026271 - DNA, 15 bp, Homo sapiens
tccctccctgccagc

SEQ ID NO: 2026272 - DNA, 15 bp, Homo sapiens
ccctccctgccagca

SEQ ID NO: 2026273 - DNA, 15 bp, Homo sapiens
cctccctgccagcat

SEQ ID NO: 2026274 - DNA, 15 bp, Homo sapiens
ctccctgccagcatc

SEQ ID NO: 2026275 - DNA, 15 bp, Homo sapiens
tccctgccagcatct

SEQ ID NO: 2026276 - DNA, 15 bp, Homo sapiens
ccctgccagcatctc

SEQ ID NO: 2026277 - DNA, 15 bp, Homo sapiens
cctgccagcatctcc

SEQ ID NO: 2026278 - DNA, 15 bp, Homo sapiens
ctgccagcatctcct

SEQ ID NO: 2026279 - DNA, 15 bp, Homo sapiens
tgccagcatctcctt

SEQ ID NO: 2026280 - DNA, 15 bp, Homo sapiens
gccagcatctccttg

SEQ ID NO: 2026281 - DNA, 15 bp, Homo sapiens
ccagcatctccttgc

SEQ ID NO: 2026282 - DNA, 15 bp, Homo sapiens
cagcatctccttgca

SEQ ID NO: 2026283 - DNA, 15 bp, Homo sapiens
agcatctccttgcac

SEQ ID NO: 2026284 - DNA, 15 bp, Homo sapiens
gcatctccttgcacc

SEQ ID NO: 2026285 - DNA, 15 bp, Homo sapiens
catctccttgcaccc

SEQ ID NO: 2026286 - DNA, 15 bp, Homo sapiens
atctccttgcaccct

SEQ ID NO: 2026287 - DNA, 15 bp, Homo sapiens
tctccttgcaccctt

SEQ ID NO: 2026288 - DNA, 15 bp, Homo sapiens
ctccttgcacccttt

SEQ ID NO: 2026289 - DNA, 15 bp, Homo sapiens
tccttgcaccctttc

SEQ ID NO: 2026290 - DNA, 15 bp, Homo sapiens
ccttgcaccctttct

SEQ ID NO: 2026291 - DNA, 15 bp, Homo sapiens
cttgcaccctttctc

SEQ ID NO: 2026292 - DNA, 15 bp, Homo sapiens
ttgcaccctttctcc

SEQ ID NO: 2026293 - DNA, 15 bp, Homo sapiens
tgcaccctttctccc

SEQ ID NO: 2026294 - DNA, 15 bp, Homo sapiens
gcaccctttctccct

SEQ ID NO: 2026295 - DNA, 15 bp, Homo sapiens
caccctttctccctt

SEQ ID NO: 2026296 - DNA, 15 bp, Homo sapiens
accctttctcccttt

SEQ ID NO: 2026297 - DNA, 15 bp, Homo sapiens
ccctttctccctttt

SEQ ID NO: 2026298 - DNA, 15 bp, Homo sapiens
cctttctcccttttc

SEQ ID NO: 2026299 - DNA, 15 bp, Homo sapiens
tctcccttttctccc

SEQ ID NO: 2026300 - DNA, 15 bp, Homo sapiens
cccttttctcccctc

SEQ ID NO: 2026301 - DNA, 15 bp, Homo sapiens
ccttttctcccctct

SEQ ID NO: 2026302 - DNA, 15 bp, Homo sapiens
cttttctcccctctc

SEQ ID NO: 2026303 - DNA, 15 bp, Homo sapiens
ttttctcccctctcc

SEQ ID NO: 2026304 - DNA, 15 bp, Homo sapiens
tttctcccctctcct

SEQ ID NO: 2026305 - DNA, 15 bp, Homo sapiens
ttctcccctctcctt

SEQ ID NO: 2026306 - DNA, 15 bp, Homo sapiens
tctcccctctcctta

SEQ ID NO: 2026307 - DNA, 15 bp, Homo sapiens
ctcccctctccttac

SEQ ID NO: 2026308 - DNA, 15 bp, Homo sapiens
tcccctctccttacc

SEQ ID NO: 2026309 - DNA, 15 bp, Homo sapiens
cccctctccttacca

SEQ ID NO: 2026310 - DNA, 15 bp, Homo sapiens
ccctctccttaccaa

SEQ ID NO: 2026311 - DNA, 15 bp, Homo sapiens
cctctccttaccaag

SEQ ID NO: 2026312 - DNA, 15 bp, Homo sapiens
ctctccttaccaagt

SEQ ID NO: 2026313 - DNA, 15 bp, Homo sapiens
tctccttaccaagtt

SEQ ID NO: 2026314 - DNA, 15 bp, Homo sapiens
ctccttaccaagtta

SEQ ID NO: 2026315 - DNA, 15 bp, Homo sapiens
tccttaccaagttag

SEQ ID NO: 2026316 - DNA, 15 bp, Homo sapiens
ccttaccaagttagg

SEQ ID NO: 2026317 - DNA, 15 bp, Homo sapiens
cttaccaagttagga

SEQ ID NO: 2026318 - DNA, 15 bp, Homo sapiens
ttaccaagttaggat

SEQ ID NO: 2026319 - DNA, 15 bp, Homo sapiens
taccaagttaggata

SEQ ID NO: 2026320 - DNA, 15 bp, Homo sapiens
accaagttaggataa

SEQ ID NO: 2026321 - DNA, 15 bp, Homo sapiens
ccaagttaggataat

SEQ ID NO: 2026322 - DNA, 15 bp, Homo sapiens
caagttaggataatt

SEQ ID NO: 2026323 - DNA, 15 bp, Homo sapiens
aagttaggataattc

SEQ ID NO: 2026324 - DNA, 15 bp, Homo sapiens
agttaggataattct

SEQ ID NO: 2026325 - DNA, 15 bp, Homo sapiens
gttaggataattctt

SEQ ID NO: 2026326 - DNA, 15 bp, Homo sapiens
ttaggataattcttt

SEQ ID NO: 2026327 - DNA, 15 bp, Homo sapiens
taggataattctttg

SEQ ID NO: 2026328 - DNA, 15 bp, Homo sapiens
aggataattctttgt

SEQ ID NO: 2026329 - DNA, 15 bp, Homo sapiens
ggataattctttgtc

SEQ ID NO: 2026330 - DNA, 15 bp, Homo sapiens
gataattctttgtct

SEQ ID NO: 2026331 - DNA, 15 bp, Homo sapiens
ataattctttgtctc

SEQ ID NO: 2026332 - DNA, 15 bp, Homo sapiens
taattctttgtctca

SEQ ID NO: 2026333 - DNA, 15 bp, Homo sapiens
aattctttgtctcaa

SEQ ID NO: 2026334 - DNA, 15 bp, Homo sapiens
attctttgtctcaag

SEQ ID NO: 2026335 - DNA, 15 bp, Homo sapiens
ttctttgtctcaagt

SEQ ID NO: 2026336 - DNA, 15 bp, Homo sapiens
tctttgtctcaagta

SEQ ID NO: 2026337 - DNA, 15 bp, Homo sapiens
ctttgtctcaagtac

SEQ ID NO: 2026338 - DNA, 15 bp, Homo sapiens
tttgtctcaagtacc

SEQ ID NO: 2026339 - DNA, 15 bp, Homo sapiens
ttgtctcaagtaccc

SEQ ID NO: 2026340 - DNA, 15 bp, Homo sapiens
tgtctcaagtaccct

SEQ ID NO: 2026341 - DNA, 15 bp, Homo sapiens
gtctcaagtaccctg

SEQ ID NO: 2026342 - DNA, 15 bp, Homo sapiens
tctcaagtaccctga

SEQ ID NO: 2026343 - DNA, 15 bp, Homo sapiens
ctcaagtaccctgag

SEQ ID NO: 2026344 - DNA, 15 bp, Homo sapiens
tcaagtaccctgaga

SEQ ID NO: 2026345 - DNA, 15 bp, Homo sapiens
caagtaccctgagac

SEQ ID NO: 2026346 - DNA, 15 bp, Homo sapiens
aagtaccctgagact

SEQ ID NO: 2026347 - DNA, 15 bp, Homo sapiens
agtaccctgagactt

SEQ ID NO: 2026348 - DNA, 15 bp, Homo sapiens
gtaccctgagacttt

SEQ ID NO: 2026349 - DNA, 15 bp, Homo sapiens
taccctgagactttg

SEQ ID NO: 2026350 - DNA, 15 bp, Homo sapiens
accctgagactttga

SEQ ID NO: 2026351 - DNA, 15 bp, Homo sapiens
ccctgagactttgaa

SEQ ID NO: 2026352 - DNA, 15 bp, Homo sapiens
cctgagactttgaag

SEQ ID NO: 2026353 - DNA, 15 bp, Homo sapiens
ctgagactttgaaga

SEQ ID NO: 2026354 - DNA, 15 bp, Homo sapiens
tgagactttgaagat

SEQ ID NO: 2026355 - DNA, 15 bp, Homo sapiens
gagactttgaagatt

SEQ ID NO: 2026356 - DNA, 15 bp, Homo sapiens
agactttgaagattt

SEQ ID NO: 2026357 - DNA, 15 bp, Homo sapiens
gactttgaagatttt

SEQ ID NO: 2026358 - DNA, 15 bp, Homo sapiens
actttgaagattttt

SEQ ID NO: 2026359 - DNA, 15 bp, Homo sapiens
ctttgaagatttttc

SEQ ID NO: 2026360 - DNA, 15 bp, Homo sapiens
tttgaagatttttca

SEQ ID NO: 2026361 - DNA, 15 bp, Homo sapiens
ttgaagatttttcag

SEQ ID NO: 2026362 - DNA, 15 bp, Homo sapiens
tgaagatttttcaga

SEQ ID NO: 2026363 - DNA, 15 bp, Homo sapiens
gaagatttttcagat

SEQ ID NO: 2026364 - DNA, 15 bp, Homo sapiens
aagatttttcagatg

SEQ ID NO: 2026365 - DNA, 15 bp, Homo sapiens
agatttttcagatgt

SEQ ID NO: 2026366 - DNA, 15 bp, Homo sapiens
gatttttcagatgta

SEQ ID NO: 2026367 - DNA, 15 bp, Homo sapiens
atttttcagatgtaa

SEQ ID NO: 2026368 - DNA, 15 bp, Homo sapiens
tttttcagatgtaaa

SEQ ID NO: 2026369 - DNA, 15 bp, Homo sapiens
ttttcagatgtaaat

SEQ ID NO: 2026370 - DNA, 15 bp, Homo sapiens
tttcagatgtaaatt

SEQ ID NO: 2026371 - DNA, 15 bp, Homo sapiens
ttcagatgtaaattc

SEQ ID NO: 2026372 - DNA, 15 bp, Homo sapiens
tcagatgtaaattct

SEQ ID NO: 2026373 - DNA, 15 bp, Homo sapiens
cagatgtaaattctt

SEQ ID NO: 2026374 - DNA, 15 bp, Homo sapiens
agatgtaaattctta

SEQ ID NO: 2026375 - DNA, 15 bp, Homo sapiens
gatgtaaattcttaa

SEQ ID NO: 2026376 - DNA, 15 bp, Homo sapiens
atgtaaattcttaac

SEQ ID NO: 2026377 - DNA, 15 bp, Homo sapiens
tgtaaattcttaact

SEQ ID NO: 2026378 - DNA, 15 bp, Homo sapiens
gtaaattcttaactt

SEQ ID NO: 2026379 - DNA, 15 bp, Homo sapiens
taaattcttaacttc

SEQ ID NO: 2026380 - DNA, 15 bp, Homo sapiens
aaattcttaacttct

SEQ ID NO: 2026381 - DNA, 15 bp, Homo sapiens
aattcttaacttctg

SEQ ID NO: 2026382 - DNA, 15 bp, Homo sapiens
attcttaacttctga

SEQ ID NO: 2026383 - DNA, 15 bp, Homo sapiens
ttcttaacttctgaa

SEQ ID NO: 2026384 - DNA, 15 bp, Homo sapiens
tcttaacttctgaaa

SEQ ID NO: 2026385 - DNA, 15 bp, Homo sapiens
cttaacttctgaaaa

SEQ ID NO: 2026386 - DNA, 15 bp, Homo sapiens
ttaacttctgaaaat

SEQ ID NO: 2026387 - DNA, 15 bp, Homo sapiens
taacttctgaaaatt

SEQ ID NO: 2026388 - DNA, 15 bp, Homo sapiens
aacttctgaaaattt

SEQ ID NO: 2026389 - DNA, 15 bp, Homo sapiens
acttctgaaaatttt

SEQ ID NO: 2026390 - DNA, 15 bp, Homo sapiens
cttctgaaaattttc

SEQ ID NO: 2026391 - DNA, 15 bp, Homo sapiens
ttctgaaaattttcc

SEQ ID NO: 2026392 - DNA, 15 bp, Homo sapiens
tctgaaaattttccc

SEQ ID NO: 2026393 - DNA, 15 bp, Homo sapiens
ctgaaaattttccct

SEQ ID NO: 2026394 - DNA, 15 bp, Homo sapiens
tgaaaattttccctg

SEQ ID NO: 2026395 - DNA, 15 bp, Homo sapiens
gaaaattttccctga

SEQ ID NO: 2026396 - DNA, 15 bp, Homo sapiens
aaaattttccctgag

SEQ ID NO: 2026397 - DNA, 15 bp, Homo sapiens
aaattttccctgagg

SEQ ID NO: 2026398 - DNA, 15 bp, Homo sapiens
aattttccctgagga

SEQ ID NO: 2026399 - DNA, 15 bp, Homo sapiens
attttccctgaggat

SEQ ID NO: 2026400 - DNA, 15 bp, Homo sapiens
ttttccctgaggata

SEQ ID NO: 2026401 - DNA, 15 bp, Homo sapiens
tttccctgaggataa

SEQ ID NO: 2026402 - DNA, 15 bp, Homo sapiens
ttccctgaggataac

SEQ ID NO: 2026403 - DNA, 15 bp, Homo sapiens
tccctgaggataaca

SEQ ID NO: 2026404 - DNA, 15 bp, Homo sapiens
ccctgaggataacat

SEQ ID NO: 2026405 - DNA, 15 bp, Homo sapiens
cctgaggataacata

SEQ ID NO: 2026406 - DNA, 15 bp, Homo sapiens
ctgaggataacatag

SEQ ID NO: 2026407 - DNA, 15 bp, Homo sapiens
tgaggataacatagc

SEQ ID NO: 2026408 - DNA, 15 bp, Homo sapiens
gaggataacatagcc

SEQ ID NO: 2026409 - DNA, 15 bp, Homo sapiens
aggataacatagccc

SEQ ID NO: 2026410 - DNA, 15 bp, Homo sapiens
ggataacatagccca

SEQ ID NO: 2026411 - DNA, 15 bp, Homo sapiens
gataacatagcccag

SEQ ID NO: 2026412 - DNA, 15 bp, Homo sapiens
ataacatagcccagg

SEQ ID NO: 2026413 - DNA, 15 bp, Homo sapiens
taacatagcccaggt

SEQ ID NO: 2026414 - DNA, 15 bp, Homo sapiens
aacatagcccaggtt

SEQ ID NO: 2026415 - DNA, 15 bp, Homo sapiens
acatagcccaggttt

SEQ ID NO: 2026416 - DNA, 15 bp, Homo sapiens
catagcccaggtttt

SEQ ID NO: 2026417 - DNA, 15 bp, Homo sapiens
atagcccaggtttta

SEQ ID NO: 2026418 - DNA, 15 bp, Homo sapiens
tagcccaggttttat

SEQ ID NO: 2026419 - DNA, 15 bp, Homo sapiens
agcccaggttttata

SEQ ID NO: 2026420 - DNA, 15 bp, Homo sapiens
gcccaggttttatag

SEQ ID NO: 2026421 - DNA, 15 bp, Homo sapiens
ccaggttttatagtg

SEQ ID NO: 2026422 - DNA, 15 bp, Homo sapiens
caggttttatagtgg

SEQ ID NO: 2026423 - DNA, 15 bp, Homo sapiens
aggttttatagtggg

SEQ ID NO: 2026424 - DNA, 15 bp, Homo sapiens
ggttttatagtgggc

SEQ ID NO: 2026425 - DNA, 15 bp, Homo sapiens
gttttatagtgggcc

SEQ ID NO: 2026426 - DNA, 15 bp, Homo sapiens
ttttatagtgggcct

SEQ ID NO: 2026427 - DNA, 15 bp, Homo sapiens
tttatagtgggcctt

SEQ ID NO: 2026428 - DNA, 15 bp, Homo sapiens
ttatagtgggccttt

SEQ ID NO: 2026429 - DNA, 15 bp, Homo sapiens
tatagtgggcctttt

SEQ ID NO: 2026430 - DNA, 15 bp, Homo sapiens
atagtgggcctttta

SEQ ID NO: 2026431 - DNA, 15 bp, Homo sapiens
tagtgggccttttag

SEQ ID NO: 2026432 - DNA, 15 bp, Homo sapiens
agtgggccttttagg

SEQ ID NO: 2026433 - DNA, 15 bp, Homo sapiens
gtgggccttttagga

SEQ ID NO: 2026434 - DNA, 15 bp, Homo sapiens
tgggccttttaggat

SEQ ID NO: 2026435 - DNA, 15 bp, Homo sapiens
gggccttttaggatt

SEQ ID NO: 2026436 - DNA, 15 bp, Homo sapiens
ggccttttaggattc

SEQ ID NO: 2026437 - DNA, 15 bp, Homo sapiens
gccttttaggattcc

SEQ ID NO: 2026438 - DNA, 15 bp, Homo sapiens
ccttttaggattcca

SEQ ID NO: 2026439 - DNA, 15 bp, Homo sapiens
cttttaggattccaa

SEQ ID NO: 2026440 - DNA, 15 bp, Homo sapiens
ttttaggattccaaa

SEQ ID NO: 2026441 - DNA, 15 bp, Homo sapiens
tttaggattccaaat

SEQ ID NO: 2026442 - DNA, 15 bp, Homo sapiens
ttaggattccaaatt

SEQ ID NO: 2026443 - DNA, 15 bp, Homo sapiens
taggattccaaattc

SEQ ID NO: 2026444 - DNA, 15 bp, Homo sapiens
aggattccaaattct

SEQ ID NO: 2026445 - DNA, 15 bp, Homo sapiens
ggattccaaattctc

SEQ ID NO: 2026446 - DNA, 15 bp, Homo sapiens
gattccaaattctcc

SEQ ID NO: 2026447 - DNA, 15 bp, Homo sapiens
attccaaattctcct

SEQ ID NO: 2026448 - DNA, 15 bp, Homo sapiens
ttccaaattctcctt

SEQ ID NO: 2026449 - DNA, 15 bp, Homo sapiens
tccaaattctccttt

SEQ ID NO: 2026450 - DNA, 15 bp, Homo sapiens
ccaaattctccttta

SEQ ID NO: 2026451 - DNA, 15 bp, Homo sapiens
caaattctcctttac

SEQ ID NO: 2026452 - DNA, 15 bp, Homo sapiens
aaattctcctttact

SEQ ID NO: 2026453 - DNA, 15 bp, Homo sapiens
aattctcctttactt

SEQ ID NO: 2026454 - DNA, 15 bp, Homo sapiens
attctcctttactta

SEQ ID NO: 2026455 - DNA, 15 bp, Homo sapiens
ttctcctttacttaa

SEQ ID NO: 2026456 - DNA, 15 bp, Homo sapiens
tctcctttacttaaa

SEQ ID NO: 2026457 - DNA, 15 bp, Homo sapiens
ctcctttacttaaag

SEQ ID NO: 2026458 - DNA, 15 bp, Homo sapiens
tcctttacttaaagg

SEQ ID NO: 2026459 - DNA, 15 bp, Homo sapiens
cctttacttaaaggg

SEQ ID NO: 2026460 - DNA, 15 bp, Homo sapiens
ctttacttaaaggga

SEQ ID NO: 2026461 - DNA, 15 bp, Homo sapiens
tttacttaaagggaa

SEQ ID NO: 2026462 - DNA, 15 bp, Homo sapiens
ttacttaaagggaaa

SEQ ID NO: 2026463 - DNA, 15 bp, Homo sapiens
tacttaaagggaaaa

SEQ ID NO: 2026464 - DNA, 15 bp, Homo sapiens
acttaaagggaaaaa

SEQ ID NO: 2026465 - DNA, 15 bp, Homo sapiens
cttaaagggaaaaag

SEQ ID NO: 2026466 - DNA, 15 bp, Homo sapiens
ttaaagggaaaaaga

SEQ ID NO: 2026467 - DNA, 15 bp, Homo sapiens
taaagggaaaaagaa

SEQ ID NO: 2026468 - DNA, 15 bp, Homo sapiens
aaagggaaaaagaag

SEQ ID NO: 2026469 - DNA, 15 bp, Homo sapiens
aagggaaaaagaaga

SEQ ID NO: 2026470 - DNA, 15 bp, Homo sapiens
agggaaaaagaagaa

SEQ ID NO: 2026471 - DNA, 15 bp, Homo sapiens
gggaaaaagaagaaa

SEQ ID NO: 2026472 - DNA, 15 bp, Homo sapiens
ggaaaaagaagaaaa

SEQ ID NO: 2026473 - DNA, 15 bp, Homo sapiens
gaaaaagaagaaaat

SEQ ID NO: 2026474 - DNA, 15 bp, Homo sapiens
aaaaagaagaaaatc

SEQ ID NO: 2026475 - DNA, 15 bp, Homo sapiens
aaaagaagaaaatca

SEQ ID NO: 2026476 - DNA, 15 bp, Homo sapiens
aaagaagaaaatcaa

SEQ ID NO: 2026477 - DNA, 15 bp, Homo sapiens
aagaagaaaatcaag

SEQ ID NO: 2026478 - DNA, 15 bp, Homo sapiens
agaagaaaatcaaga

SEQ ID NO: 2026479 - DNA, 15 bp, Homo sapiens
gaagaaaatcaagat

SEQ ID NO: 2026480 - DNA, 15 bp, Homo sapiens
aagaaaatcaagata

SEQ ID NO: 2026481 - DNA, 15 bp, Homo sapiens
agaaaatcaagatat

SEQ ID NO: 2026482 - DNA, 15 bp, Homo sapiens
gaaaatcaagatatg

SEQ ID NO: 2026483 - DNA, 15 bp, Homo sapiens
aaaatcaagatatgt

SEQ ID NO: 2026484 - DNA, 15 bp, Homo sapiens
aaatcaagatatgtt

SEQ ID NO: 2026485 - DNA, 15 bp, Homo sapiens
aatcaagatatgttt

SEQ ID NO: 2026486 - DNA, 15 bp, Homo sapiens
atcaagatatgttta

SEQ ID NO: 2026487 - DNA, 15 bp, Homo sapiens
tcaagatatgtttac

SEQ ID NO: 2026488 - DNA, 15 bp, Homo sapiens
caagatatgtttact

SEQ ID NO: 2026489 - DNA, 15 bp, Homo sapiens
aagatatgtttactt

SEQ ID NO: 2026490 - DNA, 15 bp, Homo sapiens
agatatgtttacttg

SEQ ID NO: 2026491 - DNA, 15 bp, Homo sapiens
gatatgtttacttgg

SEQ ID NO: 2026492 - DNA, 15 bp, Homo sapiens
atatgtttacttgga

SEQ ID NO: 2026493 - DNA, 15 bp, Homo sapiens
tatgtttacttggat

SEQ ID NO: 2026494 - DNA, 15 bp, Homo sapiens
atgtttacttggatg

SEQ ID NO: 2026495 - DNA, 15 bp, Homo sapiens
tgtttacttggatgg

SEQ ID NO: 2026496 - DNA, 15 bp, Homo sapiens
gtttacttggatggg

SEQ ID NO: 2026497 - DNA, 15 bp, Homo sapiens
tttacttggatgggc

SEQ ID NO: 2026498 - DNA, 15 bp, Homo sapiens
ttacttggatgggct

SEQ ID NO: 2026499 - DNA, 15 bp, Homo sapiens
tacttggatgggctt

SEQ ID NO: 2026500 - DNA, 15 bp, Homo sapiens
acttggatgggcttc

SEQ ID NO: 2026501 - DNA, 15 bp, Homo sapiens
cttggatgggcttca

SEQ ID NO: 2026502 - DNA, 15 bp, Homo sapiens
ttggatgggcttcag

SEQ ID NO: 2026503 - DNA, 15 bp, Homo sapiens
tggatgggcttcaga

SEQ ID NO: 2026504 - DNA, 15 bp, Homo sapiens
ggatgggcttcagaa

SEQ ID NO: 2026505 - DNA, 15 bp, Homo sapiens
gatgggcttcagaaa

SEQ ID NO: 2026506 - DNA, 15 bp, Homo sapiens
atgggcttcagaaat

SEQ ID NO: 2026507 - DNA, 15 bp, Homo sapiens
tgggcttcagaaatt

SEQ ID NO: 2026508 - DNA, 15 bp, Homo sapiens
gggcttcagaaattg

SEQ ID NO: 2026509 - DNA, 15 bp, Homo sapiens
ggcttcagaaattgt

SEQ ID NO: 2026510 - DNA, 15 bp, Homo sapiens
gcttcagaaattgta

SEQ ID NO: 2026511 - DNA, 15 bp, Homo sapiens
cttcagaaattgtac

SEQ ID NO: 2026512 - DNA, 15 bp, Homo sapiens
ttcagaaattgtaca

SEQ ID NO: 2026513 - DNA, 15 bp, Homo sapiens
tcagaaattgtacat

SEQ ID NO: 2026514 - DNA, 15 bp, Homo sapiens
cagaaattgtacata

SEQ ID NO: 2026515 - DNA, 15 bp, Homo sapiens
agaaattgtacataa

SEQ ID NO: 2026516 - DNA, 15 bp, Homo sapiens
gaaattgtacataag

SEQ ID NO: 2026517 - DNA, 15 bp, Homo sapiens
aaattgtacataaga

SEQ ID NO: 2026518 - DNA, 15 bp, Homo sapiens
aattgtacataagat

SEQ ID NO: 2026519 - DNA, 15 bp, Homo sapiens
attgtacataagatt

SEQ ID NO: 2026520 - DNA, 15 bp, Homo sapiens
ttgtacataagattt

SEQ ID NO: 2026521 - DNA, 15 bp, Homo sapiens
tgtacataagatttt

SEQ ID NO: 2026522 - DNA, 15 bp, Homo sapiens
gtacataagattttg

SEQ ID NO: 2026523 - DNA, 15 bp, Homo sapiens
tacataagattttgt

SEQ ID NO: 2026524 - DNA, 15 bp, Homo sapiens
acataagattttgtg

SEQ ID NO: 2026525 - DNA, 15 bp, Homo sapiens
cataagattttgtgt

SEQ ID NO: 2026526 - DNA, 15 bp, Homo sapiens
ataagattttgtgta

SEQ ID NO: 2026527 - DNA, 15 bp, Homo sapiens
taagattttgtgtat

SEQ ID NO: 2026528 - DNA, 15 bp, Homo sapiens
aagattttgtgtatg

SEQ ID NO: 2026529 - DNA, 15 bp, Homo sapiens
agattttgtgtatgc

SEQ ID NO: 2026530 - DNA, 15 bp, Homo sapiens
gattttgtgtatgct

SEQ ID NO: 2026531 - DNA, 15 bp, Homo sapiens
attttgtgtatgctt

SEQ ID NO: 2026532 - DNA, 15 bp, Homo sapiens
ttttgtgtatgcttt

SEQ ID NO: 2026533 - DNA, 15 bp, Homo sapiens
tttgtgtatgctttg

SEQ ID NO: 2026534 - DNA, 15 bp, Homo sapiens
ttgtgtatgctttgc

SEQ ID NO: 2026535 - DNA, 15 bp, Homo sapiens
tgtgtatgctttgct

SEQ ID NO: 2026536 - DNA, 15 bp, Homo sapiens
gtgtatgctttgctt

SEQ ID NO: 2026537 - DNA, 15 bp, Homo sapiens
tgtatgctttgcttc

SEQ ID NO: 2026538 - DNA, 15 bp, Homo sapiens
gtatgctttgcttcc

SEQ ID NO: 2026539 - DNA, 15 bp, Homo sapiens
tatgctttgcttcct

SEQ ID NO: 2026540 - DNA, 15 bp, Homo sapiens
atgctttgcttcctt

SEQ ID NO: 2026541 - DNA, 15 bp, Homo sapiens
tgctttgcttccttt

SEQ ID NO: 2026542 - DNA, 15 bp, Homo sapiens
gctttgcttccttta

SEQ ID NO: 2026543 - DNA, 15 bp, Homo sapiens
ctttgcttcctttat

SEQ ID NO: 2026544 - DNA, 15 bp, Homo sapiens
tttgcttcctttatc

SEQ ID NO: 2026545 - DNA, 15 bp, Homo sapiens
ttgcttcctttatct

SEQ ID NO: 2026546 - DNA, 15 bp, Homo sapiens
tgcttcctttatctc

SEQ ID NO: 2026547 - DNA, 15 bp, Homo sapiens
gcttcctttatctca

SEQ ID NO: 2026548 - DNA, 15 bp, Homo sapiens
cttcctttatctcat

SEQ ID NO: 2026549 - DNA, 15 bp, Homo sapiens
ttcctttatctcata

SEQ ID NO: 2026550 - DNA, 15 bp, Homo sapiens
tcctttatctcatag

SEQ ID NO: 2026551 - DNA, 15 bp, Homo sapiens
cctttatctcatagg

SEQ ID NO: 2026552 - DNA, 15 bp, Homo sapiens
ctttatctcataggt

SEQ ID NO: 2026553 - DNA, 15 bp, Homo sapiens
tttatctcataggtg

SEQ ID NO: 2026554 - DNA, 15 bp, Homo sapiens
ttatctcataggtgt

SEQ ID NO: 2026555 - DNA, 15 bp, Homo sapiens
tatctcataggtgtc

SEQ ID NO: 2026556 - DNA, 15 bp, Homo sapiens
atctcataggtgtct

SEQ ID NO: 2026557 - DNA, 15 bp, Homo sapiens
tctcataggtgtctg

SEQ ID NO: 2026558 - DNA, 15 bp, Homo sapiens
ctcataggtgtctgt

SEQ ID NO: 2026559 - DNA, 15 bp, Homo sapiens
tcataggtgtctgtg

SEQ ID NO: 2026560 - DNA, 15 bp, Homo sapiens
cataggtgtctgtga

SEQ ID NO: 2026561 - DNA, 15 bp, Homo sapiens
ataggtgtctgtgac

SEQ ID NO: 2026562 - DNA, 15 bp, Homo sapiens
taggtgtctgtgaca

SEQ ID NO: 2026563 - DNA, 15 bp, Homo sapiens
aggtgtctgtgacac

SEQ ID NO: 2026564 - DNA, 15 bp, Homo sapiens
ggtgtctgtgacacc

SEQ ID NO: 2026565 - DNA, 15 bp, Homo sapiens
gtgtctgtgacacct

SEQ ID NO: 2026566 - DNA, 15 bp, Homo sapiens
tgtctgtgacacctg

SEQ ID NO: 2026567 - DNA, 15 bp, Homo sapiens
gtctgtgacacctgt

SEQ ID NO: 2026568 - DNA, 15 bp, Homo sapiens
tctgtgacacctgtc

SEQ ID NO: 2026569 - DNA, 15 bp, Homo sapiens
ctgtgacacctgtcc

SEQ ID NO: 2026570 - DNA, 15 bp, Homo sapiens
tgtgacacctgtcct

SEQ ID NO: 2026571 - DNA, 15 bp, Homo sapiens
gtgacacctgtcctg

SEQ ID NO: 2026572 - DNA, 15 bp, Homo sapiens
tgacacctgtcctgg

SEQ ID NO: 2026573 - DNA, 15 bp, Homo sapiens
gacacctgtcctggg

SEQ ID NO: 2026574 - DNA, 15 bp, Homo sapiens
acacctgtcctgggt

SEQ ID NO: 2026575 - DNA, 15 bp, Homo sapiens
cacctgtcctgggtt

SEQ ID NO: 2026576 - DNA, 15 bp, Homo sapiens
acctgtcctgggttg

SEQ ID NO: 2026577 - DNA, 15 bp, Homo sapiens
cctgtcctgggttga

SEQ ID NO: 2026578 - DNA, 15 bp, Homo sapiens
ctgtcctgggttgag

SEQ ID NO: 2026579 - DNA, 15 bp, Homo sapiens
tgtcctgggttgagg

SEQ ID NO: 2026580 - DNA, 15 bp, Homo sapiens
gtcctgggttgagga

SEQ ID NO: 2026581 - DNA, 15 bp, Homo sapiens
tcctgggttgaggaa

SEQ ID NO: 2026582 - DNA, 15 bp, Homo sapiens
cctgggttgaggaag

SEQ ID NO: 2026583 - DNA, 15 bp, Homo sapiens
ctgggttgaggaagt

SEQ ID NO: 2026584 - DNA, 15 bp, Homo sapiens
tgggttgaggaagtc

SEQ ID NO: 2026585 - DNA, 15 bp, Homo sapiens
gggttgaggaagtcc

SEQ ID NO: 2026586 - DNA, 15 bp, Homo sapiens
ggttgaggaagtcca

SEQ ID NO: 2026587 - DNA, 15 bp, Homo sapiens
gttgaggaagtccaa

SEQ ID NO: 2026588 - DNA, 15 bp, Homo sapiens
ttgaggaagtccaat

SEQ ID NO: 2026589 - DNA, 15 bp, Homo sapiens
tgaggaagtccaatt

SEQ ID NO: 2026590 - DNA, 15 bp, Homo sapiens
gaggaagtccaattc

SEQ ID NO: 2026591 - DNA, 15 bp, Homo sapiens
aggaagtccaattct

SEQ ID NO: 2026592 - DNA, 15 bp, Homo sapiens
ggaagtccaattctt

SEQ ID NO: 2026593 - DNA, 15 bp, Homo sapiens
gaagtccaattcttt

SEQ ID NO: 2026594 - DNA, 15 bp, Homo sapiens
aagtccaattcttta

SEQ ID NO: 2026595 - DNA, 15 bp, Homo sapiens
agtccaattctttat

SEQ ID NO: 2026596 - DNA, 15 bp, Homo sapiens
gtccaattctttata

SEQ ID NO: 2026597 - DNA, 15 bp, Homo sapiens
tccaattctttataa

SEQ ID NO: 2026598 - DNA, 15 bp, Homo sapiens
ccaattctttataag

SEQ ID NO: 2026599 - DNA, 15 bp, Homo sapiens
caattctttataagt

SEQ ID NO: 2026600 - DNA, 15 bp, Homo sapiens
aattctttataagtg

SEQ ID NO: 2026601 - DNA, 15 bp, Homo sapiens
attctttataagtgt

SEQ ID NO: 2026602 - DNA, 15 bp, Homo sapiens
ttctttataagtgtt

SEQ ID NO: 2026603 - DNA, 15 bp, Homo sapiens
tctttataagtgttg

SEQ ID NO: 2026604 - DNA, 15 bp, Homo sapiens
ctttataagtgttga

SEQ ID NO: 2026605 - DNA, 15 bp, Homo sapiens
tttataagtgttgaa

SEQ ID NO: 2026606 - DNA, 15 bp, Homo sapiens
ttataagtgttgaaa

SEQ ID NO: 2026607 - DNA, 15 bp, Homo sapiens
tataagtgttgaaat

SEQ ID NO: 2026608 - DNA, 15 bp, Homo sapiens
ataagtgttgaaata

SEQ ID NO: 2026609 - DNA, 15 bp, Homo sapiens
taagtgttgaaatac

SEQ ID NO: 2026610 - DNA, 15 bp, Homo sapiens
aagtgttgaaataca

SEQ ID NO: 2026611 - DNA, 15 bp, Homo sapiens
agtgttgaaatacac

SEQ ID NO: 2026612 - DNA, 15 bp, Homo sapiens
gtgttgaaatacaca

SEQ ID NO: 2026613 - DNA, 15 bp, Homo sapiens
tgttgaaatacacag

SEQ ID NO: 2026614 - DNA, 15 bp, Homo sapiens
gttgaaatacacagg

SEQ ID NO: 2026615 - DNA, 15 bp, Homo sapiens
ttgaaatacacagga

SEQ ID NO: 2026616 - DNA, 15 bp, Homo sapiens
tgaaatacacaggat

SEQ ID NO: 2026617 - DNA, 15 bp, Homo sapiens
gaaatacacaggata

SEQ ID NO: 2026618 - DNA, 15 bp, Homo sapiens
aaatacacaggataa

SEQ ID NO: 2026619 - DNA, 15 bp, Homo sapiens
aatacacaggataaa

SEQ ID NO: 2026620 - DNA, 15 bp, Homo sapiens
atacacaggataaaa

SEQ ID NO: 2026621 - DNA, 15 bp, Homo sapiens
tacacaggataaaag

SEQ ID NO: 2026622 - DNA, 15 bp, Homo sapiens
acacaggataaaagt

SEQ ID NO: 2026623 - DNA, 15 bp, Homo sapiens
cacaggataaaagtt

SEQ ID NO: 2026624 - DNA, 15 bp, Homo sapiens
acaggataaaagttt

SEQ ID NO: 2026625 - DNA, 15 bp, Homo sapiens
caggataaaagtttt

SEQ ID NO: 2026626 - DNA, 15 bp, Homo sapiens
aggataaaagttttg

SEQ ID NO: 2026627 - DNA, 15 bp, Homo sapiens
ggataaaagttttgt

SEQ ID NO: 2026628 - DNA, 15 bp, Homo sapiens
gataaaagttttgtc

SEQ ID NO: 2026629 - DNA, 15 bp, Homo sapiens
ataaaagttttgtca

SEQ ID NO: 2026630 - DNA, 15 bp, Homo sapiens
taaaagttttgtcaa

SEQ ID NO: 2026631 - DNA, 15 bp, Homo sapiens
aaaagttttgtcaaa

SEQ ID NO: 2026632 - DNA, 15 bp, Homo sapiens
aaagttttgtcaaaa

SEQ ID NO: 2026633 - DNA, 15 bp, Homo sapiens
aagttttgtcaaaat

SEQ ID NO: 2026634 - DNA, 15 bp, Homo sapiens
agttttgtcaaaatt

SEQ ID NO: 2026635 - DNA, 15 bp, Homo sapiens
gttttgtcaaaattg

SEQ ID NO: 2026636 - DNA, 15 bp, Homo sapiens
ttttgtcaaaattgt

SEQ ID NO: 2026637 - DNA, 15 bp, Homo sapiens
tttgtcaaaattgta

SEQ ID NO: 2026638 - DNA, 15 bp, Homo sapiens
ttgtcaaaattgtat

SEQ ID NO: 2026639 - DNA, 15 bp, Homo sapiens
tgtcaaaattgtata

SEQ ID NO: 2026640 - DNA, 15 bp, Homo sapiens
gtcaaaattgtataa

SEQ ID NO: 2026641 - DNA, 15 bp, Homo sapiens
tcaaaattgtataac

SEQ ID NO: 2026642 - DNA, 15 bp, Homo sapiens
caaaattgtataact

SEQ ID NO: 2026643 - DNA, 15 bp, Homo sapiens
aaaattgtataactt

SEQ ID NO: 2026644 - DNA, 15 bp, Homo sapiens
aaattgtataactta

SEQ ID NO: 2026645 - DNA, 15 bp, Homo sapiens
aattgtataacttag

SEQ ID NO: 2026646 - DNA, 15 bp, Homo sapiens
attgtataacttaga

SEQ ID NO: 2026647 - DNA, 15 bp, Homo sapiens
ttgtataacttagaa

SEQ ID NO: 2026648 - DNA, 15 bp, Homo sapiens
tgtataacttagaat

SEQ ID NO: 2026649 - DNA, 15 bp, Homo sapiens
gtataacttagaatt

SEQ ID NO: 2026650 - DNA, 15 bp, Homo sapiens
tataacttagaattc

SEQ ID NO: 2026651 - DNA, 15 bp, Homo sapiens
ataacttagaattcc

SEQ ID NO: 2026652 - DNA, 15 bp, Homo sapiens
taacttagaattcct

SEQ ID NO: 2026653 - DNA, 15 bp, Homo sapiens
aacttagaattcctg

SEQ ID NO: 2026654 - DNA, 15 bp, Homo sapiens
acttagaattcctgg

SEQ ID NO: 2026655 - DNA, 15 bp, Homo sapiens
cttagaattcctggg

SEQ ID NO: 2026656 - DNA, 15 bp, Homo sapiens
ttagaattcctggga

SEQ ID NO: 2026657 - DNA, 15 bp, Homo sapiens
tagaattcctgggaa

SEQ ID NO: 2026658 - DNA, 15 bp, Homo sapiens
agaattcctgggaat

SEQ ID NO: 2026659 - DNA, 15 bp, Homo sapiens
gaattcctgggaatt

SEQ ID NO: 2026660 - DNA, 15 bp, Homo sapiens
aattcctgggaatta

SEQ ID NO: 2026661 - DNA, 15 bp, Homo sapiens
attcctgggaattag

SEQ ID NO: 2026662 - DNA, 15 bp, Homo sapiens
ttcctgggaattagt

SEQ ID NO: 2026663 - DNA, 15 bp, Homo sapiens
tcctgggaattagta

SEQ ID NO: 2026664 - DNA, 15 bp, Homo sapiens
cctgggaattagtaa

SEQ ID NO: 2026665 - DNA, 15 bp, Homo sapiens
ctgggaattagtaaa

SEQ ID NO: 2026666 - DNA, 15 bp, Homo sapiens
tgggaattagtaaaa

SEQ ID NO: 2026667 - DNA, 15 bp, Homo sapiens
gggaattagtaaaag

SEQ ID NO: 2026668 - DNA, 15 bp, Homo sapiens
ggaattagtaaaaga

SEQ ID NO: 2026669 - DNA, 15 bp, Homo sapiens
gaattagtaaaagat

SEQ ID NO: 2026670 - DNA, 15 bp, Homo sapiens
aattagtaaaagata

SEQ ID NO: 2026671 - DNA, 15 bp, Homo sapiens
attagtaaaagatac

SEQ ID NO: 2026672 - DNA, 15 bp, Homo sapiens
ttagtaaaagataca

SEQ ID NO: 2026673 - DNA, 15 bp, Homo sapiens
tagtaaaagatacaa

SEQ ID NO: 2026674 - DNA, 15 bp, Homo sapiens
agtaaaagatacaag

SEQ ID NO: 2026675 - DNA, 15 bp, Homo sapiens
gtaaaagatacaagc

SEQ ID NO: 2026676 - DNA, 15 bp, Homo sapiens
taaaagatacaagct

SEQ ID NO: 2026677 - DNA, 15 bp, Homo sapiens
aaaagatacaagctg

SEQ ID NO: 2026678 - DNA, 15 bp, Homo sapiens
aaagatacaagctga

SEQ ID NO: 2026679 - DNA, 15 bp, Homo sapiens
aagatacaagctgag

SEQ ID NO: 2026680 - DNA, 15 bp, Homo sapiens
agatacaagctgagc

SEQ ID NO: 2026681 - DNA, 15 bp, Homo sapiens
gatacaagctgagca

SEQ ID NO: 2026682 - DNA, 15 bp, Homo sapiens
atacaagctgagcac

SEQ ID NO: 2026683 - DNA, 15 bp, Homo sapiens
tacaagctgagcact

SEQ ID NO: 2026684 - DNA, 15 bp, Homo sapiens
acaagctgagcactg

SEQ ID NO: 2026685 - DNA, 15 bp, Homo sapiens
caagctgagcactgg

SEQ ID NO: 2026686 - DNA, 15 bp, Homo sapiens
aagctgagcactggc

SEQ ID NO: 2026687 - DNA, 15 bp, Homo sapiens
agctgagcactggca

SEQ ID NO: 2026688 - DNA, 15 bp, Homo sapiens
gctgagcactggcac

SEQ ID NO: 2026689 - DNA, 15 bp, Homo sapiens
ctgagcactggcact

SEQ ID NO: 2026690 - DNA, 15 bp, Homo sapiens
tgagcactggcactg

SEQ ID NO: 2026691 - DNA, 15 bp, Homo sapiens
gagcactggcactgt

SEQ ID NO: 2026692 - DNA, 15 bp, Homo sapiens
agcactggcactgta

SEQ ID NO: 2026693 - DNA, 15 bp, Homo sapiens
gcactggcactgtag

SEQ ID NO: 2026694 - DNA, 15 bp, Homo sapiens
cactggcactgtagt

SEQ ID NO: 2026695 - DNA, 15 bp, Homo sapiens
actggcactgtagtc

SEQ ID NO: 2026696 - DNA, 15 bp, Homo sapiens
ctggcactgtagtcc

SEQ ID NO: 2026697 - DNA, 15 bp, Homo sapiens
tggcactgtagtccc

SEQ ID NO: 2026698 - DNA, 15 bp, Homo sapiens
ggcactgtagtccca

SEQ ID NO: 2026699 - DNA, 15 bp, Homo sapiens
gcactgtagtcccag

SEQ ID NO: 2026700 - DNA, 15 bp, Homo sapiens
cactgtagtcccagc

SEQ ID NO: 2026701 - DNA, 15 bp, Homo sapiens
actgtagtcccagct

SEQ ID NO: 2026702 - DNA, 15 bp, Homo sapiens
cgggaggctgaggcg

SEQ ID NO: 2026703 - DNA, 15 bp, Homo sapiens
tgaggcgggaggaca

SEQ ID NO: 2026704 - DNA, 15 bp, Homo sapiens
gaggcgggaggacag

SEQ ID NO: 2026705 - DNA, 15 bp, Homo sapiens
aggcgggaggacagc

SEQ ID NO: 2026706 - DNA, 15 bp, Homo sapiens
ggcgggaggacagct

SEQ ID NO: 2026707 - DNA, 15 bp, Homo sapiens
gcgggaggacagctt

SEQ ID NO: 2026708 - DNA, 15 bp, Homo sapiens
cgggaggacagcttg

SEQ ID NO: 2026709 - DNA, 15 bp, Homo sapiens
gggaggacagcttga

SEQ ID NO: 2026710 - DNA, 15 bp, Homo sapiens
ggaggacagcttgag

SEQ ID NO: 2026711 - DNA, 15 bp, Homo sapiens
gaggacagcttgagc

SEQ ID NO: 2026712 - DNA, 15 bp, Homo sapiens
aggacagcttgagct

SEQ ID NO: 2026713 - DNA, 15 bp, Homo sapiens
ggacagcttgagctc

SEQ ID NO: 2026714 - DNA, 15 bp, Homo sapiens
gacagcttgagctca

SEQ ID NO: 2026715 - DNA, 15 bp, Homo sapiens
acagcttgagctcag

SEQ ID NO: 2026716 - DNA, 15 bp, Homo sapiens
cagcttgagctcagg

SEQ ID NO: 2026717 - DNA, 15 bp, Homo sapiens
agcttgagctcagga

SEQ ID NO: 2026718 - DNA, 15 bp, Homo sapiens
gcttgagctcaggag

SEQ ID NO: 2026719 - DNA, 15 bp, Homo sapiens
tcaaggctgcagtgt

SEQ ID NO: 2026720 - DNA, 15 bp, Homo sapiens
caaggctgcagtgtg

SEQ ID NO: 2026721 - DNA, 15 bp, Homo sapiens
aaggctgcagtgtgc

SEQ ID NO: 2026722 - DNA, 15 bp, Homo sapiens
aggctgcagtgtgct

SEQ ID NO: 2026723 - DNA, 15 bp, Homo sapiens
ggctgcagtgtgcta

SEQ ID NO: 2026724 - DNA, 15 bp, Homo sapiens
gctgcagtgtgctat

SEQ ID NO: 2026725 - DNA, 15 bp, Homo sapiens
ctgcagtgtgctata

SEQ ID NO: 2026726 - DNA, 15 bp, Homo sapiens
tgcagtgtgctataa

SEQ ID NO: 2026727 - DNA, 15 bp, Homo sapiens
gcagtgtgctataat

SEQ ID NO: 2026728 - DNA, 15 bp, Homo sapiens
cagtgtgctataatc

SEQ ID NO: 2026729 - DNA, 15 bp, Homo sapiens
agtgtgctataatca

SEQ ID NO: 2026730 - DNA, 15 bp, Homo sapiens
gtgtgctataatcat

SEQ ID NO: 2026731 - DNA, 15 bp, Homo sapiens
tgtgctataatcatg

SEQ ID NO: 2026732 - DNA, 15 bp, Homo sapiens
gtgctataatcatgt

SEQ ID NO: 2026733 - DNA, 15 bp, Homo sapiens
tgctataatcatgtc

SEQ ID NO: 2026734 - DNA, 15 bp, Homo sapiens
gctataatcatgtct

SEQ ID NO: 2026735 - DNA, 15 bp, Homo sapiens
ctataatcatgtctg

SEQ ID NO: 2026736 - DNA, 15 bp, Homo sapiens
tataatcatgtctgt

SEQ ID NO: 2026737 - DNA, 15 bp, Homo sapiens
ataatcatgtctgtg

SEQ ID NO: 2026738 - DNA, 15 bp, Homo sapiens
taatcatgtctgtga

SEQ ID NO: 2026739 - DNA, 15 bp, Homo sapiens
aatcatgtctgtgaa

SEQ ID NO: 2026740 - DNA, 15 bp, Homo sapiens
atcatgtctgtgaat

SEQ ID NO: 2026741 - DNA, 15 bp, Homo sapiens
tcatgtctgtgaata

SEQ ID NO: 2026742 - DNA, 15 bp, Homo sapiens
catgtctgtgaatag

SEQ ID NO: 2026743 - DNA, 15 bp, Homo sapiens
atgtctgtgaatagc

SEQ ID NO: 2026744 - DNA, 15 bp, Homo sapiens
tgtctgtgaatagcc

SEQ ID NO: 2026745 - DNA, 15 bp, Homo sapiens
gtctgtgaatagcca

SEQ ID NO: 2026746 - DNA, 15 bp, Homo sapiens
tctgtgaatagccaa

SEQ ID NO: 2026747 - DNA, 15 bp, Homo sapiens
ctgtgaatagccaat

SEQ ID NO: 2026748 - DNA, 15 bp, Homo sapiens
tgtgaatagccaatg

SEQ ID NO: 2026749 - DNA, 15 bp, Homo sapiens
gtgaatagccaatgc

SEQ ID NO: 2026750 - DNA, 15 bp, Homo sapiens
tgaatagccaatgca

SEQ ID NO: 2026751 - DNA, 15 bp, Homo sapiens
gaatagccaatgcac

SEQ ID NO: 2026752 - DNA, 15 bp, Homo sapiens
aatagccaatgcaca

SEQ ID NO: 2026753 - DNA, 15 bp, Homo sapiens
atagccaatgcacac

SEQ ID NO: 2026754 - DNA, 15 bp, Homo sapiens
tagccaatgcacacc

SEQ ID NO: 2026755 - DNA, 15 bp, Homo sapiens
agccaatgcacacca

SEQ ID NO: 2026756 - DNA, 15 bp, Homo sapiens
gccaatgcacaccag

SEQ ID NO: 2026757 - DNA, 15 bp, Homo sapiens
ccaatgcacaccagc

SEQ ID NO: 2026758 - DNA, 15 bp, Homo sapiens
caatgcacaccagcc

SEQ ID NO: 2026759 - DNA, 15 bp, Homo sapiens
aatgcacaccagcct

SEQ ID NO: 2026760 - DNA, 15 bp, Homo sapiens
atgcacaccagcctg

SEQ ID NO: 2026761 - DNA, 15 bp, Homo sapiens
cacaccagcctgggg

SEQ ID NO: 2026762 - DNA, 15 bp, Homo sapiens
acaccagcctgggga

SEQ ID NO: 2026763 - DNA, 15 bp, Homo sapiens
caccagcctggggaa

SEQ ID NO: 2026764 - DNA, 15 bp, Homo sapiens
gaacatagtgagact

SEQ ID NO: 2026765 - DNA, 15 bp, Homo sapiens
aacatagtgagactc

SEQ ID NO: 2026766 - DNA, 15 bp, Homo sapiens
acatagtgagactct

SEQ ID NO: 2026767 - DNA, 15 bp, Homo sapiens
catagtgagactctg

SEQ ID NO: 2026768 - DNA, 15 bp, Homo sapiens
atagtgagactctga

SEQ ID NO: 2026769 - DNA, 15 bp, Homo sapiens
tagtgagactctgac

SEQ ID NO: 2026770 - DNA, 15 bp, Homo sapiens
agtgagactctgact

SEQ ID NO: 2026771 - DNA, 15 bp, Homo sapiens
gtgagactctgacta

SEQ ID NO: 2026772 - DNA, 15 bp, Homo sapiens
tgagactctgactaa

SEQ ID NO: 2026773 - DNA, 15 bp, Homo sapiens
gagactctgactaaa

SEQ ID NO: 2026774 - DNA, 15 bp, Homo sapiens
agactctgactaaaa

SEQ ID NO: 2026775 - DNA, 15 bp, Homo sapiens
gactctgactaaaag

SEQ ID NO: 2026776 - DNA, 15 bp, Homo sapiens
actctgactaaaagt

SEQ ID NO: 2026777 - DNA, 15 bp, Homo sapiens
ctctgactaaaagtt

SEQ ID NO: 2026778 - DNA, 15 bp, Homo sapiens
tctgactaaaagttt

SEQ ID NO: 2026779 - DNA, 15 bp, Homo sapiens
ctgactaaaagtttt

SEQ ID NO: 2026780 - DNA, 15 bp, Homo sapiens
tgactaaaagttttt

SEQ ID NO: 2026781 - DNA, 15 bp, Homo sapiens
gactaaaagtttttt

SEQ ID NO: 2026782 - DNA, 15 bp, Homo sapiens
actaaaagtttttta

SEQ ID NO: 2026783 - DNA, 15 bp, Homo sapiens
ctaaaagttttttaa

SEQ ID NO: 2026784 - DNA, 15 bp, Homo sapiens
taaaagttttttaaa

SEQ ID NO: 2026785 - DNA, 15 bp, Homo sapiens
aaaagttttttaaaa

SEQ ID NO: 2026786 - DNA, 15 bp, Homo sapiens
aaagttttttaaaaa

SEQ ID NO: 2026787 - DNA, 15 bp, Homo sapiens
aagttttttaaaaaa

SEQ ID NO: 2026788 - DNA, 15 bp, Homo sapiens
agttttttaaaaaag

SEQ ID NO: 2026789 - DNA, 15 bp, Homo sapiens
gttttttaaaaaaga

SEQ ID NO: 2026790 - DNA, 15 bp, Homo sapiens
ttttaaaaaagaaaa

SEQ ID NO: 2026791 - DNA, 15 bp, Homo sapiens
tttaaaaaagaaaaa

SEQ ID NO: 2026792 - DNA, 15 bp, Homo sapiens
ttaaaaaagaaaaaa

SEQ ID NO: 2026793 - DNA, 15 bp, Homo sapiens
taaaaaagaaaaaag

SEQ ID NO: 2026794 - DNA, 15 bp, Homo sapiens
aaaaagaaaaaagat

SEQ ID NO: 2026795 - DNA, 15 bp, Homo sapiens
aaaagaaaaaagata

SEQ ID NO: 2026796 - DNA, 15 bp, Homo sapiens
aaagaaaaaagatat

SEQ ID NO: 2026797 - DNA, 15 bp, Homo sapiens
aagaaaaaagatatg

SEQ ID NO: 2026798 - DNA, 15 bp, Homo sapiens
agaaaaaagatatgt

SEQ ID NO: 2026799 - DNA, 15 bp, Homo sapiens
gaaaaaagatatgta

SEQ ID NO: 2026800 - DNA, 15 bp, Homo sapiens
aaaaaagatatgtaa

SEQ ID NO: 2026801 - DNA, 15 bp, Homo sapiens
aaaaagatatgtaaa

SEQ ID NO: 2026802 - DNA, 15 bp, Homo sapiens
aaaagatatgtaaac

SEQ ID NO: 2026803 - DNA, 15 bp, Homo sapiens
aaagatatgtaaaca

SEQ ID NO: 2026804 - DNA, 15 bp, Homo sapiens
aagatatgtaaacag

SEQ ID NO: 2026805 - DNA, 15 bp, Homo sapiens
agatatgtaaacaga

SEQ ID NO: 2026806 - DNA, 15 bp, Homo sapiens
gatatgtaaacagaa

SEQ ID NO: 2026807 - DNA, 15 bp, Homo sapiens
atatgtaaacagaaa

SEQ ID NO: 2026808 - DNA, 15 bp, Homo sapiens
tatgtaaacagaaat

SEQ ID NO: 2026809 - DNA, 15 bp, Homo sapiens
atgtaaacagaaata

SEQ ID NO: 2026810 - DNA, 15 bp, Homo sapiens
tgtaaacagaaataa

SEQ ID NO: 2026811 - DNA, 15 bp, Homo sapiens
gtaaacagaaataat

SEQ ID NO: 2026812 - DNA, 15 bp, Homo sapiens
taaacagaaataata

SEQ ID NO: 2026813 - DNA, 15 bp, Homo sapiens
aaacagaaataataa

SEQ ID NO: 2026814 - DNA, 15 bp, Homo sapiens
aacagaaataataac

SEQ ID NO: 2026815 - DNA, 15 bp, Homo sapiens
acagaaataataaca

SEQ ID NO: 2026816 - DNA, 15 bp, Homo sapiens
cagaaataataacac

SEQ ID NO: 2026817 - DNA, 15 bp, Homo sapiens
agaaataataacact

SEQ ID NO: 2026818 - DNA, 15 bp, Homo sapiens
gaaataataacacta

SEQ ID NO: 2026819 - DNA, 15 bp, Homo sapiens
aaataataacactaa

SEQ ID NO: 2026820 - DNA, 15 bp, Homo sapiens
aataataacactaat

SEQ ID NO: 2026821 - DNA, 15 bp, Homo sapiens
ataataacactaatt

SEQ ID NO: 2026822 - DNA, 15 bp, Homo sapiens
taataacactaattt

SEQ ID NO: 2026823 - DNA, 15 bp, Homo sapiens
aataacactaatttt

SEQ ID NO: 2026824 - DNA, 15 bp, Homo sapiens
ataacactaattttc

SEQ ID NO: 2026825 - DNA, 15 bp, Homo sapiens
taacactaattttca

SEQ ID NO: 2026826 - DNA, 15 bp, Homo sapiens
aacactaattttcac

SEQ ID NO: 2026827 - DNA, 15 bp, Homo sapiens
acactaattttcaca

SEQ ID NO: 2026828 - DNA, 15 bp, Homo sapiens
cactaattttcacat

SEQ ID NO: 2026829 - DNA, 15 bp, Homo sapiens
actaattttcacatt

SEQ ID NO: 2026830 - DNA, 15 bp, Homo sapiens
ctaattttcacattt

SEQ ID NO: 2026831 - DNA, 15 bp, Homo sapiens
taattttcacatttt

SEQ ID NO: 2026832 - DNA, 15 bp, Homo sapiens
aattttcacatttta

SEQ ID NO: 2026833 - DNA, 15 bp, Homo sapiens
attttcacattttag

SEQ ID NO: 2026834 - DNA, 15 bp, Homo sapiens
ttttcacattttagg

SEQ ID NO: 2026835 - DNA, 15 bp, Homo sapiens
tttcacattttagga

SEQ ID NO: 2026836 - DNA, 15 bp, Homo sapiens
ttcacattttaggaa

SEQ ID NO: 2026837 - DNA, 15 bp, Homo sapiens
tcacattttaggaaa

SEQ ID NO: 2026838 - DNA, 15 bp, Homo sapiens
cacattttaggaaaa

SEQ ID NO: 2026839 - DNA, 15 bp, Homo sapiens
acattttaggaaaat

SEQ ID NO: 2026840 - DNA, 15 bp, Homo sapiens
cattttaggaaaatg

SEQ ID NO: 2026841 - DNA, 15 bp, Homo sapiens
attttaggaaaatgg

SEQ ID NO: 2026842 - DNA, 15 bp, Homo sapiens
ttttaggaaaatgga

SEQ ID NO: 2026843 - DNA, 15 bp, Homo sapiens
tttaggaaaatggag

SEQ ID NO: 2026844 - DNA, 15 bp, Homo sapiens
ttaggaaaatggagc

SEQ ID NO: 2026845 - DNA, 15 bp, Homo sapiens
taggaaaatggagct

SEQ ID NO: 2026846 - DNA, 15 bp, Homo sapiens
aggaaaatggagcta

SEQ ID NO: 2026847 - DNA, 15 bp, Homo sapiens
ggaaaatggagctat

SEQ ID NO: 2026848 - DNA, 15 bp, Homo sapiens
gaaaatggagctata

SEQ ID NO: 2026849 - DNA, 15 bp, Homo sapiens
aaaatggagctataa

SEQ ID NO: 2026850 - DNA, 15 bp, Homo sapiens
aaatggagctataag

SEQ ID NO: 2026851 - DNA, 15 bp, Homo sapiens
aatggagctataagc

SEQ ID NO: 2026852 - DNA, 15 bp, Homo sapiens
atggagctataagcc

SEQ ID NO: 2026853 - DNA, 15 bp, Homo sapiens
tggagctataagcct

SEQ ID NO: 2026854 - DNA, 15 bp, Homo sapiens
ggagctataagcctg

SEQ ID NO: 2026855 - DNA, 15 bp, Homo sapiens
gagctataagcctgc

SEQ ID NO: 2026856 - DNA, 15 bp, Homo sapiens
agctataagcctgcc

SEQ ID NO: 2026857 - DNA, 15 bp, Homo sapiens
gctataagcctgcct

SEQ ID NO: 2026858 - DNA, 15 bp, Homo sapiens
ctataagcctgcctt

SEQ ID NO: 2026859 - DNA, 15 bp, Homo sapiens
tataagcctgccttt

SEQ ID NO: 2026860 - DNA, 15 bp, Homo sapiens
ataagcctgccttta

SEQ ID NO: 2026861 - DNA, 15 bp, Homo sapiens
taagcctgcctttaa

SEQ ID NO: 2026862 - DNA, 15 bp, Homo sapiens
aagcctgcctttaat

SEQ ID NO: 2026863 - DNA, 15 bp, Homo sapiens
agcctgcctttaatt

SEQ ID NO: 2026864 - DNA, 15 bp, Homo sapiens
gcctgcctttaattt

SEQ ID NO: 2026865 - DNA, 15 bp, Homo sapiens
cctgcctttaatttc

SEQ ID NO: 2026866 - DNA, 15 bp, Homo sapiens
ctgcctttaatttct

SEQ ID NO: 2026867 - DNA, 15 bp, Homo sapiens
tgcctttaatttcta

SEQ ID NO: 2026868 - DNA, 15 bp, Homo sapiens
gcctttaatttctaa

SEQ ID NO: 2026869 - DNA, 15 bp, Homo sapiens
cctttaatttctaat

SEQ ID NO: 2026870 - DNA, 15 bp, Homo sapiens
ctttaatttctaatt

SEQ ID NO: 2026871 - DNA, 15 bp, Homo sapiens
tttaatttctaattc

SEQ ID NO: 2026872 - DNA, 15 bp, Homo sapiens
ttaatttctaattca

SEQ ID NO: 2026873 - DNA, 15 bp, Homo sapiens
taatttctaattcaa

SEQ ID NO: 2026874 - DNA, 15 bp, Homo sapiens
aatttctaattcaaa

SEQ ID NO: 2026875 - DNA, 15 bp, Homo sapiens
atttctaattcaaag

SEQ ID NO: 2026876 - DNA, 15 bp, Homo sapiens
tttctaattcaaaga

SEQ ID NO: 2026877 - DNA, 15 bp, Homo sapiens
ttctaattcaaagat

SEQ ID NO: 2026878 - DNA, 15 bp, Homo sapiens
tctaattcaaagatc

SEQ ID NO: 2026879 - DNA, 15 bp, Homo sapiens
ctaattcaaagatct

SEQ ID NO: 2026880 - DNA, 15 bp, Homo sapiens
taattcaaagatctt

SEQ ID NO: 2026881 - DNA, 15 bp, Homo sapiens
aattcaaagatcttc

SEQ ID NO: 2026882 - DNA, 15 bp, Homo sapiens
attcaaagatcttca

SEQ ID NO: 2026883 - DNA, 15 bp, Homo sapiens
ttcaaagatcttcat

SEQ ID NO: 2026884 - DNA, 15 bp, Homo sapiens
aaagatcttcattga

SEQ ID NO: 2026885 - DNA, 15 bp, Homo sapiens
aagatcttcattgaa

SEQ ID NO: 2026886 - DNA, 15 bp, Homo sapiens
agatcttcattgaaa

SEQ ID NO: 2026887 - DNA, 15 bp, Homo sapiens
gatcttcattgaaaa

SEQ ID NO: 2026888 - DNA, 15 bp, Homo sapiens
atcttcattgaaaaa

SEQ ID NO: 2026889 - DNA, 15 bp, Homo sapiens
tcttcattgaaaaat

SEQ ID NO: 2026890 - DNA, 15 bp, Homo sapiens
cttcattgaaaaata

SEQ ID NO: 2026891 - DNA, 15 bp, Homo sapiens
ttcattgaaaaatac

SEQ ID NO: 2026892 - DNA, 15 bp, Homo sapiens
tcattgaaaaataca

SEQ ID NO: 2026893 - DNA, 15 bp, Homo sapiens
cattgaaaaatacaa

SEQ ID NO: 2026894 - DNA, 15 bp, Homo sapiens
attgaaaaatacaac

SEQ ID NO: 2026895 - DNA, 15 bp, Homo sapiens
ttgaaaaatacaacc

SEQ ID NO: 2026896 - DNA, 15 bp, Homo sapiens
tgaaaaatacaacct

SEQ ID NO: 2026897 - DNA, 15 bp, Homo sapiens
gaaaaatacaacctt

SEQ ID NO: 2026898 - DNA, 15 bp, Homo sapiens
aaaaatacaaccttt

SEQ ID NO: 2026899 - DNA, 15 bp, Homo sapiens
aaaatacaacctttt

SEQ ID NO: 2026900 - DNA, 15 bp, Homo sapiens
aaatacaacctttta

SEQ ID NO: 2026901 - DNA, 15 bp, Homo sapiens
aatacaaccttttaa

SEQ ID NO: 2026902 - DNA, 15 bp, Homo sapiens
atacaaccttttaac

SEQ ID NO: 2026903 - DNA, 15 bp, Homo sapiens
tacaaccttttaaca

SEQ ID NO: 2026904 - DNA, 15 bp, Homo sapiens
acaaccttttaacaa

SEQ ID NO: 2026905 - DNA, 15 bp, Homo sapiens
caaccttttaacaat

SEQ ID NO: 2026906 - DNA, 15 bp, Homo sapiens
aaccttttaacaatt

SEQ ID NO: 2026907 - DNA, 15 bp, Homo sapiens
accttttaacaatta

SEQ ID NO: 2026908 - DNA, 15 bp, Homo sapiens
ccttttaacaattat

SEQ ID NO: 2026909 - DNA, 15 bp, Homo sapiens
cttttaacaattatt

SEQ ID NO: 2026910 - DNA, 15 bp, Homo sapiens
ttttaacaattatta

SEQ ID NO: 2026911 - DNA, 15 bp, Homo sapiens
tttaacaattattag

SEQ ID NO: 2026912 - DNA, 15 bp, Homo sapiens
ttaacaattattagc

SEQ ID NO: 2026913 - DNA, 15 bp, Homo sapiens
taacaattattagcc

SEQ ID NO: 2026914 - DNA, 15 bp, Homo sapiens
aacaattattagcct

SEQ ID NO: 2026915 - DNA, 15 bp, Homo sapiens
acaattattagcctg

SEQ ID NO: 2026916 - DNA, 15 bp, Homo sapiens
caattattagcctgg

SEQ ID NO: 2026917 - DNA, 15 bp, Homo sapiens
aattattagcctggg

SEQ ID NO: 2026918 - DNA, 15 bp, Homo sapiens
attattagcctgggt

SEQ ID NO: 2026919 - DNA, 15 bp, Homo sapiens
ttattagcctgggta

SEQ ID NO: 2026920 - DNA, 15 bp, Homo sapiens
tattagcctgggtaa

SEQ ID NO: 2026921 - DNA, 15 bp, Homo sapiens
attagcctgggtaaa

SEQ ID NO: 2026922 - DNA, 15 bp, Homo sapiens
ttagcctgggtaaac

SEQ ID NO: 2026923 - DNA, 15 bp, Homo sapiens
tagcctgggtaaacc

SEQ ID NO: 2026924 - DNA, 15 bp, Homo sapiens
agcctgggtaaacct

SEQ ID NO: 2026925 - DNA, 15 bp, Homo sapiens
gcctgggtaaacctg

SEQ ID NO: 2026926 - DNA, 15 bp, Homo sapiens
cctgggtaaacctgt

SEQ ID NO: 2026927 - DNA, 15 bp, Homo sapiens
ctgggtaaacctgta

SEQ ID NO: 2026928 - DNA, 15 bp, Homo sapiens
tgggtaaacctgtat

SEQ ID NO: 2026929 - DNA, 15 bp, Homo sapiens
gggtaaacctgtatt

SEQ ID NO: 2026930 - DNA, 15 bp, Homo sapiens
ggtaaacctgtattc

SEQ ID NO: 2026931 - DNA, 15 bp, Homo sapiens
gtaaacctgtattct

SEQ ID NO: 2026932 - DNA, 15 bp, Homo sapiens
taaacctgtattctt

SEQ ID NO: 2026933 - DNA, 15 bp, Homo sapiens
aaacctgtattcttc

SEQ ID NO: 2026934 - DNA, 15 bp, Homo sapiens
aacctgtattcttct

SEQ ID NO: 2026935 - DNA, 15 bp, Homo sapiens
acctgtattcttctc

SEQ ID NO: 2026936 - DNA, 15 bp, Homo sapiens
cctgtattcttctct

SEQ ID NO: 2026937 - DNA, 15 bp, Homo sapiens
ctgtattcttctcta

SEQ ID NO: 2026938 - DNA, 15 bp, Homo sapiens
tgtattcttctctag

SEQ ID NO: 2026939 - DNA, 15 bp, Homo sapiens
gtattcttctctagt

SEQ ID NO: 2026940 - DNA, 15 bp, Homo sapiens
tattcttctctagtg

SEQ ID NO: 2026941 - DNA, 15 bp, Homo sapiens
attcttctctagtga

SEQ ID NO: 2026942 - DNA, 15 bp, Homo sapiens
ttcttctctagtgac

SEQ ID NO: 2026943 - DNA, 15 bp, Homo sapiens
tcttctctagtgacc

SEQ ID NO: 2026944 - DNA, 15 bp, Homo sapiens
cttctctagtgacct

SEQ ID NO: 2026945 - DNA, 15 bp, Homo sapiens
ttctctagtgaccta

SEQ ID NO: 2026946 - DNA, 15 bp, Homo sapiens
tctctagtgacctaa

SEQ ID NO: 2026947 - DNA, 15 bp, Homo sapiens
ctctagtgacctaaa

SEQ ID NO: 2026948 - DNA, 15 bp, Homo sapiens
tctagtgacctaaag

SEQ ID NO: 2026949 - DNA, 15 bp, Homo sapiens
ctagtgacctaaagc

SEQ ID NO: 2026950 - DNA, 15 bp, Homo sapiens
tagtgacctaaagca

SEQ ID NO: 2026951 - DNA, 15 bp, Homo sapiens
agtgacctaaagcaa

SEQ ID NO: 2026952 - DNA, 15 bp, Homo sapiens
gtgacctaaagcaat

SEQ ID NO: 2026953 - DNA, 15 bp, Homo sapiens
tgacctaaagcaatc

SEQ ID NO: 2026954 - DNA, 15 bp, Homo sapiens
gacctaaagcaatct

SEQ ID NO: 2026955 - DNA, 15 bp, Homo sapiens
acctaaagcaatctc

SEQ ID NO: 2026956 - DNA, 15 bp, Homo sapiens
cctaaagcaatctct

SEQ ID NO: 2026957 - DNA, 15 bp, Homo sapiens
ctaaagcaatctctg

SEQ ID NO: 2026958 - DNA, 15 bp, Homo sapiens
taaagcaatctctga

SEQ ID NO: 2026959 - DNA, 15 bp, Homo sapiens
aaagcaatctctgac

SEQ ID NO: 2026960 - DNA, 15 bp, Homo sapiens
aagcaatctctgaca

SEQ ID NO: 2026961 - DNA, 15 bp, Homo sapiens
agcaatctctgacag

SEQ ID NO: 2026962 - DNA, 15 bp, Homo sapiens
gcaatctctgacagc

SEQ ID NO: 2026963 - DNA, 15 bp, Homo sapiens
caatctctgacagct

SEQ ID NO: 2026964 - DNA, 15 bp, Homo sapiens
aatctctgacagctt

SEQ ID NO: 2026965 - DNA, 15 bp, Homo sapiens
atctctgacagcttc

SEQ ID NO: 2026966 - DNA, 15 bp, Homo sapiens
tctctgacagcttct

SEQ ID NO: 2026967 - DNA, 15 bp, Homo sapiens
ctctgacagcttctg

SEQ ID NO: 2026968 - DNA, 15 bp, Homo sapiens
tctgacagcttctgc

SEQ ID NO: 2026969 - DNA, 15 bp, Homo sapiens
ctgacagcttctgct

SEQ ID NO: 2026970 - DNA, 15 bp, Homo sapiens
tgacagcttctgctt

SEQ ID NO: 2026971 - DNA, 15 bp, Homo sapiens
gacagcttctgcttt

SEQ ID NO: 2026972 - DNA, 15 bp, Homo sapiens
acagcttctgctttt

SEQ ID NO: 2026973 - DNA, 15 bp, Homo sapiens
cagcttctgcttttt

SEQ ID NO: 2026974 - DNA, 15 bp, Homo sapiens
agcttctgctttttg

SEQ ID NO: 2026975 - DNA, 15 bp, Homo sapiens
gcttctgctttttgc

SEQ ID NO: 2026976 - DNA, 15 bp, Homo sapiens
cttctgctttttgct

SEQ ID NO: 2026977 - DNA, 15 bp, Homo sapiens
ttctgctttttgctg

SEQ ID NO: 2026978 - DNA, 15 bp, Homo sapiens
tctgctttttgctga

SEQ ID NO: 2026979 - DNA, 15 bp, Homo sapiens
ctgctttttgctgaa

SEQ ID NO: 2026980 - DNA, 15 bp, Homo sapiens
tgctttttgctgaag

SEQ ID NO: 2026981 - DNA, 15 bp, Homo sapiens
gctttttgctgaagc

SEQ ID NO: 2026982 - DNA, 15 bp, Homo sapiens
ctttttgctgaagca

SEQ ID NO: 2026983 - DNA, 15 bp, Homo sapiens
tttttgctgaagcat

SEQ ID NO: 2026984 - DNA, 15 bp, Homo sapiens
ttttgctgaagcatg

SEQ ID NO: 2026985 - DNA, 15 bp, Homo sapiens
tttgctgaagcatgt

SEQ ID NO: 2026986 - DNA, 15 bp, Homo sapiens
ttgctgaagcatgtc

SEQ ID NO: 2026987 - DNA, 15 bp, Homo sapiens
tgctgaagcatgtca

SEQ ID NO: 2026988 - DNA, 15 bp, Homo sapiens
gctgaagcatgtcat

SEQ ID NO: 2026989 - DNA, 15 bp, Homo sapiens
ctgaagcatgtcatc

SEQ ID NO: 2026990 - DNA, 15 bp, Homo sapiens
tgaagcatgtcatcc

SEQ ID NO: 2026991 - DNA, 15 bp, Homo sapiens
gaagcatgtcatccc

SEQ ID NO: 2026992 - DNA, 15 bp, Homo sapiens
aagcatgtcatccca

SEQ ID NO: 2026993 - DNA, 15 bp, Homo sapiens
agcatgtcatcccag

SEQ ID NO: 2026994 - DNA, 15 bp, Homo sapiens
gcatgtcatcccaga

SEQ ID NO: 2026995 - DNA, 15 bp, Homo sapiens
catgtcatcccagag

SEQ ID NO: 2026996 - DNA, 15 bp, Homo sapiens
atgtcatcccagaga

SEQ ID NO: 2026997 - DNA, 15 bp, Homo sapiens
tgtcatcccagagaa

SEQ ID NO: 2026998 - DNA, 15 bp, Homo sapiens
gtcatcccagagaaa

SEQ ID NO: 2026999 - DNA, 15 bp, Homo sapiens
tcatcccagagaaaa

SEQ ID NO: 2027000 - DNA, 15 bp, Homo sapiens
catcccagagaaaaa

SEQ ID NO: 2027001 - DNA, 15 bp, Homo sapiens
atcccagagaaaaag

SEQ ID NO: 2027002 - DNA, 15 bp, Homo sapiens
tcccagagaaaaagc

SEQ ID NO: 2027003 - DNA, 15 bp, Homo sapiens
cccagagaaaaagcc

SEQ ID NO: 2027004 - DNA, 15 bp, Homo sapiens
ccagagaaaaagcct

SEQ ID NO: 2027005 - DNA, 15 bp, Homo sapiens
cagagaaaaagcctt

SEQ ID NO: 2027006 - DNA, 15 bp, Homo sapiens
agagaaaaagccttt

SEQ ID NO: 2027007 - DNA, 15 bp, Homo sapiens
gagaaaaagccttta

SEQ ID NO: 2027008 - DNA, 15 bp, Homo sapiens
agaaaaagcctttag

SEQ ID NO: 2027009 - DNA, 15 bp, Homo sapiens
gaaaaagcctttagg

SEQ ID NO: 2027010 - DNA, 15 bp, Homo sapiens
aaaaagcctttaggc

SEQ ID NO: 2027011 - DNA, 15 bp, Homo sapiens
aaaagcctttaggca

SEQ ID NO: 2027012 - DNA, 15 bp, Homo sapiens
aaagcctttaggcag

SEQ ID NO: 2027013 - DNA, 15 bp, Homo sapiens
aagcctttaggcaga

SEQ ID NO: 2027014 - DNA, 15 bp, Homo sapiens
agcctttaggcagac

SEQ ID NO: 2027015 - DNA, 15 bp, Homo sapiens
gcctttaggcagact

SEQ ID NO: 2027016 - DNA, 15 bp, Homo sapiens
cctttaggcagactt

SEQ ID NO: 2027017 - DNA, 15 bp, Homo sapiens
ctttaggcagactta

SEQ ID NO: 2027018 - DNA, 15 bp, Homo sapiens
tttaggcagacttaa

SEQ ID NO: 2027019 - DNA, 15 bp, Homo sapiens
ttaggcagacttaaa

SEQ ID NO: 2027020 - DNA, 15 bp, Homo sapiens
taggcagacttaaat

SEQ ID NO: 2027021 - DNA, 15 bp, Homo sapiens
aggcagacttaaatt

SEQ ID NO: 2027022 - DNA, 15 bp, Homo sapiens
ggcagacttaaattc

SEQ ID NO: 2027023 - DNA, 15 bp, Homo sapiens
gcagacttaaattcc

SEQ ID NO: 2027024 - DNA, 15 bp, Homo sapiens
cagacttaaattcca

SEQ ID NO: 2027025 - DNA, 15 bp, Homo sapiens
agacttaaattccag

SEQ ID NO: 2027026 - DNA, 15 bp, Homo sapiens
gacttaaattccagt

SEQ ID NO: 2027027 - DNA, 15 bp, Homo sapiens
acttaaattccagtg

SEQ ID NO: 2027028 - DNA, 15 bp, Homo sapiens
cttaaattccagtgg

SEQ ID NO: 2027029 - DNA, 15 bp, Homo sapiens
ttaaattccagtggc

SEQ ID NO: 2027030 - DNA, 15 bp, Homo sapiens
taaattccagtggct

SEQ ID NO: 2027031 - DNA, 15 bp, Homo sapiens
aaattccagtggctt

SEQ ID NO: 2027032 - DNA, 15 bp, Homo sapiens
aattccagtggcttt

SEQ ID NO: 2027033 - DNA, 15 bp, Homo sapiens
attccagtggctttt

SEQ ID NO: 2027034 - DNA, 15 bp, Homo sapiens
ttccagtggcttttt

SEQ ID NO: 2027035 - DNA, 15 bp, Homo sapiens
tccagtggctttttt

SEQ ID NO: 2027036 - DNA, 15 bp, Homo sapiens
ccagtggcttttttt

SEQ ID NO: 2027037 - DNA, 15 bp, Homo sapiens
cagtggctttttttc

SEQ ID NO: 2027038 - DNA, 15 bp, Homo sapiens
agtggctttttttcc

SEQ ID NO: 2027039 - DNA, 15 bp, Homo sapiens
gtggctttttttccc

SEQ ID NO: 2027040 - DNA, 15 bp, Homo sapiens
tggctttttttccct

SEQ ID NO: 2027041 - DNA, 15 bp, Homo sapiens
ggctttttttcccta

SEQ ID NO: 2027042 - DNA, 15 bp, Homo sapiens
gctttttttccctat

SEQ ID NO: 2027043 - DNA, 15 bp, Homo sapiens
ctttttttccctata

SEQ ID NO: 2027044 - DNA, 15 bp, Homo sapiens
tttttttccctatat

SEQ ID NO: 2027045 - DNA, 15 bp, Homo sapiens
ttttttccctatatg

SEQ ID NO: 2027046 - DNA, 15 bp, Homo sapiens
tttttccctatatgg

SEQ ID NO: 2027047 - DNA, 15 bp, Homo sapiens
ttttccctatatggt

SEQ ID NO: 2027048 - DNA, 15 bp, Homo sapiens
tttccctatatggtt

SEQ ID NO: 2027049 - DNA, 15 bp, Homo sapiens
ttccctatatggttg

SEQ ID NO: 2027050 - DNA, 15 bp, Homo sapiens
tccctatatggttgt

SEQ ID NO: 2027051 - DNA, 15 bp, Homo sapiens
ccctatatggttgtt

SEQ ID NO: 2027052 - DNA, 15 bp, Homo sapiens
cctatatggttgttg

SEQ ID NO: 2027053 - DNA, 15 bp, Homo sapiens
ctatatggttgttgc

SEQ ID NO: 2027054 - DNA, 15 bp, Homo sapiens
tatatggttgttgca

SEQ ID NO: 2027055 - DNA, 15 bp, Homo sapiens
atatggttgttgcat

SEQ ID NO: 2027056 - DNA, 15 bp, Homo sapiens
tatggttgttgcatc

SEQ ID NO: 2027057 - DNA, 15 bp, Homo sapiens
atggttgttgcatca

SEQ ID NO: 2027058 - DNA, 15 bp, Homo sapiens
tggttgttgcatcaa

SEQ ID NO: 2027059 - DNA, 15 bp, Homo sapiens
ggttgttgcatcaat

SEQ ID NO: 2027060 - DNA, 15 bp, Homo sapiens
gttgttgcatcaata

SEQ ID NO: 2027061 - DNA, 15 bp, Homo sapiens
ttgttgcatcaatat

SEQ ID NO: 2027062 - DNA, 15 bp, Homo sapiens
tgttgcatcaatata

SEQ ID NO: 2027063 - DNA, 15 bp, Homo sapiens
gttgcatcaatatag

SEQ ID NO: 2027064 - DNA, 15 bp, Homo sapiens
ttgcatcaatatagt

SEQ ID NO: 2027065 - DNA, 15 bp, Homo sapiens
tgcatcaatatagta

SEQ ID NO: 2027066 - DNA, 15 bp, Homo sapiens
gcatcaatatagtag

SEQ ID NO: 2027067 - DNA, 15 bp, Homo sapiens
catcaatatagtagc

SEQ ID NO: 2027068 - DNA, 15 bp, Homo sapiens
atcaatatagtagca

SEQ ID NO: 2027069 - DNA, 15 bp, Homo sapiens
tcaatatagtagcat

SEQ ID NO: 2027070 - DNA, 15 bp, Homo sapiens
caatatagtagcatg

SEQ ID NO: 2027071 - DNA, 15 bp, Homo sapiens
aatatagtagcatga

SEQ ID NO: 2027072 - DNA, 15 bp, Homo sapiens
atatagtagcatgat

SEQ ID NO: 2027073 - DNA, 15 bp, Homo sapiens
tatagtagcatgata

SEQ ID NO: 2027074 - DNA, 15 bp, Homo sapiens
atagtagcatgataa

SEQ ID NO: 2027075 - DNA, 15 bp, Homo sapiens
tagtagcatgataaa

SEQ ID NO: 2027076 - DNA, 15 bp, Homo sapiens
agtagcatgataaac

SEQ ID NO: 2027077 - DNA, 15 bp, Homo sapiens
gtagcatgataaaca

SEQ ID NO: 2027078 - DNA, 15 bp, Homo sapiens
tagcatgataaacat

SEQ ID NO: 2027079 - DNA, 15 bp, Homo sapiens
agcatgataaacatt

SEQ ID NO: 2027080 - DNA, 15 bp, Homo sapiens
gcatgataaacattc

SEQ ID NO: 2027081 - DNA, 15 bp, Homo sapiens
catgataaacattca

SEQ ID NO: 2027082 - DNA, 15 bp, Homo sapiens
atgataaacattcag

SEQ ID NO: 2027083 - DNA, 15 bp, Homo sapiens
tgataaacattcaga

SEQ ID NO: 2027084 - DNA, 15 bp, Homo sapiens
gataaacattcagag

SEQ ID NO: 2027085 - DNA, 15 bp, Homo sapiens
ataaacattcagagg

SEQ ID NO: 2027086 - DNA, 15 bp, Homo sapiens
taaacattcagaggt

SEQ ID NO: 2027087 - DNA, 15 bp, Homo sapiens
aaacattcagaggta

SEQ ID NO: 2027088 - DNA, 15 bp, Homo sapiens
aacattcagaggtaa

SEQ ID NO: 2027089 - DNA, 15 bp, Homo sapiens
acattcagaggtaag

SEQ ID NO: 2027090 - DNA, 15 bp, Homo sapiens
cattcagaggtaagg

SEQ ID NO: 2027091 - DNA, 15 bp, Homo sapiens
attcagaggtaagga

SEQ ID NO: 2027092 - DNA, 15 bp, Homo sapiens
ttcagaggtaaggaa

SEQ ID NO: 2027093 - DNA, 15 bp, Homo sapiens
tcagaggtaaggaaa

SEQ ID NO: 2027094 - DNA, 15 bp, Homo sapiens
cagaggtaaggaaaa

SEQ ID NO: 2027095 - DNA, 15 bp, Homo sapiens
agaggtaaggaaaac

SEQ ID NO: 2027096 - DNA, 15 bp, Homo sapiens
gaggtaaggaaaacc

SEQ ID NO: 2027097 - DNA, 15 bp, Homo sapiens
aggtaaggaaaacct

SEQ ID NO: 2027098 - DNA, 15 bp, Homo sapiens
ggtaaggaaaacctg

SEQ ID NO: 2027099 - DNA, 15 bp, Homo sapiens
gtaaggaaaacctga

SEQ ID NO: 2027100 - DNA, 15 bp, Homo sapiens
taaggaaaacctgac

SEQ ID NO: 2027101 - DNA, 15 bp, Homo sapiens
aaggaaaacctgaca

SEQ ID NO: 2027102 - DNA, 15 bp, Homo sapiens
aggaaaacctgacag

SEQ ID NO: 2027103 - DNA, 15 bp, Homo sapiens
ggaaaacctgacagt

SEQ ID NO: 2027104 - DNA, 15 bp, Homo sapiens
gaaaacctgacagtt

SEQ ID NO: 2027105 - DNA, 15 bp, Homo sapiens
aaaacctgacagtta

SEQ ID NO: 2027106 - DNA, 15 bp, Homo sapiens
aaacctgacagttac

SEQ ID NO: 2027107 - DNA, 15 bp, Homo sapiens
aacctgacagttact

SEQ ID NO: 2027108 - DNA, 15 bp, Homo sapiens
acctgacagttactg

SEQ ID NO: 2027109 - DNA, 15 bp, Homo sapiens
cctgacagttactga

SEQ ID NO: 2027110 - DNA, 15 bp, Homo sapiens
ctgacagttactgaa

SEQ ID NO: 2027111 - DNA, 15 bp, Homo sapiens
tgacagttactgaac

SEQ ID NO: 2027112 - DNA, 15 bp, Homo sapiens
gacagttactgaaca

SEQ ID NO: 2027113 - DNA, 15 bp, Homo sapiens
acagttactgaacaa

SEQ ID NO: 2027114 - DNA, 15 bp, Homo sapiens
cagttactgaacaaa

SEQ ID NO: 2027115 - DNA, 15 bp, Homo sapiens
agttactgaacaaac

SEQ ID NO: 2027116 - DNA, 15 bp, Homo sapiens
gttactgaacaaact

SEQ ID NO: 2027117 - DNA, 15 bp, Homo sapiens
ttactgaacaaacta

SEQ ID NO: 2027118 - DNA, 15 bp, Homo sapiens
tactgaacaaactat

SEQ ID NO: 2027119 - DNA, 15 bp, Homo sapiens
actgaacaaactatt

SEQ ID NO: 2027120 - DNA, 15 bp, Homo sapiens
ctgaacaaactattt

SEQ ID NO: 2027121 - DNA, 15 bp, Homo sapiens
tgaacaaactatttc

SEQ ID NO: 2027122 - DNA, 15 bp, Homo sapiens
gaacaaactatttcc

SEQ ID NO: 2027123 - DNA, 15 bp, Homo sapiens
aacaaactatttcct

SEQ ID NO: 2027124 - DNA, 15 bp, Homo sapiens
acaaactatttcctt

SEQ ID NO: 2027125 - DNA, 15 bp, Homo sapiens
caaactatttccttt

SEQ ID NO: 2027126 - DNA, 15 bp, Homo sapiens
aaactatttccttta

SEQ ID NO: 2027127 - DNA, 15 bp, Homo sapiens
aactatttcctttac

SEQ ID NO: 2027128 - DNA, 15 bp, Homo sapiens
actatttcctttact

SEQ ID NO: 2027129 - DNA, 15 bp, Homo sapiens
ctatttcctttactg

SEQ ID NO: 2027130 - DNA, 15 bp, Homo sapiens
tatttcctttactgg

SEQ ID NO: 2027131 - DNA, 15 bp, Homo sapiens
atttcctttactgga

SEQ ID NO: 2027132 - DNA, 15 bp, Homo sapiens
tttcctttactggac

SEQ ID NO: 2027133 - DNA, 15 bp, Homo sapiens
ttcctttactggaca

SEQ ID NO: 2027134 - DNA, 15 bp, Homo sapiens
tcctttactggacag

SEQ ID NO: 2027135 - DNA, 15 bp, Homo sapiens
cctttactggacagg

SEQ ID NO: 2027136 - DNA, 15 bp, Homo sapiens
ctttactggacaggg

SEQ ID NO: 2027137 - DNA, 15 bp, Homo sapiens
tttactggacagggg

SEQ ID NO: 2027138 - DNA, 15 bp, Homo sapiens
ttactggacagggga

SEQ ID NO: 2027139 - DNA, 15 bp, Homo sapiens
tactggacaggggag

SEQ ID NO: 2027140 - DNA, 15 bp, Homo sapiens
actggacaggggaga

SEQ ID NO: 2027141 - DNA, 15 bp, Homo sapiens
ctggacaggggagaa

SEQ ID NO: 2027142 - DNA, 15 bp, Homo sapiens
tggacaggggagaaa

SEQ ID NO: 2027143 - DNA, 15 bp, Homo sapiens
ggacaggggagaaaa

SEQ ID NO: 2027144 - DNA, 15 bp, Homo sapiens
gacaggggagaaaat

SEQ ID NO: 2027145 - DNA, 15 bp, Homo sapiens
acaggggagaaaatt

SEQ ID NO: 2027146 - DNA, 15 bp, Homo sapiens
caggggagaaaatta

SEQ ID NO: 2027147 - DNA, 15 bp, Homo sapiens
aggggagaaaattaa

SEQ ID NO: 2027148 - DNA, 15 bp, Homo sapiens
ggggagaaaattaaa

SEQ ID NO: 2027149 - DNA, 15 bp, Homo sapiens
gggagaaaattaaaa

SEQ ID NO: 2027150 - DNA, 15 bp, Homo sapiens
ggagaaaattaaaat

SEQ ID NO: 2027151 - DNA, 15 bp, Homo sapiens
gagaaaattaaaatt

SEQ ID NO: 2027152 - DNA, 15 bp, Homo sapiens
agaaaattaaaattt

SEQ ID NO: 2027153 - DNA, 15 bp, Homo sapiens
gaaaattaaaatttt

SEQ ID NO: 2027154 - DNA, 15 bp, Homo sapiens
aaaattaaaattttt

SEQ ID NO: 2027155 - DNA, 15 bp, Homo sapiens
aaattaaaattttta

SEQ ID NO: 2027156 - DNA, 15 bp, Homo sapiens
aattaaaatttttaa

SEQ ID NO: 2027157 - DNA, 15 bp, Homo sapiens
attaaaatttttaaa

SEQ ID NO: 2027158 - DNA, 15 bp, Homo sapiens
ttaaaatttttaaat

SEQ ID NO: 2027159 - DNA, 15 bp, Homo sapiens
taaaatttttaaatt

SEQ ID NO: 2027160 - DNA, 15 bp, Homo sapiens
aaaatttttaaattg

SEQ ID NO: 2027161 - DNA, 15 bp, Homo sapiens
aaatttttaaattga

SEQ ID NO: 2027162 - DNA, 15 bp, Homo sapiens
atttttaaattgagt

SEQ ID NO: 2027163 - DNA, 15 bp, Homo sapiens
tttttaaattgagtc

SEQ ID NO: 2027164 - DNA, 15 bp, Homo sapiens
ttttaaattgagtct

SEQ ID NO: 2027165 - DNA, 15 bp, Homo sapiens
tttaaattgagtctg

SEQ ID NO: 2027166 - DNA, 15 bp, Homo sapiens
ttaaattgagtctga

SEQ ID NO: 2027167 - DNA, 15 bp, Homo sapiens
taaattgagtctgag

SEQ ID NO: 2027168 - DNA, 15 bp, Homo sapiens
aaattgagtctgagt

SEQ ID NO: 2027169 - DNA, 15 bp, Homo sapiens
aattgagtctgagtc

SEQ ID NO: 2027170 - DNA, 15 bp, Homo sapiens
attgagtctgagtct

SEQ ID NO: 2027171 - DNA, 15 bp, Homo sapiens
ttgagtctgagtctt

SEQ ID NO: 2027172 - DNA, 15 bp, Homo sapiens
tgagtctgagtcttt

SEQ ID NO: 2027173 - DNA, 15 bp, Homo sapiens
gagtctgagtctttt

SEQ ID NO: 2027174 - DNA, 15 bp, Homo sapiens
agtctgagtctttta

SEQ ID NO: 2027175 - DNA, 15 bp, Homo sapiens
gtctgagtcttttag

SEQ ID NO: 2027176 - DNA, 15 bp, Homo sapiens
tctgagtcttttagg

SEQ ID NO: 2027177 - DNA, 15 bp, Homo sapiens
ctgagtcttttaggc

SEQ ID NO: 2027178 - DNA, 15 bp, Homo sapiens
tgagtcttttaggct

SEQ ID NO: 2027179 - DNA, 15 bp, Homo sapiens
gagtcttttaggctg

SEQ ID NO: 2027180 - DNA, 15 bp, Homo sapiens
agtcttttaggctgt

SEQ ID NO: 2027181 - DNA, 15 bp, Homo sapiens
gtcttttaggctgtc

SEQ ID NO: 2027182 - DNA, 15 bp, Homo sapiens
tcttttaggctgtct

SEQ ID NO: 2027183 - DNA, 15 bp, Homo sapiens
cttttaggctgtctc

SEQ ID NO: 2027184 - DNA, 15 bp, Homo sapiens
ttttaggctgtctcc

SEQ ID NO: 2027185 - DNA, 15 bp, Homo sapiens
tttaggctgtctcct

SEQ ID NO: 2027186 - DNA, 15 bp, Homo sapiens
ttaggctgtctccta

SEQ ID NO: 2027187 - DNA, 15 bp, Homo sapiens
taggctgtctcctaa

SEQ ID NO: 2027188 - DNA, 15 bp, Homo sapiens
aggctgtctcctaaa

SEQ ID NO: 2027189 - DNA, 15 bp, Homo sapiens
ggctgtctcctaaat

SEQ ID NO: 2027190 - DNA, 15 bp, Homo sapiens
gctgtctcctaaatt

SEQ ID NO: 2027191 - DNA, 15 bp, Homo sapiens
ctgtctcctaaattg

SEQ ID NO: 2027192 - DNA, 15 bp, Homo sapiens
tgtctcctaaattgc

SEQ ID NO: 2027193 - DNA, 15 bp, Homo sapiens
gtctcctaaattgct

SEQ ID NO: 2027194 - DNA, 15 bp, Homo sapiens
tctcctaaattgctt

SEQ ID NO: 2027195 - DNA, 15 bp, Homo sapiens
ctcctaaattgctta

SEQ ID NO: 2027196 - DNA, 15 bp, Homo sapiens
tcctaaattgcttaa

SEQ ID NO: 2027197 - DNA, 15 bp, Homo sapiens
cctaaattgcttaaa

SEQ ID NO: 2027198 - DNA, 15 bp, Homo sapiens
ctaaattgcttaaat

SEQ ID NO: 2027199 - DNA, 15 bp, Homo sapiens
taaattgcttaaata

SEQ ID NO: 2027200 - DNA, 15 bp, Homo sapiens
aaattgcttaaatat

SEQ ID NO: 2027201 - DNA, 15 bp, Homo sapiens
aattgcttaaatata

SEQ ID NO: 2027202 - DNA, 15 bp, Homo sapiens
attgcttaaatatat

SEQ ID NO: 2027203 - DNA, 15 bp, Homo sapiens
ttgcttaaatatatt

SEQ ID NO: 2027204 - DNA, 15 bp, Homo sapiens
tgcttaaatatattt

SEQ ID NO: 2027205 - DNA, 15 bp, Homo sapiens
gcttaaatatatttt

SEQ ID NO: 2027206 - DNA, 15 bp, Homo sapiens
cttaaatatattttc

SEQ ID NO: 2027207 - DNA, 15 bp, Homo sapiens
ttaaatatattttca

SEQ ID NO: 2027208 - DNA, 15 bp, Homo sapiens
taaatatattttcag

SEQ ID NO: 2027209 - DNA, 15 bp, Homo sapiens
aaatatattttcaga

SEQ ID NO: 2027210 - DNA, 15 bp, Homo sapiens
aatatattttcagac

SEQ ID NO: 2027211 - DNA, 15 bp, Homo sapiens
atatattttcagaca

SEQ ID NO: 2027212 - DNA, 15 bp, Homo sapiens
tatattttcagacat

SEQ ID NO: 2027213 - DNA, 15 bp, Homo sapiens
atattttcagacatt

SEQ ID NO: 2027214 - DNA, 15 bp, Homo sapiens
tattttcagacattt

SEQ ID NO: 2027215 - DNA, 15 bp, Homo sapiens
ttttcagacatttgt

SEQ ID NO: 2027216 - DNA, 15 bp, Homo sapiens
tttcagacatttgta

SEQ ID NO: 2027217 - DNA, 15 bp, Homo sapiens
ttcagacatttgtaa

SEQ ID NO: 2027218 - DNA, 15 bp, Homo sapiens
tcagacatttgtaag

SEQ ID NO: 2027219 - DNA, 15 bp, Homo sapiens
cagacatttgtaagt

SEQ ID NO: 2027220 - DNA, 15 bp, Homo sapiens
agacatttgtaagtg

SEQ ID NO: 2027221 - DNA, 15 bp, Homo sapiens
gacatttgtaagtga

SEQ ID NO: 2027222 - DNA, 15 bp, Homo sapiens
acatttgtaagtgat

SEQ ID NO: 2027223 - DNA, 15 bp, Homo sapiens
catttgtaagtgatg

SEQ ID NO: 2027224 - DNA, 15 bp, Homo sapiens
atttgtaagtgatgt

SEQ ID NO: 2027225 - DNA, 15 bp, Homo sapiens
tttgtaagtgatgtt

SEQ ID NO: 2027226 - DNA, 15 bp, Homo sapiens
ttgtaagtgatgttt

SEQ ID NO: 2027227 - DNA, 15 bp, Homo sapiens
tgtaagtgatgtttg

SEQ ID NO: 2027228 - DNA, 15 bp, Homo sapiens
gtaagtgatgtttgg

SEQ ID NO: 2027229 - DNA, 15 bp, Homo sapiens
taagtgatgtttggt

SEQ ID NO: 2027230 - DNA, 15 bp, Homo sapiens
aagtgatgtttggtc

SEQ ID NO: 2027231 - DNA, 15 bp, Homo sapiens
agtgatgtttggtct

SEQ ID NO: 2027232 - DNA, 15 bp, Homo sapiens
gtgatgtttggtctc

SEQ ID NO: 2027233 - DNA, 15 bp, Homo sapiens
tgatgtttggtctca

SEQ ID NO: 2027234 - DNA, 15 bp, Homo sapiens
gatgtttggtctcaa

SEQ ID NO: 2027235 - DNA, 15 bp, Homo sapiens
atgtttggtctcaat

SEQ ID NO: 2027236 - DNA, 15 bp, Homo sapiens
tgtttggtctcaatg

SEQ ID NO: 2027237 - DNA, 15 bp, Homo sapiens
gtttggtctcaatga

SEQ ID NO: 2027238 - DNA, 15 bp, Homo sapiens
tttggtctcaatgaa

SEQ ID NO: 2027239 - DNA, 15 bp, Homo sapiens
ttggtctcaatgaaa

SEQ ID NO: 2027240 - DNA, 15 bp, Homo sapiens
tggtctcaatgaaac

SEQ ID NO: 2027241 - DNA, 15 bp, Homo sapiens
ggtctcaatgaaacc

SEQ ID NO: 2027242 - DNA, 15 bp, Homo sapiens
gtctcaatgaaacct

SEQ ID NO: 2027243 - DNA, 15 bp, Homo sapiens
tctcaatgaaacctg

SEQ ID NO: 2027244 - DNA, 15 bp, Homo sapiens
ctcaatgaaacctgg

SEQ ID NO: 2027245 - DNA, 15 bp, Homo sapiens
tcaatgaaacctgga

SEQ ID NO: 2027246 - DNA, 15 bp, Homo sapiens
caatgaaacctggat

SEQ ID NO: 2027247 - DNA, 15 bp, Homo sapiens
aatgaaacctggata

SEQ ID NO: 2027248 - DNA, 15 bp, Homo sapiens
atgaaacctggatat

SEQ ID NO: 2027249 - DNA, 15 bp, Homo sapiens
tgaaacctggatatt

SEQ ID NO: 2027250 - DNA, 15 bp, Homo sapiens
gaaacctggatatta

SEQ ID NO: 2027251 - DNA, 15 bp, Homo sapiens
aaacctggatattat

SEQ ID NO: 2027252 - DNA, 15 bp, Homo sapiens
aacctggatattata

SEQ ID NO: 2027253 - DNA, 15 bp, Homo sapiens
acctggatattatag

SEQ ID NO: 2027254 - DNA, 15 bp, Homo sapiens
cctggatattatagt

SEQ ID NO: 2027255 - DNA, 15 bp, Homo sapiens
ctggatattatagtt

SEQ ID NO: 2027256 - DNA, 15 bp, Homo sapiens
tggatattatagttt

SEQ ID NO: 2027257 - DNA, 15 bp, Homo sapiens
ggatattatagtttt

SEQ ID NO: 2027258 - DNA, 15 bp, Homo sapiens
gatattatagttttt

SEQ ID NO: 2027259 - DNA, 15 bp, Homo sapiens
atattatagtttttt

SEQ ID NO: 2027260 - DNA, 15 bp, Homo sapiens
attatagtttttttc

SEQ ID NO: 2027261 - DNA, 15 bp, Homo sapiens
ttatagtttttttcc

SEQ ID NO: 2027262 - DNA, 15 bp, Homo sapiens
tatagtttttttcca

SEQ ID NO: 2027263 - DNA, 15 bp, Homo sapiens
atagtttttttccat

SEQ ID NO: 2027264 - DNA, 15 bp, Homo sapiens
tagtttttttccata

SEQ ID NO: 2027265 - DNA, 15 bp, Homo sapiens
agtttttttccatat

SEQ ID NO: 2027266 - DNA, 15 bp, Homo sapiens
gtttttttccatatt

SEQ ID NO: 2027267 - DNA, 15 bp, Homo sapiens
tttttttccatattg

SEQ ID NO: 2027268 - DNA, 15 bp, Homo sapiens
ttttttccatattgg

SEQ ID NO: 2027269 - DNA, 15 bp, Homo sapiens
tttttccatattggt

SEQ ID NO: 2027270 - DNA, 15 bp, Homo sapiens
ttttccatattggtg

SEQ ID NO: 2027271 - DNA, 15 bp, Homo sapiens
tttccatattggtgg

SEQ ID NO: 2027272 - DNA, 15 bp, Homo sapiens
ttccatattggtggt

SEQ ID NO: 2027273 - DNA, 15 bp, Homo sapiens
tccatattggtggtt

SEQ ID NO: 2027274 - DNA, 15 bp, Homo sapiens
ccatattggtggtta

SEQ ID NO: 2027275 - DNA, 15 bp, Homo sapiens
catattggtggttat

SEQ ID NO: 2027276 - DNA, 15 bp, Homo sapiens
atattggtggttata

SEQ ID NO: 2027277 - DNA, 15 bp, Homo sapiens
tattggtggttatat

SEQ ID NO: 2027278 - DNA, 15 bp, Homo sapiens
attggtggttatata

SEQ ID NO: 2027279 - DNA, 15 bp, Homo sapiens
ttggtggttatatat

SEQ ID NO: 2027280 - DNA, 15 bp, Homo sapiens
tggtggttatatatg

SEQ ID NO: 2027281 - DNA, 15 bp, Homo sapiens
ggtggttatatatga

SEQ ID NO: 2027282 - DNA, 15 bp, Homo sapiens
gtggttatatatgat

SEQ ID NO: 2027283 - DNA, 15 bp, Homo sapiens
tggttatatatgatg

SEQ ID NO: 2027284 - DNA, 15 bp, Homo sapiens
ggttatatatgatgt

SEQ ID NO: 2027285 - DNA, 15 bp, Homo sapiens
gttatatatgatgta

SEQ ID NO: 2027286 - DNA, 15 bp, Homo sapiens
ttatatatgatgtaa

SEQ ID NO: 2027287 - DNA, 15 bp, Homo sapiens
tatatatgatgtaat

SEQ ID NO: 2027288 - DNA, 15 bp, Homo sapiens
atatatgatgtaatg

SEQ ID NO: 2027289 - DNA, 15 bp, Homo sapiens
tatatgatgtaatga

SEQ ID NO: 2027290 - DNA, 15 bp, Homo sapiens
atatgatgtaatgag

SEQ ID NO: 2027291 - DNA, 15 bp, Homo sapiens
tatgatgtaatgagg

SEQ ID NO: 2027292 - DNA, 15 bp, Homo sapiens
atgatgtaatgaggt

SEQ ID NO: 2027293 - DNA, 15 bp, Homo sapiens
tgatgtaatgaggtc

SEQ ID NO: 2027294 - DNA, 15 bp, Homo sapiens
gatgtaatgaggtca

SEQ ID NO: 2027295 - DNA, 15 bp, Homo sapiens
atgtaatgaggtcat

SEQ ID NO: 2027296 - DNA, 15 bp, Homo sapiens
tgtaatgaggtcata

SEQ ID NO: 2027297 - DNA, 15 bp, Homo sapiens
gtaatgaggtcatag

SEQ ID NO: 2027298 - DNA, 15 bp, Homo sapiens
taatgaggtcataga

SEQ ID NO: 2027299 - DNA, 15 bp, Homo sapiens
aatgaggtcatagag

SEQ ID NO: 2027300 - DNA, 15 bp, Homo sapiens
atgaggtcatagagg

SEQ ID NO: 2027301 - DNA, 15 bp, Homo sapiens
tgaggtcatagaggg

SEQ ID NO: 2027302 - DNA, 15 bp, Homo sapiens
gaggtcatagaggga

SEQ ID NO: 2027303 - DNA, 15 bp, Homo sapiens
aggtcatagagggaa

SEQ ID NO: 2027304 - DNA, 15 bp, Homo sapiens
ggtcatagagggaaa

SEQ ID NO: 2027305 - DNA, 15 bp, Homo sapiens
gtcatagagggaaaa

SEQ ID NO: 2027306 - DNA, 15 bp, Homo sapiens
tcatagagggaaaaa

SEQ ID NO: 2027307 - DNA, 15 bp, Homo sapiens
catagagggaaaaat

SEQ ID NO: 2027308 - DNA, 15 bp, Homo sapiens
atagagggaaaaatg

SEQ ID NO: 2027309 - DNA, 15 bp, Homo sapiens
tagagggaaaaatgg

SEQ ID NO: 2027310 - DNA, 15 bp, Homo sapiens
agagggaaaaatggg

SEQ ID NO: 2027311 - DNA, 15 bp, Homo sapiens
gagggaaaaatggga

SEQ ID NO: 2027312 - DNA, 15 bp, Homo sapiens
agggaaaaatgggag

SEQ ID NO: 2027313 - DNA, 15 bp, Homo sapiens
gggaaaaatgggagg

SEQ ID NO: 2027314 - DNA, 15 bp, Homo sapiens
ggaaaaatgggagga

SEQ ID NO: 2027315 - DNA, 15 bp, Homo sapiens
gaaaaatgggaggac

SEQ ID NO: 2027316 - DNA, 15 bp, Homo sapiens
aaaaatgggaggact

SEQ ID NO: 2027317 - DNA, 15 bp, Homo sapiens
aaaatgggaggactt

SEQ ID NO: 2027318 - DNA, 15 bp, Homo sapiens
aaatgggaggactta

SEQ ID NO: 2027319 - DNA, 15 bp, Homo sapiens
aatgggaggacttaa

SEQ ID NO: 2027320 - DNA, 15 bp, Homo sapiens
atgggaggacttaat

SEQ ID NO: 2027321 - DNA, 15 bp, Homo sapiens
tgggaggacttaatt

SEQ ID NO: 2027322 - DNA, 15 bp, Homo sapiens
gggaggacttaatta

SEQ ID NO: 2027323 - DNA, 15 bp, Homo sapiens
ggaggacttaattat

SEQ ID NO: 2027324 - DNA, 15 bp, Homo sapiens
gaggacttaattata

SEQ ID NO: 2027325 - DNA, 15 bp, Homo sapiens
aggacttaattataa

SEQ ID NO: 2027326 - DNA, 15 bp, Homo sapiens
ggacttaattataag

SEQ ID NO: 2027327 - DNA, 15 bp, Homo sapiens
gacttaattataagt

SEQ ID NO: 2027328 - DNA, 15 bp, Homo sapiens
acttaattataagtt

SEQ ID NO: 2027329 - DNA, 15 bp, Homo sapiens
cttaattataagtta

SEQ ID NO: 2027330 - DNA, 15 bp, Homo sapiens
ttaattataagttaa

SEQ ID NO: 2027331 - DNA, 15 bp, Homo sapiens
taattataagttaat

SEQ ID NO: 2027332 - DNA, 15 bp, Homo sapiens
aattataagttaatt

SEQ ID NO: 2027333 - DNA, 15 bp, Homo sapiens
attataagttaattt

SEQ ID NO: 2027334 - DNA, 15 bp, Homo sapiens
ttataagttaatttt

SEQ ID NO: 2027335 - DNA, 15 bp, Homo sapiens
tataagttaattttg

SEQ ID NO: 2027336 - DNA, 15 bp, Homo sapiens
ataagttaattttgt

SEQ ID NO: 2027337 - DNA, 15 bp, Homo sapiens
taagttaattttgtt

SEQ ID NO: 2027338 - DNA, 15 bp, Homo sapiens
aagttaattttgttt

SEQ ID NO: 2027339 - DNA, 15 bp, Homo sapiens
agttaattttgtttt

SEQ ID NO: 2027340 - DNA, 15 bp, Homo sapiens
gttaattttgttttt

SEQ ID NO: 2027341 - DNA, 15 bp, Homo sapiens
ttaattttgttttta

SEQ ID NO: 2027342 - DNA, 15 bp, Homo sapiens
taattttgtttttaa

SEQ ID NO: 2027343 - DNA, 15 bp, Homo sapiens
aattttgtttttaac

SEQ ID NO: 2027344 - DNA, 15 bp, Homo sapiens
attttgtttttaacc

SEQ ID NO: 2027345 - DNA, 15 bp, Homo sapiens
ttttgtttttaacct

SEQ ID NO: 2027346 - DNA, 15 bp, Homo sapiens
tttgtttttaacctt

SEQ ID NO: 2027347 - DNA, 15 bp, Homo sapiens
ttgtttttaaccttc

SEQ ID NO: 2027348 - DNA, 15 bp, Homo sapiens
tgtttttaaccttca

SEQ ID NO: 2027349 - DNA, 15 bp, Homo sapiens
gtttttaaccttcag

SEQ ID NO: 2027350 - DNA, 15 bp, Homo sapiens
tttttaaccttcagt

SEQ ID NO: 2027351 - DNA, 15 bp, Homo sapiens
ttttaaccttcagtt

SEQ ID NO: 2027352 - DNA, 15 bp, Homo sapiens
tttaaccttcagttt

SEQ ID NO: 2027353 - DNA, 15 bp, Homo sapiens
ttaaccttcagtttg

SEQ ID NO: 2027354 - DNA, 15 bp, Homo sapiens
taaccttcagtttgt

SEQ ID NO: 2027355 - DNA, 15 bp, Homo sapiens
aaccttcagtttgta

SEQ ID NO: 2027356 - DNA, 15 bp, Homo sapiens
accttcagtttgtag

SEQ ID NO: 2027357 - DNA, 15 bp, Homo sapiens
ccttcagtttgtagg

SEQ ID NO: 2027358 - DNA, 15 bp, Homo sapiens
cttcagtttgtaggg

SEQ ID NO: 2027359 - DNA, 15 bp, Homo sapiens
ttcagtttgtagggt

SEQ ID NO: 2027360 - DNA, 15 bp, Homo sapiens
tcagtttgtagggta

SEQ ID NO: 2027361 - DNA, 15 bp, Homo sapiens
cagtttgtagggtaa

SEQ ID NO: 2027362 - DNA, 15 bp, Homo sapiens
agtttgtagggtaac

SEQ ID NO: 2027363 - DNA, 15 bp, Homo sapiens
gtttgtagggtaact

SEQ ID NO: 2027364 - DNA, 15 bp, Homo sapiens
tttgtagggtaactt

SEQ ID NO: 2027365 - DNA, 15 bp, Homo sapiens
ttgtagggtaacttt

SEQ ID NO: 2027366 - DNA, 15 bp, Homo sapiens
tgtagggtaactttt

SEQ ID NO: 2027367 - DNA, 15 bp, Homo sapiens
gtagggtaactttta

SEQ ID NO: 2027368 - DNA, 15 bp, Homo sapiens
tagggtaacttttag

SEQ ID NO: 2027369 - DNA, 15 bp, Homo sapiens
agggtaacttttagg

SEQ ID NO: 2027370 - DNA, 15 bp, Homo sapiens
gggtaacttttagga

SEQ ID NO: 2027371 - DNA, 15 bp, Homo sapiens
ggtaacttttaggac

SEQ ID NO: 2027372 - DNA, 15 bp, Homo sapiens
gtaacttttaggaca

SEQ ID NO: 2027373 - DNA, 15 bp, Homo sapiens
taacttttaggacac

SEQ ID NO: 2027374 - DNA, 15 bp, Homo sapiens
aacttttaggacacc

SEQ ID NO: 2027375 - DNA, 15 bp, Homo sapiens
acttttaggacaccc

SEQ ID NO: 2027376 - DNA, 15 bp, Homo sapiens
cttttaggacaccca

SEQ ID NO: 2027377 - DNA, 15 bp, Homo sapiens
ttttaggacacccag

SEQ ID NO: 2027378 - DNA, 15 bp, Homo sapiens
tttaggacacccaga

SEQ ID NO: 2027379 - DNA, 15 bp, Homo sapiens
ttaggacacccagaa

SEQ ID NO: 2027380 - DNA, 15 bp, Homo sapiens
taggacacccagaaa

SEQ ID NO: 2027381 - DNA, 15 bp, Homo sapiens
aggacacccagaaag

SEQ ID NO: 2027382 - DNA, 15 bp, Homo sapiens
ggacacccagaaaga

SEQ ID NO: 2027383 - DNA, 15 bp, Homo sapiens
gacacccagaaagaa

SEQ ID NO: 2027384 - DNA, 15 bp, Homo sapiens
acacccagaaagaag

SEQ ID NO: 2027385 - DNA, 15 bp, Homo sapiens
cacccagaaagaagt

SEQ ID NO: 2027386 - DNA, 15 bp, Homo sapiens
acccagaaagaagtt

SEQ ID NO: 2027387 - DNA, 15 bp, Homo sapiens
cccagaaagaagttc

SEQ ID NO: 2027388 - DNA, 15 bp, Homo sapiens
ccagaaagaagttca

SEQ ID NO: 2027389 - DNA, 15 bp, Homo sapiens
cagaaagaagttcag

SEQ ID NO: 2027390 - DNA, 15 bp, Homo sapiens
agaaagaagttcagc

SEQ ID NO: 2027391 - DNA, 15 bp, Homo sapiens
gaaagaagttcagca

SEQ ID NO: 2027392 - DNA, 15 bp, Homo sapiens
aaagaagttcagcag

SEQ ID NO: 2027393 - DNA, 15 bp, Homo sapiens
aagaagttcagcaga

SEQ ID NO: 2027394 - DNA, 15 bp, Homo sapiens
agaagttcagcagat

SEQ ID NO: 2027395 - DNA, 15 bp, Homo sapiens
gaagttcagcagatc

SEQ ID NO: 2027396 - DNA, 15 bp, Homo sapiens
aagttcagcagatcc

SEQ ID NO: 2027397 - DNA, 15 bp, Homo sapiens
agttcagcagatcct

SEQ ID NO: 2027398 - DNA, 15 bp, Homo sapiens
gttcagcagatcctg

SEQ ID NO: 2027399 - DNA, 15 bp, Homo sapiens
ttcagcagatcctga

SEQ ID NO: 2027400 - DNA, 15 bp, Homo sapiens
tcagcagatcctgat

SEQ ID NO: 2027401 - DNA, 15 bp, Homo sapiens
cagcagatcctgatt

SEQ ID NO: 2027402 - DNA, 15 bp, Homo sapiens
agcagatcctgatta

SEQ ID NO: 2027403 - DNA, 15 bp, Homo sapiens
gcagatcctgattaa

SEQ ID NO: 2027404 - DNA, 15 bp, Homo sapiens
cagatcctgattaaa

SEQ ID NO: 2027405 - DNA, 15 bp, Homo sapiens
agatcctgattaaag

SEQ ID NO: 2027406 - DNA, 15 bp, Homo sapiens
gatcctgattaaaga

SEQ ID NO: 2027407 - DNA, 15 bp, Homo sapiens
atcctgattaaagat

SEQ ID NO: 2027408 - DNA, 15 bp, Homo sapiens
tcctgattaaagatt

SEQ ID NO: 2027409 - DNA, 15 bp, Homo sapiens
cctgattaaagattt

SEQ ID NO: 2027410 - DNA, 15 bp, Homo sapiens
ctgattaaagatttt

SEQ ID NO: 2027411 - DNA, 15 bp, Homo sapiens
tgattaaagattttc

SEQ ID NO: 2027412 - DNA, 15 bp, Homo sapiens
gattaaagattttca

SEQ ID NO: 2027413 - DNA, 15 bp, Homo sapiens
attaaagattttcac

SEQ ID NO: 2027414 - DNA, 15 bp, Homo sapiens
ttaaagattttcaca

SEQ ID NO: 2027415 - DNA, 15 bp, Homo sapiens
taaagattttcacat

SEQ ID NO: 2027416 - DNA, 15 bp, Homo sapiens
aaagattttcacatt

SEQ ID NO: 2027417 - DNA, 15 bp, Homo sapiens
aagattttcacattc

SEQ ID NO: 2027418 - DNA, 15 bp, Homo sapiens
agattttcacattct

SEQ ID NO: 2027419 - DNA, 15 bp, Homo sapiens
gattttcacattcta

SEQ ID NO: 2027420 - DNA, 15 bp, Homo sapiens
attttcacattctaa

SEQ ID NO: 2027421 - DNA, 15 bp, Homo sapiens
ttttcacattctaat

SEQ ID NO: 2027422 - DNA, 15 bp, Homo sapiens
tttcacattctaatt

SEQ ID NO: 2027423 - DNA, 15 bp, Homo sapiens
ttcacattctaattt

SEQ ID NO: 2027424 - DNA, 15 bp, Homo sapiens
tcacattctaatttg

SEQ ID NO: 2027425 - DNA, 15 bp, Homo sapiens
cacattctaatttga

SEQ ID NO: 2027426 - DNA, 15 bp, Homo sapiens
acattctaatttgat

SEQ ID NO: 2027427 - DNA, 15 bp, Homo sapiens
cattctaatttgatg

SEQ ID NO: 2027428 - DNA, 15 bp, Homo sapiens
attctaatttgatga

SEQ ID NO: 2027429 - DNA, 15 bp, Homo sapiens
ttctaatttgatgaa

SEQ ID NO: 2027430 - DNA, 15 bp, Homo sapiens
tctaatttgatgaag

SEQ ID NO: 2027431 - DNA, 15 bp, Homo sapiens
ctaatttgatgaagg

SEQ ID NO: 2027432 - DNA, 15 bp, Homo sapiens
taatttgatgaaggg

SEQ ID NO: 2027433 - DNA, 15 bp, Homo sapiens
aatttgatgaaggga

SEQ ID NO: 2027434 - DNA, 15 bp, Homo sapiens
atttgatgaagggaa

SEQ ID NO: 2027435 - DNA, 15 bp, Homo sapiens
tttgatgaagggaag

SEQ ID NO: 2027436 - DNA, 15 bp, Homo sapiens
ttgatgaagggaagg

SEQ ID NO: 2027437 - DNA, 15 bp, Homo sapiens
tgatgaagggaaggg

SEQ ID NO: 2027438 - DNA, 15 bp, Homo sapiens
gatgaagggaagggc

SEQ ID NO: 2027439 - DNA, 15 bp, Homo sapiens
atgaagggaagggcc

SEQ ID NO: 2027440 - DNA, 15 bp, Homo sapiens
tgaagggaagggcca

SEQ ID NO: 2027441 - DNA, 15 bp, Homo sapiens
gaagggaagggccat

SEQ ID NO: 2027442 - DNA, 15 bp, Homo sapiens
aagggaagggccatc

SEQ ID NO: 2027443 - DNA, 15 bp, Homo sapiens
agggaagggccatct

SEQ ID NO: 2027444 - DNA, 15 bp, Homo sapiens
gggaagggccatctg

SEQ ID NO: 2027445 - DNA, 15 bp, Homo sapiens
ggaagggccatctga

SEQ ID NO: 2027446 - DNA, 15 bp, Homo sapiens
gaagggccatctgat

SEQ ID NO: 2027447 - DNA, 15 bp, Homo sapiens
aagggccatctgata

SEQ ID NO: 2027448 - DNA, 15 bp, Homo sapiens
agggccatctgatat

SEQ ID NO: 2027449 - DNA, 15 bp, Homo sapiens
gggccatctgatatc

SEQ ID NO: 2027450 - DNA, 15 bp, Homo sapiens
ggccatctgatatct

SEQ ID NO: 2027451 - DNA, 15 bp, Homo sapiens
gccatctgatatctg

SEQ ID NO: 2027452 - DNA, 15 bp, Homo sapiens
ccatctgatatctgt

SEQ ID NO: 2027453 - DNA, 15 bp, Homo sapiens
catctgatatctgtc

SEQ ID NO: 2027454 - DNA, 15 bp, Homo sapiens
atctgatatctgtcc

SEQ ID NO: 2027455 - DNA, 15 bp, Homo sapiens
tctgatatctgtccc

SEQ ID NO: 2027456 - DNA, 15 bp, Homo sapiens
ctgatatctgtccct

SEQ ID NO: 2027457 - DNA, 15 bp, Homo sapiens
tgatatctgtcccta

SEQ ID NO: 2027458 - DNA, 15 bp, Homo sapiens
gatatctgtccctat

SEQ ID NO: 2027459 - DNA, 15 bp, Homo sapiens
atatctgtccctatg

SEQ ID NO: 2027460 - DNA, 15 bp, Homo sapiens
tatctgtccctatga

SEQ ID NO: 2027461 - DNA, 15 bp, Homo sapiens
atctgtccctatgat

SEQ ID NO: 2027462 - DNA, 15 bp, Homo sapiens
tctgtccctatgatc

SEQ ID NO: 2027463 - DNA, 15 bp, Homo sapiens
ctgtccctatgatcc

SEQ ID NO: 2027464 - DNA, 15 bp, Homo sapiens
tgtccctatgatccc

SEQ ID NO: 2027465 - DNA, 15 bp, Homo sapiens
gtccctatgatcccc

SEQ ID NO: 2027466 - DNA, 15 bp, Homo sapiens
tccctatgatcccca

SEQ ID NO: 2027467 - DNA, 15 bp, Homo sapiens
ccctatgatccccat

SEQ ID NO: 2027468 - DNA, 15 bp, Homo sapiens
cctatgatccccatt

SEQ ID NO: 2027469 - DNA, 15 bp, Homo sapiens
ctatgatccccatta

SEQ ID NO: 2027470 - DNA, 15 bp, Homo sapiens
tatgatccccattat

SEQ ID NO: 2027471 - DNA, 15 bp, Homo sapiens
atgatccccattata

SEQ ID NO: 2027472 - DNA, 15 bp, Homo sapiens
tgatccccattataa

SEQ ID NO: 2027473 - DNA, 15 bp, Homo sapiens
gatccccattataac

SEQ ID NO: 2027474 - DNA, 15 bp, Homo sapiens
atccccattataact

SEQ ID NO: 2027475 - DNA, 15 bp, Homo sapiens
tccccattataactg

SEQ ID NO: 2027476 - DNA, 15 bp, Homo sapiens
ccccattataactgg

SEQ ID NO: 2027477 - DNA, 15 bp, Homo sapiens
cccattataactgga

SEQ ID NO: 2027478 - DNA, 15 bp, Homo sapiens
ccattataactggat

SEQ ID NO: 2027479 - DNA, 15 bp, Homo sapiens
cattataactggatc

SEQ ID NO: 2027480 - DNA, 15 bp, Homo sapiens
attataactggatct

SEQ ID NO: 2027481 - DNA, 15 bp, Homo sapiens
ttataactggatcta

SEQ ID NO: 2027482 - DNA, 15 bp, Homo sapiens
tataactggatctag

SEQ ID NO: 2027483 - DNA, 15 bp, Homo sapiens
ataactggatctagt

SEQ ID NO: 2027484 - DNA, 15 bp, Homo sapiens
taactggatctagtg

SEQ ID NO: 2027485 - DNA, 15 bp, Homo sapiens
aactggatctagtgg

SEQ ID NO: 2027486 - DNA, 15 bp, Homo sapiens
actggatctagtggg

SEQ ID NO: 2027487 - DNA, 15 bp, Homo sapiens
ctggatctagtggga

SEQ ID NO: 2027488 - DNA, 15 bp, Homo sapiens
tggatctagtgggaa

SEQ ID NO: 2027489 - DNA, 15 bp, Homo sapiens
ggatctagtgggaaa

SEQ ID NO: 2027490 - DNA, 15 bp, Homo sapiens
gatctagtgggaaag

SEQ ID NO: 2027491 - DNA, 15 bp, Homo sapiens
atctagtgggaaaga

SEQ ID NO: 2027492 - DNA, 15 bp, Homo sapiens
tctagtgggaaagag

SEQ ID NO: 2027493 - DNA, 15 bp, Homo sapiens
ctagtgggaaagaga

SEQ ID NO: 2027494 - DNA, 15 bp, Homo sapiens
tagtgggaaagagaa

SEQ ID NO: 2027495 - DNA, 15 bp, Homo sapiens
agtgggaaagagaac

SEQ ID NO: 2027496 - DNA, 15 bp, Homo sapiens
gtgggaaagagaacc

SEQ ID NO: 2027497 - DNA, 15 bp, Homo sapiens
tgggaaagagaacca

SEQ ID NO: 2027498 - DNA, 15 bp, Homo sapiens
gggaaagagaaccag

SEQ ID NO: 2027499 - DNA, 15 bp, Homo sapiens
ggaaagagaaccaga

SEQ ID NO: 2027500 - DNA, 15 bp, Homo sapiens
gaaagagaaccagaa

SEQ ID NO: 2027501 - DNA, 15 bp, Homo sapiens
aaagagaaccagaat

SEQ ID NO: 2027502 - DNA, 15 bp, Homo sapiens
aagagaaccagaatt

SEQ ID NO: 2027503 - DNA, 15 bp, Homo sapiens
agagaaccagaattt

SEQ ID NO: 2027504 - DNA, 15 bp, Homo sapiens
gagaaccagaatttg

SEQ ID NO: 2027505 - DNA, 15 bp, Homo sapiens
agaaccagaatttga

SEQ ID NO: 2027506 - DNA, 15 bp, Homo sapiens
gaaccagaatttgag

SEQ ID NO: 2027507 - DNA, 15 bp, Homo sapiens
aaccagaatttgagt

SEQ ID NO: 2027508 - DNA, 15 bp, Homo sapiens
accagaatttgagtt

SEQ ID NO: 2027509 - DNA, 15 bp, Homo sapiens
ccagaatttgagttt

SEQ ID NO: 2027510 - DNA, 15 bp, Homo sapiens
cagaatttgagtttt

SEQ ID NO: 2027511 - DNA, 15 bp, Homo sapiens
agaatttgagttttg

SEQ ID NO: 2027512 - DNA, 15 bp, Homo sapiens
gaatttgagttttgg

SEQ ID NO: 2027513 - DNA, 15 bp, Homo sapiens
aatttgagttttggc

SEQ ID NO: 2027514 - DNA, 15 bp, Homo sapiens
atttgagttttggct

SEQ ID NO: 2027515 - DNA, 15 bp, Homo sapiens
tttgagttttggctt

SEQ ID NO: 2027516 - DNA, 15 bp, Homo sapiens
ttgagttttggcttt

SEQ ID NO: 2027517 - DNA, 15 bp, Homo sapiens
tgagttttggctttg

SEQ ID NO: 2027518 - DNA, 15 bp, Homo sapiens
gagttttggctttgc

SEQ ID NO: 2027519 - DNA, 15 bp, Homo sapiens
agttttggctttgct

SEQ ID NO: 2027520 - DNA, 15 bp, Homo sapiens
gttttggctttgcta

SEQ ID NO: 2027521 - DNA, 15 bp, Homo sapiens
ttttggctttgctaa

SEQ ID NO: 2027522 - DNA, 15 bp, Homo sapiens
tttggctttgctaaa

SEQ ID NO: 2027523 - DNA, 15 bp, Homo sapiens
ttggctttgctaaaa

SEQ ID NO: 2027524 - DNA, 15 bp, Homo sapiens
tggctttgctaaaaa

SEQ ID NO: 2027525 - DNA, 15 bp, Homo sapiens
ggctttgctaaaaat

SEQ ID NO: 2027526 - DNA, 15 bp, Homo sapiens
gctttgctaaaaatg

SEQ ID NO: 2027527 - DNA, 15 bp, Homo sapiens
ctttgctaaaaatgt

SEQ ID NO: 2027528 - DNA, 15 bp, Homo sapiens
tttgctaaaaatgta

SEQ ID NO: 2027529 - DNA, 15 bp, Homo sapiens
ttgctaaaaatgtat

SEQ ID NO: 2027530 - DNA, 15 bp, Homo sapiens
tgctaaaaatgtatg

SEQ ID NO: 2027531 - DNA, 15 bp, Homo sapiens
gctaaaaatgtatgg

SEQ ID NO: 2027532 - DNA, 15 bp, Homo sapiens
ctaaaaatgtatggt

SEQ ID NO: 2027533 - DNA, 15 bp, Homo sapiens
taaaaatgtatggtg

SEQ ID NO: 2027534 - DNA, 15 bp, Homo sapiens
aaaaatgtatggtgt

SEQ ID NO: 2027535 - DNA, 15 bp, Homo sapiens
aaaatgtatggtgtg

SEQ ID NO: 2027536 - DNA, 15 bp, Homo sapiens
aaatgtatggtgtgc

SEQ ID NO: 2027537 - DNA, 15 bp, Homo sapiens
aatgtatggtgtgcc

SEQ ID NO: 2027538 - DNA, 15 bp, Homo sapiens
atgtatggtgtgcct

SEQ ID NO: 2027539 - DNA, 15 bp, Homo sapiens
tgtatggtgtgcctt

SEQ ID NO: 2027540 - DNA, 15 bp, Homo sapiens
gtatggtgtgcctta

SEQ ID NO: 2027541 - DNA, 15 bp, Homo sapiens
tatggtgtgccttat

SEQ ID NO: 2027542 - DNA, 15 bp, Homo sapiens
atggtgtgccttatt

SEQ ID NO: 2027543 - DNA, 15 bp, Homo sapiens
tggtgtgccttattc

SEQ ID NO: 2027544 - DNA, 15 bp, Homo sapiens
ggtgtgccttattct

SEQ ID NO: 2027545 - DNA, 15 bp, Homo sapiens
gtgtgccttattctg

SEQ ID NO: 2027546 - DNA, 15 bp, Homo sapiens
tgtgccttattctga

SEQ ID NO: 2027547 - DNA, 15 bp, Homo sapiens
gtgccttattctgac

SEQ ID NO: 2027548 - DNA, 15 bp, Homo sapiens
tgccttattctgact

SEQ ID NO: 2027549 - DNA, 15 bp, Homo sapiens
gccttattctgactt

SEQ ID NO: 2027550 - DNA, 15 bp, Homo sapiens
ccttattctgactta

SEQ ID NO: 2027551 - DNA, 15 bp, Homo sapiens
cttattctgacttaa

SEQ ID NO: 2027552 - DNA, 15 bp, Homo sapiens
ttattctgacttaat

SEQ ID NO: 2027553 - DNA, 15 bp, Homo sapiens
tattctgacttaatt

SEQ ID NO: 2027554 - DNA, 15 bp, Homo sapiens
attctgacttaattt

SEQ ID NO: 2027555 - DNA, 15 bp, Homo sapiens
ttctgacttaatttc

SEQ ID NO: 2027556 - DNA, 15 bp, Homo sapiens
tctgacttaatttct

SEQ ID NO: 2027557 - DNA, 15 bp, Homo sapiens
ctgacttaatttcta

SEQ ID NO: 2027558 - DNA, 15 bp, Homo sapiens
tgacttaatttctat

SEQ ID NO: 2027559 - DNA, 15 bp, Homo sapiens
gacttaatttctatt

SEQ ID NO: 2027560 - DNA, 15 bp, Homo sapiens
acttaatttctattg

SEQ ID NO: 2027561 - DNA, 15 bp, Homo sapiens
cttaatttctattga

SEQ ID NO: 2027562 - DNA, 15 bp, Homo sapiens
ttaatttctattgat

SEQ ID NO: 2027563 - DNA, 15 bp, Homo sapiens
taatttctattgatc

SEQ ID NO: 2027564 - DNA, 15 bp, Homo sapiens
aatttctattgatcc

SEQ ID NO: 2027565 - DNA, 15 bp, Homo sapiens
atttctattgatcca

SEQ ID NO: 2027566 - DNA, 15 bp, Homo sapiens
tttctattgatccac

SEQ ID NO: 2027567 - DNA, 15 bp, Homo sapiens
ttctattgatccaca

SEQ ID NO: 2027568 - DNA, 15 bp, Homo sapiens
tctattgatccacat

SEQ ID NO: 2027569 - DNA, 15 bp, Homo sapiens
ctattgatccacatt

SEQ ID NO: 2027570 - DNA, 15 bp, Homo sapiens
tattgatccacatta

SEQ ID NO: 2027571 - DNA, 15 bp, Homo sapiens
attgatccacattag

SEQ ID NO: 2027572 - DNA, 15 bp, Homo sapiens
ttgatccacattagg

SEQ ID NO: 2027573 - DNA, 15 bp, Homo sapiens
tgatccacattagga

SEQ ID NO: 2027574 - DNA, 15 bp, Homo sapiens
gatccacattaggac

SEQ ID NO: 2027575 - DNA, 15 bp, Homo sapiens
atccacattaggacc

SEQ ID NO: 2027576 - DNA, 15 bp, Homo sapiens
tccacattaggacca

SEQ ID NO: 2027577 - DNA, 15 bp, Homo sapiens
ccacattaggaccat

SEQ ID NO: 2027578 - DNA, 15 bp, Homo sapiens
cacattaggaccata

SEQ ID NO: 2027579 - DNA, 15 bp, Homo sapiens
acattaggaccataa

SEQ ID NO: 2027580 - DNA, 15 bp, Homo sapiens
cattaggaccataag

SEQ ID NO: 2027581 - DNA, 15 bp, Homo sapiens
attaggaccataagt

SEQ ID NO: 2027582 - DNA, 15 bp, Homo sapiens
ttaggaccataagtc

SEQ ID NO: 2027583 - DNA, 15 bp, Homo sapiens
taggaccataagtcc

SEQ ID NO: 2027584 - DNA, 15 bp, Homo sapiens
aggaccataagtcct

SEQ ID NO: 2027585 - DNA, 15 bp, Homo sapiens
ggaccataagtcctc

SEQ ID NO: 2027586 - DNA, 15 bp, Homo sapiens
gaccataagtcctct

SEQ ID NO: 2027587 - DNA, 15 bp, Homo sapiens
accataagtcctctc

SEQ ID NO: 2027588 - DNA, 15 bp, Homo sapiens
ccataagtcctctca

SEQ ID NO: 2027589 - DNA, 15 bp, Homo sapiens
cataagtcctctcat

SEQ ID NO: 2027590 - DNA, 15 bp, Homo sapiens
ataagtcctctcata

SEQ ID NO: 2027591 - DNA, 15 bp, Homo sapiens
taagtcctctcatat

SEQ ID NO: 2027592 - DNA, 15 bp, Homo sapiens
aagtcctctcatatt

SEQ ID NO: 2027593 - DNA, 15 bp, Homo sapiens
agtcctctcatattt

SEQ ID NO: 2027594 - DNA, 15 bp, Homo sapiens
gtcctctcatatttt

SEQ ID NO: 2027595 - DNA, 15 bp, Homo sapiens
tcctctcatatttta

SEQ ID NO: 2027596 - DNA, 15 bp, Homo sapiens
cctctcatattttat

SEQ ID NO: 2027597 - DNA, 15 bp, Homo sapiens
ctctcatattttatg

SEQ ID NO: 2027598 - DNA, 15 bp, Homo sapiens
tctcatattttatgt

SEQ ID NO: 2027599 - DNA, 15 bp, Homo sapiens
ctcatattttatgtc

SEQ ID NO: 2027600 - DNA, 15 bp, Homo sapiens
tcatattttatgtct

SEQ ID NO: 2027601 - DNA, 15 bp, Homo sapiens
catattttatgtctc

SEQ ID NO: 2027602 - DNA, 15 bp, Homo sapiens
atattttatgtctca

SEQ ID NO: 2027603 - DNA, 15 bp, Homo sapiens
tattttatgtctcag

SEQ ID NO: 2027604 - DNA, 15 bp, Homo sapiens
attttatgtctcagt

SEQ ID NO: 2027605 - DNA, 15 bp, Homo sapiens
ttttatgtctcagtg

SEQ ID NO: 2027606 - DNA, 15 bp, Homo sapiens
tttatgtctcagtga

SEQ ID NO: 2027607 - DNA, 15 bp, Homo sapiens
ttatgtctcagtgag

SEQ ID NO: 2027608 - DNA, 15 bp, Homo sapiens
tatgtctcagtgaga

SEQ ID NO: 2027609 - DNA, 15 bp, Homo sapiens
atgtctcagtgagat

SEQ ID NO: 2027610 - DNA, 15 bp, Homo sapiens
tgtctcagtgagatg

SEQ ID NO: 2027611 - DNA, 15 bp, Homo sapiens
gtctcagtgagatgt

SEQ ID NO: 2027612 - DNA, 15 bp, Homo sapiens
tctcagtgagatgta

SEQ ID NO: 2027613 - DNA, 15 bp, Homo sapiens
ctcagtgagatgtat

SEQ ID NO: 2027614 - DNA, 15 bp, Homo sapiens
tcagtgagatgtatt

SEQ ID NO: 2027615 - DNA, 15 bp, Homo sapiens
cagtgagatgtattt

SEQ ID NO: 2027616 - DNA, 15 bp, Homo sapiens
agtgagatgtatttt

SEQ ID NO: 2027617 - DNA, 15 bp, Homo sapiens
gtgagatgtatttta

SEQ ID NO: 2027618 - DNA, 15 bp, Homo sapiens
tgagatgtattttag

SEQ ID NO: 2027619 - DNA, 15 bp, Homo sapiens
gagatgtattttagg

SEQ ID NO: 2027620 - DNA, 15 bp, Homo sapiens
agatgtattttagga

SEQ ID NO: 2027621 - DNA, 15 bp, Homo sapiens
gatgtattttaggaa

SEQ ID NO: 2027622 - DNA, 15 bp, Homo sapiens
atgtattttaggaaa

SEQ ID NO: 2027623 - DNA, 15 bp, Homo sapiens
tgtattttaggaaag

SEQ ID NO: 2027624 - DNA, 15 bp, Homo sapiens
gtattttaggaaagc

SEQ ID NO: 2027625 - DNA, 15 bp, Homo sapiens
tattttaggaaagcc

SEQ ID NO: 2027626 - DNA, 15 bp, Homo sapiens
attttaggaaagcct

SEQ ID NO: 2027627 - DNA, 15 bp, Homo sapiens
ttttaggaaagccta

SEQ ID NO: 2027628 - DNA, 15 bp, Homo sapiens
tttaggaaagcctat

SEQ ID NO: 2027629 - DNA, 15 bp, Homo sapiens
ttaggaaagcctata

SEQ ID NO: 2027630 - DNA, 15 bp, Homo sapiens
taggaaagcctatac

SEQ ID NO: 2027631 - DNA, 15 bp, Homo sapiens
aggaaagcctatacc

SEQ ID NO: 2027632 - DNA, 15 bp, Homo sapiens
ggaaagcctataccc

SEQ ID NO: 2027633 - DNA, 15 bp, Homo sapiens
gaaagcctatacccc

SEQ ID NO: 2027634 - DNA, 15 bp, Homo sapiens
aaagcctataccccg

SEQ ID NO: 2027635 - DNA, 15 bp, Homo sapiens
aagcctataccccgc

SEQ ID NO: 2027636 - DNA, 15 bp, Homo sapiens
agcctataccccgcc

SEQ ID NO: 2027637 - DNA, 15 bp, Homo sapiens
gcctataccccgccc

SEQ ID NO: 2027638 - DNA, 15 bp, Homo sapiens
cctataccccgcccc

SEQ ID NO: 2027639 - DNA, 15 bp, Homo sapiens
ctataccccgcccct

SEQ ID NO: 2027640 - DNA, 15 bp, Homo sapiens
tataccccgcccctc

SEQ ID NO: 2027641 - DNA, 15 bp, Homo sapiens
ataccccgcccctct

SEQ ID NO: 2027642 - DNA, 15 bp, Homo sapiens
taccccgcccctctg

SEQ ID NO: 2027643 - DNA, 15 bp, Homo sapiens
accccgcccctctgt

SEQ ID NO: 2027644 - DNA, 15 bp, Homo sapiens
ccccgcccctctgtc

SEQ ID NO: 2027645 - DNA, 15 bp, Homo sapiens
cccgcccctctgtca

SEQ ID NO: 2027646 - DNA, 15 bp, Homo sapiens
ccgcccctctgtcat

SEQ ID NO: 2027647 - DNA, 15 bp, Homo sapiens
cgcccctctgtcata

SEQ ID NO: 2027648 - DNA, 15 bp, Homo sapiens
gcccctctgtcatag

SEQ ID NO: 2027649 - DNA, 15 bp, Homo sapiens
cccctctgtcatagg

SEQ ID NO: 2027650 - DNA, 15 bp, Homo sapiens
ccctctgtcatagga

SEQ ID NO: 2027651 - DNA, 15 bp, Homo sapiens
cctctgtcataggag

SEQ ID NO: 2027652 - DNA, 15 bp, Homo sapiens
ctctgtcataggagc

SEQ ID NO: 2027653 - DNA, 15 bp, Homo sapiens
tctgtcataggagcc

SEQ ID NO: 2027654 - DNA, 15 bp, Homo sapiens
ctgtcataggagcct

SEQ ID NO: 2027655 - DNA, 15 bp, Homo sapiens
tgtcataggagcctc

SEQ ID NO: 2027656 - DNA, 15 bp, Homo sapiens
gtcataggagcctca

SEQ ID NO: 2027657 - DNA, 15 bp, Homo sapiens
tcataggagcctcac

SEQ ID NO: 2027658 - DNA, 15 bp, Homo sapiens
cataggagcctcaca

SEQ ID NO: 2027659 - DNA, 15 bp, Homo sapiens
ataggagcctcacag

SEQ ID NO: 2027660 - DNA, 15 bp, Homo sapiens
taggagcctcacagt

SEQ ID NO: 2027661 - DNA, 15 bp, Homo sapiens
aggagcctcacagtg

SEQ ID NO: 2027662 - DNA, 15 bp, Homo sapiens
ggagcctcacagtgc

SEQ ID NO: 2027663 - DNA, 15 bp, Homo sapiens
gagcctcacagtgct

SEQ ID NO: 2027664 - DNA, 15 bp, Homo sapiens
agcctcacagtgctc

SEQ ID NO: 2027665 - DNA, 15 bp, Homo sapiens
gcctcacagtgctct

SEQ ID NO: 2027666 - DNA, 15 bp, Homo sapiens
cctcacagtgctctt

SEQ ID NO: 2027667 - DNA, 15 bp, Homo sapiens
ctcacagtgctctta

SEQ ID NO: 2027668 - DNA, 15 bp, Homo sapiens
tcacagtgctcttat

SEQ ID NO: 2027669 - DNA, 15 bp, Homo sapiens
cacagtgctcttatg

SEQ ID NO: 2027670 - DNA, 15 bp, Homo sapiens
acagtgctcttatgg

SEQ ID NO: 2027671 - DNA, 15 bp, Homo sapiens
cagtgctcttatggt

SEQ ID NO: 2027672 - DNA, 15 bp, Homo sapiens
agtgctcttatggtt

SEQ ID NO: 2027673 - DNA, 15 bp, Homo sapiens
gtgctcttatggtta

SEQ ID NO: 2027674 - DNA, 15 bp, Homo sapiens
tgctcttatggttat

SEQ ID NO: 2027675 - DNA, 15 bp, Homo sapiens
gctcttatggttata

SEQ ID NO: 2027676 - DNA, 15 bp, Homo sapiens
ctcttatggttatat

SEQ ID NO: 2027677 - DNA, 15 bp, Homo sapiens
tcttatggttatatc

SEQ ID NO: 2027678 - DNA, 15 bp, Homo sapiens
cttatggttatatca

SEQ ID NO: 2027679 - DNA, 15 bp, Homo sapiens
ttatggttatatcaa

SEQ ID NO: 2027680 - DNA, 15 bp, Homo sapiens
tatggttatatcaag

SEQ ID NO: 2027681 - DNA, 15 bp, Homo sapiens
atggttatatcaagt

SEQ ID NO: 2027682 - DNA, 15 bp, Homo sapiens
tggttatatcaagtg

SEQ ID NO: 2027683 - DNA, 15 bp, Homo sapiens
ggttatatcaagtgt

SEQ ID NO: 2027684 - DNA, 15 bp, Homo sapiens
gttatatcaagtgtg

SEQ ID NO: 2027685 - DNA, 15 bp, Homo sapiens
ttatatcaagtgtgt

SEQ ID NO: 2027686 - DNA, 15 bp, Homo sapiens
tatatcaagtgtgtc

SEQ ID NO: 2027687 - DNA, 15 bp, Homo sapiens
atatcaagtgtgtcc

SEQ ID NO: 2027688 - DNA, 15 bp, Homo sapiens
tatcaagtgtgtccc

SEQ ID NO: 2027689 - DNA, 15 bp, Homo sapiens
atcaagtgtgtccct

SEQ ID NO: 2027690 - DNA, 15 bp, Homo sapiens
tcaagtgtgtccctt

SEQ ID NO: 2027691 - DNA, 15 bp, Homo sapiens
caagtgtgtcccttt

SEQ ID NO: 2027692 - DNA, 15 bp, Homo sapiens
aagtgtgtccctttt

SEQ ID NO: 2027693 - DNA, 15 bp, Homo sapiens
agtgtgtcccttttt

SEQ ID NO: 2027694 - DNA, 15 bp, Homo sapiens
gtgtgtcccttttta

SEQ ID NO: 2027695 - DNA, 15 bp, Homo sapiens
tgtgtccctttttat

SEQ ID NO: 2027696 - DNA, 15 bp, Homo sapiens
gtgtccctttttata

SEQ ID NO: 2027697 - DNA, 15 bp, Homo sapiens
tgtccctttttataa

SEQ ID NO: 2027698 - DNA, 15 bp, Homo sapiens
gtccctttttataaa

SEQ ID NO: 2027699 - DNA, 15 bp, Homo sapiens
tccctttttataaaa

SEQ ID NO: 2027700 - DNA, 15 bp, Homo sapiens
ccctttttataaaat

SEQ ID NO: 2027701 - DNA, 15 bp, Homo sapiens
cctttttataaaatc

SEQ ID NO: 2027702 - DNA, 15 bp, Homo sapiens
ctttttataaaatcc

SEQ ID NO: 2027703 - DNA, 15 bp, Homo sapiens
tttttataaaatccc

SEQ ID NO: 2027704 - DNA, 15 bp, Homo sapiens
ttttataaaatccct

SEQ ID NO: 2027705 - DNA, 15 bp, Homo sapiens
tttataaaatcccta

SEQ ID NO: 2027706 - DNA, 15 bp, Homo sapiens
ttataaaatccctaa

SEQ ID NO: 2027707 - DNA, 15 bp, Homo sapiens
tataaaatccctaaa

SEQ ID NO: 2027708 - DNA, 15 bp, Homo sapiens
ataaaatccctaaat

SEQ ID NO: 2027709 - DNA, 15 bp, Homo sapiens
taaaatccctaaatg

SEQ ID NO: 2027710 - DNA, 15 bp, Homo sapiens
aaaatccctaaatga

SEQ ID NO: 2027711 - DNA, 15 bp, Homo sapiens
aaatccctaaatgat

SEQ ID NO: 2027712 - DNA, 15 bp, Homo sapiens
aatccctaaatgatt

SEQ ID NO: 2027713 - DNA, 15 bp, Homo sapiens
atccctaaatgatta

SEQ ID NO: 2027714 - DNA, 15 bp, Homo sapiens
tccctaaatgattaa

SEQ ID NO: 2027715 - DNA, 15 bp, Homo sapiens
ccctaaatgattaag

SEQ ID NO: 2027716 - DNA, 15 bp, Homo sapiens
cctaaatgattaagg

SEQ ID NO: 2027717 - DNA, 15 bp, Homo sapiens
ctaaatgattaaggg

SEQ ID NO: 2027718 - DNA, 15 bp, Homo sapiens
taaatgattaagggg

SEQ ID NO: 2027719 - DNA, 15 bp, Homo sapiens
aaatgattaaggggt

SEQ ID NO: 2027720 - DNA, 15 bp, Homo sapiens
aatgattaaggggta

SEQ ID NO: 2027721 - DNA, 15 bp, Homo sapiens
atgattaaggggtat

SEQ ID NO: 2027722 - DNA, 15 bp, Homo sapiens
tgattaaggggtatt

SEQ ID NO: 2027723 - DNA, 15 bp, Homo sapiens
gattaaggggtattt

SEQ ID NO: 2027724 - DNA, 15 bp, Homo sapiens
attaaggggtatttt

SEQ ID NO: 2027725 - DNA, 15 bp, Homo sapiens
ttaaggggtattttg

SEQ ID NO: 2027726 - DNA, 15 bp, Homo sapiens
taaggggtattttgg

SEQ ID NO: 2027727 - DNA, 15 bp, Homo sapiens
aaggggtattttggt

SEQ ID NO: 2027728 - DNA, 15 bp, Homo sapiens
aggggtattttggtt

SEQ ID NO: 2027729 - DNA, 15 bp, Homo sapiens
ggggtattttggttt

SEQ ID NO: 2027730 - DNA, 15 bp, Homo sapiens
gggtattttggtttt

SEQ ID NO: 2027731 - DNA, 15 bp, Homo sapiens
ggtattttggtttta

SEQ ID NO: 2027732 - DNA, 15 bp, Homo sapiens
gtattttggttttac

SEQ ID NO: 2027733 - DNA, 15 bp, Homo sapiens
tattttggttttact

SEQ ID NO: 2027734 - DNA, 15 bp, Homo sapiens
attttggttttactg

SEQ ID NO: 2027735 - DNA, 15 bp, Homo sapiens
ttttggttttactgt

SEQ ID NO: 2027736 - DNA, 15 bp, Homo sapiens
tttggttttactgta

SEQ ID NO: 2027737 - DNA, 15 bp, Homo sapiens
ttggttttactgtag

SEQ ID NO: 2027738 - DNA, 15 bp, Homo sapiens
tggttttactgtaga

SEQ ID NO: 2027739 - DNA, 15 bp, Homo sapiens
ggttttactgtagaa

SEQ ID NO: 2027740 - DNA, 15 bp, Homo sapiens
gttttactgtagaat

SEQ ID NO: 2027741 - DNA, 15 bp, Homo sapiens
ttttactgtagaatt

SEQ ID NO: 2027742 - DNA, 15 bp, Homo sapiens
tttactgtagaatta

SEQ ID NO: 2027743 - DNA, 15 bp, Homo sapiens
ttactgtagaattat

SEQ ID NO: 2027744 - DNA, 15 bp, Homo sapiens
tactgtagaattata

SEQ ID NO: 2027745 - DNA, 15 bp, Homo sapiens
actgtagaattataa

SEQ ID NO: 2027746 - DNA, 15 bp, Homo sapiens
ctgtagaattataac

SEQ ID NO: 2027747 - DNA, 15 bp, Homo sapiens
tgtagaattataaca

SEQ ID NO: 2027748 - DNA, 15 bp, Homo sapiens
gtagaattataacat

SEQ ID NO: 2027749 - DNA, 15 bp, Homo sapiens
tagaattataacatc

SEQ ID NO: 2027750 - DNA, 15 bp, Homo sapiens
agaattataacatct

SEQ ID NO: 2027751 - DNA, 15 bp, Homo sapiens
gaattataacatctt

SEQ ID NO: 2027752 - DNA, 15 bp, Homo sapiens
aattataacatctta

SEQ ID NO: 2027753 - DNA, 15 bp, Homo sapiens
attataacatcttat

SEQ ID NO: 2027754 - DNA, 15 bp, Homo sapiens
ttataacatcttatt

SEQ ID NO: 2027755 - DNA, 15 bp, Homo sapiens
tataacatcttattt

SEQ ID NO: 2027756 - DNA, 15 bp, Homo sapiens
ataacatcttatttc

SEQ ID NO: 2027757 - DNA, 15 bp, Homo sapiens
taacatcttatttct

SEQ ID NO: 2027758 - DNA, 15 bp, Homo sapiens
aacatcttatttcta

SEQ ID NO: 2027759 - DNA, 15 bp, Homo sapiens
acatcttatttctaa

SEQ ID NO: 2027760 - DNA, 15 bp, Homo sapiens
catcttatttctaac

SEQ ID NO: 2027761 - DNA, 15 bp, Homo sapiens
atcttatttctaact

SEQ ID NO: 2027762 - DNA, 15 bp, Homo sapiens
tcttatttctaactg

SEQ ID NO: 2027763 - DNA, 15 bp, Homo sapiens
cttatttctaactga

SEQ ID NO: 2027764 - DNA, 15 bp, Homo sapiens
ttatttctaactgat

SEQ ID NO: 2027765 - DNA, 15 bp, Homo sapiens
tatttctaactgatc

SEQ ID NO: 2027766 - DNA, 15 bp, Homo sapiens
atttctaactgatca

SEQ ID NO: 2027767 - DNA, 15 bp, Homo sapiens
tttctaactgatcat

SEQ ID NO: 2027768 - DNA, 15 bp, Homo sapiens
ttctaactgatcata

SEQ ID NO: 2027769 - DNA, 15 bp, Homo sapiens
tctaactgatcataa

SEQ ID NO: 2027770 - DNA, 15 bp, Homo sapiens
ctaactgatcataaa

SEQ ID NO: 2027771 - DNA, 15 bp, Homo sapiens
taactgatcataaaa

SEQ ID NO: 2027772 - DNA, 15 bp, Homo sapiens
aactgatcataaaat

SEQ ID NO: 2027773 - DNA, 15 bp, Homo sapiens
actgatcataaaatt

SEQ ID NO: 2027774 - DNA, 15 bp, Homo sapiens
ctgatcataaaattt

SEQ ID NO: 2027775 - DNA, 15 bp, Homo sapiens
tgatcataaaattta

SEQ ID NO: 2027776 - DNA, 15 bp, Homo sapiens
gatcataaaatttaa

SEQ ID NO: 2027777 - DNA, 15 bp, Homo sapiens
atcataaaatttaaa

SEQ ID NO: 2027778 - DNA, 15 bp, Homo sapiens
tcataaaatttaaaa

SEQ ID NO: 2027779 - DNA, 15 bp, Homo sapiens
cataaaatttaaaaa

SEQ ID NO: 2027780 - DNA, 15 bp, Homo sapiens
ataaaatttaaaaat

SEQ ID NO: 2027781 - DNA, 15 bp, Homo sapiens
aaatttaaaaatagt

SEQ ID NO: 2027782 - DNA, 15 bp, Homo sapiens
aatttaaaaatagtt

SEQ ID NO: 2027783 - DNA, 15 bp, Homo sapiens
atttaaaaatagttg

SEQ ID NO: 2027784 - DNA, 15 bp, Homo sapiens
tttaaaaatagttga

SEQ ID NO: 2027785 - DNA, 15 bp, Homo sapiens
ttaaaaatagttgat

SEQ ID NO: 2027786 - DNA, 15 bp, Homo sapiens
taaaaatagttgatc

SEQ ID NO: 2027787 - DNA, 15 bp, Homo sapiens
aaaaatagttgatca

SEQ ID NO: 2027788 - DNA, 15 bp, Homo sapiens
aaaatagttgatcat

SEQ ID NO: 2027789 - DNA, 15 bp, Homo sapiens
aaatagttgatcata

SEQ ID NO: 2027790 - DNA, 15 bp, Homo sapiens
aatagttgatcatac

SEQ ID NO: 2027791 - DNA, 15 bp, Homo sapiens
atagttgatcatact

SEQ ID NO: 2027792 - DNA, 15 bp, Homo sapiens
tagttgatcatactt

SEQ ID NO: 2027793 - DNA, 15 bp, Homo sapiens
agttgatcatacttt

SEQ ID NO: 2027794 - DNA, 15 bp, Homo sapiens
gttgatcatactttg

SEQ ID NO: 2027795 - DNA, 15 bp, Homo sapiens
ttgatcatactttgt

SEQ ID NO: 2027796 - DNA, 15 bp, Homo sapiens
tgatcatactttgta

SEQ ID NO: 2027797 - DNA, 15 bp, Homo sapiens
gatcatactttgtaa

SEQ ID NO: 2027798 - DNA, 15 bp, Homo sapiens
atcatactttgtaac

SEQ ID NO: 2027799 - DNA, 15 bp, Homo sapiens
tcatactttgtaaca

SEQ ID NO: 2027800 - DNA, 15 bp, Homo sapiens
catactttgtaacag

SEQ ID NO: 2027801 - DNA, 15 bp, Homo sapiens
atactttgtaacaga

SEQ ID NO: 2027802 - DNA, 15 bp, Homo sapiens
tactttgtaacagaa

SEQ ID NO: 2027803 - DNA, 15 bp, Homo sapiens
actttgtaacagaat

SEQ ID NO: 2027804 - DNA, 15 bp, Homo sapiens
ctttgtaacagaatc

SEQ ID NO: 2027805 - DNA, 15 bp, Homo sapiens
tttgtaacagaatca

SEQ ID NO: 2027806 - DNA, 15 bp, Homo sapiens
ttgtaacagaatcac

SEQ ID NO: 2027807 - DNA, 15 bp, Homo sapiens
tgtaacagaatcaca

SEQ ID NO: 2027808 - DNA, 15 bp, Homo sapiens
gtaacagaatcacaa

SEQ ID NO: 2027809 - DNA, 15 bp, Homo sapiens
taacagaatcacaaa

SEQ ID NO: 2027810 - DNA, 15 bp, Homo sapiens
aacagaatcacaaat

SEQ ID NO: 2027811 - DNA, 15 bp, Homo sapiens
acagaatcacaaatt

SEQ ID NO: 2027812 - DNA, 15 bp, Homo sapiens
cagaatcacaaattg

SEQ ID NO: 2027813 - DNA, 15 bp, Homo sapiens
agaatcacaaattgt

SEQ ID NO: 2027814 - DNA, 15 bp, Homo sapiens
gaatcacaaattgta

SEQ ID NO: 2027815 - DNA, 15 bp, Homo sapiens
aatcacaaattgtat

SEQ ID NO: 2027816 - DNA, 15 bp, Homo sapiens
atcacaaattgtatg

SEQ ID NO: 2027817 - DNA, 15 bp, Homo sapiens
tcacaaattgtatgt

SEQ ID NO: 2027818 - DNA, 15 bp, Homo sapiens
cacaaattgtatgtt

SEQ ID NO: 2027819 - DNA, 15 bp, Homo sapiens
acaaattgtatgtta

SEQ ID NO: 2027820 - DNA, 15 bp, Homo sapiens
caaattgtatgttat

SEQ ID NO: 2027821 - DNA, 15 bp, Homo sapiens
aaattgtatgttatg

SEQ ID NO: 2027822 - DNA, 15 bp, Homo sapiens
aattgtatgttatga

SEQ ID NO: 2027823 - DNA, 15 bp, Homo sapiens
attgtatgttatgaa

SEQ ID NO: 2027824 - DNA, 15 bp, Homo sapiens
ttgtatgttatgaaa

SEQ ID NO: 2027825 - DNA, 15 bp, Homo sapiens
tgtatgttatgaaaa

SEQ ID NO: 2027826 - DNA, 15 bp, Homo sapiens
gtatgttatgaaaaa

SEQ ID NO: 2027827 - DNA, 15 bp, Homo sapiens
tatgttatgaaaaaa

SEQ ID NO: 2027828 - DNA, 15 bp, Homo sapiens
atgttatgaaaaaat

SEQ ID NO: 2027829 - DNA, 15 bp, Homo sapiens
tgttatgaaaaaatt

SEQ ID NO: 2027830 - DNA, 15 bp, Homo sapiens
gttatgaaaaaattt

SEQ ID NO: 2027831 - DNA, 15 bp, Homo sapiens
ttatgaaaaaatttt

SEQ ID NO: 2027832 - DNA, 15 bp, Homo sapiens
tatgaaaaaattttg

SEQ ID NO: 2027833 - DNA, 15 bp, Homo sapiens
atgaaaaaattttgg

SEQ ID NO: 2027834 - DNA, 15 bp, Homo sapiens
tgaaaaaattttgga

SEQ ID NO: 2027835 - DNA, 15 bp, Homo sapiens
gaaaaaattttggaa

SEQ ID NO: 2027836 - DNA, 15 bp, Homo sapiens
aaaaaattttggaac

SEQ ID NO: 2027837 - DNA, 15 bp, Homo sapiens
aaaaattttggaact

SEQ ID NO: 2027838 - DNA, 15 bp, Homo sapiens
aaaattttggaacta

SEQ ID NO: 2027839 - DNA, 15 bp, Homo sapiens
aaattttggaactat

SEQ ID NO: 2027840 - DNA, 15 bp, Homo sapiens
aattttggaactata

SEQ ID NO: 2027841 - DNA, 15 bp, Homo sapiens
attttggaactataa

SEQ ID NO: 2027842 - DNA, 15 bp, Homo sapiens
ttttggaactataag

SEQ ID NO: 2027843 - DNA, 15 bp, Homo sapiens
tttggaactataagg

SEQ ID NO: 2027844 - DNA, 15 bp, Homo sapiens
ttggaactataagga

SEQ ID NO: 2027845 - DNA, 15 bp, Homo sapiens
tggaactataaggaa

SEQ ID NO: 2027846 - DNA, 15 bp, Homo sapiens
ggaactataaggaaa

SEQ ID NO: 2027847 - DNA, 15 bp, Homo sapiens
gaactataaggaaaa

SEQ ID NO: 2027848 - DNA, 15 bp, Homo sapiens
aactataaggaaaaa

SEQ ID NO: 2027849 - DNA, 15 bp, Homo sapiens
actataaggaaaaat

SEQ ID NO: 2027850 - DNA, 15 bp, Homo sapiens
ctataaggaaaaata

SEQ ID NO: 2027851 - DNA, 15 bp, Homo sapiens
tataaggaaaaatac

SEQ ID NO: 2027852 - DNA, 15 bp, Homo sapiens
ataaggaaaaatacg

SEQ ID NO: 2027853 - DNA, 15 bp, Homo sapiens
taaggaaaaatacgt

SEQ ID NO: 2027854 - DNA, 15 bp, Homo sapiens
aaggaaaaatacgtt

SEQ ID NO: 2027855 - DNA, 15 bp, Homo sapiens
aggaaaaatacgttt

SEQ ID NO: 2027856 - DNA, 15 bp, Homo sapiens
ggaaaaatacgtttt

SEQ ID NO: 2027857 - DNA, 15 bp, Homo sapiens
gaaaaatacgtttta

SEQ ID NO: 2027858 - DNA, 15 bp, Homo sapiens
aaaaatacgttttaa

SEQ ID NO: 2027859 - DNA, 15 bp, Homo sapiens
aaaatacgttttaaa

SEQ ID NO: 2027860 - DNA, 15 bp, Homo sapiens
aaatacgttttaaaa

SEQ ID NO: 2027861 - DNA, 15 bp, Homo sapiens
aatacgttttaaaac

SEQ ID NO: 2027862 - DNA, 15 bp, Homo sapiens
atacgttttaaaaca

SEQ ID NO: 2027863 - DNA, 15 bp, Homo sapiens
tacgttttaaaacaa

SEQ ID NO: 2027864 - DNA, 15 bp, Homo sapiens
acgttttaaaacaac

SEQ ID NO: 2027865 - DNA, 15 bp, Homo sapiens
cgttttaaaacaact

SEQ ID NO: 2027866 - DNA, 15 bp, Homo sapiens
gttttaaaacaactt

SEQ ID NO: 2027867 - DNA, 15 bp, Homo sapiens
ttttaaaacaacttc

SEQ ID NO: 2027868 - DNA, 15 bp, Homo sapiens
tttaaaacaacttca

SEQ ID NO: 2027869 - DNA, 15 bp, Homo sapiens
ttaaaacaacttcat

SEQ ID NO: 2027870 - DNA, 15 bp, Homo sapiens
taaaacaacttcatt

SEQ ID NO: 2027871 - DNA, 15 bp, Homo sapiens
aaaacaacttcattt

SEQ ID NO: 2027872 - DNA, 15 bp, Homo sapiens
aaacaacttcatttg

SEQ ID NO: 2027873 - DNA, 15 bp, Homo sapiens
aacaacttcatttgt

SEQ ID NO: 2027874 - DNA, 15 bp, Homo sapiens
acaacttcatttgtg

SEQ ID NO: 2027875 - DNA, 15 bp, Homo sapiens
caacttcatttgtgt

SEQ ID NO: 2027876 - DNA, 15 bp, Homo sapiens
aacttcatttgtgtt

SEQ ID NO: 2027877 - DNA, 15 bp, Homo sapiens
acttcatttgtgttt

SEQ ID NO: 2027878 - DNA, 15 bp, Homo sapiens
cttcatttgtgtttt

SEQ ID NO: 2027879 - DNA, 15 bp, Homo sapiens
ttcatttgtgttttc

SEQ ID NO: 2027880 - DNA, 15 bp, Homo sapiens
tcatttgtgttttct

SEQ ID NO: 2027881 - DNA, 15 bp, Homo sapiens
catttgtgttttctc

SEQ ID NO: 2027882 - DNA, 15 bp, Homo sapiens
atttgtgttttctcc

SEQ ID NO: 2027883 - DNA, 15 bp, Homo sapiens
tttgtgttttctcct

SEQ ID NO: 2027884 - DNA, 15 bp, Homo sapiens
ttgtgttttctccta

SEQ ID NO: 2027885 - DNA, 15 bp, Homo sapiens
gtgttttctcctagg

SEQ ID NO: 2027886 - DNA, 15 bp, Homo sapiens
tgttttctcctaggt

SEQ ID NO: 2027887 - DNA, 15 bp, Homo sapiens
gttttctcctaggtc

SEQ ID NO: 2027888 - DNA, 15 bp, Homo sapiens
ttttctcctaggtca

SEQ ID NO: 2027889 - DNA, 15 bp, Homo sapiens
tttctcctaggtcag

SEQ ID NO: 2027890 - DNA, 15 bp, Homo sapiens
ttctcctaggtcagc

SEQ ID NO: 2027891 - DNA, 15 bp, Homo sapiens
tctcctaggtcagct

SEQ ID NO: 2027892 - DNA, 15 bp, Homo sapiens
ctcctaggtcagctg

SEQ ID NO: 2027893 - DNA, 15 bp, Homo sapiens
tcctaggtcagctgc

SEQ ID NO: 2027894 - DNA, 15 bp, Homo sapiens
cctaggtcagctgcc

SEQ ID NO: 2027895 - DNA, 15 bp, Homo sapiens
ctaggtcagctgcct

SEQ ID NO: 2027896 - DNA, 15 bp, Homo sapiens
taggtcagctgccta

SEQ ID NO: 2027897 - DNA, 15 bp, Homo sapiens
aggtcagctgcctat

SEQ ID NO: 2027898 - DNA, 15 bp, Homo sapiens
ggtcagctgcctata

SEQ ID NO: 2027899 - DNA, 15 bp, Homo sapiens
gtcagctgcctataa

SEQ ID NO: 2027900 - DNA, 15 bp, Homo sapiens
tcagctgcctataat

SEQ ID NO: 2027901 - DNA, 15 bp, Homo sapiens
cagctgcctataatc

SEQ ID NO: 2027902 - DNA, 15 bp, Homo sapiens
agctgcctataatct

SEQ ID NO: 2027903 - DNA, 15 bp, Homo sapiens
gctgcctataatctt

SEQ ID NO: 2027904 - DNA, 15 bp, Homo sapiens
ctgcctataatcttc

SEQ ID NO: 2027905 - DNA, 15 bp, Homo sapiens
tgcctataatcttct

SEQ ID NO: 2027906 - DNA, 15 bp, Homo sapiens
gcctataatcttctg

SEQ ID NO: 2027907 - DNA, 15 bp, Homo sapiens
cctataatcttctgt

SEQ ID NO: 2027908 - DNA, 15 bp, Homo sapiens
ctataatcttctgtg

SEQ ID NO: 2027909 - DNA, 15 bp, Homo sapiens
tataatcttctgtgt

SEQ ID NO: 2027910 - DNA, 15 bp, Homo sapiens
ataatcttctgtgtg

SEQ ID NO: 2027911 - DNA, 15 bp, Homo sapiens
taatcttctgtgtgc

SEQ ID NO: 2027912 - DNA, 15 bp, Homo sapiens
aatcttctgtgtgcc

SEQ ID NO: 2027913 - DNA, 15 bp, Homo sapiens
atcttctgtgtgcct

SEQ ID NO: 2027914 - DNA, 15 bp, Homo sapiens
tcttctgtgtgcctt

SEQ ID NO: 2027915 - DNA, 15 bp, Homo sapiens
cttctgtgtgcctta

SEQ ID NO: 2027916 - DNA, 15 bp, Homo sapiens
ttctgtgtgccttaa

SEQ ID NO: 2027917 - DNA, 15 bp, Homo sapiens
tctgtgtgccttaac

SEQ ID NO: 2027918 - DNA, 15 bp, Homo sapiens
ctgtgtgccttaact

SEQ ID NO: 2027919 - DNA, 15 bp, Homo sapiens
tgtgtgccttaactt

SEQ ID NO: 2027920 - DNA, 15 bp, Homo sapiens
gtgtgccttaacttg

SEQ ID NO: 2027921 - DNA, 15 bp, Homo sapiens
tgtgccttaacttgt

SEQ ID NO: 2027922 - DNA, 15 bp, Homo sapiens
gtgccttaacttgta

SEQ ID NO: 2027923 - DNA, 15 bp, Homo sapiens
tgccttaacttgtac

SEQ ID NO: 2027924 - DNA, 15 bp, Homo sapiens
gccttaacttgtacc

SEQ ID NO: 2027925 - DNA, 15 bp, Homo sapiens
ccttaacttgtacct

SEQ ID NO: 2027926 - DNA, 15 bp, Homo sapiens
cttaacttgtacctt

SEQ ID NO: 2027927 - DNA, 15 bp, Homo sapiens
ttaacttgtaccttt

SEQ ID NO: 2027928 - DNA, 15 bp, Homo sapiens
taacttgtaccttta

SEQ ID NO: 2027929 - DNA, 15 bp, Homo sapiens
aacttgtacctttaa

SEQ ID NO: 2027930 - DNA, 15 bp, Homo sapiens
acttgtacctttaat

SEQ ID NO: 2027931 - DNA, 15 bp, Homo sapiens
cttgtacctttaatt

SEQ ID NO: 2027932 - DNA, 15 bp, Homo sapiens
ttgtacctttaattt

SEQ ID NO: 2027933 - DNA, 15 bp, Homo sapiens
tgtacctttaattta

SEQ ID NO: 2027934 - DNA, 15 bp, Homo sapiens
gtacctttaatttaa

SEQ ID NO: 2027935 - DNA, 15 bp, Homo sapiens
tacctttaatttaaa

SEQ ID NO: 2027936 - DNA, 15 bp, Homo sapiens
acctttaatttaaaa

SEQ ID NO: 2027937 - DNA, 15 bp, Homo sapiens
cctttaatttaaaaa

SEQ ID NO: 2027938 - DNA, 15 bp, Homo sapiens
tttaatttaaaaatc

SEQ ID NO: 2027939 - DNA, 15 bp, Homo sapiens
ttaatttaaaaatcg

SEQ ID NO: 2027940 - DNA, 15 bp, Homo sapiens
taatttaaaaatcga

SEQ ID NO: 2027941 - DNA, 15 bp, Homo sapiens
aatttaaaaatcgag

SEQ ID NO: 2027942 - DNA, 15 bp, Homo sapiens
atttaaaaatcgagg

SEQ ID NO: 2027943 - DNA, 15 bp, Homo sapiens
tttaaaaatcgaggg

SEQ ID NO: 2027944 - DNA, 15 bp, Homo sapiens
ttaaaaatcgagggc

SEQ ID NO: 2027945 - DNA, 15 bp, Homo sapiens
taaaaatcgagggcc

SEQ ID NO: 2027946 - DNA, 15 bp, Homo sapiens
aaaaatcgagggcca

SEQ ID NO: 2027947 - DNA, 15 bp, Homo sapiens
aaaatcgagggccag

SEQ ID NO: 2027948 - DNA, 15 bp, Homo sapiens
aaatcgagggccagt

SEQ ID NO: 2027949 - DNA, 15 bp, Homo sapiens
aatcgagggccagtt

SEQ ID NO: 2027950 - DNA, 15 bp, Homo sapiens
atcgagggccagtta

SEQ ID NO: 2027951 - DNA, 15 bp, Homo sapiens
tcgagggccagttac

SEQ ID NO: 2027952 - DNA, 15 bp, Homo sapiens
cgagggccagttact

SEQ ID NO: 2027953 - DNA, 15 bp, Homo sapiens
gagggccagttacta

SEQ ID NO: 2027954 - DNA, 15 bp, Homo sapiens
agggccagttactag

SEQ ID NO: 2027955 - DNA, 15 bp, Homo sapiens
gggccagttactaga

SEQ ID NO: 2027956 - DNA, 15 bp, Homo sapiens
ggccagttactagag

SEQ ID NO: 2027957 - DNA, 15 bp, Homo sapiens
gccagttactagaga

SEQ ID NO: 2027958 - DNA, 15 bp, Homo sapiens
ccagttactagagac

SEQ ID NO: 2027959 - DNA, 15 bp, Homo sapiens
cagttactagagaca

SEQ ID NO: 2027960 - DNA, 15 bp, Homo sapiens
agttactagagacat

SEQ ID NO: 2027961 - DNA, 15 bp, Homo sapiens
gttactagagacatc

SEQ ID NO: 2027962 - DNA, 15 bp, Homo sapiens
ttactagagacatca

SEQ ID NO: 2027963 - DNA, 15 bp, Homo sapiens
tactagagacatcag

SEQ ID NO: 2027964 - DNA, 15 bp, Homo sapiens
actagagacatcagg

SEQ ID NO: 2027965 - DNA, 15 bp, Homo sapiens
ctagagacatcaggt

SEQ ID NO: 2027966 - DNA, 15 bp, Homo sapiens
tagagacatcaggtt

SEQ ID NO: 2027967 - DNA, 15 bp, Homo sapiens
agagacatcaggttt

SEQ ID NO: 2027968 - DNA, 15 bp, Homo sapiens
gagacatcaggttta

SEQ ID NO: 2027969 - DNA, 15 bp, Homo sapiens
agacatcaggtttat

SEQ ID NO: 2027970 - DNA, 15 bp, Homo sapiens
gacatcaggtttatg

SEQ ID NO: 2027971 - DNA, 15 bp, Homo sapiens
acatcaggtttatgt

SEQ ID NO: 2027972 - DNA, 15 bp, Homo sapiens
catcaggtttatgta

SEQ ID NO: 2027973 - DNA, 15 bp, Homo sapiens
atcaggtttatgtat

SEQ ID NO: 2027974 - DNA, 15 bp, Homo sapiens
tcaggtttatgtatc

SEQ ID NO: 2027975 - DNA, 15 bp, Homo sapiens
caggtttatgtatcc

SEQ ID NO: 2027976 - DNA, 15 bp, Homo sapiens
aggtttatgtatccc

SEQ ID NO: 2027977 - DNA, 15 bp, Homo sapiens
ggtttatgtatccct

SEQ ID NO: 2027978 - DNA, 15 bp, Homo sapiens
gtttatgtatccctg

SEQ ID NO: 2027979 - DNA, 15 bp, Homo sapiens
tttatgtatccctgc

SEQ ID NO: 2027980 - DNA, 15 bp, Homo sapiens
ttatgtatccctgcc

SEQ ID NO: 2027981 - DNA, 15 bp, Homo sapiens
tatgtatccctgcca

SEQ ID NO: 2027982 - DNA, 15 bp, Homo sapiens
atgtatccctgccaa

SEQ ID NO: 2027983 - DNA, 15 bp, Homo sapiens
tgtatccctgccaac

SEQ ID NO: 2027984 - DNA, 15 bp, Homo sapiens
gtatccctgccaaca

SEQ ID NO: 2027985 - DNA, 15 bp, Homo sapiens
tatccctgccaacaa

SEQ ID NO: 2027986 - DNA, 15 bp, Homo sapiens
atccctgccaacaac

SEQ ID NO: 2027987 - DNA, 15 bp, Homo sapiens
tccctgccaacaaca

SEQ ID NO: 2027988 - DNA, 15 bp, Homo sapiens
ccctgccaacaacac

SEQ ID NO: 2027989 - DNA, 15 bp, Homo sapiens
cctgccaacaacacc

SEQ ID NO: 2027990 - DNA, 15 bp, Homo sapiens
ctgccaacaacaccc

SEQ ID NO: 2027991 - DNA, 15 bp, Homo sapiens
tgccaacaacaccct

SEQ ID NO: 2027992 - DNA, 15 bp, Homo sapiens
gccaacaacaccctc

SEQ ID NO: 2027993 - DNA, 15 bp, Homo sapiens
ccaacaacaccctct

SEQ ID NO: 2027994 - DNA, 15 bp, Homo sapiens
caacaacaccctctt

SEQ ID NO: 2027995 - DNA, 15 bp, Homo sapiens
aacaacaccctcttt

SEQ ID NO: 2027996 - DNA, 15 bp, Homo sapiens
acaacaccctcttta

SEQ ID NO: 2027997 - DNA, 15 bp, Homo sapiens
caacaccctctttat

SEQ ID NO: 2027998 - DNA, 15 bp, Homo sapiens
aacaccctctttatt

SEQ ID NO: 2027999 - DNA, 15 bp, Homo sapiens
acaccctctttattg

SEQ ID NO: 2028000 - DNA, 15 bp, Homo sapiens
caccctctttattgt

SEQ ID NO: 2028001 - DNA, 15 bp, Homo sapiens
accctctttattgtc

SEQ ID NO: 2028002 - DNA, 15 bp, Homo sapiens
ccctctttattgtct

SEQ ID NO: 2028003 - DNA, 15 bp, Homo sapiens
cctctttattgtctc

SEQ ID NO: 2028004 - DNA, 15 bp, Homo sapiens
ctctttattgtctct

SEQ ID NO: 2028005 - DNA, 15 bp, Homo sapiens
tctttattgtctcta

SEQ ID NO: 2028006 - DNA, 15 bp, Homo sapiens
ctttattgtctctat

SEQ ID NO: 2028007 - DNA, 15 bp, Homo sapiens
tttattgtctctatt

SEQ ID NO: 2028008 - DNA, 15 bp, Homo sapiens
ttattgtctctatta

SEQ ID NO: 2028009 - DNA, 15 bp, Homo sapiens
tattgtctctattag

SEQ ID NO: 2028010 - DNA, 15 bp, Homo sapiens
attgtctctattagt

SEQ ID NO: 2028011 - DNA, 15 bp, Homo sapiens
ttgtctctattagta

SEQ ID NO: 2028012 - DNA, 15 bp, Homo sapiens
tgtctctattagtaa

SEQ ID NO: 2028013 - DNA, 15 bp, Homo sapiens
gtctctattagtaag

SEQ ID NO: 2028014 - DNA, 15 bp, Homo sapiens
tctctattagtaaga

SEQ ID NO: 2028015 - DNA, 15 bp, Homo sapiens
ctctattagtaagac

SEQ ID NO: 2028016 - DNA, 15 bp, Homo sapiens
tctattagtaagaca

SEQ ID NO: 2028017 - DNA, 15 bp, Homo sapiens
ctattagtaagacac

SEQ ID NO: 2028018 - DNA, 15 bp, Homo sapiens
tattagtaagacact

SEQ ID NO: 2028019 - DNA, 15 bp, Homo sapiens
attagtaagacactg

SEQ ID NO: 2028020 - DNA, 15 bp, Homo sapiens
ttagtaagacactgg

SEQ ID NO: 2028021 - DNA, 15 bp, Homo sapiens
tagtaagacactggc

SEQ ID NO: 2028022 - DNA, 15 bp, Homo sapiens
agtaagacactggca

SEQ ID NO: 2028023 - DNA, 15 bp, Homo sapiens
gtaagacactggcag

SEQ ID NO: 2028024 - DNA, 15 bp, Homo sapiens
taagacactggcagc

SEQ ID NO: 2028025 - DNA, 15 bp, Homo sapiens
aagacactggcagcc

SEQ ID NO: 2028026 - DNA, 15 bp, Homo sapiens
agacactggcagcca

SEQ ID NO: 2028027 - DNA, 15 bp, Homo sapiens
gacactggcagccaa

SEQ ID NO: 2028028 - DNA, 15 bp, Homo sapiens
acactggcagccaat

SEQ ID NO: 2028029 - DNA, 15 bp, Homo sapiens
cactggcagccaatg

SEQ ID NO: 2028030 - DNA, 15 bp, Homo sapiens
actggcagccaatga

SEQ ID NO: 2028031 - DNA, 15 bp, Homo sapiens
ctggcagccaatgag

SEQ ID NO: 2028032 - DNA, 15 bp, Homo sapiens
tggcagccaatgagc

SEQ ID NO: 2028033 - DNA, 15 bp, Homo sapiens
ggcagccaatgagcc

SEQ ID NO: 2028034 - DNA, 15 bp, Homo sapiens
gcagccaatgagcca

SEQ ID NO: 2028035 - DNA, 15 bp, Homo sapiens
cagccaatgagccac

SEQ ID NO: 2028036 - DNA, 15 bp, Homo sapiens
agccaatgagccaca

SEQ ID NO: 2028037 - DNA, 15 bp, Homo sapiens
gccaatgagccacac

SEQ ID NO: 2028038 - DNA, 15 bp, Homo sapiens
ccaatgagccacacc

SEQ ID NO: 2028039 - DNA, 15 bp, Homo sapiens
caatgagccacacct

SEQ ID NO: 2028040 - DNA, 15 bp, Homo sapiens
aatgagccacacctc

SEQ ID NO: 2028041 - DNA, 15 bp, Homo sapiens
atgagccacacctca

SEQ ID NO: 2028042 - DNA, 15 bp, Homo sapiens
tgagccacacctcac

SEQ ID NO: 2028043 - DNA, 15 bp, Homo sapiens
gagccacacctcacg

SEQ ID NO: 2028044 - DNA, 15 bp, Homo sapiens
agccacacctcacgt

SEQ ID NO: 2028045 - DNA, 15 bp, Homo sapiens
gccacacctcacgtt

SEQ ID NO: 2028046 - DNA, 15 bp, Homo sapiens
ccacacctcacgtta

SEQ ID NO: 2028047 - DNA, 15 bp, Homo sapiens
cacacctcacgttag

SEQ ID NO: 2028048 - DNA, 15 bp, Homo sapiens
acacctcacgttaga

SEQ ID NO: 2028049 - DNA, 15 bp, Homo sapiens
cacctcacgttagaa

SEQ ID NO: 2028050 - DNA, 15 bp, Homo sapiens
acctcacgttagaat

SEQ ID NO: 2028051 - DNA, 15 bp, Homo sapiens
cctcacgttagaatt

SEQ ID NO: 2028052 - DNA, 15 bp, Homo sapiens
ctcacgttagaattt

SEQ ID NO: 2028053 - DNA, 15 bp, Homo sapiens
tcacgttagaatttt

SEQ ID NO: 2028054 - DNA, 15 bp, Homo sapiens
cacgttagaattttt

SEQ ID NO: 2028055 - DNA, 15 bp, Homo sapiens
acgttagaatttttg

SEQ ID NO: 2028056 - DNA, 15 bp, Homo sapiens
cgttagaatttttgg

SEQ ID NO: 2028057 - DNA, 15 bp, Homo sapiens
gttagaatttttgga

SEQ ID NO: 2028058 - DNA, 15 bp, Homo sapiens
ttagaatttttggaa

SEQ ID NO: 2028059 - DNA, 15 bp, Homo sapiens
tagaatttttggaag

SEQ ID NO: 2028060 - DNA, 15 bp, Homo sapiens
agaatttttggaaga

SEQ ID NO: 2028061 - DNA, 15 bp, Homo sapiens
gaatttttggaagag

SEQ ID NO: 2028062 - DNA, 15 bp, Homo sapiens
aatttttggaagagt

SEQ ID NO: 2028063 - DNA, 15 bp, Homo sapiens
atttttggaagagtg

SEQ ID NO: 2028064 - DNA, 15 bp, Homo sapiens
tttttggaagagtgt

SEQ ID NO: 2028065 - DNA, 15 bp, Homo sapiens
ttttggaagagtgta

SEQ ID NO: 2028066 - DNA, 15 bp, Homo sapiens
tttggaagagtgtat

SEQ ID NO: 2028067 - DNA, 15 bp, Homo sapiens
ttggaagagtgtatt

SEQ ID NO: 2028068 - DNA, 15 bp, Homo sapiens
tggaagagtgtattt

SEQ ID NO: 2028069 - DNA, 15 bp, Homo sapiens
ggaagagtgtatttc

SEQ ID NO: 2028070 - DNA, 15 bp, Homo sapiens
gaagagtgtatttct

SEQ ID NO: 2028071 - DNA, 15 bp, Homo sapiens
aagagtgtatttctg

SEQ ID NO: 2028072 - DNA, 15 bp, Homo sapiens
agagtgtatttctgg

SEQ ID NO: 2028073 - DNA, 15 bp, Homo sapiens
gagtgtatttctgga

SEQ ID NO: 2028074 - DNA, 15 bp, Homo sapiens
agtgtatttctggat

SEQ ID NO: 2028075 - DNA, 15 bp, Homo sapiens
gtgtatttctggatt

SEQ ID NO: 2028076 - DNA, 15 bp, Homo sapiens
tgtatttctggattt

SEQ ID NO: 2028077 - DNA, 15 bp, Homo sapiens
gtatttctggattta

SEQ ID NO: 2028078 - DNA, 15 bp, Homo sapiens
tatttctggatttag

SEQ ID NO: 2028079 - DNA, 15 bp, Homo sapiens
atttctggatttagc

SEQ ID NO: 2028080 - DNA, 15 bp, Homo sapiens
tttctggatttagca

SEQ ID NO: 2028081 - DNA, 15 bp, Homo sapiens
ttctggatttagcaa

SEQ ID NO: 2028082 - DNA, 15 bp, Homo sapiens
tctggatttagcaaa

SEQ ID NO: 2028083 - DNA, 15 bp, Homo sapiens
ctggatttagcaaat

SEQ ID NO: 2028084 - DNA, 15 bp, Homo sapiens
tggatttagcaaatc

SEQ ID NO: 2028085 - DNA, 15 bp, Homo sapiens
ggatttagcaaatct

SEQ ID NO: 2028086 - DNA, 15 bp, Homo sapiens
gatttagcaaatcta

SEQ ID NO: 2028087 - DNA, 15 bp, Homo sapiens
atttagcaaatctag

SEQ ID NO: 2028088 - DNA, 15 bp, Homo sapiens
tttagcaaatctagt

SEQ ID NO: 2028089 - DNA, 15 bp, Homo sapiens
ttagcaaatctagta

SEQ ID NO: 2028090 - DNA, 15 bp, Homo sapiens
tagcaaatctagtaa

SEQ ID NO: 2028091 - DNA, 15 bp, Homo sapiens
agcaaatctagtaag

SEQ ID NO: 2028092 - DNA, 15 bp, Homo sapiens
gcaaatctagtaagt

SEQ ID NO: 2028093 - DNA, 15 bp, Homo sapiens
caaatctagtaagta

SEQ ID NO: 2028094 - DNA, 15 bp, Homo sapiens
aaatctagtaagtaa

SEQ ID NO: 2028095 - DNA, 15 bp, Homo sapiens
aatctagtaagtaat

SEQ ID NO: 2028096 - DNA, 15 bp, Homo sapiens
atctagtaagtaatg

SEQ ID NO: 2028097 - DNA, 15 bp, Homo sapiens
tctagtaagtaatga

SEQ ID NO: 2028098 - DNA, 15 bp, Homo sapiens
ctagtaagtaatgat

SEQ ID NO: 2028099 - DNA, 15 bp, Homo sapiens
tagtaagtaatgata

SEQ ID NO: 2028100 - DNA, 15 bp, Homo sapiens
agtaagtaatgataa

SEQ ID NO: 2028101 - DNA, 15 bp, Homo sapiens
gtaagtaatgataat

SEQ ID NO: 2028102 - DNA, 15 bp, Homo sapiens
taagtaatgataatt

SEQ ID NO: 2028103 - DNA, 15 bp, Homo sapiens
aagtaatgataattt

SEQ ID NO: 2028104 - DNA, 15 bp, Homo sapiens
agtaatgataatttt

SEQ ID NO: 2028105 - DNA, 15 bp, Homo sapiens
gtaatgataattttc

SEQ ID NO: 2028106 - DNA, 15 bp, Homo sapiens
taatgataattttct

SEQ ID NO: 2028107 - DNA, 15 bp, Homo sapiens
aatgataattttctt

SEQ ID NO: 2028108 - DNA, 15 bp, Homo sapiens
atgataattttcttt

SEQ ID NO: 2028109 - DNA, 15 bp, Homo sapiens
tgataattttcttta

SEQ ID NO: 2028110 - DNA, 15 bp, Homo sapiens
gataattttctttaa

SEQ ID NO: 2028111 - DNA, 15 bp, Homo sapiens
ataattttctttaat

SEQ ID NO: 2028112 - DNA, 15 bp, Homo sapiens
taattttctttaata

SEQ ID NO: 2028113 - DNA, 15 bp, Homo sapiens
aattttctttaatac

SEQ ID NO: 2028114 - DNA, 15 bp, Homo sapiens
attttctttaatact

SEQ ID NO: 2028115 - DNA, 15 bp, Homo sapiens
ttttctttaatacta

SEQ ID NO: 2028116 - DNA, 15 bp, Homo sapiens
tttctttaatactaa

SEQ ID NO: 2028117 - DNA, 15 bp, Homo sapiens
ttctttaatactaac

SEQ ID NO: 2028118 - DNA, 15 bp, Homo sapiens
tctttaatactaaca

SEQ ID NO: 2028119 - DNA, 15 bp, Homo sapiens
ctttaatactaacaa

SEQ ID NO: 2028120 - DNA, 15 bp, Homo sapiens
tttaatactaacaat

SEQ ID NO: 2028121 - DNA, 15 bp, Homo sapiens
ttaatactaacaatt

SEQ ID NO: 2028122 - DNA, 15 bp, Homo sapiens
taatactaacaatta

SEQ ID NO: 2028123 - DNA, 15 bp, Homo sapiens
aatactaacaattat

SEQ ID NO: 2028124 - DNA, 15 bp, Homo sapiens
atactaacaattatt

SEQ ID NO: 2028125 - DNA, 15 bp, Homo sapiens
tactaacaattattc

SEQ ID NO: 2028126 - DNA, 15 bp, Homo sapiens
actaacaattattct

SEQ ID NO: 2028127 - DNA, 15 bp, Homo sapiens
ctaacaattattcta

SEQ ID NO: 2028128 - DNA, 15 bp, Homo sapiens
taacaattattctaa

SEQ ID NO: 2028129 - DNA, 15 bp, Homo sapiens
aacaattattctaag

SEQ ID NO: 2028130 - DNA, 15 bp, Homo sapiens
acaattattctaaga

SEQ ID NO: 2028131 - DNA, 15 bp, Homo sapiens
caattattctaagag

SEQ ID NO: 2028132 - DNA, 15 bp, Homo sapiens
aattattctaagaga

SEQ ID NO: 2028133 - DNA, 15 bp, Homo sapiens
attattctaagagaa

SEQ ID NO: 2028134 - DNA, 15 bp, Homo sapiens
ttattctaagagaat

SEQ ID NO: 2028135 - DNA, 15 bp, Homo sapiens
tattctaagagaatt

SEQ ID NO: 2028136 - DNA, 15 bp, Homo sapiens
attctaagagaattc

SEQ ID NO: 2028137 - DNA, 15 bp, Homo sapiens
ttctaagagaattca

SEQ ID NO: 2028138 - DNA, 15 bp, Homo sapiens
tctaagagaattcaa

SEQ ID NO: 2028139 - DNA, 15 bp, Homo sapiens
ctaagagaattcaaa

SEQ ID NO: 2028140 - DNA, 15 bp, Homo sapiens
taagagaattcaaag

SEQ ID NO: 2028141 - DNA, 15 bp, Homo sapiens
aagagaattcaaaga

SEQ ID NO: 2028142 - DNA, 15 bp, Homo sapiens
agagaattcaaagaa

SEQ ID NO: 2028143 - DNA, 15 bp, Homo sapiens
gagaattcaaagaaa

SEQ ID NO: 2028144 - DNA, 15 bp, Homo sapiens
agaattcaaagaaaa

SEQ ID NO: 2028145 - DNA, 15 bp, Homo sapiens
gaattcaaagaaaac

SEQ ID NO: 2028146 - DNA, 15 bp, Homo sapiens
aattcaaagaaaacc

SEQ ID NO: 2028147 - DNA, 15 bp, Homo sapiens
attcaaagaaaaccc

SEQ ID NO: 2028148 - DNA, 15 bp, Homo sapiens
ttcaaagaaaaccct

SEQ ID NO: 2028149 - DNA, 15 bp, Homo sapiens
tcaaagaaaaccctt

SEQ ID NO: 2028150 - DNA, 15 bp, Homo sapiens
caaagaaaacccttt

SEQ ID NO: 2028151 - DNA, 15 bp, Homo sapiens
aaagaaaaccctttc

SEQ ID NO: 2028152 - DNA, 15 bp, Homo sapiens
aagaaaaccctttca

SEQ ID NO: 2028153 - DNA, 15 bp, Homo sapiens
agaaaaccctttcat

SEQ ID NO: 2028154 - DNA, 15 bp, Homo sapiens
gaaaaccctttcatt

SEQ ID NO: 2028155 - DNA, 15 bp, Homo sapiens
aaaaccctttcattt

SEQ ID NO: 2028156 - DNA, 15 bp, Homo sapiens
aaaccctttcatttc

SEQ ID NO: 2028157 - DNA, 15 bp, Homo sapiens
aaccctttcatttca

SEQ ID NO: 2028158 - DNA, 15 bp, Homo sapiens
accctttcatttcag

SEQ ID NO: 2028159 - DNA, 15 bp, Homo sapiens
ccctttcatttcaga

SEQ ID NO: 2028160 - DNA, 15 bp, Homo sapiens
cctttcatttcagaa

SEQ ID NO: 2028161 - DNA, 15 bp, Homo sapiens
ctttcatttcagaat

SEQ ID NO: 2028162 - DNA, 15 bp, Homo sapiens
tttcatttcagaatt

SEQ ID NO: 2028163 - DNA, 15 bp, Homo sapiens
ttcatttcagaattt

SEQ ID NO: 2028164 - DNA, 15 bp, Homo sapiens
tcatttcagaatttt

SEQ ID NO: 2028165 - DNA, 15 bp, Homo sapiens
catttcagaattttc

SEQ ID NO: 2028166 - DNA, 15 bp, Homo sapiens
atttcagaattttcc

SEQ ID NO: 2028167 - DNA, 15 bp, Homo sapiens
tttcagaattttcca

SEQ ID NO: 2028168 - DNA, 15 bp, Homo sapiens
ttcagaattttccag

SEQ ID NO: 2028169 - DNA, 15 bp, Homo sapiens
tcagaattttccagt

SEQ ID NO: 2028170 - DNA, 15 bp, Homo sapiens
cagaattttccagtg

SEQ ID NO: 2028171 - DNA, 15 bp, Homo sapiens
agaattttccagtga

SEQ ID NO: 2028172 - DNA, 15 bp, Homo sapiens
gaattttccagtgaa

SEQ ID NO: 2028173 - DNA, 15 bp, Homo sapiens
aattttccagtgaag

SEQ ID NO: 2028174 - DNA, 15 bp, Homo sapiens
attttccagtgaaga

SEQ ID NO: 2028175 - DNA, 15 bp, Homo sapiens
ttttccagtgaagac

SEQ ID NO: 2028176 - DNA, 15 bp, Homo sapiens
tttccagtgaagact

SEQ ID NO: 2028177 - DNA, 15 bp, Homo sapiens
ttccagtgaagactt

SEQ ID NO: 2028178 - DNA, 15 bp, Homo sapiens
tccagtgaagacttt

SEQ ID NO: 2028179 - DNA, 15 bp, Homo sapiens
ccagtgaagactttc

SEQ ID NO: 2028180 - DNA, 15 bp, Homo sapiens
cagtgaagactttca

SEQ ID NO: 2028181 - DNA, 15 bp, Homo sapiens
agtgaagactttcac

SEQ ID NO: 2028182 - DNA, 15 bp, Homo sapiens
gtgaagactttcact

SEQ ID NO: 2028183 - DNA, 15 bp, Homo sapiens
tgaagactttcactt

SEQ ID NO: 2028184 - DNA, 15 bp, Homo sapiens
gaagactttcactta

SEQ ID NO: 2028185 - DNA, 15 bp, Homo sapiens
aagactttcacttac

SEQ ID NO: 2028186 - DNA, 15 bp, Homo sapiens
agactttcacttaca

SEQ ID NO: 2028187 - DNA, 15 bp, Homo sapiens
gactttcacttacat

SEQ ID NO: 2028188 - DNA, 15 bp, Homo sapiens
actttcacttacatt

SEQ ID NO: 2028189 - DNA, 15 bp, Homo sapiens
ctttcacttacattt

SEQ ID NO: 2028190 - DNA, 15 bp, Homo sapiens
tttcacttacatttt

SEQ ID NO: 2028191 - DNA, 15 bp, Homo sapiens
ttcacttacattttt

SEQ ID NO: 2028192 - DNA, 15 bp, Homo sapiens
tcacttacattttta

SEQ ID NO: 2028193 - DNA, 15 bp, Homo sapiens
cacttacatttttac

SEQ ID NO: 2028194 - DNA, 15 bp, Homo sapiens
acttacatttttact

SEQ ID NO: 2028195 - DNA, 15 bp, Homo sapiens
cttacatttttactt

SEQ ID NO: 2028196 - DNA, 15 bp, Homo sapiens
ttacatttttacttt

SEQ ID NO: 2028197 - DNA, 15 bp, Homo sapiens
tacatttttactttt

SEQ ID NO: 2028198 - DNA, 15 bp, Homo sapiens
acatttttacttttt

SEQ ID NO: 2028199 - DNA, 15 bp, Homo sapiens
catttttactttttt

SEQ ID NO: 2028200 - DNA, 15 bp, Homo sapiens
atttttacttttttt

SEQ ID NO: 2028201 - DNA, 15 bp, Homo sapiens
tttttactttttttc

SEQ ID NO: 2028202 - DNA, 15 bp, Homo sapiens
ttttactttttttcc

SEQ ID NO: 2028203 - DNA, 15 bp, Homo sapiens
tttactttttttcct

SEQ ID NO: 2028204 - DNA, 15 bp, Homo sapiens
ttactttttttcctc

SEQ ID NO: 2028205 - DNA, 15 bp, Homo sapiens
tactttttttcctct

SEQ ID NO: 2028206 - DNA, 15 bp, Homo sapiens
actttttttcctctt

SEQ ID NO: 2028207 - DNA, 15 bp, Homo sapiens
ctttttttcctcttc

SEQ ID NO: 2028208 - DNA, 15 bp, Homo sapiens
tttttttcctcttct

SEQ ID NO: 2028209 - DNA, 15 bp, Homo sapiens
ttttttcctcttctg

SEQ ID NO: 2028210 - DNA, 15 bp, Homo sapiens
tttttcctcttctga

SEQ ID NO: 2028211 - DNA, 15 bp, Homo sapiens
ttttcctcttctgat

SEQ ID NO: 2028212 - DNA, 15 bp, Homo sapiens
tttcctcttctgatt

SEQ ID NO: 2028213 - DNA, 15 bp, Homo sapiens
ttcctcttctgattt

SEQ ID NO: 2028214 - DNA, 15 bp, Homo sapiens
tcctcttctgatttt

SEQ ID NO: 2028215 - DNA, 15 bp, Homo sapiens
cctcttctgatttta

SEQ ID NO: 2028216 - DNA, 15 bp, Homo sapiens
ctcttctgattttat

SEQ ID NO: 2028217 - DNA, 15 bp, Homo sapiens
tcttctgattttata

SEQ ID NO: 2028218 - DNA, 15 bp, Homo sapiens
cttctgattttatat

SEQ ID NO: 2028219 - DNA, 15 bp, Homo sapiens
ttctgattttatatc

SEQ ID NO: 2028220 - DNA, 15 bp, Homo sapiens
tctgattttatatct

SEQ ID NO: 2028221 - DNA, 15 bp, Homo sapiens
ctgattttatatctg

SEQ ID NO: 2028222 - DNA, 15 bp, Homo sapiens
tgattttatatctgt

SEQ ID NO: 2028223 - DNA, 15 bp, Homo sapiens
gattttatatctgtg

SEQ ID NO: 2028224 - DNA, 15 bp, Homo sapiens
attttatatctgtgg

SEQ ID NO: 2028225 - DNA, 15 bp, Homo sapiens
ttttatatctgtggt

SEQ ID NO: 2028226 - DNA, 15 bp, Homo sapiens
tttatatctgtggta

SEQ ID NO: 2028227 - DNA, 15 bp, Homo sapiens
ttatatctgtggtat

SEQ ID NO: 2028228 - DNA, 15 bp, Homo sapiens
tatatctgtggtatc

SEQ ID NO: 2028229 - DNA, 15 bp, Homo sapiens
atatctgtggtatcc

SEQ ID NO: 2028230 - DNA, 15 bp, Homo sapiens
tatctgtggtatcct

SEQ ID NO: 2028231 - DNA, 15 bp, Homo sapiens
atctgtggtatcctg

SEQ ID NO: 2028232 - DNA, 15 bp, Homo sapiens
tctgtggtatcctgt

SEQ ID NO: 2028233 - DNA, 15 bp, Homo sapiens
ctgtggtatcctgta

SEQ ID NO: 2028234 - DNA, 15 bp, Homo sapiens
tgtggtatcctgtaa

SEQ ID NO: 2028235 - DNA, 15 bp, Homo sapiens
gtggtatcctgtaac

SEQ ID NO: 2028236 - DNA, 15 bp, Homo sapiens
tggtatcctgtaact

SEQ ID NO: 2028237 - DNA, 15 bp, Homo sapiens
ggtatcctgtaactg

SEQ ID NO: 2028238 - DNA, 15 bp, Homo sapiens
gtatcctgtaactga

SEQ ID NO: 2028239 - DNA, 15 bp, Homo sapiens
tatcctgtaactgaa

SEQ ID NO: 2028240 - DNA, 15 bp, Homo sapiens
atcctgtaactgaag

SEQ ID NO: 2028241 - DNA, 15 bp, Homo sapiens
tcctgtaactgaagg

SEQ ID NO: 2028242 - DNA, 15 bp, Homo sapiens
cctgtaactgaagga

SEQ ID NO: 2028243 - DNA, 15 bp, Homo sapiens
ctgtaactgaaggaa

SEQ ID NO: 2028244 - DNA, 15 bp, Homo sapiens
tgtaactgaaggaac

SEQ ID NO: 2028245 - DNA, 15 bp, Homo sapiens
gtaactgaaggaact

SEQ ID NO: 2028246 - DNA, 15 bp, Homo sapiens
taactgaaggaactc

SEQ ID NO: 2028247 - DNA, 15 bp, Homo sapiens
aactgaaggaactct

SEQ ID NO: 2028248 - DNA, 15 bp, Homo sapiens
actgaaggaactctg

SEQ ID NO: 2028249 - DNA, 15 bp, Homo sapiens
ctgaaggaactctga

SEQ ID NO: 2028250 - DNA, 15 bp, Homo sapiens
tgaaggaactctgaa

SEQ ID NO: 2028251 - DNA, 15 bp, Homo sapiens
gaaggaactctgaag

SEQ ID NO: 2028252 - DNA, 15 bp, Homo sapiens
aaggaactctgaagg

SEQ ID NO: 2028253 - DNA, 15 bp, Homo sapiens
aggaactctgaagga

SEQ ID NO: 2028254 - DNA, 15 bp, Homo sapiens
ggaactctgaaggaa

SEQ ID NO: 2028255 - DNA, 15 bp, Homo sapiens
gaactctgaaggaac

SEQ ID NO: 2028256 - DNA, 15 bp, Homo sapiens
aactctgaaggaact

SEQ ID NO: 2028257 - DNA, 15 bp, Homo sapiens
actctgaaggaactt

SEQ ID NO: 2028258 - DNA, 15 bp, Homo sapiens
ctctgaaggaacttt

SEQ ID NO: 2028259 - DNA, 15 bp, Homo sapiens
tctgaaggaactttt

SEQ ID NO: 2028260 - DNA, 15 bp, Homo sapiens
ctgaaggaacttttt

SEQ ID NO: 2028261 - DNA, 15 bp, Homo sapiens
tgaaggaactttttg

SEQ ID NO: 2028262 - DNA, 15 bp, Homo sapiens
gaaggaactttttgg

SEQ ID NO: 2028263 - DNA, 15 bp, Homo sapiens
aaggaactttttggt

SEQ ID NO: 2028264 - DNA, 15 bp, Homo sapiens
aggaactttttggta

SEQ ID NO: 2028265 - DNA, 15 bp, Homo sapiens
ggaactttttggtag

SEQ ID NO: 2028266 - DNA, 15 bp, Homo sapiens
gaactttttggtagg

SEQ ID NO: 2028267 - DNA, 15 bp, Homo sapiens
aactttttggtaggc

SEQ ID NO: 2028268 - DNA, 15 bp, Homo sapiens
actttttggtaggcc

SEQ ID NO: 2028269 - DNA, 15 bp, Homo sapiens
ctttttggtaggcca

SEQ ID NO: 2028270 - DNA, 15 bp, Homo sapiens
tttttggtaggccac

SEQ ID NO: 2028271 - DNA, 15 bp, Homo sapiens
ttttggtaggccaca

SEQ ID NO: 2028272 - DNA, 15 bp, Homo sapiens
tttggtaggccacat

SEQ ID NO: 2028273 - DNA, 15 bp, Homo sapiens
ttggtaggccacatt

SEQ ID NO: 2028274 - DNA, 15 bp, Homo sapiens
tggtaggccacattg

SEQ ID NO: 2028275 - DNA, 15 bp, Homo sapiens
ggtaggccacattga

SEQ ID NO: 2028276 - DNA, 15 bp, Homo sapiens
gtaggccacattgag

SEQ ID NO: 2028277 - DNA, 15 bp, Homo sapiens
taggccacattgaga

SEQ ID NO: 2028278 - DNA, 15 bp, Homo sapiens
aggccacattgagaa

SEQ ID NO: 2028279 - DNA, 15 bp, Homo sapiens
gccacattgagaaat

SEQ ID NO: 2028280 - DNA, 15 bp, Homo sapiens
ccacattgagaaatc

SEQ ID NO: 2028281 - DNA, 15 bp, Homo sapiens
cacattgagaaatcc

SEQ ID NO: 2028282 - DNA, 15 bp, Homo sapiens
acattgagaaatcca

SEQ ID NO: 2028283 - DNA, 15 bp, Homo sapiens
cattgagaaatccac

SEQ ID NO: 2028284 - DNA, 15 bp, Homo sapiens
attgagaaatccacc

SEQ ID NO: 2028285 - DNA, 15 bp, Homo sapiens
ttgagaaatccacca

SEQ ID NO: 2028286 - DNA, 15 bp, Homo sapiens
tgagaaatccaccaa

SEQ ID NO: 2028287 - DNA, 15 bp, Homo sapiens
gagaaatccaccaaa

SEQ ID NO: 2028288 - DNA, 15 bp, Homo sapiens
agaaatccaccaaaa

SEQ ID NO: 2028289 - DNA, 15 bp, Homo sapiens
gaaatccaccaaaat

SEQ ID NO: 2028290 - DNA, 15 bp, Homo sapiens
aaatccaccaaaatt

SEQ ID NO: 2028291 - DNA, 15 bp, Homo sapiens
aatccaccaaaattc

SEQ ID NO: 2028292 - DNA, 15 bp, Homo sapiens
atccaccaaaattct

SEQ ID NO: 2028293 - DNA, 15 bp, Homo sapiens
tccaccaaaattctg

SEQ ID NO: 2028294 - DNA, 15 bp, Homo sapiens
ccaccaaaattctga

SEQ ID NO: 2028295 - DNA, 15 bp, Homo sapiens
caccaaaattctgat

SEQ ID NO: 2028296 - DNA, 15 bp, Homo sapiens
accaaaattctgata

SEQ ID NO: 2028297 - DNA, 15 bp, Homo sapiens
ccaaaattctgataa

SEQ ID NO: 2028298 - DNA, 15 bp, Homo sapiens
caaaattctgataat

SEQ ID NO: 2028299 - DNA, 15 bp, Homo sapiens
aaaattctgataata

SEQ ID NO: 2028300 - DNA, 15 bp, Homo sapiens
aaattctgataataa

SEQ ID NO: 2028301 - DNA, 15 bp, Homo sapiens
aattctgataataaa

SEQ ID NO: 2028302 - DNA, 15 bp, Homo sapiens
attctgataataaaa

SEQ ID NO: 2028303 - DNA, 15 bp, Homo sapiens
ttctgataataaaag

SEQ ID NO: 2028304 - DNA, 15 bp, Homo sapiens
tctgataataaaagc

SEQ ID NO: 2028305 - DNA, 15 bp, Homo sapiens
ctgataataaaagca

SEQ ID NO: 2028306 - DNA, 15 bp, Homo sapiens
tgataataaaagcaa

SEQ ID NO: 2028307 - DNA, 15 bp, Homo sapiens
gataataaaagcaaa

SEQ ID NO: 2028308 - DNA, 15 bp, Homo sapiens
ataataaaagcaaag

SEQ ID NO: 2028309 - DNA, 15 bp, Homo sapiens
taataaaagcaaagc

SEQ ID NO: 2028310 - DNA, 15 bp, Homo sapiens
aataaaagcaaagcg

SEQ ID NO: 2028311 - DNA, 15 bp, Homo sapiens
ataaaagcaaagcgg

SEQ ID NO: 2028312 - DNA, 15 bp, Homo sapiens
taaaagcaaagcggc

SEQ ID NO: 2028313 - DNA, 15 bp, Homo sapiens
aaaagcaaagcggca

SEQ ID NO: 2028314 - DNA, 15 bp, Homo sapiens
aaagcaaagcggcaa

SEQ ID NO: 2028315 - DNA, 15 bp, Homo sapiens
aagcaaagcggcaag

SEQ ID NO: 2028316 - DNA, 15 bp, Homo sapiens
agcaaagcggcaaga

SEQ ID NO: 2028317 - DNA, 15 bp, Homo sapiens
gcaaagcggcaagag

SEQ ID NO: 2028318 - DNA, 15 bp, Homo sapiens
caaagcggcaagagt

SEQ ID NO: 2028319 - DNA, 15 bp, Homo sapiens
aaagcggcaagagtt

SEQ ID NO: 2028320 - DNA, 15 bp, Homo sapiens
aagcggcaagagttt

SEQ ID NO: 2028321 - DNA, 15 bp, Homo sapiens
agcggcaagagtttg

SEQ ID NO: 2028322 - DNA, 15 bp, Homo sapiens
gcggcaagagtttgg

SEQ ID NO: 2028323 - DNA, 15 bp, Homo sapiens
cggcaagagtttggt

SEQ ID NO: 2028324 - DNA, 15 bp, Homo sapiens
ggcaagagtttggta

SEQ ID NO: 2028325 - DNA, 15 bp, Homo sapiens
gcaagagtttggtac

SEQ ID NO: 2028326 - DNA, 15 bp, Homo sapiens
caagagtttggtact

SEQ ID NO: 2028327 - DNA, 15 bp, Homo sapiens
aagagtttggtactt

SEQ ID NO: 2028328 - DNA, 15 bp, Homo sapiens
agagtttggtacttt

SEQ ID NO: 2028329 - DNA, 15 bp, Homo sapiens
gagtttggtacttta

SEQ ID NO: 2028330 - DNA, 15 bp, Homo sapiens
agtttggtactttac

SEQ ID NO: 2028331 - DNA, 15 bp, Homo sapiens
gtttggtactttaca

SEQ ID NO: 2028332 - DNA, 15 bp, Homo sapiens
tttggtactttacac

SEQ ID NO: 2028333 - DNA, 15 bp, Homo sapiens
ttggtactttacaca

SEQ ID NO: 2028334 - DNA, 15 bp, Homo sapiens
tggtactttacacac

SEQ ID NO: 2028335 - DNA, 15 bp, Homo sapiens
ggtactttacacacc

SEQ ID NO: 2028336 - DNA, 15 bp, Homo sapiens
gtactttacacacct

SEQ ID NO: 2028337 - DNA, 15 bp, Homo sapiens
tactttacacacctc

SEQ ID NO: 2028338 - DNA, 15 bp, Homo sapiens
actttacacacctct

SEQ ID NO: 2028339 - DNA, 15 bp, Homo sapiens
ctttacacacctctg

SEQ ID NO: 2028340 - DNA, 15 bp, Homo sapiens
tttacacacctctgg

SEQ ID NO: 2028341 - DNA, 15 bp, Homo sapiens
ttacacacctctgga

SEQ ID NO: 2028342 - DNA, 15 bp, Homo sapiens
tacacacctctggac

SEQ ID NO: 2028343 - DNA, 15 bp, Homo sapiens
acacacctctggacc

SEQ ID NO: 2028344 - DNA, 15 bp, Homo sapiens
cacacctctggacca

SEQ ID NO: 2028345 - DNA, 15 bp, Homo sapiens
acacctctggaccac

SEQ ID NO: 2028346 - DNA, 15 bp, Homo sapiens
cacctctggaccact

SEQ ID NO: 2028347 - DNA, 15 bp, Homo sapiens
acctctggaccactt

SEQ ID NO: 2028348 - DNA, 15 bp, Homo sapiens
cctctggaccactta

SEQ ID NO: 2028349 - DNA, 15 bp, Homo sapiens
ctctggaccacttac

SEQ ID NO: 2028350 - DNA, 15 bp, Homo sapiens
tctggaccacttaca

SEQ ID NO: 2028351 - DNA, 15 bp, Homo sapiens
ctggaccacttacaa

SEQ ID NO: 2028352 - DNA, 15 bp, Homo sapiens
tggaccacttacaaa

SEQ ID NO: 2028353 - DNA, 15 bp, Homo sapiens
ggaccacttacaaag

SEQ ID NO: 2028354 - DNA, 15 bp, Homo sapiens
gaccacttacaaagt

SEQ ID NO: 2028355 - DNA, 15 bp, Homo sapiens
accacttacaaagta

SEQ ID NO: 2028356 - DNA, 15 bp, Homo sapiens
ccacttacaaagtat

SEQ ID NO: 2028357 - DNA, 15 bp, Homo sapiens
cacttacaaagtatt

SEQ ID NO: 2028358 - DNA, 15 bp, Homo sapiens
acttacaaagtattt

SEQ ID NO: 2028359 - DNA, 15 bp, Homo sapiens
cttacaaagtatttt

SEQ ID NO: 2028360 - DNA, 15 bp, Homo sapiens
ttacaaagtattttc

SEQ ID NO: 2028361 - DNA, 15 bp, Homo sapiens
tacaaagtattttct

SEQ ID NO: 2028362 - DNA, 15 bp, Homo sapiens
acaaagtattttctt

SEQ ID NO: 2028363 - DNA, 15 bp, Homo sapiens
caaagtattttcttc

SEQ ID NO: 2028364 - DNA, 15 bp, Homo sapiens
aaagtattttcttca

SEQ ID NO: 2028365 - DNA, 15 bp, Homo sapiens
aagtattttcttcac

SEQ ID NO: 2028366 - DNA, 15 bp, Homo sapiens
agtattttcttcact

SEQ ID NO: 2028367 - DNA, 15 bp, Homo sapiens
gtattttcttcactg

SEQ ID NO: 2028368 - DNA, 15 bp, Homo sapiens
tattttcttcactgt

SEQ ID NO: 2028369 - DNA, 15 bp, Homo sapiens
attttcttcactgtt

SEQ ID NO: 2028370 - DNA, 15 bp, Homo sapiens
ttttcttcactgttg

SEQ ID NO: 2028371 - DNA, 15 bp, Homo sapiens
tttcttcactgttgc

SEQ ID NO: 2028372 - DNA, 15 bp, Homo sapiens
ttcttcactgttgca

SEQ ID NO: 2028373 - DNA, 15 bp, Homo sapiens
tcttcactgttgcag

SEQ ID NO: 2028374 - DNA, 15 bp, Homo sapiens
cttcactgttgcagt

SEQ ID NO: 2028375 - DNA, 15 bp, Homo sapiens
ttcactgttgcagtt

SEQ ID NO: 2028376 - DNA, 15 bp, Homo sapiens
tcactgttgcagttt

SEQ ID NO: 2028377 - DNA, 15 bp, Homo sapiens
cactgttgcagttta

SEQ ID NO: 2028378 - DNA, 15 bp, Homo sapiens
actgttgcagtttaa

SEQ ID NO: 2028379 - DNA, 15 bp, Homo sapiens
ctgttgcagtttaat

SEQ ID NO: 2028380 - DNA, 15 bp, Homo sapiens
tgttgcagtttaatt

SEQ ID NO: 2028381 - DNA, 15 bp, Homo sapiens
gttgcagtttaatta

SEQ ID NO: 2028382 - DNA, 15 bp, Homo sapiens
ttgcagtttaattag

SEQ ID NO: 2028383 - DNA, 15 bp, Homo sapiens
tgcagtttaattagc

SEQ ID NO: 2028384 - DNA, 15 bp, Homo sapiens
gcagtttaattagct

SEQ ID NO: 2028385 - DNA, 15 bp, Homo sapiens
cagtttaattagctt

SEQ ID NO: 2028386 - DNA, 15 bp, Homo sapiens
agtttaattagcttc

SEQ ID NO: 2028387 - DNA, 15 bp, Homo sapiens
gtttaattagcttca

SEQ ID NO: 2028388 - DNA, 15 bp, Homo sapiens
tttaattagcttcag

SEQ ID NO: 2028389 - DNA, 15 bp, Homo sapiens
ttaattagcttcagc

SEQ ID NO: 2028390 - DNA, 15 bp, Homo sapiens
taattagcttcagca

SEQ ID NO: 2028391 - DNA, 15 bp, Homo sapiens
aattagcttcagcat

SEQ ID NO: 2028392 - DNA, 15 bp, Homo sapiens
attagcttcagcatt

SEQ ID NO: 2028393 - DNA, 15 bp, Homo sapiens
ttagcttcagcattt

SEQ ID NO: 2028394 - DNA, 15 bp, Homo sapiens
tagcttcagcatttc

SEQ ID NO: 2028395 - DNA, 15 bp, Homo sapiens
agcttcagcatttct

SEQ ID NO: 2028396 - DNA, 15 bp, Homo sapiens
gcttcagcatttctc

SEQ ID NO: 2028397 - DNA, 15 bp, Homo sapiens
cttcagcatttctct

SEQ ID NO: 2028398 - DNA, 15 bp, Homo sapiens
ttcagcatttctctt

SEQ ID NO: 2028399 - DNA, 15 bp, Homo sapiens
tcagcatttctcttc

SEQ ID NO: 2028400 - DNA, 15 bp, Homo sapiens
cagcatttctcttca

SEQ ID NO: 2028401 - DNA, 15 bp, Homo sapiens
agcatttctcttcat

SEQ ID NO: 2028402 - DNA, 15 bp, Homo sapiens
gcatttctcttcata

SEQ ID NO: 2028403 - DNA, 15 bp, Homo sapiens
catttctcttcatag

SEQ ID NO: 2028404 - DNA, 15 bp, Homo sapiens
atttctcttcatagc

SEQ ID NO: 2028405 - DNA, 15 bp, Homo sapiens
tttctcttcatagca

SEQ ID NO: 2028406 - DNA, 15 bp, Homo sapiens
ttctcttcatagcag

SEQ ID NO: 2028407 - DNA, 15 bp, Homo sapiens
tctcttcatagcaga

SEQ ID NO: 2028408 - DNA, 15 bp, Homo sapiens
ctcttcatagcagaa

SEQ ID NO: 2028409 - DNA, 15 bp, Homo sapiens
tcttcatagcagaaa

SEQ ID NO: 2028410 - DNA, 15 bp, Homo sapiens
cttcatagcagaaaa

SEQ ID NO: 2028411 - DNA, 15 bp, Homo sapiens
ttcatagcagaaaag

SEQ ID NO: 2028412 - DNA, 15 bp, Homo sapiens
tcatagcagaaaagt

SEQ ID NO: 2028413 - DNA, 15 bp, Homo sapiens
catagcagaaaagtc

SEQ ID NO: 2028414 - DNA, 15 bp, Homo sapiens
atagcagaaaagtcc

SEQ ID NO: 2028415 - DNA, 15 bp, Homo sapiens
tagcagaaaagtcca

SEQ ID NO: 2028416 - DNA, 15 bp, Homo sapiens
agcagaaaagtccac

SEQ ID NO: 2028417 - DNA, 15 bp, Homo sapiens
gcagaaaagtccaca

SEQ ID NO: 2028418 - DNA, 15 bp, Homo sapiens
cagaaaagtccacat

SEQ ID NO: 2028419 - DNA, 15 bp, Homo sapiens
agaaaagtccacata

SEQ ID NO: 2028420 - DNA, 15 bp, Homo sapiens
gaaaagtccacataa

SEQ ID NO: 2028421 - DNA, 15 bp, Homo sapiens
aaaagtccacataag

SEQ ID NO: 2028422 - DNA, 15 bp, Homo sapiens
aaagtccacataagt

SEQ ID NO: 2028423 - DNA, 15 bp, Homo sapiens
aagtccacataagta

SEQ ID NO: 2028424 - DNA, 15 bp, Homo sapiens
agtccacataagtat

SEQ ID NO: 2028425 - DNA, 15 bp, Homo sapiens
gtccacataagtatc

SEQ ID NO: 2028426 - DNA, 15 bp, Homo sapiens
tccacataagtatcc

SEQ ID NO: 2028427 - DNA, 15 bp, Homo sapiens
ccacataagtatcca

SEQ ID NO: 2028428 - DNA, 15 bp, Homo sapiens
cacataagtatccat

SEQ ID NO: 2028429 - DNA, 15 bp, Homo sapiens
acataagtatccatg

SEQ ID NO: 2028430 - DNA, 15 bp, Homo sapiens
cataagtatccatgt

SEQ ID NO: 2028431 - DNA, 15 bp, Homo sapiens
ataagtatccatgtt

SEQ ID NO: 2028432 - DNA, 15 bp, Homo sapiens
taagtatccatgttg

SEQ ID NO: 2028433 - DNA, 15 bp, Homo sapiens
aagtatccatgttgc

SEQ ID NO: 2028434 - DNA, 15 bp, Homo sapiens
agtatccatgttgcc

SEQ ID NO: 2028435 - DNA, 15 bp, Homo sapiens
gtatccatgttgcct

SEQ ID NO: 2028436 - DNA, 15 bp, Homo sapiens
tatccatgttgcctc

SEQ ID NO: 2028437 - DNA, 15 bp, Homo sapiens
atccatgttgcctcc

SEQ ID NO: 2028438 - DNA, 15 bp, Homo sapiens
tccatgttgcctcct

SEQ ID NO: 2028439 - DNA, 15 bp, Homo sapiens
ccatgttgcctcctt

SEQ ID NO: 2028440 - DNA, 15 bp, Homo sapiens
catgttgcctcctta

SEQ ID NO: 2028441 - DNA, 15 bp, Homo sapiens
atgttgcctccttaa

SEQ ID NO: 2028442 - DNA, 15 bp, Homo sapiens
tgttgcctccttaat

SEQ ID NO: 2028443 - DNA, 15 bp, Homo sapiens
gttgcctccttaatt

SEQ ID NO: 2028444 - DNA, 15 bp, Homo sapiens
ttgcctccttaattt

SEQ ID NO: 2028445 - DNA, 15 bp, Homo sapiens
tgcctccttaatttt

SEQ ID NO: 2028446 - DNA, 15 bp, Homo sapiens
gcctccttaatttta

SEQ ID NO: 2028447 - DNA, 15 bp, Homo sapiens
cctccttaattttag

SEQ ID NO: 2028448 - DNA, 15 bp, Homo sapiens
ctccttaattttaga

SEQ ID NO: 2028449 - DNA, 15 bp, Homo sapiens
tccttaattttagag

SEQ ID NO: 2028450 - DNA, 15 bp, Homo sapiens
ccttaattttagaga

SEQ ID NO: 2028451 - DNA, 15 bp, Homo sapiens
cttaattttagagaa

SEQ ID NO: 2028452 - DNA, 15 bp, Homo sapiens
ttaattttagagaac

SEQ ID NO: 2028453 - DNA, 15 bp, Homo sapiens
taattttagagaact

SEQ ID NO: 2028454 - DNA, 15 bp, Homo sapiens
aattttagagaacta

SEQ ID NO: 2028455 - DNA, 15 bp, Homo sapiens
attttagagaactag

SEQ ID NO: 2028456 - DNA, 15 bp, Homo sapiens
ttttagagaactagt

SEQ ID NO: 2028457 - DNA, 15 bp, Homo sapiens
tttagagaactagtc

SEQ ID NO: 2028458 - DNA, 15 bp, Homo sapiens
ttagagaactagtca

SEQ ID NO: 2028459 - DNA, 15 bp, Homo sapiens
tagagaactagtcat

SEQ ID NO: 2028460 - DNA, 15 bp, Homo sapiens
agagaactagtcatt

SEQ ID NO: 2028461 - DNA, 15 bp, Homo sapiens
gagaactagtcattt

SEQ ID NO: 2028462 - DNA, 15 bp, Homo sapiens
agaactagtcatttt

SEQ ID NO: 2028463 - DNA, 15 bp, Homo sapiens
gaactagtcattttc

SEQ ID NO: 2028464 - DNA, 15 bp, Homo sapiens
aactagtcattttct

SEQ ID NO: 2028465 - DNA, 15 bp, Homo sapiens
actagtcattttctc

SEQ ID NO: 2028466 - DNA, 15 bp, Homo sapiens
ctagtcattttctct

SEQ ID NO: 2028467 - DNA, 15 bp, Homo sapiens
tagtcattttctctt

SEQ ID NO: 2028468 - DNA, 15 bp, Homo sapiens
agtcattttctcttt

SEQ ID NO: 2028469 - DNA, 15 bp, Homo sapiens
gtcattttctctttt

SEQ ID NO: 2028470 - DNA, 15 bp, Homo sapiens
tcattttctcttttc

SEQ ID NO: 2028471 - DNA, 15 bp, Homo sapiens
cattttctcttttct

SEQ ID NO: 2028472 - DNA, 15 bp, Homo sapiens
attttctcttttctt

SEQ ID NO: 2028473 - DNA, 15 bp, Homo sapiens
ttttctcttttcttt

SEQ ID NO: 2028474 - DNA, 15 bp, Homo sapiens
tttctcttttcttta

SEQ ID NO: 2028475 - DNA, 15 bp, Homo sapiens
ttctcttttctttag

SEQ ID NO: 2028476 - DNA, 15 bp, Homo sapiens
tctcttttctttagg

SEQ ID NO: 2028477 - DNA, 15 bp, Homo sapiens
ctcttttctttaggt

SEQ ID NO: 2028478 - DNA, 15 bp, Homo sapiens
tcttttctttaggtt

SEQ ID NO: 2028479 - DNA, 15 bp, Homo sapiens
cttttctttaggttg

SEQ ID NO: 2028480 - DNA, 15 bp, Homo sapiens
ttttctttaggttga

SEQ ID NO: 2028481 - DNA, 15 bp, Homo sapiens
tttctttaggttgac

SEQ ID NO: 2028482 - DNA, 15 bp, Homo sapiens
ttctttaggttgact

SEQ ID NO: 2028483 - DNA, 15 bp, Homo sapiens
tctttaggttgactt

SEQ ID NO: 2028484 - DNA, 15 bp, Homo sapiens
ctttaggttgacttt

SEQ ID NO: 2028485 - DNA, 15 bp, Homo sapiens
tttaggttgactttg

SEQ ID NO: 2028486 - DNA, 15 bp, Homo sapiens
ttaggttgactttga

SEQ ID NO: 2028487 - DNA, 15 bp, Homo sapiens
taggttgactttgaa

SEQ ID NO: 2028488 - DNA, 15 bp, Homo sapiens
aggttgactttgaac

SEQ ID NO: 2028489 - DNA, 15 bp, Homo sapiens
ggttgactttgaaca

SEQ ID NO: 2028490 - DNA, 15 bp, Homo sapiens
gttgactttgaacaa

SEQ ID NO: 2028491 - DNA, 15 bp, Homo sapiens
ttgactttgaacaat

SEQ ID NO: 2028492 - DNA, 15 bp, Homo sapiens
tgactttgaacaatg

SEQ ID NO: 2028493 - DNA, 15 bp, Homo sapiens
gactttgaacaatga

SEQ ID NO: 2028494 - DNA, 15 bp, Homo sapiens
actttgaacaatgaa

SEQ ID NO: 2028495 - DNA, 15 bp, Homo sapiens
ctttgaacaatgaat

SEQ ID NO: 2028496 - DNA, 15 bp, Homo sapiens
tttgaacaatgaatt

SEQ ID NO: 2028497 - DNA, 15 bp, Homo sapiens
ttgaacaatgaattt

SEQ ID NO: 2028498 - DNA, 15 bp, Homo sapiens
tgaacaatgaattta

SEQ ID NO: 2028499 - DNA, 15 bp, Homo sapiens
gaacaatgaatttat

SEQ ID NO: 2028500 - DNA, 15 bp, Homo sapiens
aacaatgaatttatt

SEQ ID NO: 2028501 - DNA, 15 bp, Homo sapiens
acaatgaatttattg

SEQ ID NO: 2028502 - DNA, 15 bp, Homo sapiens
caatgaatttattgt

SEQ ID NO: 2028503 - DNA, 15 bp, Homo sapiens
aatgaatttattgta

SEQ ID NO: 2028504 - DNA, 15 bp, Homo sapiens
atgaatttattgtaa

SEQ ID NO: 2028505 - DNA, 15 bp, Homo sapiens
tgaatttattgtaaa

SEQ ID NO: 2028506 - DNA, 15 bp, Homo sapiens
gaatttattgtaaat

SEQ ID NO: 2028507 - DNA, 15 bp, Homo sapiens
aatttattgtaaatg

SEQ ID NO: 2028508 - DNA, 15 bp, Homo sapiens
atttattgtaaatgt

SEQ ID NO: 2028509 - DNA, 15 bp, Homo sapiens
tttattgtaaatgta

SEQ ID NO: 2028510 - DNA, 15 bp, Homo sapiens
ttattgtaaatgtac

SEQ ID NO: 2028511 - DNA, 15 bp, Homo sapiens
tattgtaaatgtaca

SEQ ID NO: 2028512 - DNA, 15 bp, Homo sapiens
attgtaaatgtacag

SEQ ID NO: 2028513 - DNA, 15 bp, Homo sapiens
ttgtaaatgtacagt

SEQ ID NO: 2028514 - DNA, 15 bp, Homo sapiens
tgtaaatgtacagtt

SEQ ID NO: 2028515 - DNA, 15 bp, Homo sapiens
gtaaatgtacagttc

SEQ ID NO: 2028516 - DNA, 15 bp, Homo sapiens
taaatgtacagttca

SEQ ID NO: 2028517 - DNA, 15 bp, Homo sapiens
aaatgtacagttcac

SEQ ID NO: 2028518 - DNA, 15 bp, Homo sapiens
aatgtacagttcacg

SEQ ID NO: 2028519 - DNA, 15 bp, Homo sapiens
atgtacagttcacgg

SEQ ID NO: 2028520 - DNA, 15 bp, Homo sapiens
tgtacagttcacgga

SEQ ID NO: 2028521 - DNA, 15 bp, Homo sapiens
gtacagttcacggag

SEQ ID NO: 2028522 - DNA, 15 bp, Homo sapiens
tacagttcacggaga

SEQ ID NO: 2028523 - DNA, 15 bp, Homo sapiens
acagttcacggagag

SEQ ID NO: 2028524 - DNA, 15 bp, Homo sapiens
cagttcacggagagc

SEQ ID NO: 2028525 - DNA, 15 bp, Homo sapiens
agttcacggagagca

SEQ ID NO: 2028526 - DNA, 15 bp, Homo sapiens
gttcacggagagcac

SEQ ID NO: 2028527 - DNA, 15 bp, Homo sapiens
ttcacggagagcaca

SEQ ID NO: 2028528 - DNA, 15 bp, Homo sapiens
tcacggagagcacag

SEQ ID NO: 2028529 - DNA, 15 bp, Homo sapiens
cacggagagcacagt

SEQ ID NO: 2028530 - DNA, 15 bp, Homo sapiens
acggagagcacagtg

SEQ ID NO: 2028531 - DNA, 15 bp, Homo sapiens
cggagagcacagtgg

SEQ ID NO: 2028532 - DNA, 15 bp, Homo sapiens
ggagagcacagtggc

SEQ ID NO: 2028533 - DNA, 15 bp, Homo sapiens
gagagcacagtggca

SEQ ID NO: 2028534 - DNA, 15 bp, Homo sapiens
agagcacagtggcac

SEQ ID NO: 2028535 - DNA, 15 bp, Homo sapiens
gagcacagtggcaca

SEQ ID NO: 2028536 - DNA, 15 bp, Homo sapiens
agcacagtggcacat

SEQ ID NO: 2028537 - DNA, 15 bp, Homo sapiens
gcacagtggcacata

SEQ ID NO: 2028538 - DNA, 15 bp, Homo sapiens
cacagtggcacataa

SEQ ID NO: 2028539 - DNA, 15 bp, Homo sapiens
acagtggcacataat

SEQ ID NO: 2028540 - DNA, 15 bp, Homo sapiens
cagtggcacataata

SEQ ID NO: 2028541 - DNA, 15 bp, Homo sapiens
agtggcacataatac

SEQ ID NO: 2028542 - DNA, 15 bp, Homo sapiens
gtggcacataataca

SEQ ID NO: 2028543 - DNA, 15 bp, Homo sapiens
tggcacataatacag

SEQ ID NO: 2028544 - DNA, 15 bp, Homo sapiens
ggcacataatacagg

SEQ ID NO: 2028545 - DNA, 15 bp, Homo sapiens
gcacataatacaggg

SEQ ID NO: 2028546 - DNA, 15 bp, Homo sapiens
cacataatacagggc

SEQ ID NO: 2028547 - DNA, 15 bp, Homo sapiens
acataatacagggcc

SEQ ID NO: 2028548 - DNA, 15 bp, Homo sapiens
cataatacagggccc

SEQ ID NO: 2028549 - DNA, 15 bp, Homo sapiens
ataatacagggccca

SEQ ID NO: 2028550 - DNA, 15 bp, Homo sapiens
taatacagggcccag

SEQ ID NO: 2028551 - DNA, 15 bp, Homo sapiens
aatacagggcccaga

SEQ ID NO: 2028552 - DNA, 15 bp, Homo sapiens
atacagggcccagag

SEQ ID NO: 2028553 - DNA, 15 bp, Homo sapiens
tacagggcccagagt

SEQ ID NO: 2028554 - DNA, 15 bp, Homo sapiens
acagggcccagagtc

SEQ ID NO: 2028555 - DNA, 15 bp, Homo sapiens
cagggcccagagtca

SEQ ID NO: 2028556 - DNA, 15 bp, Homo sapiens
agggcccagagtcag

SEQ ID NO: 2028557 - DNA, 15 bp, Homo sapiens
gggcccagagtcagt

SEQ ID NO: 2028558 - DNA, 15 bp, Homo sapiens
ggcccagagtcagtt

SEQ ID NO: 2028559 - DNA, 15 bp, Homo sapiens
gcccagagtcagttc

SEQ ID NO: 2028560 - DNA, 15 bp, Homo sapiens
cccagagtcagttct

SEQ ID NO: 2028561 - DNA, 15 bp, Homo sapiens
ccagagtcagttctg

SEQ ID NO: 2028562 - DNA, 15 bp, Homo sapiens
cagagtcagttctga

SEQ ID NO: 2028563 - DNA, 15 bp, Homo sapiens
agagtcagttctgac

SEQ ID NO: 2028564 - DNA, 15 bp, Homo sapiens
gagtcagttctgact

SEQ ID NO: 2028565 - DNA, 15 bp, Homo sapiens
agtcagttctgactt

SEQ ID NO: 2028566 - DNA, 15 bp, Homo sapiens
gtcagttctgacttt

SEQ ID NO: 2028567 - DNA, 15 bp, Homo sapiens
tcagttctgactttg

SEQ ID NO: 2028568 - DNA, 15 bp, Homo sapiens
cagttctgactttgt

SEQ ID NO: 2028569 - DNA, 15 bp, Homo sapiens
agttctgactttgtt

SEQ ID NO: 2028570 - DNA, 15 bp, Homo sapiens
gttctgactttgttt

SEQ ID NO: 2028571 - DNA, 15 bp, Homo sapiens
ttctgactttgtttt

SEQ ID NO: 2028572 - DNA, 15 bp, Homo sapiens
tctgactttgtttta

SEQ ID NO: 2028573 - DNA, 15 bp, Homo sapiens
ctgactttgttttaa

SEQ ID NO: 2028574 - DNA, 15 bp, Homo sapiens
tgactttgttttaac

SEQ ID NO: 2028575 - DNA, 15 bp, Homo sapiens
gactttgttttaact

SEQ ID NO: 2028576 - DNA, 15 bp, Homo sapiens
actttgttttaacta

SEQ ID NO: 2028577 - DNA, 15 bp, Homo sapiens
ctttgttttaactaa

SEQ ID NO: 2028578 - DNA, 15 bp, Homo sapiens
tttgttttaactaag

SEQ ID NO: 2028579 - DNA, 15 bp, Homo sapiens
ttgttttaactaagt

SEQ ID NO: 2028580 - DNA, 15 bp, Homo sapiens
tgttttaactaagtc

SEQ ID NO: 2028581 - DNA, 15 bp, Homo sapiens
gttttaactaagtct

SEQ ID NO: 2028582 - DNA, 15 bp, Homo sapiens
ttttaactaagtctt

SEQ ID NO: 2028583 - DNA, 15 bp, Homo sapiens
tttaactaagtctta

SEQ ID NO: 2028584 - DNA, 15 bp, Homo sapiens
ttaactaagtcttat

SEQ ID NO: 2028585 - DNA, 15 bp, Homo sapiens
taactaagtcttata

SEQ ID NO: 2028586 - DNA, 15 bp, Homo sapiens
aactaagtcttataa

SEQ ID NO: 2028587 - DNA, 15 bp, Homo sapiens
actaagtcttataaa

SEQ ID NO: 2028588 - DNA, 15 bp, Homo sapiens
ctaagtcttataaat

SEQ ID NO: 2028589 - DNA, 15 bp, Homo sapiens
taagtcttataaatt

SEQ ID NO: 2028590 - DNA, 15 bp, Homo sapiens
aagtcttataaattt

SEQ ID NO: 2028591 - DNA, 15 bp, Homo sapiens
agtcttataaattta

SEQ ID NO: 2028592 - DNA, 15 bp, Homo sapiens
gtcttataaatttaa

SEQ ID NO: 2028593 - DNA, 15 bp, Homo sapiens
cttataaatttaata

SEQ ID NO: 2028594 - DNA, 15 bp, Homo sapiens
ttataaatttaatat

SEQ ID NO: 2028595 - DNA, 15 bp, Homo sapiens
tataaatttaatatc

SEQ ID NO: 2028596 - DNA, 15 bp, Homo sapiens
ataaatttaatatcc

SEQ ID NO: 2028597 - DNA, 15 bp, Homo sapiens
taaatttaatatcca

SEQ ID NO: 2028598 - DNA, 15 bp, Homo sapiens
aaatttaatatccac

SEQ ID NO: 2028599 - DNA, 15 bp, Homo sapiens
aatttaatatccact

SEQ ID NO: 2028600 - DNA, 15 bp, Homo sapiens
atttaatatccactc

SEQ ID NO: 2028601 - DNA, 15 bp, Homo sapiens
tttaatatccactct

SEQ ID NO: 2028602 - DNA, 15 bp, Homo sapiens
ttaatatccactctt

SEQ ID NO: 2028603 - DNA, 15 bp, Homo sapiens
taatatccactcttt

SEQ ID NO: 2028604 - DNA, 15 bp, Homo sapiens
aatatccactcttta

SEQ ID NO: 2028605 - DNA, 15 bp, Homo sapiens
atatccactctttat

SEQ ID NO: 2028606 - DNA, 15 bp, Homo sapiens
tatccactctttata

SEQ ID NO: 2028607 - DNA, 15 bp, Homo sapiens
atccactctttatat

SEQ ID NO: 2028608 - DNA, 15 bp, Homo sapiens
tccactctttatatt

SEQ ID NO: 2028609 - DNA, 15 bp, Homo sapiens
ccactctttatattt

SEQ ID NO: 2028610 - DNA, 15 bp, Homo sapiens
cactctttatatttg

SEQ ID NO: 2028611 - DNA, 15 bp, Homo sapiens
actctttatatttgt

SEQ ID NO: 2028612 - DNA, 15 bp, Homo sapiens
ctctttatatttgtc

SEQ ID NO: 2028613 - DNA, 15 bp, Homo sapiens
tctttatatttgtcc

SEQ ID NO: 2028614 - DNA, 15 bp, Homo sapiens
ctttatatttgtcca

SEQ ID NO: 2028615 - DNA, 15 bp, Homo sapiens
tttatatttgtccat

SEQ ID NO: 2028616 - DNA, 15 bp, Homo sapiens
ttatatttgtccatc

SEQ ID NO: 2028617 - DNA, 15 bp, Homo sapiens
tatatttgtccatct

SEQ ID NO: 2028618 - DNA, 15 bp, Homo sapiens
atatttgtccatctt

SEQ ID NO: 2028619 - DNA, 15 bp, Homo sapiens
tatttgtccatcttt

SEQ ID NO: 2028620 - DNA, 15 bp, Homo sapiens
atttgtccatcttta

SEQ ID NO: 2028621 - DNA, 15 bp, Homo sapiens
tttgtccatctttat

SEQ ID NO: 2028622 - DNA, 15 bp, Homo sapiens
ttgtccatctttata

SEQ ID NO: 2028623 - DNA, 15 bp, Homo sapiens
tgtccatctttatat

SEQ ID NO: 2028624 - DNA, 15 bp, Homo sapiens
gtccatctttatatc

SEQ ID NO: 2028625 - DNA, 15 bp, Homo sapiens
tccatctttatatcc

SEQ ID NO: 2028626 - DNA, 15 bp, Homo sapiens
ccatctttatatcct

SEQ ID NO: 2028627 - DNA, 15 bp, Homo sapiens
catctttatatccta

SEQ ID NO: 2028628 - DNA, 15 bp, Homo sapiens
atctttatatcctat

SEQ ID NO: 2028629 - DNA, 15 bp, Homo sapiens
tctttatatcctata

SEQ ID NO: 2028630 - DNA, 15 bp, Homo sapiens
ctttatatcctatag

SEQ ID NO: 2028631 - DNA, 15 bp, Homo sapiens
tttatatcctatagt

SEQ ID NO: 2028632 - DNA, 15 bp, Homo sapiens
ttatatcctatagtt

SEQ ID NO: 2028633 - DNA, 15 bp, Homo sapiens
tatatcctatagttt

SEQ ID NO: 2028634 - DNA, 15 bp, Homo sapiens
atatcctatagtttt

SEQ ID NO: 2028635 - DNA, 15 bp, Homo sapiens
tatcctatagtttta

SEQ ID NO: 2028636 - DNA, 15 bp, Homo sapiens
atcctatagttttat

SEQ ID NO: 2028637 - DNA, 15 bp, Homo sapiens
tcctatagttttata

SEQ ID NO: 2028638 - DNA, 15 bp, Homo sapiens
cctatagttttataa

SEQ ID NO: 2028639 - DNA, 15 bp, Homo sapiens
ctatagttttataaa

SEQ ID NO: 2028640 - DNA, 15 bp, Homo sapiens
tatagttttataaat

SEQ ID NO: 2028641 - DNA, 15 bp, Homo sapiens
atagttttataaatg

SEQ ID NO: 2028642 - DNA, 15 bp, Homo sapiens
tagttttataaatgt

SEQ ID NO: 2028643 - DNA, 15 bp, Homo sapiens
agttttataaatgtt

SEQ ID NO: 2028644 - DNA, 15 bp, Homo sapiens
gttttataaatgttg

SEQ ID NO: 2028645 - DNA, 15 bp, Homo sapiens
ttttataaatgttga

SEQ ID NO: 2028646 - DNA, 15 bp, Homo sapiens
tttataaatgttgat

SEQ ID NO: 2028647 - DNA, 15 bp, Homo sapiens
ttataaatgttgatc

SEQ ID NO: 2028648 - DNA, 15 bp, Homo sapiens
tataaatgttgatct

SEQ ID NO: 2028649 - DNA, 15 bp, Homo sapiens
ataaatgttgatctt

SEQ ID NO: 2028650 - DNA, 15 bp, Homo sapiens
taaatgttgatcttc

SEQ ID NO: 2028651 - DNA, 15 bp, Homo sapiens
aaatgttgatcttct

SEQ ID NO: 2028652 - DNA, 15 bp, Homo sapiens
aatgttgatcttctc

SEQ ID NO: 2028653 - DNA, 15 bp, Homo sapiens
atgttgatcttctcc

SEQ ID NO: 2028654 - DNA, 15 bp, Homo sapiens
tgttgatcttctccc

SEQ ID NO: 2028655 - DNA, 15 bp, Homo sapiens
gttgatcttctccca

SEQ ID NO: 2028656 - DNA, 15 bp, Homo sapiens
ttgatcttctcccag

SEQ ID NO: 2028657 - DNA, 15 bp, Homo sapiens
tgatcttctcccagc

SEQ ID NO: 2028658 - DNA, 15 bp, Homo sapiens
gatcttctcccagca

SEQ ID NO: 2028659 - DNA, 15 bp, Homo sapiens
atcttctcccagcat

SEQ ID NO: 2028660 - DNA, 15 bp, Homo sapiens
tcttctcccagcata

SEQ ID NO: 2028661 - DNA, 15 bp, Homo sapiens
cttctcccagcatat

SEQ ID NO: 2028662 - DNA, 15 bp, Homo sapiens
ttctcccagcatatt

SEQ ID NO: 2028663 - DNA, 15 bp, Homo sapiens
tctcccagcatattt

SEQ ID NO: 2028664 - DNA, 15 bp, Homo sapiens
ctcccagcatatttc

SEQ ID NO: 2028665 - DNA, 15 bp, Homo sapiens
tcccagcatatttcc

SEQ ID NO: 2028666 - DNA, 15 bp, Homo sapiens
cccagcatatttcct

SEQ ID NO: 2028667 - DNA, 15 bp, Homo sapiens
ccagcatatttcctg

SEQ ID NO: 2028668 - DNA, 15 bp, Homo sapiens
cagcatatttcctga

SEQ ID NO: 2028669 - DNA, 15 bp, Homo sapiens
agcatatttcctgac

SEQ ID NO: 2028670 - DNA, 15 bp, Homo sapiens
gcatatttcctgacc

SEQ ID NO: 2028671 - DNA, 15 bp, Homo sapiens
catatttcctgacct

SEQ ID NO: 2028672 - DNA, 15 bp, Homo sapiens
atatttcctgacctt

SEQ ID NO: 2028673 - DNA, 15 bp, Homo sapiens
tatttcctgaccttt

SEQ ID NO: 2028674 - DNA, 15 bp, Homo sapiens
atttcctgacctttt

SEQ ID NO: 2028675 - DNA, 15 bp, Homo sapiens
tttcctgaccttttc

SEQ ID NO: 2028676 - DNA, 15 bp, Homo sapiens
ttcctgaccttttct

SEQ ID NO: 2028677 - DNA, 15 bp, Homo sapiens
tcctgaccttttctt

SEQ ID NO: 2028678 - DNA, 15 bp, Homo sapiens
cctgaccttttcttc

SEQ ID NO: 2028679 - DNA, 15 bp, Homo sapiens
ctgaccttttcttcc

SEQ ID NO: 2028680 - DNA, 15 bp, Homo sapiens
tgaccttttcttccc

SEQ ID NO: 2028681 - DNA, 15 bp, Homo sapiens
gaccttttcttccct

SEQ ID NO: 2028682 - DNA, 15 bp, Homo sapiens
accttttcttccctt

SEQ ID NO: 2028683 - DNA, 15 bp, Homo sapiens
ccttttcttcccttt

SEQ ID NO: 2028684 - DNA, 15 bp, Homo sapiens
cttttcttccctttc

SEQ ID NO: 2028685 - DNA, 15 bp, Homo sapiens
ttttcttccctttcc

SEQ ID NO: 2028686 - DNA, 15 bp, Homo sapiens
tttcttccctttcct

SEQ ID NO: 2028687 - DNA, 15 bp, Homo sapiens
ttcttccctttcctt

SEQ ID NO: 2028688 - DNA, 15 bp, Homo sapiens
tcttccctttccttt

SEQ ID NO: 2028689 - DNA, 15 bp, Homo sapiens
cttccctttcctttc

SEQ ID NO: 2028690 - DNA, 15 bp, Homo sapiens
ttccctttcctttcc

SEQ ID NO: 2028691 - DNA, 15 bp, Homo sapiens
tccctttcctttccc

SEQ ID NO: 2028692 - DNA, 15 bp, Homo sapiens
ccctttcctttccct

SEQ ID NO: 2028693 - DNA, 15 bp, Homo sapiens
cctttcctttccctg

SEQ ID NO: 2028694 - DNA, 15 bp, Homo sapiens
ctttcctttccctgt

SEQ ID NO: 2028695 - DNA, 15 bp, Homo sapiens
tttcctttccctgta

SEQ ID NO: 2028696 - DNA, 15 bp, Homo sapiens
ttcctttccctgtaa

SEQ ID NO: 2028697 - DNA, 15 bp, Homo sapiens
tcctttccctgtaat

SEQ ID NO: 2028698 - DNA, 15 bp, Homo sapiens
cctttccctgtaata

SEQ ID NO: 2028699 - DNA, 15 bp, Homo sapiens
ctttccctgtaatat

SEQ ID NO: 2028700 - DNA, 15 bp, Homo sapiens
tttccctgtaatata

SEQ ID NO: 2028701 - DNA, 15 bp, Homo sapiens
ttccctgtaatatat

SEQ ID NO: 2028702 - DNA, 15 bp, Homo sapiens
tccctgtaatatata

SEQ ID NO: 2028703 - DNA, 15 bp, Homo sapiens
ccctgtaatatataa

SEQ ID NO: 2028704 - DNA, 15 bp, Homo sapiens
cctgtaatatataaa

SEQ ID NO: 2028705 - DNA, 15 bp, Homo sapiens
ctgtaatatataaaa

SEQ ID NO: 2028706 - DNA, 15 bp, Homo sapiens
tgtaatatataaaac

SEQ ID NO: 2028707 - DNA, 15 bp, Homo sapiens
gtaatatataaaact

SEQ ID NO: 2028708 - DNA, 15 bp, Homo sapiens
taatatataaaactt

SEQ ID NO: 2028709 - DNA, 15 bp, Homo sapiens
aatatataaaacttt

SEQ ID NO: 2028710 - DNA, 15 bp, Homo sapiens
atatataaaactttt

SEQ ID NO: 2028711 - DNA, 15 bp, Homo sapiens
tatataaaacttttt

SEQ ID NO: 2028712 - DNA, 15 bp, Homo sapiens
atataaaactttttt

SEQ ID NO: 2028713 - DNA, 15 bp, Homo sapiens
tataaaacttttttt

SEQ ID NO: 2028714 - DNA, 15 bp, Homo sapiens
ataaaactttttttt

SEQ ID NO: 2028715 - DNA, 15 bp, Homo sapiens
taaaacttttttttc

SEQ ID NO: 2028716 - DNA, 15 bp, Homo sapiens
aaaacttttttttct

SEQ ID NO: 2028717 - DNA, 15 bp, Homo sapiens
aaacttttttttctg

SEQ ID NO: 2028718 - DNA, 15 bp, Homo sapiens
aacttttttttctgc

SEQ ID NO: 2028719 - DNA, 15 bp, Homo sapiens
acttttttttctgca

SEQ ID NO: 2028720 - DNA, 15 bp, Homo sapiens
cttttttttctgcat

SEQ ID NO: 2028721 - DNA, 15 bp, Homo sapiens
ttttttttctgcatt

SEQ ID NO: 2028722 - DNA, 15 bp, Homo sapiens
tttttttctgcattc

SEQ ID NO: 2028723 - DNA, 15 bp, Homo sapiens
ttttttctgcattca

SEQ ID NO: 2028724 - DNA, 15 bp, Homo sapiens
tttttctgcattcaa

SEQ ID NO: 2028725 - DNA, 15 bp, Homo sapiens
ttttctgcattcaaa

SEQ ID NO: 2028726 - DNA, 15 bp, Homo sapiens
tttctgcattcaaac

SEQ ID NO: 2028727 - DNA, 15 bp, Homo sapiens
ttctgcattcaaaca

SEQ ID NO: 2028728 - DNA, 15 bp, Homo sapiens
tctgcattcaaacac

SEQ ID NO: 2028729 - DNA, 15 bp, Homo sapiens
ctgcattcaaacaca

SEQ ID NO: 2028730 - DNA, 15 bp, Homo sapiens
tgcattcaaacacat

SEQ ID NO: 2028731 - DNA, 15 bp, Homo sapiens
gcattcaaacacatt

SEQ ID NO: 2028732 - DNA, 15 bp, Homo sapiens
cattcaaacacattt

SEQ ID NO: 2028733 - DNA, 15 bp, Homo sapiens
attcaaacacatttc

SEQ ID NO: 2028734 - DNA, 15 bp, Homo sapiens
ttcaaacacatttct

SEQ ID NO: 2028735 - DNA, 15 bp, Homo sapiens
tcaaacacatttctt

SEQ ID NO: 2028736 - DNA, 15 bp, Homo sapiens
caaacacatttcttg

SEQ ID NO: 2028737 - DNA, 15 bp, Homo sapiens
aaacacatttcttga

SEQ ID NO: 2028738 - DNA, 15 bp, Homo sapiens
aacacatttcttgac

SEQ ID NO: 2028739 - DNA, 15 bp, Homo sapiens
acacatttcttgact

SEQ ID NO: 2028740 - DNA, 15 bp, Homo sapiens
cacatttcttgactt

SEQ ID NO: 2028741 - DNA, 15 bp, Homo sapiens
acatttcttgacttt

SEQ ID NO: 2028742 - DNA, 15 bp, Homo sapiens
catttcttgactttt

SEQ ID NO: 2028743 - DNA, 15 bp, Homo sapiens
atttcttgactttta

SEQ ID NO: 2028744 - DNA, 15 bp, Homo sapiens
tttcttgacttttat

SEQ ID NO: 2028745 - DNA, 15 bp, Homo sapiens
ttcttgacttttata

SEQ ID NO: 2028746 - DNA, 15 bp, Homo sapiens
tcttgacttttatat

SEQ ID NO: 2028747 - DNA, 15 bp, Homo sapiens
cttgacttttatata

SEQ ID NO: 2028748 - DNA, 15 bp, Homo sapiens
ttgacttttatatat

SEQ ID NO: 2028749 - DNA, 15 bp, Homo sapiens
tgacttttatatatt

SEQ ID NO: 2028750 - DNA, 15 bp, Homo sapiens
gacttttatatatta

SEQ ID NO: 2028751 - DNA, 15 bp, Homo sapiens
acttttatatattag

SEQ ID NO: 2028752 - DNA, 15 bp, Homo sapiens
cttttatatattaga

SEQ ID NO: 2028753 - DNA, 15 bp, Homo sapiens
ttttatatattagat

SEQ ID NO: 2028754 - DNA, 15 bp, Homo sapiens
tttatatattagata

SEQ ID NO: 2028755 - DNA, 15 bp, Homo sapiens
ttatatattagataa

SEQ ID NO: 2028756 - DNA, 15 bp, Homo sapiens
tatatattagataat

SEQ ID NO: 2028757 - DNA, 15 bp, Homo sapiens
atatattagataatt

SEQ ID NO: 2028758 - DNA, 15 bp, Homo sapiens
tatattagataatta

SEQ ID NO: 2028759 - DNA, 15 bp, Homo sapiens
atattagataattaa

SEQ ID NO: 2028760 - DNA, 15 bp, Homo sapiens
tattagataattaaa

SEQ ID NO: 2028761 - DNA, 15 bp, Homo sapiens
attagataattaaaa

SEQ ID NO: 2028762 - DNA, 15 bp, Homo sapiens
ttagataattaaaag

SEQ ID NO: 2028763 - DNA, 15 bp, Homo sapiens
tagataattaaaagc

SEQ ID NO: 2028764 - DNA, 15 bp, Homo sapiens
agataattaaaagct

SEQ ID NO: 2028765 - DNA, 15 bp, Homo sapiens
gataattaaaagctt

SEQ ID NO: 2028766 - DNA, 15 bp, Homo sapiens
ataattaaaagcttc

SEQ ID NO: 2028767 - DNA, 15 bp, Homo sapiens
taattaaaagcttca

SEQ ID NO: 2028768 - DNA, 15 bp, Homo sapiens
aattaaaagcttcag

SEQ ID NO: 2028769 - DNA, 15 bp, Homo sapiens
attaaaagcttcagc

SEQ ID NO: 2028770 - DNA, 15 bp, Homo sapiens
ttaaaagcttcagca

SEQ ID NO: 2028771 - DNA, 15 bp, Homo sapiens
taaaagcttcagcaa

SEQ ID NO: 2028772 - DNA, 15 bp, Homo sapiens
aaaagcttcagcaat

SEQ ID NO: 2028773 - DNA, 15 bp, Homo sapiens
aaagcttcagcaatt

SEQ ID NO: 2028774 - DNA, 15 bp, Homo sapiens
aagcttcagcaattc

SEQ ID NO: 2028775 - DNA, 15 bp, Homo sapiens
agcttcagcaattca

SEQ ID NO: 2028776 - DNA, 15 bp, Homo sapiens
gcttcagcaattcac

SEQ ID NO: 2028777 - DNA, 15 bp, Homo sapiens
cttcagcaattcact

SEQ ID NO: 2028778 - DNA, 15 bp, Homo sapiens
ttcagcaattcacta

SEQ ID NO: 2028779 - DNA, 15 bp, Homo sapiens
tcagcaattcactaa

SEQ ID NO: 2028780 - DNA, 15 bp, Homo sapiens
cagcaattcactaag

SEQ ID NO: 2028781 - DNA, 15 bp, Homo sapiens
agcaattcactaaga

SEQ ID NO: 2028782 - DNA, 15 bp, Homo sapiens
gcaattcactaagac

SEQ ID NO: 2028783 - DNA, 15 bp, Homo sapiens
caattcactaagact

SEQ ID NO: 2028784 - DNA, 15 bp, Homo sapiens
aattcactaagactc

SEQ ID NO: 2028785 - DNA, 15 bp, Homo sapiens
attcactaagactct

SEQ ID NO: 2028786 - DNA, 15 bp, Homo sapiens
ttcactaagactctt

SEQ ID NO: 2028787 - DNA, 15 bp, Homo sapiens
tcactaagactcttt

SEQ ID NO: 2028788 - DNA, 15 bp, Homo sapiens
cactaagactctttg

SEQ ID NO: 2028789 - DNA, 15 bp, Homo sapiens
actaagactctttgt

SEQ ID NO: 2028790 - DNA, 15 bp, Homo sapiens
ctaagactctttgtc

SEQ ID NO: 2028791 - DNA, 15 bp, Homo sapiens
taagactctttgtca

SEQ ID NO: 2028792 - DNA, 15 bp, Homo sapiens
aagactctttgtcag

SEQ ID NO: 2028793 - DNA, 15 bp, Homo sapiens
agactctttgtcagg

SEQ ID NO: 2028794 - DNA, 15 bp, Homo sapiens
gactctttgtcaggt

SEQ ID NO: 2028795 - DNA, 15 bp, Homo sapiens
actctttgtcaggta

SEQ ID NO: 2028796 - DNA, 15 bp, Homo sapiens
ctctttgtcaggtaa

SEQ ID NO: 2028797 - DNA, 15 bp, Homo sapiens
tctttgtcaggtaag

SEQ ID NO: 2028798 - DNA, 15 bp, Homo sapiens
ctttgtcaggtaaga

SEQ ID NO: 2028799 - DNA, 15 bp, Homo sapiens
tttgtcaggtaagag

SEQ ID NO: 2028800 - DNA, 15 bp, Homo sapiens
ttgtcaggtaagaga

SEQ ID NO: 2028801 - DNA, 15 bp, Homo sapiens
tgtcaggtaagagat

SEQ ID NO: 2028802 - DNA, 15 bp, Homo sapiens
gtcaggtaagagatg

SEQ ID NO: 2028803 - DNA, 15 bp, Homo sapiens
tcaggtaagagatgt

SEQ ID NO: 2028804 - DNA, 15 bp, Homo sapiens
caggtaagagatgta

SEQ ID NO: 2028805 - DNA, 15 bp, Homo sapiens
aggtaagagatgtag

SEQ ID NO: 2028806 - DNA, 15 bp, Homo sapiens
ggtaagagatgtagg

SEQ ID NO: 2028807 - DNA, 15 bp, Homo sapiens
gtaagagatgtagga

SEQ ID NO: 2028808 - DNA, 15 bp, Homo sapiens
taagagatgtaggac

SEQ ID NO: 2028809 - DNA, 15 bp, Homo sapiens
aagagatgtaggact

SEQ ID NO: 2028810 - DNA, 15 bp, Homo sapiens
agagatgtaggacta

SEQ ID NO: 2028811 - DNA, 15 bp, Homo sapiens
gagatgtaggactat

SEQ ID NO: 2028812 - DNA, 15 bp, Homo sapiens
agatgtaggactata

SEQ ID NO: 2028813 - DNA, 15 bp, Homo sapiens
gatgtaggactataa

SEQ ID NO: 2028814 - DNA, 15 bp, Homo sapiens
atgtaggactataac

SEQ ID NO: 2028815 - DNA, 15 bp, Homo sapiens
tgtaggactataacc

SEQ ID NO: 2028816 - DNA, 15 bp, Homo sapiens
gtaggactataaccc

SEQ ID NO: 2028817 - DNA, 15 bp, Homo sapiens
taggactataaccct

SEQ ID NO: 2028818 - DNA, 15 bp, Homo sapiens
aggactataacccta

SEQ ID NO: 2028819 - DNA, 15 bp, Homo sapiens
ggactataaccctaa

SEQ ID NO: 2028820 - DNA, 15 bp, Homo sapiens
gactataaccctaac

SEQ ID NO: 2028821 - DNA, 15 bp, Homo sapiens
actataaccctaaca

SEQ ID NO: 2028822 - DNA, 15 bp, Homo sapiens
ctataaccctaacaa

SEQ ID NO: 2028823 - DNA, 15 bp, Homo sapiens
tataaccctaacaaa

SEQ ID NO: 2028824 - DNA, 15 bp, Homo sapiens
ataaccctaacaaaa

SEQ ID NO: 2028825 - DNA, 15 bp, Homo sapiens
taaccctaacaaaaa

SEQ ID NO: 2028826 - DNA, 15 bp, Homo sapiens
aaccctaacaaaaaa

SEQ ID NO: 2028827 - DNA, 15 bp, Homo sapiens
accctaacaaaaaaa

SEQ ID NO: 2028828 - DNA, 15 bp, Homo sapiens
ccctaacaaaaaaat

SEQ ID NO: 2028829 - DNA, 15 bp, Homo sapiens
cctaacaaaaaaatg

SEQ ID NO: 2028830 - DNA, 15 bp, Homo sapiens
ctaacaaaaaaatgt

SEQ ID NO: 2028831 - DNA, 15 bp, Homo sapiens
taacaaaaaaatgtg

SEQ ID NO: 2028832 - DNA, 15 bp, Homo sapiens
aacaaaaaaatgtgt

SEQ ID NO: 2028833 - DNA, 15 bp, Homo sapiens
acaaaaaaatgtgta

SEQ ID NO: 2028834 - DNA, 15 bp, Homo sapiens
caaaaaaatgtgtag

SEQ ID NO: 2028835 - DNA, 15 bp, Homo sapiens
aaaaaaatgtgtagg

SEQ ID NO: 2028836 - DNA, 15 bp, Homo sapiens
aaaaaatgtgtagga

SEQ ID NO: 2028837 - DNA, 15 bp, Homo sapiens
aaaaatgtgtaggac

SEQ ID NO: 2028838 - DNA, 15 bp, Homo sapiens
aaaatgtgtaggact

SEQ ID NO: 2028839 - DNA, 15 bp, Homo sapiens
aaatgtgtaggactg

SEQ ID NO: 2028840 - DNA, 15 bp, Homo sapiens
aatgtgtaggactga

SEQ ID NO: 2028841 - DNA, 15 bp, Homo sapiens
atgtgtaggactgac

SEQ ID NO: 2028842 - DNA, 15 bp, Homo sapiens
tgtgtaggactgaca

SEQ ID NO: 2028843 - DNA, 15 bp, Homo sapiens
gtgtaggactgacaa

SEQ ID NO: 2028844 - DNA, 15 bp, Homo sapiens
tgtaggactgacaaa

SEQ ID NO: 2028845 - DNA, 15 bp, Homo sapiens
gtaggactgacaaaa

SEQ ID NO: 2028846 - DNA, 15 bp, Homo sapiens
taggactgacaaaac

SEQ ID NO: 2028847 - DNA, 15 bp, Homo sapiens
aggactgacaaaaca

SEQ ID NO: 2028848 - DNA, 15 bp, Homo sapiens
ggactgacaaaacaa

SEQ ID NO: 2028849 - DNA, 15 bp, Homo sapiens
gactgacaaaacaag

SEQ ID NO: 2028850 - DNA, 15 bp, Homo sapiens
actgacaaaacaaga

SEQ ID NO: 2028851 - DNA, 15 bp, Homo sapiens
ctgacaaaacaagaa

SEQ ID NO: 2028852 - DNA, 15 bp, Homo sapiens
tgacaaaacaagaaa

SEQ ID NO: 2028853 - DNA, 15 bp, Homo sapiens
gacaaaacaagaaaa

SEQ ID NO: 2028854 - DNA, 15 bp, Homo sapiens
acaaaacaagaaaag

SEQ ID NO: 2028855 - DNA, 15 bp, Homo sapiens
caaaacaagaaaagt

SEQ ID NO: 2028856 - DNA, 15 bp, Homo sapiens
aaaacaagaaaagta

SEQ ID NO: 2028857 - DNA, 15 bp, Homo sapiens
aacaagaaaagtata

SEQ ID NO: 2028858 - DNA, 15 bp, Homo sapiens
acaagaaaagtataa

SEQ ID NO: 2028859 - DNA, 15 bp, Homo sapiens
caagaaaagtataaa

SEQ ID NO: 2028860 - DNA, 15 bp, Homo sapiens
aagaaaagtataaac

SEQ ID NO: 2028861 - DNA, 15 bp, Homo sapiens
agaaaagtataaact

SEQ ID NO: 2028862 - DNA, 15 bp, Homo sapiens
gaaaagtataaactt

SEQ ID NO: 2028863 - DNA, 15 bp, Homo sapiens
aaaagtataaacttt

SEQ ID NO: 2028864 - DNA, 15 bp, Homo sapiens
aaagtataaacttta

SEQ ID NO: 2028865 - DNA, 15 bp, Homo sapiens
aagtataaactttat

SEQ ID NO: 2028866 - DNA, 15 bp, Homo sapiens
agtataaactttatt

SEQ ID NO: 2028867 - DNA, 15 bp, Homo sapiens
gtataaactttattc

SEQ ID NO: 2028868 - DNA, 15 bp, Homo sapiens
tataaactttattca

SEQ ID NO: 2028869 - DNA, 15 bp, Homo sapiens
ataaactttattcat

SEQ ID NO: 2028870 - DNA, 15 bp, Homo sapiens
taaactttattcata

SEQ ID NO: 2028871 - DNA, 15 bp, Homo sapiens
aaactttattcataa

SEQ ID NO: 2028872 - DNA, 15 bp, Homo sapiens
aactttattcataaa

SEQ ID NO: 2028873 - DNA, 15 bp, Homo sapiens
actttattcataaat

SEQ ID NO: 2028874 - DNA, 15 bp, Homo sapiens
ctttattcataaata

SEQ ID NO: 2028875 - DNA, 15 bp, Homo sapiens
tttattcataaatat

SEQ ID NO: 2028876 - DNA, 15 bp, Homo sapiens
ttattcataaatatt

SEQ ID NO: 2028877 - DNA, 15 bp, Homo sapiens
tattcataaatatta

SEQ ID NO: 2028878 - DNA, 15 bp, Homo sapiens
attcataaatattaa

SEQ ID NO: 2028879 - DNA, 15 bp, Homo sapiens
cataaatattaatat

SEQ ID NO: 2028880 - DNA, 15 bp, Homo sapiens
ataaatattaatatg

SEQ ID NO: 2028881 - DNA, 15 bp, Homo sapiens
taaatattaatatga

SEQ ID NO: 2028882 - DNA, 15 bp, Homo sapiens
aaatattaatatgag

SEQ ID NO: 2028883 - DNA, 15 bp, Homo sapiens
aatattaatatgaga

SEQ ID NO: 2028884 - DNA, 15 bp, Homo sapiens
atattaatatgagag

SEQ ID NO: 2028885 - DNA, 15 bp, Homo sapiens
tattaatatgagaga

SEQ ID NO: 2028886 - DNA, 15 bp, Homo sapiens
attaatatgagagaa

SEQ ID NO: 2028887 - DNA, 15 bp, Homo sapiens
ttaatatgagagaag

SEQ ID NO: 2028888 - DNA, 15 bp, Homo sapiens
taatatgagagaaga

SEQ ID NO: 2028889 - DNA, 15 bp, Homo sapiens
aatatgagagaagat

SEQ ID NO: 2028890 - DNA, 15 bp, Homo sapiens
atatgagagaagatt

SEQ ID NO: 2028891 - DNA, 15 bp, Homo sapiens
tatgagagaagattt

SEQ ID NO: 2028892 - DNA, 15 bp, Homo sapiens
atgagagaagatttg

SEQ ID NO: 2028893 - DNA, 15 bp, Homo sapiens
tgagagaagatttga

SEQ ID NO: 2028894 - DNA, 15 bp, Homo sapiens
gagagaagatttgag

SEQ ID NO: 2028895 - DNA, 15 bp, Homo sapiens
agagaagatttgagt

SEQ ID NO: 2028896 - DNA, 15 bp, Homo sapiens
gagaagatttgagtg

SEQ ID NO: 2028897 - DNA, 15 bp, Homo sapiens
agaagatttgagtga

SEQ ID NO: 2028898 - DNA, 15 bp, Homo sapiens
gaagatttgagtgaa

SEQ ID NO: 2028899 - DNA, 15 bp, Homo sapiens
aagatttgagtgaat

SEQ ID NO: 2028900 - DNA, 15 bp, Homo sapiens
agatttgagtgaatg

SEQ ID NO: 2028901 - DNA, 15 bp, Homo sapiens
gatttgagtgaatgt

SEQ ID NO: 2028902 - DNA, 15 bp, Homo sapiens
atttgagtgaatgta

SEQ ID NO: 2028903 - DNA, 15 bp, Homo sapiens
tttgagtgaatgtaa

SEQ ID NO: 2028904 - DNA, 15 bp, Homo sapiens
ttgagtgaatgtaaa

SEQ ID NO: 2028905 - DNA, 15 bp, Homo sapiens
tgagtgaatgtaaag

SEQ ID NO: 2028906 - DNA, 15 bp, Homo sapiens
gagtgaatgtaaagg

SEQ ID NO: 2028907 - DNA, 15 bp, Homo sapiens
agtgaatgtaaaggc

SEQ ID NO: 2028908 - DNA, 15 bp, Homo sapiens
gtgaatgtaaaggca

SEQ ID NO: 2028909 - DNA, 15 bp, Homo sapiens
tgaatgtaaaggcat

SEQ ID NO: 2028910 - DNA, 15 bp, Homo sapiens
gaatgtaaaggcata

SEQ ID NO: 2028911 - DNA, 15 bp, Homo sapiens
aatgtaaaggcatat

SEQ ID NO: 2028912 - DNA, 15 bp, Homo sapiens
atgtaaaggcatatt

SEQ ID NO: 2028913 - DNA, 15 bp, Homo sapiens
tgtaaaggcatattg

SEQ ID NO: 2028914 - DNA, 15 bp, Homo sapiens
gtaaaggcatattgt

SEQ ID NO: 2028915 - DNA, 15 bp, Homo sapiens
taaaggcatattgtg

SEQ ID NO: 2028916 - DNA, 15 bp, Homo sapiens
aaaggcatattgtgt

SEQ ID NO: 2028917 - DNA, 15 bp, Homo sapiens
aaggcatattgtgtt

SEQ ID NO: 2028918 - DNA, 15 bp, Homo sapiens
aggcatattgtgttc

SEQ ID NO: 2028919 - DNA, 15 bp, Homo sapiens
ggcatattgtgttcc

SEQ ID NO: 2028920 - DNA, 15 bp, Homo sapiens
gcatattgtgttcct

SEQ ID NO: 2028921 - DNA, 15 bp, Homo sapiens
catattgtgttcctg

SEQ ID NO: 2028922 - DNA, 15 bp, Homo sapiens
atattgtgttcctgc

SEQ ID NO: 2028923 - DNA, 15 bp, Homo sapiens
tattgtgttcctgca

SEQ ID NO: 2028924 - DNA, 15 bp, Homo sapiens
attgtgttcctgcat

SEQ ID NO: 2028925 - DNA, 15 bp, Homo sapiens
ttgtgttcctgcatg

SEQ ID NO: 2028926 - DNA, 15 bp, Homo sapiens
tgtgttcctgcatga

SEQ ID NO: 2028927 - DNA, 15 bp, Homo sapiens
gtgttcctgcatgaa

SEQ ID NO: 2028928 - DNA, 15 bp, Homo sapiens
tgttcctgcatgaac

SEQ ID NO: 2028929 - DNA, 15 bp, Homo sapiens
gttcctgcatgaaca

SEQ ID NO: 2028930 - DNA, 15 bp, Homo sapiens
ttcctgcatgaacag

SEQ ID NO: 2028931 - DNA, 15 bp, Homo sapiens
tcctgcatgaacagt

SEQ ID NO: 2028932 - DNA, 15 bp, Homo sapiens
cctgcatgaacagtt

SEQ ID NO: 2028933 - DNA, 15 bp, Homo sapiens
ctgcatgaacagttc

SEQ ID NO: 2028934 - DNA, 15 bp, Homo sapiens
tgcatgaacagttct

SEQ ID NO: 2028935 - DNA, 15 bp, Homo sapiens
gcatgaacagttctt

SEQ ID NO: 2028936 - DNA, 15 bp, Homo sapiens
catgaacagttcttc

SEQ ID NO: 2028937 - DNA, 15 bp, Homo sapiens
atgaacagttcttcc

SEQ ID NO: 2028938 - DNA, 15 bp, Homo sapiens
tgaacagttcttccc

SEQ ID NO: 2028939 - DNA, 15 bp, Homo sapiens
gaacagttcttccca

SEQ ID NO: 2028940 - DNA, 15 bp, Homo sapiens
aacagttcttcccag

SEQ ID NO: 2028941 - DNA, 15 bp, Homo sapiens
acagttcttcccaga

SEQ ID NO: 2028942 - DNA, 15 bp, Homo sapiens
cagttcttcccagat

SEQ ID NO: 2028943 - DNA, 15 bp, Homo sapiens
agttcttcccagatt

SEQ ID NO: 2028944 - DNA, 15 bp, Homo sapiens
gttcttcccagatta

SEQ ID NO: 2028945 - DNA, 15 bp, Homo sapiens
ttcttcccagattat

SEQ ID NO: 2028946 - DNA, 15 bp, Homo sapiens
tcttcccagattatt

SEQ ID NO: 2028947 - DNA, 15 bp, Homo sapiens
cttcccagattatta

SEQ ID NO: 2028948 - DNA, 15 bp, Homo sapiens
ttcccagattattac

SEQ ID NO: 2028949 - DNA, 15 bp, Homo sapiens
tcccagattattaca

SEQ ID NO: 2028950 - DNA, 15 bp, Homo sapiens
cccagattattacaa

SEQ ID NO: 2028951 - DNA, 15 bp, Homo sapiens
ccagattattacaaa

SEQ ID NO: 2028952 - DNA, 15 bp, Homo sapiens
cagattattacaaat

SEQ ID NO: 2028953 - DNA, 15 bp, Homo sapiens
agattattacaaatt

SEQ ID NO: 2028954 - DNA, 15 bp, Homo sapiens
gattattacaaattt

SEQ ID NO: 2028955 - DNA, 15 bp, Homo sapiens
attattacaaattta

SEQ ID NO: 2028956 - DNA, 15 bp, Homo sapiens
ttattacaaatttaa

SEQ ID NO: 2028957 - DNA, 15 bp, Homo sapiens
tattacaaatttaat

SEQ ID NO: 2028958 - DNA, 15 bp, Homo sapiens
attacaaatttaatg

SEQ ID NO: 2028959 - DNA, 15 bp, Homo sapiens
ttacaaatttaatgt

SEQ ID NO: 2028960 - DNA, 15 bp, Homo sapiens
tacaaatttaatgta

SEQ ID NO: 2028961 - DNA, 15 bp, Homo sapiens
acaaatttaatgtaa

SEQ ID NO: 2028962 - DNA, 15 bp, Homo sapiens
caaatttaatgtaat

SEQ ID NO: 2028963 - DNA, 15 bp, Homo sapiens
aaatttaatgtaatt

SEQ ID NO: 2028964 - DNA, 15 bp, Homo sapiens
aatttaatgtaattt

SEQ ID NO: 2028965 - DNA, 15 bp, Homo sapiens
atttaatgtaatttc

SEQ ID NO: 2028966 - DNA, 15 bp, Homo sapiens
tttaatgtaatttca

SEQ ID NO: 2028967 - DNA, 15 bp, Homo sapiens
ttaatgtaatttcat

SEQ ID NO: 2028968 - DNA, 15 bp, Homo sapiens
taatgtaatttcatc

SEQ ID NO: 2028969 - DNA, 15 bp, Homo sapiens
aatgtaatttcatca

SEQ ID NO: 2028970 - DNA, 15 bp, Homo sapiens
atgtaatttcatcaa

SEQ ID NO: 2028971 - DNA, 15 bp, Homo sapiens
tgtaatttcatcaaa

SEQ ID NO: 2028972 - DNA, 15 bp, Homo sapiens
gtaatttcatcaaaa

SEQ ID NO: 2028973 - DNA, 15 bp, Homo sapiens
taatttcatcaaaat

SEQ ID NO: 2028974 - DNA, 15 bp, Homo sapiens
aatttcatcaaaata

SEQ ID NO: 2028975 - DNA, 15 bp, Homo sapiens
atttcatcaaaataa

SEQ ID NO: 2028976 - DNA, 15 bp, Homo sapiens
tttcatcaaaataac

SEQ ID NO: 2028977 - DNA, 15 bp, Homo sapiens
ttcatcaaaataacc

SEQ ID NO: 2028978 - DNA, 15 bp, Homo sapiens
tcatcaaaataacca

SEQ ID NO: 2028979 - DNA, 15 bp, Homo sapiens
catcaaaataaccat

SEQ ID NO: 2028980 - DNA, 15 bp, Homo sapiens
atcaaaataaccatg

SEQ ID NO: 2028981 - DNA, 15 bp, Homo sapiens
tcaaaataaccatgg

SEQ ID NO: 2028982 - DNA, 15 bp, Homo sapiens
caaaataaccatggg

SEQ ID NO: 2028983 - DNA, 15 bp, Homo sapiens
aaaataaccatggga

SEQ ID NO: 2028984 - DNA, 15 bp, Homo sapiens
aaataaccatgggat

SEQ ID NO: 2028985 - DNA, 15 bp, Homo sapiens
aataaccatgggatt

SEQ ID NO: 2028986 - DNA, 15 bp, Homo sapiens
ataaccatgggattt

SEQ ID NO: 2028987 - DNA, 15 bp, Homo sapiens
taaccatgggatttg

SEQ ID NO: 2028988 - DNA, 15 bp, Homo sapiens
aaccatgggatttga

SEQ ID NO: 2028989 - DNA, 15 bp, Homo sapiens
accatgggatttgag

SEQ ID NO: 2028990 - DNA, 15 bp, Homo sapiens
ccatgggatttgagg

SEQ ID NO: 2028991 - DNA, 15 bp, Homo sapiens
catgggatttgagga

SEQ ID NO: 2028992 - DNA, 15 bp, Homo sapiens
atgggatttgaggat

SEQ ID NO: 2028993 - DNA, 15 bp, Homo sapiens
tgggatttgaggatt

SEQ ID NO: 2028994 - DNA, 15 bp, Homo sapiens
gggatttgaggattg

SEQ ID NO: 2028995 - DNA, 15 bp, Homo sapiens
ggatttgaggattga

SEQ ID NO: 2028996 - DNA, 15 bp, Homo sapiens
gatttgaggattgag

SEQ ID NO: 2028997 - DNA, 15 bp, Homo sapiens
atttgaggattgaga

SEQ ID NO: 2028998 - DNA, 15 bp, Homo sapiens
tttgaggattgagaa

SEQ ID NO: 2028999 - DNA, 15 bp, Homo sapiens
ttgaggattgagaat

SEQ ID NO: 2029000 - DNA, 15 bp, Homo sapiens
tgaggattgagaatg

SEQ ID NO: 2029001 - DNA, 15 bp, Homo sapiens
gaggattgagaatgg

SEQ ID NO: 2029002 - DNA, 15 bp, Homo sapiens
aggattgagaatgga

SEQ ID NO: 2029003 - DNA, 15 bp, Homo sapiens
ggattgagaatggag

SEQ ID NO: 2029004 - DNA, 15 bp, Homo sapiens
gattgagaatggaga

SEQ ID NO: 2029005 - DNA, 15 bp, Homo sapiens
attgagaatggagat

SEQ ID NO: 2029006 - DNA, 15 bp, Homo sapiens
ttgagaatggagata

SEQ ID NO: 2029007 - DNA, 15 bp, Homo sapiens
tgagaatggagatag

SEQ ID NO: 2029008 - DNA, 15 bp, Homo sapiens
gagaatggagataga

SEQ ID NO: 2029009 - DNA, 15 bp, Homo sapiens
agaatggagatagaa

SEQ ID NO: 2029010 - DNA, 15 bp, Homo sapiens
gaatggagatagaac

SEQ ID NO: 2029011 - DNA, 15 bp, Homo sapiens
aatggagatagaact

SEQ ID NO: 2029012 - DNA, 15 bp, Homo sapiens
atggagatagaactt

SEQ ID NO: 2029013 - DNA, 15 bp, Homo sapiens
tggagatagaactta

SEQ ID NO: 2029014 - DNA, 15 bp, Homo sapiens
ggagatagaacttaa

SEQ ID NO: 2029015 - DNA, 15 bp, Homo sapiens
gagatagaacttaaa

SEQ ID NO: 2029016 - DNA, 15 bp, Homo sapiens
agatagaacttaaat

SEQ ID NO: 2029017 - DNA, 15 bp, Homo sapiens
gatagaacttaaatg

SEQ ID NO: 2029018 - DNA, 15 bp, Homo sapiens
atagaacttaaatga

SEQ ID NO: 2029019 - DNA, 15 bp, Homo sapiens
tagaacttaaatgat

SEQ ID NO: 2029020 - DNA, 15 bp, Homo sapiens
agaacttaaatgatt

SEQ ID NO: 2029021 - DNA, 15 bp, Homo sapiens
gaacttaaatgattc

SEQ ID NO: 2029022 - DNA, 15 bp, Homo sapiens
aacttaaatgattct

SEQ ID NO: 2029023 - DNA, 15 bp, Homo sapiens
acttaaatgattcta

SEQ ID NO: 2029024 - DNA, 15 bp, Homo sapiens
cttaaatgattctaa

SEQ ID NO: 2029025 - DNA, 15 bp, Homo sapiens
ttaaatgattctaaa

SEQ ID NO: 2029026 - DNA, 15 bp, Homo sapiens
taaatgattctaaat

SEQ ID NO: 2029027 - DNA, 15 bp, Homo sapiens
aaatgattctaaatt

SEQ ID NO: 2029028 - DNA, 15 bp, Homo sapiens
aatgattctaaattc

SEQ ID NO: 2029029 - DNA, 15 bp, Homo sapiens
atgattctaaattct

SEQ ID NO: 2029030 - DNA, 15 bp, Homo sapiens
tgattctaaattcta

SEQ ID NO: 2029031 - DNA, 15 bp, Homo sapiens
gattctaaattctac

SEQ ID NO: 2029032 - DNA, 15 bp, Homo sapiens
attctaaattctaca

SEQ ID NO: 2029033 - DNA, 15 bp, Homo sapiens
ttctaaattctacat

SEQ ID NO: 2029034 - DNA, 15 bp, Homo sapiens
tctaaattctacata

SEQ ID NO: 2029035 - DNA, 15 bp, Homo sapiens
ctaaattctacataa

SEQ ID NO: 2029036 - DNA, 15 bp, Homo sapiens
taaattctacataaa

SEQ ID NO: 2029037 - DNA, 15 bp, Homo sapiens
aaattctacataaaa

SEQ ID NO: 2029038 - DNA, 15 bp, Homo sapiens
aattctacataaaag

SEQ ID NO: 2029039 - DNA, 15 bp, Homo sapiens
attctacataaaagt

SEQ ID NO: 2029040 - DNA, 15 bp, Homo sapiens
ttctacataaaagtg

SEQ ID NO: 2029041 - DNA, 15 bp, Homo sapiens
tctacataaaagtgc

SEQ ID NO: 2029042 - DNA, 15 bp, Homo sapiens
ctacataaaagtgca

SEQ ID NO: 2029043 - DNA, 15 bp, Homo sapiens
tacataaaagtgcaa

SEQ ID NO: 2029044 - DNA, 15 bp, Homo sapiens
acataaaagtgcaat

SEQ ID NO: 2029045 - DNA, 15 bp, Homo sapiens
cataaaagtgcaata

SEQ ID NO: 2029046 - DNA, 15 bp, Homo sapiens
ataaaagtgcaataa

SEQ ID NO: 2029047 - DNA, 15 bp, Homo sapiens
taaaagtgcaataat

SEQ ID NO: 2029048 - DNA, 15 bp, Homo sapiens
aaaagtgcaataata

SEQ ID NO: 2029049 - DNA, 15 bp, Homo sapiens
aaagtgcaataatag

SEQ ID NO: 2029050 - DNA, 15 bp, Homo sapiens
aagtgcaataatagc

SEQ ID NO: 2029051 - DNA, 15 bp, Homo sapiens
agtgcaataatagct

SEQ ID NO: 2029052 - DNA, 15 bp, Homo sapiens
gtgcaataatagcta

SEQ ID NO: 2029053 - DNA, 15 bp, Homo sapiens
tgcaataatagctaa

SEQ ID NO: 2029054 - DNA, 15 bp, Homo sapiens
gcaataatagctaag

SEQ ID NO: 2029055 - DNA, 15 bp, Homo sapiens
caataatagctaaga

SEQ ID NO: 2029056 - DNA, 15 bp, Homo sapiens
aataatagctaagaa

SEQ ID NO: 2029057 - DNA, 15 bp, Homo sapiens
ataatagctaagaaa

SEQ ID NO: 2029058 - DNA, 15 bp, Homo sapiens
taatagctaagaaaa

SEQ ID NO: 2029059 - DNA, 15 bp, Homo sapiens
aatagctaagaaaat

SEQ ID NO: 2029060 - DNA, 15 bp, Homo sapiens
atagctaagaaaata

SEQ ID NO: 2029061 - DNA, 15 bp, Homo sapiens
tagctaagaaaatat

SEQ ID NO: 2029062 - DNA, 15 bp, Homo sapiens
agctaagaaaatatt

SEQ ID NO: 2029063 - DNA, 15 bp, Homo sapiens
gctaagaaaatattg

SEQ ID NO: 2029064 - DNA, 15 bp, Homo sapiens
ctaagaaaatattga

SEQ ID NO: 2029065 - DNA, 15 bp, Homo sapiens
taagaaaatattgaa

SEQ ID NO: 2029066 - DNA, 15 bp, Homo sapiens
aagaaaatattgaaa

SEQ ID NO: 2029067 - DNA, 15 bp, Homo sapiens
agaaaatattgaaag

SEQ ID NO: 2029068 - DNA, 15 bp, Homo sapiens
gaaaatattgaaagg

SEQ ID NO: 2029069 - DNA, 15 bp, Homo sapiens
aaaatattgaaagga

SEQ ID NO: 2029070 - DNA, 15 bp, Homo sapiens
aaatattgaaaggaa

SEQ ID NO: 2029071 - DNA, 15 bp, Homo sapiens
aatattgaaaggaaa

SEQ ID NO: 2029072 - DNA, 15 bp, Homo sapiens
atattgaaaggaaag

SEQ ID NO: 2029073 - DNA, 15 bp, Homo sapiens
tattgaaaggaaaga

SEQ ID NO: 2029074 - DNA, 15 bp, Homo sapiens
attgaaaggaaagag

SEQ ID NO: 2029075 - DNA, 15 bp, Homo sapiens
ttgaaaggaaagaga

SEQ ID NO: 2029076 - DNA, 15 bp, Homo sapiens
tgaaaggaaagagac

SEQ ID NO: 2029077 - DNA, 15 bp, Homo sapiens
gaaaggaaagagact

SEQ ID NO: 2029078 - DNA, 15 bp, Homo sapiens
aaaggaaagagactt

SEQ ID NO: 2029079 - DNA, 15 bp, Homo sapiens
aaggaaagagacttg

SEQ ID NO: 2029080 - DNA, 15 bp, Homo sapiens
aggaaagagacttga

SEQ ID NO: 2029081 - DNA, 15 bp, Homo sapiens
ggaaagagacttgag

SEQ ID NO: 2029082 - DNA, 15 bp, Homo sapiens
gaaagagacttgaga

SEQ ID NO: 2029083 - DNA, 15 bp, Homo sapiens
aaagagacttgagac

SEQ ID NO: 2029084 - DNA, 15 bp, Homo sapiens
aagagacttgagact

SEQ ID NO: 2029085 - DNA, 15 bp, Homo sapiens
agagacttgagactt

SEQ ID NO: 2029086 - DNA, 15 bp, Homo sapiens
gagacttgagactta

SEQ ID NO: 2029087 - DNA, 15 bp, Homo sapiens
agacttgagacttaa

SEQ ID NO: 2029088 - DNA, 15 bp, Homo sapiens
gacttgagacttaat

SEQ ID NO: 2029089 - DNA, 15 bp, Homo sapiens
acttgagacttaata

SEQ ID NO: 2029090 - DNA, 15 bp, Homo sapiens
cttgagacttaatag

SEQ ID NO: 2029091 - DNA, 15 bp, Homo sapiens
ttgagacttaatagt

SEQ ID NO: 2029092 - DNA, 15 bp, Homo sapiens
tgagacttaatagta

SEQ ID NO: 2029093 - DNA, 15 bp, Homo sapiens
gagacttaatagtac

SEQ ID NO: 2029094 - DNA, 15 bp, Homo sapiens
agacttaatagtaca

SEQ ID NO: 2029095 - DNA, 15 bp, Homo sapiens
gacttaatagtacag

SEQ ID NO: 2029096 - DNA, 15 bp, Homo sapiens
acttaatagtacaga

SEQ ID NO: 2029097 - DNA, 15 bp, Homo sapiens
cttaatagtacagat

SEQ ID NO: 2029098 - DNA, 15 bp, Homo sapiens
ttaatagtacagatg

SEQ ID NO: 2029099 - DNA, 15 bp, Homo sapiens
taatagtacagatgt

SEQ ID NO: 2029100 - DNA, 15 bp, Homo sapiens
aaacatcttacctgc

SEQ ID NO: 2029101 - DNA, 15 bp, Homo sapiens
aacatcttacctgca

SEQ ID NO: 2029102 - DNA, 15 bp, Homo sapiens
acatcttacctgcaa

SEQ ID NO: 2029103 - DNA, 15 bp, Homo sapiens
catcttacctgcaaa

SEQ ID NO: 2029104 - DNA, 15 bp, Homo sapiens
atcttacctgcaaag

SEQ ID NO: 2029105 - DNA, 15 bp, Homo sapiens
tcttacctgcaaagt

SEQ ID NO: 2029106 - DNA, 15 bp, Homo sapiens
cttacctgcaaagta

SEQ ID NO: 2029107 - DNA, 15 bp, Homo sapiens
ttacctgcaaagtaa

SEQ ID NO: 2029108 - DNA, 15 bp, Homo sapiens
tacctgcaaagtaaa

SEQ ID NO: 2029109 - DNA, 15 bp, Homo sapiens
acctgcaaagtaaat

SEQ ID NO: 2029110 - DNA, 15 bp, Homo sapiens
cctgcaaagtaaata

SEQ ID NO: 2029111 - DNA, 15 bp, Homo sapiens
ctgcaaagtaaataa

SEQ ID NO: 2029112 - DNA, 15 bp, Homo sapiens
tgcaaagtaaataaa

SEQ ID NO: 2029113 - DNA, 15 bp, Homo sapiens
gcaaagtaaataaat

SEQ ID NO: 2029114 - DNA, 15 bp, Homo sapiens
caaagtaaataaatg

SEQ ID NO: 2029115 - DNA, 15 bp, Homo sapiens
aaagtaaataaatgt

SEQ ID NO: 2029116 - DNA, 15 bp, Homo sapiens
aagtaaataaatgta

SEQ ID NO: 2029117 - DNA, 15 bp, Homo sapiens
agtaaataaatgtat

SEQ ID NO: 2029118 - DNA, 15 bp, Homo sapiens
gtaaataaatgtatc

SEQ ID NO: 2029119 - DNA, 15 bp, Homo sapiens
taaataaatgtatct

SEQ ID NO: 2029120 - DNA, 15 bp, Homo sapiens
aaataaatgtatctg

SEQ ID NO: 2029121 - DNA, 15 bp, Homo sapiens
aataaatgtatctgg

SEQ ID NO: 2029122 - DNA, 15 bp, Homo sapiens
ataaatgtatctgga

SEQ ID NO: 2029123 - DNA, 15 bp, Homo sapiens
taaatgtatctggag

SEQ ID NO: 2029124 - DNA, 15 bp, Homo sapiens
aaatgtatctggaga

SEQ ID NO: 2029125 - DNA, 15 bp, Homo sapiens
aatgtatctggagaa

SEQ ID NO: 2029126 - DNA, 15 bp, Homo sapiens
atgtatctggagaag

SEQ ID NO: 2029127 - DNA, 15 bp, Homo sapiens
tgtatctggagaagg

SEQ ID NO: 2029128 - DNA, 15 bp, Homo sapiens
gtatctggagaagga

SEQ ID NO: 2029129 - DNA, 15 bp, Homo sapiens
tatctggagaaggat

SEQ ID NO: 2029130 - DNA, 15 bp, Homo sapiens
atctggagaaggatg

SEQ ID NO: 2029131 - DNA, 15 bp, Homo sapiens
tctggagaaggatgg

SEQ ID NO: 2029132 - DNA, 15 bp, Homo sapiens
ctggagaaggatggt

SEQ ID NO: 2029133 - DNA, 15 bp, Homo sapiens
tggagaaggatggtt

SEQ ID NO: 2029134 - DNA, 15 bp, Homo sapiens
ggagaaggatggttg

SEQ ID NO: 2029135 - DNA, 15 bp, Homo sapiens
gagaaggatggttga

SEQ ID NO: 2029136 - DNA, 15 bp, Homo sapiens
agaaggatggttgat

SEQ ID NO: 2029137 - DNA, 15 bp, Homo sapiens
gaaggatggttgatg

SEQ ID NO: 2029138 - DNA, 15 bp, Homo sapiens
aaggatggttgatga

SEQ ID NO: 2029139 - DNA, 15 bp, Homo sapiens
aggatggttgatgaa

SEQ ID NO: 2029140 - DNA, 15 bp, Homo sapiens
ggatggttgatgaac

SEQ ID NO: 2029141 - DNA, 15 bp, Homo sapiens
gatggttgatgaact

SEQ ID NO: 2029142 - DNA, 15 bp, Homo sapiens
atggttgatgaactt

SEQ ID NO: 2029143 - DNA, 15 bp, Homo sapiens
tggttgatgaacttg

SEQ ID NO: 2029144 - DNA, 15 bp, Homo sapiens
ggttgatgaacttgc

SEQ ID NO: 2029145 - DNA, 15 bp, Homo sapiens
gttgatgaacttgct

SEQ ID NO: 2029146 - DNA, 15 bp, Homo sapiens
ttgatgaacttgcta

SEQ ID NO: 2029147 - DNA, 15 bp, Homo sapiens
tgatgaacttgctaa

SEQ ID NO: 2029148 - DNA, 15 bp, Homo sapiens
gatgaacttgctaac

SEQ ID NO: 2029149 - DNA, 15 bp, Homo sapiens
atgaacttgctaaca

SEQ ID NO: 2029150 - DNA, 15 bp, Homo sapiens
tgaacttgctaacat

SEQ ID NO: 2029151 - DNA, 15 bp, Homo sapiens
gaacttgctaacatg

SEQ ID NO: 2029152 - DNA, 15 bp, Homo sapiens
aacttgctaacatgc

SEQ ID NO: 2029153 - DNA, 15 bp, Homo sapiens
acttgctaacatgcg

SEQ ID NO: 2029154 - DNA, 15 bp, Homo sapiens
cttgctaacatgcgc

SEQ ID NO: 2029155 - DNA, 15 bp, Homo sapiens
ttgctaacatgcgcg

SEQ ID NO: 2029156 - DNA, 15 bp, Homo sapiens
tgctaacatgcgcgc

SEQ ID NO: 2029157 - DNA, 15 bp, Homo sapiens
gctaacatgcgcgct

SEQ ID NO: 2029158 - DNA, 15 bp, Homo sapiens
ctaacatgcgcgctg

SEQ ID NO: 2029159 - DNA, 15 bp, Homo sapiens
taacatgcgcgctgt

SEQ ID NO: 2029160 - DNA, 15 bp, Homo sapiens
aacatgcgcgctgtt

SEQ ID NO: 2029161 - DNA, 15 bp, Homo sapiens
acatgcgcgctgttg

SEQ ID NO: 2029162 - DNA, 15 bp, Homo sapiens
catgcgcgctgttgt

SEQ ID NO: 2029163 - DNA, 15 bp, Homo sapiens
atgcgcgctgttgta

SEQ ID NO: 2029164 - DNA, 15 bp, Homo sapiens
tgcgcgctgttgtag

SEQ ID NO: 2029165 - DNA, 15 bp, Homo sapiens
gcgcgctgttgtaga

SEQ ID NO: 2029166 - DNA, 15 bp, Homo sapiens
cgcgctgttgtagaa

SEQ ID NO: 2029167 - DNA, 15 bp, Homo sapiens
gcgctgttgtagaat

SEQ ID NO: 2029168 - DNA, 15 bp, Homo sapiens
cgctgttgtagaatg

SEQ ID NO: 2029169 - DNA, 15 bp, Homo sapiens
gctgttgtagaatgc

SEQ ID NO: 2029170 - DNA, 15 bp, Homo sapiens
ctgttgtagaatgca

SEQ ID NO: 2029171 - DNA, 15 bp, Homo sapiens
tgttgtagaatgcac

SEQ ID NO: 2029172 - DNA, 15 bp, Homo sapiens
gttgtagaatgcact

SEQ ID NO: 2029173 - DNA, 15 bp, Homo sapiens
ttgtagaatgcactg

SEQ ID NO: 2029174 - DNA, 15 bp, Homo sapiens
tgtagaatgcactga

SEQ ID NO: 2029175 - DNA, 15 bp, Homo sapiens
gtagaatgcactgac

SEQ ID NO: 2029176 - DNA, 15 bp, Homo sapiens
tagaatgcactgact

SEQ ID NO: 2029177 - DNA, 15 bp, Homo sapiens
agaatgcactgacta

SEQ ID NO: 2029178 - DNA, 15 bp, Homo sapiens
gaatgcactgactac

SEQ ID NO: 2029179 - DNA, 15 bp, Homo sapiens
aatgcactgactaca

SEQ ID NO: 2029180 - DNA, 15 bp, Homo sapiens
atgcactgactacag

SEQ ID NO: 2029181 - DNA, 15 bp, Homo sapiens
tgcactgactacaga

SEQ ID NO: 2029182 - DNA, 15 bp, Homo sapiens
gcactgactacagaa

SEQ ID NO: 2029183 - DNA, 15 bp, Homo sapiens
cactgactacagaat

SEQ ID NO: 2029184 - DNA, 15 bp, Homo sapiens
actgactacagaatt

SEQ ID NO: 2029185 - DNA, 15 bp, Homo sapiens
ctgactacagaattc

SEQ ID NO: 2029186 - DNA, 15 bp, Homo sapiens
tgactacagaattct

SEQ ID NO: 2029187 - DNA, 15 bp, Homo sapiens
gactacagaattctt

SEQ ID NO: 2029188 - DNA, 15 bp, Homo sapiens
actacagaattcttt

SEQ ID NO: 2029189 - DNA, 15 bp, Homo sapiens
ctacagaattcttta

SEQ ID NO: 2029190 - DNA, 15 bp, Homo sapiens
tacagaattctttat

SEQ ID NO: 2029191 - DNA, 15 bp, Homo sapiens
acagaattctttata

SEQ ID NO: 2029192 - DNA, 15 bp, Homo sapiens
cagaattctttataa

SEQ ID NO: 2029193 - DNA, 15 bp, Homo sapiens
agaattctttataag

SEQ ID NO: 2029194 - DNA, 15 bp, Homo sapiens
gaattctttataagg

SEQ ID NO: 2029195 - DNA, 15 bp, Homo sapiens
aattctttataaggg

SEQ ID NO: 2029196 - DNA, 15 bp, Homo sapiens
attctttataaggga

SEQ ID NO: 2029197 - DNA, 15 bp, Homo sapiens
ttctttataagggat

SEQ ID NO: 2029198 - DNA, 15 bp, Homo sapiens
tctttataagggata

SEQ ID NO: 2029199 - DNA, 15 bp, Homo sapiens
ctttataagggatag

SEQ ID NO: 2029200 - DNA, 15 bp, Homo sapiens
tttataagggataga

SEQ ID NO: 2029201 - DNA, 15 bp, Homo sapiens
ttataagggatagac

SEQ ID NO: 2029202 - DNA, 15 bp, Homo sapiens
tataagggatagact

SEQ ID NO: 2029203 - DNA, 15 bp, Homo sapiens
ataagggatagactt

SEQ ID NO: 2029204 - DNA, 15 bp, Homo sapiens
taagggatagacttg

SEQ ID NO: 2029205 - DNA, 15 bp, Homo sapiens
aagggatagacttgt

SEQ ID NO: 2029206 - DNA, 15 bp, Homo sapiens
agggatagacttgtt

SEQ ID NO: 2029207 - DNA, 15 bp, Homo sapiens
gggatagacttgttc

SEQ ID NO: 2029208 - DNA, 15 bp, Homo sapiens
ggatagacttgttca

SEQ ID NO: 2029209 - DNA, 15 bp, Homo sapiens
gatagacttgttcat

SEQ ID NO: 2029210 - DNA, 15 bp, Homo sapiens
atagacttgttcata

SEQ ID NO: 2029211 - DNA, 15 bp, Homo sapiens
tagacttgttcatac

SEQ ID NO: 2029212 - DNA, 15 bp, Homo sapiens
agacttgttcatact

SEQ ID NO: 2029213 - DNA, 15 bp, Homo sapiens
gacttgttcatactt

SEQ ID NO: 2029214 - DNA, 15 bp, Homo sapiens
acttgttcatacttt

SEQ ID NO: 2029215 - DNA, 15 bp, Homo sapiens
cttgttcatactttt

SEQ ID NO: 2029216 - DNA, 15 bp, Homo sapiens
ttgttcatactttta

SEQ ID NO: 2029217 - DNA, 15 bp, Homo sapiens
tgttcatacttttat

SEQ ID NO: 2029218 - DNA, 15 bp, Homo sapiens
gttcatacttttatt

SEQ ID NO: 2029219 - DNA, 15 bp, Homo sapiens
ttcatacttttattt

SEQ ID NO: 2029220 - DNA, 15 bp, Homo sapiens
tcatacttttatttc

SEQ ID NO: 2029221 - DNA, 15 bp, Homo sapiens
catacttttatttcc

SEQ ID NO: 2029222 - DNA, 15 bp, Homo sapiens
atacttttatttcca

SEQ ID NO: 2029223 - DNA, 15 bp, Homo sapiens
tacttttatttccat

SEQ ID NO: 2029224 - DNA, 15 bp, Homo sapiens
acttttatttccata

SEQ ID NO: 2029225 - DNA, 15 bp, Homo sapiens
cttttatttccatat

SEQ ID NO: 2029226 - DNA, 15 bp, Homo sapiens
ttttatttccatatt

SEQ ID NO: 2029227 - DNA, 15 bp, Homo sapiens
tttatttccatattc

SEQ ID NO: 2029228 - DNA, 15 bp, Homo sapiens
ttatttccatattcc

SEQ ID NO: 2029229 - DNA, 15 bp, Homo sapiens
tatttccatattcca

SEQ ID NO: 2029230 - DNA, 15 bp, Homo sapiens
atttccatattccat

SEQ ID NO: 2029231 - DNA, 15 bp, Homo sapiens
tttccatattccatt

SEQ ID NO: 2029232 - DNA, 15 bp, Homo sapiens
ttccatattccattt

SEQ ID NO: 2029233 - DNA, 15 bp, Homo sapiens
tccatattccatttt

SEQ ID NO: 2029234 - DNA, 15 bp, Homo sapiens
ccatattccattttt

SEQ ID NO: 2029235 - DNA, 15 bp, Homo sapiens
catattccatttttt

SEQ ID NO: 2029236 - DNA, 15 bp, Homo sapiens
atattccattttttt

SEQ ID NO: 2029237 - DNA, 15 bp, Homo sapiens
tattccattttttta

SEQ ID NO: 2029238 - DNA, 15 bp, Homo sapiens
attccatttttttac

SEQ ID NO: 2029239 - DNA, 15 bp, Homo sapiens
ttccatttttttact

SEQ ID NO: 2029240 - DNA, 15 bp, Homo sapiens
tccatttttttactc

SEQ ID NO: 2029241 - DNA, 15 bp, Homo sapiens
ccatttttttactct

SEQ ID NO: 2029242 - DNA, 15 bp, Homo sapiens
catttttttactctc

SEQ ID NO: 2029243 - DNA, 15 bp, Homo sapiens
atttttttactctct

SEQ ID NO: 2029244 - DNA, 15 bp, Homo sapiens
tttttttactctctc

SEQ ID NO: 2029245 - DNA, 15 bp, Homo sapiens
ttttttactctctca

SEQ ID NO: 2029246 - DNA, 15 bp, Homo sapiens
tttttactctctcaa

SEQ ID NO: 2029247 - DNA, 15 bp, Homo sapiens
ttttactctctcaac

SEQ ID NO: 2029248 - DNA, 15 bp, Homo sapiens
tttactctctcaact

SEQ ID NO: 2029249 - DNA, 15 bp, Homo sapiens
ttactctctcaactg

SEQ ID NO: 2029250 - DNA, 15 bp, Homo sapiens
tactctctcaactgt

SEQ ID NO: 2029251 - DNA, 15 bp, Homo sapiens
actctctcaactgta

SEQ ID NO: 2029252 - DNA, 15 bp, Homo sapiens
ctctctcaactgtat

SEQ ID NO: 2029253 - DNA, 15 bp, Homo sapiens
tctctcaactgtatg

SEQ ID NO: 2029254 - DNA, 15 bp, Homo sapiens
ctctcaactgtatgt

SEQ ID NO: 2029255 - DNA, 15 bp, Homo sapiens
tctcaactgtatgtc

SEQ ID NO: 2029256 - DNA, 15 bp, Homo sapiens
ctcaactgtatgtcc

SEQ ID NO: 2029257 - DNA, 15 bp, Homo sapiens
tcaactgtatgtcca

SEQ ID NO: 2029258 - DNA, 15 bp, Homo sapiens
caactgtatgtccaa

SEQ ID NO: 2029259 - DNA, 15 bp, Homo sapiens
aactgtatgtccaat

SEQ ID NO: 2029260 - DNA, 15 bp, Homo sapiens
actgtatgtccaatg

SEQ ID NO: 2029261 - DNA, 15 bp, Homo sapiens
ctgtatgtccaatgt

SEQ ID NO: 2029262 - DNA, 15 bp, Homo sapiens
tgtatgtccaatgta

SEQ ID NO: 2029263 - DNA, 15 bp, Homo sapiens
gtatgtccaatgtaa

SEQ ID NO: 2029264 - DNA, 15 bp, Homo sapiens
tatgtccaatgtaac

SEQ ID NO: 2029265 - DNA, 15 bp, Homo sapiens
atgtccaatgtaact

SEQ ID NO: 2029266 - DNA, 15 bp, Homo sapiens
tgtccaatgtaactg

SEQ ID NO: 2029267 - DNA, 15 bp, Homo sapiens
gtccaatgtaactgg

SEQ ID NO: 2029268 - DNA, 15 bp, Homo sapiens
tccaatgtaactggt

SEQ ID NO: 2029269 - DNA, 15 bp, Homo sapiens
ccaatgtaactggtt

SEQ ID NO: 2029270 - DNA, 15 bp, Homo sapiens
caatgtaactggttg

SEQ ID NO: 2029271 - DNA, 15 bp, Homo sapiens
aatgtaactggttga

SEQ ID NO: 2029272 - DNA, 15 bp, Homo sapiens
atgtaactggttgac

SEQ ID NO: 2029273 - DNA, 15 bp, Homo sapiens
tgtaactggttgaca

SEQ ID NO: 2029274 - DNA, 15 bp, Homo sapiens
gtaactggttgacaa

SEQ ID NO: 2029275 - DNA, 15 bp, Homo sapiens
taactggttgacaac

SEQ ID NO: 2029276 - DNA, 15 bp, Homo sapiens
aactggttgacaact

SEQ ID NO: 2029277 - DNA, 15 bp, Homo sapiens
actggttgacaactt

SEQ ID NO: 2029278 - DNA, 15 bp, Homo sapiens
ctggttgacaacttt

SEQ ID NO: 2029279 - DNA, 15 bp, Homo sapiens
tggttgacaactttt

SEQ ID NO: 2029280 - DNA, 15 bp, Homo sapiens
ggttgacaacttttt

SEQ ID NO: 2029281 - DNA, 15 bp, Homo sapiens
gttgacaacttttta

SEQ ID NO: 2029282 - DNA, 15 bp, Homo sapiens
ttgacaactttttat

SEQ ID NO: 2029283 - DNA, 15 bp, Homo sapiens
tgacaactttttatg

SEQ ID NO: 2029284 - DNA, 15 bp, Homo sapiens
gacaactttttatgc

SEQ ID NO: 2029285 - DNA, 15 bp, Homo sapiens
acaactttttatgct

SEQ ID NO: 2029286 - DNA, 15 bp, Homo sapiens
caactttttatgctg

SEQ ID NO: 2029287 - DNA, 15 bp, Homo sapiens
aactttttatgctga

SEQ ID NO: 2029288 - DNA, 15 bp, Homo sapiens
actttttatgctgag

SEQ ID NO: 2029289 - DNA, 15 bp, Homo sapiens
ctttttatgctgagt

SEQ ID NO: 2029290 - DNA, 15 bp, Homo sapiens
tttttatgctgagta

SEQ ID NO: 2029291 - DNA, 15 bp, Homo sapiens
ttttatgctgagtat

SEQ ID NO: 2029292 - DNA, 15 bp, Homo sapiens
tttatgctgagtata

SEQ ID NO: 2029293 - DNA, 15 bp, Homo sapiens
ttatgctgagtatat

SEQ ID NO: 2029294 - DNA, 15 bp, Homo sapiens
tatgctgagtatatt

SEQ ID NO: 2029295 - DNA, 15 bp, Homo sapiens
atgctgagtatattt

SEQ ID NO: 2029296 - DNA, 15 bp, Homo sapiens
tgctgagtatatttt

SEQ ID NO: 2029297 - DNA, 15 bp, Homo sapiens
gctgagtatatttta

SEQ ID NO: 2029298 - DNA, 15 bp, Homo sapiens
ctgagtatattttaa

SEQ ID NO: 2029299 - DNA, 15 bp, Homo sapiens
tgagtatattttaag

SEQ ID NO: 2029300 - DNA, 15 bp, Homo sapiens
gagtatattttaagt

SEQ ID NO: 2029301 - DNA, 15 bp, Homo sapiens
agtatattttaagta

SEQ ID NO: 2029302 - DNA, 15 bp, Homo sapiens
gtatattttaagtag

SEQ ID NO: 2029303 - DNA, 15 bp, Homo sapiens
tatattttaagtagg

SEQ ID NO: 2029304 - DNA, 15 bp, Homo sapiens
atattttaagtaggt

SEQ ID NO: 2029305 - DNA, 15 bp, Homo sapiens
tattttaagtaggtt

SEQ ID NO: 2029306 - DNA, 15 bp, Homo sapiens
attttaagtaggttt

SEQ ID NO: 2029307 - DNA, 15 bp, Homo sapiens
ttttaagtaggtttt

SEQ ID NO: 2029308 - DNA, 15 bp, Homo sapiens
tttaagtaggtttta

SEQ ID NO: 2029309 - DNA, 15 bp, Homo sapiens
ttaagtaggttttag

SEQ ID NO: 2029310 - DNA, 15 bp, Homo sapiens
taagtaggttttagt

SEQ ID NO: 2029311 - DNA, 15 bp, Homo sapiens
aagtaggttttagtt

SEQ ID NO: 2029312 - DNA, 15 bp, Homo sapiens
agtaggttttagttg

SEQ ID NO: 2029313 - DNA, 15 bp, Homo sapiens
gtaggttttagttgc

SEQ ID NO: 2029314 - DNA, 15 bp, Homo sapiens
taggttttagttgct

SEQ ID NO: 2029315 - DNA, 15 bp, Homo sapiens
aggttttagttgctt

SEQ ID NO: 2029316 - DNA, 15 bp, Homo sapiens
ggttttagttgcttt

SEQ ID NO: 2029317 - DNA, 15 bp, Homo sapiens
gttttagttgctttg

SEQ ID NO: 2029318 - DNA, 15 bp, Homo sapiens
ttttagttgctttga

SEQ ID NO: 2029319 - DNA, 15 bp, Homo sapiens
tttagttgctttgac

SEQ ID NO: 2029320 - DNA, 15 bp, Homo sapiens
ttagttgctttgaca

SEQ ID NO: 2029321 - DNA, 15 bp, Homo sapiens
tagttgctttgacac

SEQ ID NO: 2029322 - DNA, 15 bp, Homo sapiens
agttgctttgacact

SEQ ID NO: 2029323 - DNA, 15 bp, Homo sapiens
gttgctttgacactc

SEQ ID NO: 2029324 - DNA, 15 bp, Homo sapiens
ttgctttgacactca

SEQ ID NO: 2029325 - DNA, 15 bp, Homo sapiens
tgctttgacactcat

SEQ ID NO: 2029326 - DNA, 15 bp, Homo sapiens
gctttgacactcatt

SEQ ID NO: 2029327 - DNA, 15 bp, Homo sapiens
ctttgacactcattc

SEQ ID NO: 2029328 - DNA, 15 bp, Homo sapiens
tttgacactcattct

SEQ ID NO: 2029329 - DNA, 15 bp, Homo sapiens
ttgacactcattcta

SEQ ID NO: 2029330 - DNA, 15 bp, Homo sapiens
tgacactcattctaa

SEQ ID NO: 2029331 - DNA, 15 bp, Homo sapiens
gacactcattctaaa

SEQ ID NO: 2029332 - DNA, 15 bp, Homo sapiens
acactcattctaaaa

SEQ ID NO: 2029333 - DNA, 15 bp, Homo sapiens
cactcattctaaaaa

SEQ ID NO: 2029334 - DNA, 15 bp, Homo sapiens
actcattctaaaaac

SEQ ID NO: 2029335 - DNA, 15 bp, Homo sapiens
ctcattctaaaaaca

SEQ ID NO: 2029336 - DNA, 15 bp, Homo sapiens
tcattctaaaaacat

SEQ ID NO: 2029337 - DNA, 15 bp, Homo sapiens
cattctaaaaacatg

SEQ ID NO: 2029338 - DNA, 15 bp, Homo sapiens
attctaaaaacatgt

SEQ ID NO: 2029339 - DNA, 15 bp, Homo sapiens
ttctaaaaacatgtt

SEQ ID NO: 2029340 - DNA, 15 bp, Homo sapiens
tctaaaaacatgttt

SEQ ID NO: 2029341 - DNA, 15 bp, Homo sapiens
ctaaaaacatgtttt

SEQ ID NO: 2029342 - DNA, 15 bp, Homo sapiens
aaaaacatgttttca

SEQ ID NO: 2029343 - DNA, 15 bp, Homo sapiens
aaaacatgttttcaa

SEQ ID NO: 2029344 - DNA, 15 bp, Homo sapiens
aaacatgttttcaac

SEQ ID NO: 2029345 - DNA, 15 bp, Homo sapiens
aacatgttttcaaca

SEQ ID NO: 2029346 - DNA, 15 bp, Homo sapiens
acatgttttcaacat

SEQ ID NO: 2029347 - DNA, 15 bp, Homo sapiens
catgttttcaacatg

SEQ ID NO: 2029348 - DNA, 15 bp, Homo sapiens
atgttttcaacatgt

SEQ ID NO: 2029349 - DNA, 15 bp, Homo sapiens
tgttttcaacatgta

SEQ ID NO: 2029350 - DNA, 15 bp, Homo sapiens
gttttcaacatgtac

SEQ ID NO: 2029351 - DNA, 15 bp, Homo sapiens
ttttcaacatgtaca

SEQ ID NO: 2029352 - DNA, 15 bp, Homo sapiens
tttcaacatgtacat

SEQ ID NO: 2029353 - DNA, 15 bp, Homo sapiens
ttcaacatgtacata

SEQ ID NO: 2029354 - DNA, 15 bp, Homo sapiens
tcaacatgtacatag

SEQ ID NO: 2029355 - DNA, 15 bp, Homo sapiens
caacatgtacatagg

SEQ ID NO: 2029356 - DNA, 15 bp, Homo sapiens
aacatgtacataggg

SEQ ID NO: 2029357 - DNA, 15 bp, Homo sapiens
acatgtacatagggt

SEQ ID NO: 2029358 - DNA, 15 bp, Homo sapiens
catgtacatagggtt

SEQ ID NO: 2029359 - DNA, 15 bp, Homo sapiens
atgtacatagggttt

SEQ ID NO: 2029360 - DNA, 15 bp, Homo sapiens
tgtacatagggttta

SEQ ID NO: 2029361 - DNA, 15 bp, Homo sapiens
gtacatagggtttat

SEQ ID NO: 2029362 - DNA, 15 bp, Homo sapiens
tacatagggtttata

SEQ ID NO: 2029363 - DNA, 15 bp, Homo sapiens
acatagggtttatat

SEQ ID NO: 2029364 - DNA, 15 bp, Homo sapiens
catagggtttatata

SEQ ID NO: 2029365 - DNA, 15 bp, Homo sapiens
atagggtttatatat

SEQ ID NO: 2029366 - DNA, 15 bp, Homo sapiens
tagggtttatatatc

SEQ ID NO: 2029367 - DNA, 15 bp, Homo sapiens
agggtttatatatca

SEQ ID NO: 2029368 - DNA, 15 bp, Homo sapiens
gggtttatatatcat

SEQ ID NO: 2029369 - DNA, 15 bp, Homo sapiens
ggtttatatatcatc

SEQ ID NO: 2029370 - DNA, 15 bp, Homo sapiens
gtttatatatcatca

SEQ ID NO: 2029371 - DNA, 15 bp, Homo sapiens
tttatatatcatcag

SEQ ID NO: 2029372 - DNA, 15 bp, Homo sapiens
ttatatatcatcagc

SEQ ID NO: 2029373 - DNA, 15 bp, Homo sapiens
tatatatcatcagct

SEQ ID NO: 2029374 - DNA, 15 bp, Homo sapiens
atatatcatcagcta

SEQ ID NO: 2029375 - DNA, 15 bp, Homo sapiens
tatatcatcagctat

SEQ ID NO: 2029376 - DNA, 15 bp, Homo sapiens
atatcatcagctata

SEQ ID NO: 2029377 - DNA, 15 bp, Homo sapiens
tatcatcagctatat

SEQ ID NO: 2029378 - DNA, 15 bp, Homo sapiens
atcatcagctatatg

SEQ ID NO: 2029379 - DNA, 15 bp, Homo sapiens
tcatcagctatatga

SEQ ID NO: 2029380 - DNA, 15 bp, Homo sapiens
catcagctatatgac

SEQ ID NO: 2029381 - DNA, 15 bp, Homo sapiens
atcagctatatgact

SEQ ID NO: 2029382 - DNA, 15 bp, Homo sapiens
tcagctatatgactt

SEQ ID NO: 2029383 - DNA, 15 bp, Homo sapiens
cagctatatgactta

SEQ ID NO: 2029384 - DNA, 15 bp, Homo sapiens
agctatatgacttat

SEQ ID NO: 2029385 - DNA, 15 bp, Homo sapiens
gctatatgacttatt

SEQ ID NO: 2029386 - DNA, 15 bp, Homo sapiens
ctatatgacttattt

SEQ ID NO: 2029387 - DNA, 15 bp, Homo sapiens
tatatgacttattta

SEQ ID NO: 2029388 - DNA, 15 bp, Homo sapiens
atatgacttatttaa

SEQ ID NO: 2029389 - DNA, 15 bp, Homo sapiens
tatgacttatttaat

SEQ ID NO: 2029390 - DNA, 15 bp, Homo sapiens
atgacttatttaatt

SEQ ID NO: 2029391 - DNA, 15 bp, Homo sapiens
tgacttatttaattt

SEQ ID NO: 2029392 - DNA, 15 bp, Homo sapiens
gacttatttaatttc

SEQ ID NO: 2029393 - DNA, 15 bp, Homo sapiens
acttatttaatttct

SEQ ID NO: 2029394 - DNA, 15 bp, Homo sapiens
cttatttaatttctg

SEQ ID NO: 2029395 - DNA, 15 bp, Homo sapiens
ttatttaatttctgt

SEQ ID NO: 2029396 - DNA, 15 bp, Homo sapiens
tatttaatttctgtt

SEQ ID NO: 2029397 - DNA, 15 bp, Homo sapiens
atttaatttctgtta

SEQ ID NO: 2029398 - DNA, 15 bp, Homo sapiens
tttaatttctgttac

SEQ ID NO: 2029399 - DNA, 15 bp, Homo sapiens
ttaatttctgttaca

SEQ ID NO: 2029400 - DNA, 15 bp, Homo sapiens
taatttctgttacaa

SEQ ID NO: 2029401 - DNA, 15 bp, Homo sapiens
aatttctgttacaat

SEQ ID NO: 2029402 - DNA, 15 bp, Homo sapiens
atttctgttacaatt

SEQ ID NO: 2029403 - DNA, 15 bp, Homo sapiens
tttctgttacaatta

SEQ ID NO: 2029404 - DNA, 15 bp, Homo sapiens
ttctgttacaattaa

SEQ ID NO: 2029405 - DNA, 15 bp, Homo sapiens
tctgttacaattaaa

SEQ ID NO: 2029406 - DNA, 15 bp, Homo sapiens
ctgttacaattaaaa

SEQ ID NO: 2029407 - DNA, 15 bp, Homo sapiens
tgttacaattaaaag

SEQ ID NO: 2029408 - DNA, 15 bp, Homo sapiens
gttacaattaaaaga

SEQ ID NO: 2029409 - DNA, 15 bp, Homo sapiens
ttacaattaaaagat

SEQ ID NO: 2029410 - DNA, 15 bp, Homo sapiens
tacaattaaaagata

SEQ ID NO: 2029411 - DNA, 15 bp, Homo sapiens
acaattaaaagatac

SEQ ID NO: 2029412 - DNA, 15 bp, Homo sapiens
caattaaaagatacc

SEQ ID NO: 2029413 - DNA, 15 bp, Homo sapiens
aattaaaagatacct

SEQ ID NO: 2029414 - DNA, 15 bp, Homo sapiens
attaaaagatacctt

SEQ ID NO: 2029415 - DNA, 15 bp, Homo sapiens
ttaaaagataccttg

SEQ ID NO: 2029416 - DNA, 15 bp, Homo sapiens
taaaagataccttgc

SEQ ID NO: 2029417 - DNA, 15 bp, Homo sapiens
aaaagataccttgct

SEQ ID NO: 2029418 - DNA, 15 bp, Homo sapiens
aaagataccttgctt

SEQ ID NO: 2029419 - DNA, 15 bp, Homo sapiens
aagataccttgcttg

SEQ ID NO: 2029420 - DNA, 15 bp, Homo sapiens
agataccttgcttgt

SEQ ID NO: 2029421 - DNA, 15 bp, Homo sapiens
gataccttgcttgtt

SEQ ID NO: 2029422 - DNA, 15 bp, Homo sapiens
ataccttgcttgtta

SEQ ID NO: 2029423 - DNA, 15 bp, Homo sapiens
taccttgcttgttat

SEQ ID NO: 2029424 - DNA, 15 bp, Homo sapiens
accttgcttgttata

SEQ ID NO: 2029425 - DNA, 15 bp, Homo sapiens
ccttgcttgttataa

SEQ ID NO: 2029426 - DNA, 15 bp, Homo sapiens
cttgcttgttataag

SEQ ID NO: 2029427 - DNA, 15 bp, Homo sapiens
ttgcttgttataaga

SEQ ID NO: 2029428 - DNA, 15 bp, Homo sapiens
tgcttgttataagag

SEQ ID NO: 2029429 - DNA, 15 bp, Homo sapiens
gcttgttataagagt

SEQ ID NO: 2029430 - DNA, 15 bp, Homo sapiens
cttgttataagagta

SEQ ID NO: 2029431 - DNA, 15 bp, Homo sapiens
ttgttataagagtaa

SEQ ID NO: 2029432 - DNA, 15 bp, Homo sapiens
tgttataagagtaaa

SEQ ID NO: 2029433 - DNA, 15 bp, Homo sapiens
gttataagagtaaaa

SEQ ID NO: 2029434 - DNA, 15 bp, Homo sapiens
ttataagagtaaaat

SEQ ID NO: 2029435 - DNA, 15 bp, Homo sapiens
tataagagtaaaatt

SEQ ID NO: 2029436 - DNA, 15 bp, Homo sapiens
ataagagtaaaattt

SEQ ID NO: 2029437 - DNA, 15 bp, Homo sapiens
taagagtaaaatttg

SEQ ID NO: 2029438 - DNA, 15 bp, Homo sapiens
aagagtaaaatttga

SEQ ID NO: 2029439 - DNA, 15 bp, Homo sapiens
agagtaaaatttgat

SEQ ID NO: 2029440 - DNA, 15 bp, Homo sapiens
gagtaaaatttgatt

SEQ ID NO: 2029441 - DNA, 15 bp, Homo sapiens
agtaaaatttgattt

SEQ ID NO: 2029442 - DNA, 15 bp, Homo sapiens
gtaaaatttgatttg

SEQ ID NO: 2029443 - DNA, 15 bp, Homo sapiens
taaaatttgatttgt

SEQ ID NO: 2029444 - DNA, 15 bp, Homo sapiens
aaaatttgatttgtt

SEQ ID NO: 2029445 - DNA, 15 bp, Homo sapiens
aaatttgatttgttg

SEQ ID NO: 2029446 - DNA, 15 bp, Homo sapiens
aatttgatttgttgc

SEQ ID NO: 2029447 - DNA, 15 bp, Homo sapiens
atttgatttgttgca

SEQ ID NO: 2029448 - DNA, 15 bp, Homo sapiens
tttgatttgttgcag

SEQ ID NO: 2029449 - DNA, 15 bp, Homo sapiens
ttgatttgttgcagg

SEQ ID NO: 2029450 - DNA, 15 bp, Homo sapiens
tgatttgttgcaggt

SEQ ID NO: 2029451 - DNA, 15 bp, Homo sapiens
gatttgttgcaggtt

SEQ ID NO: 2029452 - DNA, 15 bp, Homo sapiens
atttgttgcaggttt

SEQ ID NO: 2029453 - DNA, 15 bp, Homo sapiens
tttgttgcaggtttt

SEQ ID NO: 2029454 - DNA, 15 bp, Homo sapiens
ttgttgcaggttttg

SEQ ID NO: 2029455 - DNA, 15 bp, Homo sapiens
tgttgcaggttttgg

SEQ ID NO: 2029456 - DNA, 15 bp, Homo sapiens
gttgcaggttttggt

SEQ ID NO: 2029457 - DNA, 15 bp, Homo sapiens
ttgcaggttttggtt

SEQ ID NO: 2029458 - DNA, 15 bp, Homo sapiens
tgcaggttttggttt

SEQ ID NO: 2029459 - DNA, 15 bp, Homo sapiens
gcaggttttggtttt

SEQ ID NO: 2029460 - DNA, 15 bp, Homo sapiens
caggttttggtttta

SEQ ID NO: 2029461 - DNA, 15 bp, Homo sapiens
aggttttggttttaa

SEQ ID NO: 2029462 - DNA, 15 bp, Homo sapiens
ggttttggttttaat

SEQ ID NO: 2029463 - DNA, 15 bp, Homo sapiens
gttttggttttaatg

SEQ ID NO: 2029464 - DNA, 15 bp, Homo sapiens
ttttggttttaatgg

SEQ ID NO: 2029465 - DNA, 15 bp, Homo sapiens
tttggttttaatggc

SEQ ID NO: 2029466 - DNA, 15 bp, Homo sapiens
ttggttttaatggct

SEQ ID NO: 2029467 - DNA, 15 bp, Homo sapiens
tggttttaatggctt

SEQ ID NO: 2029468 - DNA, 15 bp, Homo sapiens
ggttttaatggcttg

SEQ ID NO: 2029469 - DNA, 15 bp, Homo sapiens
gttttaatggcttgt

SEQ ID NO: 2029470 - DNA, 15 bp, Homo sapiens
ttttaatggcttgtg

SEQ ID NO: 2029471 - DNA, 15 bp, Homo sapiens
tttaatggcttgtgg

SEQ ID NO: 2029472 - DNA, 15 bp, Homo sapiens
ttaatggcttgtggc

SEQ ID NO: 2029473 - DNA, 15 bp, Homo sapiens
taatggcttgtggcg

SEQ ID NO: 2029474 - DNA, 15 bp, Homo sapiens
aatggcttgtggcgg

SEQ ID NO: 2029475 - DNA, 15 bp, Homo sapiens
atggcttgtggcggt

SEQ ID NO: 2029476 - DNA, 15 bp, Homo sapiens
tggcttgtggcggtt

SEQ ID NO: 2029477 - DNA, 15 bp, Homo sapiens
ggcttgtggcggttt

SEQ ID NO: 2029478 - DNA, 15 bp, Homo sapiens
gcttgtggcggtttg

SEQ ID NO: 2029479 - DNA, 15 bp, Homo sapiens
cttgtggcggtttgc

SEQ ID NO: 2029480 - DNA, 15 bp, Homo sapiens
ttgtggcggtttgca

SEQ ID NO: 2029481 - DNA, 15 bp, Homo sapiens
tgtggcggtttgcag

SEQ ID NO: 2029482 - DNA, 15 bp, Homo sapiens
gtggcggtttgcagg

SEQ ID NO: 2029483 - DNA, 15 bp, Homo sapiens
tggcggtttgcagga

SEQ ID NO: 2029484 - DNA, 15 bp, Homo sapiens
ggcggtttgcaggac

SEQ ID NO: 2029485 - DNA, 15 bp, Homo sapiens
gcggtttgcaggacc

SEQ ID NO: 2029486 - DNA, 15 bp, Homo sapiens
cggtttgcaggaccg

SEQ ID NO: 2029487 - DNA, 15 bp, Homo sapiens
ggtttgcaggaccgt

SEQ ID NO: 2029488 - DNA, 15 bp, Homo sapiens
gtttgcaggaccgtt

SEQ ID NO: 2029489 - DNA, 15 bp, Homo sapiens
tttgcaggaccgttt

SEQ ID NO: 2029490 - DNA, 15 bp, Homo sapiens
ttgcaggaccgtttt

SEQ ID NO: 2029491 - DNA, 15 bp, Homo sapiens
tgcaggaccgttttc

SEQ ID NO: 2029492 - DNA, 15 bp, Homo sapiens
gcaggaccgttttca

SEQ ID NO: 2029493 - DNA, 15 bp, Homo sapiens
caggaccgttttcaa

SEQ ID NO: 2029494 - DNA, 15 bp, Homo sapiens
aggaccgttttcaaa

SEQ ID NO: 2029495 - DNA, 15 bp, Homo sapiens
ggaccgttttcaaag

SEQ ID NO: 2029496 - DNA, 15 bp, Homo sapiens
gaccgttttcaaagg

SEQ ID NO: 2029497 - DNA, 15 bp, Homo sapiens
accgttttcaaaggt

SEQ ID NO: 2029498 - DNA, 15 bp, Homo sapiens
ccgttttcaaaggta

SEQ ID NO: 2029499 - DNA, 15 bp, Homo sapiens
cgttttcaaaggtaa

SEQ ID NO: 2029500 - DNA, 15 bp, Homo sapiens
gttttcaaaggtaag

SEQ ID NO: 2029501 - DNA, 15 bp, Homo sapiens
ttttcaaaggtaaga

SEQ ID NO: 2029502 - DNA, 15 bp, Homo sapiens
tttcaaaggtaagaa

SEQ ID NO: 2029503 - DNA, 15 bp, Homo sapiens
ttcaaaggtaagaaa

SEQ ID NO: 2029504 - DNA, 15 bp, Homo sapiens
tcaaaggtaagaaaa

SEQ ID NO: 2029505 - DNA, 15 bp, Homo sapiens
caaaggtaagaaaat

SEQ ID NO: 2029506 - DNA, 15 bp, Homo sapiens
aaaggtaagaaaata

SEQ ID NO: 2029507 - DNA, 15 bp, Homo sapiens
aaggtaagaaaatat

SEQ ID NO: 2029508 - DNA, 15 bp, Homo sapiens
aggtaagaaaatata

SEQ ID NO: 2029509 - DNA, 15 bp, Homo sapiens
ggtaagaaaatatat

SEQ ID NO: 2029510 - DNA, 15 bp, Homo sapiens
gtaagaaaatatatt

SEQ ID NO: 2029511 - DNA, 15 bp, Homo sapiens
taagaaaatatattt

SEQ ID NO: 2029512 - DNA, 15 bp, Homo sapiens
aagaaaatatatttt

SEQ ID NO: 2029513 - DNA, 15 bp, Homo sapiens
agaaaatatattttt

SEQ ID NO: 2029514 - DNA, 15 bp, Homo sapiens
gaaaatatatttttc

SEQ ID NO: 2029515 - DNA, 15 bp, Homo sapiens
aaaatatatttttct

SEQ ID NO: 2029516 - DNA, 15 bp, Homo sapiens
aaatatatttttctc

SEQ ID NO: 2029517 - DNA, 15 bp, Homo sapiens
aatatatttttctct

SEQ ID NO: 2029518 - DNA, 15 bp, Homo sapiens
atatatttttctcta

SEQ ID NO: 2029519 - DNA, 15 bp, Homo sapiens
tatatttttctctaa

SEQ ID NO: 2029520 - DNA, 15 bp, Homo sapiens
atatttttctctaac

SEQ ID NO: 2029521 - DNA, 15 bp, Homo sapiens
tatttttctctaact

SEQ ID NO: 2029522 - DNA, 15 bp, Homo sapiens
atttttctctaactt

SEQ ID NO: 2029523 - DNA, 15 bp, Homo sapiens
tttttctctaacttt

SEQ ID NO: 2029524 - DNA, 15 bp, Homo sapiens
ttttctctaactttt

SEQ ID NO: 2029525 - DNA, 15 bp, Homo sapiens
tttctctaacttttg

SEQ ID NO: 2029526 - DNA, 15 bp, Homo sapiens
ttctctaacttttgg

SEQ ID NO: 2029527 - DNA, 15 bp, Homo sapiens
tctctaacttttggc

SEQ ID NO: 2029528 - DNA, 15 bp, Homo sapiens
ctctaacttttggca

SEQ ID NO: 2029529 - DNA, 15 bp, Homo sapiens
tctaacttttggcaa

SEQ ID NO: 2029530 - DNA, 15 bp, Homo sapiens
ctaacttttggcaaa

SEQ ID NO: 2029531 - DNA, 15 bp, Homo sapiens
taacttttggcaaaa

SEQ ID NO: 2029532 - DNA, 15 bp, Homo sapiens
aacttttggcaaaat

SEQ ID NO: 2029533 - DNA, 15 bp, Homo sapiens
acttttggcaaaatg

SEQ ID NO: 2029534 - DNA, 15 bp, Homo sapiens
cttttggcaaaatga

SEQ ID NO: 2029535 - DNA, 15 bp, Homo sapiens
ttttggcaaaatgaa

SEQ ID NO: 2029536 - DNA, 15 bp, Homo sapiens
tttggcaaaatgaag

SEQ ID NO: 2029537 - DNA, 15 bp, Homo sapiens
ttggcaaaatgaagg

SEQ ID NO: 2029538 - DNA, 15 bp, Homo sapiens
tggcaaaatgaaggt

SEQ ID NO: 2029539 - DNA, 15 bp, Homo sapiens
ggcaaaatgaaggtt

SEQ ID NO: 2029540 - DNA, 15 bp, Homo sapiens
gcaaaatgaaggttt

SEQ ID NO: 2029541 - DNA, 15 bp, Homo sapiens
caaaatgaaggtttc

SEQ ID NO: 2029542 - DNA, 15 bp, Homo sapiens
aaaatgaaggtttct

SEQ ID NO: 2029543 - DNA, 15 bp, Homo sapiens
aaatgaaggtttctg

SEQ ID NO: 2029544 - DNA, 15 bp, Homo sapiens
aatgaaggtttctgt

SEQ ID NO: 2029545 - DNA, 15 bp, Homo sapiens
atgaaggtttctgtt

SEQ ID NO: 2029546 - DNA, 15 bp, Homo sapiens
tgaaggtttctgttc

SEQ ID NO: 2029547 - DNA, 15 bp, Homo sapiens
gaaggtttctgttca

SEQ ID NO: 2029548 - DNA, 15 bp, Homo sapiens
aaggtttctgttcaa

SEQ ID NO: 2029549 - DNA, 15 bp, Homo sapiens
aggtttctgttcaaa

SEQ ID NO: 2029550 - DNA, 15 bp, Homo sapiens
ggtttctgttcaaat

SEQ ID NO: 2029551 - DNA, 15 bp, Homo sapiens
gtttctgttcaaatt

SEQ ID NO: 2029552 - DNA, 15 bp, Homo sapiens
tttctgttcaaatta

SEQ ID NO: 2029553 - DNA, 15 bp, Homo sapiens
ttctgttcaaattag

SEQ ID NO: 2029554 - DNA, 15 bp, Homo sapiens
tctgttcaaattagt

SEQ ID NO: 2029555 - DNA, 15 bp, Homo sapiens
ctgttcaaattagta

SEQ ID NO: 2029556 - DNA, 15 bp, Homo sapiens
tgttcaaattagtat

SEQ ID NO: 2029557 - DNA, 15 bp, Homo sapiens
gttcaaattagtatg

SEQ ID NO: 2029558 - DNA, 15 bp, Homo sapiens
ttcaaattagtatgc

SEQ ID NO: 2029559 - DNA, 15 bp, Homo sapiens
tcaaattagtatgcc

SEQ ID NO: 2029560 - DNA, 15 bp, Homo sapiens
caaattagtatgcct

SEQ ID NO: 2029561 - DNA, 15 bp, Homo sapiens
aaattagtatgcctg

SEQ ID NO: 2029562 - DNA, 15 bp, Homo sapiens
aattagtatgcctgc

SEQ ID NO: 2029563 - DNA, 15 bp, Homo sapiens
attagtatgcctgct

SEQ ID NO: 2029564 - DNA, 15 bp, Homo sapiens
ttagtatgcctgctt

SEQ ID NO: 2029565 - DNA, 15 bp, Homo sapiens
tagtatgcctgcttt

SEQ ID NO: 2029566 - DNA, 15 bp, Homo sapiens
agtatgcctgcttta

SEQ ID NO: 2029567 - DNA, 15 bp, Homo sapiens
gtatgcctgctttaa

SEQ ID NO: 2029568 - DNA, 15 bp, Homo sapiens
tatgcctgctttaag

SEQ ID NO: 2029569 - DNA, 15 bp, Homo sapiens
atgcctgctttaaga

SEQ ID NO: 2029570 - DNA, 15 bp, Homo sapiens
tgcctgctttaagaa

SEQ ID NO: 2029571 - DNA, 15 bp, Homo sapiens
gcctgctttaagaac

SEQ ID NO: 2029572 - DNA, 15 bp, Homo sapiens
cctgctttaagaaca

SEQ ID NO: 2029573 - DNA, 15 bp, Homo sapiens
ctgctttaagaacac

SEQ ID NO: 2029574 - DNA, 15 bp, Homo sapiens
tgctttaagaacaca

SEQ ID NO: 2029575 - DNA, 15 bp, Homo sapiens
gctttaagaacacac

SEQ ID NO: 2029576 - DNA, 15 bp, Homo sapiens
ctttaagaacacaca

SEQ ID NO: 2029577 - DNA, 15 bp, Homo sapiens
tttaagaacacacaa

SEQ ID NO: 2029578 - DNA, 15 bp, Homo sapiens
ttaagaacacacaat

SEQ ID NO: 2029579 - DNA, 15 bp, Homo sapiens
taagaacacacaatg

SEQ ID NO: 2029580 - DNA, 15 bp, Homo sapiens
aagaacacacaatgt

SEQ ID NO: 2029581 - DNA, 15 bp, Homo sapiens
agaacacacaatgtg

SEQ ID NO: 2029582 - DNA, 15 bp, Homo sapiens
gaacacacaatgtgc

SEQ ID NO: 2029583 - DNA, 15 bp, Homo sapiens
aacacacaatgtgct

SEQ ID NO: 2029584 - DNA, 15 bp, Homo sapiens
acacacaatgtgctg

SEQ ID NO: 2029585 - DNA, 15 bp, Homo sapiens
cacacaatgtgctga

SEQ ID NO: 2029586 - DNA, 15 bp, Homo sapiens
acacaatgtgctgaa

SEQ ID NO: 2029587 - DNA, 15 bp, Homo sapiens
cacaatgtgctgaaa

SEQ ID NO: 2029588 - DNA, 15 bp, Homo sapiens
acaatgtgctgaaaa

SEQ ID NO: 2029589 - DNA, 15 bp, Homo sapiens
caatgtgctgaaaac

SEQ ID NO: 2029590 - DNA, 15 bp, Homo sapiens
aatgtgctgaaaacc

SEQ ID NO: 2029591 - DNA, 15 bp, Homo sapiens
atgtgctgaaaacca

SEQ ID NO: 2029592 - DNA, 15 bp, Homo sapiens
tgtgctgaaaaccag

SEQ ID NO: 2029593 - DNA, 15 bp, Homo sapiens
gtgctgaaaaccaga

SEQ ID NO: 2029594 - DNA, 15 bp, Homo sapiens
tgctgaaaaccagaa

SEQ ID NO: 2029595 - DNA, 15 bp, Homo sapiens
gctgaaaaccagaaa

SEQ ID NO: 2029596 - DNA, 15 bp, Homo sapiens
ctgaaaaccagaaaa

SEQ ID NO: 2029597 - DNA, 15 bp, Homo sapiens
tgaaaaccagaaaaa

SEQ ID NO: 2029598 - DNA, 15 bp, Homo sapiens
gaaaaccagaaaaat

SEQ ID NO: 2029599 - DNA, 15 bp, Homo sapiens
aaaaccagaaaaata

SEQ ID NO: 2029600 - DNA, 15 bp, Homo sapiens
aaaccagaaaaataa

SEQ ID NO: 2029601 - DNA, 15 bp, Homo sapiens
aaccagaaaaataat

SEQ ID NO: 2029602 - DNA, 15 bp, Homo sapiens
accagaaaaataatt

SEQ ID NO: 2029603 - DNA, 15 bp, Homo sapiens
ccagaaaaataattc

SEQ ID NO: 2029604 - DNA, 15 bp, Homo sapiens
cagaaaaataattca

SEQ ID NO: 2029605 - DNA, 15 bp, Homo sapiens
agaaaaataattcac

SEQ ID NO: 2029606 - DNA, 15 bp, Homo sapiens
gaaaaataattcaca

SEQ ID NO: 2029607 - DNA, 15 bp, Homo sapiens
aaaaataattcacaa

SEQ ID NO: 2029608 - DNA, 15 bp, Homo sapiens
aaaataattcacaat

SEQ ID NO: 2029609 - DNA, 15 bp, Homo sapiens
aaataattcacaata

SEQ ID NO: 2029610 - DNA, 15 bp, Homo sapiens
aataattcacaataa

SEQ ID NO: 2029611 - DNA, 15 bp, Homo sapiens
ataattcacaataaa

SEQ ID NO: 2029612 - DNA, 15 bp, Homo sapiens
taattcacaataaac

SEQ ID NO: 2029613 - DNA, 15 bp, Homo sapiens
aattcacaataaaca

SEQ ID NO: 2029614 - DNA, 15 bp, Homo sapiens
attcacaataaacac

SEQ ID NO: 2029615 - DNA, 15 bp, Homo sapiens
ttcacaataaacaca

SEQ ID NO: 2029616 - DNA, 15 bp, Homo sapiens
tcacaataaacacat

SEQ ID NO: 2029617 - DNA, 15 bp, Homo sapiens
cacaataaacacata

SEQ ID NO: 2029618 - DNA, 15 bp, Homo sapiens
acaataaacacatat

SEQ ID NO: 2029619 - DNA, 15 bp, Homo sapiens
caataaacacatatg

SEQ ID NO: 2029620 - DNA, 15 bp, Homo sapiens
aataaacacatatgt

SEQ ID NO: 2029621 - DNA, 15 bp, Homo sapiens
ataaacacatatgtt

SEQ ID NO: 2029622 - DNA, 15 bp, Homo sapiens
taaacacatatgtta

SEQ ID NO: 2029623 - DNA, 15 bp, Homo sapiens
aaacacatatgttac

SEQ ID NO: 2029624 - DNA, 15 bp, Homo sapiens
aacacatatgttact

SEQ ID NO: 2029625 - DNA, 15 bp, Homo sapiens
acacatatgttactt

SEQ ID NO: 2029626 - DNA, 15 bp, Homo sapiens
cacatatgttacttt

SEQ ID NO: 2029627 - DNA, 15 bp, Homo sapiens
catatgttactttta

SEQ ID NO: 2029628 - DNA, 15 bp, Homo sapiens
atatgttacttttat

SEQ ID NO: 2029629 - DNA, 15 bp, Homo sapiens
tatgttacttttata

SEQ ID NO: 2029630 - DNA, 15 bp, Homo sapiens
atgttacttttataa

SEQ ID NO: 2029631 - DNA, 15 bp, Homo sapiens
tgttacttttataaa

SEQ ID NO: 2029632 - DNA, 15 bp, Homo sapiens
gttacttttataaaa

SEQ ID NO: 2029633 - DNA, 15 bp, Homo sapiens
ttacttttataaaaa

SEQ ID NO: 2029634 - DNA, 15 bp, Homo sapiens
tacttttataaaaag

SEQ ID NO: 2029635 - DNA, 15 bp, Homo sapiens
acttttataaaaagt

SEQ ID NO: 2029636 - DNA, 15 bp, Homo sapiens
cttttataaaaagtt

SEQ ID NO: 2029637 - DNA, 15 bp, Homo sapiens
ttttataaaaagttt

SEQ ID NO: 2029638 - DNA, 15 bp, Homo sapiens
tttataaaaagtttc

SEQ ID NO: 2029639 - DNA, 15 bp, Homo sapiens
ttataaaaagtttct

SEQ ID NO: 2029640 - DNA, 15 bp, Homo sapiens
tataaaaagtttctc

SEQ ID NO: 2029641 - DNA, 15 bp, Homo sapiens
ataaaaagtttctca

SEQ ID NO: 2029642 - DNA, 15 bp, Homo sapiens
taaaaagtttctcat

SEQ ID NO: 2029643 - DNA, 15 bp, Homo sapiens
aaaaagtttctcatc

SEQ ID NO: 2029644 - DNA, 15 bp, Homo sapiens
aaaagtttctcatca

SEQ ID NO: 2029645 - DNA, 15 bp, Homo sapiens
aaagtttctcatcac

SEQ ID NO: 2029646 - DNA, 15 bp, Homo sapiens
aagtttctcatcaca

SEQ ID NO: 2029647 - DNA, 15 bp, Homo sapiens
agtttctcatcacaa

SEQ ID NO: 2029648 - DNA, 15 bp, Homo sapiens
gtttctcatcacaag

SEQ ID NO: 2029649 - DNA, 15 bp, Homo sapiens
tttctcatcacaagg

SEQ ID NO: 2029650 - DNA, 15 bp, Homo sapiens
ttctcatcacaaggt

SEQ ID NO: 2029651 - DNA, 15 bp, Homo sapiens
tctcatcacaaggtt

SEQ ID NO: 2029652 - DNA, 15 bp, Homo sapiens
ctcatcacaaggttt

SEQ ID NO: 2029653 - DNA, 15 bp, Homo sapiens
tcatcacaaggtttt

SEQ ID NO: 2029654 - DNA, 15 bp, Homo sapiens
catcacaaggttttt

SEQ ID NO: 2029655 - DNA, 15 bp, Homo sapiens
atcacaaggtttttt

SEQ ID NO: 2029656 - DNA, 15 bp, Homo sapiens
tcacaaggttttttt

SEQ ID NO: 2029657 - DNA, 15 bp, Homo sapiens
cacaaggtttttttc

SEQ ID NO: 2029658 - DNA, 15 bp, Homo sapiens
acaaggtttttttcc

SEQ ID NO: 2029659 - DNA, 15 bp, Homo sapiens
caaggtttttttcca

SEQ ID NO: 2029660 - DNA, 15 bp, Homo sapiens
aaggtttttttccag

SEQ ID NO: 2029661 - DNA, 15 bp, Homo sapiens
aggtttttttccagg

SEQ ID NO: 2029662 - DNA, 15 bp, Homo sapiens
ggtttttttccagga

SEQ ID NO: 2029663 - DNA, 15 bp, Homo sapiens
gtttttttccaggag

SEQ ID NO: 2029664 - DNA, 15 bp, Homo sapiens
tttttttccaggagg

SEQ ID NO: 2029665 - DNA, 15 bp, Homo sapiens
ttttttccaggaggc

SEQ ID NO: 2029666 - DNA, 15 bp, Homo sapiens
tttttccaggaggca

SEQ ID NO: 2029667 - DNA, 15 bp, Homo sapiens
ttttccaggaggcag

SEQ ID NO: 2029668 - DNA, 15 bp, Homo sapiens
tttccaggaggcagc

SEQ ID NO: 2029669 - DNA, 15 bp, Homo sapiens
ttccaggaggcagca

SEQ ID NO: 2029670 - DNA, 15 bp, Homo sapiens
tccaggaggcagcat

SEQ ID NO: 2029671 - DNA, 15 bp, Homo sapiens
ccaggaggcagcatg

SEQ ID NO: 2029672 - DNA, 15 bp, Homo sapiens
caggaggcagcatgg

SEQ ID NO: 2029673 - DNA, 15 bp, Homo sapiens
aggaggcagcatggt

SEQ ID NO: 2029674 - DNA, 15 bp, Homo sapiens
ggaggcagcatggtg

SEQ ID NO: 2029675 - DNA, 15 bp, Homo sapiens
gaggcagcatggtgt

SEQ ID NO: 2029676 - DNA, 15 bp, Homo sapiens
aggcagcatggtgtt

SEQ ID NO: 2029677 - DNA, 15 bp, Homo sapiens
ggcagcatggtgttg

SEQ ID NO: 2029678 - DNA, 15 bp, Homo sapiens
gcagcatggtgttgg

SEQ ID NO: 2029679 - DNA, 15 bp, Homo sapiens
cagcatggtgttggg

SEQ ID NO: 2029680 - DNA, 15 bp, Homo sapiens
agcatggtgttgggg

SEQ ID NO: 2029681 - DNA, 15 bp, Homo sapiens
atggtgttggggtgt

SEQ ID NO: 2029682 - DNA, 15 bp, Homo sapiens
tggtgttggggtgtg

SEQ ID NO: 2029683 - DNA, 15 bp, Homo sapiens
ggtgttggggtgtgt

SEQ ID NO: 2029684 - DNA, 15 bp, Homo sapiens
gtgttggggtgtgtg

SEQ ID NO: 2029685 - DNA, 15 bp, Homo sapiens
tgttggggtgtgtgt

SEQ ID NO: 2029686 - DNA, 15 bp, Homo sapiens
gttggggtgtgtgta

SEQ ID NO: 2029687 - DNA, 15 bp, Homo sapiens
ttggggtgtgtgtat

SEQ ID NO: 2029688 - DNA, 15 bp, Homo sapiens
tggggtgtgtgtatt

SEQ ID NO: 2029689 - DNA, 15 bp, Homo sapiens
ggggtgtgtgtattc

SEQ ID NO: 2029690 - DNA, 15 bp, Homo sapiens
gggtgtgtgtattca

SEQ ID NO: 2029691 - DNA, 15 bp, Homo sapiens
ggtgtgtgtattcac

SEQ ID NO: 2029692 - DNA, 15 bp, Homo sapiens
gtgtgtgtattcact

SEQ ID NO: 2029693 - DNA, 15 bp, Homo sapiens
tgtgtgtattcactt

SEQ ID NO: 2029694 - DNA, 15 bp, Homo sapiens
gtgtgtattcacttt

SEQ ID NO: 2029695 - DNA, 15 bp, Homo sapiens
tgtgtattcactttt

SEQ ID NO: 2029696 - DNA, 15 bp, Homo sapiens
gtgtattcactttta

SEQ ID NO: 2029697 - DNA, 15 bp, Homo sapiens
tgtattcacttttac

SEQ ID NO: 2029698 - DNA, 15 bp, Homo sapiens
gtattcacttttaca

SEQ ID NO: 2029699 - DNA, 15 bp, Homo sapiens
tattcacttttacaa

SEQ ID NO: 2029700 - DNA, 15 bp, Homo sapiens
attcacttttacaaa

SEQ ID NO: 2029701 - DNA, 15 bp, Homo sapiens
ttcacttttacaaac

SEQ ID NO: 2029702 - DNA, 15 bp, Homo sapiens
tcacttttacaaaca

SEQ ID NO: 2029703 - DNA, 15 bp, Homo sapiens
cacttttacaaacaa

SEQ ID NO: 2029704 - DNA, 15 bp, Homo sapiens
acttttacaaacaaa

SEQ ID NO: 2029705 - DNA, 15 bp, Homo sapiens
cttttacaaacaaag

SEQ ID NO: 2029706 - DNA, 15 bp, Homo sapiens
ttttacaaacaaagt

SEQ ID NO: 2029707 - DNA, 15 bp, Homo sapiens
tttacaaacaaagtc

SEQ ID NO: 2029708 - DNA, 15 bp, Homo sapiens
ttacaaacaaagtca

SEQ ID NO: 2029709 - DNA, 15 bp, Homo sapiens
tacaaacaaagtcaa

SEQ ID NO: 2029710 - DNA, 15 bp, Homo sapiens
acaaacaaagtcaac

SEQ ID NO: 2029711 - DNA, 15 bp, Homo sapiens
caaacaaagtcaact

SEQ ID NO: 2029712 - DNA, 15 bp, Homo sapiens
aaacaaagtcaactt

SEQ ID NO: 2029713 - DNA, 15 bp, Homo sapiens
aacaaagtcaactta

SEQ ID NO: 2029714 - DNA, 15 bp, Homo sapiens
acaaagtcaacttat

SEQ ID NO: 2029715 - DNA, 15 bp, Homo sapiens
caaagtcaacttatg

SEQ ID NO: 2029716 - DNA, 15 bp, Homo sapiens
aaagtcaacttatga

SEQ ID NO: 2029717 - DNA, 15 bp, Homo sapiens
aagtcaacttatgat

SEQ ID NO: 2029718 - DNA, 15 bp, Homo sapiens
agtcaacttatgatc

SEQ ID NO: 2029719 - DNA, 15 bp, Homo sapiens
gtcaacttatgatca

SEQ ID NO: 2029720 - DNA, 15 bp, Homo sapiens
tcaacttatgatcaa

SEQ ID NO: 2029721 - DNA, 15 bp, Homo sapiens
caacttatgatcaat

SEQ ID NO: 2029722 - DNA, 15 bp, Homo sapiens
aacttatgatcaatt

SEQ ID NO: 2029723 - DNA, 15 bp, Homo sapiens
acttatgatcaattt

SEQ ID NO: 2029724 - DNA, 15 bp, Homo sapiens
cttatgatcaatttt

SEQ ID NO: 2029725 - DNA, 15 bp, Homo sapiens
ttatgatcaattttt

SEQ ID NO: 2029726 - DNA, 15 bp, Homo sapiens
tatgatcaatttttc

SEQ ID NO: 2029727 - DNA, 15 bp, Homo sapiens
atgatcaatttttca

SEQ ID NO: 2029728 - DNA, 15 bp, Homo sapiens
tgatcaatttttcag

SEQ ID NO: 2029729 - DNA, 15 bp, Homo sapiens
gatcaatttttcaga

SEQ ID NO: 2029730 - DNA, 15 bp, Homo sapiens
atcaatttttcagaa

SEQ ID NO: 2029731 - DNA, 15 bp, Homo sapiens
tcaatttttcagaag

SEQ ID NO: 2029732 - DNA, 15 bp, Homo sapiens
caatttttcagaaga

SEQ ID NO: 2029733 - DNA, 15 bp, Homo sapiens
aatttttcagaagag

SEQ ID NO: 2029734 - DNA, 15 bp, Homo sapiens
atttttcagaagagt

SEQ ID NO: 2029735 - DNA, 15 bp, Homo sapiens
tttttcagaagagta

SEQ ID NO: 2029736 - DNA, 15 bp, Homo sapiens
ttttcagaagagtat

SEQ ID NO: 2029737 - DNA, 15 bp, Homo sapiens
tttcagaagagtatg

SEQ ID NO: 2029738 - DNA, 15 bp, Homo sapiens
ttcagaagagtatga

SEQ ID NO: 2029739 - DNA, 15 bp, Homo sapiens
tcagaagagtatgat

SEQ ID NO: 2029740 - DNA, 15 bp, Homo sapiens
cagaagagtatgata

SEQ ID NO: 2029741 - DNA, 15 bp, Homo sapiens
agaagagtatgataa

SEQ ID NO: 2029742 - DNA, 15 bp, Homo sapiens
gaagagtatgataaa

SEQ ID NO: 2029743 - DNA, 15 bp, Homo sapiens
aagagtatgataaac

SEQ ID NO: 2029744 - DNA, 15 bp, Homo sapiens
agagtatgataaacc

SEQ ID NO: 2029745 - DNA, 15 bp, Homo sapiens
gagtatgataaacct

SEQ ID NO: 2029746 - DNA, 15 bp, Homo sapiens
agtatgataaacctc

SEQ ID NO: 2029747 - DNA, 15 bp, Homo sapiens
gtatgataaacctct

SEQ ID NO: 2029748 - DNA, 15 bp, Homo sapiens
tatgataaacctctg

SEQ ID NO: 2029749 - DNA, 15 bp, Homo sapiens
atgataaacctctgt

SEQ ID NO: 2029750 - DNA, 15 bp, Homo sapiens
tgataaacctctgtg

SEQ ID NO: 2029751 - DNA, 15 bp, Homo sapiens
gataaacctctgtga

SEQ ID NO: 2029752 - DNA, 15 bp, Homo sapiens
ataaacctctgtgat

SEQ ID NO: 2029753 - DNA, 15 bp, Homo sapiens
taaacctctgtgata

SEQ ID NO: 2029754 - DNA, 15 bp, Homo sapiens
aaacctctgtgatac

SEQ ID NO: 2029755 - DNA, 15 bp, Homo sapiens
aacctctgtgatact

SEQ ID NO: 2029756 - DNA, 15 bp, Homo sapiens
acctctgtgatactt

SEQ ID NO: 2029757 - DNA, 15 bp, Homo sapiens
cctctgtgatacttt

SEQ ID NO: 2029758 - DNA, 15 bp, Homo sapiens
ctctgtgatactttt

SEQ ID NO: 2029759 - DNA, 15 bp, Homo sapiens
tctgtgatacttttc

SEQ ID NO: 2029760 - DNA, 15 bp, Homo sapiens
ctgtgatacttttct

SEQ ID NO: 2029761 - DNA, 15 bp, Homo sapiens
tgtgatacttttctg

SEQ ID NO: 2029762 - DNA, 15 bp, Homo sapiens
gtgatacttttctgc

SEQ ID NO: 2029763 - DNA, 15 bp, Homo sapiens
tgatacttttctgcc

SEQ ID NO: 2029764 - DNA, 15 bp, Homo sapiens
gatacttttctgcca

SEQ ID NO: 2029765 - DNA, 15 bp, Homo sapiens
atacttttctgccac

SEQ ID NO: 2029766 - DNA, 15 bp, Homo sapiens
tacttttctgccaca

SEQ ID NO: 2029767 - DNA, 15 bp, Homo sapiens
acttttctgccacag

SEQ ID NO: 2029768 - DNA, 15 bp, Homo sapiens
cttttctgccacagt

SEQ ID NO: 2029769 - DNA, 15 bp, Homo sapiens
ttttctgccacagtc

SEQ ID NO: 2029770 - DNA, 15 bp, Homo sapiens
tttctgccacagtcc

SEQ ID NO: 2029771 - DNA, 15 bp, Homo sapiens
ttctgccacagtccc

SEQ ID NO: 2029772 - DNA, 15 bp, Homo sapiens
tctgccacagtccct

SEQ ID NO: 2029773 - DNA, 15 bp, Homo sapiens
ctgccacagtccctt

SEQ ID NO: 2029774 - DNA, 15 bp, Homo sapiens
tgccacagtcccttg

SEQ ID NO: 2029775 - DNA, 15 bp, Homo sapiens
gccacagtcccttgt

SEQ ID NO: 2029776 - DNA, 15 bp, Homo sapiens
ccacagtcccttgtg

SEQ ID NO: 2029777 - DNA, 15 bp, Homo sapiens
cacagtcccttgtgt

SEQ ID NO: 2029778 - DNA, 15 bp, Homo sapiens
acagtcccttgtgta

SEQ ID NO: 2029779 - DNA, 15 bp, Homo sapiens
cagtcccttgtgtat

SEQ ID NO: 2029780 - DNA, 15 bp, Homo sapiens
agtcccttgtgtatt

SEQ ID NO: 2029781 - DNA, 15 bp, Homo sapiens
gtcccttgtgtattt

SEQ ID NO: 2029782 - DNA, 15 bp, Homo sapiens
tcccttgtgtatttg

SEQ ID NO: 2029783 - DNA, 15 bp, Homo sapiens
cccttgtgtatttga

SEQ ID NO: 2029784 - DNA, 15 bp, Homo sapiens
ccttgtgtatttgat

SEQ ID NO: 2029785 - DNA, 15 bp, Homo sapiens
cttgtgtatttgata

SEQ ID NO: 2029786 - DNA, 15 bp, Homo sapiens
ttgtgtatttgataa

SEQ ID NO: 2029787 - DNA, 15 bp, Homo sapiens
tgtgtatttgataat

SEQ ID NO: 2029788 - DNA, 15 bp, Homo sapiens
gtgtatttgataatc

SEQ ID NO: 2029789 - DNA, 15 bp, Homo sapiens
tgtatttgataatct

SEQ ID NO: 2029790 - DNA, 15 bp, Homo sapiens
gtatttgataatctt

SEQ ID NO: 2029791 - DNA, 15 bp, Homo sapiens
tatttgataatctta

SEQ ID NO: 2029792 - DNA, 15 bp, Homo sapiens
atttgataatcttaa

SEQ ID NO: 2029793 - DNA, 15 bp, Homo sapiens
tttgataatcttaat

SEQ ID NO: 2029794 - DNA, 15 bp, Homo sapiens
ttgataatcttaatg

SEQ ID NO: 2029795 - DNA, 15 bp, Homo sapiens
tgataatcttaatgc

SEQ ID NO: 2029796 - DNA, 15 bp, Homo sapiens
gataatcttaatgca

SEQ ID NO: 2029797 - DNA, 15 bp, Homo sapiens
ataatcttaatgcac

SEQ ID NO: 2029798 - DNA, 15 bp, Homo sapiens
taatcttaatgcaca

SEQ ID NO: 2029799 - DNA, 15 bp, Homo sapiens
aatcttaatgcacac

SEQ ID NO: 2029800 - DNA, 15 bp, Homo sapiens
atcttaatgcacaca

SEQ ID NO: 2029801 - DNA, 15 bp, Homo sapiens
tcttaatgcacacag

SEQ ID NO: 2029802 - DNA, 15 bp, Homo sapiens
cttaatgcacacagt

SEQ ID NO: 2029803 - DNA, 15 bp, Homo sapiens
ttaatgcacacagtt

SEQ ID NO: 2029804 - DNA, 15 bp, Homo sapiens
taatgcacacagtta

SEQ ID NO: 2029805 - DNA, 15 bp, Homo sapiens
aatgcacacagttag

SEQ ID NO: 2029806 - DNA, 15 bp, Homo sapiens
atgcacacagttaga

SEQ ID NO: 2029807 - DNA, 15 bp, Homo sapiens
tgcacacagttagat

SEQ ID NO: 2029808 - DNA, 15 bp, Homo sapiens
gcacacagttagata

SEQ ID NO: 2029809 - DNA, 15 bp, Homo sapiens
cacacagttagatat

SEQ ID NO: 2029810 - DNA, 15 bp, Homo sapiens
acacagttagatatc

SEQ ID NO: 2029811 - DNA, 15 bp, Homo sapiens
cacagttagatatct

SEQ ID NO: 2029812 - DNA, 15 bp, Homo sapiens
acagttagatatctt

SEQ ID NO: 2029813 - DNA, 15 bp, Homo sapiens
cagttagatatctta

SEQ ID NO: 2029814 - DNA, 15 bp, Homo sapiens
agttagatatcttat

SEQ ID NO: 2029815 - DNA, 15 bp, Homo sapiens
gttagatatcttatg

SEQ ID NO: 2029816 - DNA, 15 bp, Homo sapiens
ttagatatcttatga

SEQ ID NO: 2029817 - DNA, 15 bp, Homo sapiens
tagatatcttatgac

SEQ ID NO: 2029818 - DNA, 15 bp, Homo sapiens
agatatcttatgact

SEQ ID NO: 2029819 - DNA, 15 bp, Homo sapiens
gatatcttatgacta

SEQ ID NO: 2029820 - DNA, 15 bp, Homo sapiens
atatcttatgactag

SEQ ID NO: 2029821 - DNA, 15 bp, Homo sapiens
tatcttatgactagc

SEQ ID NO: 2029822 - DNA, 15 bp, Homo sapiens
atcttatgactagca

SEQ ID NO: 2029823 - DNA, 15 bp, Homo sapiens
tcttatgactagcaa

SEQ ID NO: 2029824 - DNA, 15 bp, Homo sapiens
cttatgactagcaag

SEQ ID NO: 2029825 - DNA, 15 bp, Homo sapiens
ttatgactagcaagg

SEQ ID NO: 2029826 - DNA, 15 bp, Homo sapiens
tatgactagcaagga

SEQ ID NO: 2029827 - DNA, 15 bp, Homo sapiens
atgactagcaaggag

SEQ ID NO: 2029828 - DNA, 15 bp, Homo sapiens
tgactagcaaggagc

SEQ ID NO: 2029829 - DNA, 15 bp, Homo sapiens
gactagcaaggagca

SEQ ID NO: 2029830 - DNA, 15 bp, Homo sapiens
actagcaaggagcat

SEQ ID NO: 2029831 - DNA, 15 bp, Homo sapiens
ctagcaaggagcatt

SEQ ID NO: 2029832 - DNA, 15 bp, Homo sapiens
tagcaaggagcatta

SEQ ID NO: 2029833 - DNA, 15 bp, Homo sapiens
agcaaggagcattac

SEQ ID NO: 2029834 - DNA, 15 bp, Homo sapiens
gcaaggagcattacc

SEQ ID NO: 2029835 - DNA, 15 bp, Homo sapiens
caaggagcattacca

SEQ ID NO: 2029836 - DNA, 15 bp, Homo sapiens
aaggagcattaccat

SEQ ID NO: 2029837 - DNA, 15 bp, Homo sapiens
aggagcattaccatg

SEQ ID NO: 2029838 - DNA, 15 bp, Homo sapiens
ggagcattaccatgg

SEQ ID NO: 2029839 - DNA, 15 bp, Homo sapiens
gagcattaccatggt

SEQ ID NO: 2029840 - DNA, 15 bp, Homo sapiens
agcattaccatggtt

SEQ ID NO: 2029841 - DNA, 15 bp, Homo sapiens
gcattaccatggtta

SEQ ID NO: 2029842 - DNA, 15 bp, Homo sapiens
cattaccatggttaa

SEQ ID NO: 2029843 - DNA, 15 bp, Homo sapiens
attaccatggttaaa

SEQ ID NO: 2029844 - DNA, 15 bp, Homo sapiens
ttaccatggttaaaa

SEQ ID NO: 2029845 - DNA, 15 bp, Homo sapiens
taccatggttaaaat

SEQ ID NO: 2029846 - DNA, 15 bp, Homo sapiens
accatggttaaaatc

SEQ ID NO: 2029847 - DNA, 15 bp, Homo sapiens
ccatggttaaaatct

SEQ ID NO: 2029848 - DNA, 15 bp, Homo sapiens
catggttaaaatcta

SEQ ID NO: 2029849 - DNA, 15 bp, Homo sapiens
atggttaaaatctat

SEQ ID NO: 2029850 - DNA, 15 bp, Homo sapiens
tggttaaaatctatt

SEQ ID NO: 2029851 - DNA, 15 bp, Homo sapiens
ggttaaaatctattt

SEQ ID NO: 2029852 - DNA, 15 bp, Homo sapiens
gttaaaatctatttc

SEQ ID NO: 2029853 - DNA, 15 bp, Homo sapiens
ttaaaatctatttca

SEQ ID NO: 2029854 - DNA, 15 bp, Homo sapiens
taaaatctatttcat

SEQ ID NO: 2029855 - DNA, 15 bp, Homo sapiens
aaaatctatttcatg

SEQ ID NO: 2029856 - DNA, 15 bp, Homo sapiens
aaatctatttcatga

SEQ ID NO: 2029857 - DNA, 15 bp, Homo sapiens
aatctatttcatgaa

SEQ ID NO: 2029858 - DNA, 15 bp, Homo sapiens
atctatttcatgaaa

SEQ ID NO: 2029859 - DNA, 15 bp, Homo sapiens
tctatttcatgaaaa

SEQ ID NO: 2029860 - DNA, 15 bp, Homo sapiens
ctatttcatgaaaac

SEQ ID NO: 2029861 - DNA, 15 bp, Homo sapiens
tatttcatgaaaaca

SEQ ID NO: 2029862 - DNA, 15 bp, Homo sapiens
atttcatgaaaacat

SEQ ID NO: 2029863 - DNA, 15 bp, Homo sapiens
tttcatgaaaacatt

SEQ ID NO: 2029864 - DNA, 15 bp, Homo sapiens
ttcatgaaaacattt

SEQ ID NO: 2029865 - DNA, 15 bp, Homo sapiens
tcatgaaaacatttt

SEQ ID NO: 2029866 - DNA, 15 bp, Homo sapiens
catgaaaacattttt

SEQ ID NO: 2029867 - DNA, 15 bp, Homo sapiens
atgaaaacattttta

SEQ ID NO: 2029868 - DNA, 15 bp, Homo sapiens
tgaaaacatttttat

SEQ ID NO: 2029869 - DNA, 15 bp, Homo sapiens
gaaaacatttttatt

SEQ ID NO: 2029870 - DNA, 15 bp, Homo sapiens
aaaacatttttattt

SEQ ID NO: 2029871 - DNA, 15 bp, Homo sapiens
aaacatttttatttc

SEQ ID NO: 2029872 - DNA, 15 bp, Homo sapiens
aacatttttatttcc

SEQ ID NO: 2029873 - DNA, 15 bp, Homo sapiens
acatttttatttcca

SEQ ID NO: 2029874 - DNA, 15 bp, Homo sapiens
catttttatttccag

SEQ ID NO: 2029875 - DNA, 15 bp, Homo sapiens
atttttatttccagc

SEQ ID NO: 2029876 - DNA, 15 bp, Homo sapiens
tttttatttccagcc

SEQ ID NO: 2029877 - DNA, 15 bp, Homo sapiens
ttttatttccagcct

SEQ ID NO: 2029878 - DNA, 15 bp, Homo sapiens
tttatttccagccta

SEQ ID NO: 2029879 - DNA, 15 bp, Homo sapiens
ttatttccagcctat

SEQ ID NO: 2029880 - DNA, 15 bp, Homo sapiens
tatttccagcctatt

SEQ ID NO: 2029881 - DNA, 15 bp, Homo sapiens
atttccagcctatta

SEQ ID NO: 2029882 - DNA, 15 bp, Homo sapiens
tttccagcctattag

SEQ ID NO: 2029883 - DNA, 15 bp, Homo sapiens
ttccagcctattaga

SEQ ID NO: 2029884 - DNA, 15 bp, Homo sapiens
tccagcctattagat

SEQ ID NO: 2029885 - DNA, 15 bp, Homo sapiens
ccagcctattagatt

SEQ ID NO: 2029886 - DNA, 15 bp, Homo sapiens
cagcctattagatta

SEQ ID NO: 2029887 - DNA, 15 bp, Homo sapiens
agcctattagattag

SEQ ID NO: 2029888 - DNA, 15 bp, Homo sapiens
gcctattagattaga

SEQ ID NO: 2029889 - DNA, 15 bp, Homo sapiens
cctattagattagat

SEQ ID NO: 2029890 - DNA, 15 bp, Homo sapiens
ctattagattagatt

SEQ ID NO: 2029891 - DNA, 15 bp, Homo sapiens
tattagattagatta

SEQ ID NO: 2029892 - DNA, 15 bp, Homo sapiens
attagattagattaa

SEQ ID NO: 2029893 - DNA, 15 bp, Homo sapiens
ttagattagattaat

SEQ ID NO: 2029894 - DNA, 15 bp, Homo sapiens
tagattagattaatt

SEQ ID NO: 2029895 - DNA, 15 bp, Homo sapiens
agattagattaattt

SEQ ID NO: 2029896 - DNA, 15 bp, Homo sapiens
gattagattaatttc

SEQ ID NO: 2029897 - DNA, 15 bp, Homo sapiens
attagattaatttct

SEQ ID NO: 2029898 - DNA, 15 bp, Homo sapiens
ttagattaatttctc

SEQ ID NO: 2029899 - DNA, 15 bp, Homo sapiens
tagattaatttctct

SEQ ID NO: 2029900 - DNA, 15 bp, Homo sapiens
agattaatttctctc

SEQ ID NO: 2029901 - DNA, 15 bp, Homo sapiens
gattaatttctctct

SEQ ID NO: 2029902 - DNA, 15 bp, Homo sapiens
attaatttctctctg

SEQ ID NO: 2029903 - DNA, 15 bp, Homo sapiens
ttaatttctctctgg

SEQ ID NO: 2029904 - DNA, 15 bp, Homo sapiens
taatttctctctgga

SEQ ID NO: 2029905 - DNA, 15 bp, Homo sapiens
aatttctctctggat

SEQ ID NO: 2029906 - DNA, 15 bp, Homo sapiens
atttctctctggatt

SEQ ID NO: 2029907 - DNA, 15 bp, Homo sapiens
tttctctctggattt

SEQ ID NO: 2029908 - DNA, 15 bp, Homo sapiens
ttctctctggatttg

SEQ ID NO: 2029909 - DNA, 15 bp, Homo sapiens
tctctctggatttgt

SEQ ID NO: 2029910 - DNA, 15 bp, Homo sapiens
ctctctggatttgtc

SEQ ID NO: 2029911 - DNA, 15 bp, Homo sapiens
tctctggatttgtcc

SEQ ID NO: 2029912 - DNA, 15 bp, Homo sapiens
ctctggatttgtcct

SEQ ID NO: 2029913 - DNA, 15 bp, Homo sapiens
tctggatttgtcctc

SEQ ID NO: 2029914 - DNA, 15 bp, Homo sapiens
ctggatttgtcctca

SEQ ID NO: 2029915 - DNA, 15 bp, Homo sapiens
tggatttgtcctcat

SEQ ID NO: 2029916 - DNA, 15 bp, Homo sapiens
ggatttgtcctcatt

SEQ ID NO: 2029917 - DNA, 15 bp, Homo sapiens
gatttgtcctcattt

SEQ ID NO: 2029918 - DNA, 15 bp, Homo sapiens
atttgtcctcatttg

SEQ ID NO: 2029919 - DNA, 15 bp, Homo sapiens
tttgtcctcatttgc

SEQ ID NO: 2029920 - DNA, 15 bp, Homo sapiens
ttgtcctcatttgct

SEQ ID NO: 2029921 - DNA, 15 bp, Homo sapiens
tgtcctcatttgctc

SEQ ID NO: 2029922 - DNA, 15 bp, Homo sapiens
gtcctcatttgctct

SEQ ID NO: 2029923 - DNA, 15 bp, Homo sapiens
tcctcatttgctctt

SEQ ID NO: 2029924 - DNA, 15 bp, Homo sapiens
cctcatttgctctta

SEQ ID NO: 2029925 - DNA, 15 bp, Homo sapiens
ctcatttgctcttat

SEQ ID NO: 2029926 - DNA, 15 bp, Homo sapiens
tcatttgctcttatt

SEQ ID NO: 2029927 - DNA, 15 bp, Homo sapiens
catttgctcttattc

SEQ ID NO: 2029928 - DNA, 15 bp, Homo sapiens
atttgctcttattca

SEQ ID NO: 2029929 - DNA, 15 bp, Homo sapiens
tttgctcttattcag

SEQ ID NO: 2029930 - DNA, 15 bp, Homo sapiens
ttgctcttattcagt

SEQ ID NO: 2029931 - DNA, 15 bp, Homo sapiens
tgctcttattcagtt

SEQ ID NO: 2029932 - DNA, 15 bp, Homo sapiens
gctcttattcagttt

SEQ ID NO: 2029933 - DNA, 15 bp, Homo sapiens
ctcttattcagtttt

SEQ ID NO: 2029934 - DNA, 15 bp, Homo sapiens
tcttattcagttttt

SEQ ID NO: 2029935 - DNA, 15 bp, Homo sapiens
cttattcagtttttt

SEQ ID NO: 2029936 - DNA, 15 bp, Homo sapiens
ttattcagttttttt

SEQ ID NO: 2029937 - DNA, 15 bp, Homo sapiens
tattcagtttttttg

SEQ ID NO: 2029938 - DNA, 15 bp, Homo sapiens
attcagtttttttgt

SEQ ID NO: 2029939 - DNA, 15 bp, Homo sapiens
ttcagtttttttgtt

SEQ ID NO: 2029940 - DNA, 15 bp, Homo sapiens
tcagtttttttgttt

SEQ ID NO: 2029941 - DNA, 15 bp, Homo sapiens
cagtttttttgtttg

SEQ ID NO: 2029942 - DNA, 15 bp, Homo sapiens
agtttttttgtttgt

SEQ ID NO: 2029943 - DNA, 15 bp, Homo sapiens
ttgtttgttttgtga

SEQ ID NO: 2029944 - DNA, 15 bp, Homo sapiens
tgtttgttttgtgag

SEQ ID NO: 2029945 - DNA, 15 bp, Homo sapiens
gtttgttttgtgaga

SEQ ID NO: 2029946 - DNA, 15 bp, Homo sapiens
tttgttttgtgagac

SEQ ID NO: 2029947 - DNA, 15 bp, Homo sapiens
ttgttttgtgagacg

SEQ ID NO: 2029948 - DNA, 15 bp, Homo sapiens
tgttttgtgagacgg

SEQ ID NO: 2029949 - DNA, 15 bp, Homo sapiens
gttttgtgagacgga

SEQ ID NO: 2029950 - DNA, 15 bp, Homo sapiens
ttttgtgagacggag

SEQ ID NO: 2029951 - DNA, 15 bp, Homo sapiens
tttgtgagacggagt

SEQ ID NO: 2029952 - DNA, 15 bp, Homo sapiens
ttgtgagacggagtc

SEQ ID NO: 2029953 - DNA, 15 bp, Homo sapiens
tgtgagacggagtct

SEQ ID NO: 2029954 - DNA, 15 bp, Homo sapiens
gtgagacggagtctc

SEQ ID NO: 2029955 - DNA, 15 bp, Homo sapiens
agtctcactctgtct

SEQ ID NO: 2029956 - DNA, 15 bp, Homo sapiens
gtctcactctgtctc

SEQ ID NO: 2029957 - DNA, 15 bp, Homo sapiens
tctcactctgtctcc

SEQ ID NO: 2029958 - DNA, 15 bp, Homo sapiens
ctcactctgtctcca

SEQ ID NO: 2029959 - DNA, 15 bp, Homo sapiens
tcactctgtctccag

SEQ ID NO: 2029960 - DNA, 15 bp, Homo sapiens
cactctgtctccagg

SEQ ID NO: 2029961 - DNA, 15 bp, Homo sapiens
actctgtctccaggc

SEQ ID NO: 2029962 - DNA, 15 bp, Homo sapiens
cagtggcgcaatctt

SEQ ID NO: 2029963 - DNA, 15 bp, Homo sapiens
agtggcgcaatcttg

SEQ ID NO: 2029964 - DNA, 15 bp, Homo sapiens
gtggcgcaatcttgg

SEQ ID NO: 2029965 - DNA, 15 bp, Homo sapiens
tggcgcaatcttggc

SEQ ID NO: 2029966 - DNA, 15 bp, Homo sapiens
ggcgcaatcttggct

SEQ ID NO: 2029967 - DNA, 15 bp, Homo sapiens
gcgcaatcttggctc

SEQ ID NO: 2029968 - DNA, 15 bp, Homo sapiens
cgcaatcttggctca

SEQ ID NO: 2029969 - DNA, 15 bp, Homo sapiens
ccgagtagctgagac

SEQ ID NO: 2029970 - DNA, 15 bp, Homo sapiens
cgagtagctgagact

SEQ ID NO: 2029971 - DNA, 15 bp, Homo sapiens
agtagctgagactac

SEQ ID NO: 2029972 - DNA, 15 bp, Homo sapiens
gtagctgagactaca

SEQ ID NO: 2029973 - DNA, 15 bp, Homo sapiens
tagctgagactacag

SEQ ID NO: 2029974 - DNA, 15 bp, Homo sapiens
agctgagactacagg

SEQ ID NO: 2029975 - DNA, 15 bp, Homo sapiens
gctgagactacaggc

SEQ ID NO: 2029976 - DNA, 15 bp, Homo sapiens
ctgagactacaggca

SEQ ID NO: 2029977 - DNA, 15 bp, Homo sapiens
tgagactacaggcat

SEQ ID NO: 2029978 - DNA, 15 bp, Homo sapiens
gagactacaggcatg

SEQ ID NO: 2029979 - DNA, 15 bp, Homo sapiens
agactacaggcatgc

SEQ ID NO: 2029980 - DNA, 15 bp, Homo sapiens
actacaggcatgcag

SEQ ID NO: 2029981 - DNA, 15 bp, Homo sapiens
ctacaggcatgcagc

SEQ ID NO: 2029982 - DNA, 15 bp, Homo sapiens
tacaggcatgcagca

SEQ ID NO: 2029983 - DNA, 15 bp, Homo sapiens
acaggcatgcagcac

SEQ ID NO: 2029984 - DNA, 15 bp, Homo sapiens
caggcatgcagcacc

SEQ ID NO: 2029985 - DNA, 15 bp, Homo sapiens
aggcatgcagcacca

SEQ ID NO: 2029986 - DNA, 15 bp, Homo sapiens
ggcatgcagcaccac

SEQ ID NO: 2029987 - DNA, 15 bp, Homo sapiens
gcatgcagcaccacg

SEQ ID NO: 2029988 - DNA, 15 bp, Homo sapiens
catgcagcaccacgc

SEQ ID NO: 2029989 - DNA, 15 bp, Homo sapiens
atgcagcaccacgcc

SEQ ID NO: 2029990 - DNA, 15 bp, Homo sapiens
tgcagcaccacgccc

SEQ ID NO: 2029991 - DNA, 15 bp, Homo sapiens
gcagcaccacgccca

SEQ ID NO: 2029992 - DNA, 15 bp, Homo sapiens
cagcaccacgcccag

SEQ ID NO: 2029993 - DNA, 15 bp, Homo sapiens
agcaccacgcccagc

SEQ ID NO: 2029994 - DNA, 15 bp, Homo sapiens
gcaccacgcccagct

SEQ ID NO: 2029995 - DNA, 15 bp, Homo sapiens
tttttagtagaaaca

SEQ ID NO: 2029996 - DNA, 15 bp, Homo sapiens
ttttagtagaaacag

SEQ ID NO: 2029997 - DNA, 15 bp, Homo sapiens
tttagtagaaacagg

SEQ ID NO: 2029998 - DNA, 15 bp, Homo sapiens
ttagtagaaacaggg

SEQ ID NO: 2029999 - DNA, 15 bp, Homo sapiens
tagtagaaacagggt

SEQ ID NO: 2030000 - DNA, 15 bp, Homo sapiens
agtagaaacagggtt

SEQ ID NO: 2030001 - DNA, 15 bp, Homo sapiens
gtagaaacagggttt

SEQ ID NO: 2030002 - DNA, 15 bp, Homo sapiens
tagaaacagggtttc

SEQ ID NO: 2030003 - DNA, 15 bp, Homo sapiens
agaaacagggtttca

SEQ ID NO: 2030004 - DNA, 15 bp, Homo sapiens
gaaacagggtttcac

SEQ ID NO: 2030005 - DNA, 15 bp, Homo sapiens
aaacagggtttcacc

SEQ ID NO: 2030006 - DNA, 15 bp, Homo sapiens
aacagggtttcacca

SEQ ID NO: 2030007 - DNA, 15 bp, Homo sapiens
ggccaggatggtctt

SEQ ID NO: 2030008 - DNA, 15 bp, Homo sapiens
tgatctcttgacctc

SEQ ID NO: 2030009 - DNA, 15 bp, Homo sapiens
accgcacctggcctc

SEQ ID NO: 2030010 - DNA, 15 bp, Homo sapiens
ccgcacctggcctca

SEQ ID NO: 2030011 - DNA, 15 bp, Homo sapiens
cgcacctggcctcag

SEQ ID NO: 2030012 - DNA, 15 bp, Homo sapiens
gcacctggcctcagt

SEQ ID NO: 2030013 - DNA, 15 bp, Homo sapiens
cacctggcctcagtt

SEQ ID NO: 2030014 - DNA, 15 bp, Homo sapiens
acctggcctcagttt

SEQ ID NO: 2030015 - DNA, 15 bp, Homo sapiens
cctggcctcagtttg

SEQ ID NO: 2030016 - DNA, 15 bp, Homo sapiens
ctggcctcagtttgt

SEQ ID NO: 2030017 - DNA, 15 bp, Homo sapiens
tggcctcagtttgtt

SEQ ID NO: 2030018 - DNA, 15 bp, Homo sapiens
ggcctcagtttgttt

SEQ ID NO: 2030019 - DNA, 15 bp, Homo sapiens
gcctcagtttgtttt

SEQ ID NO: 2030020 - DNA, 15 bp, Homo sapiens
cctcagtttgttttt

SEQ ID NO: 2030021 - DNA, 15 bp, Homo sapiens
ctcagtttgtttttt

SEQ ID NO: 2030022 - DNA, 15 bp, Homo sapiens
tcagtttgttttttg

SEQ ID NO: 2030023 - DNA, 15 bp, Homo sapiens
cagtttgttttttga

SEQ ID NO: 2030024 - DNA, 15 bp, Homo sapiens
agtttgttttttgat

SEQ ID NO: 2030025 - DNA, 15 bp, Homo sapiens
gtttgttttttgatt

SEQ ID NO: 2030026 - DNA, 15 bp, Homo sapiens
tttgttttttgattg

SEQ ID NO: 2030027 - DNA, 15 bp, Homo sapiens
ttgttttttgattgg

SEQ ID NO: 2030028 - DNA, 15 bp, Homo sapiens
tgttttttgattggc

SEQ ID NO: 2030029 - DNA, 15 bp, Homo sapiens
gttttttgattggca

SEQ ID NO: 2030030 - DNA, 15 bp, Homo sapiens
ttttttgattggcat

SEQ ID NO: 2030031 - DNA, 15 bp, Homo sapiens
tttttgattggcatt

SEQ ID NO: 2030032 - DNA, 15 bp, Homo sapiens
ttttgattggcatta

SEQ ID NO: 2030033 - DNA, 15 bp, Homo sapiens
tttgattggcattag

SEQ ID NO: 2030034 - DNA, 15 bp, Homo sapiens
ttgattggcattagt

SEQ ID NO: 2030035 - DNA, 15 bp, Homo sapiens
tgattggcattagtt

SEQ ID NO: 2030036 - DNA, 15 bp, Homo sapiens
gattggcattagttt

SEQ ID NO: 2030037 - DNA, 15 bp, Homo sapiens
attggcattagttta

SEQ ID NO: 2030038 - DNA, 15 bp, Homo sapiens
ttggcattagtttat

SEQ ID NO: 2030039 - DNA, 15 bp, Homo sapiens
tggcattagtttatg

SEQ ID NO: 2030040 - DNA, 15 bp, Homo sapiens
ggcattagtttatgt

SEQ ID NO: 2030041 - DNA, 15 bp, Homo sapiens
gcattagtttatgta

SEQ ID NO: 2030042 - DNA, 15 bp, Homo sapiens
cattagtttatgtag

SEQ ID NO: 2030043 - DNA, 15 bp, Homo sapiens
attagtttatgtagt

SEQ ID NO: 2030044 - DNA, 15 bp, Homo sapiens
ttagtttatgtagtg

SEQ ID NO: 2030045 - DNA, 15 bp, Homo sapiens
tagtttatgtagtgc

SEQ ID NO: 2030046 - DNA, 15 bp, Homo sapiens
agtttatgtagtgct

SEQ ID NO: 2030047 - DNA, 15 bp, Homo sapiens
gtttatgtagtgcta

SEQ ID NO: 2030048 - DNA, 15 bp, Homo sapiens
tttatgtagtgctac

SEQ ID NO: 2030049 - DNA, 15 bp, Homo sapiens
ttatgtagtgctaca

SEQ ID NO: 2030050 - DNA, 15 bp, Homo sapiens
tatgtagtgctacat

SEQ ID NO: 2030051 - DNA, 15 bp, Homo sapiens
atgtagtgctacata

SEQ ID NO: 2030052 - DNA, 15 bp, Homo sapiens
tgtagtgctacataa

SEQ ID NO: 2030053 - DNA, 15 bp, Homo sapiens
gtagtgctacataag

SEQ ID NO: 2030054 - DNA, 15 bp, Homo sapiens
tagtgctacataaga

SEQ ID NO: 2030055 - DNA, 15 bp, Homo sapiens
agtgctacataagat

SEQ ID NO: 2030056 - DNA, 15 bp, Homo sapiens
gtgctacataagatg

SEQ ID NO: 2030057 - DNA, 15 bp, Homo sapiens
tgctacataagatgt

SEQ ID NO: 2030058 - DNA, 15 bp, Homo sapiens
gctacataagatgta

SEQ ID NO: 2030059 - DNA, 15 bp, Homo sapiens
ctacataagatgtat

SEQ ID NO: 2030060 - DNA, 15 bp, Homo sapiens
tacataagatgtata

SEQ ID NO: 2030061 - DNA, 15 bp, Homo sapiens
acataagatgtatat

SEQ ID NO: 2030062 - DNA, 15 bp, Homo sapiens
cataagatgtatatg

SEQ ID NO: 2030063 - DNA, 15 bp, Homo sapiens
ataagatgtatatga

SEQ ID NO: 2030064 - DNA, 15 bp, Homo sapiens
taagatgtatatgat

SEQ ID NO: 2030065 - DNA, 15 bp, Homo sapiens
aagatgtatatgatc

SEQ ID NO: 2030066 - DNA, 15 bp, Homo sapiens
agatgtatatgatca

SEQ ID NO: 2030067 - DNA, 15 bp, Homo sapiens
gatgtatatgatcat

SEQ ID NO: 2030068 - DNA, 15 bp, Homo sapiens
atgtatatgatcatt

SEQ ID NO: 2030069 - DNA, 15 bp, Homo sapiens
tgtatatgatcattt

SEQ ID NO: 2030070 - DNA, 15 bp, Homo sapiens
gtatatgatcatttt

SEQ ID NO: 2030071 - DNA, 15 bp, Homo sapiens
tatatgatcattttc

SEQ ID NO: 2030072 - DNA, 15 bp, Homo sapiens
atatgatcattttct

SEQ ID NO: 2030073 - DNA, 15 bp, Homo sapiens
tatgatcattttctc

SEQ ID NO: 2030074 - DNA, 15 bp, Homo sapiens
atgatcattttctct

SEQ ID NO: 2030075 - DNA, 15 bp, Homo sapiens
tgatcattttctctg

SEQ ID NO: 2030076 - DNA, 15 bp, Homo sapiens
gatcattttctctgt

SEQ ID NO: 2030077 - DNA, 15 bp, Homo sapiens
atcattttctctgta

SEQ ID NO: 2030078 - DNA, 15 bp, Homo sapiens
tcattttctctgtat

SEQ ID NO: 2030079 - DNA, 15 bp, Homo sapiens
cattttctctgtatg

SEQ ID NO: 2030080 - DNA, 15 bp, Homo sapiens
attttctctgtatgt

SEQ ID NO: 2030081 - DNA, 15 bp, Homo sapiens
ttttctctgtatgtg

SEQ ID NO: 2030082 - DNA, 15 bp, Homo sapiens
tttctctgtatgtgg

SEQ ID NO: 2030083 - DNA, 15 bp, Homo sapiens
ttctctgtatgtggg

SEQ ID NO: 2030084 - DNA, 15 bp, Homo sapiens
tctgtatgtgggctc

SEQ ID NO: 2030085 - DNA, 15 bp, Homo sapiens
ctgtatgtgggctct

SEQ ID NO: 2030086 - DNA, 15 bp, Homo sapiens
tgtatgtgggctctc

SEQ ID NO: 2030087 - DNA, 15 bp, Homo sapiens
gtatgtgggctctct

SEQ ID NO: 2030088 - DNA, 15 bp, Homo sapiens
tatgtgggctctctc

SEQ ID NO: 2030089 - DNA, 15 bp, Homo sapiens
atgtgggctctctcc

SEQ ID NO: 2030090 - DNA, 15 bp, Homo sapiens
tgtgggctctctcca

SEQ ID NO: 2030091 - DNA, 15 bp, Homo sapiens
gtgggctctctccaa

SEQ ID NO: 2030092 - DNA, 15 bp, Homo sapiens
tgggctctctccaaa

SEQ ID NO: 2030093 - DNA, 15 bp, Homo sapiens
gggctctctccaaat

SEQ ID NO: 2030094 - DNA, 15 bp, Homo sapiens
ggctctctccaaatt

SEQ ID NO: 2030095 - DNA, 15 bp, Homo sapiens
gctctctccaaattg

SEQ ID NO: 2030096 - DNA, 15 bp, Homo sapiens
ctctctccaaattga

SEQ ID NO: 2030097 - DNA, 15 bp, Homo sapiens
tctctccaaattgat

SEQ ID NO: 2030098 - DNA, 15 bp, Homo sapiens
ctctccaaattgatc

SEQ ID NO: 2030099 - DNA, 15 bp, Homo sapiens
tctccaaattgatca

SEQ ID NO: 2030100 - DNA, 15 bp, Homo sapiens
ctccaaattgatcaa

SEQ ID NO: 2030101 - DNA, 15 bp, Homo sapiens
tccaaattgatcaaa

SEQ ID NO: 2030102 - DNA, 15 bp, Homo sapiens
ccaaattgatcaaag

SEQ ID NO: 2030103 - DNA, 15 bp, Homo sapiens
caaattgatcaaagt

SEQ ID NO: 2030104 - DNA, 15 bp, Homo sapiens
aaattgatcaaagtt

SEQ ID NO: 2030105 - DNA, 15 bp, Homo sapiens
aattgatcaaagttc

SEQ ID NO: 2030106 - DNA, 15 bp, Homo sapiens
attgatcaaagttcc

SEQ ID NO: 2030107 - DNA, 15 bp, Homo sapiens
ttgatcaaagttcct

SEQ ID NO: 2030108 - DNA, 15 bp, Homo sapiens
tgatcaaagttcctt

SEQ ID NO: 2030109 - DNA, 15 bp, Homo sapiens
gatcaaagttccttg

SEQ ID NO: 2030110 - DNA, 15 bp, Homo sapiens
atcaaagttccttga

SEQ ID NO: 2030111 - DNA, 15 bp, Homo sapiens
tcaaagttccttgaa

SEQ ID NO: 2030112 - DNA, 15 bp, Homo sapiens
caaagttccttgaag

SEQ ID NO: 2030113 - DNA, 15 bp, Homo sapiens
aaagttccttgaaga

SEQ ID NO: 2030114 - DNA, 15 bp, Homo sapiens
aagttccttgaagac

SEQ ID NO: 2030115 - DNA, 15 bp, Homo sapiens
agttccttgaagaca

SEQ ID NO: 2030116 - DNA, 15 bp, Homo sapiens
gttccttgaagacag

SEQ ID NO: 2030117 - DNA, 15 bp, Homo sapiens
ttccttgaagacagg

SEQ ID NO: 2030118 - DNA, 15 bp, Homo sapiens
tccttgaagacaggg

SEQ ID NO: 2030119 - DNA, 15 bp, Homo sapiens
ccttgaagacagggt

SEQ ID NO: 2030120 - DNA, 15 bp, Homo sapiens
cttgaagacagggtt

SEQ ID NO: 2030121 - DNA, 15 bp, Homo sapiens
ttgaagacagggttt

SEQ ID NO: 2030122 - DNA, 15 bp, Homo sapiens
tgaagacagggtttc

SEQ ID NO: 2030123 - DNA, 15 bp, Homo sapiens
gaagacagggtttct

SEQ ID NO: 2030124 - DNA, 15 bp, Homo sapiens
aagacagggtttctg

SEQ ID NO: 2030125 - DNA, 15 bp, Homo sapiens
agacagggtttctgt

SEQ ID NO: 2030126 - DNA, 15 bp, Homo sapiens
gacagggtttctgtt

SEQ ID NO: 2030127 - DNA, 15 bp, Homo sapiens
acagggtttctgttt

SEQ ID NO: 2030128 - DNA, 15 bp, Homo sapiens
cagggtttctgtttc

SEQ ID NO: 2030129 - DNA, 15 bp, Homo sapiens
agggtttctgtttct

SEQ ID NO: 2030130 - DNA, 15 bp, Homo sapiens
gggtttctgtttctt

SEQ ID NO: 2030131 - DNA, 15 bp, Homo sapiens
ggtttctgtttcttc

SEQ ID NO: 2030132 - DNA, 15 bp, Homo sapiens
gtttctgtttcttcc

SEQ ID NO: 2030133 - DNA, 15 bp, Homo sapiens
tttctgtttcttcct

SEQ ID NO: 2030134 - DNA, 15 bp, Homo sapiens
ttctgtttcttcctt

SEQ ID NO: 2030135 - DNA, 15 bp, Homo sapiens
tctgtttcttcctta

SEQ ID NO: 2030136 - DNA, 15 bp, Homo sapiens
ctgtttcttccttaa

SEQ ID NO: 2030137 - DNA, 15 bp, Homo sapiens
tgtttcttccttaaa

SEQ ID NO: 2030138 - DNA, 15 bp, Homo sapiens
gtttcttccttaaac

SEQ ID NO: 2030139 - DNA, 15 bp, Homo sapiens
tttcttccttaaaca

SEQ ID NO: 2030140 - DNA, 15 bp, Homo sapiens
ttcttccttaaacag

SEQ ID NO: 2030141 - DNA, 15 bp, Homo sapiens
tcttccttaaacagt

SEQ ID NO: 2030142 - DNA, 15 bp, Homo sapiens
cttccttaaacagtt

SEQ ID NO: 2030143 - DNA, 15 bp, Homo sapiens
ttccttaaacagttc

SEQ ID NO: 2030144 - DNA, 15 bp, Homo sapiens
tccttaaacagttcc

SEQ ID NO: 2030145 - DNA, 15 bp, Homo sapiens
ccttaaacagttcct

SEQ ID NO: 2030146 - DNA, 15 bp, Homo sapiens
cttaaacagttcctg

SEQ ID NO: 2030147 - DNA, 15 bp, Homo sapiens
ttaaacagttcctgg

SEQ ID NO: 2030148 - DNA, 15 bp, Homo sapiens
taaacagttcctggt

SEQ ID NO: 2030149 - DNA, 15 bp, Homo sapiens
aaacagttcctggtg

SEQ ID NO: 2030150 - DNA, 15 bp, Homo sapiens
aacagttcctggtgc

SEQ ID NO: 2030151 - DNA, 15 bp, Homo sapiens
acagttcctggtgca

SEQ ID NO: 2030152 - DNA, 15 bp, Homo sapiens
cagttcctggtgcag

SEQ ID NO: 2030153 - DNA, 15 bp, Homo sapiens
agttcctggtgcagt

SEQ ID NO: 2030154 - DNA, 15 bp, Homo sapiens
gttcctggtgcagtg

SEQ ID NO: 2030155 - DNA, 15 bp, Homo sapiens
ttcctggtgcagtgt

SEQ ID NO: 2030156 - DNA, 15 bp, Homo sapiens
tcctggtgcagtgtt

SEQ ID NO: 2030157 - DNA, 15 bp, Homo sapiens
cctggtgcagtgttt

SEQ ID NO: 2030158 - DNA, 15 bp, Homo sapiens
ctggtgcagtgtttt

SEQ ID NO: 2030159 - DNA, 15 bp, Homo sapiens
tggtgcagtgtttta

SEQ ID NO: 2030160 - DNA, 15 bp, Homo sapiens
ggtgcagtgttttag

SEQ ID NO: 2030161 - DNA, 15 bp, Homo sapiens
gtgcagtgttttaga

SEQ ID NO: 2030162 - DNA, 15 bp, Homo sapiens
tgcagtgttttagat

SEQ ID NO: 2030163 - DNA, 15 bp, Homo sapiens
gcagtgttttagata

SEQ ID NO: 2030164 - DNA, 15 bp, Homo sapiens
cagtgttttagatac

SEQ ID NO: 2030165 - DNA, 15 bp, Homo sapiens
agtgttttagataca

SEQ ID NO: 2030166 - DNA, 15 bp, Homo sapiens
gtgttttagatacag

SEQ ID NO: 2030167 - DNA, 15 bp, Homo sapiens
tgttttagatacagg

SEQ ID NO: 2030168 - DNA, 15 bp, Homo sapiens
gttttagatacaggg

SEQ ID NO: 2030169 - DNA, 15 bp, Homo sapiens
ttttagatacagggg

SEQ ID NO: 2030170 - DNA, 15 bp, Homo sapiens
tttagatacaggggg

SEQ ID NO: 2030171 - DNA, 15 bp, Homo sapiens
ttagatacagggggt

SEQ ID NO: 2030172 - DNA, 15 bp, Homo sapiens
tagatacagggggtg

SEQ ID NO: 2030173 - DNA, 15 bp, Homo sapiens
agatacagggggtgc

SEQ ID NO: 2030174 - DNA, 15 bp, Homo sapiens
gatacagggggtgct

SEQ ID NO: 2030175 - DNA, 15 bp, Homo sapiens
atacagggggtgcta

SEQ ID NO: 2030176 - DNA, 15 bp, Homo sapiens
tacagggggtgctaa

SEQ ID NO: 2030177 - DNA, 15 bp, Homo sapiens
acagggggtgctaaa

SEQ ID NO: 2030178 - DNA, 15 bp, Homo sapiens
cagggggtgctaaat

SEQ ID NO: 2030179 - DNA, 15 bp, Homo sapiens
agggggtgctaaatc

SEQ ID NO: 2030180 - DNA, 15 bp, Homo sapiens
gggggtgctaaatca

SEQ ID NO: 2030181 - DNA, 15 bp, Homo sapiens
ggggtgctaaatcaa

SEQ ID NO: 2030182 - DNA, 15 bp, Homo sapiens
gggtgctaaatcaat

SEQ ID NO: 2030183 - DNA, 15 bp, Homo sapiens
ggtgctaaatcaata

SEQ ID NO: 2030184 - DNA, 15 bp, Homo sapiens
gtgctaaatcaatat

SEQ ID NO: 2030185 - DNA, 15 bp, Homo sapiens
tgctaaatcaatatg

SEQ ID NO: 2030186 - DNA, 15 bp, Homo sapiens
gctaaatcaatatga

SEQ ID NO: 2030187 - DNA, 15 bp, Homo sapiens
ctaaatcaatatgaa

SEQ ID NO: 2030188 - DNA, 15 bp, Homo sapiens
taaatcaatatgaat

SEQ ID NO: 2030189 - DNA, 15 bp, Homo sapiens
aaatcaatatgaatt

SEQ ID NO: 2030190 - DNA, 15 bp, Homo sapiens
aatcaatatgaattg

SEQ ID NO: 2030191 - DNA, 15 bp, Homo sapiens
atcaatatgaattgt

SEQ ID NO: 2030192 - DNA, 15 bp, Homo sapiens
tcaatatgaattgta

SEQ ID NO: 2030193 - DNA, 15 bp, Homo sapiens
caatatgaattgtat

SEQ ID NO: 2030194 - DNA, 15 bp, Homo sapiens
aatatgaattgtata

SEQ ID NO: 2030195 - DNA, 15 bp, Homo sapiens
atatgaattgtataa

SEQ ID NO: 2030196 - DNA, 15 bp, Homo sapiens
tatgaattgtataaa

SEQ ID NO: 2030197 - DNA, 15 bp, Homo sapiens
atgaattgtataaac

SEQ ID NO: 2030198 - DNA, 15 bp, Homo sapiens
tgaattgtataaacc

SEQ ID NO: 2030199 - DNA, 15 bp, Homo sapiens
gaattgtataaacct

SEQ ID NO: 2030200 - DNA, 15 bp, Homo sapiens
aattgtataaacctt

SEQ ID NO: 2030201 - DNA, 15 bp, Homo sapiens
attgtataaaccttg

SEQ ID NO: 2030202 - DNA, 15 bp, Homo sapiens
ttgtataaaccttgt

SEQ ID NO: 2030203 - DNA, 15 bp, Homo sapiens
tgtataaaccttgtt

SEQ ID NO: 2030204 - DNA, 15 bp, Homo sapiens
gtataaaccttgttc

SEQ ID NO: 2030205 - DNA, 15 bp, Homo sapiens
tataaaccttgttcc

SEQ ID NO: 2030206 - DNA, 15 bp, Homo sapiens
ataaaccttgttcca

SEQ ID NO: 2030207 - DNA, 15 bp, Homo sapiens
taaaccttgttccag

SEQ ID NO: 2030208 - DNA, 15 bp, Homo sapiens
aaaccttgttccagt

SEQ ID NO: 2030209 - DNA, 15 bp, Homo sapiens
aaccttgttccagtt

SEQ ID NO: 2030210 - DNA, 15 bp, Homo sapiens
accttgttccagttt

SEQ ID NO: 2030211 - DNA, 15 bp, Homo sapiens
ccttgttccagtttt

SEQ ID NO: 2030212 - DNA, 15 bp, Homo sapiens
cttgttccagttttt

SEQ ID NO: 2030213 - DNA, 15 bp, Homo sapiens
ttgttccagttttta

SEQ ID NO: 2030214 - DNA, 15 bp, Homo sapiens
tgttccagtttttaa

SEQ ID NO: 2030215 - DNA, 15 bp, Homo sapiens
gttccagtttttaag

SEQ ID NO: 2030216 - DNA, 15 bp, Homo sapiens
ttccagtttttaaga

SEQ ID NO: 2030217 - DNA, 15 bp, Homo sapiens
tccagtttttaagaa

SEQ ID NO: 2030218 - DNA, 15 bp, Homo sapiens
ccagtttttaagaat

SEQ ID NO: 2030219 - DNA, 15 bp, Homo sapiens
cagtttttaagaatt

SEQ ID NO: 2030220 - DNA, 15 bp, Homo sapiens
agtttttaagaattg

SEQ ID NO: 2030221 - DNA, 15 bp, Homo sapiens
gtttttaagaattgg

SEQ ID NO: 2030222 - DNA, 15 bp, Homo sapiens
tttttaagaattggg

SEQ ID NO: 2030223 - DNA, 15 bp, Homo sapiens
ttttaagaattgggt

SEQ ID NO: 2030224 - DNA, 15 bp, Homo sapiens
tttaagaattgggta

SEQ ID NO: 2030225 - DNA, 15 bp, Homo sapiens
ttaagaattgggtat

SEQ ID NO: 2030226 - DNA, 15 bp, Homo sapiens
taagaattgggtatt

SEQ ID NO: 2030227 - DNA, 15 bp, Homo sapiens
aagaattgggtattt

SEQ ID NO: 2030228 - DNA, 15 bp, Homo sapiens
agaattgggtatttt

SEQ ID NO: 2030229 - DNA, 15 bp, Homo sapiens
gaattgggtatttta

SEQ ID NO: 2030230 - DNA, 15 bp, Homo sapiens
aattgggtattttat

SEQ ID NO: 2030231 - DNA, 15 bp, Homo sapiens
attgggtattttatt

SEQ ID NO: 2030232 - DNA, 15 bp, Homo sapiens
ttgggtattttattt

SEQ ID NO: 2030233 - DNA, 15 bp, Homo sapiens
tgggtattttattta

SEQ ID NO: 2030234 - DNA, 15 bp, Homo sapiens
gggtattttatttat

SEQ ID NO: 2030235 - DNA, 15 bp, Homo sapiens
ggtattttatttatt

SEQ ID NO: 2030236 - DNA, 15 bp, Homo sapiens
gtattttatttattt

SEQ ID NO: 2030237 - DNA, 15 bp, Homo sapiens
tattttatttatttc

SEQ ID NO: 2030238 - DNA, 15 bp, Homo sapiens
attttatttatttcc

SEQ ID NO: 2030239 - DNA, 15 bp, Homo sapiens
ttttatttatttcct

SEQ ID NO: 2030240 - DNA, 15 bp, Homo sapiens
tttatttatttcctt

SEQ ID NO: 2030241 - DNA, 15 bp, Homo sapiens
ttatttatttccttt

SEQ ID NO: 2030242 - DNA, 15 bp, Homo sapiens
tatttatttcctttc

SEQ ID NO: 2030243 - DNA, 15 bp, Homo sapiens
atttatttcctttca

SEQ ID NO: 2030244 - DNA, 15 bp, Homo sapiens
tttatttcctttcac

SEQ ID NO: 2030245 - DNA, 15 bp, Homo sapiens
ttatttcctttcact

SEQ ID NO: 2030246 - DNA, 15 bp, Homo sapiens
tatttcctttcacta

SEQ ID NO: 2030247 - DNA, 15 bp, Homo sapiens
atttcctttcactat

SEQ ID NO: 2030248 - DNA, 15 bp, Homo sapiens
tttcctttcactatt

SEQ ID NO: 2030249 - DNA, 15 bp, Homo sapiens
ttcctttcactatta

SEQ ID NO: 2030250 - DNA, 15 bp, Homo sapiens
tcctttcactattac

SEQ ID NO: 2030251 - DNA, 15 bp, Homo sapiens
cctttcactattact

SEQ ID NO: 2030252 - DNA, 15 bp, Homo sapiens
ctttcactattactt

SEQ ID NO: 2030253 - DNA, 15 bp, Homo sapiens
tttcactattacttg

SEQ ID NO: 2030254 - DNA, 15 bp, Homo sapiens
ttcactattacttga

SEQ ID NO: 2030255 - DNA, 15 bp, Homo sapiens
tcactattacttgaa

SEQ ID NO: 2030256 - DNA, 15 bp, Homo sapiens
cactattacttgaat

SEQ ID NO: 2030257 - DNA, 15 bp, Homo sapiens
actattacttgaata

SEQ ID NO: 2030258 - DNA, 15 bp, Homo sapiens
ctattacttgaatat

SEQ ID NO: 2030259 - DNA, 15 bp, Homo sapiens
tattacttgaatatc

SEQ ID NO: 2030260 - DNA, 15 bp, Homo sapiens
attacttgaatatct

SEQ ID NO: 2030261 - DNA, 15 bp, Homo sapiens
ttacttgaatatctg

SEQ ID NO: 2030262 - DNA, 15 bp, Homo sapiens
tacttgaatatctgt

SEQ ID NO: 2030263 - DNA, 15 bp, Homo sapiens
acttgaatatctgtc

SEQ ID NO: 2030264 - DNA, 15 bp, Homo sapiens
cttgaatatctgtca

SEQ ID NO: 2030265 - DNA, 15 bp, Homo sapiens
ttgaatatctgtcaa

SEQ ID NO: 2030266 - DNA, 15 bp, Homo sapiens
tgaatatctgtcaac

SEQ ID NO: 2030267 - DNA, 15 bp, Homo sapiens
gaatatctgtcaaca

SEQ ID NO: 2030268 - DNA, 15 bp, Homo sapiens
aatatctgtcaacat

SEQ ID NO: 2030269 - DNA, 15 bp, Homo sapiens
atatctgtcaacatg

SEQ ID NO: 2030270 - DNA, 15 bp, Homo sapiens
tatctgtcaacatgc

SEQ ID NO: 2030271 - DNA, 15 bp, Homo sapiens
atctgtcaacatgca

SEQ ID NO: 2030272 - DNA, 15 bp, Homo sapiens
tctgtcaacatgcaa

SEQ ID NO: 2030273 - DNA, 15 bp, Homo sapiens
ctgtcaacatgcaaa

SEQ ID NO: 2030274 - DNA, 15 bp, Homo sapiens
tgtcaacatgcaaag

SEQ ID NO: 2030275 - DNA, 15 bp, Homo sapiens
gtcaacatgcaaagg

SEQ ID NO: 2030276 - DNA, 15 bp, Homo sapiens
tcaacatgcaaaggt

SEQ ID NO: 2030277 - DNA, 15 bp, Homo sapiens
caacatgcaaaggtt

SEQ ID NO: 2030278 - DNA, 15 bp, Homo sapiens
aacatgcaaaggttg

SEQ ID NO: 2030279 - DNA, 15 bp, Homo sapiens
acatgcaaaggttgt

SEQ ID NO: 2030280 - DNA, 15 bp, Homo sapiens
catgcaaaggttgtc

SEQ ID NO: 2030281 - DNA, 15 bp, Homo sapiens
atgcaaaggttgtca

SEQ ID NO: 2030282 - DNA, 15 bp, Homo sapiens
tgcaaaggttgtcac

SEQ ID NO: 2030283 - DNA, 15 bp, Homo sapiens
gcaaaggttgtcact

SEQ ID NO: 2030284 - DNA, 15 bp, Homo sapiens
caaaggttgtcactt

SEQ ID NO: 2030285 - DNA, 15 bp, Homo sapiens
aaaggttgtcactta

SEQ ID NO: 2030286 - DNA, 15 bp, Homo sapiens
aaggttgtcacttaa

SEQ ID NO: 2030287 - DNA, 15 bp, Homo sapiens
aggttgtcacttaaa

SEQ ID NO: 2030288 - DNA, 15 bp, Homo sapiens
ggttgtcacttaaaa

SEQ ID NO: 2030289 - DNA, 15 bp, Homo sapiens
gttgtcacttaaaaa

SEQ ID NO: 2030290 - DNA, 15 bp, Homo sapiens
tgtcacttaaaaaat

SEQ ID NO: 2030291 - DNA, 15 bp, Homo sapiens
gtcacttaaaaaatg

SEQ ID NO: 2030292 - DNA, 15 bp, Homo sapiens
tcacttaaaaaatgg

SEQ ID NO: 2030293 - DNA, 15 bp, Homo sapiens
cacttaaaaaatggg

SEQ ID NO: 2030294 - DNA, 15 bp, Homo sapiens
acttaaaaaatgggc

SEQ ID NO: 2030295 - DNA, 15 bp, Homo sapiens
cttaaaaaatgggcc

SEQ ID NO: 2030296 - DNA, 15 bp, Homo sapiens
ttaaaaaatgggcct

SEQ ID NO: 2030297 - DNA, 15 bp, Homo sapiens
taaaaaatgggcctg

SEQ ID NO: 2030298 - DNA, 15 bp, Homo sapiens
aaaaaatgggcctga

SEQ ID NO: 2030299 - DNA, 15 bp, Homo sapiens
aaaatgggcctgaag

SEQ ID NO: 2030300 - DNA, 15 bp, Homo sapiens
aaatgggcctgaagt

SEQ ID NO: 2030301 - DNA, 15 bp, Homo sapiens
aatgggcctgaagtt

SEQ ID NO: 2030302 - DNA, 15 bp, Homo sapiens
atgggcctgaagtta

SEQ ID NO: 2030303 - DNA, 15 bp, Homo sapiens
tgggcctgaagttac

SEQ ID NO: 2030304 - DNA, 15 bp, Homo sapiens
gggcctgaagttaca

SEQ ID NO: 2030305 - DNA, 15 bp, Homo sapiens
ggcctgaagttacag

SEQ ID NO: 2030306 - DNA, 15 bp, Homo sapiens
gcctgaagttacaga

SEQ ID NO: 2030307 - DNA, 15 bp, Homo sapiens
cctgaagttacagaa

SEQ ID NO: 2030308 - DNA, 15 bp, Homo sapiens
ctgaagttacagaaa

SEQ ID NO: 2030309 - DNA, 15 bp, Homo sapiens
tgaagttacagaaat

SEQ ID NO: 2030310 - DNA, 15 bp, Homo sapiens
gaagttacagaaata

SEQ ID NO: 2030311 - DNA, 15 bp, Homo sapiens
aagttacagaaataa

SEQ ID NO: 2030312 - DNA, 15 bp, Homo sapiens
agttacagaaataag

SEQ ID NO: 2030313 - DNA, 15 bp, Homo sapiens
gttacagaaataagt

SEQ ID NO: 2030314 - DNA, 15 bp, Homo sapiens
ttacagaaataagta

SEQ ID NO: 2030315 - DNA, 15 bp, Homo sapiens
tacagaaataagtat

SEQ ID NO: 2030316 - DNA, 15 bp, Homo sapiens
acagaaataagtata

SEQ ID NO: 2030317 - DNA, 15 bp, Homo sapiens
cagaaataagtatat

SEQ ID NO: 2030318 - DNA, 15 bp, Homo sapiens
agaaataagtatatc

SEQ ID NO: 2030319 - DNA, 15 bp, Homo sapiens
gaaataagtatatca

SEQ ID NO: 2030320 - DNA, 15 bp, Homo sapiens
aaataagtatatcat

SEQ ID NO: 2030321 - DNA, 15 bp, Homo sapiens
aataagtatatcata

SEQ ID NO: 2030322 - DNA, 15 bp, Homo sapiens
ataagtatatcatac

SEQ ID NO: 2030323 - DNA, 15 bp, Homo sapiens
taagtatatcataca

SEQ ID NO: 2030324 - DNA, 15 bp, Homo sapiens
aagtatatcatacag

SEQ ID NO: 2030325 - DNA, 15 bp, Homo sapiens
agtatatcatacaga

SEQ ID NO: 2030326 - DNA, 15 bp, Homo sapiens
gtatatcatacagaa

SEQ ID NO: 2030327 - DNA, 15 bp, Homo sapiens
tatatcatacagaag

SEQ ID NO: 2030328 - DNA, 15 bp, Homo sapiens
atatcatacagaagt

SEQ ID NO: 2030329 - DNA, 15 bp, Homo sapiens
tatcatacagaagtt

SEQ ID NO: 2030330 - DNA, 15 bp, Homo sapiens
atcatacagaagttt

SEQ ID NO: 2030331 - DNA, 15 bp, Homo sapiens
tcatacagaagtttt

SEQ ID NO: 2030332 - DNA, 15 bp, Homo sapiens
catacagaagttttt

SEQ ID NO: 2030333 - DNA, 15 bp, Homo sapiens
atacagaagtttttg

SEQ ID NO: 2030334 - DNA, 15 bp, Homo sapiens
tacagaagtttttgc

SEQ ID NO: 2030335 - DNA, 15 bp, Homo sapiens
acagaagtttttgca

SEQ ID NO: 2030336 - DNA, 15 bp, Homo sapiens
cagaagtttttgcat

SEQ ID NO: 2030337 - DNA, 15 bp, Homo sapiens
agaagtttttgcatt

SEQ ID NO: 2030338 - DNA, 15 bp, Homo sapiens
gaagtttttgcattt

SEQ ID NO: 2030339 - DNA, 15 bp, Homo sapiens
aagtttttgcatttg

SEQ ID NO: 2030340 - DNA, 15 bp, Homo sapiens
agtttttgcatttgg

SEQ ID NO: 2030341 - DNA, 15 bp, Homo sapiens
gtttttgcatttgga

SEQ ID NO: 2030342 - DNA, 15 bp, Homo sapiens
tttttgcatttggat

SEQ ID NO: 2030343 - DNA, 15 bp, Homo sapiens
ttttgcatttggatt

SEQ ID NO: 2030344 - DNA, 15 bp, Homo sapiens
tttgcatttggattg

SEQ ID NO: 2030345 - DNA, 15 bp, Homo sapiens
ttgcatttggattgc

SEQ ID NO: 2030346 - DNA, 15 bp, Homo sapiens
tgcatttggattgcc

SEQ ID NO: 2030347 - DNA, 15 bp, Homo sapiens
gcatttggattgcca

SEQ ID NO: 2030348 - DNA, 15 bp, Homo sapiens
catttggattgccag

SEQ ID NO: 2030349 - DNA, 15 bp, Homo sapiens
atttggattgccagt

SEQ ID NO: 2030350 - DNA, 15 bp, Homo sapiens
tttggattgccagta

SEQ ID NO: 2030351 - DNA, 15 bp, Homo sapiens
ttggattgccagtaa

SEQ ID NO: 2030352 - DNA, 15 bp, Homo sapiens
tggattgccagtaac

SEQ ID NO: 2030353 - DNA, 15 bp, Homo sapiens
ggattgccagtaacc

SEQ ID NO: 2030354 - DNA, 15 bp, Homo sapiens
gattgccagtaaccc

SEQ ID NO: 2030355 - DNA, 15 bp, Homo sapiens
attgccagtaaccct

SEQ ID NO: 2030356 - DNA, 15 bp, Homo sapiens
ttgccagtaaccctc

SEQ ID NO: 2030357 - DNA, 15 bp, Homo sapiens
tgccagtaaccctct

SEQ ID NO: 2030358 - DNA, 15 bp, Homo sapiens
gccagtaaccctctg

SEQ ID NO: 2030359 - DNA, 15 bp, Homo sapiens
ccagtaaccctctga

SEQ ID NO: 2030360 - DNA, 15 bp, Homo sapiens
cagtaaccctctgag

SEQ ID NO: 2030361 - DNA, 15 bp, Homo sapiens
agtaaccctctgagc

SEQ ID NO: 2030362 - DNA, 15 bp, Homo sapiens
gtaaccctctgagcc

SEQ ID NO: 2030363 - DNA, 15 bp, Homo sapiens
taaccctctgagccc

SEQ ID NO: 2030364 - DNA, 15 bp, Homo sapiens
aaccctctgagccct

SEQ ID NO: 2030365 - DNA, 15 bp, Homo sapiens
accctctgagccctt

SEQ ID NO: 2030366 - DNA, 15 bp, Homo sapiens
ccctctgagcccttt

SEQ ID NO: 2030367 - DNA, 15 bp, Homo sapiens
cctctgagcccttta

SEQ ID NO: 2030368 - DNA, 15 bp, Homo sapiens
ctctgagccctttac

SEQ ID NO: 2030369 - DNA, 15 bp, Homo sapiens
tctgagccctttaca

SEQ ID NO: 2030370 - DNA, 15 bp, Homo sapiens
ctgagccctttacag

SEQ ID NO: 2030371 - DNA, 15 bp, Homo sapiens
tgagccctttacagt

SEQ ID NO: 2030372 - DNA, 15 bp, Homo sapiens
gagccctttacagtg

SEQ ID NO: 2030373 - DNA, 15 bp, Homo sapiens
agccctttacagtgt

SEQ ID NO: 2030374 - DNA, 15 bp, Homo sapiens
gccctttacagtgtc

SEQ ID NO: 2030375 - DNA, 15 bp, Homo sapiens
ccctttacagtgtct

SEQ ID NO: 2030376 - DNA, 15 bp, Homo sapiens
cctttacagtgtcta

SEQ ID NO: 2030377 - DNA, 15 bp, Homo sapiens
ctttacagtgtctag

SEQ ID NO: 2030378 - DNA, 15 bp, Homo sapiens
tttacagtgtctagt

SEQ ID NO: 2030379 - DNA, 15 bp, Homo sapiens
ttacagtgtctagtg

SEQ ID NO: 2030380 - DNA, 15 bp, Homo sapiens
tacagtgtctagtga

SEQ ID NO: 2030381 - DNA, 15 bp, Homo sapiens
acagtgtctagtgag

SEQ ID NO: 2030382 - DNA, 15 bp, Homo sapiens
cagtgtctagtgagt

SEQ ID NO: 2030383 - DNA, 15 bp, Homo sapiens
agtgtctagtgagtg

SEQ ID NO: 2030384 - DNA, 15 bp, Homo sapiens
gtgtctagtgagtgg

SEQ ID NO: 2030385 - DNA, 15 bp, Homo sapiens
tgtctagtgagtgga

SEQ ID NO: 2030386 - DNA, 15 bp, Homo sapiens
gtctagtgagtggaa

SEQ ID NO: 2030387 - DNA, 15 bp, Homo sapiens
tctagtgagtggaat

SEQ ID NO: 2030388 - DNA, 15 bp, Homo sapiens
ctagtgagtggaatc

SEQ ID NO: 2030389 - DNA, 15 bp, Homo sapiens
tagtgagtggaatct

SEQ ID NO: 2030390 - DNA, 15 bp, Homo sapiens
agtgagtggaatcta

SEQ ID NO: 2030391 - DNA, 15 bp, Homo sapiens
gtgagtggaatctaa

SEQ ID NO: 2030392 - DNA, 15 bp, Homo sapiens
tgagtggaatctaaa

SEQ ID NO: 2030393 - DNA, 15 bp, Homo sapiens
gagtggaatctaaat

SEQ ID NO: 2030394 - DNA, 15 bp, Homo sapiens
agtggaatctaaatg

SEQ ID NO: 2030395 - DNA, 15 bp, Homo sapiens
gtggaatctaaatgg

SEQ ID NO: 2030396 - DNA, 15 bp, Homo sapiens
tggaatctaaatggc

SEQ ID NO: 2030397 - DNA, 15 bp, Homo sapiens
ggaatctaaatggca

SEQ ID NO: 2030398 - DNA, 15 bp, Homo sapiens
gaatctaaatggcag

SEQ ID NO: 2030399 - DNA, 15 bp, Homo sapiens
aatctaaatggcagc

SEQ ID NO: 2030400 - DNA, 15 bp, Homo sapiens
atctaaatggcagct

SEQ ID NO: 2030401 - DNA, 15 bp, Homo sapiens
tctaaatggcagctg

SEQ ID NO: 2030402 - DNA, 15 bp, Homo sapiens
ctaaatggcagctgg

SEQ ID NO: 2030403 - DNA, 15 bp, Homo sapiens
taaatggcagctgga

SEQ ID NO: 2030404 - DNA, 15 bp, Homo sapiens
aaatggcagctggaa

SEQ ID NO: 2030405 - DNA, 15 bp, Homo sapiens
aatggcagctggaat

SEQ ID NO: 2030406 - DNA, 15 bp, Homo sapiens
atggcagctggaatg

SEQ ID NO: 2030407 - DNA, 15 bp, Homo sapiens
tggcagctggaatga

SEQ ID NO: 2030408 - DNA, 15 bp, Homo sapiens
ggcagctggaatgat

SEQ ID NO: 2030409 - DNA, 15 bp, Homo sapiens
gcagctggaatgatg

SEQ ID NO: 2030410 - DNA, 15 bp, Homo sapiens
cagctggaatgatga

SEQ ID NO: 2030411 - DNA, 15 bp, Homo sapiens
agctggaatgatgat

SEQ ID NO: 2030412 - DNA, 15 bp, Homo sapiens
gctggaatgatgatg

SEQ ID NO: 2030413 - DNA, 15 bp, Homo sapiens
ctggaatgatgatgc

SEQ ID NO: 2030414 - DNA, 15 bp, Homo sapiens
tggaatgatgatgct

SEQ ID NO: 2030415 - DNA, 15 bp, Homo sapiens
ggaatgatgatgctc

SEQ ID NO: 2030416 - DNA, 15 bp, Homo sapiens
gaatgatgatgctct

SEQ ID NO: 2030417 - DNA, 15 bp, Homo sapiens
aatgatgatgctctg

SEQ ID NO: 2030418 - DNA, 15 bp, Homo sapiens
atgatgatgctctgc

SEQ ID NO: 2030419 - DNA, 15 bp, Homo sapiens
tgatgatgctctgct

SEQ ID NO: 2030420 - DNA, 15 bp, Homo sapiens
gatgatgctctgctc

SEQ ID NO: 2030421 - DNA, 15 bp, Homo sapiens
atgatgctctgctca

SEQ ID NO: 2030422 - DNA, 15 bp, Homo sapiens
tgatgctctgctcat

SEQ ID NO: 2030423 - DNA, 15 bp, Homo sapiens
gatgctctgctcatt

SEQ ID NO: 2030424 - DNA, 15 bp, Homo sapiens
atgctctgctcattt

SEQ ID NO: 2030425 - DNA, 15 bp, Homo sapiens
tgctctgctcatttt

SEQ ID NO: 2030426 - DNA, 15 bp, Homo sapiens
gctctgctcattttc

SEQ ID NO: 2030427 - DNA, 15 bp, Homo sapiens
ctctgctcattttct

SEQ ID NO: 2030428 - DNA, 15 bp, Homo sapiens
tctgctcattttctc

SEQ ID NO: 2030429 - DNA, 15 bp, Homo sapiens
ctgctcattttctct

SEQ ID NO: 2030430 - DNA, 15 bp, Homo sapiens
tgctcattttctctg

SEQ ID NO: 2030431 - DNA, 15 bp, Homo sapiens
gctcattttctctgt

SEQ ID NO: 2030432 - DNA, 15 bp, Homo sapiens
ctcattttctctgtt

SEQ ID NO: 2030433 - DNA, 15 bp, Homo sapiens
tcattttctctgttt

SEQ ID NO: 2030434 - DNA, 15 bp, Homo sapiens
cattttctctgtttt

SEQ ID NO: 2030435 - DNA, 15 bp, Homo sapiens
tttctctgttttgga

SEQ ID NO: 2030436 - DNA, 15 bp, Homo sapiens
ttctctgttttggaa

SEQ ID NO: 2030437 - DNA, 15 bp, Homo sapiens
tctctgttttggaaa

SEQ ID NO: 2030438 - DNA, 15 bp, Homo sapiens
ctctgttttggaaaa

SEQ ID NO: 2030439 - DNA, 15 bp, Homo sapiens
tctgttttggaaaat

SEQ ID NO: 2030440 - DNA, 15 bp, Homo sapiens
ctgttttggaaaatt

SEQ ID NO: 2030441 - DNA, 15 bp, Homo sapiens
tgttttggaaaattg

SEQ ID NO: 2030442 - DNA, 15 bp, Homo sapiens
gttttggaaaattgg

SEQ ID NO: 2030443 - DNA, 15 bp, Homo sapiens
ttttggaaaattggc

SEQ ID NO: 2030444 - DNA, 15 bp, Homo sapiens
tttggaaaattggct

SEQ ID NO: 2030445 - DNA, 15 bp, Homo sapiens
ttggaaaattggcta

SEQ ID NO: 2030446 - DNA, 15 bp, Homo sapiens
tggaaaattggctag

SEQ ID NO: 2030447 - DNA, 15 bp, Homo sapiens
ggaaaattggctaga

SEQ ID NO: 2030448 - DNA, 15 bp, Homo sapiens
gaaaattggctagac

SEQ ID NO: 2030449 - DNA, 15 bp, Homo sapiens
aaaattggctagaca

SEQ ID NO: 2030450 - DNA, 15 bp, Homo sapiens
aaattggctagacat

SEQ ID NO: 2030451 - DNA, 15 bp, Homo sapiens
aattggctagacatc

SEQ ID NO: 2030452 - DNA, 15 bp, Homo sapiens
attggctagacatca

SEQ ID NO: 2030453 - DNA, 15 bp, Homo sapiens
ttggctagacatcat

SEQ ID NO: 2030454 - DNA, 15 bp, Homo sapiens
tggctagacatcatt

SEQ ID NO: 2030455 - DNA, 15 bp, Homo sapiens
ggctagacatcattc

SEQ ID NO: 2030456 - DNA, 15 bp, Homo sapiens
gctagacatcattcc

SEQ ID NO: 2030457 - DNA, 15 bp, Homo sapiens
ctagacatcattcct

SEQ ID NO: 2030458 - DNA, 15 bp, Homo sapiens
tagacatcattcctg

SEQ ID NO: 2030459 - DNA, 15 bp, Homo sapiens
agacatcattcctgg

SEQ ID NO: 2030460 - DNA, 15 bp, Homo sapiens
gacatcattcctggt

SEQ ID NO: 2030461 - DNA, 15 bp, Homo sapiens
acatcattcctggtg

SEQ ID NO: 2030462 - DNA, 15 bp, Homo sapiens
catcattcctggtga

SEQ ID NO: 2030463 - DNA, 15 bp, Homo sapiens
atcattcctggtgat

SEQ ID NO: 2030464 - DNA, 15 bp, Homo sapiens
tcattcctggtgatt

SEQ ID NO: 2030465 - DNA, 15 bp, Homo sapiens
cattcctggtgattg

SEQ ID NO: 2030466 - DNA, 15 bp, Homo sapiens
attcctggtgattgt

SEQ ID NO: 2030467 - DNA, 15 bp, Homo sapiens
ttcctggtgattgta

SEQ ID NO: 2030468 - DNA, 15 bp, Homo sapiens
tcctggtgattgtat

SEQ ID NO: 2030469 - DNA, 15 bp, Homo sapiens
cctggtgattgtatt

SEQ ID NO: 2030470 - DNA, 15 bp, Homo sapiens
ctggtgattgtattg

SEQ ID NO: 2030471 - DNA, 15 bp, Homo sapiens
tggtgattgtattgt

SEQ ID NO: 2030472 - DNA, 15 bp, Homo sapiens
ggtgattgtattgtc

SEQ ID NO: 2030473 - DNA, 15 bp, Homo sapiens
gtgattgtattgtct

SEQ ID NO: 2030474 - DNA, 15 bp, Homo sapiens
tgattgtattgtctc

SEQ ID NO: 2030475 - DNA, 15 bp, Homo sapiens
gattgtattgtctca

SEQ ID NO: 2030476 - DNA, 15 bp, Homo sapiens
attgtattgtctcag

SEQ ID NO: 2030477 - DNA, 15 bp, Homo sapiens
ttgtattgtctcagt

SEQ ID NO: 2030478 - DNA, 15 bp, Homo sapiens
tgtattgtctcagta

SEQ ID NO: 2030479 - DNA, 15 bp, Homo sapiens
gtattgtctcagtat

SEQ ID NO: 2030480 - DNA, 15 bp, Homo sapiens
tattgtctcagtatt

SEQ ID NO: 2030481 - DNA, 15 bp, Homo sapiens
attgtctcagtatta

SEQ ID NO: 2030482 - DNA, 15 bp, Homo sapiens
ttgtctcagtattac

SEQ ID NO: 2030483 - DNA, 15 bp, Homo sapiens
tgtctcagtattaca

SEQ ID NO: 2030484 - DNA, 15 bp, Homo sapiens
gtctcagtattacat

SEQ ID NO: 2030485 - DNA, 15 bp, Homo sapiens
tctcagtattacatt

SEQ ID NO: 2030486 - DNA, 15 bp, Homo sapiens
ctcagtattacattc

SEQ ID NO: 2030487 - DNA, 15 bp, Homo sapiens
tcagtattacattca

SEQ ID NO: 2030488 - DNA, 15 bp, Homo sapiens
cagtattacattcag

SEQ ID NO: 2030489 - DNA, 15 bp, Homo sapiens
agtattacattcagt

SEQ ID NO: 2030490 - DNA, 15 bp, Homo sapiens
gtattacattcagtc

SEQ ID NO: 2030491 - DNA, 15 bp, Homo sapiens
tattacattcagtct

SEQ ID NO: 2030492 - DNA, 15 bp, Homo sapiens
attacattcagtctg

SEQ ID NO: 2030493 - DNA, 15 bp, Homo sapiens
ttacattcagtctgt

SEQ ID NO: 2030494 - DNA, 15 bp, Homo sapiens
tacattcagtctgtc

SEQ ID NO: 2030495 - DNA, 15 bp, Homo sapiens
acattcagtctgtct

SEQ ID NO: 2030496 - DNA, 15 bp, Homo sapiens
cattcagtctgtctt

SEQ ID NO: 2030497 - DNA, 15 bp, Homo sapiens
attcagtctgtcttg

SEQ ID NO: 2030498 - DNA, 15 bp, Homo sapiens
ttcagtctgtcttgt

SEQ ID NO: 2030499 - DNA, 15 bp, Homo sapiens
tcagtctgtcttgtg

SEQ ID NO: 2030500 - DNA, 15 bp, Homo sapiens
cagtctgtcttgtgc

SEQ ID NO: 2030501 - DNA, 15 bp, Homo sapiens
agtctgtcttgtgca

SEQ ID NO: 2030502 - DNA, 15 bp, Homo sapiens
gtctgtcttgtgcat

SEQ ID NO: 2030503 - DNA, 15 bp, Homo sapiens
tctgtcttgtgcatg

SEQ ID NO: 2030504 - DNA, 15 bp, Homo sapiens
ctgtcttgtgcatgg

SEQ ID NO: 2030505 - DNA, 15 bp, Homo sapiens
tgtcttgtgcatggc

SEQ ID NO: 2030506 - DNA, 15 bp, Homo sapiens
gtcttgtgcatggct

SEQ ID NO: 2030507 - DNA, 15 bp, Homo sapiens
tcttgtgcatggctt

SEQ ID NO: 2030508 - DNA, 15 bp, Homo sapiens
cttgtgcatggcttt

SEQ ID NO: 2030509 - DNA, 15 bp, Homo sapiens
ttgtgcatggctttc

SEQ ID NO: 2030510 - DNA, 15 bp, Homo sapiens
tgtgcatggctttca

SEQ ID NO: 2030511 - DNA, 15 bp, Homo sapiens
gtgcatggctttcag

SEQ ID NO: 2030512 - DNA, 15 bp, Homo sapiens
tgcatggctttcaga

SEQ ID NO: 2030513 - DNA, 15 bp, Homo sapiens
gcatggctttcagaa

SEQ ID NO: 2030514 - DNA, 15 bp, Homo sapiens
catggctttcagaaa

SEQ ID NO: 2030515 - DNA, 15 bp, Homo sapiens
atggctttcagaaaa

SEQ ID NO: 2030516 - DNA, 15 bp, Homo sapiens
tggctttcagaaaat

SEQ ID NO: 2030517 - DNA, 15 bp, Homo sapiens
ggctttcagaaaatg

SEQ ID NO: 2030518 - DNA, 15 bp, Homo sapiens
gctttcagaaaatgc

SEQ ID NO: 2030519 - DNA, 15 bp, Homo sapiens
ctttcagaaaatgca

SEQ ID NO: 2030520 - DNA, 15 bp, Homo sapiens
ttcagaaaatgcagg

SEQ ID NO: 2030521 - DNA, 15 bp, Homo sapiens
tcagaaaatgcaggt

SEQ ID NO: 2030522 - DNA, 15 bp, Homo sapiens
cagaaaatgcaggtt

SEQ ID NO: 2030523 - DNA, 15 bp, Homo sapiens
agaaaatgcaggttc

SEQ ID NO: 2030524 - DNA, 15 bp, Homo sapiens
gaaaatgcaggttca

SEQ ID NO: 2030525 - DNA, 15 bp, Homo sapiens
aaaatgcaggttcat

SEQ ID NO: 2030526 - DNA, 15 bp, Homo sapiens
aaatgcaggttcatc

SEQ ID NO: 2030527 - DNA, 15 bp, Homo sapiens
aatgcaggttcatct

SEQ ID NO: 2030528 - DNA, 15 bp, Homo sapiens
atgcaggttcatctg

SEQ ID NO: 2030529 - DNA, 15 bp, Homo sapiens
tgcaggttcatctgg

SEQ ID NO: 2030530 - DNA, 15 bp, Homo sapiens
gcaggttcatctgga

SEQ ID NO: 2030531 - DNA, 15 bp, Homo sapiens
caggttcatctggaa

SEQ ID NO: 2030532 - DNA, 15 bp, Homo sapiens
aggttcatctggaag

SEQ ID NO: 2030533 - DNA, 15 bp, Homo sapiens
ggttcatctggaagc

SEQ ID NO: 2030534 - DNA, 15 bp, Homo sapiens
gttcatctggaagct

SEQ ID NO: 2030535 - DNA, 15 bp, Homo sapiens
ttcatctggaagctt

SEQ ID NO: 2030536 - DNA, 15 bp, Homo sapiens
tcatctggaagcttt

SEQ ID NO: 2030537 - DNA, 15 bp, Homo sapiens
catctggaagcttta

SEQ ID NO: 2030538 - DNA, 15 bp, Homo sapiens
atctggaagctttaa

SEQ ID NO: 2030539 - DNA, 15 bp, Homo sapiens
tctggaagctttaag

SEQ ID NO: 2030540 - DNA, 15 bp, Homo sapiens
ctggaagctttaagc

SEQ ID NO: 2030541 - DNA, 15 bp, Homo sapiens
tggaagctttaagct

SEQ ID NO: 2030542 - DNA, 15 bp, Homo sapiens
ggaagctttaagctg

SEQ ID NO: 2030543 - DNA, 15 bp, Homo sapiens
gaagctttaagctga

SEQ ID NO: 2030544 - DNA, 15 bp, Homo sapiens
aagctttaagctgaa

SEQ ID NO: 2030545 - DNA, 15 bp, Homo sapiens
agctttaagctgaat

SEQ ID NO: 2030546 - DNA, 15 bp, Homo sapiens
gctttaagctgaata

SEQ ID NO: 2030547 - DNA, 15 bp, Homo sapiens
ctttaagctgaatag

SEQ ID NO: 2030548 - DNA, 15 bp, Homo sapiens
tttaagctgaataga

SEQ ID NO: 2030549 - DNA, 15 bp, Homo sapiens
ttaagctgaatagaa

SEQ ID NO: 2030550 - DNA, 15 bp, Homo sapiens
taagctgaatagaac

SEQ ID NO: 2030551 - DNA, 15 bp, Homo sapiens
aagctgaatagaact

SEQ ID NO: 2030552 - DNA, 15 bp, Homo sapiens
agctgaatagaactc

SEQ ID NO: 2030553 - DNA, 15 bp, Homo sapiens
gctgaatagaactcc

SEQ ID NO: 2030554 - DNA, 15 bp, Homo sapiens
ctgaatagaactccc

SEQ ID NO: 2030555 - DNA, 15 bp, Homo sapiens
tgaatagaactccct

SEQ ID NO: 2030556 - DNA, 15 bp, Homo sapiens
gaatagaactccctg

SEQ ID NO: 2030557 - DNA, 15 bp, Homo sapiens
aatagaactccctgt

SEQ ID NO: 2030558 - DNA, 15 bp, Homo sapiens
atagaactccctgtt

SEQ ID NO: 2030559 - DNA, 15 bp, Homo sapiens
tagaactccctgttg

SEQ ID NO: 2030560 - DNA, 15 bp, Homo sapiens
agaactccctgttgt

SEQ ID NO: 2030561 - DNA, 15 bp, Homo sapiens
gaactccctgttgta

SEQ ID NO: 2030562 - DNA, 15 bp, Homo sapiens
aactccctgttgtaa

SEQ ID NO: 2030563 - DNA, 15 bp, Homo sapiens
actccctgttgtaag

SEQ ID NO: 2030564 - DNA, 15 bp, Homo sapiens
ctccctgttgtaagt

SEQ ID NO: 2030565 - DNA, 15 bp, Homo sapiens
tccctgttgtaagtc

SEQ ID NO: 2030566 - DNA, 15 bp, Homo sapiens
ccctgttgtaagtcc

SEQ ID NO: 2030567 - DNA, 15 bp, Homo sapiens
cctgttgtaagtcct

SEQ ID NO: 2030568 - DNA, 15 bp, Homo sapiens
ctgttgtaagtccta

SEQ ID NO: 2030569 - DNA, 15 bp, Homo sapiens
tgttgtaagtcctat

SEQ ID NO: 2030570 - DNA, 15 bp, Homo sapiens
gttgtaagtcctatg

SEQ ID NO: 2030571 - DNA, 15 bp, Homo sapiens
ttgtaagtcctatgg

SEQ ID NO: 2030572 - DNA, 15 bp, Homo sapiens
tgtaagtcctatggt

SEQ ID NO: 2030573 - DNA, 15 bp, Homo sapiens
gtaagtcctatggta

SEQ ID NO: 2030574 - DNA, 15 bp, Homo sapiens
taagtcctatggtag

SEQ ID NO: 2030575 - DNA, 15 bp, Homo sapiens
aagtcctatggtagt

SEQ ID NO: 2030576 - DNA, 15 bp, Homo sapiens
agtcctatggtagtc

SEQ ID NO: 2030577 - DNA, 15 bp, Homo sapiens
gtcctatggtagtct

SEQ ID NO: 2030578 - DNA, 15 bp, Homo sapiens
tcctatggtagtcta

SEQ ID NO: 2030579 - DNA, 15 bp, Homo sapiens
cctatggtagtctat

SEQ ID NO: 2030580 - DNA, 15 bp, Homo sapiens
ctatggtagtctata

SEQ ID NO: 2030581 - DNA, 15 bp, Homo sapiens
tatggtagtctataa

SEQ ID NO: 2030582 - DNA, 15 bp, Homo sapiens
atggtagtctataaa

SEQ ID NO: 2030583 - DNA, 15 bp, Homo sapiens
tggtagtctataaat

SEQ ID NO: 2030584 - DNA, 15 bp, Homo sapiens
ggtagtctataaata

SEQ ID NO: 2030585 - DNA, 15 bp, Homo sapiens
gtagtctataaatat

SEQ ID NO: 2030586 - DNA, 15 bp, Homo sapiens
tagtctataaatatt

SEQ ID NO: 2030587 - DNA, 15 bp, Homo sapiens
agtctataaatatta

SEQ ID NO: 2030588 - DNA, 15 bp, Homo sapiens
gtctataaatattac

SEQ ID NO: 2030589 - DNA, 15 bp, Homo sapiens
tctataaatattact

SEQ ID NO: 2030590 - DNA, 15 bp, Homo sapiens
ctataaatattactc

SEQ ID NO: 2030591 - DNA, 15 bp, Homo sapiens
tataaatattactcc

SEQ ID NO: 2030592 - DNA, 15 bp, Homo sapiens
ataaatattactcca

SEQ ID NO: 2030593 - DNA, 15 bp, Homo sapiens
taaatattactccac

SEQ ID NO: 2030594 - DNA, 15 bp, Homo sapiens
aaatattactccact

SEQ ID NO: 2030595 - DNA, 15 bp, Homo sapiens
aatattactccactc

SEQ ID NO: 2030596 - DNA, 15 bp, Homo sapiens
atattactccactcc

SEQ ID NO: 2030597 - DNA, 15 bp, Homo sapiens
tattactccactccc

SEQ ID NO: 2030598 - DNA, 15 bp, Homo sapiens
attactccactcccc

SEQ ID NO: 2030599 - DNA, 15 bp, Homo sapiens
ttactccactcccct

SEQ ID NO: 2030600 - DNA, 15 bp, Homo sapiens
tactccactcccctt

SEQ ID NO: 2030601 - DNA, 15 bp, Homo sapiens
actccactccccttt

SEQ ID NO: 2030602 - DNA, 15 bp, Homo sapiens
ctccactcccctttt

SEQ ID NO: 2030603 - DNA, 15 bp, Homo sapiens
tccactccccttttt

SEQ ID NO: 2030604 - DNA, 15 bp, Homo sapiens
ccactcccctttttt

SEQ ID NO: 2030605 - DNA, 15 bp, Homo sapiens
cactcccctttttta

SEQ ID NO: 2030606 - DNA, 15 bp, Homo sapiens
actccccttttttaa

SEQ ID NO: 2030607 - DNA, 15 bp, Homo sapiens
ctccccttttttaat

SEQ ID NO: 2030608 - DNA, 15 bp, Homo sapiens
tccccttttttaatg

SEQ ID NO: 2030609 - DNA, 15 bp, Homo sapiens
ccccttttttaatga

SEQ ID NO: 2030610 - DNA, 15 bp, Homo sapiens
cccttttttaatgat

SEQ ID NO: 2030611 - DNA, 15 bp, Homo sapiens
ccttttttaatgata

SEQ ID NO: 2030612 - DNA, 15 bp, Homo sapiens
cttttttaatgataa

SEQ ID NO: 2030613 - DNA, 15 bp, Homo sapiens
ttttttaatgataag

SEQ ID NO: 2030614 - DNA, 15 bp, Homo sapiens
tttttaatgataagt

SEQ ID NO: 2030615 - DNA, 15 bp, Homo sapiens
ttttaatgataagta

SEQ ID NO: 2030616 - DNA, 15 bp, Homo sapiens
tttaatgataagtaa

SEQ ID NO: 2030617 - DNA, 15 bp, Homo sapiens
ttaatgataagtaat

SEQ ID NO: 2030618 - DNA, 15 bp, Homo sapiens
taatgataagtaata

SEQ ID NO: 2030619 - DNA, 15 bp, Homo sapiens
aatgataagtaatac

SEQ ID NO: 2030620 - DNA, 15 bp, Homo sapiens
atgataagtaataca

SEQ ID NO: 2030621 - DNA, 15 bp, Homo sapiens
tgataagtaatacaa

SEQ ID NO: 2030622 - DNA, 15 bp, Homo sapiens
gataagtaatacaaa

SEQ ID NO: 2030623 - DNA, 15 bp, Homo sapiens
ataagtaatacaaag

SEQ ID NO: 2030624 - DNA, 15 bp, Homo sapiens
taagtaatacaaagg

SEQ ID NO: 2030625 - DNA, 15 bp, Homo sapiens
aagtaatacaaagga

SEQ ID NO: 2030626 - DNA, 15 bp, Homo sapiens
agtaatacaaaggaa

SEQ ID NO: 2030627 - DNA, 15 bp, Homo sapiens
gtaatacaaaggaag

SEQ ID NO: 2030628 - DNA, 15 bp, Homo sapiens
taatacaaaggaaga

SEQ ID NO: 2030629 - DNA, 15 bp, Homo sapiens
aatacaaaggaagaa

SEQ ID NO: 2030630 - DNA, 15 bp, Homo sapiens
atacaaaggaagaaa

SEQ ID NO: 2030631 - DNA, 15 bp, Homo sapiens
tacaaaggaagaaaa

SEQ ID NO: 2030632 - DNA, 15 bp, Homo sapiens
acaaaggaagaaaaa

SEQ ID NO: 2030633 - DNA, 15 bp, Homo sapiens
caaaggaagaaaaat

SEQ ID NO: 2030634 - DNA, 15 bp, Homo sapiens
aaaggaagaaaaata

SEQ ID NO: 2030635 - DNA, 15 bp, Homo sapiens
aaggaagaaaaatag

SEQ ID NO: 2030636 - DNA, 15 bp, Homo sapiens
aggaagaaaaatagt

SEQ ID NO: 2030637 - DNA, 15 bp, Homo sapiens
ggaagaaaaatagta

SEQ ID NO: 2030638 - DNA, 15 bp, Homo sapiens
gaagaaaaatagtaa

SEQ ID NO: 2030639 - DNA, 15 bp, Homo sapiens
aagaaaaatagtaaa

SEQ ID NO: 2030640 - DNA, 15 bp, Homo sapiens
agaaaaatagtaaat

SEQ ID NO: 2030641 - DNA, 15 bp, Homo sapiens
gaaaaatagtaaatt

SEQ ID NO: 2030642 - DNA, 15 bp, Homo sapiens
aaaaatagtaaatta

SEQ ID NO: 2030643 - DNA, 15 bp, Homo sapiens
aaaatagtaaattaa

SEQ ID NO: 2030644 - DNA, 15 bp, Homo sapiens
aaatagtaaattaag

SEQ ID NO: 2030645 - DNA, 15 bp, Homo sapiens
aatagtaaattaagt

SEQ ID NO: 2030646 - DNA, 15 bp, Homo sapiens
atagtaaattaagtc

SEQ ID NO: 2030647 - DNA, 15 bp, Homo sapiens
tagtaaattaagtcc

SEQ ID NO: 2030648 - DNA, 15 bp, Homo sapiens
agtaaattaagtcca

SEQ ID NO: 2030649 - DNA, 15 bp, Homo sapiens
gtaaattaagtccaa

SEQ ID NO: 2030650 - DNA, 15 bp, Homo sapiens
taaattaagtccaaa

SEQ ID NO: 2030651 - DNA, 15 bp, Homo sapiens
aaattaagtccaaac

SEQ ID NO: 2030652 - DNA, 15 bp, Homo sapiens
aattaagtccaaaca

SEQ ID NO: 2030653 - DNA, 15 bp, Homo sapiens
attaagtccaaacaa

SEQ ID NO: 2030654 - DNA, 15 bp, Homo sapiens
ttaagtccaaacaaa

SEQ ID NO: 2030655 - DNA, 15 bp, Homo sapiens
taagtccaaacaaaa

SEQ ID NO: 2030656 - DNA, 15 bp, Homo sapiens
aagtccaaacaaaat

SEQ ID NO: 2030657 - DNA, 15 bp, Homo sapiens
agtccaaacaaaatt

SEQ ID NO: 2030658 - DNA, 15 bp, Homo sapiens
gtccaaacaaaatta

SEQ ID NO: 2030659 - DNA, 15 bp, Homo sapiens
tccaaacaaaattaa

SEQ ID NO: 2030660 - DNA, 15 bp, Homo sapiens
ccaaacaaaattaat

SEQ ID NO: 2030661 - DNA, 15 bp, Homo sapiens
aaacaaaattaatat

SEQ ID NO: 2030662 - DNA, 15 bp, Homo sapiens
aacaaaattaatatt

SEQ ID NO: 2030663 - DNA, 15 bp, Homo sapiens
acaaaattaatattt

SEQ ID NO: 2030664 - DNA, 15 bp, Homo sapiens
caaaattaatatttt

SEQ ID NO: 2030665 - DNA, 15 bp, Homo sapiens
aaaattaatattttt

SEQ ID NO: 2030666 - DNA, 15 bp, Homo sapiens
aaattaatatttttg

SEQ ID NO: 2030667 - DNA, 15 bp, Homo sapiens
aattaatatttttgg

SEQ ID NO: 2030668 - DNA, 15 bp, Homo sapiens
attaatatttttggc

SEQ ID NO: 2030669 - DNA, 15 bp, Homo sapiens
ttaatatttttggct

SEQ ID NO: 2030670 - DNA, 15 bp, Homo sapiens
taatatttttggctt

SEQ ID NO: 2030671 - DNA, 15 bp, Homo sapiens
atttttggcttcaga

SEQ ID NO: 2030672 - DNA, 15 bp, Homo sapiens
tttttggcttcagat

SEQ ID NO: 2030673 - DNA, 15 bp, Homo sapiens
ttttggcttcagatg

SEQ ID NO: 2030674 - DNA, 15 bp, Homo sapiens
tttggcttcagatgg

SEQ ID NO: 2030675 - DNA, 15 bp, Homo sapiens
ttggcttcagatggg

SEQ ID NO: 2030676 - DNA, 15 bp, Homo sapiens
tggcttcagatgggg

SEQ ID NO: 2030677 - DNA, 15 bp, Homo sapiens
ggcttcagatgggga

SEQ ID NO: 2030678 - DNA, 15 bp, Homo sapiens
gcttcagatggggat

SEQ ID NO: 2030679 - DNA, 15 bp, Homo sapiens
cttcagatggggatt

SEQ ID NO: 2030680 - DNA, 15 bp, Homo sapiens
ttcagatggggattt

SEQ ID NO: 2030681 - DNA, 15 bp, Homo sapiens
tcagatggggattta

SEQ ID NO: 2030682 - DNA, 15 bp, Homo sapiens
cagatggggatttac

SEQ ID NO: 2030683 - DNA, 15 bp, Homo sapiens
agatggggatttact

SEQ ID NO: 2030684 - DNA, 15 bp, Homo sapiens
gatggggatttactt

SEQ ID NO: 2030685 - DNA, 15 bp, Homo sapiens
atggggatttactta

SEQ ID NO: 2030686 - DNA, 15 bp, Homo sapiens
tggggatttacttaa

SEQ ID NO: 2030687 - DNA, 15 bp, Homo sapiens
ggggatttacttaaa

SEQ ID NO: 2030688 - DNA, 15 bp, Homo sapiens
gggatttacttaaaa

SEQ ID NO: 2030689 - DNA, 15 bp, Homo sapiens
ggatttacttaaaaa

SEQ ID NO: 2030690 - DNA, 15 bp, Homo sapiens
gatttacttaaaaaa

SEQ ID NO: 2030691 - DNA, 15 bp, Homo sapiens
atttacttaaaaaaa

SEQ ID NO: 2030692 - DNA, 15 bp, Homo sapiens
tttacttaaaaaaaa

SEQ ID NO: 2030693 - DNA, 15 bp, Homo sapiens
ttacttaaaaaaaag

SEQ ID NO: 2030694 - DNA, 15 bp, Homo sapiens
tacttaaaaaaaagg

SEQ ID NO: 2030695 - DNA, 15 bp, Homo sapiens
acttaaaaaaaagga

SEQ ID NO: 2030696 - DNA, 15 bp, Homo sapiens
cttaaaaaaaaggaa

SEQ ID NO: 2030697 - DNA, 15 bp, Homo sapiens
ttaaaaaaaaggaac

SEQ ID NO: 2030698 - DNA, 15 bp, Homo sapiens
taaaaaaaaggaact

SEQ ID NO: 2030699 - DNA, 15 bp, Homo sapiens
aaaaaaaaggaacta

SEQ ID NO: 2030700 - DNA, 15 bp, Homo sapiens
aaaaaaaggaactaa

SEQ ID NO: 2030701 - DNA, 15 bp, Homo sapiens
aaaaaaggaactaaa

SEQ ID NO: 2030702 - DNA, 15 bp, Homo sapiens
aaaaaggaactaaaa

SEQ ID NO: 2030703 - DNA, 15 bp, Homo sapiens
aaaaggaactaaaat

SEQ ID NO: 2030704 - DNA, 15 bp, Homo sapiens
aaaggaactaaaata

SEQ ID NO: 2030705 - DNA, 15 bp, Homo sapiens
aaggaactaaaataa

SEQ ID NO: 2030706 - DNA, 15 bp, Homo sapiens
aggaactaaaataat

SEQ ID NO: 2030707 - DNA, 15 bp, Homo sapiens
ggaactaaaataatt

SEQ ID NO: 2030708 - DNA, 15 bp, Homo sapiens
gaactaaaataattt

SEQ ID NO: 2030709 - DNA, 15 bp, Homo sapiens
aactaaaataatttc

SEQ ID NO: 2030710 - DNA, 15 bp, Homo sapiens
actaaaataatttcc

SEQ ID NO: 2030711 - DNA, 15 bp, Homo sapiens
ctaaaataatttcct

SEQ ID NO: 2030712 - DNA, 15 bp, Homo sapiens
taaaataatttccta

SEQ ID NO: 2030713 - DNA, 15 bp, Homo sapiens
aaaataatttcctat

SEQ ID NO: 2030714 - DNA, 15 bp, Homo sapiens
aaataatttcctatt

SEQ ID NO: 2030715 - DNA, 15 bp, Homo sapiens
aataatttcctattt

SEQ ID NO: 2030716 - DNA, 15 bp, Homo sapiens
ataatttcctatttt

SEQ ID NO: 2030717 - DNA, 15 bp, Homo sapiens
taatttcctattttc

SEQ ID NO: 2030718 - DNA, 15 bp, Homo sapiens
aatttcctattttcc

SEQ ID NO: 2030719 - DNA, 15 bp, Homo sapiens
atttcctattttcca

SEQ ID NO: 2030720 - DNA, 15 bp, Homo sapiens
tttcctattttccat

SEQ ID NO: 2030721 - DNA, 15 bp, Homo sapiens
ttcctattttccatt

SEQ ID NO: 2030722 - DNA, 15 bp, Homo sapiens
tcctattttccatta

SEQ ID NO: 2030723 - DNA, 15 bp, Homo sapiens
cctattttccattac

SEQ ID NO: 2030724 - DNA, 15 bp, Homo sapiens
ctattttccattaca

SEQ ID NO: 2030725 - DNA, 15 bp, Homo sapiens
tattttccattacag

SEQ ID NO: 2030726 - DNA, 15 bp, Homo sapiens
attttccattacagc

SEQ ID NO: 2030727 - DNA, 15 bp, Homo sapiens
ttttccattacagca

SEQ ID NO: 2030728 - DNA, 15 bp, Homo sapiens
tttccattacagcaa

SEQ ID NO: 2030729 - DNA, 15 bp, Homo sapiens
ttccattacagcaaa

SEQ ID NO: 2030730 - DNA, 15 bp, Homo sapiens
tccattacagcaaac

SEQ ID NO: 2030731 - DNA, 15 bp, Homo sapiens
ccattacagcaaaca

SEQ ID NO: 2030732 - DNA, 15 bp, Homo sapiens
cattacagcaaacac

SEQ ID NO: 2030733 - DNA, 15 bp, Homo sapiens
attacagcaaacaca

SEQ ID NO: 2030734 - DNA, 15 bp, Homo sapiens
ttacagcaaacacaa

SEQ ID NO: 2030735 - DNA, 15 bp, Homo sapiens
tacagcaaacacaaa

SEQ ID NO: 2030736 - DNA, 15 bp, Homo sapiens
acagcaaacacaaat

SEQ ID NO: 2030737 - DNA, 15 bp, Homo sapiens
cagcaaacacaaatt

SEQ ID NO: 2030738 - DNA, 15 bp, Homo sapiens
agcaaacacaaattc

SEQ ID NO: 2030739 - DNA, 15 bp, Homo sapiens
gcaaacacaaattcc

SEQ ID NO: 2030740 - DNA, 15 bp, Homo sapiens
caaacacaaattcca

SEQ ID NO: 2030741 - DNA, 15 bp, Homo sapiens
aaacacaaattccag

SEQ ID NO: 2030742 - DNA, 15 bp, Homo sapiens
aacacaaattccaga

SEQ ID NO: 2030743 - DNA, 15 bp, Homo sapiens
acacaaattccagac

SEQ ID NO: 2030744 - DNA, 15 bp, Homo sapiens
cacaaattccagact

SEQ ID NO: 2030745 - DNA, 15 bp, Homo sapiens
acaaattccagacta

SEQ ID NO: 2030746 - DNA, 15 bp, Homo sapiens
caaattccagactat

SEQ ID NO: 2030747 - DNA, 15 bp, Homo sapiens
aaattccagactatg

SEQ ID NO: 2030748 - DNA, 15 bp, Homo sapiens
aattccagactatgc

SEQ ID NO: 2030749 - DNA, 15 bp, Homo sapiens
attccagactatgct

SEQ ID NO: 2030750 - DNA, 15 bp, Homo sapiens
ttccagactatgctg

SEQ ID NO: 2030751 - DNA, 15 bp, Homo sapiens
tccagactatgctga

SEQ ID NO: 2030752 - DNA, 15 bp, Homo sapiens
ccagactatgctgag

SEQ ID NO: 2030753 - DNA, 15 bp, Homo sapiens
cagactatgctgagc

SEQ ID NO: 2030754 - DNA, 15 bp, Homo sapiens
agactatgctgagct

SEQ ID NO: 2030755 - DNA, 15 bp, Homo sapiens
gactatgctgagctt

SEQ ID NO: 2030756 - DNA, 15 bp, Homo sapiens
actatgctgagctta

SEQ ID NO: 2030757 - DNA, 15 bp, Homo sapiens
ctatgctgagcttat

SEQ ID NO: 2030758 - DNA, 15 bp, Homo sapiens
tatgctgagcttatt

SEQ ID NO: 2030759 - DNA, 15 bp, Homo sapiens
atgctgagcttattg

SEQ ID NO: 2030760 - DNA, 15 bp, Homo sapiens
tgctgagcttattgt

SEQ ID NO: 2030761 - DNA, 15 bp, Homo sapiens
gctgagcttattgtt

SEQ ID NO: 2030762 - DNA, 15 bp, Homo sapiens
ctgagcttattgtta

SEQ ID NO: 2030763 - DNA, 15 bp, Homo sapiens
tgagcttattgttaa

SEQ ID NO: 2030764 - DNA, 15 bp, Homo sapiens
gagcttattgttaag

SEQ ID NO: 2030765 - DNA, 15 bp, Homo sapiens
agcttattgttaagt

SEQ ID NO: 2030766 - DNA, 15 bp, Homo sapiens
gcttattgttaagtt

SEQ ID NO: 2030767 - DNA, 15 bp, Homo sapiens
cttattgttaagttt

SEQ ID NO: 2030768 - DNA, 15 bp, Homo sapiens
ttattgttaagtttc

SEQ ID NO: 2030769 - DNA, 15 bp, Homo sapiens
attgttaagtttctt

SEQ ID NO: 2030770 - DNA, 15 bp, Homo sapiens
ttgttaagtttcttg

SEQ ID NO: 2030771 - DNA, 15 bp, Homo sapiens
tgttaagtttcttga

SEQ ID NO: 2030772 - DNA, 15 bp, Homo sapiens
gttaagtttcttgat

SEQ ID NO: 2030773 - DNA, 15 bp, Homo sapiens
ttaagtttcttgatg

SEQ ID NO: 2030774 - DNA, 15 bp, Homo sapiens
taagtttcttgatgc

SEQ ID NO: 2030775 - DNA, 15 bp, Homo sapiens
aagtttcttgatgcc

SEQ ID NO: 2030776 - DNA, 15 bp, Homo sapiens
agtttcttgatgcct

SEQ ID NO: 2030777 - DNA, 15 bp, Homo sapiens
gtttcttgatgcctt

SEQ ID NO: 2030778 - DNA, 15 bp, Homo sapiens
tttcttgatgccttg

SEQ ID NO: 2030779 - DNA, 15 bp, Homo sapiens
ttcttgatgccttga

SEQ ID NO: 2030780 - DNA, 15 bp, Homo sapiens
tcttgatgccttgat

SEQ ID NO: 2030781 - DNA, 15 bp, Homo sapiens
cttgatgccttgatt

SEQ ID NO: 2030782 - DNA, 15 bp, Homo sapiens
ttgatgccttgattg

SEQ ID NO: 2030783 - DNA, 15 bp, Homo sapiens
tgatgccttgattga

SEQ ID NO: 2030784 - DNA, 15 bp, Homo sapiens
gatgccttgattgac

SEQ ID NO: 2030785 - DNA, 15 bp, Homo sapiens
atgccttgattgaca

SEQ ID NO: 2030786 - DNA, 15 bp, Homo sapiens
tgccttgattgacac

SEQ ID NO: 2030787 - DNA, 15 bp, Homo sapiens
gccttgattgacacg

SEQ ID NO: 2030788 - DNA, 15 bp, Homo sapiens
ccttgattgacacgt

SEQ ID NO: 2030789 - DNA, 15 bp, Homo sapiens
cttgattgacacgta

SEQ ID NO: 2030790 - DNA, 15 bp, Homo sapiens
ttgattgacacgtac

SEQ ID NO: 2030791 - DNA, 15 bp, Homo sapiens
tgattgacacgtacc

SEQ ID NO: 2030792 - DNA, 15 bp, Homo sapiens
gattgacacgtacct

SEQ ID NO: 2030793 - DNA, 15 bp, Homo sapiens
attgacacgtacctg

SEQ ID NO: 2030794 - DNA, 15 bp, Homo sapiens
ttgacacgtacctgc

SEQ ID NO: 2030795 - DNA, 15 bp, Homo sapiens
tgacacgtacctgcc

SEQ ID NO: 2030796 - DNA, 15 bp, Homo sapiens
gacacgtacctgcct

SEQ ID NO: 2030797 - DNA, 15 bp, Homo sapiens
acacgtacctgcctg

SEQ ID NO: 2030798 - DNA, 15 bp, Homo sapiens
cacgtacctgcctgg

SEQ ID NO: 2030799 - DNA, 15 bp, Homo sapiens
acgtacctgcctgga

SEQ ID NO: 2030800 - DNA, 15 bp, Homo sapiens
cgtacctgcctggaa

SEQ ID NO: 2030801 - DNA, 15 bp, Homo sapiens
gtacctgcctggaat

SEQ ID NO: 2030802 - DNA, 15 bp, Homo sapiens
tacctgcctggaatt

SEQ ID NO: 2030803 - DNA, 15 bp, Homo sapiens
acctgcctggaattg

SEQ ID NO: 2030804 - DNA, 15 bp, Homo sapiens
cctgcctggaattga

SEQ ID NO: 2030805 - DNA, 15 bp, Homo sapiens
ctgcctggaattgat

SEQ ID NO: 2030806 - DNA, 15 bp, Homo sapiens
tgcctggaattgatg

SEQ ID NO: 2030807 - DNA, 15 bp, Homo sapiens
gcctggaattgatga

SEQ ID NO: 2030808 - DNA, 15 bp, Homo sapiens
cctggaattgatgaa

SEQ ID NO: 2030809 - DNA, 15 bp, Homo sapiens
ctggaattgatgaag

SEQ ID NO: 2030810 - DNA, 15 bp, Homo sapiens
tggaattgatgaaga

SEQ ID NO: 2030811 - DNA, 15 bp, Homo sapiens
ggaattgatgaagaa

SEQ ID NO: 2030812 - DNA, 15 bp, Homo sapiens
gaattgatgaagaaa

SEQ ID NO: 2030813 - DNA, 15 bp, Homo sapiens
aattgatgaagaaac

SEQ ID NO: 2030814 - DNA, 15 bp, Homo sapiens
attgatgaagaaacc

SEQ ID NO: 2030815 - DNA, 15 bp, Homo sapiens
ttgatgaagaaacca

SEQ ID NO: 2030816 - DNA, 15 bp, Homo sapiens
tgatgaagaaaccag

SEQ ID NO: 2030817 - DNA, 15 bp, Homo sapiens
gatgaagaaaccagt

SEQ ID NO: 2030818 - DNA, 15 bp, Homo sapiens
atgaagaaaccagtg

SEQ ID NO: 2030819 - DNA, 15 bp, Homo sapiens
tgaagaaaccagtga

SEQ ID NO: 2030820 - DNA, 15 bp, Homo sapiens
gaagaaaccagtgaa

SEQ ID NO: 2030821 - DNA, 15 bp, Homo sapiens
aagaaaccagtgaag

SEQ ID NO: 2030822 - DNA, 15 bp, Homo sapiens
agaaaccagtgaaga

SEQ ID NO: 2030823 - DNA, 15 bp, Homo sapiens
gaaaccagtgaagaa

SEQ ID NO: 2030824 - DNA, 15 bp, Homo sapiens
aaaccagtgaagaat

SEQ ID NO: 2030825 - DNA, 15 bp, Homo sapiens
aaccagtgaagaatc

SEQ ID NO: 2030826 - DNA, 15 bp, Homo sapiens
accagtgaagaatcc

SEQ ID NO: 2030827 - DNA, 15 bp, Homo sapiens
ccagtgaagaatccc

SEQ ID NO: 2030828 - DNA, 15 bp, Homo sapiens
cagtgaagaatccct

SEQ ID NO: 2030829 - DNA, 15 bp, Homo sapiens
agtgaagaatccctc

SEQ ID NO: 2030830 - DNA, 15 bp, Homo sapiens
gtgaagaatccctcc

SEQ ID NO: 2030831 - DNA, 15 bp, Homo sapiens
tgaagaatccctcct

SEQ ID NO: 2030832 - DNA, 15 bp, Homo sapiens
gaagaatccctcctg

SEQ ID NO: 2030833 - DNA, 15 bp, Homo sapiens
aagaatccctcctga

SEQ ID NO: 2030834 - DNA, 15 bp, Homo sapiens
agaatccctcctgac

SEQ ID NO: 2030835 - DNA, 15 bp, Homo sapiens
gaatccctcctgact

SEQ ID NO: 2030836 - DNA, 15 bp, Homo sapiens
aatccctcctgactc

SEQ ID NO: 2030837 - DNA, 15 bp, Homo sapiens
atccctcctgactcc

SEQ ID NO: 2030838 - DNA, 15 bp, Homo sapiens
tccctcctgactccc

SEQ ID NO: 2030839 - DNA, 15 bp, Homo sapiens
ccctcctgactccca

SEQ ID NO: 2030840 - DNA, 15 bp, Homo sapiens
cctcctgactcccac

SEQ ID NO: 2030841 - DNA, 15 bp, Homo sapiens
ctcctgactcccaca

SEQ ID NO: 2030842 - DNA, 15 bp, Homo sapiens
tcctgactcccacat

SEQ ID NO: 2030843 - DNA, 15 bp, Homo sapiens
cctgactcccacatc

SEQ ID NO: 2030844 - DNA, 15 bp, Homo sapiens
ctgactcccacatct

SEQ ID NO: 2030845 - DNA, 15 bp, Homo sapiens
tgactcccacatctc

SEQ ID NO: 2030846 - DNA, 15 bp, Homo sapiens
gactcccacatctcc

SEQ ID NO: 2030847 - DNA, 15 bp, Homo sapiens
actcccacatctcct

SEQ ID NO: 2030848 - DNA, 15 bp, Homo sapiens
ctcccacatctcctt

SEQ ID NO: 2030849 - DNA, 15 bp, Homo sapiens
tcccacatctcctta

SEQ ID NO: 2030850 - DNA, 15 bp, Homo sapiens
cccacatctccttac

SEQ ID NO: 2030851 - DNA, 15 bp, Homo sapiens
ccacatctccttacc

SEQ ID NO: 2030852 - DNA, 15 bp, Homo sapiens
cacatctccttaccc

SEQ ID NO: 2030853 - DNA, 15 bp, Homo sapiens
acatctccttaccct

SEQ ID NO: 2030854 - DNA, 15 bp, Homo sapiens
catctccttaccctc

SEQ ID NO: 2030855 - DNA, 15 bp, Homo sapiens
atctccttaccctcc

SEQ ID NO: 2030856 - DNA, 15 bp, Homo sapiens
tctccttaccctcct

SEQ ID NO: 2030857 - DNA, 15 bp, Homo sapiens
ctccttaccctcctg

SEQ ID NO: 2030858 - DNA, 15 bp, Homo sapiens
tccttaccctcctgc

SEQ ID NO: 2030859 - DNA, 15 bp, Homo sapiens
ccttaccctcctgca

SEQ ID NO: 2030860 - DNA, 15 bp, Homo sapiens
cttaccctcctgcac

SEQ ID NO: 2030861 - DNA, 15 bp, Homo sapiens
ttaccctcctgcact

SEQ ID NO: 2030862 - DNA, 15 bp, Homo sapiens
taccctcctgcactg

SEQ ID NO: 2030863 - DNA, 15 bp, Homo sapiens
accctcctgcactgc

SEQ ID NO: 2030864 - DNA, 15 bp, Homo sapiens
ccctcctgcactgca

SEQ ID NO: 2030865 - DNA, 15 bp, Homo sapiens
cctcctgcactgcag

SEQ ID NO: 2030866 - DNA, 15 bp, Homo sapiens
ctcctgcactgcaga

SEQ ID NO: 2030867 - DNA, 15 bp, Homo sapiens
tcctgcactgcagag

SEQ ID NO: 2030868 - DNA, 15 bp, Homo sapiens
cctgcactgcagagc

SEQ ID NO: 2030869 - DNA, 15 bp, Homo sapiens
ctgcactgcagagcc

SEQ ID NO: 2030870 - DNA, 15 bp, Homo sapiens
tgcactgcagagcca

SEQ ID NO: 2030871 - DNA, 15 bp, Homo sapiens
gcactgcagagccag

SEQ ID NO: 2030872 - DNA, 15 bp, Homo sapiens
cactgcagagccagc

SEQ ID NO: 2030873 - DNA, 15 bp, Homo sapiens
actgcagagccagct

SEQ ID NO: 2030874 - DNA, 15 bp, Homo sapiens
ctgcagagccagctt

SEQ ID NO: 2030875 - DNA, 15 bp, Homo sapiens
tgcagagccagctta

SEQ ID NO: 2030876 - DNA, 15 bp, Homo sapiens
gcagagccagcttag

SEQ ID NO: 2030877 - DNA, 15 bp, Homo sapiens
cagagccagcttagt

SEQ ID NO: 2030878 - DNA, 15 bp, Homo sapiens
agagccagcttagta

SEQ ID NO: 2030879 - DNA, 15 bp, Homo sapiens
gagccagcttagtat

SEQ ID NO: 2030880 - DNA, 15 bp, Homo sapiens
agccagcttagtatc

SEQ ID NO: 2030881 - DNA, 15 bp, Homo sapiens
gccagcttagtatca

SEQ ID NO: 2030882 - DNA, 15 bp, Homo sapiens
ccagcttagtatcac

SEQ ID NO: 2030883 - DNA, 15 bp, Homo sapiens
cagcttagtatcact

SEQ ID NO: 2030884 - DNA, 15 bp, Homo sapiens
agcttagtatcactg

SEQ ID NO: 2030885 - DNA, 15 bp, Homo sapiens
gcttagtatcactgc

SEQ ID NO: 2030886 - DNA, 15 bp, Homo sapiens
cttagtatcactgcc

SEQ ID NO: 2030887 - DNA, 15 bp, Homo sapiens
ttagtatcactgcca

SEQ ID NO: 2030888 - DNA, 15 bp, Homo sapiens
tagtatcactgccaa

SEQ ID NO: 2030889 - DNA, 15 bp, Homo sapiens
agtatcactgccaac

SEQ ID NO: 2030890 - DNA, 15 bp, Homo sapiens
gtatcactgccaacc

SEQ ID NO: 2030891 - DNA, 15 bp, Homo sapiens
tatcactgccaacct

SEQ ID NO: 2030892 - DNA, 15 bp, Homo sapiens
atcactgccaacctt

SEQ ID NO: 2030893 - DNA, 15 bp, Homo sapiens
tcactgccaacctta

SEQ ID NO: 2030894 - DNA, 15 bp, Homo sapiens
cactgccaaccttaa

SEQ ID NO: 2030895 - DNA, 15 bp, Homo sapiens
actgccaaccttaac

SEQ ID NO: 2030896 - DNA, 15 bp, Homo sapiens
ctgccaaccttaacc

SEQ ID NO: 2030897 - DNA, 15 bp, Homo sapiens
tgccaaccttaacct

SEQ ID NO: 2030898 - DNA, 15 bp, Homo sapiens
gccaaccttaacctt

SEQ ID NO: 2030899 - DNA, 15 bp, Homo sapiens
ccaaccttaaccttt

SEQ ID NO: 2030900 - DNA, 15 bp, Homo sapiens
caaccttaacctttc

SEQ ID NO: 2030901 - DNA, 15 bp, Homo sapiens
aaccttaacctttct

SEQ ID NO: 2030902 - DNA, 15 bp, Homo sapiens
accttaacctttcta

SEQ ID NO: 2030903 - DNA, 15 bp, Homo sapiens
ccttaacctttctaa

SEQ ID NO: 2030904 - DNA, 15 bp, Homo sapiens
cttaacctttctaat

SEQ ID NO: 2030905 - DNA, 15 bp, Homo sapiens
ttaacctttctaatt

SEQ ID NO: 2030906 - DNA, 15 bp, Homo sapiens
taacctttctaattc

SEQ ID NO: 2030907 - DNA, 15 bp, Homo sapiens
aacctttctaattcc

SEQ ID NO: 2030908 - DNA, 15 bp, Homo sapiens
acctttctaattcca

SEQ ID NO: 2030909 - DNA, 15 bp, Homo sapiens
cctttctaattccat

SEQ ID NO: 2030910 - DNA, 15 bp, Homo sapiens
ctttctaattccatg

SEQ ID NO: 2030911 - DNA, 15 bp, Homo sapiens
tttctaattccatga

SEQ ID NO: 2030912 - DNA, 15 bp, Homo sapiens
ttctaattccatgac

SEQ ID NO: 2030913 - DNA, 15 bp, Homo sapiens
tctaattccatgacc

SEQ ID NO: 2030914 - DNA, 15 bp, Homo sapiens
ctaattccatgacct

SEQ ID NO: 2030915 - DNA, 15 bp, Homo sapiens
taattccatgacctc

SEQ ID NO: 2030916 - DNA, 15 bp, Homo sapiens
aattccatgacctca

SEQ ID NO: 2030917 - DNA, 15 bp, Homo sapiens
attccatgacctcac

SEQ ID NO: 2030918 - DNA, 15 bp, Homo sapiens
ttccatgacctcact

SEQ ID NO: 2030919 - DNA, 15 bp, Homo sapiens
tccatgacctcactt

SEQ ID NO: 2030920 - DNA, 15 bp, Homo sapiens
ccatgacctcacttg

SEQ ID NO: 2030921 - DNA, 15 bp, Homo sapiens
catgacctcacttgc

SEQ ID NO: 2030922 - DNA, 15 bp, Homo sapiens
atgacctcacttgca

SEQ ID NO: 2030923 - DNA, 15 bp, Homo sapiens
tgacctcacttgcaa

SEQ ID NO: 2030924 - DNA, 15 bp, Homo sapiens
gacctcacttgcaac

SEQ ID NO: 2030925 - DNA, 15 bp, Homo sapiens
acctcacttgcaact

SEQ ID NO: 2030926 - DNA, 15 bp, Homo sapiens
cctcacttgcaactt

SEQ ID NO: 2030927 - DNA, 15 bp, Homo sapiens
ctcacttgcaacttc

SEQ ID NO: 2030928 - DNA, 15 bp, Homo sapiens
tcacttgcaacttcc

SEQ ID NO: 2030929 - DNA, 15 bp, Homo sapiens
cacttgcaacttccc

SEQ ID NO: 2030930 - DNA, 15 bp, Homo sapiens
acttgcaacttccca

SEQ ID NO: 2030931 - DNA, 15 bp, Homo sapiens
cttgcaacttcccag

SEQ ID NO: 2030932 - DNA, 15 bp, Homo sapiens
ttgcaacttcccagc

SEQ ID NO: 2030933 - DNA, 15 bp, Homo sapiens
tgcaacttcccagca

SEQ ID NO: 2030934 - DNA, 15 bp, Homo sapiens
gcaacttcccagcat

SEQ ID NO: 2030935 - DNA, 15 bp, Homo sapiens
caacttcccagcatt

SEQ ID NO: 2030936 - DNA, 15 bp, Homo sapiens
aacttcccagcattc

SEQ ID NO: 2030937 - DNA, 15 bp, Homo sapiens
acttcccagcattcc

SEQ ID NO: 2030938 - DNA, 15 bp, Homo sapiens
cttcccagcattccc

SEQ ID NO: 2030939 - DNA, 15 bp, Homo sapiens
ttcccagcattcccc

SEQ ID NO: 2030940 - DNA, 15 bp, Homo sapiens
tcccagcattcccca

SEQ ID NO: 2030941 - DNA, 15 bp, Homo sapiens
cccagcattccccag

SEQ ID NO: 2030942 - DNA, 15 bp, Homo sapiens
ccagcattccccagg

SEQ ID NO: 2030943 - DNA, 15 bp, Homo sapiens
cagcattccccaggt

SEQ ID NO: 2030944 - DNA, 15 bp, Homo sapiens
agcattccccaggtc

SEQ ID NO: 2030945 - DNA, 15 bp, Homo sapiens
gcattccccaggtca

SEQ ID NO: 2030946 - DNA, 15 bp, Homo sapiens
cattccccaggtcag

SEQ ID NO: 2030947 - DNA, 15 bp, Homo sapiens
attccccaggtcagt

SEQ ID NO: 2030948 - DNA, 15 bp, Homo sapiens
ttccccaggtcagta

SEQ ID NO: 2030949 - DNA, 15 bp, Homo sapiens
tccccaggtcagtaa

SEQ ID NO: 2030950 - DNA, 15 bp, Homo sapiens
ccccaggtcagtaaa

SEQ ID NO: 2030951 - DNA, 15 bp, Homo sapiens
cccaggtcagtaaat

SEQ ID NO: 2030952 - DNA, 15 bp, Homo sapiens
ccaggtcagtaaatg

SEQ ID NO: 2030953 - DNA, 15 bp, Homo sapiens
caggtcagtaaatgt

SEQ ID NO: 2030954 - DNA, 15 bp, Homo sapiens
aggtcagtaaatgtg

SEQ ID NO: 2030955 - DNA, 15 bp, Homo sapiens
ggtcagtaaatgtga

SEQ ID NO: 2030956 - DNA, 15 bp, Homo sapiens
gtcagtaaatgtgat

SEQ ID NO: 2030957 - DNA, 15 bp, Homo sapiens
tcagtaaatgtgatc

SEQ ID NO: 2030958 - DNA, 15 bp, Homo sapiens
cagtaaatgtgatct

SEQ ID NO: 2030959 - DNA, 15 bp, Homo sapiens
agtaaatgtgatctt

SEQ ID NO: 2030960 - DNA, 15 bp, Homo sapiens
gtaaatgtgatcttt

SEQ ID NO: 2030961 - DNA, 15 bp, Homo sapiens
taaatgtgatcttta

SEQ ID NO: 2030962 - DNA, 15 bp, Homo sapiens
aaatgtgatctttat

SEQ ID NO: 2030963 - DNA, 15 bp, Homo sapiens
aatgtgatctttata

SEQ ID NO: 2030964 - DNA, 15 bp, Homo sapiens
atgtgatctttatat

SEQ ID NO: 2030965 - DNA, 15 bp, Homo sapiens
tgtgatctttatatg

SEQ ID NO: 2030966 - DNA, 15 bp, Homo sapiens
gtgatctttatatga

SEQ ID NO: 2030967 - DNA, 15 bp, Homo sapiens
tgatctttatatgac

SEQ ID NO: 2030968 - DNA, 15 bp, Homo sapiens
gatctttatatgact

SEQ ID NO: 2030969 - DNA, 15 bp, Homo sapiens
atctttatatgactt

SEQ ID NO: 2030970 - DNA, 15 bp, Homo sapiens
tctttatatgacttt

SEQ ID NO: 2030971 - DNA, 15 bp, Homo sapiens
ctttatatgactttg

SEQ ID NO: 2030972 - DNA, 15 bp, Homo sapiens
tttatatgactttga

SEQ ID NO: 2030973 - DNA, 15 bp, Homo sapiens
ttatatgactttgag

SEQ ID NO: 2030974 - DNA, 15 bp, Homo sapiens
tatatgactttgagc

SEQ ID NO: 2030975 - DNA, 15 bp, Homo sapiens
atatgactttgagca

SEQ ID NO: 2030976 - DNA, 15 bp, Homo sapiens
tatgactttgagcaa

SEQ ID NO: 2030977 - DNA, 15 bp, Homo sapiens
atgactttgagcaac

SEQ ID NO: 2030978 - DNA, 15 bp, Homo sapiens
tgactttgagcaaca

SEQ ID NO: 2030979 - DNA, 15 bp, Homo sapiens
gactttgagcaacaa

SEQ ID NO: 2030980 - DNA, 15 bp, Homo sapiens
actttgagcaacaat

SEQ ID NO: 2030981 - DNA, 15 bp, Homo sapiens
ctttgagcaacaata

SEQ ID NO: 2030982 - DNA, 15 bp, Homo sapiens
tttgagcaacaatat

SEQ ID NO: 2030983 - DNA, 15 bp, Homo sapiens
ttgagcaacaatata

SEQ ID NO: 2030984 - DNA, 15 bp, Homo sapiens
tgagcaacaatataa

SEQ ID NO: 2030985 - DNA, 15 bp, Homo sapiens
gagcaacaatataag

SEQ ID NO: 2030986 - DNA, 15 bp, Homo sapiens
agcaacaatataaga

SEQ ID NO: 2030987 - DNA, 15 bp, Homo sapiens
gcaacaatataagac

SEQ ID NO: 2030988 - DNA, 15 bp, Homo sapiens
caacaatataagaca

SEQ ID NO: 2030989 - DNA, 15 bp, Homo sapiens
aacaatataagacac

SEQ ID NO: 2030990 - DNA, 15 bp, Homo sapiens
acaatataagacacc

SEQ ID NO: 2030991 - DNA, 15 bp, Homo sapiens
caatataagacacca

SEQ ID NO: 2030992 - DNA, 15 bp, Homo sapiens
aatataagacaccaa

SEQ ID NO: 2030993 - DNA, 15 bp, Homo sapiens
atataagacaccaac

SEQ ID NO: 2030994 - DNA, 15 bp, Homo sapiens
tataagacaccaaca

SEQ ID NO: 2030995 - DNA, 15 bp, Homo sapiens
ataagacaccaacat

SEQ ID NO: 2030996 - DNA, 15 bp, Homo sapiens
taagacaccaacatt

SEQ ID NO: 2030997 - DNA, 15 bp, Homo sapiens
aagacaccaacatta

SEQ ID NO: 2030998 - DNA, 15 bp, Homo sapiens
agacaccaacattag

SEQ ID NO: 2030999 - DNA, 15 bp, Homo sapiens
gacaccaacattagg

SEQ ID NO: 2031000 - DNA, 15 bp, Homo sapiens
acaccaacattagga

SEQ ID NO: 2031001 - DNA, 15 bp, Homo sapiens
caccaacattaggaa

SEQ ID NO: 2031002 - DNA, 15 bp, Homo sapiens
accaacattaggaat

SEQ ID NO: 2031003 - DNA, 15 bp, Homo sapiens
ccaacattaggaatt

SEQ ID NO: 2031004 - DNA, 15 bp, Homo sapiens
caacattaggaattc

SEQ ID NO: 2031005 - DNA, 15 bp, Homo sapiens
aacattaggaattcc

SEQ ID NO: 2031006 - DNA, 15 bp, Homo sapiens
acattaggaattccc

SEQ ID NO: 2031007 - DNA, 15 bp, Homo sapiens
cattaggaattccct

SEQ ID NO: 2031008 - DNA, 15 bp, Homo sapiens
attaggaattccctt

SEQ ID NO: 2031009 - DNA, 15 bp, Homo sapiens
ttaggaattcccttg

SEQ ID NO: 2031010 - DNA, 15 bp, Homo sapiens
taggaattcccttgt

SEQ ID NO: 2031011 - DNA, 15 bp, Homo sapiens
aggaattcccttgtg

SEQ ID NO: 2031012 - DNA, 15 bp, Homo sapiens
ggaattcccttgtga

SEQ ID NO: 2031013 - DNA, 15 bp, Homo sapiens
gaattcccttgtgat

SEQ ID NO: 2031014 - DNA, 15 bp, Homo sapiens
aattcccttgtgatc

SEQ ID NO: 2031015 - DNA, 15 bp, Homo sapiens
attcccttgtgatca

SEQ ID NO: 2031016 - DNA, 15 bp, Homo sapiens
ttcccttgtgatcag

SEQ ID NO: 2031017 - DNA, 15 bp, Homo sapiens
tcccttgtgatcagt

SEQ ID NO: 2031018 - DNA, 15 bp, Homo sapiens
cccttgtgatcagtt

SEQ ID NO: 2031019 - DNA, 15 bp, Homo sapiens
ccttgtgatcagttt

SEQ ID NO: 2031020 - DNA, 15 bp, Homo sapiens
cttgtgatcagttta

SEQ ID NO: 2031021 - DNA, 15 bp, Homo sapiens
ttgtgatcagtttat

SEQ ID NO: 2031022 - DNA, 15 bp, Homo sapiens
tgtgatcagtttata

SEQ ID NO: 2031023 - DNA, 15 bp, Homo sapiens
gtgatcagtttatag

SEQ ID NO: 2031024 - DNA, 15 bp, Homo sapiens
tgatcagtttatagc

SEQ ID NO: 2031025 - DNA, 15 bp, Homo sapiens
gatcagtttatagca

SEQ ID NO: 2031026 - DNA, 15 bp, Homo sapiens
atcagtttatagcaa

SEQ ID NO: 2031027 - DNA, 15 bp, Homo sapiens
tcagtttatagcaaa

SEQ ID NO: 2031028 - DNA, 15 bp, Homo sapiens
cagtttatagcaaat

SEQ ID NO: 2031029 - DNA, 15 bp, Homo sapiens
agtttatagcaaatt

SEQ ID NO: 2031030 - DNA, 15 bp, Homo sapiens
gtttatagcaaattt

SEQ ID NO: 2031031 - DNA, 15 bp, Homo sapiens
tttatagcaaatttt

SEQ ID NO: 2031032 - DNA, 15 bp, Homo sapiens
ttatagcaaattttg

SEQ ID NO: 2031033 - DNA, 15 bp, Homo sapiens
tatagcaaattttgc

SEQ ID NO: 2031034 - DNA, 15 bp, Homo sapiens
atagcaaattttgct

SEQ ID NO: 2031035 - DNA, 15 bp, Homo sapiens
tagcaaattttgctc

SEQ ID NO: 2031036 - DNA, 15 bp, Homo sapiens
agcaaattttgctcc

SEQ ID NO: 2031037 - DNA, 15 bp, Homo sapiens
gcaaattttgctcct

SEQ ID NO: 2031038 - DNA, 15 bp, Homo sapiens
caaattttgctcctt

SEQ ID NO: 2031039 - DNA, 15 bp, Homo sapiens
aaattttgctccttt

SEQ ID NO: 2031040 - DNA, 15 bp, Homo sapiens
aattttgctcctttt

SEQ ID NO: 2031041 - DNA, 15 bp, Homo sapiens
attttgctccttttt

SEQ ID NO: 2031042 - DNA, 15 bp, Homo sapiens
ttttgctcctttttc

SEQ ID NO: 2031043 - DNA, 15 bp, Homo sapiens
tttgctcctttttct

SEQ ID NO: 2031044 - DNA, 15 bp, Homo sapiens
ttgctcctttttctt

SEQ ID NO: 2031045 - DNA, 15 bp, Homo sapiens
tgctcctttttctta

SEQ ID NO: 2031046 - DNA, 15 bp, Homo sapiens
gctcctttttcttat

SEQ ID NO: 2031047 - DNA, 15 bp, Homo sapiens
ctcctttttcttatg

SEQ ID NO: 2031048 - DNA, 15 bp, Homo sapiens
tcctttttcttatga

SEQ ID NO: 2031049 - DNA, 15 bp, Homo sapiens
cctttttcttatgag

SEQ ID NO: 2031050 - DNA, 15 bp, Homo sapiens
ctttttcttatgaga

SEQ ID NO: 2031051 - DNA, 15 bp, Homo sapiens
tttttcttatgagat

SEQ ID NO: 2031052 - DNA, 15 bp, Homo sapiens
ttttcttatgagatt

SEQ ID NO: 2031053 - DNA, 15 bp, Homo sapiens
tttcttatgagattc

SEQ ID NO: 2031054 - DNA, 15 bp, Homo sapiens
ttcttatgagattca

SEQ ID NO: 2031055 - DNA, 15 bp, Homo sapiens
tcttatgagattcac

SEQ ID NO: 2031056 - DNA, 15 bp, Homo sapiens
cttatgagattcacc

SEQ ID NO: 2031057 - DNA, 15 bp, Homo sapiens
ttatgagattcacct

SEQ ID NO: 2031058 - DNA, 15 bp, Homo sapiens
tatgagattcacctt

SEQ ID NO: 2031059 - DNA, 15 bp, Homo sapiens
atgagattcacctta

SEQ ID NO: 2031060 - DNA, 15 bp, Homo sapiens
tgagattcaccttac

SEQ ID NO: 2031061 - DNA, 15 bp, Homo sapiens
gagattcaccttaca

SEQ ID NO: 2031062 - DNA, 15 bp, Homo sapiens
agattcaccttacat

SEQ ID NO: 2031063 - DNA, 15 bp, Homo sapiens
gattcaccttacatt

SEQ ID NO: 2031064 - DNA, 15 bp, Homo sapiens
attcaccttacattt

SEQ ID NO: 2031065 - DNA, 15 bp, Homo sapiens
ttcaccttacatttc

SEQ ID NO: 2031066 - DNA, 15 bp, Homo sapiens
tcaccttacatttct

SEQ ID NO: 2031067 - DNA, 15 bp, Homo sapiens
caccttacatttctt

SEQ ID NO: 2031068 - DNA, 15 bp, Homo sapiens
accttacatttcttc

SEQ ID NO: 2031069 - DNA, 15 bp, Homo sapiens
ccttacatttcttct

SEQ ID NO: 2031070 - DNA, 15 bp, Homo sapiens
cttacatttcttctt

SEQ ID NO: 2031071 - DNA, 15 bp, Homo sapiens
ttacatttcttcttt

SEQ ID NO: 2031072 - DNA, 15 bp, Homo sapiens
tacatttcttcttta

SEQ ID NO: 2031073 - DNA, 15 bp, Homo sapiens
acatttcttctttac

SEQ ID NO: 2031074 - DNA, 15 bp, Homo sapiens
catttcttctttacc

SEQ ID NO: 2031075 - DNA, 15 bp, Homo sapiens
atttcttctttacct

SEQ ID NO: 2031076 - DNA, 15 bp, Homo sapiens
tttcttctttacctt

SEQ ID NO: 2031077 - DNA, 15 bp, Homo sapiens
ttcttctttaccttg

SEQ ID NO: 2031078 - DNA, 15 bp, Homo sapiens
tcttctttaccttgt

SEQ ID NO: 2031079 - DNA, 15 bp, Homo sapiens
cttctttaccttgta

SEQ ID NO: 2031080 - DNA, 15 bp, Homo sapiens
ttctttaccttgtaa

SEQ ID NO: 2031081 - DNA, 15 bp, Homo sapiens
tctttaccttgtaac

SEQ ID NO: 2031082 - DNA, 15 bp, Homo sapiens
ctttaccttgtaact

SEQ ID NO: 2031083 - DNA, 15 bp, Homo sapiens
tttaccttgtaactg

SEQ ID NO: 2031084 - DNA, 15 bp, Homo sapiens
ttaccttgtaactga

SEQ ID NO: 2031085 - DNA, 15 bp, Homo sapiens
taccttgtaactgac

SEQ ID NO: 2031086 - DNA, 15 bp, Homo sapiens
accttgtaactgact

SEQ ID NO: 2031087 - DNA, 15 bp, Homo sapiens
ccttgtaactgactt

SEQ ID NO: 2031088 - DNA, 15 bp, Homo sapiens
cttgtaactgacttg

SEQ ID NO: 2031089 - DNA, 15 bp, Homo sapiens
ttgtaactgacttga

SEQ ID NO: 2031090 - DNA, 15 bp, Homo sapiens
tgtaactgacttgac

SEQ ID NO: 2031091 - DNA, 15 bp, Homo sapiens
gtaactgacttgact

SEQ ID NO: 2031092 - DNA, 15 bp, Homo sapiens
taactgacttgactt

SEQ ID NO: 2031093 - DNA, 15 bp, Homo sapiens
aactgacttgacttt

SEQ ID NO: 2031094 - DNA, 15 bp, Homo sapiens
actgacttgactttt

SEQ ID NO: 2031095 - DNA, 15 bp, Homo sapiens
ctgacttgacttttg

SEQ ID NO: 2031096 - DNA, 15 bp, Homo sapiens
tgacttgacttttgt

SEQ ID NO: 2031097 - DNA, 15 bp, Homo sapiens
gacttgacttttgtt

SEQ ID NO: 2031098 - DNA, 15 bp, Homo sapiens
acttgacttttgtta

SEQ ID NO: 2031099 - DNA, 15 bp, Homo sapiens
cttgacttttgttat

SEQ ID NO: 2031100 - DNA, 15 bp, Homo sapiens
ttgacttttgttatt

SEQ ID NO: 2031101 - DNA, 15 bp, Homo sapiens
tgacttttgttattc

SEQ ID NO: 2031102 - DNA, 15 bp, Homo sapiens
gacttttgttattct

SEQ ID NO: 2031103 - DNA, 15 bp, Homo sapiens
acttttgttattcta

SEQ ID NO: 2031104 - DNA, 15 bp, Homo sapiens
cttttgttattctat

SEQ ID NO: 2031105 - DNA, 15 bp, Homo sapiens
ttttgttattctatg

SEQ ID NO: 2031106 - DNA, 15 bp, Homo sapiens
tttgttattctatga

SEQ ID NO: 2031107 - DNA, 15 bp, Homo sapiens
ttgttattctatgaa

SEQ ID NO: 2031108 - DNA, 15 bp, Homo sapiens
tgttattctatgaag

SEQ ID NO: 2031109 - DNA, 15 bp, Homo sapiens
gttattctatgaagc

SEQ ID NO: 2031110 - DNA, 15 bp, Homo sapiens
ttattctatgaagct

SEQ ID NO: 2031111 - DNA, 15 bp, Homo sapiens
tattctatgaagctt

SEQ ID NO: 2031112 - DNA, 15 bp, Homo sapiens
attctatgaagcttt

SEQ ID NO: 2031113 - DNA, 15 bp, Homo sapiens
ttctatgaagctttc

SEQ ID NO: 2031114 - DNA, 15 bp, Homo sapiens
tctatgaagctttct

SEQ ID NO: 2031115 - DNA, 15 bp, Homo sapiens
ctatgaagctttcta

SEQ ID NO: 2031116 - DNA, 15 bp, Homo sapiens
tatgaagctttctac

SEQ ID NO: 2031117 - DNA, 15 bp, Homo sapiens
atgaagctttctact

SEQ ID NO: 2031118 - DNA, 15 bp, Homo sapiens
tgaagctttctactt

SEQ ID NO: 2031119 - DNA, 15 bp, Homo sapiens
gaagctttctacttt

SEQ ID NO: 2031120 - DNA, 15 bp, Homo sapiens
aagctttctactttc

SEQ ID NO: 2031121 - DNA, 15 bp, Homo sapiens
agctttctactttca

SEQ ID NO: 2031122 - DNA, 15 bp, Homo sapiens
gctttctactttcaa

SEQ ID NO: 2031123 - DNA, 15 bp, Homo sapiens
ctttctactttcaaa

SEQ ID NO: 2031124 - DNA, 15 bp, Homo sapiens
tttctactttcaaac

SEQ ID NO: 2031125 - DNA, 15 bp, Homo sapiens
ttctactttcaaaca

SEQ ID NO: 2031126 - DNA, 15 bp, Homo sapiens
tctactttcaaacaa

SEQ ID NO: 2031127 - DNA, 15 bp, Homo sapiens
ctactttcaaacaag

SEQ ID NO: 2031128 - DNA, 15 bp, Homo sapiens
tactttcaaacaagt

SEQ ID NO: 2031129 - DNA, 15 bp, Homo sapiens
actttcaaacaagtt

SEQ ID NO: 2031130 - DNA, 15 bp, Homo sapiens
ctttcaaacaagttg

SEQ ID NO: 2031131 - DNA, 15 bp, Homo sapiens
tttcaaacaagttgt

SEQ ID NO: 2031132 - DNA, 15 bp, Homo sapiens
ttcaaacaagttgta

SEQ ID NO: 2031133 - DNA, 15 bp, Homo sapiens
tcaaacaagttgtac

SEQ ID NO: 2031134 - DNA, 15 bp, Homo sapiens
caaacaagttgtaca

SEQ ID NO: 2031135 - DNA, 15 bp, Homo sapiens
aaacaagttgtacat

SEQ ID NO: 2031136 - DNA, 15 bp, Homo sapiens
aacaagttgtacata

SEQ ID NO: 2031137 - DNA, 15 bp, Homo sapiens
acaagttgtacataa

SEQ ID NO: 2031138 - DNA, 15 bp, Homo sapiens
caagttgtacataag

SEQ ID NO: 2031139 - DNA, 15 bp, Homo sapiens
aagttgtacataaga

SEQ ID NO: 2031140 - DNA, 15 bp, Homo sapiens
agttgtacataagac

SEQ ID NO: 2031141 - DNA, 15 bp, Homo sapiens
gttgtacataagaca

SEQ ID NO: 2031142 - DNA, 15 bp, Homo sapiens
ttgtacataagacag

SEQ ID NO: 2031143 - DNA, 15 bp, Homo sapiens
tgtacataagacagt

SEQ ID NO: 2031144 - DNA, 15 bp, Homo sapiens
gtacataagacagta

SEQ ID NO: 2031145 - DNA, 15 bp, Homo sapiens
tacataagacagtaa

SEQ ID NO: 2031146 - DNA, 15 bp, Homo sapiens
acataagacagtaaa

SEQ ID NO: 2031147 - DNA, 15 bp, Homo sapiens
cataagacagtaaaa

SEQ ID NO: 2031148 - DNA, 15 bp, Homo sapiens
ataagacagtaaaat

SEQ ID NO: 2031149 - DNA, 15 bp, Homo sapiens
taagacagtaaaatg

SEQ ID NO: 2031150 - DNA, 15 bp, Homo sapiens
aagacagtaaaatgt

SEQ ID NO: 2031151 - DNA, 15 bp, Homo sapiens
agacagtaaaatgtt

SEQ ID NO: 2031152 - DNA, 15 bp, Homo sapiens
gacagtaaaatgtta

SEQ ID NO: 2031153 - DNA, 15 bp, Homo sapiens
acagtaaaatgttaa

SEQ ID NO: 2031154 - DNA, 15 bp, Homo sapiens
cagtaaaatgttaaa

SEQ ID NO: 2031155 - DNA, 15 bp, Homo sapiens
gtaaaatgttaaaat

SEQ ID NO: 2031156 - DNA, 15 bp, Homo sapiens
taaaatgttaaaatg

SEQ ID NO: 2031157 - DNA, 15 bp, Homo sapiens
aaaatgttaaaatgt

SEQ ID NO: 2031158 - DNA, 15 bp, Homo sapiens
aaatgttaaaatgtc

SEQ ID NO: 2031159 - DNA, 15 bp, Homo sapiens
aatgttaaaatgtcc

SEQ ID NO: 2031160 - DNA, 15 bp, Homo sapiens
atgttaaaatgtcca

SEQ ID NO: 2031161 - DNA, 15 bp, Homo sapiens
tgttaaaatgtccac

SEQ ID NO: 2031162 - DNA, 15 bp, Homo sapiens
gttaaaatgtccaca

SEQ ID NO: 2031163 - DNA, 15 bp, Homo sapiens
ttaaaatgtccacat

SEQ ID NO: 2031164 - DNA, 15 bp, Homo sapiens
taaaatgtccacatg

SEQ ID NO: 2031165 - DNA, 15 bp, Homo sapiens
aaaatgtccacatga

SEQ ID NO: 2031166 - DNA, 15 bp, Homo sapiens
aaatgtccacatgat

SEQ ID NO: 2031167 - DNA, 15 bp, Homo sapiens
aatgtccacatgata

SEQ ID NO: 2031168 - DNA, 15 bp, Homo sapiens
atgtccacatgatat

SEQ ID NO: 2031169 - DNA, 15 bp, Homo sapiens
tgtccacatgatatt

SEQ ID NO: 2031170 - DNA, 15 bp, Homo sapiens
gtccacatgatattc

SEQ ID NO: 2031171 - DNA, 15 bp, Homo sapiens
tccacatgatattcc

SEQ ID NO: 2031172 - DNA, 15 bp, Homo sapiens
ccacatgatattcca

SEQ ID NO: 2031173 - DNA, 15 bp, Homo sapiens
cacatgatattccaa

SEQ ID NO: 2031174 - DNA, 15 bp, Homo sapiens
acatgatattccaag

SEQ ID NO: 2031175 - DNA, 15 bp, Homo sapiens
catgatattccaagg

SEQ ID NO: 2031176 - DNA, 15 bp, Homo sapiens
atgatattccaaggt

SEQ ID NO: 2031177 - DNA, 15 bp, Homo sapiens
tgatattccaaggtt

SEQ ID NO: 2031178 - DNA, 15 bp, Homo sapiens
gatattccaaggttg

SEQ ID NO: 2031179 - DNA, 15 bp, Homo sapiens
atattccaaggttga

SEQ ID NO: 2031180 - DNA, 15 bp, Homo sapiens
tattccaaggttgac

SEQ ID NO: 2031181 - DNA, 15 bp, Homo sapiens
attccaaggttgaca

SEQ ID NO: 2031182 - DNA, 15 bp, Homo sapiens
ttccaaggttgacaa

SEQ ID NO: 2031183 - DNA, 15 bp, Homo sapiens
tccaaggttgacaag

SEQ ID NO: 2031184 - DNA, 15 bp, Homo sapiens
ccaaggttgacaagt

SEQ ID NO: 2031185 - DNA, 15 bp, Homo sapiens
caaggttgacaagtt

SEQ ID NO: 2031186 - DNA, 15 bp, Homo sapiens
aaggttgacaagttt

SEQ ID NO: 2031187 - DNA, 15 bp, Homo sapiens
aggttgacaagtttg

SEQ ID NO: 2031188 - DNA, 15 bp, Homo sapiens
ggttgacaagtttgt

SEQ ID NO: 2031189 - DNA, 15 bp, Homo sapiens
gttgacaagtttgta

SEQ ID NO: 2031190 - DNA, 15 bp, Homo sapiens
ttgacaagtttgtag

SEQ ID NO: 2031191 - DNA, 15 bp, Homo sapiens
tgacaagtttgtaga

SEQ ID NO: 2031192 - DNA, 15 bp, Homo sapiens
gacaagtttgtagag

SEQ ID NO: 2031193 - DNA, 15 bp, Homo sapiens
acaagtttgtagagt

SEQ ID NO: 2031194 - DNA, 15 bp, Homo sapiens
caagtttgtagagtt

SEQ ID NO: 2031195 - DNA, 15 bp, Homo sapiens
aagtttgtagagttt

SEQ ID NO: 2031196 - DNA, 15 bp, Homo sapiens
agtttgtagagtttg

SEQ ID NO: 2031197 - DNA, 15 bp, Homo sapiens
gtttgtagagtttgg

SEQ ID NO: 2031198 - DNA, 15 bp, Homo sapiens
tttgtagagtttggg

SEQ ID NO: 2031199 - DNA, 15 bp, Homo sapiens
ttgtagagtttgggc

SEQ ID NO: 2031200 - DNA, 15 bp, Homo sapiens
tgtagagtttgggca

SEQ ID NO: 2031201 - DNA, 15 bp, Homo sapiens
gtagagtttgggcag

SEQ ID NO: 2031202 - DNA, 15 bp, Homo sapiens
tagagtttgggcagg

SEQ ID NO: 2031203 - DNA, 15 bp, Homo sapiens
agagtttgggcagga

SEQ ID NO: 2031204 - DNA, 15 bp, Homo sapiens
gagtttgggcaggaa

SEQ ID NO: 2031205 - DNA, 15 bp, Homo sapiens
agtttgggcaggaag

SEQ ID NO: 2031206 - DNA, 15 bp, Homo sapiens
gtttgggcaggaaga

SEQ ID NO: 2031207 - DNA, 15 bp, Homo sapiens
tttgggcaggaagag

SEQ ID NO: 2031208 - DNA, 15 bp, Homo sapiens
ttgggcaggaagagg

SEQ ID NO: 2031209 - DNA, 15 bp, Homo sapiens
tgggcaggaagagga

SEQ ID NO: 2031210 - DNA, 15 bp, Homo sapiens
gggcaggaagaggaa

SEQ ID NO: 2031211 - DNA, 15 bp, Homo sapiens
ggcaggaagaggaac

SEQ ID NO: 2031212 - DNA, 15 bp, Homo sapiens
gcaggaagaggaact

SEQ ID NO: 2031213 - DNA, 15 bp, Homo sapiens
caggaagaggaactt

SEQ ID NO: 2031214 - DNA, 15 bp, Homo sapiens
aggaagaggaactta

SEQ ID NO: 2031215 - DNA, 15 bp, Homo sapiens
ggaagaggaacttaa

SEQ ID NO: 2031216 - DNA, 15 bp, Homo sapiens
gaagaggaacttaaa

SEQ ID NO: 2031217 - DNA, 15 bp, Homo sapiens
aagaggaacttaaaa

SEQ ID NO: 2031218 - DNA, 15 bp, Homo sapiens
agaggaacttaaaac

SEQ ID NO: 2031219 - DNA, 15 bp, Homo sapiens
gaggaacttaaaaca

SEQ ID NO: 2031220 - DNA, 15 bp, Homo sapiens
aggaacttaaaacac

SEQ ID NO: 2031221 - DNA, 15 bp, Homo sapiens
ggaacttaaaacaca

SEQ ID NO: 2031222 - DNA, 15 bp, Homo sapiens
gaacttaaaacacat

SEQ ID NO: 2031223 - DNA, 15 bp, Homo sapiens
aacttaaaacacatt

SEQ ID NO: 2031224 - DNA, 15 bp, Homo sapiens
acttaaaacacatta

SEQ ID NO: 2031225 - DNA, 15 bp, Homo sapiens
cttaaaacacattat

SEQ ID NO: 2031226 - DNA, 15 bp, Homo sapiens
ttaaaacacattatt

SEQ ID NO: 2031227 - DNA, 15 bp, Homo sapiens
taaaacacattattc

SEQ ID NO: 2031228 - DNA, 15 bp, Homo sapiens
aaaacacattattct

SEQ ID NO: 2031229 - DNA, 15 bp, Homo sapiens
aaacacattattctg

SEQ ID NO: 2031230 - DNA, 15 bp, Homo sapiens
aacacattattctgt

SEQ ID NO: 2031231 - DNA, 15 bp, Homo sapiens
acacattattctgta

SEQ ID NO: 2031232 - DNA, 15 bp, Homo sapiens
cacattattctgtaa

SEQ ID NO: 2031233 - DNA, 15 bp, Homo sapiens
acattattctgtaag

SEQ ID NO: 2031234 - DNA, 15 bp, Homo sapiens
cattattctgtaagt

SEQ ID NO: 2031235 - DNA, 15 bp, Homo sapiens
attattctgtaagtg

SEQ ID NO: 2031236 - DNA, 15 bp, Homo sapiens
ttattctgtaagtga

SEQ ID NO: 2031237 - DNA, 15 bp, Homo sapiens
tattctgtaagtgaa

SEQ ID NO: 2031238 - DNA, 15 bp, Homo sapiens
attctgtaagtgaac

SEQ ID NO: 2031239 - DNA, 15 bp, Homo sapiens
ttctgtaagtgaaca

SEQ ID NO: 2031240 - DNA, 15 bp, Homo sapiens
tctgtaagtgaacag

SEQ ID NO: 2031241 - DNA, 15 bp, Homo sapiens
ctgtaagtgaacaga

SEQ ID NO: 2031242 - DNA, 15 bp, Homo sapiens
tgtaagtgaacagaa

SEQ ID NO: 2031243 - DNA, 15 bp, Homo sapiens
gtaagtgaacagaac

SEQ ID NO: 2031244 - DNA, 15 bp, Homo sapiens
taagtgaacagaact

SEQ ID NO: 2031245 - DNA, 15 bp, Homo sapiens
aagtgaacagaacta

SEQ ID NO: 2031246 - DNA, 15 bp, Homo sapiens
agtgaacagaactat

SEQ ID NO: 2031247 - DNA, 15 bp, Homo sapiens
gtgaacagaactata

SEQ ID NO: 2031248 - DNA, 15 bp, Homo sapiens
tgaacagaactataa

SEQ ID NO: 2031249 - DNA, 15 bp, Homo sapiens
gaacagaactataat

SEQ ID NO: 2031250 - DNA, 15 bp, Homo sapiens
aacagaactataatt

SEQ ID NO: 2031251 - DNA, 15 bp, Homo sapiens
acagaactataattt

SEQ ID NO: 2031252 - DNA, 15 bp, Homo sapiens
cagaactataattta

SEQ ID NO: 2031253 - DNA, 15 bp, Homo sapiens
agaactataatttat

SEQ ID NO: 2031254 - DNA, 15 bp, Homo sapiens
gaactataatttatt

SEQ ID NO: 2031255 - DNA, 15 bp, Homo sapiens
aactataatttattt

SEQ ID NO: 2031256 - DNA, 15 bp, Homo sapiens
actataatttattta

SEQ ID NO: 2031257 - DNA, 15 bp, Homo sapiens
ctataatttatttac

SEQ ID NO: 2031258 - DNA, 15 bp, Homo sapiens
tataatttatttact

SEQ ID NO: 2031259 - DNA, 15 bp, Homo sapiens
ataatttatttacta

SEQ ID NO: 2031260 - DNA, 15 bp, Homo sapiens
taatttatttactag

SEQ ID NO: 2031261 - DNA, 15 bp, Homo sapiens
aatttatttactaga

SEQ ID NO: 2031262 - DNA, 15 bp, Homo sapiens
atttatttactagat

SEQ ID NO: 2031263 - DNA, 15 bp, Homo sapiens
tttatttactagata

SEQ ID NO: 2031264 - DNA, 15 bp, Homo sapiens
ttatttactagatat

SEQ ID NO: 2031265 - DNA, 15 bp, Homo sapiens
tatttactagatata

SEQ ID NO: 2031266 - DNA, 15 bp, Homo sapiens
atttactagatatac

SEQ ID NO: 2031267 - DNA, 15 bp, Homo sapiens
tttactagatatact

SEQ ID NO: 2031268 - DNA, 15 bp, Homo sapiens
ttactagatatacta

SEQ ID NO: 2031269 - DNA, 15 bp, Homo sapiens
tactagatatactaa

SEQ ID NO: 2031270 - DNA, 15 bp, Homo sapiens
actagatatactaac

SEQ ID NO: 2031271 - DNA, 15 bp, Homo sapiens
ctagatatactaaca

SEQ ID NO: 2031272 - DNA, 15 bp, Homo sapiens
tagatatactaacat

SEQ ID NO: 2031273 - DNA, 15 bp, Homo sapiens
agatatactaacatt

SEQ ID NO: 2031274 - DNA, 15 bp, Homo sapiens
gatatactaacattg

SEQ ID NO: 2031275 - DNA, 15 bp, Homo sapiens
atatactaacattgc

SEQ ID NO: 2031276 - DNA, 15 bp, Homo sapiens
tatactaacattgcc

SEQ ID NO: 2031277 - DNA, 15 bp, Homo sapiens
atactaacattgccc

SEQ ID NO: 2031278 - DNA, 15 bp, Homo sapiens
tactaacattgccct

SEQ ID NO: 2031279 - DNA, 15 bp, Homo sapiens
actaacattgcccta

SEQ ID NO: 2031280 - DNA, 15 bp, Homo sapiens
ctaacattgccctaa

SEQ ID NO: 2031281 - DNA, 15 bp, Homo sapiens
taacattgccctaag

SEQ ID NO: 2031282 - DNA, 15 bp, Homo sapiens
aacattgccctaagg

SEQ ID NO: 2031283 - DNA, 15 bp, Homo sapiens
acattgccctaaggg

SEQ ID NO: 2031284 - DNA, 15 bp, Homo sapiens
cattgccctaagggc

SEQ ID NO: 2031285 - DNA, 15 bp, Homo sapiens
attgccctaagggcc

SEQ ID NO: 2031286 - DNA, 15 bp, Homo sapiens
ttgccctaagggcct

SEQ ID NO: 2031287 - DNA, 15 bp, Homo sapiens
tgccctaagggcctc

SEQ ID NO: 2031288 - DNA, 15 bp, Homo sapiens
gccctaagggcctct

SEQ ID NO: 2031289 - DNA, 15 bp, Homo sapiens
ccctaagggcctctt

SEQ ID NO: 2031290 - DNA, 15 bp, Homo sapiens
cctaagggcctcttt

SEQ ID NO: 2031291 - DNA, 15 bp, Homo sapiens
ctaagggcctctttc

SEQ ID NO: 2031292 - DNA, 15 bp, Homo sapiens
taagggcctctttct

SEQ ID NO: 2031293 - DNA, 15 bp, Homo sapiens
aagggcctctttctc

SEQ ID NO: 2031294 - DNA, 15 bp, Homo sapiens
agggcctctttctct

SEQ ID NO: 2031295 - DNA, 15 bp, Homo sapiens
gggcctctttctctg

SEQ ID NO: 2031296 - DNA, 15 bp, Homo sapiens
ggcctctttctctgt

SEQ ID NO: 2031297 - DNA, 15 bp, Homo sapiens
gcctctttctctgtc

SEQ ID NO: 2031298 - DNA, 15 bp, Homo sapiens
cctctttctctgtct

SEQ ID NO: 2031299 - DNA, 15 bp, Homo sapiens
ctctttctctgtctc

SEQ ID NO: 2031300 - DNA, 15 bp, Homo sapiens
tctttctctgtctct

SEQ ID NO: 2031301 - DNA, 15 bp, Homo sapiens
ctttctctgtctctg

SEQ ID NO: 2031302 - DNA, 15 bp, Homo sapiens
tttctctgtctctga

SEQ ID NO: 2031303 - DNA, 15 bp, Homo sapiens
ttctctgtctctgat

SEQ ID NO: 2031304 - DNA, 15 bp, Homo sapiens
tctctgtctctgata

SEQ ID NO: 2031305 - DNA, 15 bp, Homo sapiens
ctctgtctctgatac

SEQ ID NO: 2031306 - DNA, 15 bp, Homo sapiens
tctgtctctgataca

SEQ ID NO: 2031307 - DNA, 15 bp, Homo sapiens
ctgtctctgatacag

SEQ ID NO: 2031308 - DNA, 15 bp, Homo sapiens
tgtctctgatacagc

SEQ ID NO: 2031309 - DNA, 15 bp, Homo sapiens
gtctctgatacagca

SEQ ID NO: 2031310 - DNA, 15 bp, Homo sapiens
tctctgatacagcat

SEQ ID NO: 2031311 - DNA, 15 bp, Homo sapiens
ctctgatacagcata

SEQ ID NO: 2031312 - DNA, 15 bp, Homo sapiens
tctgatacagcatac

SEQ ID NO: 2031313 - DNA, 15 bp, Homo sapiens
ctgatacagcatact

SEQ ID NO: 2031314 - DNA, 15 bp, Homo sapiens
tgatacagcatacta

SEQ ID NO: 2031315 - DNA, 15 bp, Homo sapiens
gatacagcatactat

SEQ ID NO: 2031316 - DNA, 15 bp, Homo sapiens
atacagcatactata

SEQ ID NO: 2031317 - DNA, 15 bp, Homo sapiens
tacagcatactatat

SEQ ID NO: 2031318 - DNA, 15 bp, Homo sapiens
acagcatactatatc

SEQ ID NO: 2031319 - DNA, 15 bp, Homo sapiens
cagcatactatatca

SEQ ID NO: 2031320 - DNA, 15 bp, Homo sapiens
agcatactatatcaa

SEQ ID NO: 2031321 - DNA, 15 bp, Homo sapiens
gcatactatatcaaa

SEQ ID NO: 2031322 - DNA, 15 bp, Homo sapiens
catactatatcaaaa

SEQ ID NO: 2031323 - DNA, 15 bp, Homo sapiens
atactatatcaaaaa

SEQ ID NO: 2031324 - DNA, 15 bp, Homo sapiens
tactatatcaaaaaa

SEQ ID NO: 2031325 - DNA, 15 bp, Homo sapiens
actatatcaaaaaaa

SEQ ID NO: 2031326 - DNA, 15 bp, Homo sapiens
ctatatcaaaaaaaa

SEQ ID NO: 2031327 - DNA, 15 bp, Homo sapiens
tatatcaaaaaaaaa

SEQ ID NO: 2031328 - DNA, 15 bp, Homo sapiens
atatcaaaaaaaaaa

SEQ ID NO: 2031329 - DNA, 15 bp, Homo sapiens
tatcaaaaaaaaaaa

SEQ ID NO: 2031330 - DNA, 15 bp, Homo sapiens
atcaaaaaaaaaaaa

SEQ ID NO: 2031331 - DNA, 15 bp, Homo sapiens
aaaaaaaaagaagaa

SEQ ID NO: 2031332 - DNA, 15 bp, Homo sapiens
aagaagaagaagaag

SEQ ID NO: 2031333 - DNA, 15 bp, Homo sapiens
agaagaagaagaaga

SEQ ID NO: 2031334 - DNA, 15 bp, Homo sapiens
gaagaagaagaagaa

SEQ ID NO: 2031335 - DNA, 15 bp, Homo sapiens
aagaagaagaaacac

SEQ ID NO: 2031336 - DNA, 15 bp, Homo sapiens
agaagaagaaacaca

SEQ ID NO: 2031337 - DNA, 15 bp, Homo sapiens
gaagaagaaacacaa

SEQ ID NO: 2031338 - DNA, 15 bp, Homo sapiens
aagaagaaacacaaa

SEQ ID NO: 2031339 - DNA, 15 bp, Homo sapiens
agaagaaacacaaaa

SEQ ID NO: 2031340 - DNA, 15 bp, Homo sapiens
gaagaaacacaaaat

SEQ ID NO: 2031341 - DNA, 15 bp, Homo sapiens
aagaaacacaaaatc

SEQ ID NO: 2031342 - DNA, 15 bp, Homo sapiens
agaaacacaaaatct

SEQ ID NO: 2031343 - DNA, 15 bp, Homo sapiens
gaaacacaaaatcta

SEQ ID NO: 2031344 - DNA, 15 bp, Homo sapiens
aaacacaaaatctat

SEQ ID NO: 2031345 - DNA, 15 bp, Homo sapiens
aacacaaaatctatt

SEQ ID NO: 2031346 - DNA, 15 bp, Homo sapiens
acacaaaatctatta

SEQ ID NO: 2031347 - DNA, 15 bp, Homo sapiens
cacaaaatctattag

SEQ ID NO: 2031348 - DNA, 15 bp, Homo sapiens
acaaaatctattagg

SEQ ID NO: 2031349 - DNA, 15 bp, Homo sapiens
caaaatctattaggt

SEQ ID NO: 2031350 - DNA, 15 bp, Homo sapiens
aaaatctattaggta

SEQ ID NO: 2031351 - DNA, 15 bp, Homo sapiens
aaatctattaggtac

SEQ ID NO: 2031352 - DNA, 15 bp, Homo sapiens
aatctattaggtacc

SEQ ID NO: 2031353 - DNA, 15 bp, Homo sapiens
atctattaggtacct

SEQ ID NO: 2031354 - DNA, 15 bp, Homo sapiens
tctattaggtacctc

SEQ ID NO: 2031355 - DNA, 15 bp, Homo sapiens
ctattaggtacctca

SEQ ID NO: 2031356 - DNA, 15 bp, Homo sapiens
tattaggtacctcac

SEQ ID NO: 2031357 - DNA, 15 bp, Homo sapiens
attaggtacctcact

SEQ ID NO: 2031358 - DNA, 15 bp, Homo sapiens
ttaggtacctcactt

SEQ ID NO: 2031359 - DNA, 15 bp, Homo sapiens
taggtacctcacttt

SEQ ID NO: 2031360 - DNA, 15 bp, Homo sapiens
aggtacctcactttc

SEQ ID NO: 2031361 - DNA, 15 bp, Homo sapiens
ggtacctcactttcc

SEQ ID NO: 2031362 - DNA, 15 bp, Homo sapiens
gtacctcactttcct

SEQ ID NO: 2031363 - DNA, 15 bp, Homo sapiens
tacctcactttcctg

SEQ ID NO: 2031364 - DNA, 15 bp, Homo sapiens
acctcactttcctgc

SEQ ID NO: 2031365 - DNA, 15 bp, Homo sapiens
cctcactttcctgct

SEQ ID NO: 2031366 - DNA, 15 bp, Homo sapiens
ctcactttcctgctg

SEQ ID NO: 2031367 - DNA, 15 bp, Homo sapiens
tcactttcctgctgc

SEQ ID NO: 2031368 - DNA, 15 bp, Homo sapiens
cactttcctgctgcc

SEQ ID NO: 2031369 - DNA, 15 bp, Homo sapiens
actttcctgctgcca

SEQ ID NO: 2031370 - DNA, 15 bp, Homo sapiens
ctttcctgctgccag

SEQ ID NO: 2031371 - DNA, 15 bp, Homo sapiens
tttcctgctgccagc

SEQ ID NO: 2031372 - DNA, 15 bp, Homo sapiens
ttcctgctgccagca

SEQ ID NO: 2031373 - DNA, 15 bp, Homo sapiens
tcctgctgccagcaa

SEQ ID NO: 2031374 - DNA, 15 bp, Homo sapiens
cctgctgccagcaat

SEQ ID NO: 2031375 - DNA, 15 bp, Homo sapiens
ctgctgccagcaata

SEQ ID NO: 2031376 - DNA, 15 bp, Homo sapiens
tgctgccagcaataa

SEQ ID NO: 2031377 - DNA, 15 bp, Homo sapiens
gctgccagcaataac

SEQ ID NO: 2031378 - DNA, 15 bp, Homo sapiens
ctgccagcaataact

SEQ ID NO: 2031379 - DNA, 15 bp, Homo sapiens
tgccagcaataactc

SEQ ID NO: 2031380 - DNA, 15 bp, Homo sapiens
gccagcaataactca

SEQ ID NO: 2031381 - DNA, 15 bp, Homo sapiens
ccagcaataactcaa

SEQ ID NO: 2031382 - DNA, 15 bp, Homo sapiens
cagcaataactcaac

SEQ ID NO: 2031383 - DNA, 15 bp, Homo sapiens
agcaataactcaacc

SEQ ID NO: 2031384 - DNA, 15 bp, Homo sapiens
gcaataactcaacca

SEQ ID NO: 2031385 - DNA, 15 bp, Homo sapiens
caataactcaaccat

SEQ ID NO: 2031386 - DNA, 15 bp, Homo sapiens
aataactcaaccatc

SEQ ID NO: 2031387 - DNA, 15 bp, Homo sapiens
ataactcaaccatcc

SEQ ID NO: 2031388 - DNA, 15 bp, Homo sapiens
taactcaaccatcca

SEQ ID NO: 2031389 - DNA, 15 bp, Homo sapiens
aactcaaccatccat

SEQ ID NO: 2031390 - DNA, 15 bp, Homo sapiens
actcaaccatccata

SEQ ID NO: 2031391 - DNA, 15 bp, Homo sapiens
ctcaaccatccatag

SEQ ID NO: 2031392 - DNA, 15 bp, Homo sapiens
tcaaccatccataga

SEQ ID NO: 2031393 - DNA, 15 bp, Homo sapiens
caaccatccatagac

SEQ ID NO: 2031394 - DNA, 15 bp, Homo sapiens
aaccatccatagacc

SEQ ID NO: 2031395 - DNA, 15 bp, Homo sapiens
accatccatagacca

SEQ ID NO: 2031396 - DNA, 15 bp, Homo sapiens
ccatccatagaccat

SEQ ID NO: 2031397 - DNA, 15 bp, Homo sapiens
catccatagaccatc

SEQ ID NO: 2031398 - DNA, 15 bp, Homo sapiens
atccatagaccatcc

SEQ ID NO: 2031399 - DNA, 15 bp, Homo sapiens
tccatagaccatcct

SEQ ID NO: 2031400 - DNA, 15 bp, Homo sapiens
ccatagaccatcctg

SEQ ID NO: 2031401 - DNA, 15 bp, Homo sapiens
catagaccatcctga

SEQ ID NO: 2031402 - DNA, 15 bp, Homo sapiens
atagaccatcctgaa

SEQ ID NO: 2031403 - DNA, 15 bp, Homo sapiens
tagaccatcctgaaa

SEQ ID NO: 2031404 - DNA, 15 bp, Homo sapiens
agaccatcctgaaaa

SEQ ID NO: 2031405 - DNA, 15 bp, Homo sapiens
gaccatcctgaaaat

SEQ ID NO: 2031406 - DNA, 15 bp, Homo sapiens
accatcctgaaaatc

SEQ ID NO: 2031407 - DNA, 15 bp, Homo sapiens
ccatcctgaaaatct

SEQ ID NO: 2031408 - DNA, 15 bp, Homo sapiens
catcctgaaaatctg

SEQ ID NO: 2031409 - DNA, 15 bp, Homo sapiens
atcctgaaaatctgg

SEQ ID NO: 2031410 - DNA, 15 bp, Homo sapiens
tcctgaaaatctgga

SEQ ID NO: 2031411 - DNA, 15 bp, Homo sapiens
cctgaaaatctggaa

SEQ ID NO: 2031412 - DNA, 15 bp, Homo sapiens
ctgaaaatctggaag

SEQ ID NO: 2031413 - DNA, 15 bp, Homo sapiens
tgaaaatctggaagt

SEQ ID NO: 2031414 - DNA, 15 bp, Homo sapiens
gaaaatctggaagta

SEQ ID NO: 2031415 - DNA, 15 bp, Homo sapiens
aaaatctggaagtaa

SEQ ID NO: 2031416 - DNA, 15 bp, Homo sapiens
aaatctggaagtaaa

SEQ ID NO: 2031417 - DNA, 15 bp, Homo sapiens
aatctggaagtaaat

SEQ ID NO: 2031418 - DNA, 15 bp, Homo sapiens
atctggaagtaaata

SEQ ID NO: 2031419 - DNA, 15 bp, Homo sapiens
tctggaagtaaataa

SEQ ID NO: 2031420 - DNA, 15 bp, Homo sapiens
ctggaagtaaataaa

SEQ ID NO: 2031421 - DNA, 15 bp, Homo sapiens
tggaagtaaataaat

SEQ ID NO: 2031422 - DNA, 15 bp, Homo sapiens
ggaagtaaataaata

SEQ ID NO: 2031423 - DNA, 15 bp, Homo sapiens
gaagtaaataaataa

SEQ ID NO: 2031424 - DNA, 15 bp, Homo sapiens
aagtaaataaataat

SEQ ID NO: 2031425 - DNA, 15 bp, Homo sapiens
agtaaataaataatc

SEQ ID NO: 2031426 - DNA, 15 bp, Homo sapiens
gtaaataaataatca

SEQ ID NO: 2031427 - DNA, 15 bp, Homo sapiens
taaataaataatcaa

SEQ ID NO: 2031428 - DNA, 15 bp, Homo sapiens
aaataaataatcaaa

SEQ ID NO: 2031429 - DNA, 15 bp, Homo sapiens
aataaataatcaaac

SEQ ID NO: 2031430 - DNA, 15 bp, Homo sapiens
ataaataatcaaaca

SEQ ID NO: 2031431 - DNA, 15 bp, Homo sapiens
taaataatcaaacaa

SEQ ID NO: 2031432 - DNA, 15 bp, Homo sapiens
aaataatcaaacaaa

SEQ ID NO: 2031433 - DNA, 15 bp, Homo sapiens
aataatcaaacaaaa

SEQ ID NO: 2031434 - DNA, 15 bp, Homo sapiens
ataatcaaacaaaaa

SEQ ID NO: 2031435 - DNA, 15 bp, Homo sapiens
taatcaaacaaaaaa

SEQ ID NO: 2031436 - DNA, 15 bp, Homo sapiens
aatcaaacaaaaaat

SEQ ID NO: 2031437 - DNA, 15 bp, Homo sapiens
atcaaacaaaaaatt

SEQ ID NO: 2031438 - DNA, 15 bp, Homo sapiens
tcaaacaaaaaattc

SEQ ID NO: 2031439 - DNA, 15 bp, Homo sapiens
caaacaaaaaattca

SEQ ID NO: 2031440 - DNA, 15 bp, Homo sapiens
aaacaaaaaattcat

SEQ ID NO: 2031441 - DNA, 15 bp, Homo sapiens
aacaaaaaattcatc

SEQ ID NO: 2031442 - DNA, 15 bp, Homo sapiens
acaaaaaattcatct

SEQ ID NO: 2031443 - DNA, 15 bp, Homo sapiens
caaaaaattcatctc

SEQ ID NO: 2031444 - DNA, 15 bp, Homo sapiens
aaaaaattcatctca

SEQ ID NO: 2031445 - DNA, 15 bp, Homo sapiens
aaaaattcatctcaa

SEQ ID NO: 2031446 - DNA, 15 bp, Homo sapiens
aaaattcatctcaag

SEQ ID NO: 2031447 - DNA, 15 bp, Homo sapiens
aaattcatctcaaga

SEQ ID NO: 2031448 - DNA, 15 bp, Homo sapiens
aattcatctcaagaa

SEQ ID NO: 2031449 - DNA, 15 bp, Homo sapiens
attcatctcaagaaa

SEQ ID NO: 2031450 - DNA, 15 bp, Homo sapiens
ttcatctcaagaaaa

SEQ ID NO: 2031451 - DNA, 15 bp, Homo sapiens
tcatctcaagaaaat

SEQ ID NO: 2031452 - DNA, 15 bp, Homo sapiens
catctcaagaaaata

SEQ ID NO: 2031453 - DNA, 15 bp, Homo sapiens
atctcaagaaaataa

SEQ ID NO: 2031454 - DNA, 15 bp, Homo sapiens
tctcaagaaaataac

SEQ ID NO: 2031455 - DNA, 15 bp, Homo sapiens
ctcaagaaaataaca

SEQ ID NO: 2031456 - DNA, 15 bp, Homo sapiens
tcaagaaaataacat

SEQ ID NO: 2031457 - DNA, 15 bp, Homo sapiens
caagaaaataacatc

SEQ ID NO: 2031458 - DNA, 15 bp, Homo sapiens
aagaaaataacatct

SEQ ID NO: 2031459 - DNA, 15 bp, Homo sapiens
agaaaataacatctt

SEQ ID NO: 2031460 - DNA, 15 bp, Homo sapiens
gaaaataacatctta

SEQ ID NO: 2031461 - DNA, 15 bp, Homo sapiens
aaaataacatcttaa

SEQ ID NO: 2031462 - DNA, 15 bp, Homo sapiens
aaataacatcttaaa

SEQ ID NO: 2031463 - DNA, 15 bp, Homo sapiens
aataacatcttaaag

SEQ ID NO: 2031464 - DNA, 15 bp, Homo sapiens
ataacatcttaaagc

SEQ ID NO: 2031465 - DNA, 15 bp, Homo sapiens
taacatcttaaagcc

SEQ ID NO: 2031466 - DNA, 15 bp, Homo sapiens
aacatcttaaagccc

SEQ ID NO: 2031467 - DNA, 15 bp, Homo sapiens
acatcttaaagccca

SEQ ID NO: 2031468 - DNA, 15 bp, Homo sapiens
catcttaaagcccat

SEQ ID NO: 2031469 - DNA, 15 bp, Homo sapiens
atcttaaagcccata

SEQ ID NO: 2031470 - DNA, 15 bp, Homo sapiens
tcttaaagcccataa

SEQ ID NO: 2031471 - DNA, 15 bp, Homo sapiens
cttaaagcccataag

SEQ ID NO: 2031472 - DNA, 15 bp, Homo sapiens
ttaaagcccataagc

SEQ ID NO: 2031473 - DNA, 15 bp, Homo sapiens
taaagcccataagca

SEQ ID NO: 2031474 - DNA, 15 bp, Homo sapiens
aaagcccataagcat

SEQ ID NO: 2031475 - DNA, 15 bp, Homo sapiens
aagcccataagcata

SEQ ID NO: 2031476 - DNA, 15 bp, Homo sapiens
agcccataagcatat

SEQ ID NO: 2031477 - DNA, 15 bp, Homo sapiens
gcccataagcatata

SEQ ID NO: 2031478 - DNA, 15 bp, Homo sapiens
cccataagcatatat

SEQ ID NO: 2031479 - DNA, 15 bp, Homo sapiens
ccataagcatatata

SEQ ID NO: 2031480 - DNA, 15 bp, Homo sapiens
ataagcatatatata

SEQ ID NO: 2031481 - DNA, 15 bp, Homo sapiens
taagcatatatatac

SEQ ID NO: 2031482 - DNA, 15 bp, Homo sapiens
aagcatatatatacc

SEQ ID NO: 2031483 - DNA, 15 bp, Homo sapiens
agcatatatatacca

SEQ ID NO: 2031484 - DNA, 15 bp, Homo sapiens
gcatatatataccaa

SEQ ID NO: 2031485 - DNA, 15 bp, Homo sapiens
catatatataccaat

SEQ ID NO: 2031486 - DNA, 15 bp, Homo sapiens
atatatataccaatt

SEQ ID NO: 2031487 - DNA, 15 bp, Homo sapiens
tatatataccaattc

SEQ ID NO: 2031488 - DNA, 15 bp, Homo sapiens
atatataccaattcg

SEQ ID NO: 2031489 - DNA, 15 bp, Homo sapiens
tatataccaattcgt

SEQ ID NO: 2031490 - DNA, 15 bp, Homo sapiens
atataccaattcgta

SEQ ID NO: 2031491 - DNA, 15 bp, Homo sapiens
tataccaattcgtaa

SEQ ID NO: 2031492 - DNA, 15 bp, Homo sapiens
ataccaattcgtaat

SEQ ID NO: 2031493 - DNA, 15 bp, Homo sapiens
taccaattcgtaatg

SEQ ID NO: 2031494 - DNA, 15 bp, Homo sapiens
accaattcgtaatgc

SEQ ID NO: 2031495 - DNA, 15 bp, Homo sapiens
ccaattcgtaatgca

SEQ ID NO: 2031496 - DNA, 15 bp, Homo sapiens
caattcgtaatgcaa

SEQ ID NO: 2031497 - DNA, 15 bp, Homo sapiens
aattcgtaatgcaac

SEQ ID NO: 2031498 - DNA, 15 bp, Homo sapiens
attcgtaatgcaact

SEQ ID NO: 2031499 - DNA, 15 bp, Homo sapiens
ttcgtaatgcaactt

SEQ ID NO: 2031500 - DNA, 15 bp, Homo sapiens
tcgtaatgcaactta

SEQ ID NO: 2031501 - DNA, 15 bp, Homo sapiens
cgtaatgcaacttag

SEQ ID NO: 2031502 - DNA, 15 bp, Homo sapiens
gtaatgcaacttaga

SEQ ID NO: 2031503 - DNA, 15 bp, Homo sapiens
taatgcaacttagat

SEQ ID NO: 2031504 - DNA, 15 bp, Homo sapiens
aatgcaacttagatt

SEQ ID NO: 2031505 - DNA, 15 bp, Homo sapiens
atgcaacttagattt

SEQ ID NO: 2031506 - DNA, 15 bp, Homo sapiens
tgcaacttagatttg

SEQ ID NO: 2031507 - DNA, 15 bp, Homo sapiens
gcaacttagatttga

SEQ ID NO: 2031508 - DNA, 15 bp, Homo sapiens
caacttagatttgaa

SEQ ID NO: 2031509 - DNA, 15 bp, Homo sapiens
aacttagatttgaat

SEQ ID NO: 2031510 - DNA, 15 bp, Homo sapiens
acttagatttgaata

SEQ ID NO: 2031511 - DNA, 15 bp, Homo sapiens
cttagatttgaatac

SEQ ID NO: 2031512 - DNA, 15 bp, Homo sapiens
ttagatttgaataca

SEQ ID NO: 2031513 - DNA, 15 bp, Homo sapiens
tagatttgaatacac

SEQ ID NO: 2031514 - DNA, 15 bp, Homo sapiens
agatttgaatacact

SEQ ID NO: 2031515 - DNA, 15 bp, Homo sapiens
gatttgaatacactg

SEQ ID NO: 2031516 - DNA, 15 bp, Homo sapiens
atttgaatacactga

SEQ ID NO: 2031517 - DNA, 15 bp, Homo sapiens
tttgaatacactgag

SEQ ID NO: 2031518 - DNA, 15 bp, Homo sapiens
ttgaatacactgaga

SEQ ID NO: 2031519 - DNA, 15 bp, Homo sapiens
tgaatacactgagaa

SEQ ID NO: 2031520 - DNA, 15 bp, Homo sapiens
gaatacactgagaaa

SEQ ID NO: 2031521 - DNA, 15 bp, Homo sapiens
aatacactgagaaat

SEQ ID NO: 2031522 - DNA, 15 bp, Homo sapiens
atacactgagaaata

SEQ ID NO: 2031523 - DNA, 15 bp, Homo sapiens
tacactgagaaatac

SEQ ID NO: 2031524 - DNA, 15 bp, Homo sapiens
acactgagaaatact

SEQ ID NO: 2031525 - DNA, 15 bp, Homo sapiens
cactgagaaatacta

SEQ ID NO: 2031526 - DNA, 15 bp, Homo sapiens
actgagaaatactaa

SEQ ID NO: 2031527 - DNA, 15 bp, Homo sapiens
ctgagaaatactaat

SEQ ID NO: 2031528 - DNA, 15 bp, Homo sapiens
tgagaaatactaata

SEQ ID NO: 2031529 - DNA, 15 bp, Homo sapiens
gagaaatactaatag

SEQ ID NO: 2031530 - DNA, 15 bp, Homo sapiens
agaaatactaatagc

SEQ ID NO: 2031531 - DNA, 15 bp, Homo sapiens
gaaatactaatagct

SEQ ID NO: 2031532 - DNA, 15 bp, Homo sapiens
aaatactaatagcta

SEQ ID NO: 2031533 - DNA, 15 bp, Homo sapiens
aatactaatagctaa

SEQ ID NO: 2031534 - DNA, 15 bp, Homo sapiens
atactaatagctaat

SEQ ID NO: 2031535 - DNA, 15 bp, Homo sapiens
tactaatagctaata

SEQ ID NO: 2031536 - DNA, 15 bp, Homo sapiens
actaatagctaatag

SEQ ID NO: 2031537 - DNA, 15 bp, Homo sapiens
ctaatagctaatagc

SEQ ID NO: 2031538 - DNA, 15 bp, Homo sapiens
taatagctaatagct

SEQ ID NO: 2031539 - DNA, 15 bp, Homo sapiens
aatagctaatagctc

SEQ ID NO: 2031540 - DNA, 15 bp, Homo sapiens
atagctaatagctcc

SEQ ID NO: 2031541 - DNA, 15 bp, Homo sapiens
tagctaatagctcca

SEQ ID NO: 2031542 - DNA, 15 bp, Homo sapiens
agctaatagctccag

SEQ ID NO: 2031543 - DNA, 15 bp, Homo sapiens
gctaatagctccagt

SEQ ID NO: 2031544 - DNA, 15 bp, Homo sapiens
ctaatagctccagtg

SEQ ID NO: 2031545 - DNA, 15 bp, Homo sapiens
taatagctccagtgg

SEQ ID NO: 2031546 - DNA, 15 bp, Homo sapiens
aatagctccagtggg

SEQ ID NO: 2031547 - DNA, 15 bp, Homo sapiens
atagctccagtggga

SEQ ID NO: 2031548 - DNA, 15 bp, Homo sapiens
tagctccagtgggac

SEQ ID NO: 2031549 - DNA, 15 bp, Homo sapiens
agctccagtgggact

SEQ ID NO: 2031550 - DNA, 15 bp, Homo sapiens
gctccagtgggactg

SEQ ID NO: 2031551 - DNA, 15 bp, Homo sapiens
ctccagtgggactga

SEQ ID NO: 2031552 - DNA, 15 bp, Homo sapiens
tccagtgggactgag

SEQ ID NO: 2031553 - DNA, 15 bp, Homo sapiens
ccagtgggactgaga

SEQ ID NO: 2031554 - DNA, 15 bp, Homo sapiens
cagtgggactgagat

SEQ ID NO: 2031555 - DNA, 15 bp, Homo sapiens
agtgggactgagata

SEQ ID NO: 2031556 - DNA, 15 bp, Homo sapiens
gtgggactgagataa

SEQ ID NO: 2031557 - DNA, 15 bp, Homo sapiens
tgggactgagataaa

SEQ ID NO: 2031558 - DNA, 15 bp, Homo sapiens
gggactgagataaac

SEQ ID NO: 2031559 - DNA, 15 bp, Homo sapiens
ggactgagataaaca

SEQ ID NO: 2031560 - DNA, 15 bp, Homo sapiens
gactgagataaacaa

SEQ ID NO: 2031561 - DNA, 15 bp, Homo sapiens
actgagataaacaag

SEQ ID NO: 2031562 - DNA, 15 bp, Homo sapiens
ctgagataaacaagg

SEQ ID NO: 2031563 - DNA, 15 bp, Homo sapiens
tgagataaacaaggt

SEQ ID NO: 2031564 - DNA, 15 bp, Homo sapiens
gagataaacaaggtg

SEQ ID NO: 2031565 - DNA, 15 bp, Homo sapiens
agataaacaaggtgg

SEQ ID NO: 2031566 - DNA, 15 bp, Homo sapiens
gataaacaaggtggg

SEQ ID NO: 2031567 - DNA, 15 bp, Homo sapiens
ataaacaaggtggga

SEQ ID NO: 2031568 - DNA, 15 bp, Homo sapiens
taaacaaggtgggag

SEQ ID NO: 2031569 - DNA, 15 bp, Homo sapiens
aaacaaggtgggaga

SEQ ID NO: 2031570 - DNA, 15 bp, Homo sapiens
aacaaggtgggagaa

SEQ ID NO: 2031571 - DNA, 15 bp, Homo sapiens
acaaggtgggagaaa

SEQ ID NO: 2031572 - DNA, 15 bp, Homo sapiens
caaggtgggagaaat

SEQ ID NO: 2031573 - DNA, 15 bp, Homo sapiens
aaggtgggagaaatg

SEQ ID NO: 2031574 - DNA, 15 bp, Homo sapiens
aggtgggagaaatgg

SEQ ID NO: 2031575 - DNA, 15 bp, Homo sapiens
ggtgggagaaatggc

SEQ ID NO: 2031576 - DNA, 15 bp, Homo sapiens
gtgggagaaatggca

SEQ ID NO: 2031577 - DNA, 15 bp, Homo sapiens
tgggagaaatggcaa

SEQ ID NO: 2031578 - DNA, 15 bp, Homo sapiens
gggagaaatggcaaa

SEQ ID NO: 2031579 - DNA, 15 bp, Homo sapiens
ggagaaatggcaaac

SEQ ID NO: 2031580 - DNA, 15 bp, Homo sapiens
gagaaatggcaaacc

SEQ ID NO: 2031581 - DNA, 15 bp, Homo sapiens
agaaatggcaaacct

SEQ ID NO: 2031582 - DNA, 15 bp, Homo sapiens
gaaatggcaaaccta

SEQ ID NO: 2031583 - DNA, 15 bp, Homo sapiens
aaatggcaaacctac

SEQ ID NO: 2031584 - DNA, 15 bp, Homo sapiens
aatggcaaacctaca

SEQ ID NO: 2031585 - DNA, 15 bp, Homo sapiens
atggcaaacctacag

SEQ ID NO: 2031586 - DNA, 15 bp, Homo sapiens
tggcaaacctacaga

SEQ ID NO: 2031587 - DNA, 15 bp, Homo sapiens
ggcaaacctacagaa

SEQ ID NO: 2031588 - DNA, 15 bp, Homo sapiens
gcaaacctacagaac

SEQ ID NO: 2031589 - DNA, 15 bp, Homo sapiens
caaacctacagaact

SEQ ID NO: 2031590 - DNA, 15 bp, Homo sapiens
aaacctacagaactc

SEQ ID NO: 2031591 - DNA, 15 bp, Homo sapiens
aacctacagaactct

SEQ ID NO: 2031592 - DNA, 15 bp, Homo sapiens
acctacagaactctg

SEQ ID NO: 2031593 - DNA, 15 bp, Homo sapiens
cctacagaactctgg

SEQ ID NO: 2031594 - DNA, 15 bp, Homo sapiens
ctacagaactctgga

SEQ ID NO: 2031595 - DNA, 15 bp, Homo sapiens
tacagaactctggac

SEQ ID NO: 2031596 - DNA, 15 bp, Homo sapiens
acagaactctggact

SEQ ID NO: 2031597 - DNA, 15 bp, Homo sapiens
cagaactctggactt

SEQ ID NO: 2031598 - DNA, 15 bp, Homo sapiens
agaactctggactta

SEQ ID NO: 2031599 - DNA, 15 bp, Homo sapiens
gaactctggacttat

SEQ ID NO: 2031600 - DNA, 15 bp, Homo sapiens
aactctggacttatt

SEQ ID NO: 2031601 - DNA, 15 bp, Homo sapiens
actctggacttattc

SEQ ID NO: 2031602 - DNA, 15 bp, Homo sapiens
ctctggacttattca

SEQ ID NO: 2031603 - DNA, 15 bp, Homo sapiens
tctggacttattcag

SEQ ID NO: 2031604 - DNA, 15 bp, Homo sapiens
ctggacttattcagt

SEQ ID NO: 2031605 - DNA, 15 bp, Homo sapiens
tggacttattcagtg

SEQ ID NO: 2031606 - DNA, 15 bp, Homo sapiens
ggacttattcagtgt

SEQ ID NO: 2031607 - DNA, 15 bp, Homo sapiens
gacttattcagtgtc

SEQ ID NO: 2031608 - DNA, 15 bp, Homo sapiens
acttattcagtgtca

SEQ ID NO: 2031609 - DNA, 15 bp, Homo sapiens
cttattcagtgtcat

SEQ ID NO: 2031610 - DNA, 15 bp, Homo sapiens
ttattcagtgtcata

SEQ ID NO: 2031611 - DNA, 15 bp, Homo sapiens
tattcagtgtcatag

SEQ ID NO: 2031612 - DNA, 15 bp, Homo sapiens
attcagtgtcatagt

SEQ ID NO: 2031613 - DNA, 15 bp, Homo sapiens
ttcagtgtcatagtg

SEQ ID NO: 2031614 - DNA, 15 bp, Homo sapiens
tcagtgtcatagtga

SEQ ID NO: 2031615 - DNA, 15 bp, Homo sapiens
cagtgtcatagtgaa

SEQ ID NO: 2031616 - DNA, 15 bp, Homo sapiens
agtgtcatagtgaat

SEQ ID NO: 2031617 - DNA, 15 bp, Homo sapiens
gtgtcatagtgaatg

SEQ ID NO: 2031618 - DNA, 15 bp, Homo sapiens
tgtcatagtgaatgg

SEQ ID NO: 2031619 - DNA, 15 bp, Homo sapiens
gtcatagtgaatggt

SEQ ID NO: 2031620 - DNA, 15 bp, Homo sapiens
tcatagtgaatggtt

SEQ ID NO: 2031621 - DNA, 15 bp, Homo sapiens
catagtgaatggttt

SEQ ID NO: 2031622 - DNA, 15 bp, Homo sapiens
atagtgaatggtttc

SEQ ID NO: 2031623 - DNA, 15 bp, Homo sapiens
tagtgaatggtttca

SEQ ID NO: 2031624 - DNA, 15 bp, Homo sapiens
agtgaatggtttcat

SEQ ID NO: 2031625 - DNA, 15 bp, Homo sapiens
gtgaatggtttcata

SEQ ID NO: 2031626 - DNA, 15 bp, Homo sapiens
tgaatggtttcatac

SEQ ID NO: 2031627 - DNA, 15 bp, Homo sapiens
gaatggtttcataca

SEQ ID NO: 2031628 - DNA, 15 bp, Homo sapiens
aatggtttcatacaa

SEQ ID NO: 2031629 - DNA, 15 bp, Homo sapiens
atggtttcatacaac

SEQ ID NO: 2031630 - DNA, 15 bp, Homo sapiens
tggtttcatacaact

SEQ ID NO: 2031631 - DNA, 15 bp, Homo sapiens
ggtttcatacaactc

SEQ ID NO: 2031632 - DNA, 15 bp, Homo sapiens
gtttcatacaactct

SEQ ID NO: 2031633 - DNA, 15 bp, Homo sapiens
tttcatacaactctg

SEQ ID NO: 2031634 - DNA, 15 bp, Homo sapiens
ttcatacaactctgg

SEQ ID NO: 2031635 - DNA, 15 bp, Homo sapiens
tcatacaactctggt

SEQ ID NO: 2031636 - DNA, 15 bp, Homo sapiens
catacaactctggtt

SEQ ID NO: 2031637 - DNA, 15 bp, Homo sapiens
atacaactctggttg

SEQ ID NO: 2031638 - DNA, 15 bp, Homo sapiens
tacaactctggttga

SEQ ID NO: 2031639 - DNA, 15 bp, Homo sapiens
acaactctggttgac

SEQ ID NO: 2031640 - DNA, 15 bp, Homo sapiens
caactctggttgacc

SEQ ID NO: 2031641 - DNA, 15 bp, Homo sapiens
aactctggttgaccc

SEQ ID NO: 2031642 - DNA, 15 bp, Homo sapiens
actctggttgaccct

SEQ ID NO: 2031643 - DNA, 15 bp, Homo sapiens
ctctggttgaccctg

SEQ ID NO: 2031644 - DNA, 15 bp, Homo sapiens
tctggttgaccctgg

SEQ ID NO: 2031645 - DNA, 15 bp, Homo sapiens
ctggttgaccctgga

SEQ ID NO: 2031646 - DNA, 15 bp, Homo sapiens
tggttgaccctggag

SEQ ID NO: 2031647 - DNA, 15 bp, Homo sapiens
ggttgaccctggagg

SEQ ID NO: 2031648 - DNA, 15 bp, Homo sapiens
gttgaccctggaggt

SEQ ID NO: 2031649 - DNA, 15 bp, Homo sapiens
ttgaccctggaggtg

SEQ ID NO: 2031650 - DNA, 15 bp, Homo sapiens
tgaccctggaggtgc

SEQ ID NO: 2031651 - DNA, 15 bp, Homo sapiens
gaccctggaggtgct

SEQ ID NO: 2031652 - DNA, 15 bp, Homo sapiens
accctggaggtgcta

SEQ ID NO: 2031653 - DNA, 15 bp, Homo sapiens
ccctggaggtgctat

SEQ ID NO: 2031654 - DNA, 15 bp, Homo sapiens
cctggaggtgctatt

SEQ ID NO: 2031655 - DNA, 15 bp, Homo sapiens
ctggaggtgctattc

SEQ ID NO: 2031656 - DNA, 15 bp, Homo sapiens
tggaggtgctattca

SEQ ID NO: 2031657 - DNA, 15 bp, Homo sapiens
ggaggtgctattcat

SEQ ID NO: 2031658 - DNA, 15 bp, Homo sapiens
gaggtgctattcatt

SEQ ID NO: 2031659 - DNA, 15 bp, Homo sapiens
aggtgctattcatta

SEQ ID NO: 2031660 - DNA, 15 bp, Homo sapiens
ggtgctattcattat

SEQ ID NO: 2031661 - DNA, 15 bp, Homo sapiens
gtgctattcattata

SEQ ID NO: 2031662 - DNA, 15 bp, Homo sapiens
tgctattcattatag

SEQ ID NO: 2031663 - DNA, 15 bp, Homo sapiens
gctattcattataga

SEQ ID NO: 2031664 - DNA, 15 bp, Homo sapiens
ctattcattatagaa

SEQ ID NO: 2031665 - DNA, 15 bp, Homo sapiens
tattcattatagaac

SEQ ID NO: 2031666 - DNA, 15 bp, Homo sapiens
attcattatagaact

SEQ ID NO: 2031667 - DNA, 15 bp, Homo sapiens
ttcattatagaactt

SEQ ID NO: 2031668 - DNA, 15 bp, Homo sapiens
tcattatagaactta

SEQ ID NO: 2031669 - DNA, 15 bp, Homo sapiens
cattatagaacttaa

SEQ ID NO: 2031670 - DNA, 15 bp, Homo sapiens
attatagaacttaaa

SEQ ID NO: 2031671 - DNA, 15 bp, Homo sapiens
ttatagaacttaaac

SEQ ID NO: 2031672 - DNA, 15 bp, Homo sapiens
tatagaacttaaact

SEQ ID NO: 2031673 - DNA, 15 bp, Homo sapiens
atagaacttaaacta

SEQ ID NO: 2031674 - DNA, 15 bp, Homo sapiens
tagaacttaaactat

SEQ ID NO: 2031675 - DNA, 15 bp, Homo sapiens
agaacttaaactatt

SEQ ID NO: 2031676 - DNA, 15 bp, Homo sapiens
gaacttaaactattg

SEQ ID NO: 2031677 - DNA, 15 bp, Homo sapiens
aacttaaactattgt

SEQ ID NO: 2031678 - DNA, 15 bp, Homo sapiens
acttaaactattgtg

SEQ ID NO: 2031679 - DNA, 15 bp, Homo sapiens
cttaaactattgtgt

SEQ ID NO: 2031680 - DNA, 15 bp, Homo sapiens
ttaaactattgtgtg

SEQ ID NO: 2031681 - DNA, 15 bp, Homo sapiens
taaactattgtgtgt

SEQ ID NO: 2031682 - DNA, 15 bp, Homo sapiens
aaactattgtgtgtg

SEQ ID NO: 2031683 - DNA, 15 bp, Homo sapiens
aactattgtgtgtgt

SEQ ID NO: 2031684 - DNA, 15 bp, Homo sapiens
actattgtgtgtgtt

SEQ ID NO: 2031685 - DNA, 15 bp, Homo sapiens
ctattgtgtgtgtta

SEQ ID NO: 2031686 - DNA, 15 bp, Homo sapiens
tattgtgtgtgttat

SEQ ID NO: 2031687 - DNA, 15 bp, Homo sapiens
attgtgtgtgttatt

SEQ ID NO: 2031688 - DNA, 15 bp, Homo sapiens
ttgtgtgtgttatta

SEQ ID NO: 2031689 - DNA, 15 bp, Homo sapiens
tgtgtgtgttattat

SEQ ID NO: 2031690 - DNA, 15 bp, Homo sapiens
gtgtgtgttattatg

SEQ ID NO: 2031691 - DNA, 15 bp, Homo sapiens
tgtgtgttattatga

SEQ ID NO: 2031692 - DNA, 15 bp, Homo sapiens
gtgtgttattatgac

SEQ ID NO: 2031693 - DNA, 15 bp, Homo sapiens
tgtgttattatgaca

SEQ ID NO: 2031694 - DNA, 15 bp, Homo sapiens
gtgttattatgacag

SEQ ID NO: 2031695 - DNA, 15 bp, Homo sapiens
tgttattatgacagt

SEQ ID NO: 2031696 - DNA, 15 bp, Homo sapiens
gttattatgacagtg

SEQ ID NO: 2031697 - DNA, 15 bp, Homo sapiens
ttattatgacagtga

SEQ ID NO: 2031698 - DNA, 15 bp, Homo sapiens
tattatgacagtgag

SEQ ID NO: 2031699 - DNA, 15 bp, Homo sapiens
attatgacagtgagt

SEQ ID NO: 2031700 - DNA, 15 bp, Homo sapiens
ttatgacagtgagta

SEQ ID NO: 2031701 - DNA, 15 bp, Homo sapiens
tatgacagtgagtaa

SEQ ID NO: 2031702 - DNA, 15 bp, Homo sapiens
atgacagtgagtaat

SEQ ID NO: 2031703 - DNA, 15 bp, Homo sapiens
tgacagtgagtaatg

SEQ ID NO: 2031704 - DNA, 15 bp, Homo sapiens
gacagtgagtaatga

SEQ ID NO: 2031705 - DNA, 15 bp, Homo sapiens
acagtgagtaatgaa

SEQ ID NO: 2031706 - DNA, 15 bp, Homo sapiens
cagtgagtaatgaag

SEQ ID NO: 2031707 - DNA, 15 bp, Homo sapiens
agtgagtaatgaagg

SEQ ID NO: 2031708 - DNA, 15 bp, Homo sapiens
gtgagtaatgaagga

SEQ ID NO: 2031709 - DNA, 15 bp, Homo sapiens
tgagtaatgaaggaa

SEQ ID NO: 2031710 - DNA, 15 bp, Homo sapiens
gagtaatgaaggaaa

SEQ ID NO: 2031711 - DNA, 15 bp, Homo sapiens
agtaatgaaggaaag

SEQ ID NO: 2031712 - DNA, 15 bp, Homo sapiens
gtaatgaaggaaagc

SEQ ID NO: 2031713 - DNA, 15 bp, Homo sapiens
taatgaaggaaagct

SEQ ID NO: 2031714 - DNA, 15 bp, Homo sapiens
aatgaaggaaagctt

SEQ ID NO: 2031715 - DNA, 15 bp, Homo sapiens
atgaaggaaagcttt

SEQ ID NO: 2031716 - DNA, 15 bp, Homo sapiens
tgaaggaaagctttt

SEQ ID NO: 2031717 - DNA, 15 bp, Homo sapiens
gaaggaaagcttttg

SEQ ID NO: 2031718 - DNA, 15 bp, Homo sapiens
aaggaaagcttttgt

SEQ ID NO: 2031719 - DNA, 15 bp, Homo sapiens
aggaaagcttttgtt

SEQ ID NO: 2031720 - DNA, 15 bp, Homo sapiens
ggaaagcttttgtta

SEQ ID NO: 2031721 - DNA, 15 bp, Homo sapiens
gaaagcttttgttat

SEQ ID NO: 2031722 - DNA, 15 bp, Homo sapiens
aaagcttttgttatg

SEQ ID NO: 2031723 - DNA, 15 bp, Homo sapiens
aagcttttgttatgg

SEQ ID NO: 2031724 - DNA, 15 bp, Homo sapiens
agcttttgttatggt

SEQ ID NO: 2031725 - DNA, 15 bp, Homo sapiens
gcttttgttatggtt

SEQ ID NO: 2031726 - DNA, 15 bp, Homo sapiens
cttttgttatggttg

SEQ ID NO: 2031727 - DNA, 15 bp, Homo sapiens
ttttgttatggttgt

SEQ ID NO: 2031728 - DNA, 15 bp, Homo sapiens
tttgttatggttgtg

SEQ ID NO: 2031729 - DNA, 15 bp, Homo sapiens
ttgttatggttgtgt

SEQ ID NO: 2031730 - DNA, 15 bp, Homo sapiens
tgttatggttgtgtt

SEQ ID NO: 2031731 - DNA, 15 bp, Homo sapiens
gttatggttgtgttt

SEQ ID NO: 2031732 - DNA, 15 bp, Homo sapiens
ttatggttgtgtttt

SEQ ID NO: 2031733 - DNA, 15 bp, Homo sapiens
tatggttgtgttttc

SEQ ID NO: 2031734 - DNA, 15 bp, Homo sapiens
atggttgtgttttct

SEQ ID NO: 2031735 - DNA, 15 bp, Homo sapiens
tggttgtgttttcta

SEQ ID NO: 2031736 - DNA, 15 bp, Homo sapiens
ggttgtgttttctat

SEQ ID NO: 2031737 - DNA, 15 bp, Homo sapiens
gttgtgttttctatt

SEQ ID NO: 2031738 - DNA, 15 bp, Homo sapiens
ttgtgttttctattt

SEQ ID NO: 2031739 - DNA, 15 bp, Homo sapiens
tgtgttttctattta

SEQ ID NO: 2031740 - DNA, 15 bp, Homo sapiens
gtgttttctatttag

SEQ ID NO: 2031741 - DNA, 15 bp, Homo sapiens
tgttttctatttaga

SEQ ID NO: 2031742 - DNA, 15 bp, Homo sapiens
gttttctatttagaa

SEQ ID NO: 2031743 - DNA, 15 bp, Homo sapiens
ttttctatttagaaa

SEQ ID NO: 2031744 - DNA, 15 bp, Homo sapiens
tttctatttagaaag

SEQ ID NO: 2031745 - DNA, 15 bp, Homo sapiens
ttctatttagaaaga

SEQ ID NO: 2031746 - DNA, 15 bp, Homo sapiens
tctatttagaaagat

SEQ ID NO: 2031747 - DNA, 15 bp, Homo sapiens
ctatttagaaagata

SEQ ID NO: 2031748 - DNA, 15 bp, Homo sapiens
tatttagaaagatat

SEQ ID NO: 2031749 - DNA, 15 bp, Homo sapiens
atttagaaagatatt

SEQ ID NO: 2031750 - DNA, 15 bp, Homo sapiens
tttagaaagatattc

SEQ ID NO: 2031751 - DNA, 15 bp, Homo sapiens
ttagaaagatattct

SEQ ID NO: 2031752 - DNA, 15 bp, Homo sapiens
tagaaagatattctt

SEQ ID NO: 2031753 - DNA, 15 bp, Homo sapiens
agaaagatattcttc

SEQ ID NO: 2031754 - DNA, 15 bp, Homo sapiens
gaaagatattcttct

SEQ ID NO: 2031755 - DNA, 15 bp, Homo sapiens
aaagatattcttcta

SEQ ID NO: 2031756 - DNA, 15 bp, Homo sapiens
aagatattcttctaa

SEQ ID NO: 2031757 - DNA, 15 bp, Homo sapiens
agatattcttctaaa

SEQ ID NO: 2031758 - DNA, 15 bp, Homo sapiens
gatattcttctaaaa

SEQ ID NO: 2031759 - DNA, 15 bp, Homo sapiens
atattcttctaaaat

SEQ ID NO: 2031760 - DNA, 15 bp, Homo sapiens
tattcttctaaaatg

SEQ ID NO: 2031761 - DNA, 15 bp, Homo sapiens
attcttctaaaatgg

SEQ ID NO: 2031762 - DNA, 15 bp, Homo sapiens
ttcttctaaaatggt

SEQ ID NO: 2031763 - DNA, 15 bp, Homo sapiens
tcttctaaaatggtt

SEQ ID NO: 2031764 - DNA, 15 bp, Homo sapiens
cttctaaaatggtta

SEQ ID NO: 2031765 - DNA, 15 bp, Homo sapiens
ttctaaaatggttaa

SEQ ID NO: 2031766 - DNA, 15 bp, Homo sapiens
tctaaaatggttaaa

SEQ ID NO: 2031767 - DNA, 15 bp, Homo sapiens
ctaaaatggttaaaa

SEQ ID NO: 2031768 - DNA, 15 bp, Homo sapiens
taaaatggttaaaaa

SEQ ID NO: 2031769 - DNA, 15 bp, Homo sapiens
aaaatggttaaaaat

SEQ ID NO: 2031770 - DNA, 15 bp, Homo sapiens
aatggttaaaaataa

SEQ ID NO: 2031771 - DNA, 15 bp, Homo sapiens
atggttaaaaataaa

SEQ ID NO: 2031772 - DNA, 15 bp, Homo sapiens
tggttaaaaataaaa

SEQ ID NO: 2031773 - DNA, 15 bp, Homo sapiens
ggttaaaaataaaag

SEQ ID NO: 2031774 - DNA, 15 bp, Homo sapiens
gttaaaaataaaaga

SEQ ID NO: 2031775 - DNA, 15 bp, Homo sapiens
ttaaaaataaaagaa

SEQ ID NO: 2031776 - DNA, 15 bp, Homo sapiens
taaaaataaaagaaa

SEQ ID NO: 2031777 - DNA, 15 bp, Homo sapiens
aaaaataaaagaaac

SEQ ID NO: 2031778 - DNA, 15 bp, Homo sapiens
aaaataaaagaaact

SEQ ID NO: 2031779 - DNA, 15 bp, Homo sapiens
aaataaaagaaactt

SEQ ID NO: 2031780 - DNA, 15 bp, Homo sapiens
aataaaagaaacttt

SEQ ID NO: 2031781 - DNA, 15 bp, Homo sapiens
ataaaagaaacttta

SEQ ID NO: 2031782 - DNA, 15 bp, Homo sapiens
taaaagaaactttag

SEQ ID NO: 2031783 - DNA, 15 bp, Homo sapiens
aaaagaaactttagt

SEQ ID NO: 2031784 - DNA, 15 bp, Homo sapiens
aaagaaactttagtt

SEQ ID NO: 2031785 - DNA, 15 bp, Homo sapiens
aagaaactttagttg

SEQ ID NO: 2031786 - DNA, 15 bp, Homo sapiens
agaaactttagttgt

SEQ ID NO: 2031787 - DNA, 15 bp, Homo sapiens
gaaactttagttgtt

SEQ ID NO: 2031788 - DNA, 15 bp, Homo sapiens
aaactttagttgttt

SEQ ID NO: 2031789 - DNA, 15 bp, Homo sapiens
aactttagttgttta

SEQ ID NO: 2031790 - DNA, 15 bp, Homo sapiens
actttagttgtttaa

SEQ ID NO: 2031791 - DNA, 15 bp, Homo sapiens
ctttagttgtttaac

SEQ ID NO: 2031792 - DNA, 15 bp, Homo sapiens
tttagttgtttaacg

SEQ ID NO: 2031793 - DNA, 15 bp, Homo sapiens
ttagttgtttaacgt

SEQ ID NO: 2031794 - DNA, 15 bp, Homo sapiens
tagttgtttaacgtt

SEQ ID NO: 2031795 - DNA, 15 bp, Homo sapiens
agttgtttaacgttc

SEQ ID NO: 2031796 - DNA, 15 bp, Homo sapiens
gttgtttaacgttcc

SEQ ID NO: 2031797 - DNA, 15 bp, Homo sapiens
ttgtttaacgttcca

SEQ ID NO: 2031798 - DNA, 15 bp, Homo sapiens
tgtttaacgttccat

SEQ ID NO: 2031799 - DNA, 15 bp, Homo sapiens
gtttaacgttccatt

SEQ ID NO: 2031800 - DNA, 15 bp, Homo sapiens
tttaacgttccatta

SEQ ID NO: 2031801 - DNA, 15 bp, Homo sapiens
ttaacgttccattat

SEQ ID NO: 2031802 - DNA, 15 bp, Homo sapiens
taacgttccattatc

SEQ ID NO: 2031803 - DNA, 15 bp, Homo sapiens
aacgttccattatct

SEQ ID NO: 2031804 - DNA, 15 bp, Homo sapiens
acgttccattatctg

SEQ ID NO: 2031805 - DNA, 15 bp, Homo sapiens
cgttccattatctga

SEQ ID NO: 2031806 - DNA, 15 bp, Homo sapiens
gttccattatctgaa

SEQ ID NO: 2031807 - DNA, 15 bp, Homo sapiens
ttccattatctgaaa

SEQ ID NO: 2031808 - DNA, 15 bp, Homo sapiens
tccattatctgaaaa

SEQ ID NO: 2031809 - DNA, 15 bp, Homo sapiens
ccattatctgaaaag

SEQ ID NO: 2031810 - DNA, 15 bp, Homo sapiens
cattatctgaaaagt

SEQ ID NO: 2031811 - DNA, 15 bp, Homo sapiens
attatctgaaaagtt

SEQ ID NO: 2031812 - DNA, 15 bp, Homo sapiens
ttatctgaaaagttc

SEQ ID NO: 2031813 - DNA, 15 bp, Homo sapiens
tatctgaaaagttca

SEQ ID NO: 2031814 - DNA, 15 bp, Homo sapiens
atctgaaaagttcac

SEQ ID NO: 2031815 - DNA, 15 bp, Homo sapiens
tctgaaaagttcact

SEQ ID NO: 2031816 - DNA, 15 bp, Homo sapiens
ctgaaaagttcactt

SEQ ID NO: 2031817 - DNA, 15 bp, Homo sapiens
tgaaaagttcactta

SEQ ID NO: 2031818 - DNA, 15 bp, Homo sapiens
gaaaagttcacttat

SEQ ID NO: 2031819 - DNA, 15 bp, Homo sapiens
aaaagttcacttatg

SEQ ID NO: 2031820 - DNA, 15 bp, Homo sapiens
aaagttcacttatga

SEQ ID NO: 2031821 - DNA, 15 bp, Homo sapiens
aagttcacttatgaa

SEQ ID NO: 2031822 - DNA, 15 bp, Homo sapiens
agttcacttatgaaa

SEQ ID NO: 2031823 - DNA, 15 bp, Homo sapiens
gttcacttatgaaac

SEQ ID NO: 2031824 - DNA, 15 bp, Homo sapiens
ttcacttatgaaaca

SEQ ID NO: 2031825 - DNA, 15 bp, Homo sapiens
tcacttatgaaacac

SEQ ID NO: 2031826 - DNA, 15 bp, Homo sapiens
cacttatgaaacaca

SEQ ID NO: 2031827 - DNA, 15 bp, Homo sapiens
acttatgaaacacat

SEQ ID NO: 2031828 - DNA, 15 bp, Homo sapiens
cttatgaaacacatc

SEQ ID NO: 2031829 - DNA, 15 bp, Homo sapiens
ttatgaaacacatca

SEQ ID NO: 2031830 - DNA, 15 bp, Homo sapiens
tatgaaacacatcat

SEQ ID NO: 2031831 - DNA, 15 bp, Homo sapiens
atgaaacacatcatt

SEQ ID NO: 2031832 - DNA, 15 bp, Homo sapiens
tgaaacacatcattg

SEQ ID NO: 2031833 - DNA, 15 bp, Homo sapiens
gaaacacatcattgt

SEQ ID NO: 2031834 - DNA, 15 bp, Homo sapiens
aaacacatcattgta

SEQ ID NO: 2031835 - DNA, 15 bp, Homo sapiens
aacacatcattgtat

SEQ ID NO: 2031836 - DNA, 15 bp, Homo sapiens
acacatcattgtata

SEQ ID NO: 2031837 - DNA, 15 bp, Homo sapiens
cacatcattgtataa

SEQ ID NO: 2031838 - DNA, 15 bp, Homo sapiens
acatcattgtataag

SEQ ID NO: 2031839 - DNA, 15 bp, Homo sapiens
catcattgtataagg

SEQ ID NO: 2031840 - DNA, 15 bp, Homo sapiens
atcattgtataagga

SEQ ID NO: 2031841 - DNA, 15 bp, Homo sapiens
tcattgtataaggaa

SEQ ID NO: 2031842 - DNA, 15 bp, Homo sapiens
cattgtataaggaaa

SEQ ID NO: 2031843 - DNA, 15 bp, Homo sapiens
attgtataaggaaaa

SEQ ID NO: 2031844 - DNA, 15 bp, Homo sapiens
ttgtataaggaaaag

SEQ ID NO: 2031845 - DNA, 15 bp, Homo sapiens
tgtataaggaaaagt

SEQ ID NO: 2031846 - DNA, 15 bp, Homo sapiens
gtataaggaaaagtt

SEQ ID NO: 2031847 - DNA, 15 bp, Homo sapiens
tataaggaaaagtta

SEQ ID NO: 2031848 - DNA, 15 bp, Homo sapiens
ataaggaaaagttac

SEQ ID NO: 2031849 - DNA, 15 bp, Homo sapiens
taaggaaaagttact

SEQ ID NO: 2031850 - DNA, 15 bp, Homo sapiens
aaggaaaagttacta

SEQ ID NO: 2031851 - DNA, 15 bp, Homo sapiens
aggaaaagttactat

SEQ ID NO: 2031852 - DNA, 15 bp, Homo sapiens
ggaaaagttactata

SEQ ID NO: 2031853 - DNA, 15 bp, Homo sapiens
gaaaagttactatat

SEQ ID NO: 2031854 - DNA, 15 bp, Homo sapiens
aaaagttactatata

SEQ ID NO: 2031855 - DNA, 15 bp, Homo sapiens
aaagttactatatat

SEQ ID NO: 2031856 - DNA, 15 bp, Homo sapiens
aagttactatatata

SEQ ID NO: 2031857 - DNA, 15 bp, Homo sapiens
agttactatatatag

SEQ ID NO: 2031858 - DNA, 15 bp, Homo sapiens
gttactatatatagt

SEQ ID NO: 2031859 - DNA, 15 bp, Homo sapiens
ttactatatatagtt

SEQ ID NO: 2031860 - DNA, 15 bp, Homo sapiens
tactatatatagttc

SEQ ID NO: 2031861 - DNA, 15 bp, Homo sapiens
actatatatagttct

SEQ ID NO: 2031862 - DNA, 15 bp, Homo sapiens
ctatatatagttctt

SEQ ID NO: 2031863 - DNA, 15 bp, Homo sapiens
tatatatagttcttt

SEQ ID NO: 2031864 - DNA, 15 bp, Homo sapiens
atatatagttctttt

SEQ ID NO: 2031865 - DNA, 15 bp, Homo sapiens
tatatagttctttta

SEQ ID NO: 2031866 - DNA, 15 bp, Homo sapiens
atatagttcttttaa

SEQ ID NO: 2031867 - DNA, 15 bp, Homo sapiens
tatagttcttttaag

SEQ ID NO: 2031868 - DNA, 15 bp, Homo sapiens
atagttcttttaagt

SEQ ID NO: 2031869 - DNA, 15 bp, Homo sapiens
tagttcttttaagtg

SEQ ID NO: 2031870 - DNA, 15 bp, Homo sapiens
agttcttttaagtgt

SEQ ID NO: 2031871 - DNA, 15 bp, Homo sapiens
gttcttttaagtgtt

SEQ ID NO: 2031872 - DNA, 15 bp, Homo sapiens
ttcttttaagtgtta

SEQ ID NO: 2031873 - DNA, 15 bp, Homo sapiens
tcttttaagtgttag

SEQ ID NO: 2031874 - DNA, 15 bp, Homo sapiens
cttttaagtgttagc

SEQ ID NO: 2031875 - DNA, 15 bp, Homo sapiens
ttttaagtgttagca

SEQ ID NO: 2031876 - DNA, 15 bp, Homo sapiens
tttaagtgttagcat

SEQ ID NO: 2031877 - DNA, 15 bp, Homo sapiens
ttaagtgttagcata

SEQ ID NO: 2031878 - DNA, 15 bp, Homo sapiens
taagtgttagcataa

SEQ ID NO: 2031879 - DNA, 15 bp, Homo sapiens
aagtgttagcataaa

SEQ ID NO: 2031880 - DNA, 15 bp, Homo sapiens
agtgttagcataaat

SEQ ID NO: 2031881 - DNA, 15 bp, Homo sapiens
gtgttagcataaatt

SEQ ID NO: 2031882 - DNA, 15 bp, Homo sapiens
tgttagcataaattt

SEQ ID NO: 2031883 - DNA, 15 bp, Homo sapiens
gttagcataaattta

SEQ ID NO: 2031884 - DNA, 15 bp, Homo sapiens
ttagcataaatttaa

SEQ ID NO: 2031885 - DNA, 15 bp, Homo sapiens
tagcataaatttaaa

SEQ ID NO: 2031886 - DNA, 15 bp, Homo sapiens
agcataaatttaaaa

SEQ ID NO: 2031887 - DNA, 15 bp, Homo sapiens
gcataaatttaaaaa

SEQ ID NO: 2031888 - DNA, 15 bp, Homo sapiens
cataaatttaaaaaa

SEQ ID NO: 2031889 - DNA, 15 bp, Homo sapiens
ataaatttaaaaaaa

SEQ ID NO: 2031890 - DNA, 15 bp, Homo sapiens
taaatttaaaaaaaa

SEQ ID NO: 2031891 - DNA, 15 bp, Homo sapiens
tttaaaaaaaatcca

SEQ ID NO: 2031892 - DNA, 15 bp, Homo sapiens
ttaaaaaaaatccaa

SEQ ID NO: 2031893 - DNA, 15 bp, Homo sapiens
taaaaaaaatccaat

SEQ ID NO: 2031894 - DNA, 15 bp, Homo sapiens
aaaaaaaatccaatg

SEQ ID NO: 2031895 - DNA, 15 bp, Homo sapiens
aaaaaaatccaatga

SEQ ID NO: 2031896 - DNA, 15 bp, Homo sapiens
aaaaaatccaatgac

SEQ ID NO: 2031897 - DNA, 15 bp, Homo sapiens
aaaaatccaatgaca

SEQ ID NO: 2031898 - DNA, 15 bp, Homo sapiens
aaaatccaatgacat

SEQ ID NO: 2031899 - DNA, 15 bp, Homo sapiens
aaatccaatgacata

SEQ ID NO: 2031900 - DNA, 15 bp, Homo sapiens
aatccaatgacataa

SEQ ID NO: 2031901 - DNA, 15 bp, Homo sapiens
atccaatgacataac

SEQ ID NO: 2031902 - DNA, 15 bp, Homo sapiens
tccaatgacataact

SEQ ID NO: 2031903 - DNA, 15 bp, Homo sapiens
ccaatgacataacta

SEQ ID NO: 2031904 - DNA, 15 bp, Homo sapiens
caatgacataactat

SEQ ID NO: 2031905 - DNA, 15 bp, Homo sapiens
aatgacataactatt

SEQ ID NO: 2031906 - DNA, 15 bp, Homo sapiens
atgacataactattc

SEQ ID NO: 2031907 - DNA, 15 bp, Homo sapiens
tgacataactattct

SEQ ID NO: 2031908 - DNA, 15 bp, Homo sapiens
gacataactattctg

SEQ ID NO: 2031909 - DNA, 15 bp, Homo sapiens
acataactattctgt

SEQ ID NO: 2031910 - DNA, 15 bp, Homo sapiens
cataactattctgtg

SEQ ID NO: 2031911 - DNA, 15 bp, Homo sapiens
ataactattctgtga

SEQ ID NO: 2031912 - DNA, 15 bp, Homo sapiens
taactattctgtgat

SEQ ID NO: 2031913 - DNA, 15 bp, Homo sapiens
aactattctgtgata

SEQ ID NO: 2031914 - DNA, 15 bp, Homo sapiens
actattctgtgatat

SEQ ID NO: 2031915 - DNA, 15 bp, Homo sapiens
ctattctgtgatatt

SEQ ID NO: 2031916 - DNA, 15 bp, Homo sapiens
tattctgtgatattc

SEQ ID NO: 2031917 - DNA, 15 bp, Homo sapiens
attctgtgatattca

SEQ ID NO: 2031918 - DNA, 15 bp, Homo sapiens
ttctgtgatattcaa

SEQ ID NO: 2031919 - DNA, 15 bp, Homo sapiens
tctgtgatattcaag

SEQ ID NO: 2031920 - DNA, 15 bp, Homo sapiens
ctgtgatattcaaga

SEQ ID NO: 2031921 - DNA, 15 bp, Homo sapiens
tgtgatattcaagat

SEQ ID NO: 2031922 - DNA, 15 bp, Homo sapiens
gtgatattcaagatc

SEQ ID NO: 2031923 - DNA, 15 bp, Homo sapiens
tgatattcaagatca

SEQ ID NO: 2031924 - DNA, 15 bp, Homo sapiens
gatattcaagatcaa

SEQ ID NO: 2031925 - DNA, 15 bp, Homo sapiens
atattcaagatcaat

SEQ ID NO: 2031926 - DNA, 15 bp, Homo sapiens
tattcaagatcaata

SEQ ID NO: 2031927 - DNA, 15 bp, Homo sapiens
attcaagatcaataa

SEQ ID NO: 2031928 - DNA, 15 bp, Homo sapiens
ttcaagatcaataaa

SEQ ID NO: 2031929 - DNA, 15 bp, Homo sapiens
tcaagatcaataaat

SEQ ID NO: 2031930 - DNA, 15 bp, Homo sapiens
caagatcaataaata

SEQ ID NO: 2031931 - DNA, 15 bp, Homo sapiens
aagatcaataaatag

SEQ ID NO: 2031932 - DNA, 15 bp, Homo sapiens
agatcaataaataga

SEQ ID NO: 2031933 - DNA, 15 bp, Homo sapiens
gatcaataaatagaa

SEQ ID NO: 2031934 - DNA, 15 bp, Homo sapiens
atcaataaatagaat

SEQ ID NO: 2031935 - DNA, 15 bp, Homo sapiens
tcaataaatagaatt

SEQ ID NO: 2031936 - DNA, 15 bp, Homo sapiens
caataaatagaattc

SEQ ID NO: 2031937 - DNA, 15 bp, Homo sapiens
aataaatagaattcc

SEQ ID NO: 2031938 - DNA, 15 bp, Homo sapiens
ataaatagaattccc

SEQ ID NO: 2031939 - DNA, 15 bp, Homo sapiens
taaatagaattccca

SEQ ID NO: 2031940 - DNA, 15 bp, Homo sapiens
aaatagaattcccag

SEQ ID NO: 2031941 - DNA, 15 bp, Homo sapiens
aatagaattcccagt

SEQ ID NO: 2031942 - DNA, 15 bp, Homo sapiens
atagaattcccagtt

SEQ ID NO: 2031943 - DNA, 15 bp, Homo sapiens
tagaattcccagttt

SEQ ID NO: 2031944 - DNA, 15 bp, Homo sapiens
agaattcccagttta

SEQ ID NO: 2031945 - DNA, 15 bp, Homo sapiens
gaattcccagtttat

SEQ ID NO: 2031946 - DNA, 15 bp, Homo sapiens
aattcccagtttatg

SEQ ID NO: 2031947 - DNA, 15 bp, Homo sapiens
attcccagtttatga

SEQ ID NO: 2031948 - DNA, 15 bp, Homo sapiens
ttcccagtttatgat

SEQ ID NO: 2031949 - DNA, 15 bp, Homo sapiens
tcccagtttatgatc

SEQ ID NO: 2031950 - DNA, 15 bp, Homo sapiens
cccagtttatgatct

SEQ ID NO: 2031951 - DNA, 15 bp, Homo sapiens
ccagtttatgatctc

SEQ ID NO: 2031952 - DNA, 15 bp, Homo sapiens
cagtttatgatctca

SEQ ID NO: 2031953 - DNA, 15 bp, Homo sapiens
agtttatgatctcag

SEQ ID NO: 2031954 - DNA, 15 bp, Homo sapiens
gtttatgatctcagt

SEQ ID NO: 2031955 - DNA, 15 bp, Homo sapiens
tttatgatctcagtt

SEQ ID NO: 2031956 - DNA, 15 bp, Homo sapiens
ttatgatctcagttt

SEQ ID NO: 2031957 - DNA, 15 bp, Homo sapiens
tatgatctcagtttt

SEQ ID NO: 2031958 - DNA, 15 bp, Homo sapiens
atgatctcagttttg

SEQ ID NO: 2031959 - DNA, 15 bp, Homo sapiens
tgatctcagttttgc

SEQ ID NO: 2031960 - DNA, 15 bp, Homo sapiens
gatctcagttttgca

SEQ ID NO: 2031961 - DNA, 15 bp, Homo sapiens
atctcagttttgcat

SEQ ID NO: 2031962 - DNA, 15 bp, Homo sapiens
tctcagttttgcatg

SEQ ID NO: 2031963 - DNA, 15 bp, Homo sapiens
ctcagttttgcatga

SEQ ID NO: 2031964 - DNA, 15 bp, Homo sapiens
tcagttttgcatgaa

SEQ ID NO: 2031965 - DNA, 15 bp, Homo sapiens
cagttttgcatgaac

SEQ ID NO: 2031966 - DNA, 15 bp, Homo sapiens
agttttgcatgaaca

SEQ ID NO: 2031967 - DNA, 15 bp, Homo sapiens
gttttgcatgaacat

SEQ ID NO: 2031968 - DNA, 15 bp, Homo sapiens
ttttgcatgaacatt

SEQ ID NO: 2031969 - DNA, 15 bp, Homo sapiens
tttgcatgaacattt

SEQ ID NO: 2031970 - DNA, 15 bp, Homo sapiens
ttgcatgaacatttc

SEQ ID NO: 2031971 - DNA, 15 bp, Homo sapiens
tgcatgaacatttca

SEQ ID NO: 2031972 - DNA, 15 bp, Homo sapiens
gcatgaacatttcaa

SEQ ID NO: 2031973 - DNA, 15 bp, Homo sapiens
catgaacatttcaac

SEQ ID NO: 2031974 - DNA, 15 bp, Homo sapiens
atgaacatttcaact

SEQ ID NO: 2031975 - DNA, 15 bp, Homo sapiens
tgaacatttcaactt

SEQ ID NO: 2031976 - DNA, 15 bp, Homo sapiens
gaacatttcaactta

SEQ ID NO: 2031977 - DNA, 15 bp, Homo sapiens
aacatttcaacttat

SEQ ID NO: 2031978 - DNA, 15 bp, Homo sapiens
acatttcaacttatg

SEQ ID NO: 2031979 - DNA, 15 bp, Homo sapiens
catttcaacttatgt

SEQ ID NO: 2031980 - DNA, 15 bp, Homo sapiens
atttcaacttatgta

SEQ ID NO: 2031981 - DNA, 15 bp, Homo sapiens
tttcaacttatgtaa

SEQ ID NO: 2031982 - DNA, 15 bp, Homo sapiens
ttcaacttatgtaat

SEQ ID NO: 2031983 - DNA, 15 bp, Homo sapiens
tcaacttatgtaatt

SEQ ID NO: 2031984 - DNA, 15 bp, Homo sapiens
caacttatgtaattt

SEQ ID NO: 2031985 - DNA, 15 bp, Homo sapiens
aacttatgtaatttt

SEQ ID NO: 2031986 - DNA, 15 bp, Homo sapiens
acttatgtaattttg

SEQ ID NO: 2031987 - DNA, 15 bp, Homo sapiens
cttatgtaattttga

SEQ ID NO: 2031988 - DNA, 15 bp, Homo sapiens
ttatgtaattttgaa

SEQ ID NO: 2031989 - DNA, 15 bp, Homo sapiens
tatgtaattttgaag

SEQ ID NO: 2031990 - DNA, 15 bp, Homo sapiens
atgtaattttgaagg

SEQ ID NO: 2031991 - DNA, 15 bp, Homo sapiens
tgtaattttgaaggt

SEQ ID NO: 2031992 - DNA, 15 bp, Homo sapiens
gtaattttgaaggtt

SEQ ID NO: 2031993 - DNA, 15 bp, Homo sapiens
taattttgaaggttc

SEQ ID NO: 2031994 - DNA, 15 bp, Homo sapiens
aattttgaaggttct

SEQ ID NO: 2031995 - DNA, 15 bp, Homo sapiens
attttgaaggttctg

SEQ ID NO: 2031996 - DNA, 15 bp, Homo sapiens
ttttgaaggttctga

SEQ ID NO: 2031997 - DNA, 15 bp, Homo sapiens
tttgaaggttctgaa

SEQ ID NO: 2031998 - DNA, 15 bp, Homo sapiens
ttgaaggttctgaag

SEQ ID NO: 2031999 - DNA, 15 bp, Homo sapiens
tgaaggttctgaaga

SEQ ID NO: 2032000 - DNA, 15 bp, Homo sapiens
gaaggttctgaagaa

SEQ ID NO: 2032001 - DNA, 15 bp, Homo sapiens
aaggttctgaagaat

SEQ ID NO: 2032002 - DNA, 15 bp, Homo sapiens
aggttctgaagaatt

SEQ ID NO: 2032003 - DNA, 15 bp, Homo sapiens
ggttctgaagaattt

SEQ ID NO: 2032004 - DNA, 15 bp, Homo sapiens
gttctgaagaatttg

SEQ ID NO: 2032005 - DNA, 15 bp, Homo sapiens
ttctgaagaatttgg

SEQ ID NO: 2032006 - DNA, 15 bp, Homo sapiens
tctgaagaatttggc

SEQ ID NO: 2032007 - DNA, 15 bp, Homo sapiens
ctgaagaatttggca

SEQ ID NO: 2032008 - DNA, 15 bp, Homo sapiens
tgaagaatttggcaa

SEQ ID NO: 2032009 - DNA, 15 bp, Homo sapiens
gaagaatttggcaat

SEQ ID NO: 2032010 - DNA, 15 bp, Homo sapiens
aagaatttggcaata

SEQ ID NO: 2032011 - DNA, 15 bp, Homo sapiens
agaatttggcaatac

SEQ ID NO: 2032012 - DNA, 15 bp, Homo sapiens
gaatttggcaatacc

SEQ ID NO: 2032013 - DNA, 15 bp, Homo sapiens
aatttggcaataccc

SEQ ID NO: 2032014 - DNA, 15 bp, Homo sapiens
atttggcaataccca

SEQ ID NO: 2032015 - DNA, 15 bp, Homo sapiens
tttggcaatacccaa

SEQ ID NO: 2032016 - DNA, 15 bp, Homo sapiens
ttggcaatacccaat

SEQ ID NO: 2032017 - DNA, 15 bp, Homo sapiens
tggcaatacccaatt

SEQ ID NO: 2032018 - DNA, 15 bp, Homo sapiens
ggcaatacccaattc

SEQ ID NO: 2032019 - DNA, 15 bp, Homo sapiens
gcaatacccaattca

SEQ ID NO: 2032020 - DNA, 15 bp, Homo sapiens
caatacccaattcat

SEQ ID NO: 2032021 - DNA, 15 bp, Homo sapiens
aatacccaattcata

SEQ ID NO: 2032022 - DNA, 15 bp, Homo sapiens
atacccaattcatat

SEQ ID NO: 2032023 - DNA, 15 bp, Homo sapiens
tacccaattcatatt

SEQ ID NO: 2032024 - DNA, 15 bp, Homo sapiens
acccaattcatatta

SEQ ID NO: 2032025 - DNA, 15 bp, Homo sapiens
cccaattcatattat

SEQ ID NO: 2032026 - DNA, 15 bp, Homo sapiens
ccaattcatattata

SEQ ID NO: 2032027 - DNA, 15 bp, Homo sapiens
caattcatattataa

SEQ ID NO: 2032028 - DNA, 15 bp, Homo sapiens
aattcatattataaa

SEQ ID NO: 2032029 - DNA, 15 bp, Homo sapiens
attcatattataaac

SEQ ID NO: 2032030 - DNA, 15 bp, Homo sapiens
ttcatattataaact

SEQ ID NO: 2032031 - DNA, 15 bp, Homo sapiens
tcatattataaacta

SEQ ID NO: 2032032 - DNA, 15 bp, Homo sapiens
catattataaactat

SEQ ID NO: 2032033 - DNA, 15 bp, Homo sapiens
atattataaactatt

SEQ ID NO: 2032034 - DNA, 15 bp, Homo sapiens
tattataaactatta

SEQ ID NO: 2032035 - DNA, 15 bp, Homo sapiens
attataaactattat

SEQ ID NO: 2032036 - DNA, 15 bp, Homo sapiens
ttataaactattatg

SEQ ID NO: 2032037 - DNA, 15 bp, Homo sapiens
tataaactattatgt

SEQ ID NO: 2032038 - DNA, 15 bp, Homo sapiens
ataaactattatgta

SEQ ID NO: 2032039 - DNA, 15 bp, Homo sapiens
taaactattatgtaa

SEQ ID NO: 2032040 - DNA, 15 bp, Homo sapiens
aaactattatgtaat

SEQ ID NO: 2032041 - DNA, 15 bp, Homo sapiens
aactattatgtaatt

SEQ ID NO: 2032042 - DNA, 15 bp, Homo sapiens
actattatgtaatta

SEQ ID NO: 2032043 - DNA, 15 bp, Homo sapiens
ctattatgtaattaa

SEQ ID NO: 2032044 - DNA, 15 bp, Homo sapiens
tattatgtaattaac

SEQ ID NO: 2032045 - DNA, 15 bp, Homo sapiens
attatgtaattaact

SEQ ID NO: 2032046 - DNA, 15 bp, Homo sapiens
ttatgtaattaacta

SEQ ID NO: 2032047 - DNA, 15 bp, Homo sapiens
tatgtaattaactat

SEQ ID NO: 2032048 - DNA, 15 bp, Homo sapiens
atgtaattaactata

SEQ ID NO: 2032049 - DNA, 15 bp, Homo sapiens
tgtaattaactatat

SEQ ID NO: 2032050 - DNA, 15 bp, Homo sapiens
gtaattaactatatt

SEQ ID NO: 2032051 - DNA, 15 bp, Homo sapiens
taattaactatattc

SEQ ID NO: 2032052 - DNA, 15 bp, Homo sapiens
aattaactatattct

SEQ ID NO: 2032053 - DNA, 15 bp, Homo sapiens
attaactatattcta

SEQ ID NO: 2032054 - DNA, 15 bp, Homo sapiens
ttaactatattctat

SEQ ID NO: 2032055 - DNA, 15 bp, Homo sapiens
taactatattctatt

SEQ ID NO: 2032056 - DNA, 15 bp, Homo sapiens
aactatattctatta

SEQ ID NO: 2032057 - DNA, 15 bp, Homo sapiens
actatattctattaa

SEQ ID NO: 2032058 - DNA, 15 bp, Homo sapiens
ctatattctattaaa

SEQ ID NO: 2032059 - DNA, 15 bp, Homo sapiens
tatattctattaaat

SEQ ID NO: 2032060 - DNA, 15 bp, Homo sapiens
atattctattaaatt

SEQ ID NO: 2032061 - DNA, 15 bp, Homo sapiens
tattctattaaattc

SEQ ID NO: 2032062 - DNA, 15 bp, Homo sapiens
attctattaaattct

SEQ ID NO: 2032063 - DNA, 15 bp, Homo sapiens
ttctattaaattctg

SEQ ID NO: 2032064 - DNA, 15 bp, Homo sapiens
tctattaaattctgc

SEQ ID NO: 2032065 - DNA, 15 bp, Homo sapiens
ctattaaattctgct

SEQ ID NO: 2032066 - DNA, 15 bp, Homo sapiens
tattaaattctgctt

SEQ ID NO: 2032067 - DNA, 15 bp, Homo sapiens
attaaattctgctta

SEQ ID NO: 2032068 - DNA, 15 bp, Homo sapiens
ttaaattctgcttaa

SEQ ID NO: 2032069 - DNA, 15 bp, Homo sapiens
taaattctgcttaac

SEQ ID NO: 2032070 - DNA, 15 bp, Homo sapiens
aaattctgcttaaca

SEQ ID NO: 2032071 - DNA, 15 bp, Homo sapiens
aattctgcttaacaa

SEQ ID NO: 2032072 - DNA, 15 bp, Homo sapiens
attctgcttaacaac

SEQ ID NO: 2032073 - DNA, 15 bp, Homo sapiens
ttctgcttaacaaca

SEQ ID NO: 2032074 - DNA, 15 bp, Homo sapiens
tctgcttaacaacaa

SEQ ID NO: 2032075 - DNA, 15 bp, Homo sapiens
ctgcttaacaacaaa

SEQ ID NO: 2032076 - DNA, 15 bp, Homo sapiens
tgcttaacaacaaag

SEQ ID NO: 2032077 - DNA, 15 bp, Homo sapiens
gcttaacaacaaagc

SEQ ID NO: 2032078 - DNA, 15 bp, Homo sapiens
cttaacaacaaagct

SEQ ID NO: 2032079 - DNA, 15 bp, Homo sapiens
ttaacaacaaagctt

SEQ ID NO: 2032080 - DNA, 15 bp, Homo sapiens
taacaacaaagcttt

SEQ ID NO: 2032081 - DNA, 15 bp, Homo sapiens
aacaacaaagctttg

SEQ ID NO: 2032082 - DNA, 15 bp, Homo sapiens
acaacaaagctttgg

SEQ ID NO: 2032083 - DNA, 15 bp, Homo sapiens
caacaaagctttggt

SEQ ID NO: 2032084 - DNA, 15 bp, Homo sapiens
aacaaagctttggtc

SEQ ID NO: 2032085 - DNA, 15 bp, Homo sapiens
acaaagctttggtca

SEQ ID NO: 2032086 - DNA, 15 bp, Homo sapiens
caaagctttggtcag

SEQ ID NO: 2032087 - DNA, 15 bp, Homo sapiens
aaagctttggtcagc

SEQ ID NO: 2032088 - DNA, 15 bp, Homo sapiens
aagctttggtcagca

SEQ ID NO: 2032089 - DNA, 15 bp, Homo sapiens
agctttggtcagcag

SEQ ID NO: 2032090 - DNA, 15 bp, Homo sapiens
gctttggtcagcaga

SEQ ID NO: 2032091 - DNA, 15 bp, Homo sapiens
ctttggtcagcagag

SEQ ID NO: 2032092 - DNA, 15 bp, Homo sapiens
tttggtcagcagagg

SEQ ID NO: 2032093 - DNA, 15 bp, Homo sapiens
ttggtcagcagagga

SEQ ID NO: 2032094 - DNA, 15 bp, Homo sapiens
tggtcagcagaggaa

SEQ ID NO: 2032095 - DNA, 15 bp, Homo sapiens
ggtcagcagaggaaa

SEQ ID NO: 2032096 - DNA, 15 bp, Homo sapiens
gtcagcagaggaaac

SEQ ID NO: 2032097 - DNA, 15 bp, Homo sapiens
tcagcagaggaaaca

SEQ ID NO: 2032098 - DNA, 15 bp, Homo sapiens
cagcagaggaaacaa

SEQ ID NO: 2032099 - DNA, 15 bp, Homo sapiens
agcagaggaaacaaa

SEQ ID NO: 2032100 - DNA, 15 bp, Homo sapiens
gcagaggaaacaaat

SEQ ID NO: 2032101 - DNA, 15 bp, Homo sapiens
cagaggaaacaaatt

SEQ ID NO: 2032102 - DNA, 15 bp, Homo sapiens
agaggaaacaaattt

SEQ ID NO: 2032103 - DNA, 15 bp, Homo sapiens
gaggaaacaaatttt

SEQ ID NO: 2032104 - DNA, 15 bp, Homo sapiens
aggaaacaaatttta

SEQ ID NO: 2032105 - DNA, 15 bp, Homo sapiens
ggaaacaaattttat

SEQ ID NO: 2032106 - DNA, 15 bp, Homo sapiens
gaaacaaattttatt

SEQ ID NO: 2032107 - DNA, 15 bp, Homo sapiens
aaacaaattttattt

SEQ ID NO: 2032108 - DNA, 15 bp, Homo sapiens
aacaaattttatttc

SEQ ID NO: 2032109 - DNA, 15 bp, Homo sapiens
acaaattttatttcc

SEQ ID NO: 2032110 - DNA, 15 bp, Homo sapiens
caaattttatttcca

SEQ ID NO: 2032111 - DNA, 15 bp, Homo sapiens
aaattttatttccac

SEQ ID NO: 2032112 - DNA, 15 bp, Homo sapiens
aattttatttccaca

SEQ ID NO: 2032113 - DNA, 15 bp, Homo sapiens
attttatttccacat

SEQ ID NO: 2032114 - DNA, 15 bp, Homo sapiens
ttttatttccacatt

SEQ ID NO: 2032115 - DNA, 15 bp, Homo sapiens
tttatttccacattt

SEQ ID NO: 2032116 - DNA, 15 bp, Homo sapiens
ttatttccacatttg

SEQ ID NO: 2032117 - DNA, 15 bp, Homo sapiens
tatttccacatttgt

SEQ ID NO: 2032118 - DNA, 15 bp, Homo sapiens
atttccacatttgtc

SEQ ID NO: 2032119 - DNA, 15 bp, Homo sapiens
tttccacatttgtca

SEQ ID NO: 2032120 - DNA, 15 bp, Homo sapiens
ttccacatttgtcag

SEQ ID NO: 2032121 - DNA, 15 bp, Homo sapiens
tccacatttgtcagt

SEQ ID NO: 2032122 - DNA, 15 bp, Homo sapiens
ccacatttgtcagtc

SEQ ID NO: 2032123 - DNA, 15 bp, Homo sapiens
cacatttgtcagtcg

SEQ ID NO: 2032124 - DNA, 15 bp, Homo sapiens
acatttgtcagtcgc

SEQ ID NO: 2032125 - DNA, 15 bp, Homo sapiens
catttgtcagtcgcc

SEQ ID NO: 2032126 - DNA, 15 bp, Homo sapiens
atttgtcagtcgcct

SEQ ID NO: 2032127 - DNA, 15 bp, Homo sapiens
tttgtcagtcgcctt

SEQ ID NO: 2032128 - DNA, 15 bp, Homo sapiens
ttgtcagtcgcctta

SEQ ID NO: 2032129 - DNA, 15 bp, Homo sapiens
tgtcagtcgccttac

SEQ ID NO: 2032130 - DNA, 15 bp, Homo sapiens
gtcagtcgccttaca

SEQ ID NO: 2032131 - DNA, 15 bp, Homo sapiens
tcagtcgccttacaa

SEQ ID NO: 2032132 - DNA, 15 bp, Homo sapiens
cagtcgccttacaag

SEQ ID NO: 2032133 - DNA, 15 bp, Homo sapiens
agtcgccttacaagt

SEQ ID NO: 2032134 - DNA, 15 bp, Homo sapiens
gtcgccttacaagta

SEQ ID NO: 2032135 - DNA, 15 bp, Homo sapiens
tcgccttacaagtaa

SEQ ID NO: 2032136 - DNA, 15 bp, Homo sapiens
cgccttacaagtaat

SEQ ID NO: 2032137 - DNA, 15 bp, Homo sapiens
gccttacaagtaatc

SEQ ID NO: 2032138 - DNA, 15 bp, Homo sapiens
ccttacaagtaatcc

SEQ ID NO: 2032139 - DNA, 15 bp, Homo sapiens
cttacaagtaatcct

SEQ ID NO: 2032140 - DNA, 15 bp, Homo sapiens
ttacaagtaatcctt

SEQ ID NO: 2032141 - DNA, 15 bp, Homo sapiens
tacaagtaatccttt

SEQ ID NO: 2032142 - DNA, 15 bp, Homo sapiens
acaagtaatcctttt

SEQ ID NO: 2032143 - DNA, 15 bp, Homo sapiens
caagtaatccttttt

SEQ ID NO: 2032144 - DNA, 15 bp, Homo sapiens
aagtaatcctttttt

SEQ ID NO: 2032145 - DNA, 15 bp, Homo sapiens
agtaatccttttttc

SEQ ID NO: 2032146 - DNA, 15 bp, Homo sapiens
gtaatccttttttcc

SEQ ID NO: 2032147 - DNA, 15 bp, Homo sapiens
taatccttttttccc

SEQ ID NO: 2032148 - DNA, 15 bp, Homo sapiens
aatccttttttcccc

SEQ ID NO: 2032149 - DNA, 15 bp, Homo sapiens
atccttttttccccc

SEQ ID NO: 2032150 - DNA, 15 bp, Homo sapiens
tccttttttccccca

SEQ ID NO: 2032151 - DNA, 15 bp, Homo sapiens
ccttttttcccccag

SEQ ID NO: 2032152 - DNA, 15 bp, Homo sapiens
cttttttcccccaga

SEQ ID NO: 2032153 - DNA, 15 bp, Homo sapiens
ttttttcccccagaa

SEQ ID NO: 2032154 - DNA, 15 bp, Homo sapiens
tttttcccccagaag

SEQ ID NO: 2032155 - DNA, 15 bp, Homo sapiens
ttttcccccagaagt

SEQ ID NO: 2032156 - DNA, 15 bp, Homo sapiens
tttcccccagaagta

SEQ ID NO: 2032157 - DNA, 15 bp, Homo sapiens
ttcccccagaagtaa

SEQ ID NO: 2032158 - DNA, 15 bp, Homo sapiens
tcccccagaagtaag

SEQ ID NO: 2032159 - DNA, 15 bp, Homo sapiens
cccccagaagtaaga

SEQ ID NO: 2032160 - DNA, 15 bp, Homo sapiens
ccccagaagtaagag

SEQ ID NO: 2032161 - DNA, 15 bp, Homo sapiens
cccagaagtaagaga

SEQ ID NO: 2032162 - DNA, 15 bp, Homo sapiens
ccagaagtaagagaa

SEQ ID NO: 2032163 - DNA, 15 bp, Homo sapiens
cagaagtaagagaag

SEQ ID NO: 2032164 - DNA, 15 bp, Homo sapiens
agaagtaagagaagt

SEQ ID NO: 2032165 - DNA, 15 bp, Homo sapiens
gaagtaagagaagtc

SEQ ID NO: 2032166 - DNA, 15 bp, Homo sapiens
aagtaagagaagtct

SEQ ID NO: 2032167 - DNA, 15 bp, Homo sapiens
agtaagagaagtcta

SEQ ID NO: 2032168 - DNA, 15 bp, Homo sapiens
gtaagagaagtctaa

SEQ ID NO: 2032169 - DNA, 15 bp, Homo sapiens
taagagaagtctaac

SEQ ID NO: 2032170 - DNA, 15 bp, Homo sapiens
aagagaagtctaact

SEQ ID NO: 2032171 - DNA, 15 bp, Homo sapiens
agagaagtctaactt

SEQ ID NO: 2032172 - DNA, 15 bp, Homo sapiens
gagaagtctaacttt

SEQ ID NO: 2032173 - DNA, 15 bp, Homo sapiens
agaagtctaactttt

SEQ ID NO: 2032174 - DNA, 15 bp, Homo sapiens
gaagtctaacttttt

SEQ ID NO: 2032175 - DNA, 15 bp, Homo sapiens
aagtctaactttttt

SEQ ID NO: 2032176 - DNA, 15 bp, Homo sapiens
agtctaacttttttt

SEQ ID NO: 2032177 - DNA, 15 bp, Homo sapiens
gtctaactttttttc

SEQ ID NO: 2032178 - DNA, 15 bp, Homo sapiens
tctaactttttttcc

SEQ ID NO: 2032179 - DNA, 15 bp, Homo sapiens
ctaactttttttccc

SEQ ID NO: 2032180 - DNA, 15 bp, Homo sapiens
taactttttttccca

SEQ ID NO: 2032181 - DNA, 15 bp, Homo sapiens
aactttttttcccat

SEQ ID NO: 2032182 - DNA, 15 bp, Homo sapiens
actttttttcccatg

SEQ ID NO: 2032183 - DNA, 15 bp, Homo sapiens
ctttttttcccatgt

SEQ ID NO: 2032184 - DNA, 15 bp, Homo sapiens
tttttttcccatgta

SEQ ID NO: 2032185 - DNA, 15 bp, Homo sapiens
ttttttcccatgtaa

SEQ ID NO: 2032186 - DNA, 15 bp, Homo sapiens
tttttcccatgtaac

SEQ ID NO: 2032187 - DNA, 15 bp, Homo sapiens
ttttcccatgtaaca

SEQ ID NO: 2032188 - DNA, 15 bp, Homo sapiens
tttcccatgtaacaa

SEQ ID NO: 2032189 - DNA, 15 bp, Homo sapiens
ttcccatgtaacaag

SEQ ID NO: 2032190 - DNA, 15 bp, Homo sapiens
tcccatgtaacaagg

SEQ ID NO: 2032191 - DNA, 15 bp, Homo sapiens
cccatgtaacaaggt

SEQ ID NO: 2032192 - DNA, 15 bp, Homo sapiens
ccatgtaacaaggtt

SEQ ID NO: 2032193 - DNA, 15 bp, Homo sapiens
catgtaacaaggttt

SEQ ID NO: 2032194 - DNA, 15 bp, Homo sapiens
atgtaacaaggtttg

SEQ ID NO: 2032195 - DNA, 15 bp, Homo sapiens
tgtaacaaggtttgt

SEQ ID NO: 2032196 - DNA, 15 bp, Homo sapiens
gtaacaaggtttgtt

SEQ ID NO: 2032197 - DNA, 15 bp, Homo sapiens
taacaaggtttgttt

SEQ ID NO: 2032198 - DNA, 15 bp, Homo sapiens
aacaaggtttgtttg

SEQ ID NO: 2032199 - DNA, 15 bp, Homo sapiens
acaaggtttgtttgc

SEQ ID NO: 2032200 - DNA, 15 bp, Homo sapiens
caaggtttgtttgcc

SEQ ID NO: 2032201 - DNA, 15 bp, Homo sapiens
aaggtttgtttgccc

SEQ ID NO: 2032202 - DNA, 15 bp, Homo sapiens
aggtttgtttgccct

SEQ ID NO: 2032203 - DNA, 15 bp, Homo sapiens
ggtttgtttgccctc

SEQ ID NO: 2032204 - DNA, 15 bp, Homo sapiens
gtttgtttgccctct

SEQ ID NO: 2032205 - DNA, 15 bp, Homo sapiens
tttgtttgccctctg

SEQ ID NO: 2032206 - DNA, 15 bp, Homo sapiens
ttgtttgccctctgc

SEQ ID NO: 2032207 - DNA, 15 bp, Homo sapiens
tgtttgccctctgcc

SEQ ID NO: 2032208 - DNA, 15 bp, Homo sapiens
gtttgccctctgcca

SEQ ID NO: 2032209 - DNA, 15 bp, Homo sapiens
tttgccctctgccac

SEQ ID NO: 2032210 - DNA, 15 bp, Homo sapiens
ttgccctctgccact

SEQ ID NO: 2032211 - DNA, 15 bp, Homo sapiens
tgccctctgccacta

SEQ ID NO: 2032212 - DNA, 15 bp, Homo sapiens
gccctctgccactaa

SEQ ID NO: 2032213 - DNA, 15 bp, Homo sapiens
ccctctgccactaac

SEQ ID NO: 2032214 - DNA, 15 bp, Homo sapiens
cctctgccactaact

SEQ ID NO: 2032215 - DNA, 15 bp, Homo sapiens
tctgccactaactct

SEQ ID NO: 2032216 - DNA, 15 bp, Homo sapiens
ctgccactaactctc

SEQ ID NO: 2032217 - DNA, 15 bp, Homo sapiens
tgccactaactctct

SEQ ID NO: 2032218 - DNA, 15 bp, Homo sapiens
gccactaactctcta

SEQ ID NO: 2032219 - DNA, 15 bp, Homo sapiens
ccactaactctctag

SEQ ID NO: 2032220 - DNA, 15 bp, Homo sapiens
cactaactctctagt

SEQ ID NO: 2032221 - DNA, 15 bp, Homo sapiens
actaactctctagta

SEQ ID NO: 2032222 - DNA, 15 bp, Homo sapiens
ctaactctctagtac

SEQ ID NO: 2032223 - DNA, 15 bp, Homo sapiens
taactctctagtaca

SEQ ID NO: 2032224 - DNA, 15 bp, Homo sapiens
aactctctagtacag

SEQ ID NO: 2032225 - DNA, 15 bp, Homo sapiens
actctctagtacagt

SEQ ID NO: 2032226 - DNA, 15 bp, Homo sapiens
ctctctagtacagtg

SEQ ID NO: 2032227 - DNA, 15 bp, Homo sapiens
tctctagtacagtgt

SEQ ID NO: 2032228 - DNA, 15 bp, Homo sapiens
ctctagtacagtgtt

SEQ ID NO: 2032229 - DNA, 15 bp, Homo sapiens
tctagtacagtgttt

SEQ ID NO: 2032230 - DNA, 15 bp, Homo sapiens
ctagtacagtgtttc

SEQ ID NO: 2032231 - DNA, 15 bp, Homo sapiens
tagtacagtgtttct

SEQ ID NO: 2032232 - DNA, 15 bp, Homo sapiens
agtacagtgtttctc

SEQ ID NO: 2032233 - DNA, 15 bp, Homo sapiens
gtacagtgtttctcc

SEQ ID NO: 2032234 - DNA, 15 bp, Homo sapiens
tacagtgtttctcca

SEQ ID NO: 2032235 - DNA, 15 bp, Homo sapiens
acagtgtttctccac

SEQ ID NO: 2032236 - DNA, 15 bp, Homo sapiens
cagtgtttctccacg

SEQ ID NO: 2032237 - DNA, 15 bp, Homo sapiens
agtgtttctccacgt

SEQ ID NO: 2032238 - DNA, 15 bp, Homo sapiens
gtgtttctccacgtg

SEQ ID NO: 2032239 - DNA, 15 bp, Homo sapiens
tgtttctccacgtgt

SEQ ID NO: 2032240 - DNA, 15 bp, Homo sapiens
gtttctccacgtgtg

SEQ ID NO: 2032241 - DNA, 15 bp, Homo sapiens
tttctccacgtgtga

SEQ ID NO: 2032242 - DNA, 15 bp, Homo sapiens
ttctccacgtgtgat

SEQ ID NO: 2032243 - DNA, 15 bp, Homo sapiens
tctccacgtgtgatc

SEQ ID NO: 2032244 - DNA, 15 bp, Homo sapiens
ctccacgtgtgatcc

SEQ ID NO: 2032245 - DNA, 15 bp, Homo sapiens
tccacgtgtgatccc

SEQ ID NO: 2032246 - DNA, 15 bp, Homo sapiens
ccacgtgtgatccca

SEQ ID NO: 2032247 - DNA, 15 bp, Homo sapiens
cacgtgtgatcccag

SEQ ID NO: 2032248 - DNA, 15 bp, Homo sapiens
acgtgtgatcccaga

SEQ ID NO: 2032249 - DNA, 15 bp, Homo sapiens
cgtgtgatcccagac

SEQ ID NO: 2032250 - DNA, 15 bp, Homo sapiens
gtgtgatcccagacc

SEQ ID NO: 2032251 - DNA, 15 bp, Homo sapiens
tgtgatcccagacca

SEQ ID NO: 2032252 - DNA, 15 bp, Homo sapiens
gtgatcccagaccag

SEQ ID NO: 2032253 - DNA, 15 bp, Homo sapiens
tgatcccagaccagc

SEQ ID NO: 2032254 - DNA, 15 bp, Homo sapiens
gatcccagaccagca

SEQ ID NO: 2032255 - DNA, 15 bp, Homo sapiens
atcccagaccagcag

SEQ ID NO: 2032256 - DNA, 15 bp, Homo sapiens
tcccagaccagcagc

SEQ ID NO: 2032257 - DNA, 15 bp, Homo sapiens
cccagaccagcagca

SEQ ID NO: 2032258 - DNA, 15 bp, Homo sapiens
ccagaccagcagcat

SEQ ID NO: 2032259 - DNA, 15 bp, Homo sapiens
cagaccagcagcatc

SEQ ID NO: 2032260 - DNA, 15 bp, Homo sapiens
gaccagcagcatcat

SEQ ID NO: 2032261 - DNA, 15 bp, Homo sapiens
accagcagcatcatt

SEQ ID NO: 2032262 - DNA, 15 bp, Homo sapiens
ccagcagcatcattt

SEQ ID NO: 2032263 - DNA, 15 bp, Homo sapiens
cagcagcatcatttg

SEQ ID NO: 2032264 - DNA, 15 bp, Homo sapiens
agcagcatcatttgg

SEQ ID NO: 2032265 - DNA, 15 bp, Homo sapiens
gcagcatcatttggg

SEQ ID NO: 2032266 - DNA, 15 bp, Homo sapiens
cagcatcatttggga

SEQ ID NO: 2032267 - DNA, 15 bp, Homo sapiens
agcatcatttgggag

SEQ ID NO: 2032268 - DNA, 15 bp, Homo sapiens
gcatcatttgggagc

SEQ ID NO: 2032269 - DNA, 15 bp, Homo sapiens
catcatttgggagct

SEQ ID NO: 2032270 - DNA, 15 bp, Homo sapiens
atcatttgggagctt

SEQ ID NO: 2032271 - DNA, 15 bp, Homo sapiens
tcatttgggagcttg

SEQ ID NO: 2032272 - DNA, 15 bp, Homo sapiens
catttgggagcttgt

SEQ ID NO: 2032273 - DNA, 15 bp, Homo sapiens
atttgggagcttgtt

SEQ ID NO: 2032274 - DNA, 15 bp, Homo sapiens
tttgggagcttgtta

SEQ ID NO: 2032275 - DNA, 15 bp, Homo sapiens
ttgggagcttgttag

SEQ ID NO: 2032276 - DNA, 15 bp, Homo sapiens
tgggagcttgttaga

SEQ ID NO: 2032277 - DNA, 15 bp, Homo sapiens
gggagcttgttagaa

SEQ ID NO: 2032278 - DNA, 15 bp, Homo sapiens
ggagcttgttagaaa

SEQ ID NO: 2032279 - DNA, 15 bp, Homo sapiens
gttagaaatgcagat

SEQ ID NO: 2032280 - DNA, 15 bp, Homo sapiens
ttagaaatgcagatg

SEQ ID NO: 2032281 - DNA, 15 bp, Homo sapiens
tagaaatgcagatgc

SEQ ID NO: 2032282 - DNA, 15 bp, Homo sapiens
agaaatgcagatgct

SEQ ID NO: 2032283 - DNA, 15 bp, Homo sapiens
gaaatgcagatgctg

SEQ ID NO: 2032284 - DNA, 15 bp, Homo sapiens
aaatgcagatgctgt

SEQ ID NO: 2032285 - DNA, 15 bp, Homo sapiens
aatgcagatgctgta

SEQ ID NO: 2032286 - DNA, 15 bp, Homo sapiens
atgcagatgctgtag

SEQ ID NO: 2032287 - DNA, 15 bp, Homo sapiens
tgcagatgctgtagt

SEQ ID NO: 2032288 - DNA, 15 bp, Homo sapiens
gcagatgctgtagtt

SEQ ID NO: 2032289 - DNA, 15 bp, Homo sapiens
cagatgctgtagttt

SEQ ID NO: 2032290 - DNA, 15 bp, Homo sapiens
agatgctgtagtttc

SEQ ID NO: 2032291 - DNA, 15 bp, Homo sapiens
gatgctgtagtttca

SEQ ID NO: 2032292 - DNA, 15 bp, Homo sapiens
atgctgtagtttcac

SEQ ID NO: 2032293 - DNA, 15 bp, Homo sapiens
tgctgtagtttcacc

SEQ ID NO: 2032294 - DNA, 15 bp, Homo sapiens
gctgtagtttcacct

SEQ ID NO: 2032295 - DNA, 15 bp, Homo sapiens
ctgtagtttcacctc

SEQ ID NO: 2032296 - DNA, 15 bp, Homo sapiens
tgtagtttcacctca

SEQ ID NO: 2032297 - DNA, 15 bp, Homo sapiens
gtagtttcacctcag

SEQ ID NO: 2032298 - DNA, 15 bp, Homo sapiens
tagtttcacctcaga

SEQ ID NO: 2032299 - DNA, 15 bp, Homo sapiens
agtttcacctcagat

SEQ ID NO: 2032300 - DNA, 15 bp, Homo sapiens
gtttcacctcagatc

SEQ ID NO: 2032301 - DNA, 15 bp, Homo sapiens
tttcacctcagatct

SEQ ID NO: 2032302 - DNA, 15 bp, Homo sapiens
ttcacctcagatctg

SEQ ID NO: 2032303 - DNA, 15 bp, Homo sapiens
tcacctcagatctgc

SEQ ID NO: 2032304 - DNA, 15 bp, Homo sapiens
cacctcagatctgca

SEQ ID NO: 2032305 - DNA, 15 bp, Homo sapiens
acctcagatctgcac

SEQ ID NO: 2032306 - DNA, 15 bp, Homo sapiens
cctcagatctgcaca

SEQ ID NO: 2032307 - DNA, 15 bp, Homo sapiens
ctcagatctgcacaa

SEQ ID NO: 2032308 - DNA, 15 bp, Homo sapiens
tcagatctgcacaaa

SEQ ID NO: 2032309 - DNA, 15 bp, Homo sapiens
cagatctgcacaaaa

SEQ ID NO: 2032310 - DNA, 15 bp, Homo sapiens
agatctgcacaaaaa

SEQ ID NO: 2032311 - DNA, 15 bp, Homo sapiens
gatctgcacaaaaaa

SEQ ID NO: 2032312 - DNA, 15 bp, Homo sapiens
atctgcacaaaaaac

SEQ ID NO: 2032313 - DNA, 15 bp, Homo sapiens
tctgcacaaaaaact

SEQ ID NO: 2032314 - DNA, 15 bp, Homo sapiens
ctgcacaaaaaactc

SEQ ID NO: 2032315 - DNA, 15 bp, Homo sapiens
tgcacaaaaaactcc

SEQ ID NO: 2032316 - DNA, 15 bp, Homo sapiens
gcacaaaaaactccc

SEQ ID NO: 2032317 - DNA, 15 bp, Homo sapiens
cacaaaaaactccca

SEQ ID NO: 2032318 - DNA, 15 bp, Homo sapiens
acaaaaaactcccaa

SEQ ID NO: 2032319 - DNA, 15 bp, Homo sapiens
caaaaaactcccaag

SEQ ID NO: 2032320 - DNA, 15 bp, Homo sapiens
aaaaaactcccaagt

SEQ ID NO: 2032321 - DNA, 15 bp, Homo sapiens
aaaaactcccaagta

SEQ ID NO: 2032322 - DNA, 15 bp, Homo sapiens
aaaactcccaagtag

SEQ ID NO: 2032323 - DNA, 15 bp, Homo sapiens
aaactcccaagtaga

SEQ ID NO: 2032324 - DNA, 15 bp, Homo sapiens
aactcccaagtagag

SEQ ID NO: 2032325 - DNA, 15 bp, Homo sapiens
actcccaagtagagc

SEQ ID NO: 2032326 - DNA, 15 bp, Homo sapiens
ctcccaagtagagcc

SEQ ID NO: 2032327 - DNA, 15 bp, Homo sapiens
tcccaagtagagccc

SEQ ID NO: 2032328 - DNA, 15 bp, Homo sapiens
cccaagtagagccca

SEQ ID NO: 2032329 - DNA, 15 bp, Homo sapiens
ccaagtagagcccag

SEQ ID NO: 2032330 - DNA, 15 bp, Homo sapiens
caagtagagcccagc

SEQ ID NO: 2032331 - DNA, 15 bp, Homo sapiens
aagtagagcccagcc

SEQ ID NO: 2032332 - DNA, 15 bp, Homo sapiens
agtagagcccagcca

SEQ ID NO: 2032333 - DNA, 15 bp, Homo sapiens
gtagagcccagccag

SEQ ID NO: 2032334 - DNA, 15 bp, Homo sapiens
tagagcccagccagc

SEQ ID NO: 2032335 - DNA, 15 bp, Homo sapiens
agagcccagccagca

SEQ ID NO: 2032336 - DNA, 15 bp, Homo sapiens
gagcccagccagcag

SEQ ID NO: 2032337 - DNA, 15 bp, Homo sapiens
agcccagccagcagt

SEQ ID NO: 2032338 - DNA, 15 bp, Homo sapiens
gcccagccagcagtc

SEQ ID NO: 2032339 - DNA, 15 bp, Homo sapiens
cccagccagcagtca

SEQ ID NO: 2032340 - DNA, 15 bp, Homo sapiens
ccagccagcagtcag

SEQ ID NO: 2032341 - DNA, 15 bp, Homo sapiens
cagccagcagtcagt

SEQ ID NO: 2032342 - DNA, 15 bp, Homo sapiens
agccagcagtcagtg

SEQ ID NO: 2032343 - DNA, 15 bp, Homo sapiens
gccagcagtcagtgt

SEQ ID NO: 2032344 - DNA, 15 bp, Homo sapiens
ccagcagtcagtgtg

SEQ ID NO: 2032345 - DNA, 15 bp, Homo sapiens
cagcagtcagtgtgt

SEQ ID NO: 2032346 - DNA, 15 bp, Homo sapiens
agcagtcagtgtgtt

SEQ ID NO: 2032347 - DNA, 15 bp, Homo sapiens
gcagtcagtgtgtta

SEQ ID NO: 2032348 - DNA, 15 bp, Homo sapiens
cagtcagtgtgttaa

SEQ ID NO: 2032349 - DNA, 15 bp, Homo sapiens
agtcagtgtgttaat

SEQ ID NO: 2032350 - DNA, 15 bp, Homo sapiens
gtcagtgtgttaata

SEQ ID NO: 2032351 - DNA, 15 bp, Homo sapiens
tcagtgtgttaataa

SEQ ID NO: 2032352 - DNA, 15 bp, Homo sapiens
cagtgtgttaataaa

SEQ ID NO: 2032353 - DNA, 15 bp, Homo sapiens
agtgtgttaataaat

SEQ ID NO: 2032354 - DNA, 15 bp, Homo sapiens
gtgtgttaataaata

SEQ ID NO: 2032355 - DNA, 15 bp, Homo sapiens
tgtgttaataaatac

SEQ ID NO: 2032356 - DNA, 15 bp, Homo sapiens
gtgttaataaatacc

SEQ ID NO: 2032357 - DNA, 15 bp, Homo sapiens
tgttaataaataccc

SEQ ID NO: 2032358 - DNA, 15 bp, Homo sapiens
gttaataaatacccc

SEQ ID NO: 2032359 - DNA, 15 bp, Homo sapiens
ttaataaatacccca

SEQ ID NO: 2032360 - DNA, 15 bp, Homo sapiens
taataaataccccag

SEQ ID NO: 2032361 - DNA, 15 bp, Homo sapiens
aataaataccccagg

SEQ ID NO: 2032362 - DNA, 15 bp, Homo sapiens
ataaataccccaggc

SEQ ID NO: 2032363 - DNA, 15 bp, Homo sapiens
taaataccccaggcg

SEQ ID NO: 2032364 - DNA, 15 bp, Homo sapiens
aaataccccaggcga

SEQ ID NO: 2032365 - DNA, 15 bp, Homo sapiens
aataccccaggcgat

SEQ ID NO: 2032366 - DNA, 15 bp, Homo sapiens
ataccccaggcgatt

SEQ ID NO: 2032367 - DNA, 15 bp, Homo sapiens
taccccaggcgattc

SEQ ID NO: 2032368 - DNA, 15 bp, Homo sapiens
accccaggcgattct

SEQ ID NO: 2032369 - DNA, 15 bp, Homo sapiens
ccccaggcgattctt

SEQ ID NO: 2032370 - DNA, 15 bp, Homo sapiens
cccaggcgattctta

SEQ ID NO: 2032371 - DNA, 15 bp, Homo sapiens
ccaggcgattcttac

SEQ ID NO: 2032372 - DNA, 15 bp, Homo sapiens
caggcgattcttaca

SEQ ID NO: 2032373 - DNA, 15 bp, Homo sapiens
aggcgattcttacac

SEQ ID NO: 2032374 - DNA, 15 bp, Homo sapiens
ggcgattcttacaca

SEQ ID NO: 2032375 - DNA, 15 bp, Homo sapiens
gcgattcttacacac

SEQ ID NO: 2032376 - DNA, 15 bp, Homo sapiens
cgattcttacacaca

SEQ ID NO: 2032377 - DNA, 15 bp, Homo sapiens
gattcttacacacac

SEQ ID NO: 2032378 - DNA, 15 bp, Homo sapiens
attcttacacacact

SEQ ID NO: 2032379 - DNA, 15 bp, Homo sapiens
ttcttacacacacta

SEQ ID NO: 2032380 - DNA, 15 bp, Homo sapiens
tcttacacacactag

SEQ ID NO: 2032381 - DNA, 15 bp, Homo sapiens
cttacacacactaga

SEQ ID NO: 2032382 - DNA, 15 bp, Homo sapiens
ttacacacactagaa

SEQ ID NO: 2032383 - DNA, 15 bp, Homo sapiens
tacacacactagaat

SEQ ID NO: 2032384 - DNA, 15 bp, Homo sapiens
acacacactagaatt

SEQ ID NO: 2032385 - DNA, 15 bp, Homo sapiens
cacacactagaattg

SEQ ID NO: 2032386 - DNA, 15 bp, Homo sapiens
acacactagaattgg

SEQ ID NO: 2032387 - DNA, 15 bp, Homo sapiens
cacactagaattgga

SEQ ID NO: 2032388 - DNA, 15 bp, Homo sapiens
acactagaattggag

SEQ ID NO: 2032389 - DNA, 15 bp, Homo sapiens
cactagaattggaga

SEQ ID NO: 2032390 - DNA, 15 bp, Homo sapiens
actagaattggagaa

SEQ ID NO: 2032391 - DNA, 15 bp, Homo sapiens
ctagaattggagaag

SEQ ID NO: 2032392 - DNA, 15 bp, Homo sapiens
tagaattggagaagc

SEQ ID NO: 2032393 - DNA, 15 bp, Homo sapiens
agaattggagaagca

SEQ ID NO: 2032394 - DNA, 15 bp, Homo sapiens
gaattggagaagcac

SEQ ID NO: 2032395 - DNA, 15 bp, Homo sapiens
aattggagaagcact

SEQ ID NO: 2032396 - DNA, 15 bp, Homo sapiens
attggagaagcactg

SEQ ID NO: 2032397 - DNA, 15 bp, Homo sapiens
ttggagaagcactgc

SEQ ID NO: 2032398 - DNA, 15 bp, Homo sapiens
tggagaagcactgcc

SEQ ID NO: 2032399 - DNA, 15 bp, Homo sapiens
ggagaagcactgccc

SEQ ID NO: 2032400 - DNA, 15 bp, Homo sapiens
gagaagcactgccct

SEQ ID NO: 2032401 - DNA, 15 bp, Homo sapiens
agaagcactgccctg

SEQ ID NO: 2032402 - DNA, 15 bp, Homo sapiens
gaagcactgccctgg

SEQ ID NO: 2032403 - DNA, 15 bp, Homo sapiens
agcactgccctgggg

SEQ ID NO: 2032404 - DNA, 15 bp, Homo sapiens
gcactgccctggggt

SEQ ID NO: 2032405 - DNA, 15 bp, Homo sapiens
cactgccctggggtc

SEQ ID NO: 2032406 - DNA, 15 bp, Homo sapiens
actgccctggggtct

SEQ ID NO: 2032407 - DNA, 15 bp, Homo sapiens
ctgccctggggtctg

SEQ ID NO: 2032408 - DNA, 15 bp, Homo sapiens
tgccctggggtctgc

SEQ ID NO: 2032409 - DNA, 15 bp, Homo sapiens
gccctggggtctgct

SEQ ID NO: 2032410 - DNA, 15 bp, Homo sapiens
ccctggggtctgctt

SEQ ID NO: 2032411 - DNA, 15 bp, Homo sapiens
cctggggtctgcttc

SEQ ID NO: 2032412 - DNA, 15 bp, Homo sapiens
ctggggtctgcttct

SEQ ID NO: 2032413 - DNA, 15 bp, Homo sapiens
tggggtctgcttctg

SEQ ID NO: 2032414 - DNA, 15 bp, Homo sapiens
ggggtctgcttctgg

SEQ ID NO: 2032415 - DNA, 15 bp, Homo sapiens
gggtctgcttctggt

SEQ ID NO: 2032416 - DNA, 15 bp, Homo sapiens
ggtctgcttctggtc

SEQ ID NO: 2032417 - DNA, 15 bp, Homo sapiens
gtctgcttctggtct

SEQ ID NO: 2032418 - DNA, 15 bp, Homo sapiens
tctgcttctggtctt

SEQ ID NO: 2032419 - DNA, 15 bp, Homo sapiens
ctgcttctggtcttg

SEQ ID NO: 2032420 - DNA, 15 bp, Homo sapiens
tgcttctggtcttgc

SEQ ID NO: 2032421 - DNA, 15 bp, Homo sapiens
gcttctggtcttgcc

SEQ ID NO: 2032422 - DNA, 15 bp, Homo sapiens
cttctggtcttgccc

SEQ ID NO: 2032423 - DNA, 15 bp, Homo sapiens
ttctggtcttgccca

SEQ ID NO: 2032424 - DNA, 15 bp, Homo sapiens
tctggtcttgcccat

SEQ ID NO: 2032425 - DNA, 15 bp, Homo sapiens
ctggtcttgcccatt

SEQ ID NO: 2032426 - DNA, 15 bp, Homo sapiens
tggtcttgcccatta

SEQ ID NO: 2032427 - DNA, 15 bp, Homo sapiens
ggtcttgcccattat

SEQ ID NO: 2032428 - DNA, 15 bp, Homo sapiens
gtcttgcccattatc

SEQ ID NO: 2032429 - DNA, 15 bp, Homo sapiens
tcttgcccattatca

SEQ ID NO: 2032430 - DNA, 15 bp, Homo sapiens
cttgcccattatcag

SEQ ID NO: 2032431 - DNA, 15 bp, Homo sapiens
ttgcccattatcagc

SEQ ID NO: 2032432 - DNA, 15 bp, Homo sapiens
tgcccattatcagca

SEQ ID NO: 2032433 - DNA, 15 bp, Homo sapiens
gcccattatcagcat

SEQ ID NO: 2032434 - DNA, 15 bp, Homo sapiens
cccattatcagcatt

SEQ ID NO: 2032435 - DNA, 15 bp, Homo sapiens
ccattatcagcattt

SEQ ID NO: 2032436 - DNA, 15 bp, Homo sapiens
cattatcagcatttc

SEQ ID NO: 2032437 - DNA, 15 bp, Homo sapiens
attatcagcatttca

SEQ ID NO: 2032438 - DNA, 15 bp, Homo sapiens
ttatcagcatttcag

SEQ ID NO: 2032439 - DNA, 15 bp, Homo sapiens
tatcagcatttcagc

SEQ ID NO: 2032440 - DNA, 15 bp, Homo sapiens
atcagcatttcagct

SEQ ID NO: 2032441 - DNA, 15 bp, Homo sapiens
tcagcatttcagctg

SEQ ID NO: 2032442 - DNA, 15 bp, Homo sapiens
cagcatttcagctgt

SEQ ID NO: 2032443 - DNA, 15 bp, Homo sapiens
agcatttcagctgtg

SEQ ID NO: 2032444 - DNA, 15 bp, Homo sapiens
gcatttcagctgtga

SEQ ID NO: 2032445 - DNA, 15 bp, Homo sapiens
catttcagctgtgaa

SEQ ID NO: 2032446 - DNA, 15 bp, Homo sapiens
atttcagctgtgaag

SEQ ID NO: 2032447 - DNA, 15 bp, Homo sapiens
tttcagctgtgaagg

SEQ ID NO: 2032448 - DNA, 15 bp, Homo sapiens
ttcagctgtgaaggc

SEQ ID NO: 2032449 - DNA, 15 bp, Homo sapiens
tcagctgtgaaggcc

SEQ ID NO: 2032450 - DNA, 15 bp, Homo sapiens
cagctgtgaaggcca

SEQ ID NO: 2032451 - DNA, 15 bp, Homo sapiens
agctgtgaaggccag

SEQ ID NO: 2032452 - DNA, 15 bp, Homo sapiens
gctgtgaaggccagg

SEQ ID NO: 2032453 - DNA, 15 bp, Homo sapiens
ctgtgaaggccaggg

SEQ ID NO: 2032454 - DNA, 15 bp, Homo sapiens
tgtgaaggccagggc

SEQ ID NO: 2032455 - DNA, 15 bp, Homo sapiens
gtgaaggccagggca

SEQ ID NO: 2032456 - DNA, 15 bp, Homo sapiens
tgaaggccagggcaa

SEQ ID NO: 2032457 - DNA, 15 bp, Homo sapiens
gaaggccagggcaaa

SEQ ID NO: 2032458 - DNA, 15 bp, Homo sapiens
aaggccagggcaaaa

SEQ ID NO: 2032459 - DNA, 15 bp, Homo sapiens
aggccagggcaaaac

SEQ ID NO: 2032460 - DNA, 15 bp, Homo sapiens
ggccagggcaaaact

SEQ ID NO: 2032461 - DNA, 15 bp, Homo sapiens
gccagggcaaaactt

SEQ ID NO: 2032462 - DNA, 15 bp, Homo sapiens
ccagggcaaaactta

SEQ ID NO: 2032463 - DNA, 15 bp, Homo sapiens
cagggcaaaacttaa

SEQ ID NO: 2032464 - DNA, 15 bp, Homo sapiens
agggcaaaacttaaa

SEQ ID NO: 2032465 - DNA, 15 bp, Homo sapiens
gggcaaaacttaaaa

SEQ ID NO: 2032466 - DNA, 15 bp, Homo sapiens
ggcaaaacttaaaat

SEQ ID NO: 2032467 - DNA, 15 bp, Homo sapiens
gcaaaacttaaaatt

SEQ ID NO: 2032468 - DNA, 15 bp, Homo sapiens
caaaacttaaaattt

SEQ ID NO: 2032469 - DNA, 15 bp, Homo sapiens
aaaacttaaaattta

SEQ ID NO: 2032470 - DNA, 15 bp, Homo sapiens
aaacttaaaatttac

SEQ ID NO: 2032471 - DNA, 15 bp, Homo sapiens
aacttaaaatttact

SEQ ID NO: 2032472 - DNA, 15 bp, Homo sapiens
acttaaaatttactt

SEQ ID NO: 2032473 - DNA, 15 bp, Homo sapiens
cttaaaatttacttt

SEQ ID NO: 2032474 - DNA, 15 bp, Homo sapiens
aaaatttactttttt

SEQ ID NO: 2032475 - DNA, 15 bp, Homo sapiens
aaatttacttttttt

SEQ ID NO: 2032476 - DNA, 15 bp, Homo sapiens
aatttacttttttta

SEQ ID NO: 2032477 - DNA, 15 bp, Homo sapiens
atttactttttttac

SEQ ID NO: 2032478 - DNA, 15 bp, Homo sapiens
tttactttttttaca

SEQ ID NO: 2032479 - DNA, 15 bp, Homo sapiens
ttactttttttacag

SEQ ID NO: 2032480 - DNA, 15 bp, Homo sapiens
tactttttttacaga

SEQ ID NO: 2032481 - DNA, 15 bp, Homo sapiens
actttttttacagat

SEQ ID NO: 2032482 - DNA, 15 bp, Homo sapiens
ctttttttacagata

SEQ ID NO: 2032483 - DNA, 15 bp, Homo sapiens
tttttttacagatac

SEQ ID NO: 2032484 - DNA, 15 bp, Homo sapiens
ttttttacagatact

SEQ ID NO: 2032485 - DNA, 15 bp, Homo sapiens
tttttacagatactg

SEQ ID NO: 2032486 - DNA, 15 bp, Homo sapiens
ttttacagatactgc

SEQ ID NO: 2032487 - DNA, 15 bp, Homo sapiens
tttacagatactgca

SEQ ID NO: 2032488 - DNA, 15 bp, Homo sapiens
ttacagatactgcag

SEQ ID NO: 2032489 - DNA, 15 bp, Homo sapiens
tacagatactgcagc

SEQ ID NO: 2032490 - DNA, 15 bp, Homo sapiens
acagatactgcagcc

SEQ ID NO: 2032491 - DNA, 15 bp, Homo sapiens
cagatactgcagcca

SEQ ID NO: 2032492 - DNA, 15 bp, Homo sapiens
agatactgcagccac

SEQ ID NO: 2032493 - DNA, 15 bp, Homo sapiens
gatactgcagccact

SEQ ID NO: 2032494 - DNA, 15 bp, Homo sapiens
atactgcagccactg

SEQ ID NO: 2032495 - DNA, 15 bp, Homo sapiens
tactgcagccactga

SEQ ID NO: 2032496 - DNA, 15 bp, Homo sapiens
actgcagccactgaa

SEQ ID NO: 2032497 - DNA, 15 bp, Homo sapiens
ctgcagccactgaat

SEQ ID NO: 2032498 - DNA, 15 bp, Homo sapiens
tgcagccactgaatt

SEQ ID NO: 2032499 - DNA, 15 bp, Homo sapiens
gcagccactgaattc

SEQ ID NO: 2032500 - DNA, 15 bp, Homo sapiens
cagccactgaattcc

SEQ ID NO: 2032501 - DNA, 15 bp, Homo sapiens
agccactgaattcct

SEQ ID NO: 2032502 - DNA, 15 bp, Homo sapiens
gccactgaattcctt

SEQ ID NO: 2032503 - DNA, 15 bp, Homo sapiens
ccactgaattccttc

SEQ ID NO: 2032504 - DNA, 15 bp, Homo sapiens
cactgaattccttcc

SEQ ID NO: 2032505 - DNA, 15 bp, Homo sapiens
actgaattccttcct

SEQ ID NO: 2032506 - DNA, 15 bp, Homo sapiens
ctgaattccttcctg

SEQ ID NO: 2032507 - DNA, 15 bp, Homo sapiens
tgaattccttcctgc

SEQ ID NO: 2032508 - DNA, 15 bp, Homo sapiens
gaattccttcctgct

SEQ ID NO: 2032509 - DNA, 15 bp, Homo sapiens
aattccttcctgctt

SEQ ID NO: 2032510 - DNA, 15 bp, Homo sapiens
attccttcctgcttc

SEQ ID NO: 2032511 - DNA, 15 bp, Homo sapiens
ttccttcctgcttcc

SEQ ID NO: 2032512 - DNA, 15 bp, Homo sapiens
tccttcctgcttccc

SEQ ID NO: 2032513 - DNA, 15 bp, Homo sapiens
ccttcctgcttcccc

SEQ ID NO: 2032514 - DNA, 15 bp, Homo sapiens
cttcctgcttccccg

SEQ ID NO: 2032515 - DNA, 15 bp, Homo sapiens
ttcctgcttccccgc

SEQ ID NO: 2032516 - DNA, 15 bp, Homo sapiens
tcctgcttccccgct

SEQ ID NO: 2032517 - DNA, 15 bp, Homo sapiens
cctgcttccccgctg

SEQ ID NO: 2032518 - DNA, 15 bp, Homo sapiens
ctgcttccccgctga

SEQ ID NO: 2032519 - DNA, 15 bp, Homo sapiens
tgcttccccgctgat

SEQ ID NO: 2032520 - DNA, 15 bp, Homo sapiens
gcttccccgctgata

SEQ ID NO: 2032521 - DNA, 15 bp, Homo sapiens
cttccccgctgataa

SEQ ID NO: 2032522 - DNA, 15 bp, Homo sapiens
ttccccgctgataaa

SEQ ID NO: 2032523 - DNA, 15 bp, Homo sapiens
tccccgctgataaac

SEQ ID NO: 2032524 - DNA, 15 bp, Homo sapiens
ccccgctgataaacc

SEQ ID NO: 2032525 - DNA, 15 bp, Homo sapiens
cccgctgataaacct

SEQ ID NO: 2032526 - DNA, 15 bp, Homo sapiens
ccgctgataaacctt

SEQ ID NO: 2032527 - DNA, 15 bp, Homo sapiens
cgctgataaaccttt

SEQ ID NO: 2032528 - DNA, 15 bp, Homo sapiens
gctgataaacctttt

SEQ ID NO: 2032529 - DNA, 15 bp, Homo sapiens
ctgataaacctttta

SEQ ID NO: 2032530 - DNA, 15 bp, Homo sapiens
tgataaaccttttag

SEQ ID NO: 2032531 - DNA, 15 bp, Homo sapiens
gataaaccttttagc

SEQ ID NO: 2032532 - DNA, 15 bp, Homo sapiens
ataaaccttttagca

SEQ ID NO: 2032533 - DNA, 15 bp, Homo sapiens
taaaccttttagcat

SEQ ID NO: 2032534 - DNA, 15 bp, Homo sapiens
aaaccttttagcatt

SEQ ID NO: 2032535 - DNA, 15 bp, Homo sapiens
aaccttttagcattt

SEQ ID NO: 2032536 - DNA, 15 bp, Homo sapiens
accttttagcatttt

SEQ ID NO: 2032537 - DNA, 15 bp, Homo sapiens
ccttttagcattttg

SEQ ID NO: 2032538 - DNA, 15 bp, Homo sapiens
cttttagcattttgg

SEQ ID NO: 2032539 - DNA, 15 bp, Homo sapiens
ttttagcattttgga

SEQ ID NO: 2032540 - DNA, 15 bp, Homo sapiens
tttagcattttggag

SEQ ID NO: 2032541 - DNA, 15 bp, Homo sapiens
ttagcattttggagc

SEQ ID NO: 2032542 - DNA, 15 bp, Homo sapiens
tagcattttggagct

SEQ ID NO: 2032543 - DNA, 15 bp, Homo sapiens
agcattttggagcta

SEQ ID NO: 2032544 - DNA, 15 bp, Homo sapiens
gcattttggagctag

SEQ ID NO: 2032545 - DNA, 15 bp, Homo sapiens
cattttggagctagg

SEQ ID NO: 2032546 - DNA, 15 bp, Homo sapiens
attttggagctaggg

SEQ ID NO: 2032547 - DNA, 15 bp, Homo sapiens
ttttggagctaggga

SEQ ID NO: 2032548 - DNA, 15 bp, Homo sapiens
tttggagctagggaa

SEQ ID NO: 2032549 - DNA, 15 bp, Homo sapiens
ttggagctagggaac

SEQ ID NO: 2032550 - DNA, 15 bp, Homo sapiens
tggagctagggaacc

SEQ ID NO: 2032551 - DNA, 15 bp, Homo sapiens
ggagctagggaacca

SEQ ID NO: 2032552 - DNA, 15 bp, Homo sapiens
gagctagggaaccat

SEQ ID NO: 2032553 - DNA, 15 bp, Homo sapiens
agctagggaaccata

SEQ ID NO: 2032554 - DNA, 15 bp, Homo sapiens
gctagggaaccatac

SEQ ID NO: 2032555 - DNA, 15 bp, Homo sapiens
ctagggaaccataca

SEQ ID NO: 2032556 - DNA, 15 bp, Homo sapiens
tagggaaccatacag

SEQ ID NO: 2032557 - DNA, 15 bp, Homo sapiens
agggaaccatacagg

SEQ ID NO: 2032558 - DNA, 15 bp, Homo sapiens
gggaaccatacaggt

SEQ ID NO: 2032559 - DNA, 15 bp, Homo sapiens
ggaaccatacaggta

SEQ ID NO: 2032560 - DNA, 15 bp, Homo sapiens
gaaccatacaggtaa

SEQ ID NO: 2032561 - DNA, 15 bp, Homo sapiens
aaccatacaggtaat

SEQ ID NO: 2032562 - DNA, 15 bp, Homo sapiens
accatacaggtaatt

SEQ ID NO: 2032563 - DNA, 15 bp, Homo sapiens
ccatacaggtaattt

SEQ ID NO: 2032564 - DNA, 15 bp, Homo sapiens
catacaggtaattta

SEQ ID NO: 2032565 - DNA, 15 bp, Homo sapiens
atacaggtaatttag

SEQ ID NO: 2032566 - DNA, 15 bp, Homo sapiens
tacaggtaatttagt

SEQ ID NO: 2032567 - DNA, 15 bp, Homo sapiens
acaggtaatttagtt

SEQ ID NO: 2032568 - DNA, 15 bp, Homo sapiens
caggtaatttagttt

SEQ ID NO: 2032569 - DNA, 15 bp, Homo sapiens
aggtaatttagtttt

SEQ ID NO: 2032570 - DNA, 15 bp, Homo sapiens
ggtaatttagtttta

SEQ ID NO: 2032571 - DNA, 15 bp, Homo sapiens
gtaatttagttttag

SEQ ID NO: 2032572 - DNA, 15 bp, Homo sapiens
taatttagttttagg

SEQ ID NO: 2032573 - DNA, 15 bp, Homo sapiens
aatttagttttaggc

SEQ ID NO: 2032574 - DNA, 15 bp, Homo sapiens
atttagttttaggct

SEQ ID NO: 2032575 - DNA, 15 bp, Homo sapiens
tttagttttaggctc

SEQ ID NO: 2032576 - DNA, 15 bp, Homo sapiens
ttagttttaggctca

SEQ ID NO: 2032577 - DNA, 15 bp, Homo sapiens
tagttttaggctcac

SEQ ID NO: 2032578 - DNA, 15 bp, Homo sapiens
agttttaggctcaca

SEQ ID NO: 2032579 - DNA, 15 bp, Homo sapiens
gttttaggctcacaa

SEQ ID NO: 2032580 - DNA, 15 bp, Homo sapiens
ttttaggctcacaat

SEQ ID NO: 2032581 - DNA, 15 bp, Homo sapiens
tttaggctcacaata

SEQ ID NO: 2032582 - DNA, 15 bp, Homo sapiens
ttaggctcacaatat

SEQ ID NO: 2032583 - DNA, 15 bp, Homo sapiens
taggctcacaatatt

SEQ ID NO: 2032584 - DNA, 15 bp, Homo sapiens
aggctcacaatattg

SEQ ID NO: 2032585 - DNA, 15 bp, Homo sapiens
ggctcacaatattgt

SEQ ID NO: 2032586 - DNA, 15 bp, Homo sapiens
gctcacaatattgtg

SEQ ID NO: 2032587 - DNA, 15 bp, Homo sapiens
ctcacaatattgtgt

SEQ ID NO: 2032588 - DNA, 15 bp, Homo sapiens
tcacaatattgtgta

SEQ ID NO: 2032589 - DNA, 15 bp, Homo sapiens
cacaatattgtgtac

SEQ ID NO: 2032590 - DNA, 15 bp, Homo sapiens
acaatattgtgtaca

SEQ ID NO: 2032591 - DNA, 15 bp, Homo sapiens
caatattgtgtacat

SEQ ID NO: 2032592 - DNA, 15 bp, Homo sapiens
aatattgtgtacatt

SEQ ID NO: 2032593 - DNA, 15 bp, Homo sapiens
atattgtgtacattg

SEQ ID NO: 2032594 - DNA, 15 bp, Homo sapiens
tattgtgtacattgg

SEQ ID NO: 2032595 - DNA, 15 bp, Homo sapiens
attgtgtacattggg

SEQ ID NO: 2032596 - DNA, 15 bp, Homo sapiens
ttgtgtacattgggg

SEQ ID NO: 2032597 - DNA, 15 bp, Homo sapiens
tgtgtacattgggga

SEQ ID NO: 2032598 - DNA, 15 bp, Homo sapiens
gtgtacattggggag

SEQ ID NO: 2032599 - DNA, 15 bp, Homo sapiens
tgtacattggggaga

SEQ ID NO: 2032600 - DNA, 15 bp, Homo sapiens
gtacattggggagac

SEQ ID NO: 2032601 - DNA, 15 bp, Homo sapiens
tacattggggagact

SEQ ID NO: 2032602 - DNA, 15 bp, Homo sapiens
acattggggagactg

SEQ ID NO: 2032603 - DNA, 15 bp, Homo sapiens
cattggggagactga

SEQ ID NO: 2032604 - DNA, 15 bp, Homo sapiens
attggggagactgag

SEQ ID NO: 2032605 - DNA, 15 bp, Homo sapiens
ttggggagactgagt

SEQ ID NO: 2032606 - DNA, 15 bp, Homo sapiens
tggggagactgagtt

SEQ ID NO: 2032607 - DNA, 15 bp, Homo sapiens
ggggagactgagttt

SEQ ID NO: 2032608 - DNA, 15 bp, Homo sapiens
gggagactgagtttt

SEQ ID NO: 2032609 - DNA, 15 bp, Homo sapiens
ggagactgagtttta

SEQ ID NO: 2032610 - DNA, 15 bp, Homo sapiens
gagactgagttttag

SEQ ID NO: 2032611 - DNA, 15 bp, Homo sapiens
agactgagttttaga

SEQ ID NO: 2032612 - DNA, 15 bp, Homo sapiens
gactgagttttagaa

SEQ ID NO: 2032613 - DNA, 15 bp, Homo sapiens
actgagttttagaag

SEQ ID NO: 2032614 - DNA, 15 bp, Homo sapiens
ctgagttttagaaga

SEQ ID NO: 2032615 - DNA, 15 bp, Homo sapiens
tgagttttagaagag

SEQ ID NO: 2032616 - DNA, 15 bp, Homo sapiens
gagttttagaagagc

SEQ ID NO: 2032617 - DNA, 15 bp, Homo sapiens
agttttagaagagct

SEQ ID NO: 2032618 - DNA, 15 bp, Homo sapiens
gttttagaagagctg

SEQ ID NO: 2032619 - DNA, 15 bp, Homo sapiens
ttttagaagagctgg

SEQ ID NO: 2032620 - DNA, 15 bp, Homo sapiens
tttagaagagctggg

SEQ ID NO: 2032621 - DNA, 15 bp, Homo sapiens
ttagaagagctgggt

SEQ ID NO: 2032622 - DNA, 15 bp, Homo sapiens
tagaagagctgggtt

SEQ ID NO: 2032623 - DNA, 15 bp, Homo sapiens
agaagagctgggtta

SEQ ID NO: 2032624 - DNA, 15 bp, Homo sapiens
gaagagctgggttaa

SEQ ID NO: 2032625 - DNA, 15 bp, Homo sapiens
aagagctgggttaac

SEQ ID NO: 2032626 - DNA, 15 bp, Homo sapiens
agagctgggttaact

SEQ ID NO: 2032627 - DNA, 15 bp, Homo sapiens
gagctgggttaactg

SEQ ID NO: 2032628 - DNA, 15 bp, Homo sapiens
agctgggttaactgc

SEQ ID NO: 2032629 - DNA, 15 bp, Homo sapiens
gctgggttaactgct

SEQ ID NO: 2032630 - DNA, 15 bp, Homo sapiens
ctgggttaactgctt

SEQ ID NO: 2032631 - DNA, 15 bp, Homo sapiens
tgggttaactgcttt

SEQ ID NO: 2032632 - DNA, 15 bp, Homo sapiens
gggttaactgcttta

SEQ ID NO: 2032633 - DNA, 15 bp, Homo sapiens
ggttaactgctttat

SEQ ID NO: 2032634 - DNA, 15 bp, Homo sapiens
gttaactgctttata

SEQ ID NO: 2032635 - DNA, 15 bp, Homo sapiens
ttaactgctttatac

SEQ ID NO: 2032636 - DNA, 15 bp, Homo sapiens
taactgctttataca

SEQ ID NO: 2032637 - DNA, 15 bp, Homo sapiens
aactgctttatacag

SEQ ID NO: 2032638 - DNA, 15 bp, Homo sapiens
actgctttatacagt

SEQ ID NO: 2032639 - DNA, 15 bp, Homo sapiens
ctgctttatacagtt

SEQ ID NO: 2032640 - DNA, 15 bp, Homo sapiens
tgctttatacagttc

SEQ ID NO: 2032641 - DNA, 15 bp, Homo sapiens
gctttatacagttct

SEQ ID NO: 2032642 - DNA, 15 bp, Homo sapiens
ctttatacagttctt

SEQ ID NO: 2032643 - DNA, 15 bp, Homo sapiens
tttatacagttctta

SEQ ID NO: 2032644 - DNA, 15 bp, Homo sapiens
ttatacagttcttat

SEQ ID NO: 2032645 - DNA, 15 bp, Homo sapiens
tatacagttcttatc

SEQ ID NO: 2032646 - DNA, 15 bp, Homo sapiens
atacagttcttatct

SEQ ID NO: 2032647 - DNA, 15 bp, Homo sapiens
tacagttcttatcta

SEQ ID NO: 2032648 - DNA, 15 bp, Homo sapiens
acagttcttatctag

SEQ ID NO: 2032649 - DNA, 15 bp, Homo sapiens
cagttcttatctaga

SEQ ID NO: 2032650 - DNA, 15 bp, Homo sapiens
agttcttatctagaa

SEQ ID NO: 2032651 - DNA, 15 bp, Homo sapiens
gttcttatctagaac

SEQ ID NO: 2032652 - DNA, 15 bp, Homo sapiens
ttcttatctagaacc

SEQ ID NO: 2032653 - DNA, 15 bp, Homo sapiens
tcttatctagaacca

SEQ ID NO: 2032654 - DNA, 15 bp, Homo sapiens
cttatctagaaccaa

SEQ ID NO: 2032655 - DNA, 15 bp, Homo sapiens
ttatctagaaccaag

SEQ ID NO: 2032656 - DNA, 15 bp, Homo sapiens
tatctagaaccaagg

SEQ ID NO: 2032657 - DNA, 15 bp, Homo sapiens
atctagaaccaaggc

SEQ ID NO: 2032658 - DNA, 15 bp, Homo sapiens
tctagaaccaaggcc

SEQ ID NO: 2032659 - DNA, 15 bp, Homo sapiens
ctagaaccaaggcca

SEQ ID NO: 2032660 - DNA, 15 bp, Homo sapiens
tagaaccaaggccag

SEQ ID NO: 2032661 - DNA, 15 bp, Homo sapiens
agaaccaaggccagg

SEQ ID NO: 2032662 - DNA, 15 bp, Homo sapiens
gaaccaaggccaggc

SEQ ID NO: 2032663 - DNA, 15 bp, Homo sapiens
aaccaaggccaggcc

SEQ ID NO: 2032664 - DNA, 15 bp, Homo sapiens
accaaggccaggccc

SEQ ID NO: 2032665 - DNA, 15 bp, Homo sapiens
ccaaggccaggccct

SEQ ID NO: 2032666 - DNA, 15 bp, Homo sapiens
caaggccaggccctt

SEQ ID NO: 2032667 - DNA, 15 bp, Homo sapiens
aaggccaggcccttt

SEQ ID NO: 2032668 - DNA, 15 bp, Homo sapiens
aggccaggccctttt

SEQ ID NO: 2032669 - DNA, 15 bp, Homo sapiens
ggccaggcccttttg

SEQ ID NO: 2032670 - DNA, 15 bp, Homo sapiens
gccaggcccttttgt

SEQ ID NO: 2032671 - DNA, 15 bp, Homo sapiens
ccaggcccttttgta

SEQ ID NO: 2032672 - DNA, 15 bp, Homo sapiens
caggcccttttgtac

SEQ ID NO: 2032673 - DNA, 15 bp, Homo sapiens
aggcccttttgtact

SEQ ID NO: 2032674 - DNA, 15 bp, Homo sapiens
ggcccttttgtacta

SEQ ID NO: 2032675 - DNA, 15 bp, Homo sapiens
gcccttttgtactac

SEQ ID NO: 2032676 - DNA, 15 bp, Homo sapiens
cccttttgtactaca

SEQ ID NO: 2032677 - DNA, 15 bp, Homo sapiens
ccttttgtactacat

SEQ ID NO: 2032678 - DNA, 15 bp, Homo sapiens
cttttgtactacatt

SEQ ID NO: 2032679 - DNA, 15 bp, Homo sapiens
ttttgtactacattc

SEQ ID NO: 2032680 - DNA, 15 bp, Homo sapiens
tttgtactacattca

SEQ ID NO: 2032681 - DNA, 15 bp, Homo sapiens
ttgtactacattcat

SEQ ID NO: 2032682 - DNA, 15 bp, Homo sapiens
tgtactacattcatt

SEQ ID NO: 2032683 - DNA, 15 bp, Homo sapiens
gtactacattcattg

SEQ ID NO: 2032684 - DNA, 15 bp, Homo sapiens
tactacattcattgc

SEQ ID NO: 2032685 - DNA, 15 bp, Homo sapiens
actacattcattgcc

SEQ ID NO: 2032686 - DNA, 15 bp, Homo sapiens
ctacattcattgcct

SEQ ID NO: 2032687 - DNA, 15 bp, Homo sapiens
tacattcattgcctt

SEQ ID NO: 2032688 - DNA, 15 bp, Homo sapiens
acattcattgccttc

SEQ ID NO: 2032689 - DNA, 15 bp, Homo sapiens
cattcattgccttcc

SEQ ID NO: 2032690 - DNA, 15 bp, Homo sapiens
attcattgccttcca

SEQ ID NO: 2032691 - DNA, 15 bp, Homo sapiens
ttcattgccttccat

SEQ ID NO: 2032692 - DNA, 15 bp, Homo sapiens
tcattgccttccatg

SEQ ID NO: 2032693 - DNA, 15 bp, Homo sapiens
cattgccttccatgg

SEQ ID NO: 2032694 - DNA, 15 bp, Homo sapiens
attgccttccatggc

SEQ ID NO: 2032695 - DNA, 15 bp, Homo sapiens
ttgccttccatggct

SEQ ID NO: 2032696 - DNA, 15 bp, Homo sapiens
tgccttccatggctg

SEQ ID NO: 2032697 - DNA, 15 bp, Homo sapiens
gccttccatggctgt

SEQ ID NO: 2032698 - DNA, 15 bp, Homo sapiens
ccttccatggctgtt

SEQ ID NO: 2032699 - DNA, 15 bp, Homo sapiens
cttccatggctgttg

SEQ ID NO: 2032700 - DNA, 15 bp, Homo sapiens
ttccatggctgttgt

SEQ ID NO: 2032701 - DNA, 15 bp, Homo sapiens
tccatggctgttgtc

SEQ ID NO: 2032702 - DNA, 15 bp, Homo sapiens
ccatggctgttgtct

SEQ ID NO: 2032703 - DNA, 15 bp, Homo sapiens
catggctgttgtctg

SEQ ID NO: 2032704 - DNA, 15 bp, Homo sapiens
atggctgttgtctgt

SEQ ID NO: 2032705 - DNA, 15 bp, Homo sapiens
tggctgttgtctgtt

SEQ ID NO: 2032706 - DNA, 15 bp, Homo sapiens
ggctgttgtctgttt

SEQ ID NO: 2032707 - DNA, 15 bp, Homo sapiens
gctgttgtctgtttg

SEQ ID NO: 2032708 - DNA, 15 bp, Homo sapiens
ctgttgtctgtttga

SEQ ID NO: 2032709 - DNA, 15 bp, Homo sapiens
tgttgtctgtttgat

SEQ ID NO: 2032710 - DNA, 15 bp, Homo sapiens
gttgtctgtttgatt

SEQ ID NO: 2032711 - DNA, 15 bp, Homo sapiens
ttgtctgtttgatta

SEQ ID NO: 2032712 - DNA, 15 bp, Homo sapiens
tgtctgtttgattat

SEQ ID NO: 2032713 - DNA, 15 bp, Homo sapiens
gtctgtttgattatc

SEQ ID NO: 2032714 - DNA, 15 bp, Homo sapiens
tctgtttgattatct

SEQ ID NO: 2032715 - DNA, 15 bp, Homo sapiens
ctgtttgattatcta

SEQ ID NO: 2032716 - DNA, 15 bp, Homo sapiens
tgtttgattatctat

SEQ ID NO: 2032717 - DNA, 15 bp, Homo sapiens
gtttgattatctatc

SEQ ID NO: 2032718 - DNA, 15 bp, Homo sapiens
tttgattatctatct

SEQ ID NO: 2032719 - DNA, 15 bp, Homo sapiens
ttgattatctatcta

SEQ ID NO: 2032720 - DNA, 15 bp, Homo sapiens
tgattatctatctac

SEQ ID NO: 2032721 - DNA, 15 bp, Homo sapiens
gattatctatctact

SEQ ID NO: 2032722 - DNA, 15 bp, Homo sapiens
attatctatctactt

SEQ ID NO: 2032723 - DNA, 15 bp, Homo sapiens
ttatctatctacttt

SEQ ID NO: 2032724 - DNA, 15 bp, Homo sapiens
tatctatctactttc

SEQ ID NO: 2032725 - DNA, 15 bp, Homo sapiens
atctatctactttcc

SEQ ID NO: 2032726 - DNA, 15 bp, Homo sapiens
tctatctactttccc

SEQ ID NO: 2032727 - DNA, 15 bp, Homo sapiens
ctatctactttccct

SEQ ID NO: 2032728 - DNA, 15 bp, Homo sapiens
tatctactttccctt

SEQ ID NO: 2032729 - DNA, 15 bp, Homo sapiens
atctactttcccttc

SEQ ID NO: 2032730 - DNA, 15 bp, Homo sapiens
tctactttcccttct

SEQ ID NO: 2032731 - DNA, 15 bp, Homo sapiens
ctactttcccttctc

SEQ ID NO: 2032732 - DNA, 15 bp, Homo sapiens
tactttcccttctcc

SEQ ID NO: 2032733 - DNA, 15 bp, Homo sapiens
actttcccttctcct

SEQ ID NO: 2032734 - DNA, 15 bp, Homo sapiens
ctttcccttctcctt

SEQ ID NO: 2032735 - DNA, 15 bp, Homo sapiens
tttcccttctccttc

SEQ ID NO: 2032736 - DNA, 15 bp, Homo sapiens
ttcccttctccttct

SEQ ID NO: 2032737 - DNA, 15 bp, Homo sapiens
tcccttctccttctt

SEQ ID NO: 2032738 - DNA, 15 bp, Homo sapiens
cccttctccttcttt

SEQ ID NO: 2032739 - DNA, 15 bp, Homo sapiens
ccttctccttcttta

SEQ ID NO: 2032740 - DNA, 15 bp, Homo sapiens
cttctccttctttat

SEQ ID NO: 2032741 - DNA, 15 bp, Homo sapiens
ttctccttctttatt

SEQ ID NO: 2032742 - DNA, 15 bp, Homo sapiens
tctccttctttattt

SEQ ID NO: 2032743 - DNA, 15 bp, Homo sapiens
ctccttctttatttc

SEQ ID NO: 2032744 - DNA, 15 bp, Homo sapiens
tccttctttatttcc

SEQ ID NO: 2032745 - DNA, 15 bp, Homo sapiens
ccttctttatttcct

SEQ ID NO: 2032746 - DNA, 15 bp, Homo sapiens
cttctttatttcctt

SEQ ID NO: 2032747 - DNA, 15 bp, Homo sapiens
ttctttatttccttg

SEQ ID NO: 2032748 - DNA, 15 bp, Homo sapiens
tctttatttccttgt

SEQ ID NO: 2032749 - DNA, 15 bp, Homo sapiens
ctttatttccttgtt

SEQ ID NO: 2032750 - DNA, 15 bp, Homo sapiens
tttatttccttgttt

SEQ ID NO: 2032751 - DNA, 15 bp, Homo sapiens
ttatttccttgtttt

SEQ ID NO: 2032752 - DNA, 15 bp, Homo sapiens
tatttccttgttttt

SEQ ID NO: 2032753 - DNA, 15 bp, Homo sapiens
atttccttgtttttg

SEQ ID NO: 2032754 - DNA, 15 bp, Homo sapiens
tttccttgtttttgt

SEQ ID NO: 2032755 - DNA, 15 bp, Homo sapiens
ttccttgtttttgtt

SEQ ID NO: 2032756 - DNA, 15 bp, Homo sapiens
tccttgtttttgttt

SEQ ID NO: 2032757 - DNA, 15 bp, Homo sapiens
ttgtttttgtttgtt

SEQ ID NO: 2032758 - DNA, 15 bp, Homo sapiens
gtttttgtttgttta

SEQ ID NO: 2032759 - DNA, 15 bp, Homo sapiens
tttttgtttgtttat

SEQ ID NO: 2032760 - DNA, 15 bp, Homo sapiens
ttttgtttgtttatt

SEQ ID NO: 2032761 - DNA, 15 bp, Homo sapiens
tttgtttgtttattg

SEQ ID NO: 2032762 - DNA, 15 bp, Homo sapiens
ttgtttgtttattgc

SEQ ID NO: 2032763 - DNA, 15 bp, Homo sapiens
tgtttgtttattgct

SEQ ID NO: 2032764 - DNA, 15 bp, Homo sapiens
gtttgtttattgcta

SEQ ID NO: 2032765 - DNA, 15 bp, Homo sapiens
tttgtttattgctaa

SEQ ID NO: 2032766 - DNA, 15 bp, Homo sapiens
ttgtttattgctaat

SEQ ID NO: 2032767 - DNA, 15 bp, Homo sapiens
tgtttattgctaatt

SEQ ID NO: 2032768 - DNA, 15 bp, Homo sapiens
gtttattgctaattc

SEQ ID NO: 2032769 - DNA, 15 bp, Homo sapiens
tttattgctaattca

SEQ ID NO: 2032770 - DNA, 15 bp, Homo sapiens
ttattgctaattcat

SEQ ID NO: 2032771 - DNA, 15 bp, Homo sapiens
tattgctaattcatt

SEQ ID NO: 2032772 - DNA, 15 bp, Homo sapiens
attgctaattcatta

SEQ ID NO: 2032773 - DNA, 15 bp, Homo sapiens
ttgctaattcattac

SEQ ID NO: 2032774 - DNA, 15 bp, Homo sapiens
tgctaattcattact

SEQ ID NO: 2032775 - DNA, 15 bp, Homo sapiens
gctaattcattactt

SEQ ID NO: 2032776 - DNA, 15 bp, Homo sapiens
ctaattcattacttc

SEQ ID NO: 2032777 - DNA, 15 bp, Homo sapiens
taattcattacttct

SEQ ID NO: 2032778 - DNA, 15 bp, Homo sapiens
aattcattacttctg

SEQ ID NO: 2032779 - DNA, 15 bp, Homo sapiens
attcattacttctgt

SEQ ID NO: 2032780 - DNA, 15 bp, Homo sapiens
ttcattacttctgtc

SEQ ID NO: 2032781 - DNA, 15 bp, Homo sapiens
tcattacttctgtct

SEQ ID NO: 2032782 - DNA, 15 bp, Homo sapiens
cattacttctgtctg

SEQ ID NO: 2032783 - DNA, 15 bp, Homo sapiens
attacttctgtctgc

SEQ ID NO: 2032784 - DNA, 15 bp, Homo sapiens
ttacttctgtctgcc

SEQ ID NO: 2032785 - DNA, 15 bp, Homo sapiens
tacttctgtctgcct

SEQ ID NO: 2032786 - DNA, 15 bp, Homo sapiens
acttctgtctgcctt

SEQ ID NO: 2032787 - DNA, 15 bp, Homo sapiens
cttctgtctgccttg

SEQ ID NO: 2032788 - DNA, 15 bp, Homo sapiens
ttctgtctgccttgc

SEQ ID NO: 2032789 - DNA, 15 bp, Homo sapiens
tctgtctgccttgcc

SEQ ID NO: 2032790 - DNA, 15 bp, Homo sapiens
ctgtctgccttgcct

SEQ ID NO: 2032791 - DNA, 15 bp, Homo sapiens
tgtctgccttgcctt

SEQ ID NO: 2032792 - DNA, 15 bp, Homo sapiens
gtctgccttgcctta

SEQ ID NO: 2032793 - DNA, 15 bp, Homo sapiens
tctgccttgccttaa

SEQ ID NO: 2032794 - DNA, 15 bp, Homo sapiens
ctgccttgccttaag

SEQ ID NO: 2032795 - DNA, 15 bp, Homo sapiens
tgccttgccttaagc

SEQ ID NO: 2032796 - DNA, 15 bp, Homo sapiens
gccttgccttaagcc

SEQ ID NO: 2032797 - DNA, 15 bp, Homo sapiens
ccttgccttaagccc

SEQ ID NO: 2032798 - DNA, 15 bp, Homo sapiens
cttgccttaagccca

SEQ ID NO: 2032799 - DNA, 15 bp, Homo sapiens
ttgccttaagcccac

SEQ ID NO: 2032800 - DNA, 15 bp, Homo sapiens
tgccttaagcccacc

SEQ ID NO: 2032801 - DNA, 15 bp, Homo sapiens
gccttaagcccacca

SEQ ID NO: 2032802 - DNA, 15 bp, Homo sapiens
ccttaagcccaccag

SEQ ID NO: 2032803 - DNA, 15 bp, Homo sapiens
cttaagcccaccagt

SEQ ID NO: 2032804 - DNA, 15 bp, Homo sapiens
ttaagcccaccagtt

SEQ ID NO: 2032805 - DNA, 15 bp, Homo sapiens
taagcccaccagttc

SEQ ID NO: 2032806 - DNA, 15 bp, Homo sapiens
aagcccaccagttct

SEQ ID NO: 2032807 - DNA, 15 bp, Homo sapiens
agcccaccagttctt

SEQ ID NO: 2032808 - DNA, 15 bp, Homo sapiens
gcccaccagttcttt

SEQ ID NO: 2032809 - DNA, 15 bp, Homo sapiens
cccaccagttctttt

SEQ ID NO: 2032810 - DNA, 15 bp, Homo sapiens
ccaccagttcttttt

SEQ ID NO: 2032811 - DNA, 15 bp, Homo sapiens
caccagttctttttt

SEQ ID NO: 2032812 - DNA, 15 bp, Homo sapiens
accagttcttttttt

SEQ ID NO: 2032813 - DNA, 15 bp, Homo sapiens
ccagttctttttttt

SEQ ID NO: 2032814 - DNA, 15 bp, Homo sapiens
cagttcttttttttc

SEQ ID NO: 2032815 - DNA, 15 bp, Homo sapiens
agttcttttttttct

SEQ ID NO: 2032816 - DNA, 15 bp, Homo sapiens
gttcttttttttctg

SEQ ID NO: 2032817 - DNA, 15 bp, Homo sapiens
ttcttttttttctgt

SEQ ID NO: 2032818 - DNA, 15 bp, Homo sapiens
cttttttttctgttg

SEQ ID NO: 2032819 - DNA, 15 bp, Homo sapiens
ttttttttctgttgg

SEQ ID NO: 2032820 - DNA, 15 bp, Homo sapiens
tttttttctgttgga

SEQ ID NO: 2032821 - DNA, 15 bp, Homo sapiens
ttttttctgttggac

SEQ ID NO: 2032822 - DNA, 15 bp, Homo sapiens
tttttctgttggact

SEQ ID NO: 2032823 - DNA, 15 bp, Homo sapiens
ttttctgttggacta

SEQ ID NO: 2032824 - DNA, 15 bp, Homo sapiens
tttctgttggactat

SEQ ID NO: 2032825 - DNA, 15 bp, Homo sapiens
ttctgttggactatt

SEQ ID NO: 2032826 - DNA, 15 bp, Homo sapiens
tctgttggactattt

SEQ ID NO: 2032827 - DNA, 15 bp, Homo sapiens
ctgttggactatttt

SEQ ID NO: 2032828 - DNA, 15 bp, Homo sapiens
tgttggactattttc

SEQ ID NO: 2032829 - DNA, 15 bp, Homo sapiens
gttggactattttct

SEQ ID NO: 2032830 - DNA, 15 bp, Homo sapiens
ttggactattttctg

SEQ ID NO: 2032831 - DNA, 15 bp, Homo sapiens
tggactattttctgg

SEQ ID NO: 2032832 - DNA, 15 bp, Homo sapiens
ggactattttctggg

SEQ ID NO: 2032833 - DNA, 15 bp, Homo sapiens
gactattttctgggt

SEQ ID NO: 2032834 - DNA, 15 bp, Homo sapiens
actattttctgggtt

SEQ ID NO: 2032835 - DNA, 15 bp, Homo sapiens
ctattttctgggtta

SEQ ID NO: 2032836 - DNA, 15 bp, Homo sapiens
tattttctgggttac

SEQ ID NO: 2032837 - DNA, 15 bp, Homo sapiens
attttctgggttact

SEQ ID NO: 2032838 - DNA, 15 bp, Homo sapiens
ttttctgggttactg

SEQ ID NO: 2032839 - DNA, 15 bp, Homo sapiens
tttctgggttactga

SEQ ID NO: 2032840 - DNA, 15 bp, Homo sapiens
ttctgggttactgaa

SEQ ID NO: 2032841 - DNA, 15 bp, Homo sapiens
tctgggttactgaac

SEQ ID NO: 2032842 - DNA, 15 bp, Homo sapiens
ctgggttactgaaca

SEQ ID NO: 2032843 - DNA, 15 bp, Homo sapiens
tgggttactgaacag

SEQ ID NO: 2032844 - DNA, 15 bp, Homo sapiens
gggttactgaacaga

SEQ ID NO: 2032845 - DNA, 15 bp, Homo sapiens
ggttactgaacagaa

SEQ ID NO: 2032846 - DNA, 15 bp, Homo sapiens
gttactgaacagaag

SEQ ID NO: 2032847 - DNA, 15 bp, Homo sapiens
ttactgaacagaagt

SEQ ID NO: 2032848 - DNA, 15 bp, Homo sapiens
tactgaacagaagtt

SEQ ID NO: 2032849 - DNA, 15 bp, Homo sapiens
actgaacagaagttg

SEQ ID NO: 2032850 - DNA, 15 bp, Homo sapiens
ctgaacagaagttga

SEQ ID NO: 2032851 - DNA, 15 bp, Homo sapiens
tgaacagaagttgaa

SEQ ID NO: 2032852 - DNA, 15 bp, Homo sapiens
gaacagaagttgaaa

SEQ ID NO: 2032853 - DNA, 15 bp, Homo sapiens
aacagaagttgaaaa

SEQ ID NO: 2032854 - DNA, 15 bp, Homo sapiens
acagaagttgaaaag

SEQ ID NO: 2032855 - DNA, 15 bp, Homo sapiens
cagaagttgaaaagt

SEQ ID NO: 2032856 - DNA, 15 bp, Homo sapiens
agaagttgaaaagtt

SEQ ID NO: 2032857 - DNA, 15 bp, Homo sapiens
gaagttgaaaagttt

SEQ ID NO: 2032858 - DNA, 15 bp, Homo sapiens
aagttgaaaagtttt

SEQ ID NO: 2032859 - DNA, 15 bp, Homo sapiens
agttgaaaagttttt

SEQ ID NO: 2032860 - DNA, 15 bp, Homo sapiens
gttgaaaagttttta

SEQ ID NO: 2032861 - DNA, 15 bp, Homo sapiens
ttgaaaagtttttaa

SEQ ID NO: 2032862 - DNA, 15 bp, Homo sapiens
tgaaaagtttttaaa

SEQ ID NO: 2032863 - DNA, 15 bp, Homo sapiens
gaaaagtttttaaaa

SEQ ID NO: 2032864 - DNA, 15 bp, Homo sapiens
aaaagtttttaaaag

SEQ ID NO: 2032865 - DNA, 15 bp, Homo sapiens
aaagtttttaaaagt

SEQ ID NO: 2032866 - DNA, 15 bp, Homo sapiens
aagtttttaaaagtc

SEQ ID NO: 2032867 - DNA, 15 bp, Homo sapiens
agtttttaaaagtct

SEQ ID NO: 2032868 - DNA, 15 bp, Homo sapiens
gtggtgagctgtgat

SEQ ID NO: 2032869 - DNA, 15 bp, Homo sapiens
tggtgagctgtgatc

SEQ ID NO: 2032870 - DNA, 15 bp, Homo sapiens
ggtgagctgtgatca

SEQ ID NO: 2032871 - DNA, 15 bp, Homo sapiens
actgcactccagtca

SEQ ID NO: 2032872 - DNA, 15 bp, Homo sapiens
ctgcactccagtcag

SEQ ID NO: 2032873 - DNA, 15 bp, Homo sapiens
tgcactccagtcagg

SEQ ID NO: 2032874 - DNA, 15 bp, Homo sapiens
gcactccagtcaggg

SEQ ID NO: 2032875 - DNA, 15 bp, Homo sapiens
cactccagtcaggga

SEQ ID NO: 2032876 - DNA, 15 bp, Homo sapiens
actccagtcagggat

SEQ ID NO: 2032877 - DNA, 15 bp, Homo sapiens
ctccagtcagggatt

SEQ ID NO: 2032878 - DNA, 15 bp, Homo sapiens
tccagtcagggattg

SEQ ID NO: 2032879 - DNA, 15 bp, Homo sapiens
ccagtcagggattga

SEQ ID NO: 2032880 - DNA, 15 bp, Homo sapiens
cagtcagggattgag

SEQ ID NO: 2032881 - DNA, 15 bp, Homo sapiens
agtcagggattgaga

SEQ ID NO: 2032882 - DNA, 15 bp, Homo sapiens
gtcagggattgagaa

SEQ ID NO: 2032883 - DNA, 15 bp, Homo sapiens
tcagggattgagaac

SEQ ID NO: 2032884 - DNA, 15 bp, Homo sapiens
cagggattgagaacc

SEQ ID NO: 2032885 - DNA, 15 bp, Homo sapiens
agggattgagaacct

SEQ ID NO: 2032886 - DNA, 15 bp, Homo sapiens
gggattgagaaccta

SEQ ID NO: 2032887 - DNA, 15 bp, Homo sapiens
ggattgagaacctat

SEQ ID NO: 2032888 - DNA, 15 bp, Homo sapiens
gattgagaacctatc

SEQ ID NO: 2032889 - DNA, 15 bp, Homo sapiens
attgagaacctatct

SEQ ID NO: 2032890 - DNA, 15 bp, Homo sapiens
ttgagaacctatctc

SEQ ID NO: 2032891 - DNA, 15 bp, Homo sapiens
tgagaacctatctca

SEQ ID NO: 2032892 - DNA, 15 bp, Homo sapiens
gagaacctatctcaa

SEQ ID NO: 2032893 - DNA, 15 bp, Homo sapiens
agaacctatctcaaa

SEQ ID NO: 2032894 - DNA, 15 bp, Homo sapiens
gaacctatctcaaaa

SEQ ID NO: 2032895 - DNA, 15 bp, Homo sapiens
aacctatctcaaaaa

SEQ ID NO: 2032896 - DNA, 15 bp, Homo sapiens
acctatctcaaaaaa

SEQ ID NO: 2032897 - DNA, 15 bp, Homo sapiens
aaaaaaaaagaagga

SEQ ID NO: 2032898 - DNA, 15 bp, Homo sapiens
aaaaaaaagaaggaa

SEQ ID NO: 2032899 - DNA, 15 bp, Homo sapiens
aaaaaaagaaggaaa

SEQ ID NO: 2032900 - DNA, 15 bp, Homo sapiens
aaggaaagaaagaaa

SEQ ID NO: 2032901 - DNA, 15 bp, Homo sapiens
aggaaagaaagaaaa

SEQ ID NO: 2032902 - DNA, 15 bp, Homo sapiens
ggaaagaaagaaaat

SEQ ID NO: 2032903 - DNA, 15 bp, Homo sapiens
gaaagaaagaaaatg

SEQ ID NO: 2032904 - DNA, 15 bp, Homo sapiens
aaagaaagaaaatga

SEQ ID NO: 2032905 - DNA, 15 bp, Homo sapiens
aagaaagaaaatgaa

SEQ ID NO: 2032906 - DNA, 15 bp, Homo sapiens
agaaagaaaatgaat

SEQ ID NO: 2032907 - DNA, 15 bp, Homo sapiens
gaaagaaaatgaatt

SEQ ID NO: 2032908 - DNA, 15 bp, Homo sapiens
aaagaaaatgaatta

SEQ ID NO: 2032909 - DNA, 15 bp, Homo sapiens
aagaaaatgaattaa

SEQ ID NO: 2032910 - DNA, 15 bp, Homo sapiens
agaaaatgaattaat

SEQ ID NO: 2032911 - DNA, 15 bp, Homo sapiens
gaaaatgaattaata

SEQ ID NO: 2032912 - DNA, 15 bp, Homo sapiens
aaaatgaattaatag

SEQ ID NO: 2032913 - DNA, 15 bp, Homo sapiens
aaatgaattaatagg

SEQ ID NO: 2032914 - DNA, 15 bp, Homo sapiens
aatgaattaatagga

SEQ ID NO: 2032915 - DNA, 15 bp, Homo sapiens
atgaattaataggat

SEQ ID NO: 2032916 - DNA, 15 bp, Homo sapiens
tgaattaataggatc

SEQ ID NO: 2032917 - DNA, 15 bp, Homo sapiens
gaattaataggatcc

SEQ ID NO: 2032918 - DNA, 15 bp, Homo sapiens
aattaataggatcca

SEQ ID NO: 2032919 - DNA, 15 bp, Homo sapiens
attaataggatccat

SEQ ID NO: 2032920 - DNA, 15 bp, Homo sapiens
ttaataggatccatt

SEQ ID NO: 2032921 - DNA, 15 bp, Homo sapiens
taataggatccattt

SEQ ID NO: 2032922 - DNA, 15 bp, Homo sapiens
aataggatccatttc

SEQ ID NO: 2032923 - DNA, 15 bp, Homo sapiens
ataggatccatttcc

SEQ ID NO: 2032924 - DNA, 15 bp, Homo sapiens
taggatccatttcca

SEQ ID NO: 2032925 - DNA, 15 bp, Homo sapiens
aggatccatttccaa

SEQ ID NO: 2032926 - DNA, 15 bp, Homo sapiens
ggatccatttccaaa

SEQ ID NO: 2032927 - DNA, 15 bp, Homo sapiens
gatccatttccaaag

SEQ ID NO: 2032928 - DNA, 15 bp, Homo sapiens
atccatttccaaagc

SEQ ID NO: 2032929 - DNA, 15 bp, Homo sapiens
tccatttccaaagca

SEQ ID NO: 2032930 - DNA, 15 bp, Homo sapiens
ccatttccaaagcat

SEQ ID NO: 2032931 - DNA, 15 bp, Homo sapiens
catttccaaagcatt

SEQ ID NO: 2032932 - DNA, 15 bp, Homo sapiens
atttccaaagcatta

SEQ ID NO: 2032933 - DNA, 15 bp, Homo sapiens
tttccaaagcattaa

SEQ ID NO: 2032934 - DNA, 15 bp, Homo sapiens
ttccaaagcattaaa

SEQ ID NO: 2032935 - DNA, 15 bp, Homo sapiens
tccaaagcattaaaa

SEQ ID NO: 2032936 - DNA, 15 bp, Homo sapiens
ccaaagcattaaaat

SEQ ID NO: 2032937 - DNA, 15 bp, Homo sapiens
caaagcattaaaatt

SEQ ID NO: 2032938 - DNA, 15 bp, Homo sapiens
aaagcattaaaattt

SEQ ID NO: 2032939 - DNA, 15 bp, Homo sapiens
aagcattaaaattta

SEQ ID NO: 2032940 - DNA, 15 bp, Homo sapiens
agcattaaaatttaa

SEQ ID NO: 2032941 - DNA, 15 bp, Homo sapiens
gcattaaaatttaat

SEQ ID NO: 2032942 - DNA, 15 bp, Homo sapiens
cattaaaatttaata

SEQ ID NO: 2032943 - DNA, 15 bp, Homo sapiens
attaaaatttaatat

SEQ ID NO: 2032944 - DNA, 15 bp, Homo sapiens
ttaaaatttaatata

SEQ ID NO: 2032945 - DNA, 15 bp, Homo sapiens
taaaatttaatatat

SEQ ID NO: 2032946 - DNA, 15 bp, Homo sapiens
aaaatttaatatata

SEQ ID NO: 2032947 - DNA, 15 bp, Homo sapiens
aaatttaatatatac

SEQ ID NO: 2032948 - DNA, 15 bp, Homo sapiens
aatttaatatatact

SEQ ID NO: 2032949 - DNA, 15 bp, Homo sapiens
atttaatatatactt

SEQ ID NO: 2032950 - DNA, 15 bp, Homo sapiens
tttaatatatacttt

SEQ ID NO: 2032951 - DNA, 15 bp, Homo sapiens
ttaatatatacttta

SEQ ID NO: 2032952 - DNA, 15 bp, Homo sapiens
taatatatactttat

SEQ ID NO: 2032953 - DNA, 15 bp, Homo sapiens
aatatatactttatc

SEQ ID NO: 2032954 - DNA, 15 bp, Homo sapiens
atatatactttatca

SEQ ID NO: 2032955 - DNA, 15 bp, Homo sapiens
tatatactttatcag

SEQ ID NO: 2032956 - DNA, 15 bp, Homo sapiens
atatactttatcagg

SEQ ID NO: 2032957 - DNA, 15 bp, Homo sapiens
tatactttatcaggg

SEQ ID NO: 2032958 - DNA, 15 bp, Homo sapiens
atactttatcagggt

SEQ ID NO: 2032959 - DNA, 15 bp, Homo sapiens
tactttatcagggtc

SEQ ID NO: 2032960 - DNA, 15 bp, Homo sapiens
actttatcagggtct

SEQ ID NO: 2032961 - DNA, 15 bp, Homo sapiens
ctttatcagggtctt

SEQ ID NO: 2032962 - DNA, 15 bp, Homo sapiens
tttatcagggtcttc

SEQ ID NO: 2032963 - DNA, 15 bp, Homo sapiens
ttatcagggtcttct

SEQ ID NO: 2032964 - DNA, 15 bp, Homo sapiens
tatcagggtcttctg

SEQ ID NO: 2032965 - DNA, 15 bp, Homo sapiens
atcagggtcttctga

SEQ ID NO: 2032966 - DNA, 15 bp, Homo sapiens
tcagggtcttctgat

SEQ ID NO: 2032967 - DNA, 15 bp, Homo sapiens
cagggtcttctgata

SEQ ID NO: 2032968 - DNA, 15 bp, Homo sapiens
agggtcttctgatat

SEQ ID NO: 2032969 - DNA, 15 bp, Homo sapiens
gggtcttctgatatt

SEQ ID NO: 2032970 - DNA, 15 bp, Homo sapiens
ggtcttctgatattc

SEQ ID NO: 2032971 - DNA, 15 bp, Homo sapiens
gtcttctgatattct

SEQ ID NO: 2032972 - DNA, 15 bp, Homo sapiens
tcttctgatattctt

SEQ ID NO: 2032973 - DNA, 15 bp, Homo sapiens
cttctgatattcttc

SEQ ID NO: 2032974 - DNA, 15 bp, Homo sapiens
ttctgatattcttca

SEQ ID NO: 2032975 - DNA, 15 bp, Homo sapiens
tctgatattcttcag

SEQ ID NO: 2032976 - DNA, 15 bp, Homo sapiens
ctgatattcttcaga

SEQ ID NO: 2032977 - DNA, 15 bp, Homo sapiens
tgatattcttcagag

SEQ ID NO: 2032978 - DNA, 15 bp, Homo sapiens
gatattcttcagagg

SEQ ID NO: 2032979 - DNA, 15 bp, Homo sapiens
atattcttcagagga

SEQ ID NO: 2032980 - DNA, 15 bp, Homo sapiens
tattcttcagaggag

SEQ ID NO: 2032981 - DNA, 15 bp, Homo sapiens
attcttcagaggaga

SEQ ID NO: 2032982 - DNA, 15 bp, Homo sapiens
ttcttcagaggagaa

SEQ ID NO: 2032983 - DNA, 15 bp, Homo sapiens
tcttcagaggagaat

SEQ ID NO: 2032984 - DNA, 15 bp, Homo sapiens
cttcagaggagaatt

SEQ ID NO: 2032985 - DNA, 15 bp, Homo sapiens
ttcagaggagaattg

SEQ ID NO: 2032986 - DNA, 15 bp, Homo sapiens
tcagaggagaattgt

SEQ ID NO: 2032987 - DNA, 15 bp, Homo sapiens
cagaggagaattgtt

SEQ ID NO: 2032988 - DNA, 15 bp, Homo sapiens
agaggagaattgttg

SEQ ID NO: 2032989 - DNA, 15 bp, Homo sapiens
gaggagaattgttgt

SEQ ID NO: 2032990 - DNA, 15 bp, Homo sapiens
aggagaattgttgta

SEQ ID NO: 2032991 - DNA, 15 bp, Homo sapiens
ggagaattgttgtaa

SEQ ID NO: 2032992 - DNA, 15 bp, Homo sapiens
gagaattgttgtaag

SEQ ID NO: 2032993 - DNA, 15 bp, Homo sapiens
agaattgttgtaagt

SEQ ID NO: 2032994 - DNA, 15 bp, Homo sapiens
gaattgttgtaagtt

SEQ ID NO: 2032995 - DNA, 15 bp, Homo sapiens
aattgttgtaagtta

SEQ ID NO: 2032996 - DNA, 15 bp, Homo sapiens
attgttgtaagttaa

SEQ ID NO: 2032997 - DNA, 15 bp, Homo sapiens
ttgttgtaagttaat

SEQ ID NO: 2032998 - DNA, 15 bp, Homo sapiens
tgttgtaagttaatt

SEQ ID NO: 2032999 - DNA, 15 bp, Homo sapiens
gttgtaagttaattc

SEQ ID NO: 2033000 - DNA, 15 bp, Homo sapiens
ttgtaagttaattca

SEQ ID NO: 2033001 - DNA, 15 bp, Homo sapiens
tgtaagttaattcaa

SEQ ID NO: 2033002 - DNA, 15 bp, Homo sapiens
gtaagttaattcaat

SEQ ID NO: 2033003 - DNA, 15 bp, Homo sapiens
taagttaattcaata

SEQ ID NO: 2033004 - DNA, 15 bp, Homo sapiens
aagttaattcaataa

SEQ ID NO: 2033005 - DNA, 15 bp, Homo sapiens
agttaattcaataaa

SEQ ID NO: 2033006 - DNA, 15 bp, Homo sapiens
gttaattcaataaac

SEQ ID NO: 2033007 - DNA, 15 bp, Homo sapiens
ttaattcaataaaca

SEQ ID NO: 2033008 - DNA, 15 bp, Homo sapiens
taattcaataaacat

SEQ ID NO: 2033009 - DNA, 15 bp, Homo sapiens
aattcaataaacatt

SEQ ID NO: 2033010 - DNA, 15 bp, Homo sapiens
attcaataaacattt

SEQ ID NO: 2033011 - DNA, 15 bp, Homo sapiens
ttcaataaacatttg

SEQ ID NO: 2033012 - DNA, 15 bp, Homo sapiens
tcaataaacatttga

SEQ ID NO: 2033013 - DNA, 15 bp, Homo sapiens
caataaacatttgaa

SEQ ID NO: 2033014 - DNA, 15 bp, Homo sapiens
aataaacatttgaat

SEQ ID NO: 2033015 - DNA, 15 bp, Homo sapiens
ataaacatttgaata

SEQ ID NO: 2033016 - DNA, 15 bp, Homo sapiens
taaacatttgaatac

SEQ ID NO: 2033017 - DNA, 15 bp, Homo sapiens
aaacatttgaatacc

SEQ ID NO: 2033018 - DNA, 15 bp, Homo sapiens
aacatttgaatacct

SEQ ID NO: 2033019 - DNA, 15 bp, Homo sapiens
acatttgaatacctg

SEQ ID NO: 2033020 - DNA, 15 bp, Homo sapiens
catttgaatacctgt

SEQ ID NO: 2033021 - DNA, 15 bp, Homo sapiens
atttgaatacctgtt

SEQ ID NO: 2033022 - DNA, 15 bp, Homo sapiens
tttgaatacctgttt

SEQ ID NO: 2033023 - DNA, 15 bp, Homo sapiens
ttgaatacctgtttt

SEQ ID NO: 2033024 - DNA, 15 bp, Homo sapiens
tgaatacctgttttg

SEQ ID NO: 2033025 - DNA, 15 bp, Homo sapiens
gaatacctgttttgt

SEQ ID NO: 2033026 - DNA, 15 bp, Homo sapiens
aatacctgttttgta

SEQ ID NO: 2033027 - DNA, 15 bp, Homo sapiens
atacctgttttgtag

SEQ ID NO: 2033028 - DNA, 15 bp, Homo sapiens
tacctgttttgtagg

SEQ ID NO: 2033029 - DNA, 15 bp, Homo sapiens
acctgttttgtaggt

SEQ ID NO: 2033030 - DNA, 15 bp, Homo sapiens
cctgttttgtaggtg

SEQ ID NO: 2033031 - DNA, 15 bp, Homo sapiens
ctgttttgtaggtgt

SEQ ID NO: 2033032 - DNA, 15 bp, Homo sapiens
tgttttgtaggtgta

SEQ ID NO: 2033033 - DNA, 15 bp, Homo sapiens
gttttgtaggtgtat

SEQ ID NO: 2033034 - DNA, 15 bp, Homo sapiens
ttttgtaggtgtatg

SEQ ID NO: 2033035 - DNA, 15 bp, Homo sapiens
tttgtaggtgtatgt

SEQ ID NO: 2033036 - DNA, 15 bp, Homo sapiens
ttgtaggtgtatgtt

SEQ ID NO: 2033037 - DNA, 15 bp, Homo sapiens
tgtaggtgtatgtta

SEQ ID NO: 2033038 - DNA, 15 bp, Homo sapiens
gtaggtgtatgttaa

SEQ ID NO: 2033039 - DNA, 15 bp, Homo sapiens
taggtgtatgttaag

SEQ ID NO: 2033040 - DNA, 15 bp, Homo sapiens
aggtgtatgttaagt

SEQ ID NO: 2033041 - DNA, 15 bp, Homo sapiens
ggtgtatgttaagta

SEQ ID NO: 2033042 - DNA, 15 bp, Homo sapiens
gtgtatgttaagtat

SEQ ID NO: 2033043 - DNA, 15 bp, Homo sapiens
tgtatgttaagtatg

SEQ ID NO: 2033044 - DNA, 15 bp, Homo sapiens
gtatgttaagtatgt

SEQ ID NO: 2033045 - DNA, 15 bp, Homo sapiens
tatgttaagtatgta

SEQ ID NO: 2033046 - DNA, 15 bp, Homo sapiens
atgttaagtatgtat

SEQ ID NO: 2033047 - DNA, 15 bp, Homo sapiens
tgttaagtatgtatt

SEQ ID NO: 2033048 - DNA, 15 bp, Homo sapiens
gttaagtatgtatta

SEQ ID NO: 2033049 - DNA, 15 bp, Homo sapiens
ttaagtatgtattag

SEQ ID NO: 2033050 - DNA, 15 bp, Homo sapiens
taagtatgtattaga

SEQ ID NO: 2033051 - DNA, 15 bp, Homo sapiens
aagtatgtattagaa

SEQ ID NO: 2033052 - DNA, 15 bp, Homo sapiens
agtatgtattagaat

SEQ ID NO: 2033053 - DNA, 15 bp, Homo sapiens
gtatgtattagaatc

SEQ ID NO: 2033054 - DNA, 15 bp, Homo sapiens
tatgtattagaatcc

SEQ ID NO: 2033055 - DNA, 15 bp, Homo sapiens
atgtattagaatcct

SEQ ID NO: 2033056 - DNA, 15 bp, Homo sapiens
tgtattagaatcctt

SEQ ID NO: 2033057 - DNA, 15 bp, Homo sapiens
gtattagaatccttg

SEQ ID NO: 2033058 - DNA, 15 bp, Homo sapiens
tattagaatccttga

SEQ ID NO: 2033059 - DNA, 15 bp, Homo sapiens
attagaatccttgat

SEQ ID NO: 2033060 - DNA, 15 bp, Homo sapiens
ttagaatccttgatc

SEQ ID NO: 2033061 - DNA, 15 bp, Homo sapiens
tagaatccttgatca

SEQ ID NO: 2033062 - DNA, 15 bp, Homo sapiens
agaatccttgatcac

SEQ ID NO: 2033063 - DNA, 15 bp, Homo sapiens
gaatccttgatcacc

SEQ ID NO: 2033064 - DNA, 15 bp, Homo sapiens
aatccttgatcacca

SEQ ID NO: 2033065 - DNA, 15 bp, Homo sapiens
atccttgatcaccag

SEQ ID NO: 2033066 - DNA, 15 bp, Homo sapiens
tccttgatcaccaga

SEQ ID NO: 2033067 - DNA, 15 bp, Homo sapiens
ccttgatcaccagag

SEQ ID NO: 2033068 - DNA, 15 bp, Homo sapiens
cttgatcaccagaga

SEQ ID NO: 2033069 - DNA, 15 bp, Homo sapiens
ttgatcaccagagac

SEQ ID NO: 2033070 - DNA, 15 bp, Homo sapiens
tgatcaccagagact

SEQ ID NO: 2033071 - DNA, 15 bp, Homo sapiens
gatcaccagagactt

SEQ ID NO: 2033072 - DNA, 15 bp, Homo sapiens
atcaccagagacttg

SEQ ID NO: 2033073 - DNA, 15 bp, Homo sapiens
tcaccagagacttga

SEQ ID NO: 2033074 - DNA, 15 bp, Homo sapiens
caccagagacttgac

SEQ ID NO: 2033075 - DNA, 15 bp, Homo sapiens
accagagacttgacg

SEQ ID NO: 2033076 - DNA, 15 bp, Homo sapiens
ccagagacttgacgg

SEQ ID NO: 2033077 - DNA, 15 bp, Homo sapiens
cagagacttgacggt

SEQ ID NO: 2033078 - DNA, 15 bp, Homo sapiens
agagacttgacggtt

SEQ ID NO: 2033079 - DNA, 15 bp, Homo sapiens
gagacttgacggttt

SEQ ID NO: 2033080 - DNA, 15 bp, Homo sapiens
agacttgacggtttt

SEQ ID NO: 2033081 - DNA, 15 bp, Homo sapiens
gacttgacggttttt

SEQ ID NO: 2033082 - DNA, 15 bp, Homo sapiens
acttgacggtttttg

SEQ ID NO: 2033083 - DNA, 15 bp, Homo sapiens
cttgacggtttttgc

SEQ ID NO: 2033084 - DNA, 15 bp, Homo sapiens
ttgacggtttttgcc

SEQ ID NO: 2033085 - DNA, 15 bp, Homo sapiens
tgacggtttttgcct

SEQ ID NO: 2033086 - DNA, 15 bp, Homo sapiens
gacggtttttgcctt

SEQ ID NO: 2033087 - DNA, 15 bp, Homo sapiens
acggtttttgccttg

SEQ ID NO: 2033088 - DNA, 15 bp, Homo sapiens
cggtttttgccttga

SEQ ID NO: 2033089 - DNA, 15 bp, Homo sapiens
ggtttttgccttgaa

SEQ ID NO: 2033090 - DNA, 15 bp, Homo sapiens
gtttttgccttgaaa

SEQ ID NO: 2033091 - DNA, 15 bp, Homo sapiens
tttttgccttgaaag

SEQ ID NO: 2033092 - DNA, 15 bp, Homo sapiens
ttttgccttgaaagt

SEQ ID NO: 2033093 - DNA, 15 bp, Homo sapiens
tttgccttgaaagtt

SEQ ID NO: 2033094 - DNA, 15 bp, Homo sapiens
ttgccttgaaagtta

SEQ ID NO: 2033095 - DNA, 15 bp, Homo sapiens
tgccttgaaagttat

SEQ ID NO: 2033096 - DNA, 15 bp, Homo sapiens
gccttgaaagttatt

SEQ ID NO: 2033097 - DNA, 15 bp, Homo sapiens
ccttgaaagttattt

SEQ ID NO: 2033098 - DNA, 15 bp, Homo sapiens
cttgaaagttatttc

SEQ ID NO: 2033099 - DNA, 15 bp, Homo sapiens
ttgaaagttatttcc

SEQ ID NO: 2033100 - DNA, 15 bp, Homo sapiens
tgaaagttatttcct

SEQ ID NO: 2033101 - DNA, 15 bp, Homo sapiens
gaaagttatttcctt

SEQ ID NO: 2033102 - DNA, 15 bp, Homo sapiens
aaagttatttccttc

SEQ ID NO: 2033103 - DNA, 15 bp, Homo sapiens
aagttatttccttcc

SEQ ID NO: 2033104 - DNA, 15 bp, Homo sapiens
agttatttccttccg

SEQ ID NO: 2033105 - DNA, 15 bp, Homo sapiens
gttatttccttccga

SEQ ID NO: 2033106 - DNA, 15 bp, Homo sapiens
ttatttccttccgat

SEQ ID NO: 2033107 - DNA, 15 bp, Homo sapiens
tatttccttccgatc

SEQ ID NO: 2033108 - DNA, 15 bp, Homo sapiens
atttccttccgatcc

SEQ ID NO: 2033109 - DNA, 15 bp, Homo sapiens
tttccttccgatcca

SEQ ID NO: 2033110 - DNA, 15 bp, Homo sapiens
ttccttccgatccat

SEQ ID NO: 2033111 - DNA, 15 bp, Homo sapiens
tccttccgatccatg

SEQ ID NO: 2033112 - DNA, 15 bp, Homo sapiens
ccttccgatccatgt

SEQ ID NO: 2033113 - DNA, 15 bp, Homo sapiens
cttccgatccatgtt

SEQ ID NO: 2033114 - DNA, 15 bp, Homo sapiens
ttccgatccatgttg

SEQ ID NO: 2033115 - DNA, 15 bp, Homo sapiens
tccgatccatgttgt

SEQ ID NO: 2033116 - DNA, 15 bp, Homo sapiens
ccgatccatgttgtt

SEQ ID NO: 2033117 - DNA, 15 bp, Homo sapiens
cgatccatgttgttt

SEQ ID NO: 2033118 - DNA, 15 bp, Homo sapiens
gatccatgttgttta

SEQ ID NO: 2033119 - DNA, 15 bp, Homo sapiens
atccatgttgtttaa

SEQ ID NO: 2033120 - DNA, 15 bp, Homo sapiens
tccatgttgtttaac

SEQ ID NO: 2033121 - DNA, 15 bp, Homo sapiens
ccatgttgtttaaca

SEQ ID NO: 2033122 - DNA, 15 bp, Homo sapiens
catgttgtttaacaa

SEQ ID NO: 2033123 - DNA, 15 bp, Homo sapiens
atgttgtttaacaaa

SEQ ID NO: 2033124 - DNA, 15 bp, Homo sapiens
tgttgtttaacaaat

SEQ ID NO: 2033125 - DNA, 15 bp, Homo sapiens
gttgtttaacaaatt

SEQ ID NO: 2033126 - DNA, 15 bp, Homo sapiens
ttgtttaacaaattc

SEQ ID NO: 2033127 - DNA, 15 bp, Homo sapiens
tgtttaacaaattct

SEQ ID NO: 2033128 - DNA, 15 bp, Homo sapiens
gtttaacaaattcta

SEQ ID NO: 2033129 - DNA, 15 bp, Homo sapiens
tttaacaaattctaa

SEQ ID NO: 2033130 - DNA, 15 bp, Homo sapiens
ttaacaaattctaag

SEQ ID NO: 2033131 - DNA, 15 bp, Homo sapiens
taacaaattctaagt

SEQ ID NO: 2033132 - DNA, 15 bp, Homo sapiens
aacaaattctaagtg

SEQ ID NO: 2033133 - DNA, 15 bp, Homo sapiens
acaaattctaagtgt

SEQ ID NO: 2033134 - DNA, 15 bp, Homo sapiens
caaattctaagtgtg

SEQ ID NO: 2033135 - DNA, 15 bp, Homo sapiens
aaattctaagtgtgc

SEQ ID NO: 2033136 - DNA, 15 bp, Homo sapiens
aattctaagtgtgca

SEQ ID NO: 2033137 - DNA, 15 bp, Homo sapiens
attctaagtgtgcac

SEQ ID NO: 2033138 - DNA, 15 bp, Homo sapiens
ttctaagtgtgcact

SEQ ID NO: 2033139 - DNA, 15 bp, Homo sapiens
tctaagtgtgcacta

SEQ ID NO: 2033140 - DNA, 15 bp, Homo sapiens
ctaagtgtgcactat

SEQ ID NO: 2033141 - DNA, 15 bp, Homo sapiens
taagtgtgcactatt

SEQ ID NO: 2033142 - DNA, 15 bp, Homo sapiens
aagtgtgcactattt

SEQ ID NO: 2033143 - DNA, 15 bp, Homo sapiens
agtgtgcactatttt

SEQ ID NO: 2033144 - DNA, 15 bp, Homo sapiens
gtgtgcactattttt

SEQ ID NO: 2033145 - DNA, 15 bp, Homo sapiens
tgtgcactatttttt

SEQ ID NO: 2033146 - DNA, 15 bp, Homo sapiens
gtgcactattttttt

SEQ ID NO: 2033147 - DNA, 15 bp, Homo sapiens
tgcactatttttttt

SEQ ID NO: 2033148 - DNA, 15 bp, Homo sapiens
gcactatttttttta

SEQ ID NO: 2033149 - DNA, 15 bp, Homo sapiens
cactattttttttat

SEQ ID NO: 2033150 - DNA, 15 bp, Homo sapiens
actattttttttatt

SEQ ID NO: 2033151 - DNA, 15 bp, Homo sapiens
ctattttttttattt

SEQ ID NO: 2033152 - DNA, 15 bp, Homo sapiens
attttttttatttta

SEQ ID NO: 2033153 - DNA, 15 bp, Homo sapiens
ttttttttattttaa

SEQ ID NO: 2033154 - DNA, 15 bp, Homo sapiens
tttttttattttaaa

SEQ ID NO: 2033155 - DNA, 15 bp, Homo sapiens
ttttttattttaaat

SEQ ID NO: 2033156 - DNA, 15 bp, Homo sapiens
tttttattttaaata

SEQ ID NO: 2033157 - DNA, 15 bp, Homo sapiens
ttttattttaaatac

SEQ ID NO: 2033158 - DNA, 15 bp, Homo sapiens
tttattttaaataca

SEQ ID NO: 2033159 - DNA, 15 bp, Homo sapiens
ttattttaaatacaa

SEQ ID NO: 2033160 - DNA, 15 bp, Homo sapiens
tattttaaatacaag

SEQ ID NO: 2033161 - DNA, 15 bp, Homo sapiens
attttaaatacaaga

SEQ ID NO: 2033162 - DNA, 15 bp, Homo sapiens
ttttaaatacaagat

SEQ ID NO: 2033163 - DNA, 15 bp, Homo sapiens
tttaaatacaagatt

SEQ ID NO: 2033164 - DNA, 15 bp, Homo sapiens
ttaaatacaagatta

SEQ ID NO: 2033165 - DNA, 15 bp, Homo sapiens
taaatacaagattaa

SEQ ID NO: 2033166 - DNA, 15 bp, Homo sapiens
aaatacaagattaat

SEQ ID NO: 2033167 - DNA, 15 bp, Homo sapiens
aatacaagattaata

SEQ ID NO: 2033168 - DNA, 15 bp, Homo sapiens
atacaagattaatac

SEQ ID NO: 2033169 - DNA, 15 bp, Homo sapiens
tacaagattaatact

SEQ ID NO: 2033170 - DNA, 15 bp, Homo sapiens
acaagattaatacta

SEQ ID NO: 2033171 - DNA, 15 bp, Homo sapiens
caagattaatactat

SEQ ID NO: 2033172 - DNA, 15 bp, Homo sapiens
aagattaatactata

SEQ ID NO: 2033173 - DNA, 15 bp, Homo sapiens
agattaatactatag

SEQ ID NO: 2033174 - DNA, 15 bp, Homo sapiens
gattaatactatagt

SEQ ID NO: 2033175 - DNA, 15 bp, Homo sapiens
attaatactatagtg

SEQ ID NO: 2033176 - DNA, 15 bp, Homo sapiens
ttaatactatagtgc

SEQ ID NO: 2033177 - DNA, 15 bp, Homo sapiens
taatactatagtgca

SEQ ID NO: 2033178 - DNA, 15 bp, Homo sapiens
aatactatagtgcac

SEQ ID NO: 2033179 - DNA, 15 bp, Homo sapiens
atactatagtgcact

SEQ ID NO: 2033180 - DNA, 15 bp, Homo sapiens
tactatagtgcactg

SEQ ID NO: 2033181 - DNA, 15 bp, Homo sapiens
actatagtgcactgt

SEQ ID NO: 2033182 - DNA, 15 bp, Homo sapiens
ctatagtgcactgta

SEQ ID NO: 2033183 - DNA, 15 bp, Homo sapiens
tatagtgcactgtag

SEQ ID NO: 2033184 - DNA, 15 bp, Homo sapiens
atagtgcactgtaga

SEQ ID NO: 2033185 - DNA, 15 bp, Homo sapiens
tagtgcactgtagaa

SEQ ID NO: 2033186 - DNA, 15 bp, Homo sapiens
agtgcactgtagaaa

SEQ ID NO: 2033187 - DNA, 15 bp, Homo sapiens
gtgcactgtagaaaa

SEQ ID NO: 2033188 - DNA, 15 bp, Homo sapiens
tgcactgtagaaaat

SEQ ID NO: 2033189 - DNA, 15 bp, Homo sapiens
gcactgtagaaaata

SEQ ID NO: 2033190 - DNA, 15 bp, Homo sapiens
cactgtagaaaatac

SEQ ID NO: 2033191 - DNA, 15 bp, Homo sapiens
actgtagaaaatacc

SEQ ID NO: 2033192 - DNA, 15 bp, Homo sapiens
ctgtagaaaatacca

SEQ ID NO: 2033193 - DNA, 15 bp, Homo sapiens
tgtagaaaataccaa

SEQ ID NO: 2033194 - DNA, 15 bp, Homo sapiens
gtagaaaataccaaa

SEQ ID NO: 2033195 - DNA, 15 bp, Homo sapiens
tagaaaataccaaaa

SEQ ID NO: 2033196 - DNA, 15 bp, Homo sapiens
agaaaataccaaaat

SEQ ID NO: 2033197 - DNA, 15 bp, Homo sapiens
gaaaataccaaaatt

SEQ ID NO: 2033198 - DNA, 15 bp, Homo sapiens
aaaataccaaaattc

SEQ ID NO: 2033199 - DNA, 15 bp, Homo sapiens
aaataccaaaattcc

SEQ ID NO: 2033200 - DNA, 15 bp, Homo sapiens
aataccaaaattcca

SEQ ID NO: 2033201 - DNA, 15 bp, Homo sapiens
ataccaaaattccag

SEQ ID NO: 2033202 - DNA, 15 bp, Homo sapiens
taccaaaattccaga

SEQ ID NO: 2033203 - DNA, 15 bp, Homo sapiens
accaaaattccagat

SEQ ID NO: 2033204 - DNA, 15 bp, Homo sapiens
ccaaaattccagata

SEQ ID NO: 2033205 - DNA, 15 bp, Homo sapiens
caaaattccagatat

SEQ ID NO: 2033206 - DNA, 15 bp, Homo sapiens
aaaattccagatatt

SEQ ID NO: 2033207 - DNA, 15 bp, Homo sapiens
aaattccagatattt

SEQ ID NO: 2033208 - DNA, 15 bp, Homo sapiens
aattccagatattta

SEQ ID NO: 2033209 - DNA, 15 bp, Homo sapiens
attccagatatttat

SEQ ID NO: 2033210 - DNA, 15 bp, Homo sapiens
ttccagatatttatc

SEQ ID NO: 2033211 - DNA, 15 bp, Homo sapiens
tccagatatttatcc

SEQ ID NO: 2033212 - DNA, 15 bp, Homo sapiens
ccagatatttatcct

SEQ ID NO: 2033213 - DNA, 15 bp, Homo sapiens
cagatatttatccta

SEQ ID NO: 2033214 - DNA, 15 bp, Homo sapiens
agatatttatcctac

SEQ ID NO: 2033215 - DNA, 15 bp, Homo sapiens
gatatttatcctaca

SEQ ID NO: 2033216 - DNA, 15 bp, Homo sapiens
atatttatcctacat

SEQ ID NO: 2033217 - DNA, 15 bp, Homo sapiens
tatttatcctacata

SEQ ID NO: 2033218 - DNA, 15 bp, Homo sapiens
atttatcctacatat

SEQ ID NO: 2033219 - DNA, 15 bp, Homo sapiens
tttatcctacatata

SEQ ID NO: 2033220 - DNA, 15 bp, Homo sapiens
ttatcctacatatat

SEQ ID NO: 2033221 - DNA, 15 bp, Homo sapiens
tatcctacatatatg

SEQ ID NO: 2033222 - DNA, 15 bp, Homo sapiens
atcctacatatatgt

SEQ ID NO: 2033223 - DNA, 15 bp, Homo sapiens
tcctacatatatgta

SEQ ID NO: 2033224 - DNA, 15 bp, Homo sapiens
cctacatatatgtat

SEQ ID NO: 2033225 - DNA, 15 bp, Homo sapiens
ctacatatatgtatt

SEQ ID NO: 2033226 - DNA, 15 bp, Homo sapiens
tacatatatgtattg

SEQ ID NO: 2033227 - DNA, 15 bp, Homo sapiens
acatatatgtattgt

SEQ ID NO: 2033228 - DNA, 15 bp, Homo sapiens
catatatgtattgtt

SEQ ID NO: 2033229 - DNA, 15 bp, Homo sapiens
atatatgtattgttt

SEQ ID NO: 2033230 - DNA, 15 bp, Homo sapiens
tatatgtattgttta

SEQ ID NO: 2033231 - DNA, 15 bp, Homo sapiens
atatgtattgtttac

SEQ ID NO: 2033232 - DNA, 15 bp, Homo sapiens
tatgtattgtttact

SEQ ID NO: 2033233 - DNA, 15 bp, Homo sapiens
atgtattgtttacta

SEQ ID NO: 2033234 - DNA, 15 bp, Homo sapiens
tgtattgtttactat

SEQ ID NO: 2033235 - DNA, 15 bp, Homo sapiens
gtattgtttactata

SEQ ID NO: 2033236 - DNA, 15 bp, Homo sapiens
tattgtttactatat

SEQ ID NO: 2033237 - DNA, 15 bp, Homo sapiens
attgtttactatatg

SEQ ID NO: 2033238 - DNA, 15 bp, Homo sapiens
ttgtttactatatgc

SEQ ID NO: 2033239 - DNA, 15 bp, Homo sapiens
tgtttactatatgca

SEQ ID NO: 2033240 - DNA, 15 bp, Homo sapiens
gtttactatatgcaa

SEQ ID NO: 2033241 - DNA, 15 bp, Homo sapiens
tttactatatgcaag

SEQ ID NO: 2033242 - DNA, 15 bp, Homo sapiens
ttactatatgcaagg

SEQ ID NO: 2033243 - DNA, 15 bp, Homo sapiens
tactatatgcaaggg

SEQ ID NO: 2033244 - DNA, 15 bp, Homo sapiens
actatatgcaagggg

SEQ ID NO: 2033245 - DNA, 15 bp, Homo sapiens
ctatatgcaaggggc

SEQ ID NO: 2033246 - DNA, 15 bp, Homo sapiens
tatatgcaaggggct

SEQ ID NO: 2033247 - DNA, 15 bp, Homo sapiens
atatgcaaggggctc

SEQ ID NO: 2033248 - DNA, 15 bp, Homo sapiens
tatgcaaggggctct

SEQ ID NO: 2033249 - DNA, 15 bp, Homo sapiens
atgcaaggggctctt

SEQ ID NO: 2033250 - DNA, 15 bp, Homo sapiens
tgcaaggggctctta

SEQ ID NO: 2033251 - DNA, 15 bp, Homo sapiens
gcaaggggctcttag

SEQ ID NO: 2033252 - DNA, 15 bp, Homo sapiens
caaggggctcttaga

SEQ ID NO: 2033253 - DNA, 15 bp, Homo sapiens
aaggggctcttagac

SEQ ID NO: 2033254 - DNA, 15 bp, Homo sapiens
aggggctcttagacc

SEQ ID NO: 2033255 - DNA, 15 bp, Homo sapiens
ggggctcttagaccc

SEQ ID NO: 2033256 - DNA, 15 bp, Homo sapiens
gggctcttagacccc

SEQ ID NO: 2033257 - DNA, 15 bp, Homo sapiens
ggctcttagacccca

SEQ ID NO: 2033258 - DNA, 15 bp, Homo sapiens
gctcttagaccccag

SEQ ID NO: 2033259 - DNA, 15 bp, Homo sapiens
ctcttagaccccagg

SEQ ID NO: 2033260 - DNA, 15 bp, Homo sapiens
tcttagaccccaggg

SEQ ID NO: 2033261 - DNA, 15 bp, Homo sapiens
cttagaccccagggg

SEQ ID NO: 2033262 - DNA, 15 bp, Homo sapiens
ttagaccccagggga

SEQ ID NO: 2033263 - DNA, 15 bp, Homo sapiens
tagaccccaggggag

SEQ ID NO: 2033264 - DNA, 15 bp, Homo sapiens
agaccccaggggagc

SEQ ID NO: 2033265 - DNA, 15 bp, Homo sapiens
gaccccaggggagca

SEQ ID NO: 2033266 - DNA, 15 bp, Homo sapiens
accccaggggagcag

SEQ ID NO: 2033267 - DNA, 15 bp, Homo sapiens
ccccaggggagcaga

SEQ ID NO: 2033268 - DNA, 15 bp, Homo sapiens
cccaggggagcagag

SEQ ID NO: 2033269 - DNA, 15 bp, Homo sapiens
ccaggggagcagagg

SEQ ID NO: 2033270 - DNA, 15 bp, Homo sapiens
caggggagcagaggg

SEQ ID NO: 2033271 - DNA, 15 bp, Homo sapiens
aggggagcagagggg

SEQ ID NO: 2033272 - DNA, 15 bp, Homo sapiens
ggggagcagaggggc

SEQ ID NO: 2033273 - DNA, 15 bp, Homo sapiens
gggagcagaggggct

SEQ ID NO: 2033274 - DNA, 15 bp, Homo sapiens
ggagcagaggggctg

SEQ ID NO: 2033275 - DNA, 15 bp, Homo sapiens
gagcagaggggctgc

SEQ ID NO: 2033276 - DNA, 15 bp, Homo sapiens
agcagaggggctgcc

SEQ ID NO: 2033277 - DNA, 15 bp, Homo sapiens
gcagaggggctgcca

SEQ ID NO: 2033278 - DNA, 15 bp, Homo sapiens
cagaggggctgccag

SEQ ID NO: 2033279 - DNA, 15 bp, Homo sapiens
agaggggctgccagg

SEQ ID NO: 2033280 - DNA, 15 bp, Homo sapiens
gaggggctgccaggg

SEQ ID NO: 2033281 - DNA, 15 bp, Homo sapiens
aggggctgccagggc

SEQ ID NO: 2033282 - DNA, 15 bp, Homo sapiens
ggggctgccagggca

SEQ ID NO: 2033283 - DNA, 15 bp, Homo sapiens
gggctgccagggcat

SEQ ID NO: 2033284 - DNA, 15 bp, Homo sapiens
ggctgccagggcatg

SEQ ID NO: 2033285 - DNA, 15 bp, Homo sapiens
gctgccagggcatga

SEQ ID NO: 2033286 - DNA, 15 bp, Homo sapiens
ctgccagggcatgat

SEQ ID NO: 2033287 - DNA, 15 bp, Homo sapiens
tgccagggcatgata

SEQ ID NO: 2033288 - DNA, 15 bp, Homo sapiens
gccagggcatgatac

SEQ ID NO: 2033289 - DNA, 15 bp, Homo sapiens
ccagggcatgatacc

SEQ ID NO: 2033290 - DNA, 15 bp, Homo sapiens
cagggcatgatacct

SEQ ID NO: 2033291 - DNA, 15 bp, Homo sapiens
agggcatgatacctg

SEQ ID NO: 2033292 - DNA, 15 bp, Homo sapiens
gggcatgatacctgc

SEQ ID NO: 2033293 - DNA, 15 bp, Homo sapiens
ggcatgatacctgcc

SEQ ID NO: 2033294 - DNA, 15 bp, Homo sapiens
gcatgatacctgcct

SEQ ID NO: 2033295 - DNA, 15 bp, Homo sapiens
catgatacctgcctt

SEQ ID NO: 2033296 - DNA, 15 bp, Homo sapiens
atgatacctgccttc

SEQ ID NO: 2033297 - DNA, 15 bp, Homo sapiens
tgatacctgccttca

SEQ ID NO: 2033298 - DNA, 15 bp, Homo sapiens
gatacctgccttcaa

SEQ ID NO: 2033299 - DNA, 15 bp, Homo sapiens
atacctgccttcaat

SEQ ID NO: 2033300 - DNA, 15 bp, Homo sapiens
tacctgccttcaata

SEQ ID NO: 2033301 - DNA, 15 bp, Homo sapiens
acctgccttcaatat

SEQ ID NO: 2033302 - DNA, 15 bp, Homo sapiens
cctgccttcaatata

SEQ ID NO: 2033303 - DNA, 15 bp, Homo sapiens
ctgccttcaatatat

SEQ ID NO: 2033304 - DNA, 15 bp, Homo sapiens
tgccttcaatatatt

SEQ ID NO: 2033305 - DNA, 15 bp, Homo sapiens
gccttcaatatattt

SEQ ID NO: 2033306 - DNA, 15 bp, Homo sapiens
ccttcaatatatttc

SEQ ID NO: 2033307 - DNA, 15 bp, Homo sapiens
cttcaatatatttca

SEQ ID NO: 2033308 - DNA, 15 bp, Homo sapiens
ttcaatatatttcag

SEQ ID NO: 2033309 - DNA, 15 bp, Homo sapiens
tcaatatatttcaga

SEQ ID NO: 2033310 - DNA, 15 bp, Homo sapiens
caatatatttcagat

SEQ ID NO: 2033311 - DNA, 15 bp, Homo sapiens
aatatatttcagatc

SEQ ID NO: 2033312 - DNA, 15 bp, Homo sapiens
atatatttcagatca

SEQ ID NO: 2033313 - DNA, 15 bp, Homo sapiens
tatatttcagatcag

SEQ ID NO: 2033314 - DNA, 15 bp, Homo sapiens
atatttcagatcaga

SEQ ID NO: 2033315 - DNA, 15 bp, Homo sapiens
tatttcagatcagaa

SEQ ID NO: 2033316 - DNA, 15 bp, Homo sapiens
atttcagatcagaac

SEQ ID NO: 2033317 - DNA, 15 bp, Homo sapiens
tttcagatcagaacg

SEQ ID NO: 2033318 - DNA, 15 bp, Homo sapiens
ttcagatcagaacgg

SEQ ID NO: 2033319 - DNA, 15 bp, Homo sapiens
tcagatcagaacggg

SEQ ID NO: 2033320 - DNA, 15 bp, Homo sapiens
cagatcagaacgggc

SEQ ID NO: 2033321 - DNA, 15 bp, Homo sapiens
agatcagaacgggca

SEQ ID NO: 2033322 - DNA, 15 bp, Homo sapiens
gatcagaacgggcag

SEQ ID NO: 2033323 - DNA, 15 bp, Homo sapiens
atcagaacgggcagt

SEQ ID NO: 2033324 - DNA, 15 bp, Homo sapiens
tcagaacgggcagta

SEQ ID NO: 2033325 - DNA, 15 bp, Homo sapiens
cagaacgggcagtag

SEQ ID NO: 2033326 - DNA, 15 bp, Homo sapiens
agaacgggcagtaga

SEQ ID NO: 2033327 - DNA, 15 bp, Homo sapiens
gaacgggcagtagaa

SEQ ID NO: 2033328 - DNA, 15 bp, Homo sapiens
aacgggcagtagaat

SEQ ID NO: 2033329 - DNA, 15 bp, Homo sapiens
acgggcagtagaatg

SEQ ID NO: 2033330 - DNA, 15 bp, Homo sapiens
cgggcagtagaatgt

SEQ ID NO: 2033331 - DNA, 15 bp, Homo sapiens
gggcagtagaatgta

SEQ ID NO: 2033332 - DNA, 15 bp, Homo sapiens
ggcagtagaatgtac

SEQ ID NO: 2033333 - DNA, 15 bp, Homo sapiens
gcagtagaatgtaca

SEQ ID NO: 2033334 - DNA, 15 bp, Homo sapiens
cagtagaatgtacat

SEQ ID NO: 2033335 - DNA, 15 bp, Homo sapiens
agtagaatgtacata

SEQ ID NO: 2033336 - DNA, 15 bp, Homo sapiens
gtagaatgtacatag

SEQ ID NO: 2033337 - DNA, 15 bp, Homo sapiens
tagaatgtacataga

SEQ ID NO: 2033338 - DNA, 15 bp, Homo sapiens
agaatgtacatagat

SEQ ID NO: 2033339 - DNA, 15 bp, Homo sapiens
gaatgtacatagata

SEQ ID NO: 2033340 - DNA, 15 bp, Homo sapiens
aatgtacatagataa

SEQ ID NO: 2033341 - DNA, 15 bp, Homo sapiens
atgtacatagataac

SEQ ID NO: 2033342 - DNA, 15 bp, Homo sapiens
tgtacatagataact

SEQ ID NO: 2033343 - DNA, 15 bp, Homo sapiens
gtacatagataacta

SEQ ID NO: 2033344 - DNA, 15 bp, Homo sapiens
tacatagataactat

SEQ ID NO: 2033345 - DNA, 15 bp, Homo sapiens
acatagataactatt

SEQ ID NO: 2033346 - DNA, 15 bp, Homo sapiens
catagataactattt

SEQ ID NO: 2033347 - DNA, 15 bp, Homo sapiens
atagataactatttt

SEQ ID NO: 2033348 - DNA, 15 bp, Homo sapiens
tagataactattttg

SEQ ID NO: 2033349 - DNA, 15 bp, Homo sapiens
agataactattttga

SEQ ID NO: 2033350 - DNA, 15 bp, Homo sapiens
gataactattttgac

SEQ ID NO: 2033351 - DNA, 15 bp, Homo sapiens
ataactattttgacc

SEQ ID NO: 2033352 - DNA, 15 bp, Homo sapiens
taactattttgacct

SEQ ID NO: 2033353 - DNA, 15 bp, Homo sapiens
aactattttgacctc

SEQ ID NO: 2033354 - DNA, 15 bp, Homo sapiens
actattttgacctct

SEQ ID NO: 2033355 - DNA, 15 bp, Homo sapiens
ctattttgacctcta

SEQ ID NO: 2033356 - DNA, 15 bp, Homo sapiens
tattttgacctctat

SEQ ID NO: 2033357 - DNA, 15 bp, Homo sapiens
attttgacctctatt

SEQ ID NO: 2033358 - DNA, 15 bp, Homo sapiens
ttttgacctctattg

SEQ ID NO: 2033359 - DNA, 15 bp, Homo sapiens
tttgacctctattgt

SEQ ID NO: 2033360 - DNA, 15 bp, Homo sapiens
ttgacctctattgtg

SEQ ID NO: 2033361 - DNA, 15 bp, Homo sapiens
tgacctctattgtga

SEQ ID NO: 2033362 - DNA, 15 bp, Homo sapiens
gacctctattgtgat

SEQ ID NO: 2033363 - DNA, 15 bp, Homo sapiens
acctctattgtgata

SEQ ID NO: 2033364 - DNA, 15 bp, Homo sapiens
cctctattgtgatac

SEQ ID NO: 2033365 - DNA, 15 bp, Homo sapiens
ctctattgtgatacc

SEQ ID NO: 2033366 - DNA, 15 bp, Homo sapiens
tctattgtgatacct

SEQ ID NO: 2033367 - DNA, 15 bp, Homo sapiens
ctattgtgatacctg

SEQ ID NO: 2033368 - DNA, 15 bp, Homo sapiens
tattgtgatacctgt

SEQ ID NO: 2033369 - DNA, 15 bp, Homo sapiens
attgtgatacctgtc

SEQ ID NO: 2033370 - DNA, 15 bp, Homo sapiens
ttgtgatacctgtca

SEQ ID NO: 2033371 - DNA, 15 bp, Homo sapiens
tgtgatacctgtcat

SEQ ID NO: 2033372 - DNA, 15 bp, Homo sapiens
gtgatacctgtcatg

SEQ ID NO: 2033373 - DNA, 15 bp, Homo sapiens
tgatacctgtcatgt

SEQ ID NO: 2033374 - DNA, 15 bp, Homo sapiens
gatacctgtcatgtt

SEQ ID NO: 2033375 - DNA, 15 bp, Homo sapiens
atacctgtcatgttg

SEQ ID NO: 2033376 - DNA, 15 bp, Homo sapiens
tacctgtcatgttgt

SEQ ID NO: 2033377 - DNA, 15 bp, Homo sapiens
acctgtcatgttgta

SEQ ID NO: 2033378 - DNA, 15 bp, Homo sapiens
cctgtcatgttgtac

SEQ ID NO: 2033379 - DNA, 15 bp, Homo sapiens
ctgtcatgttgtacc

SEQ ID NO: 2033380 - DNA, 15 bp, Homo sapiens
tgtcatgttgtacct

SEQ ID NO: 2033381 - DNA, 15 bp, Homo sapiens
gtcatgttgtacctt

SEQ ID NO: 2033382 - DNA, 15 bp, Homo sapiens
tcatgttgtaccttg

SEQ ID NO: 2033383 - DNA, 15 bp, Homo sapiens
catgttgtaccttgt

SEQ ID NO: 2033384 - DNA, 15 bp, Homo sapiens
atgttgtaccttgta

SEQ ID NO: 2033385 - DNA, 15 bp, Homo sapiens
tgttgtaccttgtac

SEQ ID NO: 2033386 - DNA, 15 bp, Homo sapiens
gttgtaccttgtact

SEQ ID NO: 2033387 - DNA, 15 bp, Homo sapiens
ttgtaccttgtacta

SEQ ID NO: 2033388 - DNA, 15 bp, Homo sapiens
tgtaccttgtactat

SEQ ID NO: 2033389 - DNA, 15 bp, Homo sapiens
gtaccttgtactata

SEQ ID NO: 2033390 - DNA, 15 bp, Homo sapiens
taccttgtactatat

SEQ ID NO: 2033391 - DNA, 15 bp, Homo sapiens
accttgtactatata

SEQ ID NO: 2033392 - DNA, 15 bp, Homo sapiens
ccttgtactatatag

SEQ ID NO: 2033393 - DNA, 15 bp, Homo sapiens
cttgtactatatagt

SEQ ID NO: 2033394 - DNA, 15 bp, Homo sapiens
ttgtactatatagta

SEQ ID NO: 2033395 - DNA, 15 bp, Homo sapiens
tgtactatatagtat

SEQ ID NO: 2033396 - DNA, 15 bp, Homo sapiens
gtactatatagtatt

SEQ ID NO: 2033397 - DNA, 15 bp, Homo sapiens
tactatatagtattc

SEQ ID NO: 2033398 - DNA, 15 bp, Homo sapiens
actatatagtattct

SEQ ID NO: 2033399 - DNA, 15 bp, Homo sapiens
ctatatagtattctg

SEQ ID NO: 2033400 - DNA, 15 bp, Homo sapiens
tatatagtattctga

SEQ ID NO: 2033401 - DNA, 15 bp, Homo sapiens
atatagtattctgat

SEQ ID NO: 2033402 - DNA, 15 bp, Homo sapiens
tatagtattctgata

SEQ ID NO: 2033403 - DNA, 15 bp, Homo sapiens
atagtattctgatag

SEQ ID NO: 2033404 - DNA, 15 bp, Homo sapiens
tagtattctgatagt

SEQ ID NO: 2033405 - DNA, 15 bp, Homo sapiens
agtattctgatagtt

SEQ ID NO: 2033406 - DNA, 15 bp, Homo sapiens
gtattctgatagttc

SEQ ID NO: 2033407 - DNA, 15 bp, Homo sapiens
tattctgatagttca

SEQ ID NO: 2033408 - DNA, 15 bp, Homo sapiens
attctgatagttcaa

SEQ ID NO: 2033409 - DNA, 15 bp, Homo sapiens
ttctgatagttcaaa

SEQ ID NO: 2033410 - DNA, 15 bp, Homo sapiens
tctgatagttcaaag

SEQ ID NO: 2033411 - DNA, 15 bp, Homo sapiens
ctgatagttcaaagg

SEQ ID NO: 2033412 - DNA, 15 bp, Homo sapiens
tgatagttcaaaggg

SEQ ID NO: 2033413 - DNA, 15 bp, Homo sapiens
gatagttcaaaggga

SEQ ID NO: 2033414 - DNA, 15 bp, Homo sapiens
atagttcaaagggac

SEQ ID NO: 2033415 - DNA, 15 bp, Homo sapiens
tagttcaaagggaca

SEQ ID NO: 2033416 - DNA, 15 bp, Homo sapiens
agttcaaagggacat

SEQ ID NO: 2033417 - DNA, 15 bp, Homo sapiens
gttcaaagggacatt

SEQ ID NO: 2033418 - DNA, 15 bp, Homo sapiens
ttcaaagggacattt

SEQ ID NO: 2033419 - DNA, 15 bp, Homo sapiens
tcaaagggacatttg

SEQ ID NO: 2033420 - DNA, 15 bp, Homo sapiens
caaagggacatttgt

SEQ ID NO: 2033421 - DNA, 15 bp, Homo sapiens
aaagggacatttgtg

SEQ ID NO: 2033422 - DNA, 15 bp, Homo sapiens
aagggacatttgtgt

SEQ ID NO: 2033423 - DNA, 15 bp, Homo sapiens
agggacatttgtgtg

SEQ ID NO: 2033424 - DNA, 15 bp, Homo sapiens
gggacatttgtgtgg

SEQ ID NO: 2033425 - DNA, 15 bp, Homo sapiens
ggacatttgtgtgga

SEQ ID NO: 2033426 - DNA, 15 bp, Homo sapiens
gacatttgtgtggaa

SEQ ID NO: 2033427 - DNA, 15 bp, Homo sapiens
acatttgtgtggaag

SEQ ID NO: 2033428 - DNA, 15 bp, Homo sapiens
catttgtgtggaagg

SEQ ID NO: 2033429 - DNA, 15 bp, Homo sapiens
atttgtgtggaagga

SEQ ID NO: 2033430 - DNA, 15 bp, Homo sapiens
tttgtgtggaaggat

SEQ ID NO: 2033431 - DNA, 15 bp, Homo sapiens
ttgtgtggaaggatc

SEQ ID NO: 2033432 - DNA, 15 bp, Homo sapiens
tgtgtggaaggatca

SEQ ID NO: 2033433 - DNA, 15 bp, Homo sapiens
gtgtggaaggatcat

SEQ ID NO: 2033434 - DNA, 15 bp, Homo sapiens
tgtggaaggatcatg

SEQ ID NO: 2033435 - DNA, 15 bp, Homo sapiens
gtggaaggatcatgt

SEQ ID NO: 2033436 - DNA, 15 bp, Homo sapiens
tggaaggatcatgta

SEQ ID NO: 2033437 - DNA, 15 bp, Homo sapiens
ggaaggatcatgtaa

SEQ ID NO: 2033438 - DNA, 15 bp, Homo sapiens
gaaggatcatgtaat

SEQ ID NO: 2033439 - DNA, 15 bp, Homo sapiens
aaggatcatgtaata

SEQ ID NO: 2033440 - DNA, 15 bp, Homo sapiens
aggatcatgtaataa

SEQ ID NO: 2033441 - DNA, 15 bp, Homo sapiens
ggatcatgtaataat

SEQ ID NO: 2033442 - DNA, 15 bp, Homo sapiens
gatcatgtaataatt

SEQ ID NO: 2033443 - DNA, 15 bp, Homo sapiens
atcatgtaataatta

SEQ ID NO: 2033444 - DNA, 15 bp, Homo sapiens
tcatgtaataattat

SEQ ID NO: 2033445 - DNA, 15 bp, Homo sapiens
catgtaataattatg

SEQ ID NO: 2033446 - DNA, 15 bp, Homo sapiens
atgtaataattatgg

SEQ ID NO: 2033447 - DNA, 15 bp, Homo sapiens
tgtaataattatggc

SEQ ID NO: 2033448 - DNA, 15 bp, Homo sapiens
gtaataattatggca

SEQ ID NO: 2033449 - DNA, 15 bp, Homo sapiens
taataattatggcaa

SEQ ID NO: 2033450 - DNA, 15 bp, Homo sapiens
aataattatggcaaa

SEQ ID NO: 2033451 - DNA, 15 bp, Homo sapiens
ataattatggcaaaa

SEQ ID NO: 2033452 - DNA, 15 bp, Homo sapiens
taattatggcaaaag

SEQ ID NO: 2033453 - DNA, 15 bp, Homo sapiens
aattatggcaaaagt

SEQ ID NO: 2033454 - DNA, 15 bp, Homo sapiens
attatggcaaaagtt

SEQ ID NO: 2033455 - DNA, 15 bp, Homo sapiens
ttatggcaaaagttt

SEQ ID NO: 2033456 - DNA, 15 bp, Homo sapiens
tatggcaaaagtttt

SEQ ID NO: 2033457 - DNA, 15 bp, Homo sapiens
atggcaaaagtttta

SEQ ID NO: 2033458 - DNA, 15 bp, Homo sapiens
tggcaaaagttttat

SEQ ID NO: 2033459 - DNA, 15 bp, Homo sapiens
ggcaaaagttttata

SEQ ID NO: 2033460 - DNA, 15 bp, Homo sapiens
gcaaaagttttataa

SEQ ID NO: 2033461 - DNA, 15 bp, Homo sapiens
caaaagttttataac

SEQ ID NO: 2033462 - DNA, 15 bp, Homo sapiens
aaaagttttataaca

SEQ ID NO: 2033463 - DNA, 15 bp, Homo sapiens
aaagttttataacac

SEQ ID NO: 2033464 - DNA, 15 bp, Homo sapiens
aagttttataacaca

SEQ ID NO: 2033465 - DNA, 15 bp, Homo sapiens
agttttataacacat

SEQ ID NO: 2033466 - DNA, 15 bp, Homo sapiens
gttttataacacatt

SEQ ID NO: 2033467 - DNA, 15 bp, Homo sapiens
ttttataacacattt

SEQ ID NO: 2033468 - DNA, 15 bp, Homo sapiens
tttataacacatttt

SEQ ID NO: 2033469 - DNA, 15 bp, Homo sapiens
ttataacacattttt

SEQ ID NO: 2033470 - DNA, 15 bp, Homo sapiens
tataacacatttttc

SEQ ID NO: 2033471 - DNA, 15 bp, Homo sapiens
ataacacatttttca

SEQ ID NO: 2033472 - DNA, 15 bp, Homo sapiens
taacacatttttcac

SEQ ID NO: 2033473 - DNA, 15 bp, Homo sapiens
aacacatttttcacc

SEQ ID NO: 2033474 - DNA, 15 bp, Homo sapiens
acacatttttcacct

SEQ ID NO: 2033475 - DNA, 15 bp, Homo sapiens
cacatttttcacctc

SEQ ID NO: 2033476 - DNA, 15 bp, Homo sapiens
acatttttcacctca

SEQ ID NO: 2033477 - DNA, 15 bp, Homo sapiens
catttttcacctcaa

SEQ ID NO: 2033478 - DNA, 15 bp, Homo sapiens
atttttcacctcaaa

SEQ ID NO: 2033479 - DNA, 15 bp, Homo sapiens
tttttcacctcaaaa

SEQ ID NO: 2033480 - DNA, 15 bp, Homo sapiens
ttttcacctcaaaaa

SEQ ID NO: 2033481 - DNA, 15 bp, Homo sapiens
tttcacctcaaaaat

SEQ ID NO: 2033482 - DNA, 15 bp, Homo sapiens
ttcacctcaaaaatg

SEQ ID NO: 2033483 - DNA, 15 bp, Homo sapiens
tcacctcaaaaatgt

SEQ ID NO: 2033484 - DNA, 15 bp, Homo sapiens
cacctcaaaaatgtt

SEQ ID NO: 2033485 - DNA, 15 bp, Homo sapiens
acctcaaaaatgttt

SEQ ID NO: 2033486 - DNA, 15 bp, Homo sapiens
cctcaaaaatgtttt

SEQ ID NO: 2033487 - DNA, 15 bp, Homo sapiens
ctcaaaaatgttttt

SEQ ID NO: 2033488 - DNA, 15 bp, Homo sapiens
tcaaaaatgttttta

SEQ ID NO: 2033489 - DNA, 15 bp, Homo sapiens
caaaaatgtttttaa

SEQ ID NO: 2033490 - DNA, 15 bp, Homo sapiens
aaaaatgtttttaaa

SEQ ID NO: 2033491 - DNA, 15 bp, Homo sapiens
aaaatgtttttaaac

SEQ ID NO: 2033492 - DNA, 15 bp, Homo sapiens
aaatgtttttaaaca

SEQ ID NO: 2033493 - DNA, 15 bp, Homo sapiens
aatgtttttaaacaa

SEQ ID NO: 2033494 - DNA, 15 bp, Homo sapiens
atgtttttaaacaaa

SEQ ID NO: 2033495 - DNA, 15 bp, Homo sapiens
tgtttttaaacaaaa

SEQ ID NO: 2033496 - DNA, 15 bp, Homo sapiens
gtttttaaacaaaac

SEQ ID NO: 2033497 - DNA, 15 bp, Homo sapiens
tttttaaacaaaaca

SEQ ID NO: 2033498 - DNA, 15 bp, Homo sapiens
ttttaaacaaaacaa

SEQ ID NO: 2033499 - DNA, 15 bp, Homo sapiens
tttaaacaaaacaag

SEQ ID NO: 2033500 - DNA, 15 bp, Homo sapiens
ttaaacaaaacaagt

SEQ ID NO: 2033501 - DNA, 15 bp, Homo sapiens
taaacaaaacaagta

SEQ ID NO: 2033502 - DNA, 15 bp, Homo sapiens
aaacaaaacaagtaa

SEQ ID NO: 2033503 - DNA, 15 bp, Homo sapiens
aacaaaacaagtaaa

SEQ ID NO: 2033504 - DNA, 15 bp, Homo sapiens
acaaaacaagtaaat

SEQ ID NO: 2033505 - DNA, 15 bp, Homo sapiens
caaaacaagtaaatt

SEQ ID NO: 2033506 - DNA, 15 bp, Homo sapiens
aaaacaagtaaattc

SEQ ID NO: 2033507 - DNA, 15 bp, Homo sapiens
aaacaagtaaattcg

SEQ ID NO: 2033508 - DNA, 15 bp, Homo sapiens
aacaagtaaattcgt

SEQ ID NO: 2033509 - DNA, 15 bp, Homo sapiens
acaagtaaattcgtg

SEQ ID NO: 2033510 - DNA, 15 bp, Homo sapiens
caagtaaattcgtga

SEQ ID NO: 2033511 - DNA, 15 bp, Homo sapiens
aagtaaattcgtgat

SEQ ID NO: 2033512 - DNA, 15 bp, Homo sapiens
agtaaattcgtgatc

SEQ ID NO: 2033513 - DNA, 15 bp, Homo sapiens
gtaaattcgtgatct

SEQ ID NO: 2033514 - DNA, 15 bp, Homo sapiens
taaattcgtgatcta

SEQ ID NO: 2033515 - DNA, 15 bp, Homo sapiens
aaattcgtgatctat

SEQ ID NO: 2033516 - DNA, 15 bp, Homo sapiens
aattcgtgatctatt

SEQ ID NO: 2033517 - DNA, 15 bp, Homo sapiens
attcgtgatctattt

SEQ ID NO: 2033518 - DNA, 15 bp, Homo sapiens
ttcgtgatctattta

SEQ ID NO: 2033519 - DNA, 15 bp, Homo sapiens
tcgtgatctatttaa

SEQ ID NO: 2033520 - DNA, 15 bp, Homo sapiens
cgtgatctatttaat

SEQ ID NO: 2033521 - DNA, 15 bp, Homo sapiens
gtgatctatttaatt

SEQ ID NO: 2033522 - DNA, 15 bp, Homo sapiens
tgatctatttaattt

SEQ ID NO: 2033523 - DNA, 15 bp, Homo sapiens
gatctatttaatttt

SEQ ID NO: 2033524 - DNA, 15 bp, Homo sapiens
atctatttaattttt

SEQ ID NO: 2033525 - DNA, 15 bp, Homo sapiens
tctatttaatttttt

SEQ ID NO: 2033526 - DNA, 15 bp, Homo sapiens
ctatttaattttttt

SEQ ID NO: 2033527 - DNA, 15 bp, Homo sapiens
tatttaatttttttt

SEQ ID NO: 2033528 - DNA, 15 bp, Homo sapiens
atttaattttttttt

SEQ ID NO: 2033529 - DNA, 15 bp, Homo sapiens
agcaattctcctgct

SEQ ID NO: 2033530 - DNA, 15 bp, Homo sapiens
gcaattctcctgctt

SEQ ID NO: 2033531 - DNA, 15 bp, Homo sapiens
caattctcctgcttc

SEQ ID NO: 2033532 - DNA, 15 bp, Homo sapiens
aattctcctgcttca

SEQ ID NO: 2033533 - DNA, 15 bp, Homo sapiens
attctcctgcttcac

SEQ ID NO: 2033534 - DNA, 15 bp, Homo sapiens
ttctcctgcttcacc

SEQ ID NO: 2033535 - DNA, 15 bp, Homo sapiens
tctcctgcttcaccc

SEQ ID NO: 2033536 - DNA, 15 bp, Homo sapiens
ctcctgcttcaccct

SEQ ID NO: 2033537 - DNA, 15 bp, Homo sapiens
tcctgcttcaccctg

SEQ ID NO: 2033538 - DNA, 15 bp, Homo sapiens
cctgcttcaccctgc

SEQ ID NO: 2033539 - DNA, 15 bp, Homo sapiens
ctgcttcaccctgct

SEQ ID NO: 2033540 - DNA, 15 bp, Homo sapiens
tgcttcaccctgctg

SEQ ID NO: 2033541 - DNA, 15 bp, Homo sapiens
gcttcaccctgctga

SEQ ID NO: 2033542 - DNA, 15 bp, Homo sapiens
cttcaccctgctgag

SEQ ID NO: 2033543 - DNA, 15 bp, Homo sapiens
ttcaccctgctgagt

SEQ ID NO: 2033544 - DNA, 15 bp, Homo sapiens
tcaccctgctgagta

SEQ ID NO: 2033545 - DNA, 15 bp, Homo sapiens
caccctgctgagtag

SEQ ID NO: 2033546 - DNA, 15 bp, Homo sapiens
accctgctgagtagc

SEQ ID NO: 2033547 - DNA, 15 bp, Homo sapiens
ccctgctgagtagct

SEQ ID NO: 2033548 - DNA, 15 bp, Homo sapiens
cctgctgagtagctg

SEQ ID NO: 2033549 - DNA, 15 bp, Homo sapiens
ctgctgagtagctgg

SEQ ID NO: 2033550 - DNA, 15 bp, Homo sapiens
tgctgagtagctggc

SEQ ID NO: 2033551 - DNA, 15 bp, Homo sapiens
gctgagtagctggca

SEQ ID NO: 2033552 - DNA, 15 bp, Homo sapiens
ctgagtagctggcac

SEQ ID NO: 2033553 - DNA, 15 bp, Homo sapiens
tgagtagctggcact

SEQ ID NO: 2033554 - DNA, 15 bp, Homo sapiens
gagtagctggcacta

SEQ ID NO: 2033555 - DNA, 15 bp, Homo sapiens
agtagctggcactac

SEQ ID NO: 2033556 - DNA, 15 bp, Homo sapiens
gtagctggcactaca

SEQ ID NO: 2033557 - DNA, 15 bp, Homo sapiens
tagctggcactacag

SEQ ID NO: 2033558 - DNA, 15 bp, Homo sapiens
agctggcactacagg

SEQ ID NO: 2033559 - DNA, 15 bp, Homo sapiens
gctggcactacaggc

SEQ ID NO: 2033560 - DNA, 15 bp, Homo sapiens
ctggcactacaggca

SEQ ID NO: 2033561 - DNA, 15 bp, Homo sapiens
tggcactacaggcac

SEQ ID NO: 2033562 - DNA, 15 bp, Homo sapiens
ggcactacaggcacc

SEQ ID NO: 2033563 - DNA, 15 bp, Homo sapiens
gcactacaggcaccc

SEQ ID NO: 2033564 - DNA, 15 bp, Homo sapiens
cactacaggcaccca

SEQ ID NO: 2033565 - DNA, 15 bp, Homo sapiens
ctacaggcacccact

SEQ ID NO: 2033566 - DNA, 15 bp, Homo sapiens
tacaggcacccacta

SEQ ID NO: 2033567 - DNA, 15 bp, Homo sapiens
acaggcacccactac

SEQ ID NO: 2033568 - DNA, 15 bp, Homo sapiens
caggcacccactacc

SEQ ID NO: 2033569 - DNA, 15 bp, Homo sapiens
aggcacccactacca

SEQ ID NO: 2033570 - DNA, 15 bp, Homo sapiens
ggcacccactaccat

SEQ ID NO: 2033571 - DNA, 15 bp, Homo sapiens
gcacccactaccatg

SEQ ID NO: 2033572 - DNA, 15 bp, Homo sapiens
cacccactaccatgc

SEQ ID NO: 2033573 - DNA, 15 bp, Homo sapiens
acccactaccatgcc

SEQ ID NO: 2033574 - DNA, 15 bp, Homo sapiens
cccactaccatgcct

SEQ ID NO: 2033575 - DNA, 15 bp, Homo sapiens
ccactaccatgcctg

SEQ ID NO: 2033576 - DNA, 15 bp, Homo sapiens
cactaccatgcctgg

SEQ ID NO: 2033577 - DNA, 15 bp, Homo sapiens
actaccatgcctggc

SEQ ID NO: 2033578 - DNA, 15 bp, Homo sapiens
ttttagtggagacag

SEQ ID NO: 2033579 - DNA, 15 bp, Homo sapiens
tttagtggagacagg

SEQ ID NO: 2033580 - DNA, 15 bp, Homo sapiens
ttagtggagacaggg

SEQ ID NO: 2033581 - DNA, 15 bp, Homo sapiens
tagtggagacagggt

SEQ ID NO: 2033582 - DNA, 15 bp, Homo sapiens
agtggagacagggtt

SEQ ID NO: 2033583 - DNA, 15 bp, Homo sapiens
gtggagacagggttt

SEQ ID NO: 2033584 - DNA, 15 bp, Homo sapiens
tggagacagggtttc

SEQ ID NO: 2033585 - DNA, 15 bp, Homo sapiens
ggagacagggtttca

SEQ ID NO: 2033586 - DNA, 15 bp, Homo sapiens
cagggtttcaccata

SEQ ID NO: 2033587 - DNA, 15 bp, Homo sapiens
agggtttcaccatat

SEQ ID NO: 2033588 - DNA, 15 bp, Homo sapiens
caccatattggccat

SEQ ID NO: 2033589 - DNA, 15 bp, Homo sapiens
accatattggccatg

SEQ ID NO: 2033590 - DNA, 15 bp, Homo sapiens
ccatattggccatgc

SEQ ID NO: 2033591 - DNA, 15 bp, Homo sapiens
catattggccatgct

SEQ ID NO: 2033592 - DNA, 15 bp, Homo sapiens
atattggccatgctg

SEQ ID NO: 2033593 - DNA, 15 bp, Homo sapiens
tattggccatgctgg

SEQ ID NO: 2033594 - DNA, 15 bp, Homo sapiens
attggccatgctggt

SEQ ID NO: 2033595 - DNA, 15 bp, Homo sapiens
tgaccttgtgatcct

SEQ ID NO: 2033596 - DNA, 15 bp, Homo sapiens
cttgtgatcctccca

SEQ ID NO: 2033597 - DNA, 15 bp, Homo sapiens
ttgtgatcctcccac

SEQ ID NO: 2033598 - DNA, 15 bp, Homo sapiens
tgtgatcctcccacc

SEQ ID NO: 2033599 - DNA, 15 bp, Homo sapiens
gatcctcccacctcc

SEQ ID NO: 2033600 - DNA, 15 bp, Homo sapiens
atcctcccacctcca

SEQ ID NO: 2033601 - DNA, 15 bp, Homo sapiens
tcctcccacctccac

SEQ ID NO: 2033602 - DNA, 15 bp, Homo sapiens
cctcccacctccacc

SEQ ID NO: 2033603 - DNA, 15 bp, Homo sapiens
ctcccacctccacct

SEQ ID NO: 2033604 - DNA, 15 bp, Homo sapiens
tcccacctccacctc

SEQ ID NO: 2033605 - DNA, 15 bp, Homo sapiens
cccacctccacctcc

SEQ ID NO: 2033606 - DNA, 15 bp, Homo sapiens
ccacctccacctccc

SEQ ID NO: 2033607 - DNA, 15 bp, Homo sapiens
cacctccacctccca

SEQ ID NO: 2033608 - DNA, 15 bp, Homo sapiens
acctccacctcccaa

SEQ ID NO: 2033609 - DNA, 15 bp, Homo sapiens
cctccacctcccaaa

SEQ ID NO: 2033610 - DNA, 15 bp, Homo sapiens
ctccacctcccaaag

SEQ ID NO: 2033611 - DNA, 15 bp, Homo sapiens
tccacctcccaaagt

SEQ ID NO: 2033612 - DNA, 15 bp, Homo sapiens
ccacctcccaaagtg

SEQ ID NO: 2033613 - DNA, 15 bp, Homo sapiens
cacctcccaaagtgc

SEQ ID NO: 2033614 - DNA, 15 bp, Homo sapiens
ctgggaattacaggc

SEQ ID NO: 2033615 - DNA, 15 bp, Homo sapiens
tgggaattacaggca

SEQ ID NO: 2033616 - DNA, 15 bp, Homo sapiens
gggaattacaggcat

SEQ ID NO: 2033617 - DNA, 15 bp, Homo sapiens
ccgcacctggcctaa

SEQ ID NO: 2033618 - DNA, 15 bp, Homo sapiens
cgcacctggcctaaa

SEQ ID NO: 2033619 - DNA, 15 bp, Homo sapiens
gcacctggcctaaaa

SEQ ID NO: 2033620 - DNA, 15 bp, Homo sapiens
cacctggcctaaaat

SEQ ID NO: 2033621 - DNA, 15 bp, Homo sapiens
acctggcctaaaatt

SEQ ID NO: 2033622 - DNA, 15 bp, Homo sapiens
cctggcctaaaattt

SEQ ID NO: 2033623 - DNA, 15 bp, Homo sapiens
ctggcctaaaatttt

SEQ ID NO: 2033624 - DNA, 15 bp, Homo sapiens
tggcctaaaattttt

SEQ ID NO: 2033625 - DNA, 15 bp, Homo sapiens
ggcctaaaatttttt

SEQ ID NO: 2033626 - DNA, 15 bp, Homo sapiens
gcctaaaattttttt

SEQ ID NO: 2033627 - DNA, 15 bp, Homo sapiens
cctaaaatttttttt

SEQ ID NO: 2033628 - DNA, 15 bp, Homo sapiens
ctaaaattttttttt

SEQ ID NO: 2033629 - DNA, 15 bp, Homo sapiens
taaaattttttttta

SEQ ID NO: 2033630 - DNA, 15 bp, Homo sapiens
aaaatttttttttac

SEQ ID NO: 2033631 - DNA, 15 bp, Homo sapiens
aaatttttttttact

SEQ ID NO: 2033632 - DNA, 15 bp, Homo sapiens
aatttttttttacta

SEQ ID NO: 2033633 - DNA, 15 bp, Homo sapiens
atttttttttactag

SEQ ID NO: 2033634 - DNA, 15 bp, Homo sapiens
tttttttttactagg

SEQ ID NO: 2033635 - DNA, 15 bp, Homo sapiens
ttttttttactagga

SEQ ID NO: 2033636 - DNA, 15 bp, Homo sapiens
tttttttactaggaa

SEQ ID NO: 2033637 - DNA, 15 bp, Homo sapiens
ttttttactaggaaa

SEQ ID NO: 2033638 - DNA, 15 bp, Homo sapiens
tttttactaggaaaa

SEQ ID NO: 2033639 - DNA, 15 bp, Homo sapiens
ttttactaggaaaaa

SEQ ID NO: 2033640 - DNA, 15 bp, Homo sapiens
tttactaggaaaaag

SEQ ID NO: 2033641 - DNA, 15 bp, Homo sapiens
ttactaggaaaaagg

SEQ ID NO: 2033642 - DNA, 15 bp, Homo sapiens
tactaggaaaaaggc

SEQ ID NO: 2033643 - DNA, 15 bp, Homo sapiens
actaggaaaaaggct

SEQ ID NO: 2033644 - DNA, 15 bp, Homo sapiens
ctaggaaaaaggctt

SEQ ID NO: 2033645 - DNA, 15 bp, Homo sapiens
taggaaaaaggcttt

SEQ ID NO: 2033646 - DNA, 15 bp, Homo sapiens
aggaaaaaggcttta

SEQ ID NO: 2033647 - DNA, 15 bp, Homo sapiens
ggaaaaaggctttaa

SEQ ID NO: 2033648 - DNA, 15 bp, Homo sapiens
gaaaaaggctttaac

SEQ ID NO: 2033649 - DNA, 15 bp, Homo sapiens
aaaaaggctttaact

SEQ ID NO: 2033650 - DNA, 15 bp, Homo sapiens
aaaaggctttaactt

SEQ ID NO: 2033651 - DNA, 15 bp, Homo sapiens
aaaggctttaacttt

SEQ ID NO: 2033652 - DNA, 15 bp, Homo sapiens
aaggctttaactttt

SEQ ID NO: 2033653 - DNA, 15 bp, Homo sapiens
aggctttaacttttt

SEQ ID NO: 2033654 - DNA, 15 bp, Homo sapiens
ggctttaactttttt

SEQ ID NO: 2033655 - DNA, 15 bp, Homo sapiens
gctttaacttttttt

SEQ ID NO: 2033656 - DNA, 15 bp, Homo sapiens
ctttaactttttttt

SEQ ID NO: 2033657 - DNA, 15 bp, Homo sapiens
tttaacttttttttg

SEQ ID NO: 2033658 - DNA, 15 bp, Homo sapiens
ttaacttttttttgt

SEQ ID NO: 2033659 - DNA, 15 bp, Homo sapiens
taacttttttttgtt

SEQ ID NO: 2033660 - DNA, 15 bp, Homo sapiens
aacttttttttgttt

SEQ ID NO: 2033661 - DNA, 15 bp, Homo sapiens
acttttttttgtttg

SEQ ID NO: 2033662 - DNA, 15 bp, Homo sapiens
cttttttttgtttga

SEQ ID NO: 2033663 - DNA, 15 bp, Homo sapiens
ttttttttgtttgat

SEQ ID NO: 2033664 - DNA, 15 bp, Homo sapiens
ttttttgtttgatca

SEQ ID NO: 2033665 - DNA, 15 bp, Homo sapiens
tttttgtttgatcag

SEQ ID NO: 2033666 - DNA, 15 bp, Homo sapiens
ttttgtttgatcagc

SEQ ID NO: 2033667 - DNA, 15 bp, Homo sapiens
tttgtttgatcagct

SEQ ID NO: 2033668 - DNA, 15 bp, Homo sapiens
ttgtttgatcagctc

SEQ ID NO: 2033669 - DNA, 15 bp, Homo sapiens
tgtttgatcagctca

SEQ ID NO: 2033670 - DNA, 15 bp, Homo sapiens
gtttgatcagctcat

SEQ ID NO: 2033671 - DNA, 15 bp, Homo sapiens
tttgatcagctcatt

SEQ ID NO: 2033672 - DNA, 15 bp, Homo sapiens
ttgatcagctcattt

SEQ ID NO: 2033673 - DNA, 15 bp, Homo sapiens
tgatcagctcatttt

SEQ ID NO: 2033674 - DNA, 15 bp, Homo sapiens
gatcagctcatttta

SEQ ID NO: 2033675 - DNA, 15 bp, Homo sapiens
atcagctcattttac

SEQ ID NO: 2033676 - DNA, 15 bp, Homo sapiens
tcagctcattttact

SEQ ID NO: 2033677 - DNA, 15 bp, Homo sapiens
cagctcattttactg

SEQ ID NO: 2033678 - DNA, 15 bp, Homo sapiens
agctcattttactgt

SEQ ID NO: 2033679 - DNA, 15 bp, Homo sapiens
gctcattttactgtt

SEQ ID NO: 2033680 - DNA, 15 bp, Homo sapiens
ctcattttactgtta

SEQ ID NO: 2033681 - DNA, 15 bp, Homo sapiens
tcattttactgttag

SEQ ID NO: 2033682 - DNA, 15 bp, Homo sapiens
cattttactgttagt

SEQ ID NO: 2033683 - DNA, 15 bp, Homo sapiens
attttactgttagta

SEQ ID NO: 2033684 - DNA, 15 bp, Homo sapiens
ttttactgttagtat

SEQ ID NO: 2033685 - DNA, 15 bp, Homo sapiens
tttactgttagtatt

SEQ ID NO: 2033686 - DNA, 15 bp, Homo sapiens
ttactgttagtattg

SEQ ID NO: 2033687 - DNA, 15 bp, Homo sapiens
tactgttagtattgg

SEQ ID NO: 2033688 - DNA, 15 bp, Homo sapiens
actgttagtattggt

SEQ ID NO: 2033689 - DNA, 15 bp, Homo sapiens
ctgttagtattggtg

SEQ ID NO: 2033690 - DNA, 15 bp, Homo sapiens
tgttagtattggtgc

SEQ ID NO: 2033691 - DNA, 15 bp, Homo sapiens
gttagtattggtgcg

SEQ ID NO: 2033692 - DNA, 15 bp, Homo sapiens
ttagtattggtgcgt

SEQ ID NO: 2033693 - DNA, 15 bp, Homo sapiens
tagtattggtgcgtg

SEQ ID NO: 2033694 - DNA, 15 bp, Homo sapiens
agtattggtgcgtga

SEQ ID NO: 2033695 - DNA, 15 bp, Homo sapiens
gtattggtgcgtgaa

SEQ ID NO: 2033696 - DNA, 15 bp, Homo sapiens
tattggtgcgtgaat

SEQ ID NO: 2033697 - DNA, 15 bp, Homo sapiens
attggtgcgtgaatt

SEQ ID NO: 2033698 - DNA, 15 bp, Homo sapiens
ttggtgcgtgaattt

SEQ ID NO: 2033699 - DNA, 15 bp, Homo sapiens
tggtgcgtgaatttt

SEQ ID NO: 2033700 - DNA, 15 bp, Homo sapiens
ggtgcgtgaattttt

SEQ ID NO: 2033701 - DNA, 15 bp, Homo sapiens
gtgcgtgaatttttt

SEQ ID NO: 2033702 - DNA, 15 bp, Homo sapiens
tgcgtgaatttttta

SEQ ID NO: 2033703 - DNA, 15 bp, Homo sapiens
gcgtgaattttttag

SEQ ID NO: 2033704 - DNA, 15 bp, Homo sapiens
cgtgaattttttaga

SEQ ID NO: 2033705 - DNA, 15 bp, Homo sapiens
gtgaattttttagaa

SEQ ID NO: 2033706 - DNA, 15 bp, Homo sapiens
tgaattttttagaac

SEQ ID NO: 2033707 - DNA, 15 bp, Homo sapiens
gaattttttagaaca

SEQ ID NO: 2033708 - DNA, 15 bp, Homo sapiens
aattttttagaacaa

SEQ ID NO: 2033709 - DNA, 15 bp, Homo sapiens
attttttagaacaaa

SEQ ID NO: 2033710 - DNA, 15 bp, Homo sapiens
ttttttagaacaaag

SEQ ID NO: 2033711 - DNA, 15 bp, Homo sapiens
tttttagaacaaaga

SEQ ID NO: 2033712 - DNA, 15 bp, Homo sapiens
ttttagaacaaagac

SEQ ID NO: 2033713 - DNA, 15 bp, Homo sapiens
tttagaacaaagaca

SEQ ID NO: 2033714 - DNA, 15 bp, Homo sapiens
ttagaacaaagacat

SEQ ID NO: 2033715 - DNA, 15 bp, Homo sapiens
tagaacaaagacata

SEQ ID NO: 2033716 - DNA, 15 bp, Homo sapiens
agaacaaagacatac

SEQ ID NO: 2033717 - DNA, 15 bp, Homo sapiens
gaacaaagacatact

SEQ ID NO: 2033718 - DNA, 15 bp, Homo sapiens
aacaaagacatactt

SEQ ID NO: 2033719 - DNA, 15 bp, Homo sapiens
acaaagacatactta

SEQ ID NO: 2033720 - DNA, 15 bp, Homo sapiens
caaagacatacttag

SEQ ID NO: 2033721 - DNA, 15 bp, Homo sapiens
aaagacatacttagt

SEQ ID NO: 2033722 - DNA, 15 bp, Homo sapiens
aagacatacttagtt

SEQ ID NO: 2033723 - DNA, 15 bp, Homo sapiens
agacatacttagttc

SEQ ID NO: 2033724 - DNA, 15 bp, Homo sapiens
gacatacttagttca

SEQ ID NO: 2033725 - DNA, 15 bp, Homo sapiens
acatacttagttcat

SEQ ID NO: 2033726 - DNA, 15 bp, Homo sapiens
catacttagttcatc

SEQ ID NO: 2033727 - DNA, 15 bp, Homo sapiens
atacttagttcatcg

SEQ ID NO: 2033728 - DNA, 15 bp, Homo sapiens
tacttagttcatcgt

SEQ ID NO: 2033729 - DNA, 15 bp, Homo sapiens
acttagttcatcgtt

SEQ ID NO: 2033730 - DNA, 15 bp, Homo sapiens
cttagttcatcgtta

SEQ ID NO: 2033731 - DNA, 15 bp, Homo sapiens
ttagttcatcgttac

SEQ ID NO: 2033732 - DNA, 15 bp, Homo sapiens
tagttcatcgttact

SEQ ID NO: 2033733 - DNA, 15 bp, Homo sapiens
agttcatcgttactt

SEQ ID NO: 2033734 - DNA, 15 bp, Homo sapiens
gttcatcgttacttt

SEQ ID NO: 2033735 - DNA, 15 bp, Homo sapiens
ttcatcgttacttta

SEQ ID NO: 2033736 - DNA, 15 bp, Homo sapiens
tcatcgttactttag

SEQ ID NO: 2033737 - DNA, 15 bp, Homo sapiens
catcgttactttaga

SEQ ID NO: 2033738 - DNA, 15 bp, Homo sapiens
atcgttactttagac

SEQ ID NO: 2033739 - DNA, 15 bp, Homo sapiens
tcgttactttagact

SEQ ID NO: 2033740 - DNA, 15 bp, Homo sapiens
cgttactttagactc

SEQ ID NO: 2033741 - DNA, 15 bp, Homo sapiens
gttactttagactcc

SEQ ID NO: 2033742 - DNA, 15 bp, Homo sapiens
ttactttagactccc

SEQ ID NO: 2033743 - DNA, 15 bp, Homo sapiens
tactttagactccct

SEQ ID NO: 2033744 - DNA, 15 bp, Homo sapiens
actttagactccctt

SEQ ID NO: 2033745 - DNA, 15 bp, Homo sapiens
ctttagactcccttc

SEQ ID NO: 2033746 - DNA, 15 bp, Homo sapiens
tttagactcccttct

SEQ ID NO: 2033747 - DNA, 15 bp, Homo sapiens
ttagactcccttctt

SEQ ID NO: 2033748 - DNA, 15 bp, Homo sapiens
tagactcccttcttc

SEQ ID NO: 2033749 - DNA, 15 bp, Homo sapiens
agactcccttcttcc

SEQ ID NO: 2033750 - DNA, 15 bp, Homo sapiens
gactcccttcttcca

SEQ ID NO: 2033751 - DNA, 15 bp, Homo sapiens
actcccttcttccat

SEQ ID NO: 2033752 - DNA, 15 bp, Homo sapiens
tcccttcttccattt

SEQ ID NO: 2033753 - DNA, 15 bp, Homo sapiens
cccttcttccatttt

SEQ ID NO: 2033754 - DNA, 15 bp, Homo sapiens
ccttcttccattttt

SEQ ID NO: 2033755 - DNA, 15 bp, Homo sapiens
cttcttccattttta

SEQ ID NO: 2033756 - DNA, 15 bp, Homo sapiens
ttcttccatttttat

SEQ ID NO: 2033757 - DNA, 15 bp, Homo sapiens
tcttccatttttatt

SEQ ID NO: 2033758 - DNA, 15 bp, Homo sapiens
cttccatttttattt

SEQ ID NO: 2033759 - DNA, 15 bp, Homo sapiens
ttccatttttatttc

SEQ ID NO: 2033760 - DNA, 15 bp, Homo sapiens
tccatttttatttct

SEQ ID NO: 2033761 - DNA, 15 bp, Homo sapiens
ccatttttatttctg

SEQ ID NO: 2033762 - DNA, 15 bp, Homo sapiens
catttttatttctgg

SEQ ID NO: 2033763 - DNA, 15 bp, Homo sapiens
atttttatttctggc

SEQ ID NO: 2033764 - DNA, 15 bp, Homo sapiens
tttttatttctggcc

SEQ ID NO: 2033765 - DNA, 15 bp, Homo sapiens
ttttatttctggcct

SEQ ID NO: 2033766 - DNA, 15 bp, Homo sapiens
tttatttctggcctt

SEQ ID NO: 2033767 - DNA, 15 bp, Homo sapiens
ttatttctggccttg

SEQ ID NO: 2033768 - DNA, 15 bp, Homo sapiens
tatttctggccttgg

SEQ ID NO: 2033769 - DNA, 15 bp, Homo sapiens
atttctggccttggt

SEQ ID NO: 2033770 - DNA, 15 bp, Homo sapiens
tttctggccttggtc

SEQ ID NO: 2033771 - DNA, 15 bp, Homo sapiens
ttctggccttggtcc

SEQ ID NO: 2033772 - DNA, 15 bp, Homo sapiens
tctggccttggtcca

SEQ ID NO: 2033773 - DNA, 15 bp, Homo sapiens
ctggccttggtccaa

SEQ ID NO: 2033774 - DNA, 15 bp, Homo sapiens
tggccttggtccaag

SEQ ID NO: 2033775 - DNA, 15 bp, Homo sapiens
ggccttggtccaagc

SEQ ID NO: 2033776 - DNA, 15 bp, Homo sapiens
gccttggtccaagcc

SEQ ID NO: 2033777 - DNA, 15 bp, Homo sapiens
ccttggtccaagcct

SEQ ID NO: 2033778 - DNA, 15 bp, Homo sapiens
cttggtccaagccta

SEQ ID NO: 2033779 - DNA, 15 bp, Homo sapiens
ttggtccaagcctac

SEQ ID NO: 2033780 - DNA, 15 bp, Homo sapiens
tggtccaagcctacc

SEQ ID NO: 2033781 - DNA, 15 bp, Homo sapiens
ggtccaagcctacca

SEQ ID NO: 2033782 - DNA, 15 bp, Homo sapiens
gtccaagcctaccag

SEQ ID NO: 2033783 - DNA, 15 bp, Homo sapiens
tccaagcctaccagt

SEQ ID NO: 2033784 - DNA, 15 bp, Homo sapiens
ccaagcctaccagtc

SEQ ID NO: 2033785 - DNA, 15 bp, Homo sapiens
caagcctaccagtca

SEQ ID NO: 2033786 - DNA, 15 bp, Homo sapiens
aagcctaccagtcat

SEQ ID NO: 2033787 - DNA, 15 bp, Homo sapiens
agcctaccagtcatt

SEQ ID NO: 2033788 - DNA, 15 bp, Homo sapiens
gcctaccagtcattc

SEQ ID NO: 2033789 - DNA, 15 bp, Homo sapiens
cctaccagtcattct

SEQ ID NO: 2033790 - DNA, 15 bp, Homo sapiens
ctaccagtcattctc

SEQ ID NO: 2033791 - DNA, 15 bp, Homo sapiens
taccagtcattctct

SEQ ID NO: 2033792 - DNA, 15 bp, Homo sapiens
accagtcattctctc

SEQ ID NO: 2033793 - DNA, 15 bp, Homo sapiens
ccagtcattctctca

SEQ ID NO: 2033794 - DNA, 15 bp, Homo sapiens
cagtcattctctcac

SEQ ID NO: 2033795 - DNA, 15 bp, Homo sapiens
agtcattctctcact

SEQ ID NO: 2033796 - DNA, 15 bp, Homo sapiens
gtcattctctcactt

SEQ ID NO: 2033797 - DNA, 15 bp, Homo sapiens
tcattctctcacttt

SEQ ID NO: 2033798 - DNA, 15 bp, Homo sapiens
cattctctcactttg

SEQ ID NO: 2033799 - DNA, 15 bp, Homo sapiens
attctctcactttgc

SEQ ID NO: 2033800 - DNA, 15 bp, Homo sapiens
ttctctcactttgct

SEQ ID NO: 2033801 - DNA, 15 bp, Homo sapiens
tctctcactttgctt

SEQ ID NO: 2033802 - DNA, 15 bp, Homo sapiens
ctctcactttgcttc

SEQ ID NO: 2033803 - DNA, 15 bp, Homo sapiens
tctcactttgcttct

SEQ ID NO: 2033804 - DNA, 15 bp, Homo sapiens
ctcactttgcttctg

SEQ ID NO: 2033805 - DNA, 15 bp, Homo sapiens
tcactttgcttctgt

SEQ ID NO: 2033806 - DNA, 15 bp, Homo sapiens
cactttgcttctgta

SEQ ID NO: 2033807 - DNA, 15 bp, Homo sapiens
actttgcttctgtaa

SEQ ID NO: 2033808 - DNA, 15 bp, Homo sapiens
ctttgcttctgtaat

SEQ ID NO: 2033809 - DNA, 15 bp, Homo sapiens
tttgcttctgtaatg

SEQ ID NO: 2033810 - DNA, 15 bp, Homo sapiens
ttgcttctgtaatgt

SEQ ID NO: 2033811 - DNA, 15 bp, Homo sapiens
tgcttctgtaatgta

SEQ ID NO: 2033812 - DNA, 15 bp, Homo sapiens
gcttctgtaatgtag

SEQ ID NO: 2033813 - DNA, 15 bp, Homo sapiens
cttctgtaatgtaga

SEQ ID NO: 2033814 - DNA, 15 bp, Homo sapiens
ttctgtaatgtagac

SEQ ID NO: 2033815 - DNA, 15 bp, Homo sapiens
tctgtaatgtagacc

SEQ ID NO: 2033816 - DNA, 15 bp, Homo sapiens
ctgtaatgtagacct

SEQ ID NO: 2033817 - DNA, 15 bp, Homo sapiens
tgtaatgtagacctt

SEQ ID NO: 2033818 - DNA, 15 bp, Homo sapiens
gtaatgtagaccttc

SEQ ID NO: 2033819 - DNA, 15 bp, Homo sapiens
taatgtagaccttct

SEQ ID NO: 2033820 - DNA, 15 bp, Homo sapiens
aatgtagaccttctt

SEQ ID NO: 2033821 - DNA, 15 bp, Homo sapiens
atgtagaccttcttc

SEQ ID NO: 2033822 - DNA, 15 bp, Homo sapiens
tgtagaccttcttcc

SEQ ID NO: 2033823 - DNA, 15 bp, Homo sapiens
gtagaccttcttcct

SEQ ID NO: 2033824 - DNA, 15 bp, Homo sapiens
tagaccttcttcctg

SEQ ID NO: 2033825 - DNA, 15 bp, Homo sapiens
agaccttcttcctga

SEQ ID NO: 2033826 - DNA, 15 bp, Homo sapiens
gaccttcttcctgag

SEQ ID NO: 2033827 - DNA, 15 bp, Homo sapiens
accttcttcctgaga

SEQ ID NO: 2033828 - DNA, 15 bp, Homo sapiens
ccttcttcctgagaa

SEQ ID NO: 2033829 - DNA, 15 bp, Homo sapiens
cttcttcctgagaag

SEQ ID NO: 2033830 - DNA, 15 bp, Homo sapiens
ttcttcctgagaagc

SEQ ID NO: 2033831 - DNA, 15 bp, Homo sapiens
tcttcctgagaagct

SEQ ID NO: 2033832 - DNA, 15 bp, Homo sapiens
cttcctgagaagctg

SEQ ID NO: 2033833 - DNA, 15 bp, Homo sapiens
ttcctgagaagctgg

SEQ ID NO: 2033834 - DNA, 15 bp, Homo sapiens
tcctgagaagctggc

SEQ ID NO: 2033835 - DNA, 15 bp, Homo sapiens
cctgagaagctggct

SEQ ID NO: 2033836 - DNA, 15 bp, Homo sapiens
ctgagaagctggcta

SEQ ID NO: 2033837 - DNA, 15 bp, Homo sapiens
tgagaagctggctag

SEQ ID NO: 2033838 - DNA, 15 bp, Homo sapiens
gagaagctggctaga

SEQ ID NO: 2033839 - DNA, 15 bp, Homo sapiens
agaagctggctagat

SEQ ID NO: 2033840 - DNA, 15 bp, Homo sapiens
gaagctggctagatc

SEQ ID NO: 2033841 - DNA, 15 bp, Homo sapiens
aagctggctagatca

SEQ ID NO: 2033842 - DNA, 15 bp, Homo sapiens
agctggctagatcag

SEQ ID NO: 2033843 - DNA, 15 bp, Homo sapiens
gctggctagatcagg

SEQ ID NO: 2033844 - DNA, 15 bp, Homo sapiens
ctggctagatcaggt

SEQ ID NO: 2033845 - DNA, 15 bp, Homo sapiens
tggctagatcaggta

SEQ ID NO: 2033846 - DNA, 15 bp, Homo sapiens
ggctagatcaggtag

SEQ ID NO: 2033847 - DNA, 15 bp, Homo sapiens
gctagatcaggtagt

SEQ ID NO: 2033848 - DNA, 15 bp, Homo sapiens
ctagatcaggtagtg

SEQ ID NO: 2033849 - DNA, 15 bp, Homo sapiens
tagatcaggtagtga

SEQ ID NO: 2033850 - DNA, 15 bp, Homo sapiens
agatcaggtagtgat

SEQ ID NO: 2033851 - DNA, 15 bp, Homo sapiens
gatcaggtagtgatc

SEQ ID NO: 2033852 - DNA, 15 bp, Homo sapiens
atcaggtagtgatca

SEQ ID NO: 2033853 - DNA, 15 bp, Homo sapiens
tcaggtagtgatcat

SEQ ID NO: 2033854 - DNA, 15 bp, Homo sapiens
caggtagtgatcata

SEQ ID NO: 2033855 - DNA, 15 bp, Homo sapiens
aggtagtgatcataa

SEQ ID NO: 2033856 - DNA, 15 bp, Homo sapiens
ggtagtgatcataac

SEQ ID NO: 2033857 - DNA, 15 bp, Homo sapiens
gtagtgatcataaca

SEQ ID NO: 2033858 - DNA, 15 bp, Homo sapiens
tagtgatcataacat

SEQ ID NO: 2033859 - DNA, 15 bp, Homo sapiens
agtgatcataacatt

SEQ ID NO: 2033860 - DNA, 15 bp, Homo sapiens
gtgatcataacattc

SEQ ID NO: 2033861 - DNA, 15 bp, Homo sapiens
tgatcataacattcc

SEQ ID NO: 2033862 - DNA, 15 bp, Homo sapiens
gatcataacattcct

SEQ ID NO: 2033863 - DNA, 15 bp, Homo sapiens
atcataacattccta

SEQ ID NO: 2033864 - DNA, 15 bp, Homo sapiens
tcataacattcctaa

SEQ ID NO: 2033865 - DNA, 15 bp, Homo sapiens
cataacattcctaaa

SEQ ID NO: 2033866 - DNA, 15 bp, Homo sapiens
ataacattcctaaac

SEQ ID NO: 2033867 - DNA, 15 bp, Homo sapiens
taacattcctaaacc

SEQ ID NO: 2033868 - DNA, 15 bp, Homo sapiens
aacattcctaaacca

SEQ ID NO: 2033869 - DNA, 15 bp, Homo sapiens
acattcctaaaccaa

SEQ ID NO: 2033870 - DNA, 15 bp, Homo sapiens
cattcctaaaccaat

SEQ ID NO: 2033871 - DNA, 15 bp, Homo sapiens
attcctaaaccaata

SEQ ID NO: 2033872 - DNA, 15 bp, Homo sapiens
ttcctaaaccaatag

SEQ ID NO: 2033873 - DNA, 15 bp, Homo sapiens
tcctaaaccaatagt

SEQ ID NO: 2033874 - DNA, 15 bp, Homo sapiens
cctaaaccaatagtg

SEQ ID NO: 2033875 - DNA, 15 bp, Homo sapiens
ctaaaccaatagtgc

SEQ ID NO: 2033876 - DNA, 15 bp, Homo sapiens
taaaccaatagtgct

SEQ ID NO: 2033877 - DNA, 15 bp, Homo sapiens
aaaccaatagtgctg

SEQ ID NO: 2033878 - DNA, 15 bp, Homo sapiens
aaccaatagtgctga

SEQ ID NO: 2033879 - DNA, 15 bp, Homo sapiens
accaatagtgctgat

SEQ ID NO: 2033880 - DNA, 15 bp, Homo sapiens
ccaatagtgctgata

SEQ ID NO: 2033881 - DNA, 15 bp, Homo sapiens
caatagtgctgatag

SEQ ID NO: 2033882 - DNA, 15 bp, Homo sapiens
aatagtgctgatagc

SEQ ID NO: 2033883 - DNA, 15 bp, Homo sapiens
atagtgctgatagct

SEQ ID NO: 2033884 - DNA, 15 bp, Homo sapiens
tagtgctgatagctc

SEQ ID NO: 2033885 - DNA, 15 bp, Homo sapiens
agtgctgatagctct

SEQ ID NO: 2033886 - DNA, 15 bp, Homo sapiens
gtgctgatagctctg

SEQ ID NO: 2033887 - DNA, 15 bp, Homo sapiens
tgctgatagctctgt

SEQ ID NO: 2033888 - DNA, 15 bp, Homo sapiens
gctgatagctctgtg

SEQ ID NO: 2033889 - DNA, 15 bp, Homo sapiens
ctgatagctctgtgt

SEQ ID NO: 2033890 - DNA, 15 bp, Homo sapiens
tgatagctctgtgta

SEQ ID NO: 2033891 - DNA, 15 bp, Homo sapiens
gatagctctgtgtac

SEQ ID NO: 2033892 - DNA, 15 bp, Homo sapiens
atagctctgtgtacg

SEQ ID NO: 2033893 - DNA, 15 bp, Homo sapiens
tagctctgtgtacgg

SEQ ID NO: 2033894 - DNA, 15 bp, Homo sapiens
agctctgtgtacgga

SEQ ID NO: 2033895 - DNA, 15 bp, Homo sapiens
gctctgtgtacggag

SEQ ID NO: 2033896 - DNA, 15 bp, Homo sapiens
ctctgtgtacggagg

SEQ ID NO: 2033897 - DNA, 15 bp, Homo sapiens
tctgtgtacggaggg

SEQ ID NO: 2033898 - DNA, 15 bp, Homo sapiens
ctgtgtacggaggga

SEQ ID NO: 2033899 - DNA, 15 bp, Homo sapiens
tgtgtacggagggat

SEQ ID NO: 2033900 - DNA, 15 bp, Homo sapiens
gtgtacggagggata

SEQ ID NO: 2033901 - DNA, 15 bp, Homo sapiens
tgtacggagggatat

SEQ ID NO: 2033902 - DNA, 15 bp, Homo sapiens
gtacggagggatatt

SEQ ID NO: 2033903 - DNA, 15 bp, Homo sapiens
tacggagggatattt

SEQ ID NO: 2033904 - DNA, 15 bp, Homo sapiens
acggagggatatttc

SEQ ID NO: 2033905 - DNA, 15 bp, Homo sapiens
cggagggatatttca

SEQ ID NO: 2033906 - DNA, 15 bp, Homo sapiens
ggagggatatttcat

SEQ ID NO: 2033907 - DNA, 15 bp, Homo sapiens
gagggatatttcatc

SEQ ID NO: 2033908 - DNA, 15 bp, Homo sapiens
agggatatttcatct

SEQ ID NO: 2033909 - DNA, 15 bp, Homo sapiens
gggatatttcatcta

SEQ ID NO: 2033910 - DNA, 15 bp, Homo sapiens
ggatatttcatctaa

SEQ ID NO: 2033911 - DNA, 15 bp, Homo sapiens
gatatttcatctaaa

SEQ ID NO: 2033912 - DNA, 15 bp, Homo sapiens
atatttcatctaaac

SEQ ID NO: 2033913 - DNA, 15 bp, Homo sapiens
tatttcatctaaacc

SEQ ID NO: 2033914 - DNA, 15 bp, Homo sapiens
atttcatctaaacca

SEQ ID NO: 2033915 - DNA, 15 bp, Homo sapiens
tttcatctaaaccat

SEQ ID NO: 2033916 - DNA, 15 bp, Homo sapiens
ttcatctaaaccatt

SEQ ID NO: 2033917 - DNA, 15 bp, Homo sapiens
tcatctaaaccattg

SEQ ID NO: 2033918 - DNA, 15 bp, Homo sapiens
catctaaaccattgc

SEQ ID NO: 2033919 - DNA, 15 bp, Homo sapiens
atctaaaccattgct

SEQ ID NO: 2033920 - DNA, 15 bp, Homo sapiens
tctaaaccattgctc

SEQ ID NO: 2033921 - DNA, 15 bp, Homo sapiens
ctaaaccattgctct

SEQ ID NO: 2033922 - DNA, 15 bp, Homo sapiens
taaaccattgctcta

SEQ ID NO: 2033923 - DNA, 15 bp, Homo sapiens
aaaccattgctctaa

SEQ ID NO: 2033924 - DNA, 15 bp, Homo sapiens
aaccattgctctaaa

SEQ ID NO: 2033925 - DNA, 15 bp, Homo sapiens
accattgctctaaac

SEQ ID NO: 2033926 - DNA, 15 bp, Homo sapiens
ccattgctctaaact

SEQ ID NO: 2033927 - DNA, 15 bp, Homo sapiens
cattgctctaaactt

SEQ ID NO: 2033928 - DNA, 15 bp, Homo sapiens
attgctctaaactta

SEQ ID NO: 2033929 - DNA, 15 bp, Homo sapiens
ttgctctaaacttag

SEQ ID NO: 2033930 - DNA, 15 bp, Homo sapiens
tgctctaaacttaga

SEQ ID NO: 2033931 - DNA, 15 bp, Homo sapiens
gctctaaacttagac

SEQ ID NO: 2033932 - DNA, 15 bp, Homo sapiens
ctctaaacttagact

SEQ ID NO: 2033933 - DNA, 15 bp, Homo sapiens
tctaaacttagactt

SEQ ID NO: 2033934 - DNA, 15 bp, Homo sapiens
ctaaacttagacttg

SEQ ID NO: 2033935 - DNA, 15 bp, Homo sapiens
taaacttagacttgg

SEQ ID NO: 2033936 - DNA, 15 bp, Homo sapiens
aaacttagacttggc

SEQ ID NO: 2033937 - DNA, 15 bp, Homo sapiens
aacttagacttggct

SEQ ID NO: 2033938 - DNA, 15 bp, Homo sapiens
acttagacttggctc

SEQ ID NO: 2033939 - DNA, 15 bp, Homo sapiens
cttagacttggctct

SEQ ID NO: 2033940 - DNA, 15 bp, Homo sapiens
ttagacttggctctg

SEQ ID NO: 2033941 - DNA, 15 bp, Homo sapiens
tagacttggctctga

SEQ ID NO: 2033942 - DNA, 15 bp, Homo sapiens
agacttggctctgag

SEQ ID NO: 2033943 - DNA, 15 bp, Homo sapiens
gacttggctctgagt

SEQ ID NO: 2033944 - DNA, 15 bp, Homo sapiens
acttggctctgagtc

SEQ ID NO: 2033945 - DNA, 15 bp, Homo sapiens
cttggctctgagtca

SEQ ID NO: 2033946 - DNA, 15 bp, Homo sapiens
ttggctctgagtcag

SEQ ID NO: 2033947 - DNA, 15 bp, Homo sapiens
tggctctgagtcagt

SEQ ID NO: 2033948 - DNA, 15 bp, Homo sapiens
ggctctgagtcagta

SEQ ID NO: 2033949 - DNA, 15 bp, Homo sapiens
gctctgagtcagtaa

SEQ ID NO: 2033950 - DNA, 15 bp, Homo sapiens
ctctgagtcagtaat

SEQ ID NO: 2033951 - DNA, 15 bp, Homo sapiens
tctgagtcagtaata

SEQ ID NO: 2033952 - DNA, 15 bp, Homo sapiens
ctgagtcagtaatac

SEQ ID NO: 2033953 - DNA, 15 bp, Homo sapiens
tgagtcagtaatact

SEQ ID NO: 2033954 - DNA, 15 bp, Homo sapiens
gagtcagtaatactt

SEQ ID NO: 2033955 - DNA, 15 bp, Homo sapiens
agtcagtaatacttc

SEQ ID NO: 2033956 - DNA, 15 bp, Homo sapiens
gtcagtaatacttct

SEQ ID NO: 2033957 - DNA, 15 bp, Homo sapiens
tcagtaatacttctg

SEQ ID NO: 2033958 - DNA, 15 bp, Homo sapiens
cagtaatacttctgt

SEQ ID NO: 2033959 - DNA, 15 bp, Homo sapiens
agtaatacttctgtt

SEQ ID NO: 2033960 - DNA, 15 bp, Homo sapiens
gtaatacttctgttt

SEQ ID NO: 2033961 - DNA, 15 bp, Homo sapiens
taatacttctgttta

SEQ ID NO: 2033962 - DNA, 15 bp, Homo sapiens
aatacttctgtttac

SEQ ID NO: 2033963 - DNA, 15 bp, Homo sapiens
atacttctgtttact

SEQ ID NO: 2033964 - DNA, 15 bp, Homo sapiens
tacttctgtttacta

SEQ ID NO: 2033965 - DNA, 15 bp, Homo sapiens
acttctgtttactag

SEQ ID NO: 2033966 - DNA, 15 bp, Homo sapiens
cttctgtttactagg

SEQ ID NO: 2033967 - DNA, 15 bp, Homo sapiens
ttctgtttactaggt

SEQ ID NO: 2033968 - DNA, 15 bp, Homo sapiens
tctgtttactaggtt

SEQ ID NO: 2033969 - DNA, 15 bp, Homo sapiens
ctgtttactaggttt

SEQ ID NO: 2033970 - DNA, 15 bp, Homo sapiens
tgtttactaggtttg

SEQ ID NO: 2033971 - DNA, 15 bp, Homo sapiens
gtttactaggtttga

SEQ ID NO: 2033972 - DNA, 15 bp, Homo sapiens
tttactaggtttgaa

SEQ ID NO: 2033973 - DNA, 15 bp, Homo sapiens
ttactaggtttgaaa

SEQ ID NO: 2033974 - DNA, 15 bp, Homo sapiens
tactaggtttgaaat

SEQ ID NO: 2033975 - DNA, 15 bp, Homo sapiens
actaggtttgaaata

SEQ ID NO: 2033976 - DNA, 15 bp, Homo sapiens
ctaggtttgaaatat

SEQ ID NO: 2033977 - DNA, 15 bp, Homo sapiens
taggtttgaaatatc

SEQ ID NO: 2033978 - DNA, 15 bp, Homo sapiens
aggtttgaaatatct

SEQ ID NO: 2033979 - DNA, 15 bp, Homo sapiens
ggtttgaaatatctc

SEQ ID NO: 2033980 - DNA, 15 bp, Homo sapiens
gtttgaaatatctcc

SEQ ID NO: 2033981 - DNA, 15 bp, Homo sapiens
tttgaaatatctccc

SEQ ID NO: 2033982 - DNA, 15 bp, Homo sapiens
ttgaaatatctccct

SEQ ID NO: 2033983 - DNA, 15 bp, Homo sapiens
tgaaatatctccctc

SEQ ID NO: 2033984 - DNA, 15 bp, Homo sapiens
gaaatatctccctct

SEQ ID NO: 2033985 - DNA, 15 bp, Homo sapiens
aaatatctccctctt

SEQ ID NO: 2033986 - DNA, 15 bp, Homo sapiens
aatatctccctctta

SEQ ID NO: 2033987 - DNA, 15 bp, Homo sapiens
atatctccctcttag

SEQ ID NO: 2033988 - DNA, 15 bp, Homo sapiens
tatctccctcttagc

SEQ ID NO: 2033989 - DNA, 15 bp, Homo sapiens
atctccctcttagct

SEQ ID NO: 2033990 - DNA, 15 bp, Homo sapiens
tctccctcttagctg

SEQ ID NO: 2033991 - DNA, 15 bp, Homo sapiens
ctccctcttagctgg

SEQ ID NO: 2033992 - DNA, 15 bp, Homo sapiens
tccctcttagctggg

SEQ ID NO: 2033993 - DNA, 15 bp, Homo sapiens
ccctcttagctgggc

SEQ ID NO: 2033994 - DNA, 15 bp, Homo sapiens
cctcttagctgggca

SEQ ID NO: 2033995 - DNA, 15 bp, Homo sapiens
ctcttagctgggcac

SEQ ID NO: 2033996 - DNA, 15 bp, Homo sapiens
tcttagctgggcaca

SEQ ID NO: 2033997 - DNA, 15 bp, Homo sapiens
cttagctgggcacag

SEQ ID NO: 2033998 - DNA, 15 bp, Homo sapiens
tagctgggcacagtg

SEQ ID NO: 2033999 - DNA, 15 bp, Homo sapiens
agctgggcacagtgg

SEQ ID NO: 2034000 - DNA, 15 bp, Homo sapiens
ctgggcacagtggca

SEQ ID NO: 2034001 - DNA, 15 bp, Homo sapiens
tgggcacagtggcac

SEQ ID NO: 2034002 - DNA, 15 bp, Homo sapiens
gggcacagtggcaca

SEQ ID NO: 2034003 - DNA, 15 bp, Homo sapiens
ggcacagtggcacat

SEQ ID NO: 2034004 - DNA, 15 bp, Homo sapiens
gcacagtggcacatg

SEQ ID NO: 2034005 - DNA, 15 bp, Homo sapiens
cacagtggcacatgc

SEQ ID NO: 2034006 - DNA, 15 bp, Homo sapiens
acagtggcacatgct

SEQ ID NO: 2034007 - DNA, 15 bp, Homo sapiens
cagtggcacatgctt

SEQ ID NO: 2034008 - DNA, 15 bp, Homo sapiens
agtggcacatgcttg

SEQ ID NO: 2034009 - DNA, 15 bp, Homo sapiens
gtggcacatgcttgt

SEQ ID NO: 2034010 - DNA, 15 bp, Homo sapiens
tggcacatgcttgtg

SEQ ID NO: 2034011 - DNA, 15 bp, Homo sapiens
ggcacatgcttgtgg

SEQ ID NO: 2034012 - DNA, 15 bp, Homo sapiens
gcacatgcttgtggt

SEQ ID NO: 2034013 - DNA, 15 bp, Homo sapiens
cacatgcttgtggtc

SEQ ID NO: 2034014 - DNA, 15 bp, Homo sapiens
acatgcttgtggtcc

SEQ ID NO: 2034015 - DNA, 15 bp, Homo sapiens
catgcttgtggtccc

SEQ ID NO: 2034016 - DNA, 15 bp, Homo sapiens
atgcttgtggtccca

SEQ ID NO: 2034017 - DNA, 15 bp, Homo sapiens
tgcttgtggtcccag

SEQ ID NO: 2034018 - DNA, 15 bp, Homo sapiens
gcttgtggtcccagc

SEQ ID NO: 2034019 - DNA, 15 bp, Homo sapiens
cttgtggtcccagct

SEQ ID NO: 2034020 - DNA, 15 bp, Homo sapiens
ttgtggtcccagcta

SEQ ID NO: 2034021 - DNA, 15 bp, Homo sapiens
tggtcccagctacta

SEQ ID NO: 2034022 - DNA, 15 bp, Homo sapiens
ggtcccagctactag

SEQ ID NO: 2034023 - DNA, 15 bp, Homo sapiens
gtcccagctactagg

SEQ ID NO: 2034024 - DNA, 15 bp, Homo sapiens
tagggaggctgaggt

SEQ ID NO: 2034025 - DNA, 15 bp, Homo sapiens
agggaggctgaggtg

SEQ ID NO: 2034026 - DNA, 15 bp, Homo sapiens
attgcttgagcccaa

SEQ ID NO: 2034027 - DNA, 15 bp, Homo sapiens
ttgcttgagcccaag

SEQ ID NO: 2034028 - DNA, 15 bp, Homo sapiens
tgcttgagcccaaga

SEQ ID NO: 2034029 - DNA, 15 bp, Homo sapiens
gcttgagcccaagag

SEQ ID NO: 2034030 - DNA, 15 bp, Homo sapiens
tgagcccaagagttc

SEQ ID NO: 2034031 - DNA, 15 bp, Homo sapiens
gagcccaagagttca

SEQ ID NO: 2034032 - DNA, 15 bp, Homo sapiens
agcccaagagttcaa

SEQ ID NO: 2034033 - DNA, 15 bp, Homo sapiens
gcccaagagttcaag

SEQ ID NO: 2034034 - DNA, 15 bp, Homo sapiens
cccaagagttcaagt

SEQ ID NO: 2034035 - DNA, 15 bp, Homo sapiens
ccaagagttcaagtc

SEQ ID NO: 2034036 - DNA, 15 bp, Homo sapiens
caagagttcaagtct

SEQ ID NO: 2034037 - DNA, 15 bp, Homo sapiens
aagagttcaagtctg

SEQ ID NO: 2034038 - DNA, 15 bp, Homo sapiens
agagttcaagtctgg

SEQ ID NO: 2034039 - DNA, 15 bp, Homo sapiens
gagttcaagtctggc

SEQ ID NO: 2034040 - DNA, 15 bp, Homo sapiens
agttcaagtctggcc

SEQ ID NO: 2034041 - DNA, 15 bp, Homo sapiens
gttcaagtctggcct

SEQ ID NO: 2034042 - DNA, 15 bp, Homo sapiens
ttcaagtctggcctg

SEQ ID NO: 2034043 - DNA, 15 bp, Homo sapiens
tcaagtctggcctgg

SEQ ID NO: 2034044 - DNA, 15 bp, Homo sapiens
caagtctggcctggg

SEQ ID NO: 2034045 - DNA, 15 bp, Homo sapiens
aagtctggcctgggc

SEQ ID NO: 2034046 - DNA, 15 bp, Homo sapiens
agtctggcctgggca

SEQ ID NO: 2034047 - DNA, 15 bp, Homo sapiens
gtctggcctgggcaa

SEQ ID NO: 2034048 - DNA, 15 bp, Homo sapiens
tctggcctgggcaac

SEQ ID NO: 2034049 - DNA, 15 bp, Homo sapiens
ctggcctgggcaaca

SEQ ID NO: 2034050 - DNA, 15 bp, Homo sapiens
tggcctgggcaacat

SEQ ID NO: 2034051 - DNA, 15 bp, Homo sapiens
ggcctgggcaacatc

SEQ ID NO: 2034052 - DNA, 15 bp, Homo sapiens
catcatgagaccctc

SEQ ID NO: 2034053 - DNA, 15 bp, Homo sapiens
atcatgagaccctcg

SEQ ID NO: 2034054 - DNA, 15 bp, Homo sapiens
tcatgagaccctcgt

SEQ ID NO: 2034055 - DNA, 15 bp, Homo sapiens
catgagaccctcgtc

SEQ ID NO: 2034056 - DNA, 15 bp, Homo sapiens
atgagaccctcgtct

SEQ ID NO: 2034057 - DNA, 15 bp, Homo sapiens
tgagaccctcgtctt

SEQ ID NO: 2034058 - DNA, 15 bp, Homo sapiens
gagaccctcgtcttt

SEQ ID NO: 2034059 - DNA, 15 bp, Homo sapiens
agaccctcgtctttt

SEQ ID NO: 2034060 - DNA, 15 bp, Homo sapiens
gaccctcgtctttta

SEQ ID NO: 2034061 - DNA, 15 bp, Homo sapiens
accctcgtcttttaa

SEQ ID NO: 2034062 - DNA, 15 bp, Homo sapiens
ccctcgtcttttaaa

SEQ ID NO: 2034063 - DNA, 15 bp, Homo sapiens
cctcgtcttttaaaa

SEQ ID NO: 2034064 - DNA, 15 bp, Homo sapiens
ctcgtcttttaaaag

SEQ ID NO: 2034065 - DNA, 15 bp, Homo sapiens
tcgtcttttaaaaga

SEQ ID NO: 2034066 - DNA, 15 bp, Homo sapiens
cgtcttttaaaagaa

SEQ ID NO: 2034067 - DNA, 15 bp, Homo sapiens
gtcttttaaaagaag

SEQ ID NO: 2034068 - DNA, 15 bp, Homo sapiens
tcttttaaaagaagg

SEQ ID NO: 2034069 - DNA, 15 bp, Homo sapiens
cttttaaaagaagga

SEQ ID NO: 2034070 - DNA, 15 bp, Homo sapiens
ttttaaaagaaggaa

SEQ ID NO: 2034071 - DNA, 15 bp, Homo sapiens
tttaaaagaaggaaa

SEQ ID NO: 2034072 - DNA, 15 bp, Homo sapiens
ttaaaagaaggaaaa

SEQ ID NO: 2034073 - DNA, 15 bp, Homo sapiens
taaaagaaggaaaag

SEQ ID NO: 2034074 - DNA, 15 bp, Homo sapiens
aaaagaaggaaaaga

SEQ ID NO: 2034075 - DNA, 15 bp, Homo sapiens
aaagaaggaaaagaa

SEQ ID NO: 2034076 - DNA, 15 bp, Homo sapiens
aagaaggaaaagaaa

SEQ ID NO: 2034077 - DNA, 15 bp, Homo sapiens
agaaggaaaagaaat

SEQ ID NO: 2034078 - DNA, 15 bp, Homo sapiens
gaaggaaaagaaata

SEQ ID NO: 2034079 - DNA, 15 bp, Homo sapiens
aaggaaaagaaatat

SEQ ID NO: 2034080 - DNA, 15 bp, Homo sapiens
aggaaaagaaatatc

SEQ ID NO: 2034081 - DNA, 15 bp, Homo sapiens
ggaaaagaaatatct

SEQ ID NO: 2034082 - DNA, 15 bp, Homo sapiens
gaaaagaaatatctc

SEQ ID NO: 2034083 - DNA, 15 bp, Homo sapiens
aaaagaaatatctcc

SEQ ID NO: 2034084 - DNA, 15 bp, Homo sapiens
aaagaaatatctccc

SEQ ID NO: 2034085 - DNA, 15 bp, Homo sapiens
aagaaatatctccct

SEQ ID NO: 2034086 - DNA, 15 bp, Homo sapiens
agaaatatctccctt

SEQ ID NO: 2034087 - DNA, 15 bp, Homo sapiens
gaaatatctcccttt

SEQ ID NO: 2034088 - DNA, 15 bp, Homo sapiens
aaatatctccctttt

SEQ ID NO: 2034089 - DNA, 15 bp, Homo sapiens
aatatctccctttta

SEQ ID NO: 2034090 - DNA, 15 bp, Homo sapiens
atatctcccttttag

SEQ ID NO: 2034091 - DNA, 15 bp, Homo sapiens
tatctcccttttaga

SEQ ID NO: 2034092 - DNA, 15 bp, Homo sapiens
atctcccttttagaa

SEQ ID NO: 2034093 - DNA, 15 bp, Homo sapiens
tctcccttttagaag

SEQ ID NO: 2034094 - DNA, 15 bp, Homo sapiens
ctcccttttagaaga

SEQ ID NO: 2034095 - DNA, 15 bp, Homo sapiens
tcccttttagaagaa

SEQ ID NO: 2034096 - DNA, 15 bp, Homo sapiens
cccttttagaagaaa

SEQ ID NO: 2034097 - DNA, 15 bp, Homo sapiens
ccttttagaagaaac

SEQ ID NO: 2034098 - DNA, 15 bp, Homo sapiens
cttttagaagaaacc

SEQ ID NO: 2034099 - DNA, 15 bp, Homo sapiens
ttttagaagaaacct

SEQ ID NO: 2034100 - DNA, 15 bp, Homo sapiens
tttagaagaaaccta

SEQ ID NO: 2034101 - DNA, 15 bp, Homo sapiens
ttagaagaaacctag

SEQ ID NO: 2034102 - DNA, 15 bp, Homo sapiens
tagaagaaacctaga

SEQ ID NO: 2034103 - DNA, 15 bp, Homo sapiens
agaagaaacctagaa

SEQ ID NO: 2034104 - DNA, 15 bp, Homo sapiens
gaagaaacctagaag

SEQ ID NO: 2034105 - DNA, 15 bp, Homo sapiens
aagaaacctagaagt

SEQ ID NO: 2034106 - DNA, 15 bp, Homo sapiens
agaaacctagaagtc

SEQ ID NO: 2034107 - DNA, 15 bp, Homo sapiens
gaaacctagaagtct

SEQ ID NO: 2034108 - DNA, 15 bp, Homo sapiens
aaacctagaagtctc

SEQ ID NO: 2034109 - DNA, 15 bp, Homo sapiens
aacctagaagtctct

SEQ ID NO: 2034110 - DNA, 15 bp, Homo sapiens
acctagaagtctcta

SEQ ID NO: 2034111 - DNA, 15 bp, Homo sapiens
cctagaagtctctat

SEQ ID NO: 2034112 - DNA, 15 bp, Homo sapiens
ctagaagtctctatt

SEQ ID NO: 2034113 - DNA, 15 bp, Homo sapiens
tagaagtctctattt

SEQ ID NO: 2034114 - DNA, 15 bp, Homo sapiens
agaagtctctatttt

SEQ ID NO: 2034115 - DNA, 15 bp, Homo sapiens
gaagtctctattttg

SEQ ID NO: 2034116 - DNA, 15 bp, Homo sapiens
aagtctctattttga

SEQ ID NO: 2034117 - DNA, 15 bp, Homo sapiens
agtctctattttgag

SEQ ID NO: 2034118 - DNA, 15 bp, Homo sapiens
gtctctattttgagg

SEQ ID NO: 2034119 - DNA, 15 bp, Homo sapiens
tctctattttgaggc

SEQ ID NO: 2034120 - DNA, 15 bp, Homo sapiens
ctctattttgaggcc

SEQ ID NO: 2034121 - DNA, 15 bp, Homo sapiens
tctattttgaggcca

SEQ ID NO: 2034122 - DNA, 15 bp, Homo sapiens
ctattttgaggccac

SEQ ID NO: 2034123 - DNA, 15 bp, Homo sapiens
tattttgaggccact

SEQ ID NO: 2034124 - DNA, 15 bp, Homo sapiens
attttgaggccactt

SEQ ID NO: 2034125 - DNA, 15 bp, Homo sapiens
ttttgaggccactta

SEQ ID NO: 2034126 - DNA, 15 bp, Homo sapiens
tttgaggccacttaa

SEQ ID NO: 2034127 - DNA, 15 bp, Homo sapiens
ttgaggccacttaag

SEQ ID NO: 2034128 - DNA, 15 bp, Homo sapiens
tgaggccacttaaga

SEQ ID NO: 2034129 - DNA, 15 bp, Homo sapiens
gaggccacttaagat

SEQ ID NO: 2034130 - DNA, 15 bp, Homo sapiens
aggccacttaagatc

SEQ ID NO: 2034131 - DNA, 15 bp, Homo sapiens
ggccacttaagatct

SEQ ID NO: 2034132 - DNA, 15 bp, Homo sapiens
gccacttaagatctc

SEQ ID NO: 2034133 - DNA, 15 bp, Homo sapiens
ccacttaagatctct

SEQ ID NO: 2034134 - DNA, 15 bp, Homo sapiens
cacttaagatctctg

SEQ ID NO: 2034135 - DNA, 15 bp, Homo sapiens
acttaagatctctga

SEQ ID NO: 2034136 - DNA, 15 bp, Homo sapiens
cttaagatctctgaa

SEQ ID NO: 2034137 - DNA, 15 bp, Homo sapiens
ttaagatctctgaaa

SEQ ID NO: 2034138 - DNA, 15 bp, Homo sapiens
taagatctctgaaat

SEQ ID NO: 2034139 - DNA, 15 bp, Homo sapiens
aagatctctgaaatg

SEQ ID NO: 2034140 - DNA, 15 bp, Homo sapiens
agatctctgaaatga

SEQ ID NO: 2034141 - DNA, 15 bp, Homo sapiens
gatctctgaaatgat

SEQ ID NO: 2034142 - DNA, 15 bp, Homo sapiens
atctctgaaatgatt

SEQ ID NO: 2034143 - DNA, 15 bp, Homo sapiens
tctctgaaatgattt

SEQ ID NO: 2034144 - DNA, 15 bp, Homo sapiens
ctctgaaatgatttt

SEQ ID NO: 2034145 - DNA, 15 bp, Homo sapiens
tctgaaatgatttta

SEQ ID NO: 2034146 - DNA, 15 bp, Homo sapiens
ctgaaatgattttaa

SEQ ID NO: 2034147 - DNA, 15 bp, Homo sapiens
tgaaatgattttaat

SEQ ID NO: 2034148 - DNA, 15 bp, Homo sapiens
gaaatgattttaatg

SEQ ID NO: 2034149 - DNA, 15 bp, Homo sapiens
aaatgattttaatgt

SEQ ID NO: 2034150 - DNA, 15 bp, Homo sapiens
aatgattttaatgtt

SEQ ID NO: 2034151 - DNA, 15 bp, Homo sapiens
atgattttaatgttt

SEQ ID NO: 2034152 - DNA, 15 bp, Homo sapiens
tgattttaatgtttt

SEQ ID NO: 2034153 - DNA, 15 bp, Homo sapiens
gattttaatgtttta

SEQ ID NO: 2034154 - DNA, 15 bp, Homo sapiens
attttaatgttttag

SEQ ID NO: 2034155 - DNA, 15 bp, Homo sapiens
ttttaatgttttaga

SEQ ID NO: 2034156 - DNA, 15 bp, Homo sapiens
tttaatgttttagag

SEQ ID NO: 2034157 - DNA, 15 bp, Homo sapiens
ttaatgttttagaga

SEQ ID NO: 2034158 - DNA, 15 bp, Homo sapiens
taatgttttagagaa

SEQ ID NO: 2034159 - DNA, 15 bp, Homo sapiens
aatgttttagagaat

SEQ ID NO: 2034160 - DNA, 15 bp, Homo sapiens
atgttttagagaatt

SEQ ID NO: 2034161 - DNA, 15 bp, Homo sapiens
tgttttagagaattg

SEQ ID NO: 2034162 - DNA, 15 bp, Homo sapiens
gttttagagaattgt

SEQ ID NO: 2034163 - DNA, 15 bp, Homo sapiens
ttttagagaattgtt

SEQ ID NO: 2034164 - DNA, 15 bp, Homo sapiens
tttagagaattgttt

SEQ ID NO: 2034165 - DNA, 15 bp, Homo sapiens
ttagagaattgttta

SEQ ID NO: 2034166 - DNA, 15 bp, Homo sapiens
tagagaattgtttat

SEQ ID NO: 2034167 - DNA, 15 bp, Homo sapiens
agagaattgtttatg

SEQ ID NO: 2034168 - DNA, 15 bp, Homo sapiens
gagaattgtttatgg

SEQ ID NO: 2034169 - DNA, 15 bp, Homo sapiens
agaattgtttatggt

SEQ ID NO: 2034170 - DNA, 15 bp, Homo sapiens
gaattgtttatggta

SEQ ID NO: 2034171 - DNA, 15 bp, Homo sapiens
aattgtttatggtat

SEQ ID NO: 2034172 - DNA, 15 bp, Homo sapiens
attgtttatggtatt

SEQ ID NO: 2034173 - DNA, 15 bp, Homo sapiens
ttgtttatggtatta

SEQ ID NO: 2034174 - DNA, 15 bp, Homo sapiens
tgtttatggtattac

SEQ ID NO: 2034175 - DNA, 15 bp, Homo sapiens
gtttatggtattacc

SEQ ID NO: 2034176 - DNA, 15 bp, Homo sapiens
tttatggtattacct

SEQ ID NO: 2034177 - DNA, 15 bp, Homo sapiens
ttatggtattacctg

SEQ ID NO: 2034178 - DNA, 15 bp, Homo sapiens
tatggtattacctga

SEQ ID NO: 2034179 - DNA, 15 bp, Homo sapiens
atggtattacctgac

SEQ ID NO: 2034180 - DNA, 15 bp, Homo sapiens
tggtattacctgacc

SEQ ID NO: 2034181 - DNA, 15 bp, Homo sapiens
ggtattacctgacct

SEQ ID NO: 2034182 - DNA, 15 bp, Homo sapiens
gtattacctgacctt

SEQ ID NO: 2034183 - DNA, 15 bp, Homo sapiens
tattacctgaccttt

SEQ ID NO: 2034184 - DNA, 15 bp, Homo sapiens
attacctgacctttt

SEQ ID NO: 2034185 - DNA, 15 bp, Homo sapiens
ttacctgaccttttt

SEQ ID NO: 2034186 - DNA, 15 bp, Homo sapiens
tacctgacctttttt

SEQ ID NO: 2034187 - DNA, 15 bp, Homo sapiens
acctgaccttttttt

SEQ ID NO: 2034188 - DNA, 15 bp, Homo sapiens
cctgacctttttttc

SEQ ID NO: 2034189 - DNA, 15 bp, Homo sapiens
ctgacctttttttct

SEQ ID NO: 2034190 - DNA, 15 bp, Homo sapiens
tgacctttttttctt

SEQ ID NO: 2034191 - DNA, 15 bp, Homo sapiens
gacctttttttcttg

SEQ ID NO: 2034192 - DNA, 15 bp, Homo sapiens
acctttttttcttga

SEQ ID NO: 2034193 - DNA, 15 bp, Homo sapiens
cctttttttcttgat

SEQ ID NO: 2034194 - DNA, 15 bp, Homo sapiens
ctttttttcttgatt

SEQ ID NO: 2034195 - DNA, 15 bp, Homo sapiens
tttttttcttgattt

SEQ ID NO: 2034196 - DNA, 15 bp, Homo sapiens
ttttttcttgatttg

SEQ ID NO: 2034197 - DNA, 15 bp, Homo sapiens
tttttcttgatttgt

SEQ ID NO: 2034198 - DNA, 15 bp, Homo sapiens
ttttcttgatttgtt

SEQ ID NO: 2034199 - DNA, 15 bp, Homo sapiens
tttcttgatttgttt

SEQ ID NO: 2034200 - DNA, 15 bp, Homo sapiens
ttcttgatttgtttt

SEQ ID NO: 2034201 - DNA, 15 bp, Homo sapiens
tcttgatttgttttc

SEQ ID NO: 2034202 - DNA, 15 bp, Homo sapiens
cttgatttgttttct

SEQ ID NO: 2034203 - DNA, 15 bp, Homo sapiens
ttgatttgttttctt

SEQ ID NO: 2034204 - DNA, 15 bp, Homo sapiens
tgatttgttttcttt

SEQ ID NO: 2034205 - DNA, 15 bp, Homo sapiens
gatttgttttctttt

SEQ ID NO: 2034206 - DNA, 15 bp, Homo sapiens
atttgttttcttttt

SEQ ID NO: 2034207 - DNA, 15 bp, Homo sapiens
gttttctttttcttt

SEQ ID NO: 2034208 - DNA, 15 bp, Homo sapiens
ttttctttttctttg

SEQ ID NO: 2034209 - DNA, 15 bp, Homo sapiens
tttctttttctttgt

SEQ ID NO: 2034210 - DNA, 15 bp, Homo sapiens
ttctttttctttgtt

SEQ ID NO: 2034211 - DNA, 15 bp, Homo sapiens
tctttttctttgtta

SEQ ID NO: 2034212 - DNA, 15 bp, Homo sapiens
ctttttctttgttat

SEQ ID NO: 2034213 - DNA, 15 bp, Homo sapiens
tttttctttgttatt

SEQ ID NO: 2034214 - DNA, 15 bp, Homo sapiens
ttttctttgttatta

SEQ ID NO: 2034215 - DNA, 15 bp, Homo sapiens
tttctttgttattat

SEQ ID NO: 2034216 - DNA, 15 bp, Homo sapiens
ttctttgttattatc

SEQ ID NO: 2034217 - DNA, 15 bp, Homo sapiens
tctttgttattatcc

SEQ ID NO: 2034218 - DNA, 15 bp, Homo sapiens
ctttgttattatcct

SEQ ID NO: 2034219 - DNA, 15 bp, Homo sapiens
tttgttattatccta

SEQ ID NO: 2034220 - DNA, 15 bp, Homo sapiens
ttgttattatcctat

SEQ ID NO: 2034221 - DNA, 15 bp, Homo sapiens
tgttattatcctatg

SEQ ID NO: 2034222 - DNA, 15 bp, Homo sapiens
gttattatcctatgt

SEQ ID NO: 2034223 - DNA, 15 bp, Homo sapiens
ttattatcctatgtt

SEQ ID NO: 2034224 - DNA, 15 bp, Homo sapiens
tattatcctatgttt

SEQ ID NO: 2034225 - DNA, 15 bp, Homo sapiens
attatcctatgttta

SEQ ID NO: 2034226 - DNA, 15 bp, Homo sapiens
ttatcctatgtttaa

SEQ ID NO: 2034227 - DNA, 15 bp, Homo sapiens
tatcctatgtttaag

SEQ ID NO: 2034228 - DNA, 15 bp, Homo sapiens
atcctatgtttaagg

SEQ ID NO: 2034229 - DNA, 15 bp, Homo sapiens
tcctatgtttaaggg

SEQ ID NO: 2034230 - DNA, 15 bp, Homo sapiens
cctatgtttaaggga

SEQ ID NO: 2034231 - DNA, 15 bp, Homo sapiens
ctatgtttaagggag

SEQ ID NO: 2034232 - DNA, 15 bp, Homo sapiens
tatgtttaagggaga

SEQ ID NO: 2034233 - DNA, 15 bp, Homo sapiens
atgtttaagggagaa

SEQ ID NO: 2034234 - DNA, 15 bp, Homo sapiens
tgtttaagggagaaa

SEQ ID NO: 2034235 - DNA, 15 bp, Homo sapiens
gtttaagggagaaaa

SEQ ID NO: 2034236 - DNA, 15 bp, Homo sapiens
tttaagggagaaaaa

SEQ ID NO: 2034237 - DNA, 15 bp, Homo sapiens
ttaagggagaaaaat

SEQ ID NO: 2034238 - DNA, 15 bp, Homo sapiens
taagggagaaaaata

SEQ ID NO: 2034239 - DNA, 15 bp, Homo sapiens
aagggagaaaaataa

SEQ ID NO: 2034240 - DNA, 15 bp, Homo sapiens
agggagaaaaataat

SEQ ID NO: 2034241 - DNA, 15 bp, Homo sapiens
gggagaaaaataatt

SEQ ID NO: 2034242 - DNA, 15 bp, Homo sapiens
ggagaaaaataattt

SEQ ID NO: 2034243 - DNA, 15 bp, Homo sapiens
gagaaaaataatttt

SEQ ID NO: 2034244 - DNA, 15 bp, Homo sapiens
agaaaaataatttta

SEQ ID NO: 2034245 - DNA, 15 bp, Homo sapiens
gaaaaataattttaa

SEQ ID NO: 2034246 - DNA, 15 bp, Homo sapiens
aaaaataattttaaa

SEQ ID NO: 2034247 - DNA, 15 bp, Homo sapiens
aaaataattttaaat

SEQ ID NO: 2034248 - DNA, 15 bp, Homo sapiens
aaataattttaaatt

SEQ ID NO: 2034249 - DNA, 15 bp, Homo sapiens
aataattttaaattg

SEQ ID NO: 2034250 - DNA, 15 bp, Homo sapiens
ataattttaaattga

SEQ ID NO: 2034251 - DNA, 15 bp, Homo sapiens
taattttaaattgag

SEQ ID NO: 2034252 - DNA, 15 bp, Homo sapiens
aattttaaattgagc

SEQ ID NO: 2034253 - DNA, 15 bp, Homo sapiens
attttaaattgagcg

SEQ ID NO: 2034254 - DNA, 15 bp, Homo sapiens
ttttaaattgagcga

SEQ ID NO: 2034255 - DNA, 15 bp, Homo sapiens
tttaaattgagcgat

SEQ ID NO: 2034256 - DNA, 15 bp, Homo sapiens
ttaaattgagcgatt

SEQ ID NO: 2034257 - DNA, 15 bp, Homo sapiens
taaattgagcgattt

SEQ ID NO: 2034258 - DNA, 15 bp, Homo sapiens
aaattgagcgatttc

SEQ ID NO: 2034259 - DNA, 15 bp, Homo sapiens
aattgagcgatttct

SEQ ID NO: 2034260 - DNA, 15 bp, Homo sapiens
attgagcgatttctt

SEQ ID NO: 2034261 - DNA, 15 bp, Homo sapiens
ttgagcgatttcttg

SEQ ID NO: 2034262 - DNA, 15 bp, Homo sapiens
tgagcgatttcttgg

SEQ ID NO: 2034263 - DNA, 15 bp, Homo sapiens
gagcgatttcttggt

SEQ ID NO: 2034264 - DNA, 15 bp, Homo sapiens
agcgatttcttggta

SEQ ID NO: 2034265 - DNA, 15 bp, Homo sapiens
gcgatttcttggtat

SEQ ID NO: 2034266 - DNA, 15 bp, Homo sapiens
cgatttcttggtata

SEQ ID NO: 2034267 - DNA, 15 bp, Homo sapiens
gatttcttggtataa

SEQ ID NO: 2034268 - DNA, 15 bp, Homo sapiens
atttcttggtataat

SEQ ID NO: 2034269 - DNA, 15 bp, Homo sapiens
tttcttggtataatt

SEQ ID NO: 2034270 - DNA, 15 bp, Homo sapiens
ttcttggtataattc

SEQ ID NO: 2034271 - DNA, 15 bp, Homo sapiens
tcttggtataattct

SEQ ID NO: 2034272 - DNA, 15 bp, Homo sapiens
cttggtataattctt

SEQ ID NO: 2034273 - DNA, 15 bp, Homo sapiens
ttggtataattcttg

SEQ ID NO: 2034274 - DNA, 15 bp, Homo sapiens
tggtataattcttgc

SEQ ID NO: 2034275 - DNA, 15 bp, Homo sapiens
ggtataattcttgct

SEQ ID NO: 2034276 - DNA, 15 bp, Homo sapiens
gtataattcttgcta

SEQ ID NO: 2034277 - DNA, 15 bp, Homo sapiens
tataattcttgctaa

SEQ ID NO: 2034278 - DNA, 15 bp, Homo sapiens
ataattcttgctaat

SEQ ID NO: 2034279 - DNA, 15 bp, Homo sapiens
taattcttgctaatt

SEQ ID NO: 2034280 - DNA, 15 bp, Homo sapiens
aattcttgctaattt

SEQ ID NO: 2034281 - DNA, 15 bp, Homo sapiens
attcttgctaatttt

SEQ ID NO: 2034282 - DNA, 15 bp, Homo sapiens
ttcttgctaattttt

SEQ ID NO: 2034283 - DNA, 15 bp, Homo sapiens
tcttgctaattttta

SEQ ID NO: 2034284 - DNA, 15 bp, Homo sapiens
cttgctaatttttaa

SEQ ID NO: 2034285 - DNA, 15 bp, Homo sapiens
ttgctaatttttaaa

SEQ ID NO: 2034286 - DNA, 15 bp, Homo sapiens
gctaatttttaaatc

SEQ ID NO: 2034287 - DNA, 15 bp, Homo sapiens
ctaatttttaaatct

SEQ ID NO: 2034288 - DNA, 15 bp, Homo sapiens
taatttttaaatcta

SEQ ID NO: 2034289 - DNA, 15 bp, Homo sapiens
aatttttaaatctaa

SEQ ID NO: 2034290 - DNA, 15 bp, Homo sapiens
atttttaaatctaat

SEQ ID NO: 2034291 - DNA, 15 bp, Homo sapiens
tttttaaatctaatt

SEQ ID NO: 2034292 - DNA, 15 bp, Homo sapiens
ttttaaatctaattt

SEQ ID NO: 2034293 - DNA, 15 bp, Homo sapiens
tttaaatctaatttt

SEQ ID NO: 2034294 - DNA, 15 bp, Homo sapiens
ttaaatctaattttt

SEQ ID NO: 2034295 - DNA, 15 bp, Homo sapiens
taaatctaattttta

SEQ ID NO: 2034296 - DNA, 15 bp, Homo sapiens
aaatctaatttttag

SEQ ID NO: 2034297 - DNA, 15 bp, Homo sapiens
aatctaatttttagc

SEQ ID NO: 2034298 - DNA, 15 bp, Homo sapiens
atctaatttttagct

SEQ ID NO: 2034299 - DNA, 15 bp, Homo sapiens
tctaatttttagctt

SEQ ID NO: 2034300 - DNA, 15 bp, Homo sapiens
ctaatttttagctta

SEQ ID NO: 2034301 - DNA, 15 bp, Homo sapiens
taatttttagcttaa

SEQ ID NO: 2034302 - DNA, 15 bp, Homo sapiens
tttttagcttaattc

SEQ ID NO: 2034303 - DNA, 15 bp, Homo sapiens
ttttagcttaattct

SEQ ID NO: 2034304 - DNA, 15 bp, Homo sapiens
tttagcttaattctt

SEQ ID NO: 2034305 - DNA, 15 bp, Homo sapiens
ttagcttaattctta

SEQ ID NO: 2034306 - DNA, 15 bp, Homo sapiens
tagcttaattcttaa

SEQ ID NO: 2034307 - DNA, 15 bp, Homo sapiens
agcttaattcttaat

SEQ ID NO: 2034308 - DNA, 15 bp, Homo sapiens
gcttaattcttaatt

SEQ ID NO: 2034309 - DNA, 15 bp, Homo sapiens
cttaattcttaattt

SEQ ID NO: 2034310 - DNA, 15 bp, Homo sapiens
ttaattcttaattta

SEQ ID NO: 2034311 - DNA, 15 bp, Homo sapiens
taattcttaatttaa

SEQ ID NO: 2034312 - DNA, 15 bp, Homo sapiens
aattcttaatttaaa

SEQ ID NO: 2034313 - DNA, 15 bp, Homo sapiens
attcttaatttaaac

SEQ ID NO: 2034314 - DNA, 15 bp, Homo sapiens
ttcttaatttaaact

SEQ ID NO: 2034315 - DNA, 15 bp, Homo sapiens
tcttaatttaaacta

SEQ ID NO: 2034316 - DNA, 15 bp, Homo sapiens
cttaatttaaactaa

SEQ ID NO: 2034317 - DNA, 15 bp, Homo sapiens
ttaatttaaactaaa

SEQ ID NO: 2034318 - DNA, 15 bp, Homo sapiens
taatttaaactaaaa

SEQ ID NO: 2034319 - DNA, 15 bp, Homo sapiens
aatttaaactaaaat

SEQ ID NO: 2034320 - DNA, 15 bp, Homo sapiens
atttaaactaaaatt

SEQ ID NO: 2034321 - DNA, 15 bp, Homo sapiens
tttaaactaaaattc

SEQ ID NO: 2034322 - DNA, 15 bp, Homo sapiens
ttaaactaaaattct

SEQ ID NO: 2034323 - DNA, 15 bp, Homo sapiens
taaactaaaattctt

SEQ ID NO: 2034324 - DNA, 15 bp, Homo sapiens
aaactaaaattctta

SEQ ID NO: 2034325 - DNA, 15 bp, Homo sapiens
aactaaaattcttaa

SEQ ID NO: 2034326 - DNA, 15 bp, Homo sapiens
actaaaattcttaat

SEQ ID NO: 2034327 - DNA, 15 bp, Homo sapiens
ctaaaattcttaatt

SEQ ID NO: 2034328 - DNA, 15 bp, Homo sapiens
taaaattcttaattt

SEQ ID NO: 2034329 - DNA, 15 bp, Homo sapiens
aaaattcttaatttt

SEQ ID NO: 2034330 - DNA, 15 bp, Homo sapiens
aaattcttaatttta

SEQ ID NO: 2034331 - DNA, 15 bp, Homo sapiens
aattcttaattttaa

SEQ ID NO: 2034332 - DNA, 15 bp, Homo sapiens
attcttaattttaat

SEQ ID NO: 2034333 - DNA, 15 bp, Homo sapiens
ttcttaattttaata

SEQ ID NO: 2034334 - DNA, 15 bp, Homo sapiens
tcttaattttaatat

SEQ ID NO: 2034335 - DNA, 15 bp, Homo sapiens
cttaattttaatata

SEQ ID NO: 2034336 - DNA, 15 bp, Homo sapiens
ttaattttaatataa

SEQ ID NO: 2034337 - DNA, 15 bp, Homo sapiens
taattttaatataag

SEQ ID NO: 2034338 - DNA, 15 bp, Homo sapiens
aattttaatataagt

SEQ ID NO: 2034339 - DNA, 15 bp, Homo sapiens
attttaatataagtg

SEQ ID NO: 2034340 - DNA, 15 bp, Homo sapiens
ttttaatataagtgg

SEQ ID NO: 2034341 - DNA, 15 bp, Homo sapiens
tttaatataagtggt

SEQ ID NO: 2034342 - DNA, 15 bp, Homo sapiens
ttaatataagtggta

SEQ ID NO: 2034343 - DNA, 15 bp, Homo sapiens
taatataagtggtaa

SEQ ID NO: 2034344 - DNA, 15 bp, Homo sapiens
aatataagtggtaaa

SEQ ID NO: 2034345 - DNA, 15 bp, Homo sapiens
atataagtggtaaaa

SEQ ID NO: 2034346 - DNA, 15 bp, Homo sapiens
tataagtggtaaaaa

SEQ ID NO: 2034347 - DNA, 15 bp, Homo sapiens
ataagtggtaaaaaa

SEQ ID NO: 2034348 - DNA, 15 bp, Homo sapiens
taagtggtaaaaaaa

SEQ ID NO: 2034349 - DNA, 15 bp, Homo sapiens
aagtggtaaaaaaat

SEQ ID NO: 2034350 - DNA, 15 bp, Homo sapiens
agtggtaaaaaaata

SEQ ID NO: 2034351 - DNA, 15 bp, Homo sapiens
gtggtaaaaaaatac

SEQ ID NO: 2034352 - DNA, 15 bp, Homo sapiens
tggtaaaaaaataca

SEQ ID NO: 2034353 - DNA, 15 bp, Homo sapiens
ggtaaaaaaatacat

SEQ ID NO: 2034354 - DNA, 15 bp, Homo sapiens
gtaaaaaaatacatc

SEQ ID NO: 2034355 - DNA, 15 bp, Homo sapiens
taaaaaaatacatct

SEQ ID NO: 2034356 - DNA, 15 bp, Homo sapiens
aaaaaaatacatcta

SEQ ID NO: 2034357 - DNA, 15 bp, Homo sapiens
aaaaaatacatctac

SEQ ID NO: 2034358 - DNA, 15 bp, Homo sapiens
aaaaatacatctaca

SEQ ID NO: 2034359 - DNA, 15 bp, Homo sapiens
aaaatacatctacaa

SEQ ID NO: 2034360 - DNA, 15 bp, Homo sapiens
aaatacatctacaaa

SEQ ID NO: 2034361 - DNA, 15 bp, Homo sapiens
aatacatctacaaag

SEQ ID NO: 2034362 - DNA, 15 bp, Homo sapiens
atacatctacaaagt

SEQ ID NO: 2034363 - DNA, 15 bp, Homo sapiens
tacatctacaaagtt

SEQ ID NO: 2034364 - DNA, 15 bp, Homo sapiens
acatctacaaagttg

SEQ ID NO: 2034365 - DNA, 15 bp, Homo sapiens
catctacaaagttgt

SEQ ID NO: 2034366 - DNA, 15 bp, Homo sapiens
atctacaaagttgta

SEQ ID NO: 2034367 - DNA, 15 bp, Homo sapiens
tctacaaagttgtaa

SEQ ID NO: 2034368 - DNA, 15 bp, Homo sapiens
ctacaaagttgtaag

SEQ ID NO: 2034369 - DNA, 15 bp, Homo sapiens
tacaaagttgtaagt

SEQ ID NO: 2034370 - DNA, 15 bp, Homo sapiens
acaaagttgtaagtt

SEQ ID NO: 2034371 - DNA, 15 bp, Homo sapiens
caaagttgtaagttc

SEQ ID NO: 2034372 - DNA, 15 bp, Homo sapiens
aaagttgtaagttct

SEQ ID NO: 2034373 - DNA, 15 bp, Homo sapiens
aagttgtaagttctc

SEQ ID NO: 2034374 - DNA, 15 bp, Homo sapiens
agttgtaagttctct

SEQ ID NO: 2034375 - DNA, 15 bp, Homo sapiens
gttgtaagttctctc

SEQ ID NO: 2034376 - DNA, 15 bp, Homo sapiens
ttgtaagttctctca

SEQ ID NO: 2034377 - DNA, 15 bp, Homo sapiens
tgtaagttctctcat

SEQ ID NO: 2034378 - DNA, 15 bp, Homo sapiens
gtaagttctctcatt

SEQ ID NO: 2034379 - DNA, 15 bp, Homo sapiens
taagttctctcattt

SEQ ID NO: 2034380 - DNA, 15 bp, Homo sapiens
aagttctctcattta

SEQ ID NO: 2034381 - DNA, 15 bp, Homo sapiens
agttctctcatttat

SEQ ID NO: 2034382 - DNA, 15 bp, Homo sapiens
gttctctcatttatt

SEQ ID NO: 2034383 - DNA, 15 bp, Homo sapiens
ttctctcatttattt

SEQ ID NO: 2034384 - DNA, 15 bp, Homo sapiens
tctctcatttattta

SEQ ID NO: 2034385 - DNA, 15 bp, Homo sapiens
ctctcatttatttac

SEQ ID NO: 2034386 - DNA, 15 bp, Homo sapiens
tctcatttatttacc

SEQ ID NO: 2034387 - DNA, 15 bp, Homo sapiens
ctcatttatttacca

SEQ ID NO: 2034388 - DNA, 15 bp, Homo sapiens
tcatttatttaccaa

SEQ ID NO: 2034389 - DNA, 15 bp, Homo sapiens
catttatttaccaac

SEQ ID NO: 2034390 - DNA, 15 bp, Homo sapiens
atttatttaccaact

SEQ ID NO: 2034391 - DNA, 15 bp, Homo sapiens
tttatttaccaactg

SEQ ID NO: 2034392 - DNA, 15 bp, Homo sapiens
ttatttaccaactgt

SEQ ID NO: 2034393 - DNA, 15 bp, Homo sapiens
tatttaccaactgta

SEQ ID NO: 2034394 - DNA, 15 bp, Homo sapiens
atttaccaactgtaa

SEQ ID NO: 2034395 - DNA, 15 bp, Homo sapiens
tttaccaactgtaat

SEQ ID NO: 2034396 - DNA, 15 bp, Homo sapiens
ttaccaactgtaata

SEQ ID NO: 2034397 - DNA, 15 bp, Homo sapiens
taccaactgtaatat

SEQ ID NO: 2034398 - DNA, 15 bp, Homo sapiens
accaactgtaatatt

SEQ ID NO: 2034399 - DNA, 15 bp, Homo sapiens
ccaactgtaatattt

SEQ ID NO: 2034400 - DNA, 15 bp, Homo sapiens
caactgtaatattta

SEQ ID NO: 2034401 - DNA, 15 bp, Homo sapiens
aactgtaatatttag

SEQ ID NO: 2034402 - DNA, 15 bp, Homo sapiens
actgtaatatttagg

SEQ ID NO: 2034403 - DNA, 15 bp, Homo sapiens
ctgtaatatttagga

SEQ ID NO: 2034404 - DNA, 15 bp, Homo sapiens
tgtaatatttaggaa

SEQ ID NO: 2034405 - DNA, 15 bp, Homo sapiens
gtaatatttaggaaa

SEQ ID NO: 2034406 - DNA, 15 bp, Homo sapiens
taatatttaggaaat

SEQ ID NO: 2034407 - DNA, 15 bp, Homo sapiens
aatatttaggaaatt

SEQ ID NO: 2034408 - DNA, 15 bp, Homo sapiens
atatttaggaaatta

SEQ ID NO: 2034409 - DNA, 15 bp, Homo sapiens
tatttaggaaattaa

SEQ ID NO: 2034410 - DNA, 15 bp, Homo sapiens
atttaggaaattaat

SEQ ID NO: 2034411 - DNA, 15 bp, Homo sapiens
tttaggaaattaatg

SEQ ID NO: 2034412 - DNA, 15 bp, Homo sapiens
ttaggaaattaatgg

SEQ ID NO: 2034413 - DNA, 15 bp, Homo sapiens
taggaaattaatggt

SEQ ID NO: 2034414 - DNA, 15 bp, Homo sapiens
aggaaattaatggtc

SEQ ID NO: 2034415 - DNA, 15 bp, Homo sapiens
ggaaattaatggtca

SEQ ID NO: 2034416 - DNA, 15 bp, Homo sapiens
gaaattaatggtcag

SEQ ID NO: 2034417 - DNA, 15 bp, Homo sapiens
aaattaatggtcaga

SEQ ID NO: 2034418 - DNA, 15 bp, Homo sapiens
aattaatggtcagaa

SEQ ID NO: 2034419 - DNA, 15 bp, Homo sapiens
attaatggtcagaat

SEQ ID NO: 2034420 - DNA, 15 bp, Homo sapiens
ttaatggtcagaatt

SEQ ID NO: 2034421 - DNA, 15 bp, Homo sapiens
taatggtcagaattc

SEQ ID NO: 2034422 - DNA, 15 bp, Homo sapiens
aatggtcagaattca

SEQ ID NO: 2034423 - DNA, 15 bp, Homo sapiens
atggtcagaattcaa

SEQ ID NO: 2034424 - DNA, 15 bp, Homo sapiens
tggtcagaattcaat

SEQ ID NO: 2034425 - DNA, 15 bp, Homo sapiens
ggtcagaattcaata

SEQ ID NO: 2034426 - DNA, 15 bp, Homo sapiens
gtcagaattcaataa

SEQ ID NO: 2034427 - DNA, 15 bp, Homo sapiens
tcagaattcaataat

SEQ ID NO: 2034428 - DNA, 15 bp, Homo sapiens
cagaattcaataatt

SEQ ID NO: 2034429 - DNA, 15 bp, Homo sapiens
agaattcaataatta

SEQ ID NO: 2034430 - DNA, 15 bp, Homo sapiens
gaattcaataattaa

SEQ ID NO: 2034431 - DNA, 15 bp, Homo sapiens
aattcaataattaaa

SEQ ID NO: 2034432 - DNA, 15 bp, Homo sapiens
attcaataattaaaa

SEQ ID NO: 2034433 - DNA, 15 bp, Homo sapiens
ttcaataattaaaac

SEQ ID NO: 2034434 - DNA, 15 bp, Homo sapiens
tcaataattaaaacc

SEQ ID NO: 2034435 - DNA, 15 bp, Homo sapiens
caataattaaaacca

SEQ ID NO: 2034436 - DNA, 15 bp, Homo sapiens
aataattaaaaccag

SEQ ID NO: 2034437 - DNA, 15 bp, Homo sapiens
ataattaaaaccaga

SEQ ID NO: 2034438 - DNA, 15 bp, Homo sapiens
taattaaaaccagat

SEQ ID NO: 2034439 - DNA, 15 bp, Homo sapiens
aattaaaaccagatt

SEQ ID NO: 2034440 - DNA, 15 bp, Homo sapiens
attaaaaccagattc

SEQ ID NO: 2034441 - DNA, 15 bp, Homo sapiens
ttaaaaccagattcc

SEQ ID NO: 2034442 - DNA, 15 bp, Homo sapiens
taaaaccagattcct

SEQ ID NO: 2034443 - DNA, 15 bp, Homo sapiens
aaaaccagattcctt

SEQ ID NO: 2034444 - DNA, 15 bp, Homo sapiens
aaaccagattccttc

SEQ ID NO: 2034445 - DNA, 15 bp, Homo sapiens
aaccagattccttct

SEQ ID NO: 2034446 - DNA, 15 bp, Homo sapiens
accagattccttctg

SEQ ID NO: 2034447 - DNA, 15 bp, Homo sapiens
ccagattccttctga

SEQ ID NO: 2034448 - DNA, 15 bp, Homo sapiens
cagattccttctgaa

SEQ ID NO: 2034449 - DNA, 15 bp, Homo sapiens
agattccttctgaaa

SEQ ID NO: 2034450 - DNA, 15 bp, Homo sapiens
gattccttctgaaaa

SEQ ID NO: 2034451 - DNA, 15 bp, Homo sapiens
attccttctgaaaac

SEQ ID NO: 2034452 - DNA, 15 bp, Homo sapiens
ttccttctgaaaacc

SEQ ID NO: 2034453 - DNA, 15 bp, Homo sapiens
tccttctgaaaacca

SEQ ID NO: 2034454 - DNA, 15 bp, Homo sapiens
ccttctgaaaaccaa

SEQ ID NO: 2034455 - DNA, 15 bp, Homo sapiens
cttctgaaaaccaag

SEQ ID NO: 2034456 - DNA, 15 bp, Homo sapiens
ttctgaaaaccaagg

SEQ ID NO: 2034457 - DNA, 15 bp, Homo sapiens
tctgaaaaccaagga

SEQ ID NO: 2034458 - DNA, 15 bp, Homo sapiens
ctgaaaaccaaggaa

SEQ ID NO: 2034459 - DNA, 15 bp, Homo sapiens
tgaaaaccaaggaac

SEQ ID NO: 2034460 - DNA, 15 bp, Homo sapiens
gaaaaccaaggaaca

SEQ ID NO: 2034461 - DNA, 15 bp, Homo sapiens
aaaaccaaggaacat

SEQ ID NO: 2034462 - DNA, 15 bp, Homo sapiens
aaaccaaggaacatt

SEQ ID NO: 2034463 - DNA, 15 bp, Homo sapiens
aaccaaggaacatta

SEQ ID NO: 2034464 - DNA, 15 bp, Homo sapiens
accaaggaacattat

SEQ ID NO: 2034465 - DNA, 15 bp, Homo sapiens
ccaaggaacattata

SEQ ID NO: 2034466 - DNA, 15 bp, Homo sapiens
caaggaacattataa

SEQ ID NO: 2034467 - DNA, 15 bp, Homo sapiens
aaggaacattataat

SEQ ID NO: 2034468 - DNA, 15 bp, Homo sapiens
aggaacattataatt

SEQ ID NO: 2034469 - DNA, 15 bp, Homo sapiens
ggaacattataatta

SEQ ID NO: 2034470 - DNA, 15 bp, Homo sapiens
gaacattataattat

SEQ ID NO: 2034471 - DNA, 15 bp, Homo sapiens
aacattataattatc

SEQ ID NO: 2034472 - DNA, 15 bp, Homo sapiens
acattataattatct

SEQ ID NO: 2034473 - DNA, 15 bp, Homo sapiens
cattataattatcta

SEQ ID NO: 2034474 - DNA, 15 bp, Homo sapiens
attataattatctag

SEQ ID NO: 2034475 - DNA, 15 bp, Homo sapiens
ttataattatctagt

SEQ ID NO: 2034476 - DNA, 15 bp, Homo sapiens
tataattatctagta

SEQ ID NO: 2034477 - DNA, 15 bp, Homo sapiens
ataattatctagtat

SEQ ID NO: 2034478 - DNA, 15 bp, Homo sapiens
taattatctagtatc

SEQ ID NO: 2034479 - DNA, 15 bp, Homo sapiens
aattatctagtatct

SEQ ID NO: 2034480 - DNA, 15 bp, Homo sapiens
attatctagtatcta

SEQ ID NO: 2034481 - DNA, 15 bp, Homo sapiens
ttatctagtatctaa

SEQ ID NO: 2034482 - DNA, 15 bp, Homo sapiens
tatctagtatctaat

SEQ ID NO: 2034483 - DNA, 15 bp, Homo sapiens
atctagtatctaatt

SEQ ID NO: 2034484 - DNA, 15 bp, Homo sapiens
tctagtatctaattg

SEQ ID NO: 2034485 - DNA, 15 bp, Homo sapiens
ctagtatctaattgt

SEQ ID NO: 2034486 - DNA, 15 bp, Homo sapiens
tagtatctaattgta

SEQ ID NO: 2034487 - DNA, 15 bp, Homo sapiens
agtatctaattgtat

SEQ ID NO: 2034488 - DNA, 15 bp, Homo sapiens
gtatctaattgtatt

SEQ ID NO: 2034489 - DNA, 15 bp, Homo sapiens
tatctaattgtattt

SEQ ID NO: 2034490 - DNA, 15 bp, Homo sapiens
atctaattgtatttc

SEQ ID NO: 2034491 - DNA, 15 bp, Homo sapiens
tctaattgtatttca

SEQ ID NO: 2034492 - DNA, 15 bp, Homo sapiens
ctaattgtatttcac

SEQ ID NO: 2034493 - DNA, 15 bp, Homo sapiens
taattgtatttcacc

SEQ ID NO: 2034494 - DNA, 15 bp, Homo sapiens
aattgtatttcaccc

SEQ ID NO: 2034495 - DNA, 15 bp, Homo sapiens
attgtatttcaccct

SEQ ID NO: 2034496 - DNA, 15 bp, Homo sapiens
ttgtatttcaccctt

SEQ ID NO: 2034497 - DNA, 15 bp, Homo sapiens
tgtatttcacccttt

SEQ ID NO: 2034498 - DNA, 15 bp, Homo sapiens
gtatttcaccctttt

SEQ ID NO: 2034499 - DNA, 15 bp, Homo sapiens
tatttcacccttttt

SEQ ID NO: 2034500 - DNA, 15 bp, Homo sapiens
atttcaccctttttt

SEQ ID NO: 2034501 - DNA, 15 bp, Homo sapiens
tttcaccctttttta

SEQ ID NO: 2034502 - DNA, 15 bp, Homo sapiens
ttcacccttttttaa

SEQ ID NO: 2034503 - DNA, 15 bp, Homo sapiens
tcacccttttttaaa

SEQ ID NO: 2034504 - DNA, 15 bp, Homo sapiens
cacccttttttaaat

SEQ ID NO: 2034505 - DNA, 15 bp, Homo sapiens
acccttttttaaatc

SEQ ID NO: 2034506 - DNA, 15 bp, Homo sapiens
cccttttttaaatct

SEQ ID NO: 2034507 - DNA, 15 bp, Homo sapiens
ccttttttaaatctt

SEQ ID NO: 2034508 - DNA, 15 bp, Homo sapiens
cttttttaaatctta

SEQ ID NO: 2034509 - DNA, 15 bp, Homo sapiens
ttttttaaatcttat

SEQ ID NO: 2034510 - DNA, 15 bp, Homo sapiens
tttttaaatcttatg

SEQ ID NO: 2034511 - DNA, 15 bp, Homo sapiens
ttttaaatcttatga

SEQ ID NO: 2034512 - DNA, 15 bp, Homo sapiens
tttaaatcttatgaa

SEQ ID NO: 2034513 - DNA, 15 bp, Homo sapiens
ttaaatcttatgaac

SEQ ID NO: 2034514 - DNA, 15 bp, Homo sapiens
taaatcttatgaaca

SEQ ID NO: 2034515 - DNA, 15 bp, Homo sapiens
aaatcttatgaacat

SEQ ID NO: 2034516 - DNA, 15 bp, Homo sapiens
aatcttatgaacatc

SEQ ID NO: 2034517 - DNA, 15 bp, Homo sapiens
atcttatgaacatca

SEQ ID NO: 2034518 - DNA, 15 bp, Homo sapiens
tcttatgaacatcac

SEQ ID NO: 2034519 - DNA, 15 bp, Homo sapiens
cttatgaacatcact

SEQ ID NO: 2034520 - DNA, 15 bp, Homo sapiens
ttatgaacatcactt

SEQ ID NO: 2034521 - DNA, 15 bp, Homo sapiens
tatgaacatcactta

SEQ ID NO: 2034522 - DNA, 15 bp, Homo sapiens
atgaacatcacttac

SEQ ID NO: 2034523 - DNA, 15 bp, Homo sapiens
tgaacatcacttact

SEQ ID NO: 2034524 - DNA, 15 bp, Homo sapiens
gaacatcacttactt

SEQ ID NO: 2034525 - DNA, 15 bp, Homo sapiens
aacatcacttacttg

SEQ ID NO: 2034526 - DNA, 15 bp, Homo sapiens
acatcacttacttgc

SEQ ID NO: 2034527 - DNA, 15 bp, Homo sapiens
catcacttacttgct

SEQ ID NO: 2034528 - DNA, 15 bp, Homo sapiens
atcacttacttgctt

SEQ ID NO: 2034529 - DNA, 15 bp, Homo sapiens
tcacttacttgcttt

SEQ ID NO: 2034530 - DNA, 15 bp, Homo sapiens
cacttacttgctttt

SEQ ID NO: 2034531 - DNA, 15 bp, Homo sapiens
acttacttgcttttt

SEQ ID NO: 2034532 - DNA, 15 bp, Homo sapiens
cttacttgctttttt

SEQ ID NO: 2034533 - DNA, 15 bp, Homo sapiens
ttacttgcttttttt

SEQ ID NO: 2034534 - DNA, 15 bp, Homo sapiens
tacttgctttttttt

SEQ ID NO: 2034535 - DNA, 15 bp, Homo sapiens
acttgcttttttttc

SEQ ID NO: 2034536 - DNA, 15 bp, Homo sapiens
cttgcttttttttct

SEQ ID NO: 2034537 - DNA, 15 bp, Homo sapiens
ttgcttttttttctt

SEQ ID NO: 2034538 - DNA, 15 bp, Homo sapiens
tgcttttttttcttc

SEQ ID NO: 2034539 - DNA, 15 bp, Homo sapiens
gcttttttttcttcc

SEQ ID NO: 2034540 - DNA, 15 bp, Homo sapiens
cttttttttcttcca

SEQ ID NO: 2034541 - DNA, 15 bp, Homo sapiens
ttttttttcttccat

SEQ ID NO: 2034542 - DNA, 15 bp, Homo sapiens
tttttttcttccatt

SEQ ID NO: 2034543 - DNA, 15 bp, Homo sapiens
ttttttcttccattc

SEQ ID NO: 2034544 - DNA, 15 bp, Homo sapiens
tttttcttccattct

SEQ ID NO: 2034545 - DNA, 15 bp, Homo sapiens
ttttcttccattctt

SEQ ID NO: 2034546 - DNA, 15 bp, Homo sapiens
tttcttccattcttt

SEQ ID NO: 2034547 - DNA, 15 bp, Homo sapiens
ttcttccattctttg

SEQ ID NO: 2034548 - DNA, 15 bp, Homo sapiens
tcttccattctttgt

SEQ ID NO: 2034549 - DNA, 15 bp, Homo sapiens
cttccattctttgta

SEQ ID NO: 2034550 - DNA, 15 bp, Homo sapiens
ttccattctttgtaa

SEQ ID NO: 2034551 - DNA, 15 bp, Homo sapiens
tccattctttgtaaa

SEQ ID NO: 2034552 - DNA, 15 bp, Homo sapiens
ccattctttgtaaag

SEQ ID NO: 2034553 - DNA, 15 bp, Homo sapiens
cattctttgtaaagc

SEQ ID NO: 2034554 - DNA, 15 bp, Homo sapiens
attctttgtaaagct

SEQ ID NO: 2034555 - DNA, 15 bp, Homo sapiens
ttctttgtaaagctt

SEQ ID NO: 2034556 - DNA, 15 bp, Homo sapiens
tctttgtaaagcttc

SEQ ID NO: 2034557 - DNA, 15 bp, Homo sapiens
ctttgtaaagcttct

SEQ ID NO: 2034558 - DNA, 15 bp, Homo sapiens
tttgtaaagcttctc

SEQ ID NO: 2034559 - DNA, 15 bp, Homo sapiens
ttgtaaagcttctct

SEQ ID NO: 2034560 - DNA, 15 bp, Homo sapiens
tgtaaagcttctctg

SEQ ID NO: 2034561 - DNA, 15 bp, Homo sapiens
gtaaagcttctctgc

SEQ ID NO: 2034562 - DNA, 15 bp, Homo sapiens
taaagcttctctgcc

SEQ ID NO: 2034563 - DNA, 15 bp, Homo sapiens
aaagcttctctgcct

SEQ ID NO: 2034564 - DNA, 15 bp, Homo sapiens
aagcttctctgcctt

SEQ ID NO: 2034565 - DNA, 15 bp, Homo sapiens
agcttctctgccttg

SEQ ID NO: 2034566 - DNA, 15 bp, Homo sapiens
gcttctctgccttgc

SEQ ID NO: 2034567 - DNA, 15 bp, Homo sapiens
cttctctgccttgct

SEQ ID NO: 2034568 - DNA, 15 bp, Homo sapiens
ttctctgccttgctc

SEQ ID NO: 2034569 - DNA, 15 bp, Homo sapiens
tctctgccttgctct

SEQ ID NO: 2034570 - DNA, 15 bp, Homo sapiens
ctctgccttgctcta

SEQ ID NO: 2034571 - DNA, 15 bp, Homo sapiens
tctgccttgctctaa

SEQ ID NO: 2034572 - DNA, 15 bp, Homo sapiens
ctgccttgctctaaa

SEQ ID NO: 2034573 - DNA, 15 bp, Homo sapiens
tgccttgctctaaat

SEQ ID NO: 2034574 - DNA, 15 bp, Homo sapiens
gccttgctctaaatc

SEQ ID NO: 2034575 - DNA, 15 bp, Homo sapiens
ccttgctctaaatca

SEQ ID NO: 2034576 - DNA, 15 bp, Homo sapiens
cttgctctaaatcag

SEQ ID NO: 2034577 - DNA, 15 bp, Homo sapiens
ttgctctaaatcagc

SEQ ID NO: 2034578 - DNA, 15 bp, Homo sapiens
tgctctaaatcagca

SEQ ID NO: 2034579 - DNA, 15 bp, Homo sapiens
gctctaaatcagcag

SEQ ID NO: 2034580 - DNA, 15 bp, Homo sapiens
ctctaaatcagcagt

SEQ ID NO: 2034581 - DNA, 15 bp, Homo sapiens
tctaaatcagcagtt

SEQ ID NO: 2034582 - DNA, 15 bp, Homo sapiens
ctaaatcagcagttt

SEQ ID NO: 2034583 - DNA, 15 bp, Homo sapiens
taaatcagcagtttt

SEQ ID NO: 2034584 - DNA, 15 bp, Homo sapiens
aaatcagcagttttc

SEQ ID NO: 2034585 - DNA, 15 bp, Homo sapiens
aatcagcagttttca

SEQ ID NO: 2034586 - DNA, 15 bp, Homo sapiens
atcagcagttttcat

SEQ ID NO: 2034587 - DNA, 15 bp, Homo sapiens
tcagcagttttcatg

SEQ ID NO: 2034588 - DNA, 15 bp, Homo sapiens
cagcagttttcatgc

SEQ ID NO: 2034589 - DNA, 15 bp, Homo sapiens
agcagttttcatgca

SEQ ID NO: 2034590 - DNA, 15 bp, Homo sapiens
gcagttttcatgcag

SEQ ID NO: 2034591 - DNA, 15 bp, Homo sapiens
cagttttcatgcagc

SEQ ID NO: 2034592 - DNA, 15 bp, Homo sapiens
agttttcatgcagct

SEQ ID NO: 2034593 - DNA, 15 bp, Homo sapiens
gttttcatgcagctg

SEQ ID NO: 2034594 - DNA, 15 bp, Homo sapiens
ttttcatgcagctgt

SEQ ID NO: 2034595 - DNA, 15 bp, Homo sapiens
tttcatgcagctgtt

SEQ ID NO: 2034596 - DNA, 15 bp, Homo sapiens
ttcatgcagctgttc

SEQ ID NO: 2034597 - DNA, 15 bp, Homo sapiens
tcatgcagctgttcc

SEQ ID NO: 2034598 - DNA, 15 bp, Homo sapiens
catgcagctgttccc

SEQ ID NO: 2034599 - DNA, 15 bp, Homo sapiens
atgcagctgttccct

SEQ ID NO: 2034600 - DNA, 15 bp, Homo sapiens
tgcagctgttccctc

SEQ ID NO: 2034601 - DNA, 15 bp, Homo sapiens
gcagctgttccctca

SEQ ID NO: 2034602 - DNA, 15 bp, Homo sapiens
cagctgttccctcat

SEQ ID NO: 2034603 - DNA, 15 bp, Homo sapiens
agctgttccctcatc

SEQ ID NO: 2034604 - DNA, 15 bp, Homo sapiens
gctgttccctcatca

SEQ ID NO: 2034605 - DNA, 15 bp, Homo sapiens
ctgttccctcatcaa

SEQ ID NO: 2034606 - DNA, 15 bp, Homo sapiens
tgttccctcatcaag

SEQ ID NO: 2034607 - DNA, 15 bp, Homo sapiens
gttccctcatcaagg

SEQ ID NO: 2034608 - DNA, 15 bp, Homo sapiens
ttccctcatcaaggt

SEQ ID NO: 2034609 - DNA, 15 bp, Homo sapiens
tccctcatcaaggta

SEQ ID NO: 2034610 - DNA, 15 bp, Homo sapiens
ccctcatcaaggtac

SEQ ID NO: 2034611 - DNA, 15 bp, Homo sapiens
cctcatcaaggtact

SEQ ID NO: 2034612 - DNA, 15 bp, Homo sapiens
ctcatcaaggtactc

SEQ ID NO: 2034613 - DNA, 15 bp, Homo sapiens
tcatcaaggtactct

SEQ ID NO: 2034614 - DNA, 15 bp, Homo sapiens
catcaaggtactctt

SEQ ID NO: 2034615 - DNA, 15 bp, Homo sapiens
atcaaggtactcttt

SEQ ID NO: 2034616 - DNA, 15 bp, Homo sapiens
tcaaggtactcttta

SEQ ID NO: 2034617 - DNA, 15 bp, Homo sapiens
caaggtactctttat

SEQ ID NO: 2034618 - DNA, 15 bp, Homo sapiens
aaggtactctttatt

SEQ ID NO: 2034619 - DNA, 15 bp, Homo sapiens
aggtactctttattt

SEQ ID NO: 2034620 - DNA, 15 bp, Homo sapiens
ggtactctttatttt

SEQ ID NO: 2034621 - DNA, 15 bp, Homo sapiens
gtactctttattttc

SEQ ID NO: 2034622 - DNA, 15 bp, Homo sapiens
tactctttattttca

SEQ ID NO: 2034623 - DNA, 15 bp, Homo sapiens
actctttattttcat

SEQ ID NO: 2034624 - DNA, 15 bp, Homo sapiens
ctctttattttcatc

SEQ ID NO: 2034625 - DNA, 15 bp, Homo sapiens
tctttattttcatca

SEQ ID NO: 2034626 - DNA, 15 bp, Homo sapiens
ctttattttcatcat

SEQ ID NO: 2034627 - DNA, 15 bp, Homo sapiens
tttattttcatcatc

SEQ ID NO: 2034628 - DNA, 15 bp, Homo sapiens
ttattttcatcatct

SEQ ID NO: 2034629 - DNA, 15 bp, Homo sapiens
tattttcatcatctt

SEQ ID NO: 2034630 - DNA, 15 bp, Homo sapiens
attttcatcatcttt

SEQ ID NO: 2034631 - DNA, 15 bp, Homo sapiens
ttttcatcatctttg

SEQ ID NO: 2034632 - DNA, 15 bp, Homo sapiens
tttcatcatctttgc

SEQ ID NO: 2034633 - DNA, 15 bp, Homo sapiens
ttcatcatctttgca

SEQ ID NO: 2034634 - DNA, 15 bp, Homo sapiens
tcatcatctttgcac

SEQ ID NO: 2034635 - DNA, 15 bp, Homo sapiens
catcatctttgcacg

SEQ ID NO: 2034636 - DNA, 15 bp, Homo sapiens
atcatctttgcacga

SEQ ID NO: 2034637 - DNA, 15 bp, Homo sapiens
tcatctttgcacgaa

SEQ ID NO: 2034638 - DNA, 15 bp, Homo sapiens
catctttgcacgaaa

SEQ ID NO: 2034639 - DNA, 15 bp, Homo sapiens
atctttgcacgaaaa

SEQ ID NO: 2034640 - DNA, 15 bp, Homo sapiens
tctttgcacgaaaat

SEQ ID NO: 2034641 - DNA, 15 bp, Homo sapiens
ctttgcacgaaaata

SEQ ID NO: 2034642 - DNA, 15 bp, Homo sapiens
tttgcacgaaaatac

SEQ ID NO: 2034643 - DNA, 15 bp, Homo sapiens
ttgcacgaaaatact

SEQ ID NO: 2034644 - DNA, 15 bp, Homo sapiens
tgcacgaaaatactg

SEQ ID NO: 2034645 - DNA, 15 bp, Homo sapiens
gcacgaaaatactgc

SEQ ID NO: 2034646 - DNA, 15 bp, Homo sapiens
cacgaaaatactgct

SEQ ID NO: 2034647 - DNA, 15 bp, Homo sapiens
acgaaaatactgctt

SEQ ID NO: 2034648 - DNA, 15 bp, Homo sapiens
cgaaaatactgctta

SEQ ID NO: 2034649 - DNA, 15 bp, Homo sapiens
gaaaatactgcttac

SEQ ID NO: 2034650 - DNA, 15 bp, Homo sapiens
aaaatactgcttacc

SEQ ID NO: 2034651 - DNA, 15 bp, Homo sapiens
aaatactgcttaccc

SEQ ID NO: 2034652 - DNA, 15 bp, Homo sapiens
aatactgcttacccc

SEQ ID NO: 2034653 - DNA, 15 bp, Homo sapiens
atactgcttacccca

SEQ ID NO: 2034654 - DNA, 15 bp, Homo sapiens
tactgcttaccccac

SEQ ID NO: 2034655 - DNA, 15 bp, Homo sapiens
actgcttaccccaca

SEQ ID NO: 2034656 - DNA, 15 bp, Homo sapiens
ctgcttaccccacac

SEQ ID NO: 2034657 - DNA, 15 bp, Homo sapiens
tgcttaccccacact

SEQ ID NO: 2034658 - DNA, 15 bp, Homo sapiens
gcttaccccacactc

SEQ ID NO: 2034659 - DNA, 15 bp, Homo sapiens
cttaccccacactca

SEQ ID NO: 2034660 - DNA, 15 bp, Homo sapiens
ttaccccacactcat

SEQ ID NO: 2034661 - DNA, 15 bp, Homo sapiens
taccccacactcatc

SEQ ID NO: 2034662 - DNA, 15 bp, Homo sapiens
accccacactcatcc

SEQ ID NO: 2034663 - DNA, 15 bp, Homo sapiens
ccccacactcatcct

SEQ ID NO: 2034664 - DNA, 15 bp, Homo sapiens
cccacactcatcctg

SEQ ID NO: 2034665 - DNA, 15 bp, Homo sapiens
ccacactcatcctgg

SEQ ID NO: 2034666 - DNA, 15 bp, Homo sapiens
cacactcatcctggg

SEQ ID NO: 2034667 - DNA, 15 bp, Homo sapiens
acactcatcctgggc

SEQ ID NO: 2034668 - DNA, 15 bp, Homo sapiens
cactcatcctgggca

SEQ ID NO: 2034669 - DNA, 15 bp, Homo sapiens
actcatcctgggcac

SEQ ID NO: 2034670 - DNA, 15 bp, Homo sapiens
ctcatcctgggcaca

SEQ ID NO: 2034671 - DNA, 15 bp, Homo sapiens
tcatcctgggcacat

SEQ ID NO: 2034672 - DNA, 15 bp, Homo sapiens
catcctgggcacata

SEQ ID NO: 2034673 - DNA, 15 bp, Homo sapiens
atcctgggcacatag

SEQ ID NO: 2034674 - DNA, 15 bp, Homo sapiens
tcctgggcacatagc

SEQ ID NO: 2034675 - DNA, 15 bp, Homo sapiens
cctgggcacatagca

SEQ ID NO: 2034676 - DNA, 15 bp, Homo sapiens
ctgggcacatagcat

SEQ ID NO: 2034677 - DNA, 15 bp, Homo sapiens
tgggcacatagcatg

SEQ ID NO: 2034678 - DNA, 15 bp, Homo sapiens
gggcacatagcatga

SEQ ID NO: 2034679 - DNA, 15 bp, Homo sapiens
ggcacatagcatgag

SEQ ID NO: 2034680 - DNA, 15 bp, Homo sapiens
gcacatagcatgaga

SEQ ID NO: 2034681 - DNA, 15 bp, Homo sapiens
cacatagcatgagac

SEQ ID NO: 2034682 - DNA, 15 bp, Homo sapiens
acatagcatgagact

SEQ ID NO: 2034683 - DNA, 15 bp, Homo sapiens
catagcatgagactt

SEQ ID NO: 2034684 - DNA, 15 bp, Homo sapiens
atagcatgagacttt

SEQ ID NO: 2034685 - DNA, 15 bp, Homo sapiens
tagcatgagacttta

SEQ ID NO: 2034686 - DNA, 15 bp, Homo sapiens
agcatgagactttac

SEQ ID NO: 2034687 - DNA, 15 bp, Homo sapiens
gcatgagactttact

SEQ ID NO: 2034688 - DNA, 15 bp, Homo sapiens
catgagactttactc

SEQ ID NO: 2034689 - DNA, 15 bp, Homo sapiens
atgagactttactca

SEQ ID NO: 2034690 - DNA, 15 bp, Homo sapiens
tgagactttactcac

SEQ ID NO: 2034691 - DNA, 15 bp, Homo sapiens
gagactttactcacc

SEQ ID NO: 2034692 - DNA, 15 bp, Homo sapiens
agactttactcaccg

SEQ ID NO: 2034693 - DNA, 15 bp, Homo sapiens
gactttactcaccgg

SEQ ID NO: 2034694 - DNA, 15 bp, Homo sapiens
actttactcaccggt

SEQ ID NO: 2034695 - DNA, 15 bp, Homo sapiens
ctttactcaccggtc

SEQ ID NO: 2034696 - DNA, 15 bp, Homo sapiens
tttactcaccggtcc

SEQ ID NO: 2034697 - DNA, 15 bp, Homo sapiens
ttactcaccggtccc

SEQ ID NO: 2034698 - DNA, 15 bp, Homo sapiens
tactcaccggtccct

SEQ ID NO: 2034699 - DNA, 15 bp, Homo sapiens
actcaccggtccctg

SEQ ID NO: 2034700 - DNA, 15 bp, Homo sapiens
ctcaccggtccctgt

SEQ ID NO: 2034701 - DNA, 15 bp, Homo sapiens
tcaccggtccctgta

SEQ ID NO: 2034702 - DNA, 15 bp, Homo sapiens
caccggtccctgtaa

SEQ ID NO: 2034703 - DNA, 15 bp, Homo sapiens
accggtccctgtaag

SEQ ID NO: 2034704 - DNA, 15 bp, Homo sapiens
ccggtccctgtaagc

SEQ ID NO: 2034705 - DNA, 15 bp, Homo sapiens
cggtccctgtaagct

SEQ ID NO: 2034706 - DNA, 15 bp, Homo sapiens
ggtccctgtaagctc

SEQ ID NO: 2034707 - DNA, 15 bp, Homo sapiens
gtccctgtaagctca

SEQ ID NO: 2034708 - DNA, 15 bp, Homo sapiens
tccctgtaagctcag

SEQ ID NO: 2034709 - DNA, 15 bp, Homo sapiens
ccctgtaagctcagt

SEQ ID NO: 2034710 - DNA, 15 bp, Homo sapiens
cctgtaagctcagtc

SEQ ID NO: 2034711 - DNA, 15 bp, Homo sapiens
ctgtaagctcagtct

SEQ ID NO: 2034712 - DNA, 15 bp, Homo sapiens
tgtaagctcagtctg

SEQ ID NO: 2034713 - DNA, 15 bp, Homo sapiens
gtaagctcagtctgc

SEQ ID NO: 2034714 - DNA, 15 bp, Homo sapiens
taagctcagtctgcc

SEQ ID NO: 2034715 - DNA, 15 bp, Homo sapiens
aagctcagtctgcct

SEQ ID NO: 2034716 - DNA, 15 bp, Homo sapiens
agctcagtctgcctt

SEQ ID NO: 2034717 - DNA, 15 bp, Homo sapiens
gctcagtctgcctta

SEQ ID NO: 2034718 - DNA, 15 bp, Homo sapiens
ctcagtctgccttag

SEQ ID NO: 2034719 - DNA, 15 bp, Homo sapiens
tcagtctgccttagg

SEQ ID NO: 2034720 - DNA, 15 bp, Homo sapiens
cagtctgccttaggc

SEQ ID NO: 2034721 - DNA, 15 bp, Homo sapiens
agtctgccttaggca

SEQ ID NO: 2034722 - DNA, 15 bp, Homo sapiens
gtctgccttaggcac

SEQ ID NO: 2034723 - DNA, 15 bp, Homo sapiens
tctgccttaggcact

SEQ ID NO: 2034724 - DNA, 15 bp, Homo sapiens
ctgccttaggcactt

SEQ ID NO: 2034725 - DNA, 15 bp, Homo sapiens
tgccttaggcacttt

SEQ ID NO: 2034726 - DNA, 15 bp, Homo sapiens
gccttaggcacttta

SEQ ID NO: 2034727 - DNA, 15 bp, Homo sapiens
ccttaggcactttag

SEQ ID NO: 2034728 - DNA, 15 bp, Homo sapiens
cttaggcactttagg

SEQ ID NO: 2034729 - DNA, 15 bp, Homo sapiens
ttaggcactttagga

SEQ ID NO: 2034730 - DNA, 15 bp, Homo sapiens
taggcactttaggaa

SEQ ID NO: 2034731 - DNA, 15 bp, Homo sapiens
aggcactttaggaac

SEQ ID NO: 2034732 - DNA, 15 bp, Homo sapiens
ggcactttaggaact

SEQ ID NO: 2034733 - DNA, 15 bp, Homo sapiens
gcactttaggaactt

SEQ ID NO: 2034734 - DNA, 15 bp, Homo sapiens
cactttaggaacttg

SEQ ID NO: 2034735 - DNA, 15 bp, Homo sapiens
actttaggaacttgt

SEQ ID NO: 2034736 - DNA, 15 bp, Homo sapiens
ctttaggaacttgta

SEQ ID NO: 2034737 - DNA, 15 bp, Homo sapiens
tttaggaacttgtaa

SEQ ID NO: 2034738 - DNA, 15 bp, Homo sapiens
ttaggaacttgtaaa

SEQ ID NO: 2034739 - DNA, 15 bp, Homo sapiens
taggaacttgtaaag

SEQ ID NO: 2034740 - DNA, 15 bp, Homo sapiens
aggaacttgtaaagc

SEQ ID NO: 2034741 - DNA, 15 bp, Homo sapiens
ggaacttgtaaagcc

SEQ ID NO: 2034742 - DNA, 15 bp, Homo sapiens
gaacttgtaaagcca

SEQ ID NO: 2034743 - DNA, 15 bp, Homo sapiens
aacttgtaaagccac

SEQ ID NO: 2034744 - DNA, 15 bp, Homo sapiens
acttgtaaagccacc

SEQ ID NO: 2034745 - DNA, 15 bp, Homo sapiens
cttgtaaagccacca

SEQ ID NO: 2034746 - DNA, 15 bp, Homo sapiens
ttgtaaagccaccac

SEQ ID NO: 2034747 - DNA, 15 bp, Homo sapiens
tgtaaagccaccact

SEQ ID NO: 2034748 - DNA, 15 bp, Homo sapiens
gtaaagccaccactt

SEQ ID NO: 2034749 - DNA, 15 bp, Homo sapiens
taaagccaccacttt

SEQ ID NO: 2034750 - DNA, 15 bp, Homo sapiens
aaagccaccacttta

SEQ ID NO: 2034751 - DNA, 15 bp, Homo sapiens
aagccaccactttat

SEQ ID NO: 2034752 - DNA, 15 bp, Homo sapiens
agccaccactttata

SEQ ID NO: 2034753 - DNA, 15 bp, Homo sapiens
gccaccactttataa

SEQ ID NO: 2034754 - DNA, 15 bp, Homo sapiens
ccaccactttataag

SEQ ID NO: 2034755 - DNA, 15 bp, Homo sapiens
caccactttataagg

SEQ ID NO: 2034756 - DNA, 15 bp, Homo sapiens
accactttataaggt

SEQ ID NO: 2034757 - DNA, 15 bp, Homo sapiens
ccactttataaggtc

SEQ ID NO: 2034758 - DNA, 15 bp, Homo sapiens
cactttataaggtct

SEQ ID NO: 2034759 - DNA, 15 bp, Homo sapiens
actttataaggtctt

SEQ ID NO: 2034760 - DNA, 15 bp, Homo sapiens
ctttataaggtcttg

SEQ ID NO: 2034761 - DNA, 15 bp, Homo sapiens
tttataaggtcttgg

SEQ ID NO: 2034762 - DNA, 15 bp, Homo sapiens
ttataaggtcttggt

SEQ ID NO: 2034763 - DNA, 15 bp, Homo sapiens
tataaggtcttggta

SEQ ID NO: 2034764 - DNA, 15 bp, Homo sapiens
ataaggtcttggtac

SEQ ID NO: 2034765 - DNA, 15 bp, Homo sapiens
taaggtcttggtact

SEQ ID NO: 2034766 - DNA, 15 bp, Homo sapiens
aaggtcttggtactt

SEQ ID NO: 2034767 - DNA, 15 bp, Homo sapiens
aggtcttggtactta

SEQ ID NO: 2034768 - DNA, 15 bp, Homo sapiens
ggtcttggtacttaa

SEQ ID NO: 2034769 - DNA, 15 bp, Homo sapiens
gtcttggtacttaac

SEQ ID NO: 2034770 - DNA, 15 bp, Homo sapiens
tcttggtacttaaca

SEQ ID NO: 2034771 - DNA, 15 bp, Homo sapiens
cttggtacttaacag

SEQ ID NO: 2034772 - DNA, 15 bp, Homo sapiens
ttggtacttaacagg

SEQ ID NO: 2034773 - DNA, 15 bp, Homo sapiens
tggtacttaacagga

SEQ ID NO: 2034774 - DNA, 15 bp, Homo sapiens
ggtacttaacaggaa

SEQ ID NO: 2034775 - DNA, 15 bp, Homo sapiens
gtacttaacaggaat

SEQ ID NO: 2034776 - DNA, 15 bp, Homo sapiens
tacttaacaggaatt

SEQ ID NO: 2034777 - DNA, 15 bp, Homo sapiens
cttaacaggaattgc

SEQ ID NO: 2034778 - DNA, 15 bp, Homo sapiens
ttaacaggaattgca

SEQ ID NO: 2034779 - DNA, 15 bp, Homo sapiens
taacaggaattgcac

SEQ ID NO: 2034780 - DNA, 15 bp, Homo sapiens
aacaggaattgcacg

SEQ ID NO: 2034781 - DNA, 15 bp, Homo sapiens
acaggaattgcacgg

SEQ ID NO: 2034782 - DNA, 15 bp, Homo sapiens
caggaattgcacggc

SEQ ID NO: 2034783 - DNA, 15 bp, Homo sapiens
aggaattgcacggcc

SEQ ID NO: 2034784 - DNA, 15 bp, Homo sapiens
ggaattgcacggcca

SEQ ID NO: 2034785 - DNA, 15 bp, Homo sapiens
gaattgcacggccag

SEQ ID NO: 2034786 - DNA, 15 bp, Homo sapiens
aattgcacggccagt

SEQ ID NO: 2034787 - DNA, 15 bp, Homo sapiens
attgcacggccagtg

SEQ ID NO: 2034788 - DNA, 15 bp, Homo sapiens
ttgcacggccagtgt

SEQ ID NO: 2034789 - DNA, 15 bp, Homo sapiens
tgcacggccagtgtg

SEQ ID NO: 2034790 - DNA, 15 bp, Homo sapiens
gcacggccagtgtgt

SEQ ID NO: 2034791 - DNA, 15 bp, Homo sapiens
cacggccagtgtgtg

SEQ ID NO: 2034792 - DNA, 15 bp, Homo sapiens
acggccagtgtgtgg

SEQ ID NO: 2034793 - DNA, 15 bp, Homo sapiens
cggccagtgtgtggc

SEQ ID NO: 2034794 - DNA, 15 bp, Homo sapiens
ggccagtgtgtggcc

SEQ ID NO: 2034795 - DNA, 15 bp, Homo sapiens
gccagtgtgtggcct

SEQ ID NO: 2034796 - DNA, 15 bp, Homo sapiens
ccagtgtgtggcctg

SEQ ID NO: 2034797 - DNA, 15 bp, Homo sapiens
cagtgtgtggcctgt

SEQ ID NO: 2034798 - DNA, 15 bp, Homo sapiens
agtgtgtggcctgtc

SEQ ID NO: 2034799 - DNA, 15 bp, Homo sapiens
gtgtgtggcctgtct

SEQ ID NO: 2034800 - DNA, 15 bp, Homo sapiens
tgtgtggcctgtctt

SEQ ID NO: 2034801 - DNA, 15 bp, Homo sapiens
gtgtggcctgtcttg

SEQ ID NO: 2034802 - DNA, 15 bp, Homo sapiens
tgtggcctgtcttgt

SEQ ID NO: 2034803 - DNA, 15 bp, Homo sapiens
gtggcctgtcttgtt

SEQ ID NO: 2034804 - DNA, 15 bp, Homo sapiens
tggcctgtcttgttt

SEQ ID NO: 2034805 - DNA, 15 bp, Homo sapiens
ggcctgtcttgttta

SEQ ID NO: 2034806 - DNA, 15 bp, Homo sapiens
gcctgtcttgtttaa

SEQ ID NO: 2034807 - DNA, 15 bp, Homo sapiens
cctgtcttgtttaag

SEQ ID NO: 2034808 - DNA, 15 bp, Homo sapiens
ctgtcttgtttaagg

SEQ ID NO: 2034809 - DNA, 15 bp, Homo sapiens
tgtcttgtttaagga

SEQ ID NO: 2034810 - DNA, 15 bp, Homo sapiens
gtcttgtttaaggag

SEQ ID NO: 2034811 - DNA, 15 bp, Homo sapiens
tcttgtttaaggagc

SEQ ID NO: 2034812 - DNA, 15 bp, Homo sapiens
cttgtttaaggagct

SEQ ID NO: 2034813 - DNA, 15 bp, Homo sapiens
ttgtttaaggagctg

SEQ ID NO: 2034814 - DNA, 15 bp, Homo sapiens
tgtttaaggagctgc

SEQ ID NO: 2034815 - DNA, 15 bp, Homo sapiens
gtttaaggagctgct

SEQ ID NO: 2034816 - DNA, 15 bp, Homo sapiens
tttaaggagctgcta

SEQ ID NO: 2034817 - DNA, 15 bp, Homo sapiens
ttaaggagctgctaa

SEQ ID NO: 2034818 - DNA, 15 bp, Homo sapiens
taaggagctgctaat

SEQ ID NO: 2034819 - DNA, 15 bp, Homo sapiens
aaggagctgctaata

SEQ ID NO: 2034820 - DNA, 15 bp, Homo sapiens
aggagctgctaatac

SEQ ID NO: 2034821 - DNA, 15 bp, Homo sapiens
ggagctgctaatacc

SEQ ID NO: 2034822 - DNA, 15 bp, Homo sapiens
gagctgctaataccc

SEQ ID NO: 2034823 - DNA, 15 bp, Homo sapiens
agctgctaataccca

SEQ ID NO: 2034824 - DNA, 15 bp, Homo sapiens
gctgctaatacccac

SEQ ID NO: 2034825 - DNA, 15 bp, Homo sapiens
ctgctaatacccacc

SEQ ID NO: 2034826 - DNA, 15 bp, Homo sapiens
tgctaatacccaccc

SEQ ID NO: 2034827 - DNA, 15 bp, Homo sapiens
gctaatacccaccca

SEQ ID NO: 2034828 - DNA, 15 bp, Homo sapiens
ctaatacccacccag

SEQ ID NO: 2034829 - DNA, 15 bp, Homo sapiens
taatacccacccaga

SEQ ID NO: 2034830 - DNA, 15 bp, Homo sapiens
aatacccacccagaa

SEQ ID NO: 2034831 - DNA, 15 bp, Homo sapiens
atacccacccagaac

SEQ ID NO: 2034832 - DNA, 15 bp, Homo sapiens
tacccacccagaaca

SEQ ID NO: 2034833 - DNA, 15 bp, Homo sapiens
acccacccagaacaa

SEQ ID NO: 2034834 - DNA, 15 bp, Homo sapiens
cccacccagaacaat

SEQ ID NO: 2034835 - DNA, 15 bp, Homo sapiens
ccacccagaacaatg

SEQ ID NO: 2034836 - DNA, 15 bp, Homo sapiens
cacccagaacaatga

SEQ ID NO: 2034837 - DNA, 15 bp, Homo sapiens
acccagaacaatgaa

SEQ ID NO: 2034838 - DNA, 15 bp, Homo sapiens
cccagaacaatgaag

SEQ ID NO: 2034839 - DNA, 15 bp, Homo sapiens
ccagaacaatgaaga

SEQ ID NO: 2034840 - DNA, 15 bp, Homo sapiens
cagaacaatgaagat

SEQ ID NO: 2034841 - DNA, 15 bp, Homo sapiens
agaacaatgaagatg

SEQ ID NO: 2034842 - DNA, 15 bp, Homo sapiens
gaacaatgaagatgc

SEQ ID NO: 2034843 - DNA, 15 bp, Homo sapiens
aacaatgaagatgca

SEQ ID NO: 2034844 - DNA, 15 bp, Homo sapiens
acaatgaagatgcaa

SEQ ID NO: 2034845 - DNA, 15 bp, Homo sapiens
caatgaagatgcaat

SEQ ID NO: 2034846 - DNA, 15 bp, Homo sapiens
aatgaagatgcaatc

SEQ ID NO: 2034847 - DNA, 15 bp, Homo sapiens
atgaagatgcaatcc

SEQ ID NO: 2034848 - DNA, 15 bp, Homo sapiens
tgaagatgcaatccc

SEQ ID NO: 2034849 - DNA, 15 bp, Homo sapiens
gaagatgcaatccca

SEQ ID NO: 2034850 - DNA, 15 bp, Homo sapiens
aagatgcaatcccat

SEQ ID NO: 2034851 - DNA, 15 bp, Homo sapiens
agatgcaatcccata

SEQ ID NO: 2034852 - DNA, 15 bp, Homo sapiens
gatgcaatcccatac

SEQ ID NO: 2034853 - DNA, 15 bp, Homo sapiens
atgcaatcccatacc

SEQ ID NO: 2034854 - DNA, 15 bp, Homo sapiens
tgcaatcccatacct

SEQ ID NO: 2034855 - DNA, 15 bp, Homo sapiens
gcaatcccatacctg

SEQ ID NO: 2034856 - DNA, 15 bp, Homo sapiens
caatcccatacctgg

SEQ ID NO: 2034857 - DNA, 15 bp, Homo sapiens
aatcccatacctgga

SEQ ID NO: 2034858 - DNA, 15 bp, Homo sapiens
atcccatacctggac

SEQ ID NO: 2034859 - DNA, 15 bp, Homo sapiens
tcccatacctggact

SEQ ID NO: 2034860 - DNA, 15 bp, Homo sapiens
cccatacctggacta

SEQ ID NO: 2034861 - DNA, 15 bp, Homo sapiens
ccatacctggactaa

SEQ ID NO: 2034862 - DNA, 15 bp, Homo sapiens
catacctggactaac

SEQ ID NO: 2034863 - DNA, 15 bp, Homo sapiens
tacctggactaacaa

SEQ ID NO: 2034864 - DNA, 15 bp, Homo sapiens
acctggactaacaaa

SEQ ID NO: 2034865 - DNA, 15 bp, Homo sapiens
cctggactaacaaag

SEQ ID NO: 2034866 - DNA, 15 bp, Homo sapiens
ctggactaacaaagg

SEQ ID NO: 2034867 - DNA, 15 bp, Homo sapiens
tggactaacaaaggc

SEQ ID NO: 2034868 - DNA, 15 bp, Homo sapiens
ggactaacaaaggca

SEQ ID NO: 2034869 - DNA, 15 bp, Homo sapiens
gactaacaaaggcag

SEQ ID NO: 2034870 - DNA, 15 bp, Homo sapiens
actaacaaaggcagg

SEQ ID NO: 2034871 - DNA, 15 bp, Homo sapiens
ctaacaaaggcaggt

SEQ ID NO: 2034872 - DNA, 15 bp, Homo sapiens
taacaaaggcaggtt

SEQ ID NO: 2034873 - DNA, 15 bp, Homo sapiens
aacaaaggcaggtta

SEQ ID NO: 2034874 - DNA, 15 bp, Homo sapiens
acaaaggcaggttaa

SEQ ID NO: 2034875 - DNA, 15 bp, Homo sapiens
caaaggcaggttaat

SEQ ID NO: 2034876 - DNA, 15 bp, Homo sapiens
aaaggcaggttaata

SEQ ID NO: 2034877 - DNA, 15 bp, Homo sapiens
aaggcaggttaataa

SEQ ID NO: 2034878 - DNA, 15 bp, Homo sapiens
aggcaggttaataag

SEQ ID NO: 2034879 - DNA, 15 bp, Homo sapiens
ggcaggttaataaga

SEQ ID NO: 2034880 - DNA, 15 bp, Homo sapiens
gcaggttaataagaa

SEQ ID NO: 2034881 - DNA, 15 bp, Homo sapiens
caggttaataagaaa

SEQ ID NO: 2034882 - DNA, 15 bp, Homo sapiens
aggttaataagaaac

SEQ ID NO: 2034883 - DNA, 15 bp, Homo sapiens
ggttaataagaaact

SEQ ID NO: 2034884 - DNA, 15 bp, Homo sapiens
gttaataagaaactc

SEQ ID NO: 2034885 - DNA, 15 bp, Homo sapiens
ttaataagaaactca

SEQ ID NO: 2034886 - DNA, 15 bp, Homo sapiens
taataagaaactcaa

SEQ ID NO: 2034887 - DNA, 15 bp, Homo sapiens
aataagaaactcaag

SEQ ID NO: 2034888 - DNA, 15 bp, Homo sapiens
ataagaaactcaaga

SEQ ID NO: 2034889 - DNA, 15 bp, Homo sapiens
taagaaactcaagag

SEQ ID NO: 2034890 - DNA, 15 bp, Homo sapiens
aagaaactcaagaga

SEQ ID NO: 2034891 - DNA, 15 bp, Homo sapiens
agaaactcaagagag

SEQ ID NO: 2034892 - DNA, 15 bp, Homo sapiens
gaaactcaagagaga

SEQ ID NO: 2034893 - DNA, 15 bp, Homo sapiens
aaactcaagagagag

SEQ ID NO: 2034894 - DNA, 15 bp, Homo sapiens
aactcaagagagagt

SEQ ID NO: 2034895 - DNA, 15 bp, Homo sapiens
actcaagagagagtt

SEQ ID NO: 2034896 - DNA, 15 bp, Homo sapiens
ctcaagagagagtta

SEQ ID NO: 2034897 - DNA, 15 bp, Homo sapiens
tcaagagagagttaa

SEQ ID NO: 2034898 - DNA, 15 bp, Homo sapiens
caagagagagttaat

SEQ ID NO: 2034899 - DNA, 15 bp, Homo sapiens
aagagagagttaata

SEQ ID NO: 2034900 - DNA, 15 bp, Homo sapiens
agagagagttaatag

SEQ ID NO: 2034901 - DNA, 15 bp, Homo sapiens
gagagagttaataga

SEQ ID NO: 2034902 - DNA, 15 bp, Homo sapiens
agagagttaatagag

SEQ ID NO: 2034903 - DNA, 15 bp, Homo sapiens
gagagttaatagaga

SEQ ID NO: 2034904 - DNA, 15 bp, Homo sapiens
agagttaatagagaa

SEQ ID NO: 2034905 - DNA, 15 bp, Homo sapiens
gagttaatagagaaa

SEQ ID NO: 2034906 - DNA, 15 bp, Homo sapiens
agttaatagagaaag

SEQ ID NO: 2034907 - DNA, 15 bp, Homo sapiens
gttaatagagaaaga

SEQ ID NO: 2034908 - DNA, 15 bp, Homo sapiens
ttaatagagaaagag

SEQ ID NO: 2034909 - DNA, 15 bp, Homo sapiens
taatagagaaagagc

SEQ ID NO: 2034910 - DNA, 15 bp, Homo sapiens
aatagagaaagagca

SEQ ID NO: 2034911 - DNA, 15 bp, Homo sapiens
atagagaaagagcag

SEQ ID NO: 2034912 - DNA, 15 bp, Homo sapiens
tagagaaagagcaga

SEQ ID NO: 2034913 - DNA, 15 bp, Homo sapiens
agagaaagagcagaa

SEQ ID NO: 2034914 - DNA, 15 bp, Homo sapiens
gagaaagagcagaat

SEQ ID NO: 2034915 - DNA, 15 bp, Homo sapiens
agaaagagcagaata

SEQ ID NO: 2034916 - DNA, 15 bp, Homo sapiens
gaaagagcagaatac

SEQ ID NO: 2034917 - DNA, 15 bp, Homo sapiens
aaagagcagaatacg

SEQ ID NO: 2034918 - DNA, 15 bp, Homo sapiens
aagagcagaatacgt

SEQ ID NO: 2034919 - DNA, 15 bp, Homo sapiens
agagcagaatacgtg

SEQ ID NO: 2034920 - DNA, 15 bp, Homo sapiens
gagcagaatacgtgg

SEQ ID NO: 2034921 - DNA, 15 bp, Homo sapiens
agcagaatacgtggt

SEQ ID NO: 2034922 - DNA, 15 bp, Homo sapiens
gcagaatacgtggtt

SEQ ID NO: 2034923 - DNA, 15 bp, Homo sapiens
cagaatacgtggttt

SEQ ID NO: 2034924 - DNA, 15 bp, Homo sapiens
agaatacgtggtttg

SEQ ID NO: 2034925 - DNA, 15 bp, Homo sapiens
gaatacgtggtttga

SEQ ID NO: 2034926 - DNA, 15 bp, Homo sapiens
aatacgtggtttgat

SEQ ID NO: 2034927 - DNA, 15 bp, Homo sapiens
atacgtggtttgatg

SEQ ID NO: 2034928 - DNA, 15 bp, Homo sapiens
tacgtggtttgatga

SEQ ID NO: 2034929 - DNA, 15 bp, Homo sapiens
acgtggtttgatgaa

SEQ ID NO: 2034930 - DNA, 15 bp, Homo sapiens
cgtggtttgatgaag

SEQ ID NO: 2034931 - DNA, 15 bp, Homo sapiens
gtggtttgatgaagt

SEQ ID NO: 2034932 - DNA, 15 bp, Homo sapiens
tggtttgatgaagtt

SEQ ID NO: 2034933 - DNA, 15 bp, Homo sapiens
ggtttgatgaagttt

SEQ ID NO: 2034934 - DNA, 15 bp, Homo sapiens
gtttgatgaagtttt

SEQ ID NO: 2034935 - DNA, 15 bp, Homo sapiens
tttgatgaagttttt

SEQ ID NO: 2034936 - DNA, 15 bp, Homo sapiens
gatgaagttttttta

SEQ ID NO: 2034937 - DNA, 15 bp, Homo sapiens
atgaagtttttttag

SEQ ID NO: 2034938 - DNA, 15 bp, Homo sapiens
tgaagtttttttagc

SEQ ID NO: 2034939 - DNA, 15 bp, Homo sapiens
gaagtttttttagct

SEQ ID NO: 2034940 - DNA, 15 bp, Homo sapiens
aagtttttttagctt

SEQ ID NO: 2034941 - DNA, 15 bp, Homo sapiens
agtttttttagctta

SEQ ID NO: 2034942 - DNA, 15 bp, Homo sapiens
gtttttttagcttag

SEQ ID NO: 2034943 - DNA, 15 bp, Homo sapiens
tttttttagcttaga

SEQ ID NO: 2034944 - DNA, 15 bp, Homo sapiens
ttttttagcttagaa

SEQ ID NO: 2034945 - DNA, 15 bp, Homo sapiens
tttttagcttagaaa

SEQ ID NO: 2034946 - DNA, 15 bp, Homo sapiens
ttttagcttagaaaa

SEQ ID NO: 2034947 - DNA, 15 bp, Homo sapiens
tttagcttagaaaat

SEQ ID NO: 2034948 - DNA, 15 bp, Homo sapiens
ttagcttagaaaata

SEQ ID NO: 2034949 - DNA, 15 bp, Homo sapiens
tagcttagaaaataa

SEQ ID NO: 2034950 - DNA, 15 bp, Homo sapiens
agcttagaaaataac

SEQ ID NO: 2034951 - DNA, 15 bp, Homo sapiens
gcttagaaaataact

SEQ ID NO: 2034952 - DNA, 15 bp, Homo sapiens
cttagaaaataactt

SEQ ID NO: 2034953 - DNA, 15 bp, Homo sapiens
ttagaaaataacttg

SEQ ID NO: 2034954 - DNA, 15 bp, Homo sapiens
tagaaaataacttgt

SEQ ID NO: 2034955 - DNA, 15 bp, Homo sapiens
agaaaataacttgtt

SEQ ID NO: 2034956 - DNA, 15 bp, Homo sapiens
gaaaataacttgttt

SEQ ID NO: 2034957 - DNA, 15 bp, Homo sapiens
aaaataacttgtttt

SEQ ID NO: 2034958 - DNA, 15 bp, Homo sapiens
aaataacttgttttc

SEQ ID NO: 2034959 - DNA, 15 bp, Homo sapiens
aataacttgttttcc

SEQ ID NO: 2034960 - DNA, 15 bp, Homo sapiens
ataacttgttttccc

SEQ ID NO: 2034961 - DNA, 15 bp, Homo sapiens
taacttgttttcccc

SEQ ID NO: 2034962 - DNA, 15 bp, Homo sapiens
aacttgttttcccca

SEQ ID NO: 2034963 - DNA, 15 bp, Homo sapiens
acttgttttccccaa

SEQ ID NO: 2034964 - DNA, 15 bp, Homo sapiens
cttgttttccccaaa

SEQ ID NO: 2034965 - DNA, 15 bp, Homo sapiens
ttgttttccccaaat

SEQ ID NO: 2034966 - DNA, 15 bp, Homo sapiens
tgttttccccaaata

SEQ ID NO: 2034967 - DNA, 15 bp, Homo sapiens
gttttccccaaatag

SEQ ID NO: 2034968 - DNA, 15 bp, Homo sapiens
ttttccccaaataga

SEQ ID NO: 2034969 - DNA, 15 bp, Homo sapiens
tttccccaaatagaa

SEQ ID NO: 2034970 - DNA, 15 bp, Homo sapiens
ttccccaaatagaaa

SEQ ID NO: 2034971 - DNA, 15 bp, Homo sapiens
tccccaaatagaaag

SEQ ID NO: 2034972 - DNA, 15 bp, Homo sapiens
ccccaaatagaaagc

SEQ ID NO: 2034973 - DNA, 15 bp, Homo sapiens
cccaaatagaaagcc

SEQ ID NO: 2034974 - DNA, 15 bp, Homo sapiens
ccaaatagaaagcca

SEQ ID NO: 2034975 - DNA, 15 bp, Homo sapiens
caaatagaaagccaa

SEQ ID NO: 2034976 - DNA, 15 bp, Homo sapiens
aaatagaaagccaac

SEQ ID NO: 2034977 - DNA, 15 bp, Homo sapiens
aatagaaagccaacc

SEQ ID NO: 2034978 - DNA, 15 bp, Homo sapiens
atagaaagccaaccc

SEQ ID NO: 2034979 - DNA, 15 bp, Homo sapiens
tagaaagccaacccc

SEQ ID NO: 2034980 - DNA, 15 bp, Homo sapiens
agaaagccaacccca

SEQ ID NO: 2034981 - DNA, 15 bp, Homo sapiens
gaaagccaaccccag

SEQ ID NO: 2034982 - DNA, 15 bp, Homo sapiens
aaagccaaccccagt

SEQ ID NO: 2034983 - DNA, 15 bp, Homo sapiens
aagccaaccccagtg

SEQ ID NO: 2034984 - DNA, 15 bp, Homo sapiens
agccaaccccagtgt

SEQ ID NO: 2034985 - DNA, 15 bp, Homo sapiens
gccaaccccagtgtt

SEQ ID NO: 2034986 - DNA, 15 bp, Homo sapiens
ccaaccccagtgttt

SEQ ID NO: 2034987 - DNA, 15 bp, Homo sapiens
caaccccagtgtttc

SEQ ID NO: 2034988 - DNA, 15 bp, Homo sapiens
aaccccagtgtttcc

SEQ ID NO: 2034989 - DNA, 15 bp, Homo sapiens
accccagtgtttcct

SEQ ID NO: 2034990 - DNA, 15 bp, Homo sapiens
ccccagtgtttcctc

SEQ ID NO: 2034991 - DNA, 15 bp, Homo sapiens
cccagtgtttcctca

SEQ ID NO: 2034992 - DNA, 15 bp, Homo sapiens
ccagtgtttcctcag

SEQ ID NO: 2034993 - DNA, 15 bp, Homo sapiens
cagtgtttcctcaga

SEQ ID NO: 2034994 - DNA, 15 bp, Homo sapiens
agtgtttcctcagaa

SEQ ID NO: 2034995 - DNA, 15 bp, Homo sapiens
gtgtttcctcagaaa

SEQ ID NO: 2034996 - DNA, 15 bp, Homo sapiens
tgtttcctcagaaat

SEQ ID NO: 2034997 - DNA, 15 bp, Homo sapiens
gtttcctcagaaatt

SEQ ID NO: 2034998 - DNA, 15 bp, Homo sapiens
tttcctcagaaatta

SEQ ID NO: 2034999 - DNA, 15 bp, Homo sapiens
ttcctcagaaattaa

SEQ ID NO: 2035000 - DNA, 15 bp, Homo sapiens
tcctcagaaattaaa

SEQ ID NO: 2035001 - DNA, 15 bp, Homo sapiens
cctcagaaattaaag

SEQ ID NO: 2035002 - DNA, 15 bp, Homo sapiens
ctcagaaattaaagc

SEQ ID NO: 2035003 - DNA, 15 bp, Homo sapiens
tcagaaattaaagct

SEQ ID NO: 2035004 - DNA, 15 bp, Homo sapiens
cagaaattaaagctg

SEQ ID NO: 2035005 - DNA, 15 bp, Homo sapiens
gaaattaaagctggc

SEQ ID NO: 2035006 - DNA, 15 bp, Homo sapiens
aaattaaagctggct

SEQ ID NO: 2035007 - DNA, 15 bp, Homo sapiens
aattaaagctggctg

SEQ ID NO: 2035008 - DNA, 15 bp, Homo sapiens
attaaagctggctgt

SEQ ID NO: 2035009 - DNA, 15 bp, Homo sapiens
ttaaagctggctgtc

SEQ ID NO: 2035010 - DNA, 15 bp, Homo sapiens
taaagctggctgtct

SEQ ID NO: 2035011 - DNA, 15 bp, Homo sapiens
aaagctggctgtcta

SEQ ID NO: 2035012 - DNA, 15 bp, Homo sapiens
aagctggctgtctat

SEQ ID NO: 2035013 - DNA, 15 bp, Homo sapiens
agctggctgtctatt

SEQ ID NO: 2035014 - DNA, 15 bp, Homo sapiens
gctggctgtctattc

SEQ ID NO: 2035015 - DNA, 15 bp, Homo sapiens
ctggctgtctattca

SEQ ID NO: 2035016 - DNA, 15 bp, Homo sapiens
tggctgtctattcaa

SEQ ID NO: 2035017 - DNA, 15 bp, Homo sapiens
ggctgtctattcaat

SEQ ID NO: 2035018 - DNA, 15 bp, Homo sapiens
gctgtctattcaatc

SEQ ID NO: 2035019 - DNA, 15 bp, Homo sapiens
ctgtctattcaatca

SEQ ID NO: 2035020 - DNA, 15 bp, Homo sapiens
tgtctattcaatcac

SEQ ID NO: 2035021 - DNA, 15 bp, Homo sapiens
gtctattcaatcacc

SEQ ID NO: 2035022 - DNA, 15 bp, Homo sapiens
tctattcaatcacct

SEQ ID NO: 2035023 - DNA, 15 bp, Homo sapiens
ctattcaatcacctg

SEQ ID NO: 2035024 - DNA, 15 bp, Homo sapiens
tattcaatcacctgt

SEQ ID NO: 2035025 - DNA, 15 bp, Homo sapiens
attcaatcacctgtg

SEQ ID NO: 2035026 - DNA, 15 bp, Homo sapiens
ttcaatcacctgtgg

SEQ ID NO: 2035027 - DNA, 15 bp, Homo sapiens
tcaatcacctgtggt

SEQ ID NO: 2035028 - DNA, 15 bp, Homo sapiens
caatcacctgtggtt

SEQ ID NO: 2035029 - DNA, 15 bp, Homo sapiens
aatcacctgtggtta

SEQ ID NO: 2035030 - DNA, 15 bp, Homo sapiens
atcacctgtggttaa

SEQ ID NO: 2035031 - DNA, 15 bp, Homo sapiens
tcacctgtggttaaa

SEQ ID NO: 2035032 - DNA, 15 bp, Homo sapiens
cacctgtggttaaaa

SEQ ID NO: 2035033 - DNA, 15 bp, Homo sapiens
acctgtggttaaaaa

SEQ ID NO: 2035034 - DNA, 15 bp, Homo sapiens
cctgtggttaaaaaa

SEQ ID NO: 2035035 - DNA, 15 bp, Homo sapiens
ctgtggttaaaaaaa

SEQ ID NO: 2035036 - DNA, 15 bp, Homo sapiens
tgtggttaaaaaaag

SEQ ID NO: 2035037 - DNA, 15 bp, Homo sapiens
gtggttaaaaaaagg

SEQ ID NO: 2035038 - DNA, 15 bp, Homo sapiens
tggttaaaaaaagga

SEQ ID NO: 2035039 - DNA, 15 bp, Homo sapiens
ggttaaaaaaaggaa

SEQ ID NO: 2035040 - DNA, 15 bp, Homo sapiens
gttaaaaaaaggaat

SEQ ID NO: 2035041 - DNA, 15 bp, Homo sapiens
ttaaaaaaaggaata

SEQ ID NO: 2035042 - DNA, 15 bp, Homo sapiens
taaaaaaaggaatat

SEQ ID NO: 2035043 - DNA, 15 bp, Homo sapiens
aaaaaaaggaatatg

SEQ ID NO: 2035044 - DNA, 15 bp, Homo sapiens
aaaaaaggaatatgg

SEQ ID NO: 2035045 - DNA, 15 bp, Homo sapiens
aaaaaggaatatggc

SEQ ID NO: 2035046 - DNA, 15 bp, Homo sapiens
aaaaggaatatggcc

SEQ ID NO: 2035047 - DNA, 15 bp, Homo sapiens
aaaggaatatggcca

SEQ ID NO: 2035048 - DNA, 15 bp, Homo sapiens
aaggaatatggccag

SEQ ID NO: 2035049 - DNA, 15 bp, Homo sapiens
aggaatatggccagg

SEQ ID NO: 2035050 - DNA, 15 bp, Homo sapiens
ggaatatggccaggt

SEQ ID NO: 2035051 - DNA, 15 bp, Homo sapiens
gaatatggccaggtg

SEQ ID NO: 2035052 - DNA, 15 bp, Homo sapiens
aatatggccaggtgc

SEQ ID NO: 2035053 - DNA, 15 bp, Homo sapiens
atatggccaggtgcg

SEQ ID NO: 2035054 - DNA, 15 bp, Homo sapiens
tatggccaggtgcga

SEQ ID NO: 2035055 - DNA, 15 bp, Homo sapiens
atggccaggtgcgat

SEQ ID NO: 2035056 - DNA, 15 bp, Homo sapiens
tggccaggtgcgatg

SEQ ID NO: 2035057 - DNA, 15 bp, Homo sapiens
ggccaggtgcgatgg

SEQ ID NO: 2035058 - DNA, 15 bp, Homo sapiens
gccaggtgcgatggc

SEQ ID NO: 2035059 - DNA, 15 bp, Homo sapiens
ccaggtgcgatggct

SEQ ID NO: 2035060 - DNA, 15 bp, Homo sapiens
caggtgcgatggctc

SEQ ID NO: 2035061 - DNA, 15 bp, Homo sapiens
aggtgcgatggctca

SEQ ID NO: 2035062 - DNA, 15 bp, Homo sapiens
ggtgcgatggctcac

SEQ ID NO: 2035063 - DNA, 15 bp, Homo sapiens
gtgcgatggctcacg

SEQ ID NO: 2035064 - DNA, 15 bp, Homo sapiens
tgcgatggctcacgc

SEQ ID NO: 2035065 - DNA, 15 bp, Homo sapiens
tcacgcctataatca

SEQ ID NO: 2035066 - DNA, 15 bp, Homo sapiens
cacgcctataatcac

SEQ ID NO: 2035067 - DNA, 15 bp, Homo sapiens
acgcctataatcaca

SEQ ID NO: 2035068 - DNA, 15 bp, Homo sapiens
cgcctataatcacag

SEQ ID NO: 2035069 - DNA, 15 bp, Homo sapiens
gcctataatcacagc

SEQ ID NO: 2035070 - DNA, 15 bp, Homo sapiens
cctataatcacagca

SEQ ID NO: 2035071 - DNA, 15 bp, Homo sapiens
ctataatcacagcac

SEQ ID NO: 2035072 - DNA, 15 bp, Homo sapiens
tataatcacagcact

SEQ ID NO: 2035073 - DNA, 15 bp, Homo sapiens
ataatcacagcactt

SEQ ID NO: 2035074 - DNA, 15 bp, Homo sapiens
taatcacagcacttt

SEQ ID NO: 2035075 - DNA, 15 bp, Homo sapiens
aatcacagcactttg

SEQ ID NO: 2035076 - DNA, 15 bp, Homo sapiens
atcacagcactttgg

SEQ ID NO: 2035077 - DNA, 15 bp, Homo sapiens
tcacagcactttggg

SEQ ID NO: 2035078 - DNA, 15 bp, Homo sapiens
cacagcactttggga

SEQ ID NO: 2035079 - DNA, 15 bp, Homo sapiens
gtgggcggatcactt

SEQ ID NO: 2035080 - DNA, 15 bp, Homo sapiens
tgggcggatcacttg

SEQ ID NO: 2035081 - DNA, 15 bp, Homo sapiens
gcggatcacttgagt

SEQ ID NO: 2035082 - DNA, 15 bp, Homo sapiens
cggatcacttgagtc

SEQ ID NO: 2035083 - DNA, 15 bp, Homo sapiens
ggatcacttgagtcc

SEQ ID NO: 2035084 - DNA, 15 bp, Homo sapiens
gatcacttgagtcca

SEQ ID NO: 2035085 - DNA, 15 bp, Homo sapiens
tgagtccaggagttg

SEQ ID NO: 2035086 - DNA, 15 bp, Homo sapiens
gagtccaggagttga

SEQ ID NO: 2035087 - DNA, 15 bp, Homo sapiens
agtccaggagttgaa

SEQ ID NO: 2035088 - DNA, 15 bp, Homo sapiens
gtccaggagttgaaa

SEQ ID NO: 2035089 - DNA, 15 bp, Homo sapiens
tccaggagttgaaaa

SEQ ID NO: 2035090 - DNA, 15 bp, Homo sapiens
ccaggagttgaaaac

SEQ ID NO: 2035091 - DNA, 15 bp, Homo sapiens
caggagttgaaaacc

SEQ ID NO: 2035092 - DNA, 15 bp, Homo sapiens
aggagttgaaaacca

SEQ ID NO: 2035093 - DNA, 15 bp, Homo sapiens
ggagttgaaaaccag

SEQ ID NO: 2035094 - DNA, 15 bp, Homo sapiens
gagttgaaaaccagc

SEQ ID NO: 2035095 - DNA, 15 bp, Homo sapiens
agttgaaaaccagcc

SEQ ID NO: 2035096 - DNA, 15 bp, Homo sapiens
gttgaaaaccagcct

SEQ ID NO: 2035097 - DNA, 15 bp, Homo sapiens
ttgaaaaccagcctg

SEQ ID NO: 2035098 - DNA, 15 bp, Homo sapiens
tgaaaaccagcctgg

SEQ ID NO: 2035099 - DNA, 15 bp, Homo sapiens
gaaaaccagcctggg

SEQ ID NO: 2035100 - DNA, 15 bp, Homo sapiens
aaaaccagcctgggt

SEQ ID NO: 2035101 - DNA, 15 bp, Homo sapiens
aaaccagcctgggta

SEQ ID NO: 2035102 - DNA, 15 bp, Homo sapiens
aaccagcctgggtaa

SEQ ID NO: 2035103 - DNA, 15 bp, Homo sapiens
ccagcctgggtaacg

SEQ ID NO: 2035104 - DNA, 15 bp, Homo sapiens
cagcctgggtaacgt

SEQ ID NO: 2035105 - DNA, 15 bp, Homo sapiens
agcctgggtaacgtg

SEQ ID NO: 2035106 - DNA, 15 bp, Homo sapiens
gcctgggtaacgtgg

SEQ ID NO: 2035107 - DNA, 15 bp, Homo sapiens
cctgggtaacgtggc

SEQ ID NO: 2035108 - DNA, 15 bp, Homo sapiens
ctgggtaacgtggca

SEQ ID NO: 2035109 - DNA, 15 bp, Homo sapiens
tgggtaacgtggcaa

SEQ ID NO: 2035110 - DNA, 15 bp, Homo sapiens
gggtaacgtggcaaa

SEQ ID NO: 2035111 - DNA, 15 bp, Homo sapiens
ggtaacgtggcaaaa

SEQ ID NO: 2035112 - DNA, 15 bp, Homo sapiens
gtaacgtggcaaaac

SEQ ID NO: 2035113 - DNA, 15 bp, Homo sapiens
taacgtggcaaaacc

SEQ ID NO: 2035114 - DNA, 15 bp, Homo sapiens
aacgtggcaaaaccc

SEQ ID NO: 2035115 - DNA, 15 bp, Homo sapiens
acgtggcaaaaccct

SEQ ID NO: 2035116 - DNA, 15 bp, Homo sapiens
cgtggcaaaaccctc

SEQ ID NO: 2035117 - DNA, 15 bp, Homo sapiens
gtggcaaaaccctct

SEQ ID NO: 2035118 - DNA, 15 bp, Homo sapiens
tggcaaaaccctctt

SEQ ID NO: 2035119 - DNA, 15 bp, Homo sapiens
ggcaaaaccctcttt

SEQ ID NO: 2035120 - DNA, 15 bp, Homo sapiens
gcaaaaccctctttc

SEQ ID NO: 2035121 - DNA, 15 bp, Homo sapiens
caaaaccctctttct

SEQ ID NO: 2035122 - DNA, 15 bp, Homo sapiens
aaaaccctctttcta

SEQ ID NO: 2035123 - DNA, 15 bp, Homo sapiens
aaaccctctttctac

SEQ ID NO: 2035124 - DNA, 15 bp, Homo sapiens
aaccctctttctaca

SEQ ID NO: 2035125 - DNA, 15 bp, Homo sapiens
accctctttctacaa

SEQ ID NO: 2035126 - DNA, 15 bp, Homo sapiens
ccctctttctacaaa

SEQ ID NO: 2035127 - DNA, 15 bp, Homo sapiens
cctctttctacaaaa

SEQ ID NO: 2035128 - DNA, 15 bp, Homo sapiens
ctctttctacaaaaa

SEQ ID NO: 2035129 - DNA, 15 bp, Homo sapiens
tctttctacaaaaaa

SEQ ID NO: 2035130 - DNA, 15 bp, Homo sapiens
ttctacaaaaaatac

SEQ ID NO: 2035131 - DNA, 15 bp, Homo sapiens
aaaaaatacaaaaag

SEQ ID NO: 2035132 - DNA, 15 bp, Homo sapiens
aaaaatacaaaaagc

SEQ ID NO: 2035133 - DNA, 15 bp, Homo sapiens
aaaatacaaaaagct

SEQ ID NO: 2035134 - DNA, 15 bp, Homo sapiens
aaatacaaaaagcta

SEQ ID NO: 2035135 - DNA, 15 bp, Homo sapiens
aatacaaaaagctat

SEQ ID NO: 2035136 - DNA, 15 bp, Homo sapiens
atacaaaaagctatt

SEQ ID NO: 2035137 - DNA, 15 bp, Homo sapiens
tacaaaaagctattc

SEQ ID NO: 2035138 - DNA, 15 bp, Homo sapiens
acaaaaagctattca

SEQ ID NO: 2035139 - DNA, 15 bp, Homo sapiens
caaaaagctattcac

SEQ ID NO: 2035140 - DNA, 15 bp, Homo sapiens
aaaaagctattcaca

SEQ ID NO: 2035141 - DNA, 15 bp, Homo sapiens
aaaagctattcacag

SEQ ID NO: 2035142 - DNA, 15 bp, Homo sapiens
aaagctattcacagg

SEQ ID NO: 2035143 - DNA, 15 bp, Homo sapiens
aagctattcacagga

SEQ ID NO: 2035144 - DNA, 15 bp, Homo sapiens
agctattcacaggac

SEQ ID NO: 2035145 - DNA, 15 bp, Homo sapiens
gctattcacaggact

SEQ ID NO: 2035146 - DNA, 15 bp, Homo sapiens
ctattcacaggactg

SEQ ID NO: 2035147 - DNA, 15 bp, Homo sapiens
tattcacaggactga

SEQ ID NO: 2035148 - DNA, 15 bp, Homo sapiens
attcacaggactgag

SEQ ID NO: 2035149 - DNA, 15 bp, Homo sapiens
ttcacaggactgagg

SEQ ID NO: 2035150 - DNA, 15 bp, Homo sapiens
tcacaggactgaggt

SEQ ID NO: 2035151 - DNA, 15 bp, Homo sapiens
cacaggactgaggtg

SEQ ID NO: 2035152 - DNA, 15 bp, Homo sapiens
acaggactgaggtgg

SEQ ID NO: 2035153 - DNA, 15 bp, Homo sapiens
caggactgaggtggg

SEQ ID NO: 2035154 - DNA, 15 bp, Homo sapiens
aggactgaggtgggg

SEQ ID NO: 2035155 - DNA, 15 bp, Homo sapiens
ggactgaggtgggga

SEQ ID NO: 2035156 - DNA, 15 bp, Homo sapiens
gactgaggtggggag

SEQ ID NO: 2035157 - DNA, 15 bp, Homo sapiens
actgaggtggggagg

SEQ ID NO: 2035158 - DNA, 15 bp, Homo sapiens
ctgaggtggggaggt

SEQ ID NO: 2035159 - DNA, 15 bp, Homo sapiens
tgaggtggggaggtt

SEQ ID NO: 2035160 - DNA, 15 bp, Homo sapiens
gaggtggggaggttg

SEQ ID NO: 2035161 - DNA, 15 bp, Homo sapiens
aggtggggaggttga

SEQ ID NO: 2035162 - DNA, 15 bp, Homo sapiens
ggtggggaggttgag

SEQ ID NO: 2035163 - DNA, 15 bp, Homo sapiens
gtggggaggttgagg

SEQ ID NO: 2035164 - DNA, 15 bp, Homo sapiens
tggggaggttgaggc

SEQ ID NO: 2035165 - DNA, 15 bp, Homo sapiens
ggggaggttgaggct

SEQ ID NO: 2035166 - DNA, 15 bp, Homo sapiens
gggaggttgaggctt

SEQ ID NO: 2035167 - DNA, 15 bp, Homo sapiens
ggaggttgaggcttt

SEQ ID NO: 2035168 - DNA, 15 bp, Homo sapiens
gaggttgaggctttg

SEQ ID NO: 2035169 - DNA, 15 bp, Homo sapiens
aggttgaggctttgg

SEQ ID NO: 2035170 - DNA, 15 bp, Homo sapiens
ggttgaggctttggt

SEQ ID NO: 2035171 - DNA, 15 bp, Homo sapiens
gttgaggctttggtg

SEQ ID NO: 2035172 - DNA, 15 bp, Homo sapiens
ttgaggctttggtga

SEQ ID NO: 2035173 - DNA, 15 bp, Homo sapiens
tgaggctttggtgag

SEQ ID NO: 2035174 - DNA, 15 bp, Homo sapiens
gaggctttggtgagc

SEQ ID NO: 2035175 - DNA, 15 bp, Homo sapiens
aggctttggtgagct

SEQ ID NO: 2035176 - DNA, 15 bp, Homo sapiens
ggctttggtgagctg

SEQ ID NO: 2035177 - DNA, 15 bp, Homo sapiens
gctttggtgagctga

SEQ ID NO: 2035178 - DNA, 15 bp, Homo sapiens
ctttggtgagctgag

SEQ ID NO: 2035179 - DNA, 15 bp, Homo sapiens
tttggtgagctgaga

SEQ ID NO: 2035180 - DNA, 15 bp, Homo sapiens
ttggtgagctgagat

SEQ ID NO: 2035181 - DNA, 15 bp, Homo sapiens
tggtgagctgagatc

SEQ ID NO: 2035182 - DNA, 15 bp, Homo sapiens
ggtgagctgagatcg

SEQ ID NO: 2035183 - DNA, 15 bp, Homo sapiens
tgagatcgcaccacc

SEQ ID NO: 2035184 - DNA, 15 bp, Homo sapiens
gagatcgcaccaccg

SEQ ID NO: 2035185 - DNA, 15 bp, Homo sapiens
agatcgcaccaccgc

SEQ ID NO: 2035186 - DNA, 15 bp, Homo sapiens
gatcgcaccaccgca

SEQ ID NO: 2035187 - DNA, 15 bp, Homo sapiens
atcgcaccaccgcac

SEQ ID NO: 2035188 - DNA, 15 bp, Homo sapiens
tcgcaccaccgcact

SEQ ID NO: 2035189 - DNA, 15 bp, Homo sapiens
cgcaccaccgcactc

SEQ ID NO: 2035190 - DNA, 15 bp, Homo sapiens
gcaccaccgcactcc

SEQ ID NO: 2035191 - DNA, 15 bp, Homo sapiens
caccaccgcactcca

SEQ ID NO: 2035192 - DNA, 15 bp, Homo sapiens
accaccgcactccag

SEQ ID NO: 2035193 - DNA, 15 bp, Homo sapiens
cgcactccagcctga

SEQ ID NO: 2035194 - DNA, 15 bp, Homo sapiens
gagtgacagagcaat

SEQ ID NO: 2035195 - DNA, 15 bp, Homo sapiens
agtgacagagcaata

SEQ ID NO: 2035196 - DNA, 15 bp, Homo sapiens
gtgacagagcaatac

SEQ ID NO: 2035197 - DNA, 15 bp, Homo sapiens
tgacagagcaatact

SEQ ID NO: 2035198 - DNA, 15 bp, Homo sapiens
gacagagcaatactc

SEQ ID NO: 2035199 - DNA, 15 bp, Homo sapiens
acagagcaatactct

SEQ ID NO: 2035200 - DNA, 15 bp, Homo sapiens
cagagcaatactctg

SEQ ID NO: 2035201 - DNA, 15 bp, Homo sapiens
agagcaatactctgt

SEQ ID NO: 2035202 - DNA, 15 bp, Homo sapiens
gagcaatactctgtc

SEQ ID NO: 2035203 - DNA, 15 bp, Homo sapiens
agcaatactctgtct

SEQ ID NO: 2035204 - DNA, 15 bp, Homo sapiens
gcaatactctgtctc

SEQ ID NO: 2035205 - DNA, 15 bp, Homo sapiens
caatactctgtctca

SEQ ID NO: 2035206 - DNA, 15 bp, Homo sapiens
aatactctgtctcac

SEQ ID NO: 2035207 - DNA, 15 bp, Homo sapiens
atactctgtctcaca

SEQ ID NO: 2035208 - DNA, 15 bp, Homo sapiens
tactctgtctcacaa

SEQ ID NO: 2035209 - DNA, 15 bp, Homo sapiens
gtctcacaaaaaaat

SEQ ID NO: 2035210 - DNA, 15 bp, Homo sapiens
tctcacaaaaaaatt

SEQ ID NO: 2035211 - DNA, 15 bp, Homo sapiens
ctcacaaaaaaatta

SEQ ID NO: 2035212 - DNA, 15 bp, Homo sapiens
tcacaaaaaaattaa

SEQ ID NO: 2035213 - DNA, 15 bp, Homo sapiens
cacaaaaaaattaaa

SEQ ID NO: 2035214 - DNA, 15 bp, Homo sapiens
caaaaaaattaaaaa

SEQ ID NO: 2035215 - DNA, 15 bp, Homo sapiens
aaaaaattaaaaaaa

SEQ ID NO: 2035216 - DNA, 15 bp, Homo sapiens
aaaaattaaaaaaaa

SEQ ID NO: 2035217 - DNA, 15 bp, Homo sapiens
aaaattaaaaaaaaa

SEQ ID NO: 2035218 - DNA, 15 bp, Homo sapiens
aaaaaaaatatatgg

SEQ ID NO: 2035219 - DNA, 15 bp, Homo sapiens
aaaaaaatatatggt

SEQ ID NO: 2035220 - DNA, 15 bp, Homo sapiens
aaaaaatatatggtc

SEQ ID NO: 2035221 - DNA, 15 bp, Homo sapiens
aaaaatatatggtca

SEQ ID NO: 2035222 - DNA, 15 bp, Homo sapiens
aaaatatatggtcat

SEQ ID NO: 2035223 - DNA, 15 bp, Homo sapiens
aaatatatggtcatt

SEQ ID NO: 2035224 - DNA, 15 bp, Homo sapiens
aatatatggtcatta

SEQ ID NO: 2035225 - DNA, 15 bp, Homo sapiens
atatatggtcattag

SEQ ID NO: 2035226 - DNA, 15 bp, Homo sapiens
tatatggtcattagt

SEQ ID NO: 2035227 - DNA, 15 bp, Homo sapiens
atatggtcattagtt

SEQ ID NO: 2035228 - DNA, 15 bp, Homo sapiens
tatggtcattagtta

SEQ ID NO: 2035229 - DNA, 15 bp, Homo sapiens
atggtcattagttag

SEQ ID NO: 2035230 - DNA, 15 bp, Homo sapiens
tggtcattagttagc

SEQ ID NO: 2035231 - DNA, 15 bp, Homo sapiens
ggtcattagttagct

SEQ ID NO: 2035232 - DNA, 15 bp, Homo sapiens
gtcattagttagcta

SEQ ID NO: 2035233 - DNA, 15 bp, Homo sapiens
tcattagttagctat

SEQ ID NO: 2035234 - DNA, 15 bp, Homo sapiens
cattagttagctata

SEQ ID NO: 2035235 - DNA, 15 bp, Homo sapiens
attagttagctataa

SEQ ID NO: 2035236 - DNA, 15 bp, Homo sapiens
ttagttagctataag

SEQ ID NO: 2035237 - DNA, 15 bp, Homo sapiens
tagttagctataagg

SEQ ID NO: 2035238 - DNA, 15 bp, Homo sapiens
agttagctataagga

SEQ ID NO: 2035239 - DNA, 15 bp, Homo sapiens
gttagctataaggac

SEQ ID NO: 2035240 - DNA, 15 bp, Homo sapiens
ttagctataaggact

SEQ ID NO: 2035241 - DNA, 15 bp, Homo sapiens
tagctataaggacta

SEQ ID NO: 2035242 - DNA, 15 bp, Homo sapiens
agctataaggactaa

SEQ ID NO: 2035243 - DNA, 15 bp, Homo sapiens
gctataaggactaag

SEQ ID NO: 2035244 - DNA, 15 bp, Homo sapiens
ctataaggactaaga

SEQ ID NO: 2035245 - DNA, 15 bp, Homo sapiens
tataaggactaagat

SEQ ID NO: 2035246 - DNA, 15 bp, Homo sapiens
ataaggactaagatg

SEQ ID NO: 2035247 - DNA, 15 bp, Homo sapiens
taaggactaagatga

SEQ ID NO: 2035248 - DNA, 15 bp, Homo sapiens
aaggactaagatgaa

SEQ ID NO: 2035249 - DNA, 15 bp, Homo sapiens
aggactaagatgaaa

SEQ ID NO: 2035250 - DNA, 15 bp, Homo sapiens
ggactaagatgaaaa

SEQ ID NO: 2035251 - DNA, 15 bp, Homo sapiens
gactaagatgaaaaa

SEQ ID NO: 2035252 - DNA, 15 bp, Homo sapiens
actaagatgaaaaaa

SEQ ID NO: 2035253 - DNA, 15 bp, Homo sapiens
ctaagatgaaaaaat

SEQ ID NO: 2035254 - DNA, 15 bp, Homo sapiens
taagatgaaaaaatt

SEQ ID NO: 2035255 - DNA, 15 bp, Homo sapiens
aagatgaaaaaattt

SEQ ID NO: 2035256 - DNA, 15 bp, Homo sapiens
agatgaaaaaatttg

SEQ ID NO: 2035257 - DNA, 15 bp, Homo sapiens
gatgaaaaaatttga

SEQ ID NO: 2035258 - DNA, 15 bp, Homo sapiens
atgaaaaaatttgac

SEQ ID NO: 2035259 - DNA, 15 bp, Homo sapiens
tgaaaaaatttgaca

SEQ ID NO: 2035260 - DNA, 15 bp, Homo sapiens
gaaaaaatttgacac

SEQ ID NO: 2035261 - DNA, 15 bp, Homo sapiens
aaaaaatttgacaca

SEQ ID NO: 2035262 - DNA, 15 bp, Homo sapiens
aaaaatttgacacat

SEQ ID NO: 2035263 - DNA, 15 bp, Homo sapiens
aaaatttgacacatt

SEQ ID NO: 2035264 - DNA, 15 bp, Homo sapiens
aaatttgacacattt

SEQ ID NO: 2035265 - DNA, 15 bp, Homo sapiens
aatttgacacattta

SEQ ID NO: 2035266 - DNA, 15 bp, Homo sapiens
atttgacacatttat

SEQ ID NO: 2035267 - DNA, 15 bp, Homo sapiens
tttgacacatttatg

SEQ ID NO: 2035268 - DNA, 15 bp, Homo sapiens
ttgacacatttatgt

SEQ ID NO: 2035269 - DNA, 15 bp, Homo sapiens
tgacacatttatgtc

SEQ ID NO: 2035270 - DNA, 15 bp, Homo sapiens
gacacatttatgtct

SEQ ID NO: 2035271 - DNA, 15 bp, Homo sapiens
acacatttatgtcta

SEQ ID NO: 2035272 - DNA, 15 bp, Homo sapiens
cacatttatgtctaa

SEQ ID NO: 2035273 - DNA, 15 bp, Homo sapiens
acatttatgtctaat

SEQ ID NO: 2035274 - DNA, 15 bp, Homo sapiens
catttatgtctaatt

SEQ ID NO: 2035275 - DNA, 15 bp, Homo sapiens
atttatgtctaattt

SEQ ID NO: 2035276 - DNA, 15 bp, Homo sapiens
tttatgtctaattta

SEQ ID NO: 2035277 - DNA, 15 bp, Homo sapiens
ttatgtctaatttat

SEQ ID NO: 2035278 - DNA, 15 bp, Homo sapiens
tatgtctaatttata

SEQ ID NO: 2035279 - DNA, 15 bp, Homo sapiens
atgtctaatttataa

SEQ ID NO: 2035280 - DNA, 15 bp, Homo sapiens
tgtctaatttataaa

SEQ ID NO: 2035281 - DNA, 15 bp, Homo sapiens
gtctaatttataaaa

SEQ ID NO: 2035282 - DNA, 15 bp, Homo sapiens
tctaatttataaaag

SEQ ID NO: 2035283 - DNA, 15 bp, Homo sapiens
ctaatttataaaaga

SEQ ID NO: 2035284 - DNA, 15 bp, Homo sapiens
taatttataaaagat

SEQ ID NO: 2035285 - DNA, 15 bp, Homo sapiens
aatttataaaagatg

SEQ ID NO: 2035286 - DNA, 15 bp, Homo sapiens
atttataaaagatgc

SEQ ID NO: 2035287 - DNA, 15 bp, Homo sapiens
tttataaaagatgcc

SEQ ID NO: 2035288 - DNA, 15 bp, Homo sapiens
ttataaaagatgcct

SEQ ID NO: 2035289 - DNA, 15 bp, Homo sapiens
tataaaagatgcctt

SEQ ID NO: 2035290 - DNA, 15 bp, Homo sapiens
ataaaagatgccttt

SEQ ID NO: 2035291 - DNA, 15 bp, Homo sapiens
taaaagatgcctttt

SEQ ID NO: 2035292 - DNA, 15 bp, Homo sapiens
aaaagatgccttttc

SEQ ID NO: 2035293 - DNA, 15 bp, Homo sapiens
aaagatgccttttct

SEQ ID NO: 2035294 - DNA, 15 bp, Homo sapiens
aagatgccttttctt

SEQ ID NO: 2035295 - DNA, 15 bp, Homo sapiens
agatgccttttcttt

SEQ ID NO: 2035296 - DNA, 15 bp, Homo sapiens
gatgccttttctttt

SEQ ID NO: 2035297 - DNA, 15 bp, Homo sapiens
atgccttttctttta

SEQ ID NO: 2035298 - DNA, 15 bp, Homo sapiens
tgccttttcttttat

SEQ ID NO: 2035299 - DNA, 15 bp, Homo sapiens
gccttttcttttatt

SEQ ID NO: 2035300 - DNA, 15 bp, Homo sapiens
ccttttcttttattc

SEQ ID NO: 2035301 - DNA, 15 bp, Homo sapiens
cttttcttttattca

SEQ ID NO: 2035302 - DNA, 15 bp, Homo sapiens
ttttcttttattcac

SEQ ID NO: 2035303 - DNA, 15 bp, Homo sapiens
tttcttttattcacc

SEQ ID NO: 2035304 - DNA, 15 bp, Homo sapiens
ttcttttattcacct

SEQ ID NO: 2035305 - DNA, 15 bp, Homo sapiens
tcttttattcacctg

SEQ ID NO: 2035306 - DNA, 15 bp, Homo sapiens
cttttattcacctgt

SEQ ID NO: 2035307 - DNA, 15 bp, Homo sapiens
ttttattcacctgta

SEQ ID NO: 2035308 - DNA, 15 bp, Homo sapiens
tttattcacctgtaa

SEQ ID NO: 2035309 - DNA, 15 bp, Homo sapiens
ttattcacctgtaat

SEQ ID NO: 2035310 - DNA, 15 bp, Homo sapiens
tattcacctgtaatt

SEQ ID NO: 2035311 - DNA, 15 bp, Homo sapiens
attcacctgtaatta

SEQ ID NO: 2035312 - DNA, 15 bp, Homo sapiens
ttcacctgtaattaa

SEQ ID NO: 2035313 - DNA, 15 bp, Homo sapiens
tcacctgtaattaat

SEQ ID NO: 2035314 - DNA, 15 bp, Homo sapiens
cacctgtaattaata

SEQ ID NO: 2035315 - DNA, 15 bp, Homo sapiens
acctgtaattaatat

SEQ ID NO: 2035316 - DNA, 15 bp, Homo sapiens
cctgtaattaatata

SEQ ID NO: 2035317 - DNA, 15 bp, Homo sapiens
ctgtaattaatatac

SEQ ID NO: 2035318 - DNA, 15 bp, Homo sapiens
tgtaattaatataca

SEQ ID NO: 2035319 - DNA, 15 bp, Homo sapiens
gtaattaatatacaa

SEQ ID NO: 2035320 - DNA, 15 bp, Homo sapiens
taattaatatacaaa

SEQ ID NO: 2035321 - DNA, 15 bp, Homo sapiens
aattaatatacaaaa

SEQ ID NO: 2035322 - DNA, 15 bp, Homo sapiens
attaatatacaaaaa

SEQ ID NO: 2035323 - DNA, 15 bp, Homo sapiens
ttaatatacaaaaag

SEQ ID NO: 2035324 - DNA, 15 bp, Homo sapiens
taatatacaaaaaga

SEQ ID NO: 2035325 - DNA, 15 bp, Homo sapiens
aatatacaaaaagat

SEQ ID NO: 2035326 - DNA, 15 bp, Homo sapiens
atatacaaaaagatt

SEQ ID NO: 2035327 - DNA, 15 bp, Homo sapiens
tatacaaaaagatta

SEQ ID NO: 2035328 - DNA, 15 bp, Homo sapiens
atacaaaaagattac

SEQ ID NO: 2035329 - DNA, 15 bp, Homo sapiens
tacaaaaagattaca

SEQ ID NO: 2035330 - DNA, 15 bp, Homo sapiens
acaaaaagattacac

SEQ ID NO: 2035331 - DNA, 15 bp, Homo sapiens
caaaaagattacacc

SEQ ID NO: 2035332 - DNA, 15 bp, Homo sapiens
aaaaagattacacct

SEQ ID NO: 2035333 - DNA, 15 bp, Homo sapiens
aaaagattacaccta

SEQ ID NO: 2035334 - DNA, 15 bp, Homo sapiens
aaagattacacctaa

SEQ ID NO: 2035335 - DNA, 15 bp, Homo sapiens
aagattacacctaaa

SEQ ID NO: 2035336 - DNA, 15 bp, Homo sapiens
agattacacctaaac

SEQ ID NO: 2035337 - DNA, 15 bp, Homo sapiens
gattacacctaaaca

SEQ ID NO: 2035338 - DNA, 15 bp, Homo sapiens
attacacctaaacag

SEQ ID NO: 2035339 - DNA, 15 bp, Homo sapiens
ttacacctaaacaga

SEQ ID NO: 2035340 - DNA, 15 bp, Homo sapiens
tacacctaaacagaa

SEQ ID NO: 2035341 - DNA, 15 bp, Homo sapiens
acacctaaacagaaa

SEQ ID NO: 2035342 - DNA, 15 bp, Homo sapiens
cacctaaacagaaaa

SEQ ID NO: 2035343 - DNA, 15 bp, Homo sapiens
acctaaacagaaaaa

SEQ ID NO: 2035344 - DNA, 15 bp, Homo sapiens
cctaaacagaaaaag

SEQ ID NO: 2035345 - DNA, 15 bp, Homo sapiens
ctaaacagaaaaaga

SEQ ID NO: 2035346 - DNA, 15 bp, Homo sapiens
taaacagaaaaagaa

SEQ ID NO: 2035347 - DNA, 15 bp, Homo sapiens
aaacagaaaaagaag

SEQ ID NO: 2035348 - DNA, 15 bp, Homo sapiens
aacagaaaaagaagt

SEQ ID NO: 2035349 - DNA, 15 bp, Homo sapiens
acagaaaaagaagtg

SEQ ID NO: 2035350 - DNA, 15 bp, Homo sapiens
cagaaaaagaagtgc

SEQ ID NO: 2035351 - DNA, 15 bp, Homo sapiens
agaaaaagaagtgct

SEQ ID NO: 2035352 - DNA, 15 bp, Homo sapiens
gaaaaagaagtgcta

SEQ ID NO: 2035353 - DNA, 15 bp, Homo sapiens
aaaaagaagtgctag

SEQ ID NO: 2035354 - DNA, 15 bp, Homo sapiens
aaaagaagtgctagc

SEQ ID NO: 2035355 - DNA, 15 bp, Homo sapiens
aaagaagtgctagca

SEQ ID NO: 2035356 - DNA, 15 bp, Homo sapiens
aagaagtgctagcag

SEQ ID NO: 2035357 - DNA, 15 bp, Homo sapiens
agaagtgctagcagt

SEQ ID NO: 2035358 - DNA, 15 bp, Homo sapiens
gaagtgctagcagtt

SEQ ID NO: 2035359 - DNA, 15 bp, Homo sapiens
aagtgctagcagttg

SEQ ID NO: 2035360 - DNA, 15 bp, Homo sapiens
agtgctagcagttgg

SEQ ID NO: 2035361 - DNA, 15 bp, Homo sapiens
gtgctagcagttggt

SEQ ID NO: 2035362 - DNA, 15 bp, Homo sapiens
tgctagcagttggtg

SEQ ID NO: 2035363 - DNA, 15 bp, Homo sapiens
gctagcagttggtga

SEQ ID NO: 2035364 - DNA, 15 bp, Homo sapiens
ctagcagttggtgaa

SEQ ID NO: 2035365 - DNA, 15 bp, Homo sapiens
tagcagttggtgaac

SEQ ID NO: 2035366 - DNA, 15 bp, Homo sapiens
agcagttggtgaacg

SEQ ID NO: 2035367 - DNA, 15 bp, Homo sapiens
gcagttggtgaacgt

SEQ ID NO: 2035368 - DNA, 15 bp, Homo sapiens
cagttggtgaacgtc

SEQ ID NO: 2035369 - DNA, 15 bp, Homo sapiens
agttggtgaacgtca

SEQ ID NO: 2035370 - DNA, 15 bp, Homo sapiens
gttggtgaacgtcat

SEQ ID NO: 2035371 - DNA, 15 bp, Homo sapiens
ttggtgaacgtcatt

SEQ ID NO: 2035372 - DNA, 15 bp, Homo sapiens
tggtgaacgtcattt

SEQ ID NO: 2035373 - DNA, 15 bp, Homo sapiens
ggtgaacgtcatttt

SEQ ID NO: 2035374 - DNA, 15 bp, Homo sapiens
gtgaacgtcattttt

SEQ ID NO: 2035375 - DNA, 15 bp, Homo sapiens
tgaacgtcattttta

SEQ ID NO: 2035376 - DNA, 15 bp, Homo sapiens
gaacgtcatttttaa

SEQ ID NO: 2035377 - DNA, 15 bp, Homo sapiens
aacgtcatttttaaa

SEQ ID NO: 2035378 - DNA, 15 bp, Homo sapiens
acgtcatttttaaaa

SEQ ID NO: 2035379 - DNA, 15 bp, Homo sapiens
cgtcatttttaaaaa

SEQ ID NO: 2035380 - DNA, 15 bp, Homo sapiens
gtcatttttaaaaat

SEQ ID NO: 2035381 - DNA, 15 bp, Homo sapiens
tcatttttaaaaatt

SEQ ID NO: 2035382 - DNA, 15 bp, Homo sapiens
catttttaaaaattc

SEQ ID NO: 2035383 - DNA, 15 bp, Homo sapiens
atttttaaaaattct

SEQ ID NO: 2035384 - DNA, 15 bp, Homo sapiens
tttttaaaaattctt

SEQ ID NO: 2035385 - DNA, 15 bp, Homo sapiens
ttttaaaaattcttt

SEQ ID NO: 2035386 - DNA, 15 bp, Homo sapiens
tttaaaaattctttt

SEQ ID NO: 2035387 - DNA, 15 bp, Homo sapiens
ttaaaaattcttttt

SEQ ID NO: 2035388 - DNA, 15 bp, Homo sapiens
taaaaattctttttt

SEQ ID NO: 2035389 - DNA, 15 bp, Homo sapiens
aaaaattcttttttc

SEQ ID NO: 2035390 - DNA, 15 bp, Homo sapiens
aaaattcttttttct

SEQ ID NO: 2035391 - DNA, 15 bp, Homo sapiens
aaattcttttttctt

SEQ ID NO: 2035392 - DNA, 15 bp, Homo sapiens
aattcttttttcttt

SEQ ID NO: 2035393 - DNA, 15 bp, Homo sapiens
attcttttttctttt

SEQ ID NO: 2035394 - DNA, 15 bp, Homo sapiens
tcttttttctttttg

SEQ ID NO: 2035395 - DNA, 15 bp, Homo sapiens
cttttttctttttga

SEQ ID NO: 2035396 - DNA, 15 bp, Homo sapiens
gacggagtctctctc

SEQ ID NO: 2035397 - DNA, 15 bp, Homo sapiens
acggagtctctctct

SEQ ID NO: 2035398 - DNA, 15 bp, Homo sapiens
cggagtctctctctg

SEQ ID NO: 2035399 - DNA, 15 bp, Homo sapiens
gagtctctctctgtt

SEQ ID NO: 2035400 - DNA, 15 bp, Homo sapiens
gtctctctctgttgc

SEQ ID NO: 2035401 - DNA, 15 bp, Homo sapiens
tctctctctgttgcc

SEQ ID NO: 2035402 - DNA, 15 bp, Homo sapiens
ctctctctgttgccc

SEQ ID NO: 2035403 - DNA, 15 bp, Homo sapiens
tctctctgttgccca

SEQ ID NO: 2035404 - DNA, 15 bp, Homo sapiens
ctctctgttgcccag

SEQ ID NO: 2035405 - DNA, 15 bp, Homo sapiens
gtgtgatctcagctt

SEQ ID NO: 2035406 - DNA, 15 bp, Homo sapiens
tgtgatctcagctta

SEQ ID NO: 2035407 - DNA, 15 bp, Homo sapiens
gtgatctcagcttac

SEQ ID NO: 2035408 - DNA, 15 bp, Homo sapiens
tgatctcagcttact

SEQ ID NO: 2035409 - DNA, 15 bp, Homo sapiens
gatctcagcttactg

SEQ ID NO: 2035410 - DNA, 15 bp, Homo sapiens
atctcagcttactgc

SEQ ID NO: 2035411 - DNA, 15 bp, Homo sapiens
tctcagcttactgca

SEQ ID NO: 2035412 - DNA, 15 bp, Homo sapiens
ctcagcttactgcaa

SEQ ID NO: 2035413 - DNA, 15 bp, Homo sapiens
tcagcttactgcaac

SEQ ID NO: 2035414 - DNA, 15 bp, Homo sapiens
cagcttactgcaacc

SEQ ID NO: 2035415 - DNA, 15 bp, Homo sapiens
agcttactgcaacct

SEQ ID NO: 2035416 - DNA, 15 bp, Homo sapiens
aacctccgcctcccc

SEQ ID NO: 2035417 - DNA, 15 bp, Homo sapiens
acctccgcctcccca

SEQ ID NO: 2035418 - DNA, 15 bp, Homo sapiens
cctccgcctccccag

SEQ ID NO: 2035419 - DNA, 15 bp, Homo sapiens
ctccgcctccccagt

SEQ ID NO: 2035420 - DNA, 15 bp, Homo sapiens
tccgcctccccagtt

SEQ ID NO: 2035421 - DNA, 15 bp, Homo sapiens
ccgcctccccagttc

SEQ ID NO: 2035422 - DNA, 15 bp, Homo sapiens
cgcctccccagttca

SEQ ID NO: 2035423 - DNA, 15 bp, Homo sapiens
gcctccccagttcaa

SEQ ID NO: 2035424 - DNA, 15 bp, Homo sapiens
cctccccagttcaag

SEQ ID NO: 2035425 - DNA, 15 bp, Homo sapiens
ctccccagttcaagc

SEQ ID NO: 2035426 - DNA, 15 bp, Homo sapiens
tccccagttcaagcg

SEQ ID NO: 2035427 - DNA, 15 bp, Homo sapiens
ccccagttcaagcga

SEQ ID NO: 2035428 - DNA, 15 bp, Homo sapiens
cccagttcaagcgat

SEQ ID NO: 2035429 - DNA, 15 bp, Homo sapiens
ccagttcaagcgatt

SEQ ID NO: 2035430 - DNA, 15 bp, Homo sapiens
cagttcaagcgattc

SEQ ID NO: 2035431 - DNA, 15 bp, Homo sapiens
agttcaagcgattct

SEQ ID NO: 2035432 - DNA, 15 bp, Homo sapiens
aattacaggcatgtt

SEQ ID NO: 2035433 - DNA, 15 bp, Homo sapiens
attacaggcatgttc

SEQ ID NO: 2035434 - DNA, 15 bp, Homo sapiens
ttacaggcatgttcc

SEQ ID NO: 2035435 - DNA, 15 bp, Homo sapiens
tacaggcatgttcca

SEQ ID NO: 2035436 - DNA, 15 bp, Homo sapiens
acaggcatgttccac

SEQ ID NO: 2035437 - DNA, 15 bp, Homo sapiens
caggcatgttccacc

SEQ ID NO: 2035438 - DNA, 15 bp, Homo sapiens
aggcatgttccacca

SEQ ID NO: 2035439 - DNA, 15 bp, Homo sapiens
ggcatgttccaccaa

SEQ ID NO: 2035440 - DNA, 15 bp, Homo sapiens
gcatgttccaccaag

SEQ ID NO: 2035441 - DNA, 15 bp, Homo sapiens
catgttccaccaagc

SEQ ID NO: 2035442 - DNA, 15 bp, Homo sapiens
atgttccaccaagcc

SEQ ID NO: 2035443 - DNA, 15 bp, Homo sapiens
tgttccaccaagcct

SEQ ID NO: 2035444 - DNA, 15 bp, Homo sapiens
gttccaccaagcctg

SEQ ID NO: 2035445 - DNA, 15 bp, Homo sapiens
ttccaccaagcctgg

SEQ ID NO: 2035446 - DNA, 15 bp, Homo sapiens
tccaccaagcctggc

SEQ ID NO: 2035447 - DNA, 15 bp, Homo sapiens
ccaccaagcctggct

SEQ ID NO: 2035448 - DNA, 15 bp, Homo sapiens
caccaagcctggcta

SEQ ID NO: 2035449 - DNA, 15 bp, Homo sapiens
accaagcctggctaa

SEQ ID NO: 2035450 - DNA, 15 bp, Homo sapiens
ccaagcctggctaat

SEQ ID NO: 2035451 - DNA, 15 bp, Homo sapiens
caagcctggctaatt

SEQ ID NO: 2035452 - DNA, 15 bp, Homo sapiens
aagcctggctaattt

SEQ ID NO: 2035453 - DNA, 15 bp, Homo sapiens
agcctggctaatttt

SEQ ID NO: 2035454 - DNA, 15 bp, Homo sapiens
ctggctaattttttt

SEQ ID NO: 2035455 - DNA, 15 bp, Homo sapiens
tggctaatttttttt

SEQ ID NO: 2035456 - DNA, 15 bp, Homo sapiens
ggctaattttttttg

SEQ ID NO: 2035457 - DNA, 15 bp, Homo sapiens
ttttcagtagagacg

SEQ ID NO: 2035458 - DNA, 15 bp, Homo sapiens
tttcagtagagacga

SEQ ID NO: 2035459 - DNA, 15 bp, Homo sapiens
ttcagtagagacgag

SEQ ID NO: 2035460 - DNA, 15 bp, Homo sapiens
tcagtagagacgagg

SEQ ID NO: 2035461 - DNA, 15 bp, Homo sapiens
cagtagagacgaggt

SEQ ID NO: 2035462 - DNA, 15 bp, Homo sapiens
cgaggtttcaccatt

SEQ ID NO: 2035463 - DNA, 15 bp, Homo sapiens
gaggtttcaccattt

SEQ ID NO: 2035464 - DNA, 15 bp, Homo sapiens
aggtttcaccatttt

SEQ ID NO: 2035465 - DNA, 15 bp, Homo sapiens
ctcctgacctcaaag

SEQ ID NO: 2035466 - DNA, 15 bp, Homo sapiens
tcctgacctcaaaga

SEQ ID NO: 2035467 - DNA, 15 bp, Homo sapiens
cctgacctcaaagat

SEQ ID NO: 2035468 - DNA, 15 bp, Homo sapiens
ctgacctcaaagatc

SEQ ID NO: 2035469 - DNA, 15 bp, Homo sapiens
tgacctcaaagatct

SEQ ID NO: 2035470 - DNA, 15 bp, Homo sapiens
gacctcaaagatctg

SEQ ID NO: 2035471 - DNA, 15 bp, Homo sapiens
acctcaaagatctgc

SEQ ID NO: 2035472 - DNA, 15 bp, Homo sapiens
cctcaaagatctgcc

SEQ ID NO: 2035473 - DNA, 15 bp, Homo sapiens
ctcaaagatctgcct

SEQ ID NO: 2035474 - DNA, 15 bp, Homo sapiens
tcaaagatctgcctg

SEQ ID NO: 2035475 - DNA, 15 bp, Homo sapiens
caaagatctgcctgc

SEQ ID NO: 2035476 - DNA, 15 bp, Homo sapiens
aaagatctgcctgcc

SEQ ID NO: 2035477 - DNA, 15 bp, Homo sapiens
aagatctgcctgcct

SEQ ID NO: 2035478 - DNA, 15 bp, Homo sapiens
agatctgcctgcctt

SEQ ID NO: 2035479 - DNA, 15 bp, Homo sapiens
cctcccaaaatgtta

SEQ ID NO: 2035480 - DNA, 15 bp, Homo sapiens
ctcccaaaatgttag

SEQ ID NO: 2035481 - DNA, 15 bp, Homo sapiens
tcccaaaatgttagg

SEQ ID NO: 2035482 - DNA, 15 bp, Homo sapiens
cccaaaatgttagga

SEQ ID NO: 2035483 - DNA, 15 bp, Homo sapiens
ccaaaatgttaggat

SEQ ID NO: 2035484 - DNA, 15 bp, Homo sapiens
caaaatgttaggatt

SEQ ID NO: 2035485 - DNA, 15 bp, Homo sapiens
aaaatgttaggatta

SEQ ID NO: 2035486 - DNA, 15 bp, Homo sapiens
aaatgttaggattac

SEQ ID NO: 2035487 - DNA, 15 bp, Homo sapiens
aatgttaggattaca

SEQ ID NO: 2035488 - DNA, 15 bp, Homo sapiens
atgttaggattacag

SEQ ID NO: 2035489 - DNA, 15 bp, Homo sapiens
aggcatgagccacaa

SEQ ID NO: 2035490 - DNA, 15 bp, Homo sapiens
ggcatgagccacaat

SEQ ID NO: 2035491 - DNA, 15 bp, Homo sapiens
gcatgagccacaata

SEQ ID NO: 2035492 - DNA, 15 bp, Homo sapiens
catgagccacaatac

SEQ ID NO: 2035493 - DNA, 15 bp, Homo sapiens
atgagccacaatacc

SEQ ID NO: 2035494 - DNA, 15 bp, Homo sapiens
tgagccacaatacca

SEQ ID NO: 2035495 - DNA, 15 bp, Homo sapiens
gagccacaataccaa

SEQ ID NO: 2035496 - DNA, 15 bp, Homo sapiens
agccacaataccaag

SEQ ID NO: 2035497 - DNA, 15 bp, Homo sapiens
gccacaataccaagc

SEQ ID NO: 2035498 - DNA, 15 bp, Homo sapiens
ccacaataccaagcc

SEQ ID NO: 2035499 - DNA, 15 bp, Homo sapiens
cacaataccaagcca

SEQ ID NO: 2035500 - DNA, 15 bp, Homo sapiens
acaataccaagccaa

SEQ ID NO: 2035501 - DNA, 15 bp, Homo sapiens
caataccaagccaaa

SEQ ID NO: 2035502 - DNA, 15 bp, Homo sapiens
aataccaagccaaaa

SEQ ID NO: 2035503 - DNA, 15 bp, Homo sapiens
ataccaagccaaaaa

SEQ ID NO: 2035504 - DNA, 15 bp, Homo sapiens
taccaagccaaaaat

SEQ ID NO: 2035505 - DNA, 15 bp, Homo sapiens
accaagccaaaaatt

SEQ ID NO: 2035506 - DNA, 15 bp, Homo sapiens
ccaagccaaaaattc

SEQ ID NO: 2035507 - DNA, 15 bp, Homo sapiens
caagccaaaaattct

SEQ ID NO: 2035508 - DNA, 15 bp, Homo sapiens
aagccaaaaattctt

SEQ ID NO: 2035509 - DNA, 15 bp, Homo sapiens
agccaaaaattctta

SEQ ID NO: 2035510 - DNA, 15 bp, Homo sapiens
gccaaaaattcttat

SEQ ID NO: 2035511 - DNA, 15 bp, Homo sapiens
ccaaaaattcttata

SEQ ID NO: 2035512 - DNA, 15 bp, Homo sapiens
caaaaattcttatag

SEQ ID NO: 2035513 - DNA, 15 bp, Homo sapiens
aaaaattcttatagt

SEQ ID NO: 2035514 - DNA, 15 bp, Homo sapiens
aaaattcttatagtt

SEQ ID NO: 2035515 - DNA, 15 bp, Homo sapiens
aaattcttatagtta

SEQ ID NO: 2035516 - DNA, 15 bp, Homo sapiens
aattcttatagttac

SEQ ID NO: 2035517 - DNA, 15 bp, Homo sapiens
attcttatagttaca

SEQ ID NO: 2035518 - DNA, 15 bp, Homo sapiens
ttcttatagttacaa

SEQ ID NO: 2035519 - DNA, 15 bp, Homo sapiens
tcttatagttacaat

SEQ ID NO: 2035520 - DNA, 15 bp, Homo sapiens
cttatagttacaatt

SEQ ID NO: 2035521 - DNA, 15 bp, Homo sapiens
ttatagttacaattt

SEQ ID NO: 2035522 - DNA, 15 bp, Homo sapiens
tatagttacaatttt

SEQ ID NO: 2035523 - DNA, 15 bp, Homo sapiens
atagttacaattttt

SEQ ID NO: 2035524 - DNA, 15 bp, Homo sapiens
tagttacaatttttt

SEQ ID NO: 2035525 - DNA, 15 bp, Homo sapiens
agttacaatttttta

SEQ ID NO: 2035526 - DNA, 15 bp, Homo sapiens
gttacaattttttat

SEQ ID NO: 2035527 - DNA, 15 bp, Homo sapiens
ttacaattttttata

SEQ ID NO: 2035528 - DNA, 15 bp, Homo sapiens
tacaattttttatat

SEQ ID NO: 2035529 - DNA, 15 bp, Homo sapiens
acaattttttatatt

SEQ ID NO: 2035530 - DNA, 15 bp, Homo sapiens
caattttttatattt

SEQ ID NO: 2035531 - DNA, 15 bp, Homo sapiens
aattttttatattta

SEQ ID NO: 2035532 - DNA, 15 bp, Homo sapiens
attttttatatttag

SEQ ID NO: 2035533 - DNA, 15 bp, Homo sapiens
ttttttatatttagc

SEQ ID NO: 2035534 - DNA, 15 bp, Homo sapiens
tttttatatttagct

SEQ ID NO: 2035535 - DNA, 15 bp, Homo sapiens
ttttatatttagctc

SEQ ID NO: 2035536 - DNA, 15 bp, Homo sapiens
tttatatttagctca

SEQ ID NO: 2035537 - DNA, 15 bp, Homo sapiens
ttatatttagctcaa

SEQ ID NO: 2035538 - DNA, 15 bp, Homo sapiens
tatatttagctcaaa

SEQ ID NO: 2035539 - DNA, 15 bp, Homo sapiens
atatttagctcaaaa

SEQ ID NO: 2035540 - DNA, 15 bp, Homo sapiens
tatttagctcaaaat

SEQ ID NO: 2035541 - DNA, 15 bp, Homo sapiens
atttagctcaaaata

SEQ ID NO: 2035542 - DNA, 15 bp, Homo sapiens
tttagctcaaaataa

SEQ ID NO: 2035543 - DNA, 15 bp, Homo sapiens
ttagctcaaaataaa

SEQ ID NO: 2035544 - DNA, 15 bp, Homo sapiens
tagctcaaaataaaa

SEQ ID NO: 2035545 - DNA, 15 bp, Homo sapiens
agctcaaaataaaaa

SEQ ID NO: 2035546 - DNA, 15 bp, Homo sapiens
gctcaaaataaaaat

SEQ ID NO: 2035547 - DNA, 15 bp, Homo sapiens
tcaaaataaaaatat

SEQ ID NO: 2035548 - DNA, 15 bp, Homo sapiens
caaaataaaaatatt

SEQ ID NO: 2035549 - DNA, 15 bp, Homo sapiens
aaataaaaatatttc

SEQ ID NO: 2035550 - DNA, 15 bp, Homo sapiens
aataaaaatatttct

SEQ ID NO: 2035551 - DNA, 15 bp, Homo sapiens
ataaaaatatttcta

SEQ ID NO: 2035552 - DNA, 15 bp, Homo sapiens
taaaaatatttctaa

SEQ ID NO: 2035553 - DNA, 15 bp, Homo sapiens
aaaaatatttctaag

SEQ ID NO: 2035554 - DNA, 15 bp, Homo sapiens
aaaatatttctaagt

SEQ ID NO: 2035555 - DNA, 15 bp, Homo sapiens
aaatatttctaagta

SEQ ID NO: 2035556 - DNA, 15 bp, Homo sapiens
aatatttctaagtat

SEQ ID NO: 2035557 - DNA, 15 bp, Homo sapiens
atatttctaagtata

SEQ ID NO: 2035558 - DNA, 15 bp, Homo sapiens
tatttctaagtatat

SEQ ID NO: 2035559 - DNA, 15 bp, Homo sapiens
atttctaagtatata

SEQ ID NO: 2035560 - DNA, 15 bp, Homo sapiens
tttctaagtatatat

SEQ ID NO: 2035561 - DNA, 15 bp, Homo sapiens
ttctaagtatatatt

SEQ ID NO: 2035562 - DNA, 15 bp, Homo sapiens
tctaagtatatattt

SEQ ID NO: 2035563 - DNA, 15 bp, Homo sapiens
ctaagtatatattta

SEQ ID NO: 2035564 - DNA, 15 bp, Homo sapiens
taagtatatatttaa

SEQ ID NO: 2035565 - DNA, 15 bp, Homo sapiens
aagtatatatttaat

SEQ ID NO: 2035566 - DNA, 15 bp, Homo sapiens
agtatatatttaata

SEQ ID NO: 2035567 - DNA, 15 bp, Homo sapiens
gtatatatttaatac

SEQ ID NO: 2035568 - DNA, 15 bp, Homo sapiens
tatatatttaatacg

SEQ ID NO: 2035569 - DNA, 15 bp, Homo sapiens
atatatttaatacgc

SEQ ID NO: 2035570 - DNA, 15 bp, Homo sapiens
tatatttaatacgcc

SEQ ID NO: 2035571 - DNA, 15 bp, Homo sapiens
atatttaatacgcct

SEQ ID NO: 2035572 - DNA, 15 bp, Homo sapiens
tatttaatacgcctc

SEQ ID NO: 2035573 - DNA, 15 bp, Homo sapiens
atttaatacgcctcc

SEQ ID NO: 2035574 - DNA, 15 bp, Homo sapiens
tttaatacgcctcca

SEQ ID NO: 2035575 - DNA, 15 bp, Homo sapiens
ttaatacgcctccat

SEQ ID NO: 2035576 - DNA, 15 bp, Homo sapiens
taatacgcctccatg

SEQ ID NO: 2035577 - DNA, 15 bp, Homo sapiens
aatacgcctccatga

SEQ ID NO: 2035578 - DNA, 15 bp, Homo sapiens
atacgcctccatgaa

SEQ ID NO: 2035579 - DNA, 15 bp, Homo sapiens
tacgcctccatgaat

SEQ ID NO: 2035580 - DNA, 15 bp, Homo sapiens
acgcctccatgaatg

SEQ ID NO: 2035581 - DNA, 15 bp, Homo sapiens
cgcctccatgaatgt

SEQ ID NO: 2035582 - DNA, 15 bp, Homo sapiens
gcctccatgaatgta

SEQ ID NO: 2035583 - DNA, 15 bp, Homo sapiens
cctccatgaatgtat

SEQ ID NO: 2035584 - DNA, 15 bp, Homo sapiens
ctccatgaatgtatt

SEQ ID NO: 2035585 - DNA, 15 bp, Homo sapiens
tccatgaatgtattt

SEQ ID NO: 2035586 - DNA, 15 bp, Homo sapiens
ccatgaatgtattta

SEQ ID NO: 2035587 - DNA, 15 bp, Homo sapiens
catgaatgtatttac

SEQ ID NO: 2035588 - DNA, 15 bp, Homo sapiens
atgaatgtatttact

SEQ ID NO: 2035589 - DNA, 15 bp, Homo sapiens
tgaatgtatttactg

SEQ ID NO: 2035590 - DNA, 15 bp, Homo sapiens
gaatgtatttactgt

SEQ ID NO: 2035591 - DNA, 15 bp, Homo sapiens
aatgtatttactgta

SEQ ID NO: 2035592 - DNA, 15 bp, Homo sapiens
atgtatttactgtag

SEQ ID NO: 2035593 - DNA, 15 bp, Homo sapiens
tgtatttactgtagc

SEQ ID NO: 2035594 - DNA, 15 bp, Homo sapiens
gtatttactgtagct

SEQ ID NO: 2035595 - DNA, 15 bp, Homo sapiens
tatttactgtagctt

SEQ ID NO: 2035596 - DNA, 15 bp, Homo sapiens
atttactgtagctta

SEQ ID NO: 2035597 - DNA, 15 bp, Homo sapiens
tttactgtagcttaa

SEQ ID NO: 2035598 - DNA, 15 bp, Homo sapiens
ttactgtagcttaaa

SEQ ID NO: 2035599 - DNA, 15 bp, Homo sapiens
tactgtagcttaaaa

SEQ ID NO: 2035600 - DNA, 15 bp, Homo sapiens
actgtagcttaaaaa

SEQ ID NO: 2035601 - DNA, 15 bp, Homo sapiens
ctgtagcttaaaaat

SEQ ID NO: 2035602 - DNA, 15 bp, Homo sapiens
tgtagcttaaaaata

SEQ ID NO: 2035603 - DNA, 15 bp, Homo sapiens
gtagcttaaaaatag

SEQ ID NO: 2035604 - DNA, 15 bp, Homo sapiens
tagcttaaaaatagg

SEQ ID NO: 2035605 - DNA, 15 bp, Homo sapiens
agcttaaaaataggc

SEQ ID NO: 2035606 - DNA, 15 bp, Homo sapiens
gcttaaaaataggct

SEQ ID NO: 2035607 - DNA, 15 bp, Homo sapiens
cttaaaaataggctg

SEQ ID NO: 2035608 - DNA, 15 bp, Homo sapiens
ttaaaaataggctgt

SEQ ID NO: 2035609 - DNA, 15 bp, Homo sapiens
taaaaataggctgta

SEQ ID NO: 2035610 - DNA, 15 bp, Homo sapiens
aaaaataggctgtag

SEQ ID NO: 2035611 - DNA, 15 bp, Homo sapiens
aaaataggctgtagc

SEQ ID NO: 2035612 - DNA, 15 bp, Homo sapiens
aaataggctgtagct

SEQ ID NO: 2035613 - DNA, 15 bp, Homo sapiens
aataggctgtagcta

SEQ ID NO: 2035614 - DNA, 15 bp, Homo sapiens
ataggctgtagctac

SEQ ID NO: 2035615 - DNA, 15 bp, Homo sapiens
taggctgtagctacc

SEQ ID NO: 2035616 - DNA, 15 bp, Homo sapiens
aggctgtagctacct

SEQ ID NO: 2035617 - DNA, 15 bp, Homo sapiens
ggctgtagctaccta

SEQ ID NO: 2035618 - DNA, 15 bp, Homo sapiens
gctgtagctacctaa

SEQ ID NO: 2035619 - DNA, 15 bp, Homo sapiens
ctgtagctacctaag

SEQ ID NO: 2035620 - DNA, 15 bp, Homo sapiens
tgtagctacctaaga

SEQ ID NO: 2035621 - DNA, 15 bp, Homo sapiens
gtagctacctaagaa

SEQ ID NO: 2035622 - DNA, 15 bp, Homo sapiens
tagctacctaagaag

SEQ ID NO: 2035623 - DNA, 15 bp, Homo sapiens
agctacctaagaaga

SEQ ID NO: 2035624 - DNA, 15 bp, Homo sapiens
gctacctaagaagat

SEQ ID NO: 2035625 - DNA, 15 bp, Homo sapiens
ctacctaagaagatt

SEQ ID NO: 2035626 - DNA, 15 bp, Homo sapiens
tacctaagaagattt

SEQ ID NO: 2035627 - DNA, 15 bp, Homo sapiens
acctaagaagattta

SEQ ID NO: 2035628 - DNA, 15 bp, Homo sapiens
cctaagaagatttat

SEQ ID NO: 2035629 - DNA, 15 bp, Homo sapiens
ctaagaagatttatt

SEQ ID NO: 2035630 - DNA, 15 bp, Homo sapiens
taagaagatttattc

SEQ ID NO: 2035631 - DNA, 15 bp, Homo sapiens
aagaagatttattct

SEQ ID NO: 2035632 - DNA, 15 bp, Homo sapiens
agaagatttattcta

SEQ ID NO: 2035633 - DNA, 15 bp, Homo sapiens
gaagatttattctat

SEQ ID NO: 2035634 - DNA, 15 bp, Homo sapiens
aagatttattctatt

SEQ ID NO: 2035635 - DNA, 15 bp, Homo sapiens
agatttattctattt

SEQ ID NO: 2035636 - DNA, 15 bp, Homo sapiens
gatttattctatttt

SEQ ID NO: 2035637 - DNA, 15 bp, Homo sapiens
atttattctattttg

SEQ ID NO: 2035638 - DNA, 15 bp, Homo sapiens
tttattctattttgt

SEQ ID NO: 2035639 - DNA, 15 bp, Homo sapiens
ttattctattttgtg

SEQ ID NO: 2035640 - DNA, 15 bp, Homo sapiens
tattctattttgtgc

SEQ ID NO: 2035641 - DNA, 15 bp, Homo sapiens
attctattttgtgct

SEQ ID NO: 2035642 - DNA, 15 bp, Homo sapiens
ttctattttgtgctt

SEQ ID NO: 2035643 - DNA, 15 bp, Homo sapiens
tctattttgtgctta

SEQ ID NO: 2035644 - DNA, 15 bp, Homo sapiens
ctattttgtgcttat

SEQ ID NO: 2035645 - DNA, 15 bp, Homo sapiens
tattttgtgcttatt

SEQ ID NO: 2035646 - DNA, 15 bp, Homo sapiens
attttgtgcttattt

SEQ ID NO: 2035647 - DNA, 15 bp, Homo sapiens
ttttgtgcttattta

SEQ ID NO: 2035648 - DNA, 15 bp, Homo sapiens
tttgtgcttatttat

SEQ ID NO: 2035649 - DNA, 15 bp, Homo sapiens
ttgtgcttatttata

SEQ ID NO: 2035650 - DNA, 15 bp, Homo sapiens
tgtgcttatttatat

SEQ ID NO: 2035651 - DNA, 15 bp, Homo sapiens
gtgcttatttatatt

SEQ ID NO: 2035652 - DNA, 15 bp, Homo sapiens
tgcttatttatatta

SEQ ID NO: 2035653 - DNA, 15 bp, Homo sapiens
gcttatttatattag

SEQ ID NO: 2035654 - DNA, 15 bp, Homo sapiens
cttatttatattagc

SEQ ID NO: 2035655 - DNA, 15 bp, Homo sapiens
ttatttatattagct

SEQ ID NO: 2035656 - DNA, 15 bp, Homo sapiens
tatttatattagctt

SEQ ID NO: 2035657 - DNA, 15 bp, Homo sapiens
atttatattagcttc

SEQ ID NO: 2035658 - DNA, 15 bp, Homo sapiens
tttatattagcttca

SEQ ID NO: 2035659 - DNA, 15 bp, Homo sapiens
ttatattagcttcac

SEQ ID NO: 2035660 - DNA, 15 bp, Homo sapiens
tatattagcttcact

SEQ ID NO: 2035661 - DNA, 15 bp, Homo sapiens
atattagcttcactc

SEQ ID NO: 2035662 - DNA, 15 bp, Homo sapiens
tattagcttcactca

SEQ ID NO: 2035663 - DNA, 15 bp, Homo sapiens
attagcttcactcat

SEQ ID NO: 2035664 - DNA, 15 bp, Homo sapiens
ttagcttcactcatt

SEQ ID NO: 2035665 - DNA, 15 bp, Homo sapiens
tagcttcactcattt

SEQ ID NO: 2035666 - DNA, 15 bp, Homo sapiens
agcttcactcatttt

SEQ ID NO: 2035667 - DNA, 15 bp, Homo sapiens
gcttcactcatttta

SEQ ID NO: 2035668 - DNA, 15 bp, Homo sapiens
cttcactcattttac

SEQ ID NO: 2035669 - DNA, 15 bp, Homo sapiens
ttcactcattttaca

SEQ ID NO: 2035670 - DNA, 15 bp, Homo sapiens
tcactcattttacaa

SEQ ID NO: 2035671 - DNA, 15 bp, Homo sapiens
cactcattttacaaa

SEQ ID NO: 2035672 - DNA, 15 bp, Homo sapiens
actcattttacaaat

SEQ ID NO: 2035673 - DNA, 15 bp, Homo sapiens
ctcattttacaaatt

SEQ ID NO: 2035674 - DNA, 15 bp, Homo sapiens
tcattttacaaattc

SEQ ID NO: 2035675 - DNA, 15 bp, Homo sapiens
cattttacaaattct

SEQ ID NO: 2035676 - DNA, 15 bp, Homo sapiens
attttacaaattcta

SEQ ID NO: 2035677 - DNA, 15 bp, Homo sapiens
ttttacaaattctag

SEQ ID NO: 2035678 - DNA, 15 bp, Homo sapiens
tttacaaattctagc

SEQ ID NO: 2035679 - DNA, 15 bp, Homo sapiens
ttacaaattctagca

SEQ ID NO: 2035680 - DNA, 15 bp, Homo sapiens
tacaaattctagcat

SEQ ID NO: 2035681 - DNA, 15 bp, Homo sapiens
acaaattctagcata

SEQ ID NO: 2035682 - DNA, 15 bp, Homo sapiens
caaattctagcataa

SEQ ID NO: 2035683 - DNA, 15 bp, Homo sapiens
aaattctagcataaa

SEQ ID NO: 2035684 - DNA, 15 bp, Homo sapiens
aattctagcataaaa

SEQ ID NO: 2035685 - DNA, 15 bp, Homo sapiens
attctagcataaaat

SEQ ID NO: 2035686 - DNA, 15 bp, Homo sapiens
ttctagcataaaatt

SEQ ID NO: 2035687 - DNA, 15 bp, Homo sapiens
tctagcataaaatta

SEQ ID NO: 2035688 - DNA, 15 bp, Homo sapiens
ctagcataaaattaa

SEQ ID NO: 2035689 - DNA, 15 bp, Homo sapiens
tagcataaaattaaa

SEQ ID NO: 2035690 - DNA, 15 bp, Homo sapiens
agcataaaattaaag

SEQ ID NO: 2035691 - DNA, 15 bp, Homo sapiens
gcataaaattaaagt

SEQ ID NO: 2035692 - DNA, 15 bp, Homo sapiens
cataaaattaaagtc

SEQ ID NO: 2035693 - DNA, 15 bp, Homo sapiens
ataaaattaaagtcc

SEQ ID NO: 2035694 - DNA, 15 bp, Homo sapiens
taaaattaaagtcct

SEQ ID NO: 2035695 - DNA, 15 bp, Homo sapiens
aaaattaaagtccta

SEQ ID NO: 2035696 - DNA, 15 bp, Homo sapiens
aaattaaagtcctag

SEQ ID NO: 2035697 - DNA, 15 bp, Homo sapiens
aattaaagtcctagt

SEQ ID NO: 2035698 - DNA, 15 bp, Homo sapiens
attaaagtcctagta

SEQ ID NO: 2035699 - DNA, 15 bp, Homo sapiens
ttaaagtcctagtat

SEQ ID NO: 2035700 - DNA, 15 bp, Homo sapiens
taaagtcctagtatt

SEQ ID NO: 2035701 - DNA, 15 bp, Homo sapiens
aaagtcctagtattt

SEQ ID NO: 2035702 - DNA, 15 bp, Homo sapiens
aagtcctagtatttg

SEQ ID NO: 2035703 - DNA, 15 bp, Homo sapiens
agtcctagtatttgt

SEQ ID NO: 2035704 - DNA, 15 bp, Homo sapiens
gtcctagtatttgtt

SEQ ID NO: 2035705 - DNA, 15 bp, Homo sapiens
tcctagtatttgttc

SEQ ID NO: 2035706 - DNA, 15 bp, Homo sapiens
cctagtatttgttct

SEQ ID NO: 2035707 - DNA, 15 bp, Homo sapiens
ctagtatttgttcta

SEQ ID NO: 2035708 - DNA, 15 bp, Homo sapiens
tagtatttgttctaa

SEQ ID NO: 2035709 - DNA, 15 bp, Homo sapiens
agtatttgttctaaa

SEQ ID NO: 2035710 - DNA, 15 bp, Homo sapiens
gtatttgttctaaaa

SEQ ID NO: 2035711 - DNA, 15 bp, Homo sapiens
tatttgttctaaaac

SEQ ID NO: 2035712 - DNA, 15 bp, Homo sapiens
atttgttctaaaact

SEQ ID NO: 2035713 - DNA, 15 bp, Homo sapiens
tttgttctaaaactc

SEQ ID NO: 2035714 - DNA, 15 bp, Homo sapiens
ttgttctaaaactcc

SEQ ID NO: 2035715 - DNA, 15 bp, Homo sapiens
tgttctaaaactcct

SEQ ID NO: 2035716 - DNA, 15 bp, Homo sapiens
gttctaaaactcctt

SEQ ID NO: 2035717 - DNA, 15 bp, Homo sapiens
ttctaaaactccttt

SEQ ID NO: 2035718 - DNA, 15 bp, Homo sapiens
tctaaaactcctttg

SEQ ID NO: 2035719 - DNA, 15 bp, Homo sapiens
ctaaaactcctttgt

SEQ ID NO: 2035720 - DNA, 15 bp, Homo sapiens
taaaactcctttgta

SEQ ID NO: 2035721 - DNA, 15 bp, Homo sapiens
aaaactcctttgtat

SEQ ID NO: 2035722 - DNA, 15 bp, Homo sapiens
aaactcctttgtatc

SEQ ID NO: 2035723 - DNA, 15 bp, Homo sapiens
aactcctttgtatca

SEQ ID NO: 2035724 - DNA, 15 bp, Homo sapiens
actcctttgtatcac

SEQ ID NO: 2035725 - DNA, 15 bp, Homo sapiens
ctcctttgtatcacc

SEQ ID NO: 2035726 - DNA, 15 bp, Homo sapiens
tcctttgtatcacct

SEQ ID NO: 2035727 - DNA, 15 bp, Homo sapiens
cctttgtatcacctg

SEQ ID NO: 2035728 - DNA, 15 bp, Homo sapiens
ctttgtatcacctgg

SEQ ID NO: 2035729 - DNA, 15 bp, Homo sapiens
tttgtatcacctggt

SEQ ID NO: 2035730 - DNA, 15 bp, Homo sapiens
ttgtatcacctggtc

SEQ ID NO: 2035731 - DNA, 15 bp, Homo sapiens
tgtatcacctggtct

SEQ ID NO: 2035732 - DNA, 15 bp, Homo sapiens
gtatcacctggtctt

SEQ ID NO: 2035733 - DNA, 15 bp, Homo sapiens
tatcacctggtcttt

SEQ ID NO: 2035734 - DNA, 15 bp, Homo sapiens
atcacctggtctttt

SEQ ID NO: 2035735 - DNA, 15 bp, Homo sapiens
tcacctggtctttta

SEQ ID NO: 2035736 - DNA, 15 bp, Homo sapiens
cacctggtcttttac

SEQ ID NO: 2035737 - DNA, 15 bp, Homo sapiens
acctggtcttttact

SEQ ID NO: 2035738 - DNA, 15 bp, Homo sapiens
cctggtcttttactt

SEQ ID NO: 2035739 - DNA, 15 bp, Homo sapiens
ctggtcttttacttc

SEQ ID NO: 2035740 - DNA, 15 bp, Homo sapiens
tggtcttttacttca

SEQ ID NO: 2035741 - DNA, 15 bp, Homo sapiens
ggtcttttacttcag

SEQ ID NO: 2035742 - DNA, 15 bp, Homo sapiens
gtcttttacttcaga

SEQ ID NO: 2035743 - DNA, 15 bp, Homo sapiens
tcttttacttcagat

SEQ ID NO: 2035744 - DNA, 15 bp, Homo sapiens
cttttacttcagata

SEQ ID NO: 2035745 - DNA, 15 bp, Homo sapiens
ttttacttcagatat

SEQ ID NO: 2035746 - DNA, 15 bp, Homo sapiens
tttacttcagatatt

SEQ ID NO: 2035747 - DNA, 15 bp, Homo sapiens
ttacttcagatatta

SEQ ID NO: 2035748 - DNA, 15 bp, Homo sapiens
tacttcagatattag

SEQ ID NO: 2035749 - DNA, 15 bp, Homo sapiens
acttcagatattagg

SEQ ID NO: 2035750 - DNA, 15 bp, Homo sapiens
cttcagatattagga

SEQ ID NO: 2035751 - DNA, 15 bp, Homo sapiens
ttcagatattaggag

SEQ ID NO: 2035752 - DNA, 15 bp, Homo sapiens
tcagatattaggagc

SEQ ID NO: 2035753 - DNA, 15 bp, Homo sapiens
cagatattaggagca

SEQ ID NO: 2035754 - DNA, 15 bp, Homo sapiens
agatattaggagcat

SEQ ID NO: 2035755 - DNA, 15 bp, Homo sapiens
gatattaggagcatc

SEQ ID NO: 2035756 - DNA, 15 bp, Homo sapiens
atattaggagcatct

SEQ ID NO: 2035757 - DNA, 15 bp, Homo sapiens
tattaggagcatctt

SEQ ID NO: 2035758 - DNA, 15 bp, Homo sapiens
attaggagcatctta

SEQ ID NO: 2035759 - DNA, 15 bp, Homo sapiens
ttaggagcatcttaa

SEQ ID NO: 2035760 - DNA, 15 bp, Homo sapiens
taggagcatcttaat

SEQ ID NO: 2035761 - DNA, 15 bp, Homo sapiens
aggagcatcttaatt

SEQ ID NO: 2035762 - DNA, 15 bp, Homo sapiens
ggagcatcttaattt

SEQ ID NO: 2035763 - DNA, 15 bp, Homo sapiens
gagcatcttaatttg

SEQ ID NO: 2035764 - DNA, 15 bp, Homo sapiens
agcatcttaatttgt

SEQ ID NO: 2035765 - DNA, 15 bp, Homo sapiens
gcatcttaatttgtg

SEQ ID NO: 2035766 - DNA, 15 bp, Homo sapiens
catcttaatttgtgg

SEQ ID NO: 2035767 - DNA, 15 bp, Homo sapiens
atcttaatttgtgga

SEQ ID NO: 2035768 - DNA, 15 bp, Homo sapiens
tcttaatttgtggag

SEQ ID NO: 2035769 - DNA, 15 bp, Homo sapiens
cttaatttgtggagt

SEQ ID NO: 2035770 - DNA, 15 bp, Homo sapiens
ttaatttgtggagta

SEQ ID NO: 2035771 - DNA, 15 bp, Homo sapiens
taatttgtggagtaa

SEQ ID NO: 2035772 - DNA, 15 bp, Homo sapiens
aatttgtggagtaat

SEQ ID NO: 2035773 - DNA, 15 bp, Homo sapiens
atttgtggagtaatt

SEQ ID NO: 2035774 - DNA, 15 bp, Homo sapiens
tttgtggagtaatta

SEQ ID NO: 2035775 - DNA, 15 bp, Homo sapiens
ttgtggagtaattat

SEQ ID NO: 2035776 - DNA, 15 bp, Homo sapiens
tgtggagtaattatt

SEQ ID NO: 2035777 - DNA, 15 bp, Homo sapiens
gtggagtaattattt

SEQ ID NO: 2035778 - DNA, 15 bp, Homo sapiens
tggagtaattatttt

SEQ ID NO: 2035779 - DNA, 15 bp, Homo sapiens
ggagtaattatttta

SEQ ID NO: 2035780 - DNA, 15 bp, Homo sapiens
gagtaattattttat

SEQ ID NO: 2035781 - DNA, 15 bp, Homo sapiens
agtaattattttatc

SEQ ID NO: 2035782 - DNA, 15 bp, Homo sapiens
gtaattattttatct

SEQ ID NO: 2035783 - DNA, 15 bp, Homo sapiens
taattattttatctg

SEQ ID NO: 2035784 - DNA, 15 bp, Homo sapiens
aattattttatctgt

SEQ ID NO: 2035785 - DNA, 15 bp, Homo sapiens
attattttatctgtg

SEQ ID NO: 2035786 - DNA, 15 bp, Homo sapiens
ttattttatctgtgt

SEQ ID NO: 2035787 - DNA, 15 bp, Homo sapiens
tattttatctgtgtg

SEQ ID NO: 2035788 - DNA, 15 bp, Homo sapiens
attttatctgtgtgc

SEQ ID NO: 2035789 - DNA, 15 bp, Homo sapiens
ttttatctgtgtgca

SEQ ID NO: 2035790 - DNA, 15 bp, Homo sapiens
tttatctgtgtgcaa

SEQ ID NO: 2035791 - DNA, 15 bp, Homo sapiens
ttatctgtgtgcaaa

SEQ ID NO: 2035792 - DNA, 15 bp, Homo sapiens
tatctgtgtgcaaaa

SEQ ID NO: 2035793 - DNA, 15 bp, Homo sapiens
atctgtgtgcaaaaa

SEQ ID NO: 2035794 - DNA, 15 bp, Homo sapiens
tctgtgtgcaaaaat

SEQ ID NO: 2035795 - DNA, 15 bp, Homo sapiens
ctgtgtgcaaaaatt

SEQ ID NO: 2035796 - DNA, 15 bp, Homo sapiens
tgtgtgcaaaaattc

SEQ ID NO: 2035797 - DNA, 15 bp, Homo sapiens
gtgtgcaaaaattct

SEQ ID NO: 2035798 - DNA, 15 bp, Homo sapiens
tgtgcaaaaattctt

SEQ ID NO: 2035799 - DNA, 15 bp, Homo sapiens
gtgcaaaaattcttc

SEQ ID NO: 2035800 - DNA, 15 bp, Homo sapiens
tgcaaaaattcttca

SEQ ID NO: 2035801 - DNA, 15 bp, Homo sapiens
gcaaaaattcttcac

SEQ ID NO: 2035802 - DNA, 15 bp, Homo sapiens
caaaaattcttcaca

SEQ ID NO: 2035803 - DNA, 15 bp, Homo sapiens
aaaaattcttcacat

SEQ ID NO: 2035804 - DNA, 15 bp, Homo sapiens
aaaattcttcacata

SEQ ID NO: 2035805 - DNA, 15 bp, Homo sapiens
aaattcttcacatag

SEQ ID NO: 2035806 - DNA, 15 bp, Homo sapiens
aattcttcacataga

SEQ ID NO: 2035807 - DNA, 15 bp, Homo sapiens
attcttcacatagat

SEQ ID NO: 2035808 - DNA, 15 bp, Homo sapiens
ttcttcacatagatt

SEQ ID NO: 2035809 - DNA, 15 bp, Homo sapiens
tcttcacatagatta

SEQ ID NO: 2035810 - DNA, 15 bp, Homo sapiens
cttcacatagattat

SEQ ID NO: 2035811 - DNA, 15 bp, Homo sapiens
ttcacatagattatt

SEQ ID NO: 2035812 - DNA, 15 bp, Homo sapiens
tcacatagattattt

SEQ ID NO: 2035813 - DNA, 15 bp, Homo sapiens
cacatagattatttt

SEQ ID NO: 2035814 - DNA, 15 bp, Homo sapiens
acatagattattttg

SEQ ID NO: 2035815 - DNA, 15 bp, Homo sapiens
catagattattttgt

SEQ ID NO: 2035816 - DNA, 15 bp, Homo sapiens
atagattattttgtc

SEQ ID NO: 2035817 - DNA, 15 bp, Homo sapiens
tagattattttgtct

SEQ ID NO: 2035818 - DNA, 15 bp, Homo sapiens
agattattttgtcta

SEQ ID NO: 2035819 - DNA, 15 bp, Homo sapiens
gattattttgtctaa

SEQ ID NO: 2035820 - DNA, 15 bp, Homo sapiens
attattttgtctaac

SEQ ID NO: 2035821 - DNA, 15 bp, Homo sapiens
ttattttgtctaaca

SEQ ID NO: 2035822 - DNA, 15 bp, Homo sapiens
tattttgtctaacaa

SEQ ID NO: 2035823 - DNA, 15 bp, Homo sapiens
attttgtctaacaac

SEQ ID NO: 2035824 - DNA, 15 bp, Homo sapiens
ttttgtctaacaacc

SEQ ID NO: 2035825 - DNA, 15 bp, Homo sapiens
tttgtctaacaaccc

SEQ ID NO: 2035826 - DNA, 15 bp, Homo sapiens
ttgtctaacaaccct

SEQ ID NO: 2035827 - DNA, 15 bp, Homo sapiens
tgtctaacaaccctt

SEQ ID NO: 2035828 - DNA, 15 bp, Homo sapiens
gtctaacaacccttt

SEQ ID NO: 2035829 - DNA, 15 bp, Homo sapiens
tctaacaaccctttg

SEQ ID NO: 2035830 - DNA, 15 bp, Homo sapiens
ctaacaaccctttga

SEQ ID NO: 2035831 - DNA, 15 bp, Homo sapiens
taacaaccctttgaa

SEQ ID NO: 2035832 - DNA, 15 bp, Homo sapiens
aacaaccctttgaaa

SEQ ID NO: 2035833 - DNA, 15 bp, Homo sapiens
acaaccctttgaaat

SEQ ID NO: 2035834 - DNA, 15 bp, Homo sapiens
caaccctttgaaata

SEQ ID NO: 2035835 - DNA, 15 bp, Homo sapiens
aaccctttgaaatag

SEQ ID NO: 2035836 - DNA, 15 bp, Homo sapiens
accctttgaaataga

SEQ ID NO: 2035837 - DNA, 15 bp, Homo sapiens
ccctttgaaatagac

SEQ ID NO: 2035838 - DNA, 15 bp, Homo sapiens
cctttgaaatagaca

SEQ ID NO: 2035839 - DNA, 15 bp, Homo sapiens
ctttgaaatagacaa

SEQ ID NO: 2035840 - DNA, 15 bp, Homo sapiens
tttgaaatagacaag

SEQ ID NO: 2035841 - DNA, 15 bp, Homo sapiens
ttgaaatagacaagt

SEQ ID NO: 2035842 - DNA, 15 bp, Homo sapiens
tgaaatagacaagtc

SEQ ID NO: 2035843 - DNA, 15 bp, Homo sapiens
gaaatagacaagtct

SEQ ID NO: 2035844 - DNA, 15 bp, Homo sapiens
aaatagacaagtctg

SEQ ID NO: 2035845 - DNA, 15 bp, Homo sapiens
aatagacaagtctgc

SEQ ID NO: 2035846 - DNA, 15 bp, Homo sapiens
atagacaagtctgct

SEQ ID NO: 2035847 - DNA, 15 bp, Homo sapiens
tagacaagtctgctg

SEQ ID NO: 2035848 - DNA, 15 bp, Homo sapiens
agacaagtctgctgt

SEQ ID NO: 2035849 - DNA, 15 bp, Homo sapiens
gacaagtctgctgtt

SEQ ID NO: 2035850 - DNA, 15 bp, Homo sapiens
acaagtctgctgtta

SEQ ID NO: 2035851 - DNA, 15 bp, Homo sapiens
caagtctgctgttat

SEQ ID NO: 2035852 - DNA, 15 bp, Homo sapiens
aagtctgctgttatc

SEQ ID NO: 2035853 - DNA, 15 bp, Homo sapiens
agtctgctgttatcc

SEQ ID NO: 2035854 - DNA, 15 bp, Homo sapiens
gtctgctgttatcct

SEQ ID NO: 2035855 - DNA, 15 bp, Homo sapiens
tctgctgttatcctt

SEQ ID NO: 2035856 - DNA, 15 bp, Homo sapiens
ctgctgttatcctta

SEQ ID NO: 2035857 - DNA, 15 bp, Homo sapiens
tgctgttatccttaa

SEQ ID NO: 2035858 - DNA, 15 bp, Homo sapiens
gctgttatccttaat

SEQ ID NO: 2035859 - DNA, 15 bp, Homo sapiens
ctgttatccttaatt

SEQ ID NO: 2035860 - DNA, 15 bp, Homo sapiens
tgttatccttaattg

SEQ ID NO: 2035861 - DNA, 15 bp, Homo sapiens
gttatccttaattgc

SEQ ID NO: 2035862 - DNA, 15 bp, Homo sapiens
ttatccttaattgcc

SEQ ID NO: 2035863 - DNA, 15 bp, Homo sapiens
tatccttaattgcca

SEQ ID NO: 2035864 - DNA, 15 bp, Homo sapiens
atccttaattgccag

SEQ ID NO: 2035865 - DNA, 15 bp, Homo sapiens
tccttaattgccaga

SEQ ID NO: 2035866 - DNA, 15 bp, Homo sapiens
ccttaattgccagat

SEQ ID NO: 2035867 - DNA, 15 bp, Homo sapiens
cttaattgccagatt

SEQ ID NO: 2035868 - DNA, 15 bp, Homo sapiens
ttaattgccagatta

SEQ ID NO: 2035869 - DNA, 15 bp, Homo sapiens
taattgccagattaa

SEQ ID NO: 2035870 - DNA, 15 bp, Homo sapiens
aattgccagattaag

SEQ ID NO: 2035871 - DNA, 15 bp, Homo sapiens
attgccagattaaga

SEQ ID NO: 2035872 - DNA, 15 bp, Homo sapiens
ttgccagattaagaa

SEQ ID NO: 2035873 - DNA, 15 bp, Homo sapiens
tgccagattaagaat

SEQ ID NO: 2035874 - DNA, 15 bp, Homo sapiens
gccagattaagaatt

SEQ ID NO: 2035875 - DNA, 15 bp, Homo sapiens
ccagattaagaatta

SEQ ID NO: 2035876 - DNA, 15 bp, Homo sapiens
cagattaagaattac

SEQ ID NO: 2035877 - DNA, 15 bp, Homo sapiens
agattaagaattaca

SEQ ID NO: 2035878 - DNA, 15 bp, Homo sapiens
gattaagaattacaa

SEQ ID NO: 2035879 - DNA, 15 bp, Homo sapiens
attaagaattacaac

SEQ ID NO: 2035880 - DNA, 15 bp, Homo sapiens
ttaagaattacaact

SEQ ID NO: 2035881 - DNA, 15 bp, Homo sapiens
taagaattacaacta

SEQ ID NO: 2035882 - DNA, 15 bp, Homo sapiens
aagaattacaactaa

SEQ ID NO: 2035883 - DNA, 15 bp, Homo sapiens
agaattacaactaaa

SEQ ID NO: 2035884 - DNA, 15 bp, Homo sapiens
gaattacaactaaat

SEQ ID NO: 2035885 - DNA, 15 bp, Homo sapiens
aattacaactaaata

SEQ ID NO: 2035886 - DNA, 15 bp, Homo sapiens
attacaactaaataa

SEQ ID NO: 2035887 - DNA, 15 bp, Homo sapiens
ttacaactaaataag

SEQ ID NO: 2035888 - DNA, 15 bp, Homo sapiens
tacaactaaataaga

SEQ ID NO: 2035889 - DNA, 15 bp, Homo sapiens
acaactaaataagaa

SEQ ID NO: 2035890 - DNA, 15 bp, Homo sapiens
caactaaataagaat

SEQ ID NO: 2035891 - DNA, 15 bp, Homo sapiens
aactaaataagaata

SEQ ID NO: 2035892 - DNA, 15 bp, Homo sapiens
actaaataagaatat

SEQ ID NO: 2035893 - DNA, 15 bp, Homo sapiens
ctaaataagaatatt

SEQ ID NO: 2035894 - DNA, 15 bp, Homo sapiens
taaataagaatattg

SEQ ID NO: 2035895 - DNA, 15 bp, Homo sapiens
aaataagaatattga

SEQ ID NO: 2035896 - DNA, 15 bp, Homo sapiens
aataagaatattgat

SEQ ID NO: 2035897 - DNA, 15 bp, Homo sapiens
ataagaatattgatc

SEQ ID NO: 2035898 - DNA, 15 bp, Homo sapiens
taagaatattgatcc

SEQ ID NO: 2035899 - DNA, 15 bp, Homo sapiens
aagaatattgatcca

SEQ ID NO: 2035900 - DNA, 15 bp, Homo sapiens
agaatattgatccaa

SEQ ID NO: 2035901 - DNA, 15 bp, Homo sapiens
gaatattgatccaaa

SEQ ID NO: 2035902 - DNA, 15 bp, Homo sapiens
aatattgatccaaac

SEQ ID NO: 2035903 - DNA, 15 bp, Homo sapiens
atattgatccaaaca

SEQ ID NO: 2035904 - DNA, 15 bp, Homo sapiens
tattgatccaaacaa

SEQ ID NO: 2035905 - DNA, 15 bp, Homo sapiens
attgatccaaacaag

SEQ ID NO: 2035906 - DNA, 15 bp, Homo sapiens
ttgatccaaacaagt

SEQ ID NO: 2035907 - DNA, 15 bp, Homo sapiens
tgatccaaacaagtc

SEQ ID NO: 2035908 - DNA, 15 bp, Homo sapiens
gatccaaacaagtct

SEQ ID NO: 2035909 - DNA, 15 bp, Homo sapiens
atccaaacaagtctc

SEQ ID NO: 2035910 - DNA, 15 bp, Homo sapiens
tccaaacaagtctca

SEQ ID NO: 2035911 - DNA, 15 bp, Homo sapiens
ccaaacaagtctcaa

SEQ ID NO: 2035912 - DNA, 15 bp, Homo sapiens
caaacaagtctcaaa

SEQ ID NO: 2035913 - DNA, 15 bp, Homo sapiens
aaacaagtctcaaac

SEQ ID NO: 2035914 - DNA, 15 bp, Homo sapiens
aacaagtctcaaacc

SEQ ID NO: 2035915 - DNA, 15 bp, Homo sapiens
acaagtctcaaacct

SEQ ID NO: 2035916 - DNA, 15 bp, Homo sapiens
caagtctcaaaccta

SEQ ID NO: 2035917 - DNA, 15 bp, Homo sapiens
aagtctcaaacctag

SEQ ID NO: 2035918 - DNA, 15 bp, Homo sapiens
agtctcaaacctagg

SEQ ID NO: 2035919 - DNA, 15 bp, Homo sapiens
gtctcaaacctaggt

SEQ ID NO: 2035920 - DNA, 15 bp, Homo sapiens
tctcaaacctaggtc

SEQ ID NO: 2035921 - DNA, 15 bp, Homo sapiens
ctcaaacctaggtct

SEQ ID NO: 2035922 - DNA, 15 bp, Homo sapiens
tcaaacctaggtctt

SEQ ID NO: 2035923 - DNA, 15 bp, Homo sapiens
caaacctaggtcttc

SEQ ID NO: 2035924 - DNA, 15 bp, Homo sapiens
aaacctaggtcttct

SEQ ID NO: 2035925 - DNA, 15 bp, Homo sapiens
aacctaggtcttctg

SEQ ID NO: 2035926 - DNA, 15 bp, Homo sapiens
acctaggtcttctga

SEQ ID NO: 2035927 - DNA, 15 bp, Homo sapiens
cctaggtcttctgac

SEQ ID NO: 2035928 - DNA, 15 bp, Homo sapiens
ctaggtcttctgaca

SEQ ID NO: 2035929 - DNA, 15 bp, Homo sapiens
taggtcttctgacat

SEQ ID NO: 2035930 - DNA, 15 bp, Homo sapiens
aggtcttctgacatg

SEQ ID NO: 2035931 - DNA, 15 bp, Homo sapiens
ggtcttctgacatgt

SEQ ID NO: 2035932 - DNA, 15 bp, Homo sapiens
gtcttctgacatgtt

SEQ ID NO: 2035933 - DNA, 15 bp, Homo sapiens
tcttctgacatgttt

SEQ ID NO: 2035934 - DNA, 15 bp, Homo sapiens
cttctgacatgttta

SEQ ID NO: 2035935 - DNA, 15 bp, Homo sapiens
ttctgacatgtttaa

SEQ ID NO: 2035936 - DNA, 15 bp, Homo sapiens
tctgacatgtttaag

SEQ ID NO: 2035937 - DNA, 15 bp, Homo sapiens
ctgacatgtttaagt

SEQ ID NO: 2035938 - DNA, 15 bp, Homo sapiens
tgacatgtttaagtt

SEQ ID NO: 2035939 - DNA, 15 bp, Homo sapiens
gacatgtttaagttc

SEQ ID NO: 2035940 - DNA, 15 bp, Homo sapiens
acatgtttaagttct

SEQ ID NO: 2035941 - DNA, 15 bp, Homo sapiens
catgtttaagttctc

SEQ ID NO: 2035942 - DNA, 15 bp, Homo sapiens
atgtttaagttctcc

SEQ ID NO: 2035943 - DNA, 15 bp, Homo sapiens
tgtttaagttctcct

SEQ ID NO: 2035944 - DNA, 15 bp, Homo sapiens
gtttaagttctcctg

SEQ ID NO: 2035945 - DNA, 15 bp, Homo sapiens
tttaagttctcctgt

SEQ ID NO: 2035946 - DNA, 15 bp, Homo sapiens
ttaagttctcctgta

SEQ ID NO: 2035947 - DNA, 15 bp, Homo sapiens
taagttctcctgtat

SEQ ID NO: 2035948 - DNA, 15 bp, Homo sapiens
aagttctcctgtatg

SEQ ID NO: 2035949 - DNA, 15 bp, Homo sapiens
agttctcctgtatgt

SEQ ID NO: 2035950 - DNA, 15 bp, Homo sapiens
gttctcctgtatgta

SEQ ID NO: 2035951 - DNA, 15 bp, Homo sapiens
ttctcctgtatgtaa

SEQ ID NO: 2035952 - DNA, 15 bp, Homo sapiens
tctcctgtatgtaat

SEQ ID NO: 2035953 - DNA, 15 bp, Homo sapiens
ctcctgtatgtaata

SEQ ID NO: 2035954 - DNA, 15 bp, Homo sapiens
tcctgtatgtaataa

SEQ ID NO: 2035955 - DNA, 15 bp, Homo sapiens
cctgtatgtaataag

SEQ ID NO: 2035956 - DNA, 15 bp, Homo sapiens
ctgtatgtaataaga

SEQ ID NO: 2035957 - DNA, 15 bp, Homo sapiens
tgtatgtaataagag

SEQ ID NO: 2035958 - DNA, 15 bp, Homo sapiens
gtatgtaataagagt

SEQ ID NO: 2035959 - DNA, 15 bp, Homo sapiens
tatgtaataagagtt

SEQ ID NO: 2035960 - DNA, 15 bp, Homo sapiens
atgtaataagagttt

SEQ ID NO: 2035961 - DNA, 15 bp, Homo sapiens
tgtaataagagtttt

SEQ ID NO: 2035962 - DNA, 15 bp, Homo sapiens
gtaataagagttttc

SEQ ID NO: 2035963 - DNA, 15 bp, Homo sapiens
taataagagttttct

SEQ ID NO: 2035964 - DNA, 15 bp, Homo sapiens
aataagagttttcta

SEQ ID NO: 2035965 - DNA, 15 bp, Homo sapiens
ataagagttttctaa

SEQ ID NO: 2035966 - DNA, 15 bp, Homo sapiens
taagagttttctaat

SEQ ID NO: 2035967 - DNA, 15 bp, Homo sapiens
aagagttttctaata

SEQ ID NO: 2035968 - DNA, 15 bp, Homo sapiens
agagttttctaataa

SEQ ID NO: 2035969 - DNA, 15 bp, Homo sapiens
gagttttctaataag

SEQ ID NO: 2035970 - DNA, 15 bp, Homo sapiens
agttttctaataagt

SEQ ID NO: 2035971 - DNA, 15 bp, Homo sapiens
gttttctaataagtt

SEQ ID NO: 2035972 - DNA, 15 bp, Homo sapiens
ttttctaataagttt

SEQ ID NO: 2035973 - DNA, 15 bp, Homo sapiens
tttctaataagtttg

SEQ ID NO: 2035974 - DNA, 15 bp, Homo sapiens
ttctaataagtttgc

SEQ ID NO: 2035975 - DNA, 15 bp, Homo sapiens
tctaataagtttgcc

SEQ ID NO: 2035976 - DNA, 15 bp, Homo sapiens
ctaataagtttgcca

SEQ ID NO: 2035977 - DNA, 15 bp, Homo sapiens
taataagtttgccat

SEQ ID NO: 2035978 - DNA, 15 bp, Homo sapiens
aataagtttgccata

SEQ ID NO: 2035979 - DNA, 15 bp, Homo sapiens
ataagtttgccatat

SEQ ID NO: 2035980 - DNA, 15 bp, Homo sapiens
taagtttgccatatt

SEQ ID NO: 2035981 - DNA, 15 bp, Homo sapiens
aagtttgccatattg

SEQ ID NO: 2035982 - DNA, 15 bp, Homo sapiens
agtttgccatattgt

SEQ ID NO: 2035983 - DNA, 15 bp, Homo sapiens
gtttgccatattgta

SEQ ID NO: 2035984 - DNA, 15 bp, Homo sapiens
tttgccatattgtat

SEQ ID NO: 2035985 - DNA, 15 bp, Homo sapiens
ttgccatattgtata

SEQ ID NO: 2035986 - DNA, 15 bp, Homo sapiens
tgccatattgtatat

SEQ ID NO: 2035987 - DNA, 15 bp, Homo sapiens
gccatattgtatatg

SEQ ID NO: 2035988 - DNA, 15 bp, Homo sapiens
ccatattgtatatga

SEQ ID NO: 2035989 - DNA, 15 bp, Homo sapiens
catattgtatatgaa

SEQ ID NO: 2035990 - DNA, 15 bp, Homo sapiens
atattgtatatgaaa

SEQ ID NO: 2035991 - DNA, 15 bp, Homo sapiens
tattgtatatgaaat

SEQ ID NO: 2035992 - DNA, 15 bp, Homo sapiens
attgtatatgaaata

SEQ ID NO: 2035993 - DNA, 15 bp, Homo sapiens
ttgtatatgaaataa

SEQ ID NO: 2035994 - DNA, 15 bp, Homo sapiens
tgtatatgaaataaa

SEQ ID NO: 2035995 - DNA, 15 bp, Homo sapiens
gtatatgaaataaac

SEQ ID NO: 2035996 - DNA, 15 bp, Homo sapiens
tatatgaaataaact

SEQ ID NO: 2035997 - DNA, 15 bp, Homo sapiens
atatgaaataaacta

SEQ ID NO: 2035998 - DNA, 15 bp, Homo sapiens
tatgaaataaactaa

SEQ ID NO: 2035999 - DNA, 15 bp, Homo sapiens
gaaataaactaaatg

SEQ ID NO: 2036000 - DNA, 15 bp, Homo sapiens
aaataaactaaatgc

SEQ ID NO: 2036001 - DNA, 15 bp, Homo sapiens
aataaactaaatgca

SEQ ID NO: 2036002 - DNA, 15 bp, Homo sapiens
ataaactaaatgcag

SEQ ID NO: 2036003 - DNA, 15 bp, Homo sapiens
taaactaaatgcaga

SEQ ID NO: 2036004 - DNA, 15 bp, Homo sapiens
aaactaaatgcagag

SEQ ID NO: 2036005 - DNA, 15 bp, Homo sapiens
aactaaatgcagagt

SEQ ID NO: 2036006 - DNA, 15 bp, Homo sapiens
actaaatgcagagta

SEQ ID NO: 2036007 - DNA, 15 bp, Homo sapiens
ctaaatgcagagtaa

SEQ ID NO: 2036008 - DNA, 15 bp, Homo sapiens
taaatgcagagtaag

SEQ ID NO: 2036009 - DNA, 15 bp, Homo sapiens
aaatgcagagtaagg

SEQ ID NO: 2036010 - DNA, 15 bp, Homo sapiens
aatgcagagtaaggt

SEQ ID NO: 2036011 - DNA, 15 bp, Homo sapiens
atgcagagtaaggta

SEQ ID NO: 2036012 - DNA, 15 bp, Homo sapiens
tgcagagtaaggtaa

SEQ ID NO: 2036013 - DNA, 15 bp, Homo sapiens
gcagagtaaggtaac

SEQ ID NO: 2036014 - DNA, 15 bp, Homo sapiens
cagagtaaggtaacc

SEQ ID NO: 2036015 - DNA, 15 bp, Homo sapiens
agagtaaggtaacct

SEQ ID NO: 2036016 - DNA, 15 bp, Homo sapiens
gagtaaggtaaccta

SEQ ID NO: 2036017 - DNA, 15 bp, Homo sapiens
agtaaggtaacctac

SEQ ID NO: 2036018 - DNA, 15 bp, Homo sapiens
gtaaggtaacctact

SEQ ID NO: 2036019 - DNA, 15 bp, Homo sapiens
taaggtaacctacta

SEQ ID NO: 2036020 - DNA, 15 bp, Homo sapiens
aaggtaacctactag

SEQ ID NO: 2036021 - DNA, 15 bp, Homo sapiens
aggtaacctactagt

SEQ ID NO: 2036022 - DNA, 15 bp, Homo sapiens
ggtaacctactagtg

SEQ ID NO: 2036023 - DNA, 15 bp, Homo sapiens
gtaacctactagtgc

SEQ ID NO: 2036024 - DNA, 15 bp, Homo sapiens
taacctactagtgct

SEQ ID NO: 2036025 - DNA, 15 bp, Homo sapiens
aacctactagtgctc

SEQ ID NO: 2036026 - DNA, 15 bp, Homo sapiens
acctactagtgctcc

SEQ ID NO: 2036027 - DNA, 15 bp, Homo sapiens
cctactagtgctcct

SEQ ID NO: 2036028 - DNA, 15 bp, Homo sapiens
ctactagtgctcctg

SEQ ID NO: 2036029 - DNA, 15 bp, Homo sapiens
tactagtgctcctgc

SEQ ID NO: 2036030 - DNA, 15 bp, Homo sapiens
actagtgctcctgca

SEQ ID NO: 2036031 - DNA, 15 bp, Homo sapiens
ctagtgctcctgcac

SEQ ID NO: 2036032 - DNA, 15 bp, Homo sapiens
tagtgctcctgcaca

SEQ ID NO: 2036033 - DNA, 15 bp, Homo sapiens
agtgctcctgcacag

SEQ ID NO: 2036034 - DNA, 15 bp, Homo sapiens
gtgctcctgcacagg

SEQ ID NO: 2036035 - DNA, 15 bp, Homo sapiens
tgctcctgcacaggt

SEQ ID NO: 2036036 - DNA, 15 bp, Homo sapiens
gctcctgcacaggtg

SEQ ID NO: 2036037 - DNA, 15 bp, Homo sapiens
ctcctgcacaggtgg

SEQ ID NO: 2036038 - DNA, 15 bp, Homo sapiens
tcctgcacaggtggc

SEQ ID NO: 2036039 - DNA, 15 bp, Homo sapiens
cctgcacaggtggca

SEQ ID NO: 2036040 - DNA, 15 bp, Homo sapiens
ctgcacaggtggcag

SEQ ID NO: 2036041 - DNA, 15 bp, Homo sapiens
tgcacaggtggcagg

SEQ ID NO: 2036042 - DNA, 15 bp, Homo sapiens
gcacaggtggcagga

SEQ ID NO: 2036043 - DNA, 15 bp, Homo sapiens
cacaggtggcaggag

SEQ ID NO: 2036044 - DNA, 15 bp, Homo sapiens
acaggtggcaggaga

SEQ ID NO: 2036045 - DNA, 15 bp, Homo sapiens
caggtggcaggagat

SEQ ID NO: 2036046 - DNA, 15 bp, Homo sapiens
aggtggcaggagatt

SEQ ID NO: 2036047 - DNA, 15 bp, Homo sapiens
ggtggcaggagattt

SEQ ID NO: 2036048 - DNA, 15 bp, Homo sapiens
gtggcaggagatttc

SEQ ID NO: 2036049 - DNA, 15 bp, Homo sapiens
tggcaggagatttca

SEQ ID NO: 2036050 - DNA, 15 bp, Homo sapiens
ggcaggagatttcag

SEQ ID NO: 2036051 - DNA, 15 bp, Homo sapiens
gcaggagatttcagt

SEQ ID NO: 2036052 - DNA, 15 bp, Homo sapiens
caggagatttcagtt

SEQ ID NO: 2036053 - DNA, 15 bp, Homo sapiens
aggagatttcagttt

SEQ ID NO: 2036054 - DNA, 15 bp, Homo sapiens
ggagatttcagtttt

SEQ ID NO: 2036055 - DNA, 15 bp, Homo sapiens
gagatttcagttttt

SEQ ID NO: 2036056 - DNA, 15 bp, Homo sapiens
agatttcagttttta

SEQ ID NO: 2036057 - DNA, 15 bp, Homo sapiens
gatttcagtttttat

SEQ ID NO: 2036058 - DNA, 15 bp, Homo sapiens
atttcagtttttatt

SEQ ID NO: 2036059 - DNA, 15 bp, Homo sapiens
tttcagtttttatta

SEQ ID NO: 2036060 - DNA, 15 bp, Homo sapiens
ttcagtttttattag

SEQ ID NO: 2036061 - DNA, 15 bp, Homo sapiens
tcagtttttattagt

SEQ ID NO: 2036062 - DNA, 15 bp, Homo sapiens
cagtttttattagtc

SEQ ID NO: 2036063 - DNA, 15 bp, Homo sapiens
agtttttattagtct

SEQ ID NO: 2036064 - DNA, 15 bp, Homo sapiens
gtttttattagtctg

SEQ ID NO: 2036065 - DNA, 15 bp, Homo sapiens
tttttattagtctgt

SEQ ID NO: 2036066 - DNA, 15 bp, Homo sapiens
ttttattagtctgtc

SEQ ID NO: 2036067 - DNA, 15 bp, Homo sapiens
tttattagtctgtca

SEQ ID NO: 2036068 - DNA, 15 bp, Homo sapiens
ttattagtctgtcat

SEQ ID NO: 2036069 - DNA, 15 bp, Homo sapiens
tattagtctgtcatt

SEQ ID NO: 2036070 - DNA, 15 bp, Homo sapiens
attagtctgtcattt

SEQ ID NO: 2036071 - DNA, 15 bp, Homo sapiens
ttagtctgtcatttt

SEQ ID NO: 2036072 - DNA, 15 bp, Homo sapiens
tagtctgtcattttt

SEQ ID NO: 2036073 - DNA, 15 bp, Homo sapiens
agtctgtcatttttg

SEQ ID NO: 2036074 - DNA, 15 bp, Homo sapiens
gtctgtcatttttgt

SEQ ID NO: 2036075 - DNA, 15 bp, Homo sapiens
tctgtcatttttgta

SEQ ID NO: 2036076 - DNA, 15 bp, Homo sapiens
ctgtcatttttgtag

SEQ ID NO: 2036077 - DNA, 15 bp, Homo sapiens
tgtcatttttgtagt

SEQ ID NO: 2036078 - DNA, 15 bp, Homo sapiens
gtcatttttgtagta

SEQ ID NO: 2036079 - DNA, 15 bp, Homo sapiens
tcatttttgtagtat

SEQ ID NO: 2036080 - DNA, 15 bp, Homo sapiens
catttttgtagtata

SEQ ID NO: 2036081 - DNA, 15 bp, Homo sapiens
atttttgtagtataa

SEQ ID NO: 2036082 - DNA, 15 bp, Homo sapiens
tttttgtagtataac

SEQ ID NO: 2036083 - DNA, 15 bp, Homo sapiens
ttttgtagtataact

SEQ ID NO: 2036084 - DNA, 15 bp, Homo sapiens
tttgtagtataactt

SEQ ID NO: 2036085 - DNA, 15 bp, Homo sapiens
ttgtagtataacttc

SEQ ID NO: 2036086 - DNA, 15 bp, Homo sapiens
tgtagtataacttct

SEQ ID NO: 2036087 - DNA, 15 bp, Homo sapiens
gtagtataacttctc

SEQ ID NO: 2036088 - DNA, 15 bp, Homo sapiens
tagtataacttctca

SEQ ID NO: 2036089 - DNA, 15 bp, Homo sapiens
agtataacttctcac

SEQ ID NO: 2036090 - DNA, 15 bp, Homo sapiens
gtataacttctcaca

SEQ ID NO: 2036091 - DNA, 15 bp, Homo sapiens
tataacttctcacaa

SEQ ID NO: 2036092 - DNA, 15 bp, Homo sapiens
ataacttctcacaaa

SEQ ID NO: 2036093 - DNA, 15 bp, Homo sapiens
taacttctcacaaat

SEQ ID NO: 2036094 - DNA, 15 bp, Homo sapiens
aacttctcacaaatt

SEQ ID NO: 2036095 - DNA, 15 bp, Homo sapiens
acttctcacaaatta

SEQ ID NO: 2036096 - DNA, 15 bp, Homo sapiens
cttctcacaaattac

SEQ ID NO: 2036097 - DNA, 15 bp, Homo sapiens
ttctcacaaattacc

SEQ ID NO: 2036098 - DNA, 15 bp, Homo sapiens
tctcacaaattacct

SEQ ID NO: 2036099 - DNA, 15 bp, Homo sapiens
ctcacaaattaccta

SEQ ID NO: 2036100 - DNA, 15 bp, Homo sapiens
tcacaaattacctaa

SEQ ID NO: 2036101 - DNA, 15 bp, Homo sapiens
cacaaattacctaac

SEQ ID NO: 2036102 - DNA, 15 bp, Homo sapiens
acaaattacctaacc

SEQ ID NO: 2036103 - DNA, 15 bp, Homo sapiens
caaattacctaaccc

SEQ ID NO: 2036104 - DNA, 15 bp, Homo sapiens
aaattacctaaccca

SEQ ID NO: 2036105 - DNA, 15 bp, Homo sapiens
aattacctaacccat

SEQ ID NO: 2036106 - DNA, 15 bp, Homo sapiens
attacctaacccatt

SEQ ID NO: 2036107 - DNA, 15 bp, Homo sapiens
ttacctaacccattt

SEQ ID NO: 2036108 - DNA, 15 bp, Homo sapiens
tacctaacccatttt

SEQ ID NO: 2036109 - DNA, 15 bp, Homo sapiens
acctaacccattttt

SEQ ID NO: 2036110 - DNA, 15 bp, Homo sapiens
cctaacccatttttc

SEQ ID NO: 2036111 - DNA, 15 bp, Homo sapiens
ctaacccatttttcc

SEQ ID NO: 2036112 - DNA, 15 bp, Homo sapiens
taacccatttttcct

SEQ ID NO: 2036113 - DNA, 15 bp, Homo sapiens
aacccatttttcctt

SEQ ID NO: 2036114 - DNA, 15 bp, Homo sapiens
acccatttttcctta

SEQ ID NO: 2036115 - DNA, 15 bp, Homo sapiens
cccatttttccttag

SEQ ID NO: 2036116 - DNA, 15 bp, Homo sapiens
ccatttttccttagc

SEQ ID NO: 2036117 - DNA, 15 bp, Homo sapiens
catttttccttagct

SEQ ID NO: 2036118 - DNA, 15 bp, Homo sapiens
atttttccttagctt

SEQ ID NO: 2036119 - DNA, 15 bp, Homo sapiens
tttttccttagcttt

SEQ ID NO: 2036120 - DNA, 15 bp, Homo sapiens
ttttccttagctttt

SEQ ID NO: 2036121 - DNA, 15 bp, Homo sapiens
tttccttagcttttc

SEQ ID NO: 2036122 - DNA, 15 bp, Homo sapiens
ttccttagcttttca

SEQ ID NO: 2036123 - DNA, 15 bp, Homo sapiens
tccttagcttttcaa

SEQ ID NO: 2036124 - DNA, 15 bp, Homo sapiens
ccttagcttttcaag

SEQ ID NO: 2036125 - DNA, 15 bp, Homo sapiens
cttagcttttcaaga

SEQ ID NO: 2036126 - DNA, 15 bp, Homo sapiens
ttagcttttcaagag

SEQ ID NO: 2036127 - DNA, 15 bp, Homo sapiens
tagcttttcaagagt

SEQ ID NO: 2036128 - DNA, 15 bp, Homo sapiens
agcttttcaagagtt

SEQ ID NO: 2036129 - DNA, 15 bp, Homo sapiens
gcttttcaagagtta

SEQ ID NO: 2036130 - DNA, 15 bp, Homo sapiens
cttttcaagagttaa

SEQ ID NO: 2036131 - DNA, 15 bp, Homo sapiens
ttttcaagagttaaa

SEQ ID NO: 2036132 - DNA, 15 bp, Homo sapiens
tttcaagagttaaaa

SEQ ID NO: 2036133 - DNA, 15 bp, Homo sapiens
ttcaagagttaaaag

SEQ ID NO: 2036134 - DNA, 15 bp, Homo sapiens
tcaagagttaaaagc

SEQ ID NO: 2036135 - DNA, 15 bp, Homo sapiens
caagagttaaaagcg

SEQ ID NO: 2036136 - DNA, 15 bp, Homo sapiens
aagagttaaaagcga

SEQ ID NO: 2036137 - DNA, 15 bp, Homo sapiens
agagttaaaagcgat

SEQ ID NO: 2036138 - DNA, 15 bp, Homo sapiens
gagttaaaagcgatt

SEQ ID NO: 2036139 - DNA, 15 bp, Homo sapiens
agttaaaagcgattc

SEQ ID NO: 2036140 - DNA, 15 bp, Homo sapiens
gttaaaagcgattct

SEQ ID NO: 2036141 - DNA, 15 bp, Homo sapiens
ttaaaagcgattctg

SEQ ID NO: 2036142 - DNA, 15 bp, Homo sapiens
taaaagcgattctgt

SEQ ID NO: 2036143 - DNA, 15 bp, Homo sapiens
aaaagcgattctgtt

SEQ ID NO: 2036144 - DNA, 15 bp, Homo sapiens
aaagcgattctgttg

SEQ ID NO: 2036145 - DNA, 15 bp, Homo sapiens
aagcgattctgttgt

SEQ ID NO: 2036146 - DNA, 15 bp, Homo sapiens
agcgattctgttgtt

SEQ ID NO: 2036147 - DNA, 15 bp, Homo sapiens
gcgattctgttgttt

SEQ ID NO: 2036148 - DNA, 15 bp, Homo sapiens
cgattctgttgtttt

SEQ ID NO: 2036149 - DNA, 15 bp, Homo sapiens
gattctgttgtttta

SEQ ID NO: 2036150 - DNA, 15 bp, Homo sapiens
attctgttgttttat

SEQ ID NO: 2036151 - DNA, 15 bp, Homo sapiens
ttctgttgttttatt

SEQ ID NO: 2036152 - DNA, 15 bp, Homo sapiens
tctgttgttttatta

SEQ ID NO: 2036153 - DNA, 15 bp, Homo sapiens
ctgttgttttattat

SEQ ID NO: 2036154 - DNA, 15 bp, Homo sapiens
tgttgttttattatt

SEQ ID NO: 2036155 - DNA, 15 bp, Homo sapiens
gttgttttattattt

SEQ ID NO: 2036156 - DNA, 15 bp, Homo sapiens
ttgttttattatttc

SEQ ID NO: 2036157 - DNA, 15 bp, Homo sapiens
tgttttattatttca

SEQ ID NO: 2036158 - DNA, 15 bp, Homo sapiens
gttttattatttcat

SEQ ID NO: 2036159 - DNA, 15 bp, Homo sapiens
ttttattatttcatg

SEQ ID NO: 2036160 - DNA, 15 bp, Homo sapiens
tttattatttcatga

SEQ ID NO: 2036161 - DNA, 15 bp, Homo sapiens
ttattatttcatgat

SEQ ID NO: 2036162 - DNA, 15 bp, Homo sapiens
tattatttcatgata

SEQ ID NO: 2036163 - DNA, 15 bp, Homo sapiens
attatttcatgatac

SEQ ID NO: 2036164 - DNA, 15 bp, Homo sapiens
ttatttcatgatact

SEQ ID NO: 2036165 - DNA, 15 bp, Homo sapiens
tatttcatgatacta

SEQ ID NO: 2036166 - DNA, 15 bp, Homo sapiens
atttcatgatactat

SEQ ID NO: 2036167 - DNA, 15 bp, Homo sapiens
tttcatgatactatt

SEQ ID NO: 2036168 - DNA, 15 bp, Homo sapiens
ttcatgatactatta

SEQ ID NO: 2036169 - DNA, 15 bp, Homo sapiens
tcatgatactattat

SEQ ID NO: 2036170 - DNA, 15 bp, Homo sapiens
catgatactattata

SEQ ID NO: 2036171 - DNA, 15 bp, Homo sapiens
atgatactattataa

SEQ ID NO: 2036172 - DNA, 15 bp, Homo sapiens
tgatactattataac

SEQ ID NO: 2036173 - DNA, 15 bp, Homo sapiens
gatactattataact

SEQ ID NO: 2036174 - DNA, 15 bp, Homo sapiens
atactattataactg

SEQ ID NO: 2036175 - DNA, 15 bp, Homo sapiens
tactattataactga

SEQ ID NO: 2036176 - DNA, 15 bp, Homo sapiens
actattataactgat

SEQ ID NO: 2036177 - DNA, 15 bp, Homo sapiens
ctattataactgatt

SEQ ID NO: 2036178 - DNA, 15 bp, Homo sapiens
tattataactgatta

SEQ ID NO: 2036179 - DNA, 15 bp, Homo sapiens
attataactgattat

SEQ ID NO: 2036180 - DNA, 15 bp, Homo sapiens
ttataactgattatt

SEQ ID NO: 2036181 - DNA, 15 bp, Homo sapiens
tataactgattattt

SEQ ID NO: 2036182 - DNA, 15 bp, Homo sapiens
ataactgattatttc

SEQ ID NO: 2036183 - DNA, 15 bp, Homo sapiens
taactgattatttca

SEQ ID NO: 2036184 - DNA, 15 bp, Homo sapiens
aactgattatttcag

SEQ ID NO: 2036185 - DNA, 15 bp, Homo sapiens
actgattatttcagt

SEQ ID NO: 2036186 - DNA, 15 bp, Homo sapiens
ctgattatttcagtt

SEQ ID NO: 2036187 - DNA, 15 bp, Homo sapiens
tgattatttcagttt

SEQ ID NO: 2036188 - DNA, 15 bp, Homo sapiens
gattatttcagtttg

SEQ ID NO: 2036189 - DNA, 15 bp, Homo sapiens
attatttcagtttgg

SEQ ID NO: 2036190 - DNA, 15 bp, Homo sapiens
ttatttcagtttggg

SEQ ID NO: 2036191 - DNA, 15 bp, Homo sapiens
tatttcagtttggga

SEQ ID NO: 2036192 - DNA, 15 bp, Homo sapiens
atttcagtttgggaa

SEQ ID NO: 2036193 - DNA, 15 bp, Homo sapiens
tttcagtttgggaaa

SEQ ID NO: 2036194 - DNA, 15 bp, Homo sapiens
ttcagtttgggaaac

SEQ ID NO: 2036195 - DNA, 15 bp, Homo sapiens
tcagtttgggaaacc

SEQ ID NO: 2036196 - DNA, 15 bp, Homo sapiens
cagtttgggaaacca

SEQ ID NO: 2036197 - DNA, 15 bp, Homo sapiens
agtttgggaaaccaa

SEQ ID NO: 2036198 - DNA, 15 bp, Homo sapiens
gtttgggaaaccaaa

SEQ ID NO: 2036199 - DNA, 15 bp, Homo sapiens
tttgggaaaccaaaa

SEQ ID NO: 2036200 - DNA, 15 bp, Homo sapiens
ttgggaaaccaaaag

SEQ ID NO: 2036201 - DNA, 15 bp, Homo sapiens
tgggaaaccaaaagt

SEQ ID NO: 2036202 - DNA, 15 bp, Homo sapiens
gggaaaccaaaagtg

SEQ ID NO: 2036203 - DNA, 15 bp, Homo sapiens
ggaaaccaaaagtgt

SEQ ID NO: 2036204 - DNA, 15 bp, Homo sapiens
gaaaccaaaagtgtt

SEQ ID NO: 2036205 - DNA, 15 bp, Homo sapiens
aaaccaaaagtgttt

SEQ ID NO: 2036206 - DNA, 15 bp, Homo sapiens
aaccaaaagtgtttt

SEQ ID NO: 2036207 - DNA, 15 bp, Homo sapiens
accaaaagtgttttt

SEQ ID NO: 2036208 - DNA, 15 bp, Homo sapiens
ccaaaagtgtttttt

SEQ ID NO: 2036209 - DNA, 15 bp, Homo sapiens
caaaagtgtttttta

SEQ ID NO: 2036210 - DNA, 15 bp, Homo sapiens
aaaagtgttttttaa

SEQ ID NO: 2036211 - DNA, 15 bp, Homo sapiens
aaagtgttttttaaa

SEQ ID NO: 2036212 - DNA, 15 bp, Homo sapiens
aagtgttttttaaaa

SEQ ID NO: 2036213 - DNA, 15 bp, Homo sapiens
gtgttttttaaaaat

SEQ ID NO: 2036214 - DNA, 15 bp, Homo sapiens
tgttttttaaaaatg

SEQ ID NO: 2036215 - DNA, 15 bp, Homo sapiens
gttttttaaaaatga

SEQ ID NO: 2036216 - DNA, 15 bp, Homo sapiens
ttttttaaaaatgag

SEQ ID NO: 2036217 - DNA, 15 bp, Homo sapiens
tttttaaaaatgagt

SEQ ID NO: 2036218 - DNA, 15 bp, Homo sapiens
ttttaaaaatgagtg

SEQ ID NO: 2036219 - DNA, 15 bp, Homo sapiens
tttaaaaatgagtga

SEQ ID NO: 2036220 - DNA, 15 bp, Homo sapiens
ttaaaaatgagtgac

SEQ ID NO: 2036221 - DNA, 15 bp, Homo sapiens
taaaaatgagtgact

SEQ ID NO: 2036222 - DNA, 15 bp, Homo sapiens
aaaaatgagtgacta

SEQ ID NO: 2036223 - DNA, 15 bp, Homo sapiens
aaaatgagtgactaa

SEQ ID NO: 2036224 - DNA, 15 bp, Homo sapiens
aaatgagtgactaaa

SEQ ID NO: 2036225 - DNA, 15 bp, Homo sapiens
aatgagtgactaaaa

SEQ ID NO: 2036226 - DNA, 15 bp, Homo sapiens
atgagtgactaaaaa

SEQ ID NO: 2036227 - DNA, 15 bp, Homo sapiens
tgagtgactaaaaaa

SEQ ID NO: 2036228 - DNA, 15 bp, Homo sapiens
gagtgactaaaaaat

SEQ ID NO: 2036229 - DNA, 15 bp, Homo sapiens
agtgactaaaaaatt

SEQ ID NO: 2036230 - DNA, 15 bp, Homo sapiens
gtgactaaaaaattg

SEQ ID NO: 2036231 - DNA, 15 bp, Homo sapiens
tgactaaaaaattgt

SEQ ID NO: 2036232 - DNA, 15 bp, Homo sapiens
gactaaaaaattgtc

SEQ ID NO: 2036233 - DNA, 15 bp, Homo sapiens
actaaaaaattgtca

SEQ ID NO: 2036234 - DNA, 15 bp, Homo sapiens
ctaaaaaattgtcag

SEQ ID NO: 2036235 - DNA, 15 bp, Homo sapiens
taaaaaattgtcagg

SEQ ID NO: 2036236 - DNA, 15 bp, Homo sapiens
aaaaaattgtcaggc

SEQ ID NO: 2036237 - DNA, 15 bp, Homo sapiens
aaaaattgtcaggct

SEQ ID NO: 2036238 - DNA, 15 bp, Homo sapiens
aaaattgtcaggctg

SEQ ID NO: 2036239 - DNA, 15 bp, Homo sapiens
aaattgtcaggctgg

SEQ ID NO: 2036240 - DNA, 15 bp, Homo sapiens
aattgtcaggctgga

SEQ ID NO: 2036241 - DNA, 15 bp, Homo sapiens
attgtcaggctggag

SEQ ID NO: 2036242 - DNA, 15 bp, Homo sapiens
ttgtcaggctggagc

SEQ ID NO: 2036243 - DNA, 15 bp, Homo sapiens
tgtcaggctggagct

SEQ ID NO: 2036244 - DNA, 15 bp, Homo sapiens
gtcaggctggagcta

SEQ ID NO: 2036245 - DNA, 15 bp, Homo sapiens
tcaggctggagctac

SEQ ID NO: 2036246 - DNA, 15 bp, Homo sapiens
caggctggagctaca

SEQ ID NO: 2036247 - DNA, 15 bp, Homo sapiens
aggctggagctacat

SEQ ID NO: 2036248 - DNA, 15 bp, Homo sapiens
ggctggagctacatc

SEQ ID NO: 2036249 - DNA, 15 bp, Homo sapiens
gctggagctacatca

SEQ ID NO: 2036250 - DNA, 15 bp, Homo sapiens
ctggagctacatcac

SEQ ID NO: 2036251 - DNA, 15 bp, Homo sapiens
tggagctacatcact

SEQ ID NO: 2036252 - DNA, 15 bp, Homo sapiens
ggagctacatcacta

SEQ ID NO: 2036253 - DNA, 15 bp, Homo sapiens
gagctacatcactag

SEQ ID NO: 2036254 - DNA, 15 bp, Homo sapiens
agctacatcactagt

SEQ ID NO: 2036255 - DNA, 15 bp, Homo sapiens
gctacatcactagtt

SEQ ID NO: 2036256 - DNA, 15 bp, Homo sapiens
ctacatcactagttg

SEQ ID NO: 2036257 - DNA, 15 bp, Homo sapiens
tacatcactagttgt

SEQ ID NO: 2036258 - DNA, 15 bp, Homo sapiens
acatcactagttgta

SEQ ID NO: 2036259 - DNA, 15 bp, Homo sapiens
catcactagttgtaa

SEQ ID NO: 2036260 - DNA, 15 bp, Homo sapiens
atcactagttgtaaa

SEQ ID NO: 2036261 - DNA, 15 bp, Homo sapiens
tcactagttgtaaaa

SEQ ID NO: 2036262 - DNA, 15 bp, Homo sapiens
cactagttgtaaaaa

SEQ ID NO: 2036263 - DNA, 15 bp, Homo sapiens
actagttgtaaaaat

SEQ ID NO: 2036264 - DNA, 15 bp, Homo sapiens
ctagttgtaaaaata

SEQ ID NO: 2036265 - DNA, 15 bp, Homo sapiens
tagttgtaaaaatac

SEQ ID NO: 2036266 - DNA, 15 bp, Homo sapiens
agttgtaaaaataca

SEQ ID NO: 2036267 - DNA, 15 bp, Homo sapiens
gttgtaaaaatacac

SEQ ID NO: 2036268 - DNA, 15 bp, Homo sapiens
ttgtaaaaatacaca

SEQ ID NO: 2036269 - DNA, 15 bp, Homo sapiens
tgtaaaaatacacaa

SEQ ID NO: 2036270 - DNA, 15 bp, Homo sapiens
gtaaaaatacacaaa

SEQ ID NO: 2036271 - DNA, 15 bp, Homo sapiens
taaaaatacacaaac

SEQ ID NO: 2036272 - DNA, 15 bp, Homo sapiens
aaaaatacacaaacc

SEQ ID NO: 2036273 - DNA, 15 bp, Homo sapiens
aaaatacacaaacct

SEQ ID NO: 2036274 - DNA, 15 bp, Homo sapiens
aaatacacaaacctt

SEQ ID NO: 2036275 - DNA, 15 bp, Homo sapiens
aatacacaaaccttg

SEQ ID NO: 2036276 - DNA, 15 bp, Homo sapiens
atacacaaaccttga

SEQ ID NO: 2036277 - DNA, 15 bp, Homo sapiens
tacacaaaccttgat

SEQ ID NO: 2036278 - DNA, 15 bp, Homo sapiens
acacaaaccttgata

SEQ ID NO: 2036279 - DNA, 15 bp, Homo sapiens
cacaaaccttgatac

SEQ ID NO: 2036280 - DNA, 15 bp, Homo sapiens
acaaaccttgatacc

SEQ ID NO: 2036281 - DNA, 15 bp, Homo sapiens
caaaccttgatacct

SEQ ID NO: 2036282 - DNA, 15 bp, Homo sapiens
aaaccttgatacctg

SEQ ID NO: 2036283 - DNA, 15 bp, Homo sapiens
aaccttgatacctgc

SEQ ID NO: 2036284 - DNA, 15 bp, Homo sapiens
accttgatacctgcc

SEQ ID NO: 2036285 - DNA, 15 bp, Homo sapiens
ccttgatacctgcct

SEQ ID NO: 2036286 - DNA, 15 bp, Homo sapiens
cttgatacctgcctt

SEQ ID NO: 2036287 - DNA, 15 bp, Homo sapiens
ttgatacctgccttc

SEQ ID NO: 2036288 - DNA, 15 bp, Homo sapiens
atacctgccttcaag

SEQ ID NO: 2036289 - DNA, 15 bp, Homo sapiens
tacctgccttcaagg

SEQ ID NO: 2036290 - DNA, 15 bp, Homo sapiens
acctgccttcaagga

SEQ ID NO: 2036291 - DNA, 15 bp, Homo sapiens
cctgccttcaaggaa

SEQ ID NO: 2036292 - DNA, 15 bp, Homo sapiens
ctgccttcaaggaac

SEQ ID NO: 2036293 - DNA, 15 bp, Homo sapiens
tgccttcaaggaact

SEQ ID NO: 2036294 - DNA, 15 bp, Homo sapiens
gccttcaaggaactc

SEQ ID NO: 2036295 - DNA, 15 bp, Homo sapiens
ccttcaaggaactca

SEQ ID NO: 2036296 - DNA, 15 bp, Homo sapiens
cttcaaggaactcat

SEQ ID NO: 2036297 - DNA, 15 bp, Homo sapiens
ttcaaggaactcatg

SEQ ID NO: 2036298 - DNA, 15 bp, Homo sapiens
tcaaggaactcatgt

SEQ ID NO: 2036299 - DNA, 15 bp, Homo sapiens
caaggaactcatgtt

SEQ ID NO: 2036300 - DNA, 15 bp, Homo sapiens
aaggaactcatgttc

SEQ ID NO: 2036301 - DNA, 15 bp, Homo sapiens
aggaactcatgttct

SEQ ID NO: 2036302 - DNA, 15 bp, Homo sapiens
ggaactcatgttcta

SEQ ID NO: 2036303 - DNA, 15 bp, Homo sapiens
gaactcatgttctag

SEQ ID NO: 2036304 - DNA, 15 bp, Homo sapiens
aactcatgttctagc

SEQ ID NO: 2036305 - DNA, 15 bp, Homo sapiens
actcatgttctagca

SEQ ID NO: 2036306 - DNA, 15 bp, Homo sapiens
ctcatgttctagcag

SEQ ID NO: 2036307 - DNA, 15 bp, Homo sapiens
tcatgttctagcagg

SEQ ID NO: 2036308 - DNA, 15 bp, Homo sapiens
catgttctagcaggg

SEQ ID NO: 2036309 - DNA, 15 bp, Homo sapiens
atgttctagcaggga

SEQ ID NO: 2036310 - DNA, 15 bp, Homo sapiens
tgttctagcagggaa

SEQ ID NO: 2036311 - DNA, 15 bp, Homo sapiens
gttctagcagggaag

SEQ ID NO: 2036312 - DNA, 15 bp, Homo sapiens
tctagcagggaagat

SEQ ID NO: 2036313 - DNA, 15 bp, Homo sapiens
ctagcagggaagata

SEQ ID NO: 2036314 - DNA, 15 bp, Homo sapiens
tagcagggaagatag

SEQ ID NO: 2036315 - DNA, 15 bp, Homo sapiens
agcagggaagataga

SEQ ID NO: 2036316 - DNA, 15 bp, Homo sapiens
gcagggaagatagac

SEQ ID NO: 2036317 - DNA, 15 bp, Homo sapiens
cagggaagatagaca

SEQ ID NO: 2036318 - DNA, 15 bp, Homo sapiens
agggaagatagacat

SEQ ID NO: 2036319 - DNA, 15 bp, Homo sapiens
gggaagatagacatc

SEQ ID NO: 2036320 - DNA, 15 bp, Homo sapiens
ggaagatagacatct

SEQ ID NO: 2036321 - DNA, 15 bp, Homo sapiens
gaagatagacatcta

SEQ ID NO: 2036322 - DNA, 15 bp, Homo sapiens
aagatagacatctaa

SEQ ID NO: 2036323 - DNA, 15 bp, Homo sapiens
agatagacatctaac

SEQ ID NO: 2036324 - DNA, 15 bp, Homo sapiens
gatagacatctaact

SEQ ID NO: 2036325 - DNA, 15 bp, Homo sapiens
atagacatctaactt

SEQ ID NO: 2036326 - DNA, 15 bp, Homo sapiens
tagacatctaactta

SEQ ID NO: 2036327 - DNA, 15 bp, Homo sapiens
agacatctaacttaa

SEQ ID NO: 2036328 - DNA, 15 bp, Homo sapiens
gacatctaacttaaa

SEQ ID NO: 2036329 - DNA, 15 bp, Homo sapiens
acatctaacttaaat

SEQ ID NO: 2036330 - DNA, 15 bp, Homo sapiens
catctaacttaaata

SEQ ID NO: 2036331 - DNA, 15 bp, Homo sapiens
atctaacttaaataa

SEQ ID NO: 2036332 - DNA, 15 bp, Homo sapiens
tctaacttaaataac

SEQ ID NO: 2036333 - DNA, 15 bp, Homo sapiens
ctaacttaaataaca

SEQ ID NO: 2036334 - DNA, 15 bp, Homo sapiens
taacttaaataacaa

SEQ ID NO: 2036335 - DNA, 15 bp, Homo sapiens
aacttaaataacaat

SEQ ID NO: 2036336 - DNA, 15 bp, Homo sapiens
acttaaataacaata

SEQ ID NO: 2036337 - DNA, 15 bp, Homo sapiens
cttaaataacaataa

SEQ ID NO: 2036338 - DNA, 15 bp, Homo sapiens
ttaaataacaataat

SEQ ID NO: 2036339 - DNA, 15 bp, Homo sapiens
taaataacaataatg

SEQ ID NO: 2036340 - DNA, 15 bp, Homo sapiens
aaataacaataatgt

SEQ ID NO: 2036341 - DNA, 15 bp, Homo sapiens
aataacaataatgta

SEQ ID NO: 2036342 - DNA, 15 bp, Homo sapiens
ataacaataatgtaa

SEQ ID NO: 2036343 - DNA, 15 bp, Homo sapiens
taacaataatgtaat

SEQ ID NO: 2036344 - DNA, 15 bp, Homo sapiens
aacaataatgtaatc

SEQ ID NO: 2036345 - DNA, 15 bp, Homo sapiens
acaataatgtaatct

SEQ ID NO: 2036346 - DNA, 15 bp, Homo sapiens
caataatgtaatcta

SEQ ID NO: 2036347 - DNA, 15 bp, Homo sapiens
aataatgtaatctaa

SEQ ID NO: 2036348 - DNA, 15 bp, Homo sapiens
ataatgtaatctaat

SEQ ID NO: 2036349 - DNA, 15 bp, Homo sapiens
taatgtaatctaatc

SEQ ID NO: 2036350 - DNA, 15 bp, Homo sapiens
aatgtaatctaatcc

SEQ ID NO: 2036351 - DNA, 15 bp, Homo sapiens
atgtaatctaatcct

SEQ ID NO: 2036352 - DNA, 15 bp, Homo sapiens
tgtaatctaatcctt

SEQ ID NO: 2036353 - DNA, 15 bp, Homo sapiens
gtaatctaatccttt

SEQ ID NO: 2036354 - DNA, 15 bp, Homo sapiens
taatctaatcctttt

SEQ ID NO: 2036355 - DNA, 15 bp, Homo sapiens
aatctaatccttttc

SEQ ID NO: 2036356 - DNA, 15 bp, Homo sapiens
atctaatccttttcc

SEQ ID NO: 2036357 - DNA, 15 bp, Homo sapiens
tctaatccttttccc

SEQ ID NO: 2036358 - DNA, 15 bp, Homo sapiens
ctaatccttttcccc

SEQ ID NO: 2036359 - DNA, 15 bp, Homo sapiens
taatccttttcccca

SEQ ID NO: 2036360 - DNA, 15 bp, Homo sapiens
aatccttttccccag

SEQ ID NO: 2036361 - DNA, 15 bp, Homo sapiens
atccttttccccagc

SEQ ID NO: 2036362 - DNA, 15 bp, Homo sapiens
tccttttccccagct

SEQ ID NO: 2036363 - DNA, 15 bp, Homo sapiens
ccttttccccagcta

SEQ ID NO: 2036364 - DNA, 15 bp, Homo sapiens
cttttccccagctac

SEQ ID NO: 2036365 - DNA, 15 bp, Homo sapiens
ttttccccagctact

SEQ ID NO: 2036366 - DNA, 15 bp, Homo sapiens
tttccccagctactc

SEQ ID NO: 2036367 - DNA, 15 bp, Homo sapiens
ttccccagctactca

SEQ ID NO: 2036368 - DNA, 15 bp, Homo sapiens
tccccagctactcaa

SEQ ID NO: 2036369 - DNA, 15 bp, Homo sapiens
ccccagctactcaaa

SEQ ID NO: 2036370 - DNA, 15 bp, Homo sapiens
ggcaaatcaggacca

SEQ ID NO: 2036371 - DNA, 15 bp, Homo sapiens
gcaaatcaggaccac

SEQ ID NO: 2036372 - DNA, 15 bp, Homo sapiens
caaatcaggaccaca

SEQ ID NO: 2036373 - DNA, 15 bp, Homo sapiens
aaatcaggaccacag

SEQ ID NO: 2036374 - DNA, 15 bp, Homo sapiens
aatcaggaccacaga

SEQ ID NO: 2036375 - DNA, 15 bp, Homo sapiens
atcaggaccacagaa

SEQ ID NO: 2036376 - DNA, 15 bp, Homo sapiens
tcaggaccacagaag

SEQ ID NO: 2036377 - DNA, 15 bp, Homo sapiens
caggaccacagaagt

SEQ ID NO: 2036378 - DNA, 15 bp, Homo sapiens
aggaccacagaagtt

SEQ ID NO: 2036379 - DNA, 15 bp, Homo sapiens
ggaccacagaagttt

SEQ ID NO: 2036380 - DNA, 15 bp, Homo sapiens
gaccacagaagtttt

SEQ ID NO: 2036381 - DNA, 15 bp, Homo sapiens
accacagaagtttta

SEQ ID NO: 2036382 - DNA, 15 bp, Homo sapiens
ccacagaagttttag

SEQ ID NO: 2036383 - DNA, 15 bp, Homo sapiens
cacagaagttttagc

SEQ ID NO: 2036384 - DNA, 15 bp, Homo sapiens
acagaagttttagct

SEQ ID NO: 2036385 - DNA, 15 bp, Homo sapiens
cagaagttttagctt

SEQ ID NO: 2036386 - DNA, 15 bp, Homo sapiens
agaagttttagcttt

SEQ ID NO: 2036387 - DNA, 15 bp, Homo sapiens
gaagttttagcttta

SEQ ID NO: 2036388 - DNA, 15 bp, Homo sapiens
aagttttagctttat

SEQ ID NO: 2036389 - DNA, 15 bp, Homo sapiens
agttttagctttatt

SEQ ID NO: 2036390 - DNA, 15 bp, Homo sapiens
gttttagctttattt

SEQ ID NO: 2036391 - DNA, 15 bp, Homo sapiens
ttttagctttatttc

SEQ ID NO: 2036392 - DNA, 15 bp, Homo sapiens
tttagctttatttcc

SEQ ID NO: 2036393 - DNA, 15 bp, Homo sapiens
ttagctttatttcct

SEQ ID NO: 2036394 - DNA, 15 bp, Homo sapiens
tagctttatttcctt

SEQ ID NO: 2036395 - DNA, 15 bp, Homo sapiens
agctttatttccttt

SEQ ID NO: 2036396 - DNA, 15 bp, Homo sapiens
gctttatttcctttg

SEQ ID NO: 2036397 - DNA, 15 bp, Homo sapiens
ctttatttcctttgt

SEQ ID NO: 2036398 - DNA, 15 bp, Homo sapiens
tttatttcctttgtg

SEQ ID NO: 2036399 - DNA, 15 bp, Homo sapiens
ttatttcctttgtgt

SEQ ID NO: 2036400 - DNA, 15 bp, Homo sapiens
tatttcctttgtgtg

SEQ ID NO: 2036401 - DNA, 15 bp, Homo sapiens
atttcctttgtgtgg

SEQ ID NO: 2036402 - DNA, 15 bp, Homo sapiens
tttcctttgtgtggt

SEQ ID NO: 2036403 - DNA, 15 bp, Homo sapiens
ttcctttgtgtggta

SEQ ID NO: 2036404 - DNA, 15 bp, Homo sapiens
tcctttgtgtggtag

SEQ ID NO: 2036405 - DNA, 15 bp, Homo sapiens
cctttgtgtggtagc

SEQ ID NO: 2036406 - DNA, 15 bp, Homo sapiens
ctttgtgtggtagcc

SEQ ID NO: 2036407 - DNA, 15 bp, Homo sapiens
tttgtgtggtagcct

SEQ ID NO: 2036408 - DNA, 15 bp, Homo sapiens
ttgtgtggtagcctc

SEQ ID NO: 2036409 - DNA, 15 bp, Homo sapiens
tgtgtggtagcctct

SEQ ID NO: 2036410 - DNA, 15 bp, Homo sapiens
gtgtggtagcctctg

SEQ ID NO: 2036411 - DNA, 15 bp, Homo sapiens
tgtggtagcctctgg

SEQ ID NO: 2036412 - DNA, 15 bp, Homo sapiens
gtggtagcctctggg

SEQ ID NO: 2036413 - DNA, 15 bp, Homo sapiens
tggtagcctctgggt

SEQ ID NO: 2036414 - DNA, 15 bp, Homo sapiens
ggtagcctctgggtt

SEQ ID NO: 2036415 - DNA, 15 bp, Homo sapiens
gtagcctctgggttt

SEQ ID NO: 2036416 - DNA, 15 bp, Homo sapiens
tagcctctgggtttc

SEQ ID NO: 2036417 - DNA, 15 bp, Homo sapiens
agcctctgggtttct

SEQ ID NO: 2036418 - DNA, 15 bp, Homo sapiens
gcctctgggtttctg

SEQ ID NO: 2036419 - DNA, 15 bp, Homo sapiens
cctctgggtttctgt

SEQ ID NO: 2036420 - DNA, 15 bp, Homo sapiens
ctctgggtttctgtc

SEQ ID NO: 2036421 - DNA, 15 bp, Homo sapiens
tctgggtttctgtca

SEQ ID NO: 2036422 - DNA, 15 bp, Homo sapiens
ctgggtttctgtcag

SEQ ID NO: 2036423 - DNA, 15 bp, Homo sapiens
tgggtttctgtcagt

SEQ ID NO: 2036424 - DNA, 15 bp, Homo sapiens
gggtttctgtcagtc

SEQ ID NO: 2036425 - DNA, 15 bp, Homo sapiens
ggtttctgtcagtca

SEQ ID NO: 2036426 - DNA, 15 bp, Homo sapiens
gtttctgtcagtcac

SEQ ID NO: 2036427 - DNA, 15 bp, Homo sapiens
tttctgtcagtcact

SEQ ID NO: 2036428 - DNA, 15 bp, Homo sapiens
ttctgtcagtcactt

SEQ ID NO: 2036429 - DNA, 15 bp, Homo sapiens
tctgtcagtcacttt

SEQ ID NO: 2036430 - DNA, 15 bp, Homo sapiens
ctgtcagtcactttg

SEQ ID NO: 2036431 - DNA, 15 bp, Homo sapiens
tgtcagtcactttgt

SEQ ID NO: 2036432 - DNA, 15 bp, Homo sapiens
gtcagtcactttgta

SEQ ID NO: 2036433 - DNA, 15 bp, Homo sapiens
tcagtcactttgtag

SEQ ID NO: 2036434 - DNA, 15 bp, Homo sapiens
cagtcactttgtagt

SEQ ID NO: 2036435 - DNA, 15 bp, Homo sapiens
agtcactttgtagtt

SEQ ID NO: 2036436 - DNA, 15 bp, Homo sapiens
gtcactttgtagttt

SEQ ID NO: 2036437 - DNA, 15 bp, Homo sapiens
tcactttgtagtttt

SEQ ID NO: 2036438 - DNA, 15 bp, Homo sapiens
cactttgtagttttg

SEQ ID NO: 2036439 - DNA, 15 bp, Homo sapiens
actttgtagttttgt

SEQ ID NO: 2036440 - DNA, 15 bp, Homo sapiens
ctttgtagttttgtc

SEQ ID NO: 2036441 - DNA, 15 bp, Homo sapiens
tttgtagttttgtct

SEQ ID NO: 2036442 - DNA, 15 bp, Homo sapiens
ttgtagttttgtctg

SEQ ID NO: 2036443 - DNA, 15 bp, Homo sapiens
tgtagttttgtctgt

SEQ ID NO: 2036444 - DNA, 15 bp, Homo sapiens
gtagttttgtctgtt

SEQ ID NO: 2036445 - DNA, 15 bp, Homo sapiens
tagttttgtctgttt

SEQ ID NO: 2036446 - DNA, 15 bp, Homo sapiens
agttttgtctgtttg

SEQ ID NO: 2036447 - DNA, 15 bp, Homo sapiens
gttttgtctgtttgt

SEQ ID NO: 2036448 - DNA, 15 bp, Homo sapiens
ttttgtctgtttgtt

SEQ ID NO: 2036449 - DNA, 15 bp, Homo sapiens
tttgtctgtttgttg

SEQ ID NO: 2036450 - DNA, 15 bp, Homo sapiens
ttgtctgtttgttgt

SEQ ID NO: 2036451 - DNA, 15 bp, Homo sapiens
tgtctgtttgttgtc

SEQ ID NO: 2036452 - DNA, 15 bp, Homo sapiens
gtctgtttgttgtcc

SEQ ID NO: 2036453 - DNA, 15 bp, Homo sapiens
tctgtttgttgtcca

SEQ ID NO: 2036454 - DNA, 15 bp, Homo sapiens
ctgtttgttgtccac

SEQ ID NO: 2036455 - DNA, 15 bp, Homo sapiens
tgtttgttgtccacc

SEQ ID NO: 2036456 - DNA, 15 bp, Homo sapiens
gtttgttgtccacca

SEQ ID NO: 2036457 - DNA, 15 bp, Homo sapiens
tttgttgtccaccaa

SEQ ID NO: 2036458 - DNA, 15 bp, Homo sapiens
ttgttgtccaccaaa

SEQ ID NO: 2036459 - DNA, 15 bp, Homo sapiens
tgttgtccaccaaag

SEQ ID NO: 2036460 - DNA, 15 bp, Homo sapiens
gttgtccaccaaagg

SEQ ID NO: 2036461 - DNA, 15 bp, Homo sapiens
ttgtccaccaaaggc

SEQ ID NO: 2036462 - DNA, 15 bp, Homo sapiens
tgtccaccaaaggcc

SEQ ID NO: 2036463 - DNA, 15 bp, Homo sapiens
gtccaccaaaggcca

SEQ ID NO: 2036464 - DNA, 15 bp, Homo sapiens
tccaccaaaggccag

SEQ ID NO: 2036465 - DNA, 15 bp, Homo sapiens
ccaccaaaggccaga

SEQ ID NO: 2036466 - DNA, 15 bp, Homo sapiens
caccaaaggccagaa

SEQ ID NO: 2036467 - DNA, 15 bp, Homo sapiens
accaaaggccagaaa

SEQ ID NO: 2036468 - DNA, 15 bp, Homo sapiens
ccaaaggccagaaag

SEQ ID NO: 2036469 - DNA, 15 bp, Homo sapiens
caaaggccagaaagg

SEQ ID NO: 2036470 - DNA, 15 bp, Homo sapiens
aaaggccagaaagga

SEQ ID NO: 2036471 - DNA, 15 bp, Homo sapiens
aaggccagaaaggag

SEQ ID NO: 2036472 - DNA, 15 bp, Homo sapiens
aggccagaaaggaga

SEQ ID NO: 2036473 - DNA, 15 bp, Homo sapiens
ggccagaaaggagag

SEQ ID NO: 2036474 - DNA, 15 bp, Homo sapiens
gccagaaaggagagc

SEQ ID NO: 2036475 - DNA, 15 bp, Homo sapiens
ccagaaaggagagcc

SEQ ID NO: 2036476 - DNA, 15 bp, Homo sapiens
cagaaaggagagcca

SEQ ID NO: 2036477 - DNA, 15 bp, Homo sapiens
agaaaggagagccaa

SEQ ID NO: 2036478 - DNA, 15 bp, Homo sapiens
gaaaggagagccaat

SEQ ID NO: 2036479 - DNA, 15 bp, Homo sapiens
aaaggagagccaatg

SEQ ID NO: 2036480 - DNA, 15 bp, Homo sapiens
aaggagagccaatgc

SEQ ID NO: 2036481 - DNA, 15 bp, Homo sapiens
aggagagccaatgct

SEQ ID NO: 2036482 - DNA, 15 bp, Homo sapiens
ggagagccaatgctt

SEQ ID NO: 2036483 - DNA, 15 bp, Homo sapiens
gagagccaatgcttt

SEQ ID NO: 2036484 - DNA, 15 bp, Homo sapiens
agagccaatgcttta

SEQ ID NO: 2036485 - DNA, 15 bp, Homo sapiens
gagccaatgctttag

SEQ ID NO: 2036486 - DNA, 15 bp, Homo sapiens
agccaatgctttagg

SEQ ID NO: 2036487 - DNA, 15 bp, Homo sapiens
gccaatgctttaggg

SEQ ID NO: 2036488 - DNA, 15 bp, Homo sapiens
ccaatgctttagggg

SEQ ID NO: 2036489 - DNA, 15 bp, Homo sapiens
caatgctttaggggc

SEQ ID NO: 2036490 - DNA, 15 bp, Homo sapiens
aatgctttaggggca

SEQ ID NO: 2036491 - DNA, 15 bp, Homo sapiens
atgctttaggggcaa

SEQ ID NO: 2036492 - DNA, 15 bp, Homo sapiens
tgctttaggggcaaa

SEQ ID NO: 2036493 - DNA, 15 bp, Homo sapiens
gctttaggggcaaaa

SEQ ID NO: 2036494 - DNA, 15 bp, Homo sapiens
ctttaggggcaaaag

SEQ ID NO: 2036495 - DNA, 15 bp, Homo sapiens
tttaggggcaaaaga

SEQ ID NO: 2036496 - DNA, 15 bp, Homo sapiens
ttaggggcaaaagag

SEQ ID NO: 2036497 - DNA, 15 bp, Homo sapiens
taggggcaaaagaga

SEQ ID NO: 2036498 - DNA, 15 bp, Homo sapiens
aggggcaaaagagat

SEQ ID NO: 2036499 - DNA, 15 bp, Homo sapiens
ggggcaaaagagata

SEQ ID NO: 2036500 - DNA, 15 bp, Homo sapiens
gggcaaaagagatac

SEQ ID NO: 2036501 - DNA, 15 bp, Homo sapiens
ggcaaaagagatacc

SEQ ID NO: 2036502 - DNA, 15 bp, Homo sapiens
gcaaaagagatacca

SEQ ID NO: 2036503 - DNA, 15 bp, Homo sapiens
caaaagagataccag

SEQ ID NO: 2036504 - DNA, 15 bp, Homo sapiens
aaaagagataccaga

SEQ ID NO: 2036505 - DNA, 15 bp, Homo sapiens
aaagagataccagaa

SEQ ID NO: 2036506 - DNA, 15 bp, Homo sapiens
aagagataccagaat

SEQ ID NO: 2036507 - DNA, 15 bp, Homo sapiens
agagataccagaata

SEQ ID NO: 2036508 - DNA, 15 bp, Homo sapiens
gagataccagaatac

SEQ ID NO: 2036509 - DNA, 15 bp, Homo sapiens
agataccagaataca

SEQ ID NO: 2036510 - DNA, 15 bp, Homo sapiens
gataccagaatacaa

SEQ ID NO: 2036511 - DNA, 15 bp, Homo sapiens
ataccagaatacaaa

SEQ ID NO: 2036512 - DNA, 15 bp, Homo sapiens
taccagaatacaaaa

SEQ ID NO: 2036513 - DNA, 15 bp, Homo sapiens
accagaatacaaaac

SEQ ID NO: 2036514 - DNA, 15 bp, Homo sapiens
ccagaatacaaaact

SEQ ID NO: 2036515 - DNA, 15 bp, Homo sapiens
cagaatacaaaactt

SEQ ID NO: 2036516 - DNA, 15 bp, Homo sapiens
agaatacaaaacttt

SEQ ID NO: 2036517 - DNA, 15 bp, Homo sapiens
gaatacaaaacttta

SEQ ID NO: 2036518 - DNA, 15 bp, Homo sapiens
aatacaaaactttaa

SEQ ID NO: 2036519 - DNA, 15 bp, Homo sapiens
atacaaaactttaaa

SEQ ID NO: 2036520 - DNA, 15 bp, Homo sapiens
tacaaaactttaaag

SEQ ID NO: 2036521 - DNA, 15 bp, Homo sapiens
acaaaactttaaagg

SEQ ID NO: 2036522 - DNA, 15 bp, Homo sapiens
caaaactttaaaggg

SEQ ID NO: 2036523 - DNA, 15 bp, Homo sapiens
aaaactttaaagggg

SEQ ID NO: 2036524 - DNA, 15 bp, Homo sapiens
aaactttaaaggggt

SEQ ID NO: 2036525 - DNA, 15 bp, Homo sapiens
aactttaaaggggtt

SEQ ID NO: 2036526 - DNA, 15 bp, Homo sapiens
actttaaaggggttt

SEQ ID NO: 2036527 - DNA, 15 bp, Homo sapiens
ctttaaaggggtttt

SEQ ID NO: 2036528 - DNA, 15 bp, Homo sapiens
tttaaaggggttttg

SEQ ID NO: 2036529 - DNA, 15 bp, Homo sapiens
ttaaaggggttttga

SEQ ID NO: 2036530 - DNA, 15 bp, Homo sapiens
taaaggggttttgat

SEQ ID NO: 2036531 - DNA, 15 bp, Homo sapiens
aaaggggttttgatg

SEQ ID NO: 2036532 - DNA, 15 bp, Homo sapiens
aaggggttttgatga

SEQ ID NO: 2036533 - DNA, 15 bp, Homo sapiens
aggggttttgatgaa

SEQ ID NO: 2036534 - DNA, 15 bp, Homo sapiens
ggggttttgatgaaa

SEQ ID NO: 2036535 - DNA, 15 bp, Homo sapiens
gggttttgatgaaaa

SEQ ID NO: 2036536 - DNA, 15 bp, Homo sapiens
ggttttgatgaaaag

SEQ ID NO: 2036537 - DNA, 15 bp, Homo sapiens
gttttgatgaaaaga

SEQ ID NO: 2036538 - DNA, 15 bp, Homo sapiens
ttttgatgaaaagaa

SEQ ID NO: 2036539 - DNA, 15 bp, Homo sapiens
tttgatgaaaagaag

SEQ ID NO: 2036540 - DNA, 15 bp, Homo sapiens
ttgatgaaaagaagt

SEQ ID NO: 2036541 - DNA, 15 bp, Homo sapiens
tgatgaaaagaagtg

SEQ ID NO: 2036542 - DNA, 15 bp, Homo sapiens
gatgaaaagaagtgc

SEQ ID NO: 2036543 - DNA, 15 bp, Homo sapiens
atgaaaagaagtgca

SEQ ID NO: 2036544 - DNA, 15 bp, Homo sapiens
tgaaaagaagtgcag

SEQ ID NO: 2036545 - DNA, 15 bp, Homo sapiens
gaaaagaagtgcagc

SEQ ID NO: 2036546 - DNA, 15 bp, Homo sapiens
aaaagaagtgcagca

SEQ ID NO: 2036547 - DNA, 15 bp, Homo sapiens
aaagaagtgcagcac

SEQ ID NO: 2036548 - DNA, 15 bp, Homo sapiens
aagaagtgcagcacc

SEQ ID NO: 2036549 - DNA, 15 bp, Homo sapiens
agaagtgcagcacca

SEQ ID NO: 2036550 - DNA, 15 bp, Homo sapiens
gaagtgcagcaccaa

SEQ ID NO: 2036551 - DNA, 15 bp, Homo sapiens
aagtgcagcaccaag

SEQ ID NO: 2036552 - DNA, 15 bp, Homo sapiens
agtgcagcaccaagg

SEQ ID NO: 2036553 - DNA, 15 bp, Homo sapiens
gtgcagcaccaaggc

SEQ ID NO: 2036554 - DNA, 15 bp, Homo sapiens
tgcagcaccaaggcc

SEQ ID NO: 2036555 - DNA, 15 bp, Homo sapiens
gcagcaccaaggcct

SEQ ID NO: 2036556 - DNA, 15 bp, Homo sapiens
cagcaccaaggcctt

SEQ ID NO: 2036557 - DNA, 15 bp, Homo sapiens
agcaccaaggccttc

SEQ ID NO: 2036558 - DNA, 15 bp, Homo sapiens
gcaccaaggccttct

SEQ ID NO: 2036559 - DNA, 15 bp, Homo sapiens
caccaaggccttctc

SEQ ID NO: 2036560 - DNA, 15 bp, Homo sapiens
accaaggccttctca

SEQ ID NO: 2036561 - DNA, 15 bp, Homo sapiens
ccaaggccttctcac

SEQ ID NO: 2036562 - DNA, 15 bp, Homo sapiens
caaggccttctcact

SEQ ID NO: 2036563 - DNA, 15 bp, Homo sapiens
aaggccttctcacta

SEQ ID NO: 2036564 - DNA, 15 bp, Homo sapiens
aggccttctcactaa

SEQ ID NO: 2036565 - DNA, 15 bp, Homo sapiens
ggccttctcactaac

SEQ ID NO: 2036566 - DNA, 15 bp, Homo sapiens
gccttctcactaact

SEQ ID NO: 2036567 - DNA, 15 bp, Homo sapiens
ccttctcactaactt

SEQ ID NO: 2036568 - DNA, 15 bp, Homo sapiens
cttctcactaactta

SEQ ID NO: 2036569 - DNA, 15 bp, Homo sapiens
ttctcactaacttaa

SEQ ID NO: 2036570 - DNA, 15 bp, Homo sapiens
tctcactaacttaaa

SEQ ID NO: 2036571 - DNA, 15 bp, Homo sapiens
ctcactaacttaaaa

SEQ ID NO: 2036572 - DNA, 15 bp, Homo sapiens
tcactaacttaaaat

SEQ ID NO: 2036573 - DNA, 15 bp, Homo sapiens
cactaacttaaaata

SEQ ID NO: 2036574 - DNA, 15 bp, Homo sapiens
actaacttaaaatat

SEQ ID NO: 2036575 - DNA, 15 bp, Homo sapiens
ctaacttaaaatatg

SEQ ID NO: 2036576 - DNA, 15 bp, Homo sapiens
taacttaaaatatgg

SEQ ID NO: 2036577 - DNA, 15 bp, Homo sapiens
aacttaaaatatggc

SEQ ID NO: 2036578 - DNA, 15 bp, Homo sapiens
acttaaaatatggca

SEQ ID NO: 2036579 - DNA, 15 bp, Homo sapiens
cttaaaatatggcat

SEQ ID NO: 2036580 - DNA, 15 bp, Homo sapiens
ttaaaatatggcata

SEQ ID NO: 2036581 - DNA, 15 bp, Homo sapiens
taaaatatggcatat

SEQ ID NO: 2036582 - DNA, 15 bp, Homo sapiens
aaaatatggcatata

SEQ ID NO: 2036583 - DNA, 15 bp, Homo sapiens
aaatatggcatatag

SEQ ID NO: 2036584 - DNA, 15 bp, Homo sapiens
aatatggcatatagc

SEQ ID NO: 2036585 - DNA, 15 bp, Homo sapiens
atatggcatatagca

SEQ ID NO: 2036586 - DNA, 15 bp, Homo sapiens
tatggcatatagcaa

SEQ ID NO: 2036587 - DNA, 15 bp, Homo sapiens
atggcatatagcaat

SEQ ID NO: 2036588 - DNA, 15 bp, Homo sapiens
tggcatatagcaata

SEQ ID NO: 2036589 - DNA, 15 bp, Homo sapiens
ggcatatagcaatac

SEQ ID NO: 2036590 - DNA, 15 bp, Homo sapiens
gcatatagcaataca

SEQ ID NO: 2036591 - DNA, 15 bp, Homo sapiens
catatagcaatacag

SEQ ID NO: 2036592 - DNA, 15 bp, Homo sapiens
atatagcaatacagg

SEQ ID NO: 2036593 - DNA, 15 bp, Homo sapiens
tatagcaatacagga

SEQ ID NO: 2036594 - DNA, 15 bp, Homo sapiens
atagcaatacaggat

SEQ ID NO: 2036595 - DNA, 15 bp, Homo sapiens
tagcaatacaggatg

SEQ ID NO: 2036596 - DNA, 15 bp, Homo sapiens
agcaatacaggatgt

SEQ ID NO: 2036597 - DNA, 15 bp, Homo sapiens
gcaatacaggatgtg

SEQ ID NO: 2036598 - DNA, 15 bp, Homo sapiens
caatacaggatgtgt

SEQ ID NO: 2036599 - DNA, 15 bp, Homo sapiens
aatacaggatgtgtt

SEQ ID NO: 2036600 - DNA, 15 bp, Homo sapiens
atacaggatgtgttc

SEQ ID NO: 2036601 - DNA, 15 bp, Homo sapiens
tacaggatgtgttct

SEQ ID NO: 2036602 - DNA, 15 bp, Homo sapiens
acaggatgtgttctg

SEQ ID NO: 2036603 - DNA, 15 bp, Homo sapiens
caggatgtgttctgt

SEQ ID NO: 2036604 - DNA, 15 bp, Homo sapiens
aggatgtgttctgtc

SEQ ID NO: 2036605 - DNA, 15 bp, Homo sapiens
ggatgtgttctgtct

SEQ ID NO: 2036606 - DNA, 15 bp, Homo sapiens
gatgtgttctgtctg

SEQ ID NO: 2036607 - DNA, 15 bp, Homo sapiens
atgtgttctgtctgc

SEQ ID NO: 2036608 - DNA, 15 bp, Homo sapiens
tgtgttctgtctgca

SEQ ID NO: 2036609 - DNA, 15 bp, Homo sapiens
gtgttctgtctgcat

SEQ ID NO: 2036610 - DNA, 15 bp, Homo sapiens
tgttctgtctgcatt

SEQ ID NO: 2036611 - DNA, 15 bp, Homo sapiens
gttctgtctgcattg

SEQ ID NO: 2036612 - DNA, 15 bp, Homo sapiens
ttctgtctgcattgg

SEQ ID NO: 2036613 - DNA, 15 bp, Homo sapiens
tctgtctgcattgga

SEQ ID NO: 2036614 - DNA, 15 bp, Homo sapiens
ctgtctgcattggag

SEQ ID NO: 2036615 - DNA, 15 bp, Homo sapiens
tgtctgcattggagt

SEQ ID NO: 2036616 - DNA, 15 bp, Homo sapiens
gtctgcattggagtg

SEQ ID NO: 2036617 - DNA, 15 bp, Homo sapiens
tctgcattggagtgg

SEQ ID NO: 2036618 - DNA, 15 bp, Homo sapiens
ctgcattggagtggt

SEQ ID NO: 2036619 - DNA, 15 bp, Homo sapiens
tgcattggagtggtc

SEQ ID NO: 2036620 - DNA, 15 bp, Homo sapiens
gcattggagtggtct

SEQ ID NO: 2036621 - DNA, 15 bp, Homo sapiens
cattggagtggtcta

SEQ ID NO: 2036622 - DNA, 15 bp, Homo sapiens
attggagtggtctat

SEQ ID NO: 2036623 - DNA, 15 bp, Homo sapiens
ttggagtggtctatc

SEQ ID NO: 2036624 - DNA, 15 bp, Homo sapiens
tggagtggtctatca

SEQ ID NO: 2036625 - DNA, 15 bp, Homo sapiens
ggagtggtctatcag

SEQ ID NO: 2036626 - DNA, 15 bp, Homo sapiens
gagtggtctatcaga

SEQ ID NO: 2036627 - DNA, 15 bp, Homo sapiens
agtggtctatcagat

SEQ ID NO: 2036628 - DNA, 15 bp, Homo sapiens
gtggtctatcagata

SEQ ID NO: 2036629 - DNA, 15 bp, Homo sapiens
tggtctatcagataa

SEQ ID NO: 2036630 - DNA, 15 bp, Homo sapiens
ggtctatcagataat

SEQ ID NO: 2036631 - DNA, 15 bp, Homo sapiens
gtctatcagataatc

SEQ ID NO: 2036632 - DNA, 15 bp, Homo sapiens
tctatcagataatct

SEQ ID NO: 2036633 - DNA, 15 bp, Homo sapiens
ctatcagataatctg

SEQ ID NO: 2036634 - DNA, 15 bp, Homo sapiens
tatcagataatctga

SEQ ID NO: 2036635 - DNA, 15 bp, Homo sapiens
atcagataatctgag

SEQ ID NO: 2036636 - DNA, 15 bp, Homo sapiens
tcagataatctgaga

SEQ ID NO: 2036637 - DNA, 15 bp, Homo sapiens
cagataatctgagag

SEQ ID NO: 2036638 - DNA, 15 bp, Homo sapiens
agataatctgagagt

SEQ ID NO: 2036639 - DNA, 15 bp, Homo sapiens
gataatctgagagtt

SEQ ID NO: 2036640 - DNA, 15 bp, Homo sapiens
ataatctgagagttt

SEQ ID NO: 2036641 - DNA, 15 bp, Homo sapiens
taatctgagagtttt

SEQ ID NO: 2036642 - DNA, 15 bp, Homo sapiens
aatctgagagttttt

SEQ ID NO: 2036643 - DNA, 15 bp, Homo sapiens
atctgagagtttttc

SEQ ID NO: 2036644 - DNA, 15 bp, Homo sapiens
tctgagagtttttcc

SEQ ID NO: 2036645 - DNA, 15 bp, Homo sapiens
ctgagagtttttcct

SEQ ID NO: 2036646 - DNA, 15 bp, Homo sapiens
tgagagtttttccta

SEQ ID NO: 2036647 - DNA, 15 bp, Homo sapiens
gagagtttttcctat

SEQ ID NO: 2036648 - DNA, 15 bp, Homo sapiens
agagtttttcctatg

SEQ ID NO: 2036649 - DNA, 15 bp, Homo sapiens
gagtttttcctatgg

SEQ ID NO: 2036650 - DNA, 15 bp, Homo sapiens
agtttttcctatggg

SEQ ID NO: 2036651 - DNA, 15 bp, Homo sapiens
gtttttcctatggga

SEQ ID NO: 2036652 - DNA, 15 bp, Homo sapiens
tttttcctatgggat

SEQ ID NO: 2036653 - DNA, 15 bp, Homo sapiens
ttttcctatgggata

SEQ ID NO: 2036654 - DNA, 15 bp, Homo sapiens
tttcctatgggatat

SEQ ID NO: 2036655 - DNA, 15 bp, Homo sapiens
ttcctatgggatatt

SEQ ID NO: 2036656 - DNA, 15 bp, Homo sapiens
tcctatgggatattg

SEQ ID NO: 2036657 - DNA, 15 bp, Homo sapiens
cctatgggatattga

SEQ ID NO: 2036658 - DNA, 15 bp, Homo sapiens
ctatgggatattgag

SEQ ID NO: 2036659 - DNA, 15 bp, Homo sapiens
tatgggatattgagg

SEQ ID NO: 2036660 - DNA, 15 bp, Homo sapiens
atgggatattgaggt

SEQ ID NO: 2036661 - DNA, 15 bp, Homo sapiens
tgggatattgaggtg

SEQ ID NO: 2036662 - DNA, 15 bp, Homo sapiens
gggatattgaggtga

SEQ ID NO: 2036663 - DNA, 15 bp, Homo sapiens
ggatattgaggtgaa

SEQ ID NO: 2036664 - DNA, 15 bp, Homo sapiens
gatattgaggtgaaa

SEQ ID NO: 2036665 - DNA, 15 bp, Homo sapiens
atattgaggtgaaat

SEQ ID NO: 2036666 - DNA, 15 bp, Homo sapiens
tattgaggtgaaatc

SEQ ID NO: 2036667 - DNA, 15 bp, Homo sapiens
attgaggtgaaatcc

SEQ ID NO: 2036668 - DNA, 15 bp, Homo sapiens
ttgaggtgaaatcct

SEQ ID NO: 2036669 - DNA, 15 bp, Homo sapiens
tgaggtgaaatcctt

SEQ ID NO: 2036670 - DNA, 15 bp, Homo sapiens
gaggtgaaatccttc

SEQ ID NO: 2036671 - DNA, 15 bp, Homo sapiens
aggtgaaatccttca

SEQ ID NO: 2036672 - DNA, 15 bp, Homo sapiens
ggtgaaatccttcac

SEQ ID NO: 2036673 - DNA, 15 bp, Homo sapiens
gtgaaatccttcacc

SEQ ID NO: 2036674 - DNA, 15 bp, Homo sapiens
tgaaatccttcacca

SEQ ID NO: 2036675 - DNA, 15 bp, Homo sapiens
gaaatccttcaccag

SEQ ID NO: 2036676 - DNA, 15 bp, Homo sapiens
aaatccttcaccagt

SEQ ID NO: 2036677 - DNA, 15 bp, Homo sapiens
aatccttcaccagtt

SEQ ID NO: 2036678 - DNA, 15 bp, Homo sapiens
atccttcaccagttc

SEQ ID NO: 2036679 - DNA, 15 bp, Homo sapiens
tccttcaccagttcc

SEQ ID NO: 2036680 - DNA, 15 bp, Homo sapiens
ccttcaccagttcct

SEQ ID NO: 2036681 - DNA, 15 bp, Homo sapiens
cttcaccagttccta

SEQ ID NO: 2036682 - DNA, 15 bp, Homo sapiens
ttcaccagttcctag

SEQ ID NO: 2036683 - DNA, 15 bp, Homo sapiens
tcaccagttcctaga

SEQ ID NO: 2036684 - DNA, 15 bp, Homo sapiens
caccagttcctagag

SEQ ID NO: 2036685 - DNA, 15 bp, Homo sapiens
accagttcctagaga

SEQ ID NO: 2036686 - DNA, 15 bp, Homo sapiens
ccagttcctagagag

SEQ ID NO: 2036687 - DNA, 15 bp, Homo sapiens
cagttcctagagaga

SEQ ID NO: 2036688 - DNA, 15 bp, Homo sapiens
agttcctagagagat

SEQ ID NO: 2036689 - DNA, 15 bp, Homo sapiens
gttcctagagagatt

SEQ ID NO: 2036690 - DNA, 15 bp, Homo sapiens
ttcctagagagattt

SEQ ID NO: 2036691 - DNA, 15 bp, Homo sapiens
tcctagagagatttc

SEQ ID NO: 2036692 - DNA, 15 bp, Homo sapiens
cctagagagatttct

SEQ ID NO: 2036693 - DNA, 15 bp, Homo sapiens
ctagagagatttcta

SEQ ID NO: 2036694 - DNA, 15 bp, Homo sapiens
tagagagatttctag

SEQ ID NO: 2036695 - DNA, 15 bp, Homo sapiens
agagagatttctaga

SEQ ID NO: 2036696 - DNA, 15 bp, Homo sapiens
gagagatttctagat

SEQ ID NO: 2036697 - DNA, 15 bp, Homo sapiens
agagatttctagatt

SEQ ID NO: 2036698 - DNA, 15 bp, Homo sapiens
gagatttctagattt

SEQ ID NO: 2036699 - DNA, 15 bp, Homo sapiens
agatttctagattta

SEQ ID NO: 2036700 - DNA, 15 bp, Homo sapiens
gatttctagatttaa

SEQ ID NO: 2036701 - DNA, 15 bp, Homo sapiens
atttctagatttaat

SEQ ID NO: 2036702 - DNA, 15 bp, Homo sapiens
tttctagatttaatt

SEQ ID NO: 2036703 - DNA, 15 bp, Homo sapiens
ttctagatttaattt

SEQ ID NO: 2036704 - DNA, 15 bp, Homo sapiens
tctagatttaatttt

SEQ ID NO: 2036705 - DNA, 15 bp, Homo sapiens
ctagatttaatttta

SEQ ID NO: 2036706 - DNA, 15 bp, Homo sapiens
tagatttaattttag

SEQ ID NO: 2036707 - DNA, 15 bp, Homo sapiens
agatttaattttaga

SEQ ID NO: 2036708 - DNA, 15 bp, Homo sapiens
gatttaattttagag

SEQ ID NO: 2036709 - DNA, 15 bp, Homo sapiens
atttaattttagagg

SEQ ID NO: 2036710 - DNA, 15 bp, Homo sapiens
tttaattttagagga

SEQ ID NO: 2036711 - DNA, 15 bp, Homo sapiens
ttaattttagaggat

SEQ ID NO: 2036712 - DNA, 15 bp, Homo sapiens
taattttagaggata

SEQ ID NO: 2036713 - DNA, 15 bp, Homo sapiens
aattttagaggataa

SEQ ID NO: 2036714 - DNA, 15 bp, Homo sapiens
attttagaggataaa

SEQ ID NO: 2036715 - DNA, 15 bp, Homo sapiens
ttttagaggataaaa

SEQ ID NO: 2036716 - DNA, 15 bp, Homo sapiens
tttagaggataaaaa

SEQ ID NO: 2036717 - DNA, 15 bp, Homo sapiens
ttagaggataaaaag

SEQ ID NO: 2036718 - DNA, 15 bp, Homo sapiens
tagaggataaaaaga

SEQ ID NO: 2036719 - DNA, 15 bp, Homo sapiens
agaggataaaaagaa

SEQ ID NO: 2036720 - DNA, 15 bp, Homo sapiens
gaggataaaaagaaa

SEQ ID NO: 2036721 - DNA, 15 bp, Homo sapiens
aggataaaaagaaag

SEQ ID NO: 2036722 - DNA, 15 bp, Homo sapiens
ggataaaaagaaaga

SEQ ID NO: 2036723 - DNA, 15 bp, Homo sapiens
gataaaaagaaagaa

SEQ ID NO: 2036724 - DNA, 15 bp, Homo sapiens
ataaaaagaaagaat

SEQ ID NO: 2036725 - DNA, 15 bp, Homo sapiens
taaaaagaaagaatg

SEQ ID NO: 2036726 - DNA, 15 bp, Homo sapiens
aaaaagaaagaatgc

SEQ ID NO: 2036727 - DNA, 15 bp, Homo sapiens
aaaagaaagaatgct

SEQ ID NO: 2036728 - DNA, 15 bp, Homo sapiens
aaagaaagaatgctg

SEQ ID NO: 2036729 - DNA, 15 bp, Homo sapiens
aagaaagaatgctgc

SEQ ID NO: 2036730 - DNA, 15 bp, Homo sapiens
agaaagaatgctgcc

SEQ ID NO: 2036731 - DNA, 15 bp, Homo sapiens
gaaagaatgctgcca

SEQ ID NO: 2036732 - DNA, 15 bp, Homo sapiens
aaagaatgctgccaa

SEQ ID NO: 2036733 - DNA, 15 bp, Homo sapiens
aagaatgctgccaaa

SEQ ID NO: 2036734 - DNA, 15 bp, Homo sapiens
agaatgctgccaaaa

SEQ ID NO: 2036735 - DNA, 15 bp, Homo sapiens
gaatgctgccaaaat

SEQ ID NO: 2036736 - DNA, 15 bp, Homo sapiens
aatgctgccaaaatt

SEQ ID NO: 2036737 - DNA, 15 bp, Homo sapiens
atgctgccaaaattc

SEQ ID NO: 2036738 - DNA, 15 bp, Homo sapiens
tgctgccaaaattct

SEQ ID NO: 2036739 - DNA, 15 bp, Homo sapiens
gctgccaaaattctt

SEQ ID NO: 2036740 - DNA, 15 bp, Homo sapiens
ctgccaaaattctta

SEQ ID NO: 2036741 - DNA, 15 bp, Homo sapiens
tgccaaaattcttag

SEQ ID NO: 2036742 - DNA, 15 bp, Homo sapiens
gccaaaattcttaga

SEQ ID NO: 2036743 - DNA, 15 bp, Homo sapiens
ccaaaattcttagaa

SEQ ID NO: 2036744 - DNA, 15 bp, Homo sapiens
caaaattcttagaag

SEQ ID NO: 2036745 - DNA, 15 bp, Homo sapiens
aaaattcttagaagt

SEQ ID NO: 2036746 - DNA, 15 bp, Homo sapiens
aaattcttagaagtg

SEQ ID NO: 2036747 - DNA, 15 bp, Homo sapiens
aattcttagaagtga

SEQ ID NO: 2036748 - DNA, 15 bp, Homo sapiens
attcttagaagtgag

SEQ ID NO: 2036749 - DNA, 15 bp, Homo sapiens
ttcttagaagtgaga

SEQ ID NO: 2036750 - DNA, 15 bp, Homo sapiens
tcttagaagtgagaa

SEQ ID NO: 2036751 - DNA, 15 bp, Homo sapiens
cttagaagtgagaat

SEQ ID NO: 2036752 - DNA, 15 bp, Homo sapiens
ttagaagtgagaatt

SEQ ID NO: 2036753 - DNA, 15 bp, Homo sapiens
tagaagtgagaatta

SEQ ID NO: 2036754 - DNA, 15 bp, Homo sapiens
agaagtgagaattat

SEQ ID NO: 2036755 - DNA, 15 bp, Homo sapiens
gaagtgagaattatg

SEQ ID NO: 2036756 - DNA, 15 bp, Homo sapiens
aagtgagaattatgc

SEQ ID NO: 2036757 - DNA, 15 bp, Homo sapiens
agtgagaattatgct

SEQ ID NO: 2036758 - DNA, 15 bp, Homo sapiens
gtgagaattatgctg

SEQ ID NO: 2036759 - DNA, 15 bp, Homo sapiens
tgagaattatgctga

SEQ ID NO: 2036760 - DNA, 15 bp, Homo sapiens
gagaattatgctgag

SEQ ID NO: 2036761 - DNA, 15 bp, Homo sapiens
agaattatgctgaga

SEQ ID NO: 2036762 - DNA, 15 bp, Homo sapiens
gaattatgctgagaa

SEQ ID NO: 2036763 - DNA, 15 bp, Homo sapiens
aattatgctgagaaa

SEQ ID NO: 2036764 - DNA, 15 bp, Homo sapiens
attatgctgagaaac

SEQ ID NO: 2036765 - DNA, 15 bp, Homo sapiens
ttatgctgagaaact

SEQ ID NO: 2036766 - DNA, 15 bp, Homo sapiens
tatgctgagaaactt

SEQ ID NO: 2036767 - DNA, 15 bp, Homo sapiens
atgctgagaaactta

SEQ ID NO: 2036768 - DNA, 15 bp, Homo sapiens
tgctgagaaacttaa

SEQ ID NO: 2036769 - DNA, 15 bp, Homo sapiens
gctgagaaacttaaa

SEQ ID NO: 2036770 - DNA, 15 bp, Homo sapiens
ctgagaaacttaaat

SEQ ID NO: 2036771 - DNA, 15 bp, Homo sapiens
tgagaaacttaaatg

SEQ ID NO: 2036772 - DNA, 15 bp, Homo sapiens
gagaaacttaaatgc

SEQ ID NO: 2036773 - DNA, 15 bp, Homo sapiens
agaaacttaaatgcc

SEQ ID NO: 2036774 - DNA, 15 bp, Homo sapiens
gaaacttaaatgcca

SEQ ID NO: 2036775 - DNA, 15 bp, Homo sapiens
aaacttaaatgccag

SEQ ID NO: 2036776 - DNA, 15 bp, Homo sapiens
aacttaaatgccaga

SEQ ID NO: 2036777 - DNA, 15 bp, Homo sapiens
acttaaatgccagaa

SEQ ID NO: 2036778 - DNA, 15 bp, Homo sapiens
cttaaatgccagaac

SEQ ID NO: 2036779 - DNA, 15 bp, Homo sapiens
ttaaatgccagaact

SEQ ID NO: 2036780 - DNA, 15 bp, Homo sapiens
taaatgccagaacta

SEQ ID NO: 2036781 - DNA, 15 bp, Homo sapiens
aaatgccagaactag

SEQ ID NO: 2036782 - DNA, 15 bp, Homo sapiens
aatgccagaactaga

SEQ ID NO: 2036783 - DNA, 15 bp, Homo sapiens
atgccagaactagat

SEQ ID NO: 2036784 - DNA, 15 bp, Homo sapiens
tgccagaactagata

SEQ ID NO: 2036785 - DNA, 15 bp, Homo sapiens
gccagaactagatac

SEQ ID NO: 2036786 - DNA, 15 bp, Homo sapiens
ccagaactagatact

SEQ ID NO: 2036787 - DNA, 15 bp, Homo sapiens
cagaactagatacta

SEQ ID NO: 2036788 - DNA, 15 bp, Homo sapiens
agaactagatactat

SEQ ID NO: 2036789 - DNA, 15 bp, Homo sapiens
gaactagatactatg

SEQ ID NO: 2036790 - DNA, 15 bp, Homo sapiens
aactagatactatga

SEQ ID NO: 2036791 - DNA, 15 bp, Homo sapiens
actagatactatgat

SEQ ID NO: 2036792 - DNA, 15 bp, Homo sapiens
ctagatactatgatc

SEQ ID NO: 2036793 - DNA, 15 bp, Homo sapiens
tagatactatgatca

SEQ ID NO: 2036794 - DNA, 15 bp, Homo sapiens
agatactatgatcat

SEQ ID NO: 2036795 - DNA, 15 bp, Homo sapiens
gatactatgatcatt

SEQ ID NO: 2036796 - DNA, 15 bp, Homo sapiens
atactatgatcattc

SEQ ID NO: 2036797 - DNA, 15 bp, Homo sapiens
tactatgatcattct

SEQ ID NO: 2036798 - DNA, 15 bp, Homo sapiens
actatgatcattctg

SEQ ID NO: 2036799 - DNA, 15 bp, Homo sapiens
ctatgatcattctgt

SEQ ID NO: 2036800 - DNA, 15 bp, Homo sapiens
tatgatcattctgtt

SEQ ID NO: 2036801 - DNA, 15 bp, Homo sapiens
atgatcattctgttt

SEQ ID NO: 2036802 - DNA, 15 bp, Homo sapiens
tgatcattctgtttc

SEQ ID NO: 2036803 - DNA, 15 bp, Homo sapiens
gatcattctgtttca

SEQ ID NO: 2036804 - DNA, 15 bp, Homo sapiens
atcattctgtttcat

SEQ ID NO: 2036805 - DNA, 15 bp, Homo sapiens
tcattctgtttcata

SEQ ID NO: 2036806 - DNA, 15 bp, Homo sapiens
cattctgtttcatac

SEQ ID NO: 2036807 - DNA, 15 bp, Homo sapiens
attctgtttcatact

SEQ ID NO: 2036808 - DNA, 15 bp, Homo sapiens
ttctgtttcatacta

SEQ ID NO: 2036809 - DNA, 15 bp, Homo sapiens
tctgtttcatactac

SEQ ID NO: 2036810 - DNA, 15 bp, Homo sapiens
ctgtttcatactacc

SEQ ID NO: 2036811 - DNA, 15 bp, Homo sapiens
tgtttcatactacct

SEQ ID NO: 2036812 - DNA, 15 bp, Homo sapiens
gtttcatactacctt

SEQ ID NO: 2036813 - DNA, 15 bp, Homo sapiens
tttcatactaccttg

SEQ ID NO: 2036814 - DNA, 15 bp, Homo sapiens
ttcatactaccttgg

SEQ ID NO: 2036815 - DNA, 15 bp, Homo sapiens
tcatactaccttggc

SEQ ID NO: 2036816 - DNA, 15 bp, Homo sapiens
catactaccttggct

SEQ ID NO: 2036817 - DNA, 15 bp, Homo sapiens
atactaccttggctt

SEQ ID NO: 2036818 - DNA, 15 bp, Homo sapiens
tactaccttggcttt

SEQ ID NO: 2036819 - DNA, 15 bp, Homo sapiens
actaccttggctttt

SEQ ID NO: 2036820 - DNA, 15 bp, Homo sapiens
ctaccttggcttttt

SEQ ID NO: 2036821 - DNA, 15 bp, Homo sapiens
taccttggctttttc

SEQ ID NO: 2036822 - DNA, 15 bp, Homo sapiens
accttggctttttca

SEQ ID NO: 2036823 - DNA, 15 bp, Homo sapiens
ccttggctttttcaa

SEQ ID NO: 2036824 - DNA, 15 bp, Homo sapiens
cttggctttttcaag

SEQ ID NO: 2036825 - DNA, 15 bp, Homo sapiens
ttggctttttcaaga

SEQ ID NO: 2036826 - DNA, 15 bp, Homo sapiens
tggctttttcaagat

SEQ ID NO: 2036827 - DNA, 15 bp, Homo sapiens
ggctttttcaagata

SEQ ID NO: 2036828 - DNA, 15 bp, Homo sapiens
gctttttcaagatat

SEQ ID NO: 2036829 - DNA, 15 bp, Homo sapiens
ctttttcaagatata

SEQ ID NO: 2036830 - DNA, 15 bp, Homo sapiens
tttttcaagatatat

SEQ ID NO: 2036831 - DNA, 15 bp, Homo sapiens
ttttcaagatatatt

SEQ ID NO: 2036832 - DNA, 15 bp, Homo sapiens
tttcaagatatattt

SEQ ID NO: 2036833 - DNA, 15 bp, Homo sapiens
ttcaagatatatttt

SEQ ID NO: 2036834 - DNA, 15 bp, Homo sapiens
tcaagatatattttg

SEQ ID NO: 2036835 - DNA, 15 bp, Homo sapiens
caagatatattttgg

SEQ ID NO: 2036836 - DNA, 15 bp, Homo sapiens
aagatatattttggt

SEQ ID NO: 2036837 - DNA, 15 bp, Homo sapiens
agatatattttggtg

SEQ ID NO: 2036838 - DNA, 15 bp, Homo sapiens
gatatattttggtgt

SEQ ID NO: 2036839 - DNA, 15 bp, Homo sapiens
atatattttggtgta

SEQ ID NO: 2036840 - DNA, 15 bp, Homo sapiens
tatattttggtgtaa

SEQ ID NO: 2036841 - DNA, 15 bp, Homo sapiens
atattttggtgtaaa

SEQ ID NO: 2036842 - DNA, 15 bp, Homo sapiens
tattttggtgtaaac

SEQ ID NO: 2036843 - DNA, 15 bp, Homo sapiens
attttggtgtaaacg

SEQ ID NO: 2036844 - DNA, 15 bp, Homo sapiens
ttttggtgtaaacgt

SEQ ID NO: 2036845 - DNA, 15 bp, Homo sapiens
tttggtgtaaacgta

SEQ ID NO: 2036846 - DNA, 15 bp, Homo sapiens
ttggtgtaaacgtaa

SEQ ID NO: 2036847 - DNA, 15 bp, Homo sapiens
tggtgtaaacgtaat

SEQ ID NO: 2036848 - DNA, 15 bp, Homo sapiens
ggtgtaaacgtaatg

SEQ ID NO: 2036849 - DNA, 15 bp, Homo sapiens
gtgtaaacgtaatgc

SEQ ID NO: 2036850 - DNA, 15 bp, Homo sapiens
tgtaaacgtaatgca

SEQ ID NO: 2036851 - DNA, 15 bp, Homo sapiens
gtaaacgtaatgcat

SEQ ID NO: 2036852 - DNA, 15 bp, Homo sapiens
taaacgtaatgcatt

SEQ ID NO: 2036853 - DNA, 15 bp, Homo sapiens
aaacgtaatgcattt

SEQ ID NO: 2036854 - DNA, 15 bp, Homo sapiens
aacgtaatgcatttt

SEQ ID NO: 2036855 - DNA, 15 bp, Homo sapiens
acgtaatgcatttta

SEQ ID NO: 2036856 - DNA, 15 bp, Homo sapiens
cgtaatgcattttaa

SEQ ID NO: 2036857 - DNA, 15 bp, Homo sapiens
gtaatgcattttaat

SEQ ID NO: 2036858 - DNA, 15 bp, Homo sapiens
taatgcattttaatt

SEQ ID NO: 2036859 - DNA, 15 bp, Homo sapiens
aatgcattttaattg

SEQ ID NO: 2036860 - DNA, 15 bp, Homo sapiens
atgcattttaattgt

SEQ ID NO: 2036861 - DNA, 15 bp, Homo sapiens
tgcattttaattgtt

SEQ ID NO: 2036862 - DNA, 15 bp, Homo sapiens
gcattttaattgttt

SEQ ID NO: 2036863 - DNA, 15 bp, Homo sapiens
cattttaattgtttt

SEQ ID NO: 2036864 - DNA, 15 bp, Homo sapiens
attttaattgttttt

SEQ ID NO: 2036865 - DNA, 15 bp, Homo sapiens
ttttaattgtttttt

SEQ ID NO: 2036866 - DNA, 15 bp, Homo sapiens
tttaattgttttttt

SEQ ID NO: 2036867 - DNA, 15 bp, Homo sapiens
ttaattgtttttttt

SEQ ID NO: 2036868 - DNA, 15 bp, Homo sapiens
taattgttttttttt

SEQ ID NO: 2036869 - DNA, 15 bp, Homo sapiens
aattgttttttttta

SEQ ID NO: 2036870 - DNA, 15 bp, Homo sapiens
attgtttttttttaa

SEQ ID NO: 2036871 - DNA, 15 bp, Homo sapiens
ttgtttttttttaat

SEQ ID NO: 2036872 - DNA, 15 bp, Homo sapiens
tgtttttttttaatg

SEQ ID NO: 2036873 - DNA, 15 bp, Homo sapiens
gtttttttttaatga

SEQ ID NO: 2036874 - DNA, 15 bp, Homo sapiens
tttttttttaatgac

SEQ ID NO: 2036875 - DNA, 15 bp, Homo sapiens
ttttttttaatgact

SEQ ID NO: 2036876 - DNA, 15 bp, Homo sapiens
ttttttaatgacttt

SEQ ID NO: 2036877 - DNA, 15 bp, Homo sapiens
tttttaatgactttc

SEQ ID NO: 2036878 - DNA, 15 bp, Homo sapiens
ttttaatgactttcc

SEQ ID NO: 2036879 - DNA, 15 bp, Homo sapiens
tttaatgactttcca

SEQ ID NO: 2036880 - DNA, 15 bp, Homo sapiens
ttaatgactttccaa

SEQ ID NO: 2036881 - DNA, 15 bp, Homo sapiens
taatgactttccaag

SEQ ID NO: 2036882 - DNA, 15 bp, Homo sapiens
aatgactttccaaga

SEQ ID NO: 2036883 - DNA, 15 bp, Homo sapiens
atgactttccaagat

SEQ ID NO: 2036884 - DNA, 15 bp, Homo sapiens
tgactttccaagatt

SEQ ID NO: 2036885 - DNA, 15 bp, Homo sapiens
gactttccaagattt

SEQ ID NO: 2036886 - DNA, 15 bp, Homo sapiens
actttccaagatttt

SEQ ID NO: 2036887 - DNA, 15 bp, Homo sapiens
ctttccaagattttt

SEQ ID NO: 2036888 - DNA, 15 bp, Homo sapiens
tttccaagatttttg

SEQ ID NO: 2036889 - DNA, 15 bp, Homo sapiens
ttccaagatttttgt

SEQ ID NO: 2036890 - DNA, 15 bp, Homo sapiens
tccaagatttttgtt

SEQ ID NO: 2036891 - DNA, 15 bp, Homo sapiens
ccaagatttttgtta

SEQ ID NO: 2036892 - DNA, 15 bp, Homo sapiens
caagatttttgttag

SEQ ID NO: 2036893 - DNA, 15 bp, Homo sapiens
aagatttttgttagt

SEQ ID NO: 2036894 - DNA, 15 bp, Homo sapiens
agatttttgttagtt

SEQ ID NO: 2036895 - DNA, 15 bp, Homo sapiens
gatttttgttagttt

SEQ ID NO: 2036896 - DNA, 15 bp, Homo sapiens
atttttgttagtttc

SEQ ID NO: 2036897 - DNA, 15 bp, Homo sapiens
tttttgttagtttct

SEQ ID NO: 2036898 - DNA, 15 bp, Homo sapiens
ttttgttagtttctc

SEQ ID NO: 2036899 - DNA, 15 bp, Homo sapiens
tttgttagtttctcc

SEQ ID NO: 2036900 - DNA, 15 bp, Homo sapiens
ttgttagtttctcct

SEQ ID NO: 2036901 - DNA, 15 bp, Homo sapiens
tgttagtttctcctt

SEQ ID NO: 2036902 - DNA, 15 bp, Homo sapiens
gttagtttctccttt

SEQ ID NO: 2036903 - DNA, 15 bp, Homo sapiens
ttagtttctcctttg

SEQ ID NO: 2036904 - DNA, 15 bp, Homo sapiens
tagtttctcctttga

SEQ ID NO: 2036905 - DNA, 15 bp, Homo sapiens
agtttctcctttgat

SEQ ID NO: 2036906 - DNA, 15 bp, Homo sapiens
gtttctcctttgatc

SEQ ID NO: 2036907 - DNA, 15 bp, Homo sapiens
tttctcctttgatcc

SEQ ID NO: 2036908 - DNA, 15 bp, Homo sapiens
ttctcctttgatcct

SEQ ID NO: 2036909 - DNA, 15 bp, Homo sapiens
tctcctttgatcctt

SEQ ID NO: 2036910 - DNA, 15 bp, Homo sapiens
ctcctttgatcctta

SEQ ID NO: 2036911 - DNA, 15 bp, Homo sapiens
tcctttgatccttac

SEQ ID NO: 2036912 - DNA, 15 bp, Homo sapiens
cctttgatccttaca

SEQ ID NO: 2036913 - DNA, 15 bp, Homo sapiens
ctttgatccttacag

SEQ ID NO: 2036914 - DNA, 15 bp, Homo sapiens
tttgatccttacagt

SEQ ID NO: 2036915 - DNA, 15 bp, Homo sapiens
ttgatccttacagta

SEQ ID NO: 2036916 - DNA, 15 bp, Homo sapiens
tgatccttacagtaa

SEQ ID NO: 2036917 - DNA, 15 bp, Homo sapiens
gatccttacagtaaa

SEQ ID NO: 2036918 - DNA, 15 bp, Homo sapiens
atccttacagtaaaa

SEQ ID NO: 2036919 - DNA, 15 bp, Homo sapiens
tccttacagtaaaac

SEQ ID NO: 2036920 - DNA, 15 bp, Homo sapiens
ccttacagtaaaaca

SEQ ID NO: 2036921 - DNA, 15 bp, Homo sapiens
cttacagtaaaacat

SEQ ID NO: 2036922 - DNA, 15 bp, Homo sapiens
ttacagtaaaacatc

SEQ ID NO: 2036923 - DNA, 15 bp, Homo sapiens
tacagtaaaacatct

SEQ ID NO: 2036924 - DNA, 15 bp, Homo sapiens
acagtaaaacatctt

SEQ ID NO: 2036925 - DNA, 15 bp, Homo sapiens
cagtaaaacatcttt

SEQ ID NO: 2036926 - DNA, 15 bp, Homo sapiens
agtaaaacatctttg

SEQ ID NO: 2036927 - DNA, 15 bp, Homo sapiens
gtaaaacatctttgc

SEQ ID NO: 2036928 - DNA, 15 bp, Homo sapiens
taaaacatctttgct

SEQ ID NO: 2036929 - DNA, 15 bp, Homo sapiens
aaaacatctttgctg

SEQ ID NO: 2036930 - DNA, 15 bp, Homo sapiens
aaacatctttgctgt

SEQ ID NO: 2036931 - DNA, 15 bp, Homo sapiens
aacatctttgctgtg

SEQ ID NO: 2036932 - DNA, 15 bp, Homo sapiens
acatctttgctgtga

SEQ ID NO: 2036933 - DNA, 15 bp, Homo sapiens
catctttgctgtgaa

SEQ ID NO: 2036934 - DNA, 15 bp, Homo sapiens
atctttgctgtgaag

SEQ ID NO: 2036935 - DNA, 15 bp, Homo sapiens
tctttgctgtgaagt

SEQ ID NO: 2036936 - DNA, 15 bp, Homo sapiens
ctttgctgtgaagtt

SEQ ID NO: 2036937 - DNA, 15 bp, Homo sapiens
tttgctgtgaagttg

SEQ ID NO: 2036938 - DNA, 15 bp, Homo sapiens
ttgctgtgaagttga

SEQ ID NO: 2036939 - DNA, 15 bp, Homo sapiens
tgctgtgaagttgaa

SEQ ID NO: 2036940 - DNA, 15 bp, Homo sapiens
gctgtgaagttgaac

SEQ ID NO: 2036941 - DNA, 15 bp, Homo sapiens
ctgtgaagttgaact

SEQ ID NO: 2036942 - DNA, 15 bp, Homo sapiens
tgtgaagttgaactt

SEQ ID NO: 2036943 - DNA, 15 bp, Homo sapiens
gtgaagttgaactta

SEQ ID NO: 2036944 - DNA, 15 bp, Homo sapiens
tgaagttgaacttag

SEQ ID NO: 2036945 - DNA, 15 bp, Homo sapiens
gaagttgaacttagg

SEQ ID NO: 2036946 - DNA, 15 bp, Homo sapiens
aagttgaacttagga

SEQ ID NO: 2036947 - DNA, 15 bp, Homo sapiens
agttgaacttaggaa

SEQ ID NO: 2036948 - DNA, 15 bp, Homo sapiens
gttgaacttaggaat

SEQ ID NO: 2036949 - DNA, 15 bp, Homo sapiens
ttgaacttaggaatc

SEQ ID NO: 2036950 - DNA, 15 bp, Homo sapiens
tgaacttaggaatca

SEQ ID NO: 2036951 - DNA, 15 bp, Homo sapiens
gaacttaggaatcac

SEQ ID NO: 2036952 - DNA, 15 bp, Homo sapiens
aacttaggaatcaca

SEQ ID NO: 2036953 - DNA, 15 bp, Homo sapiens
acttaggaatcacag

SEQ ID NO: 2036954 - DNA, 15 bp, Homo sapiens
cttaggaatcacagt

SEQ ID NO: 2036955 - DNA, 15 bp, Homo sapiens
ttaggaatcacagtc

SEQ ID NO: 2036956 - DNA, 15 bp, Homo sapiens
taggaatcacagtca

SEQ ID NO: 2036957 - DNA, 15 bp, Homo sapiens
aggaatcacagtcac

SEQ ID NO: 2036958 - DNA, 15 bp, Homo sapiens
ggaatcacagtcaca

SEQ ID NO: 2036959 - DNA, 15 bp, Homo sapiens
gaatcacagtcacac

SEQ ID NO: 2036960 - DNA, 15 bp, Homo sapiens
aatcacagtcacacc

SEQ ID NO: 2036961 - DNA, 15 bp, Homo sapiens
atcacagtcacacca

SEQ ID NO: 2036962 - DNA, 15 bp, Homo sapiens
tcacagtcacaccac

SEQ ID NO: 2036963 - DNA, 15 bp, Homo sapiens
cacagtcacaccaca

SEQ ID NO: 2036964 - DNA, 15 bp, Homo sapiens
acagtcacaccacat

SEQ ID NO: 2036965 - DNA, 15 bp, Homo sapiens
cagtcacaccacatt

SEQ ID NO: 2036966 - DNA, 15 bp, Homo sapiens
agtcacaccacattt

SEQ ID NO: 2036967 - DNA, 15 bp, Homo sapiens
gtcacaccacattta

SEQ ID NO: 2036968 - DNA, 15 bp, Homo sapiens
tcacaccacatttac

SEQ ID NO: 2036969 - DNA, 15 bp, Homo sapiens
cacaccacatttacc

SEQ ID NO: 2036970 - DNA, 15 bp, Homo sapiens
acaccacatttacct

SEQ ID NO: 2036971 - DNA, 15 bp, Homo sapiens
caccacatttaccta

SEQ ID NO: 2036972 - DNA, 15 bp, Homo sapiens
accacatttacctat

SEQ ID NO: 2036973 - DNA, 15 bp, Homo sapiens
ccacatttacctatg

SEQ ID NO: 2036974 - DNA, 15 bp, Homo sapiens
cacatttacctatgt

SEQ ID NO: 2036975 - DNA, 15 bp, Homo sapiens
acatttacctatgtg

SEQ ID NO: 2036976 - DNA, 15 bp, Homo sapiens
catttacctatgtgt

SEQ ID NO: 2036977 - DNA, 15 bp, Homo sapiens
atttacctatgtgtg

SEQ ID NO: 2036978 - DNA, 15 bp, Homo sapiens
tttacctatgtgtga

SEQ ID NO: 2036979 - DNA, 15 bp, Homo sapiens
ttacctatgtgtgat

SEQ ID NO: 2036980 - DNA, 15 bp, Homo sapiens
tacctatgtgtgatt

SEQ ID NO: 2036981 - DNA, 15 bp, Homo sapiens
acctatgtgtgattt

SEQ ID NO: 2036982 - DNA, 15 bp, Homo sapiens
cctatgtgtgattta

SEQ ID NO: 2036983 - DNA, 15 bp, Homo sapiens
ctatgtgtgatttat

SEQ ID NO: 2036984 - DNA, 15 bp, Homo sapiens
tatgtgtgatttata

SEQ ID NO: 2036985 - DNA, 15 bp, Homo sapiens
atgtgtgatttatac

SEQ ID NO: 2036986 - DNA, 15 bp, Homo sapiens
tgtgtgatttataca

SEQ ID NO: 2036987 - DNA, 15 bp, Homo sapiens
gtgtgatttatacag

SEQ ID NO: 2036988 - DNA, 15 bp, Homo sapiens
tgtgatttatacagt

SEQ ID NO: 2036989 - DNA, 15 bp, Homo sapiens
gtgatttatacagtt

SEQ ID NO: 2036990 - DNA, 15 bp, Homo sapiens
tgatttatacagttg

SEQ ID NO: 2036991 - DNA, 15 bp, Homo sapiens
gatttatacagttgg

SEQ ID NO: 2036992 - DNA, 15 bp, Homo sapiens
atttatacagttggg

SEQ ID NO: 2036993 - DNA, 15 bp, Homo sapiens
tttatacagttgggt

SEQ ID NO: 2036994 - DNA, 15 bp, Homo sapiens
ttatacagttgggtc

SEQ ID NO: 2036995 - DNA, 15 bp, Homo sapiens
tatacagttgggtca

SEQ ID NO: 2036996 - DNA, 15 bp, Homo sapiens
atacagttgggtcac

SEQ ID NO: 2036997 - DNA, 15 bp, Homo sapiens
tacagttgggtcact

SEQ ID NO: 2036998 - DNA, 15 bp, Homo sapiens
acagttgggtcacta

SEQ ID NO: 2036999 - DNA, 15 bp, Homo sapiens
cagttgggtcactaa

SEQ ID NO: 2037000 - DNA, 15 bp, Homo sapiens
agttgggtcactaag

SEQ ID NO: 2037001 - DNA, 15 bp, Homo sapiens
gttgggtcactaagt

SEQ ID NO: 2037002 - DNA, 15 bp, Homo sapiens
ttgggtcactaagta

SEQ ID NO: 2037003 - DNA, 15 bp, Homo sapiens
tgggtcactaagtag

SEQ ID NO: 2037004 - DNA, 15 bp, Homo sapiens
gggtcactaagtagg

SEQ ID NO: 2037005 - DNA, 15 bp, Homo sapiens
ggtcactaagtagga

SEQ ID NO: 2037006 - DNA, 15 bp, Homo sapiens
gtcactaagtaggaa

SEQ ID NO: 2037007 - DNA, 15 bp, Homo sapiens
tcactaagtaggaag

SEQ ID NO: 2037008 - DNA, 15 bp, Homo sapiens
cactaagtaggaaga

SEQ ID NO: 2037009 - DNA, 15 bp, Homo sapiens
actaagtaggaagaa

SEQ ID NO: 2037010 - DNA, 15 bp, Homo sapiens
ctaagtaggaagaaa

SEQ ID NO: 2037011 - DNA, 15 bp, Homo sapiens
taagtaggaagaaaa

SEQ ID NO: 2037012 - DNA, 15 bp, Homo sapiens
aagtaggaagaaaac

SEQ ID NO: 2037013 - DNA, 15 bp, Homo sapiens
agtaggaagaaaaca

SEQ ID NO: 2037014 - DNA, 15 bp, Homo sapiens
gtaggaagaaaacat

SEQ ID NO: 2037015 - DNA, 15 bp, Homo sapiens
taggaagaaaacata

SEQ ID NO: 2037016 - DNA, 15 bp, Homo sapiens
aggaagaaaacatac

SEQ ID NO: 2037017 - DNA, 15 bp, Homo sapiens
ggaagaaaacataca

SEQ ID NO: 2037018 - DNA, 15 bp, Homo sapiens
gaagaaaacatacat

SEQ ID NO: 2037019 - DNA, 15 bp, Homo sapiens
aagaaaacatacatt

SEQ ID NO: 2037020 - DNA, 15 bp, Homo sapiens
agaaaacatacattc

SEQ ID NO: 2037021 - DNA, 15 bp, Homo sapiens
gaaaacatacattcc

SEQ ID NO: 2037022 - DNA, 15 bp, Homo sapiens
aaaacatacattcca

SEQ ID NO: 2037023 - DNA, 15 bp, Homo sapiens
aaacatacattccaa

SEQ ID NO: 2037024 - DNA, 15 bp, Homo sapiens
aacatacattccaaa

SEQ ID NO: 2037025 - DNA, 15 bp, Homo sapiens
acatacattccaaaa

SEQ ID NO: 2037026 - DNA, 15 bp, Homo sapiens
catacattccaaaaa

SEQ ID NO: 2037027 - DNA, 15 bp, Homo sapiens
atacattccaaaaac

SEQ ID NO: 2037028 - DNA, 15 bp, Homo sapiens
tacattccaaaaaca

SEQ ID NO: 2037029 - DNA, 15 bp, Homo sapiens
acattccaaaaacaa

SEQ ID NO: 2037030 - DNA, 15 bp, Homo sapiens
cattccaaaaacaag

SEQ ID NO: 2037031 - DNA, 15 bp, Homo sapiens
attccaaaaacaaga

SEQ ID NO: 2037032 - DNA, 15 bp, Homo sapiens
ttccaaaaacaagaa

SEQ ID NO: 2037033 - DNA, 15 bp, Homo sapiens
tccaaaaacaagaat

SEQ ID NO: 2037034 - DNA, 15 bp, Homo sapiens
ccaaaaacaagaatt

SEQ ID NO: 2037035 - DNA, 15 bp, Homo sapiens
caaaaacaagaattt

SEQ ID NO: 2037036 - DNA, 15 bp, Homo sapiens
aaaaacaagaattta

SEQ ID NO: 2037037 - DNA, 15 bp, Homo sapiens
aaaacaagaatttag

SEQ ID NO: 2037038 - DNA, 15 bp, Homo sapiens
aaacaagaatttaga

SEQ ID NO: 2037039 - DNA, 15 bp, Homo sapiens
aacaagaatttagat

SEQ ID NO: 2037040 - DNA, 15 bp, Homo sapiens
acaagaatttagatg

SEQ ID NO: 2037041 - DNA, 15 bp, Homo sapiens
caagaatttagatga

SEQ ID NO: 2037042 - DNA, 15 bp, Homo sapiens
aagaatttagatgaa

SEQ ID NO: 2037043 - DNA, 15 bp, Homo sapiens
agaatttagatgaaa

SEQ ID NO: 2037044 - DNA, 15 bp, Homo sapiens
gaatttagatgaaaa

SEQ ID NO: 2037045 - DNA, 15 bp, Homo sapiens
aatttagatgaaaaa

SEQ ID NO: 2037046 - DNA, 15 bp, Homo sapiens
atttagatgaaaaat

SEQ ID NO: 2037047 - DNA, 15 bp, Homo sapiens
tttagatgaaaaatg

SEQ ID NO: 2037048 - DNA, 15 bp, Homo sapiens
ttagatgaaaaatga

SEQ ID NO: 2037049 - DNA, 15 bp, Homo sapiens
tagatgaaaaatgaa

SEQ ID NO: 2037050 - DNA, 15 bp, Homo sapiens
agatgaaaaatgaat

SEQ ID NO: 2037051 - DNA, 15 bp, Homo sapiens
gatgaaaaatgaatt

SEQ ID NO: 2037052 - DNA, 15 bp, Homo sapiens
atgaaaaatgaattt

SEQ ID NO: 2037053 - DNA, 15 bp, Homo sapiens
tgaaaaatgaatttg

SEQ ID NO: 2037054 - DNA, 15 bp, Homo sapiens
gaaaaatgaatttga

SEQ ID NO: 2037055 - DNA, 15 bp, Homo sapiens
aaaaatgaatttgag

SEQ ID NO: 2037056 - DNA, 15 bp, Homo sapiens
aaaatgaatttgaga

SEQ ID NO: 2037057 - DNA, 15 bp, Homo sapiens
aaatgaatttgagaa

SEQ ID NO: 2037058 - DNA, 15 bp, Homo sapiens
aatgaatttgagaaa

SEQ ID NO: 2037059 - DNA, 15 bp, Homo sapiens
atgaatttgagaaaa

SEQ ID NO: 2037060 - DNA, 15 bp, Homo sapiens
tgaatttgagaaaag

SEQ ID NO: 2037061 - DNA, 15 bp, Homo sapiens
gaatttgagaaaaga

SEQ ID NO: 2037062 - DNA, 15 bp, Homo sapiens
aatttgagaaaagaa

SEQ ID NO: 2037063 - DNA, 15 bp, Homo sapiens
atttgagaaaagaag

SEQ ID NO: 2037064 - DNA, 15 bp, Homo sapiens
tttgagaaaagaagt

SEQ ID NO: 2037065 - DNA, 15 bp, Homo sapiens
ttgagaaaagaagta

SEQ ID NO: 2037066 - DNA, 15 bp, Homo sapiens
tgagaaaagaagtag

SEQ ID NO: 2037067 - DNA, 15 bp, Homo sapiens
gagaaaagaagtaga

SEQ ID NO: 2037068 - DNA, 15 bp, Homo sapiens
agaaaagaagtagaa

SEQ ID NO: 2037069 - DNA, 15 bp, Homo sapiens
gaaaagaagtagaat

SEQ ID NO: 2037070 - DNA, 15 bp, Homo sapiens
aaaagaagtagaata

SEQ ID NO: 2037071 - DNA, 15 bp, Homo sapiens
aaagaagtagaatat

SEQ ID NO: 2037072 - DNA, 15 bp, Homo sapiens
aagaagtagaatatc

SEQ ID NO: 2037073 - DNA, 15 bp, Homo sapiens
agaagtagaatatca

SEQ ID NO: 2037074 - DNA, 15 bp, Homo sapiens
gaagtagaatatcaa

SEQ ID NO: 2037075 - DNA, 15 bp, Homo sapiens
aagtagaatatcaac

SEQ ID NO: 2037076 - DNA, 15 bp, Homo sapiens
agtagaatatcaact

SEQ ID NO: 2037077 - DNA, 15 bp, Homo sapiens
gtagaatatcaactt

SEQ ID NO: 2037078 - DNA, 15 bp, Homo sapiens
tagaatatcaacttt

SEQ ID NO: 2037079 - DNA, 15 bp, Homo sapiens
agaatatcaactttt

SEQ ID NO: 2037080 - DNA, 15 bp, Homo sapiens
gaatatcaacttttg

SEQ ID NO: 2037081 - DNA, 15 bp, Homo sapiens
aatatcaacttttga

SEQ ID NO: 2037082 - DNA, 15 bp, Homo sapiens
atatcaacttttgac

SEQ ID NO: 2037083 - DNA, 15 bp, Homo sapiens
tatcaacttttgaca

SEQ ID NO: 2037084 - DNA, 15 bp, Homo sapiens
atcaacttttgacat

SEQ ID NO: 2037085 - DNA, 15 bp, Homo sapiens
tcaacttttgacata

SEQ ID NO: 2037086 - DNA, 15 bp, Homo sapiens
caacttttgacatag

SEQ ID NO: 2037087 - DNA, 15 bp, Homo sapiens
aacttttgacatagt

SEQ ID NO: 2037088 - DNA, 15 bp, Homo sapiens
acttttgacatagtg

SEQ ID NO: 2037089 - DNA, 15 bp, Homo sapiens
cttttgacatagtgt

SEQ ID NO: 2037090 - DNA, 15 bp, Homo sapiens
ttttgacatagtgtt

SEQ ID NO: 2037091 - DNA, 15 bp, Homo sapiens
tttgacatagtgttg

SEQ ID NO: 2037092 - DNA, 15 bp, Homo sapiens
ttgacatagtgttga

SEQ ID NO: 2037093 - DNA, 15 bp, Homo sapiens
tgacatagtgttgaa

SEQ ID NO: 2037094 - DNA, 15 bp, Homo sapiens
gacatagtgttgaag

SEQ ID NO: 2037095 - DNA, 15 bp, Homo sapiens
acatagtgttgaagc

SEQ ID NO: 2037096 - DNA, 15 bp, Homo sapiens
catagtgttgaagct

SEQ ID NO: 2037097 - DNA, 15 bp, Homo sapiens
atagtgttgaagctt

SEQ ID NO: 2037098 - DNA, 15 bp, Homo sapiens
tagtgttgaagcttt

SEQ ID NO: 2037099 - DNA, 15 bp, Homo sapiens
agtgttgaagctttt

SEQ ID NO: 2037100 - DNA, 15 bp, Homo sapiens
gtgttgaagcttttg

SEQ ID NO: 2037101 - DNA, 15 bp, Homo sapiens
tgttgaagcttttgg

SEQ ID NO: 2037102 - DNA, 15 bp, Homo sapiens
gttgaagcttttggt

SEQ ID NO: 2037103 - DNA, 15 bp, Homo sapiens
ttgaagcttttggtt

SEQ ID NO: 2037104 - DNA, 15 bp, Homo sapiens
tgaagcttttggtta

SEQ ID NO: 2037105 - DNA, 15 bp, Homo sapiens
gaagcttttggttat

SEQ ID NO: 2037106 - DNA, 15 bp, Homo sapiens
aagcttttggttatg

SEQ ID NO: 2037107 - DNA, 15 bp, Homo sapiens
agcttttggttatga

SEQ ID NO: 2037108 - DNA, 15 bp, Homo sapiens
gcttttggttatgag

SEQ ID NO: 2037109 - DNA, 15 bp, Homo sapiens
cttttggttatgagg

SEQ ID NO: 2037110 - DNA, 15 bp, Homo sapiens
ttttggttatgaggg

SEQ ID NO: 2037111 - DNA, 15 bp, Homo sapiens
tttggttatgaggga

SEQ ID NO: 2037112 - DNA, 15 bp, Homo sapiens
ttggttatgagggat

SEQ ID NO: 2037113 - DNA, 15 bp, Homo sapiens
tggttatgagggatg

SEQ ID NO: 2037114 - DNA, 15 bp, Homo sapiens
ggttatgagggatgg

SEQ ID NO: 2037115 - DNA, 15 bp, Homo sapiens
gttatgagggatggg

SEQ ID NO: 2037116 - DNA, 15 bp, Homo sapiens
ttatgagggatgggg

SEQ ID NO: 2037117 - DNA, 15 bp, Homo sapiens
tatgagggatggggc

SEQ ID NO: 2037118 - DNA, 15 bp, Homo sapiens
atgagggatggggct

SEQ ID NO: 2037119 - DNA, 15 bp, Homo sapiens
tgagggatggggctg

SEQ ID NO: 2037120 - DNA, 15 bp, Homo sapiens
gagggatggggctga

SEQ ID NO: 2037121 - DNA, 15 bp, Homo sapiens
agggatggggctgac

SEQ ID NO: 2037122 - DNA, 15 bp, Homo sapiens
gggatggggctgaca

SEQ ID NO: 2037123 - DNA, 15 bp, Homo sapiens
ggatggggctgacaa

SEQ ID NO: 2037124 - DNA, 15 bp, Homo sapiens
gatggggctgacaag

SEQ ID NO: 2037125 - DNA, 15 bp, Homo sapiens
atggggctgacaagt

SEQ ID NO: 2037126 - DNA, 15 bp, Homo sapiens
tggggctgacaagtc

SEQ ID NO: 2037127 - DNA, 15 bp, Homo sapiens
ggggctgacaagtca

SEQ ID NO: 2037128 - DNA, 15 bp, Homo sapiens
gggctgacaagtcac

SEQ ID NO: 2037129 - DNA, 15 bp, Homo sapiens
ggctgacaagtcact

SEQ ID NO: 2037130 - DNA, 15 bp, Homo sapiens
gctgacaagtcactc

SEQ ID NO: 2037131 - DNA, 15 bp, Homo sapiens
ctgacaagtcactcg

SEQ ID NO: 2037132 - DNA, 15 bp, Homo sapiens
tgacaagtcactcgt

SEQ ID NO: 2037133 - DNA, 15 bp, Homo sapiens
gacaagtcactcgta

SEQ ID NO: 2037134 - DNA, 15 bp, Homo sapiens
acaagtcactcgtac

SEQ ID NO: 2037135 - DNA, 15 bp, Homo sapiens
caagtcactcgtact

SEQ ID NO: 2037136 - DNA, 15 bp, Homo sapiens
aagtcactcgtactt

SEQ ID NO: 2037137 - DNA, 15 bp, Homo sapiens
agtcactcgtacttt

SEQ ID NO: 2037138 - DNA, 15 bp, Homo sapiens
gtcactcgtactttt

SEQ ID NO: 2037139 - DNA, 15 bp, Homo sapiens
tcactcgtactttta

SEQ ID NO: 2037140 - DNA, 15 bp, Homo sapiens
cactcgtacttttac

SEQ ID NO: 2037141 - DNA, 15 bp, Homo sapiens
actcgtacttttaca

SEQ ID NO: 2037142 - DNA, 15 bp, Homo sapiens
ctcgtacttttacat

SEQ ID NO: 2037143 - DNA, 15 bp, Homo sapiens
tcgtacttttacatt

SEQ ID NO: 2037144 - DNA, 15 bp, Homo sapiens
cgtacttttacattt

SEQ ID NO: 2037145 - DNA, 15 bp, Homo sapiens
gtacttttacatttt

SEQ ID NO: 2037146 - DNA, 15 bp, Homo sapiens
tacttttacattttt

SEQ ID NO: 2037147 - DNA, 15 bp, Homo sapiens
acttttacattttta

SEQ ID NO: 2037148 - DNA, 15 bp, Homo sapiens
cttttacatttttaa

SEQ ID NO: 2037149 - DNA, 15 bp, Homo sapiens
ttttacatttttaat

SEQ ID NO: 2037150 - DNA, 15 bp, Homo sapiens
tttacatttttaatt

SEQ ID NO: 2037151 - DNA, 15 bp, Homo sapiens
ttacatttttaatta

SEQ ID NO: 2037152 - DNA, 15 bp, Homo sapiens
tacatttttaattaa

SEQ ID NO: 2037153 - DNA, 15 bp, Homo sapiens
acatttttaattaat

SEQ ID NO: 2037154 - DNA, 15 bp, Homo sapiens
catttttaattaatg

SEQ ID NO: 2037155 - DNA, 15 bp, Homo sapiens
atttttaattaatgt

SEQ ID NO: 2037156 - DNA, 15 bp, Homo sapiens
tttttaattaatgtg

SEQ ID NO: 2037157 - DNA, 15 bp, Homo sapiens
ttttaattaatgtgc

SEQ ID NO: 2037158 - DNA, 15 bp, Homo sapiens
tttaattaatgtgct

SEQ ID NO: 2037159 - DNA, 15 bp, Homo sapiens
ttaattaatgtgctc

SEQ ID NO: 2037160 - DNA, 15 bp, Homo sapiens
taattaatgtgctca

SEQ ID NO: 2037161 - DNA, 15 bp, Homo sapiens
aattaatgtgctcat

SEQ ID NO: 2037162 - DNA, 15 bp, Homo sapiens
attaatgtgctcatt

SEQ ID NO: 2037163 - DNA, 15 bp, Homo sapiens
ttaatgtgctcatta

SEQ ID NO: 2037164 - DNA, 15 bp, Homo sapiens
taatgtgctcattag

SEQ ID NO: 2037165 - DNA, 15 bp, Homo sapiens
aatgtgctcattagg

SEQ ID NO: 2037166 - DNA, 15 bp, Homo sapiens
atgtgctcattagga

SEQ ID NO: 2037167 - DNA, 15 bp, Homo sapiens
tgtgctcattaggaa

SEQ ID NO: 2037168 - DNA, 15 bp, Homo sapiens
gtgctcattaggaaa

SEQ ID NO: 2037169 - DNA, 15 bp, Homo sapiens
tgctcattaggaaaa

SEQ ID NO: 2037170 - DNA, 15 bp, Homo sapiens
gctcattaggaaaaa

SEQ ID NO: 2037171 - DNA, 15 bp, Homo sapiens
ctcattaggaaaaaa

SEQ ID NO: 2037172 - DNA, 15 bp, Homo sapiens
tcattaggaaaaaaa

SEQ ID NO: 2037173 - DNA, 15 bp, Homo sapiens
cattaggaaaaaaat

SEQ ID NO: 2037174 - DNA, 15 bp, Homo sapiens
attaggaaaaaaatt

SEQ ID NO: 2037175 - DNA, 15 bp, Homo sapiens
ttaggaaaaaaattg

SEQ ID NO: 2037176 - DNA, 15 bp, Homo sapiens
taggaaaaaaattgg

SEQ ID NO: 2037177 - DNA, 15 bp, Homo sapiens
aggaaaaaaattgga

SEQ ID NO: 2037178 - DNA, 15 bp, Homo sapiens
ggaaaaaaattggaa

SEQ ID NO: 2037179 - DNA, 15 bp, Homo sapiens
gaaaaaaattggaaa

SEQ ID NO: 2037180 - DNA, 15 bp, Homo sapiens
aaaaaaattggaaaa

SEQ ID NO: 2037181 - DNA, 15 bp, Homo sapiens
aaaaaattggaaaat

SEQ ID NO: 2037182 - DNA, 15 bp, Homo sapiens
aaaaattggaaaatt

SEQ ID NO: 2037183 - DNA, 15 bp, Homo sapiens
aaaattggaaaattc

SEQ ID NO: 2037184 - DNA, 15 bp, Homo sapiens
aaattggaaaattca

SEQ ID NO: 2037185 - DNA, 15 bp, Homo sapiens
aattggaaaattcag

SEQ ID NO: 2037186 - DNA, 15 bp, Homo sapiens
attggaaaattcaga

SEQ ID NO: 2037187 - DNA, 15 bp, Homo sapiens
ttggaaaattcagaa

SEQ ID NO: 2037188 - DNA, 15 bp, Homo sapiens
tggaaaattcagaaa

SEQ ID NO: 2037189 - DNA, 15 bp, Homo sapiens
ggaaaattcagaaaa

SEQ ID NO: 2037190 - DNA, 15 bp, Homo sapiens
gaaaattcagaaaaa

SEQ ID NO: 2037191 - DNA, 15 bp, Homo sapiens
aaaattcagaaaaat

SEQ ID NO: 2037192 - DNA, 15 bp, Homo sapiens
aaattcagaaaaata

SEQ ID NO: 2037193 - DNA, 15 bp, Homo sapiens
aattcagaaaaataa

SEQ ID NO: 2037194 - DNA, 15 bp, Homo sapiens
attcagaaaaataaa

SEQ ID NO: 2037195 - DNA, 15 bp, Homo sapiens
ttcagaaaaataaaa

SEQ ID NO: 2037196 - DNA, 15 bp, Homo sapiens
tcagaaaaataaaag

SEQ ID NO: 2037197 - DNA, 15 bp, Homo sapiens
cagaaaaataaaagg

SEQ ID NO: 2037198 - DNA, 15 bp, Homo sapiens
agaaaaataaaagga

SEQ ID NO: 2037199 - DNA, 15 bp, Homo sapiens
gaaaaataaaaggaa

SEQ ID NO: 2037200 - DNA, 15 bp, Homo sapiens
aataaaaggaaaaag

SEQ ID NO: 2037201 - DNA, 15 bp, Homo sapiens
ataaaaggaaaaagt

SEQ ID NO: 2037202 - DNA, 15 bp, Homo sapiens
taaaaggaaaaagtt

SEQ ID NO: 2037203 - DNA, 15 bp, Homo sapiens
aaaaggaaaaagtta

SEQ ID NO: 2037204 - DNA, 15 bp, Homo sapiens
aaaggaaaaagttac

SEQ ID NO: 2037205 - DNA, 15 bp, Homo sapiens
aaggaaaaagttacc

SEQ ID NO: 2037206 - DNA, 15 bp, Homo sapiens
aggaaaaagttaccc

SEQ ID NO: 2037207 - DNA, 15 bp, Homo sapiens
ggaaaaagttaccca

SEQ ID NO: 2037208 - DNA, 15 bp, Homo sapiens
gaaaaagttacccac

SEQ ID NO: 2037209 - DNA, 15 bp, Homo sapiens
aaaaagttacccaca

SEQ ID NO: 2037210 - DNA, 15 bp, Homo sapiens
aaaagttacccacaa

SEQ ID NO: 2037211 - DNA, 15 bp, Homo sapiens
aaagttacccacaat

SEQ ID NO: 2037212 - DNA, 15 bp, Homo sapiens
aagttacccacaatc

SEQ ID NO: 2037213 - DNA, 15 bp, Homo sapiens
agttacccacaatcc

SEQ ID NO: 2037214 - DNA, 15 bp, Homo sapiens
gttacccacaatcct

SEQ ID NO: 2037215 - DNA, 15 bp, Homo sapiens
ttacccacaatccta

SEQ ID NO: 2037216 - DNA, 15 bp, Homo sapiens
tacccacaatcctat

SEQ ID NO: 2037217 - DNA, 15 bp, Homo sapiens
acccacaatcctatc

SEQ ID NO: 2037218 - DNA, 15 bp, Homo sapiens
cccacaatcctatca

SEQ ID NO: 2037219 - DNA, 15 bp, Homo sapiens
ccacaatcctatcat

SEQ ID NO: 2037220 - DNA, 15 bp, Homo sapiens
cacaatcctatcatt

SEQ ID NO: 2037221 - DNA, 15 bp, Homo sapiens
acaatcctatcattc

SEQ ID NO: 2037222 - DNA, 15 bp, Homo sapiens
caatcctatcattct

SEQ ID NO: 2037223 - DNA, 15 bp, Homo sapiens
aatcctatcattcta

SEQ ID NO: 2037224 - DNA, 15 bp, Homo sapiens
atcctatcattctaa

SEQ ID NO: 2037225 - DNA, 15 bp, Homo sapiens
tcctatcattctaag

SEQ ID NO: 2037226 - DNA, 15 bp, Homo sapiens
cctatcattctaaga

SEQ ID NO: 2037227 - DNA, 15 bp, Homo sapiens
ctatcattctaagat

SEQ ID NO: 2037228 - DNA, 15 bp, Homo sapiens
tatcattctaagata

SEQ ID NO: 2037229 - DNA, 15 bp, Homo sapiens
atcattctaagatag

SEQ ID NO: 2037230 - DNA, 15 bp, Homo sapiens
tcattctaagataga

SEQ ID NO: 2037231 - DNA, 15 bp, Homo sapiens
cattctaagatagat

SEQ ID NO: 2037232 - DNA, 15 bp, Homo sapiens
attctaagatagata

SEQ ID NO: 2037233 - DNA, 15 bp, Homo sapiens
ttctaagatagataa

SEQ ID NO: 2037234 - DNA, 15 bp, Homo sapiens
tctaagatagataac

SEQ ID NO: 2037235 - DNA, 15 bp, Homo sapiens
ctaagatagataacc

SEQ ID NO: 2037236 - DNA, 15 bp, Homo sapiens
taagatagataacca

SEQ ID NO: 2037237 - DNA, 15 bp, Homo sapiens
aagatagataaccac

SEQ ID NO: 2037238 - DNA, 15 bp, Homo sapiens
agatagataaccact

SEQ ID NO: 2037239 - DNA, 15 bp, Homo sapiens
gatagataaccactg

SEQ ID NO: 2037240 - DNA, 15 bp, Homo sapiens
atagataaccactgt

SEQ ID NO: 2037241 - DNA, 15 bp, Homo sapiens
tagataaccactgtt

SEQ ID NO: 2037242 - DNA, 15 bp, Homo sapiens
agataaccactgttt

SEQ ID NO: 2037243 - DNA, 15 bp, Homo sapiens
gataaccactgttta

SEQ ID NO: 2037244 - DNA, 15 bp, Homo sapiens
ataaccactgtttat

SEQ ID NO: 2037245 - DNA, 15 bp, Homo sapiens
taaccactgtttatt

SEQ ID NO: 2037246 - DNA, 15 bp, Homo sapiens
aaccactgtttatta

SEQ ID NO: 2037247 - DNA, 15 bp, Homo sapiens
accactgtttattaa

SEQ ID NO: 2037248 - DNA, 15 bp, Homo sapiens
ccactgtttattaac

SEQ ID NO: 2037249 - DNA, 15 bp, Homo sapiens
cactgtttattaaca

SEQ ID NO: 2037250 - DNA, 15 bp, Homo sapiens
actgtttattaacat

SEQ ID NO: 2037251 - DNA, 15 bp, Homo sapiens
ctgtttattaacatt

SEQ ID NO: 2037252 - DNA, 15 bp, Homo sapiens
tgtttattaacattt

SEQ ID NO: 2037253 - DNA, 15 bp, Homo sapiens
gtttattaacatttt

SEQ ID NO: 2037254 - DNA, 15 bp, Homo sapiens
tttattaacattttg

SEQ ID NO: 2037255 - DNA, 15 bp, Homo sapiens
ttattaacattttgg

SEQ ID NO: 2037256 - DNA, 15 bp, Homo sapiens
tattaacattttggt

SEQ ID NO: 2037257 - DNA, 15 bp, Homo sapiens
attaacattttggtg

SEQ ID NO: 2037258 - DNA, 15 bp, Homo sapiens
ttaacattttggtgc

SEQ ID NO: 2037259 - DNA, 15 bp, Homo sapiens
taacattttggtgca

SEQ ID NO: 2037260 - DNA, 15 bp, Homo sapiens
aacattttggtgcat

SEQ ID NO: 2037261 - DNA, 15 bp, Homo sapiens
acattttggtgcatt

SEQ ID NO: 2037262 - DNA, 15 bp, Homo sapiens
cattttggtgcattt

SEQ ID NO: 2037263 - DNA, 15 bp, Homo sapiens
attttggtgcatttc

SEQ ID NO: 2037264 - DNA, 15 bp, Homo sapiens
ttttggtgcatttcc

SEQ ID NO: 2037265 - DNA, 15 bp, Homo sapiens
tttggtgcatttcct

SEQ ID NO: 2037266 - DNA, 15 bp, Homo sapiens
ttggtgcatttcctt

SEQ ID NO: 2037267 - DNA, 15 bp, Homo sapiens
tggtgcatttccttc

SEQ ID NO: 2037268 - DNA, 15 bp, Homo sapiens
ggtgcatttccttcc

SEQ ID NO: 2037269 - DNA, 15 bp, Homo sapiens
gtgcatttccttcca

SEQ ID NO: 2037270 - DNA, 15 bp, Homo sapiens
tgcatttccttccag

SEQ ID NO: 2037271 - DNA, 15 bp, Homo sapiens
gcatttccttccagt

SEQ ID NO: 2037272 - DNA, 15 bp, Homo sapiens
catttccttccagtt

SEQ ID NO: 2037273 - DNA, 15 bp, Homo sapiens
atttccttccagttt

SEQ ID NO: 2037274 - DNA, 15 bp, Homo sapiens
tttccttccagtttc

SEQ ID NO: 2037275 - DNA, 15 bp, Homo sapiens
ttccttccagtttct

SEQ ID NO: 2037276 - DNA, 15 bp, Homo sapiens
tccttccagtttctt

SEQ ID NO: 2037277 - DNA, 15 bp, Homo sapiens
ccttccagtttcttt

SEQ ID NO: 2037278 - DNA, 15 bp, Homo sapiens
cttccagtttctttt

SEQ ID NO: 2037279 - DNA, 15 bp, Homo sapiens
ttccagtttcttttt

SEQ ID NO: 2037280 - DNA, 15 bp, Homo sapiens
tccagtttctttttt

SEQ ID NO: 2037281 - DNA, 15 bp, Homo sapiens
ccagtttcttttttt

SEQ ID NO: 2037282 - DNA, 15 bp, Homo sapiens
cagtttctttttttt

SEQ ID NO: 2037283 - DNA, 15 bp, Homo sapiens
agtttctttttttta

SEQ ID NO: 2037284 - DNA, 15 bp, Homo sapiens
gtttcttttttttat

SEQ ID NO: 2037285 - DNA, 15 bp, Homo sapiens
tttcttttttttata

SEQ ID NO: 2037286 - DNA, 15 bp, Homo sapiens
ttcttttttttatat

SEQ ID NO: 2037287 - DNA, 15 bp, Homo sapiens
tcttttttttatata

SEQ ID NO: 2037288 - DNA, 15 bp, Homo sapiens
cttttttttatatac

SEQ ID NO: 2037289 - DNA, 15 bp, Homo sapiens
ttttttttatatact

SEQ ID NO: 2037290 - DNA, 15 bp, Homo sapiens
tttttttatatactt

SEQ ID NO: 2037291 - DNA, 15 bp, Homo sapiens
ttttttatatacttg

SEQ ID NO: 2037292 - DNA, 15 bp, Homo sapiens
tttttatatacttga

SEQ ID NO: 2037293 - DNA, 15 bp, Homo sapiens
ttttatatacttgag

SEQ ID NO: 2037294 - DNA, 15 bp, Homo sapiens
tttatatacttgagg

SEQ ID NO: 2037295 - DNA, 15 bp, Homo sapiens
ttatatacttgaggt

SEQ ID NO: 2037296 - DNA, 15 bp, Homo sapiens
tatatacttgaggtc

SEQ ID NO: 2037297 - DNA, 15 bp, Homo sapiens
atatacttgaggtca

SEQ ID NO: 2037298 - DNA, 15 bp, Homo sapiens
tatacttgaggtcat

SEQ ID NO: 2037299 - DNA, 15 bp, Homo sapiens
atacttgaggtcata

SEQ ID NO: 2037300 - DNA, 15 bp, Homo sapiens
tacttgaggtcatag

SEQ ID NO: 2037301 - DNA, 15 bp, Homo sapiens
acttgaggtcatagt

SEQ ID NO: 2037302 - DNA, 15 bp, Homo sapiens
cttgaggtcatagta

SEQ ID NO: 2037303 - DNA, 15 bp, Homo sapiens
ttgaggtcatagtat

SEQ ID NO: 2037304 - DNA, 15 bp, Homo sapiens
tgaggtcatagtatg

SEQ ID NO: 2037305 - DNA, 15 bp, Homo sapiens
gaggtcatagtatgt

SEQ ID NO: 2037306 - DNA, 15 bp, Homo sapiens
aggtcatagtatgtg

SEQ ID NO: 2037307 - DNA, 15 bp, Homo sapiens
ggtcatagtatgtga

SEQ ID NO: 2037308 - DNA, 15 bp, Homo sapiens
gtcatagtatgtgaa

SEQ ID NO: 2037309 - DNA, 15 bp, Homo sapiens
tcatagtatgtgaac

SEQ ID NO: 2037310 - DNA, 15 bp, Homo sapiens
catagtatgtgaaca

SEQ ID NO: 2037311 - DNA, 15 bp, Homo sapiens
atagtatgtgaacaa

SEQ ID NO: 2037312 - DNA, 15 bp, Homo sapiens
tagtatgtgaacaac

SEQ ID NO: 2037313 - DNA, 15 bp, Homo sapiens
agtatgtgaacaact

SEQ ID NO: 2037314 - DNA, 15 bp, Homo sapiens
gtatgtgaacaactt

SEQ ID NO: 2037315 - DNA, 15 bp, Homo sapiens
tatgtgaacaacttt

SEQ ID NO: 2037316 - DNA, 15 bp, Homo sapiens
atgtgaacaacttta

SEQ ID NO: 2037317 - DNA, 15 bp, Homo sapiens
tgtgaacaactttat

SEQ ID NO: 2037318 - DNA, 15 bp, Homo sapiens
gtgaacaactttata

SEQ ID NO: 2037319 - DNA, 15 bp, Homo sapiens
tgaacaactttatag

SEQ ID NO: 2037320 - DNA, 15 bp, Homo sapiens
gaacaactttatagc

SEQ ID NO: 2037321 - DNA, 15 bp, Homo sapiens
aacaactttatagct

SEQ ID NO: 2037322 - DNA, 15 bp, Homo sapiens
acaactttatagctt

SEQ ID NO: 2037323 - DNA, 15 bp, Homo sapiens
caactttatagcttg

SEQ ID NO: 2037324 - DNA, 15 bp, Homo sapiens
aactttatagcttgt

SEQ ID NO: 2037325 - DNA, 15 bp, Homo sapiens
actttatagcttgtt

SEQ ID NO: 2037326 - DNA, 15 bp, Homo sapiens
ctttatagcttgttt

SEQ ID NO: 2037327 - DNA, 15 bp, Homo sapiens
tttatagcttgtttt

SEQ ID NO: 2037328 - DNA, 15 bp, Homo sapiens
ttatagcttgttttg

SEQ ID NO: 2037329 - DNA, 15 bp, Homo sapiens
tatagcttgttttgt

SEQ ID NO: 2037330 - DNA, 15 bp, Homo sapiens
atagcttgttttgta

SEQ ID NO: 2037331 - DNA, 15 bp, Homo sapiens
tagcttgttttgtac

SEQ ID NO: 2037332 - DNA, 15 bp, Homo sapiens
agcttgttttgtacc

SEQ ID NO: 2037333 - DNA, 15 bp, Homo sapiens
gcttgttttgtaccc

SEQ ID NO: 2037334 - DNA, 15 bp, Homo sapiens
cttgttttgtaccct

SEQ ID NO: 2037335 - DNA, 15 bp, Homo sapiens
ttgttttgtaccctc

SEQ ID NO: 2037336 - DNA, 15 bp, Homo sapiens
tgttttgtaccctca

SEQ ID NO: 2037337 - DNA, 15 bp, Homo sapiens
gttttgtaccctcaa

SEQ ID NO: 2037338 - DNA, 15 bp, Homo sapiens
ttttgtaccctcaac

SEQ ID NO: 2037339 - DNA, 15 bp, Homo sapiens
tttgtaccctcaaca

SEQ ID NO: 2037340 - DNA, 15 bp, Homo sapiens
ttgtaccctcaacat

SEQ ID NO: 2037341 - DNA, 15 bp, Homo sapiens
tgtaccctcaacatt

SEQ ID NO: 2037342 - DNA, 15 bp, Homo sapiens
gtaccctcaacattt

SEQ ID NO: 2037343 - DNA, 15 bp, Homo sapiens
taccctcaacattta

SEQ ID NO: 2037344 - DNA, 15 bp, Homo sapiens
accctcaacatttaa

SEQ ID NO: 2037345 - DNA, 15 bp, Homo sapiens
ccctcaacatttaac

SEQ ID NO: 2037346 - DNA, 15 bp, Homo sapiens
cctcaacatttaaca

SEQ ID NO: 2037347 - DNA, 15 bp, Homo sapiens
ctcaacatttaacag

SEQ ID NO: 2037348 - DNA, 15 bp, Homo sapiens
tcaacatttaacagg

SEQ ID NO: 2037349 - DNA, 15 bp, Homo sapiens
caacatttaacagga

SEQ ID NO: 2037350 - DNA, 15 bp, Homo sapiens
aacatttaacaggag

SEQ ID NO: 2037351 - DNA, 15 bp, Homo sapiens
acatttaacaggaga

SEQ ID NO: 2037352 - DNA, 15 bp, Homo sapiens
catttaacaggagat

SEQ ID NO: 2037353 - DNA, 15 bp, Homo sapiens
atttaacaggagata

SEQ ID NO: 2037354 - DNA, 15 bp, Homo sapiens
tttaacaggagataa

SEQ ID NO: 2037355 - DNA, 15 bp, Homo sapiens
ttaacaggagataaa

SEQ ID NO: 2037356 - DNA, 15 bp, Homo sapiens
taacaggagataaat

SEQ ID NO: 2037357 - DNA, 15 bp, Homo sapiens
aacaggagataaata

SEQ ID NO: 2037358 - DNA, 15 bp, Homo sapiens
acaggagataaataa

SEQ ID NO: 2037359 - DNA, 15 bp, Homo sapiens
caggagataaataag

SEQ ID NO: 2037360 - DNA, 15 bp, Homo sapiens
aggagataaataagg

SEQ ID NO: 2037361 - DNA, 15 bp, Homo sapiens
ggagataaataaggc

SEQ ID NO: 2037362 - DNA, 15 bp, Homo sapiens
gagataaataaggcc

SEQ ID NO: 2037363 - DNA, 15 bp, Homo sapiens
agataaataaggcct

SEQ ID NO: 2037364 - DNA, 15 bp, Homo sapiens
gataaataaggcctt

SEQ ID NO: 2037365 - DNA, 15 bp, Homo sapiens
ataaataaggccttt

SEQ ID NO: 2037366 - DNA, 15 bp, Homo sapiens
taaataaggccttta

SEQ ID NO: 2037367 - DNA, 15 bp, Homo sapiens
aaataaggcctttaa

SEQ ID NO: 2037368 - DNA, 15 bp, Homo sapiens
aataaggcctttaaa

SEQ ID NO: 2037369 - DNA, 15 bp, Homo sapiens
ataaggcctttaaaa

SEQ ID NO: 2037370 - DNA, 15 bp, Homo sapiens
taaggcctttaaaat

SEQ ID NO: 2037371 - DNA, 15 bp, Homo sapiens
aaggcctttaaaatt

SEQ ID NO: 2037372 - DNA, 15 bp, Homo sapiens
aggcctttaaaatta

SEQ ID NO: 2037373 - DNA, 15 bp, Homo sapiens
ggcctttaaaattat

SEQ ID NO: 2037374 - DNA, 15 bp, Homo sapiens
gcctttaaaattatt

SEQ ID NO: 2037375 - DNA, 15 bp, Homo sapiens
cctttaaaattattt

SEQ ID NO: 2037376 - DNA, 15 bp, Homo sapiens
ctttaaaattatttg

SEQ ID NO: 2037377 - DNA, 15 bp, Homo sapiens
tttaaaattatttga

SEQ ID NO: 2037378 - DNA, 15 bp, Homo sapiens
ttaaaattatttgag

SEQ ID NO: 2037379 - DNA, 15 bp, Homo sapiens
taaaattatttgagg

SEQ ID NO: 2037380 - DNA, 15 bp, Homo sapiens
aaaattatttgaggt

SEQ ID NO: 2037381 - DNA, 15 bp, Homo sapiens
aaattatttgaggtt

SEQ ID NO: 2037382 - DNA, 15 bp, Homo sapiens
aattatttgaggttt

SEQ ID NO: 2037383 - DNA, 15 bp, Homo sapiens
attatttgaggtttg

SEQ ID NO: 2037384 - DNA, 15 bp, Homo sapiens
ttatttgaggtttga

SEQ ID NO: 2037385 - DNA, 15 bp, Homo sapiens
tatttgaggtttgac

SEQ ID NO: 2037386 - DNA, 15 bp, Homo sapiens
atttgaggtttgacg

SEQ ID NO: 2037387 - DNA, 15 bp, Homo sapiens
tttgaggtttgacgg

SEQ ID NO: 2037388 - DNA, 15 bp, Homo sapiens
ttgaggtttgacggt

SEQ ID NO: 2037389 - DNA, 15 bp, Homo sapiens
tgaggtttgacggtt

SEQ ID NO: 2037390 - DNA, 15 bp, Homo sapiens
gaggtttgacggtta

SEQ ID NO: 2037391 - DNA, 15 bp, Homo sapiens
aggtttgacggttat

SEQ ID NO: 2037392 - DNA, 15 bp, Homo sapiens
ggtttgacggttatt

SEQ ID NO: 2037393 - DNA, 15 bp, Homo sapiens
gtttgacggttattt

SEQ ID NO: 2037394 - DNA, 15 bp, Homo sapiens
tttgacggttatttg

SEQ ID NO: 2037395 - DNA, 15 bp, Homo sapiens
ttgacggttatttgc

SEQ ID NO: 2037396 - DNA, 15 bp, Homo sapiens
tgacggttatttgct

SEQ ID NO: 2037397 - DNA, 15 bp, Homo sapiens
gacggttatttgctt

SEQ ID NO: 2037398 - DNA, 15 bp, Homo sapiens
acggttatttgcttc

SEQ ID NO: 2037399 - DNA, 15 bp, Homo sapiens
cggttatttgcttca

SEQ ID NO: 2037400 - DNA, 15 bp, Homo sapiens
ggttatttgcttcac

SEQ ID NO: 2037401 - DNA, 15 bp, Homo sapiens
gttatttgcttcaca

SEQ ID NO: 2037402 - DNA, 15 bp, Homo sapiens
ttatttgcttcacaa

SEQ ID NO: 2037403 - DNA, 15 bp, Homo sapiens
tatttgcttcacaaa

SEQ ID NO: 2037404 - DNA, 15 bp, Homo sapiens
atttgcttcacaaaa

SEQ ID NO: 2037405 - DNA, 15 bp, Homo sapiens
tttgcttcacaaaac

SEQ ID NO: 2037406 - DNA, 15 bp, Homo sapiens
ttgcttcacaaaaca

SEQ ID NO: 2037407 - DNA, 15 bp, Homo sapiens
tgcttcacaaaacag

SEQ ID NO: 2037408 - DNA, 15 bp, Homo sapiens
gcttcacaaaacaga

SEQ ID NO: 2037409 - DNA, 15 bp, Homo sapiens
cttcacaaaacagaa

SEQ ID NO: 2037410 - DNA, 15 bp, Homo sapiens
ttcacaaaacagaaa

SEQ ID NO: 2037411 - DNA, 15 bp, Homo sapiens
tcacaaaacagaaag

SEQ ID NO: 2037412 - DNA, 15 bp, Homo sapiens
cacaaaacagaaagt

SEQ ID NO: 2037413 - DNA, 15 bp, Homo sapiens
acaaaacagaaagtg

SEQ ID NO: 2037414 - DNA, 15 bp, Homo sapiens
caaaacagaaagtgg

SEQ ID NO: 2037415 - DNA, 15 bp, Homo sapiens
aaaacagaaagtgga

SEQ ID NO: 2037416 - DNA, 15 bp, Homo sapiens
aaacagaaagtggaa

SEQ ID NO: 2037417 - DNA, 15 bp, Homo sapiens
aacagaaagtggaat

SEQ ID NO: 2037418 - DNA, 15 bp, Homo sapiens
acagaaagtggaatg

SEQ ID NO: 2037419 - DNA, 15 bp, Homo sapiens
cagaaagtggaatgt

SEQ ID NO: 2037420 - DNA, 15 bp, Homo sapiens
agaaagtggaatgtt

SEQ ID NO: 2037421 - DNA, 15 bp, Homo sapiens
gaaagtggaatgttc

SEQ ID NO: 2037422 - DNA, 15 bp, Homo sapiens
aaagtggaatgttct

SEQ ID NO: 2037423 - DNA, 15 bp, Homo sapiens
aagtggaatgttctt

SEQ ID NO: 2037424 - DNA, 15 bp, Homo sapiens
agtggaatgttctta

SEQ ID NO: 2037425 - DNA, 15 bp, Homo sapiens
gtggaatgttcttag

SEQ ID NO: 2037426 - DNA, 15 bp, Homo sapiens
tggaatgttcttagc

SEQ ID NO: 2037427 - DNA, 15 bp, Homo sapiens
ggaatgttcttagca

SEQ ID NO: 2037428 - DNA, 15 bp, Homo sapiens
gaatgttcttagcac

SEQ ID NO: 2037429 - DNA, 15 bp, Homo sapiens
aatgttcttagcact

SEQ ID NO: 2037430 - DNA, 15 bp, Homo sapiens
atgttcttagcactt

SEQ ID NO: 2037431 - DNA, 15 bp, Homo sapiens
tgttcttagcacttt

SEQ ID NO: 2037432 - DNA, 15 bp, Homo sapiens
gttcttagcactttt

SEQ ID NO: 2037433 - DNA, 15 bp, Homo sapiens
ttcttagcacttttt

SEQ ID NO: 2037434 - DNA, 15 bp, Homo sapiens
tcttagcactttttt

SEQ ID NO: 2037435 - DNA, 15 bp, Homo sapiens
cttagcacttttttg

SEQ ID NO: 2037436 - DNA, 15 bp, Homo sapiens
ttagcacttttttga

SEQ ID NO: 2037437 - DNA, 15 bp, Homo sapiens
tagcacttttttgaa

SEQ ID NO: 2037438 - DNA, 15 bp, Homo sapiens
agcacttttttgaag

SEQ ID NO: 2037439 - DNA, 15 bp, Homo sapiens
gcacttttttgaaga

SEQ ID NO: 2037440 - DNA, 15 bp, Homo sapiens
cacttttttgaagat

SEQ ID NO: 2037441 - DNA, 15 bp, Homo sapiens
acttttttgaagata

SEQ ID NO: 2037442 - DNA, 15 bp, Homo sapiens
cttttttgaagatac

SEQ ID NO: 2037443 - DNA, 15 bp, Homo sapiens
ttttttgaagatacc

SEQ ID NO: 2037444 - DNA, 15 bp, Homo sapiens
tttttgaagatacct

SEQ ID NO: 2037445 - DNA, 15 bp, Homo sapiens
ttttgaagatacctt

SEQ ID NO: 2037446 - DNA, 15 bp, Homo sapiens
tttgaagataccttc

SEQ ID NO: 2037447 - DNA, 15 bp, Homo sapiens
ttgaagataccttca

SEQ ID NO: 2037448 - DNA, 15 bp, Homo sapiens
tgaagataccttcac

SEQ ID NO: 2037449 - DNA, 15 bp, Homo sapiens
gaagataccttcacc

SEQ ID NO: 2037450 - DNA, 15 bp, Homo sapiens
aagataccttcaccc

SEQ ID NO: 2037451 - DNA, 15 bp, Homo sapiens
agataccttcaccct

SEQ ID NO: 2037452 - DNA, 15 bp, Homo sapiens
gataccttcacccta

SEQ ID NO: 2037453 - DNA, 15 bp, Homo sapiens
ataccttcaccctag

SEQ ID NO: 2037454 - DNA, 15 bp, Homo sapiens
taccttcaccctagt

SEQ ID NO: 2037455 - DNA, 15 bp, Homo sapiens
accttcaccctagtg

SEQ ID NO: 2037456 - DNA, 15 bp, Homo sapiens
ccttcaccctagtga

SEQ ID NO: 2037457 - DNA, 15 bp, Homo sapiens
cttcaccctagtgac

SEQ ID NO: 2037458 - DNA, 15 bp, Homo sapiens
ttcaccctagtgact

SEQ ID NO: 2037459 - DNA, 15 bp, Homo sapiens
tcaccctagtgactt

SEQ ID NO: 2037460 - DNA, 15 bp, Homo sapiens
caccctagtgacttc

SEQ ID NO: 2037461 - DNA, 15 bp, Homo sapiens
accctagtgacttca

SEQ ID NO: 2037462 - DNA, 15 bp, Homo sapiens
ccctagtgacttcat

SEQ ID NO: 2037463 - DNA, 15 bp, Homo sapiens
cctagtgacttcatc

SEQ ID NO: 2037464 - DNA, 15 bp, Homo sapiens
ctagtgacttcatct

SEQ ID NO: 2037465 - DNA, 15 bp, Homo sapiens
tagtgacttcatcta

SEQ ID NO: 2037466 - DNA, 15 bp, Homo sapiens
agtgacttcatctac

SEQ ID NO: 2037467 - DNA, 15 bp, Homo sapiens
gtgacttcatctaca

SEQ ID NO: 2037468 - DNA, 15 bp, Homo sapiens
tgacttcatctacat

SEQ ID NO: 2037469 - DNA, 15 bp, Homo sapiens
gacttcatctacatt

SEQ ID NO: 2037470 - DNA, 15 bp, Homo sapiens
acttcatctacatta

SEQ ID NO: 2037471 - DNA, 15 bp, Homo sapiens
cttcatctacattac

SEQ ID NO: 2037472 - DNA, 15 bp, Homo sapiens
ttcatctacattact

SEQ ID NO: 2037473 - DNA, 15 bp, Homo sapiens
tcatctacattacta

SEQ ID NO: 2037474 - DNA, 15 bp, Homo sapiens
catctacattactac

SEQ ID NO: 2037475 - DNA, 15 bp, Homo sapiens
atctacattactaca

SEQ ID NO: 2037476 - DNA, 15 bp, Homo sapiens
tctacattactacaa

SEQ ID NO: 2037477 - DNA, 15 bp, Homo sapiens
ctacattactacaat

SEQ ID NO: 2037478 - DNA, 15 bp, Homo sapiens
tacattactacaatt

SEQ ID NO: 2037479 - DNA, 15 bp, Homo sapiens
acattactacaattt

SEQ ID NO: 2037480 - DNA, 15 bp, Homo sapiens
cattactacaattta

SEQ ID NO: 2037481 - DNA, 15 bp, Homo sapiens
attactacaatttat

SEQ ID NO: 2037482 - DNA, 15 bp, Homo sapiens
ttactacaatttatg

SEQ ID NO: 2037483 - DNA, 15 bp, Homo sapiens
tactacaatttatgt

SEQ ID NO: 2037484 - DNA, 15 bp, Homo sapiens
actacaatttatgta

SEQ ID NO: 2037485 - DNA, 15 bp, Homo sapiens
ctacaatttatgtaa

SEQ ID NO: 2037486 - DNA, 15 bp, Homo sapiens
tacaatttatgtaat

SEQ ID NO: 2037487 - DNA, 15 bp, Homo sapiens
acaatttatgtaatt

SEQ ID NO: 2037488 - DNA, 15 bp, Homo sapiens
caatttatgtaattg

SEQ ID NO: 2037489 - DNA, 15 bp, Homo sapiens
aatttatgtaattgt

SEQ ID NO: 2037490 - DNA, 15 bp, Homo sapiens
atttatgtaattgta

SEQ ID NO: 2037491 - DNA, 15 bp, Homo sapiens
tttatgtaattgtaa

SEQ ID NO: 2037492 - DNA, 15 bp, Homo sapiens
ttatgtaattgtaat

SEQ ID NO: 2037493 - DNA, 15 bp, Homo sapiens
tatgtaattgtaatt

SEQ ID NO: 2037494 - DNA, 15 bp, Homo sapiens
atgtaattgtaattc

SEQ ID NO: 2037495 - DNA, 15 bp, Homo sapiens
tgtaattgtaattct

SEQ ID NO: 2037496 - DNA, 15 bp, Homo sapiens
gtaattgtaattctc

SEQ ID NO: 2037497 - DNA, 15 bp, Homo sapiens
taattgtaattctca

SEQ ID NO: 2037498 - DNA, 15 bp, Homo sapiens
aattgtaattctcag

SEQ ID NO: 2037499 - DNA, 15 bp, Homo sapiens
attgtaattctcagg

SEQ ID NO: 2037500 - DNA, 15 bp, Homo sapiens
ttgtaattctcagga

SEQ ID NO: 2037501 - DNA, 15 bp, Homo sapiens
tgtaattctcaggaa

SEQ ID NO: 2037502 - DNA, 15 bp, Homo sapiens
gtaattctcaggaat

SEQ ID NO: 2037503 - DNA, 15 bp, Homo sapiens
taattctcaggaata

SEQ ID NO: 2037504 - DNA, 15 bp, Homo sapiens
aattctcaggaataa

SEQ ID NO: 2037505 - DNA, 15 bp, Homo sapiens
attctcaggaataac

SEQ ID NO: 2037506 - DNA, 15 bp, Homo sapiens
ttctcaggaataaca

SEQ ID NO: 2037507 - DNA, 15 bp, Homo sapiens
tctcaggaataacac

SEQ ID NO: 2037508 - DNA, 15 bp, Homo sapiens
ctcaggaataacact

SEQ ID NO: 2037509 - DNA, 15 bp, Homo sapiens
tcaggaataacactg

SEQ ID NO: 2037510 - DNA, 15 bp, Homo sapiens
caggaataacactgt

SEQ ID NO: 2037511 - DNA, 15 bp, Homo sapiens
aggaataacactgtg

SEQ ID NO: 2037512 - DNA, 15 bp, Homo sapiens
ggaataacactgtgc

SEQ ID NO: 2037513 - DNA, 15 bp, Homo sapiens
gaataacactgtgcc

SEQ ID NO: 2037514 - DNA, 15 bp, Homo sapiens
aataacactgtgccc

SEQ ID NO: 2037515 - DNA, 15 bp, Homo sapiens
ataacactgtgccca

SEQ ID NO: 2037516 - DNA, 15 bp, Homo sapiens
taacactgtgcccaa

SEQ ID NO: 2037517 - DNA, 15 bp, Homo sapiens
aacactgtgcccaaa

SEQ ID NO: 2037518 - DNA, 15 bp, Homo sapiens
acactgtgcccaaac

SEQ ID NO: 2037519 - DNA, 15 bp, Homo sapiens
cactgtgcccaaaca

SEQ ID NO: 2037520 - DNA, 15 bp, Homo sapiens
actgtgcccaaacag

SEQ ID NO: 2037521 - DNA, 15 bp, Homo sapiens
ctgtgcccaaacaga

SEQ ID NO: 2037522 - DNA, 15 bp, Homo sapiens
tgtgcccaaacagaa

SEQ ID NO: 2037523 - DNA, 15 bp, Homo sapiens
gtgcccaaacagaag

SEQ ID NO: 2037524 - DNA, 15 bp, Homo sapiens
tgcccaaacagaagc

SEQ ID NO: 2037525 - DNA, 15 bp, Homo sapiens
gcccaaacagaagca

SEQ ID NO: 2037526 - DNA, 15 bp, Homo sapiens
cccaaacagaagcat

SEQ ID NO: 2037527 - DNA, 15 bp, Homo sapiens
ccaaacagaagcatt

SEQ ID NO: 2037528 - DNA, 15 bp, Homo sapiens
caaacagaagcattg

SEQ ID NO: 2037529 - DNA, 15 bp, Homo sapiens
aaacagaagcattgc

SEQ ID NO: 2037530 - DNA, 15 bp, Homo sapiens
aacagaagcattgcc

SEQ ID NO: 2037531 - DNA, 15 bp, Homo sapiens
acagaagcattgcca

SEQ ID NO: 2037532 - DNA, 15 bp, Homo sapiens
cagaagcattgccac

SEQ ID NO: 2037533 - DNA, 15 bp, Homo sapiens
agaagcattgccacc

SEQ ID NO: 2037534 - DNA, 15 bp, Homo sapiens
gaagcattgccaccc

SEQ ID NO: 2037535 - DNA, 15 bp, Homo sapiens
aagcattgccaccca

SEQ ID NO: 2037536 - DNA, 15 bp, Homo sapiens
agcattgccacccat

SEQ ID NO: 2037537 - DNA, 15 bp, Homo sapiens
gcattgccacccatg

SEQ ID NO: 2037538 - DNA, 15 bp, Homo sapiens
cattgccacccatgt

SEQ ID NO: 2037539 - DNA, 15 bp, Homo sapiens
attgccacccatgtc

SEQ ID NO: 2037540 - DNA, 15 bp, Homo sapiens
ttgccacccatgtca

SEQ ID NO: 2037541 - DNA, 15 bp, Homo sapiens
tgccacccatgtcat

SEQ ID NO: 2037542 - DNA, 15 bp, Homo sapiens
gccacccatgtcatg

SEQ ID NO: 2037543 - DNA, 15 bp, Homo sapiens
ccacccatgtcatga

SEQ ID NO: 2037544 - DNA, 15 bp, Homo sapiens
cacccatgtcatgac

SEQ ID NO: 2037545 - DNA, 15 bp, Homo sapiens
acccatgtcatgact

SEQ ID NO: 2037546 - DNA, 15 bp, Homo sapiens
cccatgtcatgactg

SEQ ID NO: 2037547 - DNA, 15 bp, Homo sapiens
ccatgtcatgactgt

SEQ ID NO: 2037548 - DNA, 15 bp, Homo sapiens
catgtcatgactgtt

SEQ ID NO: 2037549 - DNA, 15 bp, Homo sapiens
atgtcatgactgttt

SEQ ID NO: 2037550 - DNA, 15 bp, Homo sapiens
tgtcatgactgtttt

SEQ ID NO: 2037551 - DNA, 15 bp, Homo sapiens
gtcatgactgttttc

SEQ ID NO: 2037552 - DNA, 15 bp, Homo sapiens
tcatgactgttttcc

SEQ ID NO: 2037553 - DNA, 15 bp, Homo sapiens
catgactgttttccc

SEQ ID NO: 2037554 - DNA, 15 bp, Homo sapiens
atgactgttttcccc

SEQ ID NO: 2037555 - DNA, 15 bp, Homo sapiens
tgactgttttcccct

SEQ ID NO: 2037556 - DNA, 15 bp, Homo sapiens
gactgttttcccctc

SEQ ID NO: 2037557 - DNA, 15 bp, Homo sapiens
actgttttcccctca

SEQ ID NO: 2037558 - DNA, 15 bp, Homo sapiens
ctgttttcccctcag

SEQ ID NO: 2037559 - DNA, 15 bp, Homo sapiens
tgttttcccctcaga

SEQ ID NO: 2037560 - DNA, 15 bp, Homo sapiens
gttttcccctcagag

SEQ ID NO: 2037561 - DNA, 15 bp, Homo sapiens
ttttcccctcagagt

SEQ ID NO: 2037562 - DNA, 15 bp, Homo sapiens
tttcccctcagagta

SEQ ID NO: 2037563 - DNA, 15 bp, Homo sapiens
ttcccctcagagtag

SEQ ID NO: 2037564 - DNA, 15 bp, Homo sapiens
tcccctcagagtagg

SEQ ID NO: 2037565 - DNA, 15 bp, Homo sapiens
cccctcagagtaggc

SEQ ID NO: 2037566 - DNA, 15 bp, Homo sapiens
ccctcagagtaggcc

SEQ ID NO: 2037567 - DNA, 15 bp, Homo sapiens
cctcagagtaggcca

SEQ ID NO: 2037568 - DNA, 15 bp, Homo sapiens
ctcagagtaggccat

SEQ ID NO: 2037569 - DNA, 15 bp, Homo sapiens
tcagagtaggccatg

SEQ ID NO: 2037570 - DNA, 15 bp, Homo sapiens
cagagtaggccatgg

SEQ ID NO: 2037571 - DNA, 15 bp, Homo sapiens
agagtaggccatggt

SEQ ID NO: 2037572 - DNA, 15 bp, Homo sapiens
gagtaggccatggtc

SEQ ID NO: 2037573 - DNA, 15 bp, Homo sapiens
agtaggccatggtct

SEQ ID NO: 2037574 - DNA, 15 bp, Homo sapiens
gtaggccatggtcta

SEQ ID NO: 2037575 - DNA, 15 bp, Homo sapiens
taggccatggtctag

SEQ ID NO: 2037576 - DNA, 15 bp, Homo sapiens
aggccatggtctagt

SEQ ID NO: 2037577 - DNA, 15 bp, Homo sapiens
ggccatggtctagta

SEQ ID NO: 2037578 - DNA, 15 bp, Homo sapiens
gccatggtctagtag

SEQ ID NO: 2037579 - DNA, 15 bp, Homo sapiens
ccatggtctagtagt

SEQ ID NO: 2037580 - DNA, 15 bp, Homo sapiens
catggtctagtagta

SEQ ID NO: 2037581 - DNA, 15 bp, Homo sapiens
atggtctagtagtag

SEQ ID NO: 2037582 - DNA, 15 bp, Homo sapiens
tggtctagtagtagc

SEQ ID NO: 2037583 - DNA, 15 bp, Homo sapiens
ggtctagtagtagca

SEQ ID NO: 2037584 - DNA, 15 bp, Homo sapiens
gtctagtagtagcaa

SEQ ID NO: 2037585 - DNA, 15 bp, Homo sapiens
tctagtagtagcaag

SEQ ID NO: 2037586 - DNA, 15 bp, Homo sapiens
ctagtagtagcaaga

SEQ ID NO: 2037587 - DNA, 15 bp, Homo sapiens
tagtagtagcaagac

SEQ ID NO: 2037588 - DNA, 15 bp, Homo sapiens
agtagtagcaagaca

SEQ ID NO: 2037589 - DNA, 15 bp, Homo sapiens
gtagtagcaagacac

SEQ ID NO: 2037590 - DNA, 15 bp, Homo sapiens
tagtagcaagacaca

SEQ ID NO: 2037591 - DNA, 15 bp, Homo sapiens
agtagcaagacacac

SEQ ID NO: 2037592 - DNA, 15 bp, Homo sapiens
gtagcaagacacaca

SEQ ID NO: 2037593 - DNA, 15 bp, Homo sapiens
tagcaagacacacaa

SEQ ID NO: 2037594 - DNA, 15 bp, Homo sapiens
agcaagacacacaag

SEQ ID NO: 2037595 - DNA, 15 bp, Homo sapiens
gcaagacacacaaga

SEQ ID NO: 2037596 - DNA, 15 bp, Homo sapiens
caagacacacaagaa

SEQ ID NO: 2037597 - DNA, 15 bp, Homo sapiens
aagacacacaagaac

SEQ ID NO: 2037598 - DNA, 15 bp, Homo sapiens
agacacacaagaacg

SEQ ID NO: 2037599 - DNA, 15 bp, Homo sapiens
gacacacaagaacga

SEQ ID NO: 2037600 - DNA, 15 bp, Homo sapiens
acacacaagaacgag

SEQ ID NO: 2037601 - DNA, 15 bp, Homo sapiens
cacacaagaacgagc

SEQ ID NO: 2037602 - DNA, 15 bp, Homo sapiens
acacaagaacgagcc

SEQ ID NO: 2037603 - DNA, 15 bp, Homo sapiens
cacaagaacgagccc

SEQ ID NO: 2037604 - DNA, 15 bp, Homo sapiens
acaagaacgagcccc

SEQ ID NO: 2037605 - DNA, 15 bp, Homo sapiens
caagaacgagcccca

SEQ ID NO: 2037606 - DNA, 15 bp, Homo sapiens
aagaacgagccccag

SEQ ID NO: 2037607 - DNA, 15 bp, Homo sapiens
agaacgagccccagg

SEQ ID NO: 2037608 - DNA, 15 bp, Homo sapiens
gaacgagccccaggg

SEQ ID NO: 2037609 - DNA, 15 bp, Homo sapiens
aacgagccccagggt

SEQ ID NO: 2037610 - DNA, 15 bp, Homo sapiens
acgagccccagggta

SEQ ID NO: 2037611 - DNA, 15 bp, Homo sapiens
cgagccccagggtag

SEQ ID NO: 2037612 - DNA, 15 bp, Homo sapiens
gagccccagggtagc

SEQ ID NO: 2037613 - DNA, 15 bp, Homo sapiens
agccccagggtagca

SEQ ID NO: 2037614 - DNA, 15 bp, Homo sapiens
gccccagggtagcag

SEQ ID NO: 2037615 - DNA, 15 bp, Homo sapiens
ccccagggtagcaga

SEQ ID NO: 2037616 - DNA, 15 bp, Homo sapiens
cccagggtagcagat

SEQ ID NO: 2037617 - DNA, 15 bp, Homo sapiens
ccagggtagcagatt

SEQ ID NO: 2037618 - DNA, 15 bp, Homo sapiens
cagggtagcagattg

SEQ ID NO: 2037619 - DNA, 15 bp, Homo sapiens
agggtagcagattgc

SEQ ID NO: 2037620 - DNA, 15 bp, Homo sapiens
gggtagcagattgct

SEQ ID NO: 2037621 - DNA, 15 bp, Homo sapiens
ggtagcagattgctg

SEQ ID NO: 2037622 - DNA, 15 bp, Homo sapiens
gtagcagattgctgg

SEQ ID NO: 2037623 - DNA, 15 bp, Homo sapiens
tagcagattgctggc

SEQ ID NO: 2037624 - DNA, 15 bp, Homo sapiens
agcagattgctggca

SEQ ID NO: 2037625 - DNA, 15 bp, Homo sapiens
gcagattgctggcag

SEQ ID NO: 2037626 - DNA, 15 bp, Homo sapiens
cagattgctggcaga

SEQ ID NO: 2037627 - DNA, 15 bp, Homo sapiens
agattgctggcagag

SEQ ID NO: 2037628 - DNA, 15 bp, Homo sapiens
gattgctggcagaga

SEQ ID NO: 2037629 - DNA, 15 bp, Homo sapiens
attgctggcagagag

SEQ ID NO: 2037630 - DNA, 15 bp, Homo sapiens
ttgctggcagagagt

SEQ ID NO: 2037631 - DNA, 15 bp, Homo sapiens
tgctggcagagagtc

SEQ ID NO: 2037632 - DNA, 15 bp, Homo sapiens
gctggcagagagtca

SEQ ID NO: 2037633 - DNA, 15 bp, Homo sapiens
ctggcagagagtcac

SEQ ID NO: 2037634 - DNA, 15 bp, Homo sapiens
tggcagagagtcaca

SEQ ID NO: 2037635 - DNA, 15 bp, Homo sapiens
ggcagagagtcacag

SEQ ID NO: 2037636 - DNA, 15 bp, Homo sapiens
gcagagagtcacagg

SEQ ID NO: 2037637 - DNA, 15 bp, Homo sapiens
cagagagtcacaggg

SEQ ID NO: 2037638 - DNA, 15 bp, Homo sapiens
agagagtcacagggc

SEQ ID NO: 2037639 - DNA, 15 bp, Homo sapiens
gagagtcacagggcc

SEQ ID NO: 2037640 - DNA, 15 bp, Homo sapiens
agagtcacagggcct

SEQ ID NO: 2037641 - DNA, 15 bp, Homo sapiens
gagtcacagggcctt

SEQ ID NO: 2037642 - DNA, 15 bp, Homo sapiens
agtcacagggccttc

SEQ ID NO: 2037643 - DNA, 15 bp, Homo sapiens
gtcacagggccttcc

SEQ ID NO: 2037644 - DNA, 15 bp, Homo sapiens
tcacagggccttcct

SEQ ID NO: 2037645 - DNA, 15 bp, Homo sapiens
cacagggccttccta

SEQ ID NO: 2037646 - DNA, 15 bp, Homo sapiens
acagggccttcctag

SEQ ID NO: 2037647 - DNA, 15 bp, Homo sapiens
cagggccttcctagt

SEQ ID NO: 2037648 - DNA, 15 bp, Homo sapiens
agggccttcctagtg

SEQ ID NO: 2037649 - DNA, 15 bp, Homo sapiens
gggccttcctagtgg

SEQ ID NO: 2037650 - DNA, 15 bp, Homo sapiens
ggccttcctagtggt

SEQ ID NO: 2037651 - DNA, 15 bp, Homo sapiens
gccttcctagtggtc

SEQ ID NO: 2037652 - DNA, 15 bp, Homo sapiens
ccttcctagtggtca

SEQ ID NO: 2037653 - DNA, 15 bp, Homo sapiens
cttcctagtggtcat

SEQ ID NO: 2037654 - DNA, 15 bp, Homo sapiens
ttcctagtggtcatc

SEQ ID NO: 2037655 - DNA, 15 bp, Homo sapiens
tcctagtggtcatcc

SEQ ID NO: 2037656 - DNA, 15 bp, Homo sapiens
cctagtggtcatcca

SEQ ID NO: 2037657 - DNA, 15 bp, Homo sapiens
ctagtggtcatccat

SEQ ID NO: 2037658 - DNA, 15 bp, Homo sapiens
tagtggtcatccatg

SEQ ID NO: 2037659 - DNA, 15 bp, Homo sapiens
agtggtcatccatgc

SEQ ID NO: 2037660 - DNA, 15 bp, Homo sapiens
gtggtcatccatgct

SEQ ID NO: 2037661 - DNA, 15 bp, Homo sapiens
tggtcatccatgctt

SEQ ID NO: 2037662 - DNA, 15 bp, Homo sapiens
ggtcatccatgcttc

SEQ ID NO: 2037663 - DNA, 15 bp, Homo sapiens
gtcatccatgcttca

SEQ ID NO: 2037664 - DNA, 15 bp, Homo sapiens
tcatccatgcttcat

SEQ ID NO: 2037665 - DNA, 15 bp, Homo sapiens
catccatgcttcatg

SEQ ID NO: 2037666 - DNA, 15 bp, Homo sapiens
atccatgcttcatgc

SEQ ID NO: 2037667 - DNA, 15 bp, Homo sapiens
tccatgcttcatgcc

SEQ ID NO: 2037668 - DNA, 15 bp, Homo sapiens
ccatgcttcatgccc

SEQ ID NO: 2037669 - DNA, 15 bp, Homo sapiens
catgcttcatgcccc

SEQ ID NO: 2037670 - DNA, 15 bp, Homo sapiens
atgcttcatgcccct

SEQ ID NO: 2037671 - DNA, 15 bp, Homo sapiens
tgcttcatgcccctc

SEQ ID NO: 2037672 - DNA, 15 bp, Homo sapiens
gcttcatgcccctcc

SEQ ID NO: 2037673 - DNA, 15 bp, Homo sapiens
cttcatgcccctcct

SEQ ID NO: 2037674 - DNA, 15 bp, Homo sapiens
ttcatgcccctcctg

SEQ ID NO: 2037675 - DNA, 15 bp, Homo sapiens
tcatgcccctcctgc

SEQ ID NO: 2037676 - DNA, 15 bp, Homo sapiens
catgcccctcctgca

SEQ ID NO: 2037677 - DNA, 15 bp, Homo sapiens
atgcccctcctgcat

SEQ ID NO: 2037678 - DNA, 15 bp, Homo sapiens
tgcccctcctgcatg

SEQ ID NO: 2037679 - DNA, 15 bp, Homo sapiens
gcccctcctgcatgc

SEQ ID NO: 2037680 - DNA, 15 bp, Homo sapiens
cccctcctgcatgcg

SEQ ID NO: 2037681 - DNA, 15 bp, Homo sapiens
ccctcctgcatgcgg

SEQ ID NO: 2037682 - DNA, 15 bp, Homo sapiens
cctcctgcatgcggg

SEQ ID NO: 2037683 - DNA, 15 bp, Homo sapiens
ctcctgcatgcgggc

SEQ ID NO: 2037684 - DNA, 15 bp, Homo sapiens
tcctgcatgcgggcc

SEQ ID NO: 2037685 - DNA, 15 bp, Homo sapiens
cctgcatgcgggcca

SEQ ID NO: 2037686 - DNA, 15 bp, Homo sapiens
ctgcatgcgggccag

SEQ ID NO: 2037687 - DNA, 15 bp, Homo sapiens
tgcatgcgggccagc

SEQ ID NO: 2037688 - DNA, 15 bp, Homo sapiens
gcatgcgggccagct

SEQ ID NO: 2037689 - DNA, 15 bp, Homo sapiens
catgcgggccagctc

SEQ ID NO: 2037690 - DNA, 15 bp, Homo sapiens
atgcgggccagctcc

SEQ ID NO: 2037691 - DNA, 15 bp, Homo sapiens
tgcgggccagctcca

SEQ ID NO: 2037692 - DNA, 15 bp, Homo sapiens
gcgggccagctccaa

SEQ ID NO: 2037693 - DNA, 15 bp, Homo sapiens
cgggccagctccaag

SEQ ID NO: 2037694 - DNA, 15 bp, Homo sapiens
gggccagctccaagt

SEQ ID NO: 2037695 - DNA, 15 bp, Homo sapiens
ggccagctccaagtt

SEQ ID NO: 2037696 - DNA, 15 bp, Homo sapiens
gccagctccaagttg

SEQ ID NO: 2037697 - DNA, 15 bp, Homo sapiens
ccagctccaagttgt

SEQ ID NO: 2037698 - DNA, 15 bp, Homo sapiens
cagctccaagttgtt

SEQ ID NO: 2037699 - DNA, 15 bp, Homo sapiens
agctccaagttgttt

SEQ ID NO: 2037700 - DNA, 15 bp, Homo sapiens
gctccaagttgtttc

SEQ ID NO: 2037701 - DNA, 15 bp, Homo sapiens
ctccaagttgtttca

SEQ ID NO: 2037702 - DNA, 15 bp, Homo sapiens
tccaagttgtttcaa

SEQ ID NO: 2037703 - DNA, 15 bp, Homo sapiens
ccaagttgtttcaaa

SEQ ID NO: 2037704 - DNA, 15 bp, Homo sapiens
caagttgtttcaaac

SEQ ID NO: 2037705 - DNA, 15 bp, Homo sapiens
aagttgtttcaaacc

SEQ ID NO: 2037706 - DNA, 15 bp, Homo sapiens
agttgtttcaaacct

SEQ ID NO: 2037707 - DNA, 15 bp, Homo sapiens
gttgtttcaaacctt

SEQ ID NO: 2037708 - DNA, 15 bp, Homo sapiens
ttgtttcaaaccttt

SEQ ID NO: 2037709 - DNA, 15 bp, Homo sapiens
tgtttcaaacctttg

SEQ ID NO: 2037710 - DNA, 15 bp, Homo sapiens
gtttcaaacctttgt

SEQ ID NO: 2037711 - DNA, 15 bp, Homo sapiens
tttcaaacctttgtc

SEQ ID NO: 2037712 - DNA, 15 bp, Homo sapiens
ttcaaacctttgtct

SEQ ID NO: 2037713 - DNA, 15 bp, Homo sapiens
tcaaacctttgtctt

SEQ ID NO: 2037714 - DNA, 15 bp, Homo sapiens
caaacctttgtcttt

SEQ ID NO: 2037715 - DNA, 15 bp, Homo sapiens
aaacctttgtctttt

SEQ ID NO: 2037716 - DNA, 15 bp, Homo sapiens
aacctttgtcttttt

SEQ ID NO: 2037717 - DNA, 15 bp, Homo sapiens
acctttgtcttttta

SEQ ID NO: 2037718 - DNA, 15 bp, Homo sapiens
cctttgtctttttaa

SEQ ID NO: 2037719 - DNA, 15 bp, Homo sapiens
ctttgtctttttaag

SEQ ID NO: 2037720 - DNA, 15 bp, Homo sapiens
tttgtctttttaagg

SEQ ID NO: 2037721 - DNA, 15 bp, Homo sapiens
ttgtctttttaaggt

SEQ ID NO: 2037722 - DNA, 15 bp, Homo sapiens
tgtctttttaaggtc

SEQ ID NO: 2037723 - DNA, 15 bp, Homo sapiens
gtctttttaaggtcc

SEQ ID NO: 2037724 - DNA, 15 bp, Homo sapiens
tctttttaaggtcct

SEQ ID NO: 2037725 - DNA, 15 bp, Homo sapiens
ctttttaaggtccta

SEQ ID NO: 2037726 - DNA, 15 bp, Homo sapiens
tttttaaggtcctag

SEQ ID NO: 2037727 - DNA, 15 bp, Homo sapiens
ttttaaggtcctagt

SEQ ID NO: 2037728 - DNA, 15 bp, Homo sapiens
tttaaggtcctagtt

SEQ ID NO: 2037729 - DNA, 15 bp, Homo sapiens
ttaaggtcctagttt

SEQ ID NO: 2037730 - DNA, 15 bp, Homo sapiens
taaggtcctagtttt

SEQ ID NO: 2037731 - DNA, 15 bp, Homo sapiens
aaggtcctagttttg

SEQ ID NO: 2037732 - DNA, 15 bp, Homo sapiens
aggtcctagttttgc

SEQ ID NO: 2037733 - DNA, 15 bp, Homo sapiens
ggtcctagttttgcc

SEQ ID NO: 2037734 - DNA, 15 bp, Homo sapiens
gtcctagttttgcct

SEQ ID NO: 2037735 - DNA, 15 bp, Homo sapiens
tcctagttttgcctg

SEQ ID NO: 2037736 - DNA, 15 bp, Homo sapiens
cctagttttgcctga

SEQ ID NO: 2037737 - DNA, 15 bp, Homo sapiens
ctagttttgcctgaa

SEQ ID NO: 2037738 - DNA, 15 bp, Homo sapiens
tagttttgcctgaat

SEQ ID NO: 2037739 - DNA, 15 bp, Homo sapiens
agttttgcctgaatc

SEQ ID NO: 2037740 - DNA, 15 bp, Homo sapiens
gttttgcctgaatct

SEQ ID NO: 2037741 - DNA, 15 bp, Homo sapiens
ttttgcctgaatctt

SEQ ID NO: 2037742 - DNA, 15 bp, Homo sapiens
tttgcctgaatctta

SEQ ID NO: 2037743 - DNA, 15 bp, Homo sapiens
ttgcctgaatcttat

SEQ ID NO: 2037744 - DNA, 15 bp, Homo sapiens
tgcctgaatcttatt

SEQ ID NO: 2037745 - DNA, 15 bp, Homo sapiens
gcctgaatcttattt

SEQ ID NO: 2037746 - DNA, 15 bp, Homo sapiens
cctgaatcttatttt

SEQ ID NO: 2037747 - DNA, 15 bp, Homo sapiens
ctgaatcttattttc

SEQ ID NO: 2037748 - DNA, 15 bp, Homo sapiens
tgaatcttattttct

SEQ ID NO: 2037749 - DNA, 15 bp, Homo sapiens
gaatcttattttcta

SEQ ID NO: 2037750 - DNA, 15 bp, Homo sapiens
aatcttattttctat

SEQ ID NO: 2037751 - DNA, 15 bp, Homo sapiens
atcttattttctatt

SEQ ID NO: 2037752 - DNA, 15 bp, Homo sapiens
cttattttctattaa

SEQ ID NO: 2037753 - DNA, 15 bp, Homo sapiens
ttattttctattaaa

SEQ ID NO: 2037754 - DNA, 15 bp, Homo sapiens
tattttctattaaag

SEQ ID NO: 2037755 - DNA, 15 bp, Homo sapiens
attttctattaaaga

SEQ ID NO: 2037756 - DNA, 15 bp, Homo sapiens
ttttctattaaagaa

SEQ ID NO: 2037757 - DNA, 15 bp, Homo sapiens
tttctattaaagaaa

SEQ ID NO: 2037758 - DNA, 15 bp, Homo sapiens
ttctattaaagaaac

SEQ ID NO: 2037759 - DNA, 15 bp, Homo sapiens
tctattaaagaaaca

SEQ ID NO: 2037760 - DNA, 15 bp, Homo sapiens
ctattaaagaaacaa

SEQ ID NO: 2037761 - DNA, 15 bp, Homo sapiens
tattaaagaaacaac

SEQ ID NO: 2037762 - DNA, 15 bp, Homo sapiens
attaaagaaacaact

SEQ ID NO: 2037763 - DNA, 15 bp, Homo sapiens
ttaaagaaacaactc

SEQ ID NO: 2037764 - DNA, 15 bp, Homo sapiens
taaagaaacaactca

SEQ ID NO: 2037765 - DNA, 15 bp, Homo sapiens
aaagaaacaactcag

SEQ ID NO: 2037766 - DNA, 15 bp, Homo sapiens
aagaaacaactcaga

SEQ ID NO: 2037767 - DNA, 15 bp, Homo sapiens
agaaacaactcagaa

SEQ ID NO: 2037768 - DNA, 15 bp, Homo sapiens
gaaacaactcagaat

SEQ ID NO: 2037769 - DNA, 15 bp, Homo sapiens
aaacaactcagaatt

SEQ ID NO: 2037770 - DNA, 15 bp, Homo sapiens
aacaactcagaatta

SEQ ID NO: 2037771 - DNA, 15 bp, Homo sapiens
acaactcagaattac

SEQ ID NO: 2037772 - DNA, 15 bp, Homo sapiens
caactcagaattact

SEQ ID NO: 2037773 - DNA, 15 bp, Homo sapiens
aactcagaattactg

SEQ ID NO: 2037774 - DNA, 15 bp, Homo sapiens
actcagaattactgg

SEQ ID NO: 2037775 - DNA, 15 bp, Homo sapiens
ctcagaattactgga

SEQ ID NO: 2037776 - DNA, 15 bp, Homo sapiens
tcagaattactggac

SEQ ID NO: 2037777 - DNA, 15 bp, Homo sapiens
cagaattactggact

SEQ ID NO: 2037778 - DNA, 15 bp, Homo sapiens
agaattactggactt

SEQ ID NO: 2037779 - DNA, 15 bp, Homo sapiens
gaattactggacttg

SEQ ID NO: 2037780 - DNA, 15 bp, Homo sapiens
aattactggacttga

SEQ ID NO: 2037781 - DNA, 15 bp, Homo sapiens
attactggacttgaa

SEQ ID NO: 2037782 - DNA, 15 bp, Homo sapiens
ttactggacttgaaa

SEQ ID NO: 2037783 - DNA, 15 bp, Homo sapiens
tactggacttgaaac

SEQ ID NO: 2037784 - DNA, 15 bp, Homo sapiens
actggacttgaaact

SEQ ID NO: 2037785 - DNA, 15 bp, Homo sapiens
ctggacttgaaactt

SEQ ID NO: 2037786 - DNA, 15 bp, Homo sapiens
tggacttgaaacttg

SEQ ID NO: 2037787 - DNA, 15 bp, Homo sapiens
ggacttgaaacttgt

SEQ ID NO: 2037788 - DNA, 15 bp, Homo sapiens
gacttgaaacttgta

SEQ ID NO: 2037789 - DNA, 15 bp, Homo sapiens
acttgaaacttgtag

SEQ ID NO: 2037790 - DNA, 15 bp, Homo sapiens
cttgaaacttgtagg

SEQ ID NO: 2037791 - DNA, 15 bp, Homo sapiens
ttgaaacttgtaggc

SEQ ID NO: 2037792 - DNA, 15 bp, Homo sapiens
tgaaacttgtaggcc

SEQ ID NO: 2037793 - DNA, 15 bp, Homo sapiens
gaaacttgtaggcca

SEQ ID NO: 2037794 - DNA, 15 bp, Homo sapiens
aaacttgtaggccaa

SEQ ID NO: 2037795 - DNA, 15 bp, Homo sapiens
aacttgtaggccaaa

SEQ ID NO: 2037796 - DNA, 15 bp, Homo sapiens
acttgtaggccaaat

SEQ ID NO: 2037797 - DNA, 15 bp, Homo sapiens
cttgtaggccaaatg

SEQ ID NO: 2037798 - DNA, 15 bp, Homo sapiens
ttgtaggccaaatgc

SEQ ID NO: 2037799 - DNA, 15 bp, Homo sapiens
tgtaggccaaatgca

SEQ ID NO: 2037800 - DNA, 15 bp, Homo sapiens
gtaggccaaatgcaa

SEQ ID NO: 2037801 - DNA, 15 bp, Homo sapiens
taggccaaatgcaaa

SEQ ID NO: 2037802 - DNA, 15 bp, Homo sapiens
aggccaaatgcaaat

SEQ ID NO: 2037803 - DNA, 15 bp, Homo sapiens
ggccaaatgcaaatt

SEQ ID NO: 2037804 - DNA, 15 bp, Homo sapiens
gccaaatgcaaattt

SEQ ID NO: 2037805 - DNA, 15 bp, Homo sapiens
ccaaatgcaaatttg

SEQ ID NO: 2037806 - DNA, 15 bp, Homo sapiens
caaatgcaaatttga

SEQ ID NO: 2037807 - DNA, 15 bp, Homo sapiens
aaatgcaaatttgag

SEQ ID NO: 2037808 - DNA, 15 bp, Homo sapiens
aatgcaaatttgagg

SEQ ID NO: 2037809 - DNA, 15 bp, Homo sapiens
atgcaaatttgagga

SEQ ID NO: 2037810 - DNA, 15 bp, Homo sapiens
tgcaaatttgaggaa

SEQ ID NO: 2037811 - DNA, 15 bp, Homo sapiens
gcaaatttgaggaaa

SEQ ID NO: 2037812 - DNA, 15 bp, Homo sapiens
aaatttgaggaaatg

SEQ ID NO: 2037813 - DNA, 15 bp, Homo sapiens
aatttgaggaaatgg

SEQ ID NO: 2037814 - DNA, 15 bp, Homo sapiens
atttgaggaaatgga

SEQ ID NO: 2037815 - DNA, 15 bp, Homo sapiens
tttgaggaaatggaa

SEQ ID NO: 2037816 - DNA, 15 bp, Homo sapiens
ttgaggaaatggaag

SEQ ID NO: 2037817 - DNA, 15 bp, Homo sapiens
tgaggaaatggaagg

SEQ ID NO: 2037818 - DNA, 15 bp, Homo sapiens
gaggaaatggaaggt

SEQ ID NO: 2037819 - DNA, 15 bp, Homo sapiens
aggaaatggaaggtc

SEQ ID NO: 2037820 - DNA, 15 bp, Homo sapiens
ggaaatggaaggtca

SEQ ID NO: 2037821 - DNA, 15 bp, Homo sapiens
gaaatggaaggtcaa

SEQ ID NO: 2037822 - DNA, 15 bp, Homo sapiens
aaatggaaggtcaaa

SEQ ID NO: 2037823 - DNA, 15 bp, Homo sapiens
aatggaaggtcaaat

SEQ ID NO: 2037824 - DNA, 15 bp, Homo sapiens
atggaaggtcaaata

SEQ ID NO: 2037825 - DNA, 15 bp, Homo sapiens
tggaaggtcaaatac

SEQ ID NO: 2037826 - DNA, 15 bp, Homo sapiens
ggaaggtcaaatacg

SEQ ID NO: 2037827 - DNA, 15 bp, Homo sapiens
gaaggtcaaatacgc

SEQ ID NO: 2037828 - DNA, 15 bp, Homo sapiens
aaggtcaaatacgct

SEQ ID NO: 2037829 - DNA, 15 bp, Homo sapiens
aggtcaaatacgctg

SEQ ID NO: 2037830 - DNA, 15 bp, Homo sapiens
ggtcaaatacgctga

SEQ ID NO: 2037831 - DNA, 15 bp, Homo sapiens
gtcaaatacgctgac

SEQ ID NO: 2037832 - DNA, 15 bp, Homo sapiens
tcaaatacgctgaca

SEQ ID NO: 2037833 - DNA, 15 bp, Homo sapiens
caaatacgctgacaa

SEQ ID NO: 2037834 - DNA, 15 bp, Homo sapiens
aaatacgctgacaaa

SEQ ID NO: 2037835 - DNA, 15 bp, Homo sapiens
aatacgctgacaaat

SEQ ID NO: 2037836 - DNA, 15 bp, Homo sapiens
atacgctgacaaatt

SEQ ID NO: 2037837 - DNA, 15 bp, Homo sapiens
tacgctgacaaattc

SEQ ID NO: 2037838 - DNA, 15 bp, Homo sapiens
acgctgacaaattca

SEQ ID NO: 2037839 - DNA, 15 bp, Homo sapiens
cgctgacaaattcat

SEQ ID NO: 2037840 - DNA, 15 bp, Homo sapiens
gctgacaaattcata

SEQ ID NO: 2037841 - DNA, 15 bp, Homo sapiens
ctgacaaattcataa

SEQ ID NO: 2037842 - DNA, 15 bp, Homo sapiens
tgacaaattcataat

SEQ ID NO: 2037843 - DNA, 15 bp, Homo sapiens
gacaaattcataatt

SEQ ID NO: 2037844 - DNA, 15 bp, Homo sapiens
acaaattcataattt

SEQ ID NO: 2037845 - DNA, 15 bp, Homo sapiens
caaattcataatttt

SEQ ID NO: 2037846 - DNA, 15 bp, Homo sapiens
aaattcataatttta

SEQ ID NO: 2037847 - DNA, 15 bp, Homo sapiens
aattcataattttaa

SEQ ID NO: 2037848 - DNA, 15 bp, Homo sapiens
attcataattttaag

SEQ ID NO: 2037849 - DNA, 15 bp, Homo sapiens
ttcataattttaagt

SEQ ID NO: 2037850 - DNA, 15 bp, Homo sapiens
tcataattttaagtg

SEQ ID NO: 2037851 - DNA, 15 bp, Homo sapiens
cataattttaagtgg

SEQ ID NO: 2037852 - DNA, 15 bp, Homo sapiens
ataattttaagtgga

SEQ ID NO: 2037853 - DNA, 15 bp, Homo sapiens
taattttaagtggag

SEQ ID NO: 2037854 - DNA, 15 bp, Homo sapiens
aattttaagtggagg

SEQ ID NO: 2037855 - DNA, 15 bp, Homo sapiens
attttaagtggagga

SEQ ID NO: 2037856 - DNA, 15 bp, Homo sapiens
ttttaagtggaggat

SEQ ID NO: 2037857 - DNA, 15 bp, Homo sapiens
tttaagtggaggatg

SEQ ID NO: 2037858 - DNA, 15 bp, Homo sapiens
ttaagtggaggatgc

SEQ ID NO: 2037859 - DNA, 15 bp, Homo sapiens
taagtggaggatgcc

SEQ ID NO: 2037860 - DNA, 15 bp, Homo sapiens
aagtggaggatgcca

SEQ ID NO: 2037861 - DNA, 15 bp, Homo sapiens
agtggaggatgccaa

SEQ ID NO: 2037862 - DNA, 15 bp, Homo sapiens
gtggaggatgccaaa

SEQ ID NO: 2037863 - DNA, 15 bp, Homo sapiens
tggaggatgccaaag

SEQ ID NO: 2037864 - DNA, 15 bp, Homo sapiens
ggaggatgccaaagg

SEQ ID NO: 2037865 - DNA, 15 bp, Homo sapiens
gaggatgccaaaggg

SEQ ID NO: 2037866 - DNA, 15 bp, Homo sapiens
aggatgccaaaggga

SEQ ID NO: 2037867 - DNA, 15 bp, Homo sapiens
ggatgccaaagggaa

SEQ ID NO: 2037868 - DNA, 15 bp, Homo sapiens
gatgccaaagggaaa

SEQ ID NO: 2037869 - DNA, 15 bp, Homo sapiens
atgccaaagggaaaa

SEQ ID NO: 2037870 - DNA, 15 bp, Homo sapiens
tgccaaagggaaaaa

SEQ ID NO: 2037871 - DNA, 15 bp, Homo sapiens
gccaaagggaaaaaa

SEQ ID NO: 2037872 - DNA, 15 bp, Homo sapiens
ccaaagggaaaaaaa

SEQ ID NO: 2037873 - DNA, 15 bp, Homo sapiens
caaagggaaaaaaaa

SEQ ID NO: 2037874 - DNA, 15 bp, Homo sapiens
aaagggaaaaaaaaa

SEQ ID NO: 2037875 - DNA, 15 bp, Homo sapiens
agggaaaaaaaaaag

SEQ ID NO: 2037876 - DNA, 15 bp, Homo sapiens
gggaaaaaaaaaagt

SEQ ID NO: 2037877 - DNA, 15 bp, Homo sapiens
ggaaaaaaaaaagtt

SEQ ID NO: 2037878 - DNA, 15 bp, Homo sapiens
gaaaaaaaaaagttc

SEQ ID NO: 2037879 - DNA, 15 bp, Homo sapiens
aaaaaaaaaagttct

SEQ ID NO: 2037880 - DNA, 15 bp, Homo sapiens
aaaaaaaagttctat

SEQ ID NO: 2037881 - DNA, 15 bp, Homo sapiens
aaaaaaagttctatc

SEQ ID NO: 2037882 - DNA, 15 bp, Homo sapiens
aaaaaagttctatct

SEQ ID NO: 2037883 - DNA, 15 bp, Homo sapiens
aaaaagttctatctt

SEQ ID NO: 2037884 - DNA, 15 bp, Homo sapiens
aaaagttctatcttt

SEQ ID NO: 2037885 - DNA, 15 bp, Homo sapiens
aaagttctatctttt

SEQ ID NO: 2037886 - DNA, 15 bp, Homo sapiens
aagttctatcttttc

SEQ ID NO: 2037887 - DNA, 15 bp, Homo sapiens
agttctatcttttca

SEQ ID NO: 2037888 - DNA, 15 bp, Homo sapiens
gttctatcttttcaa

SEQ ID NO: 2037889 - DNA, 15 bp, Homo sapiens
ttctatcttttcaac

SEQ ID NO: 2037890 - DNA, 15 bp, Homo sapiens
tctatcttttcaact

SEQ ID NO: 2037891 - DNA, 15 bp, Homo sapiens
ctatcttttcaacta

SEQ ID NO: 2037892 - DNA, 15 bp, Homo sapiens
tatcttttcaactaa

SEQ ID NO: 2037893 - DNA, 15 bp, Homo sapiens
atcttttcaactaaa

SEQ ID NO: 2037894 - DNA, 15 bp, Homo sapiens
tcttttcaactaaaa

SEQ ID NO: 2037895 - DNA, 15 bp, Homo sapiens
cttttcaactaaaaa

SEQ ID NO: 2037896 - DNA, 15 bp, Homo sapiens
ttttcaactaaaaat

SEQ ID NO: 2037897 - DNA, 15 bp, Homo sapiens
tttcaactaaaaata

SEQ ID NO: 2037898 - DNA, 15 bp, Homo sapiens
ttcaactaaaaatat

SEQ ID NO: 2037899 - DNA, 15 bp, Homo sapiens
tcaactaaaaatatt

SEQ ID NO: 2037900 - DNA, 15 bp, Homo sapiens
caactaaaaatatta

SEQ ID NO: 2037901 - DNA, 15 bp, Homo sapiens
aactaaaaatattat

SEQ ID NO: 2037902 - DNA, 15 bp, Homo sapiens
actaaaaatattata

SEQ ID NO: 2037903 - DNA, 15 bp, Homo sapiens
ctaaaaatattatac

SEQ ID NO: 2037904 - DNA, 15 bp, Homo sapiens
taaaaatattatacc

SEQ ID NO: 2037905 - DNA, 15 bp, Homo sapiens
aaaaatattatacca

SEQ ID NO: 2037906 - DNA, 15 bp, Homo sapiens
aaaatattataccac

SEQ ID NO: 2037907 - DNA, 15 bp, Homo sapiens
aaatattataccact

SEQ ID NO: 2037908 - DNA, 15 bp, Homo sapiens
aatattataccactc

SEQ ID NO: 2037909 - DNA, 15 bp, Homo sapiens
atattataccactct

SEQ ID NO: 2037910 - DNA, 15 bp, Homo sapiens
tattataccactctc

SEQ ID NO: 2037911 - DNA, 15 bp, Homo sapiens
attataccactctct

SEQ ID NO: 2037912 - DNA, 15 bp, Homo sapiens
ttataccactctctg

SEQ ID NO: 2037913 - DNA, 15 bp, Homo sapiens
tataccactctctgg

SEQ ID NO: 2037914 - DNA, 15 bp, Homo sapiens
ataccactctctgga

SEQ ID NO: 2037915 - DNA, 15 bp, Homo sapiens
taccactctctggag

SEQ ID NO: 2037916 - DNA, 15 bp, Homo sapiens
accactctctggaga

SEQ ID NO: 2037917 - DNA, 15 bp, Homo sapiens
ccactctctggagat

SEQ ID NO: 2037918 - DNA, 15 bp, Homo sapiens
cactctctggagatc

SEQ ID NO: 2037919 - DNA, 15 bp, Homo sapiens
actctctggagatca

SEQ ID NO: 2037920 - DNA, 15 bp, Homo sapiens
ctctctggagatcag

SEQ ID NO: 2037921 - DNA, 15 bp, Homo sapiens
tctctggagatcagg

SEQ ID NO: 2037922 - DNA, 15 bp, Homo sapiens
ctctggagatcaggg

SEQ ID NO: 2037923 - DNA, 15 bp, Homo sapiens
tctggagatcaggga

SEQ ID NO: 2037924 - DNA, 15 bp, Homo sapiens
ctggagatcagggat

SEQ ID NO: 2037925 - DNA, 15 bp, Homo sapiens
tggagatcagggatt

SEQ ID NO: 2037926 - DNA, 15 bp, Homo sapiens
ggagatcagggattg

SEQ ID NO: 2037927 - DNA, 15 bp, Homo sapiens
gagatcagggattgc

SEQ ID NO: 2037928 - DNA, 15 bp, Homo sapiens
agatcagggattgca

SEQ ID NO: 2037929 - DNA, 15 bp, Homo sapiens
gatcagggattgcat

SEQ ID NO: 2037930 - DNA, 15 bp, Homo sapiens
atcagggattgcatg

SEQ ID NO: 2037931 - DNA, 15 bp, Homo sapiens
tcagggattgcatgc

SEQ ID NO: 2037932 - DNA, 15 bp, Homo sapiens
cagggattgcatgct

SEQ ID NO: 2037933 - DNA, 15 bp, Homo sapiens
agggattgcatgctt

SEQ ID NO: 2037934 - DNA, 15 bp, Homo sapiens
gggattgcatgcttt

SEQ ID NO: 2037935 - DNA, 15 bp, Homo sapiens
ggattgcatgctttg

SEQ ID NO: 2037936 - DNA, 15 bp, Homo sapiens
gattgcatgctttgg

SEQ ID NO: 2037937 - DNA, 15 bp, Homo sapiens
attgcatgctttggg

SEQ ID NO: 2037938 - DNA, 15 bp, Homo sapiens
ttgcatgctttgggg

SEQ ID NO: 2037939 - DNA, 15 bp, Homo sapiens
tgcatgctttggggc

SEQ ID NO: 2037940 - DNA, 15 bp, Homo sapiens
gcatgctttggggct

SEQ ID NO: 2037941 - DNA, 15 bp, Homo sapiens
catgctttggggctc

SEQ ID NO: 2037942 - DNA, 15 bp, Homo sapiens
atgctttggggctct

SEQ ID NO: 2037943 - DNA, 15 bp, Homo sapiens
tgctttggggctctg

SEQ ID NO: 2037944 - DNA, 15 bp, Homo sapiens
gctttggggctctga

SEQ ID NO: 2037945 - DNA, 15 bp, Homo sapiens
ctttggggctctgaa

SEQ ID NO: 2037946 - DNA, 15 bp, Homo sapiens
tttggggctctgaat

SEQ ID NO: 2037947 - DNA, 15 bp, Homo sapiens
ttggggctctgaatt

SEQ ID NO: 2037948 - DNA, 15 bp, Homo sapiens
tggggctctgaatta

SEQ ID NO: 2037949 - DNA, 15 bp, Homo sapiens
ggggctctgaattac

SEQ ID NO: 2037950 - DNA, 15 bp, Homo sapiens
gggctctgaattaca

SEQ ID NO: 2037951 - DNA, 15 bp, Homo sapiens
ggctctgaattacag

SEQ ID NO: 2037952 - DNA, 15 bp, Homo sapiens
gctctgaattacagg

SEQ ID NO: 2037953 - DNA, 15 bp, Homo sapiens
ctctgaattacaggt

SEQ ID NO: 2037954 - DNA, 15 bp, Homo sapiens
tctgaattacaggta

SEQ ID NO: 2037955 - DNA, 15 bp, Homo sapiens
ctgaattacaggtat

SEQ ID NO: 2037956 - DNA, 15 bp, Homo sapiens
tgaattacaggtatc

SEQ ID NO: 2037957 - DNA, 15 bp, Homo sapiens
gaattacaggtatct

SEQ ID NO: 2037958 - DNA, 15 bp, Homo sapiens
aattacaggtatcta

SEQ ID NO: 2037959 - DNA, 15 bp, Homo sapiens
attacaggtatctag

SEQ ID NO: 2037960 - DNA, 15 bp, Homo sapiens
ttacaggtatctagc

SEQ ID NO: 2037961 - DNA, 15 bp, Homo sapiens
tacaggtatctagct

SEQ ID NO: 2037962 - DNA, 15 bp, Homo sapiens
acaggtatctagcta

SEQ ID NO: 2037963 - DNA, 15 bp, Homo sapiens
caggtatctagctat

SEQ ID NO: 2037964 - DNA, 15 bp, Homo sapiens
aggtatctagctatc

SEQ ID NO: 2037965 - DNA, 15 bp, Homo sapiens
ggtatctagctatca

SEQ ID NO: 2037966 - DNA, 15 bp, Homo sapiens
gtatctagctatcac

SEQ ID NO: 2037967 - DNA, 15 bp, Homo sapiens
tatctagctatcaca

SEQ ID NO: 2037968 - DNA, 15 bp, Homo sapiens
atctagctatcacat

SEQ ID NO: 2037969 - DNA, 15 bp, Homo sapiens
tctagctatcacatt

SEQ ID NO: 2037970 - DNA, 15 bp, Homo sapiens
ctagctatcacattt

SEQ ID NO: 2037971 - DNA, 15 bp, Homo sapiens
tagctatcacatttt

SEQ ID NO: 2037972 - DNA, 15 bp, Homo sapiens
agctatcacatttta

SEQ ID NO: 2037973 - DNA, 15 bp, Homo sapiens
gctatcacattttaa

SEQ ID NO: 2037974 - DNA, 15 bp, Homo sapiens
ctatcacattttaaa

SEQ ID NO: 2037975 - DNA, 15 bp, Homo sapiens
tatcacattttaaaa

SEQ ID NO: 2037976 - DNA, 15 bp, Homo sapiens
atcacattttaaaat

SEQ ID NO: 2037977 - DNA, 15 bp, Homo sapiens
tcacattttaaaatg

SEQ ID NO: 2037978 - DNA, 15 bp, Homo sapiens
cacattttaaaatgg

SEQ ID NO: 2037979 - DNA, 15 bp, Homo sapiens
acattttaaaatgga

SEQ ID NO: 2037980 - DNA, 15 bp, Homo sapiens
cattttaaaatggaa

SEQ ID NO: 2037981 - DNA, 15 bp, Homo sapiens
attttaaaatggaag

SEQ ID NO: 2037982 - DNA, 15 bp, Homo sapiens
ttttaaaatggaagt

SEQ ID NO: 2037983 - DNA, 15 bp, Homo sapiens
tttaaaatggaagtg

SEQ ID NO: 2037984 - DNA, 15 bp, Homo sapiens
ttaaaatggaagtgt

SEQ ID NO: 2037985 - DNA, 15 bp, Homo sapiens
taaaatggaagtgtt

SEQ ID NO: 2037986 - DNA, 15 bp, Homo sapiens
aaaatggaagtgttc

SEQ ID NO: 2037987 - DNA, 15 bp, Homo sapiens
aaatggaagtgttca

SEQ ID NO: 2037988 - DNA, 15 bp, Homo sapiens
aatggaagtgttcag

SEQ ID NO: 2037989 - DNA, 15 bp, Homo sapiens
atggaagtgttcagt

SEQ ID NO: 2037990 - DNA, 15 bp, Homo sapiens
tggaagtgttcagtt

SEQ ID NO: 2037991 - DNA, 15 bp, Homo sapiens
ggaagtgttcagttc

SEQ ID NO: 2037992 - DNA, 15 bp, Homo sapiens
gaagtgttcagttca

SEQ ID NO: 2037993 - DNA, 15 bp, Homo sapiens
aagtgttcagttcat

SEQ ID NO: 2037994 - DNA, 15 bp, Homo sapiens
agtgttcagttcatt

SEQ ID NO: 2037995 - DNA, 15 bp, Homo sapiens
gtgttcagttcattc

SEQ ID NO: 2037996 - DNA, 15 bp, Homo sapiens
tgttcagttcattca

SEQ ID NO: 2037997 - DNA, 15 bp, Homo sapiens
gttcagttcattcag

SEQ ID NO: 2037998 - DNA, 15 bp, Homo sapiens
ttcagttcattcagt

SEQ ID NO: 2037999 - DNA, 15 bp, Homo sapiens
tcagttcattcagta

SEQ ID NO: 2038000 - DNA, 15 bp, Homo sapiens
cagttcattcagtat

SEQ ID NO: 2038001 - DNA, 15 bp, Homo sapiens
agttcattcagtatt

SEQ ID NO: 2038002 - DNA, 15 bp, Homo sapiens
gttcattcagtatta

SEQ ID NO: 2038003 - DNA, 15 bp, Homo sapiens
ttcattcagtattaa

SEQ ID NO: 2038004 - DNA, 15 bp, Homo sapiens
tcattcagtattaat

SEQ ID NO: 2038005 - DNA, 15 bp, Homo sapiens
cattcagtattaatt

SEQ ID NO: 2038006 - DNA, 15 bp, Homo sapiens
attcagtattaattg

SEQ ID NO: 2038007 - DNA, 15 bp, Homo sapiens
ttcagtattaattga

SEQ ID NO: 2038008 - DNA, 15 bp, Homo sapiens
tcagtattaattgaa

SEQ ID NO: 2038009 - DNA, 15 bp, Homo sapiens
cagtattaattgaaa

SEQ ID NO: 2038010 - DNA, 15 bp, Homo sapiens
agtattaattgaaaa

SEQ ID NO: 2038011 - DNA, 15 bp, Homo sapiens
gtattaattgaaaat

SEQ ID NO: 2038012 - DNA, 15 bp, Homo sapiens
tattaattgaaaata

SEQ ID NO: 2038013 - DNA, 15 bp, Homo sapiens
attaattgaaaataa

SEQ ID NO: 2038014 - DNA, 15 bp, Homo sapiens
ttaattgaaaataat

SEQ ID NO: 2038015 - DNA, 15 bp, Homo sapiens
taattgaaaataatt

SEQ ID NO: 2038016 - DNA, 15 bp, Homo sapiens
aattgaaaataattt

SEQ ID NO: 2038017 - DNA, 15 bp, Homo sapiens
attgaaaataatttt

SEQ ID NO: 2038018 - DNA, 15 bp, Homo sapiens
ttgaaaataattttt

SEQ ID NO: 2038019 - DNA, 15 bp, Homo sapiens
tgaaaataatttttc

SEQ ID NO: 2038020 - DNA, 15 bp, Homo sapiens
gaaaataatttttca

SEQ ID NO: 2038021 - DNA, 15 bp, Homo sapiens
aaaataatttttcaa

SEQ ID NO: 2038022 - DNA, 15 bp, Homo sapiens
aaataatttttcaat

SEQ ID NO: 2038023 - DNA, 15 bp, Homo sapiens
aataatttttcaatg

SEQ ID NO: 2038024 - DNA, 15 bp, Homo sapiens
ataatttttcaatgt

SEQ ID NO: 2038025 - DNA, 15 bp, Homo sapiens
taatttttcaatgta

SEQ ID NO: 2038026 - DNA, 15 bp, Homo sapiens
aatttttcaatgtat

SEQ ID NO: 2038027 - DNA, 15 bp, Homo sapiens
atttttcaatgtatt

SEQ ID NO: 2038028 - DNA, 15 bp, Homo sapiens
tttttcaatgtattg

SEQ ID NO: 2038029 - DNA, 15 bp, Homo sapiens
ttttcaatgtattga

SEQ ID NO: 2038030 - DNA, 15 bp, Homo sapiens
tttcaatgtattgaa

SEQ ID NO: 2038031 - DNA, 15 bp, Homo sapiens
ttcaatgtattgaaa

SEQ ID NO: 2038032 - DNA, 15 bp, Homo sapiens
tcaatgtattgaaaa

SEQ ID NO: 2038033 - DNA, 15 bp, Homo sapiens
caatgtattgaaaaa

SEQ ID NO: 2038034 - DNA, 15 bp, Homo sapiens
aatgtattgaaaaaa

SEQ ID NO: 2038035 - DNA, 15 bp, Homo sapiens
atgtattgaaaaaat

SEQ ID NO: 2038036 - DNA, 15 bp, Homo sapiens
tgtattgaaaaaata

SEQ ID NO: 2038037 - DNA, 15 bp, Homo sapiens
gtattgaaaaaataa

SEQ ID NO: 2038038 - DNA, 15 bp, Homo sapiens
tattgaaaaaataac

SEQ ID NO: 2038039 - DNA, 15 bp, Homo sapiens
attgaaaaaataact

SEQ ID NO: 2038040 - DNA, 15 bp, Homo sapiens
ttgaaaaaataacta

SEQ ID NO: 2038041 - DNA, 15 bp, Homo sapiens
tgaaaaaataactag

SEQ ID NO: 2038042 - DNA, 15 bp, Homo sapiens
gaaaaaataactaga

SEQ ID NO: 2038043 - DNA, 15 bp, Homo sapiens
aaaaaataactagat

SEQ ID NO: 2038044 - DNA, 15 bp, Homo sapiens
aaaaataactagatt

SEQ ID NO: 2038045 - DNA, 15 bp, Homo sapiens
aaaataactagattt

SEQ ID NO: 2038046 - DNA, 15 bp, Homo sapiens
ataactagattttac

SEQ ID NO: 2038047 - DNA, 15 bp, Homo sapiens
taactagattttaca

SEQ ID NO: 2038048 - DNA, 15 bp, Homo sapiens
aactagattttacag

SEQ ID NO: 2038049 - DNA, 15 bp, Homo sapiens
actagattttacagg

SEQ ID NO: 2038050 - DNA, 15 bp, Homo sapiens
ctagattttacagga

SEQ ID NO: 2038051 - DNA, 15 bp, Homo sapiens
tagattttacaggaa

SEQ ID NO: 2038052 - DNA, 15 bp, Homo sapiens
agattttacaggaaa

SEQ ID NO: 2038053 - DNA, 15 bp, Homo sapiens
gattttacaggaaaa

SEQ ID NO: 2038054 - DNA, 15 bp, Homo sapiens
attttacaggaaaac

SEQ ID NO: 2038055 - DNA, 15 bp, Homo sapiens
ttttacaggaaaaca

SEQ ID NO: 2038056 - DNA, 15 bp, Homo sapiens
tttacaggaaaacaa

SEQ ID NO: 2038057 - DNA, 15 bp, Homo sapiens
ttacaggaaaacaaa

SEQ ID NO: 2038058 - DNA, 15 bp, Homo sapiens
tacaggaaaacaaaa

SEQ ID NO: 2038059 - DNA, 15 bp, Homo sapiens
acaggaaaacaaaaa

SEQ ID NO: 2038060 - DNA, 15 bp, Homo sapiens
caggaaaacaaaaat

SEQ ID NO: 2038061 - DNA, 15 bp, Homo sapiens
aggaaaacaaaaatg

SEQ ID NO: 2038062 - DNA, 15 bp, Homo sapiens
ggaaaacaaaaatga

SEQ ID NO: 2038063 - DNA, 15 bp, Homo sapiens
gaaaacaaaaatgaa

SEQ ID NO: 2038064 - DNA, 15 bp, Homo sapiens
aaaacaaaaatgaat

SEQ ID NO: 2038065 - DNA, 15 bp, Homo sapiens
aaacaaaaatgaata

SEQ ID NO: 2038066 - DNA, 15 bp, Homo sapiens
aacaaaaatgaataa

SEQ ID NO: 2038067 - DNA, 15 bp, Homo sapiens
acaaaaatgaataat

SEQ ID NO: 2038068 - DNA, 15 bp, Homo sapiens
caaaaatgaataata

SEQ ID NO: 2038069 - DNA, 15 bp, Homo sapiens
aaaaatgaataataa

SEQ ID NO: 2038070 - DNA, 15 bp, Homo sapiens
aaaatgaataataat

SEQ ID NO: 2038071 - DNA, 15 bp, Homo sapiens
aaatgaataataatg

SEQ ID NO: 2038072 - DNA, 15 bp, Homo sapiens
aatgaataataatga

SEQ ID NO: 2038073 - DNA, 15 bp, Homo sapiens
atgaataataatgat

SEQ ID NO: 2038074 - DNA, 15 bp, Homo sapiens
tgaataataatgatc

SEQ ID NO: 2038075 - DNA, 15 bp, Homo sapiens
gaataataatgatct

SEQ ID NO: 2038076 - DNA, 15 bp, Homo sapiens
aataataatgatctt

SEQ ID NO: 2038077 - DNA, 15 bp, Homo sapiens
ataataatgatcttt

SEQ ID NO: 2038078 - DNA, 15 bp, Homo sapiens
taataatgatcttta

SEQ ID NO: 2038079 - DNA, 15 bp, Homo sapiens
aataatgatctttac

SEQ ID NO: 2038080 - DNA, 15 bp, Homo sapiens
ataatgatctttacc

SEQ ID NO: 2038081 - DNA, 15 bp, Homo sapiens
taatgatctttaccc

SEQ ID NO: 2038082 - DNA, 15 bp, Homo sapiens
aatgatctttaccct

SEQ ID NO: 2038083 - DNA, 15 bp, Homo sapiens
atgatctttaccctt

SEQ ID NO: 2038084 - DNA, 15 bp, Homo sapiens
tgatctttacccttc

SEQ ID NO: 2038085 - DNA, 15 bp, Homo sapiens
gatctttacccttct

SEQ ID NO: 2038086 - DNA, 15 bp, Homo sapiens
atctttacccttctc

SEQ ID NO: 2038087 - DNA, 15 bp, Homo sapiens
tctttacccttctca

SEQ ID NO: 2038088 - DNA, 15 bp, Homo sapiens
ctttacccttctcag

SEQ ID NO: 2038089 - DNA, 15 bp, Homo sapiens
tttacccttctcagt

SEQ ID NO: 2038090 - DNA, 15 bp, Homo sapiens
ttacccttctcagtg

SEQ ID NO: 2038091 - DNA, 15 bp, Homo sapiens
tacccttctcagtgc

SEQ ID NO: 2038092 - DNA, 15 bp, Homo sapiens
acccttctcagtgcc

SEQ ID NO: 2038093 - DNA, 15 bp, Homo sapiens
cccttctcagtgcct

SEQ ID NO: 2038094 - DNA, 15 bp, Homo sapiens
ccttctcagtgcctt

SEQ ID NO: 2038095 - DNA, 15 bp, Homo sapiens
cttctcagtgccttt

SEQ ID NO: 2038096 - DNA, 15 bp, Homo sapiens
ttctcagtgccttta

SEQ ID NO: 2038097 - DNA, 15 bp, Homo sapiens
tctcagtgcctttac

SEQ ID NO: 2038098 - DNA, 15 bp, Homo sapiens
ctcagtgcctttact

SEQ ID NO: 2038099 - DNA, 15 bp, Homo sapiens
tcagtgcctttactc

SEQ ID NO: 2038100 - DNA, 15 bp, Homo sapiens
cagtgcctttactca

SEQ ID NO: 2038101 - DNA, 15 bp, Homo sapiens
agtgcctttactcag

SEQ ID NO: 2038102 - DNA, 15 bp, Homo sapiens
gtgcctttactcagt

SEQ ID NO: 2038103 - DNA, 15 bp, Homo sapiens
tgcctttactcagta

SEQ ID NO: 2038104 - DNA, 15 bp, Homo sapiens
gcctttactcagtag

SEQ ID NO: 2038105 - DNA, 15 bp, Homo sapiens
cctttactcagtaga

SEQ ID NO: 2038106 - DNA, 15 bp, Homo sapiens
ctttactcagtagag

SEQ ID NO: 2038107 - DNA, 15 bp, Homo sapiens
tttactcagtagagg

SEQ ID NO: 2038108 - DNA, 15 bp, Homo sapiens
ttactcagtagagga

SEQ ID NO: 2038109 - DNA, 15 bp, Homo sapiens
tactcagtagaggaa

SEQ ID NO: 2038110 - DNA, 15 bp, Homo sapiens
actcagtagaggaag

SEQ ID NO: 2038111 - DNA, 15 bp, Homo sapiens
ctcagtagaggaaga

SEQ ID NO: 2038112 - DNA, 15 bp, Homo sapiens
tcagtagaggaagat

SEQ ID NO: 2038113 - DNA, 15 bp, Homo sapiens
cagtagaggaagatg

SEQ ID NO: 2038114 - DNA, 15 bp, Homo sapiens
agtagaggaagatgg

SEQ ID NO: 2038115 - DNA, 15 bp, Homo sapiens
gtagaggaagatgga

SEQ ID NO: 2038116 - DNA, 15 bp, Homo sapiens
tagaggaagatggat

SEQ ID NO: 2038117 - DNA, 15 bp, Homo sapiens
agaggaagatggatg

SEQ ID NO: 2038118 - DNA, 15 bp, Homo sapiens
gaggaagatggatgt

SEQ ID NO: 2038119 - DNA, 15 bp, Homo sapiens
aggaagatggatgta

SEQ ID NO: 2038120 - DNA, 15 bp, Homo sapiens
ggaagatggatgtac

SEQ ID NO: 2038121 - DNA, 15 bp, Homo sapiens
gaagatggatgtaca

SEQ ID NO: 2038122 - DNA, 15 bp, Homo sapiens
aagatggatgtacaa

SEQ ID NO: 2038123 - DNA, 15 bp, Homo sapiens
agatggatgtacaag

SEQ ID NO: 2038124 - DNA, 15 bp, Homo sapiens
gatggatgtacaagt

SEQ ID NO: 2038125 - DNA, 15 bp, Homo sapiens
atggatgtacaagtt

SEQ ID NO: 2038126 - DNA, 15 bp, Homo sapiens
tggatgtacaagttg

SEQ ID NO: 2038127 - DNA, 15 bp, Homo sapiens
ggatgtacaagttgt

SEQ ID NO: 2038128 - DNA, 15 bp, Homo sapiens
gatgtacaagttgta

SEQ ID NO: 2038129 - DNA, 15 bp, Homo sapiens
atgtacaagttgtag

SEQ ID NO: 2038130 - DNA, 15 bp, Homo sapiens
tgtacaagttgtaga

SEQ ID NO: 2038131 - DNA, 15 bp, Homo sapiens
gtacaagttgtagaa

SEQ ID NO: 2038132 - DNA, 15 bp, Homo sapiens
tacaagttgtagaat

SEQ ID NO: 2038133 - DNA, 15 bp, Homo sapiens
acaagttgtagaatc

SEQ ID NO: 2038134 - DNA, 15 bp, Homo sapiens
caagttgtagaatca

SEQ ID NO: 2038135 - DNA, 15 bp, Homo sapiens
aagttgtagaatcat

SEQ ID NO: 2038136 - DNA, 15 bp, Homo sapiens
agttgtagaatcata

SEQ ID NO: 2038137 - DNA, 15 bp, Homo sapiens
gttgtagaatcatag

SEQ ID NO: 2038138 - DNA, 15 bp, Homo sapiens
ttgtagaatcatagg

SEQ ID NO: 2038139 - DNA, 15 bp, Homo sapiens
tgtagaatcataggc

SEQ ID NO: 2038140 - DNA, 15 bp, Homo sapiens
gtagaatcataggca

SEQ ID NO: 2038141 - DNA, 15 bp, Homo sapiens
tagaatcataggcaa

SEQ ID NO: 2038142 - DNA, 15 bp, Homo sapiens
agaatcataggcaag

SEQ ID NO: 2038143 - DNA, 15 bp, Homo sapiens
gaatcataggcaagt

SEQ ID NO: 2038144 - DNA, 15 bp, Homo sapiens
aatcataggcaagtt

SEQ ID NO: 2038145 - DNA, 15 bp, Homo sapiens
atcataggcaagtta

SEQ ID NO: 2038146 - DNA, 15 bp, Homo sapiens
tcataggcaagttaa

SEQ ID NO: 2038147 - DNA, 15 bp, Homo sapiens
cataggcaagttaat

SEQ ID NO: 2038148 - DNA, 15 bp, Homo sapiens
ataggcaagttaatt

SEQ ID NO: 2038149 - DNA, 15 bp, Homo sapiens
taggcaagttaattt

SEQ ID NO: 2038150 - DNA, 15 bp, Homo sapiens
aggcaagttaattta

SEQ ID NO: 2038151 - DNA, 15 bp, Homo sapiens
ggcaagttaatttaa

SEQ ID NO: 2038152 - DNA, 15 bp, Homo sapiens
gcaagttaatttaaa

SEQ ID NO: 2038153 - DNA, 15 bp, Homo sapiens
caagttaatttaaaa

SEQ ID NO: 2038154 - DNA, 15 bp, Homo sapiens
aagttaatttaaaag

SEQ ID NO: 2038155 - DNA, 15 bp, Homo sapiens
agttaatttaaaagc

SEQ ID NO: 2038156 - DNA, 15 bp, Homo sapiens
gttaatttaaaagca

SEQ ID NO: 2038157 - DNA, 15 bp, Homo sapiens
ttaatttaaaagcaa

SEQ ID NO: 2038158 - DNA, 15 bp, Homo sapiens
taatttaaaagcaag

SEQ ID NO: 2038159 - DNA, 15 bp, Homo sapiens
aatttaaaagcaagg

SEQ ID NO: 2038160 - DNA, 15 bp, Homo sapiens
atttaaaagcaagga

SEQ ID NO: 2038161 - DNA, 15 bp, Homo sapiens
tttaaaagcaaggaa

SEQ ID NO: 2038162 - DNA, 15 bp, Homo sapiens
ttaaaagcaaggaag

SEQ ID NO: 2038163 - DNA, 15 bp, Homo sapiens
taaaagcaaggaagg

SEQ ID NO: 2038164 - DNA, 15 bp, Homo sapiens
aaaagcaaggaagga

SEQ ID NO: 2038165 - DNA, 15 bp, Homo sapiens
aaagcaaggaaggag

SEQ ID NO: 2038166 - DNA, 15 bp, Homo sapiens
aagcaaggaaggaga

SEQ ID NO: 2038167 - DNA, 15 bp, Homo sapiens
agcaaggaaggagaa

SEQ ID NO: 2038168 - DNA, 15 bp, Homo sapiens
gcaaggaaggagaaa

SEQ ID NO: 2038169 - DNA, 15 bp, Homo sapiens
caaggaaggagaaag

SEQ ID NO: 2038170 - DNA, 15 bp, Homo sapiens
aaggaaggagaaagt

SEQ ID NO: 2038171 - DNA, 15 bp, Homo sapiens
aggaaggagaaagta

SEQ ID NO: 2038172 - DNA, 15 bp, Homo sapiens
ggaaggagaaagtag

SEQ ID NO: 2038173 - DNA, 15 bp, Homo sapiens
gaaggagaaagtagt

SEQ ID NO: 2038174 - DNA, 15 bp, Homo sapiens
aaggagaaagtagtt

SEQ ID NO: 2038175 - DNA, 15 bp, Homo sapiens
aggagaaagtagttc

SEQ ID NO: 2038176 - DNA, 15 bp, Homo sapiens
ggagaaagtagttct

SEQ ID NO: 2038177 - DNA, 15 bp, Homo sapiens
gagaaagtagttctg

SEQ ID NO: 2038178 - DNA, 15 bp, Homo sapiens
agaaagtagttctgg

SEQ ID NO: 2038179 - DNA, 15 bp, Homo sapiens
gaaagtagttctggc

SEQ ID NO: 2038180 - DNA, 15 bp, Homo sapiens
aaagtagttctggca

SEQ ID NO: 2038181 - DNA, 15 bp, Homo sapiens
aagtagttctggcaa

SEQ ID NO: 2038182 - DNA, 15 bp, Homo sapiens
agtagttctggcaag

SEQ ID NO: 2038183 - DNA, 15 bp, Homo sapiens
gtagttctggcaaga

SEQ ID NO: 2038184 - DNA, 15 bp, Homo sapiens
tagttctggcaagag

SEQ ID NO: 2038185 - DNA, 15 bp, Homo sapiens
agttctggcaagaga

SEQ ID NO: 2038186 - DNA, 15 bp, Homo sapiens
gttctggcaagagac

SEQ ID NO: 2038187 - DNA, 15 bp, Homo sapiens
ttctggcaagagaca

SEQ ID NO: 2038188 - DNA, 15 bp, Homo sapiens
tctggcaagagacag

SEQ ID NO: 2038189 - DNA, 15 bp, Homo sapiens
ctggcaagagacaga

SEQ ID NO: 2038190 - DNA, 15 bp, Homo sapiens
tggcaagagacagaa

SEQ ID NO: 2038191 - DNA, 15 bp, Homo sapiens
ggcaagagacagaat

SEQ ID NO: 2038192 - DNA, 15 bp, Homo sapiens
gcaagagacagaata

SEQ ID NO: 2038193 - DNA, 15 bp, Homo sapiens
caagagacagaataa

SEQ ID NO: 2038194 - DNA, 15 bp, Homo sapiens
aagagacagaataat

SEQ ID NO: 2038195 - DNA, 15 bp, Homo sapiens
agagacagaataatg

SEQ ID NO: 2038196 - DNA, 15 bp, Homo sapiens
gagacagaataatgc

SEQ ID NO: 2038197 - DNA, 15 bp, Homo sapiens
agacagaataatgca

SEQ ID NO: 2038198 - DNA, 15 bp, Homo sapiens
gacagaataatgcat

SEQ ID NO: 2038199 - DNA, 15 bp, Homo sapiens
acagaataatgcatc

SEQ ID NO: 2038200 - DNA, 15 bp, Homo sapiens
cagaataatgcatca

SEQ ID NO: 2038201 - DNA, 15 bp, Homo sapiens
agaataatgcatcat

SEQ ID NO: 2038202 - DNA, 15 bp, Homo sapiens
gaataatgcatcatg

SEQ ID NO: 2038203 - DNA, 15 bp, Homo sapiens
aataatgcatcatga

SEQ ID NO: 2038204 - DNA, 15 bp, Homo sapiens
ataatgcatcatgaa

SEQ ID NO: 2038205 - DNA, 15 bp, Homo sapiens
taatgcatcatgaag

SEQ ID NO: 2038206 - DNA, 15 bp, Homo sapiens
aatgcatcatgaagg

SEQ ID NO: 2038207 - DNA, 15 bp, Homo sapiens
atgcatcatgaagga

SEQ ID NO: 2038208 - DNA, 15 bp, Homo sapiens
tgcatcatgaaggaa

SEQ ID NO: 2038209 - DNA, 15 bp, Homo sapiens
gcatcatgaaggaaa

SEQ ID NO: 2038210 - DNA, 15 bp, Homo sapiens
catcatgaaggaaaa

SEQ ID NO: 2038211 - DNA, 15 bp, Homo sapiens
atcatgaaggaaaag

SEQ ID NO: 2038212 - DNA, 15 bp, Homo sapiens
tcatgaaggaaaagg

SEQ ID NO: 2038213 - DNA, 15 bp, Homo sapiens
catgaaggaaaagga

SEQ ID NO: 2038214 - DNA, 15 bp, Homo sapiens
atgaaggaaaaggat

SEQ ID NO: 2038215 - DNA, 15 bp, Homo sapiens
tgaaggaaaaggata

SEQ ID NO: 2038216 - DNA, 15 bp, Homo sapiens
gaaggaaaaggatat

SEQ ID NO: 2038217 - DNA, 15 bp, Homo sapiens
aaggaaaaggatatg

SEQ ID NO: 2038218 - DNA, 15 bp, Homo sapiens
aggaaaaggatatga

SEQ ID NO: 2038219 - DNA, 15 bp, Homo sapiens
ggaaaaggatatgag

SEQ ID NO: 2038220 - DNA, 15 bp, Homo sapiens
gaaaaggatatgaga

SEQ ID NO: 2038221 - DNA, 15 bp, Homo sapiens
aaaaggatatgagaa

SEQ ID NO: 2038222 - DNA, 15 bp, Homo sapiens
aaaggatatgagaaa

SEQ ID NO: 2038223 - DNA, 15 bp, Homo sapiens
aaggatatgagaaaa

SEQ ID NO: 2038224 - DNA, 15 bp, Homo sapiens
aggatatgagaaaaa

SEQ ID NO: 2038225 - DNA, 15 bp, Homo sapiens
ggatatgagaaaaaa

SEQ ID NO: 2038226 - DNA, 15 bp, Homo sapiens
gatatgagaaaaaaa

SEQ ID NO: 2038227 - DNA, 15 bp, Homo sapiens
atatgagaaaaaaaa

SEQ ID NO: 2038228 - DNA, 15 bp, Homo sapiens
tatgagaaaaaaaaa

SEQ ID NO: 2038229 - DNA, 15 bp, Homo sapiens
atgagaaaaaaaaat

SEQ ID NO: 2038230 - DNA, 15 bp, Homo sapiens
tgagaaaaaaaaata

SEQ ID NO: 2038231 - DNA, 15 bp, Homo sapiens
gagaaaaaaaaatat

SEQ ID NO: 2038232 - DNA, 15 bp, Homo sapiens
gaaaaaaaaatatgg

SEQ ID NO: 2038233 - DNA, 15 bp, Homo sapiens
aaaaaaaaatatggg

SEQ ID NO: 2038234 - DNA, 15 bp, Homo sapiens
aaaaaaaatatgggt

SEQ ID NO: 2038235 - DNA, 15 bp, Homo sapiens
aaaaaaatatgggtt

SEQ ID NO: 2038236 - DNA, 15 bp, Homo sapiens
aaaaaatatgggttg

SEQ ID NO: 2038237 - DNA, 15 bp, Homo sapiens
aaaaatatgggttga

SEQ ID NO: 2038238 - DNA, 15 bp, Homo sapiens
aaaatatgggttgaa

SEQ ID NO: 2038239 - DNA, 15 bp, Homo sapiens
aaatatgggttgaat

SEQ ID NO: 2038240 - DNA, 15 bp, Homo sapiens
aatatgggttgaatt

SEQ ID NO: 2038241 - DNA, 15 bp, Homo sapiens
atatgggttgaattt

SEQ ID NO: 2038242 - DNA, 15 bp, Homo sapiens
tatgggttgaatttt

SEQ ID NO: 2038243 - DNA, 15 bp, Homo sapiens
atgggttgaatttta

SEQ ID NO: 2038244 - DNA, 15 bp, Homo sapiens
tgggttgaattttat

SEQ ID NO: 2038245 - DNA, 15 bp, Homo sapiens
gggttgaattttatc

SEQ ID NO: 2038246 - DNA, 15 bp, Homo sapiens
ggttgaattttatct

SEQ ID NO: 2038247 - DNA, 15 bp, Homo sapiens
gttgaattttatctt

SEQ ID NO: 2038248 - DNA, 15 bp, Homo sapiens
tgaattttatcttgt

SEQ ID NO: 2038249 - DNA, 15 bp, Homo sapiens
gaattttatcttgta

SEQ ID NO: 2038250 - DNA, 15 bp, Homo sapiens
aattttatcttgtag

SEQ ID NO: 2038251 - DNA, 15 bp, Homo sapiens
attttatcttgtaga

SEQ ID NO: 2038252 - DNA, 15 bp, Homo sapiens
ttttatcttgtagag

SEQ ID NO: 2038253 - DNA, 15 bp, Homo sapiens
tttatcttgtagaga

SEQ ID NO: 2038254 - DNA, 15 bp, Homo sapiens
ttatcttgtagagat

SEQ ID NO: 2038255 - DNA, 15 bp, Homo sapiens
tatcttgtagagata

SEQ ID NO: 2038256 - DNA, 15 bp, Homo sapiens
atcttgtagagatac

SEQ ID NO: 2038257 - DNA, 15 bp, Homo sapiens
tcttgtagagatacg

SEQ ID NO: 2038258 - DNA, 15 bp, Homo sapiens
cttgtagagatacgc

SEQ ID NO: 2038259 - DNA, 15 bp, Homo sapiens
ttgtagagatacgca

SEQ ID NO: 2038260 - DNA, 15 bp, Homo sapiens
tgtagagatacgcaa

SEQ ID NO: 2038261 - DNA, 15 bp, Homo sapiens
gtagagatacgcaag

SEQ ID NO: 2038262 - DNA, 15 bp, Homo sapiens
tagagatacgcaaga

SEQ ID NO: 2038263 - DNA, 15 bp, Homo sapiens
agagatacgcaagac

SEQ ID NO: 2038264 - DNA, 15 bp, Homo sapiens
gagatacgcaagaca

SEQ ID NO: 2038265 - DNA, 15 bp, Homo sapiens
agatacgcaagacaa

SEQ ID NO: 2038266 - DNA, 15 bp, Homo sapiens
gatacgcaagacaat

SEQ ID NO: 2038267 - DNA, 15 bp, Homo sapiens
atacgcaagacaatt

SEQ ID NO: 2038268 - DNA, 15 bp, Homo sapiens
tacgcaagacaatta

SEQ ID NO: 2038269 - DNA, 15 bp, Homo sapiens
acgcaagacaattaa

SEQ ID NO: 2038270 - DNA, 15 bp, Homo sapiens
cgcaagacaattaaa

SEQ ID NO: 2038271 - DNA, 15 bp, Homo sapiens
gcaagacaattaaaa

SEQ ID NO: 2038272 - DNA, 15 bp, Homo sapiens
caagacaattaaaag

SEQ ID NO: 2038273 - DNA, 15 bp, Homo sapiens
aagacaattaaaaga

SEQ ID NO: 2038274 - DNA, 15 bp, Homo sapiens
agacaattaaaagag

SEQ ID NO: 2038275 - DNA, 15 bp, Homo sapiens
gacaattaaaagagc

SEQ ID NO: 2038276 - DNA, 15 bp, Homo sapiens
acaattaaaagagcc

SEQ ID NO: 2038277 - DNA, 15 bp, Homo sapiens
caattaaaagagcct

SEQ ID NO: 2038278 - DNA, 15 bp, Homo sapiens
aattaaaagagccta

SEQ ID NO: 2038279 - DNA, 15 bp, Homo sapiens
attaaaagagcctac

SEQ ID NO: 2038280 - DNA, 15 bp, Homo sapiens
ttaaaagagcctaca

SEQ ID NO: 2038281 - DNA, 15 bp, Homo sapiens
taaaagagcctacac

SEQ ID NO: 2038282 - DNA, 15 bp, Homo sapiens
aaaagagcctacaca

SEQ ID NO: 2038283 - DNA, 15 bp, Homo sapiens
aaagagcctacacaa

SEQ ID NO: 2038284 - DNA, 15 bp, Homo sapiens
aagagcctacacaaa

SEQ ID NO: 2038285 - DNA, 15 bp, Homo sapiens
agagcctacacaaac

SEQ ID NO: 2038286 - DNA, 15 bp, Homo sapiens
gagcctacacaaaca

SEQ ID NO: 2038287 - DNA, 15 bp, Homo sapiens
agcctacacaaacat

SEQ ID NO: 2038288 - DNA, 15 bp, Homo sapiens
gcctacacaaacata

SEQ ID NO: 2038289 - DNA, 15 bp, Homo sapiens
cctacacaaacatac

SEQ ID NO: 2038290 - DNA, 15 bp, Homo sapiens
ctacacaaacataca

SEQ ID NO: 2038291 - DNA, 15 bp, Homo sapiens
tacacaaacatacat

SEQ ID NO: 2038292 - DNA, 15 bp, Homo sapiens
acacaaacatacatc

SEQ ID NO: 2038293 - DNA, 15 bp, Homo sapiens
cacaaacatacatcc

SEQ ID NO: 2038294 - DNA, 15 bp, Homo sapiens
acaaacatacatccc

SEQ ID NO: 2038295 - DNA, 15 bp, Homo sapiens
caaacatacatccca

SEQ ID NO: 2038296 - DNA, 15 bp, Homo sapiens
aaacatacatcccaa

SEQ ID NO: 2038297 - DNA, 15 bp, Homo sapiens
aacatacatcccaaa

SEQ ID NO: 2038298 - DNA, 15 bp, Homo sapiens
acatacatcccaaag

SEQ ID NO: 2038299 - DNA, 15 bp, Homo sapiens
catacatcccaaaga

SEQ ID NO: 2038300 - DNA, 15 bp, Homo sapiens
atacatcccaaagaa

SEQ ID NO: 2038301 - DNA, 15 bp, Homo sapiens
tacatcccaaagaag

SEQ ID NO: 2038302 - DNA, 15 bp, Homo sapiens
acatcccaaagaagc

SEQ ID NO: 2038303 - DNA, 15 bp, Homo sapiens
catcccaaagaagct

SEQ ID NO: 2038304 - DNA, 15 bp, Homo sapiens
atcccaaagaagctc

SEQ ID NO: 2038305 - DNA, 15 bp, Homo sapiens
tcccaaagaagctca

SEQ ID NO: 2038306 - DNA, 15 bp, Homo sapiens
cccaaagaagctcaa

SEQ ID NO: 2038307 - DNA, 15 bp, Homo sapiens
ccaaagaagctcaag

SEQ ID NO: 2038308 - DNA, 15 bp, Homo sapiens
caaagaagctcaagg

SEQ ID NO: 2038309 - DNA, 15 bp, Homo sapiens
aaagaagctcaaggc

SEQ ID NO: 2038310 - DNA, 15 bp, Homo sapiens
aagaagctcaaggca

SEQ ID NO: 2038311 - DNA, 15 bp, Homo sapiens
agaagctcaaggcac

SEQ ID NO: 2038312 - DNA, 15 bp, Homo sapiens
gaagctcaaggcaca

SEQ ID NO: 2038313 - DNA, 15 bp, Homo sapiens
aagctcaaggcacat

SEQ ID NO: 2038314 - DNA, 15 bp, Homo sapiens
agctcaaggcacatt

SEQ ID NO: 2038315 - DNA, 15 bp, Homo sapiens
gctcaaggcacattc

SEQ ID NO: 2038316 - DNA, 15 bp, Homo sapiens
ctcaaggcacattcc

SEQ ID NO: 2038317 - DNA, 15 bp, Homo sapiens
tcaaggcacattcca

SEQ ID NO: 2038318 - DNA, 15 bp, Homo sapiens
caaggcacattccag

SEQ ID NO: 2038319 - DNA, 15 bp, Homo sapiens
aaggcacattccaga

SEQ ID NO: 2038320 - DNA, 15 bp, Homo sapiens
aggcacattccagag

SEQ ID NO: 2038321 - DNA, 15 bp, Homo sapiens
ggcacattccagaga

SEQ ID NO: 2038322 - DNA, 15 bp, Homo sapiens
gcacattccagagat

SEQ ID NO: 2038323 - DNA, 15 bp, Homo sapiens
cacattccagagatc

SEQ ID NO: 2038324 - DNA, 15 bp, Homo sapiens
acattccagagatca

SEQ ID NO: 2038325 - DNA, 15 bp, Homo sapiens
cattccagagatcat

SEQ ID NO: 2038326 - DNA, 15 bp, Homo sapiens
attccagagatcatg

SEQ ID NO: 2038327 - DNA, 15 bp, Homo sapiens
ttccagagatcatga

SEQ ID NO: 2038328 - DNA, 15 bp, Homo sapiens
tccagagatcatgag

SEQ ID NO: 2038329 - DNA, 15 bp, Homo sapiens
ccagagatcatgagc

SEQ ID NO: 2038330 - DNA, 15 bp, Homo sapiens
cagagatcatgagca

SEQ ID NO: 2038331 - DNA, 15 bp, Homo sapiens
agagatcatgagcag

SEQ ID NO: 2038332 - DNA, 15 bp, Homo sapiens
gagatcatgagcagc

SEQ ID NO: 2038333 - DNA, 15 bp, Homo sapiens
agatcatgagcagct

SEQ ID NO: 2038334 - DNA, 15 bp, Homo sapiens
gatcatgagcagctt

SEQ ID NO: 2038335 - DNA, 15 bp, Homo sapiens
atcatgagcagcttt

SEQ ID NO: 2038336 - DNA, 15 bp, Homo sapiens
tcatgagcagctttc

SEQ ID NO: 2038337 - DNA, 15 bp, Homo sapiens
catgagcagctttct

SEQ ID NO: 2038338 - DNA, 15 bp, Homo sapiens
atgagcagctttctt

SEQ ID NO: 2038339 - DNA, 15 bp, Homo sapiens
tgagcagctttcttt

SEQ ID NO: 2038340 - DNA, 15 bp, Homo sapiens
gagcagctttctttc

SEQ ID NO: 2038341 - DNA, 15 bp, Homo sapiens
agcagctttctttca

SEQ ID NO: 2038342 - DNA, 15 bp, Homo sapiens
gcagctttctttcag

SEQ ID NO: 2038343 - DNA, 15 bp, Homo sapiens
cagctttctttcagt

SEQ ID NO: 2038344 - DNA, 15 bp, Homo sapiens
agctttctttcagtt

SEQ ID NO: 2038345 - DNA, 15 bp, Homo sapiens
gctttctttcagttt

SEQ ID NO: 2038346 - DNA, 15 bp, Homo sapiens
ctttctttcagtttt

SEQ ID NO: 2038347 - DNA, 15 bp, Homo sapiens
tttctttcagttttg

SEQ ID NO: 2038348 - DNA, 15 bp, Homo sapiens
ttctttcagttttgt

SEQ ID NO: 2038349 - DNA, 15 bp, Homo sapiens
tctttcagttttgtt

SEQ ID NO: 2038350 - DNA, 15 bp, Homo sapiens
ctttcagttttgtta

SEQ ID NO: 2038351 - DNA, 15 bp, Homo sapiens
tttcagttttgttat

SEQ ID NO: 2038352 - DNA, 15 bp, Homo sapiens
ttcagttttgttatt

SEQ ID NO: 2038353 - DNA, 15 bp, Homo sapiens
tcagttttgttattt

SEQ ID NO: 2038354 - DNA, 15 bp, Homo sapiens
cagttttgttatttc

SEQ ID NO: 2038355 - DNA, 15 bp, Homo sapiens
agttttgttatttct

SEQ ID NO: 2038356 - DNA, 15 bp, Homo sapiens
gttttgttatttctt

SEQ ID NO: 2038357 - DNA, 15 bp, Homo sapiens
ttttgttatttcttt

SEQ ID NO: 2038358 - DNA, 15 bp, Homo sapiens
tttgttatttctttt

SEQ ID NO: 2038359 - DNA, 15 bp, Homo sapiens
ttgttatttcttttg

SEQ ID NO: 2038360 - DNA, 15 bp, Homo sapiens
tgttatttcttttgt

SEQ ID NO: 2038361 - DNA, 15 bp, Homo sapiens
gttatttcttttgta

SEQ ID NO: 2038362 - DNA, 15 bp, Homo sapiens
ttatttcttttgtaa

SEQ ID NO: 2038363 - DNA, 15 bp, Homo sapiens
tatttcttttgtaaa

SEQ ID NO: 2038364 - DNA, 15 bp, Homo sapiens
atttcttttgtaaat

SEQ ID NO: 2038365 - DNA, 15 bp, Homo sapiens
tttcttttgtaaata

SEQ ID NO: 2038366 - DNA, 15 bp, Homo sapiens
ttcttttgtaaatag

SEQ ID NO: 2038367 - DNA, 15 bp, Homo sapiens
tcttttgtaaatagc

SEQ ID NO: 2038368 - DNA, 15 bp, Homo sapiens
cttttgtaaatagct

SEQ ID NO: 2038369 - DNA, 15 bp, Homo sapiens
ttttgtaaatagctc

SEQ ID NO: 2038370 - DNA, 15 bp, Homo sapiens
tttgtaaatagctct

SEQ ID NO: 2038371 - DNA, 15 bp, Homo sapiens
ttgtaaatagctctg

SEQ ID NO: 2038372 - DNA, 15 bp, Homo sapiens
tgtaaatagctctgg

SEQ ID NO: 2038373 - DNA, 15 bp, Homo sapiens
gtaaatagctctgga

SEQ ID NO: 2038374 - DNA, 15 bp, Homo sapiens
taaatagctctggag

SEQ ID NO: 2038375 - DNA, 15 bp, Homo sapiens
aaatagctctggaga

SEQ ID NO: 2038376 - DNA, 15 bp, Homo sapiens
aatagctctggagag

SEQ ID NO: 2038377 - DNA, 15 bp, Homo sapiens
atagctctggagagg

SEQ ID NO: 2038378 - DNA, 15 bp, Homo sapiens
tagctctggagagga

SEQ ID NO: 2038379 - DNA, 15 bp, Homo sapiens
agctctggagaggat

SEQ ID NO: 2038380 - DNA, 15 bp, Homo sapiens
gctctggagaggatg

SEQ ID NO: 2038381 - DNA, 15 bp, Homo sapiens
ctctggagaggatgc

SEQ ID NO: 2038382 - DNA, 15 bp, Homo sapiens
tctggagaggatgca

SEQ ID NO: 2038383 - DNA, 15 bp, Homo sapiens
ctggagaggatgcaa

SEQ ID NO: 2038384 - DNA, 15 bp, Homo sapiens
tggagaggatgcaaa

SEQ ID NO: 2038385 - DNA, 15 bp, Homo sapiens
ggagaggatgcaaat

SEQ ID NO: 2038386 - DNA, 15 bp, Homo sapiens
gagaggatgcaaata

SEQ ID NO: 2038387 - DNA, 15 bp, Homo sapiens
agaggatgcaaataa

SEQ ID NO: 2038388 - DNA, 15 bp, Homo sapiens
gaggatgcaaataaa

SEQ ID NO: 2038389 - DNA, 15 bp, Homo sapiens
aggatgcaaataaat

SEQ ID NO: 2038390 - DNA, 15 bp, Homo sapiens
ggatgcaaataaata

SEQ ID NO: 2038391 - DNA, 15 bp, Homo sapiens
gatgcaaataaatat

SEQ ID NO: 2038392 - DNA, 15 bp, Homo sapiens
atgcaaataaatata

SEQ ID NO: 2038393 - DNA, 15 bp, Homo sapiens
tgcaaataaatatac

SEQ ID NO: 2038394 - DNA, 15 bp, Homo sapiens
gcaaataaatataca

SEQ ID NO: 2038395 - DNA, 15 bp, Homo sapiens
caaataaatatacag

SEQ ID NO: 2038396 - DNA, 15 bp, Homo sapiens
aaataaatatacaga

SEQ ID NO: 2038397 - DNA, 15 bp, Homo sapiens
aataaatatacagaa

SEQ ID NO: 2038398 - DNA, 15 bp, Homo sapiens
ataaatatacagaag

SEQ ID NO: 2038399 - DNA, 15 bp, Homo sapiens
taaatatacagaaga

SEQ ID NO: 2038400 - DNA, 15 bp, Homo sapiens
aaatatacagaagag

SEQ ID NO: 2038401 - DNA, 15 bp, Homo sapiens
aatatacagaagaga

SEQ ID NO: 2038402 - DNA, 15 bp, Homo sapiens
atatacagaagagaa

SEQ ID NO: 2038403 - DNA, 15 bp, Homo sapiens
tatacagaagagaat

SEQ ID NO: 2038404 - DNA, 15 bp, Homo sapiens
atacagaagagaatt

SEQ ID NO: 2038405 - DNA, 15 bp, Homo sapiens
tacagaagagaattt

SEQ ID NO: 2038406 - DNA, 15 bp, Homo sapiens
acagaagagaattta

SEQ ID NO: 2038407 - DNA, 15 bp, Homo sapiens
cagaagagaatttaa

SEQ ID NO: 2038408 - DNA, 15 bp, Homo sapiens
agaagagaatttaaa

SEQ ID NO: 2038409 - DNA, 15 bp, Homo sapiens
gaagagaatttaaat

SEQ ID NO: 2038410 - DNA, 15 bp, Homo sapiens
aagagaatttaaata

SEQ ID NO: 2038411 - DNA, 15 bp, Homo sapiens
agagaatttaaatag

SEQ ID NO: 2038412 - DNA, 15 bp, Homo sapiens
gagaatttaaataga

SEQ ID NO: 2038413 - DNA, 15 bp, Homo sapiens
agaatttaaatagac

SEQ ID NO: 2038414 - DNA, 15 bp, Homo sapiens
gaatttaaatagacc

SEQ ID NO: 2038415 - DNA, 15 bp, Homo sapiens
aatttaaatagacca

SEQ ID NO: 2038416 - DNA, 15 bp, Homo sapiens
atttaaatagaccag

SEQ ID NO: 2038417 - DNA, 15 bp, Homo sapiens
tttaaatagaccaga

SEQ ID NO: 2038418 - DNA, 15 bp, Homo sapiens
ttaaatagaccagaa

SEQ ID NO: 2038419 - DNA, 15 bp, Homo sapiens
taaatagaccagaat

SEQ ID NO: 2038420 - DNA, 15 bp, Homo sapiens
aaatagaccagaatt

SEQ ID NO: 2038421 - DNA, 15 bp, Homo sapiens
aatagaccagaattc

SEQ ID NO: 2038422 - DNA, 15 bp, Homo sapiens
atagaccagaattct

SEQ ID NO: 2038423 - DNA, 15 bp, Homo sapiens
tagaccagaattctg

SEQ ID NO: 2038424 - DNA, 15 bp, Homo sapiens
agaccagaattctgt

SEQ ID NO: 2038425 - DNA, 15 bp, Homo sapiens
gaccagaattctgtt

SEQ ID NO: 2038426 - DNA, 15 bp, Homo sapiens
accagaattctgtta

SEQ ID NO: 2038427 - DNA, 15 bp, Homo sapiens
ccagaattctgttac

SEQ ID NO: 2038428 - DNA, 15 bp, Homo sapiens
cagaattctgttacc

SEQ ID NO: 2038429 - DNA, 15 bp, Homo sapiens
agaattctgttaccc

SEQ ID NO: 2038430 - DNA, 15 bp, Homo sapiens
gaattctgttaccca

SEQ ID NO: 2038431 - DNA, 15 bp, Homo sapiens
aattctgttacccag

SEQ ID NO: 2038432 - DNA, 15 bp, Homo sapiens
attctgttacccaga

SEQ ID NO: 2038433 - DNA, 15 bp, Homo sapiens
ttctgttacccagag

SEQ ID NO: 2038434 - DNA, 15 bp, Homo sapiens
tctgttacccagaga

SEQ ID NO: 2038435 - DNA, 15 bp, Homo sapiens
ctgttacccagagaa

SEQ ID NO: 2038436 - DNA, 15 bp, Homo sapiens
tgttacccagagaaa

SEQ ID NO: 2038437 - DNA, 15 bp, Homo sapiens
gttacccagagaaaa

SEQ ID NO: 2038438 - DNA, 15 bp, Homo sapiens
ttacccagagaaaag

SEQ ID NO: 2038439 - DNA, 15 bp, Homo sapiens
tacccagagaaaagt

SEQ ID NO: 2038440 - DNA, 15 bp, Homo sapiens
acccagagaaaagtt

SEQ ID NO: 2038441 - DNA, 15 bp, Homo sapiens
cccagagaaaagttc

SEQ ID NO: 2038442 - DNA, 15 bp, Homo sapiens
ccagagaaaagttcc

SEQ ID NO: 2038443 - DNA, 15 bp, Homo sapiens
cagagaaaagttcca

SEQ ID NO: 2038444 - DNA, 15 bp, Homo sapiens
agagaaaagttccat

SEQ ID NO: 2038445 - DNA, 15 bp, Homo sapiens
gagaaaagttccatg

SEQ ID NO: 2038446 - DNA, 15 bp, Homo sapiens
agaaaagttccatga

SEQ ID NO: 2038447 - DNA, 15 bp, Homo sapiens
gaaaagttccatgaa

SEQ ID NO: 2038448 - DNA, 15 bp, Homo sapiens
aaaagttccatgaat

SEQ ID NO: 2038449 - DNA, 15 bp, Homo sapiens
aaagttccatgaatg

SEQ ID NO: 2038450 - DNA, 15 bp, Homo sapiens
aagttccatgaatgt

SEQ ID NO: 2038451 - DNA, 15 bp, Homo sapiens
agttccatgaatgtt

SEQ ID NO: 2038452 - DNA, 15 bp, Homo sapiens
gttccatgaatgttt

SEQ ID NO: 2038453 - DNA, 15 bp, Homo sapiens
ttccatgaatgtttc

SEQ ID NO: 2038454 - DNA, 15 bp, Homo sapiens
tccatgaatgtttct

SEQ ID NO: 2038455 - DNA, 15 bp, Homo sapiens
ccatgaatgtttcta

SEQ ID NO: 2038456 - DNA, 15 bp, Homo sapiens
catgaatgtttctag

SEQ ID NO: 2038457 - DNA, 15 bp, Homo sapiens
atgaatgtttctagt

SEQ ID NO: 2038458 - DNA, 15 bp, Homo sapiens
tgaatgtttctagtc

SEQ ID NO: 2038459 - DNA, 15 bp, Homo sapiens
gaatgtttctagtca

SEQ ID NO: 2038460 - DNA, 15 bp, Homo sapiens
aatgtttctagtcat

SEQ ID NO: 2038461 - DNA, 15 bp, Homo sapiens
atgtttctagtcatc

SEQ ID NO: 2038462 - DNA, 15 bp, Homo sapiens
tgtttctagtcatct

SEQ ID NO: 2038463 - DNA, 15 bp, Homo sapiens
gtttctagtcatctt

SEQ ID NO: 2038464 - DNA, 15 bp, Homo sapiens
tttctagtcatcttt

SEQ ID NO: 2038465 - DNA, 15 bp, Homo sapiens
ttctagtcatctttc

SEQ ID NO: 2038466 - DNA, 15 bp, Homo sapiens
tctagtcatctttct

SEQ ID NO: 2038467 - DNA, 15 bp, Homo sapiens
ctagtcatctttcta

SEQ ID NO: 2038468 - DNA, 15 bp, Homo sapiens
tagtcatctttctat

SEQ ID NO: 2038469 - DNA, 15 bp, Homo sapiens
agtcatctttctatg

SEQ ID NO: 2038470 - DNA, 15 bp, Homo sapiens
gtcatctttctatgc

SEQ ID NO: 2038471 - DNA, 15 bp, Homo sapiens
tcatctttctatgca

SEQ ID NO: 2038472 - DNA, 15 bp, Homo sapiens
catctttctatgcat

SEQ ID NO: 2038473 - DNA, 15 bp, Homo sapiens
atctttctatgcata

SEQ ID NO: 2038474 - DNA, 15 bp, Homo sapiens
tctttctatgcatat

SEQ ID NO: 2038475 - DNA, 15 bp, Homo sapiens
ctttctatgcatatg

SEQ ID NO: 2038476 - DNA, 15 bp, Homo sapiens
tttctatgcatatga

SEQ ID NO: 2038477 - DNA, 15 bp, Homo sapiens
ttctatgcatatgat

SEQ ID NO: 2038478 - DNA, 15 bp, Homo sapiens
tctatgcatatgatt

SEQ ID NO: 2038479 - DNA, 15 bp, Homo sapiens
ctatgcatatgatta

SEQ ID NO: 2038480 - DNA, 15 bp, Homo sapiens
tatgcatatgattag

SEQ ID NO: 2038481 - DNA, 15 bp, Homo sapiens
atgcatatgattaga

SEQ ID NO: 2038482 - DNA, 15 bp, Homo sapiens
tgcatatgattagat

SEQ ID NO: 2038483 - DNA, 15 bp, Homo sapiens
gcatatgattagatt

SEQ ID NO: 2038484 - DNA, 15 bp, Homo sapiens
catatgattagatta

SEQ ID NO: 2038485 - DNA, 15 bp, Homo sapiens
atatgattagattag

SEQ ID NO: 2038486 - DNA, 15 bp, Homo sapiens
tatgattagattaga

SEQ ID NO: 2038487 - DNA, 15 bp, Homo sapiens
atgattagattagat

SEQ ID NO: 2038488 - DNA, 15 bp, Homo sapiens
tgattagattagatt

SEQ ID NO: 2038489 - DNA, 15 bp, Homo sapiens
gattagattagatta

SEQ ID NO: 2038490 - DNA, 15 bp, Homo sapiens
attagattagattag

SEQ ID NO: 2038491 - DNA, 15 bp, Homo sapiens
ttagattagattaga

SEQ ID NO: 2038492 - DNA, 15 bp, Homo sapiens
agattagattagatt

SEQ ID NO: 2038493 - DNA, 15 bp, Homo sapiens
tagattagattagaa

SEQ ID NO: 2038494 - DNA, 15 bp, Homo sapiens
agattagattagaac

SEQ ID NO: 2038495 - DNA, 15 bp, Homo sapiens
gattagattagaaca

SEQ ID NO: 2038496 - DNA, 15 bp, Homo sapiens
attagattagaacat

SEQ ID NO: 2038497 - DNA, 15 bp, Homo sapiens
ttagattagaacatg

SEQ ID NO: 2038498 - DNA, 15 bp, Homo sapiens
tagattagaacatga

SEQ ID NO: 2038499 - DNA, 15 bp, Homo sapiens
agattagaacatgac

SEQ ID NO: 2038500 - DNA, 15 bp, Homo sapiens
gattagaacatgact

SEQ ID NO: 2038501 - DNA, 15 bp, Homo sapiens
attagaacatgacta

SEQ ID NO: 2038502 - DNA, 15 bp, Homo sapiens
ttagaacatgactag

SEQ ID NO: 2038503 - DNA, 15 bp, Homo sapiens
tagaacatgactagc

SEQ ID NO: 2038504 - DNA, 15 bp, Homo sapiens
agaacatgactagcc

SEQ ID NO: 2038505 - DNA, 15 bp, Homo sapiens
gaacatgactagcct

SEQ ID NO: 2038506 - DNA, 15 bp, Homo sapiens
aacatgactagcctt

SEQ ID NO: 2038507 - DNA, 15 bp, Homo sapiens
acatgactagcctta

SEQ ID NO: 2038508 - DNA, 15 bp, Homo sapiens
catgactagccttaa

SEQ ID NO: 2038509 - DNA, 15 bp, Homo sapiens
atgactagccttaaa

SEQ ID NO: 2038510 - DNA, 15 bp, Homo sapiens
tgactagccttaaaa

SEQ ID NO: 2038511 - DNA, 15 bp, Homo sapiens
gactagccttaaaaa

SEQ ID NO: 2038512 - DNA, 15 bp, Homo sapiens
actagccttaaaaaa

SEQ ID NO: 2038513 - DNA, 15 bp, Homo sapiens
ctagccttaaaaaat

SEQ ID NO: 2038514 - DNA, 15 bp, Homo sapiens
tagccttaaaaaatt

SEQ ID NO: 2038515 - DNA, 15 bp, Homo sapiens
agccttaaaaaattt

SEQ ID NO: 2038516 - DNA, 15 bp, Homo sapiens
gccttaaaaaattta

SEQ ID NO: 2038517 - DNA, 15 bp, Homo sapiens
ccttaaaaaatttaa

SEQ ID NO: 2038518 - DNA, 15 bp, Homo sapiens
cttaaaaaatttaat

SEQ ID NO: 2038519 - DNA, 15 bp, Homo sapiens
ttaaaaaatttaata

SEQ ID NO: 2038520 - DNA, 15 bp, Homo sapiens
taaaaaatttaataa

SEQ ID NO: 2038521 - DNA, 15 bp, Homo sapiens
aaaaaatttaataag

SEQ ID NO: 2038522 - DNA, 15 bp, Homo sapiens
aaaaatttaataagg

SEQ ID NO: 2038523 - DNA, 15 bp, Homo sapiens
aaaatttaataaggg

SEQ ID NO: 2038524 - DNA, 15 bp, Homo sapiens
aaatttaataagggt

SEQ ID NO: 2038525 - DNA, 15 bp, Homo sapiens
aatttaataagggtt

SEQ ID NO: 2038526 - DNA, 15 bp, Homo sapiens
atttaataagggttt

SEQ ID NO: 2038527 - DNA, 15 bp, Homo sapiens
tttaataagggtttt

SEQ ID NO: 2038528 - DNA, 15 bp, Homo sapiens
ttaataagggtttta

SEQ ID NO: 2038529 - DNA, 15 bp, Homo sapiens
taataagggttttaa

SEQ ID NO: 2038530 - DNA, 15 bp, Homo sapiens
aataagggttttaaa

SEQ ID NO: 2038531 - DNA, 15 bp, Homo sapiens
ataagggttttaaaa

SEQ ID NO: 2038532 - DNA, 15 bp, Homo sapiens
taagggttttaaaaa

SEQ ID NO: 2038533 - DNA, 15 bp, Homo sapiens
aagggttttaaaaaa

SEQ ID NO: 2038534 - DNA, 15 bp, Homo sapiens
agggttttaaaaaag

SEQ ID NO: 2038535 - DNA, 15 bp, Homo sapiens
gggttttaaaaaaga

SEQ ID NO: 2038536 - DNA, 15 bp, Homo sapiens
ggttttaaaaaagat

SEQ ID NO: 2038537 - DNA, 15 bp, Homo sapiens
gttttaaaaaagatt

SEQ ID NO: 2038538 - DNA, 15 bp, Homo sapiens
ttttaaaaaagattt

SEQ ID NO: 2038539 - DNA, 15 bp, Homo sapiens
tttaaaaaagatttg

SEQ ID NO: 2038540 - DNA, 15 bp, Homo sapiens
ttaaaaaagatttga

SEQ ID NO: 2038541 - DNA, 15 bp, Homo sapiens
taaaaaagatttgaa

SEQ ID NO: 2038542 - DNA, 15 bp, Homo sapiens
aaaaaagatttgaat

SEQ ID NO: 2038543 - DNA, 15 bp, Homo sapiens
aaaaagatttgaata

SEQ ID NO: 2038544 - DNA, 15 bp, Homo sapiens
aaaagatttgaatag

SEQ ID NO: 2038545 - DNA, 15 bp, Homo sapiens
aaagatttgaataga

SEQ ID NO: 2038546 - DNA, 15 bp, Homo sapiens
aagatttgaatagaa

SEQ ID NO: 2038547 - DNA, 15 bp, Homo sapiens
agatttgaatagaac

SEQ ID NO: 2038548 - DNA, 15 bp, Homo sapiens
gatttgaatagaaca

SEQ ID NO: 2038549 - DNA, 15 bp, Homo sapiens
atttgaatagaacag

SEQ ID NO: 2038550 - DNA, 15 bp, Homo sapiens
tttgaatagaacaga

SEQ ID NO: 2038551 - DNA, 15 bp, Homo sapiens
ttgaatagaacagat

SEQ ID NO: 2038552 - DNA, 15 bp, Homo sapiens
tgaatagaacagatt

SEQ ID NO: 2038553 - DNA, 15 bp, Homo sapiens
gaatagaacagattt

SEQ ID NO: 2038554 - DNA, 15 bp, Homo sapiens
aatagaacagatttt

SEQ ID NO: 2038555 - DNA, 15 bp, Homo sapiens
atagaacagattttc

SEQ ID NO: 2038556 - DNA, 15 bp, Homo sapiens
tagaacagattttca

SEQ ID NO: 2038557 - DNA, 15 bp, Homo sapiens
agaacagattttcag

SEQ ID NO: 2038558 - DNA, 15 bp, Homo sapiens
gaacagattttcagt

SEQ ID NO: 2038559 - DNA, 15 bp, Homo sapiens
aacagattttcagtg

SEQ ID NO: 2038560 - DNA, 15 bp, Homo sapiens
acagattttcagtgg

SEQ ID NO: 2038561 - DNA, 15 bp, Homo sapiens
cagattttcagtggt

SEQ ID NO: 2038562 - DNA, 15 bp, Homo sapiens
agattttcagtggtg

SEQ ID NO: 2038563 - DNA, 15 bp, Homo sapiens
gattttcagtggtgg

SEQ ID NO: 2038564 - DNA, 15 bp, Homo sapiens
attttcagtggtggt

SEQ ID NO: 2038565 - DNA, 15 bp, Homo sapiens
ttttcagtggtggtt

SEQ ID NO: 2038566 - DNA, 15 bp, Homo sapiens
tttcagtggtggttc

SEQ ID NO: 2038567 - DNA, 15 bp, Homo sapiens
ttcagtggtggttca

SEQ ID NO: 2038568 - DNA, 15 bp, Homo sapiens
tcagtggtggttcag

SEQ ID NO: 2038569 - DNA, 15 bp, Homo sapiens
cagtggtggttcagc

SEQ ID NO: 2038570 - DNA, 15 bp, Homo sapiens
agtggtggttcagct

SEQ ID NO: 2038571 - DNA, 15 bp, Homo sapiens
gtggtggttcagcta

SEQ ID NO: 2038572 - DNA, 15 bp, Homo sapiens
tggtggttcagctat

SEQ ID NO: 2038573 - DNA, 15 bp, Homo sapiens
ggtggttcagctatg

SEQ ID NO: 2038574 - DNA, 15 bp, Homo sapiens
gtggttcagctatgc

SEQ ID NO: 2038575 - DNA, 15 bp, Homo sapiens
tggttcagctatgct

SEQ ID NO: 2038576 - DNA, 15 bp, Homo sapiens
ggttcagctatgctc

SEQ ID NO: 2038577 - DNA, 15 bp, Homo sapiens
gttcagctatgctca

SEQ ID NO: 2038578 - DNA, 15 bp, Homo sapiens
ttcagctatgctcac

SEQ ID NO: 2038579 - DNA, 15 bp, Homo sapiens
tcagctatgctcacc

SEQ ID NO: 2038580 - DNA, 15 bp, Homo sapiens
cagctatgctcacct

SEQ ID NO: 2038581 - DNA, 15 bp, Homo sapiens
agctatgctcacctc

SEQ ID NO: 2038582 - DNA, 15 bp, Homo sapiens
gctatgctcacctcc

SEQ ID NO: 2038583 - DNA, 15 bp, Homo sapiens
ctatgctcacctcct

SEQ ID NO: 2038584 - DNA, 15 bp, Homo sapiens
tatgctcacctcctg

SEQ ID NO: 2038585 - DNA, 15 bp, Homo sapiens
atgctcacctcctgg

SEQ ID NO: 2038586 - DNA, 15 bp, Homo sapiens
tgctcacctcctgga

SEQ ID NO: 2038587 - DNA, 15 bp, Homo sapiens
gctcacctcctggag

SEQ ID NO: 2038588 - DNA, 15 bp, Homo sapiens
ctcacctcctggaga

SEQ ID NO: 2038589 - DNA, 15 bp, Homo sapiens
tcacctcctggagaa

SEQ ID NO: 2038590 - DNA, 15 bp, Homo sapiens
cacctcctggagaaa

SEQ ID NO: 2038591 - DNA, 15 bp, Homo sapiens
acctcctggagaaat

SEQ ID NO: 2038592 - DNA, 15 bp, Homo sapiens
cctcctggagaaatg

SEQ ID NO: 2038593 - DNA, 15 bp, Homo sapiens
ctcctggagaaatgt

SEQ ID NO: 2038594 - DNA, 15 bp, Homo sapiens
tcctggagaaatgtc

SEQ ID NO: 2038595 - DNA, 15 bp, Homo sapiens
cctggagaaatgtcg

SEQ ID NO: 2038596 - DNA, 15 bp, Homo sapiens
ctggagaaatgtcgc

SEQ ID NO: 2038597 - DNA, 15 bp, Homo sapiens
tggagaaatgtcgct

SEQ ID NO: 2038598 - DNA, 15 bp, Homo sapiens
ggagaaatgtcgctg

SEQ ID NO: 2038599 - DNA, 15 bp, Homo sapiens
gagaaatgtcgctga

SEQ ID NO: 2038600 - DNA, 15 bp, Homo sapiens
agaaatgtcgctgat

SEQ ID NO: 2038601 - DNA, 15 bp, Homo sapiens
gaaatgtcgctgatg

SEQ ID NO: 2038602 - DNA, 15 bp, Homo sapiens
aaatgtcgctgatgt

SEQ ID NO: 2038603 - DNA, 15 bp, Homo sapiens
aatgtcgctgatgtt

SEQ ID NO: 2038604 - DNA, 15 bp, Homo sapiens
atgtcgctgatgttt

SEQ ID NO: 2038605 - DNA, 15 bp, Homo sapiens
tgtcgctgatgtttt

SEQ ID NO: 2038606 - DNA, 15 bp, Homo sapiens
gtcgctgatgttttt

SEQ ID NO: 2038607 - DNA, 15 bp, Homo sapiens
tcgctgatgtttttc

SEQ ID NO: 2038608 - DNA, 15 bp, Homo sapiens
cgctgatgtttttcc

SEQ ID NO: 2038609 - DNA, 15 bp, Homo sapiens
gctgatgtttttcct

SEQ ID NO: 2038610 - DNA, 15 bp, Homo sapiens
ctgatgtttttcctt

SEQ ID NO: 2038611 - DNA, 15 bp, Homo sapiens
tgatgtttttccttg

SEQ ID NO: 2038612 - DNA, 15 bp, Homo sapiens
gatgtttttccttgc

SEQ ID NO: 2038613 - DNA, 15 bp, Homo sapiens
atgtttttccttgca

SEQ ID NO: 2038614 - DNA, 15 bp, Homo sapiens
tgtttttccttgcac

SEQ ID NO: 2038615 - DNA, 15 bp, Homo sapiens
gtttttccttgcact

SEQ ID NO: 2038616 - DNA, 15 bp, Homo sapiens
tttttccttgcactc

SEQ ID NO: 2038617 - DNA, 15 bp, Homo sapiens
ttttccttgcactca

SEQ ID NO: 2038618 - DNA, 15 bp, Homo sapiens
tttccttgcactcat

SEQ ID NO: 2038619 - DNA, 15 bp, Homo sapiens
ttccttgcactcata

SEQ ID NO: 2038620 - DNA, 15 bp, Homo sapiens
tccttgcactcatat

SEQ ID NO: 2038621 - DNA, 15 bp, Homo sapiens
ccttgcactcatatg

SEQ ID NO: 2038622 - DNA, 15 bp, Homo sapiens
cttgcactcatatgc

SEQ ID NO: 2038623 - DNA, 15 bp, Homo sapiens
ttgcactcatatgcc

SEQ ID NO: 2038624 - DNA, 15 bp, Homo sapiens
tgcactcatatgcct

SEQ ID NO: 2038625 - DNA, 15 bp, Homo sapiens
gcactcatatgcctg

SEQ ID NO: 2038626 - DNA, 15 bp, Homo sapiens
cactcatatgcctga

SEQ ID NO: 2038627 - DNA, 15 bp, Homo sapiens
actcatatgcctgat

SEQ ID NO: 2038628 - DNA, 15 bp, Homo sapiens
ctcatatgcctgatg

SEQ ID NO: 2038629 - DNA, 15 bp, Homo sapiens
tcatatgcctgatgc

SEQ ID NO: 2038630 - DNA, 15 bp, Homo sapiens
catatgcctgatgca

SEQ ID NO: 2038631 - DNA, 15 bp, Homo sapiens
atatgcctgatgcag

SEQ ID NO: 2038632 - DNA, 15 bp, Homo sapiens
tatgcctgatgcagt

SEQ ID NO: 2038633 - DNA, 15 bp, Homo sapiens
atgcctgatgcagtg

SEQ ID NO: 2038634 - DNA, 15 bp, Homo sapiens
tgcctgatgcagtgc

SEQ ID NO: 2038635 - DNA, 15 bp, Homo sapiens
gcctgatgcagtgca

SEQ ID NO: 2038636 - DNA, 15 bp, Homo sapiens
cctgatgcagtgcac

SEQ ID NO: 2038637 - DNA, 15 bp, Homo sapiens
ctgatgcagtgcaca

SEQ ID NO: 2038638 - DNA, 15 bp, Homo sapiens
tgatgcagtgcacat

SEQ ID NO: 2038639 - DNA, 15 bp, Homo sapiens
gatgcagtgcacatg

SEQ ID NO: 2038640 - DNA, 15 bp, Homo sapiens
atgcagtgcacatgt

SEQ ID NO: 2038641 - DNA, 15 bp, Homo sapiens
tgcagtgcacatgtt

SEQ ID NO: 2038642 - DNA, 15 bp, Homo sapiens
gcagtgcacatgttc

SEQ ID NO: 2038643 - DNA, 15 bp, Homo sapiens
cagtgcacatgttca

SEQ ID NO: 2038644 - DNA, 15 bp, Homo sapiens
agtgcacatgttcat

SEQ ID NO: 2038645 - DNA, 15 bp, Homo sapiens
gtgcacatgttcata

SEQ ID NO: 2038646 - DNA, 15 bp, Homo sapiens
tgcacatgttcataa

SEQ ID NO: 2038647 - DNA, 15 bp, Homo sapiens
gcacatgttcataaa

SEQ ID NO: 2038648 - DNA, 15 bp, Homo sapiens
cacatgttcataaac

SEQ ID NO: 2038649 - DNA, 15 bp, Homo sapiens
acatgttcataaaca

SEQ ID NO: 2038650 - DNA, 15 bp, Homo sapiens
catgttcataaacag

SEQ ID NO: 2038651 - DNA, 15 bp, Homo sapiens
atgttcataaacagt

SEQ ID NO: 2038652 - DNA, 15 bp, Homo sapiens
tgttcataaacagtc

SEQ ID NO: 2038653 - DNA, 15 bp, Homo sapiens
gttcataaacagtca

SEQ ID NO: 2038654 - DNA, 15 bp, Homo sapiens
ttcataaacagtcac

SEQ ID NO: 2038655 - DNA, 15 bp, Homo sapiens
tcataaacagtcact

SEQ ID NO: 2038656 - DNA, 15 bp, Homo sapiens
cataaacagtcactg

SEQ ID NO: 2038657 - DNA, 15 bp, Homo sapiens
ataaacagtcactga

SEQ ID NO: 2038658 - DNA, 15 bp, Homo sapiens
taaacagtcactgac

SEQ ID NO: 2038659 - DNA, 15 bp, Homo sapiens
aaacagtcactgaca

SEQ ID NO: 2038660 - DNA, 15 bp, Homo sapiens
aacagtcactgacaa

SEQ ID NO: 2038661 - DNA, 15 bp, Homo sapiens
acagtcactgacaaa

SEQ ID NO: 2038662 - DNA, 15 bp, Homo sapiens
cagtcactgacaaat

SEQ ID NO: 2038663 - DNA, 15 bp, Homo sapiens
agtcactgacaaatg

SEQ ID NO: 2038664 - DNA, 15 bp, Homo sapiens
gtcactgacaaatgc

SEQ ID NO: 2038665 - DNA, 15 bp, Homo sapiens
tcactgacaaatgcc

SEQ ID NO: 2038666 - DNA, 15 bp, Homo sapiens
cactgacaaatgccc

SEQ ID NO: 2038667 - DNA, 15 bp, Homo sapiens
actgacaaatgccca

SEQ ID NO: 2038668 - DNA, 15 bp, Homo sapiens
ctgacaaatgcccat

SEQ ID NO: 2038669 - DNA, 15 bp, Homo sapiens
tgacaaatgcccatg

SEQ ID NO: 2038670 - DNA, 15 bp, Homo sapiens
gacaaatgcccatgt

SEQ ID NO: 2038671 - DNA, 15 bp, Homo sapiens
acaaatgcccatgtt

SEQ ID NO: 2038672 - DNA, 15 bp, Homo sapiens
caaatgcccatgttc

SEQ ID NO: 2038673 - DNA, 15 bp, Homo sapiens
aaatgcccatgttcc

SEQ ID NO: 2038674 - DNA, 15 bp, Homo sapiens
aatgcccatgttcct

SEQ ID NO: 2038675 - DNA, 15 bp, Homo sapiens
atgcccatgttcctt

SEQ ID NO: 2038676 - DNA, 15 bp, Homo sapiens
tgcccatgttccttt

SEQ ID NO: 2038677 - DNA, 15 bp, Homo sapiens
gcccatgttcctttg

SEQ ID NO: 2038678 - DNA, 15 bp, Homo sapiens
cccatgttcctttga

SEQ ID NO: 2038679 - DNA, 15 bp, Homo sapiens
ccatgttcctttgac

SEQ ID NO: 2038680 - DNA, 15 bp, Homo sapiens
catgttcctttgaca

SEQ ID NO: 2038681 - DNA, 15 bp, Homo sapiens
atgttcctttgacag

SEQ ID NO: 2038682 - DNA, 15 bp, Homo sapiens
tgttcctttgacagc

SEQ ID NO: 2038683 - DNA, 15 bp, Homo sapiens
gttcctttgacagca

SEQ ID NO: 2038684 - DNA, 15 bp, Homo sapiens
ttcctttgacagcag

SEQ ID NO: 2038685 - DNA, 15 bp, Homo sapiens
tcctttgacagcagt

SEQ ID NO: 2038686 - DNA, 15 bp, Homo sapiens
cctttgacagcagtt

SEQ ID NO: 2038687 - DNA, 15 bp, Homo sapiens
ctttgacagcagttc

SEQ ID NO: 2038688 - DNA, 15 bp, Homo sapiens
tttgacagcagttca

SEQ ID NO: 2038689 - DNA, 15 bp, Homo sapiens
ttgacagcagttcag

SEQ ID NO: 2038690 - DNA, 15 bp, Homo sapiens
tgacagcagttcaga

SEQ ID NO: 2038691 - DNA, 15 bp, Homo sapiens
gacagcagttcagat

SEQ ID NO: 2038692 - DNA, 15 bp, Homo sapiens
acagcagttcagatt

SEQ ID NO: 2038693 - DNA, 15 bp, Homo sapiens
cagcagttcagattt

SEQ ID NO: 2038694 - DNA, 15 bp, Homo sapiens
agcagttcagatttt

SEQ ID NO: 2038695 - DNA, 15 bp, Homo sapiens
gcagttcagattttc

SEQ ID NO: 2038696 - DNA, 15 bp, Homo sapiens
cagttcagattttca

SEQ ID NO: 2038697 - DNA, 15 bp, Homo sapiens
agttcagattttcaa

SEQ ID NO: 2038698 - DNA, 15 bp, Homo sapiens
gttcagattttcaag

SEQ ID NO: 2038699 - DNA, 15 bp, Homo sapiens
ttcagattttcaaga

SEQ ID NO: 2038700 - DNA, 15 bp, Homo sapiens
tcagattttcaagac

SEQ ID NO: 2038701 - DNA, 15 bp, Homo sapiens
cagattttcaagaca

SEQ ID NO: 2038702 - DNA, 15 bp, Homo sapiens
agattttcaagacag

SEQ ID NO: 2038703 - DNA, 15 bp, Homo sapiens
gattttcaagacagc

SEQ ID NO: 2038704 - DNA, 15 bp, Homo sapiens
attttcaagacagca

SEQ ID NO: 2038705 - DNA, 15 bp, Homo sapiens
ttttcaagacagcaa

SEQ ID NO: 2038706 - DNA, 15 bp, Homo sapiens
tttcaagacagcaaa

SEQ ID NO: 2038707 - DNA, 15 bp, Homo sapiens
ttcaagacagcaaat

SEQ ID NO: 2038708 - DNA, 15 bp, Homo sapiens
tcaagacagcaaatc

SEQ ID NO: 2038709 - DNA, 15 bp, Homo sapiens
caagacagcaaatct

SEQ ID NO: 2038710 - DNA, 15 bp, Homo sapiens
aagacagcaaatctc

SEQ ID NO: 2038711 - DNA, 15 bp, Homo sapiens
agacagcaaatctct

SEQ ID NO: 2038712 - DNA, 15 bp, Homo sapiens
gacagcaaatctctg

SEQ ID NO: 2038713 - DNA, 15 bp, Homo sapiens
acagcaaatctctgt

SEQ ID NO: 2038714 - DNA, 15 bp, Homo sapiens
cagcaaatctctgtt

SEQ ID NO: 2038715 - DNA, 15 bp, Homo sapiens
agcaaatctctgttg

SEQ ID NO: 2038716 - DNA, 15 bp, Homo sapiens
gcaaatctctgttga

SEQ ID NO: 2038717 - DNA, 15 bp, Homo sapiens
caaatctctgttgag

SEQ ID NO: 2038718 - DNA, 15 bp, Homo sapiens
aaatctctgttgagc

SEQ ID NO: 2038719 - DNA, 15 bp, Homo sapiens
aatctctgttgagca

SEQ ID NO: 2038720 - DNA, 15 bp, Homo sapiens
atctctgttgagcac

SEQ ID NO: 2038721 - DNA, 15 bp, Homo sapiens
tctctgttgagcacg

SEQ ID NO: 2038722 - DNA, 15 bp, Homo sapiens
ctctgttgagcacgt

SEQ ID NO: 2038723 - DNA, 15 bp, Homo sapiens
tctgttgagcacgtg

SEQ ID NO: 2038724 - DNA, 15 bp, Homo sapiens
ctgttgagcacgtgt

SEQ ID NO: 2038725 - DNA, 15 bp, Homo sapiens
tgttgagcacgtgta

SEQ ID NO: 2038726 - DNA, 15 bp, Homo sapiens
gttgagcacgtgtaa

SEQ ID NO: 2038727 - DNA, 15 bp, Homo sapiens
ttgagcacgtgtaaa

SEQ ID NO: 2038728 - DNA, 15 bp, Homo sapiens
tgagcacgtgtaaac

SEQ ID NO: 2038729 - DNA, 15 bp, Homo sapiens
gagcacgtgtaaacc

SEQ ID NO: 2038730 - DNA, 15 bp, Homo sapiens
agcacgtgtaaacca

SEQ ID NO: 2038731 - DNA, 15 bp, Homo sapiens
gcacgtgtaaaccag

SEQ ID NO: 2038732 - DNA, 15 bp, Homo sapiens
cacgtgtaaaccagg

SEQ ID NO: 2038733 - DNA, 15 bp, Homo sapiens
acgtgtaaaccaggc

SEQ ID NO: 2038734 - DNA, 15 bp, Homo sapiens
cgtgtaaaccaggcc

SEQ ID NO: 2038735 - DNA, 15 bp, Homo sapiens
gtgtaaaccaggcca

SEQ ID NO: 2038736 - DNA, 15 bp, Homo sapiens
tgtaaaccaggccac

SEQ ID NO: 2038737 - DNA, 15 bp, Homo sapiens
gtaaaccaggccacg

SEQ ID NO: 2038738 - DNA, 15 bp, Homo sapiens
taaaccaggccacgt

SEQ ID NO: 2038739 - DNA, 15 bp, Homo sapiens
aaaccaggccacgtg

SEQ ID NO: 2038740 - DNA, 15 bp, Homo sapiens
aaccaggccacgtgc

SEQ ID NO: 2038741 - DNA, 15 bp, Homo sapiens
accaggccacgtgct

SEQ ID NO: 2038742 - DNA, 15 bp, Homo sapiens
ccaggccacgtgctt

SEQ ID NO: 2038743 - DNA, 15 bp, Homo sapiens
caggccacgtgctta

SEQ ID NO: 2038744 - DNA, 15 bp, Homo sapiens
aggccacgtgcttac

SEQ ID NO: 2038745 - DNA, 15 bp, Homo sapiens
ggccacgtgcttaca

SEQ ID NO: 2038746 - DNA, 15 bp, Homo sapiens
gccacgtgcttacag

SEQ ID NO: 2038747 - DNA, 15 bp, Homo sapiens
ccacgtgcttacaga

SEQ ID NO: 2038748 - DNA, 15 bp, Homo sapiens
cacgtgcttacagat

SEQ ID NO: 2038749 - DNA, 15 bp, Homo sapiens
acgtgcttacagatg

SEQ ID NO: 2038750 - DNA, 15 bp, Homo sapiens
cgtgcttacagatgc

SEQ ID NO: 2038751 - DNA, 15 bp, Homo sapiens
gtgcttacagatgcc

SEQ ID NO: 2038752 - DNA, 15 bp, Homo sapiens
tgcttacagatgcct

SEQ ID NO: 2038753 - DNA, 15 bp, Homo sapiens
gcttacagatgcctg

SEQ ID NO: 2038754 - DNA, 15 bp, Homo sapiens
cttacagatgcctga

SEQ ID NO: 2038755 - DNA, 15 bp, Homo sapiens
ttacagatgcctgat

SEQ ID NO: 2038756 - DNA, 15 bp, Homo sapiens
tacagatgcctgata

SEQ ID NO: 2038757 - DNA, 15 bp, Homo sapiens
acagatgcctgatac

SEQ ID NO: 2038758 - DNA, 15 bp, Homo sapiens
cagatgcctgatact

SEQ ID NO: 2038759 - DNA, 15 bp, Homo sapiens
agatgcctgatactc

SEQ ID NO: 2038760 - DNA, 15 bp, Homo sapiens
gatgcctgatactct

SEQ ID NO: 2038761 - DNA, 15 bp, Homo sapiens
atgcctgatactctt

SEQ ID NO: 2038762 - DNA, 15 bp, Homo sapiens
tgcctgatactcttg

SEQ ID NO: 2038763 - DNA, 15 bp, Homo sapiens
gcctgatactcttga

SEQ ID NO: 2038764 - DNA, 15 bp, Homo sapiens
cctgatactcttgag

SEQ ID NO: 2038765 - DNA, 15 bp, Homo sapiens
ctgatactcttgagt

SEQ ID NO: 2038766 - DNA, 15 bp, Homo sapiens
tgatactcttgagtc

SEQ ID NO: 2038767 - DNA, 15 bp, Homo sapiens
gatactcttgagtcg

SEQ ID NO: 2038768 - DNA, 15 bp, Homo sapiens
atactcttgagtcga

SEQ ID NO: 2038769 - DNA, 15 bp, Homo sapiens
tactcttgagtcgaa

SEQ ID NO: 2038770 - DNA, 15 bp, Homo sapiens
actcttgagtcgaat

SEQ ID NO: 2038771 - DNA, 15 bp, Homo sapiens
ctcttgagtcgaatt

SEQ ID NO: 2038772 - DNA, 15 bp, Homo sapiens
tcttgagtcgaattc

SEQ ID NO: 2038773 - DNA, 15 bp, Homo sapiens
cttgagtcgaattca

SEQ ID NO: 2038774 - DNA, 15 bp, Homo sapiens
ttgagtcgaattcag

SEQ ID NO: 2038775 - DNA, 15 bp, Homo sapiens
tgagtcgaattcaga

SEQ ID NO: 2038776 - DNA, 15 bp, Homo sapiens
gagtcgaattcagag

SEQ ID NO: 2038777 - DNA, 15 bp, Homo sapiens
agtcgaattcagagc

SEQ ID NO: 2038778 - DNA, 15 bp, Homo sapiens
gtcgaattcagagct

SEQ ID NO: 2038779 - DNA, 15 bp, Homo sapiens
tcgaattcagagctg

SEQ ID NO: 2038780 - DNA, 15 bp, Homo sapiens
cgaattcagagctga

SEQ ID NO: 2038781 - DNA, 15 bp, Homo sapiens
gaattcagagctgaa

SEQ ID NO: 2038782 - DNA, 15 bp, Homo sapiens
aattcagagctgaat

SEQ ID NO: 2038783 - DNA, 15 bp, Homo sapiens
attcagagctgaatc

SEQ ID NO: 2038784 - DNA, 15 bp, Homo sapiens
ttcagagctgaatcc

SEQ ID NO: 2038785 - DNA, 15 bp, Homo sapiens
tcagagctgaatcca

SEQ ID NO: 2038786 - DNA, 15 bp, Homo sapiens
cagagctgaatccaa

SEQ ID NO: 2038787 - DNA, 15 bp, Homo sapiens
agagctgaatccaaa

SEQ ID NO: 2038788 - DNA, 15 bp, Homo sapiens
gagctgaatccaaat

SEQ ID NO: 2038789 - DNA, 15 bp, Homo sapiens
agctgaatccaaatg

SEQ ID NO: 2038790 - DNA, 15 bp, Homo sapiens
gctgaatccaaatga

SEQ ID NO: 2038791 - DNA, 15 bp, Homo sapiens
ctgaatccaaatgaa

SEQ ID NO: 2038792 - DNA, 15 bp, Homo sapiens
tgaatccaaatgaaa

SEQ ID NO: 2038793 - DNA, 15 bp, Homo sapiens
gaatccaaatgaaag

SEQ ID NO: 2038794 - DNA, 15 bp, Homo sapiens
aatccaaatgaaaga

SEQ ID NO: 2038795 - DNA, 15 bp, Homo sapiens
atccaaatgaaagat

SEQ ID NO: 2038796 - DNA, 15 bp, Homo sapiens
tccaaatgaaagatg

SEQ ID NO: 2038797 - DNA, 15 bp, Homo sapiens
ccaaatgaaagatga

SEQ ID NO: 2038798 - DNA, 15 bp, Homo sapiens
caaatgaaagatgag

SEQ ID NO: 2038799 - DNA, 15 bp, Homo sapiens
aaatgaaagatgagt

SEQ ID NO: 2038800 - DNA, 15 bp, Homo sapiens
aatgaaagatgagtg

SEQ ID NO: 2038801 - DNA, 15 bp, Homo sapiens
atgaaagatgagtgg

SEQ ID NO: 2038802 - DNA, 15 bp, Homo sapiens
tgaaagatgagtggc

SEQ ID NO: 2038803 - DNA, 15 bp, Homo sapiens
gaaagatgagtggct

SEQ ID NO: 2038804 - DNA, 15 bp, Homo sapiens
aaagatgagtggctc

SEQ ID NO: 2038805 - DNA, 15 bp, Homo sapiens
aagatgagtggctcc

SEQ ID NO: 2038806 - DNA, 15 bp, Homo sapiens
agatgagtggctcct

SEQ ID NO: 2038807 - DNA, 15 bp, Homo sapiens
gatgagtggctccta

SEQ ID NO: 2038808 - DNA, 15 bp, Homo sapiens
atgagtggctcctag

SEQ ID NO: 2038809 - DNA, 15 bp, Homo sapiens
tgagtggctcctaga

SEQ ID NO: 2038810 - DNA, 15 bp, Homo sapiens
gagtggctcctagag

SEQ ID NO: 2038811 - DNA, 15 bp, Homo sapiens
agtggctcctagagg

SEQ ID NO: 2038812 - DNA, 15 bp, Homo sapiens
gtggctcctagaggg

SEQ ID NO: 2038813 - DNA, 15 bp, Homo sapiens
tggctcctagaggga

SEQ ID NO: 2038814 - DNA, 15 bp, Homo sapiens
ggctcctagagggag

SEQ ID NO: 2038815 - DNA, 15 bp, Homo sapiens
gctcctagagggagg

SEQ ID NO: 2038816 - DNA, 15 bp, Homo sapiens
ctcctagagggaggt

SEQ ID NO: 2038817 - DNA, 15 bp, Homo sapiens
tcctagagggaggtc

SEQ ID NO: 2038818 - DNA, 15 bp, Homo sapiens
cctagagggaggtca

SEQ ID NO: 2038819 - DNA, 15 bp, Homo sapiens
ctagagggaggtcat

SEQ ID NO: 2038820 - DNA, 15 bp, Homo sapiens
tagagggaggtcatc

SEQ ID NO: 2038821 - DNA, 15 bp, Homo sapiens
agagggaggtcatcc

SEQ ID NO: 2038822 - DNA, 15 bp, Homo sapiens
gagggaggtcatccc

SEQ ID NO: 2038823 - DNA, 15 bp, Homo sapiens
agggaggtcatccca

SEQ ID NO: 2038824 - DNA, 15 bp, Homo sapiens
gggaggtcatcccaa

SEQ ID NO: 2038825 - DNA, 15 bp, Homo sapiens
ggaggtcatcccaag

SEQ ID NO: 2038826 - DNA, 15 bp, Homo sapiens
gaggtcatcccaagt

SEQ ID NO: 2038827 - DNA, 15 bp, Homo sapiens
aggtcatcccaagtt

SEQ ID NO: 2038828 - DNA, 15 bp, Homo sapiens
ggtcatcccaagttc

SEQ ID NO: 2038829 - DNA, 15 bp, Homo sapiens
gtcatcccaagttca

SEQ ID NO: 2038830 - DNA, 15 bp, Homo sapiens
tcatcccaagttcat

SEQ ID NO: 2038831 - DNA, 15 bp, Homo sapiens
catcccaagttcatt

SEQ ID NO: 2038832 - DNA, 15 bp, Homo sapiens
atcccaagttcattt

SEQ ID NO: 2038833 - DNA, 15 bp, Homo sapiens
tcccaagttcatttc

SEQ ID NO: 2038834 - DNA, 15 bp, Homo sapiens
cccaagttcatttcc

SEQ ID NO: 2038835 - DNA, 15 bp, Homo sapiens
ccaagttcatttcct

SEQ ID NO: 2038836 - DNA, 15 bp, Homo sapiens
caagttcatttcctg

SEQ ID NO: 2038837 - DNA, 15 bp, Homo sapiens
aagttcatttcctgt

SEQ ID NO: 2038838 - DNA, 15 bp, Homo sapiens
agttcatttcctgtt

SEQ ID NO: 2038839 - DNA, 15 bp, Homo sapiens
gttcatttcctgttc

SEQ ID NO: 2038840 - DNA, 15 bp, Homo sapiens
ttcatttcctgttca

SEQ ID NO: 2038841 - DNA, 15 bp, Homo sapiens
tcatttcctgttcat

SEQ ID NO: 2038842 - DNA, 15 bp, Homo sapiens
catttcctgttcatg

SEQ ID NO: 2038843 - DNA, 15 bp, Homo sapiens
atttcctgttcatga

SEQ ID NO: 2038844 - DNA, 15 bp, Homo sapiens
tttcctgttcatgag

SEQ ID NO: 2038845 - DNA, 15 bp, Homo sapiens
ttcctgttcatgagc

SEQ ID NO: 2038846 - DNA, 15 bp, Homo sapiens
tcctgttcatgagcc

SEQ ID NO: 2038847 - DNA, 15 bp, Homo sapiens
cctgttcatgagcca

SEQ ID NO: 2038848 - DNA, 15 bp, Homo sapiens
ctgttcatgagccaa

SEQ ID NO: 2038849 - DNA, 15 bp, Homo sapiens
tgttcatgagccaac

SEQ ID NO: 2038850 - DNA, 15 bp, Homo sapiens
gttcatgagccaaca

SEQ ID NO: 2038851 - DNA, 15 bp, Homo sapiens
ttcatgagccaacaa

SEQ ID NO: 2038852 - DNA, 15 bp, Homo sapiens
tcatgagccaacaaa

SEQ ID NO: 2038853 - DNA, 15 bp, Homo sapiens
catgagccaacaaat

SEQ ID NO: 2038854 - DNA, 15 bp, Homo sapiens
atgagccaacaaata

SEQ ID NO: 2038855 - DNA, 15 bp, Homo sapiens
tgagccaacaaataa

SEQ ID NO: 2038856 - DNA, 15 bp, Homo sapiens
gagccaacaaataac

SEQ ID NO: 2038857 - DNA, 15 bp, Homo sapiens
agccaacaaataact

SEQ ID NO: 2038858 - DNA, 15 bp, Homo sapiens
gccaacaaataacta

SEQ ID NO: 2038859 - DNA, 15 bp, Homo sapiens
ccaacaaataactaa

SEQ ID NO: 2038860 - DNA, 15 bp, Homo sapiens
caacaaataactaac

SEQ ID NO: 2038861 - DNA, 15 bp, Homo sapiens
aacaaataactaact

SEQ ID NO: 2038862 - DNA, 15 bp, Homo sapiens
acaaataactaactg

SEQ ID NO: 2038863 - DNA, 15 bp, Homo sapiens
caaataactaactgg

SEQ ID NO: 2038864 - DNA, 15 bp, Homo sapiens
aaataactaactggg

SEQ ID NO: 2038865 - DNA, 15 bp, Homo sapiens
aataactaactgggt

SEQ ID NO: 2038866 - DNA, 15 bp, Homo sapiens
ataactaactgggta

SEQ ID NO: 2038867 - DNA, 15 bp, Homo sapiens
taactaactgggtag

SEQ ID NO: 2038868 - DNA, 15 bp, Homo sapiens
aactaactgggtaga

SEQ ID NO: 2038869 - DNA, 15 bp, Homo sapiens
actaactgggtagat

SEQ ID NO: 2038870 - DNA, 15 bp, Homo sapiens
ctaactgggtagatc

SEQ ID NO: 2038871 - DNA, 15 bp, Homo sapiens
taactgggtagatct

SEQ ID NO: 2038872 - DNA, 15 bp, Homo sapiens
aactgggtagatcta

SEQ ID NO: 2038873 - DNA, 15 bp, Homo sapiens
actgggtagatctat

SEQ ID NO: 2038874 - DNA, 15 bp, Homo sapiens
ctgggtagatctatg

SEQ ID NO: 2038875 - DNA, 15 bp, Homo sapiens
tgggtagatctatgt

SEQ ID NO: 2038876 - DNA, 15 bp, Homo sapiens
gggtagatctatgta

SEQ ID NO: 2038877 - DNA, 15 bp, Homo sapiens
ggtagatctatgtac

SEQ ID NO: 2038878 - DNA, 15 bp, Homo sapiens
gtagatctatgtaca

SEQ ID NO: 2038879 - DNA, 15 bp, Homo sapiens
tagatctatgtacat

SEQ ID NO: 2038880 - DNA, 15 bp, Homo sapiens
agatctatgtacatt

SEQ ID NO: 2038881 - DNA, 15 bp, Homo sapiens
gatctatgtacattt

SEQ ID NO: 2038882 - DNA, 15 bp, Homo sapiens
atctatgtacatttt

SEQ ID NO: 2038883 - DNA, 15 bp, Homo sapiens
tctatgtacattttc

SEQ ID NO: 2038884 - DNA, 15 bp, Homo sapiens
ctatgtacattttct

SEQ ID NO: 2038885 - DNA, 15 bp, Homo sapiens
tatgtacattttctg

SEQ ID NO: 2038886 - DNA, 15 bp, Homo sapiens
atgtacattttctgt

SEQ ID NO: 2038887 - DNA, 15 bp, Homo sapiens
tgtacattttctgta

SEQ ID NO: 2038888 - DNA, 15 bp, Homo sapiens
gtacattttctgtaa

SEQ ID NO: 2038889 - DNA, 15 bp, Homo sapiens
tacattttctgtaac

SEQ ID NO: 2038890 - DNA, 15 bp, Homo sapiens
acattttctgtaaca

SEQ ID NO: 2038891 - DNA, 15 bp, Homo sapiens
cattttctgtaacat

SEQ ID NO: 2038892 - DNA, 15 bp, Homo sapiens
attttctgtaacata

SEQ ID NO: 2038893 - DNA, 15 bp, Homo sapiens
ttttctgtaacataa

SEQ ID NO: 2038894 - DNA, 15 bp, Homo sapiens
tttctgtaacataat

SEQ ID NO: 2038895 - DNA, 15 bp, Homo sapiens
ttctgtaacataatg

SEQ ID NO: 2038896 - DNA, 15 bp, Homo sapiens
tctgtaacataatga

SEQ ID NO: 2038897 - DNA, 15 bp, Homo sapiens
ctgtaacataatgaa

SEQ ID NO: 2038898 - DNA, 15 bp, Homo sapiens
tgtaacataatgaat

SEQ ID NO: 2038899 - DNA, 15 bp, Homo sapiens
gtaacataatgaata

SEQ ID NO: 2038900 - DNA, 15 bp, Homo sapiens
taacataatgaatac

SEQ ID NO: 2038901 - DNA, 15 bp, Homo sapiens
aacataatgaatact

SEQ ID NO: 2038902 - DNA, 15 bp, Homo sapiens
acataatgaatactt

SEQ ID NO: 2038903 - DNA, 15 bp, Homo sapiens
cataatgaatacttc

SEQ ID NO: 2038904 - DNA, 15 bp, Homo sapiens
ataatgaatacttct

SEQ ID NO: 2038905 - DNA, 15 bp, Homo sapiens
taatgaatacttctt

SEQ ID NO: 2038906 - DNA, 15 bp, Homo sapiens
aatgaatacttcttg

SEQ ID NO: 2038907 - DNA, 15 bp, Homo sapiens
atgaatacttcttga

SEQ ID NO: 2038908 - DNA, 15 bp, Homo sapiens
tgaatacttcttgac

SEQ ID NO: 2038909 - DNA, 15 bp, Homo sapiens
gaatacttcttgact

SEQ ID NO: 2038910 - DNA, 15 bp, Homo sapiens
aatacttcttgactt

SEQ ID NO: 2038911 - DNA, 15 bp, Homo sapiens
atacttcttgacttg

SEQ ID NO: 2038912 - DNA, 15 bp, Homo sapiens
tacttcttgacttga

SEQ ID NO: 2038913 - DNA, 15 bp, Homo sapiens
acttcttgacttgaa

SEQ ID NO: 2038914 - DNA, 15 bp, Homo sapiens
cttcttgacttgaaa

SEQ ID NO: 2038915 - DNA, 15 bp, Homo sapiens
ttcttgacttgaaat

SEQ ID NO: 2038916 - DNA, 15 bp, Homo sapiens
tcttgacttgaaata

SEQ ID NO: 2038917 - DNA, 15 bp, Homo sapiens
cttgacttgaaatat

SEQ ID NO: 2038918 - DNA, 15 bp, Homo sapiens
ttgacttgaaatatt

SEQ ID NO: 2038919 - DNA, 15 bp, Homo sapiens
tgacttgaaatatta

SEQ ID NO: 2038920 - DNA, 15 bp, Homo sapiens
gacttgaaatattac

SEQ ID NO: 2038921 - DNA, 15 bp, Homo sapiens
acttgaaatattact

SEQ ID NO: 2038922 - DNA, 15 bp, Homo sapiens
cttgaaatattactt

SEQ ID NO: 2038923 - DNA, 15 bp, Homo sapiens
ttgaaatattacttt

SEQ ID NO: 2038924 - DNA, 15 bp, Homo sapiens
tgaaatattactttt

SEQ ID NO: 2038925 - DNA, 15 bp, Homo sapiens
gaaatattacttttt

SEQ ID NO: 2038926 - DNA, 15 bp, Homo sapiens
aaatattactttttg

SEQ ID NO: 2038927 - DNA, 15 bp, Homo sapiens
aatattactttttgt

SEQ ID NO: 2038928 - DNA, 15 bp, Homo sapiens
atattactttttgtc

SEQ ID NO: 2038929 - DNA, 15 bp, Homo sapiens
tattactttttgtcc

SEQ ID NO: 2038930 - DNA, 15 bp, Homo sapiens
attactttttgtcca

SEQ ID NO: 2038931 - DNA, 15 bp, Homo sapiens
ttactttttgtccaa

SEQ ID NO: 2038932 - DNA, 15 bp, Homo sapiens
tactttttgtccaaa

SEQ ID NO: 2038933 - DNA, 15 bp, Homo sapiens
actttttgtccaaaa

SEQ ID NO: 2038934 - DNA, 15 bp, Homo sapiens
ctttttgtccaaaaa

SEQ ID NO: 2038935 - DNA, 15 bp, Homo sapiens
tttttgtccaaaaat

SEQ ID NO: 2038936 - DNA, 15 bp, Homo sapiens
ttttgtccaaaaatg

SEQ ID NO: 2038937 - DNA, 15 bp, Homo sapiens
tttgtccaaaaatgg

SEQ ID NO: 2038938 - DNA, 15 bp, Homo sapiens
ttgtccaaaaatgga

SEQ ID NO: 2038939 - DNA, 15 bp, Homo sapiens
tgtccaaaaatggaa

SEQ ID NO: 2038940 - DNA, 15 bp, Homo sapiens
gtccaaaaatggaaa

SEQ ID NO: 2038941 - DNA, 15 bp, Homo sapiens
tccaaaaatggaaat

SEQ ID NO: 2038942 - DNA, 15 bp, Homo sapiens
ccaaaaatggaaatt

SEQ ID NO: 2038943 - DNA, 15 bp, Homo sapiens
caaaaatggaaattt

SEQ ID NO: 2038944 - DNA, 15 bp, Homo sapiens
aaaaatggaaatttt

SEQ ID NO: 2038945 - DNA, 15 bp, Homo sapiens
aaaatggaaattttt

SEQ ID NO: 2038946 - DNA, 15 bp, Homo sapiens
aaatggaaatttttc

SEQ ID NO: 2038947 - DNA, 15 bp, Homo sapiens
aatggaaatttttct

SEQ ID NO: 2038948 - DNA, 15 bp, Homo sapiens
atggaaatttttcta

SEQ ID NO: 2038949 - DNA, 15 bp, Homo sapiens
tggaaatttttctat

SEQ ID NO: 2038950 - DNA, 15 bp, Homo sapiens
ggaaatttttctatt

SEQ ID NO: 2038951 - DNA, 15 bp, Homo sapiens
gaaatttttctattc

SEQ ID NO: 2038952 - DNA, 15 bp, Homo sapiens
aaatttttctattct

SEQ ID NO: 2038953 - DNA, 15 bp, Homo sapiens
aatttttctattcta

SEQ ID NO: 2038954 - DNA, 15 bp, Homo sapiens
atttttctattctaa

SEQ ID NO: 2038955 - DNA, 15 bp, Homo sapiens
tttttctattctaag

SEQ ID NO: 2038956 - DNA, 15 bp, Homo sapiens
ttttctattctaaga

SEQ ID NO: 2038957 - DNA, 15 bp, Homo sapiens
tttctattctaagat

SEQ ID NO: 2038958 - DNA, 15 bp, Homo sapiens
ttctattctaagatt

SEQ ID NO: 2038959 - DNA, 15 bp, Homo sapiens
tctattctaagattt

SEQ ID NO: 2038960 - DNA, 15 bp, Homo sapiens
ctattctaagattta

SEQ ID NO: 2038961 - DNA, 15 bp, Homo sapiens
tattctaagatttaa

SEQ ID NO: 2038962 - DNA, 15 bp, Homo sapiens
attctaagatttaaa

SEQ ID NO: 2038963 - DNA, 15 bp, Homo sapiens
ttctaagatttaaaa

SEQ ID NO: 2038964 - DNA, 15 bp, Homo sapiens
tctaagatttaaaat

SEQ ID NO: 2038965 - DNA, 15 bp, Homo sapiens
ctaagatttaaaatt

SEQ ID NO: 2038966 - DNA, 15 bp, Homo sapiens
taagatttaaaattt

SEQ ID NO: 2038967 - DNA, 15 bp, Homo sapiens
aagatttaaaatttc

SEQ ID NO: 2038968 - DNA, 15 bp, Homo sapiens
agatttaaaatttca

SEQ ID NO: 2038969 - DNA, 15 bp, Homo sapiens
gatttaaaatttcaa

SEQ ID NO: 2038970 - DNA, 15 bp, Homo sapiens
atttaaaatttcaat

SEQ ID NO: 2038971 - DNA, 15 bp, Homo sapiens
tttaaaatttcaata

SEQ ID NO: 2038972 - DNA, 15 bp, Homo sapiens
ttaaaatttcaatat

SEQ ID NO: 2038973 - DNA, 15 bp, Homo sapiens
taaaatttcaatata

SEQ ID NO: 2038974 - DNA, 15 bp, Homo sapiens
aaaatttcaatatat

SEQ ID NO: 2038975 - DNA, 15 bp, Homo sapiens
aaatttcaatatata

SEQ ID NO: 2038976 - DNA, 15 bp, Homo sapiens
aatttcaatatataa

SEQ ID NO: 2038977 - DNA, 15 bp, Homo sapiens
atttcaatatataaa

SEQ ID NO: 2038978 - DNA, 15 bp, Homo sapiens
tttcaatatataaag

SEQ ID NO: 2038979 - DNA, 15 bp, Homo sapiens
ttcaatatataaaga

SEQ ID NO: 2038980 - DNA, 15 bp, Homo sapiens
tcaatatataaagaa

SEQ ID NO: 2038981 - DNA, 15 bp, Homo sapiens
caatatataaagaag

SEQ ID NO: 2038982 - DNA, 15 bp, Homo sapiens
aatatataaagaaga

SEQ ID NO: 2038983 - DNA, 15 bp, Homo sapiens
atatataaagaagaa

SEQ ID NO: 2038984 - DNA, 15 bp, Homo sapiens
tatataaagaagaat

SEQ ID NO: 2038985 - DNA, 15 bp, Homo sapiens
atataaagaagaata

SEQ ID NO: 2038986 - DNA, 15 bp, Homo sapiens
tataaagaagaataa

SEQ ID NO: 2038987 - DNA, 15 bp, Homo sapiens
ataaagaagaataaa

SEQ ID NO: 2038988 - DNA, 15 bp, Homo sapiens
taaagaagaataaag

SEQ ID NO: 2038989 - DNA, 15 bp, Homo sapiens
aaagaagaataaagt

SEQ ID NO: 2038990 - DNA, 15 bp, Homo sapiens
aagaagaataaagta

SEQ ID NO: 2038991 - DNA, 15 bp, Homo sapiens
agaagaataaagtac

SEQ ID NO: 2038992 - DNA, 15 bp, Homo sapiens
gaagaataaagtaca

SEQ ID NO: 2038993 - DNA, 15 bp, Homo sapiens
aagaataaagtacaa

SEQ ID NO: 2038994 - DNA, 15 bp, Homo sapiens
agaataaagtacaaa

SEQ ID NO: 2038995 - DNA, 15 bp, Homo sapiens
gaataaagtacaaat

SEQ ID NO: 2038996 - DNA, 15 bp, Homo sapiens
aataaagtacaaatt

SEQ ID NO: 2038997 - DNA, 15 bp, Homo sapiens
ataaagtacaaatta

SEQ ID NO: 2038998 - DNA, 15 bp, Homo sapiens
taaagtacaaattag

SEQ ID NO: 2038999 - DNA, 15 bp, Homo sapiens
aaagtacaaattagc

SEQ ID NO: 2039000 - DNA, 15 bp, Homo sapiens
aagtacaaattagct

SEQ ID NO: 2039001 - DNA, 15 bp, Homo sapiens
agtacaaattagctg

SEQ ID NO: 2039002 - DNA, 15 bp, Homo sapiens
gtacaaattagctga

SEQ ID NO: 2039003 - DNA, 15 bp, Homo sapiens
tacaaattagctgaa

SEQ ID NO: 2039004 - DNA, 15 bp, Homo sapiens
acaaattagctgaaa

SEQ ID NO: 2039005 - DNA, 15 bp, Homo sapiens
caaattagctgaaat

SEQ ID NO: 2039006 - DNA, 15 bp, Homo sapiens
aaattagctgaaatc

SEQ ID NO: 2039007 - DNA, 15 bp, Homo sapiens
aattagctgaaatct

SEQ ID NO: 2039008 - DNA, 15 bp, Homo sapiens
attagctgaaatctt

SEQ ID NO: 2039009 - DNA, 15 bp, Homo sapiens
ttagctgaaatcttg

SEQ ID NO: 2039010 - DNA, 15 bp, Homo sapiens
tagctgaaatcttgc

SEQ ID NO: 2039011 - DNA, 15 bp, Homo sapiens
agctgaaatcttgcc

SEQ ID NO: 2039012 - DNA, 15 bp, Homo sapiens
gctgaaatcttgcca

SEQ ID NO: 2039013 - DNA, 15 bp, Homo sapiens
ctgaaatcttgccat

SEQ ID NO: 2039014 - DNA, 15 bp, Homo sapiens
tgaaatcttgccata

SEQ ID NO: 2039015 - DNA, 15 bp, Homo sapiens
gaaatcttgccatac

SEQ ID NO: 2039016 - DNA, 15 bp, Homo sapiens
aaatcttgccataca

SEQ ID NO: 2039017 - DNA, 15 bp, Homo sapiens
aatcttgccatacag

SEQ ID NO: 2039018 - DNA, 15 bp, Homo sapiens
atcttgccatacaga

SEQ ID NO: 2039019 - DNA, 15 bp, Homo sapiens
tcttgccatacagag

SEQ ID NO: 2039020 - DNA, 15 bp, Homo sapiens
cttgccatacagagg

SEQ ID NO: 2039021 - DNA, 15 bp, Homo sapiens
ttgccatacagaggt

SEQ ID NO: 2039022 - DNA, 15 bp, Homo sapiens
tgccatacagaggta

SEQ ID NO: 2039023 - DNA, 15 bp, Homo sapiens
gccatacagaggtaa

SEQ ID NO: 2039024 - DNA, 15 bp, Homo sapiens
ccatacagaggtaaa

SEQ ID NO: 2039025 - DNA, 15 bp, Homo sapiens
catacagaggtaaaa

SEQ ID NO: 2039026 - DNA, 15 bp, Homo sapiens
atacagaggtaaaat

SEQ ID NO: 2039027 - DNA, 15 bp, Homo sapiens
tacagaggtaaaata

SEQ ID NO: 2039028 - DNA, 15 bp, Homo sapiens
acagaggtaaaatat

SEQ ID NO: 2039029 - DNA, 15 bp, Homo sapiens
cagaggtaaaatata

SEQ ID NO: 2039030 - DNA, 15 bp, Homo sapiens
agaggtaaaatatat

SEQ ID NO: 2039031 - DNA, 15 bp, Homo sapiens
gaggtaaaatatatt

SEQ ID NO: 2039032 - DNA, 15 bp, Homo sapiens
aggtaaaatatattt

SEQ ID NO: 2039033 - DNA, 15 bp, Homo sapiens
ggtaaaatatatttt

SEQ ID NO: 2039034 - DNA, 15 bp, Homo sapiens
gtaaaatatattttt

SEQ ID NO: 2039035 - DNA, 15 bp, Homo sapiens
taaaatatatttttt

SEQ ID NO: 2039036 - DNA, 15 bp, Homo sapiens
aaaatatatttttta

SEQ ID NO: 2039037 - DNA, 15 bp, Homo sapiens
aaatatattttttag

SEQ ID NO: 2039038 - DNA, 15 bp, Homo sapiens
aatatattttttagt

SEQ ID NO: 2039039 - DNA, 15 bp, Homo sapiens
atatattttttagtc

SEQ ID NO: 2039040 - DNA, 15 bp, Homo sapiens
tatattttttagtcc

SEQ ID NO: 2039041 - DNA, 15 bp, Homo sapiens
atattttttagtcct

SEQ ID NO: 2039042 - DNA, 15 bp, Homo sapiens
tattttttagtcctt

SEQ ID NO: 2039043 - DNA, 15 bp, Homo sapiens
attttttagtccttt

SEQ ID NO: 2039044 - DNA, 15 bp, Homo sapiens
ttttttagtcctttg

SEQ ID NO: 2039045 - DNA, 15 bp, Homo sapiens
tttttagtcctttgg

SEQ ID NO: 2039046 - DNA, 15 bp, Homo sapiens
ttttagtcctttggc

SEQ ID NO: 2039047 - DNA, 15 bp, Homo sapiens
tttagtcctttggct

SEQ ID NO: 2039048 - DNA, 15 bp, Homo sapiens
ttagtcctttggctt

SEQ ID NO: 2039049 - DNA, 15 bp, Homo sapiens
tagtcctttggcttc

SEQ ID NO: 2039050 - DNA, 15 bp, Homo sapiens
agtcctttggcttct

SEQ ID NO: 2039051 - DNA, 15 bp, Homo sapiens
gtcctttggcttctg

SEQ ID NO: 2039052 - DNA, 15 bp, Homo sapiens
tcctttggcttctga

SEQ ID NO: 2039053 - DNA, 15 bp, Homo sapiens
cctttggcttctgac

SEQ ID NO: 2039054 - DNA, 15 bp, Homo sapiens
ctttggcttctgaca

SEQ ID NO: 2039055 - DNA, 15 bp, Homo sapiens
tttggcttctgacag

SEQ ID NO: 2039056 - DNA, 15 bp, Homo sapiens
ttggcttctgacaga

SEQ ID NO: 2039057 - DNA, 15 bp, Homo sapiens
tggcttctgacagag

SEQ ID NO: 2039058 - DNA, 15 bp, Homo sapiens
ggcttctgacagaga

SEQ ID NO: 2039059 - DNA, 15 bp, Homo sapiens
gcttctgacagagat

SEQ ID NO: 2039060 - DNA, 15 bp, Homo sapiens
cttctgacagagata

SEQ ID NO: 2039061 - DNA, 15 bp, Homo sapiens
ttctgacagagataa

SEQ ID NO: 2039062 - DNA, 15 bp, Homo sapiens
tctgacagagataaa

SEQ ID NO: 2039063 - DNA, 15 bp, Homo sapiens
ctgacagagataaaa

SEQ ID NO: 2039064 - DNA, 15 bp, Homo sapiens
tgacagagataaaat

SEQ ID NO: 2039065 - DNA, 15 bp, Homo sapiens
gacagagataaaata

SEQ ID NO: 2039066 - DNA, 15 bp, Homo sapiens
acagagataaaatat

SEQ ID NO: 2039067 - DNA, 15 bp, Homo sapiens
cagagataaaatatt

SEQ ID NO: 2039068 - DNA, 15 bp, Homo sapiens
agagataaaatattt

SEQ ID NO: 2039069 - DNA, 15 bp, Homo sapiens
gagataaaatatttt

SEQ ID NO: 2039070 - DNA, 15 bp, Homo sapiens
agataaaatattttg

SEQ ID NO: 2039071 - DNA, 15 bp, Homo sapiens
gataaaatattttgg

SEQ ID NO: 2039072 - DNA, 15 bp, Homo sapiens
ataaaatattttggc

SEQ ID NO: 2039073 - DNA, 15 bp, Homo sapiens
taaaatattttggca

SEQ ID NO: 2039074 - DNA, 15 bp, Homo sapiens
aaaatattttggcag

SEQ ID NO: 2039075 - DNA, 15 bp, Homo sapiens
aaatattttggcaga

SEQ ID NO: 2039076 - DNA, 15 bp, Homo sapiens
aatattttggcagat

SEQ ID NO: 2039077 - DNA, 15 bp, Homo sapiens
atattttggcagatg

SEQ ID NO: 2039078 - DNA, 15 bp, Homo sapiens
tattttggcagatgt

SEQ ID NO: 2039079 - DNA, 15 bp, Homo sapiens
attttggcagatgtt

SEQ ID NO: 2039080 - DNA, 15 bp, Homo sapiens
ttttggcagatgttt

SEQ ID NO: 2039081 - DNA, 15 bp, Homo sapiens
tttggcagatgttta

SEQ ID NO: 2039082 - DNA, 15 bp, Homo sapiens
ttggcagatgtttac

SEQ ID NO: 2039083 - DNA, 15 bp, Homo sapiens
tggcagatgtttacc

SEQ ID NO: 2039084 - DNA, 15 bp, Homo sapiens
ggcagatgtttaccc

SEQ ID NO: 2039085 - DNA, 15 bp, Homo sapiens
gcagatgtttaccca

SEQ ID NO: 2039086 - DNA, 15 bp, Homo sapiens
cagatgtttacccag

SEQ ID NO: 2039087 - DNA, 15 bp, Homo sapiens
agatgtttacccagc

SEQ ID NO: 2039088 - DNA, 15 bp, Homo sapiens
gatgtttacccagcc

SEQ ID NO: 2039089 - DNA, 15 bp, Homo sapiens
atgtttacccagccc

SEQ ID NO: 2039090 - DNA, 15 bp, Homo sapiens
tgtttacccagccct

SEQ ID NO: 2039091 - DNA, 15 bp, Homo sapiens
gtttacccagcccta

SEQ ID NO: 2039092 - DNA, 15 bp, Homo sapiens
tttacccagccctac

SEQ ID NO: 2039093 - DNA, 15 bp, Homo sapiens
ttacccagccctacg

SEQ ID NO: 2039094 - DNA, 15 bp, Homo sapiens
tacccagccctacgc

SEQ ID NO: 2039095 - DNA, 15 bp, Homo sapiens
acccagccctacgcc

SEQ ID NO: 2039096 - DNA, 15 bp, Homo sapiens
cccagccctacgccc

SEQ ID NO: 2039097 - DNA, 15 bp, Homo sapiens
ccagccctacgccct

SEQ ID NO: 2039098 - DNA, 15 bp, Homo sapiens
cagccctacgccctc

SEQ ID NO: 2039099 - DNA, 15 bp, Homo sapiens
agccctacgccctct

SEQ ID NO: 2039100 - DNA, 15 bp, Homo sapiens
gccctacgccctctc

SEQ ID NO: 2039101 - DNA, 15 bp, Homo sapiens
ccctacgccctctcc

SEQ ID NO: 2039102 - DNA, 15 bp, Homo sapiens
cctacgccctctccc

SEQ ID NO: 2039103 - DNA, 15 bp, Homo sapiens
ctacgccctctcccc

SEQ ID NO: 2039104 - DNA, 15 bp, Homo sapiens
tacgccctctcccca

SEQ ID NO: 2039105 - DNA, 15 bp, Homo sapiens
acgccctctccccac

SEQ ID NO: 2039106 - DNA, 15 bp, Homo sapiens
cgccctctccccaca

SEQ ID NO: 2039107 - DNA, 15 bp, Homo sapiens
gccctctccccacag

SEQ ID NO: 2039108 - DNA, 15 bp, Homo sapiens
ccctctccccacagt

SEQ ID NO: 2039109 - DNA, 15 bp, Homo sapiens
cctctccccacagtg

SEQ ID NO: 2039110 - DNA, 15 bp, Homo sapiens
ctctccccacagtgt

SEQ ID NO: 2039111 - DNA, 15 bp, Homo sapiens
tctccccacagtgtg

SEQ ID NO: 2039112 - DNA, 15 bp, Homo sapiens
ctccccacagtgtgt

SEQ ID NO: 2039113 - DNA, 15 bp, Homo sapiens
tccccacagtgtgtg

SEQ ID NO: 2039114 - DNA, 15 bp, Homo sapiens
ccccacagtgtgtgg

SEQ ID NO: 2039115 - DNA, 15 bp, Homo sapiens
cccacagtgtgtggg

SEQ ID NO: 2039116 - DNA, 15 bp, Homo sapiens
ccacagtgtgtgggt

SEQ ID NO: 2039117 - DNA, 15 bp, Homo sapiens
cacagtgtgtgggtg

SEQ ID NO: 2039118 - DNA, 15 bp, Homo sapiens
acagtgtgtgggtgt

SEQ ID NO: 2039119 - DNA, 15 bp, Homo sapiens
cagtgtgtgggtgtt

SEQ ID NO: 2039120 - DNA, 15 bp, Homo sapiens
agtgtgtgggtgttt

SEQ ID NO: 2039121 - DNA, 15 bp, Homo sapiens
gtgtgtgggtgtttt

SEQ ID NO: 2039122 - DNA, 15 bp, Homo sapiens
tgtgtgggtgttttt

SEQ ID NO: 2039123 - DNA, 15 bp, Homo sapiens
gtgtgggtgtttttt

SEQ ID NO: 2039124 - DNA, 15 bp, Homo sapiens
tgtgggtgttttttt

SEQ ID NO: 2039125 - DNA, 15 bp, Homo sapiens
gtgggtgtttttttc

SEQ ID NO: 2039126 - DNA, 15 bp, Homo sapiens
tgggtgtttttttcc

SEQ ID NO: 2039127 - DNA, 15 bp, Homo sapiens
gggtgtttttttcct

SEQ ID NO: 2039128 - DNA, 15 bp, Homo sapiens
gtgtttttttcctac

SEQ ID NO: 2039129 - DNA, 15 bp, Homo sapiens
tgtttttttcctact

SEQ ID NO: 2039130 - DNA, 15 bp, Homo sapiens
gtttttttcctactc

SEQ ID NO: 2039131 - DNA, 15 bp, Homo sapiens
tttttttcctactcc

SEQ ID NO: 2039132 - DNA, 15 bp, Homo sapiens
ttttttcctactcca

SEQ ID NO: 2039133 - DNA, 15 bp, Homo sapiens
tttttcctactccaa

SEQ ID NO: 2039134 - DNA, 15 bp, Homo sapiens
ttttcctactccaaa

SEQ ID NO: 2039135 - DNA, 15 bp, Homo sapiens
tttcctactccaaaa

SEQ ID NO: 2039136 - DNA, 15 bp, Homo sapiens
ttcctactccaaaaa

SEQ ID NO: 2039137 - DNA, 15 bp, Homo sapiens
tcctactccaaaaat

SEQ ID NO: 2039138 - DNA, 15 bp, Homo sapiens
cctactccaaaaatt

SEQ ID NO: 2039139 - DNA, 15 bp, Homo sapiens
ctactccaaaaattg

SEQ ID NO: 2039140 - DNA, 15 bp, Homo sapiens
tactccaaaaattgt

SEQ ID NO: 2039141 - DNA, 15 bp, Homo sapiens
actccaaaaattgtg

SEQ ID NO: 2039142 - DNA, 15 bp, Homo sapiens
ctccaaaaattgtgg

SEQ ID NO: 2039143 - DNA, 15 bp, Homo sapiens
tccaaaaattgtggt

SEQ ID NO: 2039144 - DNA, 15 bp, Homo sapiens
ccaaaaattgtggtc

SEQ ID NO: 2039145 - DNA, 15 bp, Homo sapiens
caaaaattgtggtca

SEQ ID NO: 2039146 - DNA, 15 bp, Homo sapiens
aaaaattgtggtcat

SEQ ID NO: 2039147 - DNA, 15 bp, Homo sapiens
aaaattgtggtcatc

SEQ ID NO: 2039148 - DNA, 15 bp, Homo sapiens
aaattgtggtcatct

SEQ ID NO: 2039149 - DNA, 15 bp, Homo sapiens
aattgtggtcatctt

SEQ ID NO: 2039150 - DNA, 15 bp, Homo sapiens
attgtggtcatcttt

SEQ ID NO: 2039151 - DNA, 15 bp, Homo sapiens
ttgtggtcatctttt

SEQ ID NO: 2039152 - DNA, 15 bp, Homo sapiens
tgtggtcatcttttt

SEQ ID NO: 2039153 - DNA, 15 bp, Homo sapiens
gtggtcatctttttg

SEQ ID NO: 2039154 - DNA, 15 bp, Homo sapiens
tggtcatctttttgt

SEQ ID NO: 2039155 - DNA, 15 bp, Homo sapiens
ggtcatctttttgta

SEQ ID NO: 2039156 - DNA, 15 bp, Homo sapiens
gtcatctttttgtat

SEQ ID NO: 2039157 - DNA, 15 bp, Homo sapiens
tcatctttttgtatc

SEQ ID NO: 2039158 - DNA, 15 bp, Homo sapiens
catctttttgtatca

SEQ ID NO: 2039159 - DNA, 15 bp, Homo sapiens
atctttttgtatcag

SEQ ID NO: 2039160 - DNA, 15 bp, Homo sapiens
tctttttgtatcagt

SEQ ID NO: 2039161 - DNA, 15 bp, Homo sapiens
ctttttgtatcagta

SEQ ID NO: 2039162 - DNA, 15 bp, Homo sapiens
tttttgtatcagtaa

SEQ ID NO: 2039163 - DNA, 15 bp, Homo sapiens
ttttgtatcagtaaa

SEQ ID NO: 2039164 - DNA, 15 bp, Homo sapiens
tttgtatcagtaaat

SEQ ID NO: 2039165 - DNA, 15 bp, Homo sapiens
ttgtatcagtaaata

SEQ ID NO: 2039166 - DNA, 15 bp, Homo sapiens
tgtatcagtaaatat

SEQ ID NO: 2039167 - DNA, 15 bp, Homo sapiens
gtatcagtaaatatc

SEQ ID NO: 2039168 - DNA, 15 bp, Homo sapiens
tatcagtaaatatca

SEQ ID NO: 2039169 - DNA, 15 bp, Homo sapiens
atcagtaaatatcaa

SEQ ID NO: 2039170 - DNA, 15 bp, Homo sapiens
tcagtaaatatcaat

SEQ ID NO: 2039171 - DNA, 15 bp, Homo sapiens
cagtaaatatcaatc

SEQ ID NO: 2039172 - DNA, 15 bp, Homo sapiens
agtaaatatcaatca

SEQ ID NO: 2039173 - DNA, 15 bp, Homo sapiens
gtaaatatcaatcag

SEQ ID NO: 2039174 - DNA, 15 bp, Homo sapiens
taaatatcaatcagt

SEQ ID NO: 2039175 - DNA, 15 bp, Homo sapiens
aaatatcaatcagta

SEQ ID NO: 2039176 - DNA, 15 bp, Homo sapiens
aatatcaatcagtaa

SEQ ID NO: 2039177 - DNA, 15 bp, Homo sapiens
atatcaatcagtaat

SEQ ID NO: 2039178 - DNA, 15 bp, Homo sapiens
tatcaatcagtaatg

SEQ ID NO: 2039179 - DNA, 15 bp, Homo sapiens
atcaatcagtaatgt

SEQ ID NO: 2039180 - DNA, 15 bp, Homo sapiens
tcaatcagtaatgta

SEQ ID NO: 2039181 - DNA, 15 bp, Homo sapiens
caatcagtaatgtac

SEQ ID NO: 2039182 - DNA, 15 bp, Homo sapiens
aatcagtaatgtaca

SEQ ID NO: 2039183 - DNA, 15 bp, Homo sapiens
atcagtaatgtacat

SEQ ID NO: 2039184 - DNA, 15 bp, Homo sapiens
tcagtaatgtacatt

SEQ ID NO: 2039185 - DNA, 15 bp, Homo sapiens
cagtaatgtacattt

SEQ ID NO: 2039186 - DNA, 15 bp, Homo sapiens
agtaatgtacatttt

SEQ ID NO: 2039187 - DNA, 15 bp, Homo sapiens
gtaatgtacattttg

SEQ ID NO: 2039188 - DNA, 15 bp, Homo sapiens
taatgtacattttga

SEQ ID NO: 2039189 - DNA, 15 bp, Homo sapiens
aatgtacattttgat

SEQ ID NO: 2039190 - DNA, 15 bp, Homo sapiens
atgtacattttgata

SEQ ID NO: 2039191 - DNA, 15 bp, Homo sapiens
tgtacattttgatac

SEQ ID NO: 2039192 - DNA, 15 bp, Homo sapiens
gtacattttgataca

SEQ ID NO: 2039193 - DNA, 15 bp, Homo sapiens
tacattttgatacaa

SEQ ID NO: 2039194 - DNA, 15 bp, Homo sapiens
acattttgatacaaa

SEQ ID NO: 2039195 - DNA, 15 bp, Homo sapiens
cattttgatacaaat

SEQ ID NO: 2039196 - DNA, 15 bp, Homo sapiens
attttgatacaaatt

SEQ ID NO: 2039197 - DNA, 15 bp, Homo sapiens
ttttgatacaaatta

SEQ ID NO: 2039198 - DNA, 15 bp, Homo sapiens
tttgatacaaattac

SEQ ID NO: 2039199 - DNA, 15 bp, Homo sapiens
ttgatacaaattact

SEQ ID NO: 2039200 - DNA, 15 bp, Homo sapiens
tgatacaaattacta

SEQ ID NO: 2039201 - DNA, 15 bp, Homo sapiens
gatacaaattactaa

SEQ ID NO: 2039202 - DNA, 15 bp, Homo sapiens
atacaaattactaaa

SEQ ID NO: 2039203 - DNA, 15 bp, Homo sapiens
tacaaattactaaaa

SEQ ID NO: 2039204 - DNA, 15 bp, Homo sapiens
acaaattactaaaac

SEQ ID NO: 2039205 - DNA, 15 bp, Homo sapiens
caaattactaaaacg

SEQ ID NO: 2039206 - DNA, 15 bp, Homo sapiens
aaattactaaaacgt

SEQ ID NO: 2039207 - DNA, 15 bp, Homo sapiens
aattactaaaacgtt

SEQ ID NO: 2039208 - DNA, 15 bp, Homo sapiens
attactaaaacgttc

SEQ ID NO: 2039209 - DNA, 15 bp, Homo sapiens
ttactaaaacgttct

SEQ ID NO: 2039210 - DNA, 15 bp, Homo sapiens
tactaaaacgttctg

SEQ ID NO: 2039211 - DNA, 15 bp, Homo sapiens
actaaaacgttctgc

SEQ ID NO: 2039212 - DNA, 15 bp, Homo sapiens
ctaaaacgttctgca

SEQ ID NO: 2039213 - DNA, 15 bp, Homo sapiens
taaaacgttctgcag

SEQ ID NO: 2039214 - DNA, 15 bp, Homo sapiens
aaaacgttctgcagc

SEQ ID NO: 2039215 - DNA, 15 bp, Homo sapiens
aaacgttctgcagct

SEQ ID NO: 2039216 - DNA, 15 bp, Homo sapiens
aacgttctgcagctg

SEQ ID NO: 2039217 - DNA, 15 bp, Homo sapiens
acgttctgcagctgt

SEQ ID NO: 2039218 - DNA, 15 bp, Homo sapiens
cgttctgcagctgtt

SEQ ID NO: 2039219 - DNA, 15 bp, Homo sapiens
gttctgcagctgttt

SEQ ID NO: 2039220 - DNA, 15 bp, Homo sapiens
ttctgcagctgtttg

SEQ ID NO: 2039221 - DNA, 15 bp, Homo sapiens
tctgcagctgtttgc

SEQ ID NO: 2039222 - DNA, 15 bp, Homo sapiens
ctgcagctgtttgct

SEQ ID NO: 2039223 - DNA, 15 bp, Homo sapiens
tgcagctgtttgctt

SEQ ID NO: 2039224 - DNA, 15 bp, Homo sapiens
gcagctgtttgcttt

SEQ ID NO: 2039225 - DNA, 15 bp, Homo sapiens
cagctgtttgctttc

SEQ ID NO: 2039226 - DNA, 15 bp, Homo sapiens
agctgtttgctttcc

SEQ ID NO: 2039227 - DNA, 15 bp, Homo sapiens
gctgtttgctttccc

SEQ ID NO: 2039228 - DNA, 15 bp, Homo sapiens
ctgtttgctttcccg

SEQ ID NO: 2039229 - DNA, 15 bp, Homo sapiens
tgtttgctttcccgc

SEQ ID NO: 2039230 - DNA, 15 bp, Homo sapiens
gtttgctttcccgcc

SEQ ID NO: 2039231 - DNA, 15 bp, Homo sapiens
tttgctttcccgcca

SEQ ID NO: 2039232 - DNA, 15 bp, Homo sapiens
ttgctttcccgccaa

SEQ ID NO: 2039233 - DNA, 15 bp, Homo sapiens
tgctttcccgccaaa

SEQ ID NO: 2039234 - DNA, 15 bp, Homo sapiens
gctttcccgccaaaa

SEQ ID NO: 2039235 - DNA, 15 bp, Homo sapiens
ctttcccgccaaaat

SEQ ID NO: 2039236 - DNA, 15 bp, Homo sapiens
tttcccgccaaaatt

SEQ ID NO: 2039237 - DNA, 15 bp, Homo sapiens
ttcccgccaaaattt

SEQ ID NO: 2039238 - DNA, 15 bp, Homo sapiens
tcccgccaaaattta

SEQ ID NO: 2039239 - DNA, 15 bp, Homo sapiens
cccgccaaaatttat

SEQ ID NO: 2039240 - DNA, 15 bp, Homo sapiens
ccgccaaaatttatg

SEQ ID NO: 2039241 - DNA, 15 bp, Homo sapiens
cgccaaaatttatgc

SEQ ID NO: 2039242 - DNA, 15 bp, Homo sapiens
gccaaaatttatgcc

SEQ ID NO: 2039243 - DNA, 15 bp, Homo sapiens
ccaaaatttatgcca

SEQ ID NO: 2039244 - DNA, 15 bp, Homo sapiens
caaaatttatgccag

SEQ ID NO: 2039245 - DNA, 15 bp, Homo sapiens
aaaatttatgccagc

SEQ ID NO: 2039246 - DNA, 15 bp, Homo sapiens
aaatttatgccagca

SEQ ID NO: 2039247 - DNA, 15 bp, Homo sapiens
aatttatgccagcag

SEQ ID NO: 2039248 - DNA, 15 bp, Homo sapiens
atttatgccagcagt

SEQ ID NO: 2039249 - DNA, 15 bp, Homo sapiens
tttatgccagcagta

SEQ ID NO: 2039250 - DNA, 15 bp, Homo sapiens
ttatgccagcagtaa

SEQ ID NO: 2039251 - DNA, 15 bp, Homo sapiens
tatgccagcagtaag

SEQ ID NO: 2039252 - DNA, 15 bp, Homo sapiens
atgccagcagtaagt

SEQ ID NO: 2039253 - DNA, 15 bp, Homo sapiens
tgccagcagtaagta

SEQ ID NO: 2039254 - DNA, 15 bp, Homo sapiens
gccagcagtaagtat

SEQ ID NO: 2039255 - DNA, 15 bp, Homo sapiens
ccagcagtaagtata

SEQ ID NO: 2039256 - DNA, 15 bp, Homo sapiens
cagcagtaagtataa

SEQ ID NO: 2039257 - DNA, 15 bp, Homo sapiens
agcagtaagtataat

SEQ ID NO: 2039258 - DNA, 15 bp, Homo sapiens
gcagtaagtataatc

SEQ ID NO: 2039259 - DNA, 15 bp, Homo sapiens
cagtaagtataatca

SEQ ID NO: 2039260 - DNA, 15 bp, Homo sapiens
agtaagtataatcag

SEQ ID NO: 2039261 - DNA, 15 bp, Homo sapiens
gtaagtataatcagt

SEQ ID NO: 2039262 - DNA, 15 bp, Homo sapiens
taagtataatcagtc

SEQ ID NO: 2039263 - DNA, 15 bp, Homo sapiens
aagtataatcagtct

SEQ ID NO: 2039264 - DNA, 15 bp, Homo sapiens
agtataatcagtcta

SEQ ID NO: 2039265 - DNA, 15 bp, Homo sapiens
gtataatcagtctaa

SEQ ID NO: 2039266 - DNA, 15 bp, Homo sapiens
tataatcagtctaat

SEQ ID NO: 2039267 - DNA, 15 bp, Homo sapiens
ataatcagtctaatt

SEQ ID NO: 2039268 - DNA, 15 bp, Homo sapiens
taatcagtctaattt

SEQ ID NO: 2039269 - DNA, 15 bp, Homo sapiens
aatcagtctaatttt

SEQ ID NO: 2039270 - DNA, 15 bp, Homo sapiens
atcagtctaattttg

SEQ ID NO: 2039271 - DNA, 15 bp, Homo sapiens
tcagtctaattttgg

SEQ ID NO: 2039272 - DNA, 15 bp, Homo sapiens
cagtctaattttggg

SEQ ID NO: 2039273 - DNA, 15 bp, Homo sapiens
agtctaattttgggg

SEQ ID NO: 2039274 - DNA, 15 bp, Homo sapiens
gtctaattttggggg

SEQ ID NO: 2039275 - DNA, 15 bp, Homo sapiens
tctaattttgggggt

SEQ ID NO: 2039276 - DNA, 15 bp, Homo sapiens
ctaattttgggggta

SEQ ID NO: 2039277 - DNA, 15 bp, Homo sapiens
taattttgggggtaa

SEQ ID NO: 2039278 - DNA, 15 bp, Homo sapiens
aattttgggggtaaa

SEQ ID NO: 2039279 - DNA, 15 bp, Homo sapiens
attttgggggtaaat

SEQ ID NO: 2039280 - DNA, 15 bp, Homo sapiens
ttttgggggtaaatt

SEQ ID NO: 2039281 - DNA, 15 bp, Homo sapiens
tttgggggtaaattt

SEQ ID NO: 2039282 - DNA, 15 bp, Homo sapiens
ttgggggtaaatttt

SEQ ID NO: 2039283 - DNA, 15 bp, Homo sapiens
tgggggtaaatttta

SEQ ID NO: 2039284 - DNA, 15 bp, Homo sapiens
gggggtaaattttat

SEQ ID NO: 2039285 - DNA, 15 bp, Homo sapiens
ggggtaaattttatt

SEQ ID NO: 2039286 - DNA, 15 bp, Homo sapiens
gggtaaattttattg

SEQ ID NO: 2039287 - DNA, 15 bp, Homo sapiens
ggtaaattttattga

SEQ ID NO: 2039288 - DNA, 15 bp, Homo sapiens
gtaaattttattgat

SEQ ID NO: 2039289 - DNA, 15 bp, Homo sapiens
taaattttattgatg

SEQ ID NO: 2039290 - DNA, 15 bp, Homo sapiens
aaattttattgatgt

SEQ ID NO: 2039291 - DNA, 15 bp, Homo sapiens
aattttattgatgtt

SEQ ID NO: 2039292 - DNA, 15 bp, Homo sapiens
attttattgatgttt

SEQ ID NO: 2039293 - DNA, 15 bp, Homo sapiens
ttttattgatgttta

SEQ ID NO: 2039294 - DNA, 15 bp, Homo sapiens
tttattgatgtttaa

SEQ ID NO: 2039295 - DNA, 15 bp, Homo sapiens
ttattgatgtttaac

SEQ ID NO: 2039296 - DNA, 15 bp, Homo sapiens
tattgatgtttaaca

SEQ ID NO: 2039297 - DNA, 15 bp, Homo sapiens
attgatgtttaacag

SEQ ID NO: 2039298 - DNA, 15 bp, Homo sapiens
ttgatgtttaacaga

SEQ ID NO: 2039299 - DNA, 15 bp, Homo sapiens
tgatgtttaacagaa

SEQ ID NO: 2039300 - DNA, 15 bp, Homo sapiens
gatgtttaacagaaa

SEQ ID NO: 2039301 - DNA, 15 bp, Homo sapiens
atgtttaacagaaaa

SEQ ID NO: 2039302 - DNA, 15 bp, Homo sapiens
tgtttaacagaaaag

SEQ ID NO: 2039303 - DNA, 15 bp, Homo sapiens
gtttaacagaaaagt

SEQ ID NO: 2039304 - DNA, 15 bp, Homo sapiens
tttaacagaaaagtt

SEQ ID NO: 2039305 - DNA, 15 bp, Homo sapiens
ttaacagaaaagttc

SEQ ID NO: 2039306 - DNA, 15 bp, Homo sapiens
taacagaaaagttca

SEQ ID NO: 2039307 - DNA, 15 bp, Homo sapiens
aacagaaaagttcac

SEQ ID NO: 2039308 - DNA, 15 bp, Homo sapiens
acagaaaagttcaca

SEQ ID NO: 2039309 - DNA, 15 bp, Homo sapiens
cagaaaagttcacaa

SEQ ID NO: 2039310 - DNA, 15 bp, Homo sapiens
agaaaagttcacaaa

SEQ ID NO: 2039311 - DNA, 15 bp, Homo sapiens
gaaaagttcacaaat

SEQ ID NO: 2039312 - DNA, 15 bp, Homo sapiens
aaaagttcacaaatt

SEQ ID NO: 2039313 - DNA, 15 bp, Homo sapiens
aaagttcacaaattg

SEQ ID NO: 2039314 - DNA, 15 bp, Homo sapiens
aagttcacaaattgc

SEQ ID NO: 2039315 - DNA, 15 bp, Homo sapiens
agttcacaaattgca

SEQ ID NO: 2039316 - DNA, 15 bp, Homo sapiens
gttcacaaattgcaa

SEQ ID NO: 2039317 - DNA, 15 bp, Homo sapiens
ttcacaaattgcaag

SEQ ID NO: 2039318 - DNA, 15 bp, Homo sapiens
tcacaaattgcaagt

SEQ ID NO: 2039319 - DNA, 15 bp, Homo sapiens
cacaaattgcaagtt

SEQ ID NO: 2039320 - DNA, 15 bp, Homo sapiens
acaaattgcaagttt

SEQ ID NO: 2039321 - DNA, 15 bp, Homo sapiens
caaattgcaagtttt

SEQ ID NO: 2039322 - DNA, 15 bp, Homo sapiens
aaattgcaagttttc

SEQ ID NO: 2039323 - DNA, 15 bp, Homo sapiens
aattgcaagttttca

SEQ ID NO: 2039324 - DNA, 15 bp, Homo sapiens
attgcaagttttcag

SEQ ID NO: 2039325 - DNA, 15 bp, Homo sapiens
ttgcaagttttcagc

SEQ ID NO: 2039326 - DNA, 15 bp, Homo sapiens
tgcaagttttcagct

SEQ ID NO: 2039327 - DNA, 15 bp, Homo sapiens
gcaagttttcagctt

SEQ ID NO: 2039328 - DNA, 15 bp, Homo sapiens
caagttttcagctta

SEQ ID NO: 2039329 - DNA, 15 bp, Homo sapiens
aagttttcagcttag

SEQ ID NO: 2039330 - DNA, 15 bp, Homo sapiens
agttttcagcttagt

SEQ ID NO: 2039331 - DNA, 15 bp, Homo sapiens
gttttcagcttagtg

SEQ ID NO: 2039332 - DNA, 15 bp, Homo sapiens
ttttcagcttagtga

SEQ ID NO: 2039333 - DNA, 15 bp, Homo sapiens
tttcagcttagtgaa

SEQ ID NO: 2039334 - DNA, 15 bp, Homo sapiens
ttcagcttagtgaac

SEQ ID NO: 2039335 - DNA, 15 bp, Homo sapiens
tcagcttagtgaact

SEQ ID NO: 2039336 - DNA, 15 bp, Homo sapiens
cagcttagtgaactt

SEQ ID NO: 2039337 - DNA, 15 bp, Homo sapiens
agcttagtgaacttt

SEQ ID NO: 2039338 - DNA, 15 bp, Homo sapiens
gcttagtgaactttt

SEQ ID NO: 2039339 - DNA, 15 bp, Homo sapiens
cttagtgaactttta

SEQ ID NO: 2039340 - DNA, 15 bp, Homo sapiens
ttagtgaacttttaa

SEQ ID NO: 2039341 - DNA, 15 bp, Homo sapiens
tagtgaacttttaaa

SEQ ID NO: 2039342 - DNA, 15 bp, Homo sapiens
agtgaacttttaaaa

SEQ ID NO: 2039343 - DNA, 15 bp, Homo sapiens
gtgaacttttaaaat

SEQ ID NO: 2039344 - DNA, 15 bp, Homo sapiens
tgaacttttaaaatg

SEQ ID NO: 2039345 - DNA, 15 bp, Homo sapiens
gaacttttaaaatgt

SEQ ID NO: 2039346 - DNA, 15 bp, Homo sapiens
aacttttaaaatgta

SEQ ID NO: 2039347 - DNA, 15 bp, Homo sapiens
acttttaaaatgtaa

SEQ ID NO: 2039348 - DNA, 15 bp, Homo sapiens
cttttaaaatgtaaa

SEQ ID NO: 2039349 - DNA, 15 bp, Homo sapiens
ttttaaaatgtaaac

SEQ ID NO: 2039350 - DNA, 15 bp, Homo sapiens
tttaaaatgtaaaca

SEQ ID NO: 2039351 - DNA, 15 bp, Homo sapiens
ttaaaatgtaaacac

SEQ ID NO: 2039352 - DNA, 15 bp, Homo sapiens
taaaatgtaaacaca

SEQ ID NO: 2039353 - DNA, 15 bp, Homo sapiens
aaaatgtaaacacac

SEQ ID NO: 2039354 - DNA, 15 bp, Homo sapiens
aaatgtaaacacact

SEQ ID NO: 2039355 - DNA, 15 bp, Homo sapiens
aatgtaaacacactt

SEQ ID NO: 2039356 - DNA, 15 bp, Homo sapiens
atgtaaacacacttg

SEQ ID NO: 2039357 - DNA, 15 bp, Homo sapiens
tgtaaacacacttga

SEQ ID NO: 2039358 - DNA, 15 bp, Homo sapiens
gtaaacacacttgaa

SEQ ID NO: 2039359 - DNA, 15 bp, Homo sapiens
taaacacacttgaaa

SEQ ID NO: 2039360 - DNA, 15 bp, Homo sapiens
aaacacacttgaaaa

SEQ ID NO: 2039361 - DNA, 15 bp, Homo sapiens
aacacacttgaaaat

SEQ ID NO: 2039362 - DNA, 15 bp, Homo sapiens
acacacttgaaaatc

SEQ ID NO: 2039363 - DNA, 15 bp, Homo sapiens
cacacttgaaaatcc

SEQ ID NO: 2039364 - DNA, 15 bp, Homo sapiens
acacttgaaaatcca

SEQ ID NO: 2039365 - DNA, 15 bp, Homo sapiens
cacttgaaaatccat

SEQ ID NO: 2039366 - DNA, 15 bp, Homo sapiens
acttgaaaatccatc

SEQ ID NO: 2039367 - DNA, 15 bp, Homo sapiens
cttgaaaatccatca

SEQ ID NO: 2039368 - DNA, 15 bp, Homo sapiens
ttgaaaatccatcat

SEQ ID NO: 2039369 - DNA, 15 bp, Homo sapiens
tgaaaatccatcatc

SEQ ID NO: 2039370 - DNA, 15 bp, Homo sapiens
gaaaatccatcatct

SEQ ID NO: 2039371 - DNA, 15 bp, Homo sapiens
aaaatccatcatcta

SEQ ID NO: 2039372 - DNA, 15 bp, Homo sapiens
aaatccatcatctac

SEQ ID NO: 2039373 - DNA, 15 bp, Homo sapiens
aatccatcatctaca

SEQ ID NO: 2039374 - DNA, 15 bp, Homo sapiens
atccatcatctacat

SEQ ID NO: 2039375 - DNA, 15 bp, Homo sapiens
tccatcatctacatc

SEQ ID NO: 2039376 - DNA, 15 bp, Homo sapiens
ccatcatctacatca

SEQ ID NO: 2039377 - DNA, 15 bp, Homo sapiens
catcatctacatcaa

SEQ ID NO: 2039378 - DNA, 15 bp, Homo sapiens
atcatctacatcaag

SEQ ID NO: 2039379 - DNA, 15 bp, Homo sapiens
tcatctacatcaaga

SEQ ID NO: 2039380 - DNA, 15 bp, Homo sapiens
catctacatcaagaa

SEQ ID NO: 2039381 - DNA, 15 bp, Homo sapiens
atctacatcaagaaa

SEQ ID NO: 2039382 - DNA, 15 bp, Homo sapiens
tctacatcaagaaac

SEQ ID NO: 2039383 - DNA, 15 bp, Homo sapiens
ctacatcaagaaaca

SEQ ID NO: 2039384 - DNA, 15 bp, Homo sapiens
tacatcaagaaacag

SEQ ID NO: 2039385 - DNA, 15 bp, Homo sapiens
acatcaagaaacaga

SEQ ID NO: 2039386 - DNA, 15 bp, Homo sapiens
catcaagaaacagaa

SEQ ID NO: 2039387 - DNA, 15 bp, Homo sapiens
atcaagaaacagaac

SEQ ID NO: 2039388 - DNA, 15 bp, Homo sapiens
tcaagaaacagaaca

SEQ ID NO: 2039389 - DNA, 15 bp, Homo sapiens
caagaaacagaacat

SEQ ID NO: 2039390 - DNA, 15 bp, Homo sapiens
aagaaacagaacatt

SEQ ID NO: 2039391 - DNA, 15 bp, Homo sapiens
agaaacagaacatta

SEQ ID NO: 2039392 - DNA, 15 bp, Homo sapiens
gaaacagaacattac

SEQ ID NO: 2039393 - DNA, 15 bp, Homo sapiens
aaacagaacattacc

SEQ ID NO: 2039394 - DNA, 15 bp, Homo sapiens
aacagaacattacca

SEQ ID NO: 2039395 - DNA, 15 bp, Homo sapiens
acagaacattaccag

SEQ ID NO: 2039396 - DNA, 15 bp, Homo sapiens
cagaacattaccagc

SEQ ID NO: 2039397 - DNA, 15 bp, Homo sapiens
agaacattaccagca

SEQ ID NO: 2039398 - DNA, 15 bp, Homo sapiens
gaacattaccagcat

SEQ ID NO: 2039399 - DNA, 15 bp, Homo sapiens
aacattaccagcatc

SEQ ID NO: 2039400 - DNA, 15 bp, Homo sapiens
acattaccagcatcc

SEQ ID NO: 2039401 - DNA, 15 bp, Homo sapiens
cattaccagcatccc

SEQ ID NO: 2039402 - DNA, 15 bp, Homo sapiens
attaccagcatccca

SEQ ID NO: 2039403 - DNA, 15 bp, Homo sapiens
ttaccagcatcccaa

SEQ ID NO: 2039404 - DNA, 15 bp, Homo sapiens
taccagcatcccaag

SEQ ID NO: 2039405 - DNA, 15 bp, Homo sapiens
accagcatcccaaga

SEQ ID NO: 2039406 - DNA, 15 bp, Homo sapiens
ccagcatcccaagaa

SEQ ID NO: 2039407 - DNA, 15 bp, Homo sapiens
cagcatcccaagaag

SEQ ID NO: 2039408 - DNA, 15 bp, Homo sapiens
agcatcccaagaagc

SEQ ID NO: 2039409 - DNA, 15 bp, Homo sapiens
gcatcccaagaagcc

SEQ ID NO: 2039410 - DNA, 15 bp, Homo sapiens
catcccaagaagcca

SEQ ID NO: 2039411 - DNA, 15 bp, Homo sapiens
atcccaagaagccat

SEQ ID NO: 2039412 - DNA, 15 bp, Homo sapiens
tcccaagaagccatc

SEQ ID NO: 2039413 - DNA, 15 bp, Homo sapiens
cccaagaagccatcc

SEQ ID NO: 2039414 - DNA, 15 bp, Homo sapiens
ccaagaagccatcct

SEQ ID NO: 2039415 - DNA, 15 bp, Homo sapiens
caagaagccatcctc

SEQ ID NO: 2039416 - DNA, 15 bp, Homo sapiens
aagaagccatcctca

SEQ ID NO: 2039417 - DNA, 15 bp, Homo sapiens
agaagccatcctcat

SEQ ID NO: 2039418 - DNA, 15 bp, Homo sapiens
gaagccatcctcatg

SEQ ID NO: 2039419 - DNA, 15 bp, Homo sapiens
aagccatcctcatgc

SEQ ID NO: 2039420 - DNA, 15 bp, Homo sapiens
agccatcctcatgcc

SEQ ID NO: 2039421 - DNA, 15 bp, Homo sapiens
gccatcctcatgccc

SEQ ID NO: 2039422 - DNA, 15 bp, Homo sapiens
ccatcctcatgcccc

SEQ ID NO: 2039423 - DNA, 15 bp, Homo sapiens
catcctcatgccccc

SEQ ID NO: 2039424 - DNA, 15 bp, Homo sapiens
atcctcatgccccct

SEQ ID NO: 2039425 - DNA, 15 bp, Homo sapiens
tcctcatgccccctt

SEQ ID NO: 2039426 - DNA, 15 bp, Homo sapiens
cctcatgccccctta

SEQ ID NO: 2039427 - DNA, 15 bp, Homo sapiens
ctcatgcccccttaa

SEQ ID NO: 2039428 - DNA, 15 bp, Homo sapiens
tcatgcccccttaag

SEQ ID NO: 2039429 - DNA, 15 bp, Homo sapiens
catgcccccttaagt

SEQ ID NO: 2039430 - DNA, 15 bp, Homo sapiens
atgcccccttaagtc

SEQ ID NO: 2039431 - DNA, 15 bp, Homo sapiens
tgcccccttaagtca

SEQ ID NO: 2039432 - DNA, 15 bp, Homo sapiens
gcccccttaagtcac

SEQ ID NO: 2039433 - DNA, 15 bp, Homo sapiens
cccccttaagtcact

SEQ ID NO: 2039434 - DNA, 15 bp, Homo sapiens
ccccttaagtcacta

SEQ ID NO: 2039435 - DNA, 15 bp, Homo sapiens
cccttaagtcactac

SEQ ID NO: 2039436 - DNA, 15 bp, Homo sapiens
ccttaagtcactact

SEQ ID NO: 2039437 - DNA, 15 bp, Homo sapiens
cttaagtcactactt

SEQ ID NO: 2039438 - DNA, 15 bp, Homo sapiens
ttaagtcactacttc

SEQ ID NO: 2039439 - DNA, 15 bp, Homo sapiens
taagtcactacttcc

SEQ ID NO: 2039440 - DNA, 15 bp, Homo sapiens
aagtcactacttccg

SEQ ID NO: 2039441 - DNA, 15 bp, Homo sapiens
agtcactacttccgc

SEQ ID NO: 2039442 - DNA, 15 bp, Homo sapiens
gtcactacttccgca

SEQ ID NO: 2039443 - DNA, 15 bp, Homo sapiens
tcactacttccgcaa

SEQ ID NO: 2039444 - DNA, 15 bp, Homo sapiens
cactacttccgcaag

SEQ ID NO: 2039445 - DNA, 15 bp, Homo sapiens
actacttccgcaagg

SEQ ID NO: 2039446 - DNA, 15 bp, Homo sapiens
ctacttccgcaaggg

SEQ ID NO: 2039447 - DNA, 15 bp, Homo sapiens
tacttccgcaagggt

SEQ ID NO: 2039448 - DNA, 15 bp, Homo sapiens
acttccgcaagggtg

SEQ ID NO: 2039449 - DNA, 15 bp, Homo sapiens
cttccgcaagggtga

SEQ ID NO: 2039450 - DNA, 15 bp, Homo sapiens
ttccgcaagggtgac

SEQ ID NO: 2039451 - DNA, 15 bp, Homo sapiens
tccgcaagggtgacc

SEQ ID NO: 2039452 - DNA, 15 bp, Homo sapiens
ccgcaagggtgacca

SEQ ID NO: 2039453 - DNA, 15 bp, Homo sapiens
cgcaagggtgaccac

SEQ ID NO: 2039454 - DNA, 15 bp, Homo sapiens
gcaagggtgaccaca

SEQ ID NO: 2039455 - DNA, 15 bp, Homo sapiens
caagggtgaccacag

SEQ ID NO: 2039456 - DNA, 15 bp, Homo sapiens
aagggtgaccacagt

SEQ ID NO: 2039457 - DNA, 15 bp, Homo sapiens
agggtgaccacagtc

SEQ ID NO: 2039458 - DNA, 15 bp, Homo sapiens
gggtgaccacagtcc

SEQ ID NO: 2039459 - DNA, 15 bp, Homo sapiens
ggtgaccacagtcct

SEQ ID NO: 2039460 - DNA, 15 bp, Homo sapiens
gtgaccacagtcctg

SEQ ID NO: 2039461 - DNA, 15 bp, Homo sapiens
tgaccacagtcctgt

SEQ ID NO: 2039462 - DNA, 15 bp, Homo sapiens
gaccacagtcctgtt

SEQ ID NO: 2039463 - DNA, 15 bp, Homo sapiens
accacagtcctgtta

SEQ ID NO: 2039464 - DNA, 15 bp, Homo sapiens
ccacagtcctgttac

SEQ ID NO: 2039465 - DNA, 15 bp, Homo sapiens
cacagtcctgttacc

SEQ ID NO: 2039466 - DNA, 15 bp, Homo sapiens
acagtcctgttaccc

SEQ ID NO: 2039467 - DNA, 15 bp, Homo sapiens
cagtcctgttaccca

SEQ ID NO: 2039468 - DNA, 15 bp, Homo sapiens
agtcctgttacccaa

SEQ ID NO: 2039469 - DNA, 15 bp, Homo sapiens
gtcctgttacccaat

SEQ ID NO: 2039470 - DNA, 15 bp, Homo sapiens
tcctgttacccaatt

SEQ ID NO: 2039471 - DNA, 15 bp, Homo sapiens
cctgttacccaattt

SEQ ID NO: 2039472 - DNA, 15 bp, Homo sapiens
ctgttacccaatttg

SEQ ID NO: 2039473 - DNA, 15 bp, Homo sapiens
tgttacccaatttgt

SEQ ID NO: 2039474 - DNA, 15 bp, Homo sapiens
gttacccaatttgta

SEQ ID NO: 2039475 - DNA, 15 bp, Homo sapiens
ttacccaatttgtaa

SEQ ID NO: 2039476 - DNA, 15 bp, Homo sapiens
tacccaatttgtaat

SEQ ID NO: 2039477 - DNA, 15 bp, Homo sapiens
acccaatttgtaatc

SEQ ID NO: 2039478 - DNA, 15 bp, Homo sapiens
cccaatttgtaatct

SEQ ID NO: 2039479 - DNA, 15 bp, Homo sapiens
ccaatttgtaatctt

SEQ ID NO: 2039480 - DNA, 15 bp, Homo sapiens
caatttgtaatcttt

SEQ ID NO: 2039481 - DNA, 15 bp, Homo sapiens
aatttgtaatctttc

SEQ ID NO: 2039482 - DNA, 15 bp, Homo sapiens
atttgtaatctttcc

SEQ ID NO: 2039483 - DNA, 15 bp, Homo sapiens
tttgtaatctttcct

SEQ ID NO: 2039484 - DNA, 15 bp, Homo sapiens
ttgtaatctttccta

SEQ ID NO: 2039485 - DNA, 15 bp, Homo sapiens
tgtaatctttcctaa

SEQ ID NO: 2039486 - DNA, 15 bp, Homo sapiens
gtaatctttcctaat

SEQ ID NO: 2039487 - DNA, 15 bp, Homo sapiens
taatctttcctaatg

SEQ ID NO: 2039488 - DNA, 15 bp, Homo sapiens
aatctttcctaatgt

SEQ ID NO: 2039489 - DNA, 15 bp, Homo sapiens
atctttcctaatgtg

SEQ ID NO: 2039490 - DNA, 15 bp, Homo sapiens
tctttcctaatgtga

SEQ ID NO: 2039491 - DNA, 15 bp, Homo sapiens
ctttcctaatgtgat

SEQ ID NO: 2039492 - DNA, 15 bp, Homo sapiens
tttcctaatgtgata

SEQ ID NO: 2039493 - DNA, 15 bp, Homo sapiens
ttcctaatgtgatag

SEQ ID NO: 2039494 - DNA, 15 bp, Homo sapiens
tcctaatgtgataga

SEQ ID NO: 2039495 - DNA, 15 bp, Homo sapiens
cctaatgtgatagat

SEQ ID NO: 2039496 - DNA, 15 bp, Homo sapiens
ctaatgtgatagata

SEQ ID NO: 2039497 - DNA, 15 bp, Homo sapiens
taatgtgatagataa

SEQ ID NO: 2039498 - DNA, 15 bp, Homo sapiens
aatgtgatagataaa

SEQ ID NO: 2039499 - DNA, 15 bp, Homo sapiens
atgtgatagataaaa

SEQ ID NO: 2039500 - DNA, 15 bp, Homo sapiens
tgtgatagataaaaa

SEQ ID NO: 2039501 - DNA, 15 bp, Homo sapiens
gtgatagataaaaat

SEQ ID NO: 2039502 - DNA, 15 bp, Homo sapiens
tgatagataaaaata

SEQ ID NO: 2039503 - DNA, 15 bp, Homo sapiens
gatagataaaaataa

SEQ ID NO: 2039504 - DNA, 15 bp, Homo sapiens
atagataaaaataaa

SEQ ID NO: 2039505 - DNA, 15 bp, Homo sapiens
tagataaaaataaaa

SEQ ID NO: 2039506 - DNA, 15 bp, Homo sapiens
ataaaaataaaaatc

SEQ ID NO: 2039507 - DNA, 15 bp, Homo sapiens
taaaaataaaaatct

SEQ ID NO: 2039508 - DNA, 15 bp, Homo sapiens
aaaaataaaaatctt

SEQ ID NO: 2039509 - DNA, 15 bp, Homo sapiens
aaaataaaaatctta

SEQ ID NO: 2039510 - DNA, 15 bp, Homo sapiens
aaataaaaatcttat

SEQ ID NO: 2039511 - DNA, 15 bp, Homo sapiens
aataaaaatcttatt

SEQ ID NO: 2039512 - DNA, 15 bp, Homo sapiens
ataaaaatcttattt

SEQ ID NO: 2039513 - DNA, 15 bp, Homo sapiens
taaaaatcttatttt

SEQ ID NO: 2039514 - DNA, 15 bp, Homo sapiens
aaaaatcttatttta

SEQ ID NO: 2039515 - DNA, 15 bp, Homo sapiens
aaaatcttattttag

SEQ ID NO: 2039516 - DNA, 15 bp, Homo sapiens
aaatcttattttagt

SEQ ID NO: 2039517 - DNA, 15 bp, Homo sapiens
aatcttattttagtt

SEQ ID NO: 2039518 - DNA, 15 bp, Homo sapiens
atcttattttagttt

SEQ ID NO: 2039519 - DNA, 15 bp, Homo sapiens
tcttattttagtttc

SEQ ID NO: 2039520 - DNA, 15 bp, Homo sapiens
cttattttagtttct

SEQ ID NO: 2039521 - DNA, 15 bp, Homo sapiens
ttattttagtttctg

SEQ ID NO: 2039522 - DNA, 15 bp, Homo sapiens
tattttagtttctgg

SEQ ID NO: 2039523 - DNA, 15 bp, Homo sapiens
attttagtttctggt

SEQ ID NO: 2039524 - DNA, 15 bp, Homo sapiens
ttttagtttctggtt

SEQ ID NO: 2039525 - DNA, 15 bp, Homo sapiens
tttagtttctggtta

SEQ ID NO: 2039526 - DNA, 15 bp, Homo sapiens
ttagtttctggttac

SEQ ID NO: 2039527 - DNA, 15 bp, Homo sapiens
tagtttctggttact

SEQ ID NO: 2039528 - DNA, 15 bp, Homo sapiens
agtttctggttactt

SEQ ID NO: 2039529 - DNA, 15 bp, Homo sapiens
gtttctggttacttt

SEQ ID NO: 2039530 - DNA, 15 bp, Homo sapiens
tttctggttactttt

SEQ ID NO: 2039531 - DNA, 15 bp, Homo sapiens
ttctggttacttttc

SEQ ID NO: 2039532 - DNA, 15 bp, Homo sapiens
tctggttacttttct

SEQ ID NO: 2039533 - DNA, 15 bp, Homo sapiens
ctggttacttttctg

SEQ ID NO: 2039534 - DNA, 15 bp, Homo sapiens
tggttacttttctga

SEQ ID NO: 2039535 - DNA, 15 bp, Homo sapiens
ggttacttttctgaa

SEQ ID NO: 2039536 - DNA, 15 bp, Homo sapiens
gttacttttctgaag

SEQ ID NO: 2039537 - DNA, 15 bp, Homo sapiens
ttacttttctgaagt

SEQ ID NO: 2039538 - DNA, 15 bp, Homo sapiens
tacttttctgaagtt

SEQ ID NO: 2039539 - DNA, 15 bp, Homo sapiens
acttttctgaagtta

SEQ ID NO: 2039540 - DNA, 15 bp, Homo sapiens
cttttctgaagttac

SEQ ID NO: 2039541 - DNA, 15 bp, Homo sapiens
ttttctgaagttact

SEQ ID NO: 2039542 - DNA, 15 bp, Homo sapiens
tttctgaagttactg

SEQ ID NO: 2039543 - DNA, 15 bp, Homo sapiens
ttctgaagttactgc

SEQ ID NO: 2039544 - DNA, 15 bp, Homo sapiens
tctgaagttactgct

SEQ ID NO: 2039545 - DNA, 15 bp, Homo sapiens
ctgaagttactgctt

SEQ ID NO: 2039546 - DNA, 15 bp, Homo sapiens
tgaagttactgctta

SEQ ID NO: 2039547 - DNA, 15 bp, Homo sapiens
gaagttactgcttag

SEQ ID NO: 2039548 - DNA, 15 bp, Homo sapiens
aagttactgcttaga

SEQ ID NO: 2039549 - DNA, 15 bp, Homo sapiens
agttactgcttagat

SEQ ID NO: 2039550 - DNA, 15 bp, Homo sapiens
gttactgcttagatt

SEQ ID NO: 2039551 - DNA, 15 bp, Homo sapiens
ttactgcttagatta

SEQ ID NO: 2039552 - DNA, 15 bp, Homo sapiens
tactgcttagattat

SEQ ID NO: 2039553 - DNA, 15 bp, Homo sapiens
actgcttagattatt

SEQ ID NO: 2039554 - DNA, 15 bp, Homo sapiens
ctgcttagattattt

SEQ ID NO: 2039555 - DNA, 15 bp, Homo sapiens
tgcttagattattta

SEQ ID NO: 2039556 - DNA, 15 bp, Homo sapiens
gcttagattatttat

SEQ ID NO: 2039557 - DNA, 15 bp, Homo sapiens
cttagattatttata

SEQ ID NO: 2039558 - DNA, 15 bp, Homo sapiens
ttagattatttataa

SEQ ID NO: 2039559 - DNA, 15 bp, Homo sapiens
tagattatttataat

SEQ ID NO: 2039560 - DNA, 15 bp, Homo sapiens
agattatttataata

SEQ ID NO: 2039561 - DNA, 15 bp, Homo sapiens
gattatttataatat

SEQ ID NO: 2039562 - DNA, 15 bp, Homo sapiens
attatttataatatt

SEQ ID NO: 2039563 - DNA, 15 bp, Homo sapiens
ttatttataatatta

SEQ ID NO: 2039564 - DNA, 15 bp, Homo sapiens
tatttataatattaa

SEQ ID NO: 2039565 - DNA, 15 bp, Homo sapiens
atttataatattaat

SEQ ID NO: 2039566 - DNA, 15 bp, Homo sapiens
tttataatattaatt

SEQ ID NO: 2039567 - DNA, 15 bp, Homo sapiens
ttataatattaattg

SEQ ID NO: 2039568 - DNA, 15 bp, Homo sapiens
tataatattaattgg

SEQ ID NO: 2039569 - DNA, 15 bp, Homo sapiens
ataatattaattggg

SEQ ID NO: 2039570 - DNA, 15 bp, Homo sapiens
taatattaattgggg

SEQ ID NO: 2039571 - DNA, 15 bp, Homo sapiens
aatattaattggggt

SEQ ID NO: 2039572 - DNA, 15 bp, Homo sapiens
atattaattggggtg

SEQ ID NO: 2039573 - DNA, 15 bp, Homo sapiens
tattaattggggtgg

SEQ ID NO: 2039574 - DNA, 15 bp, Homo sapiens
attaattggggtggg

SEQ ID NO: 2039575 - DNA, 15 bp, Homo sapiens
ttaattggggtgggg

SEQ ID NO: 2039576 - DNA, 15 bp, Homo sapiens
taattggggtggggt

SEQ ID NO: 2039577 - DNA, 15 bp, Homo sapiens
aattggggtggggtg

SEQ ID NO: 2039578 - DNA, 15 bp, Homo sapiens
attggggtggggtgc

SEQ ID NO: 2039579 - DNA, 15 bp, Homo sapiens
ttggggtggggtgca

SEQ ID NO: 2039580 - DNA, 15 bp, Homo sapiens
tggggtggggtgcag

SEQ ID NO: 2039581 - DNA, 15 bp, Homo sapiens
ggggtggggtgcagt

SEQ ID NO: 2039582 - DNA, 15 bp, Homo sapiens
gggtggggtgcagtg

SEQ ID NO: 2039583 - DNA, 15 bp, Homo sapiens
ggtggggtgcagtgg

SEQ ID NO: 2039584 - DNA, 15 bp, Homo sapiens
gtggggtgcagtggc

SEQ ID NO: 2039585 - DNA, 15 bp, Homo sapiens
tggggtgcagtggct

SEQ ID NO: 2039586 - DNA, 15 bp, Homo sapiens
ggtgcagtggctcat

SEQ ID NO: 2039587 - DNA, 15 bp, Homo sapiens
gtgcagtggctcatg

SEQ ID NO: 2039588 - DNA, 15 bp, Homo sapiens
tgcagtggctcatgc

SEQ ID NO: 2039589 - DNA, 15 bp, Homo sapiens
gcttgtaatcccaga

SEQ ID NO: 2039590 - DNA, 15 bp, Homo sapiens
cttgtaatcccagaa

SEQ ID NO: 2039591 - DNA, 15 bp, Homo sapiens
ttgtaatcccagaac

SEQ ID NO: 2039592 - DNA, 15 bp, Homo sapiens
atcccagaactttga

SEQ ID NO: 2039593 - DNA, 15 bp, Homo sapiens
tcccagaactttgag

SEQ ID NO: 2039594 - DNA, 15 bp, Homo sapiens
cccagaactttgaga

SEQ ID NO: 2039595 - DNA, 15 bp, Homo sapiens
ccagaactttgagag

SEQ ID NO: 2039596 - DNA, 15 bp, Homo sapiens
cagaactttgagagg

SEQ ID NO: 2039597 - DNA, 15 bp, Homo sapiens
agaactttgagaggc

SEQ ID NO: 2039598 - DNA, 15 bp, Homo sapiens
gaactttgagaggcc

SEQ ID NO: 2039599 - DNA, 15 bp, Homo sapiens
aactttgagaggcca

SEQ ID NO: 2039600 - DNA, 15 bp, Homo sapiens
tttgagaggccaaga

SEQ ID NO: 2039601 - DNA, 15 bp, Homo sapiens
ttgagaggccaagat

SEQ ID NO: 2039602 - DNA, 15 bp, Homo sapiens
tgagaggccaagatg

SEQ ID NO: 2039603 - DNA, 15 bp, Homo sapiens
gagaggccaagatgg

SEQ ID NO: 2039604 - DNA, 15 bp, Homo sapiens
agaggccaagatgga

SEQ ID NO: 2039605 - DNA, 15 bp, Homo sapiens
gaggccaagatggaa

SEQ ID NO: 2039606 - DNA, 15 bp, Homo sapiens
aggccaagatggaag

SEQ ID NO: 2039607 - DNA, 15 bp, Homo sapiens
ggccaagatggaagg

SEQ ID NO: 2039608 - DNA, 15 bp, Homo sapiens
gccaagatggaagga

SEQ ID NO: 2039609 - DNA, 15 bp, Homo sapiens
ccaagatggaaggat

SEQ ID NO: 2039610 - DNA, 15 bp, Homo sapiens
caagatggaaggatt

SEQ ID NO: 2039611 - DNA, 15 bp, Homo sapiens
aagatggaaggattg

SEQ ID NO: 2039612 - DNA, 15 bp, Homo sapiens
aaggattgcttgaga

SEQ ID NO: 2039613 - DNA, 15 bp, Homo sapiens
aggattgcttgagac

SEQ ID NO: 2039614 - DNA, 15 bp, Homo sapiens
ttgcttgagaccagg

SEQ ID NO: 2039615 - DNA, 15 bp, Homo sapiens
tgcttgagaccagga

SEQ ID NO: 2039616 - DNA, 15 bp, Homo sapiens
gcttgagaccaggag

SEQ ID NO: 2039617 - DNA, 15 bp, Homo sapiens
tgagaccaggagttc

SEQ ID NO: 2039618 - DNA, 15 bp, Homo sapiens
gagaccaggagttca

SEQ ID NO: 2039619 - DNA, 15 bp, Homo sapiens
agaccaggagttcaa

SEQ ID NO: 2039620 - DNA, 15 bp, Homo sapiens
gaccaggagttcaag

SEQ ID NO: 2039621 - DNA, 15 bp, Homo sapiens
accaggagttcaaga

SEQ ID NO: 2039622 - DNA, 15 bp, Homo sapiens
ttcaagaccagcctt

SEQ ID NO: 2039623 - DNA, 15 bp, Homo sapiens
tcaagaccagccttg

SEQ ID NO: 2039624 - DNA, 15 bp, Homo sapiens
caagaccagccttgg

SEQ ID NO: 2039625 - DNA, 15 bp, Homo sapiens
aagaccagccttggc

SEQ ID NO: 2039626 - DNA, 15 bp, Homo sapiens
agaccagccttggca

SEQ ID NO: 2039627 - DNA, 15 bp, Homo sapiens
gaccagccttggcaa

SEQ ID NO: 2039628 - DNA, 15 bp, Homo sapiens
accagccttggcaac

SEQ ID NO: 2039629 - DNA, 15 bp, Homo sapiens
ccagccttggcaaca

SEQ ID NO: 2039630 - DNA, 15 bp, Homo sapiens
cagccttggcaacat

SEQ ID NO: 2039631 - DNA, 15 bp, Homo sapiens
agccttggcaacata

SEQ ID NO: 2039632 - DNA, 15 bp, Homo sapiens
gccttggcaacatag

SEQ ID NO: 2039633 - DNA, 15 bp, Homo sapiens
ccttggcaacatagt

SEQ ID NO: 2039634 - DNA, 15 bp, Homo sapiens
cttggcaacatagtg

SEQ ID NO: 2039635 - DNA, 15 bp, Homo sapiens
ttggcaacatagtga

SEQ ID NO: 2039636 - DNA, 15 bp, Homo sapiens
tggcaacatagtgag

SEQ ID NO: 2039637 - DNA, 15 bp, Homo sapiens
catagtgagactcta

SEQ ID NO: 2039638 - DNA, 15 bp, Homo sapiens
atagtgagactctat

SEQ ID NO: 2039639 - DNA, 15 bp, Homo sapiens
tagtgagactctatc

SEQ ID NO: 2039640 - DNA, 15 bp, Homo sapiens
agtgagactctatct

SEQ ID NO: 2039641 - DNA, 15 bp, Homo sapiens
gtgagactctatctc

SEQ ID NO: 2039642 - DNA, 15 bp, Homo sapiens
tgagactctatctct

SEQ ID NO: 2039643 - DNA, 15 bp, Homo sapiens
gagactctatctcta

SEQ ID NO: 2039644 - DNA, 15 bp, Homo sapiens
agactctatctctag

SEQ ID NO: 2039645 - DNA, 15 bp, Homo sapiens
gactctatctctaga

SEQ ID NO: 2039646 - DNA, 15 bp, Homo sapiens
actctatctctagac

SEQ ID NO: 2039647 - DNA, 15 bp, Homo sapiens
ctctatctctagaca

SEQ ID NO: 2039648 - DNA, 15 bp, Homo sapiens
tctatctctagacag

SEQ ID NO: 2039649 - DNA, 15 bp, Homo sapiens
ctatctctagacaga

SEQ ID NO: 2039650 - DNA, 15 bp, Homo sapiens
tatctctagacagaa

SEQ ID NO: 2039651 - DNA, 15 bp, Homo sapiens
atctctagacagaat

SEQ ID NO: 2039652 - DNA, 15 bp, Homo sapiens
tctctagacagaatt

SEQ ID NO: 2039653 - DNA, 15 bp, Homo sapiens
ctctagacagaattt

SEQ ID NO: 2039654 - DNA, 15 bp, Homo sapiens
tctagacagaatttt

SEQ ID NO: 2039655 - DNA, 15 bp, Homo sapiens
ctagacagaatttta

SEQ ID NO: 2039656 - DNA, 15 bp, Homo sapiens
tagacagaattttaa

SEQ ID NO: 2039657 - DNA, 15 bp, Homo sapiens
agacagaattttaaa

SEQ ID NO: 2039658 - DNA, 15 bp, Homo sapiens
gacagaattttaaaa

SEQ ID NO: 2039659 - DNA, 15 bp, Homo sapiens
acagaattttaaaat

SEQ ID NO: 2039660 - DNA, 15 bp, Homo sapiens
cagaattttaaaatt

SEQ ID NO: 2039661 - DNA, 15 bp, Homo sapiens
agaattttaaaatta

SEQ ID NO: 2039662 - DNA, 15 bp, Homo sapiens
gaattttaaaattag

SEQ ID NO: 2039663 - DNA, 15 bp, Homo sapiens
aattttaaaattagc

SEQ ID NO: 2039664 - DNA, 15 bp, Homo sapiens
attttaaaattagct

SEQ ID NO: 2039665 - DNA, 15 bp, Homo sapiens
ttttaaaattagctg

SEQ ID NO: 2039666 - DNA, 15 bp, Homo sapiens
tttaaaattagctgg

SEQ ID NO: 2039667 - DNA, 15 bp, Homo sapiens
ttaaaattagctggg

SEQ ID NO: 2039668 - DNA, 15 bp, Homo sapiens
taaaattagctgggc

SEQ ID NO: 2039669 - DNA, 15 bp, Homo sapiens
tgcacctgtagtcct

SEQ ID NO: 2039670 - DNA, 15 bp, Homo sapiens
ctgtagtcctagctg

SEQ ID NO: 2039671 - DNA, 15 bp, Homo sapiens
tgtagtcctagctgt

SEQ ID NO: 2039672 - DNA, 15 bp, Homo sapiens
gtagtcctagctgtt

SEQ ID NO: 2039673 - DNA, 15 bp, Homo sapiens
tagtcctagctgttt

SEQ ID NO: 2039674 - DNA, 15 bp, Homo sapiens
agtcctagctgtttg

SEQ ID NO: 2039675 - DNA, 15 bp, Homo sapiens
gtcctagctgtttgg

SEQ ID NO: 2039676 - DNA, 15 bp, Homo sapiens
tcctagctgtttggg

SEQ ID NO: 2039677 - DNA, 15 bp, Homo sapiens
cctagctgtttggga

SEQ ID NO: 2039678 - DNA, 15 bp, Homo sapiens
ctagctgtttgggag

SEQ ID NO: 2039679 - DNA, 15 bp, Homo sapiens
tagctgtttgggagg

SEQ ID NO: 2039680 - DNA, 15 bp, Homo sapiens
agctgtttgggaggc

SEQ ID NO: 2039681 - DNA, 15 bp, Homo sapiens
gctgtttgggaggct

SEQ ID NO: 2039682 - DNA, 15 bp, Homo sapiens
ctgtttgggaggctg

SEQ ID NO: 2039683 - DNA, 15 bp, Homo sapiens
tgtttgggaggctga

SEQ ID NO: 2039684 - DNA, 15 bp, Homo sapiens
gggaggctgaggcga

SEQ ID NO: 2039685 - DNA, 15 bp, Homo sapiens
ggaggctgaggcgag

SEQ ID NO: 2039686 - DNA, 15 bp, Homo sapiens
gaggctgaggcgaga

SEQ ID NO: 2039687 - DNA, 15 bp, Homo sapiens
aggctgaggcgagag

SEQ ID NO: 2039688 - DNA, 15 bp, Homo sapiens
ggctgaggcgagagg

SEQ ID NO: 2039689 - DNA, 15 bp, Homo sapiens
gctgaggcgagagga

SEQ ID NO: 2039690 - DNA, 15 bp, Homo sapiens
ctgaggcgagaggat

SEQ ID NO: 2039691 - DNA, 15 bp, Homo sapiens
tgaggcgagaggata

SEQ ID NO: 2039692 - DNA, 15 bp, Homo sapiens
gaggcgagaggatag

SEQ ID NO: 2039693 - DNA, 15 bp, Homo sapiens
aggcgagaggatagc

SEQ ID NO: 2039694 - DNA, 15 bp, Homo sapiens
ggcgagaggatagct

SEQ ID NO: 2039695 - DNA, 15 bp, Homo sapiens
gcgagaggatagctt

SEQ ID NO: 2039696 - DNA, 15 bp, Homo sapiens
cgagaggatagcttg

SEQ ID NO: 2039697 - DNA, 15 bp, Homo sapiens
gagaggatagcttga

SEQ ID NO: 2039698 - DNA, 15 bp, Homo sapiens
agaggatagcttgag

SEQ ID NO: 2039699 - DNA, 15 bp, Homo sapiens
gaggatagcttgagc

SEQ ID NO: 2039700 - DNA, 15 bp, Homo sapiens
aggatagcttgagcc

SEQ ID NO: 2039701 - DNA, 15 bp, Homo sapiens
ggatagcttgagcct

SEQ ID NO: 2039702 - DNA, 15 bp, Homo sapiens
gatagcttgagcctg

SEQ ID NO: 2039703 - DNA, 15 bp, Homo sapiens
atagcttgagcctgg

SEQ ID NO: 2039704 - DNA, 15 bp, Homo sapiens
tagcttgagcctgga

SEQ ID NO: 2039705 - DNA, 15 bp, Homo sapiens
agcttgagcctggaa

SEQ ID NO: 2039706 - DNA, 15 bp, Homo sapiens
gcttgagcctggaag

SEQ ID NO: 2039707 - DNA, 15 bp, Homo sapiens
cttgagcctggaagt

SEQ ID NO: 2039708 - DNA, 15 bp, Homo sapiens
ttgagcctggaagtt

SEQ ID NO: 2039709 - DNA, 15 bp, Homo sapiens
tgagcctggaagttc

SEQ ID NO: 2039710 - DNA, 15 bp, Homo sapiens
gagcctggaagttca

SEQ ID NO: 2039711 - DNA, 15 bp, Homo sapiens
agcctggaagttcaa

SEQ ID NO: 2039712 - DNA, 15 bp, Homo sapiens
gcctggaagttcaag

SEQ ID NO: 2039713 - DNA, 15 bp, Homo sapiens
cctggaagttcaagg

SEQ ID NO: 2039714 - DNA, 15 bp, Homo sapiens
ctggaagttcaaggt

SEQ ID NO: 2039715 - DNA, 15 bp, Homo sapiens
tggaagttcaaggtt

SEQ ID NO: 2039716 - DNA, 15 bp, Homo sapiens
ggaagttcaaggtta

SEQ ID NO: 2039717 - DNA, 15 bp, Homo sapiens
gaagttcaaggttat

SEQ ID NO: 2039718 - DNA, 15 bp, Homo sapiens
aagttcaaggttata

SEQ ID NO: 2039719 - DNA, 15 bp, Homo sapiens
agttcaaggttatag

SEQ ID NO: 2039720 - DNA, 15 bp, Homo sapiens
gttcaaggttatagt

SEQ ID NO: 2039721 - DNA, 15 bp, Homo sapiens
ttcaaggttatagtg

SEQ ID NO: 2039722 - DNA, 15 bp, Homo sapiens
tcaaggttatagtga

SEQ ID NO: 2039723 - DNA, 15 bp, Homo sapiens
caaggttatagtgag

SEQ ID NO: 2039724 - DNA, 15 bp, Homo sapiens
aaggttatagtgagc

SEQ ID NO: 2039725 - DNA, 15 bp, Homo sapiens
aggttatagtgagct

SEQ ID NO: 2039726 - DNA, 15 bp, Homo sapiens
ggttatagtgagcta

SEQ ID NO: 2039727 - DNA, 15 bp, Homo sapiens
gttatagtgagctat

SEQ ID NO: 2039728 - DNA, 15 bp, Homo sapiens
ttatagtgagctatg

SEQ ID NO: 2039729 - DNA, 15 bp, Homo sapiens
tatagtgagctatga

SEQ ID NO: 2039730 - DNA, 15 bp, Homo sapiens
atagtgagctatgat

SEQ ID NO: 2039731 - DNA, 15 bp, Homo sapiens
tagtgagctatgatc

SEQ ID NO: 2039732 - DNA, 15 bp, Homo sapiens
tgagctatgatcaca

SEQ ID NO: 2039733 - DNA, 15 bp, Homo sapiens
gagctatgatcacac

SEQ ID NO: 2039734 - DNA, 15 bp, Homo sapiens
agctatgatcacacc

SEQ ID NO: 2039735 - DNA, 15 bp, Homo sapiens
gctatgatcacacca

SEQ ID NO: 2039736 - DNA, 15 bp, Homo sapiens
ctatgatcacaccac

SEQ ID NO: 2039737 - DNA, 15 bp, Homo sapiens
tatgatcacaccact

SEQ ID NO: 2039738 - DNA, 15 bp, Homo sapiens
atgatcacaccactg

SEQ ID NO: 2039739 - DNA, 15 bp, Homo sapiens
cacaccactgcactg

SEQ ID NO: 2039740 - DNA, 15 bp, Homo sapiens
acaccactgcactgc

SEQ ID NO: 2039741 - DNA, 15 bp, Homo sapiens
caccactgcactgca

SEQ ID NO: 2039742 - DNA, 15 bp, Homo sapiens
accactgcactgcag

SEQ ID NO: 2039743 - DNA, 15 bp, Homo sapiens
tgcactgcagcctgt

SEQ ID NO: 2039744 - DNA, 15 bp, Homo sapiens
gcactgcagcctgtg

SEQ ID NO: 2039745 - DNA, 15 bp, Homo sapiens
cactgcagcctgtgc

SEQ ID NO: 2039746 - DNA, 15 bp, Homo sapiens
actgcagcctgtgca

SEQ ID NO: 2039747 - DNA, 15 bp, Homo sapiens
ctgcagcctgtgcaa

SEQ ID NO: 2039748 - DNA, 15 bp, Homo sapiens
tgcagcctgtgcaac

SEQ ID NO: 2039749 - DNA, 15 bp, Homo sapiens
gcagcctgtgcaaca

SEQ ID NO: 2039750 - DNA, 15 bp, Homo sapiens
cagcctgtgcaacag

SEQ ID NO: 2039751 - DNA, 15 bp, Homo sapiens
agcctgtgcaacagg

SEQ ID NO: 2039752 - DNA, 15 bp, Homo sapiens
gcctgtgcaacaggg

SEQ ID NO: 2039753 - DNA, 15 bp, Homo sapiens
cctgtgcaacagggc

SEQ ID NO: 2039754 - DNA, 15 bp, Homo sapiens
ctgtgcaacagggca

SEQ ID NO: 2039755 - DNA, 15 bp, Homo sapiens
tgtgcaacagggcaa

SEQ ID NO: 2039756 - DNA, 15 bp, Homo sapiens
gtgcaacagggcaag

SEQ ID NO: 2039757 - DNA, 15 bp, Homo sapiens
tgcaacagggcaaga

SEQ ID NO: 2039758 - DNA, 15 bp, Homo sapiens
gcaacagggcaagac

SEQ ID NO: 2039759 - DNA, 15 bp, Homo sapiens
caacagggcaagacc

SEQ ID NO: 2039760 - DNA, 15 bp, Homo sapiens
aacagggcaagaccc

SEQ ID NO: 2039761 - DNA, 15 bp, Homo sapiens
acagggcaagaccct

SEQ ID NO: 2039762 - DNA, 15 bp, Homo sapiens
cagggcaagaccctg

SEQ ID NO: 2039763 - DNA, 15 bp, Homo sapiens
agggcaagaccctgt

SEQ ID NO: 2039764 - DNA, 15 bp, Homo sapiens
gggcaagaccctgtc

SEQ ID NO: 2039765 - DNA, 15 bp, Homo sapiens
accctgtctctaaat

SEQ ID NO: 2039766 - DNA, 15 bp, Homo sapiens
ccctgtctctaaata

SEQ ID NO: 2039767 - DNA, 15 bp, Homo sapiens
cctgtctctaaataa

SEQ ID NO: 2039768 - DNA, 15 bp, Homo sapiens
ctgtctctaaataaa

SEQ ID NO: 2039769 - DNA, 15 bp, Homo sapiens
tgtctctaaataaat

SEQ ID NO: 2039770 - DNA, 15 bp, Homo sapiens
ctctaaataaataat

SEQ ID NO: 2039771 - DNA, 15 bp, Homo sapiens
tctaaataaataatc

SEQ ID NO: 2039772 - DNA, 15 bp, Homo sapiens
ctaaataaataatca

SEQ ID NO: 2039773 - DNA, 15 bp, Homo sapiens
aaataaataatcaat

SEQ ID NO: 2039774 - DNA, 15 bp, Homo sapiens
aataaataatcaatc

SEQ ID NO: 2039775 - DNA, 15 bp, Homo sapiens
ataaataatcaatca

SEQ ID NO: 2039776 - DNA, 15 bp, Homo sapiens
taaataatcaatcat

SEQ ID NO: 2039777 - DNA, 15 bp, Homo sapiens
aaataatcaatcatt

SEQ ID NO: 2039778 - DNA, 15 bp, Homo sapiens
aataatcaatcattg

SEQ ID NO: 2039779 - DNA, 15 bp, Homo sapiens
ataatcaatcattgt

SEQ ID NO: 2039780 - DNA, 15 bp, Homo sapiens
taatcaatcattgtt

SEQ ID NO: 2039781 - DNA, 15 bp, Homo sapiens
aatcaatcattgtta

SEQ ID NO: 2039782 - DNA, 15 bp, Homo sapiens
atcaatcattgttag

SEQ ID NO: 2039783 - DNA, 15 bp, Homo sapiens
tcaatcattgttagg

SEQ ID NO: 2039784 - DNA, 15 bp, Homo sapiens
caatcattgttaggc

SEQ ID NO: 2039785 - DNA, 15 bp, Homo sapiens
aatcattgttaggcc

SEQ ID NO: 2039786 - DNA, 15 bp, Homo sapiens
atcattgttaggccc

SEQ ID NO: 2039787 - DNA, 15 bp, Homo sapiens
tcattgttaggccca

SEQ ID NO: 2039788 - DNA, 15 bp, Homo sapiens
cattgttaggcccag

SEQ ID NO: 2039789 - DNA, 15 bp, Homo sapiens
attgttaggcccagg

SEQ ID NO: 2039790 - DNA, 15 bp, Homo sapiens
ttgttaggcccaggt

SEQ ID NO: 2039791 - DNA, 15 bp, Homo sapiens
tgttaggcccaggtt

SEQ ID NO: 2039792 - DNA, 15 bp, Homo sapiens
gttaggcccaggttt

SEQ ID NO: 2039793 - DNA, 15 bp, Homo sapiens
ttaggcccaggtttt

SEQ ID NO: 2039794 - DNA, 15 bp, Homo sapiens
taggcccaggttttg

SEQ ID NO: 2039795 - DNA, 15 bp, Homo sapiens
aggcccaggttttgg

SEQ ID NO: 2039796 - DNA, 15 bp, Homo sapiens
ggcccaggttttgga

SEQ ID NO: 2039797 - DNA, 15 bp, Homo sapiens
gcccaggttttggag

SEQ ID NO: 2039798 - DNA, 15 bp, Homo sapiens
cccaggttttggagg

SEQ ID NO: 2039799 - DNA, 15 bp, Homo sapiens
ccaggttttggaggt

SEQ ID NO: 2039800 - DNA, 15 bp, Homo sapiens
caggttttggaggtt

SEQ ID NO: 2039801 - DNA, 15 bp, Homo sapiens
aggttttggaggttt

SEQ ID NO: 2039802 - DNA, 15 bp, Homo sapiens
ggttttggaggttta

SEQ ID NO: 2039803 - DNA, 15 bp, Homo sapiens
gttttggaggtttaa

SEQ ID NO: 2039804 - DNA, 15 bp, Homo sapiens
ttttggaggtttaat

SEQ ID NO: 2039805 - DNA, 15 bp, Homo sapiens
tttggaggtttaatc

SEQ ID NO: 2039806 - DNA, 15 bp, Homo sapiens
ttggaggtttaatct

SEQ ID NO: 2039807 - DNA, 15 bp, Homo sapiens
tggaggtttaatctc

SEQ ID NO: 2039808 - DNA, 15 bp, Homo sapiens
ggaggtttaatctcc

SEQ ID NO: 2039809 - DNA, 15 bp, Homo sapiens
gaggtttaatctcct

SEQ ID NO: 2039810 - DNA, 15 bp, Homo sapiens
aggtttaatctcctc

SEQ ID NO: 2039811 - DNA, 15 bp, Homo sapiens
ggtttaatctcctcc

SEQ ID NO: 2039812 - DNA, 15 bp, Homo sapiens
gtttaatctcctcct

SEQ ID NO: 2039813 - DNA, 15 bp, Homo sapiens
tttaatctcctcctc

SEQ ID NO: 2039814 - DNA, 15 bp, Homo sapiens
ttaatctcctcctca

SEQ ID NO: 2039815 - DNA, 15 bp, Homo sapiens
taatctcctcctcaa

SEQ ID NO: 2039816 - DNA, 15 bp, Homo sapiens
aatctcctcctcaag

SEQ ID NO: 2039817 - DNA, 15 bp, Homo sapiens
atctcctcctcaaga

SEQ ID NO: 2039818 - DNA, 15 bp, Homo sapiens
tctcctcctcaagag

SEQ ID NO: 2039819 - DNA, 15 bp, Homo sapiens
ctcctcctcaagaga

SEQ ID NO: 2039820 - DNA, 15 bp, Homo sapiens
tcctcctcaagagaa

SEQ ID NO: 2039821 - DNA, 15 bp, Homo sapiens
cctcctcaagagaaa

SEQ ID NO: 2039822 - DNA, 15 bp, Homo sapiens
ctcctcaagagaaat

SEQ ID NO: 2039823 - DNA, 15 bp, Homo sapiens
tcctcaagagaaata

SEQ ID NO: 2039824 - DNA, 15 bp, Homo sapiens
cctcaagagaaataa

SEQ ID NO: 2039825 - DNA, 15 bp, Homo sapiens
ctcaagagaaataaa

SEQ ID NO: 2039826 - DNA, 15 bp, Homo sapiens
tcaagagaaataaat

SEQ ID NO: 2039827 - DNA, 15 bp, Homo sapiens
caagagaaataaatg

SEQ ID NO: 2039828 - DNA, 15 bp, Homo sapiens
aagagaaataaatgg

SEQ ID NO: 2039829 - DNA, 15 bp, Homo sapiens
agagaaataaatggc

SEQ ID NO: 2039830 - DNA, 15 bp, Homo sapiens
gagaaataaatggca

SEQ ID NO: 2039831 - DNA, 15 bp, Homo sapiens
agaaataaatggcat

SEQ ID NO: 2039832 - DNA, 15 bp, Homo sapiens
gaaataaatggcatc

SEQ ID NO: 2039833 - DNA, 15 bp, Homo sapiens
aaataaatggcatct

SEQ ID NO: 2039834 - DNA, 15 bp, Homo sapiens
aataaatggcatctg

SEQ ID NO: 2039835 - DNA, 15 bp, Homo sapiens
ataaatggcatctgt

SEQ ID NO: 2039836 - DNA, 15 bp, Homo sapiens
taaatggcatctgtt

SEQ ID NO: 2039837 - DNA, 15 bp, Homo sapiens
aaatggcatctgttt

SEQ ID NO: 2039838 - DNA, 15 bp, Homo sapiens
aatggcatctgttta

SEQ ID NO: 2039839 - DNA, 15 bp, Homo sapiens
atggcatctgtttaa

SEQ ID NO: 2039840 - DNA, 15 bp, Homo sapiens
tggcatctgtttaag

SEQ ID NO: 2039841 - DNA, 15 bp, Homo sapiens
ggcatctgtttaagg

SEQ ID NO: 2039842 - DNA, 15 bp, Homo sapiens
gcatctgtttaaggt

SEQ ID NO: 2039843 - DNA, 15 bp, Homo sapiens
catctgtttaaggtt

SEQ ID NO: 2039844 - DNA, 15 bp, Homo sapiens
atctgtttaaggttg

SEQ ID NO: 2039845 - DNA, 15 bp, Homo sapiens
tctgtttaaggttgc

SEQ ID NO: 2039846 - DNA, 15 bp, Homo sapiens
ctgtttaaggttgca

SEQ ID NO: 2039847 - DNA, 15 bp, Homo sapiens
tgtttaaggttgcag

SEQ ID NO: 2039848 - DNA, 15 bp, Homo sapiens
gtttaaggttgcaga

SEQ ID NO: 2039849 - DNA, 15 bp, Homo sapiens
tttaaggttgcagaa

SEQ ID NO: 2039850 - DNA, 15 bp, Homo sapiens
ttaaggttgcagaat

SEQ ID NO: 2039851 - DNA, 15 bp, Homo sapiens
taaggttgcagaatg

SEQ ID NO: 2039852 - DNA, 15 bp, Homo sapiens
aaggttgcagaatgt

SEQ ID NO: 2039853 - DNA, 15 bp, Homo sapiens
aggttgcagaatgtg

SEQ ID NO: 2039854 - DNA, 15 bp, Homo sapiens
ggttgcagaatgtga

SEQ ID NO: 2039855 - DNA, 15 bp, Homo sapiens
gttgcagaatgtgaa

SEQ ID NO: 2039856 - DNA, 15 bp, Homo sapiens
ttgcagaatgtgaaa

SEQ ID NO: 2039857 - DNA, 15 bp, Homo sapiens
tgcagaatgtgaaat

SEQ ID NO: 2039858 - DNA, 15 bp, Homo sapiens
gcagaatgtgaaatg

SEQ ID NO: 2039859 - DNA, 15 bp, Homo sapiens
cagaatgtgaaatga

SEQ ID NO: 2039860 - DNA, 15 bp, Homo sapiens
agaatgtgaaatgac

SEQ ID NO: 2039861 - DNA, 15 bp, Homo sapiens
gaatgtgaaatgact

SEQ ID NO: 2039862 - DNA, 15 bp, Homo sapiens
aatgtgaaatgactt

SEQ ID NO: 2039863 - DNA, 15 bp, Homo sapiens
atgtgaaatgacttg

SEQ ID NO: 2039864 - DNA, 15 bp, Homo sapiens
tgtgaaatgacttgg

SEQ ID NO: 2039865 - DNA, 15 bp, Homo sapiens
gtgaaatgacttggc

SEQ ID NO: 2039866 - DNA, 15 bp, Homo sapiens
tgaaatgacttggca

SEQ ID NO: 2039867 - DNA, 15 bp, Homo sapiens
gaaatgacttggcat

SEQ ID NO: 2039868 - DNA, 15 bp, Homo sapiens
aaatgacttggcata

SEQ ID NO: 2039869 - DNA, 15 bp, Homo sapiens
aatgacttggcatag

SEQ ID NO: 2039870 - DNA, 15 bp, Homo sapiens
atgacttggcatagc

SEQ ID NO: 2039871 - DNA, 15 bp, Homo sapiens
tgacttggcatagct

SEQ ID NO: 2039872 - DNA, 15 bp, Homo sapiens
gacttggcatagctg

SEQ ID NO: 2039873 - DNA, 15 bp, Homo sapiens
acttggcatagctga

SEQ ID NO: 2039874 - DNA, 15 bp, Homo sapiens
cttggcatagctgaa

SEQ ID NO: 2039875 - DNA, 15 bp, Homo sapiens
ttggcatagctgaaa

SEQ ID NO: 2039876 - DNA, 15 bp, Homo sapiens
tggcatagctgaaaa

SEQ ID NO: 2039877 - DNA, 15 bp, Homo sapiens
ggcatagctgaaaag

SEQ ID NO: 2039878 - DNA, 15 bp, Homo sapiens
gcatagctgaaaaga

SEQ ID NO: 2039879 - DNA, 15 bp, Homo sapiens
catagctgaaaagaa

SEQ ID NO: 2039880 - DNA, 15 bp, Homo sapiens
atagctgaaaagaag

SEQ ID NO: 2039881 - DNA, 15 bp, Homo sapiens
tagctgaaaagaagc

SEQ ID NO: 2039882 - DNA, 15 bp, Homo sapiens
agctgaaaagaagca

SEQ ID NO: 2039883 - DNA, 15 bp, Homo sapiens
gctgaaaagaagcaa

SEQ ID NO: 2039884 - DNA, 15 bp, Homo sapiens
ctgaaaagaagcaaa

SEQ ID NO: 2039885 - DNA, 15 bp, Homo sapiens
tgaaaagaagcaaag

SEQ ID NO: 2039886 - DNA, 15 bp, Homo sapiens
gaaaagaagcaaaga

SEQ ID NO: 2039887 - DNA, 15 bp, Homo sapiens
aaaagaagcaaagat

SEQ ID NO: 2039888 - DNA, 15 bp, Homo sapiens
aaagaagcaaagatt

SEQ ID NO: 2039889 - DNA, 15 bp, Homo sapiens
aagaagcaaagattc

SEQ ID NO: 2039890 - DNA, 15 bp, Homo sapiens
agaagcaaagattct

SEQ ID NO: 2039891 - DNA, 15 bp, Homo sapiens
gaagcaaagattcta

SEQ ID NO: 2039892 - DNA, 15 bp, Homo sapiens
aagcaaagattctac

SEQ ID NO: 2039893 - DNA, 15 bp, Homo sapiens
agcaaagattctaca

SEQ ID NO: 2039894 - DNA, 15 bp, Homo sapiens
gcaaagattctacag

SEQ ID NO: 2039895 - DNA, 15 bp, Homo sapiens
caaagattctacagt

SEQ ID NO: 2039896 - DNA, 15 bp, Homo sapiens
aaagattctacagta

SEQ ID NO: 2039897 - DNA, 15 bp, Homo sapiens
aagattctacagtat

SEQ ID NO: 2039898 - DNA, 15 bp, Homo sapiens
agattctacagtatg

SEQ ID NO: 2039899 - DNA, 15 bp, Homo sapiens
gattctacagtatga

SEQ ID NO: 2039900 - DNA, 15 bp, Homo sapiens
attctacagtatgac

SEQ ID NO: 2039901 - DNA, 15 bp, Homo sapiens
ttctacagtatgacc

SEQ ID NO: 2039902 - DNA, 15 bp, Homo sapiens
tctacagtatgacct

SEQ ID NO: 2039903 - DNA, 15 bp, Homo sapiens
ctacagtatgacctt

SEQ ID NO: 2039904 - DNA, 15 bp, Homo sapiens
tacagtatgaccttt

SEQ ID NO: 2039905 - DNA, 15 bp, Homo sapiens
acagtatgacctttg

SEQ ID NO: 2039906 - DNA, 15 bp, Homo sapiens
cagtatgacctttgt

SEQ ID NO: 2039907 - DNA, 15 bp, Homo sapiens
agtatgacctttgtg

SEQ ID NO: 2039908 - DNA, 15 bp, Homo sapiens
gtatgacctttgtga

SEQ ID NO: 2039909 - DNA, 15 bp, Homo sapiens
tatgacctttgtgat

SEQ ID NO: 2039910 - DNA, 15 bp, Homo sapiens
atgacctttgtgata

SEQ ID NO: 2039911 - DNA, 15 bp, Homo sapiens
tgacctttgtgatat

SEQ ID NO: 2039912 - DNA, 15 bp, Homo sapiens
gacctttgtgatata

SEQ ID NO: 2039913 - DNA, 15 bp, Homo sapiens
acctttgtgatatat

SEQ ID NO: 2039914 - DNA, 15 bp, Homo sapiens
cctttgtgatatatt

SEQ ID NO: 2039915 - DNA, 15 bp, Homo sapiens
ctttgtgatatatta

SEQ ID NO: 2039916 - DNA, 15 bp, Homo sapiens
tttgtgatatattat

SEQ ID NO: 2039917 - DNA, 15 bp, Homo sapiens
ttgtgatatattatt

SEQ ID NO: 2039918 - DNA, 15 bp, Homo sapiens
tgtgatatattattt

SEQ ID NO: 2039919 - DNA, 15 bp, Homo sapiens
gtgatatattatttt

SEQ ID NO: 2039920 - DNA, 15 bp, Homo sapiens
tgatatattattttc

SEQ ID NO: 2039921 - DNA, 15 bp, Homo sapiens
gatatattattttct

SEQ ID NO: 2039922 - DNA, 15 bp, Homo sapiens
atatattattttctc

SEQ ID NO: 2039923 - DNA, 15 bp, Homo sapiens
tatattattttctca

SEQ ID NO: 2039924 - DNA, 15 bp, Homo sapiens
atattattttctcag

SEQ ID NO: 2039925 - DNA, 15 bp, Homo sapiens
tattattttctcagt

SEQ ID NO: 2039926 - DNA, 15 bp, Homo sapiens
attattttctcagta

SEQ ID NO: 2039927 - DNA, 15 bp, Homo sapiens
ttattttctcagtaa

SEQ ID NO: 2039928 - DNA, 15 bp, Homo sapiens
tattttctcagtaaa

SEQ ID NO: 2039929 - DNA, 15 bp, Homo sapiens
attttctcagtaaat

SEQ ID NO: 2039930 - DNA, 15 bp, Homo sapiens
ttttctcagtaaata

SEQ ID NO: 2039931 - DNA, 15 bp, Homo sapiens
tttctcagtaaatag

SEQ ID NO: 2039932 - DNA, 15 bp, Homo sapiens
ttctcagtaaatagt

SEQ ID NO: 2039933 - DNA, 15 bp, Homo sapiens
tctcagtaaatagtt

SEQ ID NO: 2039934 - DNA, 15 bp, Homo sapiens
ctcagtaaatagttt

SEQ ID NO: 2039935 - DNA, 15 bp, Homo sapiens
tcagtaaatagtttc

SEQ ID NO: 2039936 - DNA, 15 bp, Homo sapiens
cagtaaatagtttct

SEQ ID NO: 2039937 - DNA, 15 bp, Homo sapiens
agtaaatagtttctt

SEQ ID NO: 2039938 - DNA, 15 bp, Homo sapiens
gtaaatagtttcttt

SEQ ID NO: 2039939 - DNA, 15 bp, Homo sapiens
taaatagtttctttg

SEQ ID NO: 2039940 - DNA, 15 bp, Homo sapiens
aaatagtttctttgg

SEQ ID NO: 2039941 - DNA, 15 bp, Homo sapiens
aatagtttctttggg

SEQ ID NO: 2039942 - DNA, 15 bp, Homo sapiens
atagtttctttggga

SEQ ID NO: 2039943 - DNA, 15 bp, Homo sapiens
tagtttctttgggat

SEQ ID NO: 2039944 - DNA, 15 bp, Homo sapiens
agtttctttgggata

SEQ ID NO: 2039945 - DNA, 15 bp, Homo sapiens
gtttctttgggatag

SEQ ID NO: 2039946 - DNA, 15 bp, Homo sapiens
tttctttgggatagg

SEQ ID NO: 2039947 - DNA, 15 bp, Homo sapiens
ttctttgggataggc

SEQ ID NO: 2039948 - DNA, 15 bp, Homo sapiens
tctttgggataggca

SEQ ID NO: 2039949 - DNA, 15 bp, Homo sapiens
ctttgggataggcac

SEQ ID NO: 2039950 - DNA, 15 bp, Homo sapiens
tttgggataggcact

SEQ ID NO: 2039951 - DNA, 15 bp, Homo sapiens
ttgggataggcactg

SEQ ID NO: 2039952 - DNA, 15 bp, Homo sapiens
tgggataggcactgt

SEQ ID NO: 2039953 - DNA, 15 bp, Homo sapiens
gggataggcactgtg

SEQ ID NO: 2039954 - DNA, 15 bp, Homo sapiens
ggataggcactgtga

SEQ ID NO: 2039955 - DNA, 15 bp, Homo sapiens
gataggcactgtgat

SEQ ID NO: 2039956 - DNA, 15 bp, Homo sapiens
ataggcactgtgatt

SEQ ID NO: 2039957 - DNA, 15 bp, Homo sapiens
taggcactgtgatta

SEQ ID NO: 2039958 - DNA, 15 bp, Homo sapiens
aggcactgtgattaa

SEQ ID NO: 2039959 - DNA, 15 bp, Homo sapiens
ggcactgtgattaaa

SEQ ID NO: 2039960 - DNA, 15 bp, Homo sapiens
gcactgtgattaaaa

SEQ ID NO: 2039961 - DNA, 15 bp, Homo sapiens
cactgtgattaaaaa

SEQ ID NO: 2039962 - DNA, 15 bp, Homo sapiens
actgtgattaaaaaa

SEQ ID NO: 2039963 - DNA, 15 bp, Homo sapiens
ctgtgattaaaaaaa

SEQ ID NO: 2039964 - DNA, 15 bp, Homo sapiens
tgattaaaaaaataa

SEQ ID NO: 2039965 - DNA, 15 bp, Homo sapiens
attaaaaaaataaaa

SEQ ID NO: 2039966 - DNA, 15 bp, Homo sapiens
ttaaaaaaataaaag

SEQ ID NO: 2039967 - DNA, 15 bp, Homo sapiens
taaaaaaataaaagc

SEQ ID NO: 2039968 - DNA, 15 bp, Homo sapiens
aaaaaataaaagcat

SEQ ID NO: 2039969 - DNA, 15 bp, Homo sapiens
aaaaataaaagcatc

SEQ ID NO: 2039970 - DNA, 15 bp, Homo sapiens
aaaataaaagcatct

SEQ ID NO: 2039971 - DNA, 15 bp, Homo sapiens
aaataaaagcatctt

SEQ ID NO: 2039972 - DNA, 15 bp, Homo sapiens
aataaaagcatcttg

SEQ ID NO: 2039973 - DNA, 15 bp, Homo sapiens
ataaaagcatcttga

SEQ ID NO: 2039974 - DNA, 15 bp, Homo sapiens
taaaagcatcttgag

SEQ ID NO: 2039975 - DNA, 15 bp, Homo sapiens
aaaagcatcttgagt

SEQ ID NO: 2039976 - DNA, 15 bp, Homo sapiens
aaagcatcttgagtt

SEQ ID NO: 2039977 - DNA, 15 bp, Homo sapiens
aagcatcttgagttt

SEQ ID NO: 2039978 - DNA, 15 bp, Homo sapiens
agcatcttgagtttt

SEQ ID NO: 2039979 - DNA, 15 bp, Homo sapiens
gcatcttgagttttc

SEQ ID NO: 2039980 - DNA, 15 bp, Homo sapiens
catcttgagttttct

SEQ ID NO: 2039981 - DNA, 15 bp, Homo sapiens
atcttgagttttctt

SEQ ID NO: 2039982 - DNA, 15 bp, Homo sapiens
tcttgagttttcttt

SEQ ID NO: 2039983 - DNA, 15 bp, Homo sapiens
cttgagttttctttg

SEQ ID NO: 2039984 - DNA, 15 bp, Homo sapiens
ttgagttttctttga

SEQ ID NO: 2039985 - DNA, 15 bp, Homo sapiens
tgagttttctttgaa

SEQ ID NO: 2039986 - DNA, 15 bp, Homo sapiens
gagttttctttgaag

SEQ ID NO: 2039987 - DNA, 15 bp, Homo sapiens
agttttctttgaagt

SEQ ID NO: 2039988 - DNA, 15 bp, Homo sapiens
gttttctttgaagtg

SEQ ID NO: 2039989 - DNA, 15 bp, Homo sapiens
ttttctttgaagtga

SEQ ID NO: 2039990 - DNA, 15 bp, Homo sapiens
tttctttgaagtgac

SEQ ID NO: 2039991 - DNA, 15 bp, Homo sapiens
ttctttgaagtgaca

SEQ ID NO: 2039992 - DNA, 15 bp, Homo sapiens
tctttgaagtgacaa

SEQ ID NO: 2039993 - DNA, 15 bp, Homo sapiens
ctttgaagtgacaaa

SEQ ID NO: 2039994 - DNA, 15 bp, Homo sapiens
tttgaagtgacaaat

SEQ ID NO: 2039995 - DNA, 15 bp, Homo sapiens
ttgaagtgacaaatt

SEQ ID NO: 2039996 - DNA, 15 bp, Homo sapiens
tgaagtgacaaattt

SEQ ID NO: 2039997 - DNA, 15 bp, Homo sapiens
gaagtgacaaatttg

SEQ ID NO: 2039998 - DNA, 15 bp, Homo sapiens
aagtgacaaatttgc

SEQ ID NO: 2039999 - DNA, 15 bp, Homo sapiens
agtgacaaatttgct

SEQ ID NO: 2040000 - DNA, 15 bp, Homo sapiens
gtgacaaatttgctg

SEQ ID NO: 2040001 - DNA, 15 bp, Homo sapiens
tgacaaatttgctgg

SEQ ID NO: 2040002 - DNA, 15 bp, Homo sapiens
gacaaatttgctgga

SEQ ID NO: 2040003 - DNA, 15 bp, Homo sapiens
acaaatttgctggaa

SEQ ID NO: 2040004 - DNA, 15 bp, Homo sapiens
caaatttgctggaaa

SEQ ID NO: 2040005 - DNA, 15 bp, Homo sapiens
aaatttgctggaaag

SEQ ID NO: 2040006 - DNA, 15 bp, Homo sapiens
aatttgctggaaaga

SEQ ID NO: 2040007 - DNA, 15 bp, Homo sapiens
atttgctggaaagat

SEQ ID NO: 2040008 - DNA, 15 bp, Homo sapiens
tttgctggaaagatc

SEQ ID NO: 2040009 - DNA, 15 bp, Homo sapiens
ttgctggaaagatca

SEQ ID NO: 2040010 - DNA, 15 bp, Homo sapiens
tgctggaaagatcag

SEQ ID NO: 2040011 - DNA, 15 bp, Homo sapiens
gctggaaagatcagt

SEQ ID NO: 2040012 - DNA, 15 bp, Homo sapiens
ctggaaagatcagta

SEQ ID NO: 2040013 - DNA, 15 bp, Homo sapiens
tggaaagatcagtac

SEQ ID NO: 2040014 - DNA, 15 bp, Homo sapiens
ggaaagatcagtact

SEQ ID NO: 2040015 - DNA, 15 bp, Homo sapiens
gaaagatcagtactt

SEQ ID NO: 2040016 - DNA, 15 bp, Homo sapiens
aaagatcagtacttt

SEQ ID NO: 2040017 - DNA, 15 bp, Homo sapiens
aagatcagtactttc

SEQ ID NO: 2040018 - DNA, 15 bp, Homo sapiens
agatcagtactttct

SEQ ID NO: 2040019 - DNA, 15 bp, Homo sapiens
gatcagtactttctg

SEQ ID NO: 2040020 - DNA, 15 bp, Homo sapiens
atcagtactttctgc

SEQ ID NO: 2040021 - DNA, 15 bp, Homo sapiens
tcagtactttctgct

SEQ ID NO: 2040022 - DNA, 15 bp, Homo sapiens
cagtactttctgctg

SEQ ID NO: 2040023 - DNA, 15 bp, Homo sapiens
agtactttctgctgc

SEQ ID NO: 2040024 - DNA, 15 bp, Homo sapiens
gtactttctgctgct

SEQ ID NO: 2040025 - DNA, 15 bp, Homo sapiens
tactttctgctgctg

SEQ ID NO: 2040026 - DNA, 15 bp, Homo sapiens
actttctgctgctgg

SEQ ID NO: 2040027 - DNA, 15 bp, Homo sapiens
ctttctgctgctgga

SEQ ID NO: 2040028 - DNA, 15 bp, Homo sapiens
tttctgctgctggag

SEQ ID NO: 2040029 - DNA, 15 bp, Homo sapiens
ttctgctgctggaga

SEQ ID NO: 2040030 - DNA, 15 bp, Homo sapiens
tctgctgctggagag

SEQ ID NO: 2040031 - DNA, 15 bp, Homo sapiens
ctgctgctggagagt

SEQ ID NO: 2040032 - DNA, 15 bp, Homo sapiens
tgctgctggagagta

SEQ ID NO: 2040033 - DNA, 15 bp, Homo sapiens
gctgctggagagtat

SEQ ID NO: 2040034 - DNA, 15 bp, Homo sapiens
ctgctggagagtata

SEQ ID NO: 2040035 - DNA, 15 bp, Homo sapiens
tgctggagagtatat

SEQ ID NO: 2040036 - DNA, 15 bp, Homo sapiens
gctggagagtatatt

SEQ ID NO: 2040037 - DNA, 15 bp, Homo sapiens
ctggagagtatattc

SEQ ID NO: 2040038 - DNA, 15 bp, Homo sapiens
tggagagtatattct

SEQ ID NO: 2040039 - DNA, 15 bp, Homo sapiens
ggagagtatattctg

SEQ ID NO: 2040040 - DNA, 15 bp, Homo sapiens
gagagtatattctgt

SEQ ID NO: 2040041 - DNA, 15 bp, Homo sapiens
agagtatattctgtt

SEQ ID NO: 2040042 - DNA, 15 bp, Homo sapiens
gagtatattctgttt

SEQ ID NO: 2040043 - DNA, 15 bp, Homo sapiens
agtatattctgttta

SEQ ID NO: 2040044 - DNA, 15 bp, Homo sapiens
gtatattctgtttat

SEQ ID NO: 2040045 - DNA, 15 bp, Homo sapiens
tatattctgtttata

SEQ ID NO: 2040046 - DNA, 15 bp, Homo sapiens
atattctgtttataa

SEQ ID NO: 2040047 - DNA, 15 bp, Homo sapiens
tattctgtttataaa

SEQ ID NO: 2040048 - DNA, 15 bp, Homo sapiens
attctgtttataaac

SEQ ID NO: 2040049 - DNA, 15 bp, Homo sapiens
ttctgtttataaaca

SEQ ID NO: 2040050 - DNA, 15 bp, Homo sapiens
tctgtttataaacat

SEQ ID NO: 2040051 - DNA, 15 bp, Homo sapiens
ctgtttataaacatg

SEQ ID NO: 2040052 - DNA, 15 bp, Homo sapiens
tgtttataaacatga

SEQ ID NO: 2040053 - DNA, 15 bp, Homo sapiens
gtttataaacatgaa

SEQ ID NO: 2040054 - DNA, 15 bp, Homo sapiens
tttataaacatgaat

SEQ ID NO: 2040055 - DNA, 15 bp, Homo sapiens
ttataaacatgaatg

SEQ ID NO: 2040056 - DNA, 15 bp, Homo sapiens
tataaacatgaatga

SEQ ID NO: 2040057 - DNA, 15 bp, Homo sapiens
ataaacatgaatgag

SEQ ID NO: 2040058 - DNA, 15 bp, Homo sapiens
taaacatgaatgagg

SEQ ID NO: 2040059 - DNA, 15 bp, Homo sapiens
aaacatgaatgagga

SEQ ID NO: 2040060 - DNA, 15 bp, Homo sapiens
aacatgaatgaggat

SEQ ID NO: 2040061 - DNA, 15 bp, Homo sapiens
acatgaatgaggatg

SEQ ID NO: 2040062 - DNA, 15 bp, Homo sapiens
catgaatgaggatgt

SEQ ID NO: 2040063 - DNA, 15 bp, Homo sapiens
atgaatgaggatgtg

SEQ ID NO: 2040064 - DNA, 15 bp, Homo sapiens
tgaatgaggatgtga

SEQ ID NO: 2040065 - DNA, 15 bp, Homo sapiens
gaatgaggatgtgaa

SEQ ID NO: 2040066 - DNA, 15 bp, Homo sapiens
aatgaggatgtgaat

SEQ ID NO: 2040067 - DNA, 15 bp, Homo sapiens
atgaggatgtgaata

SEQ ID NO: 2040068 - DNA, 15 bp, Homo sapiens
tgaggatgtgaataa

SEQ ID NO: 2040069 - DNA, 15 bp, Homo sapiens
gaggatgtgaataag

SEQ ID NO: 2040070 - DNA, 15 bp, Homo sapiens
aggatgtgaataagg

SEQ ID NO: 2040071 - DNA, 15 bp, Homo sapiens
ggatgtgaataaggc

SEQ ID NO: 2040072 - DNA, 15 bp, Homo sapiens
gatgtgaataaggct

SEQ ID NO: 2040073 - DNA, 15 bp, Homo sapiens
atgtgaataaggcta

SEQ ID NO: 2040074 - DNA, 15 bp, Homo sapiens
tgtgaataaggctag

SEQ ID NO: 2040075 - DNA, 15 bp, Homo sapiens
gtgaataaggctaga

SEQ ID NO: 2040076 - DNA, 15 bp, Homo sapiens
tgaataaggctagaa

SEQ ID NO: 2040077 - DNA, 15 bp, Homo sapiens
gaataaggctagaag

SEQ ID NO: 2040078 - DNA, 15 bp, Homo sapiens
aataaggctagaaga

SEQ ID NO: 2040079 - DNA, 15 bp, Homo sapiens
ataaggctagaagat

SEQ ID NO: 2040080 - DNA, 15 bp, Homo sapiens
taaggctagaagatg

SEQ ID NO: 2040081 - DNA, 15 bp, Homo sapiens
aaggctagaagatga

SEQ ID NO: 2040082 - DNA, 15 bp, Homo sapiens
aggctagaagatgac

SEQ ID NO: 2040083 - DNA, 15 bp, Homo sapiens
ggctagaagatgacc

SEQ ID NO: 2040084 - DNA, 15 bp, Homo sapiens
gctagaagatgacct

SEQ ID NO: 2040085 - DNA, 15 bp, Homo sapiens
ctagaagatgacctc

SEQ ID NO: 2040086 - DNA, 15 bp, Homo sapiens
tagaagatgacctct

SEQ ID NO: 2040087 - DNA, 15 bp, Homo sapiens
agaagatgacctctg

SEQ ID NO: 2040088 - DNA, 15 bp, Homo sapiens
gaagatgacctctgc

SEQ ID NO: 2040089 - DNA, 15 bp, Homo sapiens
aagatgacctctgct

SEQ ID NO: 2040090 - DNA, 15 bp, Homo sapiens
agatgacctctgctg

SEQ ID NO: 2040091 - DNA, 15 bp, Homo sapiens
gatgacctctgctgg

SEQ ID NO: 2040092 - DNA, 15 bp, Homo sapiens
atgacctctgctgga

SEQ ID NO: 2040093 - DNA, 15 bp, Homo sapiens
tgacctctgctggaa

SEQ ID NO: 2040094 - DNA, 15 bp, Homo sapiens
gacctctgctggaag

SEQ ID NO: 2040095 - DNA, 15 bp, Homo sapiens
acctctgctggaagt

SEQ ID NO: 2040096 - DNA, 15 bp, Homo sapiens
cctctgctggaagtt

SEQ ID NO: 2040097 - DNA, 15 bp, Homo sapiens
ctctgctggaagttt

SEQ ID NO: 2040098 - DNA, 15 bp, Homo sapiens
tctgctggaagtttc

SEQ ID NO: 2040099 - DNA, 15 bp, Homo sapiens
ctgctggaagtttct

SEQ ID NO: 2040100 - DNA, 15 bp, Homo sapiens
tgctggaagtttctg

SEQ ID NO: 2040101 - DNA, 15 bp, Homo sapiens
gctggaagtttctgg

SEQ ID NO: 2040102 - DNA, 15 bp, Homo sapiens
ctggaagtttctggt

SEQ ID NO: 2040103 - DNA, 15 bp, Homo sapiens
tggaagtttctggta

SEQ ID NO: 2040104 - DNA, 15 bp, Homo sapiens
ggaagtttctggtat

SEQ ID NO: 2040105 - DNA, 15 bp, Homo sapiens
gaagtttctggtatg

SEQ ID NO: 2040106 - DNA, 15 bp, Homo sapiens
aagtttctggtatga

SEQ ID NO: 2040107 - DNA, 15 bp, Homo sapiens
agtttctggtatgat

SEQ ID NO: 2040108 - DNA, 15 bp, Homo sapiens
gtttctggtatgatt

SEQ ID NO: 2040109 - DNA, 15 bp, Homo sapiens
tttctggtatgattt

SEQ ID NO: 2040110 - DNA, 15 bp, Homo sapiens
ttctggtatgatttg

SEQ ID NO: 2040111 - DNA, 15 bp, Homo sapiens
tctggtatgatttgg

SEQ ID NO: 2040112 - DNA, 15 bp, Homo sapiens
ctggtatgatttgga

SEQ ID NO: 2040113 - DNA, 15 bp, Homo sapiens
tggtatgatttggag

SEQ ID NO: 2040114 - DNA, 15 bp, Homo sapiens
ggtatgatttggagg

SEQ ID NO: 2040115 - DNA, 15 bp, Homo sapiens
gtatgatttggagga

SEQ ID NO: 2040116 - DNA, 15 bp, Homo sapiens
tatgatttggaggaa

SEQ ID NO: 2040117 - DNA, 15 bp, Homo sapiens
atgatttggaggaag

SEQ ID NO: 2040118 - DNA, 15 bp, Homo sapiens
tgatttggaggaagg

SEQ ID NO: 2040119 - DNA, 15 bp, Homo sapiens
gatttggaggaagga

SEQ ID NO: 2040120 - DNA, 15 bp, Homo sapiens
atttggaggaaggag

SEQ ID NO: 2040121 - DNA, 15 bp, Homo sapiens
tttggaggaaggagc

SEQ ID NO: 2040122 - DNA, 15 bp, Homo sapiens
ttggaggaaggagca

SEQ ID NO: 2040123 - DNA, 15 bp, Homo sapiens
tggaggaaggagcac

SEQ ID NO: 2040124 - DNA, 15 bp, Homo sapiens
ggaggaaggagcact

SEQ ID NO: 2040125 - DNA, 15 bp, Homo sapiens
gaggaaggagcacta

SEQ ID NO: 2040126 - DNA, 15 bp, Homo sapiens
aggaaggagcactag

SEQ ID NO: 2040127 - DNA, 15 bp, Homo sapiens
ggaaggagcactagt

SEQ ID NO: 2040128 - DNA, 15 bp, Homo sapiens
gaaggagcactagtc

SEQ ID NO: 2040129 - DNA, 15 bp, Homo sapiens
aaggagcactagtct

SEQ ID NO: 2040130 - DNA, 15 bp, Homo sapiens
aggagcactagtctt

SEQ ID NO: 2040131 - DNA, 15 bp, Homo sapiens
ggagcactagtcttc

SEQ ID NO: 2040132 - DNA, 15 bp, Homo sapiens
gagcactagtcttcc

SEQ ID NO: 2040133 - DNA, 15 bp, Homo sapiens
agcactagtcttccc

SEQ ID NO: 2040134 - DNA, 15 bp, Homo sapiens
gcactagtcttccct

SEQ ID NO: 2040135 - DNA, 15 bp, Homo sapiens
cactagtcttccctg

SEQ ID NO: 2040136 - DNA, 15 bp, Homo sapiens
actagtcttccctgg

SEQ ID NO: 2040137 - DNA, 15 bp, Homo sapiens
ctagtcttccctggt

SEQ ID NO: 2040138 - DNA, 15 bp, Homo sapiens
tagtcttccctggtg

SEQ ID NO: 2040139 - DNA, 15 bp, Homo sapiens
agtcttccctggtgg

SEQ ID NO: 2040140 - DNA, 15 bp, Homo sapiens
gtcttccctggtggc

SEQ ID NO: 2040141 - DNA, 15 bp, Homo sapiens
tcttccctggtggct

SEQ ID NO: 2040142 - DNA, 15 bp, Homo sapiens
cttccctggtggctg

SEQ ID NO: 2040143 - DNA, 15 bp, Homo sapiens
ttccctggtggctgc

SEQ ID NO: 2040144 - DNA, 15 bp, Homo sapiens
tccctggtggctgct

SEQ ID NO: 2040145 - DNA, 15 bp, Homo sapiens
ccctggtggctgcta

SEQ ID NO: 2040146 - DNA, 15 bp, Homo sapiens
cctggtggctgctag

SEQ ID NO: 2040147 - DNA, 15 bp, Homo sapiens
ctggtggctgctagc

SEQ ID NO: 2040148 - DNA, 15 bp, Homo sapiens
tggtggctgctagcc

SEQ ID NO: 2040149 - DNA, 15 bp, Homo sapiens
ggtggctgctagcct

SEQ ID NO: 2040150 - DNA, 15 bp, Homo sapiens
gtggctgctagcctt

SEQ ID NO: 2040151 - DNA, 15 bp, Homo sapiens
tggctgctagccttt

SEQ ID NO: 2040152 - DNA, 15 bp, Homo sapiens
ggctgctagcctttc

SEQ ID NO: 2040153 - DNA, 15 bp, Homo sapiens
gctgctagcctttca

SEQ ID NO: 2040154 - DNA, 15 bp, Homo sapiens
ctgctagcctttcat

SEQ ID NO: 2040155 - DNA, 15 bp, Homo sapiens
tgctagcctttcatt

SEQ ID NO: 2040156 - DNA, 15 bp, Homo sapiens
gctagcctttcattt

SEQ ID NO: 2040157 - DNA, 15 bp, Homo sapiens
ctagcctttcattta

SEQ ID NO: 2040158 - DNA, 15 bp, Homo sapiens
tagcctttcatttag

SEQ ID NO: 2040159 - DNA, 15 bp, Homo sapiens
agcctttcatttagt

SEQ ID NO: 2040160 - DNA, 15 bp, Homo sapiens
gcctttcatttagtt

SEQ ID NO: 2040161 - DNA, 15 bp, Homo sapiens
cctttcatttagttc

SEQ ID NO: 2040162 - DNA, 15 bp, Homo sapiens
ctttcatttagttca

SEQ ID NO: 2040163 - DNA, 15 bp, Homo sapiens
tttcatttagttcaa

SEQ ID NO: 2040164 - DNA, 15 bp, Homo sapiens
ttcatttagttcaag

SEQ ID NO: 2040165 - DNA, 15 bp, Homo sapiens
tcatttagttcaagc

SEQ ID NO: 2040166 - DNA, 15 bp, Homo sapiens
catttagttcaagcc

SEQ ID NO: 2040167 - DNA, 15 bp, Homo sapiens
atttagttcaagcct

SEQ ID NO: 2040168 - DNA, 15 bp, Homo sapiens
tttagttcaagcctg

SEQ ID NO: 2040169 - DNA, 15 bp, Homo sapiens
ttagttcaagcctgc

SEQ ID NO: 2040170 - DNA, 15 bp, Homo sapiens
tagttcaagcctgcc

SEQ ID NO: 2040171 - DNA, 15 bp, Homo sapiens
agttcaagcctgcca

SEQ ID NO: 2040172 - DNA, 15 bp, Homo sapiens
gttcaagcctgccag

SEQ ID NO: 2040173 - DNA, 15 bp, Homo sapiens
ttcaagcctgccagc

SEQ ID NO: 2040174 - DNA, 15 bp, Homo sapiens
tcaagcctgccagcc

SEQ ID NO: 2040175 - DNA, 15 bp, Homo sapiens
caagcctgccagcct

SEQ ID NO: 2040176 - DNA, 15 bp, Homo sapiens
aagcctgccagcctc

SEQ ID NO: 2040177 - DNA, 15 bp, Homo sapiens
agcctgccagcctct

SEQ ID NO: 2040178 - DNA, 15 bp, Homo sapiens
gcctgccagcctcta

SEQ ID NO: 2040179 - DNA, 15 bp, Homo sapiens
cctgccagcctctag

SEQ ID NO: 2040180 - DNA, 15 bp, Homo sapiens
ctgccagcctctagc

SEQ ID NO: 2040181 - DNA, 15 bp, Homo sapiens
tgccagcctctagct

SEQ ID NO: 2040182 - DNA, 15 bp, Homo sapiens
gccagcctctagctt

SEQ ID NO: 2040183 - DNA, 15 bp, Homo sapiens
ccagcctctagcttt

SEQ ID NO: 2040184 - DNA, 15 bp, Homo sapiens
cagcctctagctttt

SEQ ID NO: 2040185 - DNA, 15 bp, Homo sapiens
agcctctagcttttc

SEQ ID NO: 2040186 - DNA, 15 bp, Homo sapiens
gcctctagcttttcc

SEQ ID NO: 2040187 - DNA, 15 bp, Homo sapiens
cctctagcttttcct

SEQ ID NO: 2040188 - DNA, 15 bp, Homo sapiens
ctctagcttttcctt

SEQ ID NO: 2040189 - DNA, 15 bp, Homo sapiens
tctagcttttccttg

SEQ ID NO: 2040190 - DNA, 15 bp, Homo sapiens
ctagcttttccttgc

SEQ ID NO: 2040191 - DNA, 15 bp, Homo sapiens
tagcttttccttgca

SEQ ID NO: 2040192 - DNA, 15 bp, Homo sapiens
agcttttccttgcaa

SEQ ID NO: 2040193 - DNA, 15 bp, Homo sapiens
gcttttccttgcaac

SEQ ID NO: 2040194 - DNA, 15 bp, Homo sapiens
cttttccttgcaact

SEQ ID NO: 2040195 - DNA, 15 bp, Homo sapiens
ttttccttgcaactt

SEQ ID NO: 2040196 - DNA, 15 bp, Homo sapiens
tttccttgcaacttg

SEQ ID NO: 2040197 - DNA, 15 bp, Homo sapiens
ttccttgcaacttgt

SEQ ID NO: 2040198 - DNA, 15 bp, Homo sapiens
tccttgcaacttgtc

SEQ ID NO: 2040199 - DNA, 15 bp, Homo sapiens
ccttgcaacttgtct

SEQ ID NO: 2040200 - DNA, 15 bp, Homo sapiens
cttgcaacttgtctt

SEQ ID NO: 2040201 - DNA, 15 bp, Homo sapiens
ttgcaacttgtcttt

SEQ ID NO: 2040202 - DNA, 15 bp, Homo sapiens
tgcaacttgtctttt

SEQ ID NO: 2040203 - DNA, 15 bp, Homo sapiens
gcaacttgtcttttc

SEQ ID NO: 2040204 - DNA, 15 bp, Homo sapiens
caacttgtcttttca

SEQ ID NO: 2040205 - DNA, 15 bp, Homo sapiens
aacttgtcttttcat

SEQ ID NO: 2040206 - DNA, 15 bp, Homo sapiens
acttgtcttttcatt

SEQ ID NO: 2040207 - DNA, 15 bp, Homo sapiens
cttgtcttttcattt

SEQ ID NO: 2040208 - DNA, 15 bp, Homo sapiens
ttgtcttttcatttt

SEQ ID NO: 2040209 - DNA, 15 bp, Homo sapiens
tgtcttttcattttt

SEQ ID NO: 2040210 - DNA, 15 bp, Homo sapiens
gtcttttcatttttc

SEQ ID NO: 2040211 - DNA, 15 bp, Homo sapiens
tcttttcatttttct

SEQ ID NO: 2040212 - DNA, 15 bp, Homo sapiens
cttttcatttttctt

SEQ ID NO: 2040213 - DNA, 15 bp, Homo sapiens
ttttcatttttcttg

SEQ ID NO: 2040214 - DNA, 15 bp, Homo sapiens
tttcatttttcttgt

SEQ ID NO: 2040215 - DNA, 15 bp, Homo sapiens
ttcatttttcttgtg

SEQ ID NO: 2040216 - DNA, 15 bp, Homo sapiens
tcatttttcttgtgc

SEQ ID NO: 2040217 - DNA, 15 bp, Homo sapiens
catttttcttgtgct

SEQ ID NO: 2040218 - DNA, 15 bp, Homo sapiens
atttttcttgtgcta

SEQ ID NO: 2040219 - DNA, 15 bp, Homo sapiens
tttttcttgtgctat

SEQ ID NO: 2040220 - DNA, 15 bp, Homo sapiens
ttttcttgtgctatt

SEQ ID NO: 2040221 - DNA, 15 bp, Homo sapiens
tttcttgtgctattt

SEQ ID NO: 2040222 - DNA, 15 bp, Homo sapiens
ttcttgtgctatttt

SEQ ID NO: 2040223 - DNA, 15 bp, Homo sapiens
tcttgtgctattttc

SEQ ID NO: 2040224 - DNA, 15 bp, Homo sapiens
cttgtgctattttct

SEQ ID NO: 2040225 - DNA, 15 bp, Homo sapiens
ttgtgctattttctg

SEQ ID NO: 2040226 - DNA, 15 bp, Homo sapiens
tgtgctattttctgc

SEQ ID NO: 2040227 - DNA, 15 bp, Homo sapiens
gtgctattttctgct

SEQ ID NO: 2040228 - DNA, 15 bp, Homo sapiens
tgctattttctgcta

SEQ ID NO: 2040229 - DNA, 15 bp, Homo sapiens
gctattttctgctat

SEQ ID NO: 2040230 - DNA, 15 bp, Homo sapiens
ctattttctgctatg

SEQ ID NO: 2040231 - DNA, 15 bp, Homo sapiens
tattttctgctatga

SEQ ID NO: 2040232 - DNA, 15 bp, Homo sapiens
attttctgctatgat

SEQ ID NO: 2040233 - DNA, 15 bp, Homo sapiens
ttttctgctatgata

SEQ ID NO: 2040234 - DNA, 15 bp, Homo sapiens
tttctgctatgatag

SEQ ID NO: 2040235 - DNA, 15 bp, Homo sapiens
ttctgctatgatagc

SEQ ID NO: 2040236 - DNA, 15 bp, Homo sapiens
tctgctatgatagca

SEQ ID NO: 2040237 - DNA, 15 bp, Homo sapiens
ctgctatgatagcaa

SEQ ID NO: 2040238 - DNA, 15 bp, Homo sapiens
tgctatgatagcaaa

SEQ ID NO: 2040239 - DNA, 15 bp, Homo sapiens
gctatgatagcaaac

SEQ ID NO: 2040240 - DNA, 15 bp, Homo sapiens
ctatgatagcaaact

SEQ ID NO: 2040241 - DNA, 15 bp, Homo sapiens
tatgatagcaaactt

SEQ ID NO: 2040242 - DNA, 15 bp, Homo sapiens
atgatagcaaacttt

SEQ ID NO: 2040243 - DNA, 15 bp, Homo sapiens
tgatagcaaactttg

SEQ ID NO: 2040244 - DNA, 15 bp, Homo sapiens
gatagcaaactttgc

SEQ ID NO: 2040245 - DNA, 15 bp, Homo sapiens
atagcaaactttgca

SEQ ID NO: 2040246 - DNA, 15 bp, Homo sapiens
tagcaaactttgcat

SEQ ID NO: 2040247 - DNA, 15 bp, Homo sapiens
agcaaactttgcata

SEQ ID NO: 2040248 - DNA, 15 bp, Homo sapiens
gcaaactttgcataa

SEQ ID NO: 2040249 - DNA, 15 bp, Homo sapiens
caaactttgcataac

SEQ ID NO: 2040250 - DNA, 15 bp, Homo sapiens
aaactttgcataaca

SEQ ID NO: 2040251 - DNA, 15 bp, Homo sapiens
aactttgcataacaa

SEQ ID NO: 2040252 - DNA, 15 bp, Homo sapiens
actttgcataacaaa

SEQ ID NO: 2040253 - DNA, 15 bp, Homo sapiens
ctttgcataacaaaa

SEQ ID NO: 2040254 - DNA, 15 bp, Homo sapiens
tttgcataacaaaat

SEQ ID NO: 2040255 - DNA, 15 bp, Homo sapiens
ttgcataacaaaatg

SEQ ID NO: 2040256 - DNA, 15 bp, Homo sapiens
tgcataacaaaatgt

SEQ ID NO: 2040257 - DNA, 15 bp, Homo sapiens
gcataacaaaatgtg

SEQ ID NO: 2040258 - DNA, 15 bp, Homo sapiens
cataacaaaatgtga

SEQ ID NO: 2040259 - DNA, 15 bp, Homo sapiens
ataacaaaatgtgaa

SEQ ID NO: 2040260 - DNA, 15 bp, Homo sapiens
taacaaaatgtgaag

SEQ ID NO: 2040261 - DNA, 15 bp, Homo sapiens
aacaaaatgtgaagt

SEQ ID NO: 2040262 - DNA, 15 bp, Homo sapiens
acaaaatgtgaagtt

SEQ ID NO: 2040263 - DNA, 15 bp, Homo sapiens
caaaatgtgaagttt

SEQ ID NO: 2040264 - DNA, 15 bp, Homo sapiens
aaaatgtgaagtttt

SEQ ID NO: 2040265 - DNA, 15 bp, Homo sapiens
aaatgtgaagttttc

SEQ ID NO: 2040266 - DNA, 15 bp, Homo sapiens
aatgtgaagttttcc

SEQ ID NO: 2040267 - DNA, 15 bp, Homo sapiens
atgtgaagttttcca

SEQ ID NO: 2040268 - DNA, 15 bp, Homo sapiens
tgtgaagttttccat

SEQ ID NO: 2040269 - DNA, 15 bp, Homo sapiens
gtgaagttttccatg

SEQ ID NO: 2040270 - DNA, 15 bp, Homo sapiens
tgaagttttccatgt

SEQ ID NO: 2040271 - DNA, 15 bp, Homo sapiens
gaagttttccatgtg

SEQ ID NO: 2040272 - DNA, 15 bp, Homo sapiens
aagttttccatgtga

SEQ ID NO: 2040273 - DNA, 15 bp, Homo sapiens
agttttccatgtgac

SEQ ID NO: 2040274 - DNA, 15 bp, Homo sapiens
gttttccatgtgaca

SEQ ID NO: 2040275 - DNA, 15 bp, Homo sapiens
ttttccatgtgacat

SEQ ID NO: 2040276 - DNA, 15 bp, Homo sapiens
tttccatgtgacatt

SEQ ID NO: 2040277 - DNA, 15 bp, Homo sapiens
ttccatgtgacatta

SEQ ID NO: 2040278 - DNA, 15 bp, Homo sapiens
tccatgtgacattaa

SEQ ID NO: 2040279 - DNA, 15 bp, Homo sapiens
ccatgtgacattaac

SEQ ID NO: 2040280 - DNA, 15 bp, Homo sapiens
catgtgacattaact

SEQ ID NO: 2040281 - DNA, 15 bp, Homo sapiens
atgtgacattaactt

SEQ ID NO: 2040282 - DNA, 15 bp, Homo sapiens
tgtgacattaactta

SEQ ID NO: 2040283 - DNA, 15 bp, Homo sapiens
gtgacattaacttag

SEQ ID NO: 2040284 - DNA, 15 bp, Homo sapiens
tgacattaacttagt

SEQ ID NO: 2040285 - DNA, 15 bp, Homo sapiens
gacattaacttagta

SEQ ID NO: 2040286 - DNA, 15 bp, Homo sapiens
acattaacttagtaa

SEQ ID NO: 2040287 - DNA, 15 bp, Homo sapiens
cattaacttagtaaa

SEQ ID NO: 2040288 - DNA, 15 bp, Homo sapiens
attaacttagtaaac

SEQ ID NO: 2040289 - DNA, 15 bp, Homo sapiens
ttaacttagtaaaca

SEQ ID NO: 2040290 - DNA, 15 bp, Homo sapiens
taacttagtaaacat

SEQ ID NO: 2040291 - DNA, 15 bp, Homo sapiens
aacttagtaaacatt

SEQ ID NO: 2040292 - DNA, 15 bp, Homo sapiens
acttagtaaacattt

SEQ ID NO: 2040293 - DNA, 15 bp, Homo sapiens
cttagtaaacatttt

SEQ ID NO: 2040294 - DNA, 15 bp, Homo sapiens
ttagtaaacatttta

SEQ ID NO: 2040295 - DNA, 15 bp, Homo sapiens
agtaaacattttagc

SEQ ID NO: 2040296 - DNA, 15 bp, Homo sapiens
gtaaacattttagca

SEQ ID NO: 2040297 - DNA, 15 bp, Homo sapiens
taaacattttagcaa

SEQ ID NO: 2040298 - DNA, 15 bp, Homo sapiens
aaacattttagcaat

SEQ ID NO: 2040299 - DNA, 15 bp, Homo sapiens
aacattttagcaatt

SEQ ID NO: 2040300 - DNA, 15 bp, Homo sapiens
acattttagcaattg

SEQ ID NO: 2040301 - DNA, 15 bp, Homo sapiens
cattttagcaattga

SEQ ID NO: 2040302 - DNA, 15 bp, Homo sapiens
attttagcaattgac

SEQ ID NO: 2040303 - DNA, 15 bp, Homo sapiens
ttttagcaattgact

SEQ ID NO: 2040304 - DNA, 15 bp, Homo sapiens
tttagcaattgacta

SEQ ID NO: 2040305 - DNA, 15 bp, Homo sapiens
ttagcaattgactat

SEQ ID NO: 2040306 - DNA, 15 bp, Homo sapiens
tagcaattgactatt

SEQ ID NO: 2040307 - DNA, 15 bp, Homo sapiens
agcaattgactatta

SEQ ID NO: 2040308 - DNA, 15 bp, Homo sapiens
gcaattgactattaa

SEQ ID NO: 2040309 - DNA, 15 bp, Homo sapiens
caattgactattaaa

SEQ ID NO: 2040310 - DNA, 15 bp, Homo sapiens
aattgactattaaaa

SEQ ID NO: 2040311 - DNA, 15 bp, Homo sapiens
attgactattaaaat

SEQ ID NO: 2040312 - DNA, 15 bp, Homo sapiens
ttgactattaaaatg

SEQ ID NO: 2040313 - DNA, 15 bp, Homo sapiens
tgactattaaaatga

SEQ ID NO: 2040314 - DNA, 15 bp, Homo sapiens
gactattaaaatgaa

SEQ ID NO: 2040315 - DNA, 15 bp, Homo sapiens
actattaaaatgaaa

SEQ ID NO: 2040316 - DNA, 15 bp, Homo sapiens
ctattaaaatgaaat

SEQ ID NO: 2040317 - DNA, 15 bp, Homo sapiens
tattaaaatgaaatg

SEQ ID NO: 2040318 - DNA, 15 bp, Homo sapiens
attaaaatgaaatgt

SEQ ID NO: 2040319 - DNA, 15 bp, Homo sapiens
ttaaaatgaaatgtg

SEQ ID NO: 2040320 - DNA, 15 bp, Homo sapiens
taaaatgaaatgtgc

SEQ ID NO: 2040321 - DNA, 15 bp, Homo sapiens
aaaatgaaatgtgca

SEQ ID NO: 2040322 - DNA, 15 bp, Homo sapiens
aaatgaaatgtgcat

SEQ ID NO: 2040323 - DNA, 15 bp, Homo sapiens
aatgaaatgtgcata

SEQ ID NO: 2040324 - DNA, 15 bp, Homo sapiens
atgaaatgtgcataa

SEQ ID NO: 2040325 - DNA, 15 bp, Homo sapiens
tgaaatgtgcataaa

SEQ ID NO: 2040326 - DNA, 15 bp, Homo sapiens
gaaatgtgcataaac

SEQ ID NO: 2040327 - DNA, 15 bp, Homo sapiens
aaatgtgcataaaca

SEQ ID NO: 2040328 - DNA, 15 bp, Homo sapiens
aatgtgcataaacaa

SEQ ID NO: 2040329 - DNA, 15 bp, Homo sapiens
atgtgcataaacaat

SEQ ID NO: 2040330 - DNA, 15 bp, Homo sapiens
tgtgcataaacaatt

SEQ ID NO: 2040331 - DNA, 15 bp, Homo sapiens
gtgcataaacaattt

SEQ ID NO: 2040332 - DNA, 15 bp, Homo sapiens
tgcataaacaatttg

SEQ ID NO: 2040333 - DNA, 15 bp, Homo sapiens
gcataaacaatttgc

SEQ ID NO: 2040334 - DNA, 15 bp, Homo sapiens
cataaacaatttgcc

SEQ ID NO: 2040335 - DNA, 15 bp, Homo sapiens
ataaacaatttgcca

SEQ ID NO: 2040336 - DNA, 15 bp, Homo sapiens
taaacaatttgccag

SEQ ID NO: 2040337 - DNA, 15 bp, Homo sapiens
aaacaatttgccagg

SEQ ID NO: 2040338 - DNA, 15 bp, Homo sapiens
aacaatttgccaggt

SEQ ID NO: 2040339 - DNA, 15 bp, Homo sapiens
acaatttgccaggtt

SEQ ID NO: 2040340 - DNA, 15 bp, Homo sapiens
caatttgccaggttg

SEQ ID NO: 2040341 - DNA, 15 bp, Homo sapiens
aatttgccaggttgt

SEQ ID NO: 2040342 - DNA, 15 bp, Homo sapiens
atttgccaggttgta

SEQ ID NO: 2040343 - DNA, 15 bp, Homo sapiens
tttgccaggttgtat

SEQ ID NO: 2040344 - DNA, 15 bp, Homo sapiens
ttgccaggttgtatc

SEQ ID NO: 2040345 - DNA, 15 bp, Homo sapiens
tgccaggttgtatct

SEQ ID NO: 2040346 - DNA, 15 bp, Homo sapiens
gccaggttgtatctt

SEQ ID NO: 2040347 - DNA, 15 bp, Homo sapiens
ccaggttgtatctta

SEQ ID NO: 2040348 - DNA, 15 bp, Homo sapiens
caggttgtatcttat

SEQ ID NO: 2040349 - DNA, 15 bp, Homo sapiens
aggttgtatcttatc

SEQ ID NO: 2040350 - DNA, 15 bp, Homo sapiens
ggttgtatcttatca

SEQ ID NO: 2040351 - DNA, 15 bp, Homo sapiens
gttgtatcttatcac

SEQ ID NO: 2040352 - DNA, 15 bp, Homo sapiens
ttgtatcttatcaca

SEQ ID NO: 2040353 - DNA, 15 bp, Homo sapiens
tgtatcttatcacaa

SEQ ID NO: 2040354 - DNA, 15 bp, Homo sapiens
gtatcttatcacaaa

SEQ ID NO: 2040355 - DNA, 15 bp, Homo sapiens
tatcttatcacaaat

SEQ ID NO: 2040356 - DNA, 15 bp, Homo sapiens
atcttatcacaaata

SEQ ID NO: 2040357 - DNA, 15 bp, Homo sapiens
tcttatcacaaatat

SEQ ID NO: 2040358 - DNA, 15 bp, Homo sapiens
cttatcacaaatata

SEQ ID NO: 2040359 - DNA, 15 bp, Homo sapiens
ttatcacaaatatag

SEQ ID NO: 2040360 - DNA, 15 bp, Homo sapiens
tatcacaaatatagt

SEQ ID NO: 2040361 - DNA, 15 bp, Homo sapiens
atcacaaatatagtc

SEQ ID NO: 2040362 - DNA, 15 bp, Homo sapiens
tcacaaatatagtca

SEQ ID NO: 2040363 - DNA, 15 bp, Homo sapiens
cacaaatatagtcat

SEQ ID NO: 2040364 - DNA, 15 bp, Homo sapiens
acaaatatagtcatg

SEQ ID NO: 2040365 - DNA, 15 bp, Homo sapiens
caaatatagtcatgt

SEQ ID NO: 2040366 - DNA, 15 bp, Homo sapiens
aaatatagtcatgtg

SEQ ID NO: 2040367 - DNA, 15 bp, Homo sapiens
aatatagtcatgtgc

SEQ ID NO: 2040368 - DNA, 15 bp, Homo sapiens
atatagtcatgtgct

SEQ ID NO: 2040369 - DNA, 15 bp, Homo sapiens
tatagtcatgtgctg

SEQ ID NO: 2040370 - DNA, 15 bp, Homo sapiens
atagtcatgtgctgc

SEQ ID NO: 2040371 - DNA, 15 bp, Homo sapiens
tagtcatgtgctgca

SEQ ID NO: 2040372 - DNA, 15 bp, Homo sapiens
agtcatgtgctgcat

SEQ ID NO: 2040373 - DNA, 15 bp, Homo sapiens
gtcatgtgctgcata

SEQ ID NO: 2040374 - DNA, 15 bp, Homo sapiens
tcatgtgctgcataa

SEQ ID NO: 2040375 - DNA, 15 bp, Homo sapiens
catgtgctgcataac

SEQ ID NO: 2040376 - DNA, 15 bp, Homo sapiens
atgtgctgcataaca

SEQ ID NO: 2040377 - DNA, 15 bp, Homo sapiens
tgtgctgcataacaa

SEQ ID NO: 2040378 - DNA, 15 bp, Homo sapiens
gtgctgcataacaac

SEQ ID NO: 2040379 - DNA, 15 bp, Homo sapiens
tgctgcataacaaca

SEQ ID NO: 2040380 - DNA, 15 bp, Homo sapiens
gctgcataacaacat

SEQ ID NO: 2040381 - DNA, 15 bp, Homo sapiens
ctgcataacaacatt

SEQ ID NO: 2040382 - DNA, 15 bp, Homo sapiens
tgcataacaacattg

SEQ ID NO: 2040383 - DNA, 15 bp, Homo sapiens
gcataacaacattgc

SEQ ID NO: 2040384 - DNA, 15 bp, Homo sapiens
cataacaacattgca

SEQ ID NO: 2040385 - DNA, 15 bp, Homo sapiens
ataacaacattgcag

SEQ ID NO: 2040386 - DNA, 15 bp, Homo sapiens
taacaacattgcagt

SEQ ID NO: 2040387 - DNA, 15 bp, Homo sapiens
aacaacattgcagtc

SEQ ID NO: 2040388 - DNA, 15 bp, Homo sapiens
acaacattgcagtca

SEQ ID NO: 2040389 - DNA, 15 bp, Homo sapiens
caacattgcagtcaa

SEQ ID NO: 2040390 - DNA, 15 bp, Homo sapiens
aacattgcagtcaac

SEQ ID NO: 2040391 - DNA, 15 bp, Homo sapiens
acattgcagtcaaca

SEQ ID NO: 2040392 - DNA, 15 bp, Homo sapiens
cattgcagtcaacaa

SEQ ID NO: 2040393 - DNA, 15 bp, Homo sapiens
attgcagtcaacaac

SEQ ID NO: 2040394 - DNA, 15 bp, Homo sapiens
ttgcagtcaacaaca

SEQ ID NO: 2040395 - DNA, 15 bp, Homo sapiens
tgcagtcaacaacag

SEQ ID NO: 2040396 - DNA, 15 bp, Homo sapiens
gcagtcaacaacaga

SEQ ID NO: 2040397 - DNA, 15 bp, Homo sapiens
cagtcaacaacagaa

SEQ ID NO: 2040398 - DNA, 15 bp, Homo sapiens
agtcaacaacagaac

SEQ ID NO: 2040399 - DNA, 15 bp, Homo sapiens
gtcaacaacagaaca

SEQ ID NO: 2040400 - DNA, 15 bp, Homo sapiens
tcaacaacagaacac

SEQ ID NO: 2040401 - DNA, 15 bp, Homo sapiens
caacaacagaacaca

SEQ ID NO: 2040402 - DNA, 15 bp, Homo sapiens
aacaacagaacacat

SEQ ID NO: 2040403 - DNA, 15 bp, Homo sapiens
acaacagaacacata

SEQ ID NO: 2040404 - DNA, 15 bp, Homo sapiens
caacagaacacatat

SEQ ID NO: 2040405 - DNA, 15 bp, Homo sapiens
aacagaacacatata

SEQ ID NO: 2040406 - DNA, 15 bp, Homo sapiens
acagaacacatatag

SEQ ID NO: 2040407 - DNA, 15 bp, Homo sapiens
cagaacacatataga

SEQ ID NO: 2040408 - DNA, 15 bp, Homo sapiens
agaacacatatagac

SEQ ID NO: 2040409 - DNA, 15 bp, Homo sapiens
gaacacatatagaca

SEQ ID NO: 2040410 - DNA, 15 bp, Homo sapiens
aacacatatagacag

SEQ ID NO: 2040411 - DNA, 15 bp, Homo sapiens
acacatatagacagt

SEQ ID NO: 2040412 - DNA, 15 bp, Homo sapiens
cacatatagacagtg

SEQ ID NO: 2040413 - DNA, 15 bp, Homo sapiens
acatatagacagtgg

SEQ ID NO: 2040414 - DNA, 15 bp, Homo sapiens
catatagacagtggt

SEQ ID NO: 2040415 - DNA, 15 bp, Homo sapiens
atatagacagtggtc

SEQ ID NO: 2040416 - DNA, 15 bp, Homo sapiens
tatagacagtggtcc

SEQ ID NO: 2040417 - DNA, 15 bp, Homo sapiens
atagacagtggtccc

SEQ ID NO: 2040418 - DNA, 15 bp, Homo sapiens
tagacagtggtcccg

SEQ ID NO: 2040419 - DNA, 15 bp, Homo sapiens
agacagtggtcccga

SEQ ID NO: 2040420 - DNA, 15 bp, Homo sapiens
gacagtggtcccgaa

SEQ ID NO: 2040421 - DNA, 15 bp, Homo sapiens
acagtggtcccgaaa

SEQ ID NO: 2040422 - DNA, 15 bp, Homo sapiens
cagtggtcccgaaag

SEQ ID NO: 2040423 - DNA, 15 bp, Homo sapiens
agtggtcccgaaaga

SEQ ID NO: 2040424 - DNA, 15 bp, Homo sapiens
gtggtcccgaaagat

SEQ ID NO: 2040425 - DNA, 15 bp, Homo sapiens
tggtcccgaaagatt

SEQ ID NO: 2040426 - DNA, 15 bp, Homo sapiens
ggtcccgaaagatta

SEQ ID NO: 2040427 - DNA, 15 bp, Homo sapiens
gtcccgaaagattat

SEQ ID NO: 2040428 - DNA, 15 bp, Homo sapiens
tcccgaaagattata

SEQ ID NO: 2040429 - DNA, 15 bp, Homo sapiens
cccgaaagattataa

SEQ ID NO: 2040430 - DNA, 15 bp, Homo sapiens
ccgaaagattataat

SEQ ID NO: 2040431 - DNA, 15 bp, Homo sapiens
cgaaagattataata

SEQ ID NO: 2040432 - DNA, 15 bp, Homo sapiens
gaaagattataatac

SEQ ID NO: 2040433 - DNA, 15 bp, Homo sapiens
aaagattataatact

SEQ ID NO: 2040434 - DNA, 15 bp, Homo sapiens
aagattataatactg

SEQ ID NO: 2040435 - DNA, 15 bp, Homo sapiens
agattataatactgt

SEQ ID NO: 2040436 - DNA, 15 bp, Homo sapiens
gattataatactgta

SEQ ID NO: 2040437 - DNA, 15 bp, Homo sapiens
attataatactgtat

SEQ ID NO: 2040438 - DNA, 15 bp, Homo sapiens
ttataatactgtatt

SEQ ID NO: 2040439 - DNA, 15 bp, Homo sapiens
tataatactgtattt

SEQ ID NO: 2040440 - DNA, 15 bp, Homo sapiens
ataatactgtatttt

SEQ ID NO: 2040441 - DNA, 15 bp, Homo sapiens
taatactgtattttt

SEQ ID NO: 2040442 - DNA, 15 bp, Homo sapiens
aatactgtattttta

SEQ ID NO: 2040443 - DNA, 15 bp, Homo sapiens
atactgtatttttac

SEQ ID NO: 2040444 - DNA, 15 bp, Homo sapiens
tactgtatttttact

SEQ ID NO: 2040445 - DNA, 15 bp, Homo sapiens
actgtatttttactg

SEQ ID NO: 2040446 - DNA, 15 bp, Homo sapiens
ctgtatttttactgt

SEQ ID NO: 2040447 - DNA, 15 bp, Homo sapiens
tgtatttttactgta

SEQ ID NO: 2040448 - DNA, 15 bp, Homo sapiens
gtatttttactgtac

SEQ ID NO: 2040449 - DNA, 15 bp, Homo sapiens
tatttttactgtacc

SEQ ID NO: 2040450 - DNA, 15 bp, Homo sapiens
atttttactgtacct

SEQ ID NO: 2040451 - DNA, 15 bp, Homo sapiens
tttttactgtacctt

SEQ ID NO: 2040452 - DNA, 15 bp, Homo sapiens
ttttactgtaccttt

SEQ ID NO: 2040453 - DNA, 15 bp, Homo sapiens
tttactgtacctttt

SEQ ID NO: 2040454 - DNA, 15 bp, Homo sapiens
ttactgtaccttttc

SEQ ID NO: 2040455 - DNA, 15 bp, Homo sapiens
tactgtaccttttct

SEQ ID NO: 2040456 - DNA, 15 bp, Homo sapiens
actgtaccttttctg

SEQ ID NO: 2040457 - DNA, 15 bp, Homo sapiens
ctgtaccttttctgt

SEQ ID NO: 2040458 - DNA, 15 bp, Homo sapiens
tgtaccttttctgtg

SEQ ID NO: 2040459 - DNA, 15 bp, Homo sapiens
gtaccttttctgtgt

SEQ ID NO: 2040460 - DNA, 15 bp, Homo sapiens
taccttttctgtgtt

SEQ ID NO: 2040461 - DNA, 15 bp, Homo sapiens
accttttctgtgtta

SEQ ID NO: 2040462 - DNA, 15 bp, Homo sapiens
ccttttctgtgttag

SEQ ID NO: 2040463 - DNA, 15 bp, Homo sapiens
cttttctgtgttaga

SEQ ID NO: 2040464 - DNA, 15 bp, Homo sapiens
ttttctgtgttagat

SEQ ID NO: 2040465 - DNA, 15 bp, Homo sapiens
tttctgtgttagata

SEQ ID NO: 2040466 - DNA, 15 bp, Homo sapiens
ttctgtgttagatat

SEQ ID NO: 2040467 - DNA, 15 bp, Homo sapiens
tctgtgttagatata

SEQ ID NO: 2040468 - DNA, 15 bp, Homo sapiens
ctgtgttagatatac

SEQ ID NO: 2040469 - DNA, 15 bp, Homo sapiens
tgtgttagatataca

SEQ ID NO: 2040470 - DNA, 15 bp, Homo sapiens
gtgttagatatacaa

SEQ ID NO: 2040471 - DNA, 15 bp, Homo sapiens
tgttagatatacaaa

SEQ ID NO: 2040472 - DNA, 15 bp, Homo sapiens
gttagatatacaaat

SEQ ID NO: 2040473 - DNA, 15 bp, Homo sapiens
ttagatatacaaata

SEQ ID NO: 2040474 - DNA, 15 bp, Homo sapiens
tagatatacaaatag

SEQ ID NO: 2040475 - DNA, 15 bp, Homo sapiens
agatatacaaatagt

SEQ ID NO: 2040476 - DNA, 15 bp, Homo sapiens
gatatacaaatagtt

SEQ ID NO: 2040477 - DNA, 15 bp, Homo sapiens
atatacaaatagtta

SEQ ID NO: 2040478 - DNA, 15 bp, Homo sapiens
tatacaaatagttag

SEQ ID NO: 2040479 - DNA, 15 bp, Homo sapiens
atacaaatagttagc

SEQ ID NO: 2040480 - DNA, 15 bp, Homo sapiens
tacaaatagttagca

SEQ ID NO: 2040481 - DNA, 15 bp, Homo sapiens
acaaatagttagcat

SEQ ID NO: 2040482 - DNA, 15 bp, Homo sapiens
caaatagttagcatt

SEQ ID NO: 2040483 - DNA, 15 bp, Homo sapiens
aaatagttagcattg

SEQ ID NO: 2040484 - DNA, 15 bp, Homo sapiens
aatagttagcattgt

SEQ ID NO: 2040485 - DNA, 15 bp, Homo sapiens
atagttagcattgtg

SEQ ID NO: 2040486 - DNA, 15 bp, Homo sapiens
tagttagcattgtgt

SEQ ID NO: 2040487 - DNA, 15 bp, Homo sapiens
agttagcattgtgtt

SEQ ID NO: 2040488 - DNA, 15 bp, Homo sapiens
gttagcattgtgtta

SEQ ID NO: 2040489 - DNA, 15 bp, Homo sapiens
ttagcattgtgttac

SEQ ID NO: 2040490 - DNA, 15 bp, Homo sapiens
tagcattgtgttaca

SEQ ID NO: 2040491 - DNA, 15 bp, Homo sapiens
agcattgtgttacaa

SEQ ID NO: 2040492 - DNA, 15 bp, Homo sapiens
gcattgtgttacaac

SEQ ID NO: 2040493 - DNA, 15 bp, Homo sapiens
cattgtgttacaact

SEQ ID NO: 2040494 - DNA, 15 bp, Homo sapiens
attgtgttacaacta

SEQ ID NO: 2040495 - DNA, 15 bp, Homo sapiens
ttgtgttacaactac

SEQ ID NO: 2040496 - DNA, 15 bp, Homo sapiens
tgtgttacaactaca

SEQ ID NO: 2040497 - DNA, 15 bp, Homo sapiens
gtgttacaactacat

SEQ ID NO: 2040498 - DNA, 15 bp, Homo sapiens
tgttacaactacata

SEQ ID NO: 2040499 - DNA, 15 bp, Homo sapiens
gttacaactacataa

SEQ ID NO: 2040500 - DNA, 15 bp, Homo sapiens
ttacaactacataaa

SEQ ID NO: 2040501 - DNA, 15 bp, Homo sapiens
tacaactacataaag

SEQ ID NO: 2040502 - DNA, 15 bp, Homo sapiens
acaactacataaagt

SEQ ID NO: 2040503 - DNA, 15 bp, Homo sapiens
caactacataaagta

SEQ ID NO: 2040504 - DNA, 15 bp, Homo sapiens
aactacataaagtac

SEQ ID NO: 2040505 - DNA, 15 bp, Homo sapiens
actacataaagtaca

SEQ ID NO: 2040506 - DNA, 15 bp, Homo sapiens
ctacataaagtacac

SEQ ID NO: 2040507 - DNA, 15 bp, Homo sapiens
tacataaagtacaca

SEQ ID NO: 2040508 - DNA, 15 bp, Homo sapiens
acataaagtacacaa

SEQ ID NO: 2040509 - DNA, 15 bp, Homo sapiens
cataaagtacacaat

SEQ ID NO: 2040510 - DNA, 15 bp, Homo sapiens
ataaagtacacaata

SEQ ID NO: 2040511 - DNA, 15 bp, Homo sapiens
taaagtacacaatat

SEQ ID NO: 2040512 - DNA, 15 bp, Homo sapiens
aaagtacacaatatg

SEQ ID NO: 2040513 - DNA, 15 bp, Homo sapiens
aagtacacaatatgg

SEQ ID NO: 2040514 - DNA, 15 bp, Homo sapiens
agtacacaatatggt

SEQ ID NO: 2040515 - DNA, 15 bp, Homo sapiens
gtacacaatatggta

SEQ ID NO: 2040516 - DNA, 15 bp, Homo sapiens
tacacaatatggtaa

SEQ ID NO: 2040517 - DNA, 15 bp, Homo sapiens
acacaatatggtaac

SEQ ID NO: 2040518 - DNA, 15 bp, Homo sapiens
cacaatatggtaacc

SEQ ID NO: 2040519 - DNA, 15 bp, Homo sapiens
acaatatggtaacct

SEQ ID NO: 2040520 - DNA, 15 bp, Homo sapiens
caatatggtaacctg

SEQ ID NO: 2040521 - DNA, 15 bp, Homo sapiens
aatatggtaacctgc

SEQ ID NO: 2040522 - DNA, 15 bp, Homo sapiens
atatggtaacctgct

SEQ ID NO: 2040523 - DNA, 15 bp, Homo sapiens
tatggtaacctgctg

SEQ ID NO: 2040524 - DNA, 15 bp, Homo sapiens
atggtaacctgctgt

SEQ ID NO: 2040525 - DNA, 15 bp, Homo sapiens
tggtaacctgctgta

SEQ ID NO: 2040526 - DNA, 15 bp, Homo sapiens
ggtaacctgctgtac

SEQ ID NO: 2040527 - DNA, 15 bp, Homo sapiens
gtaacctgctgtaca

SEQ ID NO: 2040528 - DNA, 15 bp, Homo sapiens
taacctgctgtacag

SEQ ID NO: 2040529 - DNA, 15 bp, Homo sapiens
aacctgctgtacagg

SEQ ID NO: 2040530 - DNA, 15 bp, Homo sapiens
acctgctgtacaggt

SEQ ID NO: 2040531 - DNA, 15 bp, Homo sapiens
cctgctgtacaggtt

SEQ ID NO: 2040532 - DNA, 15 bp, Homo sapiens
ctgctgtacaggttt

SEQ ID NO: 2040533 - DNA, 15 bp, Homo sapiens
tgctgtacaggtttg

SEQ ID NO: 2040534 - DNA, 15 bp, Homo sapiens
gctgtacaggtttgt

SEQ ID NO: 2040535 - DNA, 15 bp, Homo sapiens
ctgtacaggtttgtt

SEQ ID NO: 2040536 - DNA, 15 bp, Homo sapiens
tgtacaggtttgttg

SEQ ID NO: 2040537 - DNA, 15 bp, Homo sapiens
gtacaggtttgttgc

SEQ ID NO: 2040538 - DNA, 15 bp, Homo sapiens
tacaggtttgttgcc

SEQ ID NO: 2040539 - DNA, 15 bp, Homo sapiens
acaggtttgttgcct

SEQ ID NO: 2040540 - DNA, 15 bp, Homo sapiens
caggtttgttgcctg

SEQ ID NO: 2040541 - DNA, 15 bp, Homo sapiens
aggtttgttgcctgg

SEQ ID NO: 2040542 - DNA, 15 bp, Homo sapiens
ggtttgttgcctggg

SEQ ID NO: 2040543 - DNA, 15 bp, Homo sapiens
gtttgttgcctggga

SEQ ID NO: 2040544 - DNA, 15 bp, Homo sapiens
tttgttgcctgggag

SEQ ID NO: 2040545 - DNA, 15 bp, Homo sapiens
ttgttgcctgggaga

SEQ ID NO: 2040546 - DNA, 15 bp, Homo sapiens
tgttgcctgggagaa

SEQ ID NO: 2040547 - DNA, 15 bp, Homo sapiens
gttgcctgggagaaa

SEQ ID NO: 2040548 - DNA, 15 bp, Homo sapiens
ttgcctgggagaaac

SEQ ID NO: 2040549 - DNA, 15 bp, Homo sapiens
tgcctgggagaaaca

SEQ ID NO: 2040550 - DNA, 15 bp, Homo sapiens
gcctgggagaaacag

SEQ ID NO: 2040551 - DNA, 15 bp, Homo sapiens
cctgggagaaacagg

SEQ ID NO: 2040552 - DNA, 15 bp, Homo sapiens
ctgggagaaacaggc

SEQ ID NO: 2040553 - DNA, 15 bp, Homo sapiens
tgggagaaacaggct

SEQ ID NO: 2040554 - DNA, 15 bp, Homo sapiens
gggagaaacaggcta

SEQ ID NO: 2040555 - DNA, 15 bp, Homo sapiens
ggagaaacaggctat

SEQ ID NO: 2040556 - DNA, 15 bp, Homo sapiens
gagaaacaggctata

SEQ ID NO: 2040557 - DNA, 15 bp, Homo sapiens
agaaacaggctatac

SEQ ID NO: 2040558 - DNA, 15 bp, Homo sapiens
gaaacaggctatacc

SEQ ID NO: 2040559 - DNA, 15 bp, Homo sapiens
aaacaggctatacca

SEQ ID NO: 2040560 - DNA, 15 bp, Homo sapiens
aacaggctataccat

SEQ ID NO: 2040561 - DNA, 15 bp, Homo sapiens
acaggctataccata

SEQ ID NO: 2040562 - DNA, 15 bp, Homo sapiens
caggctataccatat

SEQ ID NO: 2040563 - DNA, 15 bp, Homo sapiens
aggctataccatata

SEQ ID NO: 2040564 - DNA, 15 bp, Homo sapiens
ggctataccatatag

SEQ ID NO: 2040565 - DNA, 15 bp, Homo sapiens
gctataccatatagc

SEQ ID NO: 2040566 - DNA, 15 bp, Homo sapiens
ctataccatatagcc

SEQ ID NO: 2040567 - DNA, 15 bp, Homo sapiens
ataccatatagcctt

SEQ ID NO: 2040568 - DNA, 15 bp, Homo sapiens
taccatatagccttg

SEQ ID NO: 2040569 - DNA, 15 bp, Homo sapiens
accatatagccttgg

SEQ ID NO: 2040570 - DNA, 15 bp, Homo sapiens
ccatatagccttggt

SEQ ID NO: 2040571 - DNA, 15 bp, Homo sapiens
catatagccttggtg

SEQ ID NO: 2040572 - DNA, 15 bp, Homo sapiens
atatagccttggtgt

SEQ ID NO: 2040573 - DNA, 15 bp, Homo sapiens
tatagccttggtgtg

SEQ ID NO: 2040574 - DNA, 15 bp, Homo sapiens
atagccttggtgtgt

SEQ ID NO: 2040575 - DNA, 15 bp, Homo sapiens
tagccttggtgtgta

SEQ ID NO: 2040576 - DNA, 15 bp, Homo sapiens
agccttggtgtgtag

SEQ ID NO: 2040577 - DNA, 15 bp, Homo sapiens
gccttggtgtgtagt

SEQ ID NO: 2040578 - DNA, 15 bp, Homo sapiens
ccttggtgtgtagta

SEQ ID NO: 2040579 - DNA, 15 bp, Homo sapiens
cttggtgtgtagtag

SEQ ID NO: 2040580 - DNA, 15 bp, Homo sapiens
ttggtgtgtagtagg

SEQ ID NO: 2040581 - DNA, 15 bp, Homo sapiens
tggtgtgtagtaggc

SEQ ID NO: 2040582 - DNA, 15 bp, Homo sapiens
gaataaaagaaacag

SEQ ID NO: 2040583 - DNA, 15 bp, Homo sapiens
aataaaagaaacaga

SEQ ID NO: 2040584 - DNA, 15 bp, Homo sapiens
ataaaagaaacagaa

SEQ ID NO: 2040585 - DNA, 15 bp, Homo sapiens
taaaagaaacagaaa

SEQ ID NO: 2040586 - DNA, 15 bp, Homo sapiens
aaaagaaacagaaat

SEQ ID NO: 2040587 - DNA, 15 bp, Homo sapiens
aaagaaacagaaatg

SEQ ID NO: 2040588 - DNA, 15 bp, Homo sapiens
aagaaacagaaatga

SEQ ID NO: 2040589 - DNA, 15 bp, Homo sapiens
agaaacagaaatgag

SEQ ID NO: 2040590 - DNA, 15 bp, Homo sapiens
gaaacagaaatgaga

SEQ ID NO: 2040591 - DNA, 15 bp, Homo sapiens
aaacagaaatgagac

SEQ ID NO: 2040592 - DNA, 15 bp, Homo sapiens
aacagaaatgagacc

SEQ ID NO: 2040593 - DNA, 15 bp, Homo sapiens
acagaaatgagacca

SEQ ID NO: 2040594 - DNA, 15 bp, Homo sapiens
cagaaatgagaccag

SEQ ID NO: 2040595 - DNA, 15 bp, Homo sapiens
agaaatgagaccaga

SEQ ID NO: 2040596 - DNA, 15 bp, Homo sapiens
gaaatgagaccagaa

SEQ ID NO: 2040597 - DNA, 15 bp, Homo sapiens
aaatgagaccagaaa

SEQ ID NO: 2040598 - DNA, 15 bp, Homo sapiens
aatgagaccagaaat

SEQ ID NO: 2040599 - DNA, 15 bp, Homo sapiens
atgagaccagaaatc

SEQ ID NO: 2040600 - DNA, 15 bp, Homo sapiens
tgagaccagaaatca

SEQ ID NO: 2040601 - DNA, 15 bp, Homo sapiens
gagaccagaaatcat

SEQ ID NO: 2040602 - DNA, 15 bp, Homo sapiens
agaccagaaatcatt

SEQ ID NO: 2040603 - DNA, 15 bp, Homo sapiens
gaccagaaatcattg

SEQ ID NO: 2040604 - DNA, 15 bp, Homo sapiens
accagaaatcattga

SEQ ID NO: 2040605 - DNA, 15 bp, Homo sapiens
ccagaaatcattgaa

SEQ ID NO: 2040606 - DNA, 15 bp, Homo sapiens
cagaaatcattgaaa

SEQ ID NO: 2040607 - DNA, 15 bp, Homo sapiens
agaaatcattgaaat

SEQ ID NO: 2040608 - DNA, 15 bp, Homo sapiens
gaaatcattgaaatg

SEQ ID NO: 2040609 - DNA, 15 bp, Homo sapiens
aaatcattgaaatga

SEQ ID NO: 2040610 - DNA, 15 bp, Homo sapiens
aatcattgaaatgaa

SEQ ID NO: 2040611 - DNA, 15 bp, Homo sapiens
atcattgaaatgaaa

SEQ ID NO: 2040612 - DNA, 15 bp, Homo sapiens
tcattgaaatgaaaa

SEQ ID NO: 2040613 - DNA, 15 bp, Homo sapiens
cattgaaatgaaaaa

SEQ ID NO: 2040614 - DNA, 15 bp, Homo sapiens
attgaaatgaaaaac

SEQ ID NO: 2040615 - DNA, 15 bp, Homo sapiens
ttgaaatgaaaaaca

SEQ ID NO: 2040616 - DNA, 15 bp, Homo sapiens
tgaaatgaaaaacag

SEQ ID NO: 2040617 - DNA, 15 bp, Homo sapiens
gaaatgaaaaacaga

SEQ ID NO: 2040618 - DNA, 15 bp, Homo sapiens
aaatgaaaaacagaa

SEQ ID NO: 2040619 - DNA, 15 bp, Homo sapiens
aatgaaaaacagaaa

SEQ ID NO: 2040620 - DNA, 15 bp, Homo sapiens
atgaaaaacagaaaa

SEQ ID NO: 2040621 - DNA, 15 bp, Homo sapiens
tgaaaaacagaaaaa

SEQ ID NO: 2040622 - DNA, 15 bp, Homo sapiens
gaaaaacagaaaaac

SEQ ID NO: 2040623 - DNA, 15 bp, Homo sapiens
aaaaacagaaaaaca

SEQ ID NO: 2040624 - DNA, 15 bp, Homo sapiens
aaaacagaaaaacaa

SEQ ID NO: 2040625 - DNA, 15 bp, Homo sapiens
aaacagaaaaacaat

SEQ ID NO: 2040626 - DNA, 15 bp, Homo sapiens
aacagaaaaacaata

SEQ ID NO: 2040627 - DNA, 15 bp, Homo sapiens
acagaaaaacaatat

SEQ ID NO: 2040628 - DNA, 15 bp, Homo sapiens
cagaaaaacaatata

SEQ ID NO: 2040629 - DNA, 15 bp, Homo sapiens
agaaaaacaatatag

SEQ ID NO: 2040630 - DNA, 15 bp, Homo sapiens
gaaaaacaatataga

SEQ ID NO: 2040631 - DNA, 15 bp, Homo sapiens
aaaaacaatatagaa

SEQ ID NO: 2040632 - DNA, 15 bp, Homo sapiens
aaaacaatatagaaa

SEQ ID NO: 2040633 - DNA, 15 bp, Homo sapiens
aaacaatatagaaaa

SEQ ID NO: 2040634 - DNA, 15 bp, Homo sapiens
aacaatatagaaaat

SEQ ID NO: 2040635 - DNA, 15 bp, Homo sapiens
acaatatagaaaatc

SEQ ID NO: 2040636 - DNA, 15 bp, Homo sapiens
caatatagaaaatca

SEQ ID NO: 2040637 - DNA, 15 bp, Homo sapiens
aatatagaaaatcaa

SEQ ID NO: 2040638 - DNA, 15 bp, Homo sapiens
atatagaaaatcaag

SEQ ID NO: 2040639 - DNA, 15 bp, Homo sapiens
tatagaaaatcaagc

SEQ ID NO: 2040640 - DNA, 15 bp, Homo sapiens
atagaaaatcaagct

SEQ ID NO: 2040641 - DNA, 15 bp, Homo sapiens
tagaaaatcaagctg

SEQ ID NO: 2040642 - DNA, 15 bp, Homo sapiens
agaaaatcaagctgg

SEQ ID NO: 2040643 - DNA, 15 bp, Homo sapiens
gaaaatcaagctggg

SEQ ID NO: 2040644 - DNA, 15 bp, Homo sapiens
aaaatcaagctgggc

SEQ ID NO: 2040645 - DNA, 15 bp, Homo sapiens
aaatcaagctgggca

SEQ ID NO: 2040646 - DNA, 15 bp, Homo sapiens
aatcaagctgggcac

SEQ ID NO: 2040647 - DNA, 15 bp, Homo sapiens
atcaagctgggcaca

SEQ ID NO: 2040648 - DNA, 15 bp, Homo sapiens
tcaagctgggcacag

SEQ ID NO: 2040649 - DNA, 15 bp, Homo sapiens
caagctgggcacagt

SEQ ID NO: 2040650 - DNA, 15 bp, Homo sapiens
aagctgggcacagta

SEQ ID NO: 2040651 - DNA, 15 bp, Homo sapiens
agctgggcacagtaa

SEQ ID NO: 2040652 - DNA, 15 bp, Homo sapiens
gctgggcacagtaat

SEQ ID NO: 2040653 - DNA, 15 bp, Homo sapiens
ctgggcacagtaatt

SEQ ID NO: 2040654 - DNA, 15 bp, Homo sapiens
tgggcacagtaattc

SEQ ID NO: 2040655 - DNA, 15 bp, Homo sapiens
gggcacagtaattca

SEQ ID NO: 2040656 - DNA, 15 bp, Homo sapiens
ggcacagtaattcac

SEQ ID NO: 2040657 - DNA, 15 bp, Homo sapiens
gcacagtaattcaca

SEQ ID NO: 2040658 - DNA, 15 bp, Homo sapiens
cacagtaattcacac

SEQ ID NO: 2040659 - DNA, 15 bp, Homo sapiens
acagtaattcacacg

SEQ ID NO: 2040660 - DNA, 15 bp, Homo sapiens
cagtaattcacacgt

SEQ ID NO: 2040661 - DNA, 15 bp, Homo sapiens
agtaattcacacgtg

SEQ ID NO: 2040662 - DNA, 15 bp, Homo sapiens
gtaattcacacgtgt

SEQ ID NO: 2040663 - DNA, 15 bp, Homo sapiens
taattcacacgtgta

SEQ ID NO: 2040664 - DNA, 15 bp, Homo sapiens
aattcacacgtgtaa

SEQ ID NO: 2040665 - DNA, 15 bp, Homo sapiens
attcacacgtgtaat

SEQ ID NO: 2040666 - DNA, 15 bp, Homo sapiens
ttcacacgtgtaatc

SEQ ID NO: 2040667 - DNA, 15 bp, Homo sapiens
tcacacgtgtaatcc

SEQ ID NO: 2040668 - DNA, 15 bp, Homo sapiens
cacacgtgtaatccc

SEQ ID NO: 2040669 - DNA, 15 bp, Homo sapiens
acacgtgtaatccca

SEQ ID NO: 2040670 - DNA, 15 bp, Homo sapiens
cacgtgtaatcccag

SEQ ID NO: 2040671 - DNA, 15 bp, Homo sapiens
acgtgtaatcccagt

SEQ ID NO: 2040672 - DNA, 15 bp, Homo sapiens
cgtgtaatcccagtg

SEQ ID NO: 2040673 - DNA, 15 bp, Homo sapiens
gtgtaatcccagtgc

SEQ ID NO: 2040674 - DNA, 15 bp, Homo sapiens
tcccagtgctttagg

SEQ ID NO: 2040675 - DNA, 15 bp, Homo sapiens
cccagtgctttagga

SEQ ID NO: 2040676 - DNA, 15 bp, Homo sapiens
ccagtgctttaggag

SEQ ID NO: 2040677 - DNA, 15 bp, Homo sapiens
cagtgctttaggagg

SEQ ID NO: 2040678 - DNA, 15 bp, Homo sapiens
agtgctttaggaggc

SEQ ID NO: 2040679 - DNA, 15 bp, Homo sapiens
gtgctttaggaggct

SEQ ID NO: 2040680 - DNA, 15 bp, Homo sapiens
tgctttaggaggctg

SEQ ID NO: 2040681 - DNA, 15 bp, Homo sapiens
gctttaggaggctga

SEQ ID NO: 2040682 - DNA, 15 bp, Homo sapiens
gaggattgcttgagg

SEQ ID NO: 2040683 - DNA, 15 bp, Homo sapiens
aggattgcttgaggc

SEQ ID NO: 2040684 - DNA, 15 bp, Homo sapiens
ggattgcttgaggct

SEQ ID NO: 2040685 - DNA, 15 bp, Homo sapiens
gattgcttgaggcta

SEQ ID NO: 2040686 - DNA, 15 bp, Homo sapiens
attgcttgaggctag

SEQ ID NO: 2040687 - DNA, 15 bp, Homo sapiens
ttgcttgaggctaga

SEQ ID NO: 2040688 - DNA, 15 bp, Homo sapiens
tgcttgaggctagaa

SEQ ID NO: 2040689 - DNA, 15 bp, Homo sapiens
gcttgaggctagaag

SEQ ID NO: 2040690 - DNA, 15 bp, Homo sapiens
cttgaggctagaagt

SEQ ID NO: 2040691 - DNA, 15 bp, Homo sapiens
ttgaggctagaagtt

SEQ ID NO: 2040692 - DNA, 15 bp, Homo sapiens
tgaggctagaagttt

SEQ ID NO: 2040693 - DNA, 15 bp, Homo sapiens
gaggctagaagtttg

SEQ ID NO: 2040694 - DNA, 15 bp, Homo sapiens
aggctagaagtttga

SEQ ID NO: 2040695 - DNA, 15 bp, Homo sapiens
ggctagaagtttgaa

SEQ ID NO: 2040696 - DNA, 15 bp, Homo sapiens
gctagaagtttgaaa

SEQ ID NO: 2040697 - DNA, 15 bp, Homo sapiens
ctagaagtttgaaac

SEQ ID NO: 2040698 - DNA, 15 bp, Homo sapiens
tagaagtttgaaacc

SEQ ID NO: 2040699 - DNA, 15 bp, Homo sapiens
agaagtttgaaacca

SEQ ID NO: 2040700 - DNA, 15 bp, Homo sapiens
gaagtttgaaaccag

SEQ ID NO: 2040701 - DNA, 15 bp, Homo sapiens
aagtttgaaaccagc

SEQ ID NO: 2040702 - DNA, 15 bp, Homo sapiens
agtttgaaaccagcc

SEQ ID NO: 2040703 - DNA, 15 bp, Homo sapiens
gtttgaaaccagcct

SEQ ID NO: 2040704 - DNA, 15 bp, Homo sapiens
tttgaaaccagcctg

SEQ ID NO: 2040705 - DNA, 15 bp, Homo sapiens
ttgaaaccagcctga

SEQ ID NO: 2040706 - DNA, 15 bp, Homo sapiens
tgaaaccagcctgaa

SEQ ID NO: 2040707 - DNA, 15 bp, Homo sapiens
gaaaccagcctgaac

SEQ ID NO: 2040708 - DNA, 15 bp, Homo sapiens
aaaccagcctgaaca

SEQ ID NO: 2040709 - DNA, 15 bp, Homo sapiens
aaccagcctgaacaa

SEQ ID NO: 2040710 - DNA, 15 bp, Homo sapiens
accagcctgaacaac

SEQ ID NO: 2040711 - DNA, 15 bp, Homo sapiens
ccagcctgaacaaca

SEQ ID NO: 2040712 - DNA, 15 bp, Homo sapiens
cagcctgaacaacat

SEQ ID NO: 2040713 - DNA, 15 bp, Homo sapiens
agcctgaacaacata

SEQ ID NO: 2040714 - DNA, 15 bp, Homo sapiens
gcctgaacaacatag

SEQ ID NO: 2040715 - DNA, 15 bp, Homo sapiens
cctgaacaacatagt

SEQ ID NO: 2040716 - DNA, 15 bp, Homo sapiens
ctgaacaacatagtg

SEQ ID NO: 2040717 - DNA, 15 bp, Homo sapiens
tgaacaacatagtga

SEQ ID NO: 2040718 - DNA, 15 bp, Homo sapiens
gaacaacatagtgag

SEQ ID NO: 2040719 - DNA, 15 bp, Homo sapiens
aacaacatagtgaga

SEQ ID NO: 2040720 - DNA, 15 bp, Homo sapiens
acaacatagtgagac

SEQ ID NO: 2040721 - DNA, 15 bp, Homo sapiens
aaaaaaaaaaatttt

SEQ ID NO: 2040722 - DNA, 15 bp, Homo sapiens
aaaaaaaaaatttta

SEQ ID NO: 2040723 - DNA, 15 bp, Homo sapiens
aaaaaaaaattttaa

SEQ ID NO: 2040724 - DNA, 15 bp, Homo sapiens
aaaaaaaattttaaa

SEQ ID NO: 2040725 - DNA, 15 bp, Homo sapiens
aaaaaaattttaaac

SEQ ID NO: 2040726 - DNA, 15 bp, Homo sapiens
aaaaaattttaaact

SEQ ID NO: 2040727 - DNA, 15 bp, Homo sapiens
aaaaattttaaactg

SEQ ID NO: 2040728 - DNA, 15 bp, Homo sapiens
aaaattttaaactgg

SEQ ID NO: 2040729 - DNA, 15 bp, Homo sapiens
aaattttaaactgga

SEQ ID NO: 2040730 - DNA, 15 bp, Homo sapiens
aattttaaactggac

SEQ ID NO: 2040731 - DNA, 15 bp, Homo sapiens
attttaaactggact

SEQ ID NO: 2040732 - DNA, 15 bp, Homo sapiens
ttttaaactggactg

SEQ ID NO: 2040733 - DNA, 15 bp, Homo sapiens
tttaaactggactgt

SEQ ID NO: 2040734 - DNA, 15 bp, Homo sapiens
ttaaactggactgtg

SEQ ID NO: 2040735 - DNA, 15 bp, Homo sapiens
taaactggactgtgc

SEQ ID NO: 2040736 - DNA, 15 bp, Homo sapiens
aaactggactgtgca

SEQ ID NO: 2040737 - DNA, 15 bp, Homo sapiens
aactggactgtgcat

SEQ ID NO: 2040738 - DNA, 15 bp, Homo sapiens
actggactgtgcatg

SEQ ID NO: 2040739 - DNA, 15 bp, Homo sapiens
ctggactgtgcatgg

SEQ ID NO: 2040740 - DNA, 15 bp, Homo sapiens
tggactgtgcatggt

SEQ ID NO: 2040741 - DNA, 15 bp, Homo sapiens
ggactgtgcatggtt

SEQ ID NO: 2040742 - DNA, 15 bp, Homo sapiens
gactgtgcatggttg

SEQ ID NO: 2040743 - DNA, 15 bp, Homo sapiens
actgtgcatggttgt

SEQ ID NO: 2040744 - DNA, 15 bp, Homo sapiens
ctgtgcatggttgtg

SEQ ID NO: 2040745 - DNA, 15 bp, Homo sapiens
tgtgcatggttgtgt

SEQ ID NO: 2040746 - DNA, 15 bp, Homo sapiens
gtgcatggttgtgtg

SEQ ID NO: 2040747 - DNA, 15 bp, Homo sapiens
tgcatggttgtgtgc

SEQ ID NO: 2040748 - DNA, 15 bp, Homo sapiens
gcatggttgtgtgca

SEQ ID NO: 2040749 - DNA, 15 bp, Homo sapiens
catggttgtgtgcac

SEQ ID NO: 2040750 - DNA, 15 bp, Homo sapiens
atggttgtgtgcacc

SEQ ID NO: 2040751 - DNA, 15 bp, Homo sapiens
tggttgtgtgcacct

SEQ ID NO: 2040752 - DNA, 15 bp, Homo sapiens
ggttgtgtgcacctg

SEQ ID NO: 2040753 - DNA, 15 bp, Homo sapiens
gttgtgtgcacctgt

SEQ ID NO: 2040754 - DNA, 15 bp, Homo sapiens
ttgtgtgcacctgta

SEQ ID NO: 2040755 - DNA, 15 bp, Homo sapiens
tgtgtgcacctgtag

SEQ ID NO: 2040756 - DNA, 15 bp, Homo sapiens
gtgtgcacctgtagt

SEQ ID NO: 2040757 - DNA, 15 bp, Homo sapiens
tgtgcacctgtagtc

SEQ ID NO: 2040758 - DNA, 15 bp, Homo sapiens
gtgcacctgtagtcc

SEQ ID NO: 2040759 - DNA, 15 bp, Homo sapiens
cctgtagtcccacca

SEQ ID NO: 2040760 - DNA, 15 bp, Homo sapiens
ctgtagtcccaccat

SEQ ID NO: 2040761 - DNA, 15 bp, Homo sapiens
tgtagtcccaccatt

SEQ ID NO: 2040762 - DNA, 15 bp, Homo sapiens
gtagtcccaccattc

SEQ ID NO: 2040763 - DNA, 15 bp, Homo sapiens
tagtcccaccattca

SEQ ID NO: 2040764 - DNA, 15 bp, Homo sapiens
agtcccaccattcag

SEQ ID NO: 2040765 - DNA, 15 bp, Homo sapiens
gtcccaccattcagg

SEQ ID NO: 2040766 - DNA, 15 bp, Homo sapiens
tcccaccattcagga

SEQ ID NO: 2040767 - DNA, 15 bp, Homo sapiens
cccaccattcaggag

SEQ ID NO: 2040768 - DNA, 15 bp, Homo sapiens
ccaccattcaggagg

SEQ ID NO: 2040769 - DNA, 15 bp, Homo sapiens
caccattcaggaggc

SEQ ID NO: 2040770 - DNA, 15 bp, Homo sapiens
accattcaggaggct

SEQ ID NO: 2040771 - DNA, 15 bp, Homo sapiens
ccattcaggaggctg

SEQ ID NO: 2040772 - DNA, 15 bp, Homo sapiens
cattcaggaggctgg

SEQ ID NO: 2040773 - DNA, 15 bp, Homo sapiens
attcaggaggctggg

SEQ ID NO: 2040774 - DNA, 15 bp, Homo sapiens
ttcaggaggctgggg

SEQ ID NO: 2040775 - DNA, 15 bp, Homo sapiens
tcaggaggctgggga

SEQ ID NO: 2040776 - DNA, 15 bp, Homo sapiens
caggaggctggggaa

SEQ ID NO: 2040777 - DNA, 15 bp, Homo sapiens
aggaggctggggaag

SEQ ID NO: 2040778 - DNA, 15 bp, Homo sapiens
ggaggctggggaagg

SEQ ID NO: 2040779 - DNA, 15 bp, Homo sapiens
gctggggaaggagga

SEQ ID NO: 2040780 - DNA, 15 bp, Homo sapiens
ctggggaaggaggat

SEQ ID NO: 2040781 - DNA, 15 bp, Homo sapiens
tggggaaggaggatc

SEQ ID NO: 2040782 - DNA, 15 bp, Homo sapiens
ggggaaggaggatct

SEQ ID NO: 2040783 - DNA, 15 bp, Homo sapiens
gggaaggaggatctc

SEQ ID NO: 2040784 - DNA, 15 bp, Homo sapiens
ggaaggaggatctct

SEQ ID NO: 2040785 - DNA, 15 bp, Homo sapiens
gaaggaggatctctt

SEQ ID NO: 2040786 - DNA, 15 bp, Homo sapiens
aaggaggatctcttg

SEQ ID NO: 2040787 - DNA, 15 bp, Homo sapiens
aggaggatctcttga

SEQ ID NO: 2040788 - DNA, 15 bp, Homo sapiens
cttgagcccagtagt

SEQ ID NO: 2040789 - DNA, 15 bp, Homo sapiens
ttgagcccagtagtt

SEQ ID NO: 2040790 - DNA, 15 bp, Homo sapiens
tgagcccagtagttc

SEQ ID NO: 2040791 - DNA, 15 bp, Homo sapiens
gagcccagtagttca

SEQ ID NO: 2040792 - DNA, 15 bp, Homo sapiens
agcccagtagttcaa

SEQ ID NO: 2040793 - DNA, 15 bp, Homo sapiens
gcccagtagttcaag

SEQ ID NO: 2040794 - DNA, 15 bp, Homo sapiens
cccagtagttcaagg

SEQ ID NO: 2040795 - DNA, 15 bp, Homo sapiens
ccagtagttcaaggc

SEQ ID NO: 2040796 - DNA, 15 bp, Homo sapiens
cagtagttcaaggct

SEQ ID NO: 2040797 - DNA, 15 bp, Homo sapiens
agtagttcaaggctg

SEQ ID NO: 2040798 - DNA, 15 bp, Homo sapiens
gtagttcaaggctgc

SEQ ID NO: 2040799 - DNA, 15 bp, Homo sapiens
tagttcaaggctgca

SEQ ID NO: 2040800 - DNA, 15 bp, Homo sapiens
gttcaaggctgcagg

SEQ ID NO: 2040801 - DNA, 15 bp, Homo sapiens
ttcaaggctgcaggg

SEQ ID NO: 2040802 - DNA, 15 bp, Homo sapiens
tcaaggctgcaggga

SEQ ID NO: 2040803 - DNA, 15 bp, Homo sapiens
caaggctgcagggac

SEQ ID NO: 2040804 - DNA, 15 bp, Homo sapiens
aaggctgcagggact

SEQ ID NO: 2040805 - DNA, 15 bp, Homo sapiens
aggctgcagggactt

SEQ ID NO: 2040806 - DNA, 15 bp, Homo sapiens
ggctgcagggactta

SEQ ID NO: 2040807 - DNA, 15 bp, Homo sapiens
gctgcagggacttat

SEQ ID NO: 2040808 - DNA, 15 bp, Homo sapiens
ctgcagggacttatg

SEQ ID NO: 2040809 - DNA, 15 bp, Homo sapiens
tgcagggacttatga

SEQ ID NO: 2040810 - DNA, 15 bp, Homo sapiens
gcagggacttatgat

SEQ ID NO: 2040811 - DNA, 15 bp, Homo sapiens
cagggacttatgatc

SEQ ID NO: 2040812 - DNA, 15 bp, Homo sapiens
agggacttatgatct

SEQ ID NO: 2040813 - DNA, 15 bp, Homo sapiens
gggacttatgatctg

SEQ ID NO: 2040814 - DNA, 15 bp, Homo sapiens
ggacttatgatctgg

SEQ ID NO: 2040815 - DNA, 15 bp, Homo sapiens
gacttatgatctggt

SEQ ID NO: 2040816 - DNA, 15 bp, Homo sapiens
acttatgatctggtc

SEQ ID NO: 2040817 - DNA, 15 bp, Homo sapiens
cttatgatctggtca

SEQ ID NO: 2040818 - DNA, 15 bp, Homo sapiens
ttatgatctggtcac

SEQ ID NO: 2040819 - DNA, 15 bp, Homo sapiens
tatgatctggtcact

SEQ ID NO: 2040820 - DNA, 15 bp, Homo sapiens
atgatctggtcactg

SEQ ID NO: 2040821 - DNA, 15 bp, Homo sapiens
tgatctggtcactgt

SEQ ID NO: 2040822 - DNA, 15 bp, Homo sapiens
gatctggtcactgta

SEQ ID NO: 2040823 - DNA, 15 bp, Homo sapiens
atctggtcactgtac

SEQ ID NO: 2040824 - DNA, 15 bp, Homo sapiens
tctggtcactgtact

SEQ ID NO: 2040825 - DNA, 15 bp, Homo sapiens
ctggtcactgtactc

SEQ ID NO: 2040826 - DNA, 15 bp, Homo sapiens
tggtcactgtactcc

SEQ ID NO: 2040827 - DNA, 15 bp, Homo sapiens
ggtcactgtactcca

SEQ ID NO: 2040828 - DNA, 15 bp, Homo sapiens
gtcactgtactccag

SEQ ID NO: 2040829 - DNA, 15 bp, Homo sapiens
tcactgtactccagt

SEQ ID NO: 2040830 - DNA, 15 bp, Homo sapiens
cagtctgggtgacaa

SEQ ID NO: 2040831 - DNA, 15 bp, Homo sapiens
agtctgggtgacaaa

SEQ ID NO: 2040832 - DNA, 15 bp, Homo sapiens
gtctgggtgacaaag

SEQ ID NO: 2040833 - DNA, 15 bp, Homo sapiens
tctgggtgacaaagc

SEQ ID NO: 2040834 - DNA, 15 bp, Homo sapiens
ctgggtgacaaagca

SEQ ID NO: 2040835 - DNA, 15 bp, Homo sapiens
tgggtgacaaagcaa

SEQ ID NO: 2040836 - DNA, 15 bp, Homo sapiens
gggtgacaaagcaag

SEQ ID NO: 2040837 - DNA, 15 bp, Homo sapiens
ggtgacaaagcaaga

SEQ ID NO: 2040838 - DNA, 15 bp, Homo sapiens
gtgacaaagcaagac

SEQ ID NO: 2040839 - DNA, 15 bp, Homo sapiens
tgacaaagcaagact

SEQ ID NO: 2040840 - DNA, 15 bp, Homo sapiens
gacaaagcaagactg

SEQ ID NO: 2040841 - DNA, 15 bp, Homo sapiens
acaaagcaagactgc

SEQ ID NO: 2040842 - DNA, 15 bp, Homo sapiens
caaagcaagactgca

SEQ ID NO: 2040843 - DNA, 15 bp, Homo sapiens
aaagcaagactgcat

SEQ ID NO: 2040844 - DNA, 15 bp, Homo sapiens
aagcaagactgcatc

SEQ ID NO: 2040845 - DNA, 15 bp, Homo sapiens
agcaagactgcatct

SEQ ID NO: 2040846 - DNA, 15 bp, Homo sapiens
gcaagactgcatctc

SEQ ID NO: 2040847 - DNA, 15 bp, Homo sapiens
caagactgcatctca

SEQ ID NO: 2040848 - DNA, 15 bp, Homo sapiens
aagactgcatctcaa

SEQ ID NO: 2040849 - DNA, 15 bp, Homo sapiens
agactgcatctcaaa

SEQ ID NO: 2040850 - DNA, 15 bp, Homo sapiens
gactgcatctcaaaa

SEQ ID NO: 2040851 - DNA, 15 bp, Homo sapiens
actgcatctcaaaaa

SEQ ID NO: 2040852 - DNA, 15 bp, Homo sapiens
ctgcatctcaaaaaa

SEQ ID NO: 2040853 - DNA, 15 bp, Homo sapiens
tgcatctcaaaaaac

SEQ ID NO: 2040854 - DNA, 15 bp, Homo sapiens
gcatctcaaaaaaca

SEQ ID NO: 2040855 - DNA, 15 bp, Homo sapiens
catctcaaaaaacaa

SEQ ID NO: 2040856 - DNA, 15 bp, Homo sapiens
atctcaaaaaacaaa

SEQ ID NO: 2040857 - DNA, 15 bp, Homo sapiens
ctcaaaaaacaaaac

SEQ ID NO: 2040858 - DNA, 15 bp, Homo sapiens
tcaaaaaacaaaaca

SEQ ID NO: 2040859 - DNA, 15 bp, Homo sapiens
caaaaaacaaaacaa

SEQ ID NO: 2040860 - DNA, 15 bp, Homo sapiens
aaaaaacaaaacaaa

SEQ ID NO: 2040861 - DNA, 15 bp, Homo sapiens
aacaaaacaaaaaaa

SEQ ID NO: 2040862 - DNA, 15 bp, Homo sapiens
acaaaacaaaaaaac

SEQ ID NO: 2040863 - DNA, 15 bp, Homo sapiens
aaaacaaaaaaacac

SEQ ID NO: 2040864 - DNA, 15 bp, Homo sapiens
aaacaaaaaaacaca

SEQ ID NO: 2040865 - DNA, 15 bp, Homo sapiens
aacaaaaaaacacac

SEQ ID NO: 2040866 - DNA, 15 bp, Homo sapiens
acaaaaaaacacaca

SEQ ID NO: 2040867 - DNA, 15 bp, Homo sapiens
caaaaaaacacacaa

SEQ ID NO: 2040868 - DNA, 15 bp, Homo sapiens
aaaaaaacacacaac

SEQ ID NO: 2040869 - DNA, 15 bp, Homo sapiens
aaaaaacacacaaca

SEQ ID NO: 2040870 - DNA, 15 bp, Homo sapiens
aaaaacacacaacaa

SEQ ID NO: 2040871 - DNA, 15 bp, Homo sapiens
aaaacacacaacaac

SEQ ID NO: 2040872 - DNA, 15 bp, Homo sapiens
aaacacacaacaact

SEQ ID NO: 2040873 - DNA, 15 bp, Homo sapiens
aacacacaacaactc

SEQ ID NO: 2040874 - DNA, 15 bp, Homo sapiens
acacacaacaactcc

SEQ ID NO: 2040875 - DNA, 15 bp, Homo sapiens
cacacaacaactccc

SEQ ID NO: 2040876 - DNA, 15 bp, Homo sapiens
acacaacaactccct

SEQ ID NO: 2040877 - DNA, 15 bp, Homo sapiens
cacaacaactccctc

SEQ ID NO: 2040878 - DNA, 15 bp, Homo sapiens
acaacaactccctct

SEQ ID NO: 2040879 - DNA, 15 bp, Homo sapiens
caacaactccctctc

SEQ ID NO: 2040880 - DNA, 15 bp, Homo sapiens
aacaactccctctca

SEQ ID NO: 2040881 - DNA, 15 bp, Homo sapiens
acaactccctctcac

SEQ ID NO: 2040882 - DNA, 15 bp, Homo sapiens
caactccctctcact

SEQ ID NO: 2040883 - DNA, 15 bp, Homo sapiens
aactccctctcactc

SEQ ID NO: 2040884 - DNA, 15 bp, Homo sapiens
actccctctcactct

SEQ ID NO: 2040885 - DNA, 15 bp, Homo sapiens
ctccctctcactctc

SEQ ID NO: 2040886 - DNA, 15 bp, Homo sapiens
tccctctcactctct

SEQ ID NO: 2040887 - DNA, 15 bp, Homo sapiens
ccctctcactctctc

SEQ ID NO: 2040888 - DNA, 15 bp, Homo sapiens
cctctcactctctct

SEQ ID NO: 2040889 - DNA, 15 bp, Homo sapiens
ctctcactctctctc

SEQ ID NO: 2040890 - DNA, 15 bp, Homo sapiens
tctcactctctctct

SEQ ID NO: 2040891 - DNA, 15 bp, Homo sapiens
ctcactctctctctc

SEQ ID NO: 2040892 - DNA, 15 bp, Homo sapiens
tcactctctctctca

SEQ ID NO: 2040893 - DNA, 15 bp, Homo sapiens
cactctctctctcag

SEQ ID NO: 2040894 - DNA, 15 bp, Homo sapiens
actctctctctcagt

SEQ ID NO: 2040895 - DNA, 15 bp, Homo sapiens
ctctctctctcagtt

SEQ ID NO: 2040896 - DNA, 15 bp, Homo sapiens
tctctctctcagtta

SEQ ID NO: 2040897 - DNA, 15 bp, Homo sapiens
ctctctctcagttat

SEQ ID NO: 2040898 - DNA, 15 bp, Homo sapiens
tctctctcagttata

SEQ ID NO: 2040899 - DNA, 15 bp, Homo sapiens
ctctctcagttatac

SEQ ID NO: 2040900 - DNA, 15 bp, Homo sapiens
tctctcagttatact

SEQ ID NO: 2040901 - DNA, 15 bp, Homo sapiens
ctctcagttatactt

SEQ ID NO: 2040902 - DNA, 15 bp, Homo sapiens
tctcagttatacttt

SEQ ID NO: 2040903 - DNA, 15 bp, Homo sapiens
ctcagttatacttta

SEQ ID NO: 2040904 - DNA, 15 bp, Homo sapiens
tcagttatactttaa

SEQ ID NO: 2040905 - DNA, 15 bp, Homo sapiens
cagttatactttaat

SEQ ID NO: 2040906 - DNA, 15 bp, Homo sapiens
agttatactttaata

SEQ ID NO: 2040907 - DNA, 15 bp, Homo sapiens
gttatactttaataa

SEQ ID NO: 2040908 - DNA, 15 bp, Homo sapiens
ttatactttaataaa

SEQ ID NO: 2040909 - DNA, 15 bp, Homo sapiens
tatactttaataaag

SEQ ID NO: 2040910 - DNA, 15 bp, Homo sapiens
atactttaataaagt

SEQ ID NO: 2040911 - DNA, 15 bp, Homo sapiens
tactttaataaagtt

SEQ ID NO: 2040912 - DNA, 15 bp, Homo sapiens
actttaataaagttg

SEQ ID NO: 2040913 - DNA, 15 bp, Homo sapiens
ctttaataaagttgt

SEQ ID NO: 2040914 - DNA, 15 bp, Homo sapiens
tttaataaagttgta

SEQ ID NO: 2040915 - DNA, 15 bp, Homo sapiens
ttaataaagttgtac

SEQ ID NO: 2040916 - DNA, 15 bp, Homo sapiens
taataaagttgtaca

SEQ ID NO: 2040917 - DNA, 15 bp, Homo sapiens
aataaagttgtacaa

SEQ ID NO: 2040918 - DNA, 15 bp, Homo sapiens
ataaagttgtacaaa

SEQ ID NO: 2040919 - DNA, 15 bp, Homo sapiens
taaagttgtacaaaa

SEQ ID NO: 2040920 - DNA, 15 bp, Homo sapiens
aaagttgtacaaaat

SEQ ID NO: 2040921 - DNA, 15 bp, Homo sapiens
aagttgtacaaaatg

SEQ ID NO: 2040922 - DNA, 15 bp, Homo sapiens
agttgtacaaaatga

SEQ ID NO: 2040923 - DNA, 15 bp, Homo sapiens
gttgtacaaaatgaa

SEQ ID NO: 2040924 - DNA, 15 bp, Homo sapiens
ttgtacaaaatgaaa

SEQ ID NO: 2040925 - DNA, 15 bp, Homo sapiens
tgtacaaaatgaaaa

SEQ ID NO: 2040926 - DNA, 15 bp, Homo sapiens
gtacaaaatgaaaaa

SEQ ID NO: 2040927 - DNA, 15 bp, Homo sapiens
tacaaaatgaaaaaa

SEQ ID NO: 2040928 - DNA, 15 bp, Homo sapiens
acaaaatgaaaaaag

SEQ ID NO: 2040929 - DNA, 15 bp, Homo sapiens
caaaatgaaaaaagt

SEQ ID NO: 2040930 - DNA, 15 bp, Homo sapiens
aaaatgaaaaaagtg

SEQ ID NO: 2040931 - DNA, 15 bp, Homo sapiens
aaatgaaaaaagtga

SEQ ID NO: 2040932 - DNA, 15 bp, Homo sapiens
aatgaaaaaagtgag

SEQ ID NO: 2040933 - DNA, 15 bp, Homo sapiens
atgaaaaaagtgaga

SEQ ID NO: 2040934 - DNA, 15 bp, Homo sapiens
tgaaaaaagtgagaa

SEQ ID NO: 2040935 - DNA, 15 bp, Homo sapiens
gaaaaaagtgagaag

SEQ ID NO: 2040936 - DNA, 15 bp, Homo sapiens
aaaaaagtgagaagt

SEQ ID NO: 2040937 - DNA, 15 bp, Homo sapiens
aaaaagtgagaagtt

SEQ ID NO: 2040938 - DNA, 15 bp, Homo sapiens
aaaagtgagaagttt

SEQ ID NO: 2040939 - DNA, 15 bp, Homo sapiens
aaagtgagaagttta

SEQ ID NO: 2040940 - DNA, 15 bp, Homo sapiens
aagtgagaagtttag

SEQ ID NO: 2040941 - DNA, 15 bp, Homo sapiens
agtgagaagtttaga

SEQ ID NO: 2040942 - DNA, 15 bp, Homo sapiens
gtgagaagtttagag

SEQ ID NO: 2040943 - DNA, 15 bp, Homo sapiens
tgagaagtttagagt

SEQ ID NO: 2040944 - DNA, 15 bp, Homo sapiens
gagaagtttagagta

SEQ ID NO: 2040945 - DNA, 15 bp, Homo sapiens
agaagtttagagtag

SEQ ID NO: 2040946 - DNA, 15 bp, Homo sapiens
gaagtttagagtagc

SEQ ID NO: 2040947 - DNA, 15 bp, Homo sapiens
aagtttagagtagct

SEQ ID NO: 2040948 - DNA, 15 bp, Homo sapiens
agtttagagtagcta

SEQ ID NO: 2040949 - DNA, 15 bp, Homo sapiens
gtttagagtagctaa

SEQ ID NO: 2040950 - DNA, 15 bp, Homo sapiens
tttagagtagctaaa

SEQ ID NO: 2040951 - DNA, 15 bp, Homo sapiens
ttagagtagctaaaa

SEQ ID NO: 2040952 - DNA, 15 bp, Homo sapiens
tagagtagctaaaaa

SEQ ID NO: 2040953 - DNA, 15 bp, Homo sapiens
agagtagctaaaaag

SEQ ID NO: 2040954 - DNA, 15 bp, Homo sapiens
gagtagctaaaaagt

SEQ ID NO: 2040955 - DNA, 15 bp, Homo sapiens
agtagctaaaaagta

SEQ ID NO: 2040956 - DNA, 15 bp, Homo sapiens
gtagctaaaaagtag

SEQ ID NO: 2040957 - DNA, 15 bp, Homo sapiens
tagctaaaaagtagg

SEQ ID NO: 2040958 - DNA, 15 bp, Homo sapiens
agctaaaaagtaggt

SEQ ID NO: 2040959 - DNA, 15 bp, Homo sapiens
gctaaaaagtaggtt

SEQ ID NO: 2040960 - DNA, 15 bp, Homo sapiens
ctaaaaagtaggtta

SEQ ID NO: 2040961 - DNA, 15 bp, Homo sapiens
taaaaagtaggttat

SEQ ID NO: 2040962 - DNA, 15 bp, Homo sapiens
aaaaagtaggttatg

SEQ ID NO: 2040963 - DNA, 15 bp, Homo sapiens
aaaagtaggttatga

SEQ ID NO: 2040964 - DNA, 15 bp, Homo sapiens
aaagtaggttatgag

SEQ ID NO: 2040965 - DNA, 15 bp, Homo sapiens
aagtaggttatgagg

SEQ ID NO: 2040966 - DNA, 15 bp, Homo sapiens
agtaggttatgaggg

SEQ ID NO: 2040967 - DNA, 15 bp, Homo sapiens
gtaggttatgagggg

SEQ ID NO: 2040968 - DNA, 15 bp, Homo sapiens
taggttatgaggggg

SEQ ID NO: 2040969 - DNA, 15 bp, Homo sapiens
aggttatgagggggt

SEQ ID NO: 2040970 - DNA, 15 bp, Homo sapiens
ggttatgagggggta

SEQ ID NO: 2040971 - DNA, 15 bp, Homo sapiens
gttatgagggggtag

SEQ ID NO: 2040972 - DNA, 15 bp, Homo sapiens
ttatgagggggtagg

SEQ ID NO: 2040973 - DNA, 15 bp, Homo sapiens
tatgagggggtaggc

SEQ ID NO: 2040974 - DNA, 15 bp, Homo sapiens
atgagggggtaggca

SEQ ID NO: 2040975 - DNA, 15 bp, Homo sapiens
tgagggggtaggcag

SEQ ID NO: 2040976 - DNA, 15 bp, Homo sapiens
gagggggtaggcagg

SEQ ID NO: 2040977 - DNA, 15 bp, Homo sapiens
agggggtaggcaggg

SEQ ID NO: 2040978 - DNA, 15 bp, Homo sapiens
gggggtaggcaggga

SEQ ID NO: 2040979 - DNA, 15 bp, Homo sapiens
ggggtaggcagggag

SEQ ID NO: 2040980 - DNA, 15 bp, Homo sapiens
gggtaggcagggagg

SEQ ID NO: 2040981 - DNA, 15 bp, Homo sapiens
ggtaggcagggaggc

SEQ ID NO: 2040982 - DNA, 15 bp, Homo sapiens
gtaggcagggaggca

SEQ ID NO: 2040983 - DNA, 15 bp, Homo sapiens
taggcagggaggcag

SEQ ID NO: 2040984 - DNA, 15 bp, Homo sapiens
aggcagggaggcagg

SEQ ID NO: 2040985 - DNA, 15 bp, Homo sapiens
ggcagggaggcagga

SEQ ID NO: 2040986 - DNA, 15 bp, Homo sapiens
gcagggaggcaggaa

SEQ ID NO: 2040987 - DNA, 15 bp, Homo sapiens
cagggaggcaggaag

SEQ ID NO: 2040988 - DNA, 15 bp, Homo sapiens
agggaggcaggaaga

SEQ ID NO: 2040989 - DNA, 15 bp, Homo sapiens
gggaggcaggaagaa

SEQ ID NO: 2040990 - DNA, 15 bp, Homo sapiens
ggaggcaggaagaaa

SEQ ID NO: 2040991 - DNA, 15 bp, Homo sapiens
gaggcaggaagaaat

SEQ ID NO: 2040992 - DNA, 15 bp, Homo sapiens
aggcaggaagaaatt

SEQ ID NO: 2040993 - DNA, 15 bp, Homo sapiens
ggcaggaagaaatta

SEQ ID NO: 2040994 - DNA, 15 bp, Homo sapiens
gcaggaagaaattag

SEQ ID NO: 2040995 - DNA, 15 bp, Homo sapiens
caggaagaaattagt

SEQ ID NO: 2040996 - DNA, 15 bp, Homo sapiens
aggaagaaattagtt

SEQ ID NO: 2040997 - DNA, 15 bp, Homo sapiens
ggaagaaattagttt

SEQ ID NO: 2040998 - DNA, 15 bp, Homo sapiens
gaagaaattagtttg

SEQ ID NO: 2040999 - DNA, 15 bp, Homo sapiens
aagaaattagtttgg

SEQ ID NO: 2041000 - DNA, 15 bp, Homo sapiens
agaaattagtttgga

SEQ ID NO: 2041001 - DNA, 15 bp, Homo sapiens
gaaattagtttggag

SEQ ID NO: 2041002 - DNA, 15 bp, Homo sapiens
aaattagtttggaga

SEQ ID NO: 2041003 - DNA, 15 bp, Homo sapiens
aattagtttggagag

SEQ ID NO: 2041004 - DNA, 15 bp, Homo sapiens
attagtttggagaga

SEQ ID NO: 2041005 - DNA, 15 bp, Homo sapiens
ttagtttggagagat

SEQ ID NO: 2041006 - DNA, 15 bp, Homo sapiens
tagtttggagagata

SEQ ID NO: 2041007 - DNA, 15 bp, Homo sapiens
agtttggagagatag

SEQ ID NO: 2041008 - DNA, 15 bp, Homo sapiens
gtttggagagatagg

SEQ ID NO: 2041009 - DNA, 15 bp, Homo sapiens
tttggagagataggt

SEQ ID NO: 2041010 - DNA, 15 bp, Homo sapiens
tggagagataggttg

SEQ ID NO: 2041011 - DNA, 15 bp, Homo sapiens
ggagagataggttgg

SEQ ID NO: 2041012 - DNA, 15 bp, Homo sapiens
gagagataggttgga

SEQ ID NO: 2041013 - DNA, 15 bp, Homo sapiens
agagataggttggac

SEQ ID NO: 2041014 - DNA, 15 bp, Homo sapiens
gagataggttggact

SEQ ID NO: 2041015 - DNA, 15 bp, Homo sapiens
agataggttggacta

SEQ ID NO: 2041016 - DNA, 15 bp, Homo sapiens
gataggttggactat

SEQ ID NO: 2041017 - DNA, 15 bp, Homo sapiens
ataggttggactatg

SEQ ID NO: 2041018 - DNA, 15 bp, Homo sapiens
taggttggactatgt

SEQ ID NO: 2041019 - DNA, 15 bp, Homo sapiens
aggttggactatgtc

SEQ ID NO: 2041020 - DNA, 15 bp, Homo sapiens
ggttggactatgtcc

SEQ ID NO: 2041021 - DNA, 15 bp, Homo sapiens
gttggactatgtcct

SEQ ID NO: 2041022 - DNA, 15 bp, Homo sapiens
ttggactatgtcctg

SEQ ID NO: 2041023 - DNA, 15 bp, Homo sapiens
tggactatgtcctgt

SEQ ID NO: 2041024 - DNA, 15 bp, Homo sapiens
ggactatgtcctgtg

SEQ ID NO: 2041025 - DNA, 15 bp, Homo sapiens
gactatgtcctgtgg

SEQ ID NO: 2041026 - DNA, 15 bp, Homo sapiens
actatgtcctgtgga

SEQ ID NO: 2041027 - DNA, 15 bp, Homo sapiens
ctatgtcctgtggac

SEQ ID NO: 2041028 - DNA, 15 bp, Homo sapiens
tatgtcctgtggaca

SEQ ID NO: 2041029 - DNA, 15 bp, Homo sapiens
atgtcctgtggacag

SEQ ID NO: 2041030 - DNA, 15 bp, Homo sapiens
tgtcctgtggacagg

SEQ ID NO: 2041031 - DNA, 15 bp, Homo sapiens
gtcctgtggacagga

SEQ ID NO: 2041032 - DNA, 15 bp, Homo sapiens
tcctgtggacaggat

SEQ ID NO: 2041033 - DNA, 15 bp, Homo sapiens
cctgtggacaggatt

SEQ ID NO: 2041034 - DNA, 15 bp, Homo sapiens
ctgtggacaggattg

SEQ ID NO: 2041035 - DNA, 15 bp, Homo sapiens
tgtggacaggattgt

SEQ ID NO: 2041036 - DNA, 15 bp, Homo sapiens
gtggacaggattgtg

SEQ ID NO: 2041037 - DNA, 15 bp, Homo sapiens
tggacaggattgtgg

SEQ ID NO: 2041038 - DNA, 15 bp, Homo sapiens
ggacaggattgtgga

SEQ ID NO: 2041039 - DNA, 15 bp, Homo sapiens
gacaggattgtggac

SEQ ID NO: 2041040 - DNA, 15 bp, Homo sapiens
acaggattgtggact

SEQ ID NO: 2041041 - DNA, 15 bp, Homo sapiens
caggattgtggacta

SEQ ID NO: 2041042 - DNA, 15 bp, Homo sapiens
aggattgtggactag

SEQ ID NO: 2041043 - DNA, 15 bp, Homo sapiens
ggattgtggactaga

SEQ ID NO: 2041044 - DNA, 15 bp, Homo sapiens
gattgtggactagac

SEQ ID NO: 2041045 - DNA, 15 bp, Homo sapiens
attgtggactagact

SEQ ID NO: 2041046 - DNA, 15 bp, Homo sapiens
ttgtggactagactg

SEQ ID NO: 2041047 - DNA, 15 bp, Homo sapiens
tgtggactagactgg

SEQ ID NO: 2041048 - DNA, 15 bp, Homo sapiens
gtggactagactggg

SEQ ID NO: 2041049 - DNA, 15 bp, Homo sapiens
tggactagactggga

SEQ ID NO: 2041050 - DNA, 15 bp, Homo sapiens
ggactagactgggag

SEQ ID NO: 2041051 - DNA, 15 bp, Homo sapiens
gactagactgggaga

SEQ ID NO: 2041052 - DNA, 15 bp, Homo sapiens
actagactgggagag

SEQ ID NO: 2041053 - DNA, 15 bp, Homo sapiens
ctagactgggagagc

SEQ ID NO: 2041054 - DNA, 15 bp, Homo sapiens
tagactgggagagcc

SEQ ID NO: 2041055 - DNA, 15 bp, Homo sapiens
agactgggagagcct

SEQ ID NO: 2041056 - DNA, 15 bp, Homo sapiens
gactgggagagccta

SEQ ID NO: 2041057 - DNA, 15 bp, Homo sapiens
actgggagagcctag

SEQ ID NO: 2041058 - DNA, 15 bp, Homo sapiens
ctgggagagcctagg

SEQ ID NO: 2041059 - DNA, 15 bp, Homo sapiens
tgggagagcctaggg

SEQ ID NO: 2041060 - DNA, 15 bp, Homo sapiens
gggagagcctagggt

SEQ ID NO: 2041061 - DNA, 15 bp, Homo sapiens
ggagagcctagggta

SEQ ID NO: 2041062 - DNA, 15 bp, Homo sapiens
gagagcctagggtag

SEQ ID NO: 2041063 - DNA, 15 bp, Homo sapiens
agagcctagggtagg

SEQ ID NO: 2041064 - DNA, 15 bp, Homo sapiens
gagcctagggtagga

SEQ ID NO: 2041065 - DNA, 15 bp, Homo sapiens
agcctagggtaggaa

SEQ ID NO: 2041066 - DNA, 15 bp, Homo sapiens
gcctagggtaggaat

SEQ ID NO: 2041067 - DNA, 15 bp, Homo sapiens
tagggtaggaataag

SEQ ID NO: 2041068 - DNA, 15 bp, Homo sapiens
agggtaggaataaga

SEQ ID NO: 2041069 - DNA, 15 bp, Homo sapiens
gggtaggaataagaa

SEQ ID NO: 2041070 - DNA, 15 bp, Homo sapiens
ggtaggaataagaac

SEQ ID NO: 2041071 - DNA, 15 bp, Homo sapiens
gtaggaataagaact

SEQ ID NO: 2041072 - DNA, 15 bp, Homo sapiens
taggaataagaacta

SEQ ID NO: 2041073 - DNA, 15 bp, Homo sapiens
aggaataagaactag

SEQ ID NO: 2041074 - DNA, 15 bp, Homo sapiens
ggaataagaactaga

SEQ ID NO: 2041075 - DNA, 15 bp, Homo sapiens
gaataagaactagac

SEQ ID NO: 2041076 - DNA, 15 bp, Homo sapiens
aataagaactagaca

SEQ ID NO: 2041077 - DNA, 15 bp, Homo sapiens
ataagaactagacaa

SEQ ID NO: 2041078 - DNA, 15 bp, Homo sapiens
taagaactagacaat

SEQ ID NO: 2041079 - DNA, 15 bp, Homo sapiens
aagaactagacaatt

SEQ ID NO: 2041080 - DNA, 15 bp, Homo sapiens
agaactagacaatta

SEQ ID NO: 2041081 - DNA, 15 bp, Homo sapiens
gaactagacaattag

SEQ ID NO: 2041082 - DNA, 15 bp, Homo sapiens
aactagacaattagg

SEQ ID NO: 2041083 - DNA, 15 bp, Homo sapiens
actagacaattaggt

SEQ ID NO: 2041084 - DNA, 15 bp, Homo sapiens
ctagacaattaggta

SEQ ID NO: 2041085 - DNA, 15 bp, Homo sapiens
tagacaattaggtat

SEQ ID NO: 2041086 - DNA, 15 bp, Homo sapiens
agacaattaggtatt

SEQ ID NO: 2041087 - DNA, 15 bp, Homo sapiens
gacaattaggtatta

SEQ ID NO: 2041088 - DNA, 15 bp, Homo sapiens
acaattaggtattag

SEQ ID NO: 2041089 - DNA, 15 bp, Homo sapiens
caattaggtattaga

SEQ ID NO: 2041090 - DNA, 15 bp, Homo sapiens
aattaggtattagat

SEQ ID NO: 2041091 - DNA, 15 bp, Homo sapiens
attaggtattagatg

SEQ ID NO: 2041092 - DNA, 15 bp, Homo sapiens
ttaggtattagatga

SEQ ID NO: 2041093 - DNA, 15 bp, Homo sapiens
taggtattagatgat

SEQ ID NO: 2041094 - DNA, 15 bp, Homo sapiens
aggtattagatgatg

SEQ ID NO: 2041095 - DNA, 15 bp, Homo sapiens
ggtattagatgatgg

SEQ ID NO: 2041096 - DNA, 15 bp, Homo sapiens
gtattagatgatgga

SEQ ID NO: 2041097 - DNA, 15 bp, Homo sapiens
tattagatgatggat

SEQ ID NO: 2041098 - DNA, 15 bp, Homo sapiens
attagatgatggatg

SEQ ID NO: 2041099 - DNA, 15 bp, Homo sapiens
ttagatgatggatgg

SEQ ID NO: 2041100 - DNA, 15 bp, Homo sapiens
tagatgatggatggc

SEQ ID NO: 2041101 - DNA, 15 bp, Homo sapiens
agatgatggatggcc

SEQ ID NO: 2041102 - DNA, 15 bp, Homo sapiens
gatgatggatggcct

SEQ ID NO: 2041103 - DNA, 15 bp, Homo sapiens
atgatggatggcctc

SEQ ID NO: 2041104 - DNA, 15 bp, Homo sapiens
tgatggatggcctcg

SEQ ID NO: 2041105 - DNA, 15 bp, Homo sapiens
gatggatggcctcgg

SEQ ID NO: 2041106 - DNA, 15 bp, Homo sapiens
atggatggcctcggt

SEQ ID NO: 2041107 - DNA, 15 bp, Homo sapiens
tggatggcctcggtt

SEQ ID NO: 2041108 - DNA, 15 bp, Homo sapiens
ggatggcctcggttg

SEQ ID NO: 2041109 - DNA, 15 bp, Homo sapiens
gatggcctcggttga

SEQ ID NO: 2041110 - DNA, 15 bp, Homo sapiens
atggcctcggttgag

SEQ ID NO: 2041111 - DNA, 15 bp, Homo sapiens
tggcctcggttgagg

SEQ ID NO: 2041112 - DNA, 15 bp, Homo sapiens
ggcctcggttgaggc

SEQ ID NO: 2041113 - DNA, 15 bp, Homo sapiens
gcctcggttgaggca

SEQ ID NO: 2041114 - DNA, 15 bp, Homo sapiens
cctcggttgaggcag

SEQ ID NO: 2041115 - DNA, 15 bp, Homo sapiens
ctcggttgaggcagt

SEQ ID NO: 2041116 - DNA, 15 bp, Homo sapiens
tcggttgaggcagtg

SEQ ID NO: 2041117 - DNA, 15 bp, Homo sapiens
cggttgaggcagtga

SEQ ID NO: 2041118 - DNA, 15 bp, Homo sapiens
ggttgaggcagtgaa

SEQ ID NO: 2041119 - DNA, 15 bp, Homo sapiens
gttgaggcagtgaat

SEQ ID NO: 2041120 - DNA, 15 bp, Homo sapiens
ttgaggcagtgaatg

SEQ ID NO: 2041121 - DNA, 15 bp, Homo sapiens
tgaggcagtgaatgg

SEQ ID NO: 2041122 - DNA, 15 bp, Homo sapiens
gaggcagtgaatgga

SEQ ID NO: 2041123 - DNA, 15 bp, Homo sapiens
aggcagtgaatggag

SEQ ID NO: 2041124 - DNA, 15 bp, Homo sapiens
ggcagtgaatggaga

SEQ ID NO: 2041125 - DNA, 15 bp, Homo sapiens
gcagtgaatggagag

SEQ ID NO: 2041126 - DNA, 15 bp, Homo sapiens
cagtgaatggagaga

SEQ ID NO: 2041127 - DNA, 15 bp, Homo sapiens
agtgaatggagagaa

SEQ ID NO: 2041128 - DNA, 15 bp, Homo sapiens
gtgaatggagagaac

SEQ ID NO: 2041129 - DNA, 15 bp, Homo sapiens
tgaatggagagaact

SEQ ID NO: 2041130 - DNA, 15 bp, Homo sapiens
gaatggagagaactg

SEQ ID NO: 2041131 - DNA, 15 bp, Homo sapiens
aatggagagaactgg

SEQ ID NO: 2041132 - DNA, 15 bp, Homo sapiens
atggagagaactggt

SEQ ID NO: 2041133 - DNA, 15 bp, Homo sapiens
tggagagaactggtg

SEQ ID NO: 2041134 - DNA, 15 bp, Homo sapiens
ggagagaactggtga

SEQ ID NO: 2041135 - DNA, 15 bp, Homo sapiens
gagagaactggtgag

SEQ ID NO: 2041136 - DNA, 15 bp, Homo sapiens
agagaactggtgagg

SEQ ID NO: 2041137 - DNA, 15 bp, Homo sapiens
gagaactggtgagga

SEQ ID NO: 2041138 - DNA, 15 bp, Homo sapiens
agaactggtgaggaa

SEQ ID NO: 2041139 - DNA, 15 bp, Homo sapiens
gaactggtgaggaag

SEQ ID NO: 2041140 - DNA, 15 bp, Homo sapiens
aactggtgaggaaga

SEQ ID NO: 2041141 - DNA, 15 bp, Homo sapiens
actggtgaggaagaa

SEQ ID NO: 2041142 - DNA, 15 bp, Homo sapiens
ctggtgaggaagaag

SEQ ID NO: 2041143 - DNA, 15 bp, Homo sapiens
tggtgaggaagaagt

SEQ ID NO: 2041144 - DNA, 15 bp, Homo sapiens
ggtgaggaagaagtg

SEQ ID NO: 2041145 - DNA, 15 bp, Homo sapiens
gtgaggaagaagtgg

SEQ ID NO: 2041146 - DNA, 15 bp, Homo sapiens
tgaggaagaagtggg

SEQ ID NO: 2041147 - DNA, 15 bp, Homo sapiens
gaggaagaagtgggg

SEQ ID NO: 2041148 - DNA, 15 bp, Homo sapiens
aggaagaagtggggc

SEQ ID NO: 2041149 - DNA, 15 bp, Homo sapiens
ggaagaagtggggct

SEQ ID NO: 2041150 - DNA, 15 bp, Homo sapiens
gaagaagtggggctg

SEQ ID NO: 2041151 - DNA, 15 bp, Homo sapiens
aagaagtggggctgg

SEQ ID NO: 2041152 - DNA, 15 bp, Homo sapiens
agaagtggggctgga

SEQ ID NO: 2041153 - DNA, 15 bp, Homo sapiens
gaagtggggctggat

SEQ ID NO: 2041154 - DNA, 15 bp, Homo sapiens
aagtggggctggatt

SEQ ID NO: 2041155 - DNA, 15 bp, Homo sapiens
agtggggctggattt

SEQ ID NO: 2041156 - DNA, 15 bp, Homo sapiens
gtggggctggatttg

SEQ ID NO: 2041157 - DNA, 15 bp, Homo sapiens
tggggctggatttgg

SEQ ID NO: 2041158 - DNA, 15 bp, Homo sapiens
ggggctggatttggg

SEQ ID NO: 2041159 - DNA, 15 bp, Homo sapiens
gggctggatttggga

SEQ ID NO: 2041160 - DNA, 15 bp, Homo sapiens
ggctggatttgggaa

SEQ ID NO: 2041161 - DNA, 15 bp, Homo sapiens
gctggatttgggaaa

SEQ ID NO: 2041162 - DNA, 15 bp, Homo sapiens
ctggatttgggaaac

SEQ ID NO: 2041163 - DNA, 15 bp, Homo sapiens
tggatttgggaaaca

SEQ ID NO: 2041164 - DNA, 15 bp, Homo sapiens
ggatttgggaaacat

SEQ ID NO: 2041165 - DNA, 15 bp, Homo sapiens
gatttgggaaacatc

SEQ ID NO: 2041166 - DNA, 15 bp, Homo sapiens
atttgggaaacatct

SEQ ID NO: 2041167 - DNA, 15 bp, Homo sapiens
tttgggaaacatcta

SEQ ID NO: 2041168 - DNA, 15 bp, Homo sapiens
ttgggaaacatctaa

SEQ ID NO: 2041169 - DNA, 15 bp, Homo sapiens
tgggaaacatctaag

SEQ ID NO: 2041170 - DNA, 15 bp, Homo sapiens
gggaaacatctaaga

SEQ ID NO: 2041171 - DNA, 15 bp, Homo sapiens
ggaaacatctaagat

SEQ ID NO: 2041172 - DNA, 15 bp, Homo sapiens
gaaacatctaagatg

SEQ ID NO: 2041173 - DNA, 15 bp, Homo sapiens
aaacatctaagatgt

SEQ ID NO: 2041174 - DNA, 15 bp, Homo sapiens
aacatctaagatgtg

SEQ ID NO: 2041175 - DNA, 15 bp, Homo sapiens
acatctaagatgtgg

SEQ ID NO: 2041176 - DNA, 15 bp, Homo sapiens
catctaagatgtgga

SEQ ID NO: 2041177 - DNA, 15 bp, Homo sapiens
atctaagatgtggaa

SEQ ID NO: 2041178 - DNA, 15 bp, Homo sapiens
tctaagatgtggaat

SEQ ID NO: 2041179 - DNA, 15 bp, Homo sapiens
ctaagatgtggaatg

SEQ ID NO: 2041180 - DNA, 15 bp, Homo sapiens
taagatgtggaatgg

SEQ ID NO: 2041181 - DNA, 15 bp, Homo sapiens
aagatgtggaatgga

SEQ ID NO: 2041182 - DNA, 15 bp, Homo sapiens
agatgtggaatggaa

SEQ ID NO: 2041183 - DNA, 15 bp, Homo sapiens
gatgtggaatggaaa

SEQ ID NO: 2041184 - DNA, 15 bp, Homo sapiens
atgtggaatggaaat

SEQ ID NO: 2041185 - DNA, 15 bp, Homo sapiens
tgtggaatggaaatg

SEQ ID NO: 2041186 - DNA, 15 bp, Homo sapiens
gtggaatggaaatga

SEQ ID NO: 2041187 - DNA, 15 bp, Homo sapiens
tggaatggaaatgac

SEQ ID NO: 2041188 - DNA, 15 bp, Homo sapiens
ggaatggaaatgact

SEQ ID NO: 2041189 - DNA, 15 bp, Homo sapiens
gaatggaaatgactt

SEQ ID NO: 2041190 - DNA, 15 bp, Homo sapiens
aatggaaatgacttt

SEQ ID NO: 2041191 - DNA, 15 bp, Homo sapiens
atggaaatgacttta

SEQ ID NO: 2041192 - DNA, 15 bp, Homo sapiens
tggaaatgactttat

SEQ ID NO: 2041193 - DNA, 15 bp, Homo sapiens
ggaaatgactttatg

SEQ ID NO: 2041194 - DNA, 15 bp, Homo sapiens
gaaatgactttatga

SEQ ID NO: 2041195 - DNA, 15 bp, Homo sapiens
aaatgactttatgac

SEQ ID NO: 2041196 - DNA, 15 bp, Homo sapiens
aatgactttatgacc

SEQ ID NO: 2041197 - DNA, 15 bp, Homo sapiens
atgactttatgacca

SEQ ID NO: 2041198 - DNA, 15 bp, Homo sapiens
tgactttatgaccag

SEQ ID NO: 2041199 - DNA, 15 bp, Homo sapiens
gactttatgaccagt

SEQ ID NO: 2041200 - DNA, 15 bp, Homo sapiens
actttatgaccagtt

SEQ ID NO: 2041201 - DNA, 15 bp, Homo sapiens
ctttatgaccagttg

SEQ ID NO: 2041202 - DNA, 15 bp, Homo sapiens
tttatgaccagttgg

SEQ ID NO: 2041203 - DNA, 15 bp, Homo sapiens
ttatgaccagttgga

SEQ ID NO: 2041204 - DNA, 15 bp, Homo sapiens
tatgaccagttggat

SEQ ID NO: 2041205 - DNA, 15 bp, Homo sapiens
atgaccagttggatg

SEQ ID NO: 2041206 - DNA, 15 bp, Homo sapiens
tgaccagttggatga

SEQ ID NO: 2041207 - DNA, 15 bp, Homo sapiens
gaccagttggatgag

SEQ ID NO: 2041208 - DNA, 15 bp, Homo sapiens
accagttggatgagg

SEQ ID NO: 2041209 - DNA, 15 bp, Homo sapiens
ccagttggatgaggg

SEQ ID NO: 2041210 - DNA, 15 bp, Homo sapiens
cagttggatgaggga

SEQ ID NO: 2041211 - DNA, 15 bp, Homo sapiens
agttggatgagggag

SEQ ID NO: 2041212 - DNA, 15 bp, Homo sapiens
gttggatgagggaga

SEQ ID NO: 2041213 - DNA, 15 bp, Homo sapiens
ttggatgagggagag

SEQ ID NO: 2041214 - DNA, 15 bp, Homo sapiens
tggatgagggagagg

SEQ ID NO: 2041215 - DNA, 15 bp, Homo sapiens
ggatgagggagagga

SEQ ID NO: 2041216 - DNA, 15 bp, Homo sapiens
gatgagggagaggaa

SEQ ID NO: 2041217 - DNA, 15 bp, Homo sapiens
atgagggagaggaaa

SEQ ID NO: 2041218 - DNA, 15 bp, Homo sapiens
tgagggagaggaaaa

SEQ ID NO: 2041219 - DNA, 15 bp, Homo sapiens
gagggagaggaaaag

SEQ ID NO: 2041220 - DNA, 15 bp, Homo sapiens
agggagaggaaaagg

SEQ ID NO: 2041221 - DNA, 15 bp, Homo sapiens
gggagaggaaaaggt

SEQ ID NO: 2041222 - DNA, 15 bp, Homo sapiens
ggagaggaaaaggtt

SEQ ID NO: 2041223 - DNA, 15 bp, Homo sapiens
gagaggaaaaggttg

SEQ ID NO: 2041224 - DNA, 15 bp, Homo sapiens
agaggaaaaggttga

SEQ ID NO: 2041225 - DNA, 15 bp, Homo sapiens
gaggaaaaggttgat

SEQ ID NO: 2041226 - DNA, 15 bp, Homo sapiens
aggaaaaggttgata

SEQ ID NO: 2041227 - DNA, 15 bp, Homo sapiens
ggaaaaggttgatat

SEQ ID NO: 2041228 - DNA, 15 bp, Homo sapiens
gaaaaggttgatatc

SEQ ID NO: 2041229 - DNA, 15 bp, Homo sapiens
aaaaggttgatatcg

SEQ ID NO: 2041230 - DNA, 15 bp, Homo sapiens
aaaggttgatatcga

SEQ ID NO: 2041231 - DNA, 15 bp, Homo sapiens
aaggttgatatcgag

SEQ ID NO: 2041232 - DNA, 15 bp, Homo sapiens
aggttgatatcgagg

SEQ ID NO: 2041233 - DNA, 15 bp, Homo sapiens
ggttgatatcgaggt

SEQ ID NO: 2041234 - DNA, 15 bp, Homo sapiens
gttgatatcgaggta

SEQ ID NO: 2041235 - DNA, 15 bp, Homo sapiens
ttgatatcgaggtat

SEQ ID NO: 2041236 - DNA, 15 bp, Homo sapiens
tgatatcgaggtatt

SEQ ID NO: 2041237 - DNA, 15 bp, Homo sapiens
gatatcgaggtattt

SEQ ID NO: 2041238 - DNA, 15 bp, Homo sapiens
atatcgaggtatttg

SEQ ID NO: 2041239 - DNA, 15 bp, Homo sapiens
tatcgaggtatttgg

SEQ ID NO: 2041240 - DNA, 15 bp, Homo sapiens
atcgaggtatttggc

SEQ ID NO: 2041241 - DNA, 15 bp, Homo sapiens
tcgaggtatttggct

SEQ ID NO: 2041242 - DNA, 15 bp, Homo sapiens
cgaggtatttggctt

SEQ ID NO: 2041243 - DNA, 15 bp, Homo sapiens
gaggtatttggcttc

SEQ ID NO: 2041244 - DNA, 15 bp, Homo sapiens
aggtatttggcttct

SEQ ID NO: 2041245 - DNA, 15 bp, Homo sapiens
ggtatttggcttctg

SEQ ID NO: 2041246 - DNA, 15 bp, Homo sapiens
gtatttggcttctga

SEQ ID NO: 2041247 - DNA, 15 bp, Homo sapiens
tatttggcttctgag

SEQ ID NO: 2041248 - DNA, 15 bp, Homo sapiens
atttggcttctgagc

SEQ ID NO: 2041249 - DNA, 15 bp, Homo sapiens
tttggcttctgagca

SEQ ID NO: 2041250 - DNA, 15 bp, Homo sapiens
ttggcttctgagcag

SEQ ID NO: 2041251 - DNA, 15 bp, Homo sapiens
tggcttctgagcagg

SEQ ID NO: 2041252 - DNA, 15 bp, Homo sapiens
ggcttctgagcaggc

SEQ ID NO: 2041253 - DNA, 15 bp, Homo sapiens
gcttctgagcaggca

SEQ ID NO: 2041254 - DNA, 15 bp, Homo sapiens
cttctgagcaggcat

SEQ ID NO: 2041255 - DNA, 15 bp, Homo sapiens
ttctgagcaggcatt

SEQ ID NO: 2041256 - DNA, 15 bp, Homo sapiens
tctgagcaggcattg

SEQ ID NO: 2041257 - DNA, 15 bp, Homo sapiens
ctgagcaggcattga

SEQ ID NO: 2041258 - DNA, 15 bp, Homo sapiens
tgagcaggcattgaa

SEQ ID NO: 2041259 - DNA, 15 bp, Homo sapiens
gagcaggcattgaat

SEQ ID NO: 2041260 - DNA, 15 bp, Homo sapiens
agcaggcattgaatt

SEQ ID NO: 2041261 - DNA, 15 bp, Homo sapiens
gcaggcattgaattg

SEQ ID NO: 2041262 - DNA, 15 bp, Homo sapiens
caggcattgaattgt

SEQ ID NO: 2041263 - DNA, 15 bp, Homo sapiens
aggcattgaattgtg

SEQ ID NO: 2041264 - DNA, 15 bp, Homo sapiens
ggcattgaattgtgt

SEQ ID NO: 2041265 - DNA, 15 bp, Homo sapiens
gcattgaattgtgtt

SEQ ID NO: 2041266 - DNA, 15 bp, Homo sapiens
cattgaattgtgttc

SEQ ID NO: 2041267 - DNA, 15 bp, Homo sapiens
attgaattgtgttcc

SEQ ID NO: 2041268 - DNA, 15 bp, Homo sapiens
ttgaattgtgttccc

SEQ ID NO: 2041269 - DNA, 15 bp, Homo sapiens
tgaattgtgttcccc

SEQ ID NO: 2041270 - DNA, 15 bp, Homo sapiens
gaattgtgttcccct

SEQ ID NO: 2041271 - DNA, 15 bp, Homo sapiens
aattgtgttccccta

SEQ ID NO: 2041272 - DNA, 15 bp, Homo sapiens
attgtgttcccctaa

SEQ ID NO: 2041273 - DNA, 15 bp, Homo sapiens
ttgtgttcccctaaa

SEQ ID NO: 2041274 - DNA, 15 bp, Homo sapiens
tgtgttcccctaaaa

SEQ ID NO: 2041275 - DNA, 15 bp, Homo sapiens
gtgttcccctaaaat

SEQ ID NO: 2041276 - DNA, 15 bp, Homo sapiens
tgttcccctaaaatt

SEQ ID NO: 2041277 - DNA, 15 bp, Homo sapiens
gttcccctaaaattc

SEQ ID NO: 2041278 - DNA, 15 bp, Homo sapiens
ttcccctaaaattca

SEQ ID NO: 2041279 - DNA, 15 bp, Homo sapiens
tcccctaaaattcag

SEQ ID NO: 2041280 - DNA, 15 bp, Homo sapiens
cccctaaaattcaga

SEQ ID NO: 2041281 - DNA, 15 bp, Homo sapiens
ccctaaaattcagat

SEQ ID NO: 2041282 - DNA, 15 bp, Homo sapiens
cctaaaattcagatg

SEQ ID NO: 2041283 - DNA, 15 bp, Homo sapiens
ctaaaattcagatgt

SEQ ID NO: 2041284 - DNA, 15 bp, Homo sapiens
taaaattcagatgtt

SEQ ID NO: 2041285 - DNA, 15 bp, Homo sapiens
aaaattcagatgttg

SEQ ID NO: 2041286 - DNA, 15 bp, Homo sapiens
aaattcagatgttga

SEQ ID NO: 2041287 - DNA, 15 bp, Homo sapiens
aattcagatgttgaa

SEQ ID NO: 2041288 - DNA, 15 bp, Homo sapiens
attcagatgttgaag

SEQ ID NO: 2041289 - DNA, 15 bp, Homo sapiens
ttcagatgttgaagt

SEQ ID NO: 2041290 - DNA, 15 bp, Homo sapiens
tcagatgttgaagtc

SEQ ID NO: 2041291 - DNA, 15 bp, Homo sapiens
cagatgttgaagtcc

SEQ ID NO: 2041292 - DNA, 15 bp, Homo sapiens
agatgttgaagtcct

SEQ ID NO: 2041293 - DNA, 15 bp, Homo sapiens
gatgttgaagtccta

SEQ ID NO: 2041294 - DNA, 15 bp, Homo sapiens
atgttgaagtcctaa

SEQ ID NO: 2041295 - DNA, 15 bp, Homo sapiens
tgttgaagtcctaac

SEQ ID NO: 2041296 - DNA, 15 bp, Homo sapiens
gttgaagtcctaacc

SEQ ID NO: 2041297 - DNA, 15 bp, Homo sapiens
ttgaagtcctaaccc

SEQ ID NO: 2041298 - DNA, 15 bp, Homo sapiens
tgaagtcctaacccc

SEQ ID NO: 2041299 - DNA, 15 bp, Homo sapiens
gaagtcctaaccccc

SEQ ID NO: 2041300 - DNA, 15 bp, Homo sapiens
aagtcctaacccccc

SEQ ID NO: 2041301 - DNA, 15 bp, Homo sapiens
agtcctaaccccccc

SEQ ID NO: 2041302 - DNA, 15 bp, Homo sapiens
gtcctaaccccccct

SEQ ID NO: 2041303 - DNA, 15 bp, Homo sapiens
tcctaaccccccctc

SEQ ID NO: 2041304 - DNA, 15 bp, Homo sapiens
cctaaccccccctcc

SEQ ID NO: 2041305 - DNA, 15 bp, Homo sapiens
ctaaccccccctccc

SEQ ID NO: 2041306 - DNA, 15 bp, Homo sapiens
taaccccccctcccc

SEQ ID NO: 2041307 - DNA, 15 bp, Homo sapiens
aaccccccctccccc

SEQ ID NO: 2041308 - DNA, 15 bp, Homo sapiens
accccccctccccca

SEQ ID NO: 2041309 - DNA, 15 bp, Homo sapiens
ccccccctcccccag

SEQ ID NO: 2041310 - DNA, 15 bp, Homo sapiens
cccccctcccccagt

SEQ ID NO: 2041311 - DNA, 15 bp, Homo sapiens
ccccctcccccagtg

SEQ ID NO: 2041312 - DNA, 15 bp, Homo sapiens
cccctcccccagtgt

SEQ ID NO: 2041313 - DNA, 15 bp, Homo sapiens
ccctcccccagtgtt

SEQ ID NO: 2041314 - DNA, 15 bp, Homo sapiens
cctcccccagtgtta

SEQ ID NO: 2041315 - DNA, 15 bp, Homo sapiens
ctcccccagtgttac

SEQ ID NO: 2041316 - DNA, 15 bp, Homo sapiens
tcccccagtgttact

SEQ ID NO: 2041317 - DNA, 15 bp, Homo sapiens
cccccagtgttactc

SEQ ID NO: 2041318 - DNA, 15 bp, Homo sapiens
ccccagtgttactct

SEQ ID NO: 2041319 - DNA, 15 bp, Homo sapiens
cccagtgttactcta

SEQ ID NO: 2041320 - DNA, 15 bp, Homo sapiens
ccagtgttactctat

SEQ ID NO: 2041321 - DNA, 15 bp, Homo sapiens
cagtgttactctatc

SEQ ID NO: 2041322 - DNA, 15 bp, Homo sapiens
agtgttactctatct

SEQ ID NO: 2041323 - DNA, 15 bp, Homo sapiens
gtgttactctatctg

SEQ ID NO: 2041324 - DNA, 15 bp, Homo sapiens
tgttactctatctgg

SEQ ID NO: 2041325 - DNA, 15 bp, Homo sapiens
gttactctatctgga

SEQ ID NO: 2041326 - DNA, 15 bp, Homo sapiens
ttactctatctggag

SEQ ID NO: 2041327 - DNA, 15 bp, Homo sapiens
tactctatctggaga

SEQ ID NO: 2041328 - DNA, 15 bp, Homo sapiens
actctatctggagat

SEQ ID NO: 2041329 - DNA, 15 bp, Homo sapiens
ctctatctggagata

SEQ ID NO: 2041330 - DNA, 15 bp, Homo sapiens
tctatctggagatag

SEQ ID NO: 2041331 - DNA, 15 bp, Homo sapiens
ctatctggagatagg

SEQ ID NO: 2041332 - DNA, 15 bp, Homo sapiens
tatctggagatagga

SEQ ID NO: 2041333 - DNA, 15 bp, Homo sapiens
atctggagataggat

SEQ ID NO: 2041334 - DNA, 15 bp, Homo sapiens
tctggagataggatc

SEQ ID NO: 2041335 - DNA, 15 bp, Homo sapiens
ctggagataggatct

SEQ ID NO: 2041336 - DNA, 15 bp, Homo sapiens
tggagataggatctt

SEQ ID NO: 2041337 - DNA, 15 bp, Homo sapiens
ggagataggatcttt

SEQ ID NO: 2041338 - DNA, 15 bp, Homo sapiens
gagataggatcttta

SEQ ID NO: 2041339 - DNA, 15 bp, Homo sapiens
agataggatctttag

SEQ ID NO: 2041340 - DNA, 15 bp, Homo sapiens
gataggatctttaga

SEQ ID NO: 2041341 - DNA, 15 bp, Homo sapiens
ataggatctttagaa

SEQ ID NO: 2041342 - DNA, 15 bp, Homo sapiens
taggatctttagaag

SEQ ID NO: 2041343 - DNA, 15 bp, Homo sapiens
aggatctttagaagg

SEQ ID NO: 2041344 - DNA, 15 bp, Homo sapiens
ggatctttagaaggt

SEQ ID NO: 2041345 - DNA, 15 bp, Homo sapiens
gatctttagaaggta

SEQ ID NO: 2041346 - DNA, 15 bp, Homo sapiens
atctttagaaggtat

SEQ ID NO: 2041347 - DNA, 15 bp, Homo sapiens
tctttagaaggtatc

SEQ ID NO: 2041348 - DNA, 15 bp, Homo sapiens
ctttagaaggtatct

SEQ ID NO: 2041349 - DNA, 15 bp, Homo sapiens
tttagaaggtatctt

SEQ ID NO: 2041350 - DNA, 15 bp, Homo sapiens
ttagaaggtatctta

SEQ ID NO: 2041351 - DNA, 15 bp, Homo sapiens
tagaaggtatcttag

SEQ ID NO: 2041352 - DNA, 15 bp, Homo sapiens
agaaggtatcttagt

SEQ ID NO: 2041353 - DNA, 15 bp, Homo sapiens
gaaggtatcttagtc

SEQ ID NO: 2041354 - DNA, 15 bp, Homo sapiens
aaggtatcttagtcc

SEQ ID NO: 2041355 - DNA, 15 bp, Homo sapiens
aggtatcttagtcca

SEQ ID NO: 2041356 - DNA, 15 bp, Homo sapiens
ggtatcttagtccat

SEQ ID NO: 2041357 - DNA, 15 bp, Homo sapiens
gtatcttagtccatt

SEQ ID NO: 2041358 - DNA, 15 bp, Homo sapiens
tatcttagtccattt

SEQ ID NO: 2041359 - DNA, 15 bp, Homo sapiens
atcttagtccatttg

SEQ ID NO: 2041360 - DNA, 15 bp, Homo sapiens
tcttagtccatttgt

SEQ ID NO: 2041361 - DNA, 15 bp, Homo sapiens
cttagtccatttgtg

SEQ ID NO: 2041362 - DNA, 15 bp, Homo sapiens
ttagtccatttgtgc

SEQ ID NO: 2041363 - DNA, 15 bp, Homo sapiens
tagtccatttgtgct

SEQ ID NO: 2041364 - DNA, 15 bp, Homo sapiens
agtccatttgtgctg

SEQ ID NO: 2041365 - DNA, 15 bp, Homo sapiens
gtccatttgtgctga

SEQ ID NO: 2041366 - DNA, 15 bp, Homo sapiens
tccatttgtgctgat

SEQ ID NO: 2041367 - DNA, 15 bp, Homo sapiens
ccatttgtgctgata

SEQ ID NO: 2041368 - DNA, 15 bp, Homo sapiens
catttgtgctgatat

SEQ ID NO: 2041369 - DNA, 15 bp, Homo sapiens
atttgtgctgatata

SEQ ID NO: 2041370 - DNA, 15 bp, Homo sapiens
tttgtgctgatataa

SEQ ID NO: 2041371 - DNA, 15 bp, Homo sapiens
ttgtgctgatataac

SEQ ID NO: 2041372 - DNA, 15 bp, Homo sapiens
tgtgctgatataaca

SEQ ID NO: 2041373 - DNA, 15 bp, Homo sapiens
gtgctgatataacag

SEQ ID NO: 2041374 - DNA, 15 bp, Homo sapiens
tgctgatataacaga

SEQ ID NO: 2041375 - DNA, 15 bp, Homo sapiens
gctgatataacagag

SEQ ID NO: 2041376 - DNA, 15 bp, Homo sapiens
ctgatataacagagt

SEQ ID NO: 2041377 - DNA, 15 bp, Homo sapiens
tgatataacagagta

SEQ ID NO: 2041378 - DNA, 15 bp, Homo sapiens
gatataacagagtag

SEQ ID NO: 2041379 - DNA, 15 bp, Homo sapiens
atataacagagtagc

SEQ ID NO: 2041380 - DNA, 15 bp, Homo sapiens
tataacagagtagct

SEQ ID NO: 2041381 - DNA, 15 bp, Homo sapiens
ataacagagtagctg

SEQ ID NO: 2041382 - DNA, 15 bp, Homo sapiens
taacagagtagctga

SEQ ID NO: 2041383 - DNA, 15 bp, Homo sapiens
aacagagtagctgaa

SEQ ID NO: 2041384 - DNA, 15 bp, Homo sapiens
acagagtagctgaaa

SEQ ID NO: 2041385 - DNA, 15 bp, Homo sapiens
cagagtagctgaaac

SEQ ID NO: 2041386 - DNA, 15 bp, Homo sapiens
agagtagctgaaact

SEQ ID NO: 2041387 - DNA, 15 bp, Homo sapiens
gagtagctgaaactg

SEQ ID NO: 2041388 - DNA, 15 bp, Homo sapiens
agtagctgaaactga

SEQ ID NO: 2041389 - DNA, 15 bp, Homo sapiens
gtagctgaaactgag

SEQ ID NO: 2041390 - DNA, 15 bp, Homo sapiens
tagctgaaactgagt

SEQ ID NO: 2041391 - DNA, 15 bp, Homo sapiens
agctgaaactgagta

SEQ ID NO: 2041392 - DNA, 15 bp, Homo sapiens
gctgaaactgagtag

SEQ ID NO: 2041393 - DNA, 15 bp, Homo sapiens
ctgaaactgagtagt

SEQ ID NO: 2041394 - DNA, 15 bp, Homo sapiens
tgaaactgagtagtt

SEQ ID NO: 2041395 - DNA, 15 bp, Homo sapiens
gaaactgagtagttt

SEQ ID NO: 2041396 - DNA, 15 bp, Homo sapiens
aaactgagtagttta

SEQ ID NO: 2041397 - DNA, 15 bp, Homo sapiens
aactgagtagtttaa

SEQ ID NO: 2041398 - DNA, 15 bp, Homo sapiens
actgagtagtttaaa

SEQ ID NO: 2041399 - DNA, 15 bp, Homo sapiens
ctgagtagtttaaaa

SEQ ID NO: 2041400 - DNA, 15 bp, Homo sapiens
tgagtagtttaaaaa

SEQ ID NO: 2041401 - DNA, 15 bp, Homo sapiens
gagtagtttaaaaac

SEQ ID NO: 2041402 - DNA, 15 bp, Homo sapiens
agtagtttaaaaacg

SEQ ID NO: 2041403 - DNA, 15 bp, Homo sapiens
gtagtttaaaaacga

SEQ ID NO: 2041404 - DNA, 15 bp, Homo sapiens
tagtttaaaaacgac

SEQ ID NO: 2041405 - DNA, 15 bp, Homo sapiens
agtttaaaaacgaca

SEQ ID NO: 2041406 - DNA, 15 bp, Homo sapiens
gtttaaaaacgacag

SEQ ID NO: 2041407 - DNA, 15 bp, Homo sapiens
tttaaaaacgacaga

SEQ ID NO: 2041408 - DNA, 15 bp, Homo sapiens
ttaaaaacgacagaa

SEQ ID NO: 2041409 - DNA, 15 bp, Homo sapiens
taaaaacgacagaaa

SEQ ID NO: 2041410 - DNA, 15 bp, Homo sapiens
aaaaacgacagaaat

SEQ ID NO: 2041411 - DNA, 15 bp, Homo sapiens
aaaacgacagaaatt

SEQ ID NO: 2041412 - DNA, 15 bp, Homo sapiens
aacgacagaaattta

SEQ ID NO: 2041413 - DNA, 15 bp, Homo sapiens
acgacagaaatttat

SEQ ID NO: 2041414 - DNA, 15 bp, Homo sapiens
cgacagaaatttatt

SEQ ID NO: 2041415 - DNA, 15 bp, Homo sapiens
gacagaaatttattt

SEQ ID NO: 2041416 - DNA, 15 bp, Homo sapiens
acagaaatttatttc

SEQ ID NO: 2041417 - DNA, 15 bp, Homo sapiens
cagaaatttatttct

SEQ ID NO: 2041418 - DNA, 15 bp, Homo sapiens
agaaatttatttctc

SEQ ID NO: 2041419 - DNA, 15 bp, Homo sapiens
cagttctggaggctc

SEQ ID NO: 2041420 - DNA, 15 bp, Homo sapiens
agttctggaggctcg

SEQ ID NO: 2041421 - DNA, 15 bp, Homo sapiens
gttctggaggctcgg

SEQ ID NO: 2041422 - DNA, 15 bp, Homo sapiens
ttctggaggctcgga

SEQ ID NO: 2041423 - DNA, 15 bp, Homo sapiens
tctggaggctcggaa

SEQ ID NO: 2041424 - DNA, 15 bp, Homo sapiens
ctggaggctcggaag

SEQ ID NO: 2041425 - DNA, 15 bp, Homo sapiens
tggaggctcggaagt

SEQ ID NO: 2041426 - DNA, 15 bp, Homo sapiens
ggaggctcggaagtc

SEQ ID NO: 2041427 - DNA, 15 bp, Homo sapiens
gaggctcggaagtcc

SEQ ID NO: 2041428 - DNA, 15 bp, Homo sapiens
aggctcggaagtcca

SEQ ID NO: 2041429 - DNA, 15 bp, Homo sapiens
ggctcggaagtccaa

SEQ ID NO: 2041430 - DNA, 15 bp, Homo sapiens
gctcggaagtccaag

SEQ ID NO: 2041431 - DNA, 15 bp, Homo sapiens
ctcggaagtccaagg

SEQ ID NO: 2041432 - DNA, 15 bp, Homo sapiens
tcggaagtccaaggt

SEQ ID NO: 2041433 - DNA, 15 bp, Homo sapiens
cggaagtccaaggtc

SEQ ID NO: 2041434 - DNA, 15 bp, Homo sapiens
ggaagtccaaggtca

SEQ ID NO: 2041435 - DNA, 15 bp, Homo sapiens
gaagtccaaggtcaa

SEQ ID NO: 2041436 - DNA, 15 bp, Homo sapiens
aagtccaaggtcaag

SEQ ID NO: 2041437 - DNA, 15 bp, Homo sapiens
agtccaaggtcaaga

SEQ ID NO: 2041438 - DNA, 15 bp, Homo sapiens
gtccaaggtcaagac

SEQ ID NO: 2041439 - DNA, 15 bp, Homo sapiens
tccaaggtcaagacg

SEQ ID NO: 2041440 - DNA, 15 bp, Homo sapiens
ccaaggtcaagacgc

SEQ ID NO: 2041441 - DNA, 15 bp, Homo sapiens
caaggtcaagacgct

SEQ ID NO: 2041442 - DNA, 15 bp, Homo sapiens
aaggtcaagacgctg

SEQ ID NO: 2041443 - DNA, 15 bp, Homo sapiens
aggtcaagacgctgg

SEQ ID NO: 2041444 - DNA, 15 bp, Homo sapiens
ggtcaagacgctggt

SEQ ID NO: 2041445 - DNA, 15 bp, Homo sapiens
gtcaagacgctggta

SEQ ID NO: 2041446 - DNA, 15 bp, Homo sapiens
tcaagacgctggtac

SEQ ID NO: 2041447 - DNA, 15 bp, Homo sapiens
caagacgctggtacc

SEQ ID NO: 2041448 - DNA, 15 bp, Homo sapiens
aagacgctggtacct

SEQ ID NO: 2041449 - DNA, 15 bp, Homo sapiens
agacgctggtacctg

SEQ ID NO: 2041450 - DNA, 15 bp, Homo sapiens
gacgctggtacctgg

SEQ ID NO: 2041451 - DNA, 15 bp, Homo sapiens
acgctggtacctggt

SEQ ID NO: 2041452 - DNA, 15 bp, Homo sapiens
cgctggtacctggta

SEQ ID NO: 2041453 - DNA, 15 bp, Homo sapiens
gctggtacctggtaa

SEQ ID NO: 2041454 - DNA, 15 bp, Homo sapiens
ctggtacctggtaag

SEQ ID NO: 2041455 - DNA, 15 bp, Homo sapiens
tggtacctggtaagg

SEQ ID NO: 2041456 - DNA, 15 bp, Homo sapiens
ggtacctggtaaggg

SEQ ID NO: 2041457 - DNA, 15 bp, Homo sapiens
gtacctggtaagggc

SEQ ID NO: 2041458 - DNA, 15 bp, Homo sapiens
tacctggtaagggcc

SEQ ID NO: 2041459 - DNA, 15 bp, Homo sapiens
acctggtaagggcct

SEQ ID NO: 2041460 - DNA, 15 bp, Homo sapiens
cctggtaagggcctt

SEQ ID NO: 2041461 - DNA, 15 bp, Homo sapiens
ctggtaagggccttg

SEQ ID NO: 2041462 - DNA, 15 bp, Homo sapiens
tggtaagggccttgt

SEQ ID NO: 2041463 - DNA, 15 bp, Homo sapiens
ggtaagggccttgta

SEQ ID NO: 2041464 - DNA, 15 bp, Homo sapiens
gtaagggccttgtag

SEQ ID NO: 2041465 - DNA, 15 bp, Homo sapiens
taagggccttgtagg

SEQ ID NO: 2041466 - DNA, 15 bp, Homo sapiens
aagggccttgtaggg

SEQ ID NO: 2041467 - DNA, 15 bp, Homo sapiens
agggccttgtaggga

SEQ ID NO: 2041468 - DNA, 15 bp, Homo sapiens
gggccttgtagggag

SEQ ID NO: 2041469 - DNA, 15 bp, Homo sapiens
ggccttgtagggagg

SEQ ID NO: 2041470 - DNA, 15 bp, Homo sapiens
gccttgtagggagga

SEQ ID NO: 2041471 - DNA, 15 bp, Homo sapiens
ccttgtagggaggaa

SEQ ID NO: 2041472 - DNA, 15 bp, Homo sapiens
cttgtagggaggaac

SEQ ID NO: 2041473 - DNA, 15 bp, Homo sapiens
ttgtagggaggaaca

SEQ ID NO: 2041474 - DNA, 15 bp, Homo sapiens
tgtagggaggaacac

SEQ ID NO: 2041475 - DNA, 15 bp, Homo sapiens
gtagggaggaacact

SEQ ID NO: 2041476 - DNA, 15 bp, Homo sapiens
tagggaggaacactg

SEQ ID NO: 2041477 - DNA, 15 bp, Homo sapiens
agggaggaacactgt

SEQ ID NO: 2041478 - DNA, 15 bp, Homo sapiens
gggaggaacactgtg

SEQ ID NO: 2041479 - DNA, 15 bp, Homo sapiens
ggaggaacactgtgt

SEQ ID NO: 2041480 - DNA, 15 bp, Homo sapiens
gaggaacactgtgtc

SEQ ID NO: 2041481 - DNA, 15 bp, Homo sapiens
aggaacactgtgtcc

SEQ ID NO: 2041482 - DNA, 15 bp, Homo sapiens
ggaacactgtgtcct

SEQ ID NO: 2041483 - DNA, 15 bp, Homo sapiens
gaacactgtgtcctc

SEQ ID NO: 2041484 - DNA, 15 bp, Homo sapiens
aacactgtgtcctca

SEQ ID NO: 2041485 - DNA, 15 bp, Homo sapiens
acactgtgtcctcac

SEQ ID NO: 2041486 - DNA, 15 bp, Homo sapiens
cactgtgtcctcaca

SEQ ID NO: 2041487 - DNA, 15 bp, Homo sapiens
actgtgtcctcacat

SEQ ID NO: 2041488 - DNA, 15 bp, Homo sapiens
ctgtgtcctcacatg

SEQ ID NO: 2041489 - DNA, 15 bp, Homo sapiens
tgtgtcctcacatgg

SEQ ID NO: 2041490 - DNA, 15 bp, Homo sapiens
gtgtcctcacatggg

SEQ ID NO: 2041491 - DNA, 15 bp, Homo sapiens
tgtcctcacatggga

SEQ ID NO: 2041492 - DNA, 15 bp, Homo sapiens
gtcctcacatgggag

SEQ ID NO: 2041493 - DNA, 15 bp, Homo sapiens
tcctcacatgggaga

SEQ ID NO: 2041494 - DNA, 15 bp, Homo sapiens
cctcacatgggagaa

SEQ ID NO: 2041495 - DNA, 15 bp, Homo sapiens
ctcacatgggagaag

SEQ ID NO: 2041496 - DNA, 15 bp, Homo sapiens
tcacatgggagaaga

SEQ ID NO: 2041497 - DNA, 15 bp, Homo sapiens
cacatgggagaagag

SEQ ID NO: 2041498 - DNA, 15 bp, Homo sapiens
acatgggagaagagc

SEQ ID NO: 2041499 - DNA, 15 bp, Homo sapiens
catgggagaagagca

SEQ ID NO: 2041500 - DNA, 15 bp, Homo sapiens
atgggagaagagcaa

SEQ ID NO: 2041501 - DNA, 15 bp, Homo sapiens
tgggagaagagcaag

SEQ ID NO: 2041502 - DNA, 15 bp, Homo sapiens
gggagaagagcaaga

SEQ ID NO: 2041503 - DNA, 15 bp, Homo sapiens
ggagaagagcaagac

SEQ ID NO: 2041504 - DNA, 15 bp, Homo sapiens
gagaagagcaagact

SEQ ID NO: 2041505 - DNA, 15 bp, Homo sapiens
agaagagcaagactg

SEQ ID NO: 2041506 - DNA, 15 bp, Homo sapiens
gaagagcaagactgc

SEQ ID NO: 2041507 - DNA, 15 bp, Homo sapiens
aagagcaagactgca

SEQ ID NO: 2041508 - DNA, 15 bp, Homo sapiens
agagcaagactgcaa

SEQ ID NO: 2041509 - DNA, 15 bp, Homo sapiens
gagcaagactgcaag

SEQ ID NO: 2041510 - DNA, 15 bp, Homo sapiens
agcaagactgcaagc

SEQ ID NO: 2041511 - DNA, 15 bp, Homo sapiens
gcaagactgcaagct

SEQ ID NO: 2041512 - DNA, 15 bp, Homo sapiens
caagactgcaagcta

SEQ ID NO: 2041513 - DNA, 15 bp, Homo sapiens
aagactgcaagctag

SEQ ID NO: 2041514 - DNA, 15 bp, Homo sapiens
agactgcaagctagc

SEQ ID NO: 2041515 - DNA, 15 bp, Homo sapiens
gactgcaagctagcc

SEQ ID NO: 2041516 - DNA, 15 bp, Homo sapiens
actgcaagctagcca

SEQ ID NO: 2041517 - DNA, 15 bp, Homo sapiens
ctgcaagctagccaa

SEQ ID NO: 2041518 - DNA, 15 bp, Homo sapiens
tgcaagctagccaaa

SEQ ID NO: 2041519 - DNA, 15 bp, Homo sapiens
gcaagctagccaaat

SEQ ID NO: 2041520 - DNA, 15 bp, Homo sapiens
caagctagccaaatg

SEQ ID NO: 2041521 - DNA, 15 bp, Homo sapiens
aagctagccaaatgt

SEQ ID NO: 2041522 - DNA, 15 bp, Homo sapiens
agctagccaaatgtt

SEQ ID NO: 2041523 - DNA, 15 bp, Homo sapiens
gctagccaaatgttt

SEQ ID NO: 2041524 - DNA, 15 bp, Homo sapiens
ctagccaaatgtttc

SEQ ID NO: 2041525 - DNA, 15 bp, Homo sapiens
tagccaaatgtttcg

SEQ ID NO: 2041526 - DNA, 15 bp, Homo sapiens
agccaaatgtttcgt

SEQ ID NO: 2041527 - DNA, 15 bp, Homo sapiens
gccaaatgtttcgtg

SEQ ID NO: 2041528 - DNA, 15 bp, Homo sapiens
ccaaatgtttcgtga

SEQ ID NO: 2041529 - DNA, 15 bp, Homo sapiens
caaatgtttcgtgaa

SEQ ID NO: 2041530 - DNA, 15 bp, Homo sapiens
aaatgtttcgtgaag

SEQ ID NO: 2041531 - DNA, 15 bp, Homo sapiens
aatgtttcgtgaagc

SEQ ID NO: 2041532 - DNA, 15 bp, Homo sapiens
atgtttcgtgaagcc

SEQ ID NO: 2041533 - DNA, 15 bp, Homo sapiens
tgtttcgtgaagcct

SEQ ID NO: 2041534 - DNA, 15 bp, Homo sapiens
gtttcgtgaagcctc

SEQ ID NO: 2041535 - DNA, 15 bp, Homo sapiens
tttcgtgaagcctct

SEQ ID NO: 2041536 - DNA, 15 bp, Homo sapiens
ttcgtgaagcctctt

SEQ ID NO: 2041537 - DNA, 15 bp, Homo sapiens
tcgtgaagcctcttt

SEQ ID NO: 2041538 - DNA, 15 bp, Homo sapiens
cgtgaagcctctttt

SEQ ID NO: 2041539 - DNA, 15 bp, Homo sapiens
gtgaagcctctttta

SEQ ID NO: 2041540 - DNA, 15 bp, Homo sapiens
tgaagcctcttttat

SEQ ID NO: 2041541 - DNA, 15 bp, Homo sapiens
gaagcctcttttata

SEQ ID NO: 2041542 - DNA, 15 bp, Homo sapiens
aagcctcttttataa

SEQ ID NO: 2041543 - DNA, 15 bp, Homo sapiens
agcctcttttataag

SEQ ID NO: 2041544 - DNA, 15 bp, Homo sapiens
gcctcttttataaga

SEQ ID NO: 2041545 - DNA, 15 bp, Homo sapiens
cctcttttataagat

SEQ ID NO: 2041546 - DNA, 15 bp, Homo sapiens
ctcttttataagatc

SEQ ID NO: 2041547 - DNA, 15 bp, Homo sapiens
tcttttataagatcc

SEQ ID NO: 2041548 - DNA, 15 bp, Homo sapiens
cttttataagatcct

SEQ ID NO: 2041549 - DNA, 15 bp, Homo sapiens
ttttataagatcctt

SEQ ID NO: 2041550 - DNA, 15 bp, Homo sapiens
tttataagatcctta

SEQ ID NO: 2041551 - DNA, 15 bp, Homo sapiens
ttataagatccttaa

SEQ ID NO: 2041552 - DNA, 15 bp, Homo sapiens
tataagatccttaat

SEQ ID NO: 2041553 - DNA, 15 bp, Homo sapiens
ataagatccttaatc

SEQ ID NO: 2041554 - DNA, 15 bp, Homo sapiens
taagatccttaatct

SEQ ID NO: 2041555 - DNA, 15 bp, Homo sapiens
aagatccttaatctc

SEQ ID NO: 2041556 - DNA, 15 bp, Homo sapiens
agatccttaatctca

SEQ ID NO: 2041557 - DNA, 15 bp, Homo sapiens
gatccttaatctcat

SEQ ID NO: 2041558 - DNA, 15 bp, Homo sapiens
atccttaatctcatt

SEQ ID NO: 2041559 - DNA, 15 bp, Homo sapiens
tccttaatctcatta

SEQ ID NO: 2041560 - DNA, 15 bp, Homo sapiens
ccttaatctcattaa

SEQ ID NO: 2041561 - DNA, 15 bp, Homo sapiens
cttaatctcattaag

SEQ ID NO: 2041562 - DNA, 15 bp, Homo sapiens
ttaatctcattaagg

SEQ ID NO: 2041563 - DNA, 15 bp, Homo sapiens
taatctcattaagga

SEQ ID NO: 2041564 - DNA, 15 bp, Homo sapiens
aatctcattaaggaa

SEQ ID NO: 2041565 - DNA, 15 bp, Homo sapiens
atctcattaaggaag

SEQ ID NO: 2041566 - DNA, 15 bp, Homo sapiens
tctcattaaggaagg

SEQ ID NO: 2041567 - DNA, 15 bp, Homo sapiens
ctcattaaggaagga

SEQ ID NO: 2041568 - DNA, 15 bp, Homo sapiens
tcattaaggaaggag

SEQ ID NO: 2041569 - DNA, 15 bp, Homo sapiens
cattaaggaaggagg

SEQ ID NO: 2041570 - DNA, 15 bp, Homo sapiens
attaaggaaggagga

SEQ ID NO: 2041571 - DNA, 15 bp, Homo sapiens
ttaaggaaggaggat

SEQ ID NO: 2041572 - DNA, 15 bp, Homo sapiens
taaggaaggaggatc

SEQ ID NO: 2041573 - DNA, 15 bp, Homo sapiens
aaggaaggaggatcc

SEQ ID NO: 2041574 - DNA, 15 bp, Homo sapiens
aggaaggaggatccc

SEQ ID NO: 2041575 - DNA, 15 bp, Homo sapiens
ggaaggaggatccct

SEQ ID NO: 2041576 - DNA, 15 bp, Homo sapiens
gaaggaggatccctc

SEQ ID NO: 2041577 - DNA, 15 bp, Homo sapiens
aaggaggatccctca

SEQ ID NO: 2041578 - DNA, 15 bp, Homo sapiens
aggaggatccctcat

SEQ ID NO: 2041579 - DNA, 15 bp, Homo sapiens
ggaggatccctcatg

SEQ ID NO: 2041580 - DNA, 15 bp, Homo sapiens
gaggatccctcatga

SEQ ID NO: 2041581 - DNA, 15 bp, Homo sapiens
aggatccctcatgac

SEQ ID NO: 2041582 - DNA, 15 bp, Homo sapiens
ggatccctcatgacc

SEQ ID NO: 2041583 - DNA, 15 bp, Homo sapiens
gatccctcatgacct

SEQ ID NO: 2041584 - DNA, 15 bp, Homo sapiens
atccctcatgaccta

SEQ ID NO: 2041585 - DNA, 15 bp, Homo sapiens
tccctcatgacctaa

SEQ ID NO: 2041586 - DNA, 15 bp, Homo sapiens
ccctcatgacctaat

SEQ ID NO: 2041587 - DNA, 15 bp, Homo sapiens
cctcatgacctaatc

SEQ ID NO: 2041588 - DNA, 15 bp, Homo sapiens
ctcatgacctaatca

SEQ ID NO: 2041589 - DNA, 15 bp, Homo sapiens
tcatgacctaatcac

SEQ ID NO: 2041590 - DNA, 15 bp, Homo sapiens
catgacctaatcaca

SEQ ID NO: 2041591 - DNA, 15 bp, Homo sapiens
atgacctaatcacat

SEQ ID NO: 2041592 - DNA, 15 bp, Homo sapiens
tgacctaatcacatc

SEQ ID NO: 2041593 - DNA, 15 bp, Homo sapiens
gacctaatcacatct

SEQ ID NO: 2041594 - DNA, 15 bp, Homo sapiens
acctaatcacatctt

SEQ ID NO: 2041595 - DNA, 15 bp, Homo sapiens
cctaatcacatctta

SEQ ID NO: 2041596 - DNA, 15 bp, Homo sapiens
ctaatcacatcttaa

SEQ ID NO: 2041597 - DNA, 15 bp, Homo sapiens
taatcacatcttaaa

SEQ ID NO: 2041598 - DNA, 15 bp, Homo sapiens
aatcacatcttaaag

SEQ ID NO: 2041599 - DNA, 15 bp, Homo sapiens
atcacatcttaaagg

SEQ ID NO: 2041600 - DNA, 15 bp, Homo sapiens
tcacatcttaaaggc

SEQ ID NO: 2041601 - DNA, 15 bp, Homo sapiens
cacatcttaaaggct

SEQ ID NO: 2041602 - DNA, 15 bp, Homo sapiens
acatcttaaaggctg

SEQ ID NO: 2041603 - DNA, 15 bp, Homo sapiens
catcttaaaggctgc

SEQ ID NO: 2041604 - DNA, 15 bp, Homo sapiens
atcttaaaggctgca

SEQ ID NO: 2041605 - DNA, 15 bp, Homo sapiens
tcttaaaggctgcac

SEQ ID NO: 2041606 - DNA, 15 bp, Homo sapiens
cttaaaggctgcacc

SEQ ID NO: 2041607 - DNA, 15 bp, Homo sapiens
ttaaaggctgcacct

SEQ ID NO: 2041608 - DNA, 15 bp, Homo sapiens
taaaggctgcacctc

SEQ ID NO: 2041609 - DNA, 15 bp, Homo sapiens
aaaggctgcacctct

SEQ ID NO: 2041610 - DNA, 15 bp, Homo sapiens
aaggctgcacctctt

SEQ ID NO: 2041611 - DNA, 15 bp, Homo sapiens
aggctgcacctctta

SEQ ID NO: 2041612 - DNA, 15 bp, Homo sapiens
ggctgcacctcttaa

SEQ ID NO: 2041613 - DNA, 15 bp, Homo sapiens
gctgcacctcttaat

SEQ ID NO: 2041614 - DNA, 15 bp, Homo sapiens
ctgcacctcttaata

SEQ ID NO: 2041615 - DNA, 15 bp, Homo sapiens
tgcacctcttaatac

SEQ ID NO: 2041616 - DNA, 15 bp, Homo sapiens
gcacctcttaatact

SEQ ID NO: 2041617 - DNA, 15 bp, Homo sapiens
cacctcttaatacta

SEQ ID NO: 2041618 - DNA, 15 bp, Homo sapiens
acctcttaatactat

SEQ ID NO: 2041619 - DNA, 15 bp, Homo sapiens
cctcttaatactatc

SEQ ID NO: 2041620 - DNA, 15 bp, Homo sapiens
ctcttaatactatcg

SEQ ID NO: 2041621 - DNA, 15 bp, Homo sapiens
tcttaatactatcgc

SEQ ID NO: 2041622 - DNA, 15 bp, Homo sapiens
cttaatactatcgca

SEQ ID NO: 2041623 - DNA, 15 bp, Homo sapiens
ttaatactatcgcat

SEQ ID NO: 2041624 - DNA, 15 bp, Homo sapiens
taatactatcgcatt

SEQ ID NO: 2041625 - DNA, 15 bp, Homo sapiens
aatactatcgcattg

SEQ ID NO: 2041626 - DNA, 15 bp, Homo sapiens
atactatcgcattgg

SEQ ID NO: 2041627 - DNA, 15 bp, Homo sapiens
tactatcgcattggc

SEQ ID NO: 2041628 - DNA, 15 bp, Homo sapiens
actatcgcattggca

SEQ ID NO: 2041629 - DNA, 15 bp, Homo sapiens
ctatcgcattggcaa

SEQ ID NO: 2041630 - DNA, 15 bp, Homo sapiens
tatcgcattggcaac

SEQ ID NO: 2041631 - DNA, 15 bp, Homo sapiens
atcgcattggcaaca

SEQ ID NO: 2041632 - DNA, 15 bp, Homo sapiens
tcgcattggcaacac

SEQ ID NO: 2041633 - DNA, 15 bp, Homo sapiens
cgcattggcaacact

SEQ ID NO: 2041634 - DNA, 15 bp, Homo sapiens
gcattggcaacactg

SEQ ID NO: 2041635 - DNA, 15 bp, Homo sapiens
cattggcaacactgg

SEQ ID NO: 2041636 - DNA, 15 bp, Homo sapiens
attggcaacactgga

SEQ ID NO: 2041637 - DNA, 15 bp, Homo sapiens
ttggcaacactggaa

SEQ ID NO: 2041638 - DNA, 15 bp, Homo sapiens
tggcaacactggaat

SEQ ID NO: 2041639 - DNA, 15 bp, Homo sapiens
ggcaacactggaatt

SEQ ID NO: 2041640 - DNA, 15 bp, Homo sapiens
gcaacactggaattt

SEQ ID NO: 2041641 - DNA, 15 bp, Homo sapiens
caacactggaatttt

SEQ ID NO: 2041642 - DNA, 15 bp, Homo sapiens
aacactggaattttg

SEQ ID NO: 2041643 - DNA, 15 bp, Homo sapiens
acactggaattttgg

SEQ ID NO: 2041644 - DNA, 15 bp, Homo sapiens
cactggaattttgga

SEQ ID NO: 2041645 - DNA, 15 bp, Homo sapiens
actggaattttggat

SEQ ID NO: 2041646 - DNA, 15 bp, Homo sapiens
ctggaattttggatg

SEQ ID NO: 2041647 - DNA, 15 bp, Homo sapiens
tggaattttggatgg

SEQ ID NO: 2041648 - DNA, 15 bp, Homo sapiens
ggaattttggatggc

SEQ ID NO: 2041649 - DNA, 15 bp, Homo sapiens
gaattttggatggca

SEQ ID NO: 2041650 - DNA, 15 bp, Homo sapiens
aattttggatggcac

SEQ ID NO: 2041651 - DNA, 15 bp, Homo sapiens
attttggatggcaca

SEQ ID NO: 2041652 - DNA, 15 bp, Homo sapiens
ttttggatggcacac

SEQ ID NO: 2041653 - DNA, 15 bp, Homo sapiens
tttggatggcacaca

SEQ ID NO: 2041654 - DNA, 15 bp, Homo sapiens
ttggatggcacacat

SEQ ID NO: 2041655 - DNA, 15 bp, Homo sapiens
tggatggcacacatg

SEQ ID NO: 2041656 - DNA, 15 bp, Homo sapiens
ggatggcacacatgc

SEQ ID NO: 2041657 - DNA, 15 bp, Homo sapiens
gatggcacacatgca

SEQ ID NO: 2041658 - DNA, 15 bp, Homo sapiens
atggcacacatgcaa

SEQ ID NO: 2041659 - DNA, 15 bp, Homo sapiens
tggcacacatgcaaa

SEQ ID NO: 2041660 - DNA, 15 bp, Homo sapiens
ggcacacatgcaaac

SEQ ID NO: 2041661 - DNA, 15 bp, Homo sapiens
gcacacatgcaaacc

SEQ ID NO: 2041662 - DNA, 15 bp, Homo sapiens
cacacatgcaaaccc

SEQ ID NO: 2041663 - DNA, 15 bp, Homo sapiens
acacatgcaaaccct

SEQ ID NO: 2041664 - DNA, 15 bp, Homo sapiens
cacatgcaaacccta

SEQ ID NO: 2041665 - DNA, 15 bp, Homo sapiens
acatgcaaaccctag

SEQ ID NO: 2041666 - DNA, 15 bp, Homo sapiens
catgcaaaccctagc

SEQ ID NO: 2041667 - DNA, 15 bp, Homo sapiens
atgcaaaccctagca

SEQ ID NO: 2041668 - DNA, 15 bp, Homo sapiens
tgcaaaccctagcag

SEQ ID NO: 2041669 - DNA, 15 bp, Homo sapiens
gcaaaccctagcaga

SEQ ID NO: 2041670 - DNA, 15 bp, Homo sapiens
caaaccctagcagaa

SEQ ID NO: 2041671 - DNA, 15 bp, Homo sapiens
aaaccctagcagaag

SEQ ID NO: 2041672 - DNA, 15 bp, Homo sapiens
aaccctagcagaagg

SEQ ID NO: 2041673 - DNA, 15 bp, Homo sapiens
accctagcagaaggt

SEQ ID NO: 2041674 - DNA, 15 bp, Homo sapiens
ccctagcagaaggtt

SEQ ID NO: 2041675 - DNA, 15 bp, Homo sapiens
cctagcagaaggtta

SEQ ID NO: 2041676 - DNA, 15 bp, Homo sapiens
ctagcagaaggttat

SEQ ID NO: 2041677 - DNA, 15 bp, Homo sapiens
tagcagaaggttatt

SEQ ID NO: 2041678 - DNA, 15 bp, Homo sapiens
agcagaaggttatta

SEQ ID NO: 2041679 - DNA, 15 bp, Homo sapiens
gcagaaggttattaa

SEQ ID NO: 2041680 - DNA, 15 bp, Homo sapiens
cagaaggttattaag

SEQ ID NO: 2041681 - DNA, 15 bp, Homo sapiens
agaaggttattaagg

SEQ ID NO: 2041682 - DNA, 15 bp, Homo sapiens
gaaggttattaaggt

SEQ ID NO: 2041683 - DNA, 15 bp, Homo sapiens
aaggttattaaggtt

SEQ ID NO: 2041684 - DNA, 15 bp, Homo sapiens
aggttattaaggtta

SEQ ID NO: 2041685 - DNA, 15 bp, Homo sapiens
ggttattaaggttaa

SEQ ID NO: 2041686 - DNA, 15 bp, Homo sapiens
gttattaaggttaaa

SEQ ID NO: 2041687 - DNA, 15 bp, Homo sapiens
ttattaaggttaaaa

SEQ ID NO: 2041688 - DNA, 15 bp, Homo sapiens
tattaaggttaaaag

SEQ ID NO: 2041689 - DNA, 15 bp, Homo sapiens
attaaggttaaaaga

SEQ ID NO: 2041690 - DNA, 15 bp, Homo sapiens
ttaaggttaaaagaa

SEQ ID NO: 2041691 - DNA, 15 bp, Homo sapiens
taaggttaaaagaag

SEQ ID NO: 2041692 - DNA, 15 bp, Homo sapiens
aaggttaaaagaagt

SEQ ID NO: 2041693 - DNA, 15 bp, Homo sapiens
aggttaaaagaagtc

SEQ ID NO: 2041694 - DNA, 15 bp, Homo sapiens
ggttaaaagaagtca

SEQ ID NO: 2041695 - DNA, 15 bp, Homo sapiens
gttaaaagaagtcat

SEQ ID NO: 2041696 - DNA, 15 bp, Homo sapiens
ttaaaagaagtcata

SEQ ID NO: 2041697 - DNA, 15 bp, Homo sapiens
taaaagaagtcataa

SEQ ID NO: 2041698 - DNA, 15 bp, Homo sapiens
aaaagaagtcataag

SEQ ID NO: 2041699 - DNA, 15 bp, Homo sapiens
aaagaagtcataagg

SEQ ID NO: 2041700 - DNA, 15 bp, Homo sapiens
aagaagtcataaggg

SEQ ID NO: 2041701 - DNA, 15 bp, Homo sapiens
agaagtcataagggt

SEQ ID NO: 2041702 - DNA, 15 bp, Homo sapiens
gaagtcataagggtg

SEQ ID NO: 2041703 - DNA, 15 bp, Homo sapiens
aagtcataagggtgg

SEQ ID NO: 2041704 - DNA, 15 bp, Homo sapiens
agtcataagggtggg

SEQ ID NO: 2041705 - DNA, 15 bp, Homo sapiens
gtcataagggtgggg

SEQ ID NO: 2041706 - DNA, 15 bp, Homo sapiens
tcataagggtggggc

SEQ ID NO: 2041707 - DNA, 15 bp, Homo sapiens
cataagggtggggct

SEQ ID NO: 2041708 - DNA, 15 bp, Homo sapiens
ataagggtggggctc

SEQ ID NO: 2041709 - DNA, 15 bp, Homo sapiens
taagggtggggctct

SEQ ID NO: 2041710 - DNA, 15 bp, Homo sapiens
aagggtggggctcta

SEQ ID NO: 2041711 - DNA, 15 bp, Homo sapiens
agggtggggctctaa

SEQ ID NO: 2041712 - DNA, 15 bp, Homo sapiens
gggtggggctctaat

SEQ ID NO: 2041713 - DNA, 15 bp, Homo sapiens
ggtggggctctaatc

SEQ ID NO: 2041714 - DNA, 15 bp, Homo sapiens
gtggggctctaatct

SEQ ID NO: 2041715 - DNA, 15 bp, Homo sapiens
tggggctctaatcta

SEQ ID NO: 2041716 - DNA, 15 bp, Homo sapiens
ggggctctaatctat

SEQ ID NO: 2041717 - DNA, 15 bp, Homo sapiens
gggctctaatctatt

SEQ ID NO: 2041718 - DNA, 15 bp, Homo sapiens
ggctctaatctatta

SEQ ID NO: 2041719 - DNA, 15 bp, Homo sapiens
gctctaatctattag

SEQ ID NO: 2041720 - DNA, 15 bp, Homo sapiens
ctctaatctattagg

SEQ ID NO: 2041721 - DNA, 15 bp, Homo sapiens
tctaatctattagga

SEQ ID NO: 2041722 - DNA, 15 bp, Homo sapiens
ctaatctattaggac

SEQ ID NO: 2041723 - DNA, 15 bp, Homo sapiens
taatctattaggact

SEQ ID NO: 2041724 - DNA, 15 bp, Homo sapiens
aatctattaggactg

SEQ ID NO: 2041725 - DNA, 15 bp, Homo sapiens
atctattaggactgt

SEQ ID NO: 2041726 - DNA, 15 bp, Homo sapiens
tctattaggactgtg

SEQ ID NO: 2041727 - DNA, 15 bp, Homo sapiens
ctattaggactgtgg

SEQ ID NO: 2041728 - DNA, 15 bp, Homo sapiens
tattaggactgtggc

SEQ ID NO: 2041729 - DNA, 15 bp, Homo sapiens
attaggactgtggct

SEQ ID NO: 2041730 - DNA, 15 bp, Homo sapiens
ttaggactgtggctt

SEQ ID NO: 2041731 - DNA, 15 bp, Homo sapiens
taggactgtggctta

SEQ ID NO: 2041732 - DNA, 15 bp, Homo sapiens
aggactgtggcttat

SEQ ID NO: 2041733 - DNA, 15 bp, Homo sapiens
ggactgtggcttata

SEQ ID NO: 2041734 - DNA, 15 bp, Homo sapiens
gactgtggcttatat

SEQ ID NO: 2041735 - DNA, 15 bp, Homo sapiens
actgtggcttatata

SEQ ID NO: 2041736 - DNA, 15 bp, Homo sapiens
ctgtggcttatatag

SEQ ID NO: 2041737 - DNA, 15 bp, Homo sapiens
tgtggcttatataga

SEQ ID NO: 2041738 - DNA, 15 bp, Homo sapiens
gtggcttatatagaa

SEQ ID NO: 2041739 - DNA, 15 bp, Homo sapiens
tggcttatatagaaa

SEQ ID NO: 2041740 - DNA, 15 bp, Homo sapiens
ggcttatatagaaaa

SEQ ID NO: 2041741 - DNA, 15 bp, Homo sapiens
gcttatatagaaaaa

SEQ ID NO: 2041742 - DNA, 15 bp, Homo sapiens
cttatatagaaaaag

SEQ ID NO: 2041743 - DNA, 15 bp, Homo sapiens
tatatagaaaaagat

SEQ ID NO: 2041744 - DNA, 15 bp, Homo sapiens
atatagaaaaagatc

SEQ ID NO: 2041745 - DNA, 15 bp, Homo sapiens
tatagaaaaagatct

SEQ ID NO: 2041746 - DNA, 15 bp, Homo sapiens
atagaaaaagatctc

SEQ ID NO: 2041747 - DNA, 15 bp, Homo sapiens
tagaaaaagatctct

SEQ ID NO: 2041748 - DNA, 15 bp, Homo sapiens
agaaaaagatctctc

SEQ ID NO: 2041749 - DNA, 15 bp, Homo sapiens
gaaaaagatctctct

SEQ ID NO: 2041750 - DNA, 15 bp, Homo sapiens
aaaaagatctctctt

SEQ ID NO: 2041751 - DNA, 15 bp, Homo sapiens
aaaagatctctcttt

SEQ ID NO: 2041752 - DNA, 15 bp, Homo sapiens
aaagatctctctttg

SEQ ID NO: 2041753 - DNA, 15 bp, Homo sapiens
aagatctctctttgc

SEQ ID NO: 2041754 - DNA, 15 bp, Homo sapiens
agatctctctttgct

SEQ ID NO: 2041755 - DNA, 15 bp, Homo sapiens
gatctctctttgcta

SEQ ID NO: 2041756 - DNA, 15 bp, Homo sapiens
atctctctttgctat

SEQ ID NO: 2041757 - DNA, 15 bp, Homo sapiens
tctctctttgctatg

SEQ ID NO: 2041758 - DNA, 15 bp, Homo sapiens
ctctctttgctatgc

SEQ ID NO: 2041759 - DNA, 15 bp, Homo sapiens
tctctttgctatgca

SEQ ID NO: 2041760 - DNA, 15 bp, Homo sapiens
ctctttgctatgcaa

SEQ ID NO: 2041761 - DNA, 15 bp, Homo sapiens
tctttgctatgcaaa

SEQ ID NO: 2041762 - DNA, 15 bp, Homo sapiens
ctttgctatgcaaag

SEQ ID NO: 2041763 - DNA, 15 bp, Homo sapiens
tttgctatgcaaaga

SEQ ID NO: 2041764 - DNA, 15 bp, Homo sapiens
ttgctatgcaaagac

SEQ ID NO: 2041765 - DNA, 15 bp, Homo sapiens
tgctatgcaaagaca

SEQ ID NO: 2041766 - DNA, 15 bp, Homo sapiens
gctatgcaaagacat

SEQ ID NO: 2041767 - DNA, 15 bp, Homo sapiens
ctatgcaaagacata

SEQ ID NO: 2041768 - DNA, 15 bp, Homo sapiens
tatgcaaagacatat

SEQ ID NO: 2041769 - DNA, 15 bp, Homo sapiens
atgcaaagacatatg

SEQ ID NO: 2041770 - DNA, 15 bp, Homo sapiens
tgcaaagacatatgg

SEQ ID NO: 2041771 - DNA, 15 bp, Homo sapiens
gcaaagacatatgga

SEQ ID NO: 2041772 - DNA, 15 bp, Homo sapiens
caaagacatatggag

SEQ ID NO: 2041773 - DNA, 15 bp, Homo sapiens
aaagacatatggaga

SEQ ID NO: 2041774 - DNA, 15 bp, Homo sapiens
aagacatatggagaa

SEQ ID NO: 2041775 - DNA, 15 bp, Homo sapiens
agacatatggagaag

SEQ ID NO: 2041776 - DNA, 15 bp, Homo sapiens
gacatatggagaagg

SEQ ID NO: 2041777 - DNA, 15 bp, Homo sapiens
acatatggagaaggc

SEQ ID NO: 2041778 - DNA, 15 bp, Homo sapiens
catatggagaaggcg

SEQ ID NO: 2041779 - DNA, 15 bp, Homo sapiens
atatggagaaggcgt

SEQ ID NO: 2041780 - DNA, 15 bp, Homo sapiens
tatggagaaggcgtc

SEQ ID NO: 2041781 - DNA, 15 bp, Homo sapiens
atggagaaggcgtct

SEQ ID NO: 2041782 - DNA, 15 bp, Homo sapiens
tggagaaggcgtctc

SEQ ID NO: 2041783 - DNA, 15 bp, Homo sapiens
ggagaaggcgtctct

SEQ ID NO: 2041784 - DNA, 15 bp, Homo sapiens
gagaaggcgtctctc

SEQ ID NO: 2041785 - DNA, 15 bp, Homo sapiens
agaaggcgtctctct

SEQ ID NO: 2041786 - DNA, 15 bp, Homo sapiens
gaaggcgtctctctg

SEQ ID NO: 2041787 - DNA, 15 bp, Homo sapiens
aaggcgtctctctgc

SEQ ID NO: 2041788 - DNA, 15 bp, Homo sapiens
aggcgtctctctgca

SEQ ID NO: 2041789 - DNA, 15 bp, Homo sapiens
ggcgtctctctgcaa

SEQ ID NO: 2041790 - DNA, 15 bp, Homo sapiens
gcgtctctctgcaag

SEQ ID NO: 2041791 - DNA, 15 bp, Homo sapiens
cgtctctctgcaagc

SEQ ID NO: 2041792 - DNA, 15 bp, Homo sapiens
gtctctctgcaagcc

SEQ ID NO: 2041793 - DNA, 15 bp, Homo sapiens
tctctctgcaagcca

SEQ ID NO: 2041794 - DNA, 15 bp, Homo sapiens
ctctctgcaagccag

SEQ ID NO: 2041795 - DNA, 15 bp, Homo sapiens
tctctgcaagccagt

SEQ ID NO: 2041796 - DNA, 15 bp, Homo sapiens
ctctgcaagccagtt

SEQ ID NO: 2041797 - DNA, 15 bp, Homo sapiens
tctgcaagccagtta

SEQ ID NO: 2041798 - DNA, 15 bp, Homo sapiens
ctgcaagccagttaa

SEQ ID NO: 2041799 - DNA, 15 bp, Homo sapiens
tgcaagccagttaag

SEQ ID NO: 2041800 - DNA, 15 bp, Homo sapiens
gcaagccagttaaga

SEQ ID NO: 2041801 - DNA, 15 bp, Homo sapiens
caagccagttaagag

SEQ ID NO: 2041802 - DNA, 15 bp, Homo sapiens
aagccagttaagagt

SEQ ID NO: 2041803 - DNA, 15 bp, Homo sapiens
agccagttaagagtg

SEQ ID NO: 2041804 - DNA, 15 bp, Homo sapiens
gccagttaagagtgc

SEQ ID NO: 2041805 - DNA, 15 bp, Homo sapiens
ccagttaagagtgcc

SEQ ID NO: 2041806 - DNA, 15 bp, Homo sapiens
cagttaagagtgccc

SEQ ID NO: 2041807 - DNA, 15 bp, Homo sapiens
agttaagagtgccct

SEQ ID NO: 2041808 - DNA, 15 bp, Homo sapiens
gttaagagtgccctc

SEQ ID NO: 2041809 - DNA, 15 bp, Homo sapiens
ttaagagtgccctca

SEQ ID NO: 2041810 - DNA, 15 bp, Homo sapiens
taagagtgccctcac

SEQ ID NO: 2041811 - DNA, 15 bp, Homo sapiens
aagagtgccctcacc

SEQ ID NO: 2041812 - DNA, 15 bp, Homo sapiens
agagtgccctcacca

SEQ ID NO: 2041813 - DNA, 15 bp, Homo sapiens
gagtgccctcaccag

SEQ ID NO: 2041814 - DNA, 15 bp, Homo sapiens
agtgccctcaccagc

SEQ ID NO: 2041815 - DNA, 15 bp, Homo sapiens
gtgccctcaccagca

SEQ ID NO: 2041816 - DNA, 15 bp, Homo sapiens
tgccctcaccagcaa

SEQ ID NO: 2041817 - DNA, 15 bp, Homo sapiens
gccctcaccagcaaa

SEQ ID NO: 2041818 - DNA, 15 bp, Homo sapiens
ccctcaccagcaaat

SEQ ID NO: 2041819 - DNA, 15 bp, Homo sapiens
cctcaccagcaaata

SEQ ID NO: 2041820 - DNA, 15 bp, Homo sapiens
ctcaccagcaaataa

SEQ ID NO: 2041821 - DNA, 15 bp, Homo sapiens
tcaccagcaaataaa

SEQ ID NO: 2041822 - DNA, 15 bp, Homo sapiens
caccagcaaataaat

SEQ ID NO: 2041823 - DNA, 15 bp, Homo sapiens
accagcaaataaatc

SEQ ID NO: 2041824 - DNA, 15 bp, Homo sapiens
ccagcaaataaatcc

SEQ ID NO: 2041825 - DNA, 15 bp, Homo sapiens
cagcaaataaatcct

SEQ ID NO: 2041826 - DNA, 15 bp, Homo sapiens
agcaaataaatcctg

SEQ ID NO: 2041827 - DNA, 15 bp, Homo sapiens
gcaaataaatcctgc

SEQ ID NO: 2041828 - DNA, 15 bp, Homo sapiens
caaataaatcctgct

SEQ ID NO: 2041829 - DNA, 15 bp, Homo sapiens
aaataaatcctgcta

SEQ ID NO: 2041830 - DNA, 15 bp, Homo sapiens
aataaatcctgctag

SEQ ID NO: 2041831 - DNA, 15 bp, Homo sapiens
ataaatcctgctagg

SEQ ID NO: 2041832 - DNA, 15 bp, Homo sapiens
taaatcctgctaggc

SEQ ID NO: 2041833 - DNA, 15 bp, Homo sapiens
aaatcctgctaggct

SEQ ID NO: 2041834 - DNA, 15 bp, Homo sapiens
aatcctgctaggctt

SEQ ID NO: 2041835 - DNA, 15 bp, Homo sapiens
atcctgctaggcttt

SEQ ID NO: 2041836 - DNA, 15 bp, Homo sapiens
tcctgctaggctttg

SEQ ID NO: 2041837 - DNA, 15 bp, Homo sapiens
cctgctaggctttga

SEQ ID NO: 2041838 - DNA, 15 bp, Homo sapiens
ctgctaggctttgat

SEQ ID NO: 2041839 - DNA, 15 bp, Homo sapiens
tgctaggctttgata

SEQ ID NO: 2041840 - DNA, 15 bp, Homo sapiens
gctaggctttgatat

SEQ ID NO: 2041841 - DNA, 15 bp, Homo sapiens
ctaggctttgatatt

SEQ ID NO: 2041842 - DNA, 15 bp, Homo sapiens
taggctttgatattg

SEQ ID NO: 2041843 - DNA, 15 bp, Homo sapiens
aggctttgatattgg

SEQ ID NO: 2041844 - DNA, 15 bp, Homo sapiens
ggctttgatattgga

SEQ ID NO: 2041845 - DNA, 15 bp, Homo sapiens
gctttgatattggac

SEQ ID NO: 2041846 - DNA, 15 bp, Homo sapiens
ctttgatattggacg

SEQ ID NO: 2041847 - DNA, 15 bp, Homo sapiens
tttgatattggacgt

SEQ ID NO: 2041848 - DNA, 15 bp, Homo sapiens
ttgatattggacgtt

SEQ ID NO: 2041849 - DNA, 15 bp, Homo sapiens
tgatattggacgttg

SEQ ID NO: 2041850 - DNA, 15 bp, Homo sapiens
gatattggacgttgc

SEQ ID NO: 2041851 - DNA, 15 bp, Homo sapiens
atattggacgttgca

SEQ ID NO: 2041852 - DNA, 15 bp, Homo sapiens
tattggacgttgcag

SEQ ID NO: 2041853 - DNA, 15 bp, Homo sapiens
attggacgttgcagc

SEQ ID NO: 2041854 - DNA, 15 bp, Homo sapiens
ttggacgttgcagcc

SEQ ID NO: 2041855 - DNA, 15 bp, Homo sapiens
tggacgttgcagcct

SEQ ID NO: 2041856 - DNA, 15 bp, Homo sapiens
ggacgttgcagcctc

SEQ ID NO: 2041857 - DNA, 15 bp, Homo sapiens
gacgttgcagcctcc

SEQ ID NO: 2041858 - DNA, 15 bp, Homo sapiens
acgttgcagcctcca

SEQ ID NO: 2041859 - DNA, 15 bp, Homo sapiens
cgttgcagcctccag

SEQ ID NO: 2041860 - DNA, 15 bp, Homo sapiens
gttgcagcctccaga

SEQ ID NO: 2041861 - DNA, 15 bp, Homo sapiens
ttgcagcctccagaa

SEQ ID NO: 2041862 - DNA, 15 bp, Homo sapiens
tgcagcctccagaac

SEQ ID NO: 2041863 - DNA, 15 bp, Homo sapiens
gcagcctccagaact

SEQ ID NO: 2041864 - DNA, 15 bp, Homo sapiens
cagcctccagaactg

SEQ ID NO: 2041865 - DNA, 15 bp, Homo sapiens
agcctccagaactgt

SEQ ID NO: 2041866 - DNA, 15 bp, Homo sapiens
gcctccagaactgta

SEQ ID NO: 2041867 - DNA, 15 bp, Homo sapiens
cctccagaactgtaa

SEQ ID NO: 2041868 - DNA, 15 bp, Homo sapiens
ctccagaactgtaag

SEQ ID NO: 2041869 - DNA, 15 bp, Homo sapiens
tccagaactgtaaga

SEQ ID NO: 2041870 - DNA, 15 bp, Homo sapiens
ccagaactgtaagaa

SEQ ID NO: 2041871 - DNA, 15 bp, Homo sapiens
cagaactgtaagaaa

SEQ ID NO: 2041872 - DNA, 15 bp, Homo sapiens
gaactgtaagaaaac

SEQ ID NO: 2041873 - DNA, 15 bp, Homo sapiens
aactgtaagaaaacc

SEQ ID NO: 2041874 - DNA, 15 bp, Homo sapiens
actgtaagaaaacca

SEQ ID NO: 2041875 - DNA, 15 bp, Homo sapiens
ctgtaagaaaaccaa

SEQ ID NO: 2041876 - DNA, 15 bp, Homo sapiens
tgtaagaaaaccaat

SEQ ID NO: 2041877 - DNA, 15 bp, Homo sapiens
gtaagaaaaccaatt

SEQ ID NO: 2041878 - DNA, 15 bp, Homo sapiens
taagaaaaccaattt

SEQ ID NO: 2041879 - DNA, 15 bp, Homo sapiens
aagaaaaccaatttt

SEQ ID NO: 2041880 - DNA, 15 bp, Homo sapiens
agaaaaccaattttc

SEQ ID NO: 2041881 - DNA, 15 bp, Homo sapiens
gaaaaccaattttca

SEQ ID NO: 2041882 - DNA, 15 bp, Homo sapiens
aaaaccaattttcat

SEQ ID NO: 2041883 - DNA, 15 bp, Homo sapiens
aaaccaattttcatt

SEQ ID NO: 2041884 - DNA, 15 bp, Homo sapiens
aaccaattttcattg

SEQ ID NO: 2041885 - DNA, 15 bp, Homo sapiens
accaattttcattgt

SEQ ID NO: 2041886 - DNA, 15 bp, Homo sapiens
ccaattttcattgtg

SEQ ID NO: 2041887 - DNA, 15 bp, Homo sapiens
caattttcattgtgt

SEQ ID NO: 2041888 - DNA, 15 bp, Homo sapiens
aattttcattgtgta

SEQ ID NO: 2041889 - DNA, 15 bp, Homo sapiens
attttcattgtgtaa

SEQ ID NO: 2041890 - DNA, 15 bp, Homo sapiens
ttttcattgtgtaag

SEQ ID NO: 2041891 - DNA, 15 bp, Homo sapiens
tttcattgtgtaagc

SEQ ID NO: 2041892 - DNA, 15 bp, Homo sapiens
ttcattgtgtaagcc

SEQ ID NO: 2041893 - DNA, 15 bp, Homo sapiens
tcattgtgtaagcca

SEQ ID NO: 2041894 - DNA, 15 bp, Homo sapiens
cattgtgtaagccac

SEQ ID NO: 2041895 - DNA, 15 bp, Homo sapiens
attgtgtaagccacc

SEQ ID NO: 2041896 - DNA, 15 bp, Homo sapiens
ttgtgtaagccaccc

SEQ ID NO: 2041897 - DNA, 15 bp, Homo sapiens
tgtgtaagccacccg

SEQ ID NO: 2041898 - DNA, 15 bp, Homo sapiens
gtgtaagccacccgg

SEQ ID NO: 2041899 - DNA, 15 bp, Homo sapiens
tgtaagccacccggt

SEQ ID NO: 2041900 - DNA, 15 bp, Homo sapiens
gtaagccacccggtc

SEQ ID NO: 2041901 - DNA, 15 bp, Homo sapiens
taagccacccggtct

SEQ ID NO: 2041902 - DNA, 15 bp, Homo sapiens
aagccacccggtctg

SEQ ID NO: 2041903 - DNA, 15 bp, Homo sapiens
agccacccggtctgt

SEQ ID NO: 2041904 - DNA, 15 bp, Homo sapiens
gccacccggtctgtg

SEQ ID NO: 2041905 - DNA, 15 bp, Homo sapiens
ccacccggtctgtgg

SEQ ID NO: 2041906 - DNA, 15 bp, Homo sapiens
cacccggtctgtggt

SEQ ID NO: 2041907 - DNA, 15 bp, Homo sapiens
acccggtctgtggtg

SEQ ID NO: 2041908 - DNA, 15 bp, Homo sapiens
cccggtctgtggtgt

SEQ ID NO: 2041909 - DNA, 15 bp, Homo sapiens
ccggtctgtggtgtt

SEQ ID NO: 2041910 - DNA, 15 bp, Homo sapiens
cggtctgtggtgttt

SEQ ID NO: 2041911 - DNA, 15 bp, Homo sapiens
ggtctgtggtgtttt

SEQ ID NO: 2041912 - DNA, 15 bp, Homo sapiens
gtctgtggtgttttg

SEQ ID NO: 2041913 - DNA, 15 bp, Homo sapiens
tctgtggtgttttgt

SEQ ID NO: 2041914 - DNA, 15 bp, Homo sapiens
ctgtggtgttttgtt

SEQ ID NO: 2041915 - DNA, 15 bp, Homo sapiens
tgtggtgttttgtta

SEQ ID NO: 2041916 - DNA, 15 bp, Homo sapiens
gtggtgttttgttat

SEQ ID NO: 2041917 - DNA, 15 bp, Homo sapiens
tggtgttttgttatg

SEQ ID NO: 2041918 - DNA, 15 bp, Homo sapiens
ggtgttttgttatgg

SEQ ID NO: 2041919 - DNA, 15 bp, Homo sapiens
gtgttttgttatggc

SEQ ID NO: 2041920 - DNA, 15 bp, Homo sapiens
tgttttgttatggca

SEQ ID NO: 2041921 - DNA, 15 bp, Homo sapiens
gttttgttatggcag

SEQ ID NO: 2041922 - DNA, 15 bp, Homo sapiens
ttttgttatggcaga

SEQ ID NO: 2041923 - DNA, 15 bp, Homo sapiens
tttgttatggcagac

SEQ ID NO: 2041924 - DNA, 15 bp, Homo sapiens
ttgttatggcagaca

SEQ ID NO: 2041925 - DNA, 15 bp, Homo sapiens
tgttatggcagacag

SEQ ID NO: 2041926 - DNA, 15 bp, Homo sapiens
gttatggcagacaga

SEQ ID NO: 2041927 - DNA, 15 bp, Homo sapiens
ttatggcagacagaa

SEQ ID NO: 2041928 - DNA, 15 bp, Homo sapiens
tatggcagacagaac

SEQ ID NO: 2041929 - DNA, 15 bp, Homo sapiens
atggcagacagaact

SEQ ID NO: 2041930 - DNA, 15 bp, Homo sapiens
tggcagacagaactg

SEQ ID NO: 2041931 - DNA, 15 bp, Homo sapiens
ggcagacagaactga

SEQ ID NO: 2041932 - DNA, 15 bp, Homo sapiens
gcagacagaactgac

SEQ ID NO: 2041933 - DNA, 15 bp, Homo sapiens
cagacagaactgact

SEQ ID NO: 2041934 - DNA, 15 bp, Homo sapiens
agacagaactgacta

SEQ ID NO: 2041935 - DNA, 15 bp, Homo sapiens
gacagaactgactag

SEQ ID NO: 2041936 - DNA, 15 bp, Homo sapiens
acagaactgactagc

SEQ ID NO: 2041937 - DNA, 15 bp, Homo sapiens
cagaactgactagca

SEQ ID NO: 2041938 - DNA, 15 bp, Homo sapiens
agaactgactagcac

SEQ ID NO: 2041939 - DNA, 15 bp, Homo sapiens
gaactgactagcaca

SEQ ID NO: 2041940 - DNA, 15 bp, Homo sapiens
aactgactagcacag

SEQ ID NO: 2041941 - DNA, 15 bp, Homo sapiens
actgactagcacagg

SEQ ID NO: 2041942 - DNA, 15 bp, Homo sapiens
ctgactagcacagga

SEQ ID NO: 2041943 - DNA, 15 bp, Homo sapiens
tgactagcacaggag

SEQ ID NO: 2041944 - DNA, 15 bp, Homo sapiens
gactagcacaggagc

SEQ ID NO: 2041945 - DNA, 15 bp, Homo sapiens
actagcacaggagct

SEQ ID NO: 2041946 - DNA, 15 bp, Homo sapiens
ctagcacaggagctt

SEQ ID NO: 2041947 - DNA, 15 bp, Homo sapiens
tagcacaggagcttg

SEQ ID NO: 2041948 - DNA, 15 bp, Homo sapiens
agcacaggagcttgg

SEQ ID NO: 2041949 - DNA, 15 bp, Homo sapiens
gcacaggagcttggt

SEQ ID NO: 2041950 - DNA, 15 bp, Homo sapiens
cacaggagcttggtg

SEQ ID NO: 2041951 - DNA, 15 bp, Homo sapiens
acaggagcttggtga

SEQ ID NO: 2041952 - DNA, 15 bp, Homo sapiens
caggagcttggtgaa

SEQ ID NO: 2041953 - DNA, 15 bp, Homo sapiens
aggagcttggtgaag

SEQ ID NO: 2041954 - DNA, 15 bp, Homo sapiens
ggagcttggtgaagg

SEQ ID NO: 2041955 - DNA, 15 bp, Homo sapiens
gagcttggtgaagga

SEQ ID NO: 2041956 - DNA, 15 bp, Homo sapiens
agcttggtgaaggag

SEQ ID NO: 2041957 - DNA, 15 bp, Homo sapiens
gcttggtgaaggagt

SEQ ID NO: 2041958 - DNA, 15 bp, Homo sapiens
cttggtgaaggagtg

SEQ ID NO: 2041959 - DNA, 15 bp, Homo sapiens
ttggtgaaggagtgg

SEQ ID NO: 2041960 - DNA, 15 bp, Homo sapiens
tggtgaaggagtggg

SEQ ID NO: 2041961 - DNA, 15 bp, Homo sapiens
ggtgaaggagtgggg

SEQ ID NO: 2041962 - DNA, 15 bp, Homo sapiens
gtgaaggagtggggt

SEQ ID NO: 2041963 - DNA, 15 bp, Homo sapiens
tgaaggagtggggtg

SEQ ID NO: 2041964 - DNA, 15 bp, Homo sapiens
gaaggagtggggtgg

SEQ ID NO: 2041965 - DNA, 15 bp, Homo sapiens
aaggagtggggtggc

SEQ ID NO: 2041966 - DNA, 15 bp, Homo sapiens
aggagtggggtggca

SEQ ID NO: 2041967 - DNA, 15 bp, Homo sapiens
ggagtggggtggcag

SEQ ID NO: 2041968 - DNA, 15 bp, Homo sapiens
gagtggggtggcagg

SEQ ID NO: 2041969 - DNA, 15 bp, Homo sapiens
agtggggtggcagga

SEQ ID NO: 2041970 - DNA, 15 bp, Homo sapiens
gtggggtggcaggaa

SEQ ID NO: 2041971 - DNA, 15 bp, Homo sapiens
tggggtggcaggaat

SEQ ID NO: 2041972 - DNA, 15 bp, Homo sapiens
ggggtggcaggaatt

SEQ ID NO: 2041973 - DNA, 15 bp, Homo sapiens
gggtggcaggaattg

SEQ ID NO: 2041974 - DNA, 15 bp, Homo sapiens
ggtggcaggaattgg

SEQ ID NO: 2041975 - DNA, 15 bp, Homo sapiens
gtggcaggaattggg

SEQ ID NO: 2041976 - DNA, 15 bp, Homo sapiens
tggcaggaattggga

SEQ ID NO: 2041977 - DNA, 15 bp, Homo sapiens
ggcaggaattgggag

SEQ ID NO: 2041978 - DNA, 15 bp, Homo sapiens
gcaggaattgggaga

SEQ ID NO: 2041979 - DNA, 15 bp, Homo sapiens
caggaattgggagat

SEQ ID NO: 2041980 - DNA, 15 bp, Homo sapiens
aggaattgggagatg

SEQ ID NO: 2041981 - DNA, 15 bp, Homo sapiens
ggaattgggagatgt

SEQ ID NO: 2041982 - DNA, 15 bp, Homo sapiens
gaattgggagatgtt

SEQ ID NO: 2041983 - DNA, 15 bp, Homo sapiens
aattgggagatgttc

SEQ ID NO: 2041984 - DNA, 15 bp, Homo sapiens
attgggagatgttca

SEQ ID NO: 2041985 - DNA, 15 bp, Homo sapiens
ttgggagatgttcat

SEQ ID NO: 2041986 - DNA, 15 bp, Homo sapiens
tgggagatgttcatg

SEQ ID NO: 2041987 - DNA, 15 bp, Homo sapiens
gggagatgttcatgc

SEQ ID NO: 2041988 - DNA, 15 bp, Homo sapiens
ggagatgttcatgcc

SEQ ID NO: 2041989 - DNA, 15 bp, Homo sapiens
gagatgttcatgcca

SEQ ID NO: 2041990 - DNA, 15 bp, Homo sapiens
agatgttcatgccat

SEQ ID NO: 2041991 - DNA, 15 bp, Homo sapiens
gatgttcatgccatt

SEQ ID NO: 2041992 - DNA, 15 bp, Homo sapiens
atgttcatgccattc

SEQ ID NO: 2041993 - DNA, 15 bp, Homo sapiens
tgttcatgccattca

SEQ ID NO: 2041994 - DNA, 15 bp, Homo sapiens
gttcatgccattcac

SEQ ID NO: 2041995 - DNA, 15 bp, Homo sapiens
ttcatgccattcacc

SEQ ID NO: 2041996 - DNA, 15 bp, Homo sapiens
tcatgccattcacct

SEQ ID NO: 2041997 - DNA, 15 bp, Homo sapiens
catgccattcaccta

SEQ ID NO: 2041998 - DNA, 15 bp, Homo sapiens
atgccattcacctag

SEQ ID NO: 2041999 - DNA, 15 bp, Homo sapiens
tgccattcacctaga

SEQ ID NO: 2042000 - DNA, 15 bp, Homo sapiens
gccattcacctagat

SEQ ID NO: 2042001 - DNA, 15 bp, Homo sapiens
ccattcacctagatc

SEQ ID NO: 2042002 - DNA, 15 bp, Homo sapiens
cattcacctagatca

SEQ ID NO: 2042003 - DNA, 15 bp, Homo sapiens
attcacctagatcaa

SEQ ID NO: 2042004 - DNA, 15 bp, Homo sapiens
ttcacctagatcaag

SEQ ID NO: 2042005 - DNA, 15 bp, Homo sapiens
tcacctagatcaaga

SEQ ID NO: 2042006 - DNA, 15 bp, Homo sapiens
cacctagatcaagaa

SEQ ID NO: 2042007 - DNA, 15 bp, Homo sapiens
acctagatcaagaac

SEQ ID NO: 2042008 - DNA, 15 bp, Homo sapiens
cctagatcaagaaca

SEQ ID NO: 2042009 - DNA, 15 bp, Homo sapiens
ctagatcaagaacac

SEQ ID NO: 2042010 - DNA, 15 bp, Homo sapiens
tagatcaagaacaca

SEQ ID NO: 2042011 - DNA, 15 bp, Homo sapiens
agatcaagaacacag

SEQ ID NO: 2042012 - DNA, 15 bp, Homo sapiens
gatcaagaacacagg

SEQ ID NO: 2042013 - DNA, 15 bp, Homo sapiens
atcaagaacacagga

SEQ ID NO: 2042014 - DNA, 15 bp, Homo sapiens
tcaagaacacaggac

SEQ ID NO: 2042015 - DNA, 15 bp, Homo sapiens
caagaacacaggaca

SEQ ID NO: 2042016 - DNA, 15 bp, Homo sapiens
aagaacacaggacaa

SEQ ID NO: 2042017 - DNA, 15 bp, Homo sapiens
agaacacaggacaag

SEQ ID NO: 2042018 - DNA, 15 bp, Homo sapiens
gaacacaggacaaga

SEQ ID NO: 2042019 - DNA, 15 bp, Homo sapiens
aacacaggacaagaa

SEQ ID NO: 2042020 - DNA, 15 bp, Homo sapiens
acacaggacaagaag

SEQ ID NO: 2042021 - DNA, 15 bp, Homo sapiens
cacaggacaagaagc

SEQ ID NO: 2042022 - DNA, 15 bp, Homo sapiens
acaggacaagaagca

SEQ ID NO: 2042023 - DNA, 15 bp, Homo sapiens
caggacaagaagcaa

SEQ ID NO: 2042024 - DNA, 15 bp, Homo sapiens
aggacaagaagcaaa

SEQ ID NO: 2042025 - DNA, 15 bp, Homo sapiens
ggacaagaagcaaat

SEQ ID NO: 2042026 - DNA, 15 bp, Homo sapiens
gacaagaagcaaatt

SEQ ID NO: 2042027 - DNA, 15 bp, Homo sapiens
acaagaagcaaattg

SEQ ID NO: 2042028 - DNA, 15 bp, Homo sapiens
caagaagcaaattgg

SEQ ID NO: 2042029 - DNA, 15 bp, Homo sapiens
aagaagcaaattggg

SEQ ID NO: 2042030 - DNA, 15 bp, Homo sapiens
agaagcaaattggga

SEQ ID NO: 2042031 - DNA, 15 bp, Homo sapiens
gaagcaaattgggac

SEQ ID NO: 2042032 - DNA, 15 bp, Homo sapiens
aagcaaattgggaca

SEQ ID NO: 2042033 - DNA, 15 bp, Homo sapiens
agcaaattgggacag

SEQ ID NO: 2042034 - DNA, 15 bp, Homo sapiens
gcaaattgggacagt

SEQ ID NO: 2042035 - DNA, 15 bp, Homo sapiens
caaattgggacagtg

SEQ ID NO: 2042036 - DNA, 15 bp, Homo sapiens
aaattgggacagtgt

SEQ ID NO: 2042037 - DNA, 15 bp, Homo sapiens
aattgggacagtgta

SEQ ID NO: 2042038 - DNA, 15 bp, Homo sapiens
attgggacagtgtaa

SEQ ID NO: 2042039 - DNA, 15 bp, Homo sapiens
ttgggacagtgtaag

SEQ ID NO: 2042040 - DNA, 15 bp, Homo sapiens
tgggacagtgtaagt

SEQ ID NO: 2042041 - DNA, 15 bp, Homo sapiens
gggacagtgtaagtt

SEQ ID NO: 2042042 - DNA, 15 bp, Homo sapiens
ggacagtgtaagttc

SEQ ID NO: 2042043 - DNA, 15 bp, Homo sapiens
gacagtgtaagttca

SEQ ID NO: 2042044 - DNA, 15 bp, Homo sapiens
acagtgtaagttcag

SEQ ID NO: 2042045 - DNA, 15 bp, Homo sapiens
cagtgtaagttcaga

SEQ ID NO: 2042046 - DNA, 15 bp, Homo sapiens
agtgtaagttcagat

SEQ ID NO: 2042047 - DNA, 15 bp, Homo sapiens
gtgtaagttcagatt

SEQ ID NO: 2042048 - DNA, 15 bp, Homo sapiens
tgtaagttcagattt

SEQ ID NO: 2042049 - DNA, 15 bp, Homo sapiens
gtaagttcagatttg

SEQ ID NO: 2042050 - DNA, 15 bp, Homo sapiens
taagttcagatttgg

SEQ ID NO: 2042051 - DNA, 15 bp, Homo sapiens
aagttcagatttgga

SEQ ID NO: 2042052 - DNA, 15 bp, Homo sapiens
agttcagatttggat

SEQ ID NO: 2042053 - DNA, 15 bp, Homo sapiens
gttcagatttggata

SEQ ID NO: 2042054 - DNA, 15 bp, Homo sapiens
ttcagatttggatat

SEQ ID NO: 2042055 - DNA, 15 bp, Homo sapiens
tcagatttggatatg

SEQ ID NO: 2042056 - DNA, 15 bp, Homo sapiens
cagatttggatatgt

SEQ ID NO: 2042057 - DNA, 15 bp, Homo sapiens
agatttggatatgtt

SEQ ID NO: 2042058 - DNA, 15 bp, Homo sapiens
gatttggatatgttg

SEQ ID NO: 2042059 - DNA, 15 bp, Homo sapiens
atttggatatgttgt

SEQ ID NO: 2042060 - DNA, 15 bp, Homo sapiens
tttggatatgttgtt

SEQ ID NO: 2042061 - DNA, 15 bp, Homo sapiens
ttggatatgttgttt

SEQ ID NO: 2042062 - DNA, 15 bp, Homo sapiens
tggatatgttgtttg

SEQ ID NO: 2042063 - DNA, 15 bp, Homo sapiens
ggatatgttgtttgg

SEQ ID NO: 2042064 - DNA, 15 bp, Homo sapiens
gatatgttgtttggc

SEQ ID NO: 2042065 - DNA, 15 bp, Homo sapiens
atatgttgtttggca

SEQ ID NO: 2042066 - DNA, 15 bp, Homo sapiens
tatgttgtttggcag

SEQ ID NO: 2042067 - DNA, 15 bp, Homo sapiens
atgttgtttggcaga

SEQ ID NO: 2042068 - DNA, 15 bp, Homo sapiens
tgttgtttggcagaa

SEQ ID NO: 2042069 - DNA, 15 bp, Homo sapiens
gttgtttggcagaaa

SEQ ID NO: 2042070 - DNA, 15 bp, Homo sapiens
ttgtttggcagaaat

SEQ ID NO: 2042071 - DNA, 15 bp, Homo sapiens
tgtttggcagaaatt

SEQ ID NO: 2042072 - DNA, 15 bp, Homo sapiens
gtttggcagaaattc

SEQ ID NO: 2042073 - DNA, 15 bp, Homo sapiens
tttggcagaaattca

SEQ ID NO: 2042074 - DNA, 15 bp, Homo sapiens
ttggcagaaattcac

SEQ ID NO: 2042075 - DNA, 15 bp, Homo sapiens
tggcagaaattcaca

SEQ ID NO: 2042076 - DNA, 15 bp, Homo sapiens
ggcagaaattcacat

SEQ ID NO: 2042077 - DNA, 15 bp, Homo sapiens
gcagaaattcacata

SEQ ID NO: 2042078 - DNA, 15 bp, Homo sapiens
cagaaattcacataa

SEQ ID NO: 2042079 - DNA, 15 bp, Homo sapiens
agaaattcacataag

SEQ ID NO: 2042080 - DNA, 15 bp, Homo sapiens
gaaattcacataagg

SEQ ID NO: 2042081 - DNA, 15 bp, Homo sapiens
aaattcacataagga

SEQ ID NO: 2042082 - DNA, 15 bp, Homo sapiens
aattcacataaggag

SEQ ID NO: 2042083 - DNA, 15 bp, Homo sapiens
attcacataaggagg

SEQ ID NO: 2042084 - DNA, 15 bp, Homo sapiens
ttcacataaggaggt

SEQ ID NO: 2042085 - DNA, 15 bp, Homo sapiens
tcacataaggaggta

SEQ ID NO: 2042086 - DNA, 15 bp, Homo sapiens
cacataaggaggtaa

SEQ ID NO: 2042087 - DNA, 15 bp, Homo sapiens
acataaggaggtaaa

SEQ ID NO: 2042088 - DNA, 15 bp, Homo sapiens
cataaggaggtaaac

SEQ ID NO: 2042089 - DNA, 15 bp, Homo sapiens
ataaggaggtaaaca

SEQ ID NO: 2042090 - DNA, 15 bp, Homo sapiens
taaggaggtaaacaa

SEQ ID NO: 2042091 - DNA, 15 bp, Homo sapiens
aaggaggtaaacaac

SEQ ID NO: 2042092 - DNA, 15 bp, Homo sapiens
aggaggtaaacaact

SEQ ID NO: 2042093 - DNA, 15 bp, Homo sapiens
ggaggtaaacaactg

SEQ ID NO: 2042094 - DNA, 15 bp, Homo sapiens
gaggtaaacaactga

SEQ ID NO: 2042095 - DNA, 15 bp, Homo sapiens
aggtaaacaactgaa

SEQ ID NO: 2042096 - DNA, 15 bp, Homo sapiens
ggtaaacaactgaaa

SEQ ID NO: 2042097 - DNA, 15 bp, Homo sapiens
gtaaacaactgaaaa

SEQ ID NO: 2042098 - DNA, 15 bp, Homo sapiens
taaacaactgaaaat

SEQ ID NO: 2042099 - DNA, 15 bp, Homo sapiens
aaacaactgaaaata

SEQ ID NO: 2042100 - DNA, 15 bp, Homo sapiens
aacaactgaaaatat

SEQ ID NO: 2042101 - DNA, 15 bp, Homo sapiens
acaactgaaaatata

SEQ ID NO: 2042102 - DNA, 15 bp, Homo sapiens
aactgaaaatataga

SEQ ID NO: 2042103 - DNA, 15 bp, Homo sapiens
actgaaaatatagat

SEQ ID NO: 2042104 - DNA, 15 bp, Homo sapiens
ctgaaaatatagatt

SEQ ID NO: 2042105 - DNA, 15 bp, Homo sapiens
tgaaaatatagattg

SEQ ID NO: 2042106 - DNA, 15 bp, Homo sapiens
gaaaatatagattgg

SEQ ID NO: 2042107 - DNA, 15 bp, Homo sapiens
aaaatatagattgga

SEQ ID NO: 2042108 - DNA, 15 bp, Homo sapiens
aaatatagattggaa

SEQ ID NO: 2042109 - DNA, 15 bp, Homo sapiens
aatatagattggaag

SEQ ID NO: 2042110 - DNA, 15 bp, Homo sapiens
atatagattggaagc

SEQ ID NO: 2042111 - DNA, 15 bp, Homo sapiens
tatagattggaagct

SEQ ID NO: 2042112 - DNA, 15 bp, Homo sapiens
atagattggaagctc

SEQ ID NO: 2042113 - DNA, 15 bp, Homo sapiens
tagattggaagctct

SEQ ID NO: 2042114 - DNA, 15 bp, Homo sapiens
agattggaagctctg

SEQ ID NO: 2042115 - DNA, 15 bp, Homo sapiens
gattggaagctctga

SEQ ID NO: 2042116 - DNA, 15 bp, Homo sapiens
attggaagctctgaa

SEQ ID NO: 2042117 - DNA, 15 bp, Homo sapiens
ttggaagctctgaag

SEQ ID NO: 2042118 - DNA, 15 bp, Homo sapiens
tggaagctctgaaga

SEQ ID NO: 2042119 - DNA, 15 bp, Homo sapiens
ggaagctctgaagag

SEQ ID NO: 2042120 - DNA, 15 bp, Homo sapiens
gaagctctgaagaga

SEQ ID NO: 2042121 - DNA, 15 bp, Homo sapiens
aagctctgaagagag

SEQ ID NO: 2042122 - DNA, 15 bp, Homo sapiens
agctctgaagagagg

SEQ ID NO: 2042123 - DNA, 15 bp, Homo sapiens
gctctgaagagaggt

SEQ ID NO: 2042124 - DNA, 15 bp, Homo sapiens
ctctgaagagaggtt

SEQ ID NO: 2042125 - DNA, 15 bp, Homo sapiens
tctgaagagaggttg

SEQ ID NO: 2042126 - DNA, 15 bp, Homo sapiens
ctgaagagaggttgg

SEQ ID NO: 2042127 - DNA, 15 bp, Homo sapiens
tgaagagaggttggc

SEQ ID NO: 2042128 - DNA, 15 bp, Homo sapiens
gaagagaggttggct

SEQ ID NO: 2042129 - DNA, 15 bp, Homo sapiens
aagagaggttggcta

SEQ ID NO: 2042130 - DNA, 15 bp, Homo sapiens
agagaggttggctag

SEQ ID NO: 2042131 - DNA, 15 bp, Homo sapiens
gagaggttggctaga

SEQ ID NO: 2042132 - DNA, 15 bp, Homo sapiens
agaggttggctagag

SEQ ID NO: 2042133 - DNA, 15 bp, Homo sapiens
gaggttggctagagg

SEQ ID NO: 2042134 - DNA, 15 bp, Homo sapiens
aggttggctagaggt

SEQ ID NO: 2042135 - DNA, 15 bp, Homo sapiens
ggttggctagaggta

SEQ ID NO: 2042136 - DNA, 15 bp, Homo sapiens
gttggctagaggtat

SEQ ID NO: 2042137 - DNA, 15 bp, Homo sapiens
ttggctagaggtatg

SEQ ID NO: 2042138 - DNA, 15 bp, Homo sapiens
tggctagaggtatgg

SEQ ID NO: 2042139 - DNA, 15 bp, Homo sapiens
ggctagaggtatgga

SEQ ID NO: 2042140 - DNA, 15 bp, Homo sapiens
gctagaggtatggat

SEQ ID NO: 2042141 - DNA, 15 bp, Homo sapiens
ctagaggtatggatt

SEQ ID NO: 2042142 - DNA, 15 bp, Homo sapiens
tagaggtatggattt

SEQ ID NO: 2042143 - DNA, 15 bp, Homo sapiens
agaggtatggattta

SEQ ID NO: 2042144 - DNA, 15 bp, Homo sapiens
gaggtatggatttag

SEQ ID NO: 2042145 - DNA, 15 bp, Homo sapiens
aggtatggatttagg

SEQ ID NO: 2042146 - DNA, 15 bp, Homo sapiens
ggtatggatttagga

SEQ ID NO: 2042147 - DNA, 15 bp, Homo sapiens
gtatggatttaggag

SEQ ID NO: 2042148 - DNA, 15 bp, Homo sapiens
tatggatttaggagc

SEQ ID NO: 2042149 - DNA, 15 bp, Homo sapiens
atggatttaggagcc

SEQ ID NO: 2042150 - DNA, 15 bp, Homo sapiens
tggatttaggagcca

SEQ ID NO: 2042151 - DNA, 15 bp, Homo sapiens
ggatttaggagccat

SEQ ID NO: 2042152 - DNA, 15 bp, Homo sapiens
gatttaggagccatc

SEQ ID NO: 2042153 - DNA, 15 bp, Homo sapiens
atttaggagccatca

SEQ ID NO: 2042154 - DNA, 15 bp, Homo sapiens
tttaggagccatcag

SEQ ID NO: 2042155 - DNA, 15 bp, Homo sapiens
ttaggagccatcagc

SEQ ID NO: 2042156 - DNA, 15 bp, Homo sapiens
taggagccatcagca

SEQ ID NO: 2042157 - DNA, 15 bp, Homo sapiens
aggagccatcagcaa

SEQ ID NO: 2042158 - DNA, 15 bp, Homo sapiens
ggagccatcagcaac

SEQ ID NO: 2042159 - DNA, 15 bp, Homo sapiens
gagccatcagcaaca

SEQ ID NO: 2042160 - DNA, 15 bp, Homo sapiens
agccatcagcaacag

SEQ ID NO: 2042161 - DNA, 15 bp, Homo sapiens
gccatcagcaacagg

SEQ ID NO: 2042162 - DNA, 15 bp, Homo sapiens
ccatcagcaacaggt

SEQ ID NO: 2042163 - DNA, 15 bp, Homo sapiens
catcagcaacaggtg

SEQ ID NO: 2042164 - DNA, 15 bp, Homo sapiens
atcagcaacaggtgg

SEQ ID NO: 2042165 - DNA, 15 bp, Homo sapiens
tcagcaacaggtggc

SEQ ID NO: 2042166 - DNA, 15 bp, Homo sapiens
cagcaacaggtggca

SEQ ID NO: 2042167 - DNA, 15 bp, Homo sapiens
agcaacaggtggcag

SEQ ID NO: 2042168 - DNA, 15 bp, Homo sapiens
gcaacaggtggcagc

SEQ ID NO: 2042169 - DNA, 15 bp, Homo sapiens
caacaggtggcagct

SEQ ID NO: 2042170 - DNA, 15 bp, Homo sapiens
aacaggtggcagctg

SEQ ID NO: 2042171 - DNA, 15 bp, Homo sapiens
acaggtggcagctga

SEQ ID NO: 2042172 - DNA, 15 bp, Homo sapiens
caggtggcagctgaa

SEQ ID NO: 2042173 - DNA, 15 bp, Homo sapiens
aggtggcagctgaag

SEQ ID NO: 2042174 - DNA, 15 bp, Homo sapiens
ggtggcagctgaagc

SEQ ID NO: 2042175 - DNA, 15 bp, Homo sapiens
gtggcagctgaagcc

SEQ ID NO: 2042176 - DNA, 15 bp, Homo sapiens
tggcagctgaagcca

SEQ ID NO: 2042177 - DNA, 15 bp, Homo sapiens
ggcagctgaagccac

SEQ ID NO: 2042178 - DNA, 15 bp, Homo sapiens
gcagctgaagccacg

SEQ ID NO: 2042179 - DNA, 15 bp, Homo sapiens
cagctgaagccacgg

SEQ ID NO: 2042180 - DNA, 15 bp, Homo sapiens
agctgaagccacggg

SEQ ID NO: 2042181 - DNA, 15 bp, Homo sapiens
gctgaagccacgggg

SEQ ID NO: 2042182 - DNA, 15 bp, Homo sapiens
ctgaagccacgggga

SEQ ID NO: 2042183 - DNA, 15 bp, Homo sapiens
tgaagccacggggat

SEQ ID NO: 2042184 - DNA, 15 bp, Homo sapiens
gaagccacggggatg

SEQ ID NO: 2042185 - DNA, 15 bp, Homo sapiens
aagccacggggatgg

SEQ ID NO: 2042186 - DNA, 15 bp, Homo sapiens
agccacggggatggg

SEQ ID NO: 2042187 - DNA, 15 bp, Homo sapiens
gccacggggatgggt

SEQ ID NO: 2042188 - DNA, 15 bp, Homo sapiens
ccacggggatgggta

SEQ ID NO: 2042189 - DNA, 15 bp, Homo sapiens
cacggggatgggtat

SEQ ID NO: 2042190 - DNA, 15 bp, Homo sapiens
acggggatgggtata

SEQ ID NO: 2042191 - DNA, 15 bp, Homo sapiens
cggggatgggtatac

SEQ ID NO: 2042192 - DNA, 15 bp, Homo sapiens
ggggatgggtataca

SEQ ID NO: 2042193 - DNA, 15 bp, Homo sapiens
gggatgggtatacag

SEQ ID NO: 2042194 - DNA, 15 bp, Homo sapiens
ggatgggtatacagt

SEQ ID NO: 2042195 - DNA, 15 bp, Homo sapiens
gatgggtatacagtg

SEQ ID NO: 2042196 - DNA, 15 bp, Homo sapiens
atgggtatacagtgc

SEQ ID NO: 2042197 - DNA, 15 bp, Homo sapiens
tgggtatacagtgca

SEQ ID NO: 2042198 - DNA, 15 bp, Homo sapiens
gggtatacagtgcag

SEQ ID NO: 2042199 - DNA, 15 bp, Homo sapiens
ggtatacagtgcagg

SEQ ID NO: 2042200 - DNA, 15 bp, Homo sapiens
gtatacagtgcagga

SEQ ID NO: 2042201 - DNA, 15 bp, Homo sapiens
tatacagtgcaggat

SEQ ID NO: 2042202 - DNA, 15 bp, Homo sapiens
atacagtgcaggatg

SEQ ID NO: 2042203 - DNA, 15 bp, Homo sapiens
tacagtgcaggatgg

SEQ ID NO: 2042204 - DNA, 15 bp, Homo sapiens
acagtgcaggatggg

SEQ ID NO: 2042205 - DNA, 15 bp, Homo sapiens
cagtgcaggatggga

SEQ ID NO: 2042206 - DNA, 15 bp, Homo sapiens
agtgcaggatgggaa

SEQ ID NO: 2042207 - DNA, 15 bp, Homo sapiens
gtgcaggatgggaat

SEQ ID NO: 2042208 - DNA, 15 bp, Homo sapiens
tgcaggatgggaatt

SEQ ID NO: 2042209 - DNA, 15 bp, Homo sapiens
gcaggatgggaattc

SEQ ID NO: 2042210 - DNA, 15 bp, Homo sapiens
caggatgggaattca

SEQ ID NO: 2042211 - DNA, 15 bp, Homo sapiens
aggatgggaattcaa

SEQ ID NO: 2042212 - DNA, 15 bp, Homo sapiens
ggatgggaattcaac

SEQ ID NO: 2042213 - DNA, 15 bp, Homo sapiens
gatgggaattcaacc

SEQ ID NO: 2042214 - DNA, 15 bp, Homo sapiens
atgggaattcaaccc

SEQ ID NO: 2042215 - DNA, 15 bp, Homo sapiens
tgggaattcaaccct

SEQ ID NO: 2042216 - DNA, 15 bp, Homo sapiens
gggaattcaacccta

SEQ ID NO: 2042217 - DNA, 15 bp, Homo sapiens
ggaattcaaccctag

SEQ ID NO: 2042218 - DNA, 15 bp, Homo sapiens
gaattcaaccctagt

SEQ ID NO: 2042219 - DNA, 15 bp, Homo sapiens
aattcaaccctagtc

SEQ ID NO: 2042220 - DNA, 15 bp, Homo sapiens
attcaaccctagtct

SEQ ID NO: 2042221 - DNA, 15 bp, Homo sapiens
ttcaaccctagtctc

SEQ ID NO: 2042222 - DNA, 15 bp, Homo sapiens
tcaaccctagtctct

SEQ ID NO: 2042223 - DNA, 15 bp, Homo sapiens
caaccctagtctctg

SEQ ID NO: 2042224 - DNA, 15 bp, Homo sapiens
aaccctagtctctga

SEQ ID NO: 2042225 - DNA, 15 bp, Homo sapiens
accctagtctctgag

SEQ ID NO: 2042226 - DNA, 15 bp, Homo sapiens
ccctagtctctgaga

SEQ ID NO: 2042227 - DNA, 15 bp, Homo sapiens
cctagtctctgagaa

SEQ ID NO: 2042228 - DNA, 15 bp, Homo sapiens
ctagtctctgagaag

SEQ ID NO: 2042229 - DNA, 15 bp, Homo sapiens
tagtctctgagaaga

SEQ ID NO: 2042230 - DNA, 15 bp, Homo sapiens
agtctctgagaagaa

SEQ ID NO: 2042231 - DNA, 15 bp, Homo sapiens
gtctctgagaagaaa

SEQ ID NO: 2042232 - DNA, 15 bp, Homo sapiens
tctctgagaagaaat

SEQ ID NO: 2042233 - DNA, 15 bp, Homo sapiens
ctctgagaagaaatg

SEQ ID NO: 2042234 - DNA, 15 bp, Homo sapiens
tctgagaagaaatgt

SEQ ID NO: 2042235 - DNA, 15 bp, Homo sapiens
ctgagaagaaatgtc

SEQ ID NO: 2042236 - DNA, 15 bp, Homo sapiens
tgagaagaaatgtcc

SEQ ID NO: 2042237 - DNA, 15 bp, Homo sapiens
gagaagaaatgtcca

SEQ ID NO: 2042238 - DNA, 15 bp, Homo sapiens
agaagaaatgtccag

SEQ ID NO: 2042239 - DNA, 15 bp, Homo sapiens
gaagaaatgtccaga

SEQ ID NO: 2042240 - DNA, 15 bp, Homo sapiens
aagaaatgtccagag

SEQ ID NO: 2042241 - DNA, 15 bp, Homo sapiens
agaaatgtccagaga

SEQ ID NO: 2042242 - DNA, 15 bp, Homo sapiens
gaaatgtccagagat

SEQ ID NO: 2042243 - DNA, 15 bp, Homo sapiens
aaatgtccagagatg

SEQ ID NO: 2042244 - DNA, 15 bp, Homo sapiens
aatgtccagagatgg

SEQ ID NO: 2042245 - DNA, 15 bp, Homo sapiens
atgtccagagatgga

SEQ ID NO: 2042246 - DNA, 15 bp, Homo sapiens
tgtccagagatggag

SEQ ID NO: 2042247 - DNA, 15 bp, Homo sapiens
gtccagagatggagg

SEQ ID NO: 2042248 - DNA, 15 bp, Homo sapiens
tccagagatggagga

SEQ ID NO: 2042249 - DNA, 15 bp, Homo sapiens
ccagagatggaggaa

SEQ ID NO: 2042250 - DNA, 15 bp, Homo sapiens
cagagatggaggaag

SEQ ID NO: 2042251 - DNA, 15 bp, Homo sapiens
agagatggaggaaga

SEQ ID NO: 2042252 - DNA, 15 bp, Homo sapiens
gagatggaggaagag

SEQ ID NO: 2042253 - DNA, 15 bp, Homo sapiens
agatggaggaagaga

SEQ ID NO: 2042254 - DNA, 15 bp, Homo sapiens
gatggaggaagagaa

SEQ ID NO: 2042255 - DNA, 15 bp, Homo sapiens
atggaggaagagaac

SEQ ID NO: 2042256 - DNA, 15 bp, Homo sapiens
tggaggaagagaacc

SEQ ID NO: 2042257 - DNA, 15 bp, Homo sapiens
ggaggaagagaacca

SEQ ID NO: 2042258 - DNA, 15 bp, Homo sapiens
gaggaagagaaccat

SEQ ID NO: 2042259 - DNA, 15 bp, Homo sapiens
aggaagagaaccatg

SEQ ID NO: 2042260 - DNA, 15 bp, Homo sapiens
ggaagagaaccatga

SEQ ID NO: 2042261 - DNA, 15 bp, Homo sapiens
gaagagaaccatgat

SEQ ID NO: 2042262 - DNA, 15 bp, Homo sapiens
aagagaaccatgata

SEQ ID NO: 2042263 - DNA, 15 bp, Homo sapiens
agagaaccatgatag

SEQ ID NO: 2042264 - DNA, 15 bp, Homo sapiens
gagaaccatgataga

SEQ ID NO: 2042265 - DNA, 15 bp, Homo sapiens
agaaccatgatagag

SEQ ID NO: 2042266 - DNA, 15 bp, Homo sapiens
gaaccatgatagagt

SEQ ID NO: 2042267 - DNA, 15 bp, Homo sapiens
aaccatgatagagtg

SEQ ID NO: 2042268 - DNA, 15 bp, Homo sapiens
accatgatagagtgg

SEQ ID NO: 2042269 - DNA, 15 bp, Homo sapiens
ccatgatagagtggt

SEQ ID NO: 2042270 - DNA, 15 bp, Homo sapiens
catgatagagtggtg

SEQ ID NO: 2042271 - DNA, 15 bp, Homo sapiens
atgatagagtggtga

SEQ ID NO: 2042272 - DNA, 15 bp, Homo sapiens
tgatagagtggtgac

SEQ ID NO: 2042273 - DNA, 15 bp, Homo sapiens
gatagagtggtgact

SEQ ID NO: 2042274 - DNA, 15 bp, Homo sapiens
atagagtggtgactc

SEQ ID NO: 2042275 - DNA, 15 bp, Homo sapiens
tagagtggtgactct

SEQ ID NO: 2042276 - DNA, 15 bp, Homo sapiens
agagtggtgactctg

SEQ ID NO: 2042277 - DNA, 15 bp, Homo sapiens
gagtggtgactctgc

SEQ ID NO: 2042278 - DNA, 15 bp, Homo sapiens
agtggtgactctgca

SEQ ID NO: 2042279 - DNA, 15 bp, Homo sapiens
gtggtgactctgcag

SEQ ID NO: 2042280 - DNA, 15 bp, Homo sapiens
tggtgactctgcagc

SEQ ID NO: 2042281 - DNA, 15 bp, Homo sapiens
ggtgactctgcagcc

SEQ ID NO: 2042282 - DNA, 15 bp, Homo sapiens
gtgactctgcagcca

SEQ ID NO: 2042283 - DNA, 15 bp, Homo sapiens
tgactctgcagccaa

SEQ ID NO: 2042284 - DNA, 15 bp, Homo sapiens
gactctgcagccaat

SEQ ID NO: 2042285 - DNA, 15 bp, Homo sapiens
actctgcagccaatg

SEQ ID NO: 2042286 - DNA, 15 bp, Homo sapiens
ctctgcagccaatga

SEQ ID NO: 2042287 - DNA, 15 bp, Homo sapiens
tctgcagccaatgag

SEQ ID NO: 2042288 - DNA, 15 bp, Homo sapiens
ctgcagccaatgaga

SEQ ID NO: 2042289 - DNA, 15 bp, Homo sapiens
tgcagccaatgagag

SEQ ID NO: 2042290 - DNA, 15 bp, Homo sapiens
gcagccaatgagaga

SEQ ID NO: 2042291 - DNA, 15 bp, Homo sapiens
cagccaatgagagaa

SEQ ID NO: 2042292 - DNA, 15 bp, Homo sapiens
agccaatgagagaat

SEQ ID NO: 2042293 - DNA, 15 bp, Homo sapiens
gccaatgagagaatt

SEQ ID NO: 2042294 - DNA, 15 bp, Homo sapiens
ccaatgagagaattt

SEQ ID NO: 2042295 - DNA, 15 bp, Homo sapiens
caatgagagaatttt

SEQ ID NO: 2042296 - DNA, 15 bp, Homo sapiens
aatgagagaatttta

SEQ ID NO: 2042297 - DNA, 15 bp, Homo sapiens
atgagagaattttag

SEQ ID NO: 2042298 - DNA, 15 bp, Homo sapiens
tgagagaattttaga

SEQ ID NO: 2042299 - DNA, 15 bp, Homo sapiens
gagagaattttagaa

SEQ ID NO: 2042300 - DNA, 15 bp, Homo sapiens
agagaattttagaaa

SEQ ID NO: 2042301 - DNA, 15 bp, Homo sapiens
gagaattttagaaag

SEQ ID NO: 2042302 - DNA, 15 bp, Homo sapiens
agaattttagaaagg

SEQ ID NO: 2042303 - DNA, 15 bp, Homo sapiens
gaattttagaaaggg

SEQ ID NO: 2042304 - DNA, 15 bp, Homo sapiens
aattttagaaagggg

SEQ ID NO: 2042305 - DNA, 15 bp, Homo sapiens
attttagaaaggggt

SEQ ID NO: 2042306 - DNA, 15 bp, Homo sapiens
ttttagaaaggggtg

SEQ ID NO: 2042307 - DNA, 15 bp, Homo sapiens
tttagaaaggggtga

SEQ ID NO: 2042308 - DNA, 15 bp, Homo sapiens
ttagaaaggggtgat

SEQ ID NO: 2042309 - DNA, 15 bp, Homo sapiens
tagaaaggggtgatt

SEQ ID NO: 2042310 - DNA, 15 bp, Homo sapiens
agaaaggggtgatta

SEQ ID NO: 2042311 - DNA, 15 bp, Homo sapiens
gaaaggggtgattaa

SEQ ID NO: 2042312 - DNA, 15 bp, Homo sapiens
aaaggggtgattaac

SEQ ID NO: 2042313 - DNA, 15 bp, Homo sapiens
aaggggtgattaaca

SEQ ID NO: 2042314 - DNA, 15 bp, Homo sapiens
aggggtgattaacat

SEQ ID NO: 2042315 - DNA, 15 bp, Homo sapiens
ggggtgattaacatt

SEQ ID NO: 2042316 - DNA, 15 bp, Homo sapiens
gggtgattaacatta

SEQ ID NO: 2042317 - DNA, 15 bp, Homo sapiens
ggtgattaacattat

SEQ ID NO: 2042318 - DNA, 15 bp, Homo sapiens
gtgattaacattatc

SEQ ID NO: 2042319 - DNA, 15 bp, Homo sapiens
tgattaacattatca

SEQ ID NO: 2042320 - DNA, 15 bp, Homo sapiens
gattaacattatcaa

SEQ ID NO: 2042321 - DNA, 15 bp, Homo sapiens
attaacattatcaaa

SEQ ID NO: 2042322 - DNA, 15 bp, Homo sapiens
ttaacattatcaaat

SEQ ID NO: 2042323 - DNA, 15 bp, Homo sapiens
taacattatcaaatg

SEQ ID NO: 2042324 - DNA, 15 bp, Homo sapiens
aacattatcaaatgc

SEQ ID NO: 2042325 - DNA, 15 bp, Homo sapiens
acattatcaaatgcc

SEQ ID NO: 2042326 - DNA, 15 bp, Homo sapiens
cattatcaaatgcct

SEQ ID NO: 2042327 - DNA, 15 bp, Homo sapiens
attatcaaatgcctc

SEQ ID NO: 2042328 - DNA, 15 bp, Homo sapiens
ttatcaaatgcctca

SEQ ID NO: 2042329 - DNA, 15 bp, Homo sapiens
tatcaaatgcctcag

SEQ ID NO: 2042330 - DNA, 15 bp, Homo sapiens
atcaaatgcctcaga

SEQ ID NO: 2042331 - DNA, 15 bp, Homo sapiens
tcaaatgcctcagag

SEQ ID NO: 2042332 - DNA, 15 bp, Homo sapiens
caaatgcctcagagc

SEQ ID NO: 2042333 - DNA, 15 bp, Homo sapiens
aaatgcctcagagca

SEQ ID NO: 2042334 - DNA, 15 bp, Homo sapiens
aatgcctcagagcac

SEQ ID NO: 2042335 - DNA, 15 bp, Homo sapiens
atgcctcagagcact

SEQ ID NO: 2042336 - DNA, 15 bp, Homo sapiens
tgcctcagagcactg

SEQ ID NO: 2042337 - DNA, 15 bp, Homo sapiens
gcctcagagcactgg

SEQ ID NO: 2042338 - DNA, 15 bp, Homo sapiens
cctcagagcactggg

SEQ ID NO: 2042339 - DNA, 15 bp, Homo sapiens
ctcagagcactgggc

SEQ ID NO: 2042340 - DNA, 15 bp, Homo sapiens
tcagagcactgggca

SEQ ID NO: 2042341 - DNA, 15 bp, Homo sapiens
cagagcactgggcac

SEQ ID NO: 2042342 - DNA, 15 bp, Homo sapiens
agagcactgggcaca

SEQ ID NO: 2042343 - DNA, 15 bp, Homo sapiens
gagcactgggcacat

SEQ ID NO: 2042344 - DNA, 15 bp, Homo sapiens
agcactgggcacatt

SEQ ID NO: 2042345 - DNA, 15 bp, Homo sapiens
gcactgggcacattt

SEQ ID NO: 2042346 - DNA, 15 bp, Homo sapiens
cactgggcacatttc

SEQ ID NO: 2042347 - DNA, 15 bp, Homo sapiens
actgggcacatttct

SEQ ID NO: 2042348 - DNA, 15 bp, Homo sapiens
ctgggcacatttcta

SEQ ID NO: 2042349 - DNA, 15 bp, Homo sapiens
tgggcacatttctag

SEQ ID NO: 2042350 - DNA, 15 bp, Homo sapiens
gggcacatttctagg

SEQ ID NO: 2042351 - DNA, 15 bp, Homo sapiens
ggcacatttctagga

SEQ ID NO: 2042352 - DNA, 15 bp, Homo sapiens
gcacatttctaggaa

SEQ ID NO: 2042353 - DNA, 15 bp, Homo sapiens
cacatttctaggaac

SEQ ID NO: 2042354 - DNA, 15 bp, Homo sapiens
acatttctaggaaca

SEQ ID NO: 2042355 - DNA, 15 bp, Homo sapiens
catttctaggaacat

SEQ ID NO: 2042356 - DNA, 15 bp, Homo sapiens
atttctaggaacatg

SEQ ID NO: 2042357 - DNA, 15 bp, Homo sapiens
tttctaggaacatgt

SEQ ID NO: 2042358 - DNA, 15 bp, Homo sapiens
ttctaggaacatgtc

SEQ ID NO: 2042359 - DNA, 15 bp, Homo sapiens
tctaggaacatgtct

SEQ ID NO: 2042360 - DNA, 15 bp, Homo sapiens
ctaggaacatgtcta

SEQ ID NO: 2042361 - DNA, 15 bp, Homo sapiens
taggaacatgtctaa

SEQ ID NO: 2042362 - DNA, 15 bp, Homo sapiens
aggaacatgtctaag

SEQ ID NO: 2042363 - DNA, 15 bp, Homo sapiens
ggaacatgtctaagt

SEQ ID NO: 2042364 - DNA, 15 bp, Homo sapiens
gaacatgtctaagtg

SEQ ID NO: 2042365 - DNA, 15 bp, Homo sapiens
aacatgtctaagtgt

SEQ ID NO: 2042366 - DNA, 15 bp, Homo sapiens
acatgtctaagtgtt

SEQ ID NO: 2042367 - DNA, 15 bp, Homo sapiens
catgtctaagtgttt

SEQ ID NO: 2042368 - DNA, 15 bp, Homo sapiens
atgtctaagtgtttt

SEQ ID NO: 2042369 - DNA, 15 bp, Homo sapiens
tgtctaagtgttttt

SEQ ID NO: 2042370 - DNA, 15 bp, Homo sapiens
gtctaagtgtttttg

SEQ ID NO: 2042371 - DNA, 15 bp, Homo sapiens
tctaagtgtttttga

SEQ ID NO: 2042372 - DNA, 15 bp, Homo sapiens
ctaagtgtttttgag

SEQ ID NO: 2042373 - DNA, 15 bp, Homo sapiens
taagtgtttttgaga

SEQ ID NO: 2042374 - DNA, 15 bp, Homo sapiens
aagtgtttttgagat

SEQ ID NO: 2042375 - DNA, 15 bp, Homo sapiens
agtgtttttgagatg

SEQ ID NO: 2042376 - DNA, 15 bp, Homo sapiens
gtgtttttgagatgg

SEQ ID NO: 2042377 - DNA, 15 bp, Homo sapiens
tgtttttgagatggc

SEQ ID NO: 2042378 - DNA, 15 bp, Homo sapiens
gtttttgagatggct

SEQ ID NO: 2042379 - DNA, 15 bp, Homo sapiens
tttttgagatggctg

SEQ ID NO: 2042380 - DNA, 15 bp, Homo sapiens
ttttgagatggctgt

SEQ ID NO: 2042381 - DNA, 15 bp, Homo sapiens
tttgagatggctgtt

SEQ ID NO: 2042382 - DNA, 15 bp, Homo sapiens
ttgagatggctgtta

SEQ ID NO: 2042383 - DNA, 15 bp, Homo sapiens
tgagatggctgttaa

SEQ ID NO: 2042384 - DNA, 15 bp, Homo sapiens
gagatggctgttaaa

SEQ ID NO: 2042385 - DNA, 15 bp, Homo sapiens
agatggctgttaaaa

SEQ ID NO: 2042386 - DNA, 15 bp, Homo sapiens
gatggctgttaaaat

SEQ ID NO: 2042387 - DNA, 15 bp, Homo sapiens
atggctgttaaaatc

SEQ ID NO: 2042388 - DNA, 15 bp, Homo sapiens
tggctgttaaaatca

SEQ ID NO: 2042389 - DNA, 15 bp, Homo sapiens
ggctgttaaaatcaa

SEQ ID NO: 2042390 - DNA, 15 bp, Homo sapiens
gctgttaaaatcaag

SEQ ID NO: 2042391 - DNA, 15 bp, Homo sapiens
ctgttaaaatcaagg

SEQ ID NO: 2042392 - DNA, 15 bp, Homo sapiens
tgttaaaatcaagga

SEQ ID NO: 2042393 - DNA, 15 bp, Homo sapiens
gttaaaatcaaggag

SEQ ID NO: 2042394 - DNA, 15 bp, Homo sapiens
ttaaaatcaaggagc

SEQ ID NO: 2042395 - DNA, 15 bp, Homo sapiens
taaaatcaaggagct

SEQ ID NO: 2042396 - DNA, 15 bp, Homo sapiens
aaaatcaaggagctg

SEQ ID NO: 2042397 - DNA, 15 bp, Homo sapiens
aaatcaaggagctgg

SEQ ID NO: 2042398 - DNA, 15 bp, Homo sapiens
aatcaaggagctgga

SEQ ID NO: 2042399 - DNA, 15 bp, Homo sapiens
atcaaggagctggac

SEQ ID NO: 2042400 - DNA, 15 bp, Homo sapiens
tcaaggagctggacg

SEQ ID NO: 2042401 - DNA, 15 bp, Homo sapiens
caaggagctggacgg

SEQ ID NO: 2042402 - DNA, 15 bp, Homo sapiens
aaggagctggacggg

SEQ ID NO: 2042403 - DNA, 15 bp, Homo sapiens
aggagctggacgggc

SEQ ID NO: 2042404 - DNA, 15 bp, Homo sapiens
ggagctggacgggca

SEQ ID NO: 2042405 - DNA, 15 bp, Homo sapiens
gagctggacgggcac

SEQ ID NO: 2042406 - DNA, 15 bp, Homo sapiens
agctggacgggcacg

SEQ ID NO: 2042407 - DNA, 15 bp, Homo sapiens
gctggacgggcacga

SEQ ID NO: 2042408 - DNA, 15 bp, Homo sapiens
ctggacgggcacgat

SEQ ID NO: 2042409 - DNA, 15 bp, Homo sapiens
tggacgggcacgatg

SEQ ID NO: 2042410 - DNA, 15 bp, Homo sapiens
ggacgggcacgatgg

SEQ ID NO: 2042411 - DNA, 15 bp, Homo sapiens
gacgggcacgatggc

SEQ ID NO: 2042412 - DNA, 15 bp, Homo sapiens
acgggcacgatggct

SEQ ID NO: 2042413 - DNA, 15 bp, Homo sapiens
cgggcacgatggctc

SEQ ID NO: 2042414 - DNA, 15 bp, Homo sapiens
gggcacgatggctca

SEQ ID NO: 2042415 - DNA, 15 bp, Homo sapiens
ggcacgatggctcat

SEQ ID NO: 2042416 - DNA, 15 bp, Homo sapiens
gcacgatggctcatg

SEQ ID NO: 2042417 - DNA, 15 bp, Homo sapiens
cacgatggctcatgc

SEQ ID NO: 2042418 - DNA, 15 bp, Homo sapiens
acgatggctcatgcc

SEQ ID NO: 2042419 - DNA, 15 bp, Homo sapiens
cgatggctcatgccc

SEQ ID NO: 2042420 - DNA, 15 bp, Homo sapiens
gatggctcatgcccg

SEQ ID NO: 2042421 - DNA, 15 bp, Homo sapiens
atggctcatgcccgt

SEQ ID NO: 2042422 - DNA, 15 bp, Homo sapiens
tggctcatgcccgta

SEQ ID NO: 2042423 - DNA, 15 bp, Homo sapiens
ggctcatgcccgtaa

SEQ ID NO: 2042424 - DNA, 15 bp, Homo sapiens
gctcatgcccgtaat

SEQ ID NO: 2042425 - DNA, 15 bp, Homo sapiens
ctcatgcccgtaatt

SEQ ID NO: 2042426 - DNA, 15 bp, Homo sapiens
tcatgcccgtaattc

SEQ ID NO: 2042427 - DNA, 15 bp, Homo sapiens
catgcccgtaattcc

SEQ ID NO: 2042428 - DNA, 15 bp, Homo sapiens
atgcccgtaattcca

SEQ ID NO: 2042429 - DNA, 15 bp, Homo sapiens
tgcccgtaattccag

SEQ ID NO: 2042430 - DNA, 15 bp, Homo sapiens
gcccgtaattccagc

SEQ ID NO: 2042431 - DNA, 15 bp, Homo sapiens
cccgtaattccagca

SEQ ID NO: 2042432 - DNA, 15 bp, Homo sapiens
ccgtaattccagcac

SEQ ID NO: 2042433 - DNA, 15 bp, Homo sapiens
cgtaattccagcact

SEQ ID NO: 2042434 - DNA, 15 bp, Homo sapiens
gtaattccagcactt

SEQ ID NO: 2042435 - DNA, 15 bp, Homo sapiens
ttccagcactttggg

SEQ ID NO: 2042436 - DNA, 15 bp, Homo sapiens
tccagcactttggga

SEQ ID NO: 2042437 - DNA, 15 bp, Homo sapiens
tttgggagaccgagc

SEQ ID NO: 2042438 - DNA, 15 bp, Homo sapiens
ttgggagaccgagca

SEQ ID NO: 2042439 - DNA, 15 bp, Homo sapiens
tgggagaccgagcag

SEQ ID NO: 2042440 - DNA, 15 bp, Homo sapiens
gggagaccgagcagg

SEQ ID NO: 2042441 - DNA, 15 bp, Homo sapiens
ggagaccgagcaggg

SEQ ID NO: 2042442 - DNA, 15 bp, Homo sapiens
gagaccgagcaggga

SEQ ID NO: 2042443 - DNA, 15 bp, Homo sapiens
agaccgagcagggag

SEQ ID NO: 2042444 - DNA, 15 bp, Homo sapiens
gaccgagcagggagg

SEQ ID NO: 2042445 - DNA, 15 bp, Homo sapiens
accgagcagggagga

SEQ ID NO: 2042446 - DNA, 15 bp, Homo sapiens
ccgagcagggaggat

SEQ ID NO: 2042447 - DNA, 15 bp, Homo sapiens
cgagcagggaggatt

SEQ ID NO: 2042448 - DNA, 15 bp, Homo sapiens
gagcagggaggattg

SEQ ID NO: 2042449 - DNA, 15 bp, Homo sapiens
agcagggaggattgc

SEQ ID NO: 2042450 - DNA, 15 bp, Homo sapiens
gcagggaggattgct

SEQ ID NO: 2042451 - DNA, 15 bp, Homo sapiens
cagggaggattgctt

SEQ ID NO: 2042452 - DNA, 15 bp, Homo sapiens
agggaggattgcttg

SEQ ID NO: 2042453 - DNA, 15 bp, Homo sapiens
gattgcttgagccta

SEQ ID NO: 2042454 - DNA, 15 bp, Homo sapiens
attgcttgagcctag

SEQ ID NO: 2042455 - DNA, 15 bp, Homo sapiens
ttgcttgagcctagg

SEQ ID NO: 2042456 - DNA, 15 bp, Homo sapiens
cttgagcctaggagt

SEQ ID NO: 2042457 - DNA, 15 bp, Homo sapiens
ttgagcctaggagtt

SEQ ID NO: 2042458 - DNA, 15 bp, Homo sapiens
tgagcctaggagttt

SEQ ID NO: 2042459 - DNA, 15 bp, Homo sapiens
gagcctaggagtttg

SEQ ID NO: 2042460 - DNA, 15 bp, Homo sapiens
agcctaggagtttga

SEQ ID NO: 2042461 - DNA, 15 bp, Homo sapiens
gcctaggagtttgag

SEQ ID NO: 2042462 - DNA, 15 bp, Homo sapiens
cctaggagtttgagg

SEQ ID NO: 2042463 - DNA, 15 bp, Homo sapiens
ctaggagtttgaggt

SEQ ID NO: 2042464 - DNA, 15 bp, Homo sapiens
taggagtttgaggtg

SEQ ID NO: 2042465 - DNA, 15 bp, Homo sapiens
aggagtttgaggtgg

SEQ ID NO: 2042466 - DNA, 15 bp, Homo sapiens
ggagtttgaggtggc

SEQ ID NO: 2042467 - DNA, 15 bp, Homo sapiens
gagtttgaggtggca

SEQ ID NO: 2042468 - DNA, 15 bp, Homo sapiens
agtttgaggtggcag

SEQ ID NO: 2042469 - DNA, 15 bp, Homo sapiens
gtttgaggtggcagt

SEQ ID NO: 2042470 - DNA, 15 bp, Homo sapiens
tttgaggtggcagtg

SEQ ID NO: 2042471 - DNA, 15 bp, Homo sapiens
ttgaggtggcagtga

SEQ ID NO: 2042472 - DNA, 15 bp, Homo sapiens
tgaggtggcagtgag

SEQ ID NO: 2042473 - DNA, 15 bp, Homo sapiens
gaggtggcagtgagc

SEQ ID NO: 2042474 - DNA, 15 bp, Homo sapiens
aggtggcagtgagct

SEQ ID NO: 2042475 - DNA, 15 bp, Homo sapiens
ggtggcagtgagcta

SEQ ID NO: 2042476 - DNA, 15 bp, Homo sapiens
gtggcagtgagctat

SEQ ID NO: 2042477 - DNA, 15 bp, Homo sapiens
tggcagtgagctatg

SEQ ID NO: 2042478 - DNA, 15 bp, Homo sapiens
ggcagtgagctatga

SEQ ID NO: 2042479 - DNA, 15 bp, Homo sapiens
agtgagctatgatta

SEQ ID NO: 2042480 - DNA, 15 bp, Homo sapiens
gtgagctatgattac

SEQ ID NO: 2042481 - DNA, 15 bp, Homo sapiens
tgagctatgattaca

SEQ ID NO: 2042482 - DNA, 15 bp, Homo sapiens
gagctatgattacac

SEQ ID NO: 2042483 - DNA, 15 bp, Homo sapiens
agctatgattacacc

SEQ ID NO: 2042484 - DNA, 15 bp, Homo sapiens
gctatgattacaccg

SEQ ID NO: 2042485 - DNA, 15 bp, Homo sapiens
ctatgattacaccgc

SEQ ID NO: 2042486 - DNA, 15 bp, Homo sapiens
tatgattacaccgct

SEQ ID NO: 2042487 - DNA, 15 bp, Homo sapiens
atgattacaccgcta

SEQ ID NO: 2042488 - DNA, 15 bp, Homo sapiens
tgattacaccgctat

SEQ ID NO: 2042489 - DNA, 15 bp, Homo sapiens
gattacaccgctata

SEQ ID NO: 2042490 - DNA, 15 bp, Homo sapiens
attacaccgctatac

SEQ ID NO: 2042491 - DNA, 15 bp, Homo sapiens
ttacaccgctatact

SEQ ID NO: 2042492 - DNA, 15 bp, Homo sapiens
tacaccgctatactc

SEQ ID NO: 2042493 - DNA, 15 bp, Homo sapiens
acaccgctatactct

SEQ ID NO: 2042494 - DNA, 15 bp, Homo sapiens
caccgctatactctg

SEQ ID NO: 2042495 - DNA, 15 bp, Homo sapiens
accgctatactctgg

SEQ ID NO: 2042496 - DNA, 15 bp, Homo sapiens
ccgctatactctggc

SEQ ID NO: 2042497 - DNA, 15 bp, Homo sapiens
cgctatactctggcc

SEQ ID NO: 2042498 - DNA, 15 bp, Homo sapiens
gctatactctggcct

SEQ ID NO: 2042499 - DNA, 15 bp, Homo sapiens
ctatactctggcctg

SEQ ID NO: 2042500 - DNA, 15 bp, Homo sapiens
tatactctggcctgg

SEQ ID NO: 2042501 - DNA, 15 bp, Homo sapiens
atactctggcctggg

SEQ ID NO: 2042502 - DNA, 15 bp, Homo sapiens
tactctggcctgggc

SEQ ID NO: 2042503 - DNA, 15 bp, Homo sapiens
actctggcctgggca

SEQ ID NO: 2042504 - DNA, 15 bp, Homo sapiens
ctctggcctgggcaa

SEQ ID NO: 2042505 - DNA, 15 bp, Homo sapiens
tctggcctgggcaac

SEQ ID NO: 2042506 - DNA, 15 bp, Homo sapiens
ctggcctgggcaaca

SEQ ID NO: 2042507 - DNA, 15 bp, Homo sapiens
tggcctgggcaacag

SEQ ID NO: 2042508 - DNA, 15 bp, Homo sapiens
caacagagagagacc

SEQ ID NO: 2042509 - DNA, 15 bp, Homo sapiens
aacagagagagaccc

SEQ ID NO: 2042510 - DNA, 15 bp, Homo sapiens
acagagagagaccct

SEQ ID NO: 2042511 - DNA, 15 bp, Homo sapiens
cagagagagaccctg

SEQ ID NO: 2042512 - DNA, 15 bp, Homo sapiens
agagagagaccctgt

SEQ ID NO: 2042513 - DNA, 15 bp, Homo sapiens
gagagagaccctgtc

SEQ ID NO: 2042514 - DNA, 15 bp, Homo sapiens
agagagaccctgtct

SEQ ID NO: 2042515 - DNA, 15 bp, Homo sapiens
gagagaccctgtctt

SEQ ID NO: 2042516 - DNA, 15 bp, Homo sapiens
agagaccctgtcttg

SEQ ID NO: 2042517 - DNA, 15 bp, Homo sapiens
gagaccctgtcttgg

SEQ ID NO: 2042518 - DNA, 15 bp, Homo sapiens
agaccctgtcttggg

SEQ ID NO: 2042519 - DNA, 15 bp, Homo sapiens
gaccctgtcttgggg

SEQ ID NO: 2042520 - DNA, 15 bp, Homo sapiens
accctgtcttggggg

SEQ ID NO: 2042521 - DNA, 15 bp, Homo sapiens
ccctgtcttgggggg

SEQ ID NO: 2042522 - DNA, 15 bp, Homo sapiens
cctgtcttgggggga

SEQ ID NO: 2042523 - DNA, 15 bp, Homo sapiens
ctgtcttggggggaa

SEQ ID NO: 2042524 - DNA, 15 bp, Homo sapiens
tgtcttggggggaaa

SEQ ID NO: 2042525 - DNA, 15 bp, Homo sapiens
gtcttggggggaaaa

SEQ ID NO: 2042526 - DNA, 15 bp, Homo sapiens
tcttggggggaaaaa

SEQ ID NO: 2042527 - DNA, 15 bp, Homo sapiens
cttggggggaaaaaa

SEQ ID NO: 2042528 - DNA, 15 bp, Homo sapiens
ttggggggaaaaaac

SEQ ID NO: 2042529 - DNA, 15 bp, Homo sapiens
tggggggaaaaaaca

SEQ ID NO: 2042530 - DNA, 15 bp, Homo sapiens
ggggggaaaaaacaa

SEQ ID NO: 2042531 - DNA, 15 bp, Homo sapiens
gggggaaaaaacaaa

SEQ ID NO: 2042532 - DNA, 15 bp, Homo sapiens
ggggaaaaaacaaaa

SEQ ID NO: 2042533 - DNA, 15 bp, Homo sapiens
gggaaaaaacaaaac

SEQ ID NO: 2042534 - DNA, 15 bp, Homo sapiens
ggaaaaaacaaaaca

SEQ ID NO: 2042535 - DNA, 15 bp, Homo sapiens
gaaaaaacaaaacaa

SEQ ID NO: 2042536 - DNA, 15 bp, Homo sapiens
aaacaaaacaacaaa

SEQ ID NO: 2042537 - DNA, 15 bp, Homo sapiens
aacaaaacaacaaaa

SEQ ID NO: 2042538 - DNA, 15 bp, Homo sapiens
acaaaacaacaaaaa

SEQ ID NO: 2042539 - DNA, 15 bp, Homo sapiens
caaaacaacaaaaaa

SEQ ID NO: 2042540 - DNA, 15 bp, Homo sapiens
aaaacaacaaaaaac

SEQ ID NO: 2042541 - DNA, 15 bp, Homo sapiens
aaacaacaaaaaaca

SEQ ID NO: 2042542 - DNA, 15 bp, Homo sapiens
aacaacaaaaaacag

SEQ ID NO: 2042543 - DNA, 15 bp, Homo sapiens
acaacaaaaaacaga

SEQ ID NO: 2042544 - DNA, 15 bp, Homo sapiens
caacaaaaaacagaa

SEQ ID NO: 2042545 - DNA, 15 bp, Homo sapiens
aacaaaaaacagaaa

SEQ ID NO: 2042546 - DNA, 15 bp, Homo sapiens
acaaaaaacagaaaa

SEQ ID NO: 2042547 - DNA, 15 bp, Homo sapiens
caaaaaacagaaaat

SEQ ID NO: 2042548 - DNA, 15 bp, Homo sapiens
aaaaaacagaaaata

SEQ ID NO: 2042549 - DNA, 15 bp, Homo sapiens
aaaaacagaaaataa

SEQ ID NO: 2042550 - DNA, 15 bp, Homo sapiens
aaaacagaaaataag

SEQ ID NO: 2042551 - DNA, 15 bp, Homo sapiens
aaacagaaaataagg

SEQ ID NO: 2042552 - DNA, 15 bp, Homo sapiens
aacagaaaataagga

SEQ ID NO: 2042553 - DNA, 15 bp, Homo sapiens
acagaaaataaggag

SEQ ID NO: 2042554 - DNA, 15 bp, Homo sapiens
cagaaaataaggagc

SEQ ID NO: 2042555 - DNA, 15 bp, Homo sapiens
agaaaataaggagct

SEQ ID NO: 2042556 - DNA, 15 bp, Homo sapiens
gaaaataaggagctt

SEQ ID NO: 2042557 - DNA, 15 bp, Homo sapiens
aaaataaggagctta

SEQ ID NO: 2042558 - DNA, 15 bp, Homo sapiens
aaataaggagcttac

SEQ ID NO: 2042559 - DNA, 15 bp, Homo sapiens
aataaggagcttacg

SEQ ID NO: 2042560 - DNA, 15 bp, Homo sapiens
ataaggagcttacgg

SEQ ID NO: 2042561 - DNA, 15 bp, Homo sapiens
taaggagcttacggt

SEQ ID NO: 2042562 - DNA, 15 bp, Homo sapiens
aaggagcttacggtc

SEQ ID NO: 2042563 - DNA, 15 bp, Homo sapiens
aggagcttacggtct

SEQ ID NO: 2042564 - DNA, 15 bp, Homo sapiens
ggagcttacggtctg

SEQ ID NO: 2042565 - DNA, 15 bp, Homo sapiens
gagcttacggtctgc

SEQ ID NO: 2042566 - DNA, 15 bp, Homo sapiens
agcttacggtctgcc

SEQ ID NO: 2042567 - DNA, 15 bp, Homo sapiens
gcttacggtctgcct

SEQ ID NO: 2042568 - DNA, 15 bp, Homo sapiens
cttacggtctgccta

SEQ ID NO: 2042569 - DNA, 15 bp, Homo sapiens
ttacggtctgcctaa

SEQ ID NO: 2042570 - DNA, 15 bp, Homo sapiens
tacggtctgcctaaa

SEQ ID NO: 2042571 - DNA, 15 bp, Homo sapiens
acggtctgcctaaaa

SEQ ID NO: 2042572 - DNA, 15 bp, Homo sapiens
cggtctgcctaaaaa

SEQ ID NO: 2042573 - DNA, 15 bp, Homo sapiens
ggtctgcctaaaaag

SEQ ID NO: 2042574 - DNA, 15 bp, Homo sapiens
gtctgcctaaaaaga

SEQ ID NO: 2042575 - DNA, 15 bp, Homo sapiens
tctgcctaaaaagaa

SEQ ID NO: 2042576 - DNA, 15 bp, Homo sapiens
ctgcctaaaaagaac

SEQ ID NO: 2042577 - DNA, 15 bp, Homo sapiens
tgcctaaaaagaaca

SEQ ID NO: 2042578 - DNA, 15 bp, Homo sapiens
gcctaaaaagaacac

SEQ ID NO: 2042579 - DNA, 15 bp, Homo sapiens
cctaaaaagaacaca

SEQ ID NO: 2042580 - DNA, 15 bp, Homo sapiens
ctaaaaagaacacaa

SEQ ID NO: 2042581 - DNA, 15 bp, Homo sapiens
taaaaagaacacaaa

SEQ ID NO: 2042582 - DNA, 15 bp, Homo sapiens
aaaaagaacacaaac

SEQ ID NO: 2042583 - DNA, 15 bp, Homo sapiens
aaaagaacacaaaca

SEQ ID NO: 2042584 - DNA, 15 bp, Homo sapiens
aaagaacacaaacac

SEQ ID NO: 2042585 - DNA, 15 bp, Homo sapiens
aagaacacaaacaca

SEQ ID NO: 2042586 - DNA, 15 bp, Homo sapiens
agaacacaaacacat

SEQ ID NO: 2042587 - DNA, 15 bp, Homo sapiens
gaacacaaacacatg

SEQ ID NO: 2042588 - DNA, 15 bp, Homo sapiens
aacacaaacacatgg

SEQ ID NO: 2042589 - DNA, 15 bp, Homo sapiens
acacaaacacatggc

SEQ ID NO: 2042590 - DNA, 15 bp, Homo sapiens
cacaaacacatggca

SEQ ID NO: 2042591 - DNA, 15 bp, Homo sapiens
acaaacacatggcaa

SEQ ID NO: 2042592 - DNA, 15 bp, Homo sapiens
caaacacatggcaat

SEQ ID NO: 2042593 - DNA, 15 bp, Homo sapiens
aaacacatggcaatt

SEQ ID NO: 2042594 - DNA, 15 bp, Homo sapiens
aacacatggcaatta

SEQ ID NO: 2042595 - DNA, 15 bp, Homo sapiens
acacatggcaattag

SEQ ID NO: 2042596 - DNA, 15 bp, Homo sapiens
cacatggcaattagg

SEQ ID NO: 2042597 - DNA, 15 bp, Homo sapiens
acatggcaattagga

SEQ ID NO: 2042598 - DNA, 15 bp, Homo sapiens
catggcaattaggaa

SEQ ID NO: 2042599 - DNA, 15 bp, Homo sapiens
atggcaattaggaaa

SEQ ID NO: 2042600 - DNA, 15 bp, Homo sapiens
tggcaattaggaaat

SEQ ID NO: 2042601 - DNA, 15 bp, Homo sapiens
ggcaattaggaaatc

SEQ ID NO: 2042602 - DNA, 15 bp, Homo sapiens
gcaattaggaaatca

SEQ ID NO: 2042603 - DNA, 15 bp, Homo sapiens
caattaggaaatcac

SEQ ID NO: 2042604 - DNA, 15 bp, Homo sapiens
aattaggaaatcact

SEQ ID NO: 2042605 - DNA, 15 bp, Homo sapiens
attaggaaatcactc

SEQ ID NO: 2042606 - DNA, 15 bp, Homo sapiens
ttaggaaatcactca

SEQ ID NO: 2042607 - DNA, 15 bp, Homo sapiens
taggaaatcactcaa

SEQ ID NO: 2042608 - DNA, 15 bp, Homo sapiens
aggaaatcactcaat

SEQ ID NO: 2042609 - DNA, 15 bp, Homo sapiens
ggaaatcactcaatt

SEQ ID NO: 2042610 - DNA, 15 bp, Homo sapiens
gaaatcactcaatta

SEQ ID NO: 2042611 - DNA, 15 bp, Homo sapiens
aaatcactcaattaa

SEQ ID NO: 2042612 - DNA, 15 bp, Homo sapiens
aatcactcaattaag

SEQ ID NO: 2042613 - DNA, 15 bp, Homo sapiens
atcactcaattaaga

SEQ ID NO: 2042614 - DNA, 15 bp, Homo sapiens
tcactcaattaagaa

SEQ ID NO: 2042615 - DNA, 15 bp, Homo sapiens
cactcaattaagaaa

SEQ ID NO: 2042616 - DNA, 15 bp, Homo sapiens
actcaattaagaaat

SEQ ID NO: 2042617 - DNA, 15 bp, Homo sapiens
ctcaattaagaaatt

SEQ ID NO: 2042618 - DNA, 15 bp, Homo sapiens
tcaattaagaaattg

SEQ ID NO: 2042619 - DNA, 15 bp, Homo sapiens
caattaagaaattgc

SEQ ID NO: 2042620 - DNA, 15 bp, Homo sapiens
aattaagaaattgct

SEQ ID NO: 2042621 - DNA, 15 bp, Homo sapiens
attaagaaattgctt

SEQ ID NO: 2042622 - DNA, 15 bp, Homo sapiens
ttaagaaattgctta

SEQ ID NO: 2042623 - DNA, 15 bp, Homo sapiens
taagaaattgcttat

SEQ ID NO: 2042624 - DNA, 15 bp, Homo sapiens
aagaaattgcttatc

SEQ ID NO: 2042625 - DNA, 15 bp, Homo sapiens
agaaattgcttatca

SEQ ID NO: 2042626 - DNA, 15 bp, Homo sapiens
gaaattgcttatcaa

SEQ ID NO: 2042627 - DNA, 15 bp, Homo sapiens
aaattgcttatcaat

SEQ ID NO: 2042628 - DNA, 15 bp, Homo sapiens
aattgcttatcaatg

SEQ ID NO: 2042629 - DNA, 15 bp, Homo sapiens
attgcttatcaatgt

SEQ ID NO: 2042630 - DNA, 15 bp, Homo sapiens
ttgcttatcaatgta

SEQ ID NO: 2042631 - DNA, 15 bp, Homo sapiens
tgcttatcaatgtaa

SEQ ID NO: 2042632 - DNA, 15 bp, Homo sapiens
gcttatcaatgtaac

SEQ ID NO: 2042633 - DNA, 15 bp, Homo sapiens
cttatcaatgtaaca

SEQ ID NO: 2042634 - DNA, 15 bp, Homo sapiens
ttatcaatgtaacag

SEQ ID NO: 2042635 - DNA, 15 bp, Homo sapiens
tatcaatgtaacaga

SEQ ID NO: 2042636 - DNA, 15 bp, Homo sapiens
atcaatgtaacagaa

SEQ ID NO: 2042637 - DNA, 15 bp, Homo sapiens
tcaatgtaacagaaa

SEQ ID NO: 2042638 - DNA, 15 bp, Homo sapiens
caatgtaacagaaaa

SEQ ID NO: 2042639 - DNA, 15 bp, Homo sapiens
aatgtaacagaaaag

SEQ ID NO: 2042640 - DNA, 15 bp, Homo sapiens
atgtaacagaaaagt

SEQ ID NO: 2042641 - DNA, 15 bp, Homo sapiens
tgtaacagaaaagtg

SEQ ID NO: 2042642 - DNA, 15 bp, Homo sapiens
gtaacagaaaagtgt

SEQ ID NO: 2042643 - DNA, 15 bp, Homo sapiens
taacagaaaagtgta

SEQ ID NO: 2042644 - DNA, 15 bp, Homo sapiens
aacagaaaagtgtaa

SEQ ID NO: 2042645 - DNA, 15 bp, Homo sapiens
acagaaaagtgtaat

SEQ ID NO: 2042646 - DNA, 15 bp, Homo sapiens
cagaaaagtgtaata

SEQ ID NO: 2042647 - DNA, 15 bp, Homo sapiens
agaaaagtgtaatag

SEQ ID NO: 2042648 - DNA, 15 bp, Homo sapiens
gaaaagtgtaataga

SEQ ID NO: 2042649 - DNA, 15 bp, Homo sapiens
aaaagtgtaatagag

SEQ ID NO: 2042650 - DNA, 15 bp, Homo sapiens
aaagtgtaatagaga

SEQ ID NO: 2042651 - DNA, 15 bp, Homo sapiens
aagtgtaatagagat

SEQ ID NO: 2042652 - DNA, 15 bp, Homo sapiens
agtgtaatagagatt

SEQ ID NO: 2042653 - DNA, 15 bp, Homo sapiens
gtgtaatagagattc

SEQ ID NO: 2042654 - DNA, 15 bp, Homo sapiens
tgtaatagagattca

SEQ ID NO: 2042655 - DNA, 15 bp, Homo sapiens
gtaatagagattcat

SEQ ID NO: 2042656 - DNA, 15 bp, Homo sapiens
taatagagattcatc

SEQ ID NO: 2042657 - DNA, 15 bp, Homo sapiens
aatagagattcatcc

SEQ ID NO: 2042658 - DNA, 15 bp, Homo sapiens
atagagattcatcca

SEQ ID NO: 2042659 - DNA, 15 bp, Homo sapiens
tagagattcatccat

SEQ ID NO: 2042660 - DNA, 15 bp, Homo sapiens
agagattcatccatt

SEQ ID NO: 2042661 - DNA, 15 bp, Homo sapiens
gagattcatccattt

SEQ ID NO: 2042662 - DNA, 15 bp, Homo sapiens
agattcatccattta

SEQ ID NO: 2042663 - DNA, 15 bp, Homo sapiens
gattcatccatttat

SEQ ID NO: 2042664 - DNA, 15 bp, Homo sapiens
attcatccatttatt

SEQ ID NO: 2042665 - DNA, 15 bp, Homo sapiens
ttcatccatttattc

SEQ ID NO: 2042666 - DNA, 15 bp, Homo sapiens
tcatccatttattct

SEQ ID NO: 2042667 - DNA, 15 bp, Homo sapiens
catccatttattctg

SEQ ID NO: 2042668 - DNA, 15 bp, Homo sapiens
atccatttattctgc

SEQ ID NO: 2042669 - DNA, 15 bp, Homo sapiens
tccatttattctgca

SEQ ID NO: 2042670 - DNA, 15 bp, Homo sapiens
ccatttattctgcac

SEQ ID NO: 2042671 - DNA, 15 bp, Homo sapiens
catttattctgcaca

SEQ ID NO: 2042672 - DNA, 15 bp, Homo sapiens
atttattctgcacac

SEQ ID NO: 2042673 - DNA, 15 bp, Homo sapiens
tttattctgcacaca

SEQ ID NO: 2042674 - DNA, 15 bp, Homo sapiens
ttattctgcacacat

SEQ ID NO: 2042675 - DNA, 15 bp, Homo sapiens
tattctgcacacata

SEQ ID NO: 2042676 - DNA, 15 bp, Homo sapiens
attctgcacacatat

SEQ ID NO: 2042677 - DNA, 15 bp, Homo sapiens
ttctgcacacatata

SEQ ID NO: 2042678 - DNA, 15 bp, Homo sapiens
tctgcacacatatat

SEQ ID NO: 2042679 - DNA, 15 bp, Homo sapiens
ctgcacacatatatt

SEQ ID NO: 2042680 - DNA, 15 bp, Homo sapiens
tgcacacatatattg

SEQ ID NO: 2042681 - DNA, 15 bp, Homo sapiens
gcacacatatattga

SEQ ID NO: 2042682 - DNA, 15 bp, Homo sapiens
cacacatatattgag

SEQ ID NO: 2042683 - DNA, 15 bp, Homo sapiens
acacatatattgagc

SEQ ID NO: 2042684 - DNA, 15 bp, Homo sapiens
cacatatattgagct

SEQ ID NO: 2042685 - DNA, 15 bp, Homo sapiens
acatatattgagctc

SEQ ID NO: 2042686 - DNA, 15 bp, Homo sapiens
catatattgagctcc

SEQ ID NO: 2042687 - DNA, 15 bp, Homo sapiens
atatattgagctccc

SEQ ID NO: 2042688 - DNA, 15 bp, Homo sapiens
tatattgagctccca

SEQ ID NO: 2042689 - DNA, 15 bp, Homo sapiens
atattgagctcccac

SEQ ID NO: 2042690 - DNA, 15 bp, Homo sapiens
tattgagctcccact

SEQ ID NO: 2042691 - DNA, 15 bp, Homo sapiens
attgagctcccacta

SEQ ID NO: 2042692 - DNA, 15 bp, Homo sapiens
ttgagctcccactat

SEQ ID NO: 2042693 - DNA, 15 bp, Homo sapiens
tgagctcccactatg

SEQ ID NO: 2042694 - DNA, 15 bp, Homo sapiens
gagctcccactatgt

SEQ ID NO: 2042695 - DNA, 15 bp, Homo sapiens
agctcccactatgtg

SEQ ID NO: 2042696 - DNA, 15 bp, Homo sapiens
gctcccactatgtgt

SEQ ID NO: 2042697 - DNA, 15 bp, Homo sapiens
ctcccactatgtgtc

SEQ ID NO: 2042698 - DNA, 15 bp, Homo sapiens
tcccactatgtgtca

SEQ ID NO: 2042699 - DNA, 15 bp, Homo sapiens
cccactatgtgtcag

SEQ ID NO: 2042700 - DNA, 15 bp, Homo sapiens
ccactatgtgtcagg

SEQ ID NO: 2042701 - DNA, 15 bp, Homo sapiens
cactatgtgtcaggc

SEQ ID NO: 2042702 - DNA, 15 bp, Homo sapiens
actatgtgtcaggca

SEQ ID NO: 2042703 - DNA, 15 bp, Homo sapiens
ctatgtgtcaggcat

SEQ ID NO: 2042704 - DNA, 15 bp, Homo sapiens
tatgtgtcaggcatt

SEQ ID NO: 2042705 - DNA, 15 bp, Homo sapiens
atgtgtcaggcattt

SEQ ID NO: 2042706 - DNA, 15 bp, Homo sapiens
tgtgtcaggcattta

SEQ ID NO: 2042707 - DNA, 15 bp, Homo sapiens
gtgtcaggcatttag

SEQ ID NO: 2042708 - DNA, 15 bp, Homo sapiens
tgtcaggcatttagt

SEQ ID NO: 2042709 - DNA, 15 bp, Homo sapiens
gtcaggcatttagtt

SEQ ID NO: 2042710 - DNA, 15 bp, Homo sapiens
tcaggcatttagttg

SEQ ID NO: 2042711 - DNA, 15 bp, Homo sapiens
caggcatttagttgt

SEQ ID NO: 2042712 - DNA, 15 bp, Homo sapiens
aggcatttagttgtc

SEQ ID NO: 2042713 - DNA, 15 bp, Homo sapiens
ggcatttagttgtca

SEQ ID NO: 2042714 - DNA, 15 bp, Homo sapiens
gcatttagttgtcag

SEQ ID NO: 2042715 - DNA, 15 bp, Homo sapiens
catttagttgtcaga

SEQ ID NO: 2042716 - DNA, 15 bp, Homo sapiens
atttagttgtcagaa

SEQ ID NO: 2042717 - DNA, 15 bp, Homo sapiens
tttagttgtcagaag

SEQ ID NO: 2042718 - DNA, 15 bp, Homo sapiens
ttagttgtcagaaga

SEQ ID NO: 2042719 - DNA, 15 bp, Homo sapiens
tagttgtcagaagag

SEQ ID NO: 2042720 - DNA, 15 bp, Homo sapiens
agttgtcagaagagg

SEQ ID NO: 2042721 - DNA, 15 bp, Homo sapiens
gttgtcagaagaggc

SEQ ID NO: 2042722 - DNA, 15 bp, Homo sapiens
ttgtcagaagaggca

SEQ ID NO: 2042723 - DNA, 15 bp, Homo sapiens
tgtcagaagaggcaa

SEQ ID NO: 2042724 - DNA, 15 bp, Homo sapiens
gtcagaagaggcaat

SEQ ID NO: 2042725 - DNA, 15 bp, Homo sapiens
tcagaagaggcaatt

SEQ ID NO: 2042726 - DNA, 15 bp, Homo sapiens
cagaagaggcaattg

SEQ ID NO: 2042727 - DNA, 15 bp, Homo sapiens
agaagaggcaattgg

SEQ ID NO: 2042728 - DNA, 15 bp, Homo sapiens
gaagaggcaattgga

SEQ ID NO: 2042729 - DNA, 15 bp, Homo sapiens
aagaggcaattggat

SEQ ID NO: 2042730 - DNA, 15 bp, Homo sapiens
agaggcaattggatt

SEQ ID NO: 2042731 - DNA, 15 bp, Homo sapiens
gaggcaattggattt

SEQ ID NO: 2042732 - DNA, 15 bp, Homo sapiens
aggcaattggatttt

SEQ ID NO: 2042733 - DNA, 15 bp, Homo sapiens
ggcaattggattttt

SEQ ID NO: 2042734 - DNA, 15 bp, Homo sapiens
gcaattggattttta

SEQ ID NO: 2042735 - DNA, 15 bp, Homo sapiens
caattggatttttaa

SEQ ID NO: 2042736 - DNA, 15 bp, Homo sapiens
aattggatttttaaa

SEQ ID NO: 2042737 - DNA, 15 bp, Homo sapiens
attggatttttaaag

SEQ ID NO: 2042738 - DNA, 15 bp, Homo sapiens
ttggatttttaaaga

SEQ ID NO: 2042739 - DNA, 15 bp, Homo sapiens
tggatttttaaagag

SEQ ID NO: 2042740 - DNA, 15 bp, Homo sapiens
ggatttttaaagaga

SEQ ID NO: 2042741 - DNA, 15 bp, Homo sapiens
gatttttaaagagaa

SEQ ID NO: 2042742 - DNA, 15 bp, Homo sapiens
tttttaaagagaagg

SEQ ID NO: 2042743 - DNA, 15 bp, Homo sapiens
ttttaaagagaagga

SEQ ID NO: 2042744 - DNA, 15 bp, Homo sapiens
tttaaagagaaggat

SEQ ID NO: 2042745 - DNA, 15 bp, Homo sapiens
ttaaagagaaggata

SEQ ID NO: 2042746 - DNA, 15 bp, Homo sapiens
taaagagaaggatat

SEQ ID NO: 2042747 - DNA, 15 bp, Homo sapiens
aaagagaaggatatg

SEQ ID NO: 2042748 - DNA, 15 bp, Homo sapiens
aagagaaggatatga

SEQ ID NO: 2042749 - DNA, 15 bp, Homo sapiens
agagaaggatatgac

SEQ ID NO: 2042750 - DNA, 15 bp, Homo sapiens
gagaaggatatgact

SEQ ID NO: 2042751 - DNA, 15 bp, Homo sapiens
agaaggatatgactt

SEQ ID NO: 2042752 - DNA, 15 bp, Homo sapiens
gaaggatatgactta

SEQ ID NO: 2042753 - DNA, 15 bp, Homo sapiens
aaggatatgacttag

SEQ ID NO: 2042754 - DNA, 15 bp, Homo sapiens
aggatatgacttagt

SEQ ID NO: 2042755 - DNA, 15 bp, Homo sapiens
ggatatgacttagtt

SEQ ID NO: 2042756 - DNA, 15 bp, Homo sapiens
gatatgacttagttg

SEQ ID NO: 2042757 - DNA, 15 bp, Homo sapiens
atatgacttagttgt

SEQ ID NO: 2042758 - DNA, 15 bp, Homo sapiens
tatgacttagttgtg

SEQ ID NO: 2042759 - DNA, 15 bp, Homo sapiens
atgacttagttgtgg

SEQ ID NO: 2042760 - DNA, 15 bp, Homo sapiens
tgacttagttgtggg

SEQ ID NO: 2042761 - DNA, 15 bp, Homo sapiens
gacttagttgtgggg

SEQ ID NO: 2042762 - DNA, 15 bp, Homo sapiens
acttagttgtggggc

SEQ ID NO: 2042763 - DNA, 15 bp, Homo sapiens
cttagttgtggggct

SEQ ID NO: 2042764 - DNA, 15 bp, Homo sapiens
ttagttgtggggctg

SEQ ID NO: 2042765 - DNA, 15 bp, Homo sapiens
tagttgtggggctgg

SEQ ID NO: 2042766 - DNA, 15 bp, Homo sapiens
agttgtggggctgga

SEQ ID NO: 2042767 - DNA, 15 bp, Homo sapiens
gttgtggggctggaa

SEQ ID NO: 2042768 - DNA, 15 bp, Homo sapiens
ttgtggggctggaaa

SEQ ID NO: 2042769 - DNA, 15 bp, Homo sapiens
tgtggggctggaaag

SEQ ID NO: 2042770 - DNA, 15 bp, Homo sapiens
gtggggctggaaaga

SEQ ID NO: 2042771 - DNA, 15 bp, Homo sapiens
tggggctggaaagaa

SEQ ID NO: 2042772 - DNA, 15 bp, Homo sapiens
ggggctggaaagaat

SEQ ID NO: 2042773 - DNA, 15 bp, Homo sapiens
gggctggaaagaatg

SEQ ID NO: 2042774 - DNA, 15 bp, Homo sapiens
ggctggaaagaatga

SEQ ID NO: 2042775 - DNA, 15 bp, Homo sapiens
gctggaaagaatgat

SEQ ID NO: 2042776 - DNA, 15 bp, Homo sapiens
ctggaaagaatgatt

SEQ ID NO: 2042777 - DNA, 15 bp, Homo sapiens
tggaaagaatgattt

SEQ ID NO: 2042778 - DNA, 15 bp, Homo sapiens
ggaaagaatgatttt

SEQ ID NO: 2042779 - DNA, 15 bp, Homo sapiens
gaaagaatgattttt

SEQ ID NO: 2042780 - DNA, 15 bp, Homo sapiens
aaagaatgatttttc

SEQ ID NO: 2042781 - DNA, 15 bp, Homo sapiens
aagaatgatttttct

SEQ ID NO: 2042782 - DNA, 15 bp, Homo sapiens
agaatgatttttctg

SEQ ID NO: 2042783 - DNA, 15 bp, Homo sapiens
gaatgatttttctgg

SEQ ID NO: 2042784 - DNA, 15 bp, Homo sapiens
aatgatttttctggc

SEQ ID NO: 2042785 - DNA, 15 bp, Homo sapiens
atgatttttctggct

SEQ ID NO: 2042786 - DNA, 15 bp, Homo sapiens
tgatttttctggcta

SEQ ID NO: 2042787 - DNA, 15 bp, Homo sapiens
gatttttctggctaa

SEQ ID NO: 2042788 - DNA, 15 bp, Homo sapiens
atttttctggctaag

SEQ ID NO: 2042789 - DNA, 15 bp, Homo sapiens
tttttctggctaagt

SEQ ID NO: 2042790 - DNA, 15 bp, Homo sapiens
ttttctggctaagtg

SEQ ID NO: 2042791 - DNA, 15 bp, Homo sapiens
tttctggctaagtga

SEQ ID NO: 2042792 - DNA, 15 bp, Homo sapiens
ttctggctaagtgaa

SEQ ID NO: 2042793 - DNA, 15 bp, Homo sapiens
tctggctaagtgaaa

SEQ ID NO: 2042794 - DNA, 15 bp, Homo sapiens
ctggctaagtgaaaa

SEQ ID NO: 2042795 - DNA, 15 bp, Homo sapiens
tggctaagtgaaaaa

SEQ ID NO: 2042796 - DNA, 15 bp, Homo sapiens
ggctaagtgaaaaag

SEQ ID NO: 2042797 - DNA, 15 bp, Homo sapiens
gctaagtgaaaaaga

SEQ ID NO: 2042798 - DNA, 15 bp, Homo sapiens
ctaagtgaaaaagaa

SEQ ID NO: 2042799 - DNA, 15 bp, Homo sapiens
taagtgaaaaagaat

SEQ ID NO: 2042800 - DNA, 15 bp, Homo sapiens
aagtgaaaaagaata

SEQ ID NO: 2042801 - DNA, 15 bp, Homo sapiens
agtgaaaaagaatag

SEQ ID NO: 2042802 - DNA, 15 bp, Homo sapiens
gtgaaaaagaatagc

SEQ ID NO: 2042803 - DNA, 15 bp, Homo sapiens
tgaaaaagaatagca

SEQ ID NO: 2042804 - DNA, 15 bp, Homo sapiens
gaaaaagaatagcag

SEQ ID NO: 2042805 - DNA, 15 bp, Homo sapiens
aaaaagaatagcaga

SEQ ID NO: 2042806 - DNA, 15 bp, Homo sapiens
aaaagaatagcagag

SEQ ID NO: 2042807 - DNA, 15 bp, Homo sapiens
aaagaatagcagagt

SEQ ID NO: 2042808 - DNA, 15 bp, Homo sapiens
aagaatagcagagta

SEQ ID NO: 2042809 - DNA, 15 bp, Homo sapiens
agaatagcagagtaa

SEQ ID NO: 2042810 - DNA, 15 bp, Homo sapiens
gaatagcagagtaac

SEQ ID NO: 2042811 - DNA, 15 bp, Homo sapiens
aatagcagagtaaca

SEQ ID NO: 2042812 - DNA, 15 bp, Homo sapiens
atagcagagtaacat

SEQ ID NO: 2042813 - DNA, 15 bp, Homo sapiens
tagcagagtaacatg

SEQ ID NO: 2042814 - DNA, 15 bp, Homo sapiens
agcagagtaacatgg

SEQ ID NO: 2042815 - DNA, 15 bp, Homo sapiens
gcagagtaacatggg

SEQ ID NO: 2042816 - DNA, 15 bp, Homo sapiens
cagagtaacatgggc

SEQ ID NO: 2042817 - DNA, 15 bp, Homo sapiens
agagtaacatgggca

SEQ ID NO: 2042818 - DNA, 15 bp, Homo sapiens
gagtaacatgggcat

SEQ ID NO: 2042819 - DNA, 15 bp, Homo sapiens
agtaacatgggcata

SEQ ID NO: 2042820 - DNA, 15 bp, Homo sapiens
gtaacatgggcatat

SEQ ID NO: 2042821 - DNA, 15 bp, Homo sapiens
taacatgggcatatt

SEQ ID NO: 2042822 - DNA, 15 bp, Homo sapiens
aacatgggcatattg

SEQ ID NO: 2042823 - DNA, 15 bp, Homo sapiens
acatgggcatattgg

SEQ ID NO: 2042824 - DNA, 15 bp, Homo sapiens
catgggcatattggc

SEQ ID NO: 2042825 - DNA, 15 bp, Homo sapiens
atgggcatattggct

SEQ ID NO: 2042826 - DNA, 15 bp, Homo sapiens
tgggcatattggctg

SEQ ID NO: 2042827 - DNA, 15 bp, Homo sapiens
gggcatattggctgg

SEQ ID NO: 2042828 - DNA, 15 bp, Homo sapiens
ggcatattggctggg

SEQ ID NO: 2042829 - DNA, 15 bp, Homo sapiens
gcatattggctggga

SEQ ID NO: 2042830 - DNA, 15 bp, Homo sapiens
catattggctgggat

SEQ ID NO: 2042831 - DNA, 15 bp, Homo sapiens
atattggctgggatg

SEQ ID NO: 2042832 - DNA, 15 bp, Homo sapiens
tattggctgggatgg

SEQ ID NO: 2042833 - DNA, 15 bp, Homo sapiens
attggctgggatggg

SEQ ID NO: 2042834 - DNA, 15 bp, Homo sapiens
ttggctgggatgggt

SEQ ID NO: 2042835 - DNA, 15 bp, Homo sapiens
tggctgggatgggtt

SEQ ID NO: 2042836 - DNA, 15 bp, Homo sapiens
ggctgggatgggttt

SEQ ID NO: 2042837 - DNA, 15 bp, Homo sapiens
gctgggatgggtttg

SEQ ID NO: 2042838 - DNA, 15 bp, Homo sapiens
ctgggatgggtttgg

SEQ ID NO: 2042839 - DNA, 15 bp, Homo sapiens
tgggatgggtttggg

SEQ ID NO: 2042840 - DNA, 15 bp, Homo sapiens
gggatgggtttggga

SEQ ID NO: 2042841 - DNA, 15 bp, Homo sapiens
ggatgggtttgggag

SEQ ID NO: 2042842 - DNA, 15 bp, Homo sapiens
gatgggtttgggagg

SEQ ID NO: 2042843 - DNA, 15 bp, Homo sapiens
atgggtttgggaggg

SEQ ID NO: 2042844 - DNA, 15 bp, Homo sapiens
tgggtttgggagggt

SEQ ID NO: 2042845 - DNA, 15 bp, Homo sapiens
gggtttgggagggtg

SEQ ID NO: 2042846 - DNA, 15 bp, Homo sapiens
ggtttgggagggtgg

SEQ ID NO: 2042847 - DNA, 15 bp, Homo sapiens
gtttgggagggtgga

SEQ ID NO: 2042848 - DNA, 15 bp, Homo sapiens
tttgggagggtggag

SEQ ID NO: 2042849 - DNA, 15 bp, Homo sapiens
ttgggagggtggaga

SEQ ID NO: 2042850 - DNA, 15 bp, Homo sapiens
tgggagggtggagag

SEQ ID NO: 2042851 - DNA, 15 bp, Homo sapiens
gagggtggagaggat

SEQ ID NO: 2042852 - DNA, 15 bp, Homo sapiens
agggtggagaggatc

SEQ ID NO: 2042853 - DNA, 15 bp, Homo sapiens
gggtggagaggatct

SEQ ID NO: 2042854 - DNA, 15 bp, Homo sapiens
ggtggagaggatctg

SEQ ID NO: 2042855 - DNA, 15 bp, Homo sapiens
gtggagaggatctgg

SEQ ID NO: 2042856 - DNA, 15 bp, Homo sapiens
tggagaggatctggt

SEQ ID NO: 2042857 - DNA, 15 bp, Homo sapiens
ggagaggatctggtt

SEQ ID NO: 2042858 - DNA, 15 bp, Homo sapiens
gagaggatctggttt

SEQ ID NO: 2042859 - DNA, 15 bp, Homo sapiens
agaggatctggtttt

SEQ ID NO: 2042860 - DNA, 15 bp, Homo sapiens
gaggatctggttttg

SEQ ID NO: 2042861 - DNA, 15 bp, Homo sapiens
aggatctggttttga

SEQ ID NO: 2042862 - DNA, 15 bp, Homo sapiens
ggatctggttttgac

SEQ ID NO: 2042863 - DNA, 15 bp, Homo sapiens
gatctggttttgacc

SEQ ID NO: 2042864 - DNA, 15 bp, Homo sapiens
atctggttttgacca

SEQ ID NO: 2042865 - DNA, 15 bp, Homo sapiens
tctggttttgaccag

SEQ ID NO: 2042866 - DNA, 15 bp, Homo sapiens
ctggttttgaccaga

SEQ ID NO: 2042867 - DNA, 15 bp, Homo sapiens
tggttttgaccagag

SEQ ID NO: 2042868 - DNA, 15 bp, Homo sapiens
ggttttgaccagagt

SEQ ID NO: 2042869 - DNA, 15 bp, Homo sapiens
gttttgaccagagtc

SEQ ID NO: 2042870 - DNA, 15 bp, Homo sapiens
ttttgaccagagtcc

SEQ ID NO: 2042871 - DNA, 15 bp, Homo sapiens
tttgaccagagtcca

SEQ ID NO: 2042872 - DNA, 15 bp, Homo sapiens
ttgaccagagtccaa

SEQ ID NO: 2042873 - DNA, 15 bp, Homo sapiens
tgaccagagtccaaa

SEQ ID NO: 2042874 - DNA, 15 bp, Homo sapiens
gaccagagtccaaag

SEQ ID NO: 2042875 - DNA, 15 bp, Homo sapiens
accagagtccaaaga

SEQ ID NO: 2042876 - DNA, 15 bp, Homo sapiens
ccagagtccaaagaa

SEQ ID NO: 2042877 - DNA, 15 bp, Homo sapiens
cagagtccaaagaag

SEQ ID NO: 2042878 - DNA, 15 bp, Homo sapiens
agagtccaaagaagg

SEQ ID NO: 2042879 - DNA, 15 bp, Homo sapiens
gagtccaaagaaggg

SEQ ID NO: 2042880 - DNA, 15 bp, Homo sapiens
agtccaaagaagggg

SEQ ID NO: 2042881 - DNA, 15 bp, Homo sapiens
gtccaaagaaggggg

SEQ ID NO: 2042882 - DNA, 15 bp, Homo sapiens
tccaaagaaggggga

SEQ ID NO: 2042883 - DNA, 15 bp, Homo sapiens
ccaaagaagggggaa

SEQ ID NO: 2042884 - DNA, 15 bp, Homo sapiens
caaagaagggggaat

SEQ ID NO: 2042885 - DNA, 15 bp, Homo sapiens
aaagaagggggaata

SEQ ID NO: 2042886 - DNA, 15 bp, Homo sapiens
aagaagggggaataa

SEQ ID NO: 2042887 - DNA, 15 bp, Homo sapiens
agaagggggaataat

SEQ ID NO: 2042888 - DNA, 15 bp, Homo sapiens
gaagggggaataatt

SEQ ID NO: 2042889 - DNA, 15 bp, Homo sapiens
aagggggaataattt

SEQ ID NO: 2042890 - DNA, 15 bp, Homo sapiens
agggggaataatttg

SEQ ID NO: 2042891 - DNA, 15 bp, Homo sapiens
gggggaataatttgg

SEQ ID NO: 2042892 - DNA, 15 bp, Homo sapiens
ggggaataatttggg

SEQ ID NO: 2042893 - DNA, 15 bp, Homo sapiens
gggaataatttgggg

SEQ ID NO: 2042894 - DNA, 15 bp, Homo sapiens
ggaataatttggggg

SEQ ID NO: 2042895 - DNA, 15 bp, Homo sapiens
gaataatttggggga

SEQ ID NO: 2042896 - DNA, 15 bp, Homo sapiens
aataatttgggggaa

SEQ ID NO: 2042897 - DNA, 15 bp, Homo sapiens
ataatttgggggaaa

SEQ ID NO: 2042898 - DNA, 15 bp, Homo sapiens
taatttgggggaaag

SEQ ID NO: 2042899 - DNA, 15 bp, Homo sapiens
aatttgggggaaagc

SEQ ID NO: 2042900 - DNA, 15 bp, Homo sapiens
atttgggggaaagcc

SEQ ID NO: 2042901 - DNA, 15 bp, Homo sapiens
tttgggggaaagcct

SEQ ID NO: 2042902 - DNA, 15 bp, Homo sapiens
ttgggggaaagcctg

SEQ ID NO: 2042903 - DNA, 15 bp, Homo sapiens
tgggggaaagcctgc

SEQ ID NO: 2042904 - DNA, 15 bp, Homo sapiens
gggggaaagcctgcc

SEQ ID NO: 2042905 - DNA, 15 bp, Homo sapiens
ggggaaagcctgcct

SEQ ID NO: 2042906 - DNA, 15 bp, Homo sapiens
gggaaagcctgcctg

SEQ ID NO: 2042907 - DNA, 15 bp, Homo sapiens
ggaaagcctgcctga

SEQ ID NO: 2042908 - DNA, 15 bp, Homo sapiens
gaaagcctgcctgag

SEQ ID NO: 2042909 - DNA, 15 bp, Homo sapiens
aaagcctgcctgagt

SEQ ID NO: 2042910 - DNA, 15 bp, Homo sapiens
aagcctgcctgagtg

SEQ ID NO: 2042911 - DNA, 15 bp, Homo sapiens
agcctgcctgagtga

SEQ ID NO: 2042912 - DNA, 15 bp, Homo sapiens
gcctgcctgagtgag

SEQ ID NO: 2042913 - DNA, 15 bp, Homo sapiens
cctgcctgagtgagt

SEQ ID NO: 2042914 - DNA, 15 bp, Homo sapiens
ctgcctgagtgagtt

SEQ ID NO: 2042915 - DNA, 15 bp, Homo sapiens
tgcctgagtgagttg

SEQ ID NO: 2042916 - DNA, 15 bp, Homo sapiens
gcctgagtgagttgg

SEQ ID NO: 2042917 - DNA, 15 bp, Homo sapiens
cctgagtgagttggt

SEQ ID NO: 2042918 - DNA, 15 bp, Homo sapiens
ctgagtgagttggta

SEQ ID NO: 2042919 - DNA, 15 bp, Homo sapiens
tgagtgagttggtac

SEQ ID NO: 2042920 - DNA, 15 bp, Homo sapiens
gagtgagttggtacc

SEQ ID NO: 2042921 - DNA, 15 bp, Homo sapiens
agtgagttggtaccg

SEQ ID NO: 2042922 - DNA, 15 bp, Homo sapiens
gtgagttggtaccgt

SEQ ID NO: 2042923 - DNA, 15 bp, Homo sapiens
tgagttggtaccgta

SEQ ID NO: 2042924 - DNA, 15 bp, Homo sapiens
gagttggtaccgtag

SEQ ID NO: 2042925 - DNA, 15 bp, Homo sapiens
agttggtaccgtaga

SEQ ID NO: 2042926 - DNA, 15 bp, Homo sapiens
gttggtaccgtagat

SEQ ID NO: 2042927 - DNA, 15 bp, Homo sapiens
ttggtaccgtagatt

SEQ ID NO: 2042928 - DNA, 15 bp, Homo sapiens
tggtaccgtagattg

SEQ ID NO: 2042929 - DNA, 15 bp, Homo sapiens
ggtaccgtagattgg

SEQ ID NO: 2042930 - DNA, 15 bp, Homo sapiens
gtaccgtagattgga

SEQ ID NO: 2042931 - DNA, 15 bp, Homo sapiens
taccgtagattggag

SEQ ID NO: 2042932 - DNA, 15 bp, Homo sapiens
accgtagattggaga

SEQ ID NO: 2042933 - DNA, 15 bp, Homo sapiens
ccgtagattggagag

SEQ ID NO: 2042934 - DNA, 15 bp, Homo sapiens
cgtagattggagagc

SEQ ID NO: 2042935 - DNA, 15 bp, Homo sapiens
gtagattggagagct

SEQ ID NO: 2042936 - DNA, 15 bp, Homo sapiens
tagattggagagctg

SEQ ID NO: 2042937 - DNA, 15 bp, Homo sapiens
agattggagagctgg

SEQ ID NO: 2042938 - DNA, 15 bp, Homo sapiens
gattggagagctgga

SEQ ID NO: 2042939 - DNA, 15 bp, Homo sapiens
attggagagctggaa

SEQ ID NO: 2042940 - DNA, 15 bp, Homo sapiens
ttggagagctggaag

SEQ ID NO: 2042941 - DNA, 15 bp, Homo sapiens
tggagagctggaagg

SEQ ID NO: 2042942 - DNA, 15 bp, Homo sapiens
ggagagctggaaggc

SEQ ID NO: 2042943 - DNA, 15 bp, Homo sapiens
gagagctggaaggca

SEQ ID NO: 2042944 - DNA, 15 bp, Homo sapiens
agagctggaaggcac

SEQ ID NO: 2042945 - DNA, 15 bp, Homo sapiens
gagctggaaggcacc

SEQ ID NO: 2042946 - DNA, 15 bp, Homo sapiens
agctggaaggcaccc

SEQ ID NO: 2042947 - DNA, 15 bp, Homo sapiens
gctggaaggcaccca

SEQ ID NO: 2042948 - DNA, 15 bp, Homo sapiens
ctggaaggcacccat

SEQ ID NO: 2042949 - DNA, 15 bp, Homo sapiens
tggaaggcacccatc

SEQ ID NO: 2042950 - DNA, 15 bp, Homo sapiens
ggaaggcacccatcg

SEQ ID NO: 2042951 - DNA, 15 bp, Homo sapiens
gaaggcacccatcga

SEQ ID NO: 2042952 - DNA, 15 bp, Homo sapiens
aaggcacccatcgag

SEQ ID NO: 2042953 - DNA, 15 bp, Homo sapiens
aggcacccatcgagt

SEQ ID NO: 2042954 - DNA, 15 bp, Homo sapiens
ggcacccatcgagtg

SEQ ID NO: 2042955 - DNA, 15 bp, Homo sapiens
gcacccatcgagtgt

SEQ ID NO: 2042956 - DNA, 15 bp, Homo sapiens
cacccatcgagtgta

SEQ ID NO: 2042957 - DNA, 15 bp, Homo sapiens
acccatcgagtgtag

SEQ ID NO: 2042958 - DNA, 15 bp, Homo sapiens
cccatcgagtgtagc

SEQ ID NO: 2042959 - DNA, 15 bp, Homo sapiens
ccatcgagtgtagct

SEQ ID NO: 2042960 - DNA, 15 bp, Homo sapiens
catcgagtgtagcta

SEQ ID NO: 2042961 - DNA, 15 bp, Homo sapiens
atcgagtgtagctag

SEQ ID NO: 2042962 - DNA, 15 bp, Homo sapiens
tcgagtgtagctagt

SEQ ID NO: 2042963 - DNA, 15 bp, Homo sapiens
cgagtgtagctagtc

SEQ ID NO: 2042964 - DNA, 15 bp, Homo sapiens
gagtgtagctagtcc

SEQ ID NO: 2042965 - DNA, 15 bp, Homo sapiens
agtgtagctagtccc

SEQ ID NO: 2042966 - DNA, 15 bp, Homo sapiens
gtgtagctagtccca

SEQ ID NO: 2042967 - DNA, 15 bp, Homo sapiens
tgtagctagtcccag

SEQ ID NO: 2042968 - DNA, 15 bp, Homo sapiens
gtagctagtcccaga

SEQ ID NO: 2042969 - DNA, 15 bp, Homo sapiens
tagctagtcccagaa

SEQ ID NO: 2042970 - DNA, 15 bp, Homo sapiens
agctagtcccagaag

SEQ ID NO: 2042971 - DNA, 15 bp, Homo sapiens
ctagtcccagaagtt

SEQ ID NO: 2042972 - DNA, 15 bp, Homo sapiens
tagtcccagaagttt

SEQ ID NO: 2042973 - DNA, 15 bp, Homo sapiens
agtcccagaagtttt

SEQ ID NO: 2042974 - DNA, 15 bp, Homo sapiens
gtcccagaagttttc

SEQ ID NO: 2042975 - DNA, 15 bp, Homo sapiens
tcccagaagttttcc

SEQ ID NO: 2042976 - DNA, 15 bp, Homo sapiens
cccagaagttttcct

SEQ ID NO: 2042977 - DNA, 15 bp, Homo sapiens
ccagaagttttccta

SEQ ID NO: 2042978 - DNA, 15 bp, Homo sapiens
cagaagttttcctac

SEQ ID NO: 2042979 - DNA, 15 bp, Homo sapiens
agaagttttcctact

SEQ ID NO: 2042980 - DNA, 15 bp, Homo sapiens
gaagttttcctactc

SEQ ID NO: 2042981 - DNA, 15 bp, Homo sapiens
aagttttcctactcc

SEQ ID NO: 2042982 - DNA, 15 bp, Homo sapiens
agttttcctactcca

SEQ ID NO: 2042983 - DNA, 15 bp, Homo sapiens
gttttcctactccaa

SEQ ID NO: 2042984 - DNA, 15 bp, Homo sapiens
ttttcctactccaat

SEQ ID NO: 2042985 - DNA, 15 bp, Homo sapiens
tttcctactccaata

SEQ ID NO: 2042986 - DNA, 15 bp, Homo sapiens
ttcctactccaatat

SEQ ID NO: 2042987 - DNA, 15 bp, Homo sapiens
tcctactccaatatt

SEQ ID NO: 2042988 - DNA, 15 bp, Homo sapiens
cctactccaatattt

SEQ ID NO: 2042989 - DNA, 15 bp, Homo sapiens
ctactccaatatttt

SEQ ID NO: 2042990 - DNA, 15 bp, Homo sapiens
tactccaatattttc

SEQ ID NO: 2042991 - DNA, 15 bp, Homo sapiens
actccaatattttct

SEQ ID NO: 2042992 - DNA, 15 bp, Homo sapiens
ctccaatattttcta

SEQ ID NO: 2042993 - DNA, 15 bp, Homo sapiens
tccaatattttctaa

SEQ ID NO: 2042994 - DNA, 15 bp, Homo sapiens
ccaatattttctaaa

SEQ ID NO: 2042995 - DNA, 15 bp, Homo sapiens
caatattttctaaag

SEQ ID NO: 2042996 - DNA, 15 bp, Homo sapiens
aatattttctaaagg

SEQ ID NO: 2042997 - DNA, 15 bp, Homo sapiens
atattttctaaaggt

SEQ ID NO: 2042998 - DNA, 15 bp, Homo sapiens
tattttctaaaggtt

SEQ ID NO: 2042999 - DNA, 15 bp, Homo sapiens
attttctaaaggtta

SEQ ID NO: 2043000 - DNA, 15 bp, Homo sapiens
ttttctaaaggttat

SEQ ID NO: 2043001 - DNA, 15 bp, Homo sapiens
tttctaaaggttatg

SEQ ID NO: 2043002 - DNA, 15 bp, Homo sapiens
ttctaaaggttatgc

SEQ ID NO: 2043003 - DNA, 15 bp, Homo sapiens
tctaaaggttatgct

SEQ ID NO: 2043004 - DNA, 15 bp, Homo sapiens
ctaaaggttatgctc

SEQ ID NO: 2043005 - DNA, 15 bp, Homo sapiens
taaaggttatgctcc

SEQ ID NO: 2043006 - DNA, 15 bp, Homo sapiens
aaaggttatgctcct

SEQ ID NO: 2043007 - DNA, 15 bp, Homo sapiens
aaggttatgctccta

SEQ ID NO: 2043008 - DNA, 15 bp, Homo sapiens
aggttatgctcctac

SEQ ID NO: 2043009 - DNA, 15 bp, Homo sapiens
ggttatgctcctact

SEQ ID NO: 2043010 - DNA, 15 bp, Homo sapiens
gttatgctcctactg

SEQ ID NO: 2043011 - DNA, 15 bp, Homo sapiens
ttatgctcctactgc

SEQ ID NO: 2043012 - DNA, 15 bp, Homo sapiens
tatgctcctactgct

SEQ ID NO: 2043013 - DNA, 15 bp, Homo sapiens
atgctcctactgctg

SEQ ID NO: 2043014 - DNA, 15 bp, Homo sapiens
tgctcctactgctgc

SEQ ID NO: 2043015 - DNA, 15 bp, Homo sapiens
gctcctactgctgca

SEQ ID NO: 2043016 - DNA, 15 bp, Homo sapiens
ctcctactgctgcaa

SEQ ID NO: 2043017 - DNA, 15 bp, Homo sapiens
tcctactgctgcaac

SEQ ID NO: 2043018 - DNA, 15 bp, Homo sapiens
cctactgctgcaaca

SEQ ID NO: 2043019 - DNA, 15 bp, Homo sapiens
ctactgctgcaacac

SEQ ID NO: 2043020 - DNA, 15 bp, Homo sapiens
tactgctgcaacaca

SEQ ID NO: 2043021 - DNA, 15 bp, Homo sapiens
actgctgcaacacaa

SEQ ID NO: 2043022 - DNA, 15 bp, Homo sapiens
ctgctgcaacacaag

SEQ ID NO: 2043023 - DNA, 15 bp, Homo sapiens
tgctgcaacacaagg

SEQ ID NO: 2043024 - DNA, 15 bp, Homo sapiens
gctgcaacacaaggc

SEQ ID NO: 2043025 - DNA, 15 bp, Homo sapiens
ctgcaacacaaggca

SEQ ID NO: 2043026 - DNA, 15 bp, Homo sapiens
tgcaacacaaggcag

SEQ ID NO: 2043027 - DNA, 15 bp, Homo sapiens
gcaacacaaggcaga

SEQ ID NO: 2043028 - DNA, 15 bp, Homo sapiens
caacacaaggcagaa

SEQ ID NO: 2043029 - DNA, 15 bp, Homo sapiens
aacacaaggcagaac

SEQ ID NO: 2043030 - DNA, 15 bp, Homo sapiens
acacaaggcagaacc

SEQ ID NO: 2043031 - DNA, 15 bp, Homo sapiens
cacaaggcagaaccc

SEQ ID NO: 2043032 - DNA, 15 bp, Homo sapiens
acaaggcagaacccc

SEQ ID NO: 2043033 - DNA, 15 bp, Homo sapiens
caaggcagaaccccc

SEQ ID NO: 2043034 - DNA, 15 bp, Homo sapiens
aaggcagaaccccct

SEQ ID NO: 2043035 - DNA, 15 bp, Homo sapiens
aggcagaaccccctt

SEQ ID NO: 2043036 - DNA, 15 bp, Homo sapiens
ggcagaacccccttg

SEQ ID NO: 2043037 - DNA, 15 bp, Homo sapiens
gcagaacccccttgt

SEQ ID NO: 2043038 - DNA, 15 bp, Homo sapiens
cagaacccccttgtg

SEQ ID NO: 2043039 - DNA, 15 bp, Homo sapiens
agaacccccttgtgt

SEQ ID NO: 2043040 - DNA, 15 bp, Homo sapiens
gaacccccttgtgtc

SEQ ID NO: 2043041 - DNA, 15 bp, Homo sapiens
aacccccttgtgtca

SEQ ID NO: 2043042 - DNA, 15 bp, Homo sapiens
acccccttgtgtcag

SEQ ID NO: 2043043 - DNA, 15 bp, Homo sapiens
cccccttgtgtcagg

SEQ ID NO: 2043044 - DNA, 15 bp, Homo sapiens
ccccttgtgtcaggc

SEQ ID NO: 2043045 - DNA, 15 bp, Homo sapiens
cccttgtgtcaggct

SEQ ID NO: 2043046 - DNA, 15 bp, Homo sapiens
ccttgtgtcaggctg

SEQ ID NO: 2043047 - DNA, 15 bp, Homo sapiens
cttgtgtcaggctgt

SEQ ID NO: 2043048 - DNA, 15 bp, Homo sapiens
ttgtgtcaggctgtc

SEQ ID NO: 2043049 - DNA, 15 bp, Homo sapiens
gtgtcaggctgtcaa

SEQ ID NO: 2043050 - DNA, 15 bp, Homo sapiens
tgtcaggctgtcaag

SEQ ID NO: 2043051 - DNA, 15 bp, Homo sapiens
gtcaggctgtcaagc

SEQ ID NO: 2043052 - DNA, 15 bp, Homo sapiens
tcaggctgtcaagct

SEQ ID NO: 2043053 - DNA, 15 bp, Homo sapiens
caggctgtcaagcta

SEQ ID NO: 2043054 - DNA, 15 bp, Homo sapiens
aggctgtcaagctaa

SEQ ID NO: 2043055 - DNA, 15 bp, Homo sapiens
ggctgtcaagctaat

SEQ ID NO: 2043056 - DNA, 15 bp, Homo sapiens
gctgtcaagctaata

SEQ ID NO: 2043057 - DNA, 15 bp, Homo sapiens
ctgtcaagctaatag

SEQ ID NO: 2043058 - DNA, 15 bp, Homo sapiens
tgtcaagctaatagg

SEQ ID NO: 2043059 - DNA, 15 bp, Homo sapiens
gtcaagctaataggg

SEQ ID NO: 2043060 - DNA, 15 bp, Homo sapiens
tcaagctaatagggc

SEQ ID NO: 2043061 - DNA, 15 bp, Homo sapiens
caagctaatagggcc

SEQ ID NO: 2043062 - DNA, 15 bp, Homo sapiens
aagctaatagggcca

SEQ ID NO: 2043063 - DNA, 15 bp, Homo sapiens
agctaatagggccac

SEQ ID NO: 2043064 - DNA, 15 bp, Homo sapiens
gctaatagggccact

SEQ ID NO: 2043065 - DNA, 15 bp, Homo sapiens
ctaatagggccactg

SEQ ID NO: 2043066 - DNA, 15 bp, Homo sapiens
taatagggccactgc

SEQ ID NO: 2043067 - DNA, 15 bp, Homo sapiens
aatagggccactgcc

SEQ ID NO: 2043068 - DNA, 15 bp, Homo sapiens
atagggccactgcct

SEQ ID NO: 2043069 - DNA, 15 bp, Homo sapiens
tagggccactgcctc

SEQ ID NO: 2043070 - DNA, 15 bp, Homo sapiens
agggccactgcctcc

SEQ ID NO: 2043071 - DNA, 15 bp, Homo sapiens
gggccactgcctcct

SEQ ID NO: 2043072 - DNA, 15 bp, Homo sapiens
ggccactgcctcctc

SEQ ID NO: 2043073 - DNA, 15 bp, Homo sapiens
gccactgcctcctcc

SEQ ID NO: 2043074 - DNA, 15 bp, Homo sapiens
ccactgcctcctcca

SEQ ID NO: 2043075 - DNA, 15 bp, Homo sapiens
cactgcctcctccag

SEQ ID NO: 2043076 - DNA, 15 bp, Homo sapiens
actgcctcctccaga

SEQ ID NO: 2043077 - DNA, 15 bp, Homo sapiens
cctcctccagaaagg

SEQ ID NO: 2043078 - DNA, 15 bp, Homo sapiens
ctcctccagaaagga

SEQ ID NO: 2043079 - DNA, 15 bp, Homo sapiens
tcctccagaaaggac

SEQ ID NO: 2043080 - DNA, 15 bp, Homo sapiens
cctccagaaaggaca

SEQ ID NO: 2043081 - DNA, 15 bp, Homo sapiens
ctccagaaaggacat

SEQ ID NO: 2043082 - DNA, 15 bp, Homo sapiens
tccagaaaggacatg

SEQ ID NO: 2043083 - DNA, 15 bp, Homo sapiens
ccagaaaggacatgc

SEQ ID NO: 2043084 - DNA, 15 bp, Homo sapiens
cagaaaggacatgca

SEQ ID NO: 2043085 - DNA, 15 bp, Homo sapiens
agaaaggacatgcag

SEQ ID NO: 2043086 - DNA, 15 bp, Homo sapiens
gaaaggacatgcaga

SEQ ID NO: 2043087 - DNA, 15 bp, Homo sapiens
aaaggacatgcagaa

SEQ ID NO: 2043088 - DNA, 15 bp, Homo sapiens
aaggacatgcagaaa

SEQ ID NO: 2043089 - DNA, 15 bp, Homo sapiens
aggacatgcagaaag

SEQ ID NO: 2043090 - DNA, 15 bp, Homo sapiens
ggacatgcagaaagt

SEQ ID NO: 2043091 - DNA, 15 bp, Homo sapiens
gacatgcagaaagtg

SEQ ID NO: 2043092 - DNA, 15 bp, Homo sapiens
acatgcagaaagtgc

SEQ ID NO: 2043093 - DNA, 15 bp, Homo sapiens
catgcagaaagtgca

SEQ ID NO: 2043094 - DNA, 15 bp, Homo sapiens
atgcagaaagtgcaa

SEQ ID NO: 2043095 - DNA, 15 bp, Homo sapiens
tgcagaaagtgcaag

SEQ ID NO: 2043096 - DNA, 15 bp, Homo sapiens
gcagaaagtgcaagc

SEQ ID NO: 2043097 - DNA, 15 bp, Homo sapiens
cagaaagtgcaagct

SEQ ID NO: 2043098 - DNA, 15 bp, Homo sapiens
agaaagtgcaagcta

SEQ ID NO: 2043099 - DNA, 15 bp, Homo sapiens
gaaagtgcaagctac

SEQ ID NO: 2043100 - DNA, 15 bp, Homo sapiens
aaagtgcaagctact

SEQ ID NO: 2043101 - DNA, 15 bp, Homo sapiens
aagtgcaagctactc

SEQ ID NO: 2043102 - DNA, 15 bp, Homo sapiens
agtgcaagctactcc

SEQ ID NO: 2043103 - DNA, 15 bp, Homo sapiens
gtgcaagctactcca

SEQ ID NO: 2043104 - DNA, 15 bp, Homo sapiens
tgcaagctactccat

SEQ ID NO: 2043105 - DNA, 15 bp, Homo sapiens
gcaagctactccatt

SEQ ID NO: 2043106 - DNA, 15 bp, Homo sapiens
caagctactccattg

SEQ ID NO: 2043107 - DNA, 15 bp, Homo sapiens
aagctactccattgg

SEQ ID NO: 2043108 - DNA, 15 bp, Homo sapiens
agctactccattggt

SEQ ID NO: 2043109 - DNA, 15 bp, Homo sapiens
gctactccattggtc

SEQ ID NO: 2043110 - DNA, 15 bp, Homo sapiens
ctactccattggtca

SEQ ID NO: 2043111 - DNA, 15 bp, Homo sapiens
tactccattggtcac

SEQ ID NO: 2043112 - DNA, 15 bp, Homo sapiens
actccattggtcacc

SEQ ID NO: 2043113 - DNA, 15 bp, Homo sapiens
ctccattggtcacca

SEQ ID NO: 2043114 - DNA, 15 bp, Homo sapiens
tccattggtcaccaa

SEQ ID NO: 2043115 - DNA, 15 bp, Homo sapiens
ccattggtcaccaaa

SEQ ID NO: 2043116 - DNA, 15 bp, Homo sapiens
cattggtcaccaaat

SEQ ID NO: 2043117 - DNA, 15 bp, Homo sapiens
attggtcaccaaata

SEQ ID NO: 2043118 - DNA, 15 bp, Homo sapiens
ttggtcaccaaatat

SEQ ID NO: 2043119 - DNA, 15 bp, Homo sapiens
tggtcaccaaatatg

SEQ ID NO: 2043120 - DNA, 15 bp, Homo sapiens
ggtcaccaaatatgc

SEQ ID NO: 2043121 - DNA, 15 bp, Homo sapiens
gtcaccaaatatgcc

SEQ ID NO: 2043122 - DNA, 15 bp, Homo sapiens
tcaccaaatatgcct

SEQ ID NO: 2043123 - DNA, 15 bp, Homo sapiens
caccaaatatgcctc

SEQ ID NO: 2043124 - DNA, 15 bp, Homo sapiens
accaaatatgcctcc

SEQ ID NO: 2043125 - DNA, 15 bp, Homo sapiens
ccaaatatgcctcca

SEQ ID NO: 2043126 - DNA, 15 bp, Homo sapiens
caaatatgcctccaa

SEQ ID NO: 2043127 - DNA, 15 bp, Homo sapiens
aaatatgcctccaaa

SEQ ID NO: 2043128 - DNA, 15 bp, Homo sapiens
aatatgcctccaaat

SEQ ID NO: 2043129 - DNA, 15 bp, Homo sapiens
atatgcctccaaatg

SEQ ID NO: 2043130 - DNA, 15 bp, Homo sapiens
tatgcctccaaatgc

SEQ ID NO: 2043131 - DNA, 15 bp, Homo sapiens
atgcctccaaatgcc

SEQ ID NO: 2043132 - DNA, 15 bp, Homo sapiens
tgcctccaaatgccc

SEQ ID NO: 2043133 - DNA, 15 bp, Homo sapiens
gcctccaaatgccct

SEQ ID NO: 2043134 - DNA, 15 bp, Homo sapiens
cctccaaatgccctc

SEQ ID NO: 2043135 - DNA, 15 bp, Homo sapiens
ctccaaatgccctct

SEQ ID NO: 2043136 - DNA, 15 bp, Homo sapiens
tccaaatgccctctg

SEQ ID NO: 2043137 - DNA, 15 bp, Homo sapiens
ccaaatgccctctga

SEQ ID NO: 2043138 - DNA, 15 bp, Homo sapiens
caaatgccctctgac

SEQ ID NO: 2043139 - DNA, 15 bp, Homo sapiens
aaatgccctctgact

SEQ ID NO: 2043140 - DNA, 15 bp, Homo sapiens
aatgccctctgactt

SEQ ID NO: 2043141 - DNA, 15 bp, Homo sapiens
atgccctctgacttg

SEQ ID NO: 2043142 - DNA, 15 bp, Homo sapiens
tgccctctgacttgg

SEQ ID NO: 2043143 - DNA, 15 bp, Homo sapiens
gccctctgacttgga

SEQ ID NO: 2043144 - DNA, 15 bp, Homo sapiens
ccctctgacttggac

SEQ ID NO: 2043145 - DNA, 15 bp, Homo sapiens
cctctgacttggaca

SEQ ID NO: 2043146 - DNA, 15 bp, Homo sapiens
ctctgacttggacag

SEQ ID NO: 2043147 - DNA, 15 bp, Homo sapiens
tctgacttggacagg

SEQ ID NO: 2043148 - DNA, 15 bp, Homo sapiens
ctgacttggacagga

SEQ ID NO: 2043149 - DNA, 15 bp, Homo sapiens
tgacttggacaggac

SEQ ID NO: 2043150 - DNA, 15 bp, Homo sapiens
gacttggacaggaca

SEQ ID NO: 2043151 - DNA, 15 bp, Homo sapiens
acttggacaggacat

SEQ ID NO: 2043152 - DNA, 15 bp, Homo sapiens
cttggacaggacatt

SEQ ID NO: 2043153 - DNA, 15 bp, Homo sapiens
ttggacaggacattc

SEQ ID NO: 2043154 - DNA, 15 bp, Homo sapiens
tggacaggacattcg

SEQ ID NO: 2043155 - DNA, 15 bp, Homo sapiens
ggacaggacattcgc

SEQ ID NO: 2043156 - DNA, 15 bp, Homo sapiens
gacaggacattcgca

SEQ ID NO: 2043157 - DNA, 15 bp, Homo sapiens
acaggacattcgcat

SEQ ID NO: 2043158 - DNA, 15 bp, Homo sapiens
caggacattcgcata

SEQ ID NO: 2043159 - DNA, 15 bp, Homo sapiens
aggacattcgcataa

SEQ ID NO: 2043160 - DNA, 15 bp, Homo sapiens
ggacattcgcataac

SEQ ID NO: 2043161 - DNA, 15 bp, Homo sapiens
gacattcgcataaca

SEQ ID NO: 2043162 - DNA, 15 bp, Homo sapiens
acattcgcataacaa

SEQ ID NO: 2043163 - DNA, 15 bp, Homo sapiens
cattcgcataacaaa

SEQ ID NO: 2043164 - DNA, 15 bp, Homo sapiens
attcgcataacaaaa

SEQ ID NO: 2043165 - DNA, 15 bp, Homo sapiens
ttcgcataacaaaat

SEQ ID NO: 2043166 - DNA, 15 bp, Homo sapiens
tcgcataacaaaatt

SEQ ID NO: 2043167 - DNA, 15 bp, Homo sapiens
cgcataacaaaattc

SEQ ID NO: 2043168 - DNA, 15 bp, Homo sapiens
gcataacaaaattcc

SEQ ID NO: 2043169 - DNA, 15 bp, Homo sapiens
cataacaaaattccg

SEQ ID NO: 2043170 - DNA, 15 bp, Homo sapiens
ataacaaaattccga

SEQ ID NO: 2043171 - DNA, 15 bp, Homo sapiens
taacaaaattccgaa

SEQ ID NO: 2043172 - DNA, 15 bp, Homo sapiens
aacaaaattccgaag

SEQ ID NO: 2043173 - DNA, 15 bp, Homo sapiens
acaaaattccgaagc

SEQ ID NO: 2043174 - DNA, 15 bp, Homo sapiens
caaaattccgaagca

SEQ ID NO: 2043175 - DNA, 15 bp, Homo sapiens
aaaattccgaagcaa

SEQ ID NO: 2043176 - DNA, 15 bp, Homo sapiens
aaattccgaagcaaa

SEQ ID NO: 2043177 - DNA, 15 bp, Homo sapiens
aattccgaagcaaag

SEQ ID NO: 2043178 - DNA, 15 bp, Homo sapiens
attccgaagcaaagc

SEQ ID NO: 2043179 - DNA, 15 bp, Homo sapiens
ttccgaagcaaagca

SEQ ID NO: 2043180 - DNA, 15 bp, Homo sapiens
tccgaagcaaagcat

SEQ ID NO: 2043181 - DNA, 15 bp, Homo sapiens
ccgaagcaaagcata

SEQ ID NO: 2043182 - DNA, 15 bp, Homo sapiens
cgaagcaaagcataa

SEQ ID NO: 2043183 - DNA, 15 bp, Homo sapiens
gaagcaaagcataat

SEQ ID NO: 2043184 - DNA, 15 bp, Homo sapiens
aagcaaagcataatt

SEQ ID NO: 2043185 - DNA, 15 bp, Homo sapiens
agcaaagcataatta

SEQ ID NO: 2043186 - DNA, 15 bp, Homo sapiens
gcaaagcataattaa

SEQ ID NO: 2043187 - DNA, 15 bp, Homo sapiens
caaagcataattaaa

SEQ ID NO: 2043188 - DNA, 15 bp, Homo sapiens
aaagcataattaaaa

SEQ ID NO: 2043189 - DNA, 15 bp, Homo sapiens
aagcataattaaaag

SEQ ID NO: 2043190 - DNA, 15 bp, Homo sapiens
agcataattaaaaga

SEQ ID NO: 2043191 - DNA, 15 bp, Homo sapiens
gcataattaaaagag

SEQ ID NO: 2043192 - DNA, 15 bp, Homo sapiens
cataattaaaagagg

SEQ ID NO: 2043193 - DNA, 15 bp, Homo sapiens
ataattaaaagaggg

SEQ ID NO: 2043194 - DNA, 15 bp, Homo sapiens
taattaaaagagggt

SEQ ID NO: 2043195 - DNA, 15 bp, Homo sapiens
aattaaaagagggtt

SEQ ID NO: 2043196 - DNA, 15 bp, Homo sapiens
attaaaagagggttt

SEQ ID NO: 2043197 - DNA, 15 bp, Homo sapiens
ttaaaagagggtttt

SEQ ID NO: 2043198 - DNA, 15 bp, Homo sapiens
taaaagagggtttta

SEQ ID NO: 2043199 - DNA, 15 bp, Homo sapiens
aaaagagggttttag

SEQ ID NO: 2043200 - DNA, 15 bp, Homo sapiens
aaagagggttttagg

SEQ ID NO: 2043201 - DNA, 15 bp, Homo sapiens
aagagggttttaggt

SEQ ID NO: 2043202 - DNA, 15 bp, Homo sapiens
agagggttttaggta

SEQ ID NO: 2043203 - DNA, 15 bp, Homo sapiens
gagggttttaggtac

SEQ ID NO: 2043204 - DNA, 15 bp, Homo sapiens
agggttttaggtaca

SEQ ID NO: 2043205 - DNA, 15 bp, Homo sapiens
gggttttaggtacaa

SEQ ID NO: 2043206 - DNA, 15 bp, Homo sapiens
ggttttaggtacaag

SEQ ID NO: 2043207 - DNA, 15 bp, Homo sapiens
gttttaggtacaaga

SEQ ID NO: 2043208 - DNA, 15 bp, Homo sapiens
ttttaggtacaagag

SEQ ID NO: 2043209 - DNA, 15 bp, Homo sapiens
tttaggtacaagagc

SEQ ID NO: 2043210 - DNA, 15 bp, Homo sapiens
ttaggtacaagagca

SEQ ID NO: 2043211 - DNA, 15 bp, Homo sapiens
taggtacaagagcag

SEQ ID NO: 2043212 - DNA, 15 bp, Homo sapiens
aggtacaagagcagc

SEQ ID NO: 2043213 - DNA, 15 bp, Homo sapiens
ggtacaagagcagct

SEQ ID NO: 2043214 - DNA, 15 bp, Homo sapiens
gtacaagagcagctt

SEQ ID NO: 2043215 - DNA, 15 bp, Homo sapiens
tacaagagcagcttc

SEQ ID NO: 2043216 - DNA, 15 bp, Homo sapiens
acaagagcagcttcc

SEQ ID NO: 2043217 - DNA, 15 bp, Homo sapiens
caagagcagcttcca

SEQ ID NO: 2043218 - DNA, 15 bp, Homo sapiens
aagagcagcttccaa

SEQ ID NO: 2043219 - DNA, 15 bp, Homo sapiens
agagcagcttccaag

SEQ ID NO: 2043220 - DNA, 15 bp, Homo sapiens
gagcagcttccaagc

SEQ ID NO: 2043221 - DNA, 15 bp, Homo sapiens
agcagcttccaagcc

SEQ ID NO: 2043222 - DNA, 15 bp, Homo sapiens
cagcttccaagccct

SEQ ID NO: 2043223 - DNA, 15 bp, Homo sapiens
agcttccaagccctg

SEQ ID NO: 2043224 - DNA, 15 bp, Homo sapiens
gcttccaagccctga

SEQ ID NO: 2043225 - DNA, 15 bp, Homo sapiens
cttccaagccctgat

SEQ ID NO: 2043226 - DNA, 15 bp, Homo sapiens
ttccaagccctgatc

SEQ ID NO: 2043227 - DNA, 15 bp, Homo sapiens
tccaagccctgatct

SEQ ID NO: 2043228 - DNA, 15 bp, Homo sapiens
ccaagccctgatcta

SEQ ID NO: 2043229 - DNA, 15 bp, Homo sapiens
caagccctgatctac

SEQ ID NO: 2043230 - DNA, 15 bp, Homo sapiens
aagccctgatctaca

SEQ ID NO: 2043231 - DNA, 15 bp, Homo sapiens
agccctgatctacac

SEQ ID NO: 2043232 - DNA, 15 bp, Homo sapiens
gccctgatctacacc

SEQ ID NO: 2043233 - DNA, 15 bp, Homo sapiens
ccctgatctacacct

SEQ ID NO: 2043234 - DNA, 15 bp, Homo sapiens
cctgatctacacctg

SEQ ID NO: 2043235 - DNA, 15 bp, Homo sapiens
ctgatctacacctgg

SEQ ID NO: 2043236 - DNA, 15 bp, Homo sapiens
tgatctacacctggg

SEQ ID NO: 2043237 - DNA, 15 bp, Homo sapiens
gatctacacctgggc

SEQ ID NO: 2043238 - DNA, 15 bp, Homo sapiens
atctacacctgggct

SEQ ID NO: 2043239 - DNA, 15 bp, Homo sapiens
tctacacctgggctc

SEQ ID NO: 2043240 - DNA, 15 bp, Homo sapiens
ctacacctgggctct

SEQ ID NO: 2043241 - DNA, 15 bp, Homo sapiens
tacacctgggctctt

SEQ ID NO: 2043242 - DNA, 15 bp, Homo sapiens
acacctgggctcttt

SEQ ID NO: 2043243 - DNA, 15 bp, Homo sapiens
cacctgggctctttc

SEQ ID NO: 2043244 - DNA, 15 bp, Homo sapiens
acctgggctctttca

SEQ ID NO: 2043245 - DNA, 15 bp, Homo sapiens
cctgggctctttcaa

SEQ ID NO: 2043246 - DNA, 15 bp, Homo sapiens
ctgggctctttcaaa

SEQ ID NO: 2043247 - DNA, 15 bp, Homo sapiens
tgggctctttcaaat

SEQ ID NO: 2043248 - DNA, 15 bp, Homo sapiens
gggctctttcaaata

SEQ ID NO: 2043249 - DNA, 15 bp, Homo sapiens
ggctctttcaaatag

SEQ ID NO: 2043250 - DNA, 15 bp, Homo sapiens
gctctttcaaatagc

SEQ ID NO: 2043251 - DNA, 15 bp, Homo sapiens
ctctttcaaatagca

SEQ ID NO: 2043252 - DNA, 15 bp, Homo sapiens
tctttcaaatagcag

SEQ ID NO: 2043253 - DNA, 15 bp, Homo sapiens
ctttcaaatagcagg

SEQ ID NO: 2043254 - DNA, 15 bp, Homo sapiens
tttcaaatagcaggt

SEQ ID NO: 2043255 - DNA, 15 bp, Homo sapiens
ttcaaatagcaggtg

SEQ ID NO: 2043256 - DNA, 15 bp, Homo sapiens
tcaaatagcaggtgc

SEQ ID NO: 2043257 - DNA, 15 bp, Homo sapiens
caaatagcaggtgca

SEQ ID NO: 2043258 - DNA, 15 bp, Homo sapiens
aaatagcaggtgcaa

SEQ ID NO: 2043259 - DNA, 15 bp, Homo sapiens
aatagcaggtgcaag

SEQ ID NO: 2043260 - DNA, 15 bp, Homo sapiens
agcaggtgcaaggag

SEQ ID NO: 2043261 - DNA, 15 bp, Homo sapiens
gcaggtgcaaggaga

SEQ ID NO: 2043262 - DNA, 15 bp, Homo sapiens
caggtgcaaggagac

SEQ ID NO: 2043263 - DNA, 15 bp, Homo sapiens
aggtgcaaggagact

SEQ ID NO: 2043264 - DNA, 15 bp, Homo sapiens
ggtgcaaggagactg

SEQ ID NO: 2043265 - DNA, 15 bp, Homo sapiens
gtgcaaggagactgg

SEQ ID NO: 2043266 - DNA, 15 bp, Homo sapiens
tgcaaggagactggg

SEQ ID NO: 2043267 - DNA, 15 bp, Homo sapiens
gcaaggagactgggt

SEQ ID NO: 2043268 - DNA, 15 bp, Homo sapiens
caaggagactgggtg

SEQ ID NO: 2043269 - DNA, 15 bp, Homo sapiens
aaggagactgggtga

SEQ ID NO: 2043270 - DNA, 15 bp, Homo sapiens
aggagactgggtgat

SEQ ID NO: 2043271 - DNA, 15 bp, Homo sapiens
ggagactgggtgatt

SEQ ID NO: 2043272 - DNA, 15 bp, Homo sapiens
gagactgggtgattc

SEQ ID NO: 2043273 - DNA, 15 bp, Homo sapiens
agactgggtgattca

SEQ ID NO: 2043274 - DNA, 15 bp, Homo sapiens
gactgggtgattcaa

SEQ ID NO: 2043275 - DNA, 15 bp, Homo sapiens
actgggtgattcaaa

SEQ ID NO: 2043276 - DNA, 15 bp, Homo sapiens
ctgggtgattcaaag

SEQ ID NO: 2043277 - DNA, 15 bp, Homo sapiens
tgggtgattcaaaga

SEQ ID NO: 2043278 - DNA, 15 bp, Homo sapiens
gggtgattcaaagag

SEQ ID NO: 2043279 - DNA, 15 bp, Homo sapiens
ggtgattcaaagagt

SEQ ID NO: 2043280 - DNA, 15 bp, Homo sapiens
gtgattcaaagagtc

SEQ ID NO: 2043281 - DNA, 15 bp, Homo sapiens
tgattcaaagagtca

SEQ ID NO: 2043282 - DNA, 15 bp, Homo sapiens
gattcaaagagtcaa

SEQ ID NO: 2043283 - DNA, 15 bp, Homo sapiens
attcaaagagtcaat

SEQ ID NO: 2043284 - DNA, 15 bp, Homo sapiens
ttcaaagagtcaatc

SEQ ID NO: 2043285 - DNA, 15 bp, Homo sapiens
tcaaagagtcaatca

SEQ ID NO: 2043286 - DNA, 15 bp, Homo sapiens
caaagagtcaatcat

SEQ ID NO: 2043287 - DNA, 15 bp, Homo sapiens
aaagagtcaatcata

SEQ ID NO: 2043288 - DNA, 15 bp, Homo sapiens
aagagtcaatcataa

SEQ ID NO: 2043289 - DNA, 15 bp, Homo sapiens
agagtcaatcataac

SEQ ID NO: 2043290 - DNA, 15 bp, Homo sapiens
gagtcaatcataact

SEQ ID NO: 2043291 - DNA, 15 bp, Homo sapiens
agtcaatcataactt

SEQ ID NO: 2043292 - DNA, 15 bp, Homo sapiens
gtcaatcataactta

SEQ ID NO: 2043293 - DNA, 15 bp, Homo sapiens
tcaatcataacttat

SEQ ID NO: 2043294 - DNA, 15 bp, Homo sapiens
caatcataacttata

SEQ ID NO: 2043295 - DNA, 15 bp, Homo sapiens
aatcataacttatat

SEQ ID NO: 2043296 - DNA, 15 bp, Homo sapiens
atcataacttatatt

SEQ ID NO: 2043297 - DNA, 15 bp, Homo sapiens
tcataacttatattg

SEQ ID NO: 2043298 - DNA, 15 bp, Homo sapiens
cataacttatattgg

SEQ ID NO: 2043299 - DNA, 15 bp, Homo sapiens
ataacttatattggc

SEQ ID NO: 2043300 - DNA, 15 bp, Homo sapiens
taacttatattggct

SEQ ID NO: 2043301 - DNA, 15 bp, Homo sapiens
aacttatattggctt

SEQ ID NO: 2043302 - DNA, 15 bp, Homo sapiens
acttatattggcttt

SEQ ID NO: 2043303 - DNA, 15 bp, Homo sapiens
cttatattggctttg

SEQ ID NO: 2043304 - DNA, 15 bp, Homo sapiens
ttatattggctttgg

SEQ ID NO: 2043305 - DNA, 15 bp, Homo sapiens
tatattggctttggg

SEQ ID NO: 2043306 - DNA, 15 bp, Homo sapiens
atattggctttgggt

SEQ ID NO: 2043307 - DNA, 15 bp, Homo sapiens
tattggctttgggtg

SEQ ID NO: 2043308 - DNA, 15 bp, Homo sapiens
attggctttgggtgg

SEQ ID NO: 2043309 - DNA, 15 bp, Homo sapiens
ttggctttgggtgga

SEQ ID NO: 2043310 - DNA, 15 bp, Homo sapiens
tggctttgggtggac

SEQ ID NO: 2043311 - DNA, 15 bp, Homo sapiens
ggctttgggtggacc

SEQ ID NO: 2043312 - DNA, 15 bp, Homo sapiens
gctttgggtggaccg

SEQ ID NO: 2043313 - DNA, 15 bp, Homo sapiens
ctttgggtggaccga

SEQ ID NO: 2043314 - DNA, 15 bp, Homo sapiens
tttgggtggaccgat

SEQ ID NO: 2043315 - DNA, 15 bp, Homo sapiens
ttgggtggaccgata

SEQ ID NO: 2043316 - DNA, 15 bp, Homo sapiens
tgggtggaccgatag

SEQ ID NO: 2043317 - DNA, 15 bp, Homo sapiens
gggtggaccgataga

SEQ ID NO: 2043318 - DNA, 15 bp, Homo sapiens
ggtggaccgatagac

SEQ ID NO: 2043319 - DNA, 15 bp, Homo sapiens
gtggaccgatagaca

SEQ ID NO: 2043320 - DNA, 15 bp, Homo sapiens
tggaccgatagacag

SEQ ID NO: 2043321 - DNA, 15 bp, Homo sapiens
ggaccgatagacagc

SEQ ID NO: 2043322 - DNA, 15 bp, Homo sapiens
gaccgatagacagcc

SEQ ID NO: 2043323 - DNA, 15 bp, Homo sapiens
accgatagacagcct

SEQ ID NO: 2043324 - DNA, 15 bp, Homo sapiens
ccgatagacagcctg

SEQ ID NO: 2043325 - DNA, 15 bp, Homo sapiens
cgatagacagcctga

SEQ ID NO: 2043326 - DNA, 15 bp, Homo sapiens
gatagacagcctgac

SEQ ID NO: 2043327 - DNA, 15 bp, Homo sapiens
atagacagcctgacg

SEQ ID NO: 2043328 - DNA, 15 bp, Homo sapiens
tagacagcctgacgt

SEQ ID NO: 2043329 - DNA, 15 bp, Homo sapiens
agacagcctgacgta

SEQ ID NO: 2043330 - DNA, 15 bp, Homo sapiens
gacagcctgacgtat

SEQ ID NO: 2043331 - DNA, 15 bp, Homo sapiens
acagcctgacgtatg

SEQ ID NO: 2043332 - DNA, 15 bp, Homo sapiens
cagcctgacgtatgg

SEQ ID NO: 2043333 - DNA, 15 bp, Homo sapiens
agcctgacgtatggt

SEQ ID NO: 2043334 - DNA, 15 bp, Homo sapiens
gcctgacgtatggtc

SEQ ID NO: 2043335 - DNA, 15 bp, Homo sapiens
cctgacgtatggtcg

SEQ ID NO: 2043336 - DNA, 15 bp, Homo sapiens
ctgacgtatggtcgg

SEQ ID NO: 2043337 - DNA, 15 bp, Homo sapiens
tgacgtatggtcggg

SEQ ID NO: 2043338 - DNA, 15 bp, Homo sapiens
gacgtatggtcgggc

SEQ ID NO: 2043339 - DNA, 15 bp, Homo sapiens
acgtatggtcgggcg

SEQ ID NO: 2043340 - DNA, 15 bp, Homo sapiens
cgtatggtcgggcgg

SEQ ID NO: 2043341 - DNA, 15 bp, Homo sapiens
gtatggtcgggcgga

SEQ ID NO: 2043342 - DNA, 15 bp, Homo sapiens
tatggtcgggcggac

SEQ ID NO: 2043343 - DNA, 15 bp, Homo sapiens
atggtcgggcggaca

SEQ ID NO: 2043344 - DNA, 15 bp, Homo sapiens
tggtcgggcggacag

SEQ ID NO: 2043345 - DNA, 15 bp, Homo sapiens
ggtcgggcggacagt

SEQ ID NO: 2043346 - DNA, 15 bp, Homo sapiens
gtcgggcggacagtt

SEQ ID NO: 2043347 - DNA, 15 bp, Homo sapiens
tcgggcggacagtta

SEQ ID NO: 2043348 - DNA, 15 bp, Homo sapiens
cgggcggacagttag

SEQ ID NO: 2043349 - DNA, 15 bp, Homo sapiens
gggcggacagttaga

SEQ ID NO: 2043350 - DNA, 15 bp, Homo sapiens
ggcggacagttagaa

SEQ ID NO: 2043351 - DNA, 15 bp, Homo sapiens
gcggacagttagaat

SEQ ID NO: 2043352 - DNA, 15 bp, Homo sapiens
cggacagttagaatg

SEQ ID NO: 2043353 - DNA, 15 bp, Homo sapiens
ggacagttagaatga

SEQ ID NO: 2043354 - DNA, 15 bp, Homo sapiens
gacagttagaatgag

SEQ ID NO: 2043355 - DNA, 15 bp, Homo sapiens
acagttagaatgagc

SEQ ID NO: 2043356 - DNA, 15 bp, Homo sapiens
cagttagaatgagcg

SEQ ID NO: 2043357 - DNA, 15 bp, Homo sapiens
agttagaatgagcga

SEQ ID NO: 2043358 - DNA, 15 bp, Homo sapiens
gttagaatgagcgaa

SEQ ID NO: 2043359 - DNA, 15 bp, Homo sapiens
ttagaatgagcgaat

SEQ ID NO: 2043360 - DNA, 15 bp, Homo sapiens
tagaatgagcgaatg

SEQ ID NO: 2043361 - DNA, 15 bp, Homo sapiens
agaatgagcgaatgc

SEQ ID NO: 2043362 - DNA, 15 bp, Homo sapiens
gaatgagcgaatgcg

SEQ ID NO: 2043363 - DNA, 15 bp, Homo sapiens
aatgagcgaatgcgt

SEQ ID NO: 2043364 - DNA, 15 bp, Homo sapiens
atgagcgaatgcgtg

SEQ ID NO: 2043365 - DNA, 15 bp, Homo sapiens
tgagcgaatgcgtgg

SEQ ID NO: 2043366 - DNA, 15 bp, Homo sapiens
gagcgaatgcgtgga

SEQ ID NO: 2043367 - DNA, 15 bp, Homo sapiens
agcgaatgcgtggat

SEQ ID NO: 2043368 - DNA, 15 bp, Homo sapiens
gcgaatgcgtggatg

SEQ ID NO: 2043369 - DNA, 15 bp, Homo sapiens
cgaatgcgtggatga

SEQ ID NO: 2043370 - DNA, 15 bp, Homo sapiens
gaatgcgtggatgat

SEQ ID NO: 2043371 - DNA, 15 bp, Homo sapiens
aatgcgtggatgatg

SEQ ID NO: 2043372 - DNA, 15 bp, Homo sapiens
atgcgtggatgatgt

SEQ ID NO: 2043373 - DNA, 15 bp, Homo sapiens
tgcgtggatgatgta

SEQ ID NO: 2043374 - DNA, 15 bp, Homo sapiens
gcgtggatgatgtac

SEQ ID NO: 2043375 - DNA, 15 bp, Homo sapiens
cgtggatgatgtact

SEQ ID NO: 2043376 - DNA, 15 bp, Homo sapiens
gtggatgatgtacta

SEQ ID NO: 2043377 - DNA, 15 bp, Homo sapiens
tggatgatgtactac

SEQ ID NO: 2043378 - DNA, 15 bp, Homo sapiens
ggatgatgtactacc

SEQ ID NO: 2043379 - DNA, 15 bp, Homo sapiens
gatgatgtactacca

SEQ ID NO: 2043380 - DNA, 15 bp, Homo sapiens
atgatgtactaccag

SEQ ID NO: 2043381 - DNA, 15 bp, Homo sapiens
tgatgtactaccagt

SEQ ID NO: 2043382 - DNA, 15 bp, Homo sapiens
gatgtactaccagtc

SEQ ID NO: 2043383 - DNA, 15 bp, Homo sapiens
atgtactaccagtct

SEQ ID NO: 2043384 - DNA, 15 bp, Homo sapiens
tgtactaccagtctc

SEQ ID NO: 2043385 - DNA, 15 bp, Homo sapiens
gtactaccagtctcc

SEQ ID NO: 2043386 - DNA, 15 bp, Homo sapiens
tactaccagtctccg

SEQ ID NO: 2043387 - DNA, 15 bp, Homo sapiens
actaccagtctccga

SEQ ID NO: 2043388 - DNA, 15 bp, Homo sapiens
ctaccagtctccgac

SEQ ID NO: 2043389 - DNA, 15 bp, Homo sapiens
taccagtctccgacc

SEQ ID NO: 2043390 - DNA, 15 bp, Homo sapiens
accagtctccgacca

SEQ ID NO: 2043391 - DNA, 15 bp, Homo sapiens
ccagtctccgaccac

SEQ ID NO: 2043392 - DNA, 15 bp, Homo sapiens
cagtctccgaccacc

SEQ ID NO: 2043393 - DNA, 15 bp, Homo sapiens
agtctccgaccacca

SEQ ID NO: 2043394 - DNA, 15 bp, Homo sapiens
gtctccgaccaccac

SEQ ID NO: 2043395 - DNA, 15 bp, Homo sapiens
tctccgaccaccacc

SEQ ID NO: 2043396 - DNA, 15 bp, Homo sapiens
ctccgaccaccacca

SEQ ID NO: 2043397 - DNA, 15 bp, Homo sapiens
tccgaccaccaccag

SEQ ID NO: 2043398 - DNA, 15 bp, Homo sapiens
ccgaccaccaccagt

SEQ ID NO: 2043399 - DNA, 15 bp, Homo sapiens
cgaccaccaccagtt

SEQ ID NO: 2043400 - DNA, 15 bp, Homo sapiens
gaccaccaccagttt

SEQ ID NO: 2043401 - DNA, 15 bp, Homo sapiens
accaccaccagtttt

SEQ ID NO: 2043402 - DNA, 15 bp, Homo sapiens
ccaccaccagttttc

SEQ ID NO: 2043403 - DNA, 15 bp, Homo sapiens
caccaccagttttcc

SEQ ID NO: 2043404 - DNA, 15 bp, Homo sapiens
accaccagttttccc

SEQ ID NO: 2043405 - DNA, 15 bp, Homo sapiens
ccaccagttttccct

SEQ ID NO: 2043406 - DNA, 15 bp, Homo sapiens
caccagttttcccta

SEQ ID NO: 2043407 - DNA, 15 bp, Homo sapiens
accagttttccctag

SEQ ID NO: 2043408 - DNA, 15 bp, Homo sapiens
ccagttttccctagc

SEQ ID NO: 2043409 - DNA, 15 bp, Homo sapiens
cagttttccctagcc

SEQ ID NO: 2043410 - DNA, 15 bp, Homo sapiens
agttttccctagccg

SEQ ID NO: 2043411 - DNA, 15 bp, Homo sapiens
gttttccctagccgg

SEQ ID NO: 2043412 - DNA, 15 bp, Homo sapiens
ttttccctagccgga

SEQ ID NO: 2043413 - DNA, 15 bp, Homo sapiens
tttccctagccggaa

SEQ ID NO: 2043414 - DNA, 15 bp, Homo sapiens
ttccctagccggaaa

SEQ ID NO: 2043415 - DNA, 15 bp, Homo sapiens
tccctagccggaaac

SEQ ID NO: 2043416 - DNA, 15 bp, Homo sapiens
ccctagccggaaact

SEQ ID NO: 2043417 - DNA, 15 bp, Homo sapiens
cctagccggaaacta

SEQ ID NO: 2043418 - DNA, 15 bp, Homo sapiens
ctagccggaaactag

SEQ ID NO: 2043419 - DNA, 15 bp, Homo sapiens
tagccggaaactagt

SEQ ID NO: 2043420 - DNA, 15 bp, Homo sapiens
agccggaaactagta

SEQ ID NO: 2043421 - DNA, 15 bp, Homo sapiens
gccggaaactagtag

SEQ ID NO: 2043422 - DNA, 15 bp, Homo sapiens
ccggaaactagtagc

SEQ ID NO: 2043423 - DNA, 15 bp, Homo sapiens
cggaaactagtagca

SEQ ID NO: 2043424 - DNA, 15 bp, Homo sapiens
ggaaactagtagcaa

SEQ ID NO: 2043425 - DNA, 15 bp, Homo sapiens
gaaactagtagcaaa

SEQ ID NO: 2043426 - DNA, 15 bp, Homo sapiens
aaactagtagcaaag

SEQ ID NO: 2043427 - DNA, 15 bp, Homo sapiens
aactagtagcaaagc

SEQ ID NO: 2043428 - DNA, 15 bp, Homo sapiens
actagtagcaaagct

SEQ ID NO: 2043429 - DNA, 15 bp, Homo sapiens
ctagtagcaaagctt

SEQ ID NO: 2043430 - DNA, 15 bp, Homo sapiens
tagtagcaaagcttc

SEQ ID NO: 2043431 - DNA, 15 bp, Homo sapiens
agtagcaaagcttcc

SEQ ID NO: 2043432 - DNA, 15 bp, Homo sapiens
gtagcaaagcttccc

SEQ ID NO: 2043433 - DNA, 15 bp, Homo sapiens
tagcaaagcttcccc

SEQ ID NO: 2043434 - DNA, 15 bp, Homo sapiens
agcaaagcttccccg

SEQ ID NO: 2043435 - DNA, 15 bp, Homo sapiens
gcaaagcttccccga

SEQ ID NO: 2043436 - DNA, 15 bp, Homo sapiens
caaagcttccccgag

SEQ ID NO: 2043437 - DNA, 15 bp, Homo sapiens
aaagcttccccgaga

SEQ ID NO: 2043438 - DNA, 15 bp, Homo sapiens
aagcttccccgagac

SEQ ID NO: 2043439 - DNA, 15 bp, Homo sapiens
agcttccccgagacc

SEQ ID NO: 2043440 - DNA, 15 bp, Homo sapiens
gcttccccgagaccg

SEQ ID NO: 2043441 - DNA, 15 bp, Homo sapiens
cttccccgagaccgc

SEQ ID NO: 2043442 - DNA, 15 bp, Homo sapiens
ttccccgagaccgct

SEQ ID NO: 2043443 - DNA, 15 bp, Homo sapiens
tccccgagaccgctc

SEQ ID NO: 2043444 - DNA, 15 bp, Homo sapiens
ccccgagaccgctct

SEQ ID NO: 2043445 - DNA, 15 bp, Homo sapiens
cccgagaccgctcta

SEQ ID NO: 2043446 - DNA, 15 bp, Homo sapiens
ccgagaccgctctaa

SEQ ID NO: 2043447 - DNA, 15 bp, Homo sapiens
cgagaccgctctaaa

SEQ ID NO: 2043448 - DNA, 15 bp, Homo sapiens
gagaccgctctaaag

SEQ ID NO: 2043449 - DNA, 15 bp, Homo sapiens
agaccgctctaaagc

SEQ ID NO: 2043450 - DNA, 15 bp, Homo sapiens
gaccgctctaaagct

SEQ ID NO: 2043451 - DNA, 15 bp, Homo sapiens
accgctctaaagctg

SEQ ID NO: 2043452 - DNA, 15 bp, Homo sapiens
ccgctctaaagctgc

SEQ ID NO: 2043453 - DNA, 15 bp, Homo sapiens
cgctctaaagctgca

SEQ ID NO: 2043454 - DNA, 15 bp, Homo sapiens
gctctaaagctgcag

SEQ ID NO: 2043455 - DNA, 15 bp, Homo sapiens
ctctaaagctgcagt

SEQ ID NO: 2043456 - DNA, 15 bp, Homo sapiens
tctaaagctgcagtt

SEQ ID NO: 2043457 - DNA, 15 bp, Homo sapiens
ctaaagctgcagttc

SEQ ID NO: 2043458 - DNA, 15 bp, Homo sapiens
taaagctgcagttct

SEQ ID NO: 2043459 - DNA, 15 bp, Homo sapiens
aaagctgcagttctc

SEQ ID NO: 2043460 - DNA, 15 bp, Homo sapiens
aagctgcagttctcc

SEQ ID NO: 2043461 - DNA, 15 bp, Homo sapiens
agctgcagttctcca

SEQ ID NO: 2043462 - DNA, 15 bp, Homo sapiens
gctgcagttctccag

SEQ ID NO: 2043463 - DNA, 15 bp, Homo sapiens
ctgcagttctccaga

SEQ ID NO: 2043464 - DNA, 15 bp, Homo sapiens
tgcagttctccagac

SEQ ID NO: 2043465 - DNA, 15 bp, Homo sapiens
gcagttctccagacg

SEQ ID NO: 2043466 - DNA, 15 bp, Homo sapiens
cagttctccagacgg

SEQ ID NO: 2043467 - DNA, 15 bp, Homo sapiens
agttctccagacggc

SEQ ID NO: 2043468 - DNA, 15 bp, Homo sapiens
gttctccagacggcc

SEQ ID NO: 2043469 - DNA, 15 bp, Homo sapiens
ttctccagacggccg

SEQ ID NO: 2043470 - DNA, 15 bp, Homo sapiens
tctccagacggccgc

SEQ ID NO: 2043471 - DNA, 15 bp, Homo sapiens
ctccagacggccgcc

SEQ ID NO: 2043472 - DNA, 15 bp, Homo sapiens
tccagacggccgccg

SEQ ID NO: 2043473 - DNA, 15 bp, Homo sapiens
ccagacggccgccgg

SEQ ID NO: 2043474 - DNA, 15 bp, Homo sapiens
cagacggccgccgga

SEQ ID NO: 2043475 - DNA, 15 bp, Homo sapiens
agacggccgccggaa

SEQ ID NO: 2043476 - DNA, 15 bp, Homo sapiens
gacggccgccggaag

SEQ ID NO: 2043477 - DNA, 15 bp, Homo sapiens
acggccgccggaaga

SEQ ID NO: 2043478 - DNA, 15 bp, Homo sapiens
cggccgccggaagag

SEQ ID NO: 2043479 - DNA, 15 bp, Homo sapiens
ggccgccggaagagg

SEQ ID NO: 2043480 - DNA, 15 bp, Homo sapiens
gccgccggaagaggg

SEQ ID NO: 2043481 - DNA, 15 bp, Homo sapiens
ccgccggaagagggc

SEQ ID NO: 2043482 - DNA, 15 bp, Homo sapiens
cgccggaagagggcg

SEQ ID NO: 2043483 - DNA, 15 bp, Homo sapiens
gccggaagagggcgc

SEQ ID NO: 2043484 - DNA, 15 bp, Homo sapiens
ccggaagagggcgct

SEQ ID NO: 2043485 - DNA, 15 bp, Homo sapiens
cggaagagggcgctg

SEQ ID NO: 2043486 - DNA, 15 bp, Homo sapiens
ggaagagggcgctgc

SEQ ID NO: 2043487 - DNA, 15 bp, Homo sapiens
gaagagggcgctgcg

SEQ ID NO: 2043488 - DNA, 15 bp, Homo sapiens
aagagggcgctgcgg

SEQ ID NO: 2043489 - DNA, 15 bp, Homo sapiens
agagggcgctgcgga

SEQ ID NO: 2043490 - DNA, 15 bp, Homo sapiens
gagggcgctgcggat

SEQ ID NO: 2043491 - DNA, 15 bp, Homo sapiens
agggcgctgcggatc

SEQ ID NO: 2043492 - DNA, 15 bp, Homo sapiens
gggcgctgcggatcg

SEQ ID NO: 2043493 - DNA, 15 bp, Homo sapiens
ggcgctgcggatcgc

SEQ ID NO: 2043494 - DNA, 15 bp, Homo sapiens
gcgctgcggatcgcc

SEQ ID NO: 2043495 - DNA, 15 bp, Homo sapiens
cgctgcggatcgcct

SEQ ID NO: 2043496 - DNA, 15 bp, Homo sapiens
gctgcggatcgcctc

SEQ ID NO: 2043497 - DNA, 15 bp, Homo sapiens
ctgcggatcgcctcg

SEQ ID NO: 2043498 - DNA, 15 bp, Homo sapiens
tgcggatcgcctcgg

SEQ ID NO: 2043499 - DNA, 15 bp, Homo sapiens
gcggatcgcctcggt

SEQ ID NO: 2043500 - DNA, 15 bp, Homo sapiens
cggatcgcctcggtc

SEQ ID NO: 2043501 - DNA, 15 bp, Homo sapiens
ggatcgcctcggtct

SEQ ID NO: 2043502 - DNA, 15 bp, Homo sapiens
gatcgcctcggtctg

SEQ ID NO: 2043503 - DNA, 15 bp, Homo sapiens
atcgcctcggtctgc

SEQ ID NO: 2043504 - DNA, 15 bp, Homo sapiens
tcgcctcggtctgca

SEQ ID NO: 2043505 - DNA, 15 bp, Homo sapiens
cgcctcggtctgcaa

SEQ ID NO: 2043506 - DNA, 15 bp, Homo sapiens
gcctcggtctgcaac

SEQ ID NO: 2043507 - DNA, 15 bp, Homo sapiens
cctcggtctgcaacc

SEQ ID NO: 2043508 - DNA, 15 bp, Homo sapiens
ctcggtctgcaacct

SEQ ID NO: 2043509 - DNA, 15 bp, Homo sapiens
tcggtctgcaacctt

SEQ ID NO: 2043510 - DNA, 15 bp, Homo sapiens
cggtctgcaaccttc

SEQ ID NO: 2043511 - DNA, 15 bp, Homo sapiens
ggtctgcaaccttca

SEQ ID NO: 2043512 - DNA, 15 bp, Homo sapiens
gtctgcaaccttcag

SEQ ID NO: 2043513 - DNA, 15 bp, Homo sapiens
tctgcaaccttcaga

SEQ ID NO: 2043514 - DNA, 15 bp, Homo sapiens
ctgcaaccttcagac

SEQ ID NO: 2043515 - DNA, 15 bp, Homo sapiens
tgcaaccttcagacc

SEQ ID NO: 2043516 - DNA, 15 bp, Homo sapiens
gcaaccttcagaccc

SEQ ID NO: 2043517 - DNA, 15 bp, Homo sapiens
caaccttcagacccc

SEQ ID NO: 2043518 - DNA, 15 bp, Homo sapiens
aaccttcagacccca

SEQ ID NO: 2043519 - DNA, 15 bp, Homo sapiens
accttcagaccccaa

SEQ ID NO: 2043520 - DNA, 15 bp, Homo sapiens
ccttcagaccccaag

SEQ ID NO: 2043521 - DNA, 15 bp, Homo sapiens
cttcagaccccaagt

SEQ ID NO: 2043522 - DNA, 15 bp, Homo sapiens
ttcagaccccaagtc

SEQ ID NO: 2043523 - DNA, 15 bp, Homo sapiens
tcagaccccaagtcc

SEQ ID NO: 2043524 - DNA, 15 bp, Homo sapiens
cagaccccaagtcct

SEQ ID NO: 2043525 - DNA, 15 bp, Homo sapiens
agaccccaagtccta

SEQ ID NO: 2043526 - DNA, 15 bp, Homo sapiens
gaccccaagtcctag

SEQ ID NO: 2043527 - DNA, 15 bp, Homo sapiens
accccaagtcctagg

SEQ ID NO: 2043528 - DNA, 15 bp, Homo sapiens
ccccaagtcctaggc

SEQ ID NO: 2043529 - DNA, 15 bp, Homo sapiens
cccaagtcctaggca

SEQ ID NO: 2043530 - DNA, 15 bp, Homo sapiens
ccaagtcctaggcag

SEQ ID NO: 2043531 - DNA, 15 bp, Homo sapiens
caagtcctaggcagc

SEQ ID NO: 2043532 - DNA, 15 bp, Homo sapiens
aagtcctaggcagcg

SEQ ID NO: 2043533 - DNA, 15 bp, Homo sapiens
agtcctaggcagcga

SEQ ID NO: 2043534 - DNA, 15 bp, Homo sapiens
gtcctaggcagcgag

SEQ ID NO: 2043535 - DNA, 15 bp, Homo sapiens
tcctaggcagcgagg

SEQ ID NO: 2043536 - DNA, 15 bp, Homo sapiens
cctaggcagcgaggg

SEQ ID NO: 2043537 - DNA, 15 bp, Homo sapiens
ctaggcagcgaggga

SEQ ID NO: 2043538 - DNA, 15 bp, Homo sapiens
taggcagcgagggag

SEQ ID NO: 2043539 - DNA, 15 bp, Homo sapiens
aggcagcgagggaga

SEQ ID NO: 2043540 - DNA, 15 bp, Homo sapiens
ggcagcgagggagaa

SEQ ID NO: 2043541 - DNA, 15 bp, Homo sapiens
gcagcgagggagaat

SEQ ID NO: 2043542 - DNA, 15 bp, Homo sapiens
cagcgagggagaatt

SEQ ID NO: 2043543 - DNA, 15 bp, Homo sapiens
agcgagggagaattc

SEQ ID NO: 2043544 - DNA, 15 bp, Homo sapiens
gcgagggagaattca

SEQ ID NO: 2043545 - DNA, 15 bp, Homo sapiens
cgagggagaattcag

SEQ ID NO: 2043546 - DNA, 15 bp, Homo sapiens
gagggagaattcagc

SEQ ID NO: 2043547 - DNA, 15 bp, Homo sapiens
agggagaattcagcc

SEQ ID NO: 2043548 - DNA, 15 bp, Homo sapiens
gggagaattcagcct

SEQ ID NO: 2043549 - DNA, 15 bp, Homo sapiens
ggagaattcagcctc

SEQ ID NO: 2043550 - DNA, 15 bp, Homo sapiens
gagaattcagcctcc

SEQ ID NO: 2043551 - DNA, 15 bp, Homo sapiens
agaattcagcctccc

SEQ ID NO: 2043552 - DNA, 15 bp, Homo sapiens
gaattcagcctccct

SEQ ID NO: 2043553 - DNA, 15 bp, Homo sapiens
aattcagcctccctc

SEQ ID NO: 2043554 - DNA, 15 bp, Homo sapiens
attcagcctccctca

SEQ ID NO: 2043555 - DNA, 15 bp, Homo sapiens
ttcagcctccctcaa

SEQ ID NO: 2043556 - DNA, 15 bp, Homo sapiens
tcagcctccctcaag

SEQ ID NO: 2043557 - DNA, 15 bp, Homo sapiens
cagcctccctcaagt

SEQ ID NO: 2043558 - DNA, 15 bp, Homo sapiens
agcctccctcaagtc

SEQ ID NO: 2043559 - DNA, 15 bp, Homo sapiens
gcctccctcaagtcc

SEQ ID NO: 2043560 - DNA, 15 bp, Homo sapiens
cctccctcaagtccc

SEQ ID NO: 2043561 - DNA, 15 bp, Homo sapiens
ctccctcaagtccca

SEQ ID NO: 2043562 - DNA, 15 bp, Homo sapiens
tccctcaagtcccag

SEQ ID NO: 2043563 - DNA, 15 bp, Homo sapiens
ccctcaagtcccaga

SEQ ID NO: 2043564 - DNA, 15 bp, Homo sapiens
cctcaagtcccagaa

SEQ ID NO: 2043565 - DNA, 15 bp, Homo sapiens
ctcaagtcccagaaa

SEQ ID NO: 2043566 - DNA, 15 bp, Homo sapiens
tcaagtcccagaaaa

SEQ ID NO: 2043567 - DNA, 15 bp, Homo sapiens
caagtcccagaaaac

SEQ ID NO: 2043568 - DNA, 15 bp, Homo sapiens
aagtcccagaaaaca

SEQ ID NO: 2043569 - DNA, 15 bp, Homo sapiens
agtcccagaaaacat

SEQ ID NO: 2043570 - DNA, 15 bp, Homo sapiens
gtcccagaaaacatt

SEQ ID NO: 2043571 - DNA, 15 bp, Homo sapiens
tcccagaaaacattg

SEQ ID NO: 2043572 - DNA, 15 bp, Homo sapiens
cccagaaaacattgg

SEQ ID NO: 2043573 - DNA, 15 bp, Homo sapiens
ccagaaaacattggg

SEQ ID NO: 2043574 - DNA, 15 bp, Homo sapiens
cagaaaacattgggc

SEQ ID NO: 2043575 - DNA, 15 bp, Homo sapiens
agaaaacattgggcc

SEQ ID NO: 2043576 - DNA, 15 bp, Homo sapiens
gaaaacattgggcct

SEQ ID NO: 2043577 - DNA, 15 bp, Homo sapiens
aaaacattgggcctc

SEQ ID NO: 2043578 - DNA, 15 bp, Homo sapiens
aaacattgggcctcg

SEQ ID NO: 2043579 - DNA, 15 bp, Homo sapiens
aacattgggcctcgg

SEQ ID NO: 2043580 - DNA, 15 bp, Homo sapiens
acattgggcctcgga

SEQ ID NO: 2043581 - DNA, 15 bp, Homo sapiens
cattgggcctcggag

SEQ ID NO: 2043582 - DNA, 15 bp, Homo sapiens
attgggcctcggaga

SEQ ID NO: 2043583 - DNA, 15 bp, Homo sapiens
ttgggcctcggagat

SEQ ID NO: 2043584 - DNA, 15 bp, Homo sapiens
tgggcctcggagatt

SEQ ID NO: 2043585 - DNA, 15 bp, Homo sapiens
gggcctcggagattc

SEQ ID NO: 2043586 - DNA, 15 bp, Homo sapiens
ggcctcggagattcc

SEQ ID NO: 2043587 - DNA, 15 bp, Homo sapiens
gcctcggagattccc

SEQ ID NO: 2043588 - DNA, 15 bp, Homo sapiens
cctcggagattcccc

SEQ ID NO: 2043589 - DNA, 15 bp, Homo sapiens
ctcggagattccccc

SEQ ID NO: 2043590 - DNA, 15 bp, Homo sapiens
tcggagattccccct

SEQ ID NO: 2043591 - DNA, 15 bp, Homo sapiens
cggagattccccctc

SEQ ID NO: 2043592 - DNA, 15 bp, Homo sapiens
ggagattccccctcc

SEQ ID NO: 2043593 - DNA, 15 bp, Homo sapiens
gagattccccctcca

SEQ ID NO: 2043594 - DNA, 15 bp, Homo sapiens
agattccccctccac

SEQ ID NO: 2043595 - DNA, 15 bp, Homo sapiens
gattccccctccacc

SEQ ID NO: 2043596 - DNA, 15 bp, Homo sapiens
attccccctccaccc

SEQ ID NO: 2043597 - DNA, 15 bp, Homo sapiens
ttccccctccaccct

SEQ ID NO: 2043598 - DNA, 15 bp, Homo sapiens
tccccctccaccctt

SEQ ID NO: 2043599 - DNA, 15 bp, Homo sapiens
ccccctccacccttc

SEQ ID NO: 2043600 - DNA, 15 bp, Homo sapiens
cccctccacccttcc

SEQ ID NO: 2043601 - DNA, 15 bp, Homo sapiens
ccctccacccttccc

SEQ ID NO: 2043602 - DNA, 15 bp, Homo sapiens
cctccacccttccct

SEQ ID NO: 2043603 - DNA, 15 bp, Homo sapiens
ctccacccttccctc

SEQ ID NO: 2043604 - DNA, 15 bp, Homo sapiens
tccacccttccctca

SEQ ID NO: 2043605 - DNA, 15 bp, Homo sapiens
ccacccttccctcac

SEQ ID NO: 2043606 - DNA, 15 bp, Homo sapiens
cacccttccctcaca

SEQ ID NO: 2043607 - DNA, 15 bp, Homo sapiens
acccttccctcacac

SEQ ID NO: 2043608 - DNA, 15 bp, Homo sapiens
cccttccctcacacc

SEQ ID NO: 2043609 - DNA, 15 bp, Homo sapiens
ccttccctcacaccc

SEQ ID NO: 2043610 - DNA, 15 bp, Homo sapiens
cttccctcacaccca

SEQ ID NO: 2043611 - DNA, 15 bp, Homo sapiens
ttccctcacacccac

SEQ ID NO: 2043612 - DNA, 15 bp, Homo sapiens
tccctcacacccacc

SEQ ID NO: 2043613 - DNA, 15 bp, Homo sapiens
ccctcacacccaccc

SEQ ID NO: 2043614 - DNA, 15 bp, Homo sapiens
cctcacacccacccc

SEQ ID NO: 2043615 - DNA, 15 bp, Homo sapiens
ctcacacccacccca

SEQ ID NO: 2043616 - DNA, 15 bp, Homo sapiens
tcacacccaccccaa

SEQ ID NO: 2043617 - DNA, 15 bp, Homo sapiens
cacacccaccccaat

SEQ ID NO: 2043618 - DNA, 15 bp, Homo sapiens
acacccaccccaatg

SEQ ID NO: 2043619 - DNA, 15 bp, Homo sapiens
cacccaccccaatgg

SEQ ID NO: 2043620 - DNA, 15 bp, Homo sapiens
acccaccccaatggc

SEQ ID NO: 2043621 - DNA, 15 bp, Homo sapiens
cccaccccaatggcc

SEQ ID NO: 2043622 - DNA, 15 bp, Homo sapiens
ccaccccaatggcct

SEQ ID NO: 2043623 - DNA, 15 bp, Homo sapiens
caccccaatggcctg

SEQ ID NO: 2043624 - DNA, 15 bp, Homo sapiens
accccaatggcctgg

SEQ ID NO: 2043625 - DNA, 15 bp, Homo sapiens
ccccaatggcctggg

SEQ ID NO: 2043626 - DNA, 15 bp, Homo sapiens
cccaatggcctgggg

SEQ ID NO: 2043627 - DNA, 15 bp, Homo sapiens
ccaatggcctggggt

SEQ ID NO: 2043628 - DNA, 15 bp, Homo sapiens
caatggcctggggtc

SEQ ID NO: 2043629 - DNA, 15 bp, Homo sapiens
aatggcctggggtcg

SEQ ID NO: 2043630 - DNA, 15 bp, Homo sapiens
atggcctggggtcga

SEQ ID NO: 2043631 - DNA, 15 bp, Homo sapiens
tggcctggggtcgat

SEQ ID NO: 2043632 - DNA, 15 bp, Homo sapiens
ggcctggggtcgata

SEQ ID NO: 2043633 - DNA, 15 bp, Homo sapiens
gcctggggtcgatac

SEQ ID NO: 2043634 - DNA, 15 bp, Homo sapiens
cctggggtcgatact

SEQ ID NO: 2043635 - DNA, 15 bp, Homo sapiens
ctggggtcgatactg

SEQ ID NO: 2043636 - DNA, 15 bp, Homo sapiens
tggggtcgatactgc

SEQ ID NO: 2043637 - DNA, 15 bp, Homo sapiens
ggggtcgatactgcg

SEQ ID NO: 2043638 - DNA, 15 bp, Homo sapiens
gggtcgatactgcgg

SEQ ID NO: 2043639 - DNA, 15 bp, Homo sapiens
ggtcgatactgcggc

SEQ ID NO: 2043640 - DNA, 15 bp, Homo sapiens
gtcgatactgcggcc

SEQ ID NO: 2043641 - DNA, 15 bp, Homo sapiens
tcgatactgcggcca

SEQ ID NO: 2043642 - DNA, 15 bp, Homo sapiens
cgatactgcggccac

SEQ ID NO: 2043643 - DNA, 15 bp, Homo sapiens
gatactgcggccacc

SEQ ID NO: 2043644 - DNA, 15 bp, Homo sapiens
atactgcggccaccg

SEQ ID NO: 2043645 - DNA, 15 bp, Homo sapiens
tactgcggccaccgg

SEQ ID NO: 2043646 - DNA, 15 bp, Homo sapiens
actgcggccaccgga

SEQ ID NO: 2043647 - DNA, 15 bp, Homo sapiens
ctgcggccaccggaa

SEQ ID NO: 2043648 - DNA, 15 bp, Homo sapiens
tgcggccaccggaaa

SEQ ID NO: 2043649 - DNA, 15 bp, Homo sapiens
gcggccaccggaaac

SEQ ID NO: 2043650 - DNA, 15 bp, Homo sapiens
cggccaccggaaact

SEQ ID NO: 2043651 - DNA, 15 bp, Homo sapiens
ggccaccggaaactg

SEQ ID NO: 2043652 - DNA, 15 bp, Homo sapiens
gccaccggaaactgc

SEQ ID NO: 2043653 - DNA, 15 bp, Homo sapiens
ccaccggaaactgcc

SEQ ID NO: 2043654 - DNA, 15 bp, Homo sapiens
caccggaaactgcct

SEQ ID NO: 2043655 - DNA, 15 bp, Homo sapiens
accggaaactgcctg

SEQ ID NO: 2043656 - DNA, 15 bp, Homo sapiens
ccggaaactgcctgg

SEQ ID NO: 2043657 - DNA, 15 bp, Homo sapiens
cggaaactgcctggg

SEQ ID NO: 2043658 - DNA, 15 bp, Homo sapiens
ggaaactgcctggga

SEQ ID NO: 2043659 - DNA, 15 bp, Homo sapiens
gaaactgcctgggac

SEQ ID NO: 2043660 - DNA, 15 bp, Homo sapiens
aaactgcctgggaca

SEQ ID NO: 2043661 - DNA, 15 bp, Homo sapiens
aactgcctgggacaa

SEQ ID NO: 2043662 - DNA, 15 bp, Homo sapiens
actgcctgggacaag

SEQ ID NO: 2043663 - DNA, 15 bp, Homo sapiens
ctgcctgggacaagt

SEQ ID NO: 2043664 - DNA, 15 bp, Homo sapiens
tgcctgggacaagtg

SEQ ID NO: 2043665 - DNA, 15 bp, Homo sapiens
gcctgggacaagtgt

SEQ ID NO: 2043666 - DNA, 15 bp, Homo sapiens
cctgggacaagtgtt

SEQ ID NO: 2043667 - DNA, 15 bp, Homo sapiens
ctgggacaagtgttg

SEQ ID NO: 2043668 - DNA, 15 bp, Homo sapiens
tgggacaagtgttgg

SEQ ID NO: 2043669 - DNA, 15 bp, Homo sapiens
gggacaagtgttggg

SEQ ID NO: 2043670 - DNA, 15 bp, Homo sapiens
ggacaagtgttgggg

SEQ ID NO: 2043671 - DNA, 15 bp, Homo sapiens
gacaagtgttgggga

SEQ ID NO: 2043672 - DNA, 15 bp, Homo sapiens
acaagtgttggggat

SEQ ID NO: 2043673 - DNA, 15 bp, Homo sapiens
caagtgttggggatg

SEQ ID NO: 2043674 - DNA, 15 bp, Homo sapiens
aagtgttggggatgt

SEQ ID NO: 2043675 - DNA, 15 bp, Homo sapiens
agtgttggggatgtg

SEQ ID NO: 2043676 - DNA, 15 bp, Homo sapiens
tgttggggatgtggg

SEQ ID NO: 2043677 - DNA, 15 bp, Homo sapiens
gttggggatgtgggg

SEQ ID NO: 2043678 - DNA, 15 bp, Homo sapiens
ttggggatgtggggg

SEQ ID NO: 2043679 - DNA, 15 bp, Homo sapiens
tggggatgtggggga

SEQ ID NO: 2043680 - DNA, 15 bp, Homo sapiens
ggggatgtgggggag

SEQ ID NO: 2043681 - DNA, 15 bp, Homo sapiens
gggatgtgggggaga

SEQ ID NO: 2043682 - DNA, 15 bp, Homo sapiens
ggatgtgggggagac

SEQ ID NO: 2043683 - DNA, 15 bp, Homo sapiens
gatgtgggggagacg

SEQ ID NO: 2043684 - DNA, 15 bp, Homo sapiens
atgtgggggagacgg

SEQ ID NO: 2043685 - DNA, 15 bp, Homo sapiens
tgtgggggagacggg

SEQ ID NO: 2043686 - DNA, 15 bp, Homo sapiens
gtgggggagacgggc

SEQ ID NO: 2043687 - DNA, 15 bp, Homo sapiens
tgggggagacgggct

SEQ ID NO: 2043688 - DNA, 15 bp, Homo sapiens
gggggagacgggctg

SEQ ID NO: 2043689 - DNA, 15 bp, Homo sapiens
ggggagacgggctgt

SEQ ID NO: 2043690 - DNA, 15 bp, Homo sapiens
gggagacgggctgtg

SEQ ID NO: 2043691 - DNA, 15 bp, Homo sapiens
ggagacgggctgtgg

SEQ ID NO: 2043692 - DNA, 15 bp, Homo sapiens
gagacgggctgtggt

SEQ ID NO: 2043693 - DNA, 15 bp, Homo sapiens
agacgggctgtggtg

SEQ ID NO: 2043694 - DNA, 15 bp, Homo sapiens
gacgggctgtggtgg

SEQ ID NO: 2043695 - DNA, 15 bp, Homo sapiens
acgggctgtggtggg

SEQ ID NO: 2043696 - DNA, 15 bp, Homo sapiens
cgggctgtggtggga

SEQ ID NO: 2043697 - DNA, 15 bp, Homo sapiens
gggctgtggtgggag

SEQ ID NO: 2043698 - DNA, 15 bp, Homo sapiens
ggctgtggtgggagg

SEQ ID NO: 2043699 - DNA, 15 bp, Homo sapiens
gctgtggtgggaggt

SEQ ID NO: 2043700 - DNA, 15 bp, Homo sapiens
ctgtggtgggaggtt

SEQ ID NO: 2043701 - DNA, 15 bp, Homo sapiens
tgtggtgggaggttg

SEQ ID NO: 2043702 - DNA, 15 bp, Homo sapiens
gtggtgggaggttgg

SEQ ID NO: 2043703 - DNA, 15 bp, Homo sapiens
tggtgggaggttgga

SEQ ID NO: 2043704 - DNA, 15 bp, Homo sapiens
ggtgggaggttggag

SEQ ID NO: 2043705 - DNA, 15 bp, Homo sapiens
gtgggaggttggaga

SEQ ID NO: 2043706 - DNA, 15 bp, Homo sapiens
tgggaggttggagag

SEQ ID NO: 2043707 - DNA, 15 bp, Homo sapiens
gggaggttggagagg

SEQ ID NO: 2043708 - DNA, 15 bp, Homo sapiens
ggaggttggagagga

SEQ ID NO: 2043709 - DNA, 15 bp, Homo sapiens
gaggttggagaggag

SEQ ID NO: 2043710 - DNA, 15 bp, Homo sapiens
aggttggagaggagg

SEQ ID NO: 2043711 - DNA, 15 bp, Homo sapiens
ggttggagaggagga

SEQ ID NO: 2043712 - DNA, 15 bp, Homo sapiens
gttggagaggaggaa

SEQ ID NO: 2043713 - DNA, 15 bp, Homo sapiens
ttggagaggaggaaa

SEQ ID NO: 2043714 - DNA, 15 bp, Homo sapiens
tggagaggaggaaag

SEQ ID NO: 2043715 - DNA, 15 bp, Homo sapiens
ggagaggaggaaagg

SEQ ID NO: 2043716 - DNA, 15 bp, Homo sapiens
gagaggaggaaagga

SEQ ID NO: 2043717 - DNA, 15 bp, Homo sapiens
agaggaggaaaggag

SEQ ID NO: 2043718 - DNA, 15 bp, Homo sapiens
gaggaggaaaggagc

SEQ ID NO: 2043719 - DNA, 15 bp, Homo sapiens
aggaggaaaggagcg

SEQ ID NO: 2043720 - DNA, 15 bp, Homo sapiens
ggaggaaaggagcgg

SEQ ID NO: 2043721 - DNA, 15 bp, Homo sapiens
gaggaaaggagcgga

SEQ ID NO: 2043722 - DNA, 15 bp, Homo sapiens
aggaaaggagcggag

SEQ ID NO: 2043723 - DNA, 15 bp, Homo sapiens
ggaaaggagcggagg

SEQ ID NO: 2043724 - DNA, 15 bp, Homo sapiens
gaaaggagcggagga

SEQ ID NO: 2043725 - DNA, 15 bp, Homo sapiens
aaaggagcggaggag

SEQ ID NO: 2043726 - DNA, 15 bp, Homo sapiens
aaggagcggaggagg

SEQ ID NO: 2043727 - DNA, 15 bp, Homo sapiens
aggagcggaggaggg

SEQ ID NO: 2043728 - DNA, 15 bp, Homo sapiens
ggagcggaggaggga

SEQ ID NO: 2043729 - DNA, 15 bp, Homo sapiens
gagcggaggagggaa

SEQ ID NO: 2043730 - DNA, 15 bp, Homo sapiens
agcggaggagggaac

SEQ ID NO: 2043731 - DNA, 15 bp, Homo sapiens
gcggaggagggaacc

SEQ ID NO: 2043732 - DNA, 15 bp, Homo sapiens
cggaggagggaaccc

SEQ ID NO: 2043733 - DNA, 15 bp, Homo sapiens
ggaggagggaacccc

SEQ ID NO: 2043734 - DNA, 15 bp, Homo sapiens
gaggagggaacccca

SEQ ID NO: 2043735 - DNA, 15 bp, Homo sapiens
aggagggaaccccag

SEQ ID NO: 2043736 - DNA, 15 bp, Homo sapiens
ggagggaaccccagc

SEQ ID NO: 2043737 - DNA, 15 bp, Homo sapiens
gagggaaccccagcg

SEQ ID NO: 2043738 - DNA, 15 bp, Homo sapiens
agggaaccccagcgc

SEQ ID NO: 2043739 - DNA, 15 bp, Homo sapiens
gggaaccccagcgct

SEQ ID NO: 2043740 - DNA, 15 bp, Homo sapiens
ggaaccccagcgctg

SEQ ID NO: 2043741 - DNA, 15 bp, Homo sapiens
gaaccccagcgctgc

SEQ ID NO: 2043742 - DNA, 15 bp, Homo sapiens
aaccccagcgctgct

SEQ ID NO: 2043743 - DNA, 15 bp, Homo sapiens
accccagcgctgctg

SEQ ID NO: 2043744 - DNA, 15 bp, Homo sapiens
ccccagcgctgctgg

SEQ ID NO: 2043745 - DNA, 15 bp, Homo sapiens
cccagcgctgctggc

SEQ ID NO: 2043746 - DNA, 15 bp, Homo sapiens
ccagcgctgctggca

SEQ ID NO: 2043747 - DNA, 15 bp, Homo sapiens
cagcgctgctggcaa

SEQ ID NO: 2043748 - DNA, 15 bp, Homo sapiens
agcgctgctggcaag

SEQ ID NO: 2043749 - DNA, 15 bp, Homo sapiens
gcgctgctggcaagc

SEQ ID NO: 2043750 - DNA, 15 bp, Homo sapiens
cgctgctggcaagcc

SEQ ID NO: 2043751 - DNA, 15 bp, Homo sapiens
gctgctggcaagccc

SEQ ID NO: 2043752 - DNA, 15 bp, Homo sapiens
ctgctggcaagcccg

SEQ ID NO: 2043753 - DNA, 15 bp, Homo sapiens
tgctggcaagcccgc

SEQ ID NO: 2043754 - DNA, 15 bp, Homo sapiens
gctggcaagcccgcg

SEQ ID NO: 2043755 - DNA, 15 bp, Homo sapiens
ctggcaagcccgcgg

SEQ ID NO: 2043756 - DNA, 15 bp, Homo sapiens
tggcaagcccgcggg

SEQ ID NO: 2043757 - DNA, 15 bp, Homo sapiens
ggcaagcccgcggga

SEQ ID NO: 2043758 - DNA, 15 bp, Homo sapiens
gcaagcccgcgggaa

SEQ ID NO: 2043759 - DNA, 15 bp, Homo sapiens
caagcccgcgggaaa

SEQ ID NO: 2043760 - DNA, 15 bp, Homo sapiens
aagcccgcgggaaac

SEQ ID NO: 2043761 - DNA, 15 bp, Homo sapiens
agcccgcgggaaact

SEQ ID NO: 2043762 - DNA, 15 bp, Homo sapiens
gcccgcgggaaactc

SEQ ID NO: 2043763 - DNA, 15 bp, Homo sapiens
cccgcgggaaactcg

SEQ ID NO: 2043764 - DNA, 15 bp, Homo sapiens
ccgcgggaaactcga

SEQ ID NO: 2043765 - DNA, 15 bp, Homo sapiens
cgcgggaaactcgaa

SEQ ID NO: 2043766 - DNA, 15 bp, Homo sapiens
gcgggaaactcgaac

SEQ ID NO: 2043767 - DNA, 15 bp, Homo sapiens
cgggaaactcgaaca

SEQ ID NO: 2043768 - DNA, 15 bp, Homo sapiens
gggaaactcgaacac

SEQ ID NO: 2043769 - DNA, 15 bp, Homo sapiens
ggaaactcgaacacc

SEQ ID NO: 2043770 - DNA, 15 bp, Homo sapiens
gaaactcgaacaccc

SEQ ID NO: 2043771 - DNA, 15 bp, Homo sapiens
aaactcgaacaccca

SEQ ID NO: 2043772 - DNA, 15 bp, Homo sapiens
aactcgaacacccaa

SEQ ID NO: 2043773 - DNA, 15 bp, Homo sapiens
actcgaacacccaag

SEQ ID NO: 2043774 - DNA, 15 bp, Homo sapiens
ctcgaacacccaagg

SEQ ID NO: 2043775 - DNA, 15 bp, Homo sapiens
tcgaacacccaaggc

SEQ ID NO: 2043776 - DNA, 15 bp, Homo sapiens
cgaacacccaaggcc

SEQ ID NO: 2043777 - DNA, 15 bp, Homo sapiens
gaacacccaaggccc

SEQ ID NO: 2043778 - DNA, 15 bp, Homo sapiens
aacacccaaggccca

SEQ ID NO: 2043779 - DNA, 15 bp, Homo sapiens
acacccaaggcccac

SEQ ID NO: 2043780 - DNA, 15 bp, Homo sapiens
cacccaaggcccacg

SEQ ID NO: 2043781 - DNA, 15 bp, Homo sapiens
acccaaggcccacgg

SEQ ID NO: 2043782 - DNA, 15 bp, Homo sapiens
cccaaggcccacggg

SEQ ID NO: 2043783 - DNA, 15 bp, Homo sapiens
ccaaggcccacgggc

SEQ ID NO: 2043784 - DNA, 15 bp, Homo sapiens
caaggcccacgggct

SEQ ID NO: 2043785 - DNA, 15 bp, Homo sapiens
aaggcccacgggctc

SEQ ID NO: 2043786 - DNA, 15 bp, Homo sapiens
aggcccacgggctcc

SEQ ID NO: 2043787 - DNA, 15 bp, Homo sapiens
ggcccacgggctccc

SEQ ID NO: 2043788 - DNA, 15 bp, Homo sapiens
gcccacgggctccca

SEQ ID NO: 2043789 - DNA, 15 bp, Homo sapiens
cccacgggctcccac

SEQ ID NO: 2043790 - DNA, 15 bp, Homo sapiens
ccacgggctcccact

SEQ ID NO: 2043791 - DNA, 15 bp, Homo sapiens
cacgggctcccactg

SEQ ID NO: 2043792 - DNA, 15 bp, Homo sapiens
acgggctcccactgt

SEQ ID NO: 2043793 - DNA, 15 bp, Homo sapiens
cgggctcccactgtt

SEQ ID NO: 2043794 - DNA, 15 bp, Homo sapiens
gggctcccactgttg

SEQ ID NO: 2043795 - DNA, 15 bp, Homo sapiens
ggctcccactgttgg

SEQ ID NO: 2043796 - DNA, 15 bp, Homo sapiens
gctcccactgttggg

SEQ ID NO: 2043797 - DNA, 15 bp, Homo sapiens
ctcccactgttggga

SEQ ID NO: 2043798 - DNA, 15 bp, Homo sapiens
tcccactgttgggac

SEQ ID NO: 2043799 - DNA, 15 bp, Homo sapiens
cccactgttgggact

SEQ ID NO: 2043800 - DNA, 15 bp, Homo sapiens
ccactgttgggactg

SEQ ID NO: 2043801 - DNA, 15 bp, Homo sapiens
cactgttgggactga

SEQ ID NO: 2043802 - DNA, 15 bp, Homo sapiens
actgttgggactgag

SEQ ID NO: 2043803 - DNA, 15 bp, Homo sapiens
ctgttgggactgaga

SEQ ID NO: 2043804 - DNA, 15 bp, Homo sapiens
tgttgggactgagat

SEQ ID NO: 2043805 - DNA, 15 bp, Homo sapiens
gttgggactgagatt

SEQ ID NO: 2043806 - DNA, 15 bp, Homo sapiens
ttgggactgagattt

SEQ ID NO: 2043807 - DNA, 15 bp, Homo sapiens
tgggactgagatttg

SEQ ID NO: 2043808 - DNA, 15 bp, Homo sapiens
gggactgagatttgt

SEQ ID NO: 2043809 - DNA, 15 bp, Homo sapiens
ggactgagatttgtt

SEQ ID NO: 2043810 - DNA, 15 bp, Homo sapiens
gactgagatttgttg

SEQ ID NO: 2043811 - DNA, 15 bp, Homo sapiens
actgagatttgttgg

SEQ ID NO: 2043812 - DNA, 15 bp, Homo sapiens
ctgagatttgttggg

SEQ ID NO: 2043813 - DNA, 15 bp, Homo sapiens
tgagatttgttgggg

SEQ ID NO: 2043814 - DNA, 15 bp, Homo sapiens
gagatttgttgggga

SEQ ID NO: 2043815 - DNA, 15 bp, Homo sapiens
agatttgttggggaa

SEQ ID NO: 2043816 - DNA, 15 bp, Homo sapiens
gatttgttggggaac

SEQ ID NO: 2043817 - DNA, 15 bp, Homo sapiens
atttgttggggaaca

SEQ ID NO: 2043818 - DNA, 15 bp, Homo sapiens
tttgttggggaacag

SEQ ID NO: 2043819 - DNA, 15 bp, Homo sapiens
ttgttggggaacaga

SEQ ID NO: 2043820 - DNA, 15 bp, Homo sapiens
tgttggggaacagag

SEQ ID NO: 2043821 - DNA, 15 bp, Homo sapiens
gttggggaacagagg

SEQ ID NO: 2043822 - DNA, 15 bp, Homo sapiens
ttggggaacagaggg

SEQ ID NO: 2043823 - DNA, 15 bp, Homo sapiens
tggggaacagagggc

SEQ ID NO: 2043824 - DNA, 15 bp, Homo sapiens
ggggaacagagggca

SEQ ID NO: 2043825 - DNA, 15 bp, Homo sapiens
gggaacagagggcag

SEQ ID NO: 2043826 - DNA, 15 bp, Homo sapiens
ggaacagagggcaga

SEQ ID NO: 2043827 - DNA, 15 bp, Homo sapiens
gaacagagggcagaa

SEQ ID NO: 2043828 - DNA, 15 bp, Homo sapiens
aacagagggcagaaa

SEQ ID NO: 2043829 - DNA, 15 bp, Homo sapiens
acagagggcagaaag

SEQ ID NO: 2043830 - DNA, 15 bp, Homo sapiens
cagagggcagaaaga

SEQ ID NO: 2043831 - DNA, 15 bp, Homo sapiens
agagggcagaaagag

SEQ ID NO: 2043832 - DNA, 15 bp, Homo sapiens
gagggcagaaagagc

SEQ ID NO: 2043833 - DNA, 15 bp, Homo sapiens
agggcagaaagagct

SEQ ID NO: 2043834 - DNA, 15 bp, Homo sapiens
gggcagaaagagcta

SEQ ID NO: 2043835 - DNA, 15 bp, Homo sapiens
ggcagaaagagctat

SEQ ID NO: 2043836 - DNA, 15 bp, Homo sapiens
gcagaaagagctata

SEQ ID NO: 2043837 - DNA, 15 bp, Homo sapiens
cagaaagagctatag

SEQ ID NO: 2043838 - DNA, 15 bp, Homo sapiens
agaaagagctatagg

SEQ ID NO: 2043839 - DNA, 15 bp, Homo sapiens
gaaagagctataggt

SEQ ID NO: 2043840 - DNA, 15 bp, Homo sapiens
aaagagctataggtt

SEQ ID NO: 2043841 - DNA, 15 bp, Homo sapiens
aagagctataggttt

SEQ ID NO: 2043842 - DNA, 15 bp, Homo sapiens
agagctataggtttc

SEQ ID NO: 2043843 - DNA, 15 bp, Homo sapiens
gagctataggtttcg

SEQ ID NO: 2043844 - DNA, 15 bp, Homo sapiens
agctataggtttcga

SEQ ID NO: 2043845 - DNA, 15 bp, Homo sapiens
gctataggtttcgac

SEQ ID NO: 2043846 - DNA, 15 bp, Homo sapiens
ctataggtttcgact

SEQ ID NO: 2043847 - DNA, 15 bp, Homo sapiens
tataggtttcgacta

SEQ ID NO: 2043848 - DNA, 15 bp, Homo sapiens
ataggtttcgactac

SEQ ID NO: 2043849 - DNA, 15 bp, Homo sapiens
taggtttcgactacc

SEQ ID NO: 2043850 - DNA, 15 bp, Homo sapiens
aggtttcgactacct

SEQ ID NO: 2043851 - DNA, 15 bp, Homo sapiens
ggtttcgactaccta

SEQ ID NO: 2043852 - DNA, 15 bp, Homo sapiens
gtttcgactacctaa

SEQ ID NO: 2043853 - DNA, 15 bp, Homo sapiens
tttcgactacctaaa

SEQ ID NO: 2043854 - DNA, 15 bp, Homo sapiens
ttcgactacctaaag

SEQ ID NO: 2043855 - DNA, 15 bp, Homo sapiens
tcgactacctaaagc

SEQ ID NO: 2043856 - DNA, 15 bp, Homo sapiens
cgactacctaaagct

SEQ ID NO: 2043857 - DNA, 15 bp, Homo sapiens
gactacctaaagctg

SEQ ID NO: 2043858 - DNA, 15 bp, Homo sapiens
actacctaaagctga

SEQ ID NO: 2043859 - DNA, 15 bp, Homo sapiens
ctacctaaagctgaa

SEQ ID NO: 2043860 - DNA, 15 bp, Homo sapiens
tacctaaagctgaat

SEQ ID NO: 2043861 - DNA, 15 bp, Homo sapiens
acctaaagctgaatg

SEQ ID NO: 2043862 - DNA, 15 bp, Homo sapiens
cctaaagctgaatga

SEQ ID NO: 2043863 - DNA, 15 bp, Homo sapiens
ctaaagctgaatgag

SEQ ID NO: 2043864 - DNA, 15 bp, Homo sapiens
taaagctgaatgagg

SEQ ID NO: 2043865 - DNA, 15 bp, Homo sapiens
aaagctgaatgaggc

SEQ ID NO: 2043866 - DNA, 15 bp, Homo sapiens
aagctgaatgaggct

SEQ ID NO: 2043867 - DNA, 15 bp, Homo sapiens
agctgaatgaggctg

SEQ ID NO: 2043868 - DNA, 15 bp, Homo sapiens
gctgaatgaggctgc

SEQ ID NO: 2043869 - DNA, 15 bp, Homo sapiens
ctgaatgaggctgca

SEQ ID NO: 2043870 - DNA, 15 bp, Homo sapiens
tgaatgaggctgcac

SEQ ID NO: 2043871 - DNA, 15 bp, Homo sapiens
gaatgaggctgcaca

SEQ ID NO: 2043872 - DNA, 15 bp, Homo sapiens
aatgaggctgcacag

SEQ ID NO: 2043873 - DNA, 15 bp, Homo sapiens
atgaggctgcacagg

SEQ ID NO: 2043874 - DNA, 15 bp, Homo sapiens
tgaggctgcacaggt

SEQ ID NO: 2043875 - DNA, 15 bp, Homo sapiens
gaggctgcacaggtc

SEQ ID NO: 2043876 - DNA, 15 bp, Homo sapiens
aggctgcacaggtcc

SEQ ID NO: 2043877 - DNA, 15 bp, Homo sapiens
ggctgcacaggtcct

SEQ ID NO: 2043878 - DNA, 15 bp, Homo sapiens
gctgcacaggtcctg

SEQ ID NO: 2043879 - DNA, 15 bp, Homo sapiens
ctgcacaggtcctgg

SEQ ID NO: 2043880 - DNA, 15 bp, Homo sapiens
tgcacaggtcctggg

SEQ ID NO: 2043881 - DNA, 15 bp, Homo sapiens
gcacaggtcctgggg

SEQ ID NO: 2043882 - DNA, 15 bp, Homo sapiens
cacaggtcctggggc

SEQ ID NO: 2043883 - DNA, 15 bp, Homo sapiens
acaggtcctggggcg

SEQ ID NO: 2043884 - DNA, 15 bp, Homo sapiens
caggtcctggggcga

SEQ ID NO: 2043885 - DNA, 15 bp, Homo sapiens
aggtcctggggcgaa

SEQ ID NO: 2043886 - DNA, 15 bp, Homo sapiens
ggtcctggggcgaaa

SEQ ID NO: 2043887 - DNA, 15 bp, Homo sapiens
gtcctggggcgaaaa

SEQ ID NO: 2043888 - DNA, 15 bp, Homo sapiens
tcctggggcgaaaac

SEQ ID NO: 2043889 - DNA, 15 bp, Homo sapiens
cctggggcgaaaaca

SEQ ID NO: 2043890 - DNA, 15 bp, Homo sapiens
ctggggcgaaaacag

SEQ ID NO: 2043891 - DNA, 15 bp, Homo sapiens
tggggcgaaaacagc

SEQ ID NO: 2043892 - DNA, 15 bp, Homo sapiens
ggggcgaaaacagcc

SEQ ID NO: 2043893 - DNA, 15 bp, Homo sapiens
gggcgaaaacagccg

SEQ ID NO: 2043894 - DNA, 15 bp, Homo sapiens
ggcgaaaacagccgc

SEQ ID NO: 2043895 - DNA, 15 bp, Homo sapiens
gcgaaaacagccgcg

SEQ ID NO: 2043896 - DNA, 15 bp, Homo sapiens
cgaaaacagccgcgc

SEQ ID NO: 2043897 - DNA, 15 bp, Homo sapiens
gaaaacagccgcgcc

SEQ ID NO: 2043898 - DNA, 15 bp, Homo sapiens
aaaacagccgcgccg

SEQ ID NO: 2043899 - DNA, 15 bp, Homo sapiens
aaacagccgcgccgc

SEQ ID NO: 2043900 - DNA, 15 bp, Homo sapiens
aacagccgcgccgcc

SEQ ID NO: 2043901 - DNA, 15 bp, Homo sapiens
acagccgcgccgcca

SEQ ID NO: 2043902 - DNA, 15 bp, Homo sapiens
cagccgcgccgccac

SEQ ID NO: 2043903 - DNA, 15 bp, Homo sapiens
agccgcgccgccaca

SEQ ID NO: 2043904 - DNA, 15 bp, Homo sapiens
gccgcgccgccacaa

SEQ ID NO: 2043905 - DNA, 15 bp, Homo sapiens
ccgcgccgccacaag

SEQ ID NO: 2043906 - DNA, 15 bp, Homo sapiens
cgcgccgccacaagg

SEQ ID NO: 2043907 - DNA, 15 bp, Homo sapiens
gcgccgccacaagga

SEQ ID NO: 2043908 - DNA, 15 bp, Homo sapiens
cgccgccacaaggat

SEQ ID NO: 2043909 - DNA, 15 bp, Homo sapiens
gccgccacaaggatg

SEQ ID NO: 2043910 - DNA, 15 bp, Homo sapiens
ccgccacaaggatgc

SEQ ID NO: 2043911 - DNA, 15 bp, Homo sapiens
cgccacaaggatgct

SEQ ID NO: 2043912 - DNA, 15 bp, Homo sapiens
gccacaaggatgctt

SEQ ID NO: 2043913 - DNA, 15 bp, Homo sapiens
ccacaaggatgcttc

SEQ ID NO: 2043914 - DNA, 15 bp, Homo sapiens
cacaaggatgcttcg

SEQ ID NO: 2043915 - DNA, 15 bp, Homo sapiens
acaaggatgcttcgg

SEQ ID NO: 2043916 - DNA, 15 bp, Homo sapiens
caaggatgcttcggg

SEQ ID NO: 2043917 - DNA, 15 bp, Homo sapiens
aaggatgcttcggga

SEQ ID NO: 2043918 - DNA, 15 bp, Homo sapiens
aggatgcttcgggaa

SEQ ID NO: 2043919 - DNA, 15 bp, Homo sapiens
ggatgcttcgggaat

SEQ ID NO: 2043920 - DNA, 15 bp, Homo sapiens
gatgcttcgggaatc

SEQ ID NO: 2043921 - DNA, 15 bp, Homo sapiens
atgcttcgggaatct

SEQ ID NO: 2043922 - DNA, 15 bp, Homo sapiens
tgcttcgggaatctg

SEQ ID NO: 2043923 - DNA, 15 bp, Homo sapiens
gcttcgggaatctgt

SEQ ID NO: 2043924 - DNA, 15 bp, Homo sapiens
cttcgggaatctgtc

SEQ ID NO: 2043925 - DNA, 15 bp, Homo sapiens
ttcgggaatctgtcc

SEQ ID NO: 2043926 - DNA, 15 bp, Homo sapiens
tcgggaatctgtcct

SEQ ID NO: 2043927 - DNA, 15 bp, Homo sapiens
cgggaatctgtcctt

SEQ ID NO: 2043928 - DNA, 15 bp, Homo sapiens
gggaatctgtccttt

SEQ ID NO: 2043929 - DNA, 15 bp, Homo sapiens
ggaatctgtccttta

SEQ ID NO: 2043930 - DNA, 15 bp, Homo sapiens
gaatctgtcctttaa

SEQ ID NO: 2043931 - DNA, 15 bp, Homo sapiens
aatctgtcctttaat

SEQ ID NO: 2043932 - DNA, 15 bp, Homo sapiens
atctgtcctttaatt

SEQ ID NO: 2043933 - DNA, 15 bp, Homo sapiens
tctgtcctttaatta

SEQ ID NO: 2043934 - DNA, 15 bp, Homo sapiens
ctgtcctttaattat

SEQ ID NO: 2043935 - DNA, 15 bp, Homo sapiens
tgtcctttaattatc

SEQ ID NO: 2043936 - DNA, 15 bp, Homo sapiens
gtcctttaattatca

SEQ ID NO: 2043937 - DNA, 15 bp, Homo sapiens
tcctttaattatcag

SEQ ID NO: 2043938 - DNA, 15 bp, Homo sapiens
cctttaattatcagg

SEQ ID NO: 2043939 - DNA, 15 bp, Homo sapiens
ctttaattatcagga

SEQ ID NO: 2043940 - DNA, 15 bp, Homo sapiens
tttaattatcaggag

SEQ ID NO: 2043941 - DNA, 15 bp, Homo sapiens
ttaattatcaggagc

SEQ ID NO: 2043942 - DNA, 15 bp, Homo sapiens
taattatcaggagca

SEQ ID NO: 2043943 - DNA, 15 bp, Homo sapiens
aattatcaggagcag

SEQ ID NO: 2043944 - DNA, 15 bp, Homo sapiens
attatcaggagcagc

SEQ ID NO: 2043945 - DNA, 15 bp, Homo sapiens
ttatcaggagcagct

SEQ ID NO: 2043946 - DNA, 15 bp, Homo sapiens
tatcaggagcagctg

SEQ ID NO: 2043947 - DNA, 15 bp, Homo sapiens
atcaggagcagctgc

SEQ ID NO: 2043948 - DNA, 15 bp, Homo sapiens
tcaggagcagctgcg

SEQ ID NO: 2043949 - DNA, 15 bp, Homo sapiens
caggagcagctgcga

SEQ ID NO: 2043950 - DNA, 15 bp, Homo sapiens
aggagcagctgcgaa

SEQ ID NO: 2043951 - DNA, 15 bp, Homo sapiens
ggagcagctgcgaaa

SEQ ID NO: 2043952 - DNA, 15 bp, Homo sapiens
gagcagctgcgaaac

SEQ ID NO: 2043953 - DNA, 15 bp, Homo sapiens
agcagctgcgaaact

SEQ ID NO: 2043954 - DNA, 15 bp, Homo sapiens
gcagctgcgaaactt

SEQ ID NO: 2043955 - DNA, 15 bp, Homo sapiens
cagctgcgaaactta

SEQ ID NO: 2043956 - DNA, 15 bp, Homo sapiens
agctgcgaaacttac

SEQ ID NO: 2043957 - DNA, 15 bp, Homo sapiens
gctgcgaaacttacc

SEQ ID NO: 2043958 - DNA, 15 bp, Homo sapiens
ctgcgaaacttacct

SEQ ID NO: 2043959 - DNA, 15 bp, Homo sapiens
tgcgaaacttacctt

SEQ ID NO: 2043960 - DNA, 15 bp, Homo sapiens
gcgaaacttacctta

SEQ ID NO: 2043961 - DNA, 15 bp, Homo sapiens
cgaaacttaccttag

SEQ ID NO: 2043962 - DNA, 15 bp, Homo sapiens
gaaacttaccttagc

SEQ ID NO: 2043963 - DNA, 15 bp, Homo sapiens
aaacttaccttagcg

SEQ ID NO: 2043964 - DNA, 15 bp, Homo sapiens
aacttaccttagcgc

SEQ ID NO: 2043965 - DNA, 15 bp, Homo sapiens
acttaccttagcgca

SEQ ID NO: 2043966 - DNA, 15 bp, Homo sapiens
cttaccttagcgcag

SEQ ID NO: 2043967 - DNA, 15 bp, Homo sapiens
ttaccttagcgcagc

SEQ ID NO: 2043968 - DNA, 15 bp, Homo sapiens
taccttagcgcagca

SEQ ID NO: 2043969 - DNA, 15 bp, Homo sapiens
accttagcgcagcac

SEQ ID NO: 2043970 - DNA, 15 bp, Homo sapiens
ccttagcgcagcacg

SEQ ID NO: 2043971 - DNA, 15 bp, Homo sapiens
cttagcgcagcacga

SEQ ID NO: 2043972 - DNA, 15 bp, Homo sapiens
ttagcgcagcacgaa

SEQ ID NO: 2043973 - DNA, 15 bp, Homo sapiens
tagcgcagcacgaac

SEQ ID NO: 2043974 - DNA, 15 bp, Homo sapiens
agcgcagcacgaacc

SEQ ID NO: 2043975 - DNA, 15 bp, Homo sapiens
gcgcagcacgaaccc

SEQ ID NO: 2043976 - DNA, 15 bp, Homo sapiens
cgcagcacgaaccct

SEQ ID NO: 2043977 - DNA, 15 bp, Homo sapiens
gcagcacgaacccta

SEQ ID NO: 2043978 - DNA, 15 bp, Homo sapiens
cagcacgaaccctag

SEQ ID NO: 2043979 - DNA, 15 bp, Homo sapiens
agcacgaaccctaga

SEQ ID NO: 2043980 - DNA, 15 bp, Homo sapiens
gcacgaaccctagag

SEQ ID NO: 2043981 - DNA, 15 bp, Homo sapiens
cacgaaccctagagc

SEQ ID NO: 2043982 - DNA, 15 bp, Homo sapiens
acgaaccctagagcg

SEQ ID NO: 2043983 - DNA, 15 bp, Homo sapiens
cgaaccctagagcgc

SEQ ID NO: 2043984 - DNA, 15 bp, Homo sapiens
gaaccctagagcgcc

SEQ ID NO: 2043985 - DNA, 15 bp, Homo sapiens
aaccctagagcgccc

SEQ ID NO: 2043986 - DNA, 15 bp, Homo sapiens
accctagagcgcccc

SEQ ID NO: 2043987 - DNA, 15 bp, Homo sapiens
ccctagagcgccccc

SEQ ID NO: 2043988 - DNA, 15 bp, Homo sapiens
cctagagcgcccccg

SEQ ID NO: 2043989 - DNA, 15 bp, Homo sapiens
ctagagcgcccccga

SEQ ID NO: 2043990 - DNA, 15 bp, Homo sapiens
tagagcgcccccgag

SEQ ID NO: 2043991 - DNA, 15 bp, Homo sapiens
agagcgcccccgagg

SEQ ID NO: 2043992 - DNA, 15 bp, Homo sapiens
gagcgcccccgaggg

SEQ ID NO: 2043993 - DNA, 15 bp, Homo sapiens
agcgcccccgagggt

SEQ ID NO: 2043994 - DNA, 15 bp, Homo sapiens
gcgcccccgagggtg

SEQ ID NO: 2043995 - DNA, 15 bp, Homo sapiens
cgcccccgagggtgt

SEQ ID NO: 2043996 - DNA, 15 bp, Homo sapiens
gcccccgagggtgtc

SEQ ID NO: 2043997 - DNA, 15 bp, Homo sapiens
cccccgagggtgtcc

SEQ ID NO: 2043998 - DNA, 15 bp, Homo sapiens
ccccgagggtgtccc

SEQ ID NO: 2043999 - DNA, 15 bp, Homo sapiens
cccgagggtgtccct

SEQ ID NO: 2044000 - DNA, 15 bp, Homo sapiens
ccgagggtgtccctg

SEQ ID NO: 2044001 - DNA, 15 bp, Homo sapiens
cgagggtgtccctgc

SEQ ID NO: 2044002 - DNA, 15 bp, Homo sapiens
gagggtgtccctgcc

SEQ ID NO: 2044003 - DNA, 15 bp, Homo sapiens
agggtgtccctgccc

SEQ ID NO: 2044004 - DNA, 15 bp, Homo sapiens
gggtgtccctgcccc

SEQ ID NO: 2044005 - DNA, 15 bp, Homo sapiens
ggtgtccctgcccct

SEQ ID NO: 2044006 - DNA, 15 bp, Homo sapiens
gtgtccctgcccctt

SEQ ID NO: 2044007 - DNA, 15 bp, Homo sapiens
tgtccctgccccttc

SEQ ID NO: 2044008 - DNA, 15 bp, Homo sapiens
gtccctgccccttcc

SEQ ID NO: 2044009 - DNA, 15 bp, Homo sapiens
tccctgccccttccg

SEQ ID NO: 2044010 - DNA, 15 bp, Homo sapiens
ccctgccccttccga

SEQ ID NO: 2044011 - DNA, 15 bp, Homo sapiens
cctgccccttccgac

SEQ ID NO: 2044012 - DNA, 15 bp, Homo sapiens
ctgccccttccgacg

SEQ ID NO: 2044013 - DNA, 15 bp, Homo sapiens
tgccccttccgacgg

SEQ ID NO: 2044014 - DNA, 15 bp, Homo sapiens
gccccttccgacggg

SEQ ID NO: 2044015 - DNA, 15 bp, Homo sapiens
ccccttccgacgggg

SEQ ID NO: 2044016 - DNA, 15 bp, Homo sapiens
cccttccgacggggg

SEQ ID NO: 2044017 - DNA, 15 bp, Homo sapiens
ccttccgacgggggc

SEQ ID NO: 2044018 - DNA, 15 bp, Homo sapiens
cttccgacgggggcg

SEQ ID NO: 2044019 - DNA, 15 bp, Homo sapiens
ttccgacgggggcgt

SEQ ID NO: 2044020 - DNA, 15 bp, Homo sapiens
tccgacgggggcgtc

SEQ ID NO: 2044021 - DNA, 15 bp, Homo sapiens
ccgacgggggcgtct

SEQ ID NO: 2044022 - DNA, 15 bp, Homo sapiens
cgacgggggcgtctg

SEQ ID NO: 2044023 - DNA, 15 bp, Homo sapiens
gacgggggcgtctgg

SEQ ID NO: 2044024 - DNA, 15 bp, Homo sapiens
acgggggcgtctggc

SEQ ID NO: 2044025 - DNA, 15 bp, Homo sapiens
cgggggcgtctggcg

SEQ ID NO: 2044026 - DNA, 15 bp, Homo sapiens
gggggcgtctggcgg

SEQ ID NO: 2044027 - DNA, 15 bp, Homo sapiens
ggggcgtctggcgga

SEQ ID NO: 2044028 - DNA, 15 bp, Homo sapiens
gggcgtctggcggat

SEQ ID NO: 2044029 - DNA, 15 bp, Homo sapiens
ggcgtctggcggatt

SEQ ID NO: 2044030 - DNA, 15 bp, Homo sapiens
gcgtctggcggattc

SEQ ID NO: 2044031 - DNA, 15 bp, Homo sapiens
cgtctggcggattcg

SEQ ID NO: 2044032 - DNA, 15 bp, Homo sapiens
gtctggcggattcgc

SEQ ID NO: 2044033 - DNA, 15 bp, Homo sapiens
tctggcggattcgcg

SEQ ID NO: 2044034 - DNA, 15 bp, Homo sapiens
ctggcggattcgcgg

SEQ ID NO: 2044035 - DNA, 15 bp, Homo sapiens
tggcggattcgcggc

SEQ ID NO: 2044036 - DNA, 15 bp, Homo sapiens
ggcggattcgcggcg

SEQ ID NO: 2044037 - DNA, 15 bp, Homo sapiens
gcggattcgcggcgt

SEQ ID NO: 2044038 - DNA, 15 bp, Homo sapiens
cggattcgcggcgta

SEQ ID NO: 2044039 - DNA, 15 bp, Homo sapiens
ggattcgcggcgtag

SEQ ID NO: 2044040 - DNA, 15 bp, Homo sapiens
gattcgcggcgtagc

SEQ ID NO: 2044041 - DNA, 15 bp, Homo sapiens
attcgcggcgtagca

SEQ ID NO: 2044042 - DNA, 15 bp, Homo sapiens
ttcgcggcgtagcac

SEQ ID NO: 2044043 - DNA, 15 bp, Homo sapiens
tcgcggcgtagcacg

SEQ ID NO: 2044044 - DNA, 15 bp, Homo sapiens
cgcggcgtagcacgg

SEQ ID NO: 2044045 - DNA, 15 bp, Homo sapiens
gcggcgtagcacggc

SEQ ID NO: 2044046 - DNA, 15 bp, Homo sapiens
cggcgtagcacggca

SEQ ID NO: 2044047 - DNA, 15 bp, Homo sapiens
ggcgtagcacggcag

SEQ ID NO: 2044048 - DNA, 15 bp, Homo sapiens
gcgtagcacggcagc

SEQ ID NO: 2044049 - DNA, 15 bp, Homo sapiens
cgtagcacggcagcg

SEQ ID NO: 2044050 - DNA, 15 bp, Homo sapiens
gtagcacggcagcgc

SEQ ID NO: 2044051 - DNA, 15 bp, Homo sapiens
tagcacggcagcgcg

SEQ ID NO: 2044052 - DNA, 15 bp, Homo sapiens
agcacggcagcgcgg

SEQ ID NO: 2044053 - DNA, 15 bp, Homo sapiens
gcacggcagcgcggg

SEQ ID NO: 2044054 - DNA, 15 bp, Homo sapiens
cacggcagcgcgggc

SEQ ID NO: 2044055 - DNA, 15 bp, Homo sapiens
acggcagcgcgggcc

SEQ ID NO: 2044056 - DNA, 15 bp, Homo sapiens
cggcagcgcgggcct

SEQ ID NO: 2044057 - DNA, 15 bp, Homo sapiens
ggcagcgcgggcctc

SEQ ID NO: 2044058 - DNA, 15 bp, Homo sapiens
gcagcgcgggcctca

SEQ ID NO: 2044059 - DNA, 15 bp, Homo sapiens
cagcgcgggcctcac

SEQ ID NO: 2044060 - DNA, 15 bp, Homo sapiens
agcgcgggcctcaca

SEQ ID NO: 2044061 - DNA, 15 bp, Homo sapiens
gcgcgggcctcacag

SEQ ID NO: 2044062 - DNA, 15 bp, Homo sapiens
cgcgggcctcacagg

SEQ ID NO: 2044063 - DNA, 15 bp, Homo sapiens
gcgggcctcacaggg

SEQ ID NO: 2044064 - DNA, 15 bp, Homo sapiens
cgggcctcacagggt

SEQ ID NO: 2044065 - DNA, 15 bp, Homo sapiens
gggcctcacagggtc

SEQ ID NO: 2044066 - DNA, 15 bp, Homo sapiens
ggcctcacagggtcg

SEQ ID NO: 2044067 - DNA, 15 bp, Homo sapiens
gcctcacagggtcgg

SEQ ID NO: 2044068 - DNA, 15 bp, Homo sapiens
cctcacagggtcggc

SEQ ID NO: 2044069 - DNA, 15 bp, Homo sapiens
ctcacagggtcggct

SEQ ID NO: 2044070 - DNA, 15 bp, Homo sapiens
tcacagggtcggctg

SEQ ID NO: 2044071 - DNA, 15 bp, Homo sapiens
cacagggtcggctga

SEQ ID NO: 2044072 - DNA, 15 bp, Homo sapiens
acagggtcggctgac

SEQ ID NO: 2044073 - DNA, 15 bp, Homo sapiens
cagggtcggctgacc

SEQ ID NO: 2044074 - DNA, 15 bp, Homo sapiens
agggtcggctgaccg

SEQ ID NO: 2044075 - DNA, 15 bp, Homo sapiens
gggtcggctgaccgc

SEQ ID NO: 2044076 - DNA, 15 bp, Homo sapiens
ggtcggctgaccgct

SEQ ID NO: 2044077 - DNA, 15 bp, Homo sapiens
gtcggctgaccgctt

SEQ ID NO: 2044078 - DNA, 15 bp, Homo sapiens
tcggctgaccgcttc

SEQ ID NO: 2044079 - DNA, 15 bp, Homo sapiens
cggctgaccgcttca

SEQ ID NO: 2044080 - DNA, 15 bp, Homo sapiens
ggctgaccgcttcag

SEQ ID NO: 2044081 - DNA, 15 bp, Homo sapiens
gctgaccgcttcagg

SEQ ID NO: 2044082 - DNA, 15 bp, Homo sapiens
ctgaccgcttcaggc

SEQ ID NO: 2044083 - DNA, 15 bp, Homo sapiens
tgaccgcttcaggcc

SEQ ID NO: 2044084 - DNA, 15 bp, Homo sapiens
gaccgcttcaggccc

SEQ ID NO: 2044085 - DNA, 15 bp, Homo sapiens
accgcttcaggcccg

SEQ ID NO: 2044086 - DNA, 15 bp, Homo sapiens
ccgcttcaggcccgt

SEQ ID NO: 2044087 - DNA, 15 bp, Homo sapiens
cgcttcaggcccgtg

SEQ ID NO: 2044088 - DNA, 15 bp, Homo sapiens
gcttcaggcccgtgc

SEQ ID NO: 2044089 - DNA, 15 bp, Homo sapiens
cttcaggcccgtgct

SEQ ID NO: 2044090 - DNA, 15 bp, Homo sapiens
ttcaggcccgtgctc

SEQ ID NO: 2044091 - DNA, 15 bp, Homo sapiens
tcaggcccgtgctcc

SEQ ID NO: 2044092 - DNA, 15 bp, Homo sapiens
caggcccgtgctcct

SEQ ID NO: 2044093 - DNA, 15 bp, Homo sapiens
aggcccgtgctccta

SEQ ID NO: 2044094 - DNA, 15 bp, Homo sapiens
ggcccgtgctcctac

SEQ ID NO: 2044095 - DNA, 15 bp, Homo sapiens
gcccgtgctcctacc

SEQ ID NO: 2044096 - DNA, 15 bp, Homo sapiens
cccgtgctcctacct

SEQ ID NO: 2044097 - DNA, 15 bp, Homo sapiens
ccgtgctcctacctc

SEQ ID NO: 2044098 - DNA, 15 bp, Homo sapiens
cgtgctcctacctcc

SEQ ID NO: 2044099 - DNA, 15 bp, Homo sapiens
gtgctcctacctccc

SEQ ID NO: 2044100 - DNA, 15 bp, Homo sapiens
tgctcctacctcccg

SEQ ID NO: 2044101 - DNA, 15 bp, Homo sapiens
gctcctacctcccgt

SEQ ID NO: 2044102 - DNA, 15 bp, Homo sapiens
ctcctacctcccgtc

SEQ ID NO: 2044103 - DNA, 15 bp, Homo sapiens
tcctacctcccgtct

SEQ ID NO: 2044104 - DNA, 15 bp, Homo sapiens
cctacctcccgtctc

SEQ ID NO: 2044105 - DNA, 15 bp, Homo sapiens
ctacctcccgtctcc

SEQ ID NO: 2044106 - DNA, 15 bp, Homo sapiens
tacctcccgtctccg

SEQ ID NO: 2044107 - DNA, 15 bp, Homo sapiens
acctcccgtctccgt

SEQ ID NO: 2044108 - DNA, 15 bp, Homo sapiens
cctcccgtctccgtc

SEQ ID NO: 2044109 - DNA, 15 bp, Homo sapiens
ctcccgtctccgtct

SEQ ID NO: 2044110 - DNA, 15 bp, Homo sapiens
tcccgtctccgtctt

SEQ ID NO: 2044111 - DNA, 15 bp, Homo sapiens
cccgtctccgtcttg

SEQ ID NO: 2044112 - DNA, 15 bp, Homo sapiens
ccgtctccgtcttgg

SEQ ID NO: 2044113 - DNA, 15 bp, Homo sapiens
cgtctccgtcttggt

SEQ ID NO: 2044114 - DNA, 15 bp, Homo sapiens
gtctccgtcttggtt

SEQ ID NO: 2044115 - DNA, 15 bp, Homo sapiens
tctccgtcttggttt

SEQ ID NO: 2044116 - DNA, 15 bp, Homo sapiens
ctccgtcttggtttc

SEQ ID NO: 2044117 - DNA, 15 bp, Homo sapiens
tccgtcttggtttcc

SEQ ID NO: 2044118 - DNA, 15 bp, Homo sapiens
ccgtcttggtttcct

SEQ ID NO: 2044119 - DNA, 15 bp, Homo sapiens
cgtcttggtttcctc

SEQ ID NO: 2044120 - DNA, 15 bp, Homo sapiens
gtcttggtttcctcg

SEQ ID NO: 2044121 - DNA, 15 bp, Homo sapiens
tcttggtttcctcgc

SEQ ID NO: 2044122 - DNA, 15 bp, Homo sapiens
cttggtttcctcgca

SEQ ID NO: 2044123 - DNA, 15 bp, Homo sapiens
ttggtttcctcgcaa

SEQ ID NO: 2044124 - DNA, 15 bp, Homo sapiens
tggtttcctcgcaat

SEQ ID NO: 2044125 - DNA, 15 bp, Homo sapiens
ggtttcctcgcaatt

SEQ ID NO: 2044126 - DNA, 15 bp, Homo sapiens
gtttcctcgcaattc

SEQ ID NO: 2044127 - DNA, 15 bp, Homo sapiens
tttcctcgcaattca

SEQ ID NO: 2044128 - DNA, 15 bp, Homo sapiens
ttcctcgcaattcaa

SEQ ID NO: 2044129 - DNA, 15 bp, Homo sapiens
tcctcgcaattcaaa

SEQ ID NO: 2044130 - DNA, 15 bp, Homo sapiens
cctcgcaattcaaag

SEQ ID NO: 2044131 - DNA, 15 bp, Homo sapiens
ctcgcaattcaaagg

SEQ ID NO: 2044132 - DNA, 15 bp, Homo sapiens
tcgcaattcaaaggg

SEQ ID NO: 2044133 - DNA, 15 bp, Homo sapiens
cgcaattcaaaggga

SEQ ID NO: 2044134 - DNA, 15 bp, Homo sapiens
gcaattcaaagggag

SEQ ID NO: 2044135 - DNA, 15 bp, Homo sapiens
caattcaaagggagc

SEQ ID NO: 2044136 - DNA, 15 bp, Homo sapiens
aattcaaagggagct

SEQ ID NO: 2044137 - DNA, 15 bp, Homo sapiens
attcaaagggagctg

SEQ ID NO: 2044138 - DNA, 15 bp, Homo sapiens
ttcaaagggagctgc

SEQ ID NO: 2044139 - DNA, 15 bp, Homo sapiens
tcaaagggagctgct

SEQ ID NO: 2044140 - DNA, 15 bp, Homo sapiens
caaagggagctgctg

SEQ ID NO: 2044141 - DNA, 15 bp, Homo sapiens
aaagggagctgctga

SEQ ID NO: 2044142 - DNA, 15 bp, Homo sapiens
aagggagctgctgag

SEQ ID NO: 2044143 - DNA, 15 bp, Homo sapiens
agggagctgctgagc

SEQ ID NO: 2044144 - DNA, 15 bp, Homo sapiens
gggagctgctgagct

SEQ ID NO: 2044145 - DNA, 15 bp, Homo sapiens
ggagctgctgagctc

SEQ ID NO: 2044146 - DNA, 15 bp, Homo sapiens
gagctgctgagctcc

SEQ ID NO: 2044147 - DNA, 15 bp, Homo sapiens
agctgctgagctccc

SEQ ID NO: 2044148 - DNA, 15 bp, Homo sapiens
gctgctgagctcccg

SEQ ID NO: 2044149 - DNA, 15 bp, Homo sapiens
ctgctgagctcccgc

SEQ ID NO: 2044150 - DNA, 15 bp, Homo sapiens
tgctgagctcccgct

SEQ ID NO: 2044151 - DNA, 15 bp, Homo sapiens
gctgagctcccgctg

SEQ ID NO: 2044152 - DNA, 15 bp, Homo sapiens
ctgagctcccgctgt

SEQ ID NO: 2044153 - DNA, 15 bp, Homo sapiens
tgagctcccgctgtt

SEQ ID NO: 2044154 - DNA, 15 bp, Homo sapiens
gagctcccgctgttc

SEQ ID NO: 2044155 - DNA, 15 bp, Homo sapiens
agctcccgctgttct

SEQ ID NO: 2044156 - DNA, 15 bp, Homo sapiens
gctcccgctgttctc

SEQ ID NO: 2044157 - DNA, 15 bp, Homo sapiens
ctcccgctgttctct

SEQ ID NO: 2044158 - DNA, 15 bp, Homo sapiens
tcccgctgttctctg

SEQ ID NO: 2044159 - DNA, 15 bp, Homo sapiens
cccgctgttctctgc

SEQ ID NO: 2044160 - DNA, 15 bp, Homo sapiens
ccgctgttctctgct

SEQ ID NO: 2044161 - DNA, 15 bp, Homo sapiens
cgctgttctctgctt

SEQ ID NO: 2044162 - DNA, 15 bp, Homo sapiens
gctgttctctgcttt

SEQ ID NO: 2044163 - DNA, 15 bp, Homo sapiens
ctgttctctgctttg

SEQ ID NO: 2044164 - DNA, 15 bp, Homo sapiens
tgttctctgctttgt

SEQ ID NO: 2044165 - DNA, 15 bp, Homo sapiens
gttctctgctttgta

SEQ ID NO: 2044166 - DNA, 15 bp, Homo sapiens
ttctctgctttgtaa

SEQ ID NO: 2044167 - DNA, 15 bp, Homo sapiens
tctctgctttgtaac

SEQ ID NO: 2044168 - DNA, 15 bp, Homo sapiens
ctctgctttgtaacc

SEQ ID NO: 2044169 - DNA, 15 bp, Homo sapiens
tctgctttgtaaccc

SEQ ID NO: 2044170 - DNA, 15 bp, Homo sapiens
ctgctttgtaacccg

SEQ ID NO: 2044171 - DNA, 15 bp, Homo sapiens
tgctttgtaacccgc

SEQ ID NO: 2044172 - DNA, 15 bp, Homo sapiens
gctttgtaacccgct

SEQ ID NO: 2044173 - DNA, 15 bp, Homo sapiens
ctttgtaacccgctc

SEQ ID NO: 2044174 - DNA, 15 bp, Homo sapiens
tttgtaacccgctcc

SEQ ID NO: 2044175 - DNA, 15 bp, Homo sapiens
ttgtaacccgctccc

SEQ ID NO: 2044176 - DNA, 15 bp, Homo sapiens
tgtaacccgctccct

SEQ ID NO: 2044177 - DNA, 15 bp, Homo sapiens
gtaacccgctccctc

SEQ ID NO: 2044178 - DNA, 15 bp, Homo sapiens
taacccgctccctca

SEQ ID NO: 2044179 - DNA, 15 bp, Homo sapiens
aacccgctccctcag

SEQ ID NO: 2044180 - DNA, 15 bp, Homo sapiens
acccgctccctcagg

SEQ ID NO: 2044181 - DNA, 15 bp, Homo sapiens
cccgctccctcaggt

SEQ ID NO: 2044182 - DNA, 15 bp, Homo sapiens
ccgctccctcaggtt

SEQ ID NO: 2044183 - DNA, 15 bp, Homo sapiens
cgctccctcaggttc

SEQ ID NO: 2044184 - DNA, 15 bp, Homo sapiens
gctccctcaggttcc

SEQ ID NO: 2044185 - DNA, 15 bp, Homo sapiens
ctccctcaggttccc

SEQ ID NO: 2044186 - DNA, 15 bp, Homo sapiens
tccctcaggttccct

SEQ ID NO: 2044187 - DNA, 15 bp, Homo sapiens
ccctcaggttccctc

SEQ ID NO: 2044188 - DNA, 15 bp, Homo sapiens
cctcaggttccctcc

SEQ ID NO: 2044189 - DNA, 15 bp, Homo sapiens
ctcaggttccctcct

SEQ ID NO: 2044190 - DNA, 15 bp, Homo sapiens
tcaggttccctccta

SEQ ID NO: 2044191 - DNA, 15 bp, Homo sapiens
caggttccctcctac

SEQ ID NO: 2044192 - DNA, 15 bp, Homo sapiens
aggttccctcctacc

SEQ ID NO: 2044193 - DNA, 15 bp, Homo sapiens
ggttccctcctaccc

SEQ ID NO: 2044194 - DNA, 15 bp, Homo sapiens
gttccctcctacccc

SEQ ID NO: 2044195 - DNA, 15 bp, Homo sapiens
ttccctcctacccca

SEQ ID NO: 2044196 - DNA, 15 bp, Homo sapiens
tccctcctaccccag

SEQ ID NO: 2044197 - DNA, 15 bp, Homo sapiens
ccctcctaccccagg

SEQ ID NO: 2044198 - DNA, 15 bp, Homo sapiens
cctcctaccccaggc

SEQ ID NO: 2044199 - DNA, 15 bp, Homo sapiens
ctcctaccccaggcc

SEQ ID NO: 2044200 - DNA, 15 bp, Homo sapiens
tcctaccccaggccc

SEQ ID NO: 2044201 - DNA, 15 bp, Homo sapiens
cctaccccaggcccc

SEQ ID NO: 2044202 - DNA, 15 bp, Homo sapiens
ctaccccaggcccct

SEQ ID NO: 2044203 - DNA, 15 bp, Homo sapiens
taccccaggcccctt

SEQ ID NO: 2044204 - DNA, 15 bp, Homo sapiens
accccaggccccttc

SEQ ID NO: 2044205 - DNA, 15 bp, Homo sapiens
ccccaggccccttcc

SEQ ID NO: 2044206 - DNA, 15 bp, Homo sapiens
cccaggccccttccc

SEQ ID NO: 2044207 - DNA, 15 bp, Homo sapiens
ccaggccccttcccg

SEQ ID NO: 2044208 - DNA, 15 bp, Homo sapiens
caggccccttcccgc

SEQ ID NO: 2044209 - DNA, 15 bp, Homo sapiens
aggccccttcccgcc

SEQ ID NO: 2044210 - DNA, 15 bp, Homo sapiens
ggccccttcccgcca

SEQ ID NO: 2044211 - DNA, 15 bp, Homo sapiens
gccccttcccgccag

SEQ ID NO: 2044212 - DNA, 15 bp, Homo sapiens
ccccttcccgccaga

SEQ ID NO: 2044213 - DNA, 15 bp, Homo sapiens
cccttcccgccagag

SEQ ID NO: 2044214 - DNA, 15 bp, Homo sapiens
ccttcccgccagagg

SEQ ID NO: 2044215 - DNA, 15 bp, Homo sapiens
cttcccgccagaggg

SEQ ID NO: 2044216 - DNA, 15 bp, Homo sapiens
ttcccgccagagggc

SEQ ID NO: 2044217 - DNA, 15 bp, Homo sapiens
tcccgccagagggcg

SEQ ID NO: 2044218 - DNA, 15 bp, Homo sapiens
cccgccagagggcgc

SEQ ID NO: 2044219 - DNA, 15 bp, Homo sapiens
ccgccagagggcgcc

SEQ ID NO: 2044220 - DNA, 15 bp, Homo sapiens
cgccagagggcgccc

SEQ ID NO: 2044221 - DNA, 15 bp, Homo sapiens
gccagagggcgcccc

SEQ ID NO: 2044222 - DNA, 15 bp, Homo sapiens
ccagagggcgcccct

SEQ ID NO: 2044223 - DNA, 15 bp, Homo sapiens
cagagggcgcccctg

SEQ ID NO: 2044224 - DNA, 15 bp, Homo sapiens
agagggcgcccctgg

SEQ ID NO: 2044225 - DNA, 15 bp, Homo sapiens
gagggcgcccctgga

SEQ ID NO: 2044226 - DNA, 15 bp, Homo sapiens
agggcgcccctggag

SEQ ID NO: 2044227 - DNA, 15 bp, Homo sapiens
gggcgcccctggagt

SEQ ID NO: 2044228 - DNA, 15 bp, Homo sapiens
ggcgcccctggagtc

SEQ ID NO: 2044229 - DNA, 15 bp, Homo sapiens
gcgcccctggagtcg

SEQ ID NO: 2044230 - DNA, 15 bp, Homo sapiens
cgcccctggagtcgg

SEQ ID NO: 2044231 - DNA, 15 bp, Homo sapiens
gcccctggagtcggt

SEQ ID NO: 2044232 - DNA, 15 bp, Homo sapiens
cccctggagtcggtg

SEQ ID NO: 2044233 - DNA, 15 bp, Homo sapiens
ccctggagtcggtgg

SEQ ID NO: 2044234 - DNA, 15 bp, Homo sapiens
cctggagtcggtgga

SEQ ID NO: 2044235 - DNA, 15 bp, Homo sapiens
ctggagtcggtggag

SEQ ID NO: 2044236 - DNA, 15 bp, Homo sapiens
tggagtcggtggaga

SEQ ID NO: 2044237 - DNA, 15 bp, Homo sapiens
ggagtcggtggagaa

SEQ ID NO: 2044238 - DNA, 15 bp, Homo sapiens
gagtcggtggagaag

SEQ ID NO: 2044239 - DNA, 15 bp, Homo sapiens
agtcggtggagaagg

SEQ ID NO: 2044240 - DNA, 15 bp, Homo sapiens
gtcggtggagaaggt

SEQ ID NO: 2044241 - DNA, 15 bp, Homo sapiens
tcggtggagaaggta

SEQ ID NO: 2044242 - DNA, 15 bp, Homo sapiens
cggtggagaaggtag

SEQ ID NO: 2044243 - DNA, 15 bp, Homo sapiens
ggtggagaaggtagg

SEQ ID NO: 2044244 - DNA, 15 bp, Homo sapiens
gtggagaaggtaggg

SEQ ID NO: 2044245 - DNA, 15 bp, Homo sapiens
tggagaaggtagggg

SEQ ID NO: 2044246 - DNA, 15 bp, Homo sapiens
ggagaaggtaggggc

SEQ ID NO: 2044247 - DNA, 15 bp, Homo sapiens
gagaaggtaggggct

SEQ ID NO: 2044248 - DNA, 15 bp, Homo sapiens
agaaggtaggggctc

SEQ ID NO: 2044249 - DNA, 15 bp, Homo sapiens
gaaggtaggggctct

SEQ ID NO: 2044250 - DNA, 15 bp, Homo sapiens
aaggtaggggctcta

SEQ ID NO: 2044251 - DNA, 15 bp, Homo sapiens
aggtaggggctctaa

SEQ ID NO: 2044252 - DNA, 15 bp, Homo sapiens
ggtaggggctctaaa

SEQ ID NO: 2044253 - DNA, 15 bp, Homo sapiens
gtaggggctctaaat

SEQ ID NO: 2044254 - DNA, 15 bp, Homo sapiens
taggggctctaaata

SEQ ID NO: 2044255 - DNA, 15 bp, Homo sapiens
aggggctctaaatac

SEQ ID NO: 2044256 - DNA, 15 bp, Homo sapiens
ggggctctaaataca

SEQ ID NO: 2044257 - DNA, 15 bp, Homo sapiens
gggctctaaatacaa

SEQ ID NO: 2044258 - DNA, 15 bp, Homo sapiens
ggctctaaatacaaa

SEQ ID NO: 2044259 - DNA, 15 bp, Homo sapiens
gctctaaatacaaaa

SEQ ID NO: 2044260 - DNA, 15 bp, Homo sapiens
ctctaaatacaaaaa

SEQ ID NO: 2044261 - DNA, 15 bp, Homo sapiens
tctaaatacaaaaat

SEQ ID NO: 2044262 - DNA, 15 bp, Homo sapiens
ctaaatacaaaaatt

SEQ ID NO: 2044263 - DNA, 15 bp, Homo sapiens
taaatacaaaaattc

SEQ ID NO: 2044264 - DNA, 15 bp, Homo sapiens
aaatacaaaaattca

SEQ ID NO: 2044265 - DNA, 15 bp, Homo sapiens
aatacaaaaattcaa

SEQ ID NO: 2044266 - DNA, 15 bp, Homo sapiens
atacaaaaattcaag

SEQ ID NO: 2044267 - DNA, 15 bp, Homo sapiens
tacaaaaattcaaga

SEQ ID NO: 2044268 - DNA, 15 bp, Homo sapiens
acaaaaattcaagac

SEQ ID NO: 2044269 - DNA, 15 bp, Homo sapiens
caaaaattcaagacg

SEQ ID NO: 2044270 - DNA, 15 bp, Homo sapiens
aaaaattcaagacga

SEQ ID NO: 2044271 - DNA, 15 bp, Homo sapiens
aaaattcaagacgag

SEQ ID NO: 2044272 - DNA, 15 bp, Homo sapiens
aaattcaagacgagt

SEQ ID NO: 2044273 - DNA, 15 bp, Homo sapiens
aattcaagacgagtt

SEQ ID NO: 2044274 - DNA, 15 bp, Homo sapiens
attcaagacgagttg

SEQ ID NO: 2044275 - DNA, 15 bp, Homo sapiens
ttcaagacgagttga

SEQ ID NO: 2044276 - DNA, 15 bp, Homo sapiens
tcaagacgagttgaa

SEQ ID NO: 2044277 - DNA, 15 bp, Homo sapiens
caagacgagttgaat

SEQ ID NO: 2044278 - DNA, 15 bp, Homo sapiens
aagacgagttgaatc

SEQ ID NO: 2044279 - DNA, 15 bp, Homo sapiens
agacgagttgaatct

SEQ ID NO: 2044280 - DNA, 15 bp, Homo sapiens
gacgagttgaatctt

SEQ ID NO: 2044281 - DNA, 15 bp, Homo sapiens
acgagttgaatcttg

SEQ ID NO: 2044282 - DNA, 15 bp, Homo sapiens
cgagttgaatcttgg

SEQ ID NO: 2044283 - DNA, 15 bp, Homo sapiens
gagttgaatcttggc

SEQ ID NO: 2044284 - DNA, 15 bp, Homo sapiens
agttgaatcttggct

SEQ ID NO: 2044285 - DNA, 15 bp, Homo sapiens
gttgaatcttggctt

SEQ ID NO: 2044286 - DNA, 15 bp, Homo sapiens
ttgaatcttggcttg

SEQ ID NO: 2044287 - DNA, 15 bp, Homo sapiens
tgaatcttggcttga

SEQ ID NO: 2044288 - DNA, 15 bp, Homo sapiens
gaatcttggcttgaa

SEQ ID NO: 2044289 - DNA, 15 bp, Homo sapiens
aatcttggcttgaac

SEQ ID NO: 2044290 - DNA, 15 bp, Homo sapiens
atcttggcttgaact

SEQ ID NO: 2044291 - DNA, 15 bp, Homo sapiens
tcttggcttgaactg

SEQ ID NO: 2044292 - DNA, 15 bp, Homo sapiens
cttggcttgaactgc

SEQ ID NO: 2044293 - DNA, 15 bp, Homo sapiens
ttggcttgaactgcg

SEQ ID NO: 2044294 - DNA, 15 bp, Homo sapiens
tggcttgaactgcgt

SEQ ID NO: 2044295 - DNA, 15 bp, Homo sapiens
ggcttgaactgcgtg

SEQ ID NO: 2044296 - DNA, 15 bp, Homo sapiens
gcttgaactgcgtga

SEQ ID NO: 2044297 - DNA, 15 bp, Homo sapiens
cttgaactgcgtgac

SEQ ID NO: 2044298 - DNA, 15 bp, Homo sapiens
ttgaactgcgtgaca

SEQ ID NO: 2044299 - DNA, 15 bp, Homo sapiens
tgaactgcgtgacag

SEQ ID NO: 2044300 - DNA, 15 bp, Homo sapiens
gaactgcgtgacagg

SEQ ID NO: 2044301 - DNA, 15 bp, Homo sapiens
aactgcgtgacagga

SEQ ID NO: 2044302 - DNA, 15 bp, Homo sapiens
actgcgtgacaggaa

SEQ ID NO: 2044303 - DNA, 15 bp, Homo sapiens
ctgcgtgacaggaaa

SEQ ID NO: 2044304 - DNA, 15 bp, Homo sapiens
tgcgtgacaggaaaa

SEQ ID NO: 2044305 - DNA, 15 bp, Homo sapiens
gcgtgacaggaaaat

SEQ ID NO: 2044306 - DNA, 15 bp, Homo sapiens
cgtgacaggaaaata

SEQ ID NO: 2044307 - DNA, 15 bp, Homo sapiens
gtgacaggaaaatag

SEQ ID NO: 2044308 - DNA, 15 bp, Homo sapiens
tgacaggaaaatagg

SEQ ID NO: 2044309 - DNA, 15 bp, Homo sapiens
gacaggaaaataggc

SEQ ID NO: 2044310 - DNA, 15 bp, Homo sapiens
acaggaaaataggca

SEQ ID NO: 2044311 - DNA, 15 bp, Homo sapiens
caggaaaataggcaa

SEQ ID NO: 2044312 - DNA, 15 bp, Homo sapiens
aggaaaataggcaag

SEQ ID NO: 2044313 - DNA, 15 bp, Homo sapiens
ggaaaataggcaagt

SEQ ID NO: 2044314 - DNA, 15 bp, Homo sapiens
gaaaataggcaagtt

SEQ ID NO: 2044315 - DNA, 15 bp, Homo sapiens
aaaataggcaagttt

SEQ ID NO: 2044316 - DNA, 15 bp, Homo sapiens
aaataggcaagtttg

SEQ ID NO: 2044317 - DNA, 15 bp, Homo sapiens
aataggcaagtttgg

SEQ ID NO: 2044318 - DNA, 15 bp, Homo sapiens
ataggcaagtttgga

SEQ ID NO: 2044319 - DNA, 15 bp, Homo sapiens
taggcaagtttggag

SEQ ID NO: 2044320 - DNA, 15 bp, Homo sapiens
aggcaagtttggaga

SEQ ID NO: 2044321 - DNA, 15 bp, Homo sapiens
ggcaagtttggagac

SEQ ID NO: 2044322 - DNA, 15 bp, Homo sapiens
gcaagtttggagacc

SEQ ID NO: 2044323 - DNA, 15 bp, Homo sapiens
caagtttggagacca

SEQ ID NO: 2044324 - DNA, 15 bp, Homo sapiens
aagtttggagaccac

SEQ ID NO: 2044325 - DNA, 15 bp, Homo sapiens
agtttggagaccaca

SEQ ID NO: 2044326 - DNA, 15 bp, Homo sapiens
gtttggagaccacag

SEQ ID NO: 2044327 - DNA, 15 bp, Homo sapiens
tttggagaccacagg

SEQ ID NO: 2044328 - DNA, 15 bp, Homo sapiens
ttggagaccacaggt

SEQ ID NO: 2044329 - DNA, 15 bp, Homo sapiens
tggagaccacaggtg

SEQ ID NO: 2044330 - DNA, 15 bp, Homo sapiens
ggagaccacaggtgt

SEQ ID NO: 2044331 - DNA, 15 bp, Homo sapiens
gagaccacaggtgtt

SEQ ID NO: 2044332 - DNA, 15 bp, Homo sapiens
agaccacaggtgtta

SEQ ID NO: 2044333 - DNA, 15 bp, Homo sapiens
gaccacaggtgttaa

SEQ ID NO: 2044334 - DNA, 15 bp, Homo sapiens
accacaggtgttaac

SEQ ID NO: 2044335 - DNA, 15 bp, Homo sapiens
ccacaggtgttaact

SEQ ID NO: 2044336 - DNA, 15 bp, Homo sapiens
cacaggtgttaactt

SEQ ID NO: 2044337 - DNA, 15 bp, Homo sapiens
acaggtgttaacttc

SEQ ID NO: 2044338 - DNA, 15 bp, Homo sapiens
caggtgttaacttct

SEQ ID NO: 2044339 - DNA, 15 bp, Homo sapiens
aggtgttaacttcta

SEQ ID NO: 2044340 - DNA, 15 bp, Homo sapiens
ggtgttaacttctag

SEQ ID NO: 2044341 - DNA, 15 bp, Homo sapiens
gtgttaacttctagt

SEQ ID NO: 2044342 - DNA, 15 bp, Homo sapiens
tgttaacttctagtg

SEQ ID NO: 2044343 - DNA, 15 bp, Homo sapiens
gttaacttctagtgg

SEQ ID NO: 2044344 - DNA, 15 bp, Homo sapiens
ttaacttctagtggg

SEQ ID NO: 2044345 - DNA, 15 bp, Homo sapiens
taacttctagtgggg

SEQ ID NO: 2044346 - DNA, 15 bp, Homo sapiens
aacttctagtggggc

SEQ ID NO: 2044347 - DNA, 15 bp, Homo sapiens
acttctagtggggct

SEQ ID NO: 2044348 - DNA, 15 bp, Homo sapiens
cttctagtggggctt

SEQ ID NO: 2044349 - DNA, 15 bp, Homo sapiens
ttctagtggggcttg

SEQ ID NO: 2044350 - DNA, 15 bp, Homo sapiens
tctagtggggcttga

SEQ ID NO: 2044351 - DNA, 15 bp, Homo sapiens
ctagtggggcttgac

SEQ ID NO: 2044352 - DNA, 15 bp, Homo sapiens
tagtggggcttgacc

SEQ ID NO: 2044353 - DNA, 15 bp, Homo sapiens
agtggggcttgaccc

SEQ ID NO: 2044354 - DNA, 15 bp, Homo sapiens
gtggggcttgacccg

SEQ ID NO: 2044355 - DNA, 15 bp, Homo sapiens
tggggcttgacccga

SEQ ID NO: 2044356 - DNA, 15 bp, Homo sapiens
ggggcttgacccgac

SEQ ID NO: 2044357 - DNA, 15 bp, Homo sapiens
gggcttgacccgaca

SEQ ID NO: 2044358 - DNA, 15 bp, Homo sapiens
ggcttgacccgacag

SEQ ID NO: 2044359 - DNA, 15 bp, Homo sapiens
gcttgacccgacaga

SEQ ID NO: 2044360 - DNA, 15 bp, Homo sapiens
cttgacccgacagag

SEQ ID NO: 2044361 - DNA, 15 bp, Homo sapiens
ttgacccgacagagg

SEQ ID NO: 2044362 - DNA, 15 bp, Homo sapiens
tgacccgacagagga

SEQ ID NO: 2044363 - DNA, 15 bp, Homo sapiens
gacccgacagaggag

SEQ ID NO: 2044364 - DNA, 15 bp, Homo sapiens
acccgacagaggagc

SEQ ID NO: 2044365 - DNA, 15 bp, Homo sapiens
cccgacagaggagca

SEQ ID NO: 2044366 - DNA, 15 bp, Homo sapiens
ccgacagaggagcag

SEQ ID NO: 2044367 - DNA, 15 bp, Homo sapiens
cgacagaggagcaga

SEQ ID NO: 2044368 - DNA, 15 bp, Homo sapiens
gacagaggagcagat

SEQ ID NO: 2044369 - DNA, 15 bp, Homo sapiens
acagaggagcagatt

SEQ ID NO: 2044370 - DNA, 15 bp, Homo sapiens
cagaggagcagattc

SEQ ID NO: 2044371 - DNA, 15 bp, Homo sapiens
agaggagcagattct

SEQ ID NO: 2044372 - DNA, 15 bp, Homo sapiens
gaggagcagattctt

SEQ ID NO: 2044373 - DNA, 15 bp, Homo sapiens
aggagcagattcttc

SEQ ID NO: 2044374 - DNA, 15 bp, Homo sapiens
ggagcagattcttca

SEQ ID NO: 2044375 - DNA, 15 bp, Homo sapiens
gagcagattcttcaa

SEQ ID NO: 2044376 - DNA, 15 bp, Homo sapiens
agcagattcttcaac

SEQ ID NO: 2044377 - DNA, 15 bp, Homo sapiens
gcagattcttcaaca

SEQ ID NO: 2044378 - DNA, 15 bp, Homo sapiens
cagattcttcaacac

SEQ ID NO: 2044379 - DNA, 15 bp, Homo sapiens
agattcttcaacacc

SEQ ID NO: 2044380 - DNA, 15 bp, Homo sapiens
gattcttcaacacca

SEQ ID NO: 2044381 - DNA, 15 bp, Homo sapiens
attcttcaacaccaa

SEQ ID NO: 2044382 - DNA, 15 bp, Homo sapiens
ttcttcaacaccaaa

SEQ ID NO: 2044383 - DNA, 15 bp, Homo sapiens
tcttcaacaccaaag

SEQ ID NO: 2044384 - DNA, 15 bp, Homo sapiens
cttcaacaccaaagg

SEQ ID NO: 2044385 - DNA, 15 bp, Homo sapiens
ttcaacaccaaaggc

SEQ ID NO: 2044386 - DNA, 15 bp, Homo sapiens
tcaacaccaaaggcc

SEQ ID NO: 2044387 - DNA, 15 bp, Homo sapiens
caacaccaaaggcct

SEQ ID NO: 2044388 - DNA, 15 bp, Homo sapiens
aacaccaaaggccta

SEQ ID NO: 2044389 - DNA, 15 bp, Homo sapiens
acaccaaaggcctaa

SEQ ID NO: 2044390 - DNA, 15 bp, Homo sapiens
caccaaaggcctaag

SEQ ID NO: 2044391 - DNA, 15 bp, Homo sapiens
accaaaggcctaagg

SEQ ID NO: 2044392 - DNA, 15 bp, Homo sapiens
ccaaaggcctaaggg

SEQ ID NO: 2044393 - DNA, 15 bp, Homo sapiens
caaaggcctaagggc

SEQ ID NO: 2044394 - DNA, 15 bp, Homo sapiens
aaaggcctaagggcc

SEQ ID NO: 2044395 - DNA, 15 bp, Homo sapiens
aaggcctaagggccg

SEQ ID NO: 2044396 - DNA, 15 bp, Homo sapiens
aggcctaagggccgg

SEQ ID NO: 2044397 - DNA, 15 bp, Homo sapiens
ggcctaagggccgga

SEQ ID NO: 2044398 - DNA, 15 bp, Homo sapiens
gcctaagggccggac

SEQ ID NO: 2044399 - DNA, 15 bp, Homo sapiens
cctaagggccggact

SEQ ID NO: 2044400 - DNA, 15 bp, Homo sapiens
ctaagggccggactc

SEQ ID NO: 2044401 - DNA, 15 bp, Homo sapiens
taagggccggactct

SEQ ID NO: 2044402 - DNA, 15 bp, Homo sapiens
aagggccggactctc

SEQ ID NO: 2044403 - DNA, 15 bp, Homo sapiens
agggccggactctct

SEQ ID NO: 2044404 - DNA, 15 bp, Homo sapiens
gggccggactctctt

SEQ ID NO: 2044405 - DNA, 15 bp, Homo sapiens
ggccggactctcttc

SEQ ID NO: 2044406 - DNA, 15 bp, Homo sapiens
gccggactctcttcg

SEQ ID NO: 2044407 - DNA, 15 bp, Homo sapiens
ccggactctcttcgc

SEQ ID NO: 2044408 - DNA, 15 bp, Homo sapiens
cggactctcttcgcg

SEQ ID NO: 2044409 - DNA, 15 bp, Homo sapiens
ggactctcttcgcgg

SEQ ID NO: 2044410 - DNA, 15 bp, Homo sapiens
gactctcttcgcgga

SEQ ID NO: 2044411 - DNA, 15 bp, Homo sapiens
actctcttcgcggac

SEQ ID NO: 2044412 - DNA, 15 bp, Homo sapiens
ctctcttcgcggact

SEQ ID NO: 2044413 - DNA, 15 bp, Homo sapiens
tctcttcgcggactc

SEQ ID NO: 2044414 - DNA, 15 bp, Homo sapiens
ctcttcgcggactct

SEQ ID NO: 2044415 - DNA, 15 bp, Homo sapiens
tcttcgcggactctg

SEQ ID NO: 2044416 - DNA, 15 bp, Homo sapiens
cttcgcggactctgg

SEQ ID NO: 2044417 - DNA, 15 bp, Homo sapiens
ttcgcggactctggc

SEQ ID NO: 2044418 - DNA, 15 bp, Homo sapiens
tcgcggactctggcc

SEQ ID NO: 2044419 - DNA, 15 bp, Homo sapiens
cgcggactctggccc

SEQ ID NO: 2044420 - DNA, 15 bp, Homo sapiens
gcggactctggccct

SEQ ID NO: 2044421 - DNA, 15 bp, Homo sapiens
cggactctggccctc

SEQ ID NO: 2044422 - DNA, 15 bp, Homo sapiens
ggactctggccctca

SEQ ID NO: 2044423 - DNA, 15 bp, Homo sapiens
gactctggccctcat

SEQ ID NO: 2044424 - DNA, 15 bp, Homo sapiens
actctggccctcata

SEQ ID NO: 2044425 - DNA, 15 bp, Homo sapiens
ctctggccctcatag

SEQ ID NO: 2044426 - DNA, 15 bp, Homo sapiens
tctggccctcataga

SEQ ID NO: 2044427 - DNA, 15 bp, Homo sapiens
ctggccctcatagac

SEQ ID NO: 2044428 - DNA, 15 bp, Homo sapiens
tggccctcatagacg

SEQ ID NO: 2044429 - DNA, 15 bp, Homo sapiens
ggccctcatagacgc

SEQ ID NO: 2044430 - DNA, 15 bp, Homo sapiens
gccctcatagacgcg

SEQ ID NO: 2044431 - DNA, 15 bp, Homo sapiens
ccctcatagacgcgc

SEQ ID NO: 2044432 - DNA, 15 bp, Homo sapiens
cctcatagacgcgcc

SEQ ID NO: 2044433 - DNA, 15 bp, Homo sapiens
ctcatagacgcgccc

SEQ ID NO: 2044434 - DNA, 15 bp, Homo sapiens
tcatagacgcgccct

SEQ ID NO: 2044435 - DNA, 15 bp, Homo sapiens
catagacgcgccctc

SEQ ID NO: 2044436 - DNA, 15 bp, Homo sapiens
atagacgcgccctcg

SEQ ID NO: 2044437 - DNA, 15 bp, Homo sapiens
tagacgcgccctcgc

SEQ ID NO: 2044438 - DNA, 15 bp, Homo sapiens
agacgcgccctcgcc

SEQ ID NO: 2044439 - DNA, 15 bp, Homo sapiens
gacgcgccctcgcct

SEQ ID NO: 2044440 - DNA, 15 bp, Homo sapiens
acgcgccctcgcctc

SEQ ID NO: 2044441 - DNA, 15 bp, Homo sapiens
cgcgccctcgcctcc

SEQ ID NO: 2044442 - DNA, 15 bp, Homo sapiens
gcgccctcgcctccc

SEQ ID NO: 2044443 - DNA, 15 bp, Homo sapiens
cgccctcgcctccca

SEQ ID NO: 2044444 - DNA, 15 bp, Homo sapiens
gccctcgcctcccat

SEQ ID NO: 2044445 - DNA, 15 bp, Homo sapiens
ccctcgcctcccata

SEQ ID NO: 2044446 - DNA, 15 bp, Homo sapiens
cctcgcctcccatac

SEQ ID NO: 2044447 - DNA, 15 bp, Homo sapiens
ctcgcctcccatacc

SEQ ID NO: 2044448 - DNA, 15 bp, Homo sapiens
tcgcctcccataccc

SEQ ID NO: 2044449 - DNA, 15 bp, Homo sapiens
cgcctcccataccct

SEQ ID NO: 2044450 - DNA, 15 bp, Homo sapiens
gcctcccataccctc

SEQ ID NO: 2044451 - DNA, 15 bp, Homo sapiens
cctcccataccctcc

SEQ ID NO: 2044452 - DNA, 15 bp, Homo sapiens
ctcccataccctccg

SEQ ID NO: 2044453 - DNA, 15 bp, Homo sapiens
tcccataccctccgt

SEQ ID NO: 2044454 - DNA, 15 bp, Homo sapiens
cccataccctccgta

SEQ ID NO: 2044455 - DNA, 15 bp, Homo sapiens
ccataccctccgtag

SEQ ID NO: 2044456 - DNA, 15 bp, Homo sapiens
cataccctccgtaga

SEQ ID NO: 2044457 - DNA, 15 bp, Homo sapiens
ataccctccgtagag

SEQ ID NO: 2044458 - DNA, 15 bp, Homo sapiens
taccctccgtagagc

SEQ ID NO: 2044459 - DNA, 15 bp, Homo sapiens
accctccgtagagca

SEQ ID NO: 2044460 - DNA, 15 bp, Homo sapiens
ccctccgtagagcat

SEQ ID NO: 2044461 - DNA, 15 bp, Homo sapiens
cctccgtagagcatg

SEQ ID NO: 2044462 - DNA, 15 bp, Homo sapiens
ctccgtagagcatgc

SEQ ID NO: 2044463 - DNA, 15 bp, Homo sapiens
tccgtagagcatgcc

SEQ ID NO: 2044464 - DNA, 15 bp, Homo sapiens
ccgtagagcatgcct

SEQ ID NO: 2044465 - DNA, 15 bp, Homo sapiens
cgtagagcatgcctg

SEQ ID NO: 2044466 - DNA, 15 bp, Homo sapiens
gtagagcatgcctgt

SEQ ID NO: 2044467 - DNA, 15 bp, Homo sapiens
tagagcatgcctgtg

SEQ ID NO: 2044468 - DNA, 15 bp, Homo sapiens
agagcatgcctgtga

SEQ ID NO: 2044469 - DNA, 15 bp, Homo sapiens
gagcatgcctgtgag

SEQ ID NO: 2044470 - DNA, 15 bp, Homo sapiens
agcatgcctgtgagg

SEQ ID NO: 2044471 - DNA, 15 bp, Homo sapiens
gcatgcctgtgaggg

SEQ ID NO: 2044472 - DNA, 15 bp, Homo sapiens
catgcctgtgaggga

SEQ ID NO: 2044473 - DNA, 15 bp, Homo sapiens
atgcctgtgagggaa

SEQ ID NO: 2044474 - DNA, 15 bp, Homo sapiens
tgcctgtgagggaaa

SEQ ID NO: 2044475 - DNA, 15 bp, Homo sapiens
gcctgtgagggaaag

SEQ ID NO: 2044476 - DNA, 15 bp, Homo sapiens
cctgtgagggaaagg

SEQ ID NO: 2044477 - DNA, 15 bp, Homo sapiens
ctgtgagggaaaggg

SEQ ID NO: 2044478 - DNA, 15 bp, Homo sapiens
tgtgagggaaaggga

SEQ ID NO: 2044479 - DNA, 15 bp, Homo sapiens
gtgagggaaagggag

SEQ ID NO: 2044480 - DNA, 15 bp, Homo sapiens
tgagggaaagggaga

SEQ ID NO: 2044481 - DNA, 15 bp, Homo sapiens
gagggaaagggagaa

SEQ ID NO: 2044482 - DNA, 15 bp, Homo sapiens
agggaaagggagaag

SEQ ID NO: 2044483 - DNA, 15 bp, Homo sapiens
gggaaagggagaagc

SEQ ID NO: 2044484 - DNA, 15 bp, Homo sapiens
ggaaagggagaagca

SEQ ID NO: 2044485 - DNA, 15 bp, Homo sapiens
gaaagggagaagcag

SEQ ID NO: 2044486 - DNA, 15 bp, Homo sapiens
aaagggagaagcaga

SEQ ID NO: 2044487 - DNA, 15 bp, Homo sapiens
aagggagaagcagaa

SEQ ID NO: 2044488 - DNA, 15 bp, Homo sapiens
agggagaagcagaag

SEQ ID NO: 2044489 - DNA, 15 bp, Homo sapiens
gggagaagcagaagc

SEQ ID NO: 2044490 - DNA, 15 bp, Homo sapiens
ggagaagcagaagcc

SEQ ID NO: 2044491 - DNA, 15 bp, Homo sapiens
gagaagcagaagccg

SEQ ID NO: 2044492 - DNA, 15 bp, Homo sapiens
agaagcagaagccgc

SEQ ID NO: 2044493 - DNA, 15 bp, Homo sapiens
gaagcagaagccgcg

SEQ ID NO: 2044494 - DNA, 15 bp, Homo sapiens
aagcagaagccgcgc

SEQ ID NO: 2044495 - DNA, 15 bp, Homo sapiens
agcagaagccgcgct

SEQ ID NO: 2044496 - DNA, 15 bp, Homo sapiens
gcagaagccgcgctc

SEQ ID NO: 2044497 - DNA, 15 bp, Homo sapiens
cagaagccgcgctcg

SEQ ID NO: 2044498 - DNA, 15 bp, Homo sapiens
agaagccgcgctcgg

SEQ ID NO: 2044499 - DNA, 15 bp, Homo sapiens
gaagccgcgctcgga

SEQ ID NO: 2044500 - DNA, 15 bp, Homo sapiens
aagccgcgctcggat

SEQ ID NO: 2044501 - DNA, 15 bp, Homo sapiens
agccgcgctcggatg

SEQ ID NO: 2044502 - DNA, 15 bp, Homo sapiens
gccgcgctcggatga

SEQ ID NO: 2044503 - DNA, 15 bp, Homo sapiens
ccgcgctcggatgac

SEQ ID NO: 2044504 - DNA, 15 bp, Homo sapiens
cgcgctcggatgact

SEQ ID NO: 2044505 - DNA, 15 bp, Homo sapiens
gcgctcggatgactt

SEQ ID NO: 2044506 - DNA, 15 bp, Homo sapiens
cgctcggatgacttg

SEQ ID NO: 2044507 - DNA, 15 bp, Homo sapiens
gctcggatgacttgg

SEQ ID NO: 2044508 - DNA, 15 bp, Homo sapiens
ctcggatgacttggc

SEQ ID NO: 2044509 - DNA, 15 bp, Homo sapiens
tcggatgacttggcg

SEQ ID NO: 2044510 - DNA, 15 bp, Homo sapiens
cggatgacttggcgc

SEQ ID NO: 2044511 - DNA, 15 bp, Homo sapiens
ggatgacttggcgcc

SEQ ID NO: 2044512 - DNA, 15 bp, Homo sapiens
gatgacttggcgccc

SEQ ID NO: 2044513 - DNA, 15 bp, Homo sapiens
atgacttggcgcccc

SEQ ID NO: 2044514 - DNA, 15 bp, Homo sapiens
tgacttggcgcccca

SEQ ID NO: 2044515 - DNA, 15 bp, Homo sapiens
gacttggcgccccac

SEQ ID NO: 2044516 - DNA, 15 bp, Homo sapiens
acttggcgccccacc

SEQ ID NO: 2044517 - DNA, 15 bp, Homo sapiens
cttggcgccccaccc

SEQ ID NO: 2044518 - DNA, 15 bp, Homo sapiens
ttggcgccccacccc

SEQ ID NO: 2044519 - DNA, 15 bp, Homo sapiens
tggcgccccaccccc

SEQ ID NO: 2044520 - DNA, 15 bp, Homo sapiens
ggcgccccacccccc

SEQ ID NO: 2044521 - DNA, 15 bp, Homo sapiens
gcgccccacccccca

SEQ ID NO: 2044522 - DNA, 15 bp, Homo sapiens
cgccccaccccccag

SEQ ID NO: 2044523 - DNA, 15 bp, Homo sapiens
gccccaccccccagc

SEQ ID NO: 2044524 - DNA, 15 bp, Homo sapiens
ccccaccccccagcc

SEQ ID NO: 2044525 - DNA, 15 bp, Homo sapiens
cccaccccccagcct

SEQ ID NO: 2044526 - DNA, 15 bp, Homo sapiens
ccaccccccagcctg

SEQ ID NO: 2044527 - DNA, 15 bp, Homo sapiens
caccccccagcctgc

SEQ ID NO: 2044528 - DNA, 15 bp, Homo sapiens
accccccagcctgcc

SEQ ID NO: 2044529 - DNA, 15 bp, Homo sapiens
ccccccagcctgccc

SEQ ID NO: 2044530 - DNA, 15 bp, Homo sapiens
cccccagcctgccca

SEQ ID NO: 2044531 - DNA, 15 bp, Homo sapiens
ccccagcctgcccac

SEQ ID NO: 2044532 - DNA, 15 bp, Homo sapiens
cccagcctgcccaca

SEQ ID NO: 2044533 - DNA, 15 bp, Homo sapiens
ccagcctgcccacag

SEQ ID NO: 2044534 - DNA, 15 bp, Homo sapiens
cagcctgcccacagg

SEQ ID NO: 2044535 - DNA, 15 bp, Homo sapiens
agcctgcccacaggc

SEQ ID NO: 2044536 - DNA, 15 bp, Homo sapiens
gcctgcccacaggcc

SEQ ID NO: 2044537 - DNA, 15 bp, Homo sapiens
cctgcccacaggcca

SEQ ID NO: 2044538 - DNA, 15 bp, Homo sapiens
ctgcccacaggccac

SEQ ID NO: 2044539 - DNA, 15 bp, Homo sapiens
tgcccacaggccacg

SEQ ID NO: 2044540 - DNA, 15 bp, Homo sapiens
gcccacaggccacga

SEQ ID NO: 2044541 - DNA, 15 bp, Homo sapiens
cccacaggccacgaa

SEQ ID NO: 2044542 - DNA, 15 bp, Homo sapiens
ccacaggccacgaat

SEQ ID NO: 2044543 - DNA, 15 bp, Homo sapiens
cacaggccacgaatt

SEQ ID NO: 2044544 - DNA, 15 bp, Homo sapiens
acaggccacgaattg

SEQ ID NO: 2044545 - DNA, 15 bp, Homo sapiens
caggccacgaattga

SEQ ID NO: 2044546 - DNA, 15 bp, Homo sapiens
aggccacgaattgag

SEQ ID NO: 2044547 - DNA, 15 bp, Homo sapiens
ggccacgaattgaga

SEQ ID NO: 2044548 - DNA, 15 bp, Homo sapiens
gccacgaattgagaa

SEQ ID NO: 2044549 - DNA, 15 bp, Homo sapiens
ccacgaattgagaaa

SEQ ID NO: 2044550 - DNA, 15 bp, Homo sapiens
cacgaattgagaaaa

SEQ ID NO: 2044551 - DNA, 15 bp, Homo sapiens
acgaattgagaaaag

SEQ ID NO: 2044552 - DNA, 15 bp, Homo sapiens
cgaattgagaaaagc

SEQ ID NO: 2044553 - DNA, 15 bp, Homo sapiens
gaattgagaaaagct

SEQ ID NO: 2044554 - DNA, 15 bp, Homo sapiens
aattgagaaaagctt

SEQ ID NO: 2044555 - DNA, 15 bp, Homo sapiens
attgagaaaagcttt

SEQ ID NO: 2044556 - DNA, 15 bp, Homo sapiens
ttgagaaaagctttc

SEQ ID NO: 2044557 - DNA, 15 bp, Homo sapiens
gagaaaagctttccc

SEQ ID NO: 2044558 - DNA, 15 bp, Homo sapiens
agaaaagctttccca

SEQ ID NO: 2044559 - DNA, 15 bp, Homo sapiens
gaaaagctttcccaa

SEQ ID NO: 2044560 - DNA, 15 bp, Homo sapiens
aaaagctttcccaaa

SEQ ID NO: 2044561 - DNA, 15 bp, Homo sapiens
aaagctttcccaaaa

SEQ ID NO: 2044562 - DNA, 15 bp, Homo sapiens
aagctttcccaaaag

SEQ ID NO: 2044563 - DNA, 15 bp, Homo sapiens
agctttcccaaaagg

SEQ ID NO: 2044564 - DNA, 15 bp, Homo sapiens
gctttcccaaaagga

SEQ ID NO: 2044565 - DNA, 15 bp, Homo sapiens
ctttcccaaaaggaa

SEQ ID NO: 2044566 - DNA, 15 bp, Homo sapiens
tttcccaaaaggaaa

SEQ ID NO: 2044567 - DNA, 15 bp, Homo sapiens
ttcccaaaaggaaag

SEQ ID NO: 2044568 - DNA, 15 bp, Homo sapiens
tcccaaaaggaaagt

SEQ ID NO: 2044569 - DNA, 15 bp, Homo sapiens
cccaaaaggaaagtc

SEQ ID NO: 2044570 - DNA, 15 bp, Homo sapiens
ccaaaaggaaagtcc

SEQ ID NO: 2044571 - DNA, 15 bp, Homo sapiens
caaaaggaaagtcct

SEQ ID NO: 2044572 - DNA, 15 bp, Homo sapiens
aaaaggaaagtcctc

SEQ ID NO: 2044573 - DNA, 15 bp, Homo sapiens
aaaggaaagtcctct

SEQ ID NO: 2044574 - DNA, 15 bp, Homo sapiens
aaggaaagtcctctc

SEQ ID NO: 2044575 - DNA, 15 bp, Homo sapiens
aggaaagtcctctca

SEQ ID NO: 2044576 - DNA, 15 bp, Homo sapiens
ggaaagtcctctcaa

SEQ ID NO: 2044577 - DNA, 15 bp, Homo sapiens
gaaagtcctctcaaa

SEQ ID NO: 2044578 - DNA, 15 bp, Homo sapiens
aagtcctctcaaagg

SEQ ID NO: 2044579 - DNA, 15 bp, Homo sapiens
agtcctctcaaaggc

SEQ ID NO: 2044580 - DNA, 15 bp, Homo sapiens
gtcctctcaaaggcc

SEQ ID NO: 2044581 - DNA, 15 bp, Homo sapiens
tcctctcaaaggccc

SEQ ID NO: 2044582 - DNA, 15 bp, Homo sapiens
cctctcaaaggccct

SEQ ID NO: 2044583 - DNA, 15 bp, Homo sapiens
ctctcaaaggcccta

SEQ ID NO: 2044584 - DNA, 15 bp, Homo sapiens
tctcaaaggccctag

SEQ ID NO: 2044585 - DNA, 15 bp, Homo sapiens
ctcaaaggccctaga

SEQ ID NO: 2044586 - DNA, 15 bp, Homo sapiens
tcaaaggccctagac

SEQ ID NO: 2044587 - DNA, 15 bp, Homo sapiens
caaaggccctagacg

SEQ ID NO: 2044588 - DNA, 15 bp, Homo sapiens
aaaggccctagacgg

SEQ ID NO: 2044589 - DNA, 15 bp, Homo sapiens
aaggccctagacggt

SEQ ID NO: 2044590 - DNA, 15 bp, Homo sapiens
aggccctagacggtc

SEQ ID NO: 2044591 - DNA, 15 bp, Homo sapiens
ggccctagacggtca

SEQ ID NO: 2044592 - DNA, 15 bp, Homo sapiens
gccctagacggtcaa

SEQ ID NO: 2044593 - DNA, 15 bp, Homo sapiens
ccctagacggtcaaa

SEQ ID NO: 2044594 - DNA, 15 bp, Homo sapiens
cctagacggtcaaat

SEQ ID NO: 2044595 - DNA, 15 bp, Homo sapiens
ctagacggtcaaatc

SEQ ID NO: 2044596 - DNA, 15 bp, Homo sapiens
tagacggtcaaatcg

SEQ ID NO: 2044597 - DNA, 15 bp, Homo sapiens
agacggtcaaatcgg

SEQ ID NO: 2044598 - DNA, 15 bp, Homo sapiens
gacggtcaaatcggg

SEQ ID NO: 2044599 - DNA, 15 bp, Homo sapiens
acggtcaaatcggga

SEQ ID NO: 2044600 - DNA, 15 bp, Homo sapiens
cggtcaaatcgggaa

SEQ ID NO: 2044601 - DNA, 15 bp, Homo sapiens
ggtcaaatcgggaaa

SEQ ID NO: 2044602 - DNA, 15 bp, Homo sapiens
gtcaaatcgggaaag

SEQ ID NO: 2044603 - DNA, 15 bp, Homo sapiens
tcaaatcgggaaagg

SEQ ID NO: 2044604 - DNA, 15 bp, Homo sapiens
caaatcgggaaaggg

SEQ ID NO: 2044605 - DNA, 15 bp, Homo sapiens
aaatcgggaaaggga

SEQ ID NO: 2044606 - DNA, 15 bp, Homo sapiens
aatcgggaaagggag

SEQ ID NO: 2044607 - DNA, 15 bp, Homo sapiens
atcgggaaagggagc

SEQ ID NO: 2044608 - DNA, 15 bp, Homo sapiens
tcgggaaagggagca

SEQ ID NO: 2044609 - DNA, 15 bp, Homo sapiens
cgggaaagggagcag

SEQ ID NO: 2044610 - DNA, 15 bp, Homo sapiens
gggaaagggagcagt

SEQ ID NO: 2044611 - DNA, 15 bp, Homo sapiens
ggaaagggagcagta

SEQ ID NO: 2044612 - DNA, 15 bp, Homo sapiens
gaaagggagcagtag

SEQ ID NO: 2044613 - DNA, 15 bp, Homo sapiens
aaagggagcagtaga

SEQ ID NO: 2044614 - DNA, 15 bp, Homo sapiens
aagggagcagtagag

SEQ ID NO: 2044615 - DNA, 15 bp, Homo sapiens
agggagcagtagagg

SEQ ID NO: 2044616 - DNA, 15 bp, Homo sapiens
gggagcagtagaggg

SEQ ID NO: 2044617 - DNA, 15 bp, Homo sapiens
ggagcagtagaggga

SEQ ID NO: 2044618 - DNA, 15 bp, Homo sapiens
gagcagtagagggat

SEQ ID NO: 2044619 - DNA, 15 bp, Homo sapiens
agcagtagagggatc

SEQ ID NO: 2044620 - DNA, 15 bp, Homo sapiens
gcagtagagggatcc

SEQ ID NO: 2044621 - DNA, 15 bp, Homo sapiens
cagtagagggatcct

SEQ ID NO: 2044622 - DNA, 15 bp, Homo sapiens
agtagagggatcctt

SEQ ID NO: 2044623 - DNA, 15 bp, Homo sapiens
gtagagggatccttc

SEQ ID NO: 2044624 - DNA, 15 bp, Homo sapiens
tagagggatccttcc

SEQ ID NO: 2044625 - DNA, 15 bp, Homo sapiens
agagggatccttcct

SEQ ID NO: 2044626 - DNA, 15 bp, Homo sapiens
gagggatccttcctc

SEQ ID NO: 2044627 - DNA, 15 bp, Homo sapiens
agggatccttcctcc

SEQ ID NO: 2044628 - DNA, 15 bp, Homo sapiens
gggatccttcctccc

SEQ ID NO: 2044629 - DNA, 15 bp, Homo sapiens
ggatccttcctcccg

SEQ ID NO: 2044630 - DNA, 15 bp, Homo sapiens
gatccttcctcccgc

SEQ ID NO: 2044631 - DNA, 15 bp, Homo sapiens
atccttcctcccgct

SEQ ID NO: 2044632 - DNA, 15 bp, Homo sapiens
tccttcctcccgctg

SEQ ID NO: 2044633 - DNA, 15 bp, Homo sapiens
ccttcctcccgctgc

SEQ ID NO: 2044634 - DNA, 15 bp, Homo sapiens
cttcctcccgctgcg

SEQ ID NO: 2044635 - DNA, 15 bp, Homo sapiens
ttcctcccgctgcgt

SEQ ID NO: 2044636 - DNA, 15 bp, Homo sapiens
tcctcccgctgcgtc

SEQ ID NO: 2044637 - DNA, 15 bp, Homo sapiens
cctcccgctgcgtct

SEQ ID NO: 2044638 - DNA, 15 bp, Homo sapiens
ctcccgctgcgtctg

SEQ ID NO: 2044639 - DNA, 15 bp, Homo sapiens
tcccgctgcgtctgt

SEQ ID NO: 2044640 - DNA, 15 bp, Homo sapiens
cccgctgcgtctgtg

SEQ ID NO: 2044641 - DNA, 15 bp, Homo sapiens
ccgctgcgtctgtga

SEQ ID NO: 2044642 - DNA, 15 bp, Homo sapiens
cgctgcgtctgtgaa

SEQ ID NO: 2044643 - DNA, 15 bp, Homo sapiens
gctgcgtctgtgaaa

SEQ ID NO: 2044644 - DNA, 15 bp, Homo sapiens
ctgcgtctgtgaaag

SEQ ID NO: 2044645 - DNA, 15 bp, Homo sapiens
tgcgtctgtgaaagc

SEQ ID NO: 2044646 - DNA, 15 bp, Homo sapiens
gcgtctgtgaaagcc

SEQ ID NO: 2044647 - DNA, 15 bp, Homo sapiens
cgtctgtgaaagccg

SEQ ID NO: 2044648 - DNA, 15 bp, Homo sapiens
gtctgtgaaagccgc

SEQ ID NO: 2044649 - DNA, 15 bp, Homo sapiens
tctgtgaaagccgcc

SEQ ID NO: 2044650 - DNA, 15 bp, Homo sapiens
ctgtgaaagccgcct

SEQ ID NO: 2044651 - DNA, 15 bp, Homo sapiens
tgtgaaagccgcctg

SEQ ID NO: 2044652 - DNA, 15 bp, Homo sapiens
gtgaaagccgcctgt

SEQ ID NO: 2044653 - DNA, 15 bp, Homo sapiens
tgaaagccgcctgtc

SEQ ID NO: 2044654 - DNA, 15 bp, Homo sapiens
gaaagccgcctgtct

SEQ ID NO: 2044655 - DNA, 15 bp, Homo sapiens
aaagccgcctgtctg

SEQ ID NO: 2044656 - DNA, 15 bp, Homo sapiens
aagccgcctgtctgc

SEQ ID NO: 2044657 - DNA, 15 bp, Homo sapiens
agccgcctgtctgca

SEQ ID NO: 2044658 - DNA, 15 bp, Homo sapiens
gccgcctgtctgcac

SEQ ID NO: 2044659 - DNA, 15 bp, Homo sapiens
ccgcctgtctgcacg

SEQ ID NO: 2044660 - DNA, 15 bp, Homo sapiens
cgcctgtctgcacgc

SEQ ID NO: 2044661 - DNA, 15 bp, Homo sapiens
gcctgtctgcacgcc

SEQ ID NO: 2044662 - DNA, 15 bp, Homo sapiens
cctgtctgcacgccc

SEQ ID NO: 2044663 - DNA, 15 bp, Homo sapiens
ctgtctgcacgcccc

SEQ ID NO: 2044664 - DNA, 15 bp, Homo sapiens
tgtctgcacgccccg

SEQ ID NO: 2044665 - DNA, 15 bp, Homo sapiens
gtctgcacgccccgg

SEQ ID NO: 2044666 - DNA, 15 bp, Homo sapiens
tctgcacgccccggg

SEQ ID NO: 2044667 - DNA, 15 bp, Homo sapiens
ctgcacgccccgggc

SEQ ID NO: 2044668 - DNA, 15 bp, Homo sapiens
tgcacgccccgggct

SEQ ID NO: 2044669 - DNA, 15 bp, Homo sapiens
gcacgccccgggctc

SEQ ID NO: 2044670 - DNA, 15 bp, Homo sapiens
cacgccccgggctcc

SEQ ID NO: 2044671 - DNA, 15 bp, Homo sapiens
acgccccgggctccc

SEQ ID NO: 2044672 - DNA, 15 bp, Homo sapiens
cgccccgggctcccg

SEQ ID NO: 2044673 - DNA, 15 bp, Homo sapiens
gccccgggctcccgc

SEQ ID NO: 2044674 - DNA, 15 bp, Homo sapiens
ccccgggctcccgcg

SEQ ID NO: 2044675 - DNA, 15 bp, Homo sapiens
cccgggctcccgcgg

SEQ ID NO: 2044676 - DNA, 15 bp, Homo sapiens
ccgggctcccgcggt

SEQ ID NO: 2044677 - DNA, 15 bp, Homo sapiens
cgggctcccgcggtc

SEQ ID NO: 2044678 - DNA, 15 bp, Homo sapiens
gggctcccgcggtcc

SEQ ID NO: 2044679 - DNA, 15 bp, Homo sapiens
ggctcccgcggtccc

SEQ ID NO: 2044680 - DNA, 15 bp, Homo sapiens
gctcccgcggtccct

SEQ ID NO: 2044681 - DNA, 15 bp, Homo sapiens
ctcccgcggtccctc

SEQ ID NO: 2044682 - DNA, 15 bp, Homo sapiens
tcccgcggtccctcc

SEQ ID NO: 2044683 - DNA, 15 bp, Homo sapiens
cccgcggtccctccc

SEQ ID NO: 2044684 - DNA, 15 bp, Homo sapiens
ccgcggtccctcccg

SEQ ID NO: 2044685 - DNA, 15 bp, Homo sapiens
cgcggtccctcccga

SEQ ID NO: 2044686 - DNA, 15 bp, Homo sapiens
gcggtccctcccgag

SEQ ID NO: 2044687 - DNA, 15 bp, Homo sapiens
cggtccctcccgagg

SEQ ID NO: 2044688 - DNA, 15 bp, Homo sapiens
ggtccctcccgagga

SEQ ID NO: 2044689 - DNA, 15 bp, Homo sapiens
gtccctcccgaggat

SEQ ID NO: 2044690 - DNA, 15 bp, Homo sapiens
tccctcccgaggatt

SEQ ID NO: 2044691 - DNA, 15 bp, Homo sapiens
ccctcccgaggattt

SEQ ID NO: 2044692 - DNA, 15 bp, Homo sapiens
cctcccgaggatttc

SEQ ID NO: 2044693 - DNA, 15 bp, Homo sapiens
ctcccgaggatttcg

SEQ ID NO: 2044694 - DNA, 15 bp, Homo sapiens
tcccgaggatttcgg

SEQ ID NO: 2044695 - DNA, 15 bp, Homo sapiens
cccgaggatttcggt

SEQ ID NO: 2044696 - DNA, 15 bp, Homo sapiens
ccgaggatttcggtt

SEQ ID NO: 2044697 - DNA, 15 bp, Homo sapiens
cgaggatttcggttc

SEQ ID NO: 2044698 - DNA, 15 bp, Homo sapiens
gaggatttcggttct

SEQ ID NO: 2044699 - DNA, 15 bp, Homo sapiens
aggatttcggttctg

SEQ ID NO: 2044700 - DNA, 15 bp, Homo sapiens
ggatttcggttctgg

SEQ ID NO: 2044701 - DNA, 15 bp, Homo sapiens
gatttcggttctggt

SEQ ID NO: 2044702 - DNA, 15 bp, Homo sapiens
atttcggttctggtg

SEQ ID NO: 2044703 - DNA, 15 bp, Homo sapiens
tttcggttctggtgc

SEQ ID NO: 2044704 - DNA, 15 bp, Homo sapiens
ttcggttctggtgcc

SEQ ID NO: 2044705 - DNA, 15 bp, Homo sapiens
tcggttctggtgcct

SEQ ID NO: 2044706 - DNA, 15 bp, Homo sapiens
cggttctggtgcctg

SEQ ID NO: 2044707 - DNA, 15 bp, Homo sapiens
ggttctggtgcctga

SEQ ID NO: 2044708 - DNA, 15 bp, Homo sapiens
gttctggtgcctgag

SEQ ID NO: 2044709 - DNA, 15 bp, Homo sapiens
ttctggtgcctgaga

SEQ ID NO: 2044710 - DNA, 15 bp, Homo sapiens
tctggtgcctgagaa

SEQ ID NO: 2044711 - DNA, 15 bp, Homo sapiens
ctggtgcctgagaaa

SEQ ID NO: 2044712 - DNA, 15 bp, Homo sapiens
tggtgcctgagaaag

SEQ ID NO: 2044713 - DNA, 15 bp, Homo sapiens
ggtgcctgagaaagc

SEQ ID NO: 2044714 - DNA, 15 bp, Homo sapiens
gtgcctgagaaagca

SEQ ID NO: 2044715 - DNA, 15 bp, Homo sapiens
tgcctgagaaagcag

SEQ ID NO: 2044716 - DNA, 15 bp, Homo sapiens
gcctgagaaagcagc

SEQ ID NO: 2044717 - DNA, 15 bp, Homo sapiens
cctgagaaagcagcg

SEQ ID NO: 2044718 - DNA, 15 bp, Homo sapiens
ctgagaaagcagcgc

SEQ ID NO: 2044719 - DNA, 15 bp, Homo sapiens
tgagaaagcagcgca

SEQ ID NO: 2044720 - DNA, 15 bp, Homo sapiens
gagaaagcagcgcag

SEQ ID NO: 2044721 - DNA, 15 bp, Homo sapiens
agaaagcagcgcaga

SEQ ID NO: 2044722 - DNA, 15 bp, Homo sapiens
gaaagcagcgcagag

SEQ ID NO: 2044723 - DNA, 15 bp, Homo sapiens
aaagcagcgcagagg

SEQ ID NO: 2044724 - DNA, 15 bp, Homo sapiens
aagcagcgcagaggg

SEQ ID NO: 2044725 - DNA, 15 bp, Homo sapiens
agcagcgcagagggg

SEQ ID NO: 2044726 - DNA, 15 bp, Homo sapiens
gcagcgcagaggggg

SEQ ID NO: 2044727 - DNA, 15 bp, Homo sapiens
cagcgcagagggggc

SEQ ID NO: 2044728 - DNA, 15 bp, Homo sapiens
agcgcagagggggcc

SEQ ID NO: 2044729 - DNA, 15 bp, Homo sapiens
gcgcagagggggccc

SEQ ID NO: 2044730 - DNA, 15 bp, Homo sapiens
cgcagagggggccct

SEQ ID NO: 2044731 - DNA, 15 bp, Homo sapiens
gcagagggggccctg

SEQ ID NO: 2044732 - DNA, 15 bp, Homo sapiens
cagagggggccctgc

SEQ ID NO: 2044733 - DNA, 15 bp, Homo sapiens
agagggggccctgcg

SEQ ID NO: 2044734 - DNA, 15 bp, Homo sapiens
gagggggccctgcga

SEQ ID NO: 2044735 - DNA, 15 bp, Homo sapiens
agggggccctgcgag

SEQ ID NO: 2044736 - DNA, 15 bp, Homo sapiens
gggggccctgcgaga

SEQ ID NO: 2044737 - DNA, 15 bp, Homo sapiens
ggggccctgcgagac

SEQ ID NO: 2044738 - DNA, 15 bp, Homo sapiens
gggccctgcgagacc

SEQ ID NO: 2044739 - DNA, 15 bp, Homo sapiens
ggccctgcgagaccc

SEQ ID NO: 2044740 - DNA, 15 bp, Homo sapiens
gccctgcgagacccc

SEQ ID NO: 2044741 - DNA, 15 bp, Homo sapiens
ccctgcgagacccct

SEQ ID NO: 2044742 - DNA, 15 bp, Homo sapiens
cctgcgagacccctc

SEQ ID NO: 2044743 - DNA, 15 bp, Homo sapiens
ctgcgagacccctcc

SEQ ID NO: 2044744 - DNA, 15 bp, Homo sapiens
tgcgagacccctcca

SEQ ID NO: 2044745 - DNA, 15 bp, Homo sapiens
gcgagacccctccag

SEQ ID NO: 2044746 - DNA, 15 bp, Homo sapiens
cgagacccctccaga

SEQ ID NO: 2044747 - DNA, 15 bp, Homo sapiens
gagacccctccagag

SEQ ID NO: 2044748 - DNA, 15 bp, Homo sapiens
agacccctccagaga

SEQ ID NO: 2044749 - DNA, 15 bp, Homo sapiens
gacccctccagagaa

SEQ ID NO: 2044750 - DNA, 15 bp, Homo sapiens
acccctccagagaaa

SEQ ID NO: 2044751 - DNA, 15 bp, Homo sapiens
cccctccagagaaat

SEQ ID NO: 2044752 - DNA, 15 bp, Homo sapiens
ccctccagagaaatc

SEQ ID NO: 2044753 - DNA, 15 bp, Homo sapiens
cctccagagaaatca

SEQ ID NO: 2044754 - DNA, 15 bp, Homo sapiens
ctccagagaaatcat

SEQ ID NO: 2044755 - DNA, 15 bp, Homo sapiens
tccagagaaatcatc

SEQ ID NO: 2044756 - DNA, 15 bp, Homo sapiens
ccagagaaatcatcc

SEQ ID NO: 2044757 - DNA, 15 bp, Homo sapiens
cagagaaatcatccc

SEQ ID NO: 2044758 - DNA, 15 bp, Homo sapiens
agagaaatcatcccc

SEQ ID NO: 2044759 - DNA, 15 bp, Homo sapiens
gagaaatcatccccc

SEQ ID NO: 2044760 - DNA, 15 bp, Homo sapiens
agaaatcatcccccg

SEQ ID NO: 2044761 - DNA, 15 bp, Homo sapiens
gaaatcatcccccgg

SEQ ID NO: 2044762 - DNA, 15 bp, Homo sapiens
aaatcatcccccgga

SEQ ID NO: 2044763 - DNA, 15 bp, Homo sapiens
aatcatcccccggag

SEQ ID NO: 2044764 - DNA, 15 bp, Homo sapiens
atcatcccccggagg

SEQ ID NO: 2044765 - DNA, 15 bp, Homo sapiens
tcatcccccggaggc

SEQ ID NO: 2044766 - DNA, 15 bp, Homo sapiens
catcccccggaggca

SEQ ID NO: 2044767 - DNA, 15 bp, Homo sapiens
atcccccggaggcat

SEQ ID NO: 2044768 - DNA, 15 bp, Homo sapiens
tcccccggaggcatt

SEQ ID NO: 2044769 - DNA, 15 bp, Homo sapiens
cccccggaggcattc

SEQ ID NO: 2044770 - DNA, 15 bp, Homo sapiens
ccccggaggcattcc

SEQ ID NO: 2044771 - DNA, 15 bp, Homo sapiens
cccggaggcattcct

SEQ ID NO: 2044772 - DNA, 15 bp, Homo sapiens
ccggaggcattcctc

SEQ ID NO: 2044773 - DNA, 15 bp, Homo sapiens
cggaggcattcctcg

SEQ ID NO: 2044774 - DNA, 15 bp, Homo sapiens
ggaggcattcctcgg

SEQ ID NO: 2044775 - DNA, 15 bp, Homo sapiens
gaggcattcctcgga

SEQ ID NO: 2044776 - DNA, 15 bp, Homo sapiens
aggcattcctcggat

SEQ ID NO: 2044777 - DNA, 15 bp, Homo sapiens
ggcattcctcggatc

SEQ ID NO: 2044778 - DNA, 15 bp, Homo sapiens
gcattcctcggatct

SEQ ID NO: 2044779 - DNA, 15 bp, Homo sapiens
cattcctcggatctt

SEQ ID NO: 2044780 - DNA, 15 bp, Homo sapiens
attcctcggatcttg

SEQ ID NO: 2044781 - DNA, 15 bp, Homo sapiens
ttcctcggatcttgg

SEQ ID NO: 2044782 - DNA, 15 bp, Homo sapiens
tcctcggatcttggg

SEQ ID NO: 2044783 - DNA, 15 bp, Homo sapiens
cctcggatcttgggg

SEQ ID NO: 2044784 - DNA, 15 bp, Homo sapiens
ctcggatcttggggt

SEQ ID NO: 2044785 - DNA, 15 bp, Homo sapiens
tcggatcttggggtt

SEQ ID NO: 2044786 - DNA, 15 bp, Homo sapiens
cggatcttggggttg

SEQ ID NO: 2044787 - DNA, 15 bp, Homo sapiens
ggatcttggggttgc

SEQ ID NO: 2044788 - DNA, 15 bp, Homo sapiens
gatcttggggttgcg

SEQ ID NO: 2044789 - DNA, 15 bp, Homo sapiens
atcttggggttgcgg

SEQ ID NO: 2044790 - DNA, 15 bp, Homo sapiens
tcttggggttgcgga

SEQ ID NO: 2044791 - DNA, 15 bp, Homo sapiens
cttggggttgcggag

SEQ ID NO: 2044792 - DNA, 15 bp, Homo sapiens
ttggggttgcggagc

SEQ ID NO: 2044793 - DNA, 15 bp, Homo sapiens
tggggttgcggagca

SEQ ID NO: 2044794 - DNA, 15 bp, Homo sapiens
ggggttgcggagcag

SEQ ID NO: 2044795 - DNA, 15 bp, Homo sapiens
gggttgcggagcagc

SEQ ID NO: 2044796 - DNA, 15 bp, Homo sapiens
ggttgcggagcagcg

SEQ ID NO: 2044797 - DNA, 15 bp, Homo sapiens
gttgcggagcagcgc

SEQ ID NO: 2044798 - DNA, 15 bp, Homo sapiens
ttgcggagcagcgcc

SEQ ID NO: 2044799 - DNA, 15 bp, Homo sapiens
tgcggagcagcgccc

SEQ ID NO: 2044800 - DNA, 15 bp, Homo sapiens
gcggagcagcgcccc

SEQ ID NO: 2044801 - DNA, 15 bp, Homo sapiens
cggagcagcgccccc

SEQ ID NO: 2044802 - DNA, 15 bp, Homo sapiens
ggagcagcgcccccc

SEQ ID NO: 2044803 - DNA, 15 bp, Homo sapiens
gagcagcgcccccca

SEQ ID NO: 2044804 - DNA, 15 bp, Homo sapiens
agcagcgccccccag

SEQ ID NO: 2044805 - DNA, 15 bp, Homo sapiens
gcagcgccccccagc

SEQ ID NO: 2044806 - DNA, 15 bp, Homo sapiens
cagcgccccccagcg

SEQ ID NO: 2044807 - DNA, 15 bp, Homo sapiens
agcgccccccagcgc

SEQ ID NO: 2044808 - DNA, 15 bp, Homo sapiens
gcgccccccagcgcc

SEQ ID NO: 2044809 - DNA, 15 bp, Homo sapiens
cgccccccagcgccc

SEQ ID NO: 2044810 - DNA, 15 bp, Homo sapiens
gccccccagcgccca

SEQ ID NO: 2044811 - DNA, 15 bp, Homo sapiens
ccccccagcgcccag

SEQ ID NO: 2044812 - DNA, 15 bp, Homo sapiens
cccccagcgcccagt

SEQ ID NO: 2044813 - DNA, 15 bp, Homo sapiens
ccccagcgcccagtt

SEQ ID NO: 2044814 - DNA, 15 bp, Homo sapiens
cccagcgcccagtta

SEQ ID NO: 2044815 - DNA, 15 bp, Homo sapiens
ccagcgcccagttac

SEQ ID NO: 2044816 - DNA, 15 bp, Homo sapiens
cagcgcccagttaca

SEQ ID NO: 2044817 - DNA, 15 bp, Homo sapiens
agcgcccagttacac

SEQ ID NO: 2044818 - DNA, 15 bp, Homo sapiens
gcgcccagttacact

SEQ ID NO: 2044819 - DNA, 15 bp, Homo sapiens
cgcccagttacactc

SEQ ID NO: 2044820 - DNA, 15 bp, Homo sapiens
gcccagttacactcc

SEQ ID NO: 2044821 - DNA, 15 bp, Homo sapiens
cccagttacactcct

SEQ ID NO: 2044822 - DNA, 15 bp, Homo sapiens
ccagttacactcctg

SEQ ID NO: 2044823 - DNA, 15 bp, Homo sapiens
cagttacactcctgc

SEQ ID NO: 2044824 - DNA, 15 bp, Homo sapiens
agttacactcctgcc

SEQ ID NO: 2044825 - DNA, 15 bp, Homo sapiens
gttacactcctgcct

SEQ ID NO: 2044826 - DNA, 15 bp, Homo sapiens
ttacactcctgcctt

SEQ ID NO: 2044827 - DNA, 15 bp, Homo sapiens
tacactcctgccttc

SEQ ID NO: 2044828 - DNA, 15 bp, Homo sapiens
acactcctgccttcc

SEQ ID NO: 2044829 - DNA, 15 bp, Homo sapiens
cactcctgccttccg

SEQ ID NO: 2044830 - DNA, 15 bp, Homo sapiens
actcctgccttccgc

SEQ ID NO: 2044831 - DNA, 15 bp, Homo sapiens
ctcctgccttccgct

SEQ ID NO: 2044832 - DNA, 15 bp, Homo sapiens
tcctgccttccgctc

SEQ ID NO: 2044833 - DNA, 15 bp, Homo sapiens
cctgccttccgctcc

SEQ ID NO: 2044834 - DNA, 15 bp, Homo sapiens
ctgccttccgctccc

SEQ ID NO: 2044835 - DNA, 15 bp, Homo sapiens
tgccttccgctccct

SEQ ID NO: 2044836 - DNA, 15 bp, Homo sapiens
gccttccgctccctg

SEQ ID NO: 2044837 - DNA, 15 bp, Homo sapiens
ccttccgctccctgc

SEQ ID NO: 2044838 - DNA, 15 bp, Homo sapiens
cttccgctccctgcg

SEQ ID NO: 2044839 - DNA, 15 bp, Homo sapiens
ttccgctccctgcgc

SEQ ID NO: 2044840 - DNA, 15 bp, Homo sapiens
tccgctccctgcgcc

SEQ ID NO: 2044841 - DNA, 15 bp, Homo sapiens
ccgctccctgcgcct

SEQ ID NO: 2044842 - DNA, 15 bp, Homo sapiens
cgctccctgcgcctg

SEQ ID NO: 2044843 - DNA, 15 bp, Homo sapiens
gctccctgcgcctgg

SEQ ID NO: 2044844 - DNA, 15 bp, Homo sapiens
ctccctgcgcctggt

SEQ ID NO: 2044845 - DNA, 15 bp, Homo sapiens
tccctgcgcctggtt

SEQ ID NO: 2044846 - DNA, 15 bp, Homo sapiens
ccctgcgcctggttg

SEQ ID NO: 2044847 - DNA, 15 bp, Homo sapiens
cctgcgcctggttgc

SEQ ID NO: 2044848 - DNA, 15 bp, Homo sapiens
ctgcgcctggttgcc

SEQ ID NO: 2044849 - DNA, 15 bp, Homo sapiens
tgcgcctggttgcct

SEQ ID NO: 2044850 - DNA, 15 bp, Homo sapiens
gcgcctggttgcctc

SEQ ID NO: 2044851 - DNA, 15 bp, Homo sapiens
cgcctggttgcctcg

SEQ ID NO: 2044852 - DNA, 15 bp, Homo sapiens
gcctggttgcctcga

SEQ ID NO: 2044853 - DNA, 15 bp, Homo sapiens
cctggttgcctcgat

SEQ ID NO: 2044854 - DNA, 15 bp, Homo sapiens
ctggttgcctcgatg

SEQ ID NO: 2044855 - DNA, 15 bp, Homo sapiens
tggttgcctcgatgg

SEQ ID NO: 2044856 - DNA, 15 bp, Homo sapiens
ggttgcctcgatggc

SEQ ID NO: 2044857 - DNA, 15 bp, Homo sapiens
gttgcctcgatggca

SEQ ID NO: 2044858 - DNA, 15 bp, Homo sapiens
ttgcctcgatggcac

SEQ ID NO: 2044859 - DNA, 15 bp, Homo sapiens
tgcctcgatggcact

SEQ ID NO: 2044860 - DNA, 15 bp, Homo sapiens
gcctcgatggcactc

SEQ ID NO: 2044861 - DNA, 15 bp, Homo sapiens
cctcgatggcactcg

SEQ ID NO: 2044862 - DNA, 15 bp, Homo sapiens
ctcgatggcactcgc

SEQ ID NO: 2044863 - DNA, 15 bp, Homo sapiens
tcgatggcactcgcg

SEQ ID NO: 2044864 - DNA, 15 bp, Homo sapiens
cgatggcactcgcga

SEQ ID NO: 2044865 - DNA, 15 bp, Homo sapiens
gatggcactcgcgag

SEQ ID NO: 2044866 - DNA, 15 bp, Homo sapiens
atggcactcgcgagc

SEQ ID NO: 2044867 - DNA, 15 bp, Homo sapiens
tggcactcgcgagcc

SEQ ID NO: 2044868 - DNA, 15 bp, Homo sapiens
ggcactcgcgagccc

SEQ ID NO: 2044869 - DNA, 15 bp, Homo sapiens
gcactcgcgagccca

SEQ ID NO: 2044870 - DNA, 15 bp, Homo sapiens
cactcgcgagcccag

SEQ ID NO: 2044871 - DNA, 15 bp, Homo sapiens
actcgcgagcccagc

SEQ ID NO: 2044872 - DNA, 15 bp, Homo sapiens
ctcgcgagcccagct

SEQ ID NO: 2044873 - DNA, 15 bp, Homo sapiens
tcgcgagcccagctc

SEQ ID NO: 2044874 - DNA, 15 bp, Homo sapiens
cgcgagcccagctca

SEQ ID NO: 2044875 - DNA, 15 bp, Homo sapiens
gcgagcccagctcag

SEQ ID NO: 2044876 - DNA, 15 bp, Homo sapiens
cgagcccagctcagc

SEQ ID NO: 2044877 - DNA, 15 bp, Homo sapiens
gagcccagctcagcc

SEQ ID NO: 2044878 - DNA, 15 bp, Homo sapiens
agcccagctcagccc

SEQ ID NO: 2044879 - DNA, 15 bp, Homo sapiens
gcccagctcagcccg

SEQ ID NO: 2044880 - DNA, 15 bp, Homo sapiens
cccagctcagcccgg

SEQ ID NO: 2044881 - DNA, 15 bp, Homo sapiens
ccagctcagcccggc

SEQ ID NO: 2044882 - DNA, 15 bp, Homo sapiens
cagctcagcccggct

SEQ ID NO: 2044883 - DNA, 15 bp, Homo sapiens
agctcagcccggctt

SEQ ID NO: 2044884 - DNA, 15 bp, Homo sapiens
gctcagcccggctta

SEQ ID NO: 2044885 - DNA, 15 bp, Homo sapiens
ctcagcccggcttag

SEQ ID NO: 2044886 - DNA, 15 bp, Homo sapiens
tcagcccggcttaga

SEQ ID NO: 2044887 - DNA, 15 bp, Homo sapiens
cagcccggcttagaa

SEQ ID NO: 2044888 - DNA, 15 bp, Homo sapiens
agcccggcttagaag

SEQ ID NO: 2044889 - DNA, 15 bp, Homo sapiens
gcccggcttagaagc

SEQ ID NO: 2044890 - DNA, 15 bp, Homo sapiens
cccggcttagaagcc

SEQ ID NO: 2044891 - DNA, 15 bp, Homo sapiens
ccggcttagaagcct

SEQ ID NO: 2044892 - DNA, 15 bp, Homo sapiens
cggcttagaagcctg

SEQ ID NO: 2044893 - DNA, 15 bp, Homo sapiens
ggcttagaagcctgt

SEQ ID NO: 2044894 - DNA, 15 bp, Homo sapiens
gcttagaagcctgtg

SEQ ID NO: 2044895 - DNA, 15 bp, Homo sapiens
cttagaagcctgtgc

SEQ ID NO: 2044896 - DNA, 15 bp, Homo sapiens
ttagaagcctgtgcc

SEQ ID NO: 2044897 - DNA, 15 bp, Homo sapiens
tagaagcctgtgcct

SEQ ID NO: 2044898 - DNA, 15 bp, Homo sapiens
agaagcctgtgccta

SEQ ID NO: 2044899 - DNA, 15 bp, Homo sapiens
gaagcctgtgcctag

SEQ ID NO: 2044900 - DNA, 15 bp, Homo sapiens
aagcctgtgcctagc

SEQ ID NO: 2044901 - DNA, 15 bp, Homo sapiens
agcctgtgcctagct

SEQ ID NO: 2044902 - DNA, 15 bp, Homo sapiens
gcctgtgcctagctg

SEQ ID NO: 2044903 - DNA, 15 bp, Homo sapiens
cctgtgcctagctgt

SEQ ID NO: 2044904 - DNA, 15 bp, Homo sapiens
ctgtgcctagctgtg

SEQ ID NO: 2044905 - DNA, 15 bp, Homo sapiens
tgtgcctagctgtgg

SEQ ID NO: 2044906 - DNA, 15 bp, Homo sapiens
gtgcctagctgtggg

SEQ ID NO: 2044907 - DNA, 15 bp, Homo sapiens
tgcctagctgtggga

SEQ ID NO: 2044908 - DNA, 15 bp, Homo sapiens
gcctagctgtgggag

SEQ ID NO: 2044909 - DNA, 15 bp, Homo sapiens
cctagctgtgggaga

SEQ ID NO: 2044910 - DNA, 15 bp, Homo sapiens
ctagctgtgggagac

SEQ ID NO: 2044911 - DNA, 15 bp, Homo sapiens
tagctgtgggagact

SEQ ID NO: 2044912 - DNA, 15 bp, Homo sapiens
agctgtgggagactg

SEQ ID NO: 2044913 - DNA, 15 bp, Homo sapiens
gctgtgggagactgc

SEQ ID NO: 2044914 - DNA, 15 bp, Homo sapiens
ctgtgggagactgcg

SEQ ID NO: 2044915 - DNA, 15 bp, Homo sapiens
tgtgggagactgcgg

SEQ ID NO: 2044916 - DNA, 15 bp, Homo sapiens
gtgggagactgcggg

SEQ ID NO: 2044917 - DNA, 15 bp, Homo sapiens
tgggagactgcggga

SEQ ID NO: 2044918 - DNA, 15 bp, Homo sapiens
gggagactgcgggag

SEQ ID NO: 2044919 - DNA, 15 bp, Homo sapiens
ggagactgcgggagc

SEQ ID NO: 2044920 - DNA, 15 bp, Homo sapiens
gagactgcgggagca

SEQ ID NO: 2044921 - DNA, 15 bp, Homo sapiens
agactgcgggagcaa

SEQ ID NO: 2044922 - DNA, 15 bp, Homo sapiens
gactgcgggagcaac

SEQ ID NO: 2044923 - DNA, 15 bp, Homo sapiens
actgcgggagcaact

SEQ ID NO: 2044924 - DNA, 15 bp, Homo sapiens
ctgcgggagcaactg

SEQ ID NO: 2044925 - DNA, 15 bp, Homo sapiens
tgcgggagcaactga

SEQ ID NO: 2044926 - DNA, 15 bp, Homo sapiens
gcgggagcaactgag

SEQ ID NO: 2044927 - DNA, 15 bp, Homo sapiens
cgggagcaactgagg

SEQ ID NO: 2044928 - DNA, 15 bp, Homo sapiens
gggagcaactgaggg

SEQ ID NO: 2044929 - DNA, 15 bp, Homo sapiens
ggagcaactgagggg

SEQ ID NO: 2044930 - DNA, 15 bp, Homo sapiens
gagcaactgaggggc

SEQ ID NO: 2044931 - DNA, 15 bp, Homo sapiens
agcaactgaggggcc

SEQ ID NO: 2044932 - DNA, 15 bp, Homo sapiens
gcaactgaggggccc

SEQ ID NO: 2044933 - DNA, 15 bp, Homo sapiens
caactgaggggccca

SEQ ID NO: 2044934 - DNA, 15 bp, Homo sapiens
aactgaggggcccaa

SEQ ID NO: 2044935 - DNA, 15 bp, Homo sapiens
actgaggggcccaag

SEQ ID NO: 2044936 - DNA, 15 bp, Homo sapiens
ctgaggggcccaagt

SEQ ID NO: 2044937 - DNA, 15 bp, Homo sapiens
tgaggggcccaagtg

SEQ ID NO: 2044938 - DNA, 15 bp, Homo sapiens
gaggggcccaagtgt

SEQ ID NO: 2044939 - DNA, 15 bp, Homo sapiens
aggggcccaagtgtt

SEQ ID NO: 2044940 - DNA, 15 bp, Homo sapiens
ggggcccaagtgttt

SEQ ID NO: 2044941 - DNA, 15 bp, Homo sapiens
gggcccaagtgtttc

SEQ ID NO: 2044942 - DNA, 15 bp, Homo sapiens
ggcccaagtgtttct

SEQ ID NO: 2044943 - DNA, 15 bp, Homo sapiens
gcccaagtgtttctt

SEQ ID NO: 2044944 - DNA, 15 bp, Homo sapiens
cccaagtgtttcttg

SEQ ID NO: 2044945 - DNA, 15 bp, Homo sapiens
ccaagtgtttcttgt

SEQ ID NO: 2044946 - DNA, 15 bp, Homo sapiens
caagtgtttcttgtt

SEQ ID NO: 2044947 - DNA, 15 bp, Homo sapiens
aagtgtttcttgttg

SEQ ID NO: 2044948 - DNA, 15 bp, Homo sapiens
agtgtttcttgttga

SEQ ID NO: 2044949 - DNA, 15 bp, Homo sapiens
gtgtttcttgttgaa

SEQ ID NO: 2044950 - DNA, 15 bp, Homo sapiens
tgtttcttgttgaag

SEQ ID NO: 2044951 - DNA, 15 bp, Homo sapiens
gtttcttgttgaagg

SEQ ID NO: 2044952 - DNA, 15 bp, Homo sapiens
tttcttgttgaaggt

SEQ ID NO: 2044953 - DNA, 15 bp, Homo sapiens
ttcttgttgaaggtc

SEQ ID NO: 2044954 - DNA, 15 bp, Homo sapiens
tcttgttgaaggtca

SEQ ID NO: 2044955 - DNA, 15 bp, Homo sapiens
cttgttgaaggtcag

SEQ ID NO: 2044956 - DNA, 15 bp, Homo sapiens
ttgttgaaggtcaga

SEQ ID NO: 2044957 - DNA, 15 bp, Homo sapiens
tgttgaaggtcagag

SEQ ID NO: 2044958 - DNA, 15 bp, Homo sapiens
gttgaaggtcagagg

SEQ ID NO: 2044959 - DNA, 15 bp, Homo sapiens
ttgaaggtcagaggc

SEQ ID NO: 2044960 - DNA, 15 bp, Homo sapiens
tgaaggtcagaggcc

SEQ ID NO: 2044961 - DNA, 15 bp, Homo sapiens
gaaggtcagaggcct

SEQ ID NO: 2044962 - DNA, 15 bp, Homo sapiens
aaggtcagaggccta

SEQ ID NO: 2044963 - DNA, 15 bp, Homo sapiens
aggtcagaggcctag

SEQ ID NO: 2044964 - DNA, 15 bp, Homo sapiens
ggtcagaggcctaga

SEQ ID NO: 2044965 - DNA, 15 bp, Homo sapiens
gtcagaggcctagag

SEQ ID NO: 2044966 - DNA, 15 bp, Homo sapiens
tcagaggcctagagt

SEQ ID NO: 2044967 - DNA, 15 bp, Homo sapiens
cagaggcctagagtc

SEQ ID NO: 2044968 - DNA, 15 bp, Homo sapiens
agaggcctagagtca

SEQ ID NO: 2044969 - DNA, 15 bp, Homo sapiens
gaggcctagagtcac

SEQ ID NO: 2044970 - DNA, 15 bp, Homo sapiens
aggcctagagtcaca

SEQ ID NO: 2044971 - DNA, 15 bp, Homo sapiens
ggcctagagtcacag

SEQ ID NO: 2044972 - DNA, 15 bp, Homo sapiens
gcctagagtcacagt

SEQ ID NO: 2044973 - DNA, 15 bp, Homo sapiens
cctagagtcacagtt

SEQ ID NO: 2044974 - DNA, 15 bp, Homo sapiens
ctagagtcacagttt

SEQ ID NO: 2044975 - DNA, 15 bp, Homo sapiens
tagagtcacagtttc

SEQ ID NO: 2044976 - DNA, 15 bp, Homo sapiens
agagtcacagtttct

SEQ ID NO: 2044977 - DNA, 15 bp, Homo sapiens
gagtcacagtttctc

SEQ ID NO: 2044978 - DNA, 15 bp, Homo sapiens
agtcacagtttctct

SEQ ID NO: 2044979 - DNA, 15 bp, Homo sapiens
gtcacagtttctcta

SEQ ID NO: 2044980 - DNA, 15 bp, Homo sapiens
tcacagtttctctaa

SEQ ID NO: 2044981 - DNA, 15 bp, Homo sapiens
cacagtttctctaaa

SEQ ID NO: 2044982 - DNA, 15 bp, Homo sapiens
acagtttctctaaat

SEQ ID NO: 2044983 - DNA, 15 bp, Homo sapiens
cagtttctctaaatc

SEQ ID NO: 2044984 - DNA, 15 bp, Homo sapiens
agtttctctaaatcc

SEQ ID NO: 2044985 - DNA, 15 bp, Homo sapiens
gtttctctaaatcca

SEQ ID NO: 2044986 - DNA, 15 bp, Homo sapiens
tttctctaaatccaa

SEQ ID NO: 2044987 - DNA, 15 bp, Homo sapiens
ttctctaaatccaaa

SEQ ID NO: 2044988 - DNA, 15 bp, Homo sapiens
tctctaaatccaaaa

SEQ ID NO: 2044989 - DNA, 15 bp, Homo sapiens
ctctaaatccaaaat

SEQ ID NO: 2044990 - DNA, 15 bp, Homo sapiens
tctaaatccaaaata

SEQ ID NO: 2044991 - DNA, 15 bp, Homo sapiens
ctaaatccaaaatac

SEQ ID NO: 2044992 - DNA, 15 bp, Homo sapiens
taaatccaaaataca

SEQ ID NO: 2044993 - DNA, 15 bp, Homo sapiens
aaatccaaaatacag

SEQ ID NO: 2044994 - DNA, 15 bp, Homo sapiens
aatccaaaatacaga

SEQ ID NO: 2044995 - DNA, 15 bp, Homo sapiens
atccaaaatacagaa

SEQ ID NO: 2044996 - DNA, 15 bp, Homo sapiens
tccaaaatacagaat

SEQ ID NO: 2044997 - DNA, 15 bp, Homo sapiens
ccaaaatacagaatc

SEQ ID NO: 2044998 - DNA, 15 bp, Homo sapiens
caaaatacagaatca

SEQ ID NO: 2044999 - DNA, 15 bp, Homo sapiens
aaaatacagaatcag

SEQ ID NO: 2045000 - DNA, 15 bp, Homo sapiens
aaatacagaatcaga

SEQ ID NO: 2045001 - DNA, 15 bp, Homo sapiens
aatacagaatcagaa

SEQ ID NO: 2045002 - DNA, 15 bp, Homo sapiens
atacagaatcagaag

SEQ ID NO: 2045003 - DNA, 15 bp, Homo sapiens
tacagaatcagaagg

SEQ ID NO: 2045004 - DNA, 15 bp, Homo sapiens
acagaatcagaagga

SEQ ID NO: 2045005 - DNA, 15 bp, Homo sapiens
cagaatcagaaggaa

SEQ ID NO: 2045006 - DNA, 15 bp, Homo sapiens
agaatcagaaggaat

SEQ ID NO: 2045007 - DNA, 15 bp, Homo sapiens
gaatcagaaggaata

SEQ ID NO: 2045008 - DNA, 15 bp, Homo sapiens
aatcagaaggaataa

SEQ ID NO: 2045009 - DNA, 15 bp, Homo sapiens
atcagaaggaataac

SEQ ID NO: 2045010 - DNA, 15 bp, Homo sapiens
tcagaaggaataact

SEQ ID NO: 2045011 - DNA, 15 bp, Homo sapiens
cagaaggaataactc

SEQ ID NO: 2045012 - DNA, 15 bp, Homo sapiens
agaaggaataactcc

SEQ ID NO: 2045013 - DNA, 15 bp, Homo sapiens
gaaggaataactcct

SEQ ID NO: 2045014 - DNA, 15 bp, Homo sapiens
aaggaataactcctt

SEQ ID NO: 2045015 - DNA, 15 bp, Homo sapiens
aggaataactccttc

SEQ ID NO: 2045016 - DNA, 15 bp, Homo sapiens
ggaataactccttct

SEQ ID NO: 2045017 - DNA, 15 bp, Homo sapiens
gaataactccttcta

SEQ ID NO: 2045018 - DNA, 15 bp, Homo sapiens
aataactccttctat

SEQ ID NO: 2045019 - DNA, 15 bp, Homo sapiens
ataactccttctatt

SEQ ID NO: 2045020 - DNA, 15 bp, Homo sapiens
taactccttctatta

SEQ ID NO: 2045021 - DNA, 15 bp, Homo sapiens
aactccttctattag

SEQ ID NO: 2045022 - DNA, 15 bp, Homo sapiens
actccttctattagc

SEQ ID NO: 2045023 - DNA, 15 bp, Homo sapiens
ctccttctattagcg

SEQ ID NO: 2045024 - DNA, 15 bp, Homo sapiens
tccttctattagcga

SEQ ID NO: 2045025 - DNA, 15 bp, Homo sapiens
ccttctattagcgac

SEQ ID NO: 2045026 - DNA, 15 bp, Homo sapiens
cttctattagcgact

SEQ ID NO: 2045027 - DNA, 15 bp, Homo sapiens
ttctattagcgactt

SEQ ID NO: 2045028 - DNA, 15 bp, Homo sapiens
tctattagcgacttt

SEQ ID NO: 2045029 - DNA, 15 bp, Homo sapiens
ctattagcgactttt

SEQ ID NO: 2045030 - DNA, 15 bp, Homo sapiens
tattagcgacttttg

SEQ ID NO: 2045031 - DNA, 15 bp, Homo sapiens
attagcgacttttgt

SEQ ID NO: 2045032 - DNA, 15 bp, Homo sapiens
ttagcgacttttgtg

SEQ ID NO: 2045033 - DNA, 15 bp, Homo sapiens
tagcgacttttgtga

SEQ ID NO: 2045034 - DNA, 15 bp, Homo sapiens
agcgacttttgtgat

SEQ ID NO: 2045035 - DNA, 15 bp, Homo sapiens
gcgacttttgtgatc

SEQ ID NO: 2045036 - DNA, 15 bp, Homo sapiens
cgacttttgtgatct

SEQ ID NO: 2045037 - DNA, 15 bp, Homo sapiens
gacttttgtgatcta

SEQ ID NO: 2045038 - DNA, 15 bp, Homo sapiens
acttttgtgatctac

SEQ ID NO: 2045039 - DNA, 15 bp, Homo sapiens
cttttgtgatctaca

SEQ ID NO: 2045040 - DNA, 15 bp, Homo sapiens
ttttgtgatctacaa

SEQ ID NO: 2045041 - DNA, 15 bp, Homo sapiens
tttgtgatctacaaa

SEQ ID NO: 2045042 - DNA, 15 bp, Homo sapiens
ttgtgatctacaaac

SEQ ID NO: 2045043 - DNA, 15 bp, Homo sapiens
tgtgatctacaaact

SEQ ID NO: 2045044 - DNA, 15 bp, Homo sapiens
gtgatctacaaactc

SEQ ID NO: 2045045 - DNA, 15 bp, Homo sapiens
tgatctacaaactca

SEQ ID NO: 2045046 - DNA, 15 bp, Homo sapiens
gatctacaaactcag

SEQ ID NO: 2045047 - DNA, 15 bp, Homo sapiens
atctacaaactcagg

SEQ ID NO: 2045048 - DNA, 15 bp, Homo sapiens
tctacaaactcaggc

SEQ ID NO: 2045049 - DNA, 15 bp, Homo sapiens
ctacaaactcaggca

SEQ ID NO: 2045050 - DNA, 15 bp, Homo sapiens
tacaaactcaggcac

SEQ ID NO: 2045051 - DNA, 15 bp, Homo sapiens
acaaactcaggcaca

SEQ ID NO: 2045052 - DNA, 15 bp, Homo sapiens
caaactcaggcacat

SEQ ID NO: 2045053 - DNA, 15 bp, Homo sapiens
aaactcaggcacatg

SEQ ID NO: 2045054 - DNA, 15 bp, Homo sapiens
aactcaggcacatga

SEQ ID NO: 2045055 - DNA, 15 bp, Homo sapiens
actcaggcacatgat

SEQ ID NO: 2045056 - DNA, 15 bp, Homo sapiens
ctcaggcacatgatc

SEQ ID NO: 2045057 - DNA, 15 bp, Homo sapiens
tcaggcacatgatct

SEQ ID NO: 2045058 - DNA, 15 bp, Homo sapiens
caggcacatgatctc

SEQ ID NO: 2045059 - DNA, 15 bp, Homo sapiens
aggcacatgatctca

SEQ ID NO: 2045060 - DNA, 15 bp, Homo sapiens
ggcacatgatctcat

SEQ ID NO: 2045061 - DNA, 15 bp, Homo sapiens
gcacatgatctcatc

SEQ ID NO: 2045062 - DNA, 15 bp, Homo sapiens
cacatgatctcatcc

SEQ ID NO: 2045063 - DNA, 15 bp, Homo sapiens
acatgatctcatcct

SEQ ID NO: 2045064 - DNA, 15 bp, Homo sapiens
catgatctcatcctg

SEQ ID NO: 2045065 - DNA, 15 bp, Homo sapiens
atgatctcatcctga

SEQ ID NO: 2045066 - DNA, 15 bp, Homo sapiens
tgatctcatcctgaa

SEQ ID NO: 2045067 - DNA, 15 bp, Homo sapiens
gatctcatcctgaat

SEQ ID NO: 2045068 - DNA, 15 bp, Homo sapiens
atctcatcctgaatt

SEQ ID NO: 2045069 - DNA, 15 bp, Homo sapiens
tctcatcctgaattg

SEQ ID NO: 2045070 - DNA, 15 bp, Homo sapiens
ctcatcctgaattgt

SEQ ID NO: 2045071 - DNA, 15 bp, Homo sapiens
tcatcctgaattgtt

SEQ ID NO: 2045072 - DNA, 15 bp, Homo sapiens
catcctgaattgttt

SEQ ID NO: 2045073 - DNA, 15 bp, Homo sapiens
atcctgaattgtttg

SEQ ID NO: 2045074 - DNA, 15 bp, Homo sapiens
tcctgaattgtttgg

SEQ ID NO: 2045075 - DNA, 15 bp, Homo sapiens
cctgaattgtttgga

SEQ ID NO: 2045076 - DNA, 15 bp, Homo sapiens
ctgaattgtttggat

SEQ ID NO: 2045077 - DNA, 15 bp, Homo sapiens
tgaattgtttggatc

SEQ ID NO: 2045078 - DNA, 15 bp, Homo sapiens
gaattgtttggatcc

SEQ ID NO: 2045079 - DNA, 15 bp, Homo sapiens
aattgtttggatccc

SEQ ID NO: 2045080 - DNA, 15 bp, Homo sapiens
attgtttggatccct

SEQ ID NO: 2045081 - DNA, 15 bp, Homo sapiens
ttgtttggatcccta

SEQ ID NO: 2045082 - DNA, 15 bp, Homo sapiens
tgtttggatccctag

SEQ ID NO: 2045083 - DNA, 15 bp, Homo sapiens
gtttggatccctagc

SEQ ID NO: 2045084 - DNA, 15 bp, Homo sapiens
tttggatccctagca

SEQ ID NO: 2045085 - DNA, 15 bp, Homo sapiens
ttggatccctagcac

SEQ ID NO: 2045086 - DNA, 15 bp, Homo sapiens
tggatccctagcaca

SEQ ID NO: 2045087 - DNA, 15 bp, Homo sapiens
ggatccctagcacaa

SEQ ID NO: 2045088 - DNA, 15 bp, Homo sapiens
gatccctagcacaaa

SEQ ID NO: 2045089 - DNA, 15 bp, Homo sapiens
atccctagcacaaac

SEQ ID NO: 2045090 - DNA, 15 bp, Homo sapiens
tccctagcacaaacc

SEQ ID NO: 2045091 - DNA, 15 bp, Homo sapiens
ccctagcacaaacca

SEQ ID NO: 2045092 - DNA, 15 bp, Homo sapiens
cctagcacaaaccaa

SEQ ID NO: 2045093 - DNA, 15 bp, Homo sapiens
ctagcacaaaccaag

SEQ ID NO: 2045094 - DNA, 15 bp, Homo sapiens
tagcacaaaccaagc

SEQ ID NO: 2045095 - DNA, 15 bp, Homo sapiens
agcacaaaccaagcc

SEQ ID NO: 2045096 - DNA, 15 bp, Homo sapiens
gcacaaaccaagcca

SEQ ID NO: 2045097 - DNA, 15 bp, Homo sapiens
cacaaaccaagccag

SEQ ID NO: 2045098 - DNA, 15 bp, Homo sapiens
acaaaccaagccagt

SEQ ID NO: 2045099 - DNA, 15 bp, Homo sapiens
caaaccaagccagta

SEQ ID NO: 2045100 - DNA, 15 bp, Homo sapiens
aaaccaagccagtac

SEQ ID NO: 2045101 - DNA, 15 bp, Homo sapiens
aaccaagccagtaca

SEQ ID NO: 2045102 - DNA, 15 bp, Homo sapiens
accaagccagtacac

SEQ ID NO: 2045103 - DNA, 15 bp, Homo sapiens
ccaagccagtacaca

SEQ ID NO: 2045104 - DNA, 15 bp, Homo sapiens
caagccagtacacag

SEQ ID NO: 2045105 - DNA, 15 bp, Homo sapiens
aagccagtacacagg

SEQ ID NO: 2045106 - DNA, 15 bp, Homo sapiens
agccagtacacaggg

SEQ ID NO: 2045107 - DNA, 15 bp, Homo sapiens
gccagtacacagggc

SEQ ID NO: 2045108 - DNA, 15 bp, Homo sapiens
ccagtacacagggca

SEQ ID NO: 2045109 - DNA, 15 bp, Homo sapiens
cagtacacagggcag

SEQ ID NO: 2045110 - DNA, 15 bp, Homo sapiens
agtacacagggcagg

SEQ ID NO: 2045111 - DNA, 15 bp, Homo sapiens
gtacacagggcaggt

SEQ ID NO: 2045112 - DNA, 15 bp, Homo sapiens
tacacagggcaggtt

SEQ ID NO: 2045113 - DNA, 15 bp, Homo sapiens
acacagggcaggttg

SEQ ID NO: 2045114 - DNA, 15 bp, Homo sapiens
cacagggcaggttgt

SEQ ID NO: 2045115 - DNA, 15 bp, Homo sapiens
acagggcaggttgtg

SEQ ID NO: 2045116 - DNA, 15 bp, Homo sapiens
cagggcaggttgtga

SEQ ID NO: 2045117 - DNA, 15 bp, Homo sapiens
agggcaggttgtgac

SEQ ID NO: 2045118 - DNA, 15 bp, Homo sapiens
gggcaggttgtgacc

SEQ ID NO: 2045119 - DNA, 15 bp, Homo sapiens
ggcaggttgtgacca

SEQ ID NO: 2045120 - DNA, 15 bp, Homo sapiens
gcaggttgtgaccat

SEQ ID NO: 2045121 - DNA, 15 bp, Homo sapiens
caggttgtgaccatt

SEQ ID NO: 2045122 - DNA, 15 bp, Homo sapiens
aggttgtgaccattt

SEQ ID NO: 2045123 - DNA, 15 bp, Homo sapiens
ggttgtgaccatttt

SEQ ID NO: 2045124 - DNA, 15 bp, Homo sapiens
gttgtgaccattttt

SEQ ID NO: 2045125 - DNA, 15 bp, Homo sapiens
ttgtgaccatttttt

SEQ ID NO: 2045126 - DNA, 15 bp, Homo sapiens
tgtgaccatttttta

SEQ ID NO: 2045127 - DNA, 15 bp, Homo sapiens
gtgaccattttttac

SEQ ID NO: 2045128 - DNA, 15 bp, Homo sapiens
tgaccattttttaca

SEQ ID NO: 2045129 - DNA, 15 bp, Homo sapiens
gaccattttttacag

SEQ ID NO: 2045130 - DNA, 15 bp, Homo sapiens
accattttttacagc

SEQ ID NO: 2045131 - DNA, 15 bp, Homo sapiens
ccattttttacagct

SEQ ID NO: 2045132 - DNA, 15 bp, Homo sapiens
cattttttacagctc

SEQ ID NO: 2045133 - DNA, 15 bp, Homo sapiens
attttttacagctca

SEQ ID NO: 2045134 - DNA, 15 bp, Homo sapiens
ttttttacagctcag

SEQ ID NO: 2045135 - DNA, 15 bp, Homo sapiens
tttttacagctcagg

SEQ ID NO: 2045136 - DNA, 15 bp, Homo sapiens
ttttacagctcagga

SEQ ID NO: 2045137 - DNA, 15 bp, Homo sapiens
tttacagctcaggaa

SEQ ID NO: 2045138 - DNA, 15 bp, Homo sapiens
ttacagctcaggaaa

SEQ ID NO: 2045139 - DNA, 15 bp, Homo sapiens
tacagctcaggaaac

SEQ ID NO: 2045140 - DNA, 15 bp, Homo sapiens
acagctcaggaaaca

SEQ ID NO: 2045141 - DNA, 15 bp, Homo sapiens
cagctcaggaaacag

SEQ ID NO: 2045142 - DNA, 15 bp, Homo sapiens
agctcaggaaacagg

SEQ ID NO: 2045143 - DNA, 15 bp, Homo sapiens
gctcaggaaacaggt

SEQ ID NO: 2045144 - DNA, 15 bp, Homo sapiens
ctcaggaaacaggtg

SEQ ID NO: 2045145 - DNA, 15 bp, Homo sapiens
tcaggaaacaggtgc

SEQ ID NO: 2045146 - DNA, 15 bp, Homo sapiens
caggaaacaggtgct

SEQ ID NO: 2045147 - DNA, 15 bp, Homo sapiens
aggaaacaggtgctc

SEQ ID NO: 2045148 - DNA, 15 bp, Homo sapiens
ggaaacaggtgctcg

SEQ ID NO: 2045149 - DNA, 15 bp, Homo sapiens
gaaacaggtgctcgg

SEQ ID NO: 2045150 - DNA, 15 bp, Homo sapiens
aaacaggtgctcgga

SEQ ID NO: 2045151 - DNA, 15 bp, Homo sapiens
aacaggtgctcggag

SEQ ID NO: 2045152 - DNA, 15 bp, Homo sapiens
acaggtgctcggagg

SEQ ID NO: 2045153 - DNA, 15 bp, Homo sapiens
caggtgctcggaggc

SEQ ID NO: 2045154 - DNA, 15 bp, Homo sapiens
aggtgctcggaggct

SEQ ID NO: 2045155 - DNA, 15 bp, Homo sapiens
ggtgctcggaggctg

SEQ ID NO: 2045156 - DNA, 15 bp, Homo sapiens
gtgctcggaggctgt

SEQ ID NO: 2045157 - DNA, 15 bp, Homo sapiens
tgctcggaggctgtg

SEQ ID NO: 2045158 - DNA, 15 bp, Homo sapiens
gctcggaggctgtgt

SEQ ID NO: 2045159 - DNA, 15 bp, Homo sapiens
ctcggaggctgtgtt

SEQ ID NO: 2045160 - DNA, 15 bp, Homo sapiens
tcggaggctgtgttt

SEQ ID NO: 2045161 - DNA, 15 bp, Homo sapiens
cggaggctgtgtttc

SEQ ID NO: 2045162 - DNA, 15 bp, Homo sapiens
ggaggctgtgtttcc

SEQ ID NO: 2045163 - DNA, 15 bp, Homo sapiens
gaggctgtgtttcct

SEQ ID NO: 2045164 - DNA, 15 bp, Homo sapiens
aggctgtgtttcctc

SEQ ID NO: 2045165 - DNA, 15 bp, Homo sapiens
ggctgtgtttcctca

SEQ ID NO: 2045166 - DNA, 15 bp, Homo sapiens
gctgtgtttcctcag

SEQ ID NO: 2045167 - DNA, 15 bp, Homo sapiens
ctgtgtttcctcagc

SEQ ID NO: 2045168 - DNA, 15 bp, Homo sapiens
tgtgtttcctcagcg

SEQ ID NO: 2045169 - DNA, 15 bp, Homo sapiens
gtgtttcctcagcgt

SEQ ID NO: 2045170 - DNA, 15 bp, Homo sapiens
tgtttcctcagcgtt

SEQ ID NO: 2045171 - DNA, 15 bp, Homo sapiens
gtttcctcagcgttt

SEQ ID NO: 2045172 - DNA, 15 bp, Homo sapiens
tttcctcagcgtttc

SEQ ID NO: 2045173 - DNA, 15 bp, Homo sapiens
ttcctcagcgtttct

SEQ ID NO: 2045174 - DNA, 15 bp, Homo sapiens
tcctcagcgtttctc

SEQ ID NO: 2045175 - DNA, 15 bp, Homo sapiens
cctcagcgtttctcg

SEQ ID NO: 2045176 - DNA, 15 bp, Homo sapiens
ctcagcgtttctcga

SEQ ID NO: 2045177 - DNA, 15 bp, Homo sapiens
tcagcgtttctcgag

SEQ ID NO: 2045178 - DNA, 15 bp, Homo sapiens
cagcgtttctcgagg

SEQ ID NO: 2045179 - DNA, 15 bp, Homo sapiens
agcgtttctcgaggc

SEQ ID NO: 2045180 - DNA, 15 bp, Homo sapiens
gcgtttctcgaggca

SEQ ID NO: 2045181 - DNA, 15 bp, Homo sapiens
cgtttctcgaggcac

SEQ ID NO: 2045182 - DNA, 15 bp, Homo sapiens
gtttctcgaggcact

SEQ ID NO: 2045183 - DNA, 15 bp, Homo sapiens
tttctcgaggcactg

SEQ ID NO: 2045184 - DNA, 15 bp, Homo sapiens
ttctcgaggcactgg

SEQ ID NO: 2045185 - DNA, 15 bp, Homo sapiens
tctcgaggcactggg

SEQ ID NO: 2045186 - DNA, 15 bp, Homo sapiens
ctcgaggcactgggg

SEQ ID NO: 2045187 - DNA, 15 bp, Homo sapiens
tcgaggcactggggg

SEQ ID NO: 2045188 - DNA, 15 bp, Homo sapiens
cgaggcactgggggg

SEQ ID NO: 2045189 - DNA, 15 bp, Homo sapiens
gaggcactggggggt

SEQ ID NO: 2045190 - DNA, 15 bp, Homo sapiens
aggcactggggggtt

SEQ ID NO: 2045191 - DNA, 15 bp, Homo sapiens
ggcactggggggttc

SEQ ID NO: 2045192 - DNA, 15 bp, Homo sapiens
gcactggggggttca

SEQ ID NO: 2045193 - DNA, 15 bp, Homo sapiens
cactggggggttcaa

SEQ ID NO: 2045194 - DNA, 15 bp, Homo sapiens
actggggggttcaaa

SEQ ID NO: 2045195 - DNA, 15 bp, Homo sapiens
ctggggggttcaaag

SEQ ID NO: 2045196 - DNA, 15 bp, Homo sapiens
tggggggttcaaaga

SEQ ID NO: 2045197 - DNA, 15 bp, Homo sapiens
ggggggttcaaagat

SEQ ID NO: 2045198 - DNA, 15 bp, Homo sapiens
gggggttcaaagata

SEQ ID NO: 2045199 - DNA, 15 bp, Homo sapiens
ggggttcaaagatag

SEQ ID NO: 2045200 - DNA, 15 bp, Homo sapiens
gggttcaaagataga

SEQ ID NO: 2045201 - DNA, 15 bp, Homo sapiens
ggttcaaagatagat

SEQ ID NO: 2045202 - DNA, 15 bp, Homo sapiens
gttcaaagatagata

SEQ ID NO: 2045203 - DNA, 15 bp, Homo sapiens
ttcaaagatagataa

SEQ ID NO: 2045204 - DNA, 15 bp, Homo sapiens
tcaaagatagataaa

SEQ ID NO: 2045205 - DNA, 15 bp, Homo sapiens
caaagatagataaaa

SEQ ID NO: 2045206 - DNA, 15 bp, Homo sapiens
aaagatagataaaac

SEQ ID NO: 2045207 - DNA, 15 bp, Homo sapiens
aagatagataaaaca

SEQ ID NO: 2045208 - DNA, 15 bp, Homo sapiens
agatagataaaacag

SEQ ID NO: 2045209 - DNA, 15 bp, Homo sapiens
gatagataaaacagg

SEQ ID NO: 2045210 - DNA, 15 bp, Homo sapiens
atagataaaacaggg

SEQ ID NO: 2045211 - DNA, 15 bp, Homo sapiens
tagataaaacagggg

SEQ ID NO: 2045212 - DNA, 15 bp, Homo sapiens
agataaaacaggggc

SEQ ID NO: 2045213 - DNA, 15 bp, Homo sapiens
gataaaacaggggct

SEQ ID NO: 2045214 - DNA, 15 bp, Homo sapiens
ataaaacaggggctc

SEQ ID NO: 2045215 - DNA, 15 bp, Homo sapiens
taaaacaggggctca

SEQ ID NO: 2045216 - DNA, 15 bp, Homo sapiens
aaaacaggggctcac

SEQ ID NO: 2045217 - DNA, 15 bp, Homo sapiens
aaacaggggctcacc

SEQ ID NO: 2045218 - DNA, 15 bp, Homo sapiens
aacaggggctcaccc

SEQ ID NO: 2045219 - DNA, 15 bp, Homo sapiens
acaggggctcaccct

SEQ ID NO: 2045220 - DNA, 15 bp, Homo sapiens
caggggctcaccctc

SEQ ID NO: 2045221 - DNA, 15 bp, Homo sapiens
aggggctcaccctca

SEQ ID NO: 2045222 - DNA, 15 bp, Homo sapiens
ggggctcaccctcaa

SEQ ID NO: 2045223 - DNA, 15 bp, Homo sapiens
gggctcaccctcaag

SEQ ID NO: 2045224 - DNA, 15 bp, Homo sapiens
ggctcaccctcaagg

SEQ ID NO: 2045225 - DNA, 15 bp, Homo sapiens
gctcaccctcaagga

SEQ ID NO: 2045226 - DNA, 15 bp, Homo sapiens
ctcaccctcaaggag

SEQ ID NO: 2045227 - DNA, 15 bp, Homo sapiens
tcaccctcaaggagg

SEQ ID NO: 2045228 - DNA, 15 bp, Homo sapiens
caccctcaaggaggg

SEQ ID NO: 2045229 - DNA, 15 bp, Homo sapiens
accctcaaggaggga

SEQ ID NO: 2045230 - DNA, 15 bp, Homo sapiens
ccctcaaggagggaa

SEQ ID NO: 2045231 - DNA, 15 bp, Homo sapiens
cctcaaggagggaag

SEQ ID NO: 2045232 - DNA, 15 bp, Homo sapiens
ctcaaggagggaagc

SEQ ID NO: 2045233 - DNA, 15 bp, Homo sapiens
tcaaggagggaagcc

SEQ ID NO: 2045234 - DNA, 15 bp, Homo sapiens
caaggagggaagcca

SEQ ID NO: 2045235 - DNA, 15 bp, Homo sapiens
aaggagggaagccag

SEQ ID NO: 2045236 - DNA, 15 bp, Homo sapiens
aggagggaagccaga

SEQ ID NO: 2045237 - DNA, 15 bp, Homo sapiens
ggagggaagccagaa

SEQ ID NO: 2045238 - DNA, 15 bp, Homo sapiens
gagggaagccagaaa

SEQ ID NO: 2045239 - DNA, 15 bp, Homo sapiens
agggaagccagaaaa

SEQ ID NO: 2045240 - DNA, 15 bp, Homo sapiens
gggaagccagaaaac

SEQ ID NO: 2045241 - DNA, 15 bp, Homo sapiens
ggaagccagaaaaca

SEQ ID NO: 2045242 - DNA, 15 bp, Homo sapiens
gaagccagaaaacac

SEQ ID NO: 2045243 - DNA, 15 bp, Homo sapiens
aagccagaaaacaca

SEQ ID NO: 2045244 - DNA, 15 bp, Homo sapiens
agccagaaaacacac

SEQ ID NO: 2045245 - DNA, 15 bp, Homo sapiens
gccagaaaacacaca

SEQ ID NO: 2045246 - DNA, 15 bp, Homo sapiens
ccagaaaacacacac

SEQ ID NO: 2045247 - DNA, 15 bp, Homo sapiens
cagaaaacacacact

SEQ ID NO: 2045248 - DNA, 15 bp, Homo sapiens
agaaaacacacactg

SEQ ID NO: 2045249 - DNA, 15 bp, Homo sapiens
gaaaacacacactgg

SEQ ID NO: 2045250 - DNA, 15 bp, Homo sapiens
aaaacacacactggt

SEQ ID NO: 2045251 - DNA, 15 bp, Homo sapiens
aaacacacactggtt

SEQ ID NO: 2045252 - DNA, 15 bp, Homo sapiens
aacacacactggttt

SEQ ID NO: 2045253 - DNA, 15 bp, Homo sapiens
acacacactggttta

SEQ ID NO: 2045254 - DNA, 15 bp, Homo sapiens
cacacactggtttac

SEQ ID NO: 2045255 - DNA, 15 bp, Homo sapiens
acacactggtttact

SEQ ID NO: 2045256 - DNA, 15 bp, Homo sapiens
cacactggtttactc

SEQ ID NO: 2045257 - DNA, 15 bp, Homo sapiens
acactggtttactct

SEQ ID NO: 2045258 - DNA, 15 bp, Homo sapiens
cactggtttactctg

SEQ ID NO: 2045259 - DNA, 15 bp, Homo sapiens
actggtttactctgg

SEQ ID NO: 2045260 - DNA, 15 bp, Homo sapiens
ctggtttactctggc

SEQ ID NO: 2045261 - DNA, 15 bp, Homo sapiens
tggtttactctggct

SEQ ID NO: 2045262 - DNA, 15 bp, Homo sapiens
ggtttactctggctg

SEQ ID NO: 2045263 - DNA, 15 bp, Homo sapiens
gtttactctggctgt

SEQ ID NO: 2045264 - DNA, 15 bp, Homo sapiens
tttactctggctgtg

SEQ ID NO: 2045265 - DNA, 15 bp, Homo sapiens
ttactctggctgtga

SEQ ID NO: 2045266 - DNA, 15 bp, Homo sapiens
tactctggctgtgat

SEQ ID NO: 2045267 - DNA, 15 bp, Homo sapiens
actctggctgtgatg

SEQ ID NO: 2045268 - DNA, 15 bp, Homo sapiens
ctctggctgtgatgg

SEQ ID NO: 2045269 - DNA, 15 bp, Homo sapiens
tctggctgtgatggg

SEQ ID NO: 2045270 - DNA, 15 bp, Homo sapiens
ctggctgtgatggga

SEQ ID NO: 2045271 - DNA, 15 bp, Homo sapiens
tggctgtgatgggag

SEQ ID NO: 2045272 - DNA, 15 bp, Homo sapiens
ggctgtgatgggagt

SEQ ID NO: 2045273 - DNA, 15 bp, Homo sapiens
gctgtgatgggagtg

SEQ ID NO: 2045274 - DNA, 15 bp, Homo sapiens
ctgtgatgggagtga

SEQ ID NO: 2045275 - DNA, 15 bp, Homo sapiens
tgtgatgggagtgac

SEQ ID NO: 2045276 - DNA, 15 bp, Homo sapiens
gtgatgggagtgact

SEQ ID NO: 2045277 - DNA, 15 bp, Homo sapiens
tgatgggagtgactc

SEQ ID NO: 2045278 - DNA, 15 bp, Homo sapiens
gatgggagtgactcc

SEQ ID NO: 2045279 - DNA, 15 bp, Homo sapiens
atgggagtgactcca

SEQ ID NO: 2045280 - DNA, 15 bp, Homo sapiens
tgggagtgactccag

SEQ ID NO: 2045281 - DNA, 15 bp, Homo sapiens
gggagtgactccagg

SEQ ID NO: 2045282 - DNA, 15 bp, Homo sapiens
ggagtgactccaggg

SEQ ID NO: 2045283 - DNA, 15 bp, Homo sapiens
gagtgactccagggt

SEQ ID NO: 2045284 - DNA, 15 bp, Homo sapiens
agtgactccagggtg

SEQ ID NO: 2045285 - DNA, 15 bp, Homo sapiens
gtgactccagggtgt

SEQ ID NO: 2045286 - DNA, 15 bp, Homo sapiens
tgactccagggtgtg

SEQ ID NO: 2045287 - DNA, 15 bp, Homo sapiens
gactccagggtgtgg

SEQ ID NO: 2045288 - DNA, 15 bp, Homo sapiens
actccagggtgtggc

SEQ ID NO: 2045289 - DNA, 15 bp, Homo sapiens
ctccagggtgtggcg

SEQ ID NO: 2045290 - DNA, 15 bp, Homo sapiens
tccagggtgtggcgg

SEQ ID NO: 2045291 - DNA, 15 bp, Homo sapiens
ccagggtgtggcggg

SEQ ID NO: 2045292 - DNA, 15 bp, Homo sapiens
cagggtgtggcggga

SEQ ID NO: 2045293 - DNA, 15 bp, Homo sapiens
agggtgtggcgggag

SEQ ID NO: 2045294 - DNA, 15 bp, Homo sapiens
gggtgtggcgggagc

SEQ ID NO: 2045295 - DNA, 15 bp, Homo sapiens
ggtgtggcgggagcc

SEQ ID NO: 2045296 - DNA, 15 bp, Homo sapiens
gtgtggcgggagccc

SEQ ID NO: 2045297 - DNA, 15 bp, Homo sapiens
tgtggcgggagccca

SEQ ID NO: 2045298 - DNA, 15 bp, Homo sapiens
gtggcgggagcccac

SEQ ID NO: 2045299 - DNA, 15 bp, Homo sapiens
tggcgggagcccaca

SEQ ID NO: 2045300 - DNA, 15 bp, Homo sapiens
ggcgggagcccacaa

SEQ ID NO: 2045301 - DNA, 15 bp, Homo sapiens
gcgggagcccacaag

SEQ ID NO: 2045302 - DNA, 15 bp, Homo sapiens
cgggagcccacaaga

SEQ ID NO: 2045303 - DNA, 15 bp, Homo sapiens
gggagcccacaagag

SEQ ID NO: 2045304 - DNA, 15 bp, Homo sapiens
ggagcccacaagagc

SEQ ID NO: 2045305 - DNA, 15 bp, Homo sapiens
gagcccacaagagcg

SEQ ID NO: 2045306 - DNA, 15 bp, Homo sapiens
agcccacaagagcgg

SEQ ID NO: 2045307 - DNA, 15 bp, Homo sapiens
gcccacaagagcggt

SEQ ID NO: 2045308 - DNA, 15 bp, Homo sapiens
cccacaagagcggta

SEQ ID NO: 2045309 - DNA, 15 bp, Homo sapiens
ccacaagagcggtac

SEQ ID NO: 2045310 - DNA, 15 bp, Homo sapiens
cacaagagcggtact

SEQ ID NO: 2045311 - DNA, 15 bp, Homo sapiens
acaagagcggtactg

SEQ ID NO: 2045312 - DNA, 15 bp, Homo sapiens
caagagcggtactgc

SEQ ID NO: 2045313 - DNA, 15 bp, Homo sapiens
aagagcggtactgca

SEQ ID NO: 2045314 - DNA, 15 bp, Homo sapiens
agagcggtactgcac

SEQ ID NO: 2045315 - DNA, 15 bp, Homo sapiens
gagcggtactgcaca

SEQ ID NO: 2045316 - DNA, 15 bp, Homo sapiens
agcggtactgcacag

SEQ ID NO: 2045317 - DNA, 15 bp, Homo sapiens
gcggtactgcacagc

SEQ ID NO: 2045318 - DNA, 15 bp, Homo sapiens
cggtactgcacagct

SEQ ID NO: 2045319 - DNA, 15 bp, Homo sapiens
ggtactgcacagctg

SEQ ID NO: 2045320 - DNA, 15 bp, Homo sapiens
gtactgcacagctgg

SEQ ID NO: 2045321 - DNA, 15 bp, Homo sapiens
tactgcacagctgga

SEQ ID NO: 2045322 - DNA, 15 bp, Homo sapiens
actgcacagctggaa

SEQ ID NO: 2045323 - DNA, 15 bp, Homo sapiens
ctgcacagctggaaa

SEQ ID NO: 2045324 - DNA, 15 bp, Homo sapiens
tgcacagctggaaaa

SEQ ID NO: 2045325 - DNA, 15 bp, Homo sapiens
gcacagctggaaaaa

SEQ ID NO: 2045326 - DNA, 15 bp, Homo sapiens
cacagctggaaaaag

SEQ ID NO: 2045327 - DNA, 15 bp, Homo sapiens
acagctggaaaaagg

SEQ ID NO: 2045328 - DNA, 15 bp, Homo sapiens
cagctggaaaaaggc

SEQ ID NO: 2045329 - DNA, 15 bp, Homo sapiens
agctggaaaaaggca

SEQ ID NO: 2045330 - DNA, 15 bp, Homo sapiens
gctggaaaaaggcaa

SEQ ID NO: 2045331 - DNA, 15 bp, Homo sapiens
ctggaaaaaggcaaa

SEQ ID NO: 2045332 - DNA, 15 bp, Homo sapiens
tggaaaaaggcaaag

SEQ ID NO: 2045333 - DNA, 15 bp, Homo sapiens
ggaaaaaggcaaagc

SEQ ID NO: 2045334 - DNA, 15 bp, Homo sapiens
gaaaaaggcaaagcc

SEQ ID NO: 2045335 - DNA, 15 bp, Homo sapiens
aaaaaggcaaagcca

SEQ ID NO: 2045336 - DNA, 15 bp, Homo sapiens
aaaaggcaaagccag

SEQ ID NO: 2045337 - DNA, 15 bp, Homo sapiens
aaaggcaaagccagg

SEQ ID NO: 2045338 - DNA, 15 bp, Homo sapiens
aaggcaaagccaggg

SEQ ID NO: 2045339 - DNA, 15 bp, Homo sapiens
aggcaaagccagggt

SEQ ID NO: 2045340 - DNA, 15 bp, Homo sapiens
ggcaaagccagggtt

SEQ ID NO: 2045341 - DNA, 15 bp, Homo sapiens
gcaaagccagggttc

SEQ ID NO: 2045342 - DNA, 15 bp, Homo sapiens
caaagccagggttca

SEQ ID NO: 2045343 - DNA, 15 bp, Homo sapiens
aaagccagggttcaa

SEQ ID NO: 2045344 - DNA, 15 bp, Homo sapiens
aagccagggttcaaa

SEQ ID NO: 2045345 - DNA, 15 bp, Homo sapiens
agccagggttcaaac

SEQ ID NO: 2045346 - DNA, 15 bp, Homo sapiens
gccagggttcaaacc

SEQ ID NO: 2045347 - DNA, 15 bp, Homo sapiens
ccagggttcaaacct

SEQ ID NO: 2045348 - DNA, 15 bp, Homo sapiens
cagggttcaaaccta

SEQ ID NO: 2045349 - DNA, 15 bp, Homo sapiens
agggttcaaacctag

SEQ ID NO: 2045350 - DNA, 15 bp, Homo sapiens
gggttcaaacctagg

SEQ ID NO: 2045351 - DNA, 15 bp, Homo sapiens
ggttcaaacctagga

SEQ ID NO: 2045352 - DNA, 15 bp, Homo sapiens
gttcaaacctaggac

SEQ ID NO: 2045353 - DNA, 15 bp, Homo sapiens
ttcaaacctaggacg

SEQ ID NO: 2045354 - DNA, 15 bp, Homo sapiens
tcaaacctaggacgg

SEQ ID NO: 2045355 - DNA, 15 bp, Homo sapiens
caaacctaggacgga

SEQ ID NO: 2045356 - DNA, 15 bp, Homo sapiens
aaacctaggacggac

SEQ ID NO: 2045357 - DNA, 15 bp, Homo sapiens
aacctaggacggact

SEQ ID NO: 2045358 - DNA, 15 bp, Homo sapiens
acctaggacggactt

SEQ ID NO: 2045359 - DNA, 15 bp, Homo sapiens
cctaggacggacttc

SEQ ID NO: 2045360 - DNA, 15 bp, Homo sapiens
ctaggacggacttcc

SEQ ID NO: 2045361 - DNA, 15 bp, Homo sapiens
taggacggacttcca

SEQ ID NO: 2045362 - DNA, 15 bp, Homo sapiens
aggacggacttccac

SEQ ID NO: 2045363 - DNA, 15 bp, Homo sapiens
ggacggacttccact

SEQ ID NO: 2045364 - DNA, 15 bp, Homo sapiens
gacggacttccactc

SEQ ID NO: 2045365 - DNA, 15 bp, Homo sapiens
acggacttccactca

SEQ ID NO: 2045366 - DNA, 15 bp, Homo sapiens
cggacttccactcaa

SEQ ID NO: 2045367 - DNA, 15 bp, Homo sapiens
ggacttccactcaag

SEQ ID NO: 2045368 - DNA, 15 bp, Homo sapiens
gacttccactcaagg

SEQ ID NO: 2045369 - DNA, 15 bp, Homo sapiens
acttccactcaagga

SEQ ID NO: 2045370 - DNA, 15 bp, Homo sapiens
cttccactcaaggac

SEQ ID NO: 2045371 - DNA, 15 bp, Homo sapiens
ttccactcaaggact

SEQ ID NO: 2045372 - DNA, 15 bp, Homo sapiens
tccactcaaggactc

SEQ ID NO: 2045373 - DNA, 15 bp, Homo sapiens
ccactcaaggactcc

SEQ ID NO: 2045374 - DNA, 15 bp, Homo sapiens
cactcaaggactcct

SEQ ID NO: 2045375 - DNA, 15 bp, Homo sapiens
actcaaggactcctc

SEQ ID NO: 2045376 - DNA, 15 bp, Homo sapiens
ctcaaggactcctct

SEQ ID NO: 2045377 - DNA, 15 bp, Homo sapiens
tcaaggactcctctc

SEQ ID NO: 2045378 - DNA, 15 bp, Homo sapiens
caaggactcctctca

SEQ ID NO: 2045379 - DNA, 15 bp, Homo sapiens
aaggactcctctcac

SEQ ID NO: 2045380 - DNA, 15 bp, Homo sapiens
aggactcctctcacg

SEQ ID NO: 2045381 - DNA, 15 bp, Homo sapiens
ggactcctctcacga

SEQ ID NO: 2045382 - DNA, 15 bp, Homo sapiens
gactcctctcacgac

SEQ ID NO: 2045383 - DNA, 15 bp, Homo sapiens
actcctctcacgacc

SEQ ID NO: 2045384 - DNA, 15 bp, Homo sapiens
ctcctctcacgacct

SEQ ID NO: 2045385 - DNA, 15 bp, Homo sapiens
tcctctcacgacctt

SEQ ID NO: 2045386 - DNA, 15 bp, Homo sapiens
cctctcacgaccttg

SEQ ID NO: 2045387 - DNA, 15 bp, Homo sapiens
ctctcacgaccttgg

SEQ ID NO: 2045388 - DNA, 15 bp, Homo sapiens
tctcacgaccttgga

SEQ ID NO: 2045389 - DNA, 15 bp, Homo sapiens
ctcacgaccttggaa

SEQ ID NO: 2045390 - DNA, 15 bp, Homo sapiens
tcacgaccttggaat

SEQ ID NO: 2045391 - DNA, 15 bp, Homo sapiens
cacgaccttggaatg

SEQ ID NO: 2045392 - DNA, 15 bp, Homo sapiens
acgaccttggaatgc

SEQ ID NO: 2045393 - DNA, 15 bp, Homo sapiens
cgaccttggaatgct

SEQ ID NO: 2045394 - DNA, 15 bp, Homo sapiens
gaccttggaatgctg

SEQ ID NO: 2045395 - DNA, 15 bp, Homo sapiens
accttggaatgctga

SEQ ID NO: 2045396 - DNA, 15 bp, Homo sapiens
ccttggaatgctgag

SEQ ID NO: 2045397 - DNA, 15 bp, Homo sapiens
cttggaatgctgaga

SEQ ID NO: 2045398 - DNA, 15 bp, Homo sapiens
ttggaatgctgagag

SEQ ID NO: 2045399 - DNA, 15 bp, Homo sapiens
tggaatgctgagaga

SEQ ID NO: 2045400 - DNA, 15 bp, Homo sapiens
ggaatgctgagagat

SEQ ID NO: 2045401 - DNA, 15 bp, Homo sapiens
gaatgctgagagatc

SEQ ID NO: 2045402 - DNA, 15 bp, Homo sapiens
aatgctgagagatca

SEQ ID NO: 2045403 - DNA, 15 bp, Homo sapiens
atgctgagagatcaa

SEQ ID NO: 2045404 - DNA, 15 bp, Homo sapiens
tgctgagagatcaag

SEQ ID NO: 2045405 - DNA, 15 bp, Homo sapiens
gctgagagatcaaga

SEQ ID NO: 2045406 - DNA, 15 bp, Homo sapiens
ctgagagatcaagaa

SEQ ID NO: 2045407 - DNA, 15 bp, Homo sapiens
tgagagatcaagaaa

SEQ ID NO: 2045408 - DNA, 15 bp, Homo sapiens
gagagatcaagaaat

SEQ ID NO: 2045409 - DNA, 15 bp, Homo sapiens
agagatcaagaaatg

SEQ ID NO: 2045410 - DNA, 15 bp, Homo sapiens
gagatcaagaaatgg

SEQ ID NO: 2045411 - DNA, 15 bp, Homo sapiens
agatcaagaaatggt

SEQ ID NO: 2045412 - DNA, 15 bp, Homo sapiens
gatcaagaaatggtg

SEQ ID NO: 2045413 - DNA, 15 bp, Homo sapiens
atcaagaaatggtgc

SEQ ID NO: 2045414 - DNA, 15 bp, Homo sapiens
tcaagaaatggtgca

SEQ ID NO: 2045415 - DNA, 15 bp, Homo sapiens
caagaaatggtgcaa

SEQ ID NO: 2045416 - DNA, 15 bp, Homo sapiens
aagaaatggtgcaaa

SEQ ID NO: 2045417 - DNA, 15 bp, Homo sapiens
agaaatggtgcaaaa

SEQ ID NO: 2045418 - DNA, 15 bp, Homo sapiens
gaaatggtgcaaaaa

SEQ ID NO: 2045419 - DNA, 15 bp, Homo sapiens
aaatggtgcaaaaac

SEQ ID NO: 2045420 - DNA, 15 bp, Homo sapiens
aatggtgcaaaaacc

SEQ ID NO: 2045421 - DNA, 15 bp, Homo sapiens
atggtgcaaaaaccc

SEQ ID NO: 2045422 - DNA, 15 bp, Homo sapiens
tggtgcaaaaaccca

SEQ ID NO: 2045423 - DNA, 15 bp, Homo sapiens
ggtgcaaaaacccac

SEQ ID NO: 2045424 - DNA, 15 bp, Homo sapiens
gtgcaaaaacccaca

SEQ ID NO: 2045425 - DNA, 15 bp, Homo sapiens
tgcaaaaacccacac

SEQ ID NO: 2045426 - DNA, 15 bp, Homo sapiens
gcaaaaacccacaca

SEQ ID NO: 2045427 - DNA, 15 bp, Homo sapiens
caaaaacccacacac

SEQ ID NO: 2045428 - DNA, 15 bp, Homo sapiens
aaaaacccacacacg

SEQ ID NO: 2045429 - DNA, 15 bp, Homo sapiens
aaaacccacacacga

SEQ ID NO: 2045430 - DNA, 15 bp, Homo sapiens
aaacccacacacgaa

SEQ ID NO: 2045431 - DNA, 15 bp, Homo sapiens
aacccacacacgaat

SEQ ID NO: 2045432 - DNA, 15 bp, Homo sapiens
acccacacacgaatc

SEQ ID NO: 2045433 - DNA, 15 bp, Homo sapiens
cccacacacgaatct

SEQ ID NO: 2045434 - DNA, 15 bp, Homo sapiens
ccacacacgaatctc

SEQ ID NO: 2045435 - DNA, 15 bp, Homo sapiens
cacacacgaatctcc

SEQ ID NO: 2045436 - DNA, 15 bp, Homo sapiens
acacacgaatctcca

SEQ ID NO: 2045437 - DNA, 15 bp, Homo sapiens
cacacgaatctccat

SEQ ID NO: 2045438 - DNA, 15 bp, Homo sapiens
acacgaatctccatt

SEQ ID NO: 2045439 - DNA, 15 bp, Homo sapiens
cacgaatctccatta

SEQ ID NO: 2045440 - DNA, 15 bp, Homo sapiens
acgaatctccattac

SEQ ID NO: 2045441 - DNA, 15 bp, Homo sapiens
cgaatctccattaca

SEQ ID NO: 2045442 - DNA, 15 bp, Homo sapiens
gaatctccattacaa

SEQ ID NO: 2045443 - DNA, 15 bp, Homo sapiens
aatctccattacaac

SEQ ID NO: 2045444 - DNA, 15 bp, Homo sapiens
atctccattacaacc

SEQ ID NO: 2045445 - DNA, 15 bp, Homo sapiens
tctccattacaaccc

SEQ ID NO: 2045446 - DNA, 15 bp, Homo sapiens
ctccattacaaccct

SEQ ID NO: 2045447 - DNA, 15 bp, Homo sapiens
tccattacaaccctc

SEQ ID NO: 2045448 - DNA, 15 bp, Homo sapiens
ccattacaaccctct

SEQ ID NO: 2045449 - DNA, 15 bp, Homo sapiens
cattacaaccctctc

SEQ ID NO: 2045450 - DNA, 15 bp, Homo sapiens
attacaaccctctct

SEQ ID NO: 2045451 - DNA, 15 bp, Homo sapiens
ttacaaccctctcta

SEQ ID NO: 2045452 - DNA, 15 bp, Homo sapiens
tacaaccctctctat

SEQ ID NO: 2045453 - DNA, 15 bp, Homo sapiens
acaaccctctctatc

SEQ ID NO: 2045454 - DNA, 15 bp, Homo sapiens
caaccctctctatct

SEQ ID NO: 2045455 - DNA, 15 bp, Homo sapiens
aaccctctctatctc

SEQ ID NO: 2045456 - DNA, 15 bp, Homo sapiens
accctctctatctca

SEQ ID NO: 2045457 - DNA, 15 bp, Homo sapiens
ccctctctatctcac

SEQ ID NO: 2045458 - DNA, 15 bp, Homo sapiens
cctctctatctcact

SEQ ID NO: 2045459 - DNA, 15 bp, Homo sapiens
ctctctatctcactg

SEQ ID NO: 2045460 - DNA, 15 bp, Homo sapiens
tctctatctcactgg

SEQ ID NO: 2045461 - DNA, 15 bp, Homo sapiens
ctctatctcactgga

SEQ ID NO: 2045462 - DNA, 15 bp, Homo sapiens
tctatctcactggat

SEQ ID NO: 2045463 - DNA, 15 bp, Homo sapiens
ctatctcactggatc

SEQ ID NO: 2045464 - DNA, 15 bp, Homo sapiens
tatctcactggatcc

SEQ ID NO: 2045465 - DNA, 15 bp, Homo sapiens
atctcactggatcct

SEQ ID NO: 2045466 - DNA, 15 bp, Homo sapiens
tctcactggatccta

SEQ ID NO: 2045467 - DNA, 15 bp, Homo sapiens
ctcactggatcctag

SEQ ID NO: 2045468 - DNA, 15 bp, Homo sapiens
tcactggatcctaga

SEQ ID NO: 2045469 - DNA, 15 bp, Homo sapiens
cactggatcctagag

SEQ ID NO: 2045470 - DNA, 15 bp, Homo sapiens
actggatcctagagt

SEQ ID NO: 2045471 - DNA, 15 bp, Homo sapiens
ctggatcctagagta

SEQ ID NO: 2045472 - DNA, 15 bp, Homo sapiens
tggatcctagagtaa

SEQ ID NO: 2045473 - DNA, 15 bp, Homo sapiens
ggatcctagagtaac

SEQ ID NO: 2045474 - DNA, 15 bp, Homo sapiens
gatcctagagtaaca

SEQ ID NO: 2045475 - DNA, 15 bp, Homo sapiens
atcctagagtaacat

SEQ ID NO: 2045476 - DNA, 15 bp, Homo sapiens
tcctagagtaacatc

SEQ ID NO: 2045477 - DNA, 15 bp, Homo sapiens
cctagagtaacatct

SEQ ID NO: 2045478 - DNA, 15 bp, Homo sapiens
ctagagtaacatctg

SEQ ID NO: 2045479 - DNA, 15 bp, Homo sapiens
tagagtaacatctgt

SEQ ID NO: 2045480 - DNA, 15 bp, Homo sapiens
agagtaacatctgtc

SEQ ID NO: 2045481 - DNA, 15 bp, Homo sapiens
gagtaacatctgtca

SEQ ID NO: 2045482 - DNA, 15 bp, Homo sapiens
agtaacatctgtcag

SEQ ID NO: 2045483 - DNA, 15 bp, Homo sapiens
gtaacatctgtcaga

SEQ ID NO: 2045484 - DNA, 15 bp, Homo sapiens
taacatctgtcagaa

SEQ ID NO: 2045485 - DNA, 15 bp, Homo sapiens
aacatctgtcagaaa

SEQ ID NO: 2045486 - DNA, 15 bp, Homo sapiens
acatctgtcagaaag

SEQ ID NO: 2045487 - DNA, 15 bp, Homo sapiens
catctgtcagaaagt

SEQ ID NO: 2045488 - DNA, 15 bp, Homo sapiens
atctgtcagaaagta

SEQ ID NO: 2045489 - DNA, 15 bp, Homo sapiens
tctgtcagaaagtaa

SEQ ID NO: 2045490 - DNA, 15 bp, Homo sapiens
ctgtcagaaagtaac

SEQ ID NO: 2045491 - DNA, 15 bp, Homo sapiens
tgtcagaaagtaact

SEQ ID NO: 2045492 - DNA, 15 bp, Homo sapiens
gtcagaaagtaacta

SEQ ID NO: 2045493 - DNA, 15 bp, Homo sapiens
tcagaaagtaactac

SEQ ID NO: 2045494 - DNA, 15 bp, Homo sapiens
cagaaagtaactaca

SEQ ID NO: 2045495 - DNA, 15 bp, Homo sapiens
agaaagtaactacat

SEQ ID NO: 2045496 - DNA, 15 bp, Homo sapiens
gaaagtaactacata

SEQ ID NO: 2045497 - DNA, 15 bp, Homo sapiens
aaagtaactacatat

SEQ ID NO: 2045498 - DNA, 15 bp, Homo sapiens
aagtaactacatatt

SEQ ID NO: 2045499 - DNA, 15 bp, Homo sapiens
agtaactacatatta

SEQ ID NO: 2045500 - DNA, 15 bp, Homo sapiens
gtaactacatattat

SEQ ID NO: 2045501 - DNA, 15 bp, Homo sapiens
taactacatattatt

SEQ ID NO: 2045502 - DNA, 15 bp, Homo sapiens
aactacatattattt

SEQ ID NO: 2045503 - DNA, 15 bp, Homo sapiens
actacatattatttg

SEQ ID NO: 2045504 - DNA, 15 bp, Homo sapiens
ctacatattatttgg

SEQ ID NO: 2045505 - DNA, 15 bp, Homo sapiens
tacatattatttggg

SEQ ID NO: 2045506 - DNA, 15 bp, Homo sapiens
acatattatttgggt

SEQ ID NO: 2045507 - DNA, 15 bp, Homo sapiens
catattatttgggtg

SEQ ID NO: 2045508 - DNA, 15 bp, Homo sapiens
atattatttgggtga

SEQ ID NO: 2045509 - DNA, 15 bp, Homo sapiens
tattatttgggtgat

SEQ ID NO: 2045510 - DNA, 15 bp, Homo sapiens
attatttgggtgatt

SEQ ID NO: 2045511 - DNA, 15 bp, Homo sapiens
ttatttgggtgattt

SEQ ID NO: 2045512 - DNA, 15 bp, Homo sapiens
tatttgggtgattta

SEQ ID NO: 2045513 - DNA, 15 bp, Homo sapiens
atttgggtgatttat

SEQ ID NO: 2045514 - DNA, 15 bp, Homo sapiens
tttgggtgatttatt

SEQ ID NO: 2045515 - DNA, 15 bp, Homo sapiens
ttgggtgatttattg

SEQ ID NO: 2045516 - DNA, 15 bp, Homo sapiens
tgggtgatttattgt

SEQ ID NO: 2045517 - DNA, 15 bp, Homo sapiens
gggtgatttattgtg

SEQ ID NO: 2045518 - DNA, 15 bp, Homo sapiens
ggtgatttattgtga

SEQ ID NO: 2045519 - DNA, 15 bp, Homo sapiens
gtgatttattgtgaa

SEQ ID NO: 2045520 - DNA, 15 bp, Homo sapiens
tgatttattgtgaat

SEQ ID NO: 2045521 - DNA, 15 bp, Homo sapiens
gatttattgtgaatg

SEQ ID NO: 2045522 - DNA, 15 bp, Homo sapiens
atttattgtgaatgt

SEQ ID NO: 2045523 - DNA, 15 bp, Homo sapiens
tttattgtgaatgtg

SEQ ID NO: 2045524 - DNA, 15 bp, Homo sapiens
ttattgtgaatgtgt

SEQ ID NO: 2045525 - DNA, 15 bp, Homo sapiens
tattgtgaatgtgta

SEQ ID NO: 2045526 - DNA, 15 bp, Homo sapiens
attgtgaatgtgtaa

SEQ ID NO: 2045527 - DNA, 15 bp, Homo sapiens
tgtgaatgtgtaagt

SEQ ID NO: 2045528 - DNA, 15 bp, Homo sapiens
gtgaatgtgtaagtt

SEQ ID NO: 2045529 - DNA, 15 bp, Homo sapiens
tgaatgtgtaagttc

SEQ ID NO: 2045530 - DNA, 15 bp, Homo sapiens
gaatgtgtaagttcc

SEQ ID NO: 2045531 - DNA, 15 bp, Homo sapiens
aatgtgtaagttccg

SEQ ID NO: 2045532 - DNA, 15 bp, Homo sapiens
atgtgtaagttccgt

SEQ ID NO: 2045533 - DNA, 15 bp, Homo sapiens
tgtgtaagttccgtg

SEQ ID NO: 2045534 - DNA, 15 bp, Homo sapiens
gtgtaagttccgtgt

SEQ ID NO: 2045535 - DNA, 15 bp, Homo sapiens
tgtaagttccgtgtg

SEQ ID NO: 2045536 - DNA, 15 bp, Homo sapiens
gtaagttccgtgtga

SEQ ID NO: 2045537 - DNA, 15 bp, Homo sapiens
taagttccgtgtgag

SEQ ID NO: 2045538 - DNA, 15 bp, Homo sapiens
aagttccgtgtgagt

SEQ ID NO: 2045539 - DNA, 15 bp, Homo sapiens
agttccgtgtgagta

SEQ ID NO: 2045540 - DNA, 15 bp, Homo sapiens
gttccgtgtgagtag

SEQ ID NO: 2045541 - DNA, 15 bp, Homo sapiens
ttccgtgtgagtagg

SEQ ID NO: 2045542 - DNA, 15 bp, Homo sapiens
tccgtgtgagtagga

SEQ ID NO: 2045543 - DNA, 15 bp, Homo sapiens
ccgtgtgagtaggag

SEQ ID NO: 2045544 - DNA, 15 bp, Homo sapiens
cgtgtgagtaggagc

SEQ ID NO: 2045545 - DNA, 15 bp, Homo sapiens
gtgtgagtaggagct

SEQ ID NO: 2045546 - DNA, 15 bp, Homo sapiens
tgtgagtaggagctg

SEQ ID NO: 2045547 - DNA, 15 bp, Homo sapiens
gtgagtaggagctgc

SEQ ID NO: 2045548 - DNA, 15 bp, Homo sapiens
tgagtaggagctgca

SEQ ID NO: 2045549 - DNA, 15 bp, Homo sapiens
gagtaggagctgcat

SEQ ID NO: 2045550 - DNA, 15 bp, Homo sapiens
agtaggagctgcatc

SEQ ID NO: 2045551 - DNA, 15 bp, Homo sapiens
gtaggagctgcatct

SEQ ID NO: 2045552 - DNA, 15 bp, Homo sapiens
taggagctgcatcta

SEQ ID NO: 2045553 - DNA, 15 bp, Homo sapiens
aggagctgcatctag

SEQ ID NO: 2045554 - DNA, 15 bp, Homo sapiens
ggagctgcatctaga

SEQ ID NO: 2045555 - DNA, 15 bp, Homo sapiens
gagctgcatctagat

SEQ ID NO: 2045556 - DNA, 15 bp, Homo sapiens
agctgcatctagatt

SEQ ID NO: 2045557 - DNA, 15 bp, Homo sapiens
gctgcatctagatta

SEQ ID NO: 2045558 - DNA, 15 bp, Homo sapiens
ctgcatctagattaa

SEQ ID NO: 2045559 - DNA, 15 bp, Homo sapiens
tgcatctagattaag

SEQ ID NO: 2045560 - DNA, 15 bp, Homo sapiens
gcatctagattaagt

SEQ ID NO: 2045561 - DNA, 15 bp, Homo sapiens
catctagattaagtt

SEQ ID NO: 2045562 - DNA, 15 bp, Homo sapiens
atctagattaagttt

SEQ ID NO: 2045563 - DNA, 15 bp, Homo sapiens
tctagattaagtttg

SEQ ID NO: 2045564 - DNA, 15 bp, Homo sapiens
ctagattaagtttga

SEQ ID NO: 2045565 - DNA, 15 bp, Homo sapiens
tagattaagtttgaa

SEQ ID NO: 2045566 - DNA, 15 bp, Homo sapiens
agattaagtttgaat

SEQ ID NO: 2045567 - DNA, 15 bp, Homo sapiens
gattaagtttgaatt

SEQ ID NO: 2045568 - DNA, 15 bp, Homo sapiens
attaagtttgaattt

SEQ ID NO: 2045569 - DNA, 15 bp, Homo sapiens
ttaagtttgaatttt

SEQ ID NO: 2045570 - DNA, 15 bp, Homo sapiens
taagtttgaattttc

SEQ ID NO: 2045571 - DNA, 15 bp, Homo sapiens
aagtttgaattttca

SEQ ID NO: 2045572 - DNA, 15 bp, Homo sapiens
agtttgaattttcag

SEQ ID NO: 2045573 - DNA, 15 bp, Homo sapiens
gtttgaattttcagg

SEQ ID NO: 2045574 - DNA, 15 bp, Homo sapiens
tttgaattttcaggc

SEQ ID NO: 2045575 - DNA, 15 bp, Homo sapiens
ttgaattttcaggcc

SEQ ID NO: 2045576 - DNA, 15 bp, Homo sapiens
tgaattttcaggcct

SEQ ID NO: 2045577 - DNA, 15 bp, Homo sapiens
gaattttcaggcctt

SEQ ID NO: 2045578 - DNA, 15 bp, Homo sapiens
aattttcaggccttg

SEQ ID NO: 2045579 - DNA, 15 bp, Homo sapiens
attttcaggccttgc

SEQ ID NO: 2045580 - DNA, 15 bp, Homo sapiens
ttttcaggccttgcg

SEQ ID NO: 2045581 - DNA, 15 bp, Homo sapiens
tttcaggccttgcgt

SEQ ID NO: 2045582 - DNA, 15 bp, Homo sapiens
ttcaggccttgcgta

SEQ ID NO: 2045583 - DNA, 15 bp, Homo sapiens
tcaggccttgcgtag

SEQ ID NO: 2045584 - DNA, 15 bp, Homo sapiens
caggccttgcgtagt

SEQ ID NO: 2045585 - DNA, 15 bp, Homo sapiens
aggccttgcgtagtc

SEQ ID NO: 2045586 - DNA, 15 bp, Homo sapiens
ggccttgcgtagtcc

SEQ ID NO: 2045587 - DNA, 15 bp, Homo sapiens
gccttgcgtagtccc

SEQ ID NO: 2045588 - DNA, 15 bp, Homo sapiens
ccttgcgtagtccct

SEQ ID NO: 2045589 - DNA, 15 bp, Homo sapiens
cttgcgtagtccctg

SEQ ID NO: 2045590 - DNA, 15 bp, Homo sapiens
ttgcgtagtccctgg

SEQ ID NO: 2045591 - DNA, 15 bp, Homo sapiens
tgcgtagtccctggc

SEQ ID NO: 2045592 - DNA, 15 bp, Homo sapiens
gcgtagtccctggca

SEQ ID NO: 2045593 - DNA, 15 bp, Homo sapiens
cgtagtccctggcac

SEQ ID NO: 2045594 - DNA, 15 bp, Homo sapiens
gtagtccctggcaca

SEQ ID NO: 2045595 - DNA, 15 bp, Homo sapiens
tagtccctggcacag

SEQ ID NO: 2045596 - DNA, 15 bp, Homo sapiens
agtccctggcacaga

SEQ ID NO: 2045597 - DNA, 15 bp, Homo sapiens
gtccctggcacagag

SEQ ID NO: 2045598 - DNA, 15 bp, Homo sapiens
tccctggcacagagc

SEQ ID NO: 2045599 - DNA, 15 bp, Homo sapiens
ccctggcacagagcc

SEQ ID NO: 2045600 - DNA, 15 bp, Homo sapiens
cctggcacagagccc

SEQ ID NO: 2045601 - DNA, 15 bp, Homo sapiens
ctggcacagagccct

SEQ ID NO: 2045602 - DNA, 15 bp, Homo sapiens
tggcacagagcccta

SEQ ID NO: 2045603 - DNA, 15 bp, Homo sapiens
ggcacagagccctag

SEQ ID NO: 2045604 - DNA, 15 bp, Homo sapiens
gcacagagccctagc

SEQ ID NO: 2045605 - DNA, 15 bp, Homo sapiens
cacagagccctagct

SEQ ID NO: 2045606 - DNA, 15 bp, Homo sapiens
acagagccctagctg

SEQ ID NO: 2045607 - DNA, 15 bp, Homo sapiens
cagagccctagctga

SEQ ID NO: 2045608 - DNA, 15 bp, Homo sapiens
agagccctagctgaa

SEQ ID NO: 2045609 - DNA, 15 bp, Homo sapiens
gagccctagctgaat

SEQ ID NO: 2045610 - DNA, 15 bp, Homo sapiens
agccctagctgaata

SEQ ID NO: 2045611 - DNA, 15 bp, Homo sapiens
gccctagctgaataa

SEQ ID NO: 2045612 - DNA, 15 bp, Homo sapiens
ccctagctgaataaa

SEQ ID NO: 2045613 - DNA, 15 bp, Homo sapiens
cctagctgaataaat

SEQ ID NO: 2045614 - DNA, 15 bp, Homo sapiens
ctagctgaataaata

SEQ ID NO: 2045615 - DNA, 15 bp, Homo sapiens
tagctgaataaatac

SEQ ID NO: 2045616 - DNA, 15 bp, Homo sapiens
agctgaataaatact

SEQ ID NO: 2045617 - DNA, 15 bp, Homo sapiens
gctgaataaatactg

SEQ ID NO: 2045618 - DNA, 15 bp, Homo sapiens
ctgaataaatactgt

SEQ ID NO: 2045619 - DNA, 15 bp, Homo sapiens
tgaataaatactgtc

SEQ ID NO: 2045620 - DNA, 15 bp, Homo sapiens
gaataaatactgtcg

SEQ ID NO: 2045621 - DNA, 15 bp, Homo sapiens
aataaatactgtcga

SEQ ID NO: 2045622 - DNA, 15 bp, Homo sapiens
ataaatactgtcgag

SEQ ID NO: 2045623 - DNA, 15 bp, Homo sapiens
taaatactgtcgagt

SEQ ID NO: 2045624 - DNA, 15 bp, Homo sapiens
aaatactgtcgagtg

SEQ ID NO: 2045625 - DNA, 15 bp, Homo sapiens
aatactgtcgagtga

SEQ ID NO: 2045626 - DNA, 15 bp, Homo sapiens
atactgtcgagtgaa

SEQ ID NO: 2045627 - DNA, 15 bp, Homo sapiens
tactgtcgagtgaat

SEQ ID NO: 2045628 - DNA, 15 bp, Homo sapiens
actgtcgagtgaatc

SEQ ID NO: 2045629 - DNA, 15 bp, Homo sapiens
ctgtcgagtgaatca

SEQ ID NO: 2045630 - DNA, 15 bp, Homo sapiens
tgtcgagtgaatcaa

SEQ ID NO: 2045631 - DNA, 15 bp, Homo sapiens
gtcgagtgaatcaaa

SEQ ID NO: 2045632 - DNA, 15 bp, Homo sapiens
tcgagtgaatcaaaa

SEQ ID NO: 2045633 - DNA, 15 bp, Homo sapiens
cgagtgaatcaaaaa

SEQ ID NO: 2045634 - DNA, 15 bp, Homo sapiens
gagtgaatcaaaaat

SEQ ID NO: 2045635 - DNA, 15 bp, Homo sapiens
agtgaatcaaaaatt

SEQ ID NO: 2045636 - DNA, 15 bp, Homo sapiens
gtgaatcaaaaattg

SEQ ID NO: 2045637 - DNA, 15 bp, Homo sapiens
tgaatcaaaaattgc

SEQ ID NO: 2045638 - DNA, 15 bp, Homo sapiens
gaatcaaaaattgcg

SEQ ID NO: 2045639 - DNA, 15 bp, Homo sapiens
aatcaaaaattgcga

SEQ ID NO: 2045640 - DNA, 15 bp, Homo sapiens
atcaaaaattgcgat

SEQ ID NO: 2045641 - DNA, 15 bp, Homo sapiens
tcaaaaattgcgata

SEQ ID NO: 2045642 - DNA, 15 bp, Homo sapiens
caaaaattgcgataa

SEQ ID NO: 2045643 - DNA, 15 bp, Homo sapiens
aaaaattgcgataaa

SEQ ID NO: 2045644 - DNA, 15 bp, Homo sapiens
aaaattgcgataaaa

SEQ ID NO: 2045645 - DNA, 15 bp, Homo sapiens
aaattgcgataaaac

SEQ ID NO: 2045646 - DNA, 15 bp, Homo sapiens
aattgcgataaaact

SEQ ID NO: 2045647 - DNA, 15 bp, Homo sapiens
attgcgataaaactt

SEQ ID NO: 2045648 - DNA, 15 bp, Homo sapiens
ttgcgataaaacttg

SEQ ID NO: 2045649 - DNA, 15 bp, Homo sapiens
tgcgataaaacttgg

SEQ ID NO: 2045650 - DNA, 15 bp, Homo sapiens
gcgataaaacttgga

SEQ ID NO: 2045651 - DNA, 15 bp, Homo sapiens
cgataaaacttggag

SEQ ID NO: 2045652 - DNA, 15 bp, Homo sapiens
gataaaacttggagc

SEQ ID NO: 2045653 - DNA, 15 bp, Homo sapiens
ataaaacttggagca

SEQ ID NO: 2045654 - DNA, 15 bp, Homo sapiens
taaaacttggagcaa

SEQ ID NO: 2045655 - DNA, 15 bp, Homo sapiens
aaaacttggagcaaa

SEQ ID NO: 2045656 - DNA, 15 bp, Homo sapiens
aaacttggagcaaaa

SEQ ID NO: 2045657 - DNA, 15 bp, Homo sapiens
aacttggagcaaaat

SEQ ID NO: 2045658 - DNA, 15 bp, Homo sapiens
acttggagcaaaata

SEQ ID NO: 2045659 - DNA, 15 bp, Homo sapiens
cttggagcaaaataa

SEQ ID NO: 2045660 - DNA, 15 bp, Homo sapiens
ttggagcaaaataac

SEQ ID NO: 2045661 - DNA, 15 bp, Homo sapiens
tggagcaaaataaca

SEQ ID NO: 2045662 - DNA, 15 bp, Homo sapiens
ggagcaaaataacac

SEQ ID NO: 2045663 - DNA, 15 bp, Homo sapiens
gagcaaaataacact

SEQ ID NO: 2045664 - DNA, 15 bp, Homo sapiens
agcaaaataacacta

SEQ ID NO: 2045665 - DNA, 15 bp, Homo sapiens
gcaaaataacactac

SEQ ID NO: 2045666 - DNA, 15 bp, Homo sapiens
caaaataacactacc

SEQ ID NO: 2045667 - DNA, 15 bp, Homo sapiens
aaaataacactacca

SEQ ID NO: 2045668 - DNA, 15 bp, Homo sapiens
aaataacactaccag

SEQ ID NO: 2045669 - DNA, 15 bp, Homo sapiens
aataacactaccagg

SEQ ID NO: 2045670 - DNA, 15 bp, Homo sapiens
ataacactaccagga

SEQ ID NO: 2045671 - DNA, 15 bp, Homo sapiens
taacactaccaggag

SEQ ID NO: 2045672 - DNA, 15 bp, Homo sapiens
aacactaccaggaga

SEQ ID NO: 2045673 - DNA, 15 bp, Homo sapiens
acactaccaggagac

SEQ ID NO: 2045674 - DNA, 15 bp, Homo sapiens
cactaccaggagaca

SEQ ID NO: 2045675 - DNA, 15 bp, Homo sapiens
actaccaggagacag

SEQ ID NO: 2045676 - DNA, 15 bp, Homo sapiens
ctaccaggagacaga

SEQ ID NO: 2045677 - DNA, 15 bp, Homo sapiens
taccaggagacagag

SEQ ID NO: 2045678 - DNA, 15 bp, Homo sapiens
accaggagacagagt

SEQ ID NO: 2045679 - DNA, 15 bp, Homo sapiens
ccaggagacagagtg

SEQ ID NO: 2045680 - DNA, 15 bp, Homo sapiens
caggagacagagtgg

SEQ ID NO: 2045681 - DNA, 15 bp, Homo sapiens
aggagacagagtggc

SEQ ID NO: 2045682 - DNA, 15 bp, Homo sapiens
ggagacagagtggct

SEQ ID NO: 2045683 - DNA, 15 bp, Homo sapiens
gagacagagtggctc

SEQ ID NO: 2045684 - DNA, 15 bp, Homo sapiens
agacagagtggctca

SEQ ID NO: 2045685 - DNA, 15 bp, Homo sapiens
gacagagtggctcag

SEQ ID NO: 2045686 - DNA, 15 bp, Homo sapiens
acagagtggctcagc

SEQ ID NO: 2045687 - DNA, 15 bp, Homo sapiens
cagagtggctcagcg

SEQ ID NO: 2045688 - DNA, 15 bp, Homo sapiens
agagtggctcagcgc

SEQ ID NO: 2045689 - DNA, 15 bp, Homo sapiens
gagtggctcagcgcc

SEQ ID NO: 2045690 - DNA, 15 bp, Homo sapiens
agtggctcagcgccc

SEQ ID NO: 2045691 - DNA, 15 bp, Homo sapiens
gtggctcagcgccct

SEQ ID NO: 2045692 - DNA, 15 bp, Homo sapiens
tggctcagcgcccta

SEQ ID NO: 2045693 - DNA, 15 bp, Homo sapiens
ggctcagcgccctaa

SEQ ID NO: 2045694 - DNA, 15 bp, Homo sapiens
gctcagcgccctaaa

SEQ ID NO: 2045695 - DNA, 15 bp, Homo sapiens
ctcagcgccctaaac

SEQ ID NO: 2045696 - DNA, 15 bp, Homo sapiens
tcagcgccctaaaca

SEQ ID NO: 2045697 - DNA, 15 bp, Homo sapiens
cagcgccctaaacag

SEQ ID NO: 2045698 - DNA, 15 bp, Homo sapiens
agcgccctaaacagg

SEQ ID NO: 2045699 - DNA, 15 bp, Homo sapiens
gcgccctaaacaggt

SEQ ID NO: 2045700 - DNA, 15 bp, Homo sapiens
cgccctaaacaggtg

SEQ ID NO: 2045701 - DNA, 15 bp, Homo sapiens
gccctaaacaggtgt

SEQ ID NO: 2045702 - DNA, 15 bp, Homo sapiens
ccctaaacaggtgtg

SEQ ID NO: 2045703 - DNA, 15 bp, Homo sapiens
cctaaacaggtgtgg

SEQ ID NO: 2045704 - DNA, 15 bp, Homo sapiens
ctaaacaggtgtgga

SEQ ID NO: 2045705 - DNA, 15 bp, Homo sapiens
taaacaggtgtggag

SEQ ID NO: 2045706 - DNA, 15 bp, Homo sapiens
aaacaggtgtggagg

SEQ ID NO: 2045707 - DNA, 15 bp, Homo sapiens
aacaggtgtggagga

SEQ ID NO: 2045708 - DNA, 15 bp, Homo sapiens
acaggtgtggaggac

SEQ ID NO: 2045709 - DNA, 15 bp, Homo sapiens
caggtgtggaggacc

SEQ ID NO: 2045710 - DNA, 15 bp, Homo sapiens
aggtgtggaggacca

SEQ ID NO: 2045711 - DNA, 15 bp, Homo sapiens
ggtgtggaggaccac

SEQ ID NO: 2045712 - DNA, 15 bp, Homo sapiens
gtgtggaggaccaca

SEQ ID NO: 2045713 - DNA, 15 bp, Homo sapiens
tgtggaggaccacaa

SEQ ID NO: 2045714 - DNA, 15 bp, Homo sapiens
gtggaggaccacaaa

SEQ ID NO: 2045715 - DNA, 15 bp, Homo sapiens
tggaggaccacaaag

SEQ ID NO: 2045716 - DNA, 15 bp, Homo sapiens
ggaggaccacaaagg

SEQ ID NO: 2045717 - DNA, 15 bp, Homo sapiens
gaggaccacaaaggg

SEQ ID NO: 2045718 - DNA, 15 bp, Homo sapiens
aggaccacaaaggga

SEQ ID NO: 2045719 - DNA, 15 bp, Homo sapiens
ggaccacaaagggag

SEQ ID NO: 2045720 - DNA, 15 bp, Homo sapiens
gaccacaaagggagt

SEQ ID NO: 2045721 - DNA, 15 bp, Homo sapiens
accacaaagggagtt

SEQ ID NO: 2045722 - DNA, 15 bp, Homo sapiens
ccacaaagggagtta

SEQ ID NO: 2045723 - DNA, 15 bp, Homo sapiens
cacaaagggagttag

SEQ ID NO: 2045724 - DNA, 15 bp, Homo sapiens
acaaagggagttaga

SEQ ID NO: 2045725 - DNA, 15 bp, Homo sapiens
caaagggagttagaa

SEQ ID NO: 2045726 - DNA, 15 bp, Homo sapiens
aaagggagttagaaa

SEQ ID NO: 2045727 - DNA, 15 bp, Homo sapiens
aagggagttagaaaa

SEQ ID NO: 2045728 - DNA, 15 bp, Homo sapiens
agggagttagaaaaa

SEQ ID NO: 2045729 - DNA, 15 bp, Homo sapiens
gggagttagaaaaag

SEQ ID NO: 2045730 - DNA, 15 bp, Homo sapiens
ggagttagaaaaagc

SEQ ID NO: 2045731 - DNA, 15 bp, Homo sapiens
gagttagaaaaagca

SEQ ID NO: 2045732 - DNA, 15 bp, Homo sapiens
agttagaaaaagcag

SEQ ID NO: 2045733 - DNA, 15 bp, Homo sapiens
gttagaaaaagcagt

SEQ ID NO: 2045734 - DNA, 15 bp, Homo sapiens
ttagaaaaagcagtt

SEQ ID NO: 2045735 - DNA, 15 bp, Homo sapiens
tagaaaaagcagttg

SEQ ID NO: 2045736 - DNA, 15 bp, Homo sapiens
agaaaaagcagttgg

SEQ ID NO: 2045737 - DNA, 15 bp, Homo sapiens
gaaaaagcagttggg

SEQ ID NO: 2045738 - DNA, 15 bp, Homo sapiens
aaaaagcagttgggg

SEQ ID NO: 2045739 - DNA, 15 bp, Homo sapiens
aaaagcagttggggg

SEQ ID NO: 2045740 - DNA, 15 bp, Homo sapiens
aaagcagttgggggg

SEQ ID NO: 2045741 - DNA, 15 bp, Homo sapiens
aagcagttggggggt

SEQ ID NO: 2045742 - DNA, 15 bp, Homo sapiens
agcagttggggggtg

SEQ ID NO: 2045743 - DNA, 15 bp, Homo sapiens
gcagttggggggtgg

SEQ ID NO: 2045744 - DNA, 15 bp, Homo sapiens
cagttggggggtggg

SEQ ID NO: 2045745 - DNA, 15 bp, Homo sapiens
agttggggggtgggg

SEQ ID NO: 2045746 - DNA, 15 bp, Homo sapiens
gttggggggtggggc

SEQ ID NO: 2045747 - DNA, 15 bp, Homo sapiens
ttggggggtggggcg

SEQ ID NO: 2045748 - DNA, 15 bp, Homo sapiens
tggggggtggggcgg

SEQ ID NO: 2045749 - DNA, 15 bp, Homo sapiens
ggggggtggggcggt

SEQ ID NO: 2045750 - DNA, 15 bp, Homo sapiens
gggggtggggcggtg

SEQ ID NO: 2045751 - DNA, 15 bp, Homo sapiens
ggggtggggcggtga

SEQ ID NO: 2045752 - DNA, 15 bp, Homo sapiens
gggtggggcggtgag

SEQ ID NO: 2045753 - DNA, 15 bp, Homo sapiens
ggtggggcggtgaga

SEQ ID NO: 2045754 - DNA, 15 bp, Homo sapiens
gtggggcggtgagac

SEQ ID NO: 2045755 - DNA, 15 bp, Homo sapiens
tggggcggtgagaca

SEQ ID NO: 2045756 - DNA, 15 bp, Homo sapiens
ggggcggtgagacag

SEQ ID NO: 2045757 - DNA, 15 bp, Homo sapiens
gggcggtgagacagg

SEQ ID NO: 2045758 - DNA, 15 bp, Homo sapiens
ggcggtgagacaggt

SEQ ID NO: 2045759 - DNA, 15 bp, Homo sapiens
gcggtgagacaggtg

SEQ ID NO: 2045760 - DNA, 15 bp, Homo sapiens
cggtgagacaggtgg

SEQ ID NO: 2045761 - DNA, 15 bp, Homo sapiens
ggtgagacaggtggt

SEQ ID NO: 2045762 - DNA, 15 bp, Homo sapiens
gtgagacaggtggtt

SEQ ID NO: 2045763 - DNA, 15 bp, Homo sapiens
tgagacaggtggttc

SEQ ID NO: 2045764 - DNA, 15 bp, Homo sapiens
gagacaggtggttcc

SEQ ID NO: 2045765 - DNA, 15 bp, Homo sapiens
agacaggtggttcct

SEQ ID NO: 2045766 - DNA, 15 bp, Homo sapiens
gacaggtggttcctc

SEQ ID NO: 2045767 - DNA, 15 bp, Homo sapiens
acaggtggttcctcc

SEQ ID NO: 2045768 - DNA, 15 bp, Homo sapiens
caggtggttcctcct

SEQ ID NO: 2045769 - DNA, 15 bp, Homo sapiens
aggtggttcctcctc

SEQ ID NO: 2045770 - DNA, 15 bp, Homo sapiens
ggtggttcctcctca

SEQ ID NO: 2045771 - DNA, 15 bp, Homo sapiens
gtggttcctcctcac

SEQ ID NO: 2045772 - DNA, 15 bp, Homo sapiens
tggttcctcctcaca

SEQ ID NO: 2045773 - DNA, 15 bp, Homo sapiens
ggttcctcctcacag

SEQ ID NO: 2045774 - DNA, 15 bp, Homo sapiens
gttcctcctcacagt

SEQ ID NO: 2045775 - DNA, 15 bp, Homo sapiens
ttcctcctcacagtt

SEQ ID NO: 2045776 - DNA, 15 bp, Homo sapiens
tcctcctcacagttc

SEQ ID NO: 2045777 - DNA, 15 bp, Homo sapiens
cctcctcacagttcc

SEQ ID NO: 2045778 - DNA, 15 bp, Homo sapiens
ctcctcacagttcca

SEQ ID NO: 2045779 - DNA, 15 bp, Homo sapiens
tcctcacagttccac

SEQ ID NO: 2045780 - DNA, 15 bp, Homo sapiens
cctcacagttccacc

SEQ ID NO: 2045781 - DNA, 15 bp, Homo sapiens
ctcacagttccacct

SEQ ID NO: 2045782 - DNA, 15 bp, Homo sapiens
tcacagttccacctg

SEQ ID NO: 2045783 - DNA, 15 bp, Homo sapiens
cacagttccacctgg

SEQ ID NO: 2045784 - DNA, 15 bp, Homo sapiens
acagttccacctggt

SEQ ID NO: 2045785 - DNA, 15 bp, Homo sapiens
cagttccacctggtc

SEQ ID NO: 2045786 - DNA, 15 bp, Homo sapiens
agttccacctggtcc

SEQ ID NO: 2045787 - DNA, 15 bp, Homo sapiens
gttccacctggtcca

SEQ ID NO: 2045788 - DNA, 15 bp, Homo sapiens
ttccacctggtccaa

SEQ ID NO: 2045789 - DNA, 15 bp, Homo sapiens
tccacctggtccaag

SEQ ID NO: 2045790 - DNA, 15 bp, Homo sapiens
ccacctggtccaagc

SEQ ID NO: 2045791 - DNA, 15 bp, Homo sapiens
cacctggtccaagct

SEQ ID NO: 2045792 - DNA, 15 bp, Homo sapiens
acctggtccaagcta

SEQ ID NO: 2045793 - DNA, 15 bp, Homo sapiens
cctggtccaagctac

SEQ ID NO: 2045794 - DNA, 15 bp, Homo sapiens
ctggtccaagctaca

SEQ ID NO: 2045795 - DNA, 15 bp, Homo sapiens
tggtccaagctacag

SEQ ID NO: 2045796 - DNA, 15 bp, Homo sapiens
ggtccaagctacaga

SEQ ID NO: 2045797 - DNA, 15 bp, Homo sapiens
gtccaagctacagac

SEQ ID NO: 2045798 - DNA, 15 bp, Homo sapiens
tccaagctacagacc

SEQ ID NO: 2045799 - DNA, 15 bp, Homo sapiens
ccaagctacagaccc

SEQ ID NO: 2045800 - DNA, 15 bp, Homo sapiens
caagctacagacccc

SEQ ID NO: 2045801 - DNA, 15 bp, Homo sapiens
aagctacagacccca

SEQ ID NO: 2045802 - DNA, 15 bp, Homo sapiens
agctacagaccccaa

SEQ ID NO: 2045803 - DNA, 15 bp, Homo sapiens
gctacagaccccaaa

SEQ ID NO: 2045804 - DNA, 15 bp, Homo sapiens
ctacagaccccaaat

SEQ ID NO: 2045805 - DNA, 15 bp, Homo sapiens
tacagaccccaaatt

SEQ ID NO: 2045806 - DNA, 15 bp, Homo sapiens
acagaccccaaatta

SEQ ID NO: 2045807 - DNA, 15 bp, Homo sapiens
cagaccccaaattag

SEQ ID NO: 2045808 - DNA, 15 bp, Homo sapiens
agaccccaaattagc

SEQ ID NO: 2045809 - DNA, 15 bp, Homo sapiens
gaccccaaattagcc

SEQ ID NO: 2045810 - DNA, 15 bp, Homo sapiens
accccaaattagcct

SEQ ID NO: 2045811 - DNA, 15 bp, Homo sapiens
ccccaaattagcctt

SEQ ID NO: 2045812 - DNA, 15 bp, Homo sapiens
cccaaattagccttc

SEQ ID NO: 2045813 - DNA, 15 bp, Homo sapiens
ccaaattagccttct

SEQ ID NO: 2045814 - DNA, 15 bp, Homo sapiens
caaattagccttctt

SEQ ID NO: 2045815 - DNA, 15 bp, Homo sapiens
aaattagccttcttt

SEQ ID NO: 2045816 - DNA, 15 bp, Homo sapiens
aattagccttctttt

SEQ ID NO: 2045817 - DNA, 15 bp, Homo sapiens
attagccttcttttg

SEQ ID NO: 2045818 - DNA, 15 bp, Homo sapiens
ttagccttcttttgt

SEQ ID NO: 2045819 - DNA, 15 bp, Homo sapiens
tagccttcttttgta

SEQ ID NO: 2045820 - DNA, 15 bp, Homo sapiens
agccttcttttgtat

SEQ ID NO: 2045821 - DNA, 15 bp, Homo sapiens
gccttcttttgtatg

SEQ ID NO: 2045822 - DNA, 15 bp, Homo sapiens
ccttcttttgtatga

SEQ ID NO: 2045823 - DNA, 15 bp, Homo sapiens
cttcttttgtatgag

SEQ ID NO: 2045824 - DNA, 15 bp, Homo sapiens
ttcttttgtatgagc

SEQ ID NO: 2045825 - DNA, 15 bp, Homo sapiens
tcttttgtatgagcc

SEQ ID NO: 2045826 - DNA, 15 bp, Homo sapiens
cttttgtatgagccc

SEQ ID NO: 2045827 - DNA, 15 bp, Homo sapiens
ttttgtatgagccct

SEQ ID NO: 2045828 - DNA, 15 bp, Homo sapiens
tttgtatgagccctc

SEQ ID NO: 2045829 - DNA, 15 bp, Homo sapiens
ttgtatgagccctct

SEQ ID NO: 2045830 - DNA, 15 bp, Homo sapiens
tgtatgagccctctg

SEQ ID NO: 2045831 - DNA, 15 bp, Homo sapiens
gtatgagccctctgt

SEQ ID NO: 2045832 - DNA, 15 bp, Homo sapiens
tatgagccctctgtt

SEQ ID NO: 2045833 - DNA, 15 bp, Homo sapiens
atgagccctctgttc

SEQ ID NO: 2045834 - DNA, 15 bp, Homo sapiens
tgagccctctgttct

SEQ ID NO: 2045835 - DNA, 15 bp, Homo sapiens
gagccctctgttctt

SEQ ID NO: 2045836 - DNA, 15 bp, Homo sapiens
agccctctgttcttg

SEQ ID NO: 2045837 - DNA, 15 bp, Homo sapiens
gccctctgttcttgt

SEQ ID NO: 2045838 - DNA, 15 bp, Homo sapiens
ccctctgttcttgtc

SEQ ID NO: 2045839 - DNA, 15 bp, Homo sapiens
cctctgttcttgtct

SEQ ID NO: 2045840 - DNA, 15 bp, Homo sapiens
ctctgttcttgtctc

SEQ ID NO: 2045841 - DNA, 15 bp, Homo sapiens
tctgttcttgtctcg

SEQ ID NO: 2045842 - DNA, 15 bp, Homo sapiens
ctgttcttgtctcgc

SEQ ID NO: 2045843 - DNA, 15 bp, Homo sapiens
tgttcttgtctcgca

SEQ ID NO: 2045844 - DNA, 15 bp, Homo sapiens
gttcttgtctcgcaa

SEQ ID NO: 2045845 - DNA, 15 bp, Homo sapiens
ttcttgtctcgcaaa

SEQ ID NO: 2045846 - DNA, 15 bp, Homo sapiens
tcttgtctcgcaaag

SEQ ID NO: 2045847 - DNA, 15 bp, Homo sapiens
cttgtctcgcaaagt

SEQ ID NO: 2045848 - DNA, 15 bp, Homo sapiens
ttgtctcgcaaagtg

SEQ ID NO: 2045849 - DNA, 15 bp, Homo sapiens
tgtctcgcaaagtga

SEQ ID NO: 2045850 - DNA, 15 bp, Homo sapiens
gtctcgcaaagtgac

SEQ ID NO: 2045851 - DNA, 15 bp, Homo sapiens
tgccctcactggggc

SEQ ID NO: 2045852 - DNA, 15 bp, Homo sapiens
gccctcactggggcc

SEQ ID NO: 2045853 - DNA, 15 bp, Homo sapiens
ccctcactggggcct

SEQ ID NO: 2045854 - DNA, 15 bp, Homo sapiens
cctcactggggcctg

SEQ ID NO: 2045855 - DNA, 15 bp, Homo sapiens
ctcactggggcctga

SEQ ID NO: 2045856 - DNA, 15 bp, Homo sapiens
tcactggggcctgac

SEQ ID NO: 2045857 - DNA, 15 bp, Homo sapiens
cactggggcctgaca

SEQ ID NO: 2045858 - DNA, 15 bp, Homo sapiens
actggggcctgacag

SEQ ID NO: 2045859 - DNA, 15 bp, Homo sapiens
ctggggcctgacagg

SEQ ID NO: 2045860 - DNA, 15 bp, Homo sapiens
tggggcctgacagga

SEQ ID NO: 2045861 - DNA, 15 bp, Homo sapiens
ggggcctgacaggag

SEQ ID NO: 2045862 - DNA, 15 bp, Homo sapiens
gggcctgacaggaga

SEQ ID NO: 2045863 - DNA, 15 bp, Homo sapiens
ggcctgacaggagag

SEQ ID NO: 2045864 - DNA, 15 bp, Homo sapiens
gcctgacaggagaga

SEQ ID NO: 2045865 - DNA, 15 bp, Homo sapiens
cctgacaggagagaa

SEQ ID NO: 2045866 - DNA, 15 bp, Homo sapiens
ctgacaggagagaag

SEQ ID NO: 2045867 - DNA, 15 bp, Homo sapiens
tgacaggagagaagc

SEQ ID NO: 2045868 - DNA, 15 bp, Homo sapiens
gacaggagagaagcc

SEQ ID NO: 2045869 - DNA, 15 bp, Homo sapiens
acaggagagaagcca

SEQ ID NO: 2045870 - DNA, 15 bp, Homo sapiens
caggagagaagccaa

SEQ ID NO: 2045871 - DNA, 15 bp, Homo sapiens
aggagagaagccaag

SEQ ID NO: 2045872 - DNA, 15 bp, Homo sapiens
ggagagaagccaaga

SEQ ID NO: 2045873 - DNA, 15 bp, Homo sapiens
gagagaagccaagag

SEQ ID NO: 2045874 - DNA, 15 bp, Homo sapiens
agagaagccaagagg

SEQ ID NO: 2045875 - DNA, 15 bp, Homo sapiens
gagaagccaagaggc

SEQ ID NO: 2045876 - DNA, 15 bp, Homo sapiens
agaagccaagaggca

SEQ ID NO: 2045877 - DNA, 15 bp, Homo sapiens
gaagccaagaggcaa

SEQ ID NO: 2045878 - DNA, 15 bp, Homo sapiens
aagccaagaggcaaa

SEQ ID NO: 2045879 - DNA, 15 bp, Homo sapiens
agccaagaggcaaag

SEQ ID NO: 2045880 - DNA, 15 bp, Homo sapiens
gccaagaggcaaagc

SEQ ID NO: 2045881 - DNA, 15 bp, Homo sapiens
ccaagaggcaaagcg

SEQ ID NO: 2045882 - DNA, 15 bp, Homo sapiens
caagaggcaaagcgt

SEQ ID NO: 2045883 - DNA, 15 bp, Homo sapiens
aagaggcaaagcgtc

SEQ ID NO: 2045884 - DNA, 15 bp, Homo sapiens
agaggcaaagcgtct

SEQ ID NO: 2045885 - DNA, 15 bp, Homo sapiens
gaggcaaagcgtctg

SEQ ID NO: 2045886 - DNA, 15 bp, Homo sapiens
aggcaaagcgtctgg

SEQ ID NO: 2045887 - DNA, 15 bp, Homo sapiens
ggcaaagcgtctggg

SEQ ID NO: 2045888 - DNA, 15 bp, Homo sapiens
gcaaagcgtctgggg

SEQ ID NO: 2045889 - DNA, 15 bp, Homo sapiens
caaagcgtctggggg

SEQ ID NO: 2045890 - DNA, 15 bp, Homo sapiens
aaagcgtctgggggc

SEQ ID NO: 2045891 - DNA, 15 bp, Homo sapiens
aagcgtctgggggct

SEQ ID NO: 2045892 - DNA, 15 bp, Homo sapiens
agcgtctgggggctc

SEQ ID NO: 2045893 - DNA, 15 bp, Homo sapiens
gcgtctgggggctcc

SEQ ID NO: 2045894 - DNA, 15 bp, Homo sapiens
cgtctgggggctcca

SEQ ID NO: 2045895 - DNA, 15 bp, Homo sapiens
gtctgggggctccag

SEQ ID NO: 2045896 - DNA, 15 bp, Homo sapiens
tctgggggctccagc

SEQ ID NO: 2045897 - DNA, 15 bp, Homo sapiens
ctgggggctccagct

SEQ ID NO: 2045898 - DNA, 15 bp, Homo sapiens
tgggggctccagctt

SEQ ID NO: 2045899 - DNA, 15 bp, Homo sapiens
gggggctccagcttt

SEQ ID NO: 2045900 - DNA, 15 bp, Homo sapiens
ggggctccagctttt

SEQ ID NO: 2045901 - DNA, 15 bp, Homo sapiens
gggctccagcttttg

SEQ ID NO: 2045902 - DNA, 15 bp, Homo sapiens
ggctccagcttttgg

SEQ ID NO: 2045903 - DNA, 15 bp, Homo sapiens
gctccagcttttgga

SEQ ID NO: 2045904 - DNA, 15 bp, Homo sapiens
ctccagcttttggaa

SEQ ID NO: 2045905 - DNA, 15 bp, Homo sapiens
tccagcttttggaag

SEQ ID NO: 2045906 - DNA, 15 bp, Homo sapiens
ccagcttttggaagt

SEQ ID NO: 2045907 - DNA, 15 bp, Homo sapiens
cagcttttggaagtc

SEQ ID NO: 2045908 - DNA, 15 bp, Homo sapiens
agcttttggaagtca

SEQ ID NO: 2045909 - DNA, 15 bp, Homo sapiens
gcttttggaagtcaa

SEQ ID NO: 2045910 - DNA, 15 bp, Homo sapiens
cttttggaagtcaac

SEQ ID NO: 2045911 - DNA, 15 bp, Homo sapiens
ttttggaagtcaaca

SEQ ID NO: 2045912 - DNA, 15 bp, Homo sapiens
tttggaagtcaacac

SEQ ID NO: 2045913 - DNA, 15 bp, Homo sapiens
ttggaagtcaacacc

SEQ ID NO: 2045914 - DNA, 15 bp, Homo sapiens
tggaagtcaacaccc

SEQ ID NO: 2045915 - DNA, 15 bp, Homo sapiens
ggaagtcaacacccc

SEQ ID NO: 2045916 - DNA, 15 bp, Homo sapiens
gaagtcaacaccccc

SEQ ID NO: 2045917 - DNA, 15 bp, Homo sapiens
aagtcaacaccccct

SEQ ID NO: 2045918 - DNA, 15 bp, Homo sapiens
agtcaacaccccctc

SEQ ID NO: 2045919 - DNA, 15 bp, Homo sapiens
gtcaacaccccctct

SEQ ID NO: 2045920 - DNA, 15 bp, Homo sapiens
tcaacaccccctctc

SEQ ID NO: 2045921 - DNA, 15 bp, Homo sapiens
caacaccccctctcc

SEQ ID NO: 2045922 - DNA, 15 bp, Homo sapiens
aacaccccctctcct

SEQ ID NO: 2045923 - DNA, 15 bp, Homo sapiens
acaccccctctccta

SEQ ID NO: 2045924 - DNA, 15 bp, Homo sapiens
caccccctctcctaa

SEQ ID NO: 2045925 - DNA, 15 bp, Homo sapiens
accccctctcctaac

SEQ ID NO: 2045926 - DNA, 15 bp, Homo sapiens
ccccctctcctaacc

SEQ ID NO: 2045927 - DNA, 15 bp, Homo sapiens
cccctctcctaacct

SEQ ID NO: 2045928 - DNA, 15 bp, Homo sapiens
ccctctcctaacctc

SEQ ID NO: 2045929 - DNA, 15 bp, Homo sapiens
cctctcctaacctct

SEQ ID NO: 2045930 - DNA, 15 bp, Homo sapiens
ctctcctaacctctc

SEQ ID NO: 2045931 - DNA, 15 bp, Homo sapiens
tctcctaacctctcc

SEQ ID NO: 2045932 - DNA, 15 bp, Homo sapiens
ctcctaacctctcca

SEQ ID NO: 2045933 - DNA, 15 bp, Homo sapiens
tcctaacctctccaa

SEQ ID NO: 2045934 - DNA, 15 bp, Homo sapiens
cctaacctctccaaa

SEQ ID NO: 2045935 - DNA, 15 bp, Homo sapiens
ctaacctctccaaac

SEQ ID NO: 2045936 - DNA, 15 bp, Homo sapiens
taacctctccaaact

SEQ ID NO: 2045937 - DNA, 15 bp, Homo sapiens
aacctctccaaactg

SEQ ID NO: 2045938 - DNA, 15 bp, Homo sapiens
acctctccaaactgg

SEQ ID NO: 2045939 - DNA, 15 bp, Homo sapiens
cctctccaaactggg

SEQ ID NO: 2045940 - DNA, 15 bp, Homo sapiens
ctctccaaactgggg

SEQ ID NO: 2045941 - DNA, 15 bp, Homo sapiens
tctccaaactggggt

SEQ ID NO: 2045942 - DNA, 15 bp, Homo sapiens
ctccaaactggggtc

SEQ ID NO: 2045943 - DNA, 15 bp, Homo sapiens
tccaaactggggtct

SEQ ID NO: 2045944 - DNA, 15 bp, Homo sapiens
ccaaactggggtcta

SEQ ID NO: 2045945 - DNA, 15 bp, Homo sapiens
caaactggggtctac

SEQ ID NO: 2045946 - DNA, 15 bp, Homo sapiens
aaactggggtctacc

SEQ ID NO: 2045947 - DNA, 15 bp, Homo sapiens
aactggggtctaccg

SEQ ID NO: 2045948 - DNA, 15 bp, Homo sapiens
actggggtctaccgt

SEQ ID NO: 2045949 - DNA, 15 bp, Homo sapiens
ctggggtctaccgta

SEQ ID NO: 2045950 - DNA, 15 bp, Homo sapiens
tggggtctaccgtag

SEQ ID NO: 2045951 - DNA, 15 bp, Homo sapiens
ggggtctaccgtagg

SEQ ID NO: 2045952 - DNA, 15 bp, Homo sapiens
gggtctaccgtagga

SEQ ID NO: 2045953 - DNA, 15 bp, Homo sapiens
ggtctaccgtaggac

SEQ ID NO: 2045954 - DNA, 15 bp, Homo sapiens
gtctaccgtaggacc

SEQ ID NO: 2045955 - DNA, 15 bp, Homo sapiens
tctaccgtaggaccc

SEQ ID NO: 2045956 - DNA, 15 bp, Homo sapiens
ctaccgtaggacccc

SEQ ID NO: 2045957 - DNA, 15 bp, Homo sapiens
taccgtaggacccca

SEQ ID NO: 2045958 - DNA, 15 bp, Homo sapiens
accgtaggaccccag

SEQ ID NO: 2045959 - DNA, 15 bp, Homo sapiens
ccgtaggaccccagc

SEQ ID NO: 2045960 - DNA, 15 bp, Homo sapiens
cgtaggaccccagct

SEQ ID NO: 2045961 - DNA, 15 bp, Homo sapiens
gtaggaccccagctc

SEQ ID NO: 2045962 - DNA, 15 bp, Homo sapiens
taggaccccagctcc

SEQ ID NO: 2045963 - DNA, 15 bp, Homo sapiens
aggaccccagctccc

SEQ ID NO: 2045964 - DNA, 15 bp, Homo sapiens
ggaccccagctcccg

SEQ ID NO: 2045965 - DNA, 15 bp, Homo sapiens
gaccccagctcccgg

SEQ ID NO: 2045966 - DNA, 15 bp, Homo sapiens
accccagctcccggc

SEQ ID NO: 2045967 - DNA, 15 bp, Homo sapiens
ccccagctcccggcc

SEQ ID NO: 2045968 - DNA, 15 bp, Homo sapiens
cccagctcccggcct

SEQ ID NO: 2045969 - DNA, 15 bp, Homo sapiens
ccagctcccggcctg

SEQ ID NO: 2045970 - DNA, 15 bp, Homo sapiens
cagctcccggcctga

SEQ ID NO: 2045971 - DNA, 15 bp, Homo sapiens
agctcccggcctgag

SEQ ID NO: 2045972 - DNA, 15 bp, Homo sapiens
gctcccggcctgagc

SEQ ID NO: 2045973 - DNA, 15 bp, Homo sapiens
ctcccggcctgagcc

SEQ ID NO: 2045974 - DNA, 15 bp, Homo sapiens
tcccggcctgagccc

SEQ ID NO: 2045975 - DNA, 15 bp, Homo sapiens
cccggcctgagccca

SEQ ID NO: 2045976 - DNA, 15 bp, Homo sapiens
ccggcctgagcccag

SEQ ID NO: 2045977 - DNA, 15 bp, Homo sapiens
cggcctgagcccagt

SEQ ID NO: 2045978 - DNA, 15 bp, Homo sapiens
ggcctgagcccagtt

SEQ ID NO: 2045979 - DNA, 15 bp, Homo sapiens
gcctgagcccagttc

SEQ ID NO: 2045980 - DNA, 15 bp, Homo sapiens
cctgagcccagttcg

SEQ ID NO: 2045981 - DNA, 15 bp, Homo sapiens
ctgagcccagttcgc

SEQ ID NO: 2045982 - DNA, 15 bp, Homo sapiens
tgagcccagttcgcc

SEQ ID NO: 2045983 - DNA, 15 bp, Homo sapiens
gagcccagttcgccg

SEQ ID NO: 2045984 - DNA, 15 bp, Homo sapiens
agcccagttcgccgc

SEQ ID NO: 2045985 - DNA, 15 bp, Homo sapiens
gcccagttcgccgcc

SEQ ID NO: 2045986 - DNA, 15 bp, Homo sapiens
cccagttcgccgcct

SEQ ID NO: 2045987 - DNA, 15 bp, Homo sapiens
ccagttcgccgcctg

SEQ ID NO: 2045988 - DNA, 15 bp, Homo sapiens
cagttcgccgcctgt

SEQ ID NO: 2045989 - DNA, 15 bp, Homo sapiens
agttcgccgcctgtg

SEQ ID NO: 2045990 - DNA, 15 bp, Homo sapiens
gttcgccgcctgtgg

SEQ ID NO: 2045991 - DNA, 15 bp, Homo sapiens
ttcgccgcctgtggc

SEQ ID NO: 2045992 - DNA, 15 bp, Homo sapiens
tcgccgcctgtggcc

SEQ ID NO: 2045993 - DNA, 15 bp, Homo sapiens
cgccgcctgtggcca

SEQ ID NO: 2045994 - DNA, 15 bp, Homo sapiens
gccgcctgtggccag

SEQ ID NO: 2045995 - DNA, 15 bp, Homo sapiens
ccgcctgtggccagc

SEQ ID NO: 2045996 - DNA, 15 bp, Homo sapiens
cgcctgtggccagct

SEQ ID NO: 2045997 - DNA, 15 bp, Homo sapiens
gcctgtggccagcta

SEQ ID NO: 2045998 - DNA, 15 bp, Homo sapiens
cctgtggccagctaa

SEQ ID NO: 2045999 - DNA, 15 bp, Homo sapiens
ctgtggccagctaat

SEQ ID NO: 2046000 - DNA, 15 bp, Homo sapiens
tgtggccagctaatc

SEQ ID NO: 2046001 - DNA, 15 bp, Homo sapiens
gtggccagctaatcc

SEQ ID NO: 2046002 - DNA, 15 bp, Homo sapiens
tggccagctaatcct

SEQ ID NO: 2046003 - DNA, 15 bp, Homo sapiens
ggccagctaatccta

SEQ ID NO: 2046004 - DNA, 15 bp, Homo sapiens
gccagctaatcctaa

SEQ ID NO: 2046005 - DNA, 15 bp, Homo sapiens
ccagctaatcctaat

SEQ ID NO: 2046006 - DNA, 15 bp, Homo sapiens
cagctaatcctaatg

SEQ ID NO: 2046007 - DNA, 15 bp, Homo sapiens
agctaatcctaatgc

SEQ ID NO: 2046008 - DNA, 15 bp, Homo sapiens
gctaatcctaatgct

SEQ ID NO: 2046009 - DNA, 15 bp, Homo sapiens
ctaatcctaatgctc

SEQ ID NO: 2046010 - DNA, 15 bp, Homo sapiens
taatcctaatgctct

SEQ ID NO: 2046011 - DNA, 15 bp, Homo sapiens
aatcctaatgctctg

SEQ ID NO: 2046012 - DNA, 15 bp, Homo sapiens
atcctaatgctctga

SEQ ID NO: 2046013 - DNA, 15 bp, Homo sapiens
tcctaatgctctgac

SEQ ID NO: 2046014 - DNA, 15 bp, Homo sapiens
cctaatgctctgacc

SEQ ID NO: 2046015 - DNA, 15 bp, Homo sapiens
ctaatgctctgaccc

SEQ ID NO: 2046016 - DNA, 15 bp, Homo sapiens
taatgctctgacccg

SEQ ID NO: 2046017 - DNA, 15 bp, Homo sapiens
aatgctctgacccgg

SEQ ID NO: 2046018 - DNA, 15 bp, Homo sapiens
atgctctgacccggg

SEQ ID NO: 2046019 - DNA, 15 bp, Homo sapiens
tgctctgacccgggc

SEQ ID NO: 2046020 - DNA, 15 bp, Homo sapiens
gctctgacccgggct

SEQ ID NO: 2046021 - DNA, 15 bp, Homo sapiens
ctctgacccgggctg

SEQ ID NO: 2046022 - DNA, 15 bp, Homo sapiens
tctgacccgggctgg

SEQ ID NO: 2046023 - DNA, 15 bp, Homo sapiens
ctgacccgggctggg

SEQ ID NO: 2046024 - DNA, 15 bp, Homo sapiens
tgacccgggctgggc

SEQ ID NO: 2046025 - DNA, 15 bp, Homo sapiens
gacccgggctgggca

SEQ ID NO: 2046026 - DNA, 15 bp, Homo sapiens
acccgggctgggcac

SEQ ID NO: 2046027 - DNA, 15 bp, Homo sapiens
cccgggctgggcacg

SEQ ID NO: 2046028 - DNA, 15 bp, Homo sapiens
ccgggctgggcacga

SEQ ID NO: 2046029 - DNA, 15 bp, Homo sapiens
cgggctgggcacgaa

SEQ ID NO: 2046030 - DNA, 15 bp, Homo sapiens
gggctgggcacgaaa

SEQ ID NO: 2046031 - DNA, 15 bp, Homo sapiens
ggctgggcacgaaag

SEQ ID NO: 2046032 - DNA, 15 bp, Homo sapiens
gctgggcacgaaagg

SEQ ID NO: 2046033 - DNA, 15 bp, Homo sapiens
ctgggcacgaaagga

SEQ ID NO: 2046034 - DNA, 15 bp, Homo sapiens
tgggcacgaaaggag

SEQ ID NO: 2046035 - DNA, 15 bp, Homo sapiens
gggcacgaaaggagc

SEQ ID NO: 2046036 - DNA, 15 bp, Homo sapiens
ggcacgaaaggagca

SEQ ID NO: 2046037 - DNA, 15 bp, Homo sapiens
gcacgaaaggagcag

SEQ ID NO: 2046038 - DNA, 15 bp, Homo sapiens
cacgaaaggagcaga

SEQ ID NO: 2046039 - DNA, 15 bp, Homo sapiens
acgaaaggagcagaa

SEQ ID NO: 2046040 - DNA, 15 bp, Homo sapiens
cgaaaggagcagaag

SEQ ID NO: 2046041 - DNA, 15 bp, Homo sapiens
gaaaggagcagaagc

SEQ ID NO: 2046042 - DNA, 15 bp, Homo sapiens
aaaggagcagaagcg

SEQ ID NO: 2046043 - DNA, 15 bp, Homo sapiens
aaggagcagaagcgg

SEQ ID NO: 2046044 - DNA, 15 bp, Homo sapiens
aggagcagaagcggc

SEQ ID NO: 2046045 - DNA, 15 bp, Homo sapiens
ggagcagaagcggcc

SEQ ID NO: 2046046 - DNA, 15 bp, Homo sapiens
gagcagaagcggcct

SEQ ID NO: 2046047 - DNA, 15 bp, Homo sapiens
agcagaagcggcctt

SEQ ID NO: 2046048 - DNA, 15 bp, Homo sapiens
gcagaagcggccttt

SEQ ID NO: 2046049 - DNA, 15 bp, Homo sapiens
cagaagcggcctttc

SEQ ID NO: 2046050 - DNA, 15 bp, Homo sapiens
agaagcggcctttcc

SEQ ID NO: 2046051 - DNA, 15 bp, Homo sapiens
gaagcggcctttccc

SEQ ID NO: 2046052 - DNA, 15 bp, Homo sapiens
aagcggcctttcccc

SEQ ID NO: 2046053 - DNA, 15 bp, Homo sapiens
agcggcctttccccc

SEQ ID NO: 2046054 - DNA, 15 bp, Homo sapiens
gcggcctttccccca

SEQ ID NO: 2046055 - DNA, 15 bp, Homo sapiens
cggcctttcccccac

SEQ ID NO: 2046056 - DNA, 15 bp, Homo sapiens
ggcctttcccccact

SEQ ID NO: 2046057 - DNA, 15 bp, Homo sapiens
gcctttcccccactg

SEQ ID NO: 2046058 - DNA, 15 bp, Homo sapiens
cctttcccccactgc

SEQ ID NO: 2046059 - DNA, 15 bp, Homo sapiens
ctttcccccactgcg

SEQ ID NO: 2046060 - DNA, 15 bp, Homo sapiens
tttcccccactgcgt

SEQ ID NO: 2046061 - DNA, 15 bp, Homo sapiens
ttcccccactgcgtc

SEQ ID NO: 2046062 - DNA, 15 bp, Homo sapiens
tcccccactgcgtct

SEQ ID NO: 2046063 - DNA, 15 bp, Homo sapiens
cccccactgcgtctt

SEQ ID NO: 2046064 - DNA, 15 bp, Homo sapiens
ccccactgcgtcttt

SEQ ID NO: 2046065 - DNA, 15 bp, Homo sapiens
cccactgcgtctttt

SEQ ID NO: 2046066 - DNA, 15 bp, Homo sapiens
ccactgcgtcttttg

SEQ ID NO: 2046067 - DNA, 15 bp, Homo sapiens
cactgcgtcttttgg

SEQ ID NO: 2046068 - DNA, 15 bp, Homo sapiens
actgcgtcttttggt

SEQ ID NO: 2046069 - DNA, 15 bp, Homo sapiens
ctgcgtcttttggtt

SEQ ID NO: 2046070 - DNA, 15 bp, Homo sapiens
tgcgtcttttggttc

SEQ ID NO: 2046071 - DNA, 15 bp, Homo sapiens
gcgtcttttggttcg

SEQ ID NO: 2046072 - DNA, 15 bp, Homo sapiens
cgtcttttggttcga

SEQ ID NO: 2046073 - DNA, 15 bp, Homo sapiens
gtcttttggttcgaa

SEQ ID NO: 2046074 - DNA, 15 bp, Homo sapiens
tcttttggttcgaaa

SEQ ID NO: 2046075 - DNA, 15 bp, Homo sapiens
cttttggttcgaaag

SEQ ID NO: 2046076 - DNA, 15 bp, Homo sapiens
ttttggttcgaaaga

SEQ ID NO: 2046077 - DNA, 15 bp, Homo sapiens
tttggttcgaaagag

SEQ ID NO: 2046078 - DNA, 15 bp, Homo sapiens
ttggttcgaaagagg

SEQ ID NO: 2046079 - DNA, 15 bp, Homo sapiens
tggttcgaaagaggg

SEQ ID NO: 2046080 - DNA, 15 bp, Homo sapiens
ggttcgaaagaggga

SEQ ID NO: 2046081 - DNA, 15 bp, Homo sapiens
gttcgaaagagggaa

SEQ ID NO: 2046082 - DNA, 15 bp, Homo sapiens
ttcgaaagagggaac

SEQ ID NO: 2046083 - DNA, 15 bp, Homo sapiens
tcgaaagagggaact

SEQ ID NO: 2046084 - DNA, 15 bp, Homo sapiens
cgaaagagggaactg

SEQ ID NO: 2046085 - DNA, 15 bp, Homo sapiens
gaaagagggaactga

SEQ ID NO: 2046086 - DNA, 15 bp, Homo sapiens
aaagagggaactgag

SEQ ID NO: 2046087 - DNA, 15 bp, Homo sapiens
aagagggaactgaga

SEQ ID NO: 2046088 - DNA, 15 bp, Homo sapiens
agagggaactgagac

SEQ ID NO: 2046089 - DNA, 15 bp, Homo sapiens
gagggaactgagact

SEQ ID NO: 2046090 - DNA, 15 bp, Homo sapiens
agggaactgagactg

SEQ ID NO: 2046091 - DNA, 15 bp, Homo sapiens
gggaactgagactga

SEQ ID NO: 2046092 - DNA, 15 bp, Homo sapiens
ggaactgagactgag

SEQ ID NO: 2046093 - DNA, 15 bp, Homo sapiens
gaactgagactgagg

SEQ ID NO: 2046094 - DNA, 15 bp, Homo sapiens
aactgagactgaggg

SEQ ID NO: 2046095 - DNA, 15 bp, Homo sapiens
actgagactgaggga

SEQ ID NO: 2046096 - DNA, 15 bp, Homo sapiens
ctgagactgagggag

SEQ ID NO: 2046097 - DNA, 15 bp, Homo sapiens
tgagactgagggagg

SEQ ID NO: 2046098 - DNA, 15 bp, Homo sapiens
gagactgagggaggg

SEQ ID NO: 2046099 - DNA, 15 bp, Homo sapiens
agactgagggagggc

SEQ ID NO: 2046100 - DNA, 15 bp, Homo sapiens
gactgagggagggca

SEQ ID NO: 2046101 - DNA, 15 bp, Homo sapiens
actgagggagggcag

SEQ ID NO: 2046102 - DNA, 15 bp, Homo sapiens
ctgagggagggcagc

SEQ ID NO: 2046103 - DNA, 15 bp, Homo sapiens
tgagggagggcagcc

SEQ ID NO: 2046104 - DNA, 15 bp, Homo sapiens
gagggagggcagcca

SEQ ID NO: 2046105 - DNA, 15 bp, Homo sapiens
agggagggcagccag

SEQ ID NO: 2046106 - DNA, 15 bp, Homo sapiens
gggagggcagccagg

SEQ ID NO: 2046107 - DNA, 15 bp, Homo sapiens
ggagggcagccaggg

SEQ ID NO: 2046108 - DNA, 15 bp, Homo sapiens
gagggcagccagggt

SEQ ID NO: 2046109 - DNA, 15 bp, Homo sapiens
agggcagccagggtt

SEQ ID NO: 2046110 - DNA, 15 bp, Homo sapiens
gggcagccagggttg

SEQ ID NO: 2046111 - DNA, 15 bp, Homo sapiens
ggcagccagggttgg

SEQ ID NO: 2046112 - DNA, 15 bp, Homo sapiens
gcagccagggttggg

SEQ ID NO: 2046113 - DNA, 15 bp, Homo sapiens
cagccagggttgggg

SEQ ID NO: 2046114 - DNA, 15 bp, Homo sapiens
agccagggttggggc

SEQ ID NO: 2046115 - DNA, 15 bp, Homo sapiens
gccagggttggggct

SEQ ID NO: 2046116 - DNA, 15 bp, Homo sapiens
ccagggttggggctg

SEQ ID NO: 2046117 - DNA, 15 bp, Homo sapiens
cagggttggggctgt

SEQ ID NO: 2046118 - DNA, 15 bp, Homo sapiens
agggttggggctgtg

SEQ ID NO: 2046119 - DNA, 15 bp, Homo sapiens
gggttggggctgtga

SEQ ID NO: 2046120 - DNA, 15 bp, Homo sapiens
ggttggggctgtgag

SEQ ID NO: 2046121 - DNA, 15 bp, Homo sapiens
gttggggctgtgagc

SEQ ID NO: 2046122 - DNA, 15 bp, Homo sapiens
ttggggctgtgagcg

SEQ ID NO: 2046123 - DNA, 15 bp, Homo sapiens
tggggctgtgagcgc

SEQ ID NO: 2046124 - DNA, 15 bp, Homo sapiens
ggggctgtgagcgct

SEQ ID NO: 2046125 - DNA, 15 bp, Homo sapiens
gggctgtgagcgctc

SEQ ID NO: 2046126 - DNA, 15 bp, Homo sapiens
ggctgtgagcgctcc

SEQ ID NO: 2046127 - DNA, 15 bp, Homo sapiens
gctgtgagcgctcca

SEQ ID NO: 2046128 - DNA, 15 bp, Homo sapiens
ctgtgagcgctccag

SEQ ID NO: 2046129 - DNA, 15 bp, Homo sapiens
tgtgagcgctccagt

SEQ ID NO: 2046130 - DNA, 15 bp, Homo sapiens
gtgagcgctccagta

SEQ ID NO: 2046131 - DNA, 15 bp, Homo sapiens
tgagcgctccagtac

SEQ ID NO: 2046132 - DNA, 15 bp, Homo sapiens
gagcgctccagtaca

SEQ ID NO: 2046133 - DNA, 15 bp, Homo sapiens
agcgctccagtacag

SEQ ID NO: 2046134 - DNA, 15 bp, Homo sapiens
gcgctccagtacagc

SEQ ID NO: 2046135 - DNA, 15 bp, Homo sapiens
cgctccagtacagcc

SEQ ID NO: 2046136 - DNA, 15 bp, Homo sapiens
gctccagtacagccc

SEQ ID NO: 2046137 - DNA, 15 bp, Homo sapiens
ctccagtacagcccc

SEQ ID NO: 2046138 - DNA, 15 bp, Homo sapiens
tccagtacagccccc

SEQ ID NO: 2046139 - DNA, 15 bp, Homo sapiens
ccagtacagccccct

SEQ ID NO: 2046140 - DNA, 15 bp, Homo sapiens
cagtacagccccctc

SEQ ID NO: 2046141 - DNA, 15 bp, Homo sapiens
agtacagccccctcg

SEQ ID NO: 2046142 - DNA, 15 bp, Homo sapiens
gtacagccccctcga

SEQ ID NO: 2046143 - DNA, 15 bp, Homo sapiens
tacagccccctcgac

SEQ ID NO: 2046144 - DNA, 15 bp, Homo sapiens
acagccccctcgacg

SEQ ID NO: 2046145 - DNA, 15 bp, Homo sapiens
cagccccctcgacgg

SEQ ID NO: 2046146 - DNA, 15 bp, Homo sapiens
agccccctcgacggt

SEQ ID NO: 2046147 - DNA, 15 bp, Homo sapiens
gccccctcgacggta

SEQ ID NO: 2046148 - DNA, 15 bp, Homo sapiens
ccccctcgacggtac

SEQ ID NO: 2046149 - DNA, 15 bp, Homo sapiens
cccctcgacggtacg

SEQ ID NO: 2046150 - DNA, 15 bp, Homo sapiens
ccctcgacggtacgg

SEQ ID NO: 2046151 - DNA, 15 bp, Homo sapiens
cctcgacggtacggc

SEQ ID NO: 2046152 - DNA, 15 bp, Homo sapiens
ctcgacggtacggcc

SEQ ID NO: 2046153 - DNA, 15 bp, Homo sapiens
tcgacggtacggcct

SEQ ID NO: 2046154 - DNA, 15 bp, Homo sapiens
cgacggtacggcctg

SEQ ID NO: 2046155 - DNA, 15 bp, Homo sapiens
gacggtacggcctgg

SEQ ID NO: 2046156 - DNA, 15 bp, Homo sapiens
acggtacggcctggg

SEQ ID NO: 2046157 - DNA, 15 bp, Homo sapiens
cggtacggcctgggg

SEQ ID NO: 2046158 - DNA, 15 bp, Homo sapiens
ggtacggcctggggc

SEQ ID NO: 2046159 - DNA, 15 bp, Homo sapiens
gtacggcctggggca

SEQ ID NO: 2046160 - DNA, 15 bp, Homo sapiens
tacggcctggggcag

SEQ ID NO: 2046161 - DNA, 15 bp, Homo sapiens
acggcctggggcagg

SEQ ID NO: 2046162 - DNA, 15 bp, Homo sapiens
cggcctggggcaggc

SEQ ID NO: 2046163 - DNA, 15 bp, Homo sapiens
ggcctggggcaggcg

SEQ ID NO: 2046164 - DNA, 15 bp, Homo sapiens
gcctggggcaggcgc

SEQ ID NO: 2046165 - DNA, 15 bp, Homo sapiens
cctggggcaggcgct

SEQ ID NO: 2046166 - DNA, 15 bp, Homo sapiens
ctggggcaggcgctg

SEQ ID NO: 2046167 - DNA, 15 bp, Homo sapiens
tggggcaggcgctgg

SEQ ID NO: 2046168 - DNA, 15 bp, Homo sapiens
ggggcaggcgctggc

SEQ ID NO: 2046169 - DNA, 15 bp, Homo sapiens
gggcaggcgctggca

SEQ ID NO: 2046170 - DNA, 15 bp, Homo sapiens
ggcaggcgctggcag

SEQ ID NO: 2046171 - DNA, 15 bp, Homo sapiens
gcaggcgctggcagt

SEQ ID NO: 2046172 - DNA, 15 bp, Homo sapiens
caggcgctggcagtt

SEQ ID NO: 2046173 - DNA, 15 bp, Homo sapiens
aggcgctggcagttc

SEQ ID NO: 2046174 - DNA, 15 bp, Homo sapiens
ggcgctggcagttcc

SEQ ID NO: 2046175 - DNA, 15 bp, Homo sapiens
gcgctggcagttccc

SEQ ID NO: 2046176 - DNA, 15 bp, Homo sapiens
cgctggcagttcccc

SEQ ID NO: 2046177 - DNA, 15 bp, Homo sapiens
gctggcagttccccg

SEQ ID NO: 2046178 - DNA, 15 bp, Homo sapiens
ctggcagttccccgc

SEQ ID NO: 2046179 - DNA, 15 bp, Homo sapiens
tggcagttccccgcg

SEQ ID NO: 2046180 - DNA, 15 bp, Homo sapiens
ggcagttccccgcgg

SEQ ID NO: 2046181 - DNA, 15 bp, Homo sapiens
gcagttccccgcgga

SEQ ID NO: 2046182 - DNA, 15 bp, Homo sapiens
cagttccccgcggat

SEQ ID NO: 2046183 - DNA, 15 bp, Homo sapiens
agttccccgcggatg

SEQ ID NO: 2046184 - DNA, 15 bp, Homo sapiens
gttccccgcggatgg

SEQ ID NO: 2046185 - DNA, 15 bp, Homo sapiens
ttccccgcggatggg

SEQ ID NO: 2046186 - DNA, 15 bp, Homo sapiens
tccccgcggatgggc

SEQ ID NO: 2046187 - DNA, 15 bp, Homo sapiens
ccccgcggatgggcc

SEQ ID NO: 2046188 - DNA, 15 bp, Homo sapiens
cccgcggatgggcct

SEQ ID NO: 2046189 - DNA, 15 bp, Homo sapiens
ccgcggatgggcctc

SEQ ID NO: 2046190 - DNA, 15 bp, Homo sapiens
cgcggatgggcctct

SEQ ID NO: 2046191 - DNA, 15 bp, Homo sapiens
gcggatgggcctctt

SEQ ID NO: 2046192 - DNA, 15 bp, Homo sapiens
cggatgggcctcttg

SEQ ID NO: 2046193 - DNA, 15 bp, Homo sapiens
ggatgggcctcttgg

SEQ ID NO: 2046194 - DNA, 15 bp, Homo sapiens
gatgggcctcttggg

SEQ ID NO: 2046195 - DNA, 15 bp, Homo sapiens
atgggcctcttgggc

SEQ ID NO: 2046196 - DNA, 15 bp, Homo sapiens
tgggcctcttgggcc

SEQ ID NO: 2046197 - DNA, 15 bp, Homo sapiens
gggcctcttgggccc

SEQ ID NO: 2046198 - DNA, 15 bp, Homo sapiens
ggcctcttgggcccc

SEQ ID NO: 2046199 - DNA, 15 bp, Homo sapiens
gcctcttgggcccca

SEQ ID NO: 2046200 - DNA, 15 bp, Homo sapiens
cctcttgggccccag

SEQ ID NO: 2046201 - DNA, 15 bp, Homo sapiens
ctcttgggccccagc

SEQ ID NO: 2046202 - DNA, 15 bp, Homo sapiens
tcttgggccccagcg

SEQ ID NO: 2046203 - DNA, 15 bp, Homo sapiens
cttgggccccagcgc

SEQ ID NO: 2046204 - DNA, 15 bp, Homo sapiens
ttgggccccagcgct

SEQ ID NO: 2046205 - DNA, 15 bp, Homo sapiens
tgggccccagcgcta

SEQ ID NO: 2046206 - DNA, 15 bp, Homo sapiens
gggccccagcgctag

SEQ ID NO: 2046207 - DNA, 15 bp, Homo sapiens
ggccccagcgctagg

SEQ ID NO: 2046208 - DNA, 15 bp, Homo sapiens
gccccagcgctaggc

SEQ ID NO: 2046209 - DNA, 15 bp, Homo sapiens
ccccagcgctaggct

SEQ ID NO: 2046210 - DNA, 15 bp, Homo sapiens
cccagcgctaggctg

SEQ ID NO: 2046211 - DNA, 15 bp, Homo sapiens
ccagcgctaggctgc

SEQ ID NO: 2046212 - DNA, 15 bp, Homo sapiens
cagcgctaggctgcc

SEQ ID NO: 2046213 - DNA, 15 bp, Homo sapiens
agcgctaggctgcct

SEQ ID NO: 2046214 - DNA, 15 bp, Homo sapiens
gcgctaggctgcctg

SEQ ID NO: 2046215 - DNA, 15 bp, Homo sapiens
cgctaggctgcctgg

SEQ ID NO: 2046216 - DNA, 15 bp, Homo sapiens
gctaggctgcctggg

SEQ ID NO: 2046217 - DNA, 15 bp, Homo sapiens
ctaggctgcctgggt

SEQ ID NO: 2046218 - DNA, 15 bp, Homo sapiens
taggctgcctgggtc

SEQ ID NO: 2046219 - DNA, 15 bp, Homo sapiens
aggctgcctgggtca

SEQ ID NO: 2046220 - DNA, 15 bp, Homo sapiens
ggctgcctgggtcag

SEQ ID NO: 2046221 - DNA, 15 bp, Homo sapiens
gctgcctgggtcagg

SEQ ID NO: 2046222 - DNA, 15 bp, Homo sapiens
ctgcctgggtcagga

SEQ ID NO: 2046223 - DNA, 15 bp, Homo sapiens
tgcctgggtcaggag

SEQ ID NO: 2046224 - DNA, 15 bp, Homo sapiens
gcctgggtcaggagg

SEQ ID NO: 2046225 - DNA, 15 bp, Homo sapiens
cctgggtcaggaggg

SEQ ID NO: 2046226 - DNA, 15 bp, Homo sapiens
ctgggtcaggagggc

SEQ ID NO: 2046227 - DNA, 15 bp, Homo sapiens
tgggtcaggagggcg

SEQ ID NO: 2046228 - DNA, 15 bp, Homo sapiens
gggtcaggagggcgc

SEQ ID NO: 2046229 - DNA, 15 bp, Homo sapiens
ggtcaggagggcgcc

SEQ ID NO: 2046230 - DNA, 15 bp, Homo sapiens
gtcaggagggcgccg

SEQ ID NO: 2046231 - DNA, 15 bp, Homo sapiens
tcaggagggcgccgt

SEQ ID NO: 2046232 - DNA, 15 bp, Homo sapiens
caggagggcgccgtc

SEQ ID NO: 2046233 - DNA, 15 bp, Homo sapiens
aggagggcgccgtcg

SEQ ID NO: 2046234 - DNA, 15 bp, Homo sapiens
ggagggcgccgtcgg

SEQ ID NO: 2046235 - DNA, 15 bp, Homo sapiens
gagggcgccgtcggt

SEQ ID NO: 2046236 - DNA, 15 bp, Homo sapiens
agggcgccgtcggtt

SEQ ID NO: 2046237 - DNA, 15 bp, Homo sapiens
gggcgccgtcggttg

SEQ ID NO: 2046238 - DNA, 15 bp, Homo sapiens
ggcgccgtcggttgg

SEQ ID NO: 2046239 - DNA, 15 bp, Homo sapiens
gcgccgtcggttggg

SEQ ID NO: 2046240 - DNA, 15 bp, Homo sapiens
cgccgtcggttgggg

SEQ ID NO: 2046241 - DNA, 15 bp, Homo sapiens
gccgtcggttggggc

SEQ ID NO: 2046242 - DNA, 15 bp, Homo sapiens
ccgtcggttggggcg

SEQ ID NO: 2046243 - DNA, 15 bp, Homo sapiens
cgtcggttggggcgg

SEQ ID NO: 2046244 - DNA, 15 bp, Homo sapiens
gtcggttggggcggg

SEQ ID NO: 2046245 - DNA, 15 bp, Homo sapiens
tcggttggggcgggc

SEQ ID NO: 2046246 - DNA, 15 bp, Homo sapiens
cggttggggcgggcc

SEQ ID NO: 2046247 - DNA, 15 bp, Homo sapiens
ggttggggcgggccg

SEQ ID NO: 2046248 - DNA, 15 bp, Homo sapiens
gttggggcgggccgg

SEQ ID NO: 2046249 - DNA, 15 bp, Homo sapiens
ttggggcgggccggg

SEQ ID NO: 2046250 - DNA, 15 bp, Homo sapiens
tggggcgggccgggc

SEQ ID NO: 2046251 - DNA, 15 bp, Homo sapiens
ggggcgggccgggcg

SEQ ID NO: 2046252 - DNA, 15 bp, Homo sapiens
gggcgggccgggcgg

SEQ ID NO: 2046253 - DNA, 15 bp, Homo sapiens
ggcgggccgggcggg

SEQ ID NO: 2046254 - DNA, 15 bp, Homo sapiens
gcgggccgggcgggc

SEQ ID NO: 2046255 - DNA, 15 bp, Homo sapiens
cgggccgggcgggcc

SEQ ID NO: 2046256 - DNA, 15 bp, Homo sapiens
gggccgggcgggcca

SEQ ID NO: 2046257 - DNA, 15 bp, Homo sapiens
ggccgggcgggccaa

SEQ ID NO: 2046258 - DNA, 15 bp, Homo sapiens
gccgggcgggccaat

SEQ ID NO: 2046259 - DNA, 15 bp, Homo sapiens
ccgggcgggccaatg

SEQ ID NO: 2046260 - DNA, 15 bp, Homo sapiens
cgggcgggccaatgg

SEQ ID NO: 2046261 - DNA, 15 bp, Homo sapiens
gggcgggccaatggc

SEQ ID NO: 2046262 - DNA, 15 bp, Homo sapiens
ggcgggccaatggcg

SEQ ID NO: 2046263 - DNA, 15 bp, Homo sapiens
gcgggccaatggcgc

SEQ ID NO: 2046264 - DNA, 15 bp, Homo sapiens
cgggccaatggcgcg

SEQ ID NO: 2046265 - DNA, 15 bp, Homo sapiens
gggccaatggcgcgg

SEQ ID NO: 2046266 - DNA, 15 bp, Homo sapiens
ggccaatggcgcgga

SEQ ID NO: 2046267 - DNA, 15 bp, Homo sapiens
gccaatggcgcggaa

SEQ ID NO: 2046268 - DNA, 15 bp, Homo sapiens
ccaatggcgcggaaa

SEQ ID NO: 2046269 - DNA, 15 bp, Homo sapiens
caatggcgcggaaaa

SEQ ID NO: 2046270 - DNA, 15 bp, Homo sapiens
aatggcgcggaaaac

SEQ ID NO: 2046271 - DNA, 15 bp, Homo sapiens
atggcgcggaaaaca

SEQ ID NO: 2046272 - DNA, 15 bp, Homo sapiens
tggcgcggaaaacag

SEQ ID NO: 2046273 - DNA, 15 bp, Homo sapiens
ggcgcggaaaacagg

SEQ ID NO: 2046274 - DNA, 15 bp, Homo sapiens
gcgcggaaaacaggg

SEQ ID NO: 2046275 - DNA, 15 bp, Homo sapiens
cgcggaaaacagggg

SEQ ID NO: 2046276 - DNA, 15 bp, Homo sapiens
gcggaaaacaggggt

SEQ ID NO: 2046277 - DNA, 15 bp, Homo sapiens
cggaaaacaggggtg

SEQ ID NO: 2046278 - DNA, 15 bp, Homo sapiens
ggaaaacaggggtgg

SEQ ID NO: 2046279 - DNA, 15 bp, Homo sapiens
gaaaacaggggtggc

SEQ ID NO: 2046280 - DNA, 15 bp, Homo sapiens
aaaacaggggtggcc

SEQ ID NO: 2046281 - DNA, 15 bp, Homo sapiens
aaacaggggtggcct

SEQ ID NO: 2046282 - DNA, 15 bp, Homo sapiens
aacaggggtggcctg

SEQ ID NO: 2046283 - DNA, 15 bp, Homo sapiens
acaggggtggcctgg

SEQ ID NO: 2046284 - DNA, 15 bp, Homo sapiens
caggggtggcctggc

SEQ ID NO: 2046285 - DNA, 15 bp, Homo sapiens
aggggtggcctggct

SEQ ID NO: 2046286 - DNA, 15 bp, Homo sapiens
ggggtggcctggctc

SEQ ID NO: 2046287 - DNA, 15 bp, Homo sapiens
gggtggcctggctcg

SEQ ID NO: 2046288 - DNA, 15 bp, Homo sapiens
ggtggcctggctcgg

SEQ ID NO: 2046289 - DNA, 15 bp, Homo sapiens
gtggcctggctcggc

SEQ ID NO: 2046290 - DNA, 15 bp, Homo sapiens
tggcctggctcggcc

SEQ ID NO: 2046291 - DNA, 15 bp, Homo sapiens
ggcctggctcggcct

SEQ ID NO: 2046292 - DNA, 15 bp, Homo sapiens
gcctggctcggcctg

SEQ ID NO: 2046293 - DNA, 15 bp, Homo sapiens
cctggctcggcctgg

SEQ ID NO: 2046294 - DNA, 15 bp, Homo sapiens
ctggctcggcctggc

SEQ ID NO: 2046295 - DNA, 15 bp, Homo sapiens
tggctcggcctggcc

SEQ ID NO: 2046296 - DNA, 15 bp, Homo sapiens
ggctcggcctggccc

SEQ ID NO: 2046297 - DNA, 15 bp, Homo sapiens
gctcggcctggcccc

SEQ ID NO: 2046298 - DNA, 15 bp, Homo sapiens
ctcggcctggccccg

SEQ ID NO: 2046299 - DNA, 15 bp, Homo sapiens
tcggcctggccccgg

SEQ ID NO: 2046300 - DNA, 15 bp, Homo sapiens
cggcctggccccggc

SEQ ID NO: 2046301 - DNA, 15 bp, Homo sapiens
ggcctggccccggcc

SEQ ID NO: 2046302 - DNA, 15 bp, Homo sapiens
gcctggccccggccg

SEQ ID NO: 2046303 - DNA, 15 bp, Homo sapiens
cctggccccggccga

SEQ ID NO: 2046304 - DNA, 15 bp, Homo sapiens
ctggccccggccgac

SEQ ID NO: 2046305 - DNA, 15 bp, Homo sapiens
tggccccggccgacg

SEQ ID NO: 2046306 - DNA, 15 bp, Homo sapiens
ggccccggccgacgc

SEQ ID NO: 2046307 - DNA, 15 bp, Homo sapiens
gccccggccgacgct

SEQ ID NO: 2046308 - DNA, 15 bp, Homo sapiens
ccccggccgacgctg

SEQ ID NO: 2046309 - DNA, 15 bp, Homo sapiens
cccggccgacgctgt

SEQ ID NO: 2046310 - DNA, 15 bp, Homo sapiens
ccggccgacgctgtg

SEQ ID NO: 2046311 - DNA, 15 bp, Homo sapiens
cggccgacgctgtgc

SEQ ID NO: 2046312 - DNA, 15 bp, Homo sapiens
ggccgacgctgtgcg

SEQ ID NO: 2046313 - DNA, 15 bp, Homo sapiens
gccgacgctgtgcgt

SEQ ID NO: 2046314 - DNA, 15 bp, Homo sapiens
ccgacgctgtgcgtt

SEQ ID NO: 2046315 - DNA, 15 bp, Homo sapiens
cgacgctgtgcgttt

SEQ ID NO: 2046316 - DNA, 15 bp, Homo sapiens
gacgctgtgcgtttg

SEQ ID NO: 2046317 - DNA, 15 bp, Homo sapiens
acgctgtgcgtttgt

SEQ ID NO: 2046318 - DNA, 15 bp, Homo sapiens
cgctgtgcgtttgtc

SEQ ID NO: 2046319 - DNA, 15 bp, Homo sapiens
gctgtgcgtttgtcg

SEQ ID NO: 2046320 - DNA, 15 bp, Homo sapiens
ctgtgcgtttgtcgc

SEQ ID NO: 2046321 - DNA, 15 bp, Homo sapiens
tgtgcgtttgtcgct

SEQ ID NO: 2046322 - DNA, 15 bp, Homo sapiens
gtgcgtttgtcgctt

SEQ ID NO: 2046323 - DNA, 15 bp, Homo sapiens
tgcgtttgtcgctta

SEQ ID NO: 2046324 - DNA, 15 bp, Homo sapiens
gcgtttgtcgcttac

SEQ ID NO: 2046325 - DNA, 15 bp, Homo sapiens
cgtttgtcgcttaca

SEQ ID NO: 2046326 - DNA, 15 bp, Homo sapiens
gtttgtcgcttacag

SEQ ID NO: 2046327 - DNA, 15 bp, Homo sapiens
tttgtcgcttacagt

SEQ ID NO: 2046328 - DNA, 15 bp, Homo sapiens
ttgtcgcttacagtc

SEQ ID NO: 2046329 - DNA, 15 bp, Homo sapiens
tgtcgcttacagtct

SEQ ID NO: 2046330 - DNA, 15 bp, Homo sapiens
gtcgcttacagtctc

SEQ ID NO: 2046331 - DNA, 15 bp, Homo sapiens
tcgcttacagtctcc

SEQ ID NO: 2046332 - DNA, 15 bp, Homo sapiens
cgcttacagtctccc

SEQ ID NO: 2046333 - DNA, 15 bp, Homo sapiens
gcttacagtctcccg

SEQ ID NO: 2046334 - DNA, 15 bp, Homo sapiens
cttacagtctcccgc

SEQ ID NO: 2046335 - DNA, 15 bp, Homo sapiens
ttacagtctcccgct

SEQ ID NO: 2046336 - DNA, 15 bp, Homo sapiens
tacagtctcccgctt

SEQ ID NO: 2046337 - DNA, 15 bp, Homo sapiens
acagtctcccgcttc

SEQ ID NO: 2046338 - DNA, 15 bp, Homo sapiens
cagtctcccgcttca

SEQ ID NO: 2046339 - DNA, 15 bp, Homo sapiens
agtctcccgcttcat

SEQ ID NO: 2046340 - DNA, 15 bp, Homo sapiens
gtctcccgcttcatg

SEQ ID NO: 2046341 - DNA, 15 bp, Homo sapiens
tctcccgcttcatgg

SEQ ID NO: 2046342 - DNA, 15 bp, Homo sapiens
ctcccgcttcatggg

SEQ ID NO: 2046343 - DNA, 15 bp, Homo sapiens
tcccgcttcatgggc

SEQ ID NO: 2046344 - DNA, 15 bp, Homo sapiens
cccgcttcatgggcc

SEQ ID NO: 2046345 - DNA, 15 bp, Homo sapiens
ccgcttcatgggccc

SEQ ID NO: 2046346 - DNA, 15 bp, Homo sapiens
cgcttcatgggcccg

SEQ ID NO: 2046347 - DNA, 15 bp, Homo sapiens
gcttcatgggcccgg

SEQ ID NO: 2046348 - DNA, 15 bp, Homo sapiens
cttcatgggcccggc

SEQ ID NO: 2046349 - DNA, 15 bp, Homo sapiens
ttcatgggcccggcg

SEQ ID NO: 2046350 - DNA, 15 bp, Homo sapiens
tcatgggcccggcga

SEQ ID NO: 2046351 - DNA, 15 bp, Homo sapiens
catgggcccggcgag

SEQ ID NO: 2046352 - DNA, 15 bp, Homo sapiens
atgggcccggcgagc

SEQ ID NO: 2046353 - DNA, 15 bp, Homo sapiens
tgggcccggcgagcg

SEQ ID NO: 2046354 - DNA, 15 bp, Homo sapiens
gggcccggcgagcgg

SEQ ID NO: 2046355 - DNA, 15 bp, Homo sapiens
ggcccggcgagcggc

SEQ ID NO: 2046356 - DNA, 15 bp, Homo sapiens
gcccggcgagcggca

SEQ ID NO: 2046357 - DNA, 15 bp, Homo sapiens
cccggcgagcggcat

SEQ ID NO: 2046358 - DNA, 15 bp, Homo sapiens
ccggcgagcggcatg

SEQ ID NO: 2046359 - DNA, 15 bp, Homo sapiens
cggcgagcggcatga

SEQ ID NO: 2046360 - DNA, 15 bp, Homo sapiens
ggcgagcggcatgaa

SEQ ID NO: 2046361 - DNA, 15 bp, Homo sapiens
gcgagcggcatgaac

SEQ ID NO: 2046362 - DNA, 15 bp, Homo sapiens
cgagcggcatgaaca

SEQ ID NO: 2046363 - DNA, 15 bp, Homo sapiens
gagcggcatgaacat

SEQ ID NO: 2046364 - DNA, 15 bp, Homo sapiens
agcggcatgaacatg

SEQ ID NO: 2046365 - DNA, 15 bp, Homo sapiens
gcggcatgaacatga

SEQ ID NO: 2046366 - DNA, 15 bp, Homo sapiens
cggcatgaacatgag

SEQ ID NO: 2046367 - DNA, 15 bp, Homo sapiens
ggcatgaacatgagc

SEQ ID NO: 2046368 - DNA, 15 bp, Homo sapiens
gcatgaacatgagcg

SEQ ID NO: 2046369 - DNA, 15 bp, Homo sapiens
catgaacatgagcgg

SEQ ID NO: 2046370 - DNA, 15 bp, Homo sapiens
atgaacatgagcggc

SEQ ID NO: 2046371 - DNA, 15 bp, Homo sapiens
tgaacatgagcggca

SEQ ID NO: 2046372 - DNA, 15 bp, Homo sapiens
gaacatgagcggcat

SEQ ID NO: 2046373 - DNA, 15 bp, Homo sapiens
aacatgagcggcatg

SEQ ID NO: 2046374 - DNA, 15 bp, Homo sapiens
acatgagcggcatgg

SEQ ID NO: 2046375 - DNA, 15 bp, Homo sapiens
catgagcggcatggg

SEQ ID NO: 2046376 - DNA, 15 bp, Homo sapiens
atgagcggcatgggc

SEQ ID NO: 2046377 - DNA, 15 bp, Homo sapiens
tgagcggcatgggcg

SEQ ID NO: 2046378 - DNA, 15 bp, Homo sapiens
gagcggcatgggcgg

SEQ ID NO: 2046379 - DNA, 15 bp, Homo sapiens
agcggcatgggcggc

SEQ ID NO: 2046380 - DNA, 15 bp, Homo sapiens
gcggcatgggcggcc

SEQ ID NO: 2046381 - DNA, 15 bp, Homo sapiens
cggcatgggcggcct

SEQ ID NO: 2046382 - DNA, 15 bp, Homo sapiens
ggcatgggcggcctg

SEQ ID NO: 2046383 - DNA, 15 bp, Homo sapiens
gcatgggcggcctgg

SEQ ID NO: 2046384 - DNA, 15 bp, Homo sapiens
catgggcggcctggg

SEQ ID NO: 2046385 - DNA, 15 bp, Homo sapiens
atgggcggcctgggc

SEQ ID NO: 2046386 - DNA, 15 bp, Homo sapiens
tgggcggcctgggct

SEQ ID NO: 2046387 - DNA, 15 bp, Homo sapiens
gggcggcctgggctc

SEQ ID NO: 2046388 - DNA, 15 bp, Homo sapiens
ggcggcctgggctcg

SEQ ID NO: 2046389 - DNA, 15 bp, Homo sapiens
gcggcctgggctcgc

SEQ ID NO: 2046390 - DNA, 15 bp, Homo sapiens
cggcctgggctcgct

SEQ ID NO: 2046391 - DNA, 15 bp, Homo sapiens
ggcctgggctcgctg

SEQ ID NO: 2046392 - DNA, 15 bp, Homo sapiens
gcctgggctcgctgg

SEQ ID NO: 2046393 - DNA, 15 bp, Homo sapiens
cctgggctcgctggg

SEQ ID NO: 2046394 - DNA, 15 bp, Homo sapiens
ctgggctcgctgggg

SEQ ID NO: 2046395 - DNA, 15 bp, Homo sapiens
tgggctcgctggggg

SEQ ID NO: 2046396 - DNA, 15 bp, Homo sapiens
gggctcgctggggga

SEQ ID NO: 2046397 - DNA, 15 bp, Homo sapiens
ggctcgctgggggac

SEQ ID NO: 2046398 - DNA, 15 bp, Homo sapiens
gctcgctgggggacg

SEQ ID NO: 2046399 - DNA, 15 bp, Homo sapiens
ctcgctgggggacgt

SEQ ID NO: 2046400 - DNA, 15 bp, Homo sapiens
tcgctgggggacgtg

SEQ ID NO: 2046401 - DNA, 15 bp, Homo sapiens
cgctgggggacgtga

SEQ ID NO: 2046402 - DNA, 15 bp, Homo sapiens
gctgggggacgtgag

SEQ ID NO: 2046403 - DNA, 15 bp, Homo sapiens
ctgggggacgtgagc

SEQ ID NO: 2046404 - DNA, 15 bp, Homo sapiens
tgggggacgtgagca

SEQ ID NO: 2046405 - DNA, 15 bp, Homo sapiens
gggggacgtgagcaa

SEQ ID NO: 2046406 - DNA, 15 bp, Homo sapiens
ggggacgtgagcaag

SEQ ID NO: 2046407 - DNA, 15 bp, Homo sapiens
gggacgtgagcaaga

SEQ ID NO: 2046408 - DNA, 15 bp, Homo sapiens
ggacgtgagcaagaa

SEQ ID NO: 2046409 - DNA, 15 bp, Homo sapiens
gacgtgagcaagaac

SEQ ID NO: 2046410 - DNA, 15 bp, Homo sapiens
acgtgagcaagaaca

SEQ ID NO: 2046411 - DNA, 15 bp, Homo sapiens
cgtgagcaagaacat

SEQ ID NO: 2046412 - DNA, 15 bp, Homo sapiens
gtgagcaagaacatg

SEQ ID NO: 2046413 - DNA, 15 bp, Homo sapiens
tgagcaagaacatgg

SEQ ID NO: 2046414 - DNA, 15 bp, Homo sapiens
gagcaagaacatggc

SEQ ID NO: 2046415 - DNA, 15 bp, Homo sapiens
agcaagaacatggcc

SEQ ID NO: 2046416 - DNA, 15 bp, Homo sapiens
gcaagaacatggccc

SEQ ID NO: 2046417 - DNA, 15 bp, Homo sapiens
caagaacatggcccc

SEQ ID NO: 2046418 - DNA, 15 bp, Homo sapiens
aagaacatggccccg

SEQ ID NO: 2046419 - DNA, 15 bp, Homo sapiens
agaacatggccccgc

SEQ ID NO: 2046420 - DNA, 15 bp, Homo sapiens
gaacatggccccgct

SEQ ID NO: 2046421 - DNA, 15 bp, Homo sapiens
aacatggccccgctg

SEQ ID NO: 2046422 - DNA, 15 bp, Homo sapiens
acatggccccgctgc

SEQ ID NO: 2046423 - DNA, 15 bp, Homo sapiens
catggccccgctgcc

SEQ ID NO: 2046424 - DNA, 15 bp, Homo sapiens
atggccccgctgcca

SEQ ID NO: 2046425 - DNA, 15 bp, Homo sapiens
tggccccgctgccaa

SEQ ID NO: 2046426 - DNA, 15 bp, Homo sapiens
ggccccgctgccaag

SEQ ID NO: 2046427 - DNA, 15 bp, Homo sapiens
gccccgctgccaagc

SEQ ID NO: 2046428 - DNA, 15 bp, Homo sapiens
ccccgctgccaagcg

SEQ ID NO: 2046429 - DNA, 15 bp, Homo sapiens
cccgctgccaagcgc

SEQ ID NO: 2046430 - DNA, 15 bp, Homo sapiens
ccgctgccaagcgcg

SEQ ID NO: 2046431 - DNA, 15 bp, Homo sapiens
cgctgccaagcgcgc

SEQ ID NO: 2046432 - DNA, 15 bp, Homo sapiens
gctgccaagcgcgcc

SEQ ID NO: 2046433 - DNA, 15 bp, Homo sapiens
ctgccaagcgcgccg

SEQ ID NO: 2046434 - DNA, 15 bp, Homo sapiens
tgccaagcgcgccgc

SEQ ID NO: 2046435 - DNA, 15 bp, Homo sapiens
gccaagcgcgccgcg

SEQ ID NO: 2046436 - DNA, 15 bp, Homo sapiens
ccaagcgcgccgcgc

SEQ ID NO: 2046437 - DNA, 15 bp, Homo sapiens
caagcgcgccgcgca

SEQ ID NO: 2046438 - DNA, 15 bp, Homo sapiens
aagcgcgccgcgcag

SEQ ID NO: 2046439 - DNA, 15 bp, Homo sapiens
agcgcgccgcgcagg

SEQ ID NO: 2046440 - DNA, 15 bp, Homo sapiens
gcgcgccgcgcagga

SEQ ID NO: 2046441 - DNA, 15 bp, Homo sapiens
cgcgccgcgcaggaa

SEQ ID NO: 2046442 - DNA, 15 bp, Homo sapiens
gcgccgcgcaggaag

SEQ ID NO: 2046443 - DNA, 15 bp, Homo sapiens
cgccgcgcaggaagc

SEQ ID NO: 2046444 - DNA, 15 bp, Homo sapiens
gccgcgcaggaagcg

SEQ ID NO: 2046445 - DNA, 15 bp, Homo sapiens
ccgcgcaggaagcgc

SEQ ID NO: 2046446 - DNA, 15 bp, Homo sapiens
cgcgcaggaagcgcc

SEQ ID NO: 2046447 - DNA, 15 bp, Homo sapiens
gcgcaggaagcgccg

SEQ ID NO: 2046448 - DNA, 15 bp, Homo sapiens
cgcaggaagcgccgg

SEQ ID NO: 2046449 - DNA, 15 bp, Homo sapiens
gcaggaagcgccggg

SEQ ID NO: 2046450 - DNA, 15 bp, Homo sapiens
caggaagcgccgggt

SEQ ID NO: 2046451 - DNA, 15 bp, Homo sapiens
aggaagcgccgggtg

SEQ ID NO: 2046452 - DNA, 15 bp, Homo sapiens
ggaagcgccgggtgc

SEQ ID NO: 2046453 - DNA, 15 bp, Homo sapiens
gaagcgccgggtgct

SEQ ID NO: 2046454 - DNA, 15 bp, Homo sapiens
aagcgccgggtgctc

SEQ ID NO: 2046455 - DNA, 15 bp, Homo sapiens
agcgccgggtgctct

SEQ ID NO: 2046456 - DNA, 15 bp, Homo sapiens
gcgccgggtgctctt

SEQ ID NO: 2046457 - DNA, 15 bp, Homo sapiens
cgccgggtgctcttc

SEQ ID NO: 2046458 - DNA, 15 bp, Homo sapiens
gccgggtgctcttct

SEQ ID NO: 2046459 - DNA, 15 bp, Homo sapiens
ccgggtgctcttctc

SEQ ID NO: 2046460 - DNA, 15 bp, Homo sapiens
cgggtgctcttctcg

SEQ ID NO: 2046461 - DNA, 15 bp, Homo sapiens
gggtgctcttctcgc

SEQ ID NO: 2046462 - DNA, 15 bp, Homo sapiens
ggtgctcttctcgca

SEQ ID NO: 2046463 - DNA, 15 bp, Homo sapiens
gtgctcttctcgcag

SEQ ID NO: 2046464 - DNA, 15 bp, Homo sapiens
tgctcttctcgcagg

SEQ ID NO: 2046465 - DNA, 15 bp, Homo sapiens
gctcttctcgcaggc

SEQ ID NO: 2046466 - DNA, 15 bp, Homo sapiens
ctcttctcgcaggcg

SEQ ID NO: 2046467 - DNA, 15 bp, Homo sapiens
tcttctcgcaggcgc

SEQ ID NO: 2046468 - DNA, 15 bp, Homo sapiens
cttctcgcaggcgca

SEQ ID NO: 2046469 - DNA, 15 bp, Homo sapiens
ttctcgcaggcgcag

SEQ ID NO: 2046470 - DNA, 15 bp, Homo sapiens
tctcgcaggcgcagg

SEQ ID NO: 2046471 - DNA, 15 bp, Homo sapiens
ctcgcaggcgcaggt

SEQ ID NO: 2046472 - DNA, 15 bp, Homo sapiens
tcgcaggcgcaggtg

SEQ ID NO: 2046473 - DNA, 15 bp, Homo sapiens
cgcaggcgcaggtgt

SEQ ID NO: 2046474 - DNA, 15 bp, Homo sapiens
gcaggcgcaggtgta

SEQ ID NO: 2046475 - DNA, 15 bp, Homo sapiens
caggcgcaggtgtac

SEQ ID NO: 2046476 - DNA, 15 bp, Homo sapiens
aggcgcaggtgtacg

SEQ ID NO: 2046477 - DNA, 15 bp, Homo sapiens
ggcgcaggtgtacga

SEQ ID NO: 2046478 - DNA, 15 bp, Homo sapiens
gcgcaggtgtacgag

SEQ ID NO: 2046479 - DNA, 15 bp, Homo sapiens
cgcaggtgtacgagc

SEQ ID NO: 2046480 - DNA, 15 bp, Homo sapiens
gcaggtgtacgagct

SEQ ID NO: 2046481 - DNA, 15 bp, Homo sapiens
caggtgtacgagctg

SEQ ID NO: 2046482 - DNA, 15 bp, Homo sapiens
aggtgtacgagctgg

SEQ ID NO: 2046483 - DNA, 15 bp, Homo sapiens
ggtgtacgagctgga

SEQ ID NO: 2046484 - DNA, 15 bp, Homo sapiens
gtgtacgagctggag

SEQ ID NO: 2046485 - DNA, 15 bp, Homo sapiens
tgtacgagctggagc

SEQ ID NO: 2046486 - DNA, 15 bp, Homo sapiens
gtacgagctggagcg

SEQ ID NO: 2046487 - DNA, 15 bp, Homo sapiens
tacgagctggagcga

SEQ ID NO: 2046488 - DNA, 15 bp, Homo sapiens
acgagctggagcgac

SEQ ID NO: 2046489 - DNA, 15 bp, Homo sapiens
cgagctggagcgacg

SEQ ID NO: 2046490 - DNA, 15 bp, Homo sapiens
gagctggagcgacgc

SEQ ID NO: 2046491 - DNA, 15 bp, Homo sapiens
agctggagcgacgct

SEQ ID NO: 2046492 - DNA, 15 bp, Homo sapiens
gctggagcgacgctt

SEQ ID NO: 2046493 - DNA, 15 bp, Homo sapiens
ctggagcgacgcttc

SEQ ID NO: 2046494 - DNA, 15 bp, Homo sapiens
tggagcgacgcttca

SEQ ID NO: 2046495 - DNA, 15 bp, Homo sapiens
ggagcgacgcttcaa

SEQ ID NO: 2046496 - DNA, 15 bp, Homo sapiens
gagcgacgcttcaag

SEQ ID NO: 2046497 - DNA, 15 bp, Homo sapiens
agcgacgcttcaagc

SEQ ID NO: 2046498 - DNA, 15 bp, Homo sapiens
gcgacgcttcaagca

SEQ ID NO: 2046499 - DNA, 15 bp, Homo sapiens
cgacgcttcaagcaa

SEQ ID NO: 2046500 - DNA, 15 bp, Homo sapiens
gacgcttcaagcaac

SEQ ID NO: 2046501 - DNA, 15 bp, Homo sapiens
acgcttcaagcaaca

SEQ ID NO: 2046502 - DNA, 15 bp, Homo sapiens
cgcttcaagcaacag

SEQ ID NO: 2046503 - DNA, 15 bp, Homo sapiens
gcttcaagcaacaga

SEQ ID NO: 2046504 - DNA, 15 bp, Homo sapiens
cttcaagcaacagaa

SEQ ID NO: 2046505 - DNA, 15 bp, Homo sapiens
ttcaagcaacagaag

SEQ ID NO: 2046506 - DNA, 15 bp, Homo sapiens
tcaagcaacagaagt

SEQ ID NO: 2046507 - DNA, 15 bp, Homo sapiens
caagcaacagaagta

SEQ ID NO: 2046508 - DNA, 15 bp, Homo sapiens
aagcaacagaagtac

SEQ ID NO: 2046509 - DNA, 15 bp, Homo sapiens
agcaacagaagtacc

SEQ ID NO: 2046510 - DNA, 15 bp, Homo sapiens
gcaacagaagtacct

SEQ ID NO: 2046511 - DNA, 15 bp, Homo sapiens
caacagaagtacctg

SEQ ID NO: 2046512 - DNA, 15 bp, Homo sapiens
aacagaagtacctgt

SEQ ID NO: 2046513 - DNA, 15 bp, Homo sapiens
acagaagtacctgtc

SEQ ID NO: 2046514 - DNA, 15 bp, Homo sapiens
cagaagtacctgtcg

SEQ ID NO: 2046515 - DNA, 15 bp, Homo sapiens
agaagtacctgtcgg

SEQ ID NO: 2046516 - DNA, 15 bp, Homo sapiens
gaagtacctgtcggc

SEQ ID NO: 2046517 - DNA, 15 bp, Homo sapiens
aagtacctgtcggcg

SEQ ID NO: 2046518 - DNA, 15 bp, Homo sapiens
agtacctgtcggcgc

SEQ ID NO: 2046519 - DNA, 15 bp, Homo sapiens
gtacctgtcggcgcc

SEQ ID NO: 2046520 - DNA, 15 bp, Homo sapiens
tacctgtcggcgccg

SEQ ID NO: 2046521 - DNA, 15 bp, Homo sapiens
acctgtcggcgccgg

SEQ ID NO: 2046522 - DNA, 15 bp, Homo sapiens
cctgtcggcgccgga

SEQ ID NO: 2046523 - DNA, 15 bp, Homo sapiens
ctgtcggcgccggag

SEQ ID NO: 2046524 - DNA, 15 bp, Homo sapiens
tgtcggcgccggagc

SEQ ID NO: 2046525 - DNA, 15 bp, Homo sapiens
gtcggcgccggagcg

SEQ ID NO: 2046526 - DNA, 15 bp, Homo sapiens
tcggcgccggagcgc

SEQ ID NO: 2046527 - DNA, 15 bp, Homo sapiens
cggcgccggagcgcg

SEQ ID NO: 2046528 - DNA, 15 bp, Homo sapiens
ggcgccggagcgcga

SEQ ID NO: 2046529 - DNA, 15 bp, Homo sapiens
gcgccggagcgcgag

SEQ ID NO: 2046530 - DNA, 15 bp, Homo sapiens
cgccggagcgcgagc

SEQ ID NO: 2046531 - DNA, 15 bp, Homo sapiens
gccggagcgcgagca

SEQ ID NO: 2046532 - DNA, 15 bp, Homo sapiens
ccggagcgcgagcac

SEQ ID NO: 2046533 - DNA, 15 bp, Homo sapiens
cggagcgcgagcacc

SEQ ID NO: 2046534 - DNA, 15 bp, Homo sapiens
ggagcgcgagcacct

SEQ ID NO: 2046535 - DNA, 15 bp, Homo sapiens
gagcgcgagcacctg

SEQ ID NO: 2046536 - DNA, 15 bp, Homo sapiens
agcgcgagcacctgg

SEQ ID NO: 2046537 - DNA, 15 bp, Homo sapiens
gcgcgagcacctggc

SEQ ID NO: 2046538 - DNA, 15 bp, Homo sapiens
cgcgagcacctggcc

SEQ ID NO: 2046539 - DNA, 15 bp, Homo sapiens
gcgagcacctggcca

SEQ ID NO: 2046540 - DNA, 15 bp, Homo sapiens
cgagcacctggccag

SEQ ID NO: 2046541 - DNA, 15 bp, Homo sapiens
gagcacctggccagc

SEQ ID NO: 2046542 - DNA, 15 bp, Homo sapiens
agcacctggccagca

SEQ ID NO: 2046543 - DNA, 15 bp, Homo sapiens
gcacctggccagcat

SEQ ID NO: 2046544 - DNA, 15 bp, Homo sapiens
cacctggccagcatg

SEQ ID NO: 2046545 - DNA, 15 bp, Homo sapiens
acctggccagcatga

SEQ ID NO: 2046546 - DNA, 15 bp, Homo sapiens
cctggccagcatgat

SEQ ID NO: 2046547 - DNA, 15 bp, Homo sapiens
ctggccagcatgatc

SEQ ID NO: 2046548 - DNA, 15 bp, Homo sapiens
tggccagcatgatcc

SEQ ID NO: 2046549 - DNA, 15 bp, Homo sapiens
ggccagcatgatcca

SEQ ID NO: 2046550 - DNA, 15 bp, Homo sapiens
gccagcatgatccac

SEQ ID NO: 2046551 - DNA, 15 bp, Homo sapiens
ccagcatgatccacc

SEQ ID NO: 2046552 - DNA, 15 bp, Homo sapiens
cagcatgatccacct

SEQ ID NO: 2046553 - DNA, 15 bp, Homo sapiens
agcatgatccacctg

SEQ ID NO: 2046554 - DNA, 15 bp, Homo sapiens
gcatgatccacctga

SEQ ID NO: 2046555 - DNA, 15 bp, Homo sapiens
catgatccacctgac

SEQ ID NO: 2046556 - DNA, 15 bp, Homo sapiens
atgatccacctgacg

SEQ ID NO: 2046557 - DNA, 15 bp, Homo sapiens
tgatccacctgacgc

SEQ ID NO: 2046558 - DNA, 15 bp, Homo sapiens
gatccacctgacgcc

SEQ ID NO: 2046559 - DNA, 15 bp, Homo sapiens
atccacctgacgccc

SEQ ID NO: 2046560 - DNA, 15 bp, Homo sapiens
tccacctgacgccca

SEQ ID NO: 2046561 - DNA, 15 bp, Homo sapiens
ccacctgacgcccac

SEQ ID NO: 2046562 - DNA, 15 bp, Homo sapiens
cacctgacgcccacg

SEQ ID NO: 2046563 - DNA, 15 bp, Homo sapiens
acctgacgcccacgc

SEQ ID NO: 2046564 - DNA, 15 bp, Homo sapiens
cctgacgcccacgca

SEQ ID NO: 2046565 - DNA, 15 bp, Homo sapiens
ctgacgcccacgcag

SEQ ID NO: 2046566 - DNA, 15 bp, Homo sapiens
tgacgcccacgcagg

SEQ ID NO: 2046567 - DNA, 15 bp, Homo sapiens
gacgcccacgcaggt

SEQ ID NO: 2046568 - DNA, 15 bp, Homo sapiens
acgcccacgcaggtc

SEQ ID NO: 2046569 - DNA, 15 bp, Homo sapiens
cgcccacgcaggtca

SEQ ID NO: 2046570 - DNA, 15 bp, Homo sapiens
gcccacgcaggtcaa

SEQ ID NO: 2046571 - DNA, 15 bp, Homo sapiens
cccacgcaggtcaag

SEQ ID NO: 2046572 - DNA, 15 bp, Homo sapiens
ccacgcaggtcaaga

SEQ ID NO: 2046573 - DNA, 15 bp, Homo sapiens
cacgcaggtcaagat

SEQ ID NO: 2046574 - DNA, 15 bp, Homo sapiens
acgcaggtcaagatc

SEQ ID NO: 2046575 - DNA, 15 bp, Homo sapiens
cgcaggtcaagatct

SEQ ID NO: 2046576 - DNA, 15 bp, Homo sapiens
gcaggtcaagatctg

SEQ ID NO: 2046577 - DNA, 15 bp, Homo sapiens
caggtcaagatctgg

SEQ ID NO: 2046578 - DNA, 15 bp, Homo sapiens
aggtcaagatctggt

SEQ ID NO: 2046579 - DNA, 15 bp, Homo sapiens
ggtcaagatctggtt

SEQ ID NO: 2046580 - DNA, 15 bp, Homo sapiens
gtcaagatctggttc

SEQ ID NO: 2046581 - DNA, 15 bp, Homo sapiens
tcaagatctggttcc

SEQ ID NO: 2046582 - DNA, 15 bp, Homo sapiens
caagatctggttcca

SEQ ID NO: 2046583 - DNA, 15 bp, Homo sapiens
aagatctggttccag

SEQ ID NO: 2046584 - DNA, 15 bp, Homo sapiens
agatctggttccaga

SEQ ID NO: 2046585 - DNA, 15 bp, Homo sapiens
gatctggttccagaa

SEQ ID NO: 2046586 - DNA, 15 bp, Homo sapiens
ctggttccagaacca

SEQ ID NO: 2046587 - DNA, 15 bp, Homo sapiens
tggttccagaaccac

SEQ ID NO: 2046588 - DNA, 15 bp, Homo sapiens
ggttccagaaccacc

SEQ ID NO: 2046589 - DNA, 15 bp, Homo sapiens
gttccagaaccaccg

SEQ ID NO: 2046590 - DNA, 15 bp, Homo sapiens
ttccagaaccaccgc

SEQ ID NO: 2046591 - DNA, 15 bp, Homo sapiens
tccagaaccaccgct

SEQ ID NO: 2046592 - DNA, 15 bp, Homo sapiens
ccagaaccaccgcta

SEQ ID NO: 2046593 - DNA, 15 bp, Homo sapiens
cagaaccaccgctac

SEQ ID NO: 2046594 - DNA, 15 bp, Homo sapiens
agaaccaccgctaca

SEQ ID NO: 2046595 - DNA, 15 bp, Homo sapiens
gaaccaccgctacaa

SEQ ID NO: 2046596 - DNA, 15 bp, Homo sapiens
aaccaccgctacaaa

SEQ ID NO: 2046597 - DNA, 15 bp, Homo sapiens
accaccgctacaaaa

SEQ ID NO: 2046598 - DNA, 15 bp, Homo sapiens
ccaccgctacaaaat

SEQ ID NO: 2046599 - DNA, 15 bp, Homo sapiens
caccgctacaaaatg

SEQ ID NO: 2046600 - DNA, 15 bp, Homo sapiens
accgctacaaaatga

SEQ ID NO: 2046601 - DNA, 15 bp, Homo sapiens
ccgctacaaaatgaa

SEQ ID NO: 2046602 - DNA, 15 bp, Homo sapiens
cgctacaaaatgaag

SEQ ID NO: 2046603 - DNA, 15 bp, Homo sapiens
gctacaaaatgaagc

SEQ ID NO: 2046604 - DNA, 15 bp, Homo sapiens
ctacaaaatgaagcg

SEQ ID NO: 2046605 - DNA, 15 bp, Homo sapiens
tacaaaatgaagcgc

SEQ ID NO: 2046606 - DNA, 15 bp, Homo sapiens
acaaaatgaagcgcc

SEQ ID NO: 2046607 - DNA, 15 bp, Homo sapiens
caaaatgaagcgcca

SEQ ID NO: 2046608 - DNA, 15 bp, Homo sapiens
aaaatgaagcgccag

SEQ ID NO: 2046609 - DNA, 15 bp, Homo sapiens
aaatgaagcgccagg

SEQ ID NO: 2046610 - DNA, 15 bp, Homo sapiens
aatgaagcgccaggc

SEQ ID NO: 2046611 - DNA, 15 bp, Homo sapiens
atgaagcgccaggcc

SEQ ID NO: 2046612 - DNA, 15 bp, Homo sapiens
tgaagcgccaggcca

SEQ ID NO: 2046613 - DNA, 15 bp, Homo sapiens
gaagcgccaggccaa

SEQ ID NO: 2046614 - DNA, 15 bp, Homo sapiens
aagcgccaggccaag

SEQ ID NO: 2046615 - DNA, 15 bp, Homo sapiens
agcgccaggccaagg

SEQ ID NO: 2046616 - DNA, 15 bp, Homo sapiens
gcgccaggccaagga

SEQ ID NO: 2046617 - DNA, 15 bp, Homo sapiens
cgccaggccaaggac

SEQ ID NO: 2046618 - DNA, 15 bp, Homo sapiens
gccaggccaaggaca

SEQ ID NO: 2046619 - DNA, 15 bp, Homo sapiens
ccaggccaaggacaa

SEQ ID NO: 2046620 - DNA, 15 bp, Homo sapiens
caggccaaggacaag

SEQ ID NO: 2046621 - DNA, 15 bp, Homo sapiens
aggccaaggacaagg

SEQ ID NO: 2046622 - DNA, 15 bp, Homo sapiens
ggccaaggacaaggc

SEQ ID NO: 2046623 - DNA, 15 bp, Homo sapiens
gccaaggacaaggcg

SEQ ID NO: 2046624 - DNA, 15 bp, Homo sapiens
ccaaggacaaggcgg

SEQ ID NO: 2046625 - DNA, 15 bp, Homo sapiens
caaggacaaggcggc

SEQ ID NO: 2046626 - DNA, 15 bp, Homo sapiens
aaggacaaggcggcg

SEQ ID NO: 2046627 - DNA, 15 bp, Homo sapiens
aggacaaggcggcgc

SEQ ID NO: 2046628 - DNA, 15 bp, Homo sapiens
ggacaaggcggcgca

SEQ ID NO: 2046629 - DNA, 15 bp, Homo sapiens
gacaaggcggcgcag

SEQ ID NO: 2046630 - DNA, 15 bp, Homo sapiens
acaaggcggcgcagc

SEQ ID NO: 2046631 - DNA, 15 bp, Homo sapiens
caaggcggcgcagca

SEQ ID NO: 2046632 - DNA, 15 bp, Homo sapiens
aaggcggcgcagcag

SEQ ID NO: 2046633 - DNA, 15 bp, Homo sapiens
aggcggcgcagcagc

SEQ ID NO: 2046634 - DNA, 15 bp, Homo sapiens
ggcggcgcagcagca

SEQ ID NO: 2046635 - DNA, 15 bp, Homo sapiens
gcggcgcagcagcaa

SEQ ID NO: 2046636 - DNA, 15 bp, Homo sapiens
cggcgcagcagcaac

SEQ ID NO: 2046637 - DNA, 15 bp, Homo sapiens
ggcgcagcagcaact

SEQ ID NO: 2046638 - DNA, 15 bp, Homo sapiens
gcgcagcagcaactg

SEQ ID NO: 2046639 - DNA, 15 bp, Homo sapiens
cgcagcagcaactgc

SEQ ID NO: 2046640 - DNA, 15 bp, Homo sapiens
gcagcagcaactgca

SEQ ID NO: 2046641 - DNA, 15 bp, Homo sapiens
cagcagcaactgcag

SEQ ID NO: 2046642 - DNA, 15 bp, Homo sapiens
agcagcaactgcagc

SEQ ID NO: 2046643 - DNA, 15 bp, Homo sapiens
gcagcaactgcagca

SEQ ID NO: 2046644 - DNA, 15 bp, Homo sapiens
cagcaactgcagcag

SEQ ID NO: 2046645 - DNA, 15 bp, Homo sapiens
agcaactgcagcagg

SEQ ID NO: 2046646 - DNA, 15 bp, Homo sapiens
gcaactgcagcagga

SEQ ID NO: 2046647 - DNA, 15 bp, Homo sapiens
caactgcagcaggac

SEQ ID NO: 2046648 - DNA, 15 bp, Homo sapiens
aactgcagcaggaca

SEQ ID NO: 2046649 - DNA, 15 bp, Homo sapiens
actgcagcaggacag

SEQ ID NO: 2046650 - DNA, 15 bp, Homo sapiens
ctgcagcaggacagc

SEQ ID NO: 2046651 - DNA, 15 bp, Homo sapiens
tgcagcaggacagcg

SEQ ID NO: 2046652 - DNA, 15 bp, Homo sapiens
gcagcaggacagcgg

SEQ ID NO: 2046653 - DNA, 15 bp, Homo sapiens
cagcaggacagcggc

SEQ ID NO: 2046654 - DNA, 15 bp, Homo sapiens
agcaggacagcggcg

SEQ ID NO: 2046655 - DNA, 15 bp, Homo sapiens
gcaggacagcggcgg

SEQ ID NO: 2046656 - DNA, 15 bp, Homo sapiens
caggacagcggcggc

SEQ ID NO: 2046657 - DNA, 15 bp, Homo sapiens
aggacagcggcggcg

SEQ ID NO: 2046658 - DNA, 15 bp, Homo sapiens
ggacagcggcggcgg

SEQ ID NO: 2046659 - DNA, 15 bp, Homo sapiens
gacagcggcggcggc

SEQ ID NO: 2046660 - DNA, 15 bp, Homo sapiens
acagcggcggcggcg

SEQ ID NO: 2046661 - DNA, 15 bp, Homo sapiens
agcggcggcggcggg

SEQ ID NO: 2046662 - DNA, 15 bp, Homo sapiens
gcggcggcggcgggg

SEQ ID NO: 2046663 - DNA, 15 bp, Homo sapiens
cggcggcggcggggg

SEQ ID NO: 2046664 - DNA, 15 bp, Homo sapiens
ggcggcggcgggggc

SEQ ID NO: 2046665 - DNA, 15 bp, Homo sapiens
gcggcggcgggggcg

SEQ ID NO: 2046666 - DNA, 15 bp, Homo sapiens
cggcggcgggggcgg

SEQ ID NO: 2046667 - DNA, 15 bp, Homo sapiens
ggcggcgggggcggc

SEQ ID NO: 2046668 - DNA, 15 bp, Homo sapiens
gcggcgggggcggcg

SEQ ID NO: 2046669 - DNA, 15 bp, Homo sapiens
cggcgggggcggcgg

SEQ ID NO: 2046670 - DNA, 15 bp, Homo sapiens
ggcgggggcggcggg

SEQ ID NO: 2046671 - DNA, 15 bp, Homo sapiens
gcgggggcggcgggg

SEQ ID NO: 2046672 - DNA, 15 bp, Homo sapiens
cgggggcggcggggg

SEQ ID NO: 2046673 - DNA, 15 bp, Homo sapiens
gggggcggcgggggc

SEQ ID NO: 2046674 - DNA, 15 bp, Homo sapiens
ggggcggcgggggca

SEQ ID NO: 2046675 - DNA, 15 bp, Homo sapiens
gggcggcgggggcac

SEQ ID NO: 2046676 - DNA, 15 bp, Homo sapiens
ggcggcgggggcacc

SEQ ID NO: 2046677 - DNA, 15 bp, Homo sapiens
gcggcgggggcaccg

SEQ ID NO: 2046678 - DNA, 15 bp, Homo sapiens
cggcgggggcaccgg

SEQ ID NO: 2046679 - DNA, 15 bp, Homo sapiens
ggcgggggcaccggg

SEQ ID NO: 2046680 - DNA, 15 bp, Homo sapiens
gcgggggcaccgggt

SEQ ID NO: 2046681 - DNA, 15 bp, Homo sapiens
cgggggcaccgggtg

SEQ ID NO: 2046682 - DNA, 15 bp, Homo sapiens
gggggcaccgggtgc

SEQ ID NO: 2046683 - DNA, 15 bp, Homo sapiens
ggggcaccgggtgcc

SEQ ID NO: 2046684 - DNA, 15 bp, Homo sapiens
gggcaccgggtgccc

SEQ ID NO: 2046685 - DNA, 15 bp, Homo sapiens
ggcaccgggtgcccg

SEQ ID NO: 2046686 - DNA, 15 bp, Homo sapiens
gcaccgggtgcccgc

SEQ ID NO: 2046687 - DNA, 15 bp, Homo sapiens
caccgggtgcccgca

SEQ ID NO: 2046688 - DNA, 15 bp, Homo sapiens
accgggtgcccgcag

SEQ ID NO: 2046689 - DNA, 15 bp, Homo sapiens
ccgggtgcccgcagc

SEQ ID NO: 2046690 - DNA, 15 bp, Homo sapiens
cgggtgcccgcagca

SEQ ID NO: 2046691 - DNA, 15 bp, Homo sapiens
gggtgcccgcagcag

SEQ ID NO: 2046692 - DNA, 15 bp, Homo sapiens
ggtgcccgcagcagc

SEQ ID NO: 2046693 - DNA, 15 bp, Homo sapiens
gtgcccgcagcagca

SEQ ID NO: 2046694 - DNA, 15 bp, Homo sapiens
tgcccgcagcagcaa

SEQ ID NO: 2046695 - DNA, 15 bp, Homo sapiens
gcccgcagcagcaac

SEQ ID NO: 2046696 - DNA, 15 bp, Homo sapiens
cccgcagcagcaaca

SEQ ID NO: 2046697 - DNA, 15 bp, Homo sapiens
ccgcagcagcaacag

SEQ ID NO: 2046698 - DNA, 15 bp, Homo sapiens
cgcagcagcaacagg

SEQ ID NO: 2046699 - DNA, 15 bp, Homo sapiens
gcagcagcaacaggc

SEQ ID NO: 2046700 - DNA, 15 bp, Homo sapiens
cagcagcaacaggct

SEQ ID NO: 2046701 - DNA, 15 bp, Homo sapiens
agcagcaacaggctc

SEQ ID NO: 2046702 - DNA, 15 bp, Homo sapiens
gcagcaacaggctca

SEQ ID NO: 2046703 - DNA, 15 bp, Homo sapiens
cagcaacaggctcag

SEQ ID NO: 2046704 - DNA, 15 bp, Homo sapiens
agcaacaggctcagc

SEQ ID NO: 2046705 - DNA, 15 bp, Homo sapiens
gcaacaggctcagca

SEQ ID NO: 2046706 - DNA, 15 bp, Homo sapiens
caacaggctcagcag

SEQ ID NO: 2046707 - DNA, 15 bp, Homo sapiens
aacaggctcagcagc

SEQ ID NO: 2046708 - DNA, 15 bp, Homo sapiens
acaggctcagcagca

SEQ ID NO: 2046709 - DNA, 15 bp, Homo sapiens
caggctcagcagcag

SEQ ID NO: 2046710 - DNA, 15 bp, Homo sapiens
aggctcagcagcagt

SEQ ID NO: 2046711 - DNA, 15 bp, Homo sapiens
ggctcagcagcagtc

SEQ ID NO: 2046712 - DNA, 15 bp, Homo sapiens
gctcagcagcagtcg

SEQ ID NO: 2046713 - DNA, 15 bp, Homo sapiens
ctcagcagcagtcgc

SEQ ID NO: 2046714 - DNA, 15 bp, Homo sapiens
tcagcagcagtcgcc

SEQ ID NO: 2046715 - DNA, 15 bp, Homo sapiens
cagcagcagtcgccg

SEQ ID NO: 2046716 - DNA, 15 bp, Homo sapiens
agcagcagtcgccgc

SEQ ID NO: 2046717 - DNA, 15 bp, Homo sapiens
gcagcagtcgccgcg

SEQ ID NO: 2046718 - DNA, 15 bp, Homo sapiens
cagcagtcgccgcga

SEQ ID NO: 2046719 - DNA, 15 bp, Homo sapiens
agcagtcgccgcgac

SEQ ID NO: 2046720 - DNA, 15 bp, Homo sapiens
gcagtcgccgcgacg

SEQ ID NO: 2046721 - DNA, 15 bp, Homo sapiens
cagtcgccgcgacgc

SEQ ID NO: 2046722 - DNA, 15 bp, Homo sapiens
agtcgccgcgacgcg

SEQ ID NO: 2046723 - DNA, 15 bp, Homo sapiens
gtcgccgcgacgcgt

SEQ ID NO: 2046724 - DNA, 15 bp, Homo sapiens
tcgccgcgacgcgtg

SEQ ID NO: 2046725 - DNA, 15 bp, Homo sapiens
cgccgcgacgcgtgg

SEQ ID NO: 2046726 - DNA, 15 bp, Homo sapiens
gccgcgacgcgtggc

SEQ ID NO: 2046727 - DNA, 15 bp, Homo sapiens
ccgcgacgcgtggcg

SEQ ID NO: 2046728 - DNA, 15 bp, Homo sapiens
cgcgacgcgtggcgg

SEQ ID NO: 2046729 - DNA, 15 bp, Homo sapiens
gcgacgcgtggcggt

SEQ ID NO: 2046730 - DNA, 15 bp, Homo sapiens
cgacgcgtggcggtg

SEQ ID NO: 2046731 - DNA, 15 bp, Homo sapiens
gacgcgtggcggtgc

SEQ ID NO: 2046732 - DNA, 15 bp, Homo sapiens
acgcgtggcggtgcc

SEQ ID NO: 2046733 - DNA, 15 bp, Homo sapiens
cgcgtggcggtgccg

SEQ ID NO: 2046734 - DNA, 15 bp, Homo sapiens
gcgtggcggtgccgg

SEQ ID NO: 2046735 - DNA, 15 bp, Homo sapiens
cgtggcggtgccggt

SEQ ID NO: 2046736 - DNA, 15 bp, Homo sapiens
gtggcggtgccggtc

SEQ ID NO: 2046737 - DNA, 15 bp, Homo sapiens
tggcggtgccggtcc

SEQ ID NO: 2046738 - DNA, 15 bp, Homo sapiens
ggcggtgccggtcct

SEQ ID NO: 2046739 - DNA, 15 bp, Homo sapiens
gcggtgccggtcctg

SEQ ID NO: 2046740 - DNA, 15 bp, Homo sapiens
cggtgccggtcctgg

SEQ ID NO: 2046741 - DNA, 15 bp, Homo sapiens
ggtgccggtcctggt

SEQ ID NO: 2046742 - DNA, 15 bp, Homo sapiens
gtgccggtcctggtg

SEQ ID NO: 2046743 - DNA, 15 bp, Homo sapiens
tgccggtcctggtga

SEQ ID NO: 2046744 - DNA, 15 bp, Homo sapiens
gccggtcctggtgaa

SEQ ID NO: 2046745 - DNA, 15 bp, Homo sapiens
ccggtcctggtgaaa

SEQ ID NO: 2046746 - DNA, 15 bp, Homo sapiens
cggtcctggtgaaag

SEQ ID NO: 2046747 - DNA, 15 bp, Homo sapiens
ggtcctggtgaaaga

SEQ ID NO: 2046748 - DNA, 15 bp, Homo sapiens
gtcctggtgaaagac

SEQ ID NO: 2046749 - DNA, 15 bp, Homo sapiens
tcctggtgaaagacg

SEQ ID NO: 2046750 - DNA, 15 bp, Homo sapiens
cctggtgaaagacgg

SEQ ID NO: 2046751 - DNA, 15 bp, Homo sapiens
ctggtgaaagacggc

SEQ ID NO: 2046752 - DNA, 15 bp, Homo sapiens
tggtgaaagacggca

SEQ ID NO: 2046753 - DNA, 15 bp, Homo sapiens
ggtgaaagacggcaa

SEQ ID NO: 2046754 - DNA, 15 bp, Homo sapiens
gtgaaagacggcaaa

SEQ ID NO: 2046755 - DNA, 15 bp, Homo sapiens
tgaaagacggcaaac

SEQ ID NO: 2046756 - DNA, 15 bp, Homo sapiens
gaaagacggcaaacc

SEQ ID NO: 2046757 - DNA, 15 bp, Homo sapiens
aaagacggcaaaccg

SEQ ID NO: 2046758 - DNA, 15 bp, Homo sapiens
aagacggcaaaccgt

SEQ ID NO: 2046759 - DNA, 15 bp, Homo sapiens
agacggcaaaccgtg

SEQ ID NO: 2046760 - DNA, 15 bp, Homo sapiens
gacggcaaaccgtgc

SEQ ID NO: 2046761 - DNA, 15 bp, Homo sapiens
acggcaaaccgtgcc

SEQ ID NO: 2046762 - DNA, 15 bp, Homo sapiens
cggcaaaccgtgcca

SEQ ID NO: 2046763 - DNA, 15 bp, Homo sapiens
ggcaaaccgtgccag

SEQ ID NO: 2046764 - DNA, 15 bp, Homo sapiens
gcaaaccgtgccagg

SEQ ID NO: 2046765 - DNA, 15 bp, Homo sapiens
caaaccgtgccaggc

SEQ ID NO: 2046766 - DNA, 15 bp, Homo sapiens
aaaccgtgccaggcg

SEQ ID NO: 2046767 - DNA, 15 bp, Homo sapiens
aaccgtgccaggcgg

SEQ ID NO: 2046768 - DNA, 15 bp, Homo sapiens
accgtgccaggcggg

SEQ ID NO: 2046769 - DNA, 15 bp, Homo sapiens
ccgtgccaggcgggt

SEQ ID NO: 2046770 - DNA, 15 bp, Homo sapiens
cgtgccaggcgggtg

SEQ ID NO: 2046771 - DNA, 15 bp, Homo sapiens
gtgccaggcgggtgc

SEQ ID NO: 2046772 - DNA, 15 bp, Homo sapiens
tgccaggcgggtgcc

SEQ ID NO: 2046773 - DNA, 15 bp, Homo sapiens
gccaggcgggtgccc

SEQ ID NO: 2046774 - DNA, 15 bp, Homo sapiens
ccaggcgggtgcccc

SEQ ID NO: 2046775 - DNA, 15 bp, Homo sapiens
caggcgggtgccccc

SEQ ID NO: 2046776 - DNA, 15 bp, Homo sapiens
aggcgggtgcccccg

SEQ ID NO: 2046777 - DNA, 15 bp, Homo sapiens
ggcgggtgcccccgc

SEQ ID NO: 2046778 - DNA, 15 bp, Homo sapiens
gcgggtgcccccgcg

SEQ ID NO: 2046779 - DNA, 15 bp, Homo sapiens
cgggtgcccccgcgc

SEQ ID NO: 2046780 - DNA, 15 bp, Homo sapiens
gggtgcccccgcgcc

SEQ ID NO: 2046781 - DNA, 15 bp, Homo sapiens
ggtgcccccgcgccg

SEQ ID NO: 2046782 - DNA, 15 bp, Homo sapiens
gtgcccccgcgccgg

SEQ ID NO: 2046783 - DNA, 15 bp, Homo sapiens
tgcccccgcgccggg

SEQ ID NO: 2046784 - DNA, 15 bp, Homo sapiens
gcccccgcgccgggc

SEQ ID NO: 2046785 - DNA, 15 bp, Homo sapiens
cccccgcgccgggcg

SEQ ID NO: 2046786 - DNA, 15 bp, Homo sapiens
ccccgcgccgggcgc

SEQ ID NO: 2046787 - DNA, 15 bp, Homo sapiens
cccgcgccgggcgcc

SEQ ID NO: 2046788 - DNA, 15 bp, Homo sapiens
ccgcgccgggcgccg

SEQ ID NO: 2046789 - DNA, 15 bp, Homo sapiens
cgcgccgggcgccgc

SEQ ID NO: 2046790 - DNA, 15 bp, Homo sapiens
gcgccgggcgccgcc

SEQ ID NO: 2046791 - DNA, 15 bp, Homo sapiens
cgccgggcgccgcca

SEQ ID NO: 2046792 - DNA, 15 bp, Homo sapiens
gccgggcgccgccag

SEQ ID NO: 2046793 - DNA, 15 bp, Homo sapiens
ccgggcgccgccagc

SEQ ID NO: 2046794 - DNA, 15 bp, Homo sapiens
cgggcgccgccagcc

SEQ ID NO: 2046795 - DNA, 15 bp, Homo sapiens
gggcgccgccagcct

SEQ ID NO: 2046796 - DNA, 15 bp, Homo sapiens
ggcgccgccagccta

SEQ ID NO: 2046797 - DNA, 15 bp, Homo sapiens
gcgccgccagcctac

SEQ ID NO: 2046798 - DNA, 15 bp, Homo sapiens
cgccgccagcctaca

SEQ ID NO: 2046799 - DNA, 15 bp, Homo sapiens
gccgccagcctacaa

SEQ ID NO: 2046800 - DNA, 15 bp, Homo sapiens
ccgccagcctacaag

SEQ ID NO: 2046801 - DNA, 15 bp, Homo sapiens
cgccagcctacaagg

SEQ ID NO: 2046802 - DNA, 15 bp, Homo sapiens
gccagcctacaaggc

SEQ ID NO: 2046803 - DNA, 15 bp, Homo sapiens
ccagcctacaaggcc

SEQ ID NO: 2046804 - DNA, 15 bp, Homo sapiens
cagcctacaaggcca

SEQ ID NO: 2046805 - DNA, 15 bp, Homo sapiens
agcctacaaggccac

SEQ ID NO: 2046806 - DNA, 15 bp, Homo sapiens
gcctacaaggccacg

SEQ ID NO: 2046807 - DNA, 15 bp, Homo sapiens
cctacaaggccacgc

SEQ ID NO: 2046808 - DNA, 15 bp, Homo sapiens
ctacaaggccacgcg

SEQ ID NO: 2046809 - DNA, 15 bp, Homo sapiens
tacaaggccacgcgc

SEQ ID NO: 2046810 - DNA, 15 bp, Homo sapiens
acaaggccacgcgca

SEQ ID NO: 2046811 - DNA, 15 bp, Homo sapiens
caaggccacgcgcag

SEQ ID NO: 2046812 - DNA, 15 bp, Homo sapiens
aaggccacgcgcagc

SEQ ID NO: 2046813 - DNA, 15 bp, Homo sapiens
aggccacgcgcagca

SEQ ID NO: 2046814 - DNA, 15 bp, Homo sapiens
ggccacgcgcagcag

SEQ ID NO: 2046815 - DNA, 15 bp, Homo sapiens
gccacgcgcagcagc

SEQ ID NO: 2046816 - DNA, 15 bp, Homo sapiens
ccacgcgcagcagca

SEQ ID NO: 2046817 - DNA, 15 bp, Homo sapiens
cacgcgcagcagcag

SEQ ID NO: 2046818 - DNA, 15 bp, Homo sapiens
acgcgcagcagcagg

SEQ ID NO: 2046819 - DNA, 15 bp, Homo sapiens
cgcgcagcagcaggc

SEQ ID NO: 2046820 - DNA, 15 bp, Homo sapiens
gcgcagcagcaggcg

SEQ ID NO: 2046821 - DNA, 15 bp, Homo sapiens
cgcagcagcaggcgc

SEQ ID NO: 2046822 - DNA, 15 bp, Homo sapiens
gcagcagcaggcgca

SEQ ID NO: 2046823 - DNA, 15 bp, Homo sapiens
cagcagcaggcgcag

SEQ ID NO: 2046824 - DNA, 15 bp, Homo sapiens
agcagcaggcgcagc

SEQ ID NO: 2046825 - DNA, 15 bp, Homo sapiens
gcagcaggcgcagca

SEQ ID NO: 2046826 - DNA, 15 bp, Homo sapiens
cagcaggcgcagcac

SEQ ID NO: 2046827 - DNA, 15 bp, Homo sapiens
agcaggcgcagcacc

SEQ ID NO: 2046828 - DNA, 15 bp, Homo sapiens
gcaggcgcagcacca

SEQ ID NO: 2046829 - DNA, 15 bp, Homo sapiens
caggcgcagcaccag

SEQ ID NO: 2046830 - DNA, 15 bp, Homo sapiens
aggcgcagcaccagg

SEQ ID NO: 2046831 - DNA, 15 bp, Homo sapiens
ggcgcagcaccaggc

SEQ ID NO: 2046832 - DNA, 15 bp, Homo sapiens
gcgcagcaccaggcg

SEQ ID NO: 2046833 - DNA, 15 bp, Homo sapiens
cgcagcaccaggcgc

SEQ ID NO: 2046834 - DNA, 15 bp, Homo sapiens
gcagcaccaggcgca

SEQ ID NO: 2046835 - DNA, 15 bp, Homo sapiens
cagcaccaggcgcag

SEQ ID NO: 2046836 - DNA, 15 bp, Homo sapiens
agcaccaggcgcagg

SEQ ID NO: 2046837 - DNA, 15 bp, Homo sapiens
gcaccaggcgcaggc

SEQ ID NO: 2046838 - DNA, 15 bp, Homo sapiens
caccaggcgcaggcc

SEQ ID NO: 2046839 - DNA, 15 bp, Homo sapiens
accaggcgcaggccg

SEQ ID NO: 2046840 - DNA, 15 bp, Homo sapiens
ccaggcgcaggccgc

SEQ ID NO: 2046841 - DNA, 15 bp, Homo sapiens
caggcgcaggccgcg

SEQ ID NO: 2046842 - DNA, 15 bp, Homo sapiens
aggcgcaggccgcgc

SEQ ID NO: 2046843 - DNA, 15 bp, Homo sapiens
ggcgcaggccgcgca

SEQ ID NO: 2046844 - DNA, 15 bp, Homo sapiens
gcgcaggccgcgcag

SEQ ID NO: 2046845 - DNA, 15 bp, Homo sapiens
cgcaggccgcgcagg

SEQ ID NO: 2046846 - DNA, 15 bp, Homo sapiens
gcaggccgcgcaggc

SEQ ID NO: 2046847 - DNA, 15 bp, Homo sapiens
caggccgcgcaggcg

SEQ ID NO: 2046848 - DNA, 15 bp, Homo sapiens
aggccgcgcaggcgg

SEQ ID NO: 2046849 - DNA, 15 bp, Homo sapiens
ggccgcgcaggcggc

SEQ ID NO: 2046850 - DNA, 15 bp, Homo sapiens
gccgcgcaggcggcg

SEQ ID NO: 2046851 - DNA, 15 bp, Homo sapiens
ccgcgcaggcggcgg

SEQ ID NO: 2046852 - DNA, 15 bp, Homo sapiens
cgcgcaggcggcggc

SEQ ID NO: 2046853 - DNA, 15 bp, Homo sapiens
gcgcaggcggcggca

SEQ ID NO: 2046854 - DNA, 15 bp, Homo sapiens
cgcaggcggcggcag

SEQ ID NO: 2046855 - DNA, 15 bp, Homo sapiens
gcaggcggcggcagc

SEQ ID NO: 2046856 - DNA, 15 bp, Homo sapiens
caggcggcggcagcg

SEQ ID NO: 2046857 - DNA, 15 bp, Homo sapiens
aggcggcggcagcgg

SEQ ID NO: 2046858 - DNA, 15 bp, Homo sapiens
ggcggcggcagcggc

SEQ ID NO: 2046859 - DNA, 15 bp, Homo sapiens
gcggcggcagcggcc

SEQ ID NO: 2046860 - DNA, 15 bp, Homo sapiens
cggcggcagcggcca

SEQ ID NO: 2046861 - DNA, 15 bp, Homo sapiens
ggcggcagcggccat

SEQ ID NO: 2046862 - DNA, 15 bp, Homo sapiens
gcggcagcggccatc

SEQ ID NO: 2046863 - DNA, 15 bp, Homo sapiens
cggcagcggccatct

SEQ ID NO: 2046864 - DNA, 15 bp, Homo sapiens
ggcagcggccatctc

SEQ ID NO: 2046865 - DNA, 15 bp, Homo sapiens
gcagcggccatctcc

SEQ ID NO: 2046866 - DNA, 15 bp, Homo sapiens
cagcggccatctccg

SEQ ID NO: 2046867 - DNA, 15 bp, Homo sapiens
agcggccatctccgt

SEQ ID NO: 2046868 - DNA, 15 bp, Homo sapiens
gcggccatctccgtg

SEQ ID NO: 2046869 - DNA, 15 bp, Homo sapiens
cggccatctccgtgg

SEQ ID NO: 2046870 - DNA, 15 bp, Homo sapiens
ggccatctccgtggg

SEQ ID NO: 2046871 - DNA, 15 bp, Homo sapiens
gccatctccgtgggc

SEQ ID NO: 2046872 - DNA, 15 bp, Homo sapiens
catctccgtgggcag

SEQ ID NO: 2046873 - DNA, 15 bp, Homo sapiens
atctccgtgggcagc

SEQ ID NO: 2046874 - DNA, 15 bp, Homo sapiens
tctccgtgggcagcg

SEQ ID NO: 2046875 - DNA, 15 bp, Homo sapiens
ctccgtgggcagcgg

SEQ ID NO: 2046876 - DNA, 15 bp, Homo sapiens
tccgtgggcagcggt

SEQ ID NO: 2046877 - DNA, 15 bp, Homo sapiens
ccgtgggcagcggtg

SEQ ID NO: 2046878 - DNA, 15 bp, Homo sapiens
cgtgggcagcggtgg

SEQ ID NO: 2046879 - DNA, 15 bp, Homo sapiens
gtgggcagcggtggc

SEQ ID NO: 2046880 - DNA, 15 bp, Homo sapiens
tgggcagcggtggcg

SEQ ID NO: 2046881 - DNA, 15 bp, Homo sapiens
gggcagcggtggcgc

SEQ ID NO: 2046882 - DNA, 15 bp, Homo sapiens
ggcagcggtggcgcc

SEQ ID NO: 2046883 - DNA, 15 bp, Homo sapiens
gcagcggtggcgccg

SEQ ID NO: 2046884 - DNA, 15 bp, Homo sapiens
cagcggtggcgccgg

SEQ ID NO: 2046885 - DNA, 15 bp, Homo sapiens
agcggtggcgccggc

SEQ ID NO: 2046886 - DNA, 15 bp, Homo sapiens
gcggtggcgccggcc

SEQ ID NO: 2046887 - DNA, 15 bp, Homo sapiens
cggtggcgccggcct

SEQ ID NO: 2046888 - DNA, 15 bp, Homo sapiens
ggtggcgccggcctt

SEQ ID NO: 2046889 - DNA, 15 bp, Homo sapiens
gtggcgccggccttg

SEQ ID NO: 2046890 - DNA, 15 bp, Homo sapiens
tggcgccggccttgg

SEQ ID NO: 2046891 - DNA, 15 bp, Homo sapiens
ggcgccggccttggc

SEQ ID NO: 2046892 - DNA, 15 bp, Homo sapiens
gcgccggccttggcg

SEQ ID NO: 2046893 - DNA, 15 bp, Homo sapiens
cgccggccttggcgc

SEQ ID NO: 2046894 - DNA, 15 bp, Homo sapiens
gccggccttggcgca

SEQ ID NO: 2046895 - DNA, 15 bp, Homo sapiens
ccggccttggcgcac

SEQ ID NO: 2046896 - DNA, 15 bp, Homo sapiens
cggccttggcgcaca

SEQ ID NO: 2046897 - DNA, 15 bp, Homo sapiens
ggccttggcgcacac

SEQ ID NO: 2046898 - DNA, 15 bp, Homo sapiens
gccttggcgcacacc

SEQ ID NO: 2046899 - DNA, 15 bp, Homo sapiens
ccttggcgcacaccc

SEQ ID NO: 2046900 - DNA, 15 bp, Homo sapiens
cttggcgcacacccg

SEQ ID NO: 2046901 - DNA, 15 bp, Homo sapiens
ttggcgcacacccgg

SEQ ID NO: 2046902 - DNA, 15 bp, Homo sapiens
tggcgcacacccggg

SEQ ID NO: 2046903 - DNA, 15 bp, Homo sapiens
ggcgcacacccgggc

SEQ ID NO: 2046904 - DNA, 15 bp, Homo sapiens
gcgcacacccgggcc

SEQ ID NO: 2046905 - DNA, 15 bp, Homo sapiens
cgcacacccgggcca

SEQ ID NO: 2046906 - DNA, 15 bp, Homo sapiens
gcacacccgggccac

SEQ ID NO: 2046907 - DNA, 15 bp, Homo sapiens
cacacccgggccacc

SEQ ID NO: 2046908 - DNA, 15 bp, Homo sapiens
acacccgggccacca

SEQ ID NO: 2046909 - DNA, 15 bp, Homo sapiens
cacccgggccaccag

SEQ ID NO: 2046910 - DNA, 15 bp, Homo sapiens
acccgggccaccagc

SEQ ID NO: 2046911 - DNA, 15 bp, Homo sapiens
cccgggccaccagcc

SEQ ID NO: 2046912 - DNA, 15 bp, Homo sapiens
ccgggccaccagcca

SEQ ID NO: 2046913 - DNA, 15 bp, Homo sapiens
cgggccaccagccag

SEQ ID NO: 2046914 - DNA, 15 bp, Homo sapiens
gggccaccagccagg

SEQ ID NO: 2046915 - DNA, 15 bp, Homo sapiens
ggccaccagccaggc

SEQ ID NO: 2046916 - DNA, 15 bp, Homo sapiens
gccaccagccaggca

SEQ ID NO: 2046917 - DNA, 15 bp, Homo sapiens
ccaccagccaggcag

SEQ ID NO: 2046918 - DNA, 15 bp, Homo sapiens
caccagccaggcagc

SEQ ID NO: 2046919 - DNA, 15 bp, Homo sapiens
accagccaggcagcg

SEQ ID NO: 2046920 - DNA, 15 bp, Homo sapiens
ccagccaggcagcgc

SEQ ID NO: 2046921 - DNA, 15 bp, Homo sapiens
cagccaggcagcgca

SEQ ID NO: 2046922 - DNA, 15 bp, Homo sapiens
agccaggcagcgcag

SEQ ID NO: 2046923 - DNA, 15 bp, Homo sapiens
gccaggcagcgcagg

SEQ ID NO: 2046924 - DNA, 15 bp, Homo sapiens
ccaggcagcgcaggc

SEQ ID NO: 2046925 - DNA, 15 bp, Homo sapiens
caggcagcgcaggcc

SEQ ID NO: 2046926 - DNA, 15 bp, Homo sapiens
aggcagcgcaggcca

SEQ ID NO: 2046927 - DNA, 15 bp, Homo sapiens
ggcagcgcaggccag

SEQ ID NO: 2046928 - DNA, 15 bp, Homo sapiens
gcagcgcaggccagt

SEQ ID NO: 2046929 - DNA, 15 bp, Homo sapiens
cagcgcaggccagtc

SEQ ID NO: 2046930 - DNA, 15 bp, Homo sapiens
agcgcaggccagtct

SEQ ID NO: 2046931 - DNA, 15 bp, Homo sapiens
gcgcaggccagtctc

SEQ ID NO: 2046932 - DNA, 15 bp, Homo sapiens
cgcaggccagtctcc

SEQ ID NO: 2046933 - DNA, 15 bp, Homo sapiens
gcaggccagtctccg

SEQ ID NO: 2046934 - DNA, 15 bp, Homo sapiens
caggccagtctccgg

SEQ ID NO: 2046935 - DNA, 15 bp, Homo sapiens
aggccagtctccgga

SEQ ID NO: 2046936 - DNA, 15 bp, Homo sapiens
ggccagtctccggac

SEQ ID NO: 2046937 - DNA, 15 bp, Homo sapiens
gccagtctccggacc

SEQ ID NO: 2046938 - DNA, 15 bp, Homo sapiens
ccagtctccggacct

SEQ ID NO: 2046939 - DNA, 15 bp, Homo sapiens
cagtctccggacctg

SEQ ID NO: 2046940 - DNA, 15 bp, Homo sapiens
agtctccggacctgg

SEQ ID NO: 2046941 - DNA, 15 bp, Homo sapiens
gtctccggacctggc

SEQ ID NO: 2046942 - DNA, 15 bp, Homo sapiens
tctccggacctggcg

SEQ ID NO: 2046943 - DNA, 15 bp, Homo sapiens
ctccggacctggcgc

SEQ ID NO: 2046944 - DNA, 15 bp, Homo sapiens
tccggacctggcgca

SEQ ID NO: 2046945 - DNA, 15 bp, Homo sapiens
ccggacctggcgcac

SEQ ID NO: 2046946 - DNA, 15 bp, Homo sapiens
cggacctggcgcacc

SEQ ID NO: 2046947 - DNA, 15 bp, Homo sapiens
ggacctggcgcacca

SEQ ID NO: 2046948 - DNA, 15 bp, Homo sapiens
gacctggcgcaccac

SEQ ID NO: 2046949 - DNA, 15 bp, Homo sapiens
acctggcgcaccacg

SEQ ID NO: 2046950 - DNA, 15 bp, Homo sapiens
cctggcgcaccacgc

SEQ ID NO: 2046951 - DNA, 15 bp, Homo sapiens
ctggcgcaccacgcc

SEQ ID NO: 2046952 - DNA, 15 bp, Homo sapiens
tggcgcaccacgccg

SEQ ID NO: 2046953 - DNA, 15 bp, Homo sapiens
ggcgcaccacgccgc

SEQ ID NO: 2046954 - DNA, 15 bp, Homo sapiens
gcgcaccacgccgcc

SEQ ID NO: 2046955 - DNA, 15 bp, Homo sapiens
cgcaccacgccgcca

SEQ ID NO: 2046956 - DNA, 15 bp, Homo sapiens
gcaccacgccgccag

SEQ ID NO: 2046957 - DNA, 15 bp, Homo sapiens
caccacgccgccagc

SEQ ID NO: 2046958 - DNA, 15 bp, Homo sapiens
accacgccgccagcc

SEQ ID NO: 2046959 - DNA, 15 bp, Homo sapiens
ccacgccgccagccc

SEQ ID NO: 2046960 - DNA, 15 bp, Homo sapiens
cacgccgccagcccc

SEQ ID NO: 2046961 - DNA, 15 bp, Homo sapiens
acgccgccagccccg

SEQ ID NO: 2046962 - DNA, 15 bp, Homo sapiens
cgccgccagccccgc

SEQ ID NO: 2046963 - DNA, 15 bp, Homo sapiens
gccgccagccccgcg

SEQ ID NO: 2046964 - DNA, 15 bp, Homo sapiens
ccgccagccccgcgg

SEQ ID NO: 2046965 - DNA, 15 bp, Homo sapiens
cgccagccccgcggc

SEQ ID NO: 2046966 - DNA, 15 bp, Homo sapiens
gccagccccgcggcg

SEQ ID NO: 2046967 - DNA, 15 bp, Homo sapiens
ccagccccgcggcgc

SEQ ID NO: 2046968 - DNA, 15 bp, Homo sapiens
cagccccgcggcgct

SEQ ID NO: 2046969 - DNA, 15 bp, Homo sapiens
agccccgcggcgctg

SEQ ID NO: 2046970 - DNA, 15 bp, Homo sapiens
gccccgcggcgctgc

SEQ ID NO: 2046971 - DNA, 15 bp, Homo sapiens
ccccgcggcgctgca

SEQ ID NO: 2046972 - DNA, 15 bp, Homo sapiens
cccgcggcgctgcag

SEQ ID NO: 2046973 - DNA, 15 bp, Homo sapiens
ccgcggcgctgcagg

SEQ ID NO: 2046974 - DNA, 15 bp, Homo sapiens
cgcggcgctgcaggg

SEQ ID NO: 2046975 - DNA, 15 bp, Homo sapiens
gcggcgctgcagggc

SEQ ID NO: 2046976 - DNA, 15 bp, Homo sapiens
cggcgctgcagggcc

SEQ ID NO: 2046977 - DNA, 15 bp, Homo sapiens
ggcgctgcagggcca

SEQ ID NO: 2046978 - DNA, 15 bp, Homo sapiens
gcgctgcagggccag

SEQ ID NO: 2046979 - DNA, 15 bp, Homo sapiens
cgctgcagggccagg

SEQ ID NO: 2046980 - DNA, 15 bp, Homo sapiens
gctgcagggccaggt

SEQ ID NO: 2046981 - DNA, 15 bp, Homo sapiens
ctgcagggccaggta

SEQ ID NO: 2046982 - DNA, 15 bp, Homo sapiens
tgcagggccaggtat

SEQ ID NO: 2046983 - DNA, 15 bp, Homo sapiens
gcagggccaggtatc

SEQ ID NO: 2046984 - DNA, 15 bp, Homo sapiens
cagggccaggtatcc

SEQ ID NO: 2046985 - DNA, 15 bp, Homo sapiens
agggccaggtatcca

SEQ ID NO: 2046986 - DNA, 15 bp, Homo sapiens
gggccaggtatccag

SEQ ID NO: 2046987 - DNA, 15 bp, Homo sapiens
ggccaggtatccagc

SEQ ID NO: 2046988 - DNA, 15 bp, Homo sapiens
gccaggtatccagcc

SEQ ID NO: 2046989 - DNA, 15 bp, Homo sapiens
ccaggtatccagcct

SEQ ID NO: 2046990 - DNA, 15 bp, Homo sapiens
caggtatccagcctg

SEQ ID NO: 2046991 - DNA, 15 bp, Homo sapiens
aggtatccagcctgt

SEQ ID NO: 2046992 - DNA, 15 bp, Homo sapiens
ggtatccagcctgtc

SEQ ID NO: 2046993 - DNA, 15 bp, Homo sapiens
gtatccagcctgtcc

SEQ ID NO: 2046994 - DNA, 15 bp, Homo sapiens
tatccagcctgtccc

SEQ ID NO: 2046995 - DNA, 15 bp, Homo sapiens
atccagcctgtccca

SEQ ID NO: 2046996 - DNA, 15 bp, Homo sapiens
tccagcctgtcccac

SEQ ID NO: 2046997 - DNA, 15 bp, Homo sapiens
ccagcctgtcccacc

SEQ ID NO: 2046998 - DNA, 15 bp, Homo sapiens
cagcctgtcccacct

SEQ ID NO: 2046999 - DNA, 15 bp, Homo sapiens
agcctgtcccacctg

SEQ ID NO: 2047000 - DNA, 15 bp, Homo sapiens
gcctgtcccacctga

SEQ ID NO: 2047001 - DNA, 15 bp, Homo sapiens
cctgtcccacctgaa

SEQ ID NO: 2047002 - DNA, 15 bp, Homo sapiens
ctgtcccacctgaac

SEQ ID NO: 2047003 - DNA, 15 bp, Homo sapiens
tgtcccacctgaact

SEQ ID NO: 2047004 - DNA, 15 bp, Homo sapiens
gtcccacctgaactc

SEQ ID NO: 2047005 - DNA, 15 bp, Homo sapiens
tcccacctgaactcc

SEQ ID NO: 2047006 - DNA, 15 bp, Homo sapiens
cccacctgaactcct

SEQ ID NO: 2047007 - DNA, 15 bp, Homo sapiens
ccacctgaactcctc

SEQ ID NO: 2047008 - DNA, 15 bp, Homo sapiens
cacctgaactcctcg

SEQ ID NO: 2047009 - DNA, 15 bp, Homo sapiens
acctgaactcctcgg

SEQ ID NO: 2047010 - DNA, 15 bp, Homo sapiens
cctgaactcctcggg

SEQ ID NO: 2047011 - DNA, 15 bp, Homo sapiens
ctgaactcctcgggc

SEQ ID NO: 2047012 - DNA, 15 bp, Homo sapiens
tgaactcctcgggct

SEQ ID NO: 2047013 - DNA, 15 bp, Homo sapiens
gaactcctcgggctc

SEQ ID NO: 2047014 - DNA, 15 bp, Homo sapiens
aactcctcgggctcg

SEQ ID NO: 2047015 - DNA, 15 bp, Homo sapiens
actcctcgggctcgg

SEQ ID NO: 2047016 - DNA, 15 bp, Homo sapiens
ctcctcgggctcgga

SEQ ID NO: 2047017 - DNA, 15 bp, Homo sapiens
tcctcgggctcggac

SEQ ID NO: 2047018 - DNA, 15 bp, Homo sapiens
cctcgggctcggact

SEQ ID NO: 2047019 - DNA, 15 bp, Homo sapiens
ctcgggctcggacta

SEQ ID NO: 2047020 - DNA, 15 bp, Homo sapiens
tcgggctcggactac

SEQ ID NO: 2047021 - DNA, 15 bp, Homo sapiens
cgggctcggactacg

SEQ ID NO: 2047022 - DNA, 15 bp, Homo sapiens
gggctcggactacgg

SEQ ID NO: 2047023 - DNA, 15 bp, Homo sapiens
ggctcggactacggc

SEQ ID NO: 2047024 - DNA, 15 bp, Homo sapiens
gctcggactacggca

SEQ ID NO: 2047025 - DNA, 15 bp, Homo sapiens
ctcggactacggcac

SEQ ID NO: 2047026 - DNA, 15 bp, Homo sapiens
tcggactacggcacc

SEQ ID NO: 2047027 - DNA, 15 bp, Homo sapiens
cggactacggcacca

SEQ ID NO: 2047028 - DNA, 15 bp, Homo sapiens
ggactacggcaccat

SEQ ID NO: 2047029 - DNA, 15 bp, Homo sapiens
gactacggcaccatg

SEQ ID NO: 2047030 - DNA, 15 bp, Homo sapiens
actacggcaccatgt

SEQ ID NO: 2047031 - DNA, 15 bp, Homo sapiens
ctacggcaccatgtc

SEQ ID NO: 2047032 - DNA, 15 bp, Homo sapiens
tacggcaccatgtcc

SEQ ID NO: 2047033 - DNA, 15 bp, Homo sapiens
acggcaccatgtcct

SEQ ID NO: 2047034 - DNA, 15 bp, Homo sapiens
cggcaccatgtcctg

SEQ ID NO: 2047035 - DNA, 15 bp, Homo sapiens
ggcaccatgtcctgc

SEQ ID NO: 2047036 - DNA, 15 bp, Homo sapiens
gcaccatgtcctgct

SEQ ID NO: 2047037 - DNA, 15 bp, Homo sapiens
caccatgtcctgctc

SEQ ID NO: 2047038 - DNA, 15 bp, Homo sapiens
accatgtcctgctcc

SEQ ID NO: 2047039 - DNA, 15 bp, Homo sapiens
ccatgtcctgctcca

SEQ ID NO: 2047040 - DNA, 15 bp, Homo sapiens
catgtcctgctccac

SEQ ID NO: 2047041 - DNA, 15 bp, Homo sapiens
atgtcctgctccacc

SEQ ID NO: 2047042 - DNA, 15 bp, Homo sapiens
tgtcctgctccacct

SEQ ID NO: 2047043 - DNA, 15 bp, Homo sapiens
gtcctgctccacctt

SEQ ID NO: 2047044 - DNA, 15 bp, Homo sapiens
tcctgctccaccttg

SEQ ID NO: 2047045 - DNA, 15 bp, Homo sapiens
cctgctccaccttgc

SEQ ID NO: 2047046 - DNA, 15 bp, Homo sapiens
ctgctccaccttgct

SEQ ID NO: 2047047 - DNA, 15 bp, Homo sapiens
tgctccaccttgcta

SEQ ID NO: 2047048 - DNA, 15 bp, Homo sapiens
gctccaccttgctat

SEQ ID NO: 2047049 - DNA, 15 bp, Homo sapiens
ctccaccttgctata

SEQ ID NO: 2047050 - DNA, 15 bp, Homo sapiens
tccaccttgctatac

SEQ ID NO: 2047051 - DNA, 15 bp, Homo sapiens
ccaccttgctatacg

SEQ ID NO: 2047052 - DNA, 15 bp, Homo sapiens
caccttgctatacgg

SEQ ID NO: 2047053 - DNA, 15 bp, Homo sapiens
accttgctatacggt

SEQ ID NO: 2047054 - DNA, 15 bp, Homo sapiens
ccttgctatacggtc

SEQ ID NO: 2047055 - DNA, 15 bp, Homo sapiens
cttgctatacggtcg

SEQ ID NO: 2047056 - DNA, 15 bp, Homo sapiens
ttgctatacggtcgg

SEQ ID NO: 2047057 - DNA, 15 bp, Homo sapiens
tgctatacggtcgga

SEQ ID NO: 2047058 - DNA, 15 bp, Homo sapiens
gctatacggtcggac

SEQ ID NO: 2047059 - DNA, 15 bp, Homo sapiens
ctatacggtcggacc

SEQ ID NO: 2047060 - DNA, 15 bp, Homo sapiens
tatacggtcggacct

SEQ ID NO: 2047061 - DNA, 15 bp, Homo sapiens
atacggtcggacctg

SEQ ID NO: 2047062 - DNA, 15 bp, Homo sapiens
tacggtcggacctgg

SEQ ID NO: 2047063 - DNA, 15 bp, Homo sapiens
acggtcggacctggt

SEQ ID NO: 2047064 - DNA, 15 bp, Homo sapiens
cggtcggacctggtg

SEQ ID NO: 2047065 - DNA, 15 bp, Homo sapiens
ggtcggacctggtga

SEQ ID NO: 2047066 - DNA, 15 bp, Homo sapiens
gtcggacctggtgag

SEQ ID NO: 2047067 - DNA, 15 bp, Homo sapiens
tcggacctggtgaga

SEQ ID NO: 2047068 - DNA, 15 bp, Homo sapiens
cggacctggtgagag

SEQ ID NO: 2047069 - DNA, 15 bp, Homo sapiens
ggacctggtgagagg

SEQ ID NO: 2047070 - DNA, 15 bp, Homo sapiens
gacctggtgagagga

SEQ ID NO: 2047071 - DNA, 15 bp, Homo sapiens
acctggtgagaggac

SEQ ID NO: 2047072 - DNA, 15 bp, Homo sapiens
cctggtgagaggacg

SEQ ID NO: 2047073 - DNA, 15 bp, Homo sapiens
ctggtgagaggacgc

SEQ ID NO: 2047074 - DNA, 15 bp, Homo sapiens
tggtgagaggacgcc

SEQ ID NO: 2047075 - DNA, 15 bp, Homo sapiens
ggtgagaggacgccg

SEQ ID NO: 2047076 - DNA, 15 bp, Homo sapiens
gtgagaggacgccgg

SEQ ID NO: 2047077 - DNA, 15 bp, Homo sapiens
tgagaggacgccggg

SEQ ID NO: 2047078 - DNA, 15 bp, Homo sapiens
gagaggacgccgggc

SEQ ID NO: 2047079 - DNA, 15 bp, Homo sapiens
agaggacgccgggcc

SEQ ID NO: 2047080 - DNA, 15 bp, Homo sapiens
gaggacgccgggccg

SEQ ID NO: 2047081 - DNA, 15 bp, Homo sapiens
aggacgccgggccgg

SEQ ID NO: 2047082 - DNA, 15 bp, Homo sapiens
ggacgccgggccggc

SEQ ID NO: 2047083 - DNA, 15 bp, Homo sapiens
gacgccgggccggcc

SEQ ID NO: 2047084 - DNA, 15 bp, Homo sapiens
acgccgggccggccc

SEQ ID NO: 2047085 - DNA, 15 bp, Homo sapiens
cgccgggccggccct

SEQ ID NO: 2047086 - DNA, 15 bp, Homo sapiens
gccgggccggcccta

SEQ ID NO: 2047087 - DNA, 15 bp, Homo sapiens
ccgggccggccctag

SEQ ID NO: 2047088 - DNA, 15 bp, Homo sapiens
cgggccggccctagc

SEQ ID NO: 2047089 - DNA, 15 bp, Homo sapiens
gggccggccctagcc

SEQ ID NO: 2047090 - DNA, 15 bp, Homo sapiens
ggccggccctagccc

SEQ ID NO: 2047091 - DNA, 15 bp, Homo sapiens
gccggccctagccca

SEQ ID NO: 2047092 - DNA, 15 bp, Homo sapiens
ccggccctagcccag

SEQ ID NO: 2047093 - DNA, 15 bp, Homo sapiens
cggccctagcccagc

SEQ ID NO: 2047094 - DNA, 15 bp, Homo sapiens
ggccctagcccagcg

SEQ ID NO: 2047095 - DNA, 15 bp, Homo sapiens
gccctagcccagcgc

SEQ ID NO: 2047096 - DNA, 15 bp, Homo sapiens
ccctagcccagcgct

SEQ ID NO: 2047097 - DNA, 15 bp, Homo sapiens
cctagcccagcgctc

SEQ ID NO: 2047098 - DNA, 15 bp, Homo sapiens
ctagcccagcgctct

SEQ ID NO: 2047099 - DNA, 15 bp, Homo sapiens
tagcccagcgctctg

SEQ ID NO: 2047100 - DNA, 15 bp, Homo sapiens
agcccagcgctctgc

SEQ ID NO: 2047101 - DNA, 15 bp, Homo sapiens
gcccagcgctctgcc

SEQ ID NO: 2047102 - DNA, 15 bp, Homo sapiens
cccagcgctctgcct

SEQ ID NO: 2047103 - DNA, 15 bp, Homo sapiens
ccagcgctctgcctc

SEQ ID NO: 2047104 - DNA, 15 bp, Homo sapiens
cagcgctctgcctca

SEQ ID NO: 2047105 - DNA, 15 bp, Homo sapiens
agcgctctgcctcac

SEQ ID NO: 2047106 - DNA, 15 bp, Homo sapiens
gcgctctgcctcacc

SEQ ID NO: 2047107 - DNA, 15 bp, Homo sapiens
cgctctgcctcaccg

SEQ ID NO: 2047108 - DNA, 15 bp, Homo sapiens
gctctgcctcaccgc

SEQ ID NO: 2047109 - DNA, 15 bp, Homo sapiens
ctctgcctcaccgct

SEQ ID NO: 2047110 - DNA, 15 bp, Homo sapiens
tctgcctcaccgctt

SEQ ID NO: 2047111 - DNA, 15 bp, Homo sapiens
ctgcctcaccgcttc

SEQ ID NO: 2047112 - DNA, 15 bp, Homo sapiens
tgcctcaccgcttcc

SEQ ID NO: 2047113 - DNA, 15 bp, Homo sapiens
gcctcaccgcttccc

SEQ ID NO: 2047114 - DNA, 15 bp, Homo sapiens
cctcaccgcttccct

SEQ ID NO: 2047115 - DNA, 15 bp, Homo sapiens
ctcaccgcttccctc

SEQ ID NO: 2047116 - DNA, 15 bp, Homo sapiens
tcaccgcttccctcc

SEQ ID NO: 2047117 - DNA, 15 bp, Homo sapiens
caccgcttccctcct

SEQ ID NO: 2047118 - DNA, 15 bp, Homo sapiens
accgcttccctcctg

SEQ ID NO: 2047119 - DNA, 15 bp, Homo sapiens
ccgcttccctcctgc

SEQ ID NO: 2047120 - DNA, 15 bp, Homo sapiens
cgcttccctcctgcc

SEQ ID NO: 2047121 - DNA, 15 bp, Homo sapiens
gcttccctcctgccc

SEQ ID NO: 2047122 - DNA, 15 bp, Homo sapiens
cttccctcctgcccg

SEQ ID NO: 2047123 - DNA, 15 bp, Homo sapiens
ttccctcctgcccgc

SEQ ID NO: 2047124 - DNA, 15 bp, Homo sapiens
tccctcctgcccgcc

SEQ ID NO: 2047125 - DNA, 15 bp, Homo sapiens
ccctcctgcccgcca

SEQ ID NO: 2047126 - DNA, 15 bp, Homo sapiens
cctcctgcccgccac

SEQ ID NO: 2047127 - DNA, 15 bp, Homo sapiens
ctcctgcccgccaca

SEQ ID NO: 2047128 - DNA, 15 bp, Homo sapiens
tcctgcccgccacac

SEQ ID NO: 2047129 - DNA, 15 bp, Homo sapiens
cctgcccgccacaca

SEQ ID NO: 2047130 - DNA, 15 bp, Homo sapiens
ctgcccgccacacag

SEQ ID NO: 2047131 - DNA, 15 bp, Homo sapiens
tgcccgccacacaga

SEQ ID NO: 2047132 - DNA, 15 bp, Homo sapiens
gcccgccacacagac

SEQ ID NO: 2047133 - DNA, 15 bp, Homo sapiens
cccgccacacagacc

SEQ ID NO: 2047134 - DNA, 15 bp, Homo sapiens
ccgccacacagacca

SEQ ID NO: 2047135 - DNA, 15 bp, Homo sapiens
cgccacacagaccac

SEQ ID NO: 2047136 - DNA, 15 bp, Homo sapiens
gccacacagaccacc

SEQ ID NO: 2047137 - DNA, 15 bp, Homo sapiens
ccacacagaccacca

SEQ ID NO: 2047138 - DNA, 15 bp, Homo sapiens
cacacagaccaccat

SEQ ID NO: 2047139 - DNA, 15 bp, Homo sapiens
acacagaccaccatc

SEQ ID NO: 2047140 - DNA, 15 bp, Homo sapiens
cacagaccaccatcc

SEQ ID NO: 2047141 - DNA, 15 bp, Homo sapiens
acagaccaccatcca

SEQ ID NO: 2047142 - DNA, 15 bp, Homo sapiens
cagaccaccatccac

SEQ ID NO: 2047143 - DNA, 15 bp, Homo sapiens
agaccaccatccacc

SEQ ID NO: 2047144 - DNA, 15 bp, Homo sapiens
gaccaccatccaccg

SEQ ID NO: 2047145 - DNA, 15 bp, Homo sapiens
accaccatccaccgc

SEQ ID NO: 2047146 - DNA, 15 bp, Homo sapiens
ccaccatccaccgct

SEQ ID NO: 2047147 - DNA, 15 bp, Homo sapiens
caccatccaccgctg

SEQ ID NO: 2047148 - DNA, 15 bp, Homo sapiens
accatccaccgctgc

SEQ ID NO: 2047149 - DNA, 15 bp, Homo sapiens
ccatccaccgctgct

SEQ ID NO: 2047150 - DNA, 15 bp, Homo sapiens
catccaccgctgctc

SEQ ID NO: 2047151 - DNA, 15 bp, Homo sapiens
atccaccgctgctcc

SEQ ID NO: 2047152 - DNA, 15 bp, Homo sapiens
tccaccgctgctcca

SEQ ID NO: 2047153 - DNA, 15 bp, Homo sapiens
ccaccgctgctccac

SEQ ID NO: 2047154 - DNA, 15 bp, Homo sapiens
caccgctgctccacg

SEQ ID NO: 2047155 - DNA, 15 bp, Homo sapiens
accgctgctccacgc

SEQ ID NO: 2047156 - DNA, 15 bp, Homo sapiens
ccgctgctccacgcg

SEQ ID NO: 2047157 - DNA, 15 bp, Homo sapiens
cgctgctccacgcgc

SEQ ID NO: 2047158 - DNA, 15 bp, Homo sapiens
gctgctccacgcgct

SEQ ID NO: 2047159 - DNA, 15 bp, Homo sapiens
ctgctccacgcgctt

SEQ ID NO: 2047160 - DNA, 15 bp, Homo sapiens
tgctccacgcgcttc

SEQ ID NO: 2047161 - DNA, 15 bp, Homo sapiens
gctccacgcgcttcg

SEQ ID NO: 2047162 - DNA, 15 bp, Homo sapiens
ctccacgcgcttcga

SEQ ID NO: 2047163 - DNA, 15 bp, Homo sapiens
tccacgcgcttcgac

SEQ ID NO: 2047164 - DNA, 15 bp, Homo sapiens
ccacgcgcttcgact

SEQ ID NO: 2047165 - DNA, 15 bp, Homo sapiens
cacgcgcttcgactt

SEQ ID NO: 2047166 - DNA, 15 bp, Homo sapiens
acgcgcttcgacttt

SEQ ID NO: 2047167 - DNA, 15 bp, Homo sapiens
cgcgcttcgactttt

SEQ ID NO: 2047168 - DNA, 15 bp, Homo sapiens
gcgcttcgacttttc

SEQ ID NO: 2047169 - DNA, 15 bp, Homo sapiens
cgcttcgacttttct

SEQ ID NO: 2047170 - DNA, 15 bp, Homo sapiens
gcttcgacttttctt

SEQ ID NO: 2047171 - DNA, 15 bp, Homo sapiens
cttcgacttttctta

SEQ ID NO: 2047172 - DNA, 15 bp, Homo sapiens
ttcgacttttcttaa

SEQ ID NO: 2047173 - DNA, 15 bp, Homo sapiens
tcgacttttcttaac

SEQ ID NO: 2047174 - DNA, 15 bp, Homo sapiens
cgacttttcttaaca

SEQ ID NO: 2047175 - DNA, 15 bp, Homo sapiens
gacttttcttaacaa

SEQ ID NO: 2047176 - DNA, 15 bp, Homo sapiens
acttttcttaacaac

SEQ ID NO: 2047177 - DNA, 15 bp, Homo sapiens
cttttcttaacaacc

SEQ ID NO: 2047178 - DNA, 15 bp, Homo sapiens
ttttcttaacaacct

SEQ ID NO: 2047179 - DNA, 15 bp, Homo sapiens
tttcttaacaacctg

SEQ ID NO: 2047180 - DNA, 15 bp, Homo sapiens
ttcttaacaacctgg

SEQ ID NO: 2047181 - DNA, 15 bp, Homo sapiens
tcttaacaacctggc

SEQ ID NO: 2047182 - DNA, 15 bp, Homo sapiens
cttaacaacctggcc

SEQ ID NO: 2047183 - DNA, 15 bp, Homo sapiens
ttaacaacctggccg

SEQ ID NO: 2047184 - DNA, 15 bp, Homo sapiens
taacaacctggccgc

SEQ ID NO: 2047185 - DNA, 15 bp, Homo sapiens
aacaacctggccgcg

SEQ ID NO: 2047186 - DNA, 15 bp, Homo sapiens
acaacctggccgcgt

SEQ ID NO: 2047187 - DNA, 15 bp, Homo sapiens
caacctggccgcgtt

SEQ ID NO: 2047188 - DNA, 15 bp, Homo sapiens
aacctggccgcgttt

SEQ ID NO: 2047189 - DNA, 15 bp, Homo sapiens
acctggccgcgttta

SEQ ID NO: 2047190 - DNA, 15 bp, Homo sapiens
cctggccgcgtttag

SEQ ID NO: 2047191 - DNA, 15 bp, Homo sapiens
ctggccgcgtttaga

SEQ ID NO: 2047192 - DNA, 15 bp, Homo sapiens
tggccgcgtttagac

SEQ ID NO: 2047193 - DNA, 15 bp, Homo sapiens
ggccgcgtttagacc

SEQ ID NO: 2047194 - DNA, 15 bp, Homo sapiens
gccgcgtttagacca

SEQ ID NO: 2047195 - DNA, 15 bp, Homo sapiens
ccgcgtttagaccaa

SEQ ID NO: 2047196 - DNA, 15 bp, Homo sapiens
cgcgtttagaccaag

SEQ ID NO: 2047197 - DNA, 15 bp, Homo sapiens
gcgtttagaccaagg

SEQ ID NO: 2047198 - DNA, 15 bp, Homo sapiens
cgtttagaccaagga

SEQ ID NO: 2047199 - DNA, 15 bp, Homo sapiens
gtttagaccaaggaa

SEQ ID NO: 2047200 - DNA, 15 bp, Homo sapiens
tttagaccaaggaac

SEQ ID NO: 2047201 - DNA, 15 bp, Homo sapiens
ttagaccaaggaaca

SEQ ID NO: 2047202 - DNA, 15 bp, Homo sapiens
tagaccaaggaacaa

SEQ ID NO: 2047203 - DNA, 15 bp, Homo sapiens
agaccaaggaacaaa

SEQ ID NO: 2047204 - DNA, 15 bp, Homo sapiens
gaccaaggaacaaaa

SEQ ID NO: 2047205 - DNA, 15 bp, Homo sapiens
accaaggaacaaaaa

SEQ ID NO: 2047206 - DNA, 15 bp, Homo sapiens
ccaaggaacaaaaaa

SEQ ID NO: 2047207 - DNA, 15 bp, Homo sapiens
caaggaacaaaaaaa

SEQ ID NO: 2047208 - DNA, 15 bp, Homo sapiens
aaggaacaaaaaaac

SEQ ID NO: 2047209 - DNA, 15 bp, Homo sapiens
aggaacaaaaaaacc

SEQ ID NO: 2047210 - DNA, 15 bp, Homo sapiens
ggaacaaaaaaacca

SEQ ID NO: 2047211 - DNA, 15 bp, Homo sapiens
gaacaaaaaaaccac

SEQ ID NO: 2047212 - DNA, 15 bp, Homo sapiens
aacaaaaaaaccaca

SEQ ID NO: 2047213 - DNA, 15 bp, Homo sapiens
acaaaaaaaccacaa

SEQ ID NO: 2047214 - DNA, 15 bp, Homo sapiens
caaaaaaaccacaaa

SEQ ID NO: 2047215 - DNA, 15 bp, Homo sapiens
aaaaaaaccacaaag

SEQ ID NO: 2047216 - DNA, 15 bp, Homo sapiens
aaaaaaccacaaagg

SEQ ID NO: 2047217 - DNA, 15 bp, Homo sapiens
aaaaaccacaaaggc

SEQ ID NO: 2047218 - DNA, 15 bp, Homo sapiens
aaaaccacaaaggcc

SEQ ID NO: 2047219 - DNA, 15 bp, Homo sapiens
aaaccacaaaggcca

SEQ ID NO: 2047220 - DNA, 15 bp, Homo sapiens
aaccacaaaggccaa

SEQ ID NO: 2047221 - DNA, 15 bp, Homo sapiens
accacaaaggccaaa

SEQ ID NO: 2047222 - DNA, 15 bp, Homo sapiens
ccacaaaggccaaac

SEQ ID NO: 2047223 - DNA, 15 bp, Homo sapiens
cacaaaggccaaact

SEQ ID NO: 2047224 - DNA, 15 bp, Homo sapiens
acaaaggccaaactg

SEQ ID NO: 2047225 - DNA, 15 bp, Homo sapiens
caaaggccaaactgc

SEQ ID NO: 2047226 - DNA, 15 bp, Homo sapiens
aaaggccaaactgct

SEQ ID NO: 2047227 - DNA, 15 bp, Homo sapiens
aaggccaaactgctg

SEQ ID NO: 2047228 - DNA, 15 bp, Homo sapiens
aggccaaactgctgg

SEQ ID NO: 2047229 - DNA, 15 bp, Homo sapiens
ggccaaactgctgga

SEQ ID NO: 2047230 - DNA, 15 bp, Homo sapiens
gccaaactgctggac

SEQ ID NO: 2047231 - DNA, 15 bp, Homo sapiens
ccaaactgctggacg

SEQ ID NO: 2047232 - DNA, 15 bp, Homo sapiens
caaactgctggacgt

SEQ ID NO: 2047233 - DNA, 15 bp, Homo sapiens
aaactgctggacgtc

SEQ ID NO: 2047234 - DNA, 15 bp, Homo sapiens
aactgctggacgtct

SEQ ID NO: 2047235 - DNA, 15 bp, Homo sapiens
actgctggacgtctt

SEQ ID NO: 2047236 - DNA, 15 bp, Homo sapiens
ctgctggacgtcttt

SEQ ID NO: 2047237 - DNA, 15 bp, Homo sapiens
tgctggacgtctttc

SEQ ID NO: 2047238 - DNA, 15 bp, Homo sapiens
gctggacgtctttct

SEQ ID NO: 2047239 - DNA, 15 bp, Homo sapiens
ctggacgtctttctt

SEQ ID NO: 2047240 - DNA, 15 bp, Homo sapiens
tggacgtctttcttt

SEQ ID NO: 2047241 - DNA, 15 bp, Homo sapiens
ggacgtctttctttt

SEQ ID NO: 2047242 - DNA, 15 bp, Homo sapiens
gacgtctttcttttt

SEQ ID NO: 2047243 - DNA, 15 bp, Homo sapiens
acgtctttctttttt

SEQ ID NO: 2047244 - DNA, 15 bp, Homo sapiens
cgtctttcttttttt

SEQ ID NO: 2047245 - DNA, 15 bp, Homo sapiens
gtctttctttttttc

SEQ ID NO: 2047246 - DNA, 15 bp, Homo sapiens
tctttctttttttcc

SEQ ID NO: 2047247 - DNA, 15 bp, Homo sapiens
ctttctttttttccc

SEQ ID NO: 2047248 - DNA, 15 bp, Homo sapiens
tttctttttttcccc

SEQ ID NO: 2047249 - DNA, 15 bp, Homo sapiens
ttctttttttccccc

SEQ ID NO: 2047250 - DNA, 15 bp, Homo sapiens
tctttttttcccccc

SEQ ID NO: 2047251 - DNA, 15 bp, Homo sapiens
ctttttttccccccc

SEQ ID NO: 2047252 - DNA, 15 bp, Homo sapiens
tttttttccccccct

SEQ ID NO: 2047253 - DNA, 15 bp, Homo sapiens
ttttttcccccccta

SEQ ID NO: 2047254 - DNA, 15 bp, Homo sapiens
tttttccccccctaa

SEQ ID NO: 2047255 - DNA, 15 bp, Homo sapiens
ttttccccccctaaa

SEQ ID NO: 2047256 - DNA, 15 bp, Homo sapiens
tttccccccctaaaa

SEQ ID NO: 2047257 - DNA, 15 bp, Homo sapiens
ttccccccctaaaat

SEQ ID NO: 2047258 - DNA, 15 bp, Homo sapiens
tccccccctaaaatt

SEQ ID NO: 2047259 - DNA, 15 bp, Homo sapiens
ccccccctaaaattt

SEQ ID NO: 2047260 - DNA, 15 bp, Homo sapiens
cccccctaaaatttg

SEQ ID NO: 2047261 - DNA, 15 bp, Homo sapiens
ccccctaaaatttgt

SEQ ID NO: 2047262 - DNA, 15 bp, Homo sapiens
cccctaaaatttgtg

SEQ ID NO: 2047263 - DNA, 15 bp, Homo sapiens
ccctaaaatttgtgg

SEQ ID NO: 2047264 - DNA, 15 bp, Homo sapiens
cctaaaatttgtggg

SEQ ID NO: 2047265 - DNA, 15 bp, Homo sapiens
ctaaaatttgtgggt

SEQ ID NO: 2047266 - DNA, 15 bp, Homo sapiens
taaaatttgtgggtt

SEQ ID NO: 2047267 - DNA, 15 bp, Homo sapiens
aaaatttgtgggttt

SEQ ID NO: 2047268 - DNA, 15 bp, Homo sapiens
aaatttgtgggtttt

SEQ ID NO: 2047269 - DNA, 15 bp, Homo sapiens
aatttgtgggttttt

SEQ ID NO: 2047270 - DNA, 15 bp, Homo sapiens
atttgtgggtttttt

SEQ ID NO: 2047271 - DNA, 15 bp, Homo sapiens
tttgtgggttttttt

SEQ ID NO: 2047272 - DNA, 15 bp, Homo sapiens
gggttttttttttta

SEQ ID NO: 2047273 - DNA, 15 bp, Homo sapiens
ggtttttttttttaa

SEQ ID NO: 2047274 - DNA, 15 bp, Homo sapiens
gtttttttttttaaa

SEQ ID NO: 2047275 - DNA, 15 bp, Homo sapiens
taaaaaaagaaaatg

SEQ ID NO: 2047276 - DNA, 15 bp, Homo sapiens
aaaaaaagaaaatga

SEQ ID NO: 2047277 - DNA, 15 bp, Homo sapiens
aaaaaagaaaatgaa

SEQ ID NO: 2047278 - DNA, 15 bp, Homo sapiens
aaaaagaaaatgaaa

SEQ ID NO: 2047279 - DNA, 15 bp, Homo sapiens
aaaagaaaatgaaaa

SEQ ID NO: 2047280 - DNA, 15 bp, Homo sapiens
aaagaaaatgaaaaa

SEQ ID NO: 2047281 - DNA, 15 bp, Homo sapiens
aagaaaatgaaaaac

SEQ ID NO: 2047282 - DNA, 15 bp, Homo sapiens
agaaaatgaaaaaca

SEQ ID NO: 2047283 - DNA, 15 bp, Homo sapiens
gaaaatgaaaaacaa

SEQ ID NO: 2047284 - DNA, 15 bp, Homo sapiens
atgaaaaacaaccaa

SEQ ID NO: 2047285 - DNA, 15 bp, Homo sapiens
tgaaaaacaaccaag

SEQ ID NO: 2047286 - DNA, 15 bp, Homo sapiens
gaaaaacaaccaagc

SEQ ID NO: 2047287 - DNA, 15 bp, Homo sapiens
aaaaacaaccaagcg

SEQ ID NO: 2047288 - DNA, 15 bp, Homo sapiens
aaaacaaccaagcgc

SEQ ID NO: 2047289 - DNA, 15 bp, Homo sapiens
aaacaaccaagcgca

SEQ ID NO: 2047290 - DNA, 15 bp, Homo sapiens
aacaaccaagcgcat

SEQ ID NO: 2047291 - DNA, 15 bp, Homo sapiens
acaaccaagcgcatc

SEQ ID NO: 2047292 - DNA, 15 bp, Homo sapiens
caaccaagcgcatcc

SEQ ID NO: 2047293 - DNA, 15 bp, Homo sapiens
aaccaagcgcatcca

SEQ ID NO: 2047294 - DNA, 15 bp, Homo sapiens
accaagcgcatccaa

SEQ ID NO: 2047295 - DNA, 15 bp, Homo sapiens
ccaagcgcatccaat

SEQ ID NO: 2047296 - DNA, 15 bp, Homo sapiens
caagcgcatccaatc

SEQ ID NO: 2047297 - DNA, 15 bp, Homo sapiens
aagcgcatccaatct

SEQ ID NO: 2047298 - DNA, 15 bp, Homo sapiens
agcgcatccaatctc

SEQ ID NO: 2047299 - DNA, 15 bp, Homo sapiens
gcgcatccaatctca

SEQ ID NO: 2047300 - DNA, 15 bp, Homo sapiens
cgcatccaatctcaa

SEQ ID NO: 2047301 - DNA, 15 bp, Homo sapiens
gcatccaatctcaag

SEQ ID NO: 2047302 - DNA, 15 bp, Homo sapiens
catccaatctcaagg

SEQ ID NO: 2047303 - DNA, 15 bp, Homo sapiens
atccaatctcaagga

SEQ ID NO: 2047304 - DNA, 15 bp, Homo sapiens
tccaatctcaaggaa

SEQ ID NO: 2047305 - DNA, 15 bp, Homo sapiens
ccaatctcaaggaat

SEQ ID NO: 2047306 - DNA, 15 bp, Homo sapiens
caatctcaaggaatc

SEQ ID NO: 2047307 - DNA, 15 bp, Homo sapiens
aatctcaaggaatct

SEQ ID NO: 2047308 - DNA, 15 bp, Homo sapiens
atctcaaggaatctt

SEQ ID NO: 2047309 - DNA, 15 bp, Homo sapiens
tctcaaggaatcttt

SEQ ID NO: 2047310 - DNA, 15 bp, Homo sapiens
ctcaaggaatcttta

SEQ ID NO: 2047311 - DNA, 15 bp, Homo sapiens
tcaaggaatctttaa

SEQ ID NO: 2047312 - DNA, 15 bp, Homo sapiens
caaggaatctttaag

SEQ ID NO: 2047313 - DNA, 15 bp, Homo sapiens
aaggaatctttaagc

SEQ ID NO: 2047314 - DNA, 15 bp, Homo sapiens
aggaatctttaagca

SEQ ID NO: 2047315 - DNA, 15 bp, Homo sapiens
ggaatctttaagcag

SEQ ID NO: 2047316 - DNA, 15 bp, Homo sapiens
gaatctttaagcaga

SEQ ID NO: 2047317 - DNA, 15 bp, Homo sapiens
aatctttaagcagag

SEQ ID NO: 2047318 - DNA, 15 bp, Homo sapiens
atctttaagcagaga

SEQ ID NO: 2047319 - DNA, 15 bp, Homo sapiens
tctttaagcagagaa

SEQ ID NO: 2047320 - DNA, 15 bp, Homo sapiens
ctttaagcagagaag

SEQ ID NO: 2047321 - DNA, 15 bp, Homo sapiens
tttaagcagagaagg

SEQ ID NO: 2047322 - DNA, 15 bp, Homo sapiens
ttaagcagagaaggg

SEQ ID NO: 2047323 - DNA, 15 bp, Homo sapiens
taagcagagaagggc

SEQ ID NO: 2047324 - DNA, 15 bp, Homo sapiens
aagcagagaagggca

SEQ ID NO: 2047325 - DNA, 15 bp, Homo sapiens
agcagagaagggcat

SEQ ID NO: 2047326 - DNA, 15 bp, Homo sapiens
gcagagaagggcata

SEQ ID NO: 2047327 - DNA, 15 bp, Homo sapiens
cagagaagggcataa

SEQ ID NO: 2047328 - DNA, 15 bp, Homo sapiens
agagaagggcataaa

SEQ ID NO: 2047329 - DNA, 15 bp, Homo sapiens
gagaagggcataaaa

SEQ ID NO: 2047330 - DNA, 15 bp, Homo sapiens
agaagggcataaaac

SEQ ID NO: 2047331 - DNA, 15 bp, Homo sapiens
gaagggcataaaaca

SEQ ID NO: 2047332 - DNA, 15 bp, Homo sapiens
aagggcataaaacag

SEQ ID NO: 2047333 - DNA, 15 bp, Homo sapiens
agggcataaaacagc

SEQ ID NO: 2047334 - DNA, 15 bp, Homo sapiens
gggcataaaacagct

SEQ ID NO: 2047335 - DNA, 15 bp, Homo sapiens
ggcataaaacagctt

SEQ ID NO: 2047336 - DNA, 15 bp, Homo sapiens
gcataaaacagcttt

SEQ ID NO: 2047337 - DNA, 15 bp, Homo sapiens
cataaaacagctttg

SEQ ID NO: 2047338 - DNA, 15 bp, Homo sapiens
ataaaacagctttgg

SEQ ID NO: 2047339 - DNA, 15 bp, Homo sapiens
taaaacagctttggg

SEQ ID NO: 2047340 - DNA, 15 bp, Homo sapiens
aaaacagctttgggg

SEQ ID NO: 2047341 - DNA, 15 bp, Homo sapiens
aaacagctttggggt

SEQ ID NO: 2047342 - DNA, 15 bp, Homo sapiens
aacagctttggggtg

SEQ ID NO: 2047343 - DNA, 15 bp, Homo sapiens
acagctttggggtgt

SEQ ID NO: 2047344 - DNA, 15 bp, Homo sapiens
cagctttggggtgtc

SEQ ID NO: 2047345 - DNA, 15 bp, Homo sapiens
agctttggggtgtct

SEQ ID NO: 2047346 - DNA, 15 bp, Homo sapiens
gctttggggtgtctt

SEQ ID NO: 2047347 - DNA, 15 bp, Homo sapiens
ctttggggtgtcttt

SEQ ID NO: 2047348 - DNA, 15 bp, Homo sapiens
tttggggtgtctttt

SEQ ID NO: 2047349 - DNA, 15 bp, Homo sapiens
ttggggtgtcttttt

SEQ ID NO: 2047350 - DNA, 15 bp, Homo sapiens
tggggtgtctttttt

SEQ ID NO: 2047351 - DNA, 15 bp, Homo sapiens
ggggtgtcttttttt

SEQ ID NO: 2047352 - DNA, 15 bp, Homo sapiens
gggtgtctttttttg

SEQ ID NO: 2047353 - DNA, 15 bp, Homo sapiens
ggtgtctttttttgg

SEQ ID NO: 2047354 - DNA, 15 bp, Homo sapiens
gtgtctttttttggt

SEQ ID NO: 2047355 - DNA, 15 bp, Homo sapiens
tgtctttttttggtg

SEQ ID NO: 2047356 - DNA, 15 bp, Homo sapiens
gtctttttttggtga

SEQ ID NO: 2047357 - DNA, 15 bp, Homo sapiens
tctttttttggtgat

SEQ ID NO: 2047358 - DNA, 15 bp, Homo sapiens
ctttttttggtgatt

SEQ ID NO: 2047359 - DNA, 15 bp, Homo sapiens
tttttttggtgattc

SEQ ID NO: 2047360 - DNA, 15 bp, Homo sapiens
ttttttggtgattca

SEQ ID NO: 2047361 - DNA, 15 bp, Homo sapiens
tttttggtgattcaa

SEQ ID NO: 2047362 - DNA, 15 bp, Homo sapiens
ttttggtgattcaaa

SEQ ID NO: 2047363 - DNA, 15 bp, Homo sapiens
tttggtgattcaaat

SEQ ID NO: 2047364 - DNA, 15 bp, Homo sapiens
ttggtgattcaaatg

SEQ ID NO: 2047365 - DNA, 15 bp, Homo sapiens
tggtgattcaaatgg

SEQ ID NO: 2047366 - DNA, 15 bp, Homo sapiens
ggtgattcaaatggg

SEQ ID NO: 2047367 - DNA, 15 bp, Homo sapiens
gtgattcaaatgggt

SEQ ID NO: 2047368 - DNA, 15 bp, Homo sapiens
tgattcaaatgggtt

SEQ ID NO: 2047369 - DNA, 15 bp, Homo sapiens
gattcaaatgggttt

SEQ ID NO: 2047370 - DNA, 15 bp, Homo sapiens
attcaaatgggtttt

SEQ ID NO: 2047371 - DNA, 15 bp, Homo sapiens
ttcaaatgggttttc

SEQ ID NO: 2047372 - DNA, 15 bp, Homo sapiens
tcaaatgggttttcc

SEQ ID NO: 2047373 - DNA, 15 bp, Homo sapiens
caaatgggttttcca

SEQ ID NO: 2047374 - DNA, 15 bp, Homo sapiens
aaatgggttttccac

SEQ ID NO: 2047375 - DNA, 15 bp, Homo sapiens
aatgggttttccacg

SEQ ID NO: 2047376 - DNA, 15 bp, Homo sapiens
atgggttttccacgc

SEQ ID NO: 2047377 - DNA, 15 bp, Homo sapiens
tgggttttccacgct

SEQ ID NO: 2047378 - DNA, 15 bp, Homo sapiens
gggttttccacgcta

SEQ ID NO: 2047379 - DNA, 15 bp, Homo sapiens
ggttttccacgctag

SEQ ID NO: 2047380 - DNA, 15 bp, Homo sapiens
gttttccacgctagg

SEQ ID NO: 2047381 - DNA, 15 bp, Homo sapiens
ttttccacgctaggg

SEQ ID NO: 2047382 - DNA, 15 bp, Homo sapiens
tttccacgctagggc

SEQ ID NO: 2047383 - DNA, 15 bp, Homo sapiens
ttccacgctagggcg

SEQ ID NO: 2047384 - DNA, 15 bp, Homo sapiens
tccacgctagggcgg

SEQ ID NO: 2047385 - DNA, 15 bp, Homo sapiens
ccacgctagggcggg

SEQ ID NO: 2047386 - DNA, 15 bp, Homo sapiens
cacgctagggcgggg

SEQ ID NO: 2047387 - DNA, 15 bp, Homo sapiens
acgctagggcggggc

SEQ ID NO: 2047388 - DNA, 15 bp, Homo sapiens
cgctagggcggggca

SEQ ID NO: 2047389 - DNA, 15 bp, Homo sapiens
gctagggcggggcac

SEQ ID NO: 2047390 - DNA, 15 bp, Homo sapiens
ctagggcggggcaca

SEQ ID NO: 2047391 - DNA, 15 bp, Homo sapiens
tagggcggggcacag

SEQ ID NO: 2047392 - DNA, 15 bp, Homo sapiens
agggcggggcacaga

SEQ ID NO: 2047393 - DNA, 15 bp, Homo sapiens
gggcggggcacagat

SEQ ID NO: 2047394 - DNA, 15 bp, Homo sapiens
ggcggggcacagatt

SEQ ID NO: 2047395 - DNA, 15 bp, Homo sapiens
gcggggcacagattg

SEQ ID NO: 2047396 - DNA, 15 bp, Homo sapiens
cggggcacagattgg

SEQ ID NO: 2047397 - DNA, 15 bp, Homo sapiens
ggggcacagattgga

SEQ ID NO: 2047398 - DNA, 15 bp, Homo sapiens
gggcacagattggag

SEQ ID NO: 2047399 - DNA, 15 bp, Homo sapiens
ggcacagattggaga

SEQ ID NO: 2047400 - DNA, 15 bp, Homo sapiens
gcacagattggagag

SEQ ID NO: 2047401 - DNA, 15 bp, Homo sapiens
cacagattggagagg

SEQ ID NO: 2047402 - DNA, 15 bp, Homo sapiens
acagattggagaggg

SEQ ID NO: 2047403 - DNA, 15 bp, Homo sapiens
cagattggagagggc

SEQ ID NO: 2047404 - DNA, 15 bp, Homo sapiens
agattggagagggct

SEQ ID NO: 2047405 - DNA, 15 bp, Homo sapiens
gattggagagggctc

SEQ ID NO: 2047406 - DNA, 15 bp, Homo sapiens
attggagagggctct

SEQ ID NO: 2047407 - DNA, 15 bp, Homo sapiens
ttggagagggctctg

SEQ ID NO: 2047408 - DNA, 15 bp, Homo sapiens
tggagagggctctgt

SEQ ID NO: 2047409 - DNA, 15 bp, Homo sapiens
ggagagggctctgtg

SEQ ID NO: 2047410 - DNA, 15 bp, Homo sapiens
gagagggctctgtgc

SEQ ID NO: 2047411 - DNA, 15 bp, Homo sapiens
agagggctctgtgct

SEQ ID NO: 2047412 - DNA, 15 bp, Homo sapiens
gagggctctgtgctg

SEQ ID NO: 2047413 - DNA, 15 bp, Homo sapiens
agggctctgtgctga

SEQ ID NO: 2047414 - DNA, 15 bp, Homo sapiens
gggctctgtgctgac

SEQ ID NO: 2047415 - DNA, 15 bp, Homo sapiens
ggctctgtgctgaca

SEQ ID NO: 2047416 - DNA, 15 bp, Homo sapiens
gctctgtgctgacat

SEQ ID NO: 2047417 - DNA, 15 bp, Homo sapiens
ctctgtgctgacatg

SEQ ID NO: 2047418 - DNA, 15 bp, Homo sapiens
tctgtgctgacatgg

SEQ ID NO: 2047419 - DNA, 15 bp, Homo sapiens
ctgtgctgacatggc

SEQ ID NO: 2047420 - DNA, 15 bp, Homo sapiens
tgtgctgacatggct

SEQ ID NO: 2047421 - DNA, 15 bp, Homo sapiens
gtgctgacatggctc

SEQ ID NO: 2047422 - DNA, 15 bp, Homo sapiens
tgctgacatggctct

SEQ ID NO: 2047423 - DNA, 15 bp, Homo sapiens
gctgacatggctctg

SEQ ID NO: 2047424 - DNA, 15 bp, Homo sapiens
ctgacatggctctgg

SEQ ID NO: 2047425 - DNA, 15 bp, Homo sapiens
tgacatggctctgga

SEQ ID NO: 2047426 - DNA, 15 bp, Homo sapiens
gacatggctctggac

SEQ ID NO: 2047427 - DNA, 15 bp, Homo sapiens
acatggctctggact

SEQ ID NO: 2047428 - DNA, 15 bp, Homo sapiens
catggctctggactc

SEQ ID NO: 2047429 - DNA, 15 bp, Homo sapiens
atggctctggactct

SEQ ID NO: 2047430 - DNA, 15 bp, Homo sapiens
tggctctggactcta

SEQ ID NO: 2047431 - DNA, 15 bp, Homo sapiens
ggctctggactctaa

SEQ ID NO: 2047432 - DNA, 15 bp, Homo sapiens
gctctggactctaaa

SEQ ID NO: 2047433 - DNA, 15 bp, Homo sapiens
ctctggactctaaag

SEQ ID NO: 2047434 - DNA, 15 bp, Homo sapiens
tctggactctaaaga

SEQ ID NO: 2047435 - DNA, 15 bp, Homo sapiens
ctggactctaaagac

SEQ ID NO: 2047436 - DNA, 15 bp, Homo sapiens
tggactctaaagacc

SEQ ID NO: 2047437 - DNA, 15 bp, Homo sapiens
ggactctaaagacca

SEQ ID NO: 2047438 - DNA, 15 bp, Homo sapiens
gactctaaagaccaa

SEQ ID NO: 2047439 - DNA, 15 bp, Homo sapiens
actctaaagaccaaa

SEQ ID NO: 2047440 - DNA, 15 bp, Homo sapiens
ctctaaagaccaaac

SEQ ID NO: 2047441 - DNA, 15 bp, Homo sapiens
tctaaagaccaaact

SEQ ID NO: 2047442 - DNA, 15 bp, Homo sapiens
ctaaagaccaaactt

SEQ ID NO: 2047443 - DNA, 15 bp, Homo sapiens
taaagaccaaacttc

SEQ ID NO: 2047444 - DNA, 15 bp, Homo sapiens
aaagaccaaacttca

SEQ ID NO: 2047445 - DNA, 15 bp, Homo sapiens
aagaccaaacttcac

SEQ ID NO: 2047446 - DNA, 15 bp, Homo sapiens
agaccaaacttcact

SEQ ID NO: 2047447 - DNA, 15 bp, Homo sapiens
gaccaaacttcactc

SEQ ID NO: 2047448 - DNA, 15 bp, Homo sapiens
accaaacttcactct

SEQ ID NO: 2047449 - DNA, 15 bp, Homo sapiens
ccaaacttcactctg

SEQ ID NO: 2047450 - DNA, 15 bp, Homo sapiens
caaacttcactctgg

SEQ ID NO: 2047451 - DNA, 15 bp, Homo sapiens
aaacttcactctggg

SEQ ID NO: 2047452 - DNA, 15 bp, Homo sapiens
aacttcactctgggc

SEQ ID NO: 2047453 - DNA, 15 bp, Homo sapiens
acttcactctgggca

SEQ ID NO: 2047454 - DNA, 15 bp, Homo sapiens
cttcactctgggcac

SEQ ID NO: 2047455 - DNA, 15 bp, Homo sapiens
ttcactctgggcaca

SEQ ID NO: 2047456 - DNA, 15 bp, Homo sapiens
tcactctgggcacac

SEQ ID NO: 2047457 - DNA, 15 bp, Homo sapiens
cactctgggcacact

SEQ ID NO: 2047458 - DNA, 15 bp, Homo sapiens
actctgggcacactc

SEQ ID NO: 2047459 - DNA, 15 bp, Homo sapiens
ctctgggcacactct

SEQ ID NO: 2047460 - DNA, 15 bp, Homo sapiens
tctgggcacactctg

SEQ ID NO: 2047461 - DNA, 15 bp, Homo sapiens
ctgggcacactctgc

SEQ ID NO: 2047462 - DNA, 15 bp, Homo sapiens
tgggcacactctgcc

SEQ ID NO: 2047463 - DNA, 15 bp, Homo sapiens
gggcacactctgcca

SEQ ID NO: 2047464 - DNA, 15 bp, Homo sapiens
ggcacactctgccag

SEQ ID NO: 2047465 - DNA, 15 bp, Homo sapiens
gcacactctgccagc

SEQ ID NO: 2047466 - DNA, 15 bp, Homo sapiens
cacactctgccagca

SEQ ID NO: 2047467 - DNA, 15 bp, Homo sapiens
acactctgccagcaa

SEQ ID NO: 2047468 - DNA, 15 bp, Homo sapiens
cactctgccagcaaa

SEQ ID NO: 2047469 - DNA, 15 bp, Homo sapiens
actctgccagcaaag

SEQ ID NO: 2047470 - DNA, 15 bp, Homo sapiens
ctctgccagcaaaga

SEQ ID NO: 2047471 - DNA, 15 bp, Homo sapiens
tctgccagcaaagag

SEQ ID NO: 2047472 - DNA, 15 bp, Homo sapiens
ctgccagcaaagagg

SEQ ID NO: 2047473 - DNA, 15 bp, Homo sapiens
tgccagcaaagagga

SEQ ID NO: 2047474 - DNA, 15 bp, Homo sapiens
gccagcaaagaggac

SEQ ID NO: 2047475 - DNA, 15 bp, Homo sapiens
ccagcaaagaggact

SEQ ID NO: 2047476 - DNA, 15 bp, Homo sapiens
cagcaaagaggactc

SEQ ID NO: 2047477 - DNA, 15 bp, Homo sapiens
agcaaagaggactcg

SEQ ID NO: 2047478 - DNA, 15 bp, Homo sapiens
gcaaagaggactcgc

SEQ ID NO: 2047479 - DNA, 15 bp, Homo sapiens
caaagaggactcgct

SEQ ID NO: 2047480 - DNA, 15 bp, Homo sapiens
aaagaggactcgctt

SEQ ID NO: 2047481 - DNA, 15 bp, Homo sapiens
aagaggactcgcttg

SEQ ID NO: 2047482 - DNA, 15 bp, Homo sapiens
agaggactcgcttgt

SEQ ID NO: 2047483 - DNA, 15 bp, Homo sapiens
gaggactcgcttgta

SEQ ID NO: 2047484 - DNA, 15 bp, Homo sapiens
aggactcgcttgtaa

SEQ ID NO: 2047485 - DNA, 15 bp, Homo sapiens
ggactcgcttgtaaa

SEQ ID NO: 2047486 - DNA, 15 bp, Homo sapiens
gactcgcttgtaaat

SEQ ID NO: 2047487 - DNA, 15 bp, Homo sapiens
actcgcttgtaaata

SEQ ID NO: 2047488 - DNA, 15 bp, Homo sapiens
ctcgcttgtaaatac

SEQ ID NO: 2047489 - DNA, 15 bp, Homo sapiens
tcgcttgtaaatacc

SEQ ID NO: 2047490 - DNA, 15 bp, Homo sapiens
cgcttgtaaatacca

SEQ ID NO: 2047491 - DNA, 15 bp, Homo sapiens
gcttgtaaataccag

SEQ ID NO: 2047492 - DNA, 15 bp, Homo sapiens
cttgtaaataccagg

SEQ ID NO: 2047493 - DNA, 15 bp, Homo sapiens
ttgtaaataccagga

SEQ ID NO: 2047494 - DNA, 15 bp, Homo sapiens
tgtaaataccaggat

SEQ ID NO: 2047495 - DNA, 15 bp, Homo sapiens
gtaaataccaggatt

SEQ ID NO: 2047496 - DNA, 15 bp, Homo sapiens
taaataccaggattt

SEQ ID NO: 2047497 - DNA, 15 bp, Homo sapiens
aaataccaggatttt

SEQ ID NO: 2047498 - DNA, 15 bp, Homo sapiens
aataccaggattttt

SEQ ID NO: 2047499 - DNA, 15 bp, Homo sapiens
ataccaggatttttt

SEQ ID NO: 2047500 - DNA, 15 bp, Homo sapiens
taccaggattttttt

SEQ ID NO: 2047501 - DNA, 15 bp, Homo sapiens
accaggatttttttt

SEQ ID NO: 2047502 - DNA, 15 bp, Homo sapiens
ccaggattttttttt

SEQ ID NO: 2047503 - DNA, 15 bp, Homo sapiens
aggattttttttttt

SEQ ID NO: 2047504 - DNA, 15 bp, Homo sapiens
ttttttttttttgaa

SEQ ID NO: 2047505 - DNA, 15 bp, Homo sapiens
tttttttttttgaag

SEQ ID NO: 2047506 - DNA, 15 bp, Homo sapiens
ttttttttttgaagg

SEQ ID NO: 2047507 - DNA, 15 bp, Homo sapiens
tttttttttgaaggg

SEQ ID NO: 2047508 - DNA, 15 bp, Homo sapiens
ttttttttgaaggga

SEQ ID NO: 2047509 - DNA, 15 bp, Homo sapiens
tttttttgaagggag

SEQ ID NO: 2047510 - DNA, 15 bp, Homo sapiens
ttttttgaagggagg

SEQ ID NO: 2047511 - DNA, 15 bp, Homo sapiens
tttttgaagggagga

SEQ ID NO: 2047512 - DNA, 15 bp, Homo sapiens
ttttgaagggaggac

SEQ ID NO: 2047513 - DNA, 15 bp, Homo sapiens
tttgaagggaggacg

SEQ ID NO: 2047514 - DNA, 15 bp, Homo sapiens
ttgaagggaggacgg

SEQ ID NO: 2047515 - DNA, 15 bp, Homo sapiens
tgaagggaggacggg

SEQ ID NO: 2047516 - DNA, 15 bp, Homo sapiens
gaagggaggacggga

SEQ ID NO: 2047517 - DNA, 15 bp, Homo sapiens
aagggaggacgggag

SEQ ID NO: 2047518 - DNA, 15 bp, Homo sapiens
agggaggacgggagc

SEQ ID NO: 2047519 - DNA, 15 bp, Homo sapiens
gggaggacgggagct

SEQ ID NO: 2047520 - DNA, 15 bp, Homo sapiens
ggaggacgggagctg

SEQ ID NO: 2047521 - DNA, 15 bp, Homo sapiens
gaggacgggagctgg

SEQ ID NO: 2047522 - DNA, 15 bp, Homo sapiens
aggacgggagctggg

SEQ ID NO: 2047523 - DNA, 15 bp, Homo sapiens
ggacgggagctgggg

SEQ ID NO: 2047524 - DNA, 15 bp, Homo sapiens
gacgggagctgggga

SEQ ID NO: 2047525 - DNA, 15 bp, Homo sapiens
acgggagctggggag

SEQ ID NO: 2047526 - DNA, 15 bp, Homo sapiens
cgggagctggggaga

SEQ ID NO: 2047527 - DNA, 15 bp, Homo sapiens
gggagctggggagag

SEQ ID NO: 2047528 - DNA, 15 bp, Homo sapiens
ggagctggggagagg

SEQ ID NO: 2047529 - DNA, 15 bp, Homo sapiens
gagctggggagagga

SEQ ID NO: 2047530 - DNA, 15 bp, Homo sapiens
agctggggagaggaa

SEQ ID NO: 2047531 - DNA, 15 bp, Homo sapiens
gctggggagaggaaa

SEQ ID NO: 2047532 - DNA, 15 bp, Homo sapiens
ctggggagaggaaag

SEQ ID NO: 2047533 - DNA, 15 bp, Homo sapiens
tggggagaggaaaga

SEQ ID NO: 2047534 - DNA, 15 bp, Homo sapiens
ggggagaggaaagag

SEQ ID NO: 2047535 - DNA, 15 bp, Homo sapiens
gggagaggaaagagt

SEQ ID NO: 2047536 - DNA, 15 bp, Homo sapiens
ggagaggaaagagtc

SEQ ID NO: 2047537 - DNA, 15 bp, Homo sapiens
gagaggaaagagtct

SEQ ID NO: 2047538 - DNA, 15 bp, Homo sapiens
agaggaaagagtctt

SEQ ID NO: 2047539 - DNA, 15 bp, Homo sapiens
gaggaaagagtcttc

SEQ ID NO: 2047540 - DNA, 15 bp, Homo sapiens
aggaaagagtcttca

SEQ ID NO: 2047541 - DNA, 15 bp, Homo sapiens
ggaaagagtcttcaa

SEQ ID NO: 2047542 - DNA, 15 bp, Homo sapiens
gaaagagtcttcaac

SEQ ID NO: 2047543 - DNA, 15 bp, Homo sapiens
aaagagtcttcaaca

SEQ ID NO: 2047544 - DNA, 15 bp, Homo sapiens
aagagtcttcaacat

SEQ ID NO: 2047545 - DNA, 15 bp, Homo sapiens
agagtcttcaacata

SEQ ID NO: 2047546 - DNA, 15 bp, Homo sapiens
gagtcttcaacataa

SEQ ID NO: 2047547 - DNA, 15 bp, Homo sapiens
agtcttcaacataac

SEQ ID NO: 2047548 - DNA, 15 bp, Homo sapiens
gtcttcaacataacc

SEQ ID NO: 2047549 - DNA, 15 bp, Homo sapiens
tcttcaacataaccc

SEQ ID NO: 2047550 - DNA, 15 bp, Homo sapiens
cttcaacataaccca

SEQ ID NO: 2047551 - DNA, 15 bp, Homo sapiens
ttcaacataacccac

SEQ ID NO: 2047552 - DNA, 15 bp, Homo sapiens
tcaacataacccact

SEQ ID NO: 2047553 - DNA, 15 bp, Homo sapiens
caacataacccactt

SEQ ID NO: 2047554 - DNA, 15 bp, Homo sapiens
aacataacccacttg

SEQ ID NO: 2047555 - DNA, 15 bp, Homo sapiens
acataacccacttgt

SEQ ID NO: 2047556 - DNA, 15 bp, Homo sapiens
cataacccacttgtc

SEQ ID NO: 2047557 - DNA, 15 bp, Homo sapiens
ataacccacttgtca

SEQ ID NO: 2047558 - DNA, 15 bp, Homo sapiens
taacccacttgtcac

SEQ ID NO: 2047559 - DNA, 15 bp, Homo sapiens
aacccacttgtcact

SEQ ID NO: 2047560 - DNA, 15 bp, Homo sapiens
acccacttgtcactg

SEQ ID NO: 2047561 - DNA, 15 bp, Homo sapiens
cccacttgtcactga

SEQ ID NO: 2047562 - DNA, 15 bp, Homo sapiens
ccacttgtcactgac

SEQ ID NO: 2047563 - DNA, 15 bp, Homo sapiens
cacttgtcactgaca

SEQ ID NO: 2047564 - DNA, 15 bp, Homo sapiens
acttgtcactgacac

SEQ ID NO: 2047565 - DNA, 15 bp, Homo sapiens
cttgtcactgacaca

SEQ ID NO: 2047566 - DNA, 15 bp, Homo sapiens
ttgtcactgacacaa

SEQ ID NO: 2047567 - DNA, 15 bp, Homo sapiens
tgtcactgacacaaa

SEQ ID NO: 2047568 - DNA, 15 bp, Homo sapiens
gtcactgacacaaag

SEQ ID NO: 2047569 - DNA, 15 bp, Homo sapiens
tcactgacacaaagg

SEQ ID NO: 2047570 - DNA, 15 bp, Homo sapiens
cactgacacaaagga

SEQ ID NO: 2047571 - DNA, 15 bp, Homo sapiens
actgacacaaaggaa

SEQ ID NO: 2047572 - DNA, 15 bp, Homo sapiens
ctgacacaaaggaag

SEQ ID NO: 2047573 - DNA, 15 bp, Homo sapiens
tgacacaaaggaagt

SEQ ID NO: 2047574 - DNA, 15 bp, Homo sapiens
gacacaaaggaagtg

SEQ ID NO: 2047575 - DNA, 15 bp, Homo sapiens
acacaaaggaagtgc

SEQ ID NO: 2047576 - DNA, 15 bp, Homo sapiens
cacaaaggaagtgcc

SEQ ID NO: 2047577 - DNA, 15 bp, Homo sapiens
acaaaggaagtgccc

SEQ ID NO: 2047578 - DNA, 15 bp, Homo sapiens
caaaggaagtgcccc

SEQ ID NO: 2047579 - DNA, 15 bp, Homo sapiens
aaaggaagtgccccc

SEQ ID NO: 2047580 - DNA, 15 bp, Homo sapiens
aaggaagtgccccct

SEQ ID NO: 2047581 - DNA, 15 bp, Homo sapiens
aggaagtgccccctc

SEQ ID NO: 2047582 - DNA, 15 bp, Homo sapiens
ggaagtgccccctcc

SEQ ID NO: 2047583 - DNA, 15 bp, Homo sapiens
gaagtgccccctccc

SEQ ID NO: 2047584 - DNA, 15 bp, Homo sapiens
aagtgccccctcccc

SEQ ID NO: 2047585 - DNA, 15 bp, Homo sapiens
agtgccccctccccg

SEQ ID NO: 2047586 - DNA, 15 bp, Homo sapiens
gtgccccctccccgg

SEQ ID NO: 2047587 - DNA, 15 bp, Homo sapiens
tgccccctccccggc

SEQ ID NO: 2047588 - DNA, 15 bp, Homo sapiens
gccccctccccggca

SEQ ID NO: 2047589 - DNA, 15 bp, Homo sapiens
ccccctccccggcac

SEQ ID NO: 2047590 - DNA, 15 bp, Homo sapiens
cccctccccggcacc

SEQ ID NO: 2047591 - DNA, 15 bp, Homo sapiens
ccctccccggcaccc

SEQ ID NO: 2047592 - DNA, 15 bp, Homo sapiens
cctccccggcaccct

SEQ ID NO: 2047593 - DNA, 15 bp, Homo sapiens
ctccccggcaccctc

SEQ ID NO: 2047594 - DNA, 15 bp, Homo sapiens
tccccggcaccctct

SEQ ID NO: 2047595 - DNA, 15 bp, Homo sapiens
ccccggcaccctctg

SEQ ID NO: 2047596 - DNA, 15 bp, Homo sapiens
cccggcaccctctgg

SEQ ID NO: 2047597 - DNA, 15 bp, Homo sapiens
ccggcaccctctggc

SEQ ID NO: 2047598 - DNA, 15 bp, Homo sapiens
cggcaccctctggcc

SEQ ID NO: 2047599 - DNA, 15 bp, Homo sapiens
ggcaccctctggccg

SEQ ID NO: 2047600 - DNA, 15 bp, Homo sapiens
gcaccctctggccgc

SEQ ID NO: 2047601 - DNA, 15 bp, Homo sapiens
caccctctggccgcc

SEQ ID NO: 2047602 - DNA, 15 bp, Homo sapiens
accctctggccgcct

SEQ ID NO: 2047603 - DNA, 15 bp, Homo sapiens
ccctctggccgccta

SEQ ID NO: 2047604 - DNA, 15 bp, Homo sapiens
cctctggccgcctag

SEQ ID NO: 2047605 - DNA, 15 bp, Homo sapiens
ctctggccgcctagg

SEQ ID NO: 2047606 - DNA, 15 bp, Homo sapiens
tctggccgcctaggc

SEQ ID NO: 2047607 - DNA, 15 bp, Homo sapiens
ctggccgcctaggct

SEQ ID NO: 2047608 - DNA, 15 bp, Homo sapiens
tggccgcctaggctc

SEQ ID NO: 2047609 - DNA, 15 bp, Homo sapiens
ggccgcctaggctca

SEQ ID NO: 2047610 - DNA, 15 bp, Homo sapiens
gccgcctaggctcag

SEQ ID NO: 2047611 - DNA, 15 bp, Homo sapiens
ccgcctaggctcagc

SEQ ID NO: 2047612 - DNA, 15 bp, Homo sapiens
cgcctaggctcagcg

SEQ ID NO: 2047613 - DNA, 15 bp, Homo sapiens
gcctaggctcagcgg

SEQ ID NO: 2047614 - DNA, 15 bp, Homo sapiens
cctaggctcagcggc

SEQ ID NO: 2047615 - DNA, 15 bp, Homo sapiens
ctaggctcagcggcg

SEQ ID NO: 2047616 - DNA, 15 bp, Homo sapiens
taggctcagcggcga

SEQ ID NO: 2047617 - DNA, 15 bp, Homo sapiens
aggctcagcggcgac

SEQ ID NO: 2047618 - DNA, 15 bp, Homo sapiens
ggctcagcggcgacc

SEQ ID NO: 2047619 - DNA, 15 bp, Homo sapiens
gctcagcggcgaccg

SEQ ID NO: 2047620 - DNA, 15 bp, Homo sapiens
ctcagcggcgaccgc

SEQ ID NO: 2047621 - DNA, 15 bp, Homo sapiens
tcagcggcgaccgcc

SEQ ID NO: 2047622 - DNA, 15 bp, Homo sapiens
cagcggcgaccgccc

SEQ ID NO: 2047623 - DNA, 15 bp, Homo sapiens
agcggcgaccgccct

SEQ ID NO: 2047624 - DNA, 15 bp, Homo sapiens
gcggcgaccgccctc

SEQ ID NO: 2047625 - DNA, 15 bp, Homo sapiens
cggcgaccgccctcc

SEQ ID NO: 2047626 - DNA, 15 bp, Homo sapiens
ggcgaccgccctccg

SEQ ID NO: 2047627 - DNA, 15 bp, Homo sapiens
gcgaccgccctccgc

SEQ ID NO: 2047628 - DNA, 15 bp, Homo sapiens
cgaccgccctccgcg

SEQ ID NO: 2047629 - DNA, 15 bp, Homo sapiens
gaccgccctccgcga

SEQ ID NO: 2047630 - DNA, 15 bp, Homo sapiens
accgccctccgcgaa

SEQ ID NO: 2047631 - DNA, 15 bp, Homo sapiens
ccgccctccgcgaaa

SEQ ID NO: 2047632 - DNA, 15 bp, Homo sapiens
cgccctccgcgaaaa

SEQ ID NO: 2047633 - DNA, 15 bp, Homo sapiens
gccctccgcgaaaat

SEQ ID NO: 2047634 - DNA, 15 bp, Homo sapiens
ccctccgcgaaaata

SEQ ID NO: 2047635 - DNA, 15 bp, Homo sapiens
cctccgcgaaaatag

SEQ ID NO: 2047636 - DNA, 15 bp, Homo sapiens
ctccgcgaaaatagt

SEQ ID NO: 2047637 - DNA, 15 bp, Homo sapiens
tccgcgaaaatagtt

SEQ ID NO: 2047638 - DNA, 15 bp, Homo sapiens
ccgcgaaaatagttt

SEQ ID NO: 2047639 - DNA, 15 bp, Homo sapiens
cgcgaaaatagtttg

SEQ ID NO: 2047640 - DNA, 15 bp, Homo sapiens
gcgaaaatagtttgt

SEQ ID NO: 2047641 - DNA, 15 bp, Homo sapiens
cgaaaatagtttgtt

SEQ ID NO: 2047642 - DNA, 15 bp, Homo sapiens
gaaaatagtttgttt

SEQ ID NO: 2047643 - DNA, 15 bp, Homo sapiens
aaaatagtttgttta

SEQ ID NO: 2047644 - DNA, 15 bp, Homo sapiens
aaatagtttgtttaa

SEQ ID NO: 2047645 - DNA, 15 bp, Homo sapiens
aatagtttgtttaat

SEQ ID NO: 2047646 - DNA, 15 bp, Homo sapiens
atagtttgtttaatg

SEQ ID NO: 2047647 - DNA, 15 bp, Homo sapiens
tagtttgtttaatgt

SEQ ID NO: 2047648 - DNA, 15 bp, Homo sapiens
agtttgtttaatgtg

SEQ ID NO: 2047649 - DNA, 15 bp, Homo sapiens
gtttgtttaatgtga

SEQ ID NO: 2047650 - DNA, 15 bp, Homo sapiens
tttgtttaatgtgaa

SEQ ID NO: 2047651 - DNA, 15 bp, Homo sapiens
ttgtttaatgtgaac

SEQ ID NO: 2047652 - DNA, 15 bp, Homo sapiens
tgtttaatgtgaact

SEQ ID NO: 2047653 - DNA, 15 bp, Homo sapiens
gtttaatgtgaactt

SEQ ID NO: 2047654 - DNA, 15 bp, Homo sapiens
tttaatgtgaacttg

SEQ ID NO: 2047655 - DNA, 15 bp, Homo sapiens
ttaatgtgaacttgt

SEQ ID NO: 2047656 - DNA, 15 bp, Homo sapiens
taatgtgaacttgta

SEQ ID NO: 2047657 - DNA, 15 bp, Homo sapiens
aatgtgaacttgtag

SEQ ID NO: 2047658 - DNA, 15 bp, Homo sapiens
atgtgaacttgtagc

SEQ ID NO: 2047659 - DNA, 15 bp, Homo sapiens
tgtgaacttgtagct

SEQ ID NO: 2047660 - DNA, 15 bp, Homo sapiens
gtgaacttgtagctg

SEQ ID NO: 2047661 - DNA, 15 bp, Homo sapiens
tgaacttgtagctgt

SEQ ID NO: 2047662 - DNA, 15 bp, Homo sapiens
gaacttgtagctgta

SEQ ID NO: 2047663 - DNA, 15 bp, Homo sapiens
aacttgtagctgtaa

SEQ ID NO: 2047664 - DNA, 15 bp, Homo sapiens
acttgtagctgtaaa

SEQ ID NO: 2047665 - DNA, 15 bp, Homo sapiens
cttgtagctgtaaaa

SEQ ID NO: 2047666 - DNA, 15 bp, Homo sapiens
ttgtagctgtaaaac

SEQ ID NO: 2047667 - DNA, 15 bp, Homo sapiens
tgtagctgtaaaacg

SEQ ID NO: 2047668 - DNA, 15 bp, Homo sapiens
gtagctgtaaaacgc

SEQ ID NO: 2047669 - DNA, 15 bp, Homo sapiens
tagctgtaaaacgct

SEQ ID NO: 2047670 - DNA, 15 bp, Homo sapiens
agctgtaaaacgctg

SEQ ID NO: 2047671 - DNA, 15 bp, Homo sapiens
gctgtaaaacgctgt

SEQ ID NO: 2047672 - DNA, 15 bp, Homo sapiens
ctgtaaaacgctgtc

SEQ ID NO: 2047673 - DNA, 15 bp, Homo sapiens
tgtaaaacgctgtca

SEQ ID NO: 2047674 - DNA, 15 bp, Homo sapiens
gtaaaacgctgtcaa

SEQ ID NO: 2047675 - DNA, 15 bp, Homo sapiens
taaaacgctgtcaaa

SEQ ID NO: 2047676 - DNA, 15 bp, Homo sapiens
aaaacgctgtcaaaa

SEQ ID NO: 2047677 - DNA, 15 bp, Homo sapiens
aaacgctgtcaaaag

SEQ ID NO: 2047678 - DNA, 15 bp, Homo sapiens
aacgctgtcaaaagt

SEQ ID NO: 2047679 - DNA, 15 bp, Homo sapiens
acgctgtcaaaagtt

SEQ ID NO: 2047680 - DNA, 15 bp, Homo sapiens
cgctgtcaaaagttg

SEQ ID NO: 2047681 - DNA, 15 bp, Homo sapiens
gctgtcaaaagttgg

SEQ ID NO: 2047682 - DNA, 15 bp, Homo sapiens
ctgtcaaaagttgga

SEQ ID NO: 2047683 - DNA, 15 bp, Homo sapiens
tgtcaaaagttggac

SEQ ID NO: 2047684 - DNA, 15 bp, Homo sapiens
gtcaaaagttggact

SEQ ID NO: 2047685 - DNA, 15 bp, Homo sapiens
tcaaaagttggacta

SEQ ID NO: 2047686 - DNA, 15 bp, Homo sapiens
caaaagttggactaa

SEQ ID NO: 2047687 - DNA, 15 bp, Homo sapiens
aaaagttggactaaa

SEQ ID NO: 2047688 - DNA, 15 bp, Homo sapiens
aaagttggactaaat

SEQ ID NO: 2047689 - DNA, 15 bp, Homo sapiens
agttggactaaatgc

SEQ ID NO: 2047690 - DNA, 15 bp, Homo sapiens
gttggactaaatgcc

SEQ ID NO: 2047691 - DNA, 15 bp, Homo sapiens
ttggactaaatgcct

SEQ ID NO: 2047692 - DNA, 15 bp, Homo sapiens
tggactaaatgccta

SEQ ID NO: 2047693 - DNA, 15 bp, Homo sapiens
ggactaaatgcctag

SEQ ID NO: 2047694 - DNA, 15 bp, Homo sapiens
gactaaatgcctagt

SEQ ID NO: 2047695 - DNA, 15 bp, Homo sapiens
actaaatgcctagtt

SEQ ID NO: 2047696 - DNA, 15 bp, Homo sapiens
ctaaatgcctagttt

SEQ ID NO: 2047697 - DNA, 15 bp, Homo sapiens
taaatgcctagtttt

SEQ ID NO: 2047698 - DNA, 15 bp, Homo sapiens
aaatgcctagttttt

SEQ ID NO: 2047699 - DNA, 15 bp, Homo sapiens
aatgcctagttttta

SEQ ID NO: 2047700 - DNA, 15 bp, Homo sapiens
atgcctagtttttag

SEQ ID NO: 2047701 - DNA, 15 bp, Homo sapiens
tgcctagtttttagt

SEQ ID NO: 2047702 - DNA, 15 bp, Homo sapiens
gcctagtttttagta

SEQ ID NO: 2047703 - DNA, 15 bp, Homo sapiens
cctagtttttagtaa

SEQ ID NO: 2047704 - DNA, 15 bp, Homo sapiens
ctagtttttagtaat

SEQ ID NO: 2047705 - DNA, 15 bp, Homo sapiens
tagtttttagtaatc

SEQ ID NO: 2047706 - DNA, 15 bp, Homo sapiens
agtttttagtaatct

SEQ ID NO: 2047707 - DNA, 15 bp, Homo sapiens
gtttttagtaatctg

SEQ ID NO: 2047708 - DNA, 15 bp, Homo sapiens
tttttagtaatctgt

SEQ ID NO: 2047709 - DNA, 15 bp, Homo sapiens
ttttagtaatctgta

SEQ ID NO: 2047710 - DNA, 15 bp, Homo sapiens
tttagtaatctgtac

SEQ ID NO: 2047711 - DNA, 15 bp, Homo sapiens
ttagtaatctgtaca

SEQ ID NO: 2047712 - DNA, 15 bp, Homo sapiens
tagtaatctgtacat

SEQ ID NO: 2047713 - DNA, 15 bp, Homo sapiens
agtaatctgtacatt

SEQ ID NO: 2047714 - DNA, 15 bp, Homo sapiens
gtaatctgtacattt

SEQ ID NO: 2047715 - DNA, 15 bp, Homo sapiens
taatctgtacatttt

SEQ ID NO: 2047716 - DNA, 15 bp, Homo sapiens
aatctgtacattttg

SEQ ID NO: 2047717 - DNA, 15 bp, Homo sapiens
atctgtacattttgt

SEQ ID NO: 2047718 - DNA, 15 bp, Homo sapiens
tctgtacattttgtt

SEQ ID NO: 2047719 - DNA, 15 bp, Homo sapiens
ctgtacattttgttg

SEQ ID NO: 2047720 - DNA, 15 bp, Homo sapiens
tgtacattttgttgt

SEQ ID NO: 2047721 - DNA, 15 bp, Homo sapiens
gtacattttgttgta

SEQ ID NO: 2047722 - DNA, 15 bp, Homo sapiens
tacattttgttgtaa

SEQ ID NO: 2047723 - DNA, 15 bp, Homo sapiens
acattttgttgtaaa

SEQ ID NO: 2047724 - DNA, 15 bp, Homo sapiens
cattttgttgtaaaa

SEQ ID NO: 2047725 - DNA, 15 bp, Homo sapiens
attttgttgtaaaaa

SEQ ID NO: 2047726 - DNA, 15 bp, Homo sapiens
ttttgttgtaaaaag

SEQ ID NO: 2047727 - DNA, 15 bp, Homo sapiens
tttgttgtaaaaaga

SEQ ID NO: 2047728 - DNA, 15 bp, Homo sapiens
ttgttgtaaaaagaa

SEQ ID NO: 2047729 - DNA, 15 bp, Homo sapiens
tgttgtaaaaagaaa

SEQ ID NO: 2047730 - DNA, 15 bp, Homo sapiens
gttgtaaaaagaaaa

SEQ ID NO: 2047731 - DNA, 15 bp, Homo sapiens
ttgtaaaaagaaaaa

SEQ ID NO: 2047732 - DNA, 15 bp, Homo sapiens
tgtaaaaagaaaaac

SEQ ID NO: 2047733 - DNA, 15 bp, Homo sapiens
gtaaaaagaaaaacc

SEQ ID NO: 2047734 - DNA, 15 bp, Homo sapiens
taaaaagaaaaacca

SEQ ID NO: 2047735 - DNA, 15 bp, Homo sapiens
aaaaagaaaaaccac

SEQ ID NO: 2047736 - DNA, 15 bp, Homo sapiens
aaaagaaaaaccact

SEQ ID NO: 2047737 - DNA, 15 bp, Homo sapiens
aaagaaaaaccactc

SEQ ID NO: 2047738 - DNA, 15 bp, Homo sapiens
aagaaaaaccactcc

SEQ ID NO: 2047739 - DNA, 15 bp, Homo sapiens
agaaaaaccactccc

SEQ ID NO: 2047740 - DNA, 15 bp, Homo sapiens
gaaaaaccactccca

SEQ ID NO: 2047741 - DNA, 15 bp, Homo sapiens
aaaaaccactcccag

SEQ ID NO: 2047742 - DNA, 15 bp, Homo sapiens
aaaaccactcccagt

SEQ ID NO: 2047743 - DNA, 15 bp, Homo sapiens
aaaccactcccagtc

SEQ ID NO: 2047744 - DNA, 15 bp, Homo sapiens
aaccactcccagtcc

SEQ ID NO: 2047745 - DNA, 15 bp, Homo sapiens
accactcccagtccc

SEQ ID NO: 2047746 - DNA, 15 bp, Homo sapiens
ccactcccagtcccc

SEQ ID NO: 2047747 - DNA, 15 bp, Homo sapiens
cactcccagtcccca

SEQ ID NO: 2047748 - DNA, 15 bp, Homo sapiens
actcccagtccccag

SEQ ID NO: 2047749 - DNA, 15 bp, Homo sapiens
ctcccagtccccagc

SEQ ID NO: 2047750 - DNA, 15 bp, Homo sapiens
tcccagtccccagcc

SEQ ID NO: 2047751 - DNA, 15 bp, Homo sapiens
cccagtccccagccc

SEQ ID NO: 2047752 - DNA, 15 bp, Homo sapiens
ccagtccccagccct

SEQ ID NO: 2047753 - DNA, 15 bp, Homo sapiens
cagtccccagccctt

SEQ ID NO: 2047754 - DNA, 15 bp, Homo sapiens
agtccccagcccttc

SEQ ID NO: 2047755 - DNA, 15 bp, Homo sapiens
gtccccagcccttca

SEQ ID NO: 2047756 - DNA, 15 bp, Homo sapiens
tccccagcccttcac

SEQ ID NO: 2047757 - DNA, 15 bp, Homo sapiens
ccccagcccttcaca

SEQ ID NO: 2047758 - DNA, 15 bp, Homo sapiens
cccagcccttcacat

SEQ ID NO: 2047759 - DNA, 15 bp, Homo sapiens
ccagcccttcacatt

SEQ ID NO: 2047760 - DNA, 15 bp, Homo sapiens
cagcccttcacattt

SEQ ID NO: 2047761 - DNA, 15 bp, Homo sapiens
agcccttcacatttt

SEQ ID NO: 2047762 - DNA, 15 bp, Homo sapiens
gcccttcacattttt

SEQ ID NO: 2047763 - DNA, 15 bp, Homo sapiens
cccttcacatttttt

SEQ ID NO: 2047764 - DNA, 15 bp, Homo sapiens
ccttcacatttttta

SEQ ID NO: 2047765 - DNA, 15 bp, Homo sapiens
cttcacattttttat

SEQ ID NO: 2047766 - DNA, 15 bp, Homo sapiens
ttcacattttttatg

SEQ ID NO: 2047767 - DNA, 15 bp, Homo sapiens
tcacattttttatgg

SEQ ID NO: 2047768 - DNA, 15 bp, Homo sapiens
cacattttttatggg

SEQ ID NO: 2047769 - DNA, 15 bp, Homo sapiens
acattttttatgggc

SEQ ID NO: 2047770 - DNA, 15 bp, Homo sapiens
cattttttatgggca

SEQ ID NO: 2047771 - DNA, 15 bp, Homo sapiens
attttttatgggcat

SEQ ID NO: 2047772 - DNA, 15 bp, Homo sapiens
ttttttatgggcatt

SEQ ID NO: 2047773 - DNA, 15 bp, Homo sapiens
tttttatgggcattg

SEQ ID NO: 2047774 - DNA, 15 bp, Homo sapiens
ttttatgggcattga

SEQ ID NO: 2047775 - DNA, 15 bp, Homo sapiens
tttatgggcattgac

SEQ ID NO: 2047776 - DNA, 15 bp, Homo sapiens
ttatgggcattgaca

SEQ ID NO: 2047777 - DNA, 15 bp, Homo sapiens
tatgggcattgacaa

SEQ ID NO: 2047778 - DNA, 15 bp, Homo sapiens
atgggcattgacaaa

SEQ ID NO: 2047779 - DNA, 15 bp, Homo sapiens
tgggcattgacaaat

SEQ ID NO: 2047780 - DNA, 15 bp, Homo sapiens
gggcattgacaaatc

SEQ ID NO: 2047781 - DNA, 15 bp, Homo sapiens
ggcattgacaaatct

SEQ ID NO: 2047782 - DNA, 15 bp, Homo sapiens
gcattgacaaatctg

SEQ ID NO: 2047783 - DNA, 15 bp, Homo sapiens
cattgacaaatctgt

SEQ ID NO: 2047784 - DNA, 15 bp, Homo sapiens
attgacaaatctgtg

SEQ ID NO: 2047785 - DNA, 15 bp, Homo sapiens
ttgacaaatctgtgt

SEQ ID NO: 2047786 - DNA, 15 bp, Homo sapiens
tgacaaatctgtgta

SEQ ID NO: 2047787 - DNA, 15 bp, Homo sapiens
gacaaatctgtgtat

SEQ ID NO: 2047788 - DNA, 15 bp, Homo sapiens
acaaatctgtgtata

SEQ ID NO: 2047789 - DNA, 15 bp, Homo sapiens
caaatctgtgtatat

SEQ ID NO: 2047790 - DNA, 15 bp, Homo sapiens
aaatctgtgtatatt

SEQ ID NO: 2047791 - DNA, 15 bp, Homo sapiens
aatctgtgtatatta

SEQ ID NO: 2047792 - DNA, 15 bp, Homo sapiens
atctgtgtatattat

SEQ ID NO: 2047793 - DNA, 15 bp, Homo sapiens
tctgtgtatattatt

SEQ ID NO: 2047794 - DNA, 15 bp, Homo sapiens
ctgtgtatattattt

SEQ ID NO: 2047795 - DNA, 15 bp, Homo sapiens
tgtgtatattatttg

SEQ ID NO: 2047796 - DNA, 15 bp, Homo sapiens
gtgtatattatttgg

SEQ ID NO: 2047797 - DNA, 15 bp, Homo sapiens
tgtatattatttggc

SEQ ID NO: 2047798 - DNA, 15 bp, Homo sapiens
gtatattatttggca

SEQ ID NO: 2047799 - DNA, 15 bp, Homo sapiens
tatattatttggcag

SEQ ID NO: 2047800 - DNA, 15 bp, Homo sapiens
atattatttggcagt

SEQ ID NO: 2047801 - DNA, 15 bp, Homo sapiens
tattatttggcagtt

SEQ ID NO: 2047802 - DNA, 15 bp, Homo sapiens
attatttggcagttt

SEQ ID NO: 2047803 - DNA, 15 bp, Homo sapiens
ttatttggcagtttg

SEQ ID NO: 2047804 - DNA, 15 bp, Homo sapiens
tatttggcagtttgg

SEQ ID NO: 2047805 - DNA, 15 bp, Homo sapiens
atttggcagtttggt

SEQ ID NO: 2047806 - DNA, 15 bp, Homo sapiens
tttggcagtttggta

SEQ ID NO: 2047807 - DNA, 15 bp, Homo sapiens
ttggcagtttggtat

SEQ ID NO: 2047808 - DNA, 15 bp, Homo sapiens
tggcagtttggtatt

SEQ ID NO: 2047809 - DNA, 15 bp, Homo sapiens
ggcagtttggtattt

SEQ ID NO: 2047810 - DNA, 15 bp, Homo sapiens
gcagtttggtatttg

SEQ ID NO: 2047811 - DNA, 15 bp, Homo sapiens
cagtttggtatttgc

SEQ ID NO: 2047812 - DNA, 15 bp, Homo sapiens
agtttggtatttgcg

SEQ ID NO: 2047813 - DNA, 15 bp, Homo sapiens
gtttggtatttgcgg

SEQ ID NO: 2047814 - DNA, 15 bp, Homo sapiens
tttggtatttgcggc

SEQ ID NO: 2047815 - DNA, 15 bp, Homo sapiens
ttggtatttgcggcg

SEQ ID NO: 2047816 - DNA, 15 bp, Homo sapiens
tggtatttgcggcgt

SEQ ID NO: 2047817 - DNA, 15 bp, Homo sapiens
ggtatttgcggcgtc

SEQ ID NO: 2047818 - DNA, 15 bp, Homo sapiens
gtatttgcggcgtca

SEQ ID NO: 2047819 - DNA, 15 bp, Homo sapiens
tatttgcggcgtcag

SEQ ID NO: 2047820 - DNA, 15 bp, Homo sapiens
atttgcggcgtcagt

SEQ ID NO: 2047821 - DNA, 15 bp, Homo sapiens
tttgcggcgtcagtc

SEQ ID NO: 2047822 - DNA, 15 bp, Homo sapiens
ttgcggcgtcagtct

SEQ ID NO: 2047823 - DNA, 15 bp, Homo sapiens
tgcggcgtcagtctt

SEQ ID NO: 2047824 - DNA, 15 bp, Homo sapiens
gcggcgtcagtcttt

SEQ ID NO: 2047825 - DNA, 15 bp, Homo sapiens
cggcgtcagtctttt

SEQ ID NO: 2047826 - DNA, 15 bp, Homo sapiens
ggcgtcagtcttttt

SEQ ID NO: 2047827 - DNA, 15 bp, Homo sapiens
gcgtcagtctttttc

SEQ ID NO: 2047828 - DNA, 15 bp, Homo sapiens
cgtcagtctttttct

SEQ ID NO: 2047829 - DNA, 15 bp, Homo sapiens
gtcagtctttttctg

SEQ ID NO: 2047830 - DNA, 15 bp, Homo sapiens
tcagtctttttctgt

SEQ ID NO: 2047831 - DNA, 15 bp, Homo sapiens
cagtctttttctgtt

SEQ ID NO: 2047832 - DNA, 15 bp, Homo sapiens
agtctttttctgttg

SEQ ID NO: 2047833 - DNA, 15 bp, Homo sapiens
gtctttttctgttgt

SEQ ID NO: 2047834 - DNA, 15 bp, Homo sapiens
tctttttctgttgta

SEQ ID NO: 2047835 - DNA, 15 bp, Homo sapiens
ctttttctgttgtaa

SEQ ID NO: 2047836 - DNA, 15 bp, Homo sapiens
tttttctgttgtaac

SEQ ID NO: 2047837 - DNA, 15 bp, Homo sapiens
ttttctgttgtaact

SEQ ID NO: 2047838 - DNA, 15 bp, Homo sapiens
tttctgttgtaactt

SEQ ID NO: 2047839 - DNA, 15 bp, Homo sapiens
ttctgttgtaactta

SEQ ID NO: 2047840 - DNA, 15 bp, Homo sapiens
tctgttgtaacttat

SEQ ID NO: 2047841 - DNA, 15 bp, Homo sapiens
ctgttgtaacttatg

SEQ ID NO: 2047842 - DNA, 15 bp, Homo sapiens
tgttgtaacttatgt

SEQ ID NO: 2047843 - DNA, 15 bp, Homo sapiens
gttgtaacttatgta

SEQ ID NO: 2047844 - DNA, 15 bp, Homo sapiens
ttgtaacttatgtag

SEQ ID NO: 2047845 - DNA, 15 bp, Homo sapiens
tgtaacttatgtaga

SEQ ID NO: 2047846 - DNA, 15 bp, Homo sapiens
gtaacttatgtagat

SEQ ID NO: 2047847 - DNA, 15 bp, Homo sapiens
taacttatgtagata

SEQ ID NO: 2047848 - DNA, 15 bp, Homo sapiens
aacttatgtagatat

SEQ ID NO: 2047849 - DNA, 15 bp, Homo sapiens
acttatgtagatatt

SEQ ID NO: 2047850 - DNA, 15 bp, Homo sapiens
cttatgtagatattt

SEQ ID NO: 2047851 - DNA, 15 bp, Homo sapiens
ttatgtagatatttg

SEQ ID NO: 2047852 - DNA, 15 bp, Homo sapiens
tatgtagatatttgg

SEQ ID NO: 2047853 - DNA, 15 bp, Homo sapiens
atgtagatatttggc

SEQ ID NO: 2047854 - DNA, 15 bp, Homo sapiens
tgtagatatttggct

SEQ ID NO: 2047855 - DNA, 15 bp, Homo sapiens
gtagatatttggctt

SEQ ID NO: 2047856 - DNA, 15 bp, Homo sapiens
tagatatttggctta

SEQ ID NO: 2047857 - DNA, 15 bp, Homo sapiens
agatatttggcttaa

SEQ ID NO: 2047858 - DNA, 15 bp, Homo sapiens
gatatttggcttaaa

SEQ ID NO: 2047859 - DNA, 15 bp, Homo sapiens
atatttggcttaaat

SEQ ID NO: 2047860 - DNA, 15 bp, Homo sapiens
tatttggcttaaata

SEQ ID NO: 2047861 - DNA, 15 bp, Homo sapiens
atttggcttaaatat

SEQ ID NO: 2047862 - DNA, 15 bp, Homo sapiens
tttggcttaaatata

SEQ ID NO: 2047863 - DNA, 15 bp, Homo sapiens
ttggcttaaatatag

SEQ ID NO: 2047864 - DNA, 15 bp, Homo sapiens
tggcttaaatatagt

SEQ ID NO: 2047865 - DNA, 15 bp, Homo sapiens
ggcttaaatatagtt

SEQ ID NO: 2047866 - DNA, 15 bp, Homo sapiens
gcttaaatatagttc

SEQ ID NO: 2047867 - DNA, 15 bp, Homo sapiens
cttaaatatagttcc

SEQ ID NO: 2047868 - DNA, 15 bp, Homo sapiens
ttaaatatagttcct

SEQ ID NO: 2047869 - DNA, 15 bp, Homo sapiens
taaatatagttccta

SEQ ID NO: 2047870 - DNA, 15 bp, Homo sapiens
aaatatagttcctaa

SEQ ID NO: 2047871 - DNA, 15 bp, Homo sapiens
aatatagttcctaag

SEQ ID NO: 2047872 - DNA, 15 bp, Homo sapiens
atatagttcctaaga

SEQ ID NO: 2047873 - DNA, 15 bp, Homo sapiens
tatagttcctaagaa

SEQ ID NO: 2047874 - DNA, 15 bp, Homo sapiens
atagttcctaagaag

SEQ ID NO: 2047875 - DNA, 15 bp, Homo sapiens
tagttcctaagaagc

SEQ ID NO: 2047876 - DNA, 15 bp, Homo sapiens
agttcctaagaagct

SEQ ID NO: 2047877 - DNA, 15 bp, Homo sapiens
gttcctaagaagctt

SEQ ID NO: 2047878 - DNA, 15 bp, Homo sapiens
ttcctaagaagcttc

SEQ ID NO: 2047879 - DNA, 15 bp, Homo sapiens
tcctaagaagcttct

SEQ ID NO: 2047880 - DNA, 15 bp, Homo sapiens
cctaagaagcttcta

SEQ ID NO: 2047881 - DNA, 15 bp, Homo sapiens
ctaagaagcttctaa

SEQ ID NO: 2047882 - DNA, 15 bp, Homo sapiens
taagaagcttctaat

SEQ ID NO: 2047883 - DNA, 15 bp, Homo sapiens
aagaagcttctaata

SEQ ID NO: 2047884 - DNA, 15 bp, Homo sapiens
agaagcttctaataa

SEQ ID NO: 2047885 - DNA, 15 bp, Homo sapiens
gaagcttctaataaa

SEQ ID NO: 2047886 - DNA, 15 bp, Homo sapiens
aagcttctaataaat

SEQ ID NO: 2047887 - DNA, 15 bp, Homo sapiens
agcttctaataaatt

SEQ ID NO: 2047888 - DNA, 15 bp, Homo sapiens
gcttctaataaatta

SEQ ID NO: 2047889 - DNA, 15 bp, Homo sapiens
cttctaataaattat

SEQ ID NO: 2047890 - DNA, 15 bp, Homo sapiens
ttctaataaattata

SEQ ID NO: 2047891 - DNA, 15 bp, Homo sapiens
tctaataaattatac

SEQ ID NO: 2047892 - DNA, 15 bp, Homo sapiens
ctaataaattataca

SEQ ID NO: 2047893 - DNA, 15 bp, Homo sapiens
taataaattatacaa

SEQ ID NO: 2047894 - DNA, 15 bp, Homo sapiens
aataaattatacaaa

SEQ ID NO: 2047895 - DNA, 15 bp, Homo sapiens
ataaattatacaaat

SEQ ID NO: 2047896 - DNA, 15 bp, Homo sapiens
taaattatacaaatt

SEQ ID NO: 2047897 - DNA, 15 bp, Homo sapiens
aaattatacaaatta

SEQ ID NO: 2047898 - DNA, 15 bp, Homo sapiens
aattatacaaattaa

SEQ ID NO: 2047899 - DNA, 15 bp, Homo sapiens
attatacaaattaaa

SEQ ID NO: 2047900 - DNA, 15 bp, Homo sapiens
ttatacaaattaaaa

SEQ ID NO: 2047901 - DNA, 15 bp, Homo sapiens
tatacaaattaaaaa

SEQ ID NO: 2047902 - DNA, 15 bp, Homo sapiens
atacaaattaaaaag

SEQ ID NO: 2047903 - DNA, 15 bp, Homo sapiens
tacaaattaaaaaga

SEQ ID NO: 2047904 - DNA, 15 bp, Homo sapiens
acaaattaaaaagat

SEQ ID NO: 2047905 - DNA, 15 bp, Homo sapiens
caaattaaaaagatt

SEQ ID NO: 2047906 - DNA, 15 bp, Homo sapiens
aaattaaaaagattc

SEQ ID NO: 2047907 - DNA, 15 bp, Homo sapiens
aattaaaaagattct

SEQ ID NO: 2047908 - DNA, 15 bp, Homo sapiens
attaaaaagattctt

SEQ ID NO: 2047909 - DNA, 15 bp, Homo sapiens
ttaaaaagattcttt

SEQ ID NO: 2047910 - DNA, 15 bp, Homo sapiens
taaaaagattctttt

SEQ ID NO: 2047911 - DNA, 15 bp, Homo sapiens
aaaaagattcttttt

SEQ ID NO: 2047912 - DNA, 15 bp, Homo sapiens
aaaagattctttttc

SEQ ID NO: 2047913 - DNA, 15 bp, Homo sapiens
aaagattctttttct

SEQ ID NO: 2047914 - DNA, 15 bp, Homo sapiens
aagattctttttctg

SEQ ID NO: 2047915 - DNA, 15 bp, Homo sapiens
agattctttttctga

SEQ ID NO: 2047916 - DNA, 15 bp, Homo sapiens
gattctttttctgat

SEQ ID NO: 2047917 - DNA, 15 bp, Homo sapiens
attctttttctgatt

SEQ ID NO: 2047918 - DNA, 15 bp, Homo sapiens
ttctttttctgatta

SEQ ID NO: 2047919 - DNA, 15 bp, Homo sapiens
tctttttctgattaa

SEQ ID NO: 2047920 - DNA, 15 bp, Homo sapiens
ctttttctgattaaa

SEQ ID NO: 2047921 - DNA, 15 bp, Homo sapiens
tttttctgattaaaa

SEQ ID NO: 2047922 - DNA, 15 bp, Homo sapiens
ttttctgattaaaac

SEQ ID NO: 2047923 - DNA, 15 bp, Homo sapiens
tttctgattaaaacc

SEQ ID NO: 2047924 - DNA, 15 bp, Homo sapiens
ttctgattaaaaccc

SEQ ID NO: 2047925 - DNA, 15 bp, Homo sapiens
tctgattaaaaccct

SEQ ID NO: 2047926 - DNA, 15 bp, Homo sapiens
ctgattaaaaccctc

SEQ ID NO: 2047927 - DNA, 15 bp, Homo sapiens
tgattaaaaccctcc

SEQ ID NO: 2047928 - DNA, 15 bp, Homo sapiens
gattaaaaccctcct

SEQ ID NO: 2047929 - DNA, 15 bp, Homo sapiens
attaaaaccctcctt

SEQ ID NO: 2047930 - DNA, 15 bp, Homo sapiens
ttaaaaccctccttt

SEQ ID NO: 2047931 - DNA, 15 bp, Homo sapiens
taaaaccctcctttt

SEQ ID NO: 2047932 - DNA, 15 bp, Homo sapiens
aaaaccctccttttt

SEQ ID NO: 2047933 - DNA, 15 bp, Homo sapiens
aaaccctcctttttg

SEQ ID NO: 2047934 - DNA, 15 bp, Homo sapiens
aaccctcctttttgt

SEQ ID NO: 2047935 - DNA, 15 bp, Homo sapiens
accctcctttttgtt

SEQ ID NO: 2047936 - DNA, 15 bp, Homo sapiens
ccctcctttttgttt

SEQ ID NO: 2047937 - DNA, 15 bp, Homo sapiens
cctcctttttgtttt

SEQ ID NO: 2047938 - DNA, 15 bp, Homo sapiens
ctcctttttgttttg

SEQ ID NO: 2047939 - DNA, 15 bp, Homo sapiens
tcctttttgttttgt

SEQ ID NO: 2047940 - DNA, 15 bp, Homo sapiens
cctttttgttttgtt

SEQ ID NO: 2047941 - DNA, 15 bp, Homo sapiens
tttgttttgttttga

SEQ ID NO: 2047942 - DNA, 15 bp, Homo sapiens
ttgttttgttttgat

SEQ ID NO: 2047943 - DNA, 15 bp, Homo sapiens
tgttttgttttgatt

SEQ ID NO: 2047944 - DNA, 15 bp, Homo sapiens
gttttgttttgattt

SEQ ID NO: 2047945 - DNA, 15 bp, Homo sapiens
ttttgttttgatttg

SEQ ID NO: 2047946 - DNA, 15 bp, Homo sapiens
tttgttttgatttgg

SEQ ID NO: 2047947 - DNA, 15 bp, Homo sapiens
ttgttttgatttggc

SEQ ID NO: 2047948 - DNA, 15 bp, Homo sapiens
tgttttgatttggct

SEQ ID NO: 2047949 - DNA, 15 bp, Homo sapiens
gttttgatttggctt

SEQ ID NO: 2047950 - DNA, 15 bp, Homo sapiens
ttttgatttggcttt

SEQ ID NO: 2047951 - DNA, 15 bp, Homo sapiens
tttgatttggcttta

SEQ ID NO: 2047952 - DNA, 15 bp, Homo sapiens
ttgatttggctttaa

SEQ ID NO: 2047953 - DNA, 15 bp, Homo sapiens
tgatttggctttaaa

SEQ ID NO: 2047954 - DNA, 15 bp, Homo sapiens
gatttggctttaaat

SEQ ID NO: 2047955 - DNA, 15 bp, Homo sapiens
atttggctttaaatg

SEQ ID NO: 2047956 - DNA, 15 bp, Homo sapiens
tttggctttaaatgg

SEQ ID NO: 2047957 - DNA, 15 bp, Homo sapiens
ttggctttaaatggc

SEQ ID NO: 2047958 - DNA, 15 bp, Homo sapiens
tggctttaaatggct

SEQ ID NO: 2047959 - DNA, 15 bp, Homo sapiens
ggctttaaatggctt

SEQ ID NO: 2047960 - DNA, 15 bp, Homo sapiens
gctttaaatggcttt

SEQ ID NO: 2047961 - DNA, 15 bp, Homo sapiens
ctttaaatggctttg

SEQ ID NO: 2047962 - DNA, 15 bp, Homo sapiens
tttaaatggctttga

SEQ ID NO: 2047963 - DNA, 15 bp, Homo sapiens
ttaaatggctttgag

SEQ ID NO: 2047964 - DNA, 15 bp, Homo sapiens
taaatggctttgagg

SEQ ID NO: 2047965 - DNA, 15 bp, Homo sapiens
aaatggctttgaggg

SEQ ID NO: 2047966 - DNA, 15 bp, Homo sapiens
aatggctttgagggg

SEQ ID NO: 2047967 - DNA, 15 bp, Homo sapiens
atggctttgaggggc

SEQ ID NO: 2047968 - DNA, 15 bp, Homo sapiens
tggctttgaggggcg

SEQ ID NO: 2047969 - DNA, 15 bp, Homo sapiens
ggctttgaggggcgg

SEQ ID NO: 2047970 - DNA, 15 bp, Homo sapiens
gctttgaggggcggg

SEQ ID NO: 2047971 - DNA, 15 bp, Homo sapiens
ctttgaggggcgggg

SEQ ID NO: 2047972 - DNA, 15 bp, Homo sapiens
tttgaggggcggggg

SEQ ID NO: 2047973 - DNA, 15 bp, Homo sapiens
ttgaggggcgggggc

SEQ ID NO: 2047974 - DNA, 15 bp, Homo sapiens
tgaggggcgggggct

SEQ ID NO: 2047975 - DNA, 15 bp, Homo sapiens
gaggggcgggggctt

SEQ ID NO: 2047976 - DNA, 15 bp, Homo sapiens
aggggcgggggcttg

SEQ ID NO: 2047977 - DNA, 15 bp, Homo sapiens
ggggcgggggcttgg

SEQ ID NO: 2047978 - DNA, 15 bp, Homo sapiens
gggcgggggcttggg

SEQ ID NO: 2047979 - DNA, 15 bp, Homo sapiens
ggcgggggcttggga

SEQ ID NO: 2047980 - DNA, 15 bp, Homo sapiens
gcgggggcttgggag

SEQ ID NO: 2047981 - DNA, 15 bp, Homo sapiens
cgggggcttgggagg

SEQ ID NO: 2047982 - DNA, 15 bp, Homo sapiens
gggggcttgggagga

SEQ ID NO: 2047983 - DNA, 15 bp, Homo sapiens
ggggcttgggaggat

SEQ ID NO: 2047984 - DNA, 15 bp, Homo sapiens
gggcttgggaggatc

SEQ ID NO: 2047985 - DNA, 15 bp, Homo sapiens
ggcttgggaggatct

SEQ ID NO: 2047986 - DNA, 15 bp, Homo sapiens
gcttgggaggatctt

SEQ ID NO: 2047987 - DNA, 15 bp, Homo sapiens
cttgggaggatcttg

SEQ ID NO: 2047988 - DNA, 15 bp, Homo sapiens
ttgggaggatcttgt

SEQ ID NO: 2047989 - DNA, 15 bp, Homo sapiens
tgggaggatcttgtc

SEQ ID NO: 2047990 - DNA, 15 bp, Homo sapiens
gggaggatcttgtct

SEQ ID NO: 2047991 - DNA, 15 bp, Homo sapiens
ggaggatcttgtctt

SEQ ID NO: 2047992 - DNA, 15 bp, Homo sapiens
gaggatcttgtcttt

SEQ ID NO: 2047993 - DNA, 15 bp, Homo sapiens
aggatcttgtctttg

SEQ ID NO: 2047994 - DNA, 15 bp, Homo sapiens
ggatcttgtctttgg

SEQ ID NO: 2047995 - DNA, 15 bp, Homo sapiens
gatcttgtctttggt

SEQ ID NO: 2047996 - DNA, 15 bp, Homo sapiens
atcttgtctttggtc

SEQ ID NO: 2047997 - DNA, 15 bp, Homo sapiens
tcttgtctttggtct

SEQ ID NO: 2047998 - DNA, 15 bp, Homo sapiens
cttgtctttggtctg

SEQ ID NO: 2047999 - DNA, 15 bp, Homo sapiens
ttgtctttggtctga

SEQ ID NO: 2048000 - DNA, 15 bp, Homo sapiens
tgtctttggtctgat

SEQ ID NO: 2048001 - DNA, 15 bp, Homo sapiens
gtctttggtctgatg

SEQ ID NO: 2048002 - DNA, 15 bp, Homo sapiens
tctttggtctgatga

SEQ ID NO: 2048003 - DNA, 15 bp, Homo sapiens
ctttggtctgatgag

SEQ ID NO: 2048004 - DNA, 15 bp, Homo sapiens
tttggtctgatgaga

SEQ ID NO: 2048005 - DNA, 15 bp, Homo sapiens
ttggtctgatgagat

SEQ ID NO: 2048006 - DNA, 15 bp, Homo sapiens
tggtctgatgagatt

SEQ ID NO: 2048007 - DNA, 15 bp, Homo sapiens
ggtctgatgagattc

SEQ ID NO: 2048008 - DNA, 15 bp, Homo sapiens
gtctgatgagattca

SEQ ID NO: 2048009 - DNA, 15 bp, Homo sapiens
tctgatgagattcaa

SEQ ID NO: 2048010 - DNA, 15 bp, Homo sapiens
ctgatgagattcaaa

SEQ ID NO: 2048011 - DNA, 15 bp, Homo sapiens
tgatgagattcaaat

SEQ ID NO: 2048012 - DNA, 15 bp, Homo sapiens
gatgagattcaaatt

SEQ ID NO: 2048013 - DNA, 15 bp, Homo sapiens
atgagattcaaattg

SEQ ID NO: 2048014 - DNA, 15 bp, Homo sapiens
tgagattcaaattgt

SEQ ID NO: 2048015 - DNA, 15 bp, Homo sapiens
gagattcaaattgtt

SEQ ID NO: 2048016 - DNA, 15 bp, Homo sapiens
agattcaaattgttt

SEQ ID NO: 2048017 - DNA, 15 bp, Homo sapiens
gattcaaattgtttg

SEQ ID NO: 2048018 - DNA, 15 bp, Homo sapiens
attcaaattgtttgg

SEQ ID NO: 2048019 - DNA, 15 bp, Homo sapiens
ttcaaattgtttggg

SEQ ID NO: 2048020 - DNA, 15 bp, Homo sapiens
tcaaattgtttgggt

SEQ ID NO: 2048021 - DNA, 15 bp, Homo sapiens
caaattgtttgggtt

SEQ ID NO: 2048022 - DNA, 15 bp, Homo sapiens
aaattgtttgggttt

SEQ ID NO: 2048023 - DNA, 15 bp, Homo sapiens
aattgtttgggtttg

SEQ ID NO: 2048024 - DNA, 15 bp, Homo sapiens
attgtttgggtttga

SEQ ID NO: 2048025 - DNA, 15 bp, Homo sapiens
ttgtttgggtttgag

SEQ ID NO: 2048026 - DNA, 15 bp, Homo sapiens
tgtttgggtttgagc

SEQ ID NO: 2048027 - DNA, 15 bp, Homo sapiens
gtttgggtttgagct

SEQ ID NO: 2048028 - DNA, 15 bp, Homo sapiens
tttgggtttgagctc

SEQ ID NO: 2048029 - DNA, 15 bp, Homo sapiens
ttgggtttgagctca

SEQ ID NO: 2048030 - DNA, 15 bp, Homo sapiens
tgggtttgagctcaa

SEQ ID NO: 2048031 - DNA, 15 bp, Homo sapiens
gggtttgagctcaaa

SEQ ID NO: 2048032 - DNA, 15 bp, Homo sapiens
ggtttgagctcaaag

SEQ ID NO: 2048033 - DNA, 15 bp, Homo sapiens
gtttgagctcaaagg

SEQ ID NO: 2048034 - DNA, 15 bp, Homo sapiens
tttgagctcaaagga

SEQ ID NO: 2048035 - DNA, 15 bp, Homo sapiens
ttgagctcaaaggat

SEQ ID NO: 2048036 - DNA, 15 bp, Homo sapiens
tgagctcaaaggatt

SEQ ID NO: 2048037 - DNA, 15 bp, Homo sapiens
gagctcaaaggattc

SEQ ID NO: 2048038 - DNA, 15 bp, Homo sapiens
agctcaaaggattct

SEQ ID NO: 2048039 - DNA, 15 bp, Homo sapiens
gctcaaaggattctg

SEQ ID NO: 2048040 - DNA, 15 bp, Homo sapiens
ctcaaaggattctga

SEQ ID NO: 2048041 - DNA, 15 bp, Homo sapiens
tcaaaggattctgaa

SEQ ID NO: 2048042 - DNA, 15 bp, Homo sapiens
caaaggattctgaac

SEQ ID NO: 2048043 - DNA, 15 bp, Homo sapiens
aaaggattctgaacc

SEQ ID NO: 2048044 - DNA, 15 bp, Homo sapiens
aaggattctgaaccg

SEQ ID NO: 2048045 - DNA, 15 bp, Homo sapiens
aggattctgaaccgg

SEQ ID NO: 2048046 - DNA, 15 bp, Homo sapiens
ggattctgaaccggt

SEQ ID NO: 2048047 - DNA, 15 bp, Homo sapiens
gattctgaaccggtt

SEQ ID NO: 2048048 - DNA, 15 bp, Homo sapiens
attctgaaccggtta

SEQ ID NO: 2048049 - DNA, 15 bp, Homo sapiens
ttctgaaccggttaa

SEQ ID NO: 2048050 - DNA, 15 bp, Homo sapiens
tctgaaccggttaag

SEQ ID NO: 2048051 - DNA, 15 bp, Homo sapiens
ctgaaccggttaagg

SEQ ID NO: 2048052 - DNA, 15 bp, Homo sapiens
tgaaccggttaagga

SEQ ID NO: 2048053 - DNA, 15 bp, Homo sapiens
gaaccggttaaggag

SEQ ID NO: 2048054 - DNA, 15 bp, Homo sapiens
aaccggttaaggagg

SEQ ID NO: 2048055 - DNA, 15 bp, Homo sapiens
accggttaaggaggt

SEQ ID NO: 2048056 - DNA, 15 bp, Homo sapiens
ccggttaaggaggta

SEQ ID NO: 2048057 - DNA, 15 bp, Homo sapiens
cggttaaggaggtaa

SEQ ID NO: 2048058 - DNA, 15 bp, Homo sapiens
ggttaaggaggtaag

SEQ ID NO: 2048059 - DNA, 15 bp, Homo sapiens
gttaaggaggtaagg

SEQ ID NO: 2048060 - DNA, 15 bp, Homo sapiens
ttaaggaggtaagga

SEQ ID NO: 2048061 - DNA, 15 bp, Homo sapiens
taaggaggtaaggag

SEQ ID NO: 2048062 - DNA, 15 bp, Homo sapiens
aaggaggtaaggagg

SEQ ID NO: 2048063 - DNA, 15 bp, Homo sapiens
aggaggtaaggaggc

SEQ ID NO: 2048064 - DNA, 15 bp, Homo sapiens
ggaggtaaggaggcc

SEQ ID NO: 2048065 - DNA, 15 bp, Homo sapiens
gaggtaaggaggcca

SEQ ID NO: 2048066 - DNA, 15 bp, Homo sapiens
aggtaaggaggccag

SEQ ID NO: 2048067 - DNA, 15 bp, Homo sapiens
ggtaaggaggccagg

SEQ ID NO: 2048068 - DNA, 15 bp, Homo sapiens
gtaaggaggccaggc

SEQ ID NO: 2048069 - DNA, 15 bp, Homo sapiens
taaggaggccaggcc

SEQ ID NO: 2048070 - DNA, 15 bp, Homo sapiens
aaggaggccaggccc

SEQ ID NO: 2048071 - DNA, 15 bp, Homo sapiens
aggaggccaggccca

SEQ ID NO: 2048072 - DNA, 15 bp, Homo sapiens
ggaggccaggcccag

SEQ ID NO: 2048073 - DNA, 15 bp, Homo sapiens
gaggccaggcccaga

SEQ ID NO: 2048074 - DNA, 15 bp, Homo sapiens
aggccaggcccagag

SEQ ID NO: 2048075 - DNA, 15 bp, Homo sapiens
ggccaggcccagagt

SEQ ID NO: 2048076 - DNA, 15 bp, Homo sapiens
ccaggcccagagtcc

SEQ ID NO: 2048077 - DNA, 15 bp, Homo sapiens
caggcccagagtcct

SEQ ID NO: 2048078 - DNA, 15 bp, Homo sapiens
aggcccagagtcctt

SEQ ID NO: 2048079 - DNA, 15 bp, Homo sapiens
ggcccagagtccttg

SEQ ID NO: 2048080 - DNA, 15 bp, Homo sapiens
gcccagagtccttgc

SEQ ID NO: 2048081 - DNA, 15 bp, Homo sapiens
cccagagtccttgcc

SEQ ID NO: 2048082 - DNA, 15 bp, Homo sapiens
ccagagtccttgccc

SEQ ID NO: 2048083 - DNA, 15 bp, Homo sapiens
cagagtccttgcccc

SEQ ID NO: 2048084 - DNA, 15 bp, Homo sapiens
agagtccttgcccca

SEQ ID NO: 2048085 - DNA, 15 bp, Homo sapiens
gagtccttgccccac

SEQ ID NO: 2048086 - DNA, 15 bp, Homo sapiens
agtccttgccccaca

SEQ ID NO: 2048087 - DNA, 15 bp, Homo sapiens
gtccttgccccacag

SEQ ID NO: 2048088 - DNA, 15 bp, Homo sapiens
tccttgccccacagg

SEQ ID NO: 2048089 - DNA, 15 bp, Homo sapiens
ccttgccccacagga

SEQ ID NO: 2048090 - DNA, 15 bp, Homo sapiens
cttgccccacaggaa

SEQ ID NO: 2048091 - DNA, 15 bp, Homo sapiens
ttgccccacaggaag

SEQ ID NO: 2048092 - DNA, 15 bp, Homo sapiens
tgccccacaggaaga

SEQ ID NO: 2048093 - DNA, 15 bp, Homo sapiens
gccccacaggaagag

SEQ ID NO: 2048094 - DNA, 15 bp, Homo sapiens
ccccacaggaagagg

SEQ ID NO: 2048095 - DNA, 15 bp, Homo sapiens
cccacaggaagaggg

SEQ ID NO: 2048096 - DNA, 15 bp, Homo sapiens
ccacaggaagaggga

SEQ ID NO: 2048097 - DNA, 15 bp, Homo sapiens
cacaggaagagggag

SEQ ID NO: 2048098 - DNA, 15 bp, Homo sapiens
acaggaagagggagt

SEQ ID NO: 2048099 - DNA, 15 bp, Homo sapiens
caggaagagggagtt

SEQ ID NO: 2048100 - DNA, 15 bp, Homo sapiens
aggaagagggagttt

SEQ ID NO: 2048101 - DNA, 15 bp, Homo sapiens
ggaagagggagtttt

SEQ ID NO: 2048102 - DNA, 15 bp, Homo sapiens
gaagagggagttttg

SEQ ID NO: 2048103 - DNA, 15 bp, Homo sapiens
aagagggagttttgt

SEQ ID NO: 2048104 - DNA, 15 bp, Homo sapiens
agagggagttttgtt

SEQ ID NO: 2048105 - DNA, 15 bp, Homo sapiens
gagggagttttgttc

SEQ ID NO: 2048106 - DNA, 15 bp, Homo sapiens
agggagttttgttct

SEQ ID NO: 2048107 - DNA, 15 bp, Homo sapiens
gggagttttgttctg

SEQ ID NO: 2048108 - DNA, 15 bp, Homo sapiens
ggagttttgttctgc

SEQ ID NO: 2048109 - DNA, 15 bp, Homo sapiens
gagttttgttctgcc

SEQ ID NO: 2048110 - DNA, 15 bp, Homo sapiens
agttttgttctgcct

SEQ ID NO: 2048111 - DNA, 15 bp, Homo sapiens
gttttgttctgcctc

SEQ ID NO: 2048112 - DNA, 15 bp, Homo sapiens
ttttgttctgcctca

SEQ ID NO: 2048113 - DNA, 15 bp, Homo sapiens
tttgttctgcctcag

SEQ ID NO: 2048114 - DNA, 15 bp, Homo sapiens
ttgttctgcctcaga

SEQ ID NO: 2048115 - DNA, 15 bp, Homo sapiens
tgttctgcctcagaa

SEQ ID NO: 2048116 - DNA, 15 bp, Homo sapiens
gttctgcctcagaaa

SEQ ID NO: 2048117 - DNA, 15 bp, Homo sapiens
ttctgcctcagaaat

SEQ ID NO: 2048118 - DNA, 15 bp, Homo sapiens
tctgcctcagaaatt

SEQ ID NO: 2048119 - DNA, 15 bp, Homo sapiens
ctgcctcagaaattg

SEQ ID NO: 2048120 - DNA, 15 bp, Homo sapiens
tgcctcagaaattgt

SEQ ID NO: 2048121 - DNA, 15 bp, Homo sapiens
gcctcagaaattgtg

SEQ ID NO: 2048122 - DNA, 15 bp, Homo sapiens
cctcagaaattgtgt

SEQ ID NO: 2048123 - DNA, 15 bp, Homo sapiens
ctcagaaattgtgtg

SEQ ID NO: 2048124 - DNA, 15 bp, Homo sapiens
tcagaaattgtgtgg

SEQ ID NO: 2048125 - DNA, 15 bp, Homo sapiens
cagaaattgtgtgga

SEQ ID NO: 2048126 - DNA, 15 bp, Homo sapiens
agaaattgtgtggaa

SEQ ID NO: 2048127 - DNA, 15 bp, Homo sapiens
gaaattgtgtggaaa

SEQ ID NO: 2048128 - DNA, 15 bp, Homo sapiens
aaattgtgtggaaac

SEQ ID NO: 2048129 - DNA, 15 bp, Homo sapiens
aattgtgtggaaaca

SEQ ID NO: 2048130 - DNA, 15 bp, Homo sapiens
attgtgtggaaacaa

SEQ ID NO: 2048131 - DNA, 15 bp, Homo sapiens
ttgtgtggaaacaaa

SEQ ID NO: 2048132 - DNA, 15 bp, Homo sapiens
tgtgtggaaacaaat

SEQ ID NO: 2048133 - DNA, 15 bp, Homo sapiens
gtgtggaaacaaatc

SEQ ID NO: 2048134 - DNA, 15 bp, Homo sapiens
tgtggaaacaaatct

SEQ ID NO: 2048135 - DNA, 15 bp, Homo sapiens
gtggaaacaaatctt

SEQ ID NO: 2048136 - DNA, 15 bp, Homo sapiens
tggaaacaaatcttg

SEQ ID NO: 2048137 - DNA, 15 bp, Homo sapiens
ggaaacaaatcttga

SEQ ID NO: 2048138 - DNA, 15 bp, Homo sapiens
gaaacaaatcttgag

SEQ ID NO: 2048139 - DNA, 15 bp, Homo sapiens
aaacaaatcttgagc

SEQ ID NO: 2048140 - DNA, 15 bp, Homo sapiens
aacaaatcttgagca

SEQ ID NO: 2048141 - DNA, 15 bp, Homo sapiens
acaaatcttgagcag

SEQ ID NO: 2048142 - DNA, 15 bp, Homo sapiens
caaatcttgagcagt

SEQ ID NO: 2048143 - DNA, 15 bp, Homo sapiens
aaatcttgagcagtc

SEQ ID NO: 2048144 - DNA, 15 bp, Homo sapiens
aatcttgagcagtcc

SEQ ID NO: 2048145 - DNA, 15 bp, Homo sapiens
atcttgagcagtcct

SEQ ID NO: 2048146 - DNA, 15 bp, Homo sapiens
tcttgagcagtcctg

SEQ ID NO: 2048147 - DNA, 15 bp, Homo sapiens
cttgagcagtcctga

SEQ ID NO: 2048148 - DNA, 15 bp, Homo sapiens
ttgagcagtcctgag

SEQ ID NO: 2048149 - DNA, 15 bp, Homo sapiens
tgagcagtcctgaga

SEQ ID NO: 2048150 - DNA, 15 bp, Homo sapiens
gagcagtcctgagac

SEQ ID NO: 2048151 - DNA, 15 bp, Homo sapiens
agcagtcctgagact

SEQ ID NO: 2048152 - DNA, 15 bp, Homo sapiens
gcagtcctgagactg

SEQ ID NO: 2048153 - DNA, 15 bp, Homo sapiens
cagtcctgagactgc

SEQ ID NO: 2048154 - DNA, 15 bp, Homo sapiens
agtcctgagactgca

SEQ ID NO: 2048155 - DNA, 15 bp, Homo sapiens
gtcctgagactgcag

SEQ ID NO: 2048156 - DNA, 15 bp, Homo sapiens
tcctgagactgcagt

SEQ ID NO: 2048157 - DNA, 15 bp, Homo sapiens
cctgagactgcagtg

SEQ ID NO: 2048158 - DNA, 15 bp, Homo sapiens
ctgagactgcagtgg

SEQ ID NO: 2048159 - DNA, 15 bp, Homo sapiens
tgagactgcagtgga

SEQ ID NO: 2048160 - DNA, 15 bp, Homo sapiens
gagactgcagtggag

SEQ ID NO: 2048161 - DNA, 15 bp, Homo sapiens
agactgcagtggagg

SEQ ID NO: 2048162 - DNA, 15 bp, Homo sapiens
gactgcagtggagga

SEQ ID NO: 2048163 - DNA, 15 bp, Homo sapiens
actgcagtggaggac

SEQ ID NO: 2048164 - DNA, 15 bp, Homo sapiens
ctgcagtggaggacc

SEQ ID NO: 2048165 - DNA, 15 bp, Homo sapiens
tgcagtggaggaccg

SEQ ID NO: 2048166 - DNA, 15 bp, Homo sapiens
gcagtggaggaccga

SEQ ID NO: 2048167 - DNA, 15 bp, Homo sapiens
cagtggaggaccgaa

SEQ ID NO: 2048168 - DNA, 15 bp, Homo sapiens
agtggaggaccgaaa

SEQ ID NO: 2048169 - DNA, 15 bp, Homo sapiens
gtggaggaccgaaat

SEQ ID NO: 2048170 - DNA, 15 bp, Homo sapiens
tggaggaccgaaata

SEQ ID NO: 2048171 - DNA, 15 bp, Homo sapiens
ggaggaccgaaatac

SEQ ID NO: 2048172 - DNA, 15 bp, Homo sapiens
gaggaccgaaatacc

SEQ ID NO: 2048173 - DNA, 15 bp, Homo sapiens
aggaccgaaatacca

SEQ ID NO: 2048174 - DNA, 15 bp, Homo sapiens
ggaccgaaataccaa

SEQ ID NO: 2048175 - DNA, 15 bp, Homo sapiens
gaccgaaataccaaa

SEQ ID NO: 2048176 - DNA, 15 bp, Homo sapiens
accgaaataccaaac

SEQ ID NO: 2048177 - DNA, 15 bp, Homo sapiens
ccgaaataccaaact

SEQ ID NO: 2048178 - DNA, 15 bp, Homo sapiens
cgaaataccaaacta

SEQ ID NO: 2048179 - DNA, 15 bp, Homo sapiens
gaaataccaaactac

SEQ ID NO: 2048180 - DNA, 15 bp, Homo sapiens
aaataccaaactact

SEQ ID NO: 2048181 - DNA, 15 bp, Homo sapiens
aataccaaactactt

SEQ ID NO: 2048182 - DNA, 15 bp, Homo sapiens
ataccaaactacttc

SEQ ID NO: 2048183 - DNA, 15 bp, Homo sapiens
taccaaactacttcc

SEQ ID NO: 2048184 - DNA, 15 bp, Homo sapiens
accaaactacttcca

SEQ ID NO: 2048185 - DNA, 15 bp, Homo sapiens
ccaaactacttccac

SEQ ID NO: 2048186 - DNA, 15 bp, Homo sapiens
caaactacttccacc

SEQ ID NO: 2048187 - DNA, 15 bp, Homo sapiens
aaactacttccacca

SEQ ID NO: 2048188 - DNA, 15 bp, Homo sapiens
aactacttccaccaa

SEQ ID NO: 2048189 - DNA, 15 bp, Homo sapiens
actacttccaccaag

SEQ ID NO: 2048190 - DNA, 15 bp, Homo sapiens
ctacttccaccaaga

SEQ ID NO: 2048191 - DNA, 15 bp, Homo sapiens
tacttccaccaagag

SEQ ID NO: 2048192 - DNA, 15 bp, Homo sapiens
acttccaccaagagg

SEQ ID NO: 2048193 - DNA, 15 bp, Homo sapiens
cttccaccaagaggg

SEQ ID NO: 2048194 - DNA, 15 bp, Homo sapiens
ttccaccaagaggga

SEQ ID NO: 2048195 - DNA, 15 bp, Homo sapiens
tccaccaagagggag

SEQ ID NO: 2048196 - DNA, 15 bp, Homo sapiens
ccaccaagagggaga

SEQ ID NO: 2048197 - DNA, 15 bp, Homo sapiens
caccaagagggagag

SEQ ID NO: 2048198 - DNA, 15 bp, Homo sapiens
accaagagggagagg

SEQ ID NO: 2048199 - DNA, 15 bp, Homo sapiens
ccaagagggagaggg

SEQ ID NO: 2048200 - DNA, 15 bp, Homo sapiens
caagagggagaggga

SEQ ID NO: 2048201 - DNA, 15 bp, Homo sapiens
aagagggagagggag

SEQ ID NO: 2048202 - DNA, 15 bp, Homo sapiens
agagggagagggaga

SEQ ID NO: 2048203 - DNA, 15 bp, Homo sapiens
gagggagagggagag

SEQ ID NO: 2048204 - DNA, 15 bp, Homo sapiens
agggagagggagaga

SEQ ID NO: 2048205 - DNA, 15 bp, Homo sapiens
ggagagggagagagg

SEQ ID NO: 2048206 - DNA, 15 bp, Homo sapiens
gagagggagagagga

SEQ ID NO: 2048207 - DNA, 15 bp, Homo sapiens
agagggagagaggaa

SEQ ID NO: 2048208 - DNA, 15 bp, Homo sapiens
gagggagagaggaag

SEQ ID NO: 2048209 - DNA, 15 bp, Homo sapiens
agggagagaggaaga

SEQ ID NO: 2048210 - DNA, 15 bp, Homo sapiens
gggagagaggaagag

SEQ ID NO: 2048211 - DNA, 15 bp, Homo sapiens
ggagagaggaagaga

SEQ ID NO: 2048212 - DNA, 15 bp, Homo sapiens
gagagaggaagagaa

SEQ ID NO: 2048213 - DNA, 15 bp, Homo sapiens
agagaggaagagaaa

SEQ ID NO: 2048214 - DNA, 15 bp, Homo sapiens
gagaggaagagaaag

SEQ ID NO: 2048215 - DNA, 15 bp, Homo sapiens
agaggaagagaaaga

SEQ ID NO: 2048216 - DNA, 15 bp, Homo sapiens
gaggaagagaaagag

SEQ ID NO: 2048217 - DNA, 15 bp, Homo sapiens
aggaagagaaagaga

SEQ ID NO: 2048218 - DNA, 15 bp, Homo sapiens
ggaagagaaagagac

SEQ ID NO: 2048219 - DNA, 15 bp, Homo sapiens
gaagagaaagagacc

SEQ ID NO: 2048220 - DNA, 15 bp, Homo sapiens
aagagaaagagacca

SEQ ID NO: 2048221 - DNA, 15 bp, Homo sapiens
agagaaagagaccaa

SEQ ID NO: 2048222 - DNA, 15 bp, Homo sapiens
gagaaagagaccaaa

SEQ ID NO: 2048223 - DNA, 15 bp, Homo sapiens
agaaagagaccaaat

SEQ ID NO: 2048224 - DNA, 15 bp, Homo sapiens
gaaagagaccaaata

SEQ ID NO: 2048225 - DNA, 15 bp, Homo sapiens
aaagagaccaaataa

SEQ ID NO: 2048226 - DNA, 15 bp, Homo sapiens
aagagaccaaataat

SEQ ID NO: 2048227 - DNA, 15 bp, Homo sapiens
agagaccaaataatt

SEQ ID NO: 2048228 - DNA, 15 bp, Homo sapiens
gagaccaaataattc

SEQ ID NO: 2048229 - DNA, 15 bp, Homo sapiens
agaccaaataattca

SEQ ID NO: 2048230 - DNA, 15 bp, Homo sapiens
gaccaaataattcat

SEQ ID NO: 2048231 - DNA, 15 bp, Homo sapiens
accaaataattcatt

SEQ ID NO: 2048232 - DNA, 15 bp, Homo sapiens
ccaaataattcattt

SEQ ID NO: 2048233 - DNA, 15 bp, Homo sapiens
caaataattcatttt

SEQ ID NO: 2048234 - DNA, 15 bp, Homo sapiens
aaataattcattttc

SEQ ID NO: 2048235 - DNA, 15 bp, Homo sapiens
aataattcattttct

SEQ ID NO: 2048236 - DNA, 15 bp, Homo sapiens
ataattcattttctg

SEQ ID NO: 2048237 - DNA, 15 bp, Homo sapiens
taattcattttctga

SEQ ID NO: 2048238 - DNA, 15 bp, Homo sapiens
aattcattttctgag

SEQ ID NO: 2048239 - DNA, 15 bp, Homo sapiens
attcattttctgagt

SEQ ID NO: 2048240 - DNA, 15 bp, Homo sapiens
ttcattttctgagtc

SEQ ID NO: 2048241 - DNA, 15 bp, Homo sapiens
tcattttctgagtca

SEQ ID NO: 2048242 - DNA, 15 bp, Homo sapiens
cattttctgagtcag

SEQ ID NO: 2048243 - DNA, 15 bp, Homo sapiens
attttctgagtcaga

SEQ ID NO: 2048244 - DNA, 15 bp, Homo sapiens
ttttctgagtcagac

SEQ ID NO: 2048245 - DNA, 15 bp, Homo sapiens
tttctgagtcagact

SEQ ID NO: 2048246 - DNA, 15 bp, Homo sapiens
ttctgagtcagactt

SEQ ID NO: 2048247 - DNA, 15 bp, Homo sapiens
tctgagtcagacttc

SEQ ID NO: 2048248 - DNA, 15 bp, Homo sapiens
ctgagtcagacttct

SEQ ID NO: 2048249 - DNA, 15 bp, Homo sapiens
tgagtcagacttctg

SEQ ID NO: 2048250 - DNA, 15 bp, Homo sapiens
gagtcagacttctgt

SEQ ID NO: 2048251 - DNA, 15 bp, Homo sapiens
agtcagacttctgtt

SEQ ID NO: 2048252 - DNA, 15 bp, Homo sapiens
gtcagacttctgttg

SEQ ID NO: 2048253 - DNA, 15 bp, Homo sapiens
tcagacttctgttga

SEQ ID NO: 2048254 - DNA, 15 bp, Homo sapiens
cagacttctgttgat

SEQ ID NO: 2048255 - DNA, 15 bp, Homo sapiens
agacttctgttgata

SEQ ID NO: 2048256 - DNA, 15 bp, Homo sapiens
gacttctgttgatag

SEQ ID NO: 2048257 - DNA, 15 bp, Homo sapiens
acttctgttgatagg

SEQ ID NO: 2048258 - DNA, 15 bp, Homo sapiens
cttctgttgatagga

SEQ ID NO: 2048259 - DNA, 15 bp, Homo sapiens
ttctgttgataggag

SEQ ID NO: 2048260 - DNA, 15 bp, Homo sapiens
tctgttgataggagt

SEQ ID NO: 2048261 - DNA, 15 bp, Homo sapiens
ctgttgataggagtc

SEQ ID NO: 2048262 - DNA, 15 bp, Homo sapiens
tgttgataggagtct

SEQ ID NO: 2048263 - DNA, 15 bp, Homo sapiens
gttgataggagtctc

SEQ ID NO: 2048264 - DNA, 15 bp, Homo sapiens
ttgataggagtctca

SEQ ID NO: 2048265 - DNA, 15 bp, Homo sapiens
tgataggagtctcag

SEQ ID NO: 2048266 - DNA, 15 bp, Homo sapiens
gataggagtctcaga

SEQ ID NO: 2048267 - DNA, 15 bp, Homo sapiens
ataggagtctcagaa

SEQ ID NO: 2048268 - DNA, 15 bp, Homo sapiens
taggagtctcagaac

SEQ ID NO: 2048269 - DNA, 15 bp, Homo sapiens
aggagtctcagaact

SEQ ID NO: 2048270 - DNA, 15 bp, Homo sapiens
ggagtctcagaactg

SEQ ID NO: 2048271 - DNA, 15 bp, Homo sapiens
gagtctcagaactgt

SEQ ID NO: 2048272 - DNA, 15 bp, Homo sapiens
agtctcagaactgtc

SEQ ID NO: 2048273 - DNA, 15 bp, Homo sapiens
gtctcagaactgtct

SEQ ID NO: 2048274 - DNA, 15 bp, Homo sapiens
ctcagaactgtctac

SEQ ID NO: 2048275 - DNA, 15 bp, Homo sapiens
tcagaactgtctact

SEQ ID NO: 2048276 - DNA, 15 bp, Homo sapiens
cagaactgtctactg

SEQ ID NO: 2048277 - DNA, 15 bp, Homo sapiens
agaactgtctactgt

SEQ ID NO: 2048278 - DNA, 15 bp, Homo sapiens
gaactgtctactgtg

SEQ ID NO: 2048279 - DNA, 15 bp, Homo sapiens
aactgtctactgtgg

SEQ ID NO: 2048280 - DNA, 15 bp, Homo sapiens
actgtctactgtggt

SEQ ID NO: 2048281 - DNA, 15 bp, Homo sapiens
ctgtctactgtggtc

SEQ ID NO: 2048282 - DNA, 15 bp, Homo sapiens
tgtctactgtggtct

SEQ ID NO: 2048283 - DNA, 15 bp, Homo sapiens
gtctactgtggtctc

SEQ ID NO: 2048284 - DNA, 15 bp, Homo sapiens
tctactgtggtctca

SEQ ID NO: 2048285 - DNA, 15 bp, Homo sapiens
ctactgtggtctcac

SEQ ID NO: 2048286 - DNA, 15 bp, Homo sapiens
tactgtggtctcaca

SEQ ID NO: 2048287 - DNA, 15 bp, Homo sapiens
actgtggtctcacaa

SEQ ID NO: 2048288 - DNA, 15 bp, Homo sapiens
ctgtggtctcacaaa

SEQ ID NO: 2048289 - DNA, 15 bp, Homo sapiens
tgtggtctcacaaag

SEQ ID NO: 2048290 - DNA, 15 bp, Homo sapiens
gtggtctcacaaagc

SEQ ID NO: 2048291 - DNA, 15 bp, Homo sapiens
tggtctcacaaagct

SEQ ID NO: 2048292 - DNA, 15 bp, Homo sapiens
ggtctcacaaagctg

SEQ ID NO: 2048293 - DNA, 15 bp, Homo sapiens
gtctcacaaagctga

SEQ ID NO: 2048294 - DNA, 15 bp, Homo sapiens
tctcacaaagctgag

SEQ ID NO: 2048295 - DNA, 15 bp, Homo sapiens
ctcacaaagctgagc

SEQ ID NO: 2048296 - DNA, 15 bp, Homo sapiens
tcacaaagctgagcc

SEQ ID NO: 2048297 - DNA, 15 bp, Homo sapiens
cacaaagctgagcca

SEQ ID NO: 2048298 - DNA, 15 bp, Homo sapiens
acaaagctgagccaa

SEQ ID NO: 2048299 - DNA, 15 bp, Homo sapiens
caaagctgagccaaa

SEQ ID NO: 2048300 - DNA, 15 bp, Homo sapiens
aaagctgagccaaag

SEQ ID NO: 2048301 - DNA, 15 bp, Homo sapiens
aagctgagccaaagt

SEQ ID NO: 2048302 - DNA, 15 bp, Homo sapiens
agctgagccaaagtt

SEQ ID NO: 2048303 - DNA, 15 bp, Homo sapiens
gctgagccaaagttt

SEQ ID NO: 2048304 - DNA, 15 bp, Homo sapiens
ctgagccaaagtttt

SEQ ID NO: 2048305 - DNA, 15 bp, Homo sapiens
tgagccaaagtttta

SEQ ID NO: 2048306 - DNA, 15 bp, Homo sapiens
gagccaaagttttaa

SEQ ID NO: 2048307 - DNA, 15 bp, Homo sapiens
agccaaagttttaaa

SEQ ID NO: 2048308 - DNA, 15 bp, Homo sapiens
gccaaagttttaaaa

SEQ ID NO: 2048309 - DNA, 15 bp, Homo sapiens
ccaaagttttaaaac

SEQ ID NO: 2048310 - DNA, 15 bp, Homo sapiens
caaagttttaaaaca

SEQ ID NO: 2048311 - DNA, 15 bp, Homo sapiens
aaagttttaaaacag

SEQ ID NO: 2048312 - DNA, 15 bp, Homo sapiens
aagttttaaaacagt

SEQ ID NO: 2048313 - DNA, 15 bp, Homo sapiens
agttttaaaacagtg

SEQ ID NO: 2048314 - DNA, 15 bp, Homo sapiens
gttttaaaacagtga

SEQ ID NO: 2048315 - DNA, 15 bp, Homo sapiens
ttttaaaacagtgag

SEQ ID NO: 2048316 - DNA, 15 bp, Homo sapiens
tttaaaacagtgaga

SEQ ID NO: 2048317 - DNA, 15 bp, Homo sapiens
ttaaaacagtgagag

SEQ ID NO: 2048318 - DNA, 15 bp, Homo sapiens
taaaacagtgagaga

SEQ ID NO: 2048319 - DNA, 15 bp, Homo sapiens
aaaacagtgagagag

SEQ ID NO: 2048320 - DNA, 15 bp, Homo sapiens
aaacagtgagagagg

SEQ ID NO: 2048321 - DNA, 15 bp, Homo sapiens
aacagtgagagagga

SEQ ID NO: 2048322 - DNA, 15 bp, Homo sapiens
acagtgagagaggac

SEQ ID NO: 2048323 - DNA, 15 bp, Homo sapiens
cagtgagagaggaca

SEQ ID NO: 2048324 - DNA, 15 bp, Homo sapiens
agtgagagaggacac

SEQ ID NO: 2048325 - DNA, 15 bp, Homo sapiens
gtgagagaggacacc

SEQ ID NO: 2048326 - DNA, 15 bp, Homo sapiens
tgagagaggacaccc

SEQ ID NO: 2048327 - DNA, 15 bp, Homo sapiens
gagagaggacaccca

SEQ ID NO: 2048328 - DNA, 15 bp, Homo sapiens
agagaggacacccat

SEQ ID NO: 2048329 - DNA, 15 bp, Homo sapiens
gagaggacacccatt

SEQ ID NO: 2048330 - DNA, 15 bp, Homo sapiens
agaggacacccattt

SEQ ID NO: 2048331 - DNA, 15 bp, Homo sapiens
gaggacacccatttt

SEQ ID NO: 2048332 - DNA, 15 bp, Homo sapiens
aggacacccatttta

SEQ ID NO: 2048333 - DNA, 15 bp, Homo sapiens
ggacacccattttaa

SEQ ID NO: 2048334 - DNA, 15 bp, Homo sapiens
gacacccattttaaa

SEQ ID NO: 2048335 - DNA, 15 bp, Homo sapiens
acacccattttaaat

SEQ ID NO: 2048336 - DNA, 15 bp, Homo sapiens
cacccattttaaatc

SEQ ID NO: 2048337 - DNA, 15 bp, Homo sapiens
acccattttaaatca

SEQ ID NO: 2048338 - DNA, 15 bp, Homo sapiens
cccattttaaatcag

SEQ ID NO: 2048339 - DNA, 15 bp, Homo sapiens
ccattttaaatcagt

SEQ ID NO: 2048340 - DNA, 15 bp, Homo sapiens
cattttaaatcagtc

SEQ ID NO: 2048341 - DNA, 15 bp, Homo sapiens
attttaaatcagtct

SEQ ID NO: 2048342 - DNA, 15 bp, Homo sapiens
ttttaaatcagtctg

SEQ ID NO: 2048343 - DNA, 15 bp, Homo sapiens
tttaaatcagtctga

SEQ ID NO: 2048344 - DNA, 15 bp, Homo sapiens
ttaaatcagtctgag

SEQ ID NO: 2048345 - DNA, 15 bp, Homo sapiens
taaatcagtctgagt

SEQ ID NO: 2048346 - DNA, 15 bp, Homo sapiens
aaatcagtctgagtg

SEQ ID NO: 2048347 - DNA, 15 bp, Homo sapiens
aatcagtctgagtga

SEQ ID NO: 2048348 - DNA, 15 bp, Homo sapiens
atcagtctgagtgag

SEQ ID NO: 2048349 - DNA, 15 bp, Homo sapiens
tcagtctgagtgagt

SEQ ID NO: 2048350 - DNA, 15 bp, Homo sapiens
cagtctgagtgagtt

SEQ ID NO: 2048351 - DNA, 15 bp, Homo sapiens
agtctgagtgagtta

SEQ ID NO: 2048352 - DNA, 15 bp, Homo sapiens
gtctgagtgagttat

SEQ ID NO: 2048353 - DNA, 15 bp, Homo sapiens
tctgagtgagttatg

SEQ ID NO: 2048354 - DNA, 15 bp, Homo sapiens
ctgagtgagttatgg

SEQ ID NO: 2048355 - DNA, 15 bp, Homo sapiens
tgagtgagttatggt

SEQ ID NO: 2048356 - DNA, 15 bp, Homo sapiens
gagtgagttatggtt

SEQ ID NO: 2048357 - DNA, 15 bp, Homo sapiens
agtgagttatggttt

SEQ ID NO: 2048358 - DNA, 15 bp, Homo sapiens
gtgagttatggtttt

SEQ ID NO: 2048359 - DNA, 15 bp, Homo sapiens
tgagttatggttttc

SEQ ID NO: 2048360 - DNA, 15 bp, Homo sapiens
gagttatggttttca

SEQ ID NO: 2048361 - DNA, 15 bp, Homo sapiens
agttatggttttcag

SEQ ID NO: 2048362 - DNA, 15 bp, Homo sapiens
gttatggttttcagt

SEQ ID NO: 2048363 - DNA, 15 bp, Homo sapiens
ttatggttttcagtg

SEQ ID NO: 2048364 - DNA, 15 bp, Homo sapiens
tatggttttcagtga

SEQ ID NO: 2048365 - DNA, 15 bp, Homo sapiens
atggttttcagtgaa

SEQ ID NO: 2048366 - DNA, 15 bp, Homo sapiens
tggttttcagtgaat

SEQ ID NO: 2048367 - DNA, 15 bp, Homo sapiens
ggttttcagtgaatg

SEQ ID NO: 2048368 - DNA, 15 bp, Homo sapiens
gttttcagtgaatgg

SEQ ID NO: 2048369 - DNA, 15 bp, Homo sapiens
ttttcagtgaatgga

SEQ ID NO: 2048370 - DNA, 15 bp, Homo sapiens
tttcagtgaatggat

SEQ ID NO: 2048371 - DNA, 15 bp, Homo sapiens
ttcagtgaatggatc

SEQ ID NO: 2048372 - DNA, 15 bp, Homo sapiens
tcagtgaatggatca

SEQ ID NO: 2048373 - DNA, 15 bp, Homo sapiens
cagtgaatggatcac

SEQ ID NO: 2048374 - DNA, 15 bp, Homo sapiens
agtgaatggatcacc

SEQ ID NO: 2048375 - DNA, 15 bp, Homo sapiens
gtgaatggatcacct

SEQ ID NO: 2048376 - DNA, 15 bp, Homo sapiens
tgaatggatcacctc

SEQ ID NO: 2048377 - DNA, 15 bp, Homo sapiens
gaatggatcacctct

SEQ ID NO: 2048378 - DNA, 15 bp, Homo sapiens
aatggatcacctctg

SEQ ID NO: 2048379 - DNA, 15 bp, Homo sapiens
atggatcacctctgt

SEQ ID NO: 2048380 - DNA, 15 bp, Homo sapiens
tggatcacctctgta

SEQ ID NO: 2048381 - DNA, 15 bp, Homo sapiens
ggatcacctctgtag

SEQ ID NO: 2048382 - DNA, 15 bp, Homo sapiens
gatcacctctgtaga

SEQ ID NO: 2048383 - DNA, 15 bp, Homo sapiens
atcacctctgtagat

SEQ ID NO: 2048384 - DNA, 15 bp, Homo sapiens
tcacctctgtagatt

SEQ ID NO: 2048385 - DNA, 15 bp, Homo sapiens
cacctctgtagattt

SEQ ID NO: 2048386 - DNA, 15 bp, Homo sapiens
acctctgtagatttg

SEQ ID NO: 2048387 - DNA, 15 bp, Homo sapiens
cctctgtagatttga

SEQ ID NO: 2048388 - DNA, 15 bp, Homo sapiens
ctctgtagatttgaa

SEQ ID NO: 2048389 - DNA, 15 bp, Homo sapiens
tctgtagatttgaac

SEQ ID NO: 2048390 - DNA, 15 bp, Homo sapiens
ctgtagatttgaaca

SEQ ID NO: 2048391 - DNA, 15 bp, Homo sapiens
tgtagatttgaacat

SEQ ID NO: 2048392 - DNA, 15 bp, Homo sapiens
gtagatttgaacatc

SEQ ID NO: 2048393 - DNA, 15 bp, Homo sapiens
tagatttgaacatca

SEQ ID NO: 2048394 - DNA, 15 bp, Homo sapiens
agatttgaacatcaa

SEQ ID NO: 2048395 - DNA, 15 bp, Homo sapiens
gatttgaacatcaaa

SEQ ID NO: 2048396 - DNA, 15 bp, Homo sapiens
atttgaacatcaaac

SEQ ID NO: 2048397 - DNA, 15 bp, Homo sapiens
tttgaacatcaaacc

SEQ ID NO: 2048398 - DNA, 15 bp, Homo sapiens
ttgaacatcaaacct

SEQ ID NO: 2048399 - DNA, 15 bp, Homo sapiens
tgaacatcaaacctt

SEQ ID NO: 2048400 - DNA, 15 bp, Homo sapiens
gaacatcaaaccttt

SEQ ID NO: 2048401 - DNA, 15 bp, Homo sapiens
aacatcaaaccttta

SEQ ID NO: 2048402 - DNA, 15 bp, Homo sapiens
acatcaaacctttat

SEQ ID NO: 2048403 - DNA, 15 bp, Homo sapiens
catcaaacctttatt

SEQ ID NO: 2048404 - DNA, 15 bp, Homo sapiens
atcaaacctttattt

SEQ ID NO: 2048405 - DNA, 15 bp, Homo sapiens
tcaaacctttatttc

SEQ ID NO: 2048406 - DNA, 15 bp, Homo sapiens
caaacctttatttct

SEQ ID NO: 2048407 - DNA, 15 bp, Homo sapiens
aaacctttatttcta

SEQ ID NO: 2048408 - DNA, 15 bp, Homo sapiens
aacctttatttctaa

SEQ ID NO: 2048409 - DNA, 15 bp, Homo sapiens
acctttatttctaat

SEQ ID NO: 2048410 - DNA, 15 bp, Homo sapiens
cctttatttctaatc

SEQ ID NO: 2048411 - DNA, 15 bp, Homo sapiens
ctttatttctaatca

SEQ ID NO: 2048412 - DNA, 15 bp, Homo sapiens
tttatttctaatcag

SEQ ID NO: 2048413 - DNA, 15 bp, Homo sapiens
ttatttctaatcagt

SEQ ID NO: 2048414 - DNA, 15 bp, Homo sapiens
tatttctaatcagtg

SEQ ID NO: 2048415 - DNA, 15 bp, Homo sapiens
atttctaatcagtgg

SEQ ID NO: 2048416 - DNA, 15 bp, Homo sapiens
tttctaatcagtggc

SEQ ID NO: 2048417 - DNA, 15 bp, Homo sapiens
ttctaatcagtggct

SEQ ID NO: 2048418 - DNA, 15 bp, Homo sapiens
tctaatcagtggctg

SEQ ID NO: 2048419 - DNA, 15 bp, Homo sapiens
ctaatcagtggctga

SEQ ID NO: 2048420 - DNA, 15 bp, Homo sapiens
taatcagtggctgag

SEQ ID NO: 2048421 - DNA, 15 bp, Homo sapiens
aatcagtggctgagc

SEQ ID NO: 2048422 - DNA, 15 bp, Homo sapiens
atcagtggctgagct

SEQ ID NO: 2048423 - DNA, 15 bp, Homo sapiens
tcagtggctgagctc

SEQ ID NO: 2048424 - DNA, 15 bp, Homo sapiens
cagtggctgagctcc

SEQ ID NO: 2048425 - DNA, 15 bp, Homo sapiens
agtggctgagctcct

SEQ ID NO: 2048426 - DNA, 15 bp, Homo sapiens
gtggctgagctcctt

SEQ ID NO: 2048427 - DNA, 15 bp, Homo sapiens
tggctgagctccttc

SEQ ID NO: 2048428 - DNA, 15 bp, Homo sapiens
ggctgagctccttca

SEQ ID NO: 2048429 - DNA, 15 bp, Homo sapiens
gctgagctccttcac

SEQ ID NO: 2048430 - DNA, 15 bp, Homo sapiens
ctgagctccttcaca

SEQ ID NO: 2048431 - DNA, 15 bp, Homo sapiens
tgagctccttcacag

SEQ ID NO: 2048432 - DNA, 15 bp, Homo sapiens
gagctccttcacaga

SEQ ID NO: 2048433 - DNA, 15 bp, Homo sapiens
agctccttcacagaa

SEQ ID NO: 2048434 - DNA, 15 bp, Homo sapiens
gctccttcacagaat

SEQ ID NO: 2048435 - DNA, 15 bp, Homo sapiens
ctccttcacagaatt

SEQ ID NO: 2048436 - DNA, 15 bp, Homo sapiens
tccttcacagaattc

SEQ ID NO: 2048437 - DNA, 15 bp, Homo sapiens
ccttcacagaattcg

SEQ ID NO: 2048438 - DNA, 15 bp, Homo sapiens
cttcacagaattcga

SEQ ID NO: 2048439 - DNA, 15 bp, Homo sapiens
ttcacagaattcgat

SEQ ID NO: 2048440 - DNA, 15 bp, Homo sapiens
tcacagaattcgatg

SEQ ID NO: 2048441 - DNA, 15 bp, Homo sapiens
cacagaattcgatgg

SEQ ID NO: 2048442 - DNA, 15 bp, Homo sapiens
acagaattcgatggg

SEQ ID NO: 2048443 - DNA, 15 bp, Homo sapiens
cagaattcgatggga

SEQ ID NO: 2048444 - DNA, 15 bp, Homo sapiens
agaattcgatgggag

SEQ ID NO: 2048445 - DNA, 15 bp, Homo sapiens
gaattcgatgggagg

SEQ ID NO: 2048446 - DNA, 15 bp, Homo sapiens
aattcgatgggaggc

SEQ ID NO: 2048447 - DNA, 15 bp, Homo sapiens
attcgatgggaggct

SEQ ID NO: 2048448 - DNA, 15 bp, Homo sapiens
ttcgatgggaggctg

SEQ ID NO: 2048449 - DNA, 15 bp, Homo sapiens
tcgatgggaggctgt

SEQ ID NO: 2048450 - DNA, 15 bp, Homo sapiens
cgatgggaggctgtt

SEQ ID NO: 2048451 - DNA, 15 bp, Homo sapiens
gatgggaggctgttt

SEQ ID NO: 2048452 - DNA, 15 bp, Homo sapiens
atgggaggctgtttt

SEQ ID NO: 2048453 - DNA, 15 bp, Homo sapiens
tgggaggctgttttc

SEQ ID NO: 2048454 - DNA, 15 bp, Homo sapiens
gggaggctgttttcg

SEQ ID NO: 2048455 - DNA, 15 bp, Homo sapiens
ggaggctgttttcga

SEQ ID NO: 2048456 - DNA, 15 bp, Homo sapiens
gaggctgttttcgaa

SEQ ID NO: 2048457 - DNA, 15 bp, Homo sapiens
aggctgttttcgaaa

SEQ ID NO: 2048458 - DNA, 15 bp, Homo sapiens
ggctgttttcgaaag

SEQ ID NO: 2048459 - DNA, 15 bp, Homo sapiens
gctgttttcgaaagt

SEQ ID NO: 2048460 - DNA, 15 bp, Homo sapiens
ctgttttcgaaagta

SEQ ID NO: 2048461 - DNA, 15 bp, Homo sapiens
tgttttcgaaagtaa

SEQ ID NO: 2048462 - DNA, 15 bp, Homo sapiens
gttttcgaaagtaag

SEQ ID NO: 2048463 - DNA, 15 bp, Homo sapiens
ttttcgaaagtaagg

SEQ ID NO: 2048464 - DNA, 15 bp, Homo sapiens
tttcgaaagtaagga

SEQ ID NO: 2048465 - DNA, 15 bp, Homo sapiens
ttcgaaagtaaggaa

SEQ ID NO: 2048466 - DNA, 15 bp, Homo sapiens
tcgaaagtaaggaag

SEQ ID NO: 2048467 - DNA, 15 bp, Homo sapiens
cgaaagtaaggaagt

SEQ ID NO: 2048468 - DNA, 15 bp, Homo sapiens
gaaagtaaggaagtc

SEQ ID NO: 2048469 - DNA, 15 bp, Homo sapiens
aaagtaaggaagtca

SEQ ID NO: 2048470 - DNA, 15 bp, Homo sapiens
aagtaaggaagtcat

SEQ ID NO: 2048471 - DNA, 15 bp, Homo sapiens
agtaaggaagtcatt

SEQ ID NO: 2048472 - DNA, 15 bp, Homo sapiens
gtaaggaagtcattc

SEQ ID NO: 2048473 - DNA, 15 bp, Homo sapiens
taaggaagtcattca

SEQ ID NO: 2048474 - DNA, 15 bp, Homo sapiens
aaggaagtcattcag

SEQ ID NO: 2048475 - DNA, 15 bp, Homo sapiens
aggaagtcattcagg

SEQ ID NO: 2048476 - DNA, 15 bp, Homo sapiens
ggaagtcattcaggg

SEQ ID NO: 2048477 - DNA, 15 bp, Homo sapiens
gaagtcattcagggg

SEQ ID NO: 2048478 - DNA, 15 bp, Homo sapiens
aagtcattcaggggt

SEQ ID NO: 2048479 - DNA, 15 bp, Homo sapiens
agtcattcaggggtt

SEQ ID NO: 2048480 - DNA, 15 bp, Homo sapiens
gtcattcaggggttt

SEQ ID NO: 2048481 - DNA, 15 bp, Homo sapiens
tcattcaggggtttt

SEQ ID NO: 2048482 - DNA, 15 bp, Homo sapiens
cattcaggggttttg

SEQ ID NO: 2048483 - DNA, 15 bp, Homo sapiens
attcaggggttttgt

SEQ ID NO: 2048484 - DNA, 15 bp, Homo sapiens
ttcaggggttttgtt

SEQ ID NO: 2048485 - DNA, 15 bp, Homo sapiens
tcaggggttttgttt

SEQ ID NO: 2048486 - DNA, 15 bp, Homo sapiens
caggggttttgtttc

SEQ ID NO: 2048487 - DNA, 15 bp, Homo sapiens
aggggttttgtttct

SEQ ID NO: 2048488 - DNA, 15 bp, Homo sapiens
ggggttttgtttctg

SEQ ID NO: 2048489 - DNA, 15 bp, Homo sapiens
gggttttgtttctgt

SEQ ID NO: 2048490 - DNA, 15 bp, Homo sapiens
ggttttgtttctgtc

SEQ ID NO: 2048491 - DNA, 15 bp, Homo sapiens
gttttgtttctgtcc

SEQ ID NO: 2048492 - DNA, 15 bp, Homo sapiens
ttttgtttctgtcct

SEQ ID NO: 2048493 - DNA, 15 bp, Homo sapiens
tttgtttctgtccta

SEQ ID NO: 2048494 - DNA, 15 bp, Homo sapiens
ttgtttctgtcctaa

SEQ ID NO: 2048495 - DNA, 15 bp, Homo sapiens
tgtttctgtcctaaa

SEQ ID NO: 2048496 - DNA, 15 bp, Homo sapiens
gtttctgtcctaaaa

SEQ ID NO: 2048497 - DNA, 15 bp, Homo sapiens
tttctgtcctaaaac

SEQ ID NO: 2048498 - DNA, 15 bp, Homo sapiens
ttctgtcctaaaaca

SEQ ID NO: 2048499 - DNA, 15 bp, Homo sapiens
tctgtcctaaaacag

SEQ ID NO: 2048500 - DNA, 15 bp, Homo sapiens
ctgtcctaaaacagg

SEQ ID NO: 2048501 - DNA, 15 bp, Homo sapiens
tgtcctaaaacaggg

SEQ ID NO: 2048502 - DNA, 15 bp, Homo sapiens
gtcctaaaacaggga

SEQ ID NO: 2048503 - DNA, 15 bp, Homo sapiens
tcctaaaacagggac

SEQ ID NO: 2048504 - DNA, 15 bp, Homo sapiens
cctaaaacagggacc

SEQ ID NO: 2048505 - DNA, 15 bp, Homo sapiens
ctaaaacagggaccc

SEQ ID NO: 2048506 - DNA, 15 bp, Homo sapiens
taaaacagggacccc

SEQ ID NO: 2048507 - DNA, 15 bp, Homo sapiens
aaaacagggacccct

SEQ ID NO: 2048508 - DNA, 15 bp, Homo sapiens
aaacagggacccctc

SEQ ID NO: 2048509 - DNA, 15 bp, Homo sapiens
aacagggacccctct

SEQ ID NO: 2048510 - DNA, 15 bp, Homo sapiens
acagggacccctcta

SEQ ID NO: 2048511 - DNA, 15 bp, Homo sapiens
cagggacccctctag

SEQ ID NO: 2048512 - DNA, 15 bp, Homo sapiens
agggacccctctagg

SEQ ID NO: 2048513 - DNA, 15 bp, Homo sapiens
gggacccctctaggg

SEQ ID NO: 2048514 - DNA, 15 bp, Homo sapiens
ggacccctctagggg

SEQ ID NO: 2048515 - DNA, 15 bp, Homo sapiens
gacccctctagggga

SEQ ID NO: 2048516 - DNA, 15 bp, Homo sapiens
acccctctaggggac

SEQ ID NO: 2048517 - DNA, 15 bp, Homo sapiens
cccctctaggggacc

SEQ ID NO: 2048518 - DNA, 15 bp, Homo sapiens
ccctctaggggacca

SEQ ID NO: 2048519 - DNA, 15 bp, Homo sapiens
cctctaggggaccag

SEQ ID NO: 2048520 - DNA, 15 bp, Homo sapiens
ctctaggggaccagc

SEQ ID NO: 2048521 - DNA, 15 bp, Homo sapiens
tctaggggaccagca

SEQ ID NO: 2048522 - DNA, 15 bp, Homo sapiens
ctaggggaccagcag

SEQ ID NO: 2048523 - DNA, 15 bp, Homo sapiens
taggggaccagcagc

SEQ ID NO: 2048524 - DNA, 15 bp, Homo sapiens
aggggaccagcagca

SEQ ID NO: 2048525 - DNA, 15 bp, Homo sapiens
ggggaccagcagcag

SEQ ID NO: 2048526 - DNA, 15 bp, Homo sapiens
gggaccagcagcaga

SEQ ID NO: 2048527 - DNA, 15 bp, Homo sapiens
ggaccagcagcagac

SEQ ID NO: 2048528 - DNA, 15 bp, Homo sapiens
gaccagcagcagacg

SEQ ID NO: 2048529 - DNA, 15 bp, Homo sapiens
accagcagcagacgc

SEQ ID NO: 2048530 - DNA, 15 bp, Homo sapiens
ccagcagcagacgcc

SEQ ID NO: 2048531 - DNA, 15 bp, Homo sapiens
cagcagcagacgcct

SEQ ID NO: 2048532 - DNA, 15 bp, Homo sapiens
agcagcagacgcctt

SEQ ID NO: 2048533 - DNA, 15 bp, Homo sapiens
gcagcagacgccttc

SEQ ID NO: 2048534 - DNA, 15 bp, Homo sapiens
cagcagacgccttca

SEQ ID NO: 2048535 - DNA, 15 bp, Homo sapiens
agcagacgccttcag

SEQ ID NO: 2048536 - DNA, 15 bp, Homo sapiens
gcagacgccttcagc

SEQ ID NO: 2048537 - DNA, 15 bp, Homo sapiens
cagacgccttcagcc

SEQ ID NO: 2048538 - DNA, 15 bp, Homo sapiens
agacgccttcagccc

SEQ ID NO: 2048539 - DNA, 15 bp, Homo sapiens
gacgccttcagcccc

SEQ ID NO: 2048540 - DNA, 15 bp, Homo sapiens
acgccttcagcccct

SEQ ID NO: 2048541 - DNA, 15 bp, Homo sapiens
cgccttcagcccctg

SEQ ID NO: 2048542 - DNA, 15 bp, Homo sapiens
gccttcagcccctgc

SEQ ID NO: 2048543 - DNA, 15 bp, Homo sapiens
ccttcagcccctgct

SEQ ID NO: 2048544 - DNA, 15 bp, Homo sapiens
cttcagcccctgctg

SEQ ID NO: 2048545 - DNA, 15 bp, Homo sapiens
ttcagcccctgctgc

SEQ ID NO: 2048546 - DNA, 15 bp, Homo sapiens
tcagcccctgctgct

SEQ ID NO: 2048547 - DNA, 15 bp, Homo sapiens
cagcccctgctgctt

SEQ ID NO: 2048548 - DNA, 15 bp, Homo sapiens
agcccctgctgcttt

SEQ ID NO: 2048549 - DNA, 15 bp, Homo sapiens
gcccctgctgctttt

SEQ ID NO: 2048550 - DNA, 15 bp, Homo sapiens
cccctgctgcttttg

SEQ ID NO: 2048551 - DNA, 15 bp, Homo sapiens
ccctgctgcttttgg

SEQ ID NO: 2048552 - DNA, 15 bp, Homo sapiens
cctgctgcttttggc

SEQ ID NO: 2048553 - DNA, 15 bp, Homo sapiens
ctgctgcttttggct

SEQ ID NO: 2048554 - DNA, 15 bp, Homo sapiens
tgctgcttttggctc

SEQ ID NO: 2048555 - DNA, 15 bp, Homo sapiens
gctgcttttggctcc

SEQ ID NO: 2048556 - DNA, 15 bp, Homo sapiens
ctgcttttggctcct

SEQ ID NO: 2048557 - DNA, 15 bp, Homo sapiens
tgcttttggctcctt

SEQ ID NO: 2048558 - DNA, 15 bp, Homo sapiens
gcttttggctccttt

SEQ ID NO: 2048559 - DNA, 15 bp, Homo sapiens
cttttggctcctttg

SEQ ID NO: 2048560 - DNA, 15 bp, Homo sapiens
ttttggctcctttgg

SEQ ID NO: 2048561 - DNA, 15 bp, Homo sapiens
tttggctcctttggc

SEQ ID NO: 2048562 - DNA, 15 bp, Homo sapiens
ttggctcctttggcc

SEQ ID NO: 2048563 - DNA, 15 bp, Homo sapiens
tggctcctttggcct

SEQ ID NO: 2048564 - DNA, 15 bp, Homo sapiens
ggctcctttggcctc

SEQ ID NO: 2048565 - DNA, 15 bp, Homo sapiens
gctcctttggcctcc

SEQ ID NO: 2048566 - DNA, 15 bp, Homo sapiens
ctcctttggcctcca

SEQ ID NO: 2048567 - DNA, 15 bp, Homo sapiens
tcctttggcctccaa

SEQ ID NO: 2048568 - DNA, 15 bp, Homo sapiens
cctttggcctccaac

SEQ ID NO: 2048569 - DNA, 15 bp, Homo sapiens
ctttggcctccaacg

SEQ ID NO: 2048570 - DNA, 15 bp, Homo sapiens
tttggcctccaacgg

SEQ ID NO: 2048571 - DNA, 15 bp, Homo sapiens
ttggcctccaacggg

SEQ ID NO: 2048572 - DNA, 15 bp, Homo sapiens
tggcctccaacgggg

SEQ ID NO: 2048573 - DNA, 15 bp, Homo sapiens
ggcctccaacggggt

SEQ ID NO: 2048574 - DNA, 15 bp, Homo sapiens
gcctccaacggggta

SEQ ID NO: 2048575 - DNA, 15 bp, Homo sapiens
cctccaacggggtaa

SEQ ID NO: 2048576 - DNA, 15 bp, Homo sapiens
ctccaacggggtaac

SEQ ID NO: 2048577 - DNA, 15 bp, Homo sapiens
tccaacggggtaaca

SEQ ID NO: 2048578 - DNA, 15 bp, Homo sapiens
ccaacggggtaacac

SEQ ID NO: 2048579 - DNA, 15 bp, Homo sapiens
caacggggtaacact

SEQ ID NO: 2048580 - DNA, 15 bp, Homo sapiens
aacggggtaacactg

SEQ ID NO: 2048581 - DNA, 15 bp, Homo sapiens
acggggtaacactgg

SEQ ID NO: 2048582 - DNA, 15 bp, Homo sapiens
cggggtaacactggg

SEQ ID NO: 2048583 - DNA, 15 bp, Homo sapiens
ggggtaacactgggt

SEQ ID NO: 2048584 - DNA, 15 bp, Homo sapiens
gggtaacactgggtg

SEQ ID NO: 2048585 - DNA, 15 bp, Homo sapiens
ggtaacactgggtga

SEQ ID NO: 2048586 - DNA, 15 bp, Homo sapiens
gtaacactgggtgac

SEQ ID NO: 2048587 - DNA, 15 bp, Homo sapiens
taacactgggtgaca

SEQ ID NO: 2048588 - DNA, 15 bp, Homo sapiens
aacactgggtgacag

SEQ ID NO: 2048589 - DNA, 15 bp, Homo sapiens
acactgggtgacagg

SEQ ID NO: 2048590 - DNA, 15 bp, Homo sapiens
cactgggtgacaggc

SEQ ID NO: 2048591 - DNA, 15 bp, Homo sapiens
actgggtgacaggcc

SEQ ID NO: 2048592 - DNA, 15 bp, Homo sapiens
ctgggtgacaggcct

SEQ ID NO: 2048593 - DNA, 15 bp, Homo sapiens
tgggtgacaggcctg

SEQ ID NO: 2048594 - DNA, 15 bp, Homo sapiens
gggtgacaggcctga

SEQ ID NO: 2048595 - DNA, 15 bp, Homo sapiens
ggtgacaggcctgag

SEQ ID NO: 2048596 - DNA, 15 bp, Homo sapiens
gtgacaggcctgagg

SEQ ID NO: 2048597 - DNA, 15 bp, Homo sapiens
tgacaggcctgagga

SEQ ID NO: 2048598 - DNA, 15 bp, Homo sapiens
gacaggcctgaggac

SEQ ID NO: 2048599 - DNA, 15 bp, Homo sapiens
acaggcctgaggaca

SEQ ID NO: 2048600 - DNA, 15 bp, Homo sapiens
caggcctgaggacat

SEQ ID NO: 2048601 - DNA, 15 bp, Homo sapiens
aggcctgaggacatc

SEQ ID NO: 2048602 - DNA, 15 bp, Homo sapiens
ggcctgaggacatcc

SEQ ID NO: 2048603 - DNA, 15 bp, Homo sapiens
gcctgaggacatccc

SEQ ID NO: 2048604 - DNA, 15 bp, Homo sapiens
cctgaggacatccca

SEQ ID NO: 2048605 - DNA, 15 bp, Homo sapiens
ctgaggacatcccag

SEQ ID NO: 2048606 - DNA, 15 bp, Homo sapiens
tgaggacatcccagg

SEQ ID NO: 2048607 - DNA, 15 bp, Homo sapiens
gaggacatcccagga

SEQ ID NO: 2048608 - DNA, 15 bp, Homo sapiens
aggacatcccaggaa

SEQ ID NO: 2048609 - DNA, 15 bp, Homo sapiens
ggacatcccaggaag

SEQ ID NO: 2048610 - DNA, 15 bp, Homo sapiens
gacatcccaggaagg

SEQ ID NO: 2048611 - DNA, 15 bp, Homo sapiens
acatcccaggaagga

SEQ ID NO: 2048612 - DNA, 15 bp, Homo sapiens
catcccaggaaggac

SEQ ID NO: 2048613 - DNA, 15 bp, Homo sapiens
atcccaggaaggact

SEQ ID NO: 2048614 - DNA, 15 bp, Homo sapiens
tcccaggaaggactt

SEQ ID NO: 2048615 - DNA, 15 bp, Homo sapiens
cccaggaaggacttt

SEQ ID NO: 2048616 - DNA, 15 bp, Homo sapiens
ccaggaaggactttg

SEQ ID NO: 2048617 - DNA, 15 bp, Homo sapiens
caggaaggactttgg

SEQ ID NO: 2048618 - DNA, 15 bp, Homo sapiens
aggaaggactttggg

SEQ ID NO: 2048619 - DNA, 15 bp, Homo sapiens
ggaaggactttggga

SEQ ID NO: 2048620 - DNA, 15 bp, Homo sapiens
gaaggactttgggag

SEQ ID NO: 2048621 - DNA, 15 bp, Homo sapiens
aaggactttgggagc

SEQ ID NO: 2048622 - DNA, 15 bp, Homo sapiens
aggactttgggagct

SEQ ID NO: 2048623 - DNA, 15 bp, Homo sapiens
ggactttgggagctg

SEQ ID NO: 2048624 - DNA, 15 bp, Homo sapiens
gactttgggagctga

SEQ ID NO: 2048625 - DNA, 15 bp, Homo sapiens
actttgggagctgag

SEQ ID NO: 2048626 - DNA, 15 bp, Homo sapiens
ctttgggagctgaga

SEQ ID NO: 2048627 - DNA, 15 bp, Homo sapiens
tttgggagctgagat

SEQ ID NO: 2048628 - DNA, 15 bp, Homo sapiens
ttgggagctgagatt

SEQ ID NO: 2048629 - DNA, 15 bp, Homo sapiens
tgggagctgagattt

SEQ ID NO: 2048630 - DNA, 15 bp, Homo sapiens
gggagctgagatttc

SEQ ID NO: 2048631 - DNA, 15 bp, Homo sapiens
ggagctgagatttca

SEQ ID NO: 2048632 - DNA, 15 bp, Homo sapiens
gagctgagatttcac

SEQ ID NO: 2048633 - DNA, 15 bp, Homo sapiens
agctgagatttcact

SEQ ID NO: 2048634 - DNA, 15 bp, Homo sapiens
gctgagatttcactc

SEQ ID NO: 2048635 - DNA, 15 bp, Homo sapiens
ctgagatttcactct

SEQ ID NO: 2048636 - DNA, 15 bp, Homo sapiens
tgagatttcactctt

SEQ ID NO: 2048637 - DNA, 15 bp, Homo sapiens
gagatttcactcttt

SEQ ID NO: 2048638 - DNA, 15 bp, Homo sapiens
agatttcactctttg

SEQ ID NO: 2048639 - DNA, 15 bp, Homo sapiens
gatttcactctttgt

SEQ ID NO: 2048640 - DNA, 15 bp, Homo sapiens
atttcactctttgtt

SEQ ID NO: 2048641 - DNA, 15 bp, Homo sapiens
tttcactctttgttg

SEQ ID NO: 2048642 - DNA, 15 bp, Homo sapiens
ttcactctttgttgt

SEQ ID NO: 2048643 - DNA, 15 bp, Homo sapiens
tcactctttgttgta

SEQ ID NO: 2048644 - DNA, 15 bp, Homo sapiens
cactctttgttgtac

SEQ ID NO: 2048645 - DNA, 15 bp, Homo sapiens
actctttgttgtact

SEQ ID NO: 2048646 - DNA, 15 bp, Homo sapiens
ctctttgttgtactg

SEQ ID NO: 2048647 - DNA, 15 bp, Homo sapiens
tctttgttgtactgg

SEQ ID NO: 2048648 - DNA, 15 bp, Homo sapiens
ctttgttgtactggg

SEQ ID NO: 2048649 - DNA, 15 bp, Homo sapiens
tttgttgtactgggt

SEQ ID NO: 2048650 - DNA, 15 bp, Homo sapiens
ttgttgtactgggtt

SEQ ID NO: 2048651 - DNA, 15 bp, Homo sapiens
tgttgtactgggttt

SEQ ID NO: 2048652 - DNA, 15 bp, Homo sapiens
gttgtactgggtttt

SEQ ID NO: 2048653 - DNA, 15 bp, Homo sapiens
ttgtactgggtttta

SEQ ID NO: 2048654 - DNA, 15 bp, Homo sapiens
tgtactgggttttat

SEQ ID NO: 2048655 - DNA, 15 bp, Homo sapiens
gtactgggttttatc

SEQ ID NO: 2048656 - DNA, 15 bp, Homo sapiens
tactgggttttatct

SEQ ID NO: 2048657 - DNA, 15 bp, Homo sapiens
actgggttttatctc

SEQ ID NO: 2048658 - DNA, 15 bp, Homo sapiens
ctgggttttatctct

SEQ ID NO: 2048659 - DNA, 15 bp, Homo sapiens
tgggttttatctctg

SEQ ID NO: 2048660 - DNA, 15 bp, Homo sapiens
gggttttatctctgg

SEQ ID NO: 2048661 - DNA, 15 bp, Homo sapiens
ggttttatctctggg

SEQ ID NO: 2048662 - DNA, 15 bp, Homo sapiens
gttttatctctggga

SEQ ID NO: 2048663 - DNA, 15 bp, Homo sapiens
ttttatctctgggat

SEQ ID NO: 2048664 - DNA, 15 bp, Homo sapiens
tttatctctgggatc

SEQ ID NO: 2048665 - DNA, 15 bp, Homo sapiens
ttatctctgggatcc

SEQ ID NO: 2048666 - DNA, 15 bp, Homo sapiens
tatctctgggatcct

SEQ ID NO: 2048667 - DNA, 15 bp, Homo sapiens
atctctgggatccta

SEQ ID NO: 2048668 - DNA, 15 bp, Homo sapiens
tctctgggatcctaa

SEQ ID NO: 2048669 - DNA, 15 bp, Homo sapiens
ctctgggatcctaaa

SEQ ID NO: 2048670 - DNA, 15 bp, Homo sapiens
tctgggatcctaaat

SEQ ID NO: 2048671 - DNA, 15 bp, Homo sapiens
ctgggatcctaaatt

SEQ ID NO: 2048672 - DNA, 15 bp, Homo sapiens
tgggatcctaaattt

SEQ ID NO: 2048673 - DNA, 15 bp, Homo sapiens
gggatcctaaatttt

SEQ ID NO: 2048674 - DNA, 15 bp, Homo sapiens
ggatcctaaattttt

SEQ ID NO: 2048675 - DNA, 15 bp, Homo sapiens
gatcctaaatttttg

SEQ ID NO: 2048676 - DNA, 15 bp, Homo sapiens
atcctaaatttttgt

SEQ ID NO: 2048677 - DNA, 15 bp, Homo sapiens
tcctaaatttttgta

SEQ ID NO: 2048678 - DNA, 15 bp, Homo sapiens
cctaaatttttgtag

SEQ ID NO: 2048679 - DNA, 15 bp, Homo sapiens
ctaaatttttgtagt

SEQ ID NO: 2048680 - DNA, 15 bp, Homo sapiens
taaatttttgtagta

SEQ ID NO: 2048681 - DNA, 15 bp, Homo sapiens
aaatttttgtagtaa

SEQ ID NO: 2048682 - DNA, 15 bp, Homo sapiens
aatttttgtagtaat

SEQ ID NO: 2048683 - DNA, 15 bp, Homo sapiens
atttttgtagtaatg

SEQ ID NO: 2048684 - DNA, 15 bp, Homo sapiens
tttttgtagtaatga

SEQ ID NO: 2048685 - DNA, 15 bp, Homo sapiens
ttttgtagtaatgaa

SEQ ID NO: 2048686 - DNA, 15 bp, Homo sapiens
tttgtagtaatgaat

SEQ ID NO: 2048687 - DNA, 15 bp, Homo sapiens
ttgtagtaatgaatc

SEQ ID NO: 2048688 - DNA, 15 bp, Homo sapiens
tgtagtaatgaatct

SEQ ID NO: 2048689 - DNA, 15 bp, Homo sapiens
gtagtaatgaatctt

SEQ ID NO: 2048690 - DNA, 15 bp, Homo sapiens
tagtaatgaatcttt

SEQ ID NO: 2048691 - DNA, 15 bp, Homo sapiens
agtaatgaatctttc

SEQ ID NO: 2048692 - DNA, 15 bp, Homo sapiens
gtaatgaatctttct

SEQ ID NO: 2048693 - DNA, 15 bp, Homo sapiens
taatgaatctttctc

SEQ ID NO: 2048694 - DNA, 15 bp, Homo sapiens
aatgaatctttctcc

SEQ ID NO: 2048695 - DNA, 15 bp, Homo sapiens
atgaatctttctcct

SEQ ID NO: 2048696 - DNA, 15 bp, Homo sapiens
tgaatctttctcctg

SEQ ID NO: 2048697 - DNA, 15 bp, Homo sapiens
gaatctttctcctgt

SEQ ID NO: 2048698 - DNA, 15 bp, Homo sapiens
aatctttctcctgtt

SEQ ID NO: 2048699 - DNA, 15 bp, Homo sapiens
atctttctcctgttt

SEQ ID NO: 2048700 - DNA, 15 bp, Homo sapiens
tctttctcctgttta

SEQ ID NO: 2048701 - DNA, 15 bp, Homo sapiens
ctttctcctgtttac

SEQ ID NO: 2048702 - DNA, 15 bp, Homo sapiens
tttctcctgtttaca

SEQ ID NO: 2048703 - DNA, 15 bp, Homo sapiens
ttctcctgtttacag

SEQ ID NO: 2048704 - DNA, 15 bp, Homo sapiens
tctcctgtttacagt

SEQ ID NO: 2048705 - DNA, 15 bp, Homo sapiens
ctcctgtttacagtt

SEQ ID NO: 2048706 - DNA, 15 bp, Homo sapiens
tcctgtttacagttc

SEQ ID NO: 2048707 - DNA, 15 bp, Homo sapiens
cctgtttacagttct

SEQ ID NO: 2048708 - DNA, 15 bp, Homo sapiens
ctgtttacagttctt

SEQ ID NO: 2048709 - DNA, 15 bp, Homo sapiens
tgtttacagttcttc

SEQ ID NO: 2048710 - DNA, 15 bp, Homo sapiens
gtttacagttcttca

SEQ ID NO: 2048711 - DNA, 15 bp, Homo sapiens
tttacagttcttcac

SEQ ID NO: 2048712 - DNA, 15 bp, Homo sapiens
ttacagttcttcacc

SEQ ID NO: 2048713 - DNA, 15 bp, Homo sapiens
tacagttcttcacct

SEQ ID NO: 2048714 - DNA, 15 bp, Homo sapiens
acagttcttcacctc

SEQ ID NO: 2048715 - DNA, 15 bp, Homo sapiens
cagttcttcacctcc

SEQ ID NO: 2048716 - DNA, 15 bp, Homo sapiens
agttcttcacctccc

SEQ ID NO: 2048717 - DNA, 15 bp, Homo sapiens
gttcttcacctccca

SEQ ID NO: 2048718 - DNA, 15 bp, Homo sapiens
ttcttcacctcccag

SEQ ID NO: 2048719 - DNA, 15 bp, Homo sapiens
tcttcacctcccagc

SEQ ID NO: 2048720 - DNA, 15 bp, Homo sapiens
cttcacctcccagcc

SEQ ID NO: 2048721 - DNA, 15 bp, Homo sapiens
ttcacctcccagcca

SEQ ID NO: 2048722 - DNA, 15 bp, Homo sapiens
tcacctcccagccac

SEQ ID NO: 2048723 - DNA, 15 bp, Homo sapiens
cacctcccagccact

SEQ ID NO: 2048724 - DNA, 15 bp, Homo sapiens
acctcccagccacta

SEQ ID NO: 2048725 - DNA, 15 bp, Homo sapiens
cctcccagccactac

SEQ ID NO: 2048726 - DNA, 15 bp, Homo sapiens
ctcccagccactacc

SEQ ID NO: 2048727 - DNA, 15 bp, Homo sapiens
tcccagccactacct

SEQ ID NO: 2048728 - DNA, 15 bp, Homo sapiens
cccagccactacctc

SEQ ID NO: 2048729 - DNA, 15 bp, Homo sapiens
ccagccactacctcc

SEQ ID NO: 2048730 - DNA, 15 bp, Homo sapiens
cagccactacctccc

SEQ ID NO: 2048731 - DNA, 15 bp, Homo sapiens
agccactacctccca

SEQ ID NO: 2048732 - DNA, 15 bp, Homo sapiens
gccactacctcccac

SEQ ID NO: 2048733 - DNA, 15 bp, Homo sapiens
ccactacctcccacg

SEQ ID NO: 2048734 - DNA, 15 bp, Homo sapiens
cactacctcccacgc

SEQ ID NO: 2048735 - DNA, 15 bp, Homo sapiens
actacctcccacgcc

SEQ ID NO: 2048736 - DNA, 15 bp, Homo sapiens
ctacctcccacgcca

SEQ ID NO: 2048737 - DNA, 15 bp, Homo sapiens
tacctcccacgccaa

SEQ ID NO: 2048738 - DNA, 15 bp, Homo sapiens
acctcccacgccaag

SEQ ID NO: 2048739 - DNA, 15 bp, Homo sapiens
cctcccacgccaagc

SEQ ID NO: 2048740 - DNA, 15 bp, Homo sapiens
ctcccacgccaagca

SEQ ID NO: 2048741 - DNA, 15 bp, Homo sapiens
tcccacgccaagcaa

SEQ ID NO: 2048742 - DNA, 15 bp, Homo sapiens
cccacgccaagcaaa

SEQ ID NO: 2048743 - DNA, 15 bp, Homo sapiens
ccacgccaagcaaaa

SEQ ID NO: 2048744 - DNA, 15 bp, Homo sapiens
cacgccaagcaaaaa

SEQ ID NO: 2048745 - DNA, 15 bp, Homo sapiens
acgccaagcaaaaaa

SEQ ID NO: 2048746 - DNA, 15 bp, Homo sapiens
cgccaagcaaaaaaa

SEQ ID NO: 2048747 - DNA, 15 bp, Homo sapiens
gccaagcaaaaaaaa

SEQ ID NO: 2048748 - DNA, 15 bp, Homo sapiens
ccaagcaaaaaaaat

SEQ ID NO: 2048749 - DNA, 15 bp, Homo sapiens
caagcaaaaaaaata

SEQ ID NO: 2048750 - DNA, 15 bp, Homo sapiens
aagcaaaaaaaataa

SEQ ID NO: 2048751 - DNA, 15 bp, Homo sapiens
agcaaaaaaaataaa

SEQ ID NO: 2048752 - DNA, 15 bp, Homo sapiens
gcaaaaaaaataaat

SEQ ID NO: 2048753 - DNA, 15 bp, Homo sapiens
caaaaaaaataaata

SEQ ID NO: 2048754 - DNA, 15 bp, Homo sapiens
aaaaaaaataaataa

SEQ ID NO: 2048755 - DNA, 15 bp, Homo sapiens
aataaataaataata

SEQ ID NO: 2048756 - DNA, 15 bp, Homo sapiens
ataaataaataataa

SEQ ID NO: 2048757 - DNA, 15 bp, Homo sapiens
aaataaataataaat

SEQ ID NO: 2048758 - DNA, 15 bp, Homo sapiens
aataaataataaatc

SEQ ID NO: 2048759 - DNA, 15 bp, Homo sapiens
ataaataataaatca

SEQ ID NO: 2048760 - DNA, 15 bp, Homo sapiens
taaataataaatcat

SEQ ID NO: 2048761 - DNA, 15 bp, Homo sapiens
aaataataaatcatt

SEQ ID NO: 2048762 - DNA, 15 bp, Homo sapiens
aataataaatcattt

SEQ ID NO: 2048763 - DNA, 15 bp, Homo sapiens
ataataaatcatttt

SEQ ID NO: 2048764 - DNA, 15 bp, Homo sapiens
taataaatcattttt

SEQ ID NO: 2048765 - DNA, 15 bp, Homo sapiens
aataaatcatttttg

SEQ ID NO: 2048766 - DNA, 15 bp, Homo sapiens
ataaatcatttttga

SEQ ID NO: 2048767 - DNA, 15 bp, Homo sapiens
taaatcatttttgat

SEQ ID NO: 2048768 - DNA, 15 bp, Homo sapiens
aaatcatttttgatt

SEQ ID NO: 2048769 - DNA, 15 bp, Homo sapiens
aatcatttttgattc

SEQ ID NO: 2048770 - DNA, 15 bp, Homo sapiens
atcatttttgattcc

SEQ ID NO: 2048771 - DNA, 15 bp, Homo sapiens
tcatttttgattcct

SEQ ID NO: 2048772 - DNA, 15 bp, Homo sapiens
catttttgattcctt

SEQ ID NO: 2048773 - DNA, 15 bp, Homo sapiens
atttttgattccttt

SEQ ID NO: 2048774 - DNA, 15 bp, Homo sapiens
tttttgattcctttc

SEQ ID NO: 2048775 - DNA, 15 bp, Homo sapiens
ttttgattcctttct

SEQ ID NO: 2048776 - DNA, 15 bp, Homo sapiens
tttgattcctttctt

SEQ ID NO: 2048777 - DNA, 15 bp, Homo sapiens
gattcctttcttcca

SEQ ID NO: 2048778 - DNA, 15 bp, Homo sapiens
attcctttcttccaa

SEQ ID NO: 2048779 - DNA, 15 bp, Homo sapiens
ttcctttcttccaac

SEQ ID NO: 2048780 - DNA, 15 bp, Homo sapiens
tcctttcttccaacc

SEQ ID NO: 2048781 - DNA, 15 bp, Homo sapiens
cctttcttccaacct

SEQ ID NO: 2048782 - DNA, 15 bp, Homo sapiens
ctttcttccaacctc

SEQ ID NO: 2048783 - DNA, 15 bp, Homo sapiens
tttcttccaacctct

SEQ ID NO: 2048784 - DNA, 15 bp, Homo sapiens
ttcttccaacctcta

SEQ ID NO: 2048785 - DNA, 15 bp, Homo sapiens
tcttccaacctctaa

SEQ ID NO: 2048786 - DNA, 15 bp, Homo sapiens
cttccaacctctaat

SEQ ID NO: 2048787 - DNA, 15 bp, Homo sapiens
ttccaacctctaatt

SEQ ID NO: 2048788 - DNA, 15 bp, Homo sapiens
tccaacctctaattt

SEQ ID NO: 2048789 - DNA, 15 bp, Homo sapiens
ccaacctctaatttc

SEQ ID NO: 2048790 - DNA, 15 bp, Homo sapiens
caacctctaatttcc

SEQ ID NO: 2048791 - DNA, 15 bp, Homo sapiens
aacctctaatttcct

SEQ ID NO: 2048792 - DNA, 15 bp, Homo sapiens
acctctaatttcctg

SEQ ID NO: 2048793 - DNA, 15 bp, Homo sapiens
cctctaatttcctgg

SEQ ID NO: 2048794 - DNA, 15 bp, Homo sapiens
ctctaatttcctggt

SEQ ID NO: 2048795 - DNA, 15 bp, Homo sapiens
tctaatttcctggtt

SEQ ID NO: 2048796 - DNA, 15 bp, Homo sapiens
ctaatttcctggttt

SEQ ID NO: 2048797 - DNA, 15 bp, Homo sapiens
taatttcctggtttc

SEQ ID NO: 2048798 - DNA, 15 bp, Homo sapiens
aatttcctggtttcc

SEQ ID NO: 2048799 - DNA, 15 bp, Homo sapiens
atttcctggtttcct

SEQ ID NO: 2048800 - DNA, 15 bp, Homo sapiens
tttcctggtttcctc

SEQ ID NO: 2048801 - DNA, 15 bp, Homo sapiens
ttcctggtttcctca

SEQ ID NO: 2048802 - DNA, 15 bp, Homo sapiens
tcctggtttcctcag

SEQ ID NO: 2048803 - DNA, 15 bp, Homo sapiens
cctggtttcctcagc

SEQ ID NO: 2048804 - DNA, 15 bp, Homo sapiens
ctggtttcctcagcg

SEQ ID NO: 2048805 - DNA, 15 bp, Homo sapiens
tggtttcctcagcgc

SEQ ID NO: 2048806 - DNA, 15 bp, Homo sapiens
ggtttcctcagcgct

SEQ ID NO: 2048807 - DNA, 15 bp, Homo sapiens
gtttcctcagcgctc

SEQ ID NO: 2048808 - DNA, 15 bp, Homo sapiens
tttcctcagcgctca

SEQ ID NO: 2048809 - DNA, 15 bp, Homo sapiens
ttcctcagcgctcag

SEQ ID NO: 2048810 - DNA, 15 bp, Homo sapiens
tcctcagcgctcagt

SEQ ID NO: 2048811 - DNA, 15 bp, Homo sapiens
cctcagcgctcagtg

SEQ ID NO: 2048812 - DNA, 15 bp, Homo sapiens
ctcagcgctcagtgt

SEQ ID NO: 2048813 - DNA, 15 bp, Homo sapiens
tcagcgctcagtgtt

SEQ ID NO: 2048814 - DNA, 15 bp, Homo sapiens
cagcgctcagtgttt

SEQ ID NO: 2048815 - DNA, 15 bp, Homo sapiens
agcgctcagtgtttg

SEQ ID NO: 2048816 - DNA, 15 bp, Homo sapiens
gcgctcagtgtttgt

SEQ ID NO: 2048817 - DNA, 15 bp, Homo sapiens
cgctcagtgtttgtg

SEQ ID NO: 2048818 - DNA, 15 bp, Homo sapiens
gctcagtgtttgtgt

SEQ ID NO: 2048819 - DNA, 15 bp, Homo sapiens
ctcagtgtttgtgtt

SEQ ID NO: 2048820 - DNA, 15 bp, Homo sapiens
tcagtgtttgtgttg

SEQ ID NO: 2048821 - DNA, 15 bp, Homo sapiens
cagtgtttgtgttgg

SEQ ID NO: 2048822 - DNA, 15 bp, Homo sapiens
agtgtttgtgttggg

SEQ ID NO: 2048823 - DNA, 15 bp, Homo sapiens
gtgtttgtgttggga

SEQ ID NO: 2048824 - DNA, 15 bp, Homo sapiens
tgtttgtgttgggag

SEQ ID NO: 2048825 - DNA, 15 bp, Homo sapiens
gtttgtgttgggaga

SEQ ID NO: 2048826 - DNA, 15 bp, Homo sapiens
tttgtgttgggagac

SEQ ID NO: 2048827 - DNA, 15 bp, Homo sapiens
ttgtgttgggagacc

SEQ ID NO: 2048828 - DNA, 15 bp, Homo sapiens
tgtgttgggagaccc

SEQ ID NO: 2048829 - DNA, 15 bp, Homo sapiens
gtgttgggagaccca

SEQ ID NO: 2048830 - DNA, 15 bp, Homo sapiens
tgttgggagacccat

SEQ ID NO: 2048831 - DNA, 15 bp, Homo sapiens
gttgggagacccatt

SEQ ID NO: 2048832 - DNA, 15 bp, Homo sapiens
ttgggagacccatta

SEQ ID NO: 2048833 - DNA, 15 bp, Homo sapiens
tgggagacccattag

SEQ ID NO: 2048834 - DNA, 15 bp, Homo sapiens
gggagacccattagg

SEQ ID NO: 2048835 - DNA, 15 bp, Homo sapiens
ggagacccattaggg

SEQ ID NO: 2048836 - DNA, 15 bp, Homo sapiens
gagacccattaggga

SEQ ID NO: 2048837 - DNA, 15 bp, Homo sapiens
agacccattagggat

SEQ ID NO: 2048838 - DNA, 15 bp, Homo sapiens
gacccattagggatg

SEQ ID NO: 2048839 - DNA, 15 bp, Homo sapiens
acccattagggatga

SEQ ID NO: 2048840 - DNA, 15 bp, Homo sapiens
cccattagggatgag

SEQ ID NO: 2048841 - DNA, 15 bp, Homo sapiens
ccattagggatgaga

SEQ ID NO: 2048842 - DNA, 15 bp, Homo sapiens
cattagggatgagag

SEQ ID NO: 2048843 - DNA, 15 bp, Homo sapiens
attagggatgagaga

SEQ ID NO: 2048844 - DNA, 15 bp, Homo sapiens
ttagggatgagagag

SEQ ID NO: 2048845 - DNA, 15 bp, Homo sapiens
tagggatgagagaga

SEQ ID NO: 2048846 - DNA, 15 bp, Homo sapiens
agggatgagagagag

SEQ ID NO: 2048847 - DNA, 15 bp, Homo sapiens
gggatgagagagagg

SEQ ID NO: 2048848 - DNA, 15 bp, Homo sapiens
ggatgagagagaggg

SEQ ID NO: 2048849 - DNA, 15 bp, Homo sapiens
gatgagagagagggg

SEQ ID NO: 2048850 - DNA, 15 bp, Homo sapiens
atgagagagagggga

SEQ ID NO: 2048851 - DNA, 15 bp, Homo sapiens
tgagagagaggggag

SEQ ID NO: 2048852 - DNA, 15 bp, Homo sapiens
gagagagaggggaga

SEQ ID NO: 2048853 - DNA, 15 bp, Homo sapiens
agagagaggggagaa

SEQ ID NO: 2048854 - DNA, 15 bp, Homo sapiens
gagagaggggagaag

SEQ ID NO: 2048855 - DNA, 15 bp, Homo sapiens
agagaggggagaagg

SEQ ID NO: 2048856 - DNA, 15 bp, Homo sapiens
gagaggggagaagga

SEQ ID NO: 2048857 - DNA, 15 bp, Homo sapiens
agaggggagaaggaa

SEQ ID NO: 2048858 - DNA, 15 bp, Homo sapiens
gaggggagaaggaat

SEQ ID NO: 2048859 - DNA, 15 bp, Homo sapiens
aggggagaaggaatg

SEQ ID NO: 2048860 - DNA, 15 bp, Homo sapiens
ggggagaaggaatgg

SEQ ID NO: 2048861 - DNA, 15 bp, Homo sapiens
gggagaaggaatggt

SEQ ID NO: 2048862 - DNA, 15 bp, Homo sapiens
ggagaaggaatggtt

SEQ ID NO: 2048863 - DNA, 15 bp, Homo sapiens
gagaaggaatggttt

SEQ ID NO: 2048864 - DNA, 15 bp, Homo sapiens
agaaggaatggtttt

SEQ ID NO: 2048865 - DNA, 15 bp, Homo sapiens
aaggaatggttttga

SEQ ID NO: 2048866 - DNA, 15 bp, Homo sapiens
aggaatggttttgaa

SEQ ID NO: 2048867 - DNA, 15 bp, Homo sapiens
ggaatggttttgaac

SEQ ID NO: 2048868 - DNA, 15 bp, Homo sapiens
gaatggttttgaaca

SEQ ID NO: 2048869 - DNA, 15 bp, Homo sapiens
aatggttttgaacac

SEQ ID NO: 2048870 - DNA, 15 bp, Homo sapiens
atggttttgaacaca

SEQ ID NO: 2048871 - DNA, 15 bp, Homo sapiens
tggttttgaacacag

SEQ ID NO: 2048872 - DNA, 15 bp, Homo sapiens
ggttttgaacacaga

SEQ ID NO: 2048873 - DNA, 15 bp, Homo sapiens
gttttgaacacagaa

SEQ ID NO: 2048874 - DNA, 15 bp, Homo sapiens
ttttgaacacagaaa

SEQ ID NO: 2048875 - DNA, 15 bp, Homo sapiens
tttgaacacagaaaa

SEQ ID NO: 2048876 - DNA, 15 bp, Homo sapiens
ttgaacacagaaaaa

SEQ ID NO: 2048877 - DNA, 15 bp, Homo sapiens
tgaacacagaaaaat

SEQ ID NO: 2048878 - DNA, 15 bp, Homo sapiens
gaacacagaaaaatt

SEQ ID NO: 2048879 - DNA, 15 bp, Homo sapiens
aacacagaaaaattg

SEQ ID NO: 2048880 - DNA, 15 bp, Homo sapiens
acacagaaaaattgt

SEQ ID NO: 2048881 - DNA, 15 bp, Homo sapiens
cacagaaaaattgta

SEQ ID NO: 2048882 - DNA, 15 bp, Homo sapiens
acagaaaaattgtag

SEQ ID NO: 2048883 - DNA, 15 bp, Homo sapiens
cagaaaaattgtagt

SEQ ID NO: 2048884 - DNA, 15 bp, Homo sapiens
agaaaaattgtagtc

SEQ ID NO: 2048885 - DNA, 15 bp, Homo sapiens
gaaaaattgtagtcc

SEQ ID NO: 2048886 - DNA, 15 bp, Homo sapiens
aaaaattgtagtccc

SEQ ID NO: 2048887 - DNA, 15 bp, Homo sapiens
aaaattgtagtcccc

SEQ ID NO: 2048888 - DNA, 15 bp, Homo sapiens
aaattgtagtcccct

SEQ ID NO: 2048889 - DNA, 15 bp, Homo sapiens
aattgtagtcccctg

SEQ ID NO: 2048890 - DNA, 15 bp, Homo sapiens
attgtagtcccctgg

SEQ ID NO: 2048891 - DNA, 15 bp, Homo sapiens
ttgtagtcccctgga

SEQ ID NO: 2048892 - DNA, 15 bp, Homo sapiens
tgtagtcccctggat

SEQ ID NO: 2048893 - DNA, 15 bp, Homo sapiens
gtagtcccctggatg

SEQ ID NO: 2048894 - DNA, 15 bp, Homo sapiens
tagtcccctggatgg

SEQ ID NO: 2048895 - DNA, 15 bp, Homo sapiens
agtcccctggatggg

SEQ ID NO: 2048896 - DNA, 15 bp, Homo sapiens
gtcccctggatgggc

SEQ ID NO: 2048897 - DNA, 15 bp, Homo sapiens
tcccctggatgggct

SEQ ID NO: 2048898 - DNA, 15 bp, Homo sapiens
cccctggatgggctg

SEQ ID NO: 2048899 - DNA, 15 bp, Homo sapiens
ccctggatgggctgt

SEQ ID NO: 2048900 - DNA, 15 bp, Homo sapiens
cctggatgggctgta

SEQ ID NO: 2048901 - DNA, 15 bp, Homo sapiens
ctggatgggctgtag

SEQ ID NO: 2048902 - DNA, 15 bp, Homo sapiens
tggatgggctgtagc

SEQ ID NO: 2048903 - DNA, 15 bp, Homo sapiens
ggatgggctgtagcc

SEQ ID NO: 2048904 - DNA, 15 bp, Homo sapiens
gatgggctgtagccc

SEQ ID NO: 2048905 - DNA, 15 bp, Homo sapiens
atgggctgtagccct

SEQ ID NO: 2048906 - DNA, 15 bp, Homo sapiens
tgggctgtagccctt

SEQ ID NO: 2048907 - DNA, 15 bp, Homo sapiens
gggctgtagcccttc

SEQ ID NO: 2048908 - DNA, 15 bp, Homo sapiens
ggctgtagcccttcc

SEQ ID NO: 2048909 - DNA, 15 bp, Homo sapiens
gctgtagcccttccg

SEQ ID NO: 2048910 - DNA, 15 bp, Homo sapiens
ctgtagcccttccgg

SEQ ID NO: 2048911 - DNA, 15 bp, Homo sapiens
tgtagcccttccggg

SEQ ID NO: 2048912 - DNA, 15 bp, Homo sapiens
gtagcccttccgggt

SEQ ID NO: 2048913 - DNA, 15 bp, Homo sapiens
tagcccttccgggtc

SEQ ID NO: 2048914 - DNA, 15 bp, Homo sapiens
agcccttccgggtca

SEQ ID NO: 2048915 - DNA, 15 bp, Homo sapiens
gcccttccgggtcac

SEQ ID NO: 2048916 - DNA, 15 bp, Homo sapiens
cccttccgggtcacc

SEQ ID NO: 2048917 - DNA, 15 bp, Homo sapiens
ccttccgggtcaccc

SEQ ID NO: 2048918 - DNA, 15 bp, Homo sapiens
cttccgggtcaccct

SEQ ID NO: 2048919 - DNA, 15 bp, Homo sapiens
ttccgggtcaccctt

SEQ ID NO: 2048920 - DNA, 15 bp, Homo sapiens
tccgggtcacccttg

SEQ ID NO: 2048921 - DNA, 15 bp, Homo sapiens
ccgggtcacccttgc

SEQ ID NO: 2048922 - DNA, 15 bp, Homo sapiens
cgggtcacccttgcc

SEQ ID NO: 2048923 - DNA, 15 bp, Homo sapiens
gggtcacccttgcca

SEQ ID NO: 2048924 - DNA, 15 bp, Homo sapiens
ggtcacccttgccaa

SEQ ID NO: 2048925 - DNA, 15 bp, Homo sapiens
gtcacccttgccaaa

SEQ ID NO: 2048926 - DNA, 15 bp, Homo sapiens
tcacccttgccaaat

SEQ ID NO: 2048927 - DNA, 15 bp, Homo sapiens
cacccttgccaaatc

SEQ ID NO: 2048928 - DNA, 15 bp, Homo sapiens
acccttgccaaatct

SEQ ID NO: 2048929 - DNA, 15 bp, Homo sapiens
cccttgccaaatctc

SEQ ID NO: 2048930 - DNA, 15 bp, Homo sapiens
ccttgccaaatctcc

SEQ ID NO: 2048931 - DNA, 15 bp, Homo sapiens
cttgccaaatctccg

SEQ ID NO: 2048932 - DNA, 15 bp, Homo sapiens
ttgccaaatctccgg

SEQ ID NO: 2048933 - DNA, 15 bp, Homo sapiens
tgccaaatctccggt

SEQ ID NO: 2048934 - DNA, 15 bp, Homo sapiens
gccaaatctccggtc

SEQ ID NO: 2048935 - DNA, 15 bp, Homo sapiens
ccaaatctccggtcg

SEQ ID NO: 2048936 - DNA, 15 bp, Homo sapiens
caaatctccggtcga

SEQ ID NO: 2048937 - DNA, 15 bp, Homo sapiens
aaatctccggtcgaa

SEQ ID NO: 2048938 - DNA, 15 bp, Homo sapiens
aatctccggtcgaaa

SEQ ID NO: 2048939 - DNA, 15 bp, Homo sapiens
atctccggtcgaaag

SEQ ID NO: 2048940 - DNA, 15 bp, Homo sapiens
tctccggtcgaaagg

SEQ ID NO: 2048941 - DNA, 15 bp, Homo sapiens
ctccggtcgaaaggc

SEQ ID NO: 2048942 - DNA, 15 bp, Homo sapiens
tccggtcgaaaggca

SEQ ID NO: 2048943 - DNA, 15 bp, Homo sapiens
ccggtcgaaaggcag

SEQ ID NO: 2048944 - DNA, 15 bp, Homo sapiens
cggtcgaaaggcagc

SEQ ID NO: 2048945 - DNA, 15 bp, Homo sapiens
ggtcgaaaggcagct

SEQ ID NO: 2048946 - DNA, 15 bp, Homo sapiens
gtcgaaaggcagctg

SEQ ID NO: 2048947 - DNA, 15 bp, Homo sapiens
tcgaaaggcagctga

SEQ ID NO: 2048948 - DNA, 15 bp, Homo sapiens
cgaaaggcagctgag

SEQ ID NO: 2048949 - DNA, 15 bp, Homo sapiens
gaaaggcagctgagc

SEQ ID NO: 2048950 - DNA, 15 bp, Homo sapiens
aaaggcagctgagcc

SEQ ID NO: 2048951 - DNA, 15 bp, Homo sapiens
aaggcagctgagcca

SEQ ID NO: 2048952 - DNA, 15 bp, Homo sapiens
aggcagctgagccag

SEQ ID NO: 2048953 - DNA, 15 bp, Homo sapiens
ggcagctgagccagc

SEQ ID NO: 2048954 - DNA, 15 bp, Homo sapiens
gcagctgagccagct

SEQ ID NO: 2048955 - DNA, 15 bp, Homo sapiens
cagctgagccagctg

SEQ ID NO: 2048956 - DNA, 15 bp, Homo sapiens
agctgagccagctgc

SEQ ID NO: 2048957 - DNA, 15 bp, Homo sapiens
gctgagccagctgcg

SEQ ID NO: 2048958 - DNA, 15 bp, Homo sapiens
ctgagccagctgcgg

SEQ ID NO: 2048959 - DNA, 15 bp, Homo sapiens
tgagccagctgcggg

SEQ ID NO: 2048960 - DNA, 15 bp, Homo sapiens
gagccagctgcgggc

SEQ ID NO: 2048961 - DNA, 15 bp, Homo sapiens
agccagctgcgggca

SEQ ID NO: 2048962 - DNA, 15 bp, Homo sapiens
gccagctgcgggcag

SEQ ID NO: 2048963 - DNA, 15 bp, Homo sapiens
ccagctgcgggcaga

SEQ ID NO: 2048964 - DNA, 15 bp, Homo sapiens
cagctgcgggcagac

SEQ ID NO: 2048965 - DNA, 15 bp, Homo sapiens
agctgcgggcagacg

SEQ ID NO: 2048966 - DNA, 15 bp, Homo sapiens
gctgcgggcagacgc

SEQ ID NO: 2048967 - DNA, 15 bp, Homo sapiens
ctgcgggcagacgcc

SEQ ID NO: 2048968 - DNA, 15 bp, Homo sapiens
tgcgggcagacgccc

SEQ ID NO: 2048969 - DNA, 15 bp, Homo sapiens
gcgggcagacgcccc

SEQ ID NO: 2048970 - DNA, 15 bp, Homo sapiens
cgggcagacgcccct

SEQ ID NO: 2048971 - DNA, 15 bp, Homo sapiens
gggcagacgcccctc

SEQ ID NO: 2048972 - DNA, 15 bp, Homo sapiens
ggcagacgcccctcc

SEQ ID NO: 2048973 - DNA, 15 bp, Homo sapiens
gcagacgcccctccc

SEQ ID NO: 2048974 - DNA, 15 bp, Homo sapiens
cagacgcccctccca

SEQ ID NO: 2048975 - DNA, 15 bp, Homo sapiens
agacgcccctcccag

SEQ ID NO: 2048976 - DNA, 15 bp, Homo sapiens
gacgcccctcccagc

SEQ ID NO: 2048977 - DNA, 15 bp, Homo sapiens
acgcccctcccagca

SEQ ID NO: 2048978 - DNA, 15 bp, Homo sapiens
cgcccctcccagcac

SEQ ID NO: 2048979 - DNA, 15 bp, Homo sapiens
gcccctcccagcact

SEQ ID NO: 2048980 - DNA, 15 bp, Homo sapiens
cccctcccagcactt

SEQ ID NO: 2048981 - DNA, 15 bp, Homo sapiens
ccctcccagcacttt

SEQ ID NO: 2048982 - DNA, 15 bp, Homo sapiens
cctcccagcactttc

SEQ ID NO: 2048983 - DNA, 15 bp, Homo sapiens
ctcccagcactttcc

SEQ ID NO: 2048984 - DNA, 15 bp, Homo sapiens
tcccagcactttcct

SEQ ID NO: 2048985 - DNA, 15 bp, Homo sapiens
cccagcactttcctc

SEQ ID NO: 2048986 - DNA, 15 bp, Homo sapiens
ccagcactttcctct

SEQ ID NO: 2048987 - DNA, 15 bp, Homo sapiens
cagcactttcctcta

SEQ ID NO: 2048988 - DNA, 15 bp, Homo sapiens
agcactttcctctag

SEQ ID NO: 2048989 - DNA, 15 bp, Homo sapiens
gcactttcctctagg

SEQ ID NO: 2048990 - DNA, 15 bp, Homo sapiens
cactttcctctaggc

SEQ ID NO: 2048991 - DNA, 15 bp, Homo sapiens
actttcctctaggcc

SEQ ID NO: 2048992 - DNA, 15 bp, Homo sapiens
ctttcctctaggcct

SEQ ID NO: 2048993 - DNA, 15 bp, Homo sapiens
tttcctctaggcctg

SEQ ID NO: 2048994 - DNA, 15 bp, Homo sapiens
ttcctctaggcctgg

SEQ ID NO: 2048995 - DNA, 15 bp, Homo sapiens
tcctctaggcctgga

SEQ ID NO: 2048996 - DNA, 15 bp, Homo sapiens
cctctaggcctggaa

SEQ ID NO: 2048997 - DNA, 15 bp, Homo sapiens
ctctaggcctggaag

SEQ ID NO: 2048998 - DNA, 15 bp, Homo sapiens
tctaggcctggaagt

SEQ ID NO: 2048999 - DNA, 15 bp, Homo sapiens
ctaggcctggaagta

SEQ ID NO: 2049000 - DNA, 15 bp, Homo sapiens
taggcctggaagtat

SEQ ID NO: 2049001 - DNA, 15 bp, Homo sapiens
aggcctggaagtatt

SEQ ID NO: 2049002 - DNA, 15 bp, Homo sapiens
ggcctggaagtattg

SEQ ID NO: 2049003 - DNA, 15 bp, Homo sapiens
gcctggaagtattgg

SEQ ID NO: 2049004 - DNA, 15 bp, Homo sapiens
cctggaagtattgga

SEQ ID NO: 2049005 - DNA, 15 bp, Homo sapiens
ctggaagtattggat

SEQ ID NO: 2049006 - DNA, 15 bp, Homo sapiens
tggaagtattggatt

SEQ ID NO: 2049007 - DNA, 15 bp, Homo sapiens
ggaagtattggatta

SEQ ID NO: 2049008 - DNA, 15 bp, Homo sapiens
gaagtattggattat

SEQ ID NO: 2049009 - DNA, 15 bp, Homo sapiens
aagtattggattatg

SEQ ID NO: 2049010 - DNA, 15 bp, Homo sapiens
agtattggattatgg

SEQ ID NO: 2049011 - DNA, 15 bp, Homo sapiens
gtattggattatggg

SEQ ID NO: 2049012 - DNA, 15 bp, Homo sapiens
tattggattatgggc

SEQ ID NO: 2049013 - DNA, 15 bp, Homo sapiens
attggattatgggca

SEQ ID NO: 2049014 - DNA, 15 bp, Homo sapiens
ttggattatgggcaa

SEQ ID NO: 2049015 - DNA, 15 bp, Homo sapiens
tggattatgggcaat

SEQ ID NO: 2049016 - DNA, 15 bp, Homo sapiens
ggattatgggcaatt

SEQ ID NO: 2049017 - DNA, 15 bp, Homo sapiens
gattatgggcaattg

SEQ ID NO: 2049018 - DNA, 15 bp, Homo sapiens
attatgggcaattga

SEQ ID NO: 2049019 - DNA, 15 bp, Homo sapiens
ttatgggcaattgat

SEQ ID NO: 2049020 - DNA, 15 bp, Homo sapiens
tatgggcaattgatt

SEQ ID NO: 2049021 - DNA, 15 bp, Homo sapiens
atgggcaattgattc

SEQ ID NO: 2049022 - DNA, 15 bp, Homo sapiens
tgggcaattgattct

SEQ ID NO: 2049023 - DNA, 15 bp, Homo sapiens
gggcaattgattctt

SEQ ID NO: 2049024 - DNA, 15 bp, Homo sapiens
ggcaattgattctta

SEQ ID NO: 2049025 - DNA, 15 bp, Homo sapiens
gcaattgattcttat

SEQ ID NO: 2049026 - DNA, 15 bp, Homo sapiens
caattgattcttatt

SEQ ID NO: 2049027 - DNA, 15 bp, Homo sapiens
aattgattcttattt

SEQ ID NO: 2049028 - DNA, 15 bp, Homo sapiens
attgattcttatttg

SEQ ID NO: 2049029 - DNA, 15 bp, Homo sapiens
ttgattcttatttgg

SEQ ID NO: 2049030 - DNA, 15 bp, Homo sapiens
tgattcttatttggc

SEQ ID NO: 2049031 - DNA, 15 bp, Homo sapiens
gattcttatttggca

SEQ ID NO: 2049032 - DNA, 15 bp, Homo sapiens
attcttatttggcat

SEQ ID NO: 2049033 - DNA, 15 bp, Homo sapiens
ttcttatttggcatg

SEQ ID NO: 2049034 - DNA, 15 bp, Homo sapiens
tcttatttggcatgt

SEQ ID NO: 2049035 - DNA, 15 bp, Homo sapiens
cttatttggcatgta

SEQ ID NO: 2049036 - DNA, 15 bp, Homo sapiens
ttatttggcatgtac

SEQ ID NO: 2049037 - DNA, 15 bp, Homo sapiens
tatttggcatgtact

SEQ ID NO: 2049038 - DNA, 15 bp, Homo sapiens
atttggcatgtactc

SEQ ID NO: 2049039 - DNA, 15 bp, Homo sapiens
tttggcatgtactca

SEQ ID NO: 2049040 - DNA, 15 bp, Homo sapiens
ttggcatgtactcac

SEQ ID NO: 2049041 - DNA, 15 bp, Homo sapiens
tggcatgtactcact

SEQ ID NO: 2049042 - DNA, 15 bp, Homo sapiens
ggcatgtactcactt

SEQ ID NO: 2049043 - DNA, 15 bp, Homo sapiens
gcatgtactcacttc

SEQ ID NO: 2049044 - DNA, 15 bp, Homo sapiens
catgtactcacttct

SEQ ID NO: 2049045 - DNA, 15 bp, Homo sapiens
atgtactcacttctc

SEQ ID NO: 2049046 - DNA, 15 bp, Homo sapiens
tgtactcacttctcg

SEQ ID NO: 2049047 - DNA, 15 bp, Homo sapiens
gtactcacttctcgc

SEQ ID NO: 2049048 - DNA, 15 bp, Homo sapiens
tactcacttctcgcc

SEQ ID NO: 2049049 - DNA, 15 bp, Homo sapiens
actcacttctcgccc

SEQ ID NO: 2049050 - DNA, 15 bp, Homo sapiens
ctcacttctcgccca

SEQ ID NO: 2049051 - DNA, 15 bp, Homo sapiens
tcacttctcgcccag

SEQ ID NO: 2049052 - DNA, 15 bp, Homo sapiens
cacttctcgcccagg

SEQ ID NO: 2049053 - DNA, 15 bp, Homo sapiens
acttctcgcccaggt

SEQ ID NO: 2049054 - DNA, 15 bp, Homo sapiens
cttctcgcccaggtt

SEQ ID NO: 2049055 - DNA, 15 bp, Homo sapiens
ttctcgcccaggttt

SEQ ID NO: 2049056 - DNA, 15 bp, Homo sapiens
tctcgcccaggtttt

SEQ ID NO: 2049057 - DNA, 15 bp, Homo sapiens
ctcgcccaggttttc

SEQ ID NO: 2049058 - DNA, 15 bp, Homo sapiens
tcgcccaggttttca

SEQ ID NO: 2049059 - DNA, 15 bp, Homo sapiens
cgcccaggttttcaa

SEQ ID NO: 2049060 - DNA, 15 bp, Homo sapiens
gcccaggttttcaac

SEQ ID NO: 2049061 - DNA, 15 bp, Homo sapiens
cccaggttttcaact

SEQ ID NO: 2049062 - DNA, 15 bp, Homo sapiens
ccaggttttcaactt

SEQ ID NO: 2049063 - DNA, 15 bp, Homo sapiens
caggttttcaacttt

SEQ ID NO: 2049064 - DNA, 15 bp, Homo sapiens
aggttttcaactttc

SEQ ID NO: 2049065 - DNA, 15 bp, Homo sapiens
ggttttcaactttct

SEQ ID NO: 2049066 - DNA, 15 bp, Homo sapiens
gttttcaactttctt

SEQ ID NO: 2049067 - DNA, 15 bp, Homo sapiens
ttttcaactttcttt

SEQ ID NO: 2049068 - DNA, 15 bp, Homo sapiens
tttcaactttctttt

SEQ ID NO: 2049069 - DNA, 15 bp, Homo sapiens
ttcaactttcttttt

SEQ ID NO: 2049070 - DNA, 15 bp, Homo sapiens
tcaactttctttttc

SEQ ID NO: 2049071 - DNA, 15 bp, Homo sapiens
caactttctttttct

SEQ ID NO: 2049072 - DNA, 15 bp, Homo sapiens
aactttctttttctt

SEQ ID NO: 2049073 - DNA, 15 bp, Homo sapiens
actttctttttcttc

SEQ ID NO: 2049074 - DNA, 15 bp, Homo sapiens
ctttctttttcttcc

SEQ ID NO: 2049075 - DNA, 15 bp, Homo sapiens
tttctttttcttcct

SEQ ID NO: 2049076 - DNA, 15 bp, Homo sapiens
ttctttttcttcctc

SEQ ID NO: 2049077 - DNA, 15 bp, Homo sapiens
tctttttcttcctct

SEQ ID NO: 2049078 - DNA, 15 bp, Homo sapiens
ctttttcttcctctc

SEQ ID NO: 2049079 - DNA, 15 bp, Homo sapiens
tttttcttcctctct

SEQ ID NO: 2049080 - DNA, 15 bp, Homo sapiens
ttttcttcctctctt

SEQ ID NO: 2049081 - DNA, 15 bp, Homo sapiens
tttcttcctctcttc

SEQ ID NO: 2049082 - DNA, 15 bp, Homo sapiens
ttcttcctctcttcc

SEQ ID NO: 2049083 - DNA, 15 bp, Homo sapiens
tcttcctctcttccc

SEQ ID NO: 2049084 - DNA, 15 bp, Homo sapiens
cttcctctcttcccc

SEQ ID NO: 2049085 - DNA, 15 bp, Homo sapiens
ttcctctcttcccct

SEQ ID NO: 2049086 - DNA, 15 bp, Homo sapiens
tcctctcttcccctc

SEQ ID NO: 2049087 - DNA, 15 bp, Homo sapiens
cctctcttcccctct

SEQ ID NO: 2049088 - DNA, 15 bp, Homo sapiens
ctctcttcccctctc

SEQ ID NO: 2049089 - DNA, 15 bp, Homo sapiens
tctcttcccctctct

SEQ ID NO: 2049090 - DNA, 15 bp, Homo sapiens
ctcttcccctctctc

SEQ ID NO: 2049091 - DNA, 15 bp, Homo sapiens
tcttcccctctctca

SEQ ID NO: 2049092 - DNA, 15 bp, Homo sapiens
cttcccctctctcat

SEQ ID NO: 2049093 - DNA, 15 bp, Homo sapiens
ttcccctctctcatt

SEQ ID NO: 2049094 - DNA, 15 bp, Homo sapiens
tcccctctctcattt

SEQ ID NO: 2049095 - DNA, 15 bp, Homo sapiens
cccctctctcatttc

SEQ ID NO: 2049096 - DNA, 15 bp, Homo sapiens
ccctctctcatttcg

SEQ ID NO: 2049097 - DNA, 15 bp, Homo sapiens
cctctctcatttcgt

SEQ ID NO: 2049098 - DNA, 15 bp, Homo sapiens
ctctctcatttcgtt

SEQ ID NO: 2049099 - DNA, 15 bp, Homo sapiens
tctctcatttcgtta

SEQ ID NO: 2049100 - DNA, 15 bp, Homo sapiens
ctctcatttcgttat

SEQ ID NO: 2049101 - DNA, 15 bp, Homo sapiens
tctcatttcgttatt

SEQ ID NO: 2049102 - DNA, 15 bp, Homo sapiens
ctcatttcgttattc

SEQ ID NO: 2049103 - DNA, 15 bp, Homo sapiens
tcatttcgttattcg

SEQ ID NO: 2049104 - DNA, 15 bp, Homo sapiens
catttcgttattcgt

SEQ ID NO: 2049105 - DNA, 15 bp, Homo sapiens
atttcgttattcgtc

SEQ ID NO: 2049106 - DNA, 15 bp, Homo sapiens
tttcgttattcgtct

SEQ ID NO: 2049107 - DNA, 15 bp, Homo sapiens
ttcgttattcgtctg

SEQ ID NO: 2049108 - DNA, 15 bp, Homo sapiens
tcgttattcgtctgc

SEQ ID NO: 2049109 - DNA, 15 bp, Homo sapiens
cgttattcgtctgca

SEQ ID NO: 2049110 - DNA, 15 bp, Homo sapiens
gttattcgtctgcat

SEQ ID NO: 2049111 - DNA, 15 bp, Homo sapiens
ttattcgtctgcatc

SEQ ID NO: 2049112 - DNA, 15 bp, Homo sapiens
tattcgtctgcatct

SEQ ID NO: 2049113 - DNA, 15 bp, Homo sapiens
attcgtctgcatctc

SEQ ID NO: 2049114 - DNA, 15 bp, Homo sapiens
ttcgtctgcatctct

SEQ ID NO: 2049115 - DNA, 15 bp, Homo sapiens
tcgtctgcatctctt

SEQ ID NO: 2049116 - DNA, 15 bp, Homo sapiens
cgtctgcatctcttc

SEQ ID NO: 2049117 - DNA, 15 bp, Homo sapiens
gtctgcatctcttcc

SEQ ID NO: 2049118 - DNA, 15 bp, Homo sapiens
ctgcatctcttccca

SEQ ID NO: 2049119 - DNA, 15 bp, Homo sapiens
tgcatctcttcccaa

SEQ ID NO: 2049120 - DNA, 15 bp, Homo sapiens
gcatctcttcccaat

SEQ ID NO: 2049121 - DNA, 15 bp, Homo sapiens
catctcttcccaatc

SEQ ID NO: 2049122 - DNA, 15 bp, Homo sapiens
atctcttcccaatcc

SEQ ID NO: 2049123 - DNA, 15 bp, Homo sapiens
tctcttcccaatccc

SEQ ID NO: 2049124 - DNA, 15 bp, Homo sapiens
ctcttcccaatccct

SEQ ID NO: 2049125 - DNA, 15 bp, Homo sapiens
tcttcccaatccctc

SEQ ID NO: 2049126 - DNA, 15 bp, Homo sapiens
cttcccaatccctct

SEQ ID NO: 2049127 - DNA, 15 bp, Homo sapiens
ttcccaatccctctc

SEQ ID NO: 2049128 - DNA, 15 bp, Homo sapiens
tcccaatccctctct

SEQ ID NO: 2049129 - DNA, 15 bp, Homo sapiens
cccaatccctctctc

SEQ ID NO: 2049130 - DNA, 15 bp, Homo sapiens
ccaatccctctctcc

SEQ ID NO: 2049131 - DNA, 15 bp, Homo sapiens
caatccctctctccc

SEQ ID NO: 2049132 - DNA, 15 bp, Homo sapiens
aatccctctctcccg

SEQ ID NO: 2049133 - DNA, 15 bp, Homo sapiens
atccctctctcccgc

SEQ ID NO: 2049134 - DNA, 15 bp, Homo sapiens
tccctctctcccgct

SEQ ID NO: 2049135 - DNA, 15 bp, Homo sapiens
ccctctctcccgctc

SEQ ID NO: 2049136 - DNA, 15 bp, Homo sapiens
cctctctcccgctcc

SEQ ID NO: 2049137 - DNA, 15 bp, Homo sapiens
ctctctcccgctccc

SEQ ID NO: 2049138 - DNA, 15 bp, Homo sapiens
tctctcccgctcccc

SEQ ID NO: 2049139 - DNA, 15 bp, Homo sapiens
ctctcccgctccccc

SEQ ID NO: 2049140 - DNA, 15 bp, Homo sapiens
tctcccgctccccca

SEQ ID NO: 2049141 - DNA, 15 bp, Homo sapiens
ctcccgctcccccac

SEQ ID NO: 2049142 - DNA, 15 bp, Homo sapiens
tcccgctcccccacc

SEQ ID NO: 2049143 - DNA, 15 bp, Homo sapiens
cccgctcccccacca

SEQ ID NO: 2049144 - DNA, 15 bp, Homo sapiens
ccgctcccccaccaa

SEQ ID NO: 2049145 - DNA, 15 bp, Homo sapiens
cgctcccccaccaag

SEQ ID NO: 2049146 - DNA, 15 bp, Homo sapiens
gctcccccaccaaga

SEQ ID NO: 2049147 - DNA, 15 bp, Homo sapiens
ctcccccaccaagag

SEQ ID NO: 2049148 - DNA, 15 bp, Homo sapiens
tcccccaccaagagc

SEQ ID NO: 2049149 - DNA, 15 bp, Homo sapiens
cccccaccaagagct

SEQ ID NO: 2049150 - DNA, 15 bp, Homo sapiens
ccccaccaagagctt

SEQ ID NO: 2049151 - DNA, 15 bp, Homo sapiens
cccaccaagagcttg

SEQ ID NO: 2049152 - DNA, 15 bp, Homo sapiens
ccaccaagagcttgt

SEQ ID NO: 2049153 - DNA, 15 bp, Homo sapiens
caccaagagcttgtg

SEQ ID NO: 2049154 - DNA, 15 bp, Homo sapiens
accaagagcttgtga

SEQ ID NO: 2049155 - DNA, 15 bp, Homo sapiens
ccaagagcttgtgag

SEQ ID NO: 2049156 - DNA, 15 bp, Homo sapiens
caagagcttgtgagg

SEQ ID NO: 2049157 - DNA, 15 bp, Homo sapiens
aagagcttgtgagga

SEQ ID NO: 2049158 - DNA, 15 bp, Homo sapiens
agagcttgtgaggaa

SEQ ID NO: 2049159 - DNA, 15 bp, Homo sapiens
gagcttgtgaggaaa

SEQ ID NO: 2049160 - DNA, 15 bp, Homo sapiens
agcttgtgaggaaag

SEQ ID NO: 2049161 - DNA, 15 bp, Homo sapiens
gcttgtgaggaaagc

SEQ ID NO: 2049162 - DNA, 15 bp, Homo sapiens
cttgtgaggaaagca

SEQ ID NO: 2049163 - DNA, 15 bp, Homo sapiens
ttgtgaggaaagcag

SEQ ID NO: 2049164 - DNA, 15 bp, Homo sapiens
tgtgaggaaagcaga

SEQ ID NO: 2049165 - DNA, 15 bp, Homo sapiens
gtgaggaaagcagac

SEQ ID NO: 2049166 - DNA, 15 bp, Homo sapiens
tgaggaaagcagact

SEQ ID NO: 2049167 - DNA, 15 bp, Homo sapiens
gaggaaagcagactg

SEQ ID NO: 2049168 - DNA, 15 bp, Homo sapiens
aggaaagcagactgg

SEQ ID NO: 2049169 - DNA, 15 bp, Homo sapiens
ggaaagcagactggc

SEQ ID NO: 2049170 - DNA, 15 bp, Homo sapiens
gaaagcagactggcc

SEQ ID NO: 2049171 - DNA, 15 bp, Homo sapiens
aaagcagactggccg

SEQ ID NO: 2049172 - DNA, 15 bp, Homo sapiens
aagcagactggccgg

SEQ ID NO: 2049173 - DNA, 15 bp, Homo sapiens
agcagactggccgga

SEQ ID NO: 2049174 - DNA, 15 bp, Homo sapiens
gcagactggccggag

SEQ ID NO: 2049175 - DNA, 15 bp, Homo sapiens
cagactggccggagt

SEQ ID NO: 2049176 - DNA, 15 bp, Homo sapiens
agactggccggagtc

SEQ ID NO: 2049177 - DNA, 15 bp, Homo sapiens
gactggccggagtcc

SEQ ID NO: 2049178 - DNA, 15 bp, Homo sapiens
actggccggagtcct

SEQ ID NO: 2049179 - DNA, 15 bp, Homo sapiens
ctggccggagtcctc

SEQ ID NO: 2049180 - DNA, 15 bp, Homo sapiens
tggccggagtcctcg

SEQ ID NO: 2049181 - DNA, 15 bp, Homo sapiens
ggccggagtcctcgc

SEQ ID NO: 2049182 - DNA, 15 bp, Homo sapiens
gccggagtcctcgct

SEQ ID NO: 2049183 - DNA, 15 bp, Homo sapiens
ccggagtcctcgctc

SEQ ID NO: 2049184 - DNA, 15 bp, Homo sapiens
cggagtcctcgctcc

SEQ ID NO: 2049185 - DNA, 15 bp, Homo sapiens
ggagtcctcgctccg

SEQ ID NO: 2049186 - DNA, 15 bp, Homo sapiens
gagtcctcgctccgg

SEQ ID NO: 2049187 - DNA, 15 bp, Homo sapiens
agtcctcgctccggg

SEQ ID NO: 2049188 - DNA, 15 bp, Homo sapiens
gtcctcgctccgggc

SEQ ID NO: 2049189 - DNA, 15 bp, Homo sapiens
tcctcgctccgggcc

SEQ ID NO: 2049190 - DNA, 15 bp, Homo sapiens
cctcgctccgggccc

SEQ ID NO: 2049191 - DNA, 15 bp, Homo sapiens
ctcgctccgggccca

SEQ ID NO: 2049192 - DNA, 15 bp, Homo sapiens
tcgctccgggcccag

SEQ ID NO: 2049193 - DNA, 15 bp, Homo sapiens
cgctccgggcccagc

SEQ ID NO: 2049194 - DNA, 15 bp, Homo sapiens
gctccgggcccagca

SEQ ID NO: 2049195 - DNA, 15 bp, Homo sapiens
ctccgggcccagcag

SEQ ID NO: 2049196 - DNA, 15 bp, Homo sapiens
tccgggcccagcagt

SEQ ID NO: 2049197 - DNA, 15 bp, Homo sapiens
ccgggcccagcagtc

SEQ ID NO: 2049198 - DNA, 15 bp, Homo sapiens
cgggcccagcagtcc

SEQ ID NO: 2049199 - DNA, 15 bp, Homo sapiens
gggcccagcagtcct

SEQ ID NO: 2049200 - DNA, 15 bp, Homo sapiens
ggcccagcagtcctc

SEQ ID NO: 2049201 - DNA, 15 bp, Homo sapiens
gcccagcagtcctct

SEQ ID NO: 2049202 - DNA, 15 bp, Homo sapiens
cccagcagtcctctt

SEQ ID NO: 2049203 - DNA, 15 bp, Homo sapiens
ccagcagtcctcttt

SEQ ID NO: 2049204 - DNA, 15 bp, Homo sapiens
cagcagtcctctttg

SEQ ID NO: 2049205 - DNA, 15 bp, Homo sapiens
agcagtcctctttgt

SEQ ID NO: 2049206 - DNA, 15 bp, Homo sapiens
gcagtcctctttgtt

SEQ ID NO: 2049207 - DNA, 15 bp, Homo sapiens
cagtcctctttgtta

SEQ ID NO: 2049208 - DNA, 15 bp, Homo sapiens
agtcctctttgttaa

SEQ ID NO: 2049209 - DNA, 15 bp, Homo sapiens
gtcctctttgttaac

SEQ ID NO: 2049210 - DNA, 15 bp, Homo sapiens
tcctctttgttaact

SEQ ID NO: 2049211 - DNA, 15 bp, Homo sapiens
cctctttgttaactt

SEQ ID NO: 2049212 - DNA, 15 bp, Homo sapiens
ctctttgttaacttc

SEQ ID NO: 2049213 - DNA, 15 bp, Homo sapiens
tctttgttaacttcc

SEQ ID NO: 2049214 - DNA, 15 bp, Homo sapiens
ctttgttaacttcct

SEQ ID NO: 2049215 - DNA, 15 bp, Homo sapiens
tttgttaacttcctg

SEQ ID NO: 2049216 - DNA, 15 bp, Homo sapiens
ttgttaacttcctgg

SEQ ID NO: 2049217 - DNA, 15 bp, Homo sapiens
tgttaacttcctgga

SEQ ID NO: 2049218 - DNA, 15 bp, Homo sapiens
gttaacttcctggag

SEQ ID NO: 2049219 - DNA, 15 bp, Homo sapiens
ttaacttcctggagc

SEQ ID NO: 2049220 - DNA, 15 bp, Homo sapiens
taacttcctggagcc

SEQ ID NO: 2049221 - DNA, 15 bp, Homo sapiens
aacttcctggagcct

SEQ ID NO: 2049222 - DNA, 15 bp, Homo sapiens
acttcctggagcctc

SEQ ID NO: 2049223 - DNA, 15 bp, Homo sapiens
cttcctggagcctcc

SEQ ID NO: 2049224 - DNA, 15 bp, Homo sapiens
ttcctggagcctcct

SEQ ID NO: 2049225 - DNA, 15 bp, Homo sapiens
tcctggagcctcctc

SEQ ID NO: 2049226 - DNA, 15 bp, Homo sapiens
cctggagcctcctct

SEQ ID NO: 2049227 - DNA, 15 bp, Homo sapiens
ctggagcctcctctg

SEQ ID NO: 2049228 - DNA, 15 bp, Homo sapiens
tggagcctcctctgg

SEQ ID NO: 2049229 - DNA, 15 bp, Homo sapiens
ggagcctcctctggc

SEQ ID NO: 2049230 - DNA, 15 bp, Homo sapiens
gagcctcctctggcg

SEQ ID NO: 2049231 - DNA, 15 bp, Homo sapiens
agcctcctctggcgt

SEQ ID NO: 2049232 - DNA, 15 bp, Homo sapiens
gcctcctctggcgtg

SEQ ID NO: 2049233 - DNA, 15 bp, Homo sapiens
cctcctctggcgtgg

SEQ ID NO: 2049234 - DNA, 15 bp, Homo sapiens
ctcctctggcgtggt

SEQ ID NO: 2049235 - DNA, 15 bp, Homo sapiens
tcctctggcgtggtg

SEQ ID NO: 2049236 - DNA, 15 bp, Homo sapiens
cctctggcgtggtgc

SEQ ID NO: 2049237 - DNA, 15 bp, Homo sapiens
ctctggcgtggtgcc

SEQ ID NO: 2049238 - DNA, 15 bp, Homo sapiens
tctggcgtggtgcct

SEQ ID NO: 2049239 - DNA, 15 bp, Homo sapiens
ctggcgtggtgcctt

SEQ ID NO: 2049240 - DNA, 15 bp, Homo sapiens
tggcgtggtgcctta

SEQ ID NO: 2049241 - DNA, 15 bp, Homo sapiens
ggcgtggtgccttaa

SEQ ID NO: 2049242 - DNA, 15 bp, Homo sapiens
gcgtggtgccttaag

SEQ ID NO: 2049243 - DNA, 15 bp, Homo sapiens
cgtggtgccttaaga

SEQ ID NO: 2049244 - DNA, 15 bp, Homo sapiens
gtggtgccttaagac

SEQ ID NO: 2049245 - DNA, 15 bp, Homo sapiens
tggtgccttaagact

SEQ ID NO: 2049246 - DNA, 15 bp, Homo sapiens
ggtgccttaagactg

SEQ ID NO: 2049247 - DNA, 15 bp, Homo sapiens
gtgccttaagactgt

SEQ ID NO: 2049248 - DNA, 15 bp, Homo sapiens
tgccttaagactgtg

SEQ ID NO: 2049249 - DNA, 15 bp, Homo sapiens
gccttaagactgtgg

SEQ ID NO: 2049250 - DNA, 15 bp, Homo sapiens
ccttaagactgtggg

SEQ ID NO: 2049251 - DNA, 15 bp, Homo sapiens
cttaagactgtgggc

SEQ ID NO: 2049252 - DNA, 15 bp, Homo sapiens
ttaagactgtgggct

SEQ ID NO: 2049253 - DNA, 15 bp, Homo sapiens
taagactgtgggcta

SEQ ID NO: 2049254 - DNA, 15 bp, Homo sapiens
aagactgtgggctag

SEQ ID NO: 2049255 - DNA, 15 bp, Homo sapiens
agactgtgggctagg

SEQ ID NO: 2049256 - DNA, 15 bp, Homo sapiens
gactgtgggctaggc

SEQ ID NO: 2049257 - DNA, 15 bp, Homo sapiens
actgtgggctaggcc

SEQ ID NO: 2049258 - DNA, 15 bp, Homo sapiens
ctgtgggctaggccg

SEQ ID NO: 2049259 - DNA, 15 bp, Homo sapiens
tgtgggctaggccgg

SEQ ID NO: 2049260 - DNA, 15 bp, Homo sapiens
gtgggctaggccggg

SEQ ID NO: 2049261 - DNA, 15 bp, Homo sapiens
tgggctaggccgggc

SEQ ID NO: 2049262 - DNA, 15 bp, Homo sapiens
gggctaggccgggct

SEQ ID NO: 2049263 - DNA, 15 bp, Homo sapiens
ggctaggccgggctt

SEQ ID NO: 2049264 - DNA, 15 bp, Homo sapiens
gctaggccgggcttt

SEQ ID NO: 2049265 - DNA, 15 bp, Homo sapiens
ctaggccgggctttc

SEQ ID NO: 2049266 - DNA, 15 bp, Homo sapiens
taggccgggctttct

SEQ ID NO: 2049267 - DNA, 15 bp, Homo sapiens
aggccgggctttctc

SEQ ID NO: 2049268 - DNA, 15 bp, Homo sapiens
ggccgggctttctcc

SEQ ID NO: 2049269 - DNA, 15 bp, Homo sapiens
gccgggctttctccc

SEQ ID NO: 2049270 - DNA, 15 bp, Homo sapiens
ccgggctttctccct

SEQ ID NO: 2049271 - DNA, 15 bp, Homo sapiens
cgggctttctccctc

SEQ ID NO: 2049272 - DNA, 15 bp, Homo sapiens
gggctttctccctca

SEQ ID NO: 2049273 - DNA, 15 bp, Homo sapiens
ggctttctccctcag

SEQ ID NO: 2049274 - DNA, 15 bp, Homo sapiens
gctttctccctcaga

SEQ ID NO: 2049275 - DNA, 15 bp, Homo sapiens
ctttctccctcagaa

SEQ ID NO: 2049276 - DNA, 15 bp, Homo sapiens
tttctccctcagaaa

SEQ ID NO: 2049277 - DNA, 15 bp, Homo sapiens
ttctccctcagaaac

SEQ ID NO: 2049278 - DNA, 15 bp, Homo sapiens
tctccctcagaaacc

SEQ ID NO: 2049279 - DNA, 15 bp, Homo sapiens
ctccctcagaaacct

SEQ ID NO: 2049280 - DNA, 15 bp, Homo sapiens
tccctcagaaacctg

SEQ ID NO: 2049281 - DNA, 15 bp, Homo sapiens
ccctcagaaacctgg

SEQ ID NO: 2049282 - DNA, 15 bp, Homo sapiens
cctcagaaacctggg

SEQ ID NO: 2049283 - DNA, 15 bp, Homo sapiens
ctcagaaacctgggc

SEQ ID NO: 2049284 - DNA, 15 bp, Homo sapiens
tcagaaacctgggcc

SEQ ID NO: 2049285 - DNA, 15 bp, Homo sapiens
cagaaacctgggcct

SEQ ID NO: 2049286 - DNA, 15 bp, Homo sapiens
agaaacctgggcctc

SEQ ID NO: 2049287 - DNA, 15 bp, Homo sapiens
gaaacctgggcctca

SEQ ID NO: 2049288 - DNA, 15 bp, Homo sapiens
aaacctgggcctcac

SEQ ID NO: 2049289 - DNA, 15 bp, Homo sapiens
aacctgggcctcact

SEQ ID NO: 2049290 - DNA, 15 bp, Homo sapiens
acctgggcctcactg

SEQ ID NO: 2049291 - DNA, 15 bp, Homo sapiens
cctgggcctcactgc

SEQ ID NO: 2049292 - DNA, 15 bp, Homo sapiens
ctgggcctcactgct

SEQ ID NO: 2049293 - DNA, 15 bp, Homo sapiens
tgggcctcactgctg

SEQ ID NO: 2049294 - DNA, 15 bp, Homo sapiens
gggcctcactgctga

SEQ ID NO: 2049295 - DNA, 15 bp, Homo sapiens
ggcctcactgctgag

SEQ ID NO: 2049296 - DNA, 15 bp, Homo sapiens
gcctcactgctgaga

SEQ ID NO: 2049297 - DNA, 15 bp, Homo sapiens
cctcactgctgagac

SEQ ID NO: 2049298 - DNA, 15 bp, Homo sapiens
ctcactgctgagaca

SEQ ID NO: 2049299 - DNA, 15 bp, Homo sapiens
tcactgctgagacac

SEQ ID NO: 2049300 - DNA, 15 bp, Homo sapiens
cactgctgagacaca

SEQ ID NO: 2049301 - DNA, 15 bp, Homo sapiens
actgctgagacacag

SEQ ID NO: 2049302 - DNA, 15 bp, Homo sapiens
ctgctgagacacagt

SEQ ID NO: 2049303 - DNA, 15 bp, Homo sapiens
tgctgagacacagtt

SEQ ID NO: 2049304 - DNA, 15 bp, Homo sapiens
gctgagacacagttt

SEQ ID NO: 2049305 - DNA, 15 bp, Homo sapiens
ctgagacacagtttc

SEQ ID NO: 2049306 - DNA, 15 bp, Homo sapiens
tgagacacagtttcc

SEQ ID NO: 2049307 - DNA, 15 bp, Homo sapiens
gagacacagtttcca

SEQ ID NO: 2049308 - DNA, 15 bp, Homo sapiens
agacacagtttccaa

SEQ ID NO: 2049309 - DNA, 15 bp, Homo sapiens
gacacagtttccaac

SEQ ID NO: 2049310 - DNA, 15 bp, Homo sapiens
acacagtttccaaca

SEQ ID NO: 2049311 - DNA, 15 bp, Homo sapiens
cacagtttccaacag

SEQ ID NO: 2049312 - DNA, 15 bp, Homo sapiens
acagtttccaacagc

SEQ ID NO: 2049313 - DNA, 15 bp, Homo sapiens
cagtttccaacagcc

SEQ ID NO: 2049314 - DNA, 15 bp, Homo sapiens
agtttccaacagcca

SEQ ID NO: 2049315 - DNA, 15 bp, Homo sapiens
gtttccaacagccag

SEQ ID NO: 2049316 - DNA, 15 bp, Homo sapiens
tttccaacagccaga

SEQ ID NO: 2049317 - DNA, 15 bp, Homo sapiens
ttccaacagccagag

SEQ ID NO: 2049318 - DNA, 15 bp, Homo sapiens
tccaacagccagagg

SEQ ID NO: 2049319 - DNA, 15 bp, Homo sapiens
ccaacagccagaggg

SEQ ID NO: 2049320 - DNA, 15 bp, Homo sapiens
caacagccagaggga

SEQ ID NO: 2049321 - DNA, 15 bp, Homo sapiens
aacagccagagggac

SEQ ID NO: 2049322 - DNA, 15 bp, Homo sapiens
acagccagagggact

SEQ ID NO: 2049323 - DNA, 15 bp, Homo sapiens
cagccagagggactc

SEQ ID NO: 2049324 - DNA, 15 bp, Homo sapiens
agccagagggactcg

SEQ ID NO: 2049325 - DNA, 15 bp, Homo sapiens
gccagagggactcga

SEQ ID NO: 2049326 - DNA, 15 bp, Homo sapiens
ccagagggactcgaa

SEQ ID NO: 2049327 - DNA, 15 bp, Homo sapiens
cagagggactcgaag

SEQ ID NO: 2049328 - DNA, 15 bp, Homo sapiens
agagggactcgaaga

SEQ ID NO: 2049329 - DNA, 15 bp, Homo sapiens
gagggactcgaagat

SEQ ID NO: 2049330 - DNA, 15 bp, Homo sapiens
agggactcgaagatt

SEQ ID NO: 2049331 - DNA, 15 bp, Homo sapiens
gggactcgaagattc

SEQ ID NO: 2049332 - DNA, 15 bp, Homo sapiens
ggactcgaagattcc

SEQ ID NO: 2049333 - DNA, 15 bp, Homo sapiens
gactcgaagattccc

SEQ ID NO: 2049334 - DNA, 15 bp, Homo sapiens
actcgaagattccca

SEQ ID NO: 2049335 - DNA, 15 bp, Homo sapiens
ctcgaagattcccaa

SEQ ID NO: 2049336 - DNA, 15 bp, Homo sapiens
tcgaagattcccaag

SEQ ID NO: 2049337 - DNA, 15 bp, Homo sapiens
cgaagattcccaaga

SEQ ID NO: 2049338 - DNA, 15 bp, Homo sapiens
gaagattcccaagag

SEQ ID NO: 2049339 - DNA, 15 bp, Homo sapiens
aagattcccaagagg

SEQ ID NO: 2049340 - DNA, 15 bp, Homo sapiens
agattcccaagagga

SEQ ID NO: 2049341 - DNA, 15 bp, Homo sapiens
gattcccaagaggat

SEQ ID NO: 2049342 - DNA, 15 bp, Homo sapiens
attcccaagaggatg

SEQ ID NO: 2049343 - DNA, 15 bp, Homo sapiens
ttcccaagaggatgg

SEQ ID NO: 2049344 - DNA, 15 bp, Homo sapiens
tcccaagaggatggt

SEQ ID NO: 2049345 - DNA, 15 bp, Homo sapiens
cccaagaggatggtt

SEQ ID NO: 2049346 - DNA, 15 bp, Homo sapiens
ccaagaggatggttg

SEQ ID NO: 2049347 - DNA, 15 bp, Homo sapiens
caagaggatggttgg

SEQ ID NO: 2049348 - DNA, 15 bp, Homo sapiens
aagaggatggttggg

SEQ ID NO: 2049349 - DNA, 15 bp, Homo sapiens
agaggatggttgggt

SEQ ID NO: 2049350 - DNA, 15 bp, Homo sapiens
gaggatggttgggtc

SEQ ID NO: 2049351 - DNA, 15 bp, Homo sapiens
aggatggttgggtct

SEQ ID NO: 2049352 - DNA, 15 bp, Homo sapiens
ggatggttgggtcta

SEQ ID NO: 2049353 - DNA, 15 bp, Homo sapiens
gatggttgggtctag

SEQ ID NO: 2049354 - DNA, 15 bp, Homo sapiens
atggttgggtctagt

SEQ ID NO: 2049355 - DNA, 15 bp, Homo sapiens
tggttgggtctagtg

SEQ ID NO: 2049356 - DNA, 15 bp, Homo sapiens
ggttgggtctagtga

SEQ ID NO: 2049357 - DNA, 15 bp, Homo sapiens
gttgggtctagtgag

SEQ ID NO: 2049358 - DNA, 15 bp, Homo sapiens
ttgggtctagtgaga

SEQ ID NO: 2049359 - DNA, 15 bp, Homo sapiens
tgggtctagtgagag

SEQ ID NO: 2049360 - DNA, 15 bp, Homo sapiens
gggtctagtgagagt

SEQ ID NO: 2049361 - DNA, 15 bp, Homo sapiens
ggtctagtgagagtg

SEQ ID NO: 2049362 - DNA, 15 bp, Homo sapiens
gtctagtgagagtgc

SEQ ID NO: 2049363 - DNA, 15 bp, Homo sapiens
tctagtgagagtgct

SEQ ID NO: 2049364 - DNA, 15 bp, Homo sapiens
ctagtgagagtgctt

SEQ ID NO: 2049365 - DNA, 15 bp, Homo sapiens
tagtgagagtgcttg

SEQ ID NO: 2049366 - DNA, 15 bp, Homo sapiens
agtgagagtgcttgt

SEQ ID NO: 2049367 - DNA, 15 bp, Homo sapiens
gtgagagtgcttgtt

SEQ ID NO: 2049368 - DNA, 15 bp, Homo sapiens
tgagagtgcttgttg

SEQ ID NO: 2049369 - DNA, 15 bp, Homo sapiens
gagagtgcttgttgg

SEQ ID NO: 2049370 - DNA, 15 bp, Homo sapiens
agagtgcttgttgga

SEQ ID NO: 2049371 - DNA, 15 bp, Homo sapiens
gagtgcttgttggaa

SEQ ID NO: 2049372 - DNA, 15 bp, Homo sapiens
agtgcttgttggaag

SEQ ID NO: 2049373 - DNA, 15 bp, Homo sapiens
gtgcttgttggaagg

SEQ ID NO: 2049374 - DNA, 15 bp, Homo sapiens
tgcttgttggaaggc

SEQ ID NO: 2049375 - DNA, 15 bp, Homo sapiens
gcttgttggaaggcg

SEQ ID NO: 2049376 - DNA, 15 bp, Homo sapiens
cttgttggaaggcgg

SEQ ID NO: 2049377 - DNA, 15 bp, Homo sapiens
ttgttggaaggcggg

SEQ ID NO: 2049378 - DNA, 15 bp, Homo sapiens
tgttggaaggcgggg

SEQ ID NO: 2049379 - DNA, 15 bp, Homo sapiens
gttggaaggcgggga

SEQ ID NO: 2049380 - DNA, 15 bp, Homo sapiens
ttggaaggcggggaa

SEQ ID NO: 2049381 - DNA, 15 bp, Homo sapiens
tggaaggcggggaag

SEQ ID NO: 2049382 - DNA, 15 bp, Homo sapiens
ggaaggcggggaagg

SEQ ID NO: 2049383 - DNA, 15 bp, Homo sapiens
gaaggcggggaaggg

SEQ ID NO: 2049384 - DNA, 15 bp, Homo sapiens
aaggcggggaaggga

SEQ ID NO: 2049385 - DNA, 15 bp, Homo sapiens
aggcggggaagggag

SEQ ID NO: 2049386 - DNA, 15 bp, Homo sapiens
ggcggggaagggaga

SEQ ID NO: 2049387 - DNA, 15 bp, Homo sapiens
gcggggaagggagat

SEQ ID NO: 2049388 - DNA, 15 bp, Homo sapiens
cggggaagggagatt

SEQ ID NO: 2049389 - DNA, 15 bp, Homo sapiens
ggggaagggagattt

SEQ ID NO: 2049390 - DNA, 15 bp, Homo sapiens
gggaagggagatttt

SEQ ID NO: 2049391 - DNA, 15 bp, Homo sapiens
ggaagggagatttta

SEQ ID NO: 2049392 - DNA, 15 bp, Homo sapiens
gaagggagattttaa

SEQ ID NO: 2049393 - DNA, 15 bp, Homo sapiens
aagggagattttaac

SEQ ID NO: 2049394 - DNA, 15 bp, Homo sapiens
agggagattttaaca

SEQ ID NO: 2049395 - DNA, 15 bp, Homo sapiens
gggagattttaacag

SEQ ID NO: 2049396 - DNA, 15 bp, Homo sapiens
ggagattttaacagg

SEQ ID NO: 2049397 - DNA, 15 bp, Homo sapiens
gagattttaacaggt

SEQ ID NO: 2049398 - DNA, 15 bp, Homo sapiens
agattttaacaggtc

SEQ ID NO: 2049399 - DNA, 15 bp, Homo sapiens
gattttaacaggtct

SEQ ID NO: 2049400 - DNA, 15 bp, Homo sapiens
attttaacaggtctc

SEQ ID NO: 2049401 - DNA, 15 bp, Homo sapiens
ttttaacaggtctca

SEQ ID NO: 2049402 - DNA, 15 bp, Homo sapiens
tttaacaggtctcac

SEQ ID NO: 2049403 - DNA, 15 bp, Homo sapiens
ttaacaggtctcacg

SEQ ID NO: 2049404 - DNA, 15 bp, Homo sapiens
taacaggtctcacgt

SEQ ID NO: 2049405 - DNA, 15 bp, Homo sapiens
aacaggtctcacgtt

SEQ ID NO: 2049406 - DNA, 15 bp, Homo sapiens
acaggtctcacgttt

SEQ ID NO: 2049407 - DNA, 15 bp, Homo sapiens
caggtctcacgtttt

SEQ ID NO: 2049408 - DNA, 15 bp, Homo sapiens
aggtctcacgttttg

SEQ ID NO: 2049409 - DNA, 15 bp, Homo sapiens
ggtctcacgttttgg

SEQ ID NO: 2049410 - DNA, 15 bp, Homo sapiens
gtctcacgttttgga

SEQ ID NO: 2049411 - DNA, 15 bp, Homo sapiens
tctcacgttttggaa

SEQ ID NO: 2049412 - DNA, 15 bp, Homo sapiens
ctcacgttttggaaa

SEQ ID NO: 2049413 - DNA, 15 bp, Homo sapiens
tcacgttttggaaaa

SEQ ID NO: 2049414 - DNA, 15 bp, Homo sapiens
cacgttttggaaaac

SEQ ID NO: 2049415 - DNA, 15 bp, Homo sapiens
acgttttggaaaaca

SEQ ID NO: 2049416 - DNA, 15 bp, Homo sapiens
cgttttggaaaacaa

SEQ ID NO: 2049417 - DNA, 15 bp, Homo sapiens
gttttggaaaacaaa

SEQ ID NO: 2049418 - DNA, 15 bp, Homo sapiens
ttttggaaaacaaac

SEQ ID NO: 2049419 - DNA, 15 bp, Homo sapiens
tttggaaaacaaaca

SEQ ID NO: 2049420 - DNA, 15 bp, Homo sapiens
ttggaaaacaaacaa

SEQ ID NO: 2049421 - DNA, 15 bp, Homo sapiens
tggaaaacaaacaaa

SEQ ID NO: 2049422 - DNA, 15 bp, Homo sapiens
ggaaaacaaacaaat

SEQ ID NO: 2049423 - DNA, 15 bp, Homo sapiens
gaaaacaaacaaatt

SEQ ID NO: 2049424 - DNA, 15 bp, Homo sapiens
aaaacaaacaaattt

SEQ ID NO: 2049425 - DNA, 15 bp, Homo sapiens
aaacaaacaaatttg

SEQ ID NO: 2049426 - DNA, 15 bp, Homo sapiens
aacaaacaaatttga

SEQ ID NO: 2049427 - DNA, 15 bp, Homo sapiens
acaaacaaatttgac

SEQ ID NO: 2049428 - DNA, 15 bp, Homo sapiens
caaacaaatttgacc

SEQ ID NO: 2049429 - DNA, 15 bp, Homo sapiens
aaacaaatttgacca

SEQ ID NO: 2049430 - DNA, 15 bp, Homo sapiens
aacaaatttgaccac

SEQ ID NO: 2049431 - DNA, 15 bp, Homo sapiens
acaaatttgaccact

SEQ ID NO: 2049432 - DNA, 15 bp, Homo sapiens
caaatttgaccactt

SEQ ID NO: 2049433 - DNA, 15 bp, Homo sapiens
aaatttgaccacttg

SEQ ID NO: 2049434 - DNA, 15 bp, Homo sapiens
aatttgaccacttgc

SEQ ID NO: 2049435 - DNA, 15 bp, Homo sapiens
atttgaccacttgcg

SEQ ID NO: 2049436 - DNA, 15 bp, Homo sapiens
tttgaccacttgcgt

SEQ ID NO: 2049437 - DNA, 15 bp, Homo sapiens
ttgaccacttgcgtt

SEQ ID NO: 2049438 - DNA, 15 bp, Homo sapiens
tgaccacttgcgttg

SEQ ID NO: 2049439 - DNA, 15 bp, Homo sapiens
gaccacttgcgttgg

SEQ ID NO: 2049440 - DNA, 15 bp, Homo sapiens
accacttgcgttgga

SEQ ID NO: 2049441 - DNA, 15 bp, Homo sapiens
ccacttgcgttggaa

SEQ ID NO: 2049442 - DNA, 15 bp, Homo sapiens
cacttgcgttggaat

SEQ ID NO: 2049443 - DNA, 15 bp, Homo sapiens
acttgcgttggaatg

SEQ ID NO: 2049444 - DNA, 15 bp, Homo sapiens
cttgcgttggaatgg

SEQ ID NO: 2049445 - DNA, 15 bp, Homo sapiens
ttgcgttggaatggt

SEQ ID NO: 2049446 - DNA, 15 bp, Homo sapiens
tgcgttggaatggtc

SEQ ID NO: 2049447 - DNA, 15 bp, Homo sapiens
gcgttggaatggtca

SEQ ID NO: 2049448 - DNA, 15 bp, Homo sapiens
cgttggaatggtcag

SEQ ID NO: 2049449 - DNA, 15 bp, Homo sapiens
gttggaatggtcagc

SEQ ID NO: 2049450 - DNA, 15 bp, Homo sapiens
ttggaatggtcagct

SEQ ID NO: 2049451 - DNA, 15 bp, Homo sapiens
tggaatggtcagctg

SEQ ID NO: 2049452 - DNA, 15 bp, Homo sapiens
ggaatggtcagctgt

SEQ ID NO: 2049453 - DNA, 15 bp, Homo sapiens
gaatggtcagctgtg

SEQ ID NO: 2049454 - DNA, 15 bp, Homo sapiens
aatggtcagctgtgg

SEQ ID NO: 2049455 - DNA, 15 bp, Homo sapiens
atggtcagctgtggt

SEQ ID NO: 2049456 - DNA, 15 bp, Homo sapiens
tggtcagctgtggtt

SEQ ID NO: 2049457 - DNA, 15 bp, Homo sapiens
ggtcagctgtggttc

SEQ ID NO: 2049458 - DNA, 15 bp, Homo sapiens
gtcagctgtggttcc

SEQ ID NO: 2049459 - DNA, 15 bp, Homo sapiens
tcagctgtggttccg

SEQ ID NO: 2049460 - DNA, 15 bp, Homo sapiens
cagctgtggttccgg

SEQ ID NO: 2049461 - DNA, 15 bp, Homo sapiens
agctgtggttccggg

SEQ ID NO: 2049462 - DNA, 15 bp, Homo sapiens
gctgtggttccggga

SEQ ID NO: 2049463 - DNA, 15 bp, Homo sapiens
ctgtggttccgggac

SEQ ID NO: 2049464 - DNA, 15 bp, Homo sapiens
tgtggttccgggacc

SEQ ID NO: 2049465 - DNA, 15 bp, Homo sapiens
gtggttccgggaccg

SEQ ID NO: 2049466 - DNA, 15 bp, Homo sapiens
tggttccgggaccgg

SEQ ID NO: 2049467 - DNA, 15 bp, Homo sapiens
ggttccgggaccggg

SEQ ID NO: 2049468 - DNA, 15 bp, Homo sapiens
gttccgggaccggga

SEQ ID NO: 2049469 - DNA, 15 bp, Homo sapiens
ttccgggaccgggag

SEQ ID NO: 2049470 - DNA, 15 bp, Homo sapiens
tccgggaccgggagt

SEQ ID NO: 2049471 - DNA, 15 bp, Homo sapiens
ccgggaccgggagtg

SEQ ID NO: 2049472 - DNA, 15 bp, Homo sapiens
cgggaccgggagtgt

SEQ ID NO: 2049473 - DNA, 15 bp, Homo sapiens
gggaccgggagtgta

SEQ ID NO: 2049474 - DNA, 15 bp, Homo sapiens
ggaccgggagtgtag

SEQ ID NO: 2049475 - DNA, 15 bp, Homo sapiens
gaccgggagtgtagg

SEQ ID NO: 2049476 - DNA, 15 bp, Homo sapiens
accgggagtgtaggt

SEQ ID NO: 2049477 - DNA, 15 bp, Homo sapiens
ccgggagtgtaggtg

SEQ ID NO: 2049478 - DNA, 15 bp, Homo sapiens
cgggagtgtaggtgg

SEQ ID NO: 2049479 - DNA, 15 bp, Homo sapiens
gggagtgtaggtggc

SEQ ID NO: 2049480 - DNA, 15 bp, Homo sapiens
ggagtgtaggtggct

SEQ ID NO: 2049481 - DNA, 15 bp, Homo sapiens
gagtgtaggtggcta

SEQ ID NO: 2049482 - DNA, 15 bp, Homo sapiens
agtgtaggtggctaa

SEQ ID NO: 2049483 - DNA, 15 bp, Homo sapiens
gtgtaggtggctaag

SEQ ID NO: 2049484 - DNA, 15 bp, Homo sapiens
tgtaggtggctaagg

SEQ ID NO: 2049485 - DNA, 15 bp, Homo sapiens
gtaggtggctaaggc

SEQ ID NO: 2049486 - DNA, 15 bp, Homo sapiens
taggtggctaaggca

SEQ ID NO: 2049487 - DNA, 15 bp, Homo sapiens
aggtggctaaggcac

SEQ ID NO: 2049488 - DNA, 15 bp, Homo sapiens
ggtggctaaggcacc

SEQ ID NO: 2049489 - DNA, 15 bp, Homo sapiens
gtggctaaggcaccc

SEQ ID NO: 2049490 - DNA, 15 bp, Homo sapiens
tggctaaggcaccca

SEQ ID NO: 2049491 - DNA, 15 bp, Homo sapiens
ggctaaggcacccag

SEQ ID NO: 2049492 - DNA, 15 bp, Homo sapiens
gctaaggcacccagc

SEQ ID NO: 2049493 - DNA, 15 bp, Homo sapiens
ctaaggcacccagct

SEQ ID NO: 2049494 - DNA, 15 bp, Homo sapiens
taaggcacccagctc

SEQ ID NO: 2049495 - DNA, 15 bp, Homo sapiens
aaggcacccagctca

SEQ ID NO: 2049496 - DNA, 15 bp, Homo sapiens
aggcacccagctcag

SEQ ID NO: 2049497 - DNA, 15 bp, Homo sapiens
ggcacccagctcagg

SEQ ID NO: 2049498 - DNA, 15 bp, Homo sapiens
gcacccagctcaggc

SEQ ID NO: 2049499 - DNA, 15 bp, Homo sapiens
cacccagctcaggcc

SEQ ID NO: 2049500 - DNA, 15 bp, Homo sapiens
acccagctcaggccg

SEQ ID NO: 2049501 - DNA, 15 bp, Homo sapiens
cccagctcaggccgg

SEQ ID NO: 2049502 - DNA, 15 bp, Homo sapiens
ccagctcaggccggc

SEQ ID NO: 2049503 - DNA, 15 bp, Homo sapiens
cagctcaggccggcc

SEQ ID NO: 2049504 - DNA, 15 bp, Homo sapiens
agctcaggccggccg

SEQ ID NO: 2049505 - DNA, 15 bp, Homo sapiens
gctcaggccggccgg

SEQ ID NO: 2049506 - DNA, 15 bp, Homo sapiens
ctcaggccggccggg

SEQ ID NO: 2049507 - DNA, 15 bp, Homo sapiens
tcaggccggccgggc

SEQ ID NO: 2049508 - DNA, 15 bp, Homo sapiens
caggccggccgggca

SEQ ID NO: 2049509 - DNA, 15 bp, Homo sapiens
aggccggccgggcag

SEQ ID NO: 2049510 - DNA, 15 bp, Homo sapiens
ggccggccgggcagg

SEQ ID NO: 2049511 - DNA, 15 bp, Homo sapiens
gccggccgggcaggg

SEQ ID NO: 2049512 - DNA, 15 bp, Homo sapiens
ccggccgggcagggg

SEQ ID NO: 2049513 - DNA, 15 bp, Homo sapiens
cggccgggcagggga

SEQ ID NO: 2049514 - DNA, 15 bp, Homo sapiens
ggccgggcaggggac

SEQ ID NO: 2049515 - DNA, 15 bp, Homo sapiens
gccgggcaggggaca

SEQ ID NO: 2049516 - DNA, 15 bp, Homo sapiens
ccgggcaggggacat

SEQ ID NO: 2049517 - DNA, 15 bp, Homo sapiens
cgggcaggggacatg

SEQ ID NO: 2049518 - DNA, 15 bp, Homo sapiens
gggcaggggacatgg

SEQ ID NO: 2049519 - DNA, 15 bp, Homo sapiens
ggcaggggacatgga

SEQ ID NO: 2049520 - DNA, 15 bp, Homo sapiens
gcaggggacatggat

SEQ ID NO: 2049521 - DNA, 15 bp, Homo sapiens
caggggacatggata

SEQ ID NO: 2049522 - DNA, 15 bp, Homo sapiens
aggggacatggatac

SEQ ID NO: 2049523 - DNA, 15 bp, Homo sapiens
ggggacatggatact

SEQ ID NO: 2049524 - DNA, 15 bp, Homo sapiens
gggacatggatactg

SEQ ID NO: 2049525 - DNA, 15 bp, Homo sapiens
ggacatggatactgc

SEQ ID NO: 2049526 - DNA, 15 bp, Homo sapiens
gacatggatactgca

SEQ ID NO: 2049527 - DNA, 15 bp, Homo sapiens
acatggatactgcag

SEQ ID NO: 2049528 - DNA, 15 bp, Homo sapiens
catggatactgcagc

SEQ ID NO: 2049529 - DNA, 15 bp, Homo sapiens
atggatactgcagct

SEQ ID NO: 2049530 - DNA, 15 bp, Homo sapiens
tggatactgcagctg

SEQ ID NO: 2049531 - DNA, 15 bp, Homo sapiens
ggatactgcagctgc

SEQ ID NO: 2049532 - DNA, 15 bp, Homo sapiens
gatactgcagctgct

SEQ ID NO: 2049533 - DNA, 15 bp, Homo sapiens
atactgcagctgctg

SEQ ID NO: 2049534 - DNA, 15 bp, Homo sapiens
tactgcagctgctgt

SEQ ID NO: 2049535 - DNA, 15 bp, Homo sapiens
actgcagctgctgtt

SEQ ID NO: 2049536 - DNA, 15 bp, Homo sapiens
ctgcagctgctgttt

SEQ ID NO: 2049537 - DNA, 15 bp, Homo sapiens
tgcagctgctgtttg

SEQ ID NO: 2049538 - DNA, 15 bp, Homo sapiens
gcagctgctgtttgg

SEQ ID NO: 2049539 - DNA, 15 bp, Homo sapiens
cagctgctgtttggc

SEQ ID NO: 2049540 - DNA, 15 bp, Homo sapiens
agctgctgtttggct

SEQ ID NO: 2049541 - DNA, 15 bp, Homo sapiens
gctgctgtttggctc

SEQ ID NO: 2049542 - DNA, 15 bp, Homo sapiens
ctgctgtttggctct

SEQ ID NO: 2049543 - DNA, 15 bp, Homo sapiens
tgctgtttggctcta

SEQ ID NO: 2049544 - DNA, 15 bp, Homo sapiens
gctgtttggctctag

SEQ ID NO: 2049545 - DNA, 15 bp, Homo sapiens
ctgtttggctctagg

SEQ ID NO: 2049546 - DNA, 15 bp, Homo sapiens
tgtttggctctaggt

SEQ ID NO: 2049547 - DNA, 15 bp, Homo sapiens
gtttggctctaggtc

SEQ ID NO: 2049548 - DNA, 15 bp, Homo sapiens
tttggctctaggtcc

SEQ ID NO: 2049549 - DNA, 15 bp, Homo sapiens
ttggctctaggtccg

SEQ ID NO: 2049550 - DNA, 15 bp, Homo sapiens
tggctctaggtccgg

SEQ ID NO: 2049551 - DNA, 15 bp, Homo sapiens
ggctctaggtccgga

SEQ ID NO: 2049552 - DNA, 15 bp, Homo sapiens
gctctaggtccggat

SEQ ID NO: 2049553 - DNA, 15 bp, Homo sapiens
ctctaggtccggatc

SEQ ID NO: 2049554 - DNA, 15 bp, Homo sapiens
tctaggtccggatcc

SEQ ID NO: 2049555 - DNA, 15 bp, Homo sapiens
ctaggtccggatccc

SEQ ID NO: 2049556 - DNA, 15 bp, Homo sapiens
taggtccggatccca

SEQ ID NO: 2049557 - DNA, 15 bp, Homo sapiens
aggtccggatcccac

SEQ ID NO: 2049558 - DNA, 15 bp, Homo sapiens
ggtccggatcccacg

SEQ ID NO: 2049559 - DNA, 15 bp, Homo sapiens
gtccggatcccacgg

SEQ ID NO: 2049560 - DNA, 15 bp, Homo sapiens
tccggatcccacgga

SEQ ID NO: 2049561 - DNA, 15 bp, Homo sapiens
ccggatcccacggaa

SEQ ID NO: 2049562 - DNA, 15 bp, Homo sapiens
cggatcccacggaat

SEQ ID NO: 2049563 - DNA, 15 bp, Homo sapiens
ggatcccacggaatt

SEQ ID NO: 2049564 - DNA, 15 bp, Homo sapiens
gatcccacggaattg

SEQ ID NO: 2049565 - DNA, 15 bp, Homo sapiens
atcccacggaattgg

SEQ ID NO: 2049566 - DNA, 15 bp, Homo sapiens
tcccacggaattgga

SEQ ID NO: 2049567 - DNA, 15 bp, Homo sapiens
cccacggaattggag

SEQ ID NO: 2049568 - DNA, 15 bp, Homo sapiens
ccacggaattggagc

SEQ ID NO: 2049569 - DNA, 15 bp, Homo sapiens
cacggaattggagct

SEQ ID NO: 2049570 - DNA, 15 bp, Homo sapiens
acggaattggagctt

SEQ ID NO: 2049571 - DNA, 15 bp, Homo sapiens
cggaattggagcttc

SEQ ID NO: 2049572 - DNA, 15 bp, Homo sapiens
ggaattggagcttcg

SEQ ID NO: 2049573 - DNA, 15 bp, Homo sapiens
gaattggagcttcgc

SEQ ID NO: 2049574 - DNA, 15 bp, Homo sapiens
aattggagcttcgct

SEQ ID NO: 2049575 - DNA, 15 bp, Homo sapiens
attggagcttcgctt

SEQ ID NO: 2049576 - DNA, 15 bp, Homo sapiens
ttggagcttcgctta

SEQ ID NO: 2049577 - DNA, 15 bp, Homo sapiens
tggagcttcgcttaa

SEQ ID NO: 2049578 - DNA, 15 bp, Homo sapiens
ggagcttcgcttaac

SEQ ID NO: 2049579 - DNA, 15 bp, Homo sapiens
gagcttcgcttaacc

SEQ ID NO: 2049580 - DNA, 15 bp, Homo sapiens
agcttcgcttaacct

SEQ ID NO: 2049581 - DNA, 15 bp, Homo sapiens
gcttcgcttaacctg

SEQ ID NO: 2049582 - DNA, 15 bp, Homo sapiens
cttcgcttaacctgc

SEQ ID NO: 2049583 - DNA, 15 bp, Homo sapiens
ttcgcttaacctgcc

SEQ ID NO: 2049584 - DNA, 15 bp, Homo sapiens
tcgcttaacctgccc

SEQ ID NO: 2049585 - DNA, 15 bp, Homo sapiens
cgcttaacctgcccc

SEQ ID NO: 2049586 - DNA, 15 bp, Homo sapiens
gcttaacctgcccca

SEQ ID NO: 2049587 - DNA, 15 bp, Homo sapiens
cttaacctgccccag

SEQ ID NO: 2049588 - DNA, 15 bp, Homo sapiens
ttaacctgccccagc

SEQ ID NO: 2049589 - DNA, 15 bp, Homo sapiens
taacctgccccagcc

SEQ ID NO: 2049590 - DNA, 15 bp, Homo sapiens
aacctgccccagcct

SEQ ID NO: 2049591 - DNA, 15 bp, Homo sapiens
acctgccccagccta

SEQ ID NO: 2049592 - DNA, 15 bp, Homo sapiens
cctgccccagcctag

SEQ ID NO: 2049593 - DNA, 15 bp, Homo sapiens
ctgccccagcctagc

SEQ ID NO: 2049594 - DNA, 15 bp, Homo sapiens
tgccccagcctagcc

SEQ ID NO: 2049595 - DNA, 15 bp, Homo sapiens
gccccagcctagccc

SEQ ID NO: 2049596 - DNA, 15 bp, Homo sapiens
ccccagcctagccca

SEQ ID NO: 2049597 - DNA, 15 bp, Homo sapiens
cccagcctagcccaa

SEQ ID NO: 2049598 - DNA, 15 bp, Homo sapiens
ccagcctagcccaag

SEQ ID NO: 2049599 - DNA, 15 bp, Homo sapiens
cagcctagcccaagc

SEQ ID NO: 2049600 - DNA, 15 bp, Homo sapiens
agcctagcccaagcc

SEQ ID NO: 2049601 - DNA, 15 bp, Homo sapiens
gcctagcccaagccc

SEQ ID NO: 2049602 - DNA, 15 bp, Homo sapiens
cctagcccaagcccg

SEQ ID NO: 2049603 - DNA, 15 bp, Homo sapiens
ctagcccaagcccgg

SEQ ID NO: 2049604 - DNA, 15 bp, Homo sapiens
tagcccaagcccggg

SEQ ID NO: 2049605 - DNA, 15 bp, Homo sapiens
agcccaagcccgggc

SEQ ID NO: 2049606 - DNA, 15 bp, Homo sapiens
gcccaagcccgggcg

SEQ ID NO: 2049607 - DNA, 15 bp, Homo sapiens
cccaagcccgggcgg

SEQ ID NO: 2049608 - DNA, 15 bp, Homo sapiens
ccaagcccgggcggg

SEQ ID NO: 2049609 - DNA, 15 bp, Homo sapiens
caagcccgggcgggg

SEQ ID NO: 2049610 - DNA, 15 bp, Homo sapiens
aagcccgggcgggga

SEQ ID NO: 2049611 - DNA, 15 bp, Homo sapiens
agcccgggcggggac

SEQ ID NO: 2049612 - DNA, 15 bp, Homo sapiens
gcccgggcggggacc

SEQ ID NO: 2049613 - DNA, 15 bp, Homo sapiens
cccgggcggggacct

SEQ ID NO: 2049614 - DNA, 15 bp, Homo sapiens
ccgggcggggacctg

SEQ ID NO: 2049615 - DNA, 15 bp, Homo sapiens
cgggcggggacctgg

SEQ ID NO: 2049616 - DNA, 15 bp, Homo sapiens
gggcggggacctggc

SEQ ID NO: 2049617 - DNA, 15 bp, Homo sapiens
ggcggggacctggct

SEQ ID NO: 2049618 - DNA, 15 bp, Homo sapiens
gcggggacctggctg

SEQ ID NO: 2049619 - DNA, 15 bp, Homo sapiens
cggggacctggctgg

SEQ ID NO: 2049620 - DNA, 15 bp, Homo sapiens
ggggacctggctggc

SEQ ID NO: 2049621 - DNA, 15 bp, Homo sapiens
gggacctggctggcg

SEQ ID NO: 2049622 - DNA, 15 bp, Homo sapiens
ggacctggctggcgg

SEQ ID NO: 2049623 - DNA, 15 bp, Homo sapiens
gacctggctggcggt

SEQ ID NO: 2049624 - DNA, 15 bp, Homo sapiens
acctggctggcggtg

SEQ ID NO: 2049625 - DNA, 15 bp, Homo sapiens
cctggctggcggtgc

SEQ ID NO: 2049626 - DNA, 15 bp, Homo sapiens
ctggctggcggtgcc

SEQ ID NO: 2049627 - DNA, 15 bp, Homo sapiens
tggctggcggtgccc

SEQ ID NO: 2049628 - DNA, 15 bp, Homo sapiens
ggctggcggtgcccg

SEQ ID NO: 2049629 - DNA, 15 bp, Homo sapiens
gctggcggtgcccgg

SEQ ID NO: 2049630 - DNA, 15 bp, Homo sapiens
ctggcggtgcccggc

SEQ ID NO: 2049631 - DNA, 15 bp, Homo sapiens
tggcggtgcccggct

SEQ ID NO: 2049632 - DNA, 15 bp, Homo sapiens
ggcggtgcccggctg

SEQ ID NO: 2049633 - DNA, 15 bp, Homo sapiens
gcggtgcccggctgt

SEQ ID NO: 2049634 - DNA, 15 bp, Homo sapiens
cggtgcccggctgtg

SEQ ID NO: 2049635 - DNA, 15 bp, Homo sapiens
ggtgcccggctgtgg

SEQ ID NO: 2049636 - DNA, 15 bp, Homo sapiens
gtgcccggctgtggt

SEQ ID NO: 2049637 - DNA, 15 bp, Homo sapiens
tgcccggctgtggtt

SEQ ID NO: 2049638 - DNA, 15 bp, Homo sapiens
gcccggctgtggttc

SEQ ID NO: 2049639 - DNA, 15 bp, Homo sapiens
cccggctgtggttct

SEQ ID NO: 2049640 - DNA, 15 bp, Homo sapiens
ccggctgtggttctg

SEQ ID NO: 2049641 - DNA, 15 bp, Homo sapiens
cggctgtggttctgg

SEQ ID NO: 2049642 - DNA, 15 bp, Homo sapiens
ggctgtggttctggc

SEQ ID NO: 2049643 - DNA, 15 bp, Homo sapiens
gctgtggttctggcg

SEQ ID NO: 2049644 - DNA, 15 bp, Homo sapiens
ctgtggttctggcgg

SEQ ID NO: 2049645 - DNA, 15 bp, Homo sapiens
tgtggttctggcggc

SEQ ID NO: 2049646 - DNA, 15 bp, Homo sapiens
gtggttctggcggct

SEQ ID NO: 2049647 - DNA, 15 bp, Homo sapiens
tggttctggcggctg

SEQ ID NO: 2049648 - DNA, 15 bp, Homo sapiens
ggttctggcggctgc

SEQ ID NO: 2049649 - DNA, 15 bp, Homo sapiens
gttctggcggctgcc

SEQ ID NO: 2049650 - DNA, 15 bp, Homo sapiens
ttctggcggctgccc

SEQ ID NO: 2049651 - DNA, 15 bp, Homo sapiens
tctggcggctgcccc

SEQ ID NO: 2049652 - DNA, 15 bp, Homo sapiens
ctggcggctgccccg

SEQ ID NO: 2049653 - DNA, 15 bp, Homo sapiens
tggcggctgccccgc

SEQ ID NO: 2049654 - DNA, 15 bp, Homo sapiens
ggcggctgccccgca

SEQ ID NO: 2049655 - DNA, 15 bp, Homo sapiens
gcggctgccccgcac

SEQ ID NO: 2049656 - DNA, 15 bp, Homo sapiens
cggctgccccgcacc

SEQ ID NO: 2049657 - DNA, 15 bp, Homo sapiens
ggctgccccgcaccc

SEQ ID NO: 2049658 - DNA, 15 bp, Homo sapiens
gctgccccgcacccc

SEQ ID NO: 2049659 - DNA, 15 bp, Homo sapiens
ctgccccgcacccca

SEQ ID NO: 2049660 - DNA, 15 bp, Homo sapiens
tgccccgcaccccat

SEQ ID NO: 2049661 - DNA, 15 bp, Homo sapiens
gccccgcaccccatt

SEQ ID NO: 2049662 - DNA, 15 bp, Homo sapiens
ccccgcaccccattc

SEQ ID NO: 2049663 - DNA, 15 bp, Homo sapiens
cccgcaccccattct

SEQ ID NO: 2049664 - DNA, 15 bp, Homo sapiens
ccgcaccccattcta

SEQ ID NO: 2049665 - DNA, 15 bp, Homo sapiens
cgcaccccattctag

SEQ ID NO: 2049666 - DNA, 15 bp, Homo sapiens
gcaccccattctagc

SEQ ID NO: 2049667 - DNA, 15 bp, Homo sapiens
caccccattctagct

SEQ ID NO: 2049668 - DNA, 15 bp, Homo sapiens
accccattctagctg

SEQ ID NO: 2049669 - DNA, 15 bp, Homo sapiens
ccccattctagctgg

SEQ ID NO: 2049670 - DNA, 15 bp, Homo sapiens
cccattctagctggg

SEQ ID NO: 2049671 - DNA, 15 bp, Homo sapiens
ccattctagctggga

SEQ ID NO: 2049672 - DNA, 15 bp, Homo sapiens
cattctagctgggag

SEQ ID NO: 2049673 - DNA, 15 bp, Homo sapiens
attctagctgggagg

SEQ ID NO: 2049674 - DNA, 15 bp, Homo sapiens
ttctagctgggagga

SEQ ID NO: 2049675 - DNA, 15 bp, Homo sapiens
tctagctgggaggaa

SEQ ID NO: 2049676 - DNA, 15 bp, Homo sapiens
ctagctgggaggaag

SEQ ID NO: 2049677 - DNA, 15 bp, Homo sapiens
tagctgggaggaagc

SEQ ID NO: 2049678 - DNA, 15 bp, Homo sapiens
agctgggaggaagcc

SEQ ID NO: 2049679 - DNA, 15 bp, Homo sapiens
gctgggaggaagcct

SEQ ID NO: 2049680 - DNA, 15 bp, Homo sapiens
ctgggaggaagcctt

SEQ ID NO: 2049681 - DNA, 15 bp, Homo sapiens
tgggaggaagccttt

SEQ ID NO: 2049682 - DNA, 15 bp, Homo sapiens
gggaggaagcctttg

SEQ ID NO: 2049683 - DNA, 15 bp, Homo sapiens
ggaggaagcctttgg

SEQ ID NO: 2049684 - DNA, 15 bp, Homo sapiens
gaggaagcctttggg

SEQ ID NO: 2049685 - DNA, 15 bp, Homo sapiens
aggaagcctttggga

SEQ ID NO: 2049686 - DNA, 15 bp, Homo sapiens
ggaagcctttgggag

SEQ ID NO: 2049687 - DNA, 15 bp, Homo sapiens
gaagcctttgggagt

SEQ ID NO: 2049688 - DNA, 15 bp, Homo sapiens
aagcctttgggagtc

SEQ ID NO: 2049689 - DNA, 15 bp, Homo sapiens
agcctttgggagtca

SEQ ID NO: 2049690 - DNA, 15 bp, Homo sapiens
gcctttgggagtcac

SEQ ID NO: 2049691 - DNA, 15 bp, Homo sapiens
cctttgggagtcaca

SEQ ID NO: 2049692 - DNA, 15 bp, Homo sapiens
ctttgggagtcacaa

SEQ ID NO: 2049693 - DNA, 15 bp, Homo sapiens
tttgggagtcacaat

SEQ ID NO: 2049694 - DNA, 15 bp, Homo sapiens
ttgggagtcacaatt

SEQ ID NO: 2049695 - DNA, 15 bp, Homo sapiens
tgggagtcacaattt

SEQ ID NO: 2049696 - DNA, 15 bp, Homo sapiens
gggagtcacaatttt

SEQ ID NO: 2049697 - DNA, 15 bp, Homo sapiens
ggagtcacaatttta

SEQ ID NO: 2049698 - DNA, 15 bp, Homo sapiens
gagtcacaattttag

SEQ ID NO: 2049699 - DNA, 15 bp, Homo sapiens
agtcacaattttagt

SEQ ID NO: 2049700 - DNA, 15 bp, Homo sapiens
gtcacaattttagta

SEQ ID NO: 2049701 - DNA, 15 bp, Homo sapiens
tcacaattttagtag

SEQ ID NO: 2049702 - DNA, 15 bp, Homo sapiens
cacaattttagtagg

SEQ ID NO: 2049703 - DNA, 15 bp, Homo sapiens
acaattttagtaggc

SEQ ID NO: 2049704 - DNA, 15 bp, Homo sapiens
caattttagtaggct

SEQ ID NO: 2049705 - DNA, 15 bp, Homo sapiens
aattttagtaggctg

SEQ ID NO: 2049706 - DNA, 15 bp, Homo sapiens
attttagtaggctgt

SEQ ID NO: 2049707 - DNA, 15 bp, Homo sapiens
ttttagtaggctgtg

SEQ ID NO: 2049708 - DNA, 15 bp, Homo sapiens
tttagtaggctgtgg

SEQ ID NO: 2049709 - DNA, 15 bp, Homo sapiens
ttagtaggctgtggc

SEQ ID NO: 2049710 - DNA, 15 bp, Homo sapiens
tagtaggctgtggca

SEQ ID NO: 2049711 - DNA, 15 bp, Homo sapiens
agtaggctgtggcac

SEQ ID NO: 2049712 - DNA, 15 bp, Homo sapiens
gtaggctgtggcacc

SEQ ID NO: 2049713 - DNA, 15 bp, Homo sapiens
taggctgtggcaccc

SEQ ID NO: 2049714 - DNA, 15 bp, Homo sapiens
aggctgtggcaccct

SEQ ID NO: 2049715 - DNA, 15 bp, Homo sapiens
ggctgtggcaccctc

SEQ ID NO: 2049716 - DNA, 15 bp, Homo sapiens
gctgtggcaccctcg

SEQ ID NO: 2049717 - DNA, 15 bp, Homo sapiens
ctgtggcaccctcgg

SEQ ID NO: 2049718 - DNA, 15 bp, Homo sapiens
tgtggcaccctcggc

SEQ ID NO: 2049719 - DNA, 15 bp, Homo sapiens
gtggcaccctcggcc

SEQ ID NO: 2049720 - DNA, 15 bp, Homo sapiens
tggcaccctcggcct

SEQ ID NO: 2049721 - DNA, 15 bp, Homo sapiens
ggcaccctcggcctt

SEQ ID NO: 2049722 - DNA, 15 bp, Homo sapiens
gcaccctcggcctta

SEQ ID NO: 2049723 - DNA, 15 bp, Homo sapiens
caccctcggccttat

SEQ ID NO: 2049724 - DNA, 15 bp, Homo sapiens
accctcggccttatc

SEQ ID NO: 2049725 - DNA, 15 bp, Homo sapiens
ccctcggccttatca

SEQ ID NO: 2049726 - DNA, 15 bp, Homo sapiens
cctcggccttatcat

SEQ ID NO: 2049727 - DNA, 15 bp, Homo sapiens
ctcggccttatcatc

SEQ ID NO: 2049728 - DNA, 15 bp, Homo sapiens
tcggccttatcatct

SEQ ID NO: 2049729 - DNA, 15 bp, Homo sapiens
cggccttatcatctt

SEQ ID NO: 2049730 - DNA, 15 bp, Homo sapiens
ggccttatcatcttt

SEQ ID NO: 2049731 - DNA, 15 bp, Homo sapiens
gccttatcatctttg

SEQ ID NO: 2049732 - DNA, 15 bp, Homo sapiens
ccttatcatctttgc

SEQ ID NO: 2049733 - DNA, 15 bp, Homo sapiens
cttatcatctttgca

SEQ ID NO: 2049734 - DNA, 15 bp, Homo sapiens
ttatcatctttgcat

SEQ ID NO: 2049735 - DNA, 15 bp, Homo sapiens
tatcatctttgcatt

SEQ ID NO: 2049736 - DNA, 15 bp, Homo sapiens
atcatctttgcattg

SEQ ID NO: 2049737 - DNA, 15 bp, Homo sapiens
tcatctttgcattgg

SEQ ID NO: 2049738 - DNA, 15 bp, Homo sapiens
catctttgcattgga

SEQ ID NO: 2049739 - DNA, 15 bp, Homo sapiens
atctttgcattggat

SEQ ID NO: 2049740 - DNA, 15 bp, Homo sapiens
tctttgcattggatg

SEQ ID NO: 2049741 - DNA, 15 bp, Homo sapiens
ctttgcattggatgg

SEQ ID NO: 2049742 - DNA, 15 bp, Homo sapiens
tttgcattggatgga

SEQ ID NO: 2049743 - DNA, 15 bp, Homo sapiens
ttgcattggatggag

SEQ ID NO: 2049744 - DNA, 15 bp, Homo sapiens
tgcattggatggagt

SEQ ID NO: 2049745 - DNA, 15 bp, Homo sapiens
gcattggatggagtt

SEQ ID NO: 2049746 - DNA, 15 bp, Homo sapiens
cattggatggagttt

SEQ ID NO: 2049747 - DNA, 15 bp, Homo sapiens
attggatggagtttc

SEQ ID NO: 2049748 - DNA, 15 bp, Homo sapiens
ttggatggagtttcc

SEQ ID NO: 2049749 - DNA, 15 bp, Homo sapiens
tggatggagtttcca

SEQ ID NO: 2049750 - DNA, 15 bp, Homo sapiens
ggatggagtttccat

SEQ ID NO: 2049751 - DNA, 15 bp, Homo sapiens
gatggagtttccatc

SEQ ID NO: 2049752 - DNA, 15 bp, Homo sapiens
atggagtttccatca

SEQ ID NO: 2049753 - DNA, 15 bp, Homo sapiens
tggagtttccatcaa

SEQ ID NO: 2049754 - DNA, 15 bp, Homo sapiens
ggagtttccatcaaa

SEQ ID NO: 2049755 - DNA, 15 bp, Homo sapiens
gagtttccatcaaat

SEQ ID NO: 2049756 - DNA, 15 bp, Homo sapiens
agtttccatcaaata

SEQ ID NO: 2049757 - DNA, 15 bp, Homo sapiens
gtttccatcaaatac

SEQ ID NO: 2049758 - DNA, 15 bp, Homo sapiens
tttccatcaaataca

SEQ ID NO: 2049759 - DNA, 15 bp, Homo sapiens
ttccatcaaatacat

SEQ ID NO: 2049760 - DNA, 15 bp, Homo sapiens
tccatcaaatacatt

SEQ ID NO: 2049761 - DNA, 15 bp, Homo sapiens
ccatcaaatacattc

SEQ ID NO: 2049762 - DNA, 15 bp, Homo sapiens
catcaaatacattct

SEQ ID NO: 2049763 - DNA, 15 bp, Homo sapiens
atcaaatacattctt

SEQ ID NO: 2049764 - DNA, 15 bp, Homo sapiens
tcaaatacattcttc

SEQ ID NO: 2049765 - DNA, 15 bp, Homo sapiens
caaatacattcttct

SEQ ID NO: 2049766 - DNA, 15 bp, Homo sapiens
aaatacattcttctc

SEQ ID NO: 2049767 - DNA, 15 bp, Homo sapiens
aatacattcttctcc

SEQ ID NO: 2049768 - DNA, 15 bp, Homo sapiens
atacattcttctcct

SEQ ID NO: 2049769 - DNA, 15 bp, Homo sapiens
tacattcttctcctc

SEQ ID NO: 2049770 - DNA, 15 bp, Homo sapiens
acattcttctcctcg

SEQ ID NO: 2049771 - DNA, 15 bp, Homo sapiens
cattcttctcctcgc

SEQ ID NO: 2049772 - DNA, 15 bp, Homo sapiens
attcttctcctcgcc

SEQ ID NO: 2049773 - DNA, 15 bp, Homo sapiens
ttcttctcctcgccg

SEQ ID NO: 2049774 - DNA, 15 bp, Homo sapiens
tcttctcctcgccgt

SEQ ID NO: 2049775 - DNA, 15 bp, Homo sapiens
cttctcctcgccgtc

SEQ ID NO: 2049776 - DNA, 15 bp, Homo sapiens
ttctcctcgccgtct

SEQ ID NO: 2049777 - DNA, 15 bp, Homo sapiens
tctcctcgccgtcta

SEQ ID NO: 2049778 - DNA, 15 bp, Homo sapiens
ctcctcgccgtctac

SEQ ID NO: 2049779 - DNA, 15 bp, Homo sapiens
tcctcgccgtctaca

SEQ ID NO: 2049780 - DNA, 15 bp, Homo sapiens
cctcgccgtctacag

SEQ ID NO: 2049781 - DNA, 15 bp, Homo sapiens
ctcgccgtctacagt

SEQ ID NO: 2049782 - DNA, 15 bp, Homo sapiens
tcgccgtctacagtc

SEQ ID NO: 2049783 - DNA, 15 bp, Homo sapiens
cgccgtctacagtcg

SEQ ID NO: 2049784 - DNA, 15 bp, Homo sapiens
gccgtctacagtcgg

SEQ ID NO: 2049785 - DNA, 15 bp, Homo sapiens
ccgtctacagtcggc

SEQ ID NO: 2049786 - DNA, 15 bp, Homo sapiens
cgtctacagtcggca

SEQ ID NO: 2049787 - DNA, 15 bp, Homo sapiens
gtctacagtcggcat

SEQ ID NO: 2049788 - DNA, 15 bp, Homo sapiens
tctacagtcggcata

SEQ ID NO: 2049789 - DNA, 15 bp, Homo sapiens
ctacagtcggcatag

SEQ ID NO: 2049790 - DNA, 15 bp, Homo sapiens
tacagtcggcatagt

SEQ ID NO: 2049791 - DNA, 15 bp, Homo sapiens
acagtcggcatagtt

SEQ ID NO: 2049792 - DNA, 15 bp, Homo sapiens
cagtcggcatagttt

SEQ ID NO: 2049793 - DNA, 15 bp, Homo sapiens
agtcggcatagtttg

SEQ ID NO: 2049794 - DNA, 15 bp, Homo sapiens
gtcggcatagtttga

SEQ ID NO: 2049795 - DNA, 15 bp, Homo sapiens
tcggcatagtttgaa

SEQ ID NO: 2049796 - DNA, 15 bp, Homo sapiens
cggcatagtttgaag

SEQ ID NO: 2049797 - DNA, 15 bp, Homo sapiens
ggcatagtttgaagt

SEQ ID NO: 2049798 - DNA, 15 bp, Homo sapiens
gcatagtttgaagtc

SEQ ID NO: 2049799 - DNA, 15 bp, Homo sapiens
catagtttgaagtct

SEQ ID NO: 2049800 - DNA, 15 bp, Homo sapiens
atagtttgaagtctg

SEQ ID NO: 2049801 - DNA, 15 bp, Homo sapiens
tagtttgaagtctgt

SEQ ID NO: 2049802 - DNA, 15 bp, Homo sapiens
agtttgaagtctgtt

SEQ ID NO: 2049803 - DNA, 15 bp, Homo sapiens
gtttgaagtctgttt

SEQ ID NO: 2049804 - DNA, 15 bp, Homo sapiens
tttgaagtctgttta

SEQ ID NO: 2049805 - DNA, 15 bp, Homo sapiens
ttgaagtctgtttac

SEQ ID NO: 2049806 - DNA, 15 bp, Homo sapiens
tgaagtctgtttact

SEQ ID NO: 2049807 - DNA, 15 bp, Homo sapiens
gaagtctgtttactt

SEQ ID NO: 2049808 - DNA, 15 bp, Homo sapiens
aagtctgtttacttg

SEQ ID NO: 2049809 - DNA, 15 bp, Homo sapiens
agtctgtttacttgt

SEQ ID NO: 2049810 - DNA, 15 bp, Homo sapiens
gtctgtttacttgtc

SEQ ID NO: 2049811 - DNA, 15 bp, Homo sapiens
tctgtttacttgtcc

SEQ ID NO: 2049812 - DNA, 15 bp, Homo sapiens
ctgtttacttgtccc

SEQ ID NO: 2049813 - DNA, 15 bp, Homo sapiens
tgtttacttgtcccg

SEQ ID NO: 2049814 - DNA, 15 bp, Homo sapiens
gtttacttgtcccgg

SEQ ID NO: 2049815 - DNA, 15 bp, Homo sapiens
tttacttgtcccggg

SEQ ID NO: 2049816 - DNA, 15 bp, Homo sapiens
ttacttgtcccgggg

SEQ ID NO: 2049817 - DNA, 15 bp, Homo sapiens
tacttgtcccgggga

SEQ ID NO: 2049818 - DNA, 15 bp, Homo sapiens
acttgtcccggggaa

SEQ ID NO: 2049819 - DNA, 15 bp, Homo sapiens
cttgtcccggggaaa

SEQ ID NO: 2049820 - DNA, 15 bp, Homo sapiens
ttgtcccggggaaag

SEQ ID NO: 2049821 - DNA, 15 bp, Homo sapiens
tgtcccggggaaagg

SEQ ID NO: 2049822 - DNA, 15 bp, Homo sapiens
gtcccggggaaaggt

SEQ ID NO: 2049823 - DNA, 15 bp, Homo sapiens
tcccggggaaaggtg

SEQ ID NO: 2049824 - DNA, 15 bp, Homo sapiens
cccggggaaaggtga

SEQ ID NO: 2049825 - DNA, 15 bp, Homo sapiens
ccggggaaaggtgaa

SEQ ID NO: 2049826 - DNA, 15 bp, Homo sapiens
cggggaaaggtgaac

SEQ ID NO: 2049827 - DNA, 15 bp, Homo sapiens
ggggaaaggtgaact

SEQ ID NO: 2049828 - DNA, 15 bp, Homo sapiens
gggaaaggtgaactc

SEQ ID NO: 2049829 - DNA, 15 bp, Homo sapiens
ggaaaggtgaactca

SEQ ID NO: 2049830 - DNA, 15 bp, Homo sapiens
gaaaggtgaactcaa

SEQ ID NO: 2049831 - DNA, 15 bp, Homo sapiens
aaaggtgaactcaat

SEQ ID NO: 2049832 - DNA, 15 bp, Homo sapiens
aaggtgaactcaatc

SEQ ID NO: 2049833 - DNA, 15 bp, Homo sapiens
aggtgaactcaatcg

SEQ ID NO: 2049834 - DNA, 15 bp, Homo sapiens
ggtgaactcaatcgg

SEQ ID NO: 2049835 - DNA, 15 bp, Homo sapiens
gtgaactcaatcggg

SEQ ID NO: 2049836 - DNA, 15 bp, Homo sapiens
tgaactcaatcgggt

SEQ ID NO: 2049837 - DNA, 15 bp, Homo sapiens
gaactcaatcgggtt

SEQ ID NO: 2049838 - DNA, 15 bp, Homo sapiens
aactcaatcgggttt

SEQ ID NO: 2049839 - DNA, 15 bp, Homo sapiens
actcaatcgggtttg

SEQ ID NO: 2049840 - DNA, 15 bp, Homo sapiens
ctcaatcgggtttgc

SEQ ID NO: 2049841 - DNA, 15 bp, Homo sapiens
tcaatcgggtttgcg

SEQ ID NO: 2049842 - DNA, 15 bp, Homo sapiens
caatcgggtttgcgg

SEQ ID NO: 2049843 - DNA, 15 bp, Homo sapiens
aatcgggtttgcgga

SEQ ID NO: 2049844 - DNA, 15 bp, Homo sapiens
atcgggtttgcggac

SEQ ID NO: 2049845 - DNA, 15 bp, Homo sapiens
tcgggtttgcggacc

SEQ ID NO: 2049846 - DNA, 15 bp, Homo sapiens
cgggtttgcggaccg

SEQ ID NO: 2049847 - DNA, 15 bp, Homo sapiens
gggtttgcggaccga

SEQ ID NO: 2049848 - DNA, 15 bp, Homo sapiens
ggtttgcggaccgag

SEQ ID NO: 2049849 - DNA, 15 bp, Homo sapiens
gtttgcggaccgaga

SEQ ID NO: 2049850 - DNA, 15 bp, Homo sapiens
tttgcggaccgagac

SEQ ID NO: 2049851 - DNA, 15 bp, Homo sapiens
ttgcggaccgagaca

SEQ ID NO: 2049852 - DNA, 15 bp, Homo sapiens
tgcggaccgagacaa

SEQ ID NO: 2049853 - DNA, 15 bp, Homo sapiens
gcggaccgagacaaa

SEQ ID NO: 2049854 - DNA, 15 bp, Homo sapiens
cggaccgagacaaac

SEQ ID NO: 2049855 - DNA, 15 bp, Homo sapiens
ggaccgagacaaaca

SEQ ID NO: 2049856 - DNA, 15 bp, Homo sapiens
gaccgagacaaacag

SEQ ID NO: 2049857 - DNA, 15 bp, Homo sapiens
accgagacaaacagg

SEQ ID NO: 2049858 - DNA, 15 bp, Homo sapiens
ccgagacaaacagga

SEQ ID NO: 2049859 - DNA, 15 bp, Homo sapiens
cgagacaaacaggac

SEQ ID NO: 2049860 - DNA, 15 bp, Homo sapiens
gagacaaacaggacc

SEQ ID NO: 2049861 - DNA, 15 bp, Homo sapiens
agacaaacaggacct

SEQ ID NO: 2049862 - DNA, 15 bp, Homo sapiens
gacaaacaggacctc

SEQ ID NO: 2049863 - DNA, 15 bp, Homo sapiens
acaaacaggacctca

SEQ ID NO: 2049864 - DNA, 15 bp, Homo sapiens
caaacaggacctcag

SEQ ID NO: 2049865 - DNA, 15 bp, Homo sapiens
aaacaggacctcagc

SEQ ID NO: 2049866 - DNA, 15 bp, Homo sapiens
aacaggacctcagcc

SEQ ID NO: 2049867 - DNA, 15 bp, Homo sapiens
acaggacctcagcct

SEQ ID NO: 2049868 - DNA, 15 bp, Homo sapiens
caggacctcagcctc

SEQ ID NO: 2049869 - DNA, 15 bp, Homo sapiens
aggacctcagcctct

SEQ ID NO: 2049870 - DNA, 15 bp, Homo sapiens
ggacctcagcctctt

SEQ ID NO: 2049871 - DNA, 15 bp, Homo sapiens
gacctcagcctcttt

SEQ ID NO: 2049872 - DNA, 15 bp, Homo sapiens
acctcagcctctttc

SEQ ID NO: 2049873 - DNA, 15 bp, Homo sapiens
cctcagcctctttct

SEQ ID NO: 2049874 - DNA, 15 bp, Homo sapiens
ctcagcctctttctt

SEQ ID NO: 2049875 - DNA, 15 bp, Homo sapiens
tcagcctctttcttg

SEQ ID NO: 2049876 - DNA, 15 bp, Homo sapiens
cagcctctttcttgc

SEQ ID NO: 2049877 - DNA, 15 bp, Homo sapiens
agcctctttcttgcc

SEQ ID NO: 2049878 - DNA, 15 bp, Homo sapiens
gcctctttcttgcca

SEQ ID NO: 2049879 - DNA, 15 bp, Homo sapiens
cctctttcttgccat

SEQ ID NO: 2049880 - DNA, 15 bp, Homo sapiens
ctctttcttgccatc

SEQ ID NO: 2049881 - DNA, 15 bp, Homo sapiens
tctttcttgccatca

SEQ ID NO: 2049882 - DNA, 15 bp, Homo sapiens
ctttcttgccatcaa

SEQ ID NO: 2049883 - DNA, 15 bp, Homo sapiens
tttcttgccatcaat

SEQ ID NO: 2049884 - DNA, 15 bp, Homo sapiens
ttcttgccatcaatt

SEQ ID NO: 2049885 - DNA, 15 bp, Homo sapiens
tcttgccatcaatta

SEQ ID NO: 2049886 - DNA, 15 bp, Homo sapiens
cttgccatcaattac

SEQ ID NO: 2049887 - DNA, 15 bp, Homo sapiens
ttgccatcaattacg

SEQ ID NO: 2049888 - DNA, 15 bp, Homo sapiens
tgccatcaattacgc

SEQ ID NO: 2049889 - DNA, 15 bp, Homo sapiens
gccatcaattacgct

SEQ ID NO: 2049890 - DNA, 15 bp, Homo sapiens
ccatcaattacgctg

SEQ ID NO: 2049891 - DNA, 15 bp, Homo sapiens
catcaattacgctgg

SEQ ID NO: 2049892 - DNA, 15 bp, Homo sapiens
atcaattacgctggc

SEQ ID NO: 2049893 - DNA, 15 bp, Homo sapiens
tcaattacgctggct

SEQ ID NO: 2049894 - DNA, 15 bp, Homo sapiens
caattacgctggctc

SEQ ID NO: 2049895 - DNA, 15 bp, Homo sapiens
aattacgctggctcc

SEQ ID NO: 2049896 - DNA, 15 bp, Homo sapiens
attacgctggctcca

SEQ ID NO: 2049897 - DNA, 15 bp, Homo sapiens
ttacgctggctccat

SEQ ID NO: 2049898 - DNA, 15 bp, Homo sapiens
tacgctggctccatc

SEQ ID NO: 2049899 - DNA, 15 bp, Homo sapiens
acgctggctccatcc

SEQ ID NO: 2049900 - DNA, 15 bp, Homo sapiens
cgctggctccatccg

SEQ ID NO: 2049901 - DNA, 15 bp, Homo sapiens
gctggctccatccgc

SEQ ID NO: 2049902 - DNA, 15 bp, Homo sapiens
ctggctccatccgct

SEQ ID NO: 2049903 - DNA, 15 bp, Homo sapiens
tggctccatccgctc

SEQ ID NO: 2049904 - DNA, 15 bp, Homo sapiens
ggctccatccgctcc

SEQ ID NO: 2049905 - DNA, 15 bp, Homo sapiens
gctccatccgctccc

SEQ ID NO: 2049906 - DNA, 15 bp, Homo sapiens
ctccatccgctcccg

SEQ ID NO: 2049907 - DNA, 15 bp, Homo sapiens
tccatccgctcccgc

SEQ ID NO: 2049908 - DNA, 15 bp, Homo sapiens
ccatccgctcccgct

SEQ ID NO: 2049909 - DNA, 15 bp, Homo sapiens
catccgctcccgctc

SEQ ID NO: 2049910 - DNA, 15 bp, Homo sapiens
atccgctcccgctcc

SEQ ID NO: 2049911 - DNA, 15 bp, Homo sapiens
tccgctcccgctccc

SEQ ID NO: 2049912 - DNA, 15 bp, Homo sapiens
ccgctcccgctcccg

SEQ ID NO: 2049913 - DNA, 15 bp, Homo sapiens
cgctcccgctcccgg

SEQ ID NO: 2049914 - DNA, 15 bp, Homo sapiens
gctcccgctcccggc

SEQ ID NO: 2049915 - DNA, 15 bp, Homo sapiens
ctcccgctcccggct

SEQ ID NO: 2049916 - DNA, 15 bp, Homo sapiens
tcccgctcccggctg

SEQ ID NO: 2049917 - DNA, 15 bp, Homo sapiens
cccgctcccggctgg

SEQ ID NO: 2049918 - DNA, 15 bp, Homo sapiens
ccgctcccggctggg

SEQ ID NO: 2049919 - DNA, 15 bp, Homo sapiens
cgctcccggctgggg

SEQ ID NO: 2049920 - DNA, 15 bp, Homo sapiens
gctcccggctggggg

SEQ ID NO: 2049921 - DNA, 15 bp, Homo sapiens
ctcccggctggggga

SEQ ID NO: 2049922 - DNA, 15 bp, Homo sapiens
tcccggctgggggaa

SEQ ID NO: 2049923 - DNA, 15 bp, Homo sapiens
cccggctgggggaat

SEQ ID NO: 2049924 - DNA, 15 bp, Homo sapiens
ccggctgggggaatt

SEQ ID NO: 2049925 - DNA, 15 bp, Homo sapiens
cggctgggggaattg

SEQ ID NO: 2049926 - DNA, 15 bp, Homo sapiens
ggctgggggaattgt

SEQ ID NO: 2049927 - DNA, 15 bp, Homo sapiens
gctgggggaattgtc

SEQ ID NO: 2049928 - DNA, 15 bp, Homo sapiens
ctgggggaattgtcg

SEQ ID NO: 2049929 - DNA, 15 bp, Homo sapiens
tgggggaattgtcgc

SEQ ID NO: 2049930 - DNA, 15 bp, Homo sapiens
gggggaattgtcgca

SEQ ID NO: 2049931 - DNA, 15 bp, Homo sapiens
ggggaattgtcgcag

SEQ ID NO: 2049932 - DNA, 15 bp, Homo sapiens
gggaattgtcgcagc

SEQ ID NO: 2049933 - DNA, 15 bp, Homo sapiens
ggaattgtcgcagct

SEQ ID NO: 2049934 - DNA, 15 bp, Homo sapiens
gaattgtcgcagctg

SEQ ID NO: 2049935 - DNA, 15 bp, Homo sapiens
aattgtcgcagctgc

SEQ ID NO: 2049936 - DNA, 15 bp, Homo sapiens
attgtcgcagctgcg

SEQ ID NO: 2049937 - DNA, 15 bp, Homo sapiens
ttgtcgcagctgcgg

SEQ ID NO: 2049938 - DNA, 15 bp, Homo sapiens
tgtcgcagctgcggg

SEQ ID NO: 2049939 - DNA, 15 bp, Homo sapiens
gtcgcagctgcggga

SEQ ID NO: 2049940 - DNA, 15 bp, Homo sapiens
tcgcagctgcgggaa

SEQ ID NO: 2049941 - DNA, 15 bp, Homo sapiens
cgcagctgcgggaag

SEQ ID NO: 2049942 - DNA, 15 bp, Homo sapiens
gcagctgcgggaaga

SEQ ID NO: 2049943 - DNA, 15 bp, Homo sapiens
cagctgcgggaagag

SEQ ID NO: 2049944 - DNA, 15 bp, Homo sapiens
agctgcgggaagaga

SEQ ID NO: 2049945 - DNA, 15 bp, Homo sapiens
gctgcgggaagagac

SEQ ID NO: 2049946 - DNA, 15 bp, Homo sapiens
ctgcgggaagagacc

SEQ ID NO: 2049947 - DNA, 15 bp, Homo sapiens
tgcgggaagagacct

SEQ ID NO: 2049948 - DNA, 15 bp, Homo sapiens
gcgggaagagaccta

SEQ ID NO: 2049949 - DNA, 15 bp, Homo sapiens
cgggaagagacctag

SEQ ID NO: 2049950 - DNA, 15 bp, Homo sapiens
gggaagagacctaga

SEQ ID NO: 2049951 - DNA, 15 bp, Homo sapiens
ggaagagacctagaa

SEQ ID NO: 2049952 - DNA, 15 bp, Homo sapiens
gaagagacctagaac

SEQ ID NO: 2049953 - DNA, 15 bp, Homo sapiens
aagagacctagaacg

SEQ ID NO: 2049954 - DNA, 15 bp, Homo sapiens
agagacctagaacgc

SEQ ID NO: 2049955 - DNA, 15 bp, Homo sapiens
gagacctagaacgca

SEQ ID NO: 2049956 - DNA, 15 bp, Homo sapiens
agacctagaacgcaa

SEQ ID NO: 2049957 - DNA, 15 bp, Homo sapiens
gacctagaacgcaat

SEQ ID NO: 2049958 - DNA, 15 bp, Homo sapiens
acctagaacgcaatc

SEQ ID NO: 2049959 - DNA, 15 bp, Homo sapiens
cctagaacgcaatct

SEQ ID NO: 2049960 - DNA, 15 bp, Homo sapiens
ctagaacgcaatctg

SEQ ID NO: 2049961 - DNA, 15 bp, Homo sapiens
tagaacgcaatctga

SEQ ID NO: 2049962 - DNA, 15 bp, Homo sapiens
agaacgcaatctgaa

SEQ ID NO: 2049963 - DNA, 15 bp, Homo sapiens
gaacgcaatctgaag

SEQ ID NO: 2049964 - DNA, 15 bp, Homo sapiens
aacgcaatctgaagc

SEQ ID NO: 2049965 - DNA, 15 bp, Homo sapiens
acgcaatctgaagcg

SEQ ID NO: 2049966 - DNA, 15 bp, Homo sapiens
cgcaatctgaagcgt

SEQ ID NO: 2049967 - DNA, 15 bp, Homo sapiens
gcaatctgaagcgtt

SEQ ID NO: 2049968 - DNA, 15 bp, Homo sapiens
caatctgaagcgttt

SEQ ID NO: 2049969 - DNA, 15 bp, Homo sapiens
aatctgaagcgtttc

SEQ ID NO: 2049970 - DNA, 15 bp, Homo sapiens
atctgaagcgtttca

SEQ ID NO: 2049971 - DNA, 15 bp, Homo sapiens
tctgaagcgtttcat

SEQ ID NO: 2049972 - DNA, 15 bp, Homo sapiens
ctgaagcgtttcatt

SEQ ID NO: 2049973 - DNA, 15 bp, Homo sapiens
tgaagcgtttcatta

SEQ ID NO: 2049974 - DNA, 15 bp, Homo sapiens
gaagcgtttcattag

SEQ ID NO: 2049975 - DNA, 15 bp, Homo sapiens
aagcgtttcattagg

SEQ ID NO: 2049976 - DNA, 15 bp, Homo sapiens
agcgtttcattaggg

SEQ ID NO: 2049977 - DNA, 15 bp, Homo sapiens
gcgtttcattaggga

SEQ ID NO: 2049978 - DNA, 15 bp, Homo sapiens
cgtttcattagggaa

SEQ ID NO: 2049979 - DNA, 15 bp, Homo sapiens
gtttcattagggaaa

SEQ ID NO: 2049980 - DNA, 15 bp, Homo sapiens
tttcattagggaaat

SEQ ID NO: 2049981 - DNA, 15 bp, Homo sapiens
ttcattagggaaata

SEQ ID NO: 2049982 - DNA, 15 bp, Homo sapiens
tcattagggaaatag

SEQ ID NO: 2049983 - DNA, 15 bp, Homo sapiens
cattagggaaatagg

SEQ ID NO: 2049984 - DNA, 15 bp, Homo sapiens
attagggaaataggt

SEQ ID NO: 2049985 - DNA, 15 bp, Homo sapiens
ttagggaaataggtg

SEQ ID NO: 2049986 - DNA, 15 bp, Homo sapiens
tagggaaataggtgc

SEQ ID NO: 2049987 - DNA, 15 bp, Homo sapiens
agggaaataggtgcg

SEQ ID NO: 2049988 - DNA, 15 bp, Homo sapiens
gggaaataggtgcgc

SEQ ID NO: 2049989 - DNA, 15 bp, Homo sapiens
ggaaataggtgcgcg

SEQ ID NO: 2049990 - DNA, 15 bp, Homo sapiens
gaaataggtgcgcgc

SEQ ID NO: 2049991 - DNA, 15 bp, Homo sapiens
aaataggtgcgcgct

SEQ ID NO: 2049992 - DNA, 15 bp, Homo sapiens
aataggtgcgcgctg

SEQ ID NO: 2049993 - DNA, 15 bp, Homo sapiens
ataggtgcgcgctgg

SEQ ID NO: 2049994 - DNA, 15 bp, Homo sapiens
taggtgcgcgctggg

SEQ ID NO: 2049995 - DNA, 15 bp, Homo sapiens
aggtgcgcgctggga

SEQ ID NO: 2049996 - DNA, 15 bp, Homo sapiens
ggtgcgcgctgggag

SEQ ID NO: 2049997 - DNA, 15 bp, Homo sapiens
gtgcgcgctgggagc

SEQ ID NO: 2049998 - DNA, 15 bp, Homo sapiens
tgcgcgctgggagca

SEQ ID NO: 2049999 - DNA, 15 bp, Homo sapiens
gcgcgctgggagcag

SEQ ID NO: 2050000 - DNA, 15 bp, Homo sapiens
cgcgctgggagcagt

SEQ ID NO: 2050001 - DNA, 15 bp, Homo sapiens
gcgctgggagcagtg

SEQ ID NO: 2050002 - DNA, 15 bp, Homo sapiens
cgctgggagcagtgc

SEQ ID NO: 2050003 - DNA, 15 bp, Homo sapiens
gctgggagcagtgca

SEQ ID NO: 2050004 - DNA, 15 bp, Homo sapiens
ctgggagcagtgcaa

SEQ ID NO: 2050005 - DNA, 15 bp, Homo sapiens
tgggagcagtgcaag

SEQ ID NO: 2050006 - DNA, 15 bp, Homo sapiens
gggagcagtgcaaga

SEQ ID NO: 2050007 - DNA, 15 bp, Homo sapiens
ggagcagtgcaagag

SEQ ID NO: 2050008 - DNA, 15 bp, Homo sapiens
gagcagtgcaagagg

SEQ ID NO: 2050009 - DNA, 15 bp, Homo sapiens
agcagtgcaagaggg

SEQ ID NO: 2050010 - DNA, 15 bp, Homo sapiens
gcagtgcaagagggt

SEQ ID NO: 2050011 - DNA, 15 bp, Homo sapiens
cagtgcaagagggtt

SEQ ID NO: 2050012 - DNA, 15 bp, Homo sapiens
agtgcaagagggttc

SEQ ID NO: 2050013 - DNA, 15 bp, Homo sapiens
gtgcaagagggttcc

SEQ ID NO: 2050014 - DNA, 15 bp, Homo sapiens
tgcaagagggttccg

SEQ ID NO: 2050015 - DNA, 15 bp, Homo sapiens
gcaagagggttccgc

SEQ ID NO: 2050016 - DNA, 15 bp, Homo sapiens
caagagggttccgca

SEQ ID NO: 2050017 - DNA, 15 bp, Homo sapiens
aagagggttccgcaa

SEQ ID NO: 2050018 - DNA, 15 bp, Homo sapiens
agagggttccgcaac

SEQ ID NO: 2050019 - DNA, 15 bp, Homo sapiens
gagggttccgcaacc

SEQ ID NO: 2050020 - DNA, 15 bp, Homo sapiens
agggttccgcaacct

SEQ ID NO: 2050021 - DNA, 15 bp, Homo sapiens
gggttccgcaacctg

SEQ ID NO: 2050022 - DNA, 15 bp, Homo sapiens
ggttccgcaacctgg

SEQ ID NO: 2050023 - DNA, 15 bp, Homo sapiens
gttccgcaacctggg

SEQ ID NO: 2050024 - DNA, 15 bp, Homo sapiens
ttccgcaacctgggg

SEQ ID NO: 2050025 - DNA, 15 bp, Homo sapiens
tccgcaacctgggga

SEQ ID NO: 2050026 - DNA, 15 bp, Homo sapiens
ccgcaacctggggac

SEQ ID NO: 2050027 - DNA, 15 bp, Homo sapiens
cgcaacctggggaca

SEQ ID NO: 2050028 - DNA, 15 bp, Homo sapiens
gcaacctggggacac

SEQ ID NO: 2050029 - DNA, 15 bp, Homo sapiens
caacctggggacacc

SEQ ID NO: 2050030 - DNA, 15 bp, Homo sapiens
aacctggggacaccc

SEQ ID NO: 2050031 - DNA, 15 bp, Homo sapiens
acctggggacaccct

SEQ ID NO: 2050032 - DNA, 15 bp, Homo sapiens
cctggggacaccctc

SEQ ID NO: 2050033 - DNA, 15 bp, Homo sapiens
ctggggacaccctcc

SEQ ID NO: 2050034 - DNA, 15 bp, Homo sapiens
tggggacaccctccg

SEQ ID NO: 2050035 - DNA, 15 bp, Homo sapiens
ggggacaccctccgc

SEQ ID NO: 2050036 - DNA, 15 bp, Homo sapiens
gggacaccctccgcc

SEQ ID NO: 2050037 - DNA, 15 bp, Homo sapiens
ggacaccctccgccc

SEQ ID NO: 2050038 - DNA, 15 bp, Homo sapiens
gacaccctccgcccc

SEQ ID NO: 2050039 - DNA, 15 bp, Homo sapiens
acaccctccgcccct

SEQ ID NO: 2050040 - DNA, 15 bp, Homo sapiens
caccctccgccccta

SEQ ID NO: 2050041 - DNA, 15 bp, Homo sapiens
accctccgcccctac

SEQ ID NO: 2050042 - DNA, 15 bp, Homo sapiens
ccctccgcccctaca

SEQ ID NO: 2050043 - DNA, 15 bp, Homo sapiens
cctccgcccctacag

SEQ ID NO: 2050044 - DNA, 15 bp, Homo sapiens
ctccgcccctacagc

SEQ ID NO: 2050045 - DNA, 15 bp, Homo sapiens
tccgcccctacagca

SEQ ID NO: 2050046 - DNA, 15 bp, Homo sapiens
ccgcccctacagcac

SEQ ID NO: 2050047 - DNA, 15 bp, Homo sapiens
cgcccctacagcacc

SEQ ID NO: 2050048 - DNA, 15 bp, Homo sapiens
gcccctacagcaccg

SEQ ID NO: 2050049 - DNA, 15 bp, Homo sapiens
cccctacagcaccgt

SEQ ID NO: 2050050 - DNA, 15 bp, Homo sapiens
ccctacagcaccgtc

SEQ ID NO: 2050051 - DNA, 15 bp, Homo sapiens
cctacagcaccgtcg

SEQ ID NO: 2050052 - DNA, 15 bp, Homo sapiens
ctacagcaccgtcgg

SEQ ID NO: 2050053 - DNA, 15 bp, Homo sapiens
tacagcaccgtcggc

SEQ ID NO: 2050054 - DNA, 15 bp, Homo sapiens
acagcaccgtcggct

SEQ ID NO: 2050055 - DNA, 15 bp, Homo sapiens
cagcaccgtcggctt

SEQ ID NO: 2050056 - DNA, 15 bp, Homo sapiens
agcaccgtcggcttc

SEQ ID NO: 2050057 - DNA, 15 bp, Homo sapiens
gcaccgtcggcttct

SEQ ID NO: 2050058 - DNA, 15 bp, Homo sapiens
caccgtcggcttctg

SEQ ID NO: 2050059 - DNA, 15 bp, Homo sapiens
accgtcggcttctgg

SEQ ID NO: 2050060 - DNA, 15 bp, Homo sapiens
ccgtcggcttctgga

SEQ ID NO: 2050061 - DNA, 15 bp, Homo sapiens
cgtcggcttctggaa

SEQ ID NO: 2050062 - DNA, 15 bp, Homo sapiens
gtcggcttctggaaa

SEQ ID NO: 2050063 - DNA, 15 bp, Homo sapiens
tcggcttctggaaag

SEQ ID NO: 2050064 - DNA, 15 bp, Homo sapiens
cggcttctggaaagc

SEQ ID NO: 2050065 - DNA, 15 bp, Homo sapiens
ggcttctggaaagcc

SEQ ID NO: 2050066 - DNA, 15 bp, Homo sapiens
gcttctggaaagccg

SEQ ID NO: 2050067 - DNA, 15 bp, Homo sapiens
cttctggaaagccga

SEQ ID NO: 2050068 - DNA, 15 bp, Homo sapiens
ttctggaaagccgac

SEQ ID NO: 2050069 - DNA, 15 bp, Homo sapiens
tctggaaagccgaca

SEQ ID NO: 2050070 - DNA, 15 bp, Homo sapiens
ctggaaagccgacag

SEQ ID NO: 2050071 - DNA, 15 bp, Homo sapiens
tggaaagccgacagt

SEQ ID NO: 2050072 - DNA, 15 bp, Homo sapiens
ggaaagccgacagtc

SEQ ID NO: 2050073 - DNA, 15 bp, Homo sapiens
gaaagccgacagtcc

SEQ ID NO: 2050074 - DNA, 15 bp, Homo sapiens
aaagccgacagtcct

SEQ ID NO: 2050075 - DNA, 15 bp, Homo sapiens
aagccgacagtcctc

SEQ ID NO: 2050076 - DNA, 15 bp, Homo sapiens
agccgacagtcctcc

SEQ ID NO: 2050077 - DNA, 15 bp, Homo sapiens
gccgacagtcctcct

SEQ ID NO: 2050078 - DNA, 15 bp, Homo sapiens
ccgacagtcctcctt

SEQ ID NO: 2050079 - DNA, 15 bp, Homo sapiens
cgacagtcctccttt

SEQ ID NO: 2050080 - DNA, 15 bp, Homo sapiens
gacagtcctcctttc

SEQ ID NO: 2050081 - DNA, 15 bp, Homo sapiens
acagtcctcctttct

SEQ ID NO: 2050082 - DNA, 15 bp, Homo sapiens
cagtcctcctttctg

SEQ ID NO: 2050083 - DNA, 15 bp, Homo sapiens
agtcctcctttctgg

SEQ ID NO: 2050084 - DNA, 15 bp, Homo sapiens
gtcctcctttctggg

SEQ ID NO: 2050085 - DNA, 15 bp, Homo sapiens
tcctcctttctggga

SEQ ID NO: 2050086 - DNA, 15 bp, Homo sapiens
cctcctttctgggaa

SEQ ID NO: 2050087 - DNA, 15 bp, Homo sapiens
ctcctttctgggaat

SEQ ID NO: 2050088 - DNA, 15 bp, Homo sapiens
tcctttctgggaatc

SEQ ID NO: 2050089 - DNA, 15 bp, Homo sapiens
cctttctgggaatct

SEQ ID NO: 2050090 - DNA, 15 bp, Homo sapiens
ctttctgggaatctc

SEQ ID NO: 2050091 - DNA, 15 bp, Homo sapiens
tttctgggaatctcc

SEQ ID NO: 2050092 - DNA, 15 bp, Homo sapiens
ttctgggaatctcct

SEQ ID NO: 2050093 - DNA, 15 bp, Homo sapiens
tctgggaatctcctg

SEQ ID NO: 2050094 - DNA, 15 bp, Homo sapiens
ctgggaatctcctgc

SEQ ID NO: 2050095 - DNA, 15 bp, Homo sapiens
tgggaatctcctgca

SEQ ID NO: 2050096 - DNA, 15 bp, Homo sapiens
gggaatctcctgcat

SEQ ID NO: 2050097 - DNA, 15 bp, Homo sapiens
ggaatctcctgcatc

SEQ ID NO: 2050098 - DNA, 15 bp, Homo sapiens
gaatctcctgcatca

SEQ ID NO: 2050099 - DNA, 15 bp, Homo sapiens
aatctcctgcatcaa

SEQ ID NO: 2050100 - DNA, 15 bp, Homo sapiens
atctcctgcatcaac

SEQ ID NO: 2050101 - DNA, 15 bp, Homo sapiens
tctcctgcatcaact

SEQ ID NO: 2050102 - DNA, 15 bp, Homo sapiens
ctcctgcatcaactc

SEQ ID NO: 2050103 - DNA, 15 bp, Homo sapiens
tcctgcatcaactcg

SEQ ID NO: 2050104 - DNA, 15 bp, Homo sapiens
cctgcatcaactcgt

SEQ ID NO: 2050105 - DNA, 15 bp, Homo sapiens
ctgcatcaactcgtg

SEQ ID NO: 2050106 - DNA, 15 bp, Homo sapiens
tgcatcaactcgtgc

SEQ ID NO: 2050107 - DNA, 15 bp, Homo sapiens
gcatcaactcgtgcc

SEQ ID NO: 2050108 - DNA, 15 bp, Homo sapiens
catcaactcgtgccc

SEQ ID NO: 2050109 - DNA, 15 bp, Homo sapiens
atcaactcgtgccca

SEQ ID NO: 2050110 - DNA, 15 bp, Homo sapiens
tcaactcgtgcccaa

SEQ ID NO: 2050111 - DNA, 15 bp, Homo sapiens
caactcgtgcccaat

SEQ ID NO: 2050112 - DNA, 15 bp, Homo sapiens
aactcgtgcccaatt

SEQ ID NO: 2050113 - DNA, 15 bp, Homo sapiens
actcgtgcccaattt

SEQ ID NO: 2050114 - DNA, 15 bp, Homo sapiens
ctcgtgcccaatttc

SEQ ID NO: 2050115 - DNA, 15 bp, Homo sapiens
tcgtgcccaatttct

SEQ ID NO: 2050116 - DNA, 15 bp, Homo sapiens
cgtgcccaatttctg

SEQ ID NO: 2050117 - DNA, 15 bp, Homo sapiens
gtgcccaatttctgg

SEQ ID NO: 2050118 - DNA, 15 bp, Homo sapiens
tgcccaatttctggc

SEQ ID NO: 2050119 - DNA, 15 bp, Homo sapiens
gcccaatttctggcc

SEQ ID NO: 2050120 - DNA, 15 bp, Homo sapiens
cccaatttctggcct

SEQ ID NO: 2050121 - DNA, 15 bp, Homo sapiens
ccaatttctggcctc

SEQ ID NO: 2050122 - DNA, 15 bp, Homo sapiens
caatttctggcctcc

SEQ ID NO: 2050123 - DNA, 15 bp, Homo sapiens
aatttctggcctccc

SEQ ID NO: 2050124 - DNA, 15 bp, Homo sapiens
atttctggcctcccc

SEQ ID NO: 2050125 - DNA, 15 bp, Homo sapiens
tttctggcctcccct

SEQ ID NO: 2050126 - DNA, 15 bp, Homo sapiens
ttctggcctcccctc

SEQ ID NO: 2050127 - DNA, 15 bp, Homo sapiens
tctggcctcccctct

SEQ ID NO: 2050128 - DNA, 15 bp, Homo sapiens
ctggcctcccctctc

SEQ ID NO: 2050129 - DNA, 15 bp, Homo sapiens
tggcctcccctctcg

SEQ ID NO: 2050130 - DNA, 15 bp, Homo sapiens
ggcctcccctctcgg

SEQ ID NO: 2050131 - DNA, 15 bp, Homo sapiens
gcctcccctctcgga

SEQ ID NO: 2050132 - DNA, 15 bp, Homo sapiens
cctcccctctcggag

SEQ ID NO: 2050133 - DNA, 15 bp, Homo sapiens
ctcccctctcggaga

SEQ ID NO: 2050134 - DNA, 15 bp, Homo sapiens
tcccctctcggagaa

SEQ ID NO: 2050135 - DNA, 15 bp, Homo sapiens
cccctctcggagaaa

SEQ ID NO: 2050136 - DNA, 15 bp, Homo sapiens
ccctctcggagaaat

SEQ ID NO: 2050137 - DNA, 15 bp, Homo sapiens
cctctcggagaaatc

SEQ ID NO: 2050138 - DNA, 15 bp, Homo sapiens
ctctcggagaaatca

SEQ ID NO: 2050139 - DNA, 15 bp, Homo sapiens
tctcggagaaatcag

SEQ ID NO: 2050140 - DNA, 15 bp, Homo sapiens
ctcggagaaatcagc

SEQ ID NO: 2050141 - DNA, 15 bp, Homo sapiens
tcggagaaatcagca

SEQ ID NO: 2050142 - DNA, 15 bp, Homo sapiens
cggagaaatcagcat

SEQ ID NO: 2050143 - DNA, 15 bp, Homo sapiens
ggagaaatcagcatt

SEQ ID NO: 2050144 - DNA, 15 bp, Homo sapiens
gagaaatcagcattc

SEQ ID NO: 2050145 - DNA, 15 bp, Homo sapiens
agaaatcagcattct

SEQ ID NO: 2050146 - DNA, 15 bp, Homo sapiens
gaaatcagcattctg

SEQ ID NO: 2050147 - DNA, 15 bp, Homo sapiens
aaatcagcattctga

SEQ ID NO: 2050148 - DNA, 15 bp, Homo sapiens
aatcagcattctgag

SEQ ID NO: 2050149 - DNA, 15 bp, Homo sapiens
atcagcattctgagg

SEQ ID NO: 2050150 - DNA, 15 bp, Homo sapiens
tcagcattctgagga

SEQ ID NO: 2050151 - DNA, 15 bp, Homo sapiens
cagcattctgaggat

SEQ ID NO: 2050152 - DNA, 15 bp, Homo sapiens
agcattctgaggatg

SEQ ID NO: 2050153 - DNA, 15 bp, Homo sapiens
gcattctgaggatgc

SEQ ID NO: 2050154 - DNA, 15 bp, Homo sapiens
cattctgaggatgcc

SEQ ID NO: 2050155 - DNA, 15 bp, Homo sapiens
attctgaggatgccc

SEQ ID NO: 2050156 - DNA, 15 bp, Homo sapiens
ttctgaggatgcccc

SEQ ID NO: 2050157 - DNA, 15 bp, Homo sapiens
tctgaggatgcccct

SEQ ID NO: 2050158 - DNA, 15 bp, Homo sapiens
ctgaggatgcccctg

SEQ ID NO: 2050159 - DNA, 15 bp, Homo sapiens
tgaggatgcccctgg

SEQ ID NO: 2050160 - DNA, 15 bp, Homo sapiens
gaggatgcccctggc

SEQ ID NO: 2050161 - DNA, 15 bp, Homo sapiens
aggatgcccctggcg

SEQ ID NO: 2050162 - DNA, 15 bp, Homo sapiens
ggatgcccctggcgc

SEQ ID NO: 2050163 - DNA, 15 bp, Homo sapiens
gatgcccctggcgct

SEQ ID NO: 2050164 - DNA, 15 bp, Homo sapiens
atgcccctggcgctg

SEQ ID NO: 2050165 - DNA, 15 bp, Homo sapiens
tgcccctggcgctga

SEQ ID NO: 2050166 - DNA, 15 bp, Homo sapiens
gcccctggcgctgag

SEQ ID NO: 2050167 - DNA, 15 bp, Homo sapiens
cccctggcgctgagg

SEQ ID NO: 2050168 - DNA, 15 bp, Homo sapiens
ccctggcgctgaggt

SEQ ID NO: 2050169 - DNA, 15 bp, Homo sapiens
cctggcgctgaggtg

SEQ ID NO: 2050170 - DNA, 15 bp, Homo sapiens
ctggcgctgaggtgc

SEQ ID NO: 2050171 - DNA, 15 bp, Homo sapiens
tggcgctgaggtgct

SEQ ID NO: 2050172 - DNA, 15 bp, Homo sapiens
ggcgctgaggtgctt

SEQ ID NO: 2050173 - DNA, 15 bp, Homo sapiens
gcgctgaggtgcttg

SEQ ID NO: 2050174 - DNA, 15 bp, Homo sapiens
cgctgaggtgcttgg

SEQ ID NO: 2050175 - DNA, 15 bp, Homo sapiens
gctgaggtgcttgga

SEQ ID NO: 2050176 - DNA, 15 bp, Homo sapiens
ctgaggtgcttggaa

SEQ ID NO: 2050177 - DNA, 15 bp, Homo sapiens
tgaggtgcttggaag

SEQ ID NO: 2050178 - DNA, 15 bp, Homo sapiens
gaggtgcttggaagc

SEQ ID NO: 2050179 - DNA, 15 bp, Homo sapiens
aggtgcttggaagct

SEQ ID NO: 2050180 - DNA, 15 bp, Homo sapiens
ggtgcttggaagctt

SEQ ID NO: 2050181 - DNA, 15 bp, Homo sapiens
gtgcttggaagcttc

SEQ ID NO: 2050182 - DNA, 15 bp, Homo sapiens
tgcttggaagcttcc

SEQ ID NO: 2050183 - DNA, 15 bp, Homo sapiens
gcttggaagcttccg

SEQ ID NO: 2050184 - DNA, 15 bp, Homo sapiens
cttggaagcttccga

SEQ ID NO: 2050185 - DNA, 15 bp, Homo sapiens
ttggaagcttccgag

SEQ ID NO: 2050186 - DNA, 15 bp, Homo sapiens
tggaagcttccgagg

SEQ ID NO: 2050187 - DNA, 15 bp, Homo sapiens
ggaagcttccgaggt

SEQ ID NO: 2050188 - DNA, 15 bp, Homo sapiens
gaagcttccgaggtt

SEQ ID NO: 2050189 - DNA, 15 bp, Homo sapiens
aagcttccgaggttt

SEQ ID NO: 2050190 - DNA, 15 bp, Homo sapiens
agcttccgaggtttg

SEQ ID NO: 2050191 - DNA, 15 bp, Homo sapiens
gcttccgaggtttgg

SEQ ID NO: 2050192 - DNA, 15 bp, Homo sapiens
cttccgaggtttggg

SEQ ID NO: 2050193 - DNA, 15 bp, Homo sapiens
ttccgaggtttggga

SEQ ID NO: 2050194 - DNA, 15 bp, Homo sapiens
tccgaggtttgggag

SEQ ID NO: 2050195 - DNA, 15 bp, Homo sapiens
ccgaggtttgggagc

SEQ ID NO: 2050196 - DNA, 15 bp, Homo sapiens
cgaggtttgggagca

SEQ ID NO: 2050197 - DNA, 15 bp, Homo sapiens
gaggtttgggagcaa

SEQ ID NO: 2050198 - DNA, 15 bp, Homo sapiens
aggtttgggagcaag

SEQ ID NO: 2050199 - DNA, 15 bp, Homo sapiens
ggtttgggagcaagt

SEQ ID NO: 2050200 - DNA, 15 bp, Homo sapiens
gtttgggagcaagta

SEQ ID NO: 2050201 - DNA, 15 bp, Homo sapiens
tttgggagcaagtac

SEQ ID NO: 2050202 - DNA, 15 bp, Homo sapiens
ttgggagcaagtacg

SEQ ID NO: 2050203 - DNA, 15 bp, Homo sapiens
tgggagcaagtacgg

SEQ ID NO: 2050204 - DNA, 15 bp, Homo sapiens
gggagcaagtacggt

SEQ ID NO: 2050205 - DNA, 15 bp, Homo sapiens
ggagcaagtacggtt

SEQ ID NO: 2050206 - DNA, 15 bp, Homo sapiens
gagcaagtacggttc

SEQ ID NO: 2050207 - DNA, 15 bp, Homo sapiens
agcaagtacggttca

SEQ ID NO: 2050208 - DNA, 15 bp, Homo sapiens
gcaagtacggttcac

SEQ ID NO: 2050209 - DNA, 15 bp, Homo sapiens
caagtacggttcacc

SEQ ID NO: 2050210 - DNA, 15 bp, Homo sapiens
aagtacggttcaccc

SEQ ID NO: 2050211 - DNA, 15 bp, Homo sapiens
agtacggttcacccc

SEQ ID NO: 2050212 - DNA, 15 bp, Homo sapiens
gtacggttcaccccg

SEQ ID NO: 2050213 - DNA, 15 bp, Homo sapiens
tacggttcaccccga

SEQ ID NO: 2050214 - DNA, 15 bp, Homo sapiens
acggttcaccccgag

SEQ ID NO: 2050215 - DNA, 15 bp, Homo sapiens
cggttcaccccgaga

SEQ ID NO: 2050216 - DNA, 15 bp, Homo sapiens
ggttcaccccgagat

SEQ ID NO: 2050217 - DNA, 15 bp, Homo sapiens
gttcaccccgagatc

SEQ ID NO: 2050218 - DNA, 15 bp, Homo sapiens
ttcaccccgagatca

SEQ ID NO: 2050219 - DNA, 15 bp, Homo sapiens
tcaccccgagatcac

SEQ ID NO: 2050220 - DNA, 15 bp, Homo sapiens
caccccgagatcacc

SEQ ID NO: 2050221 - DNA, 15 bp, Homo sapiens
accccgagatcaccg

SEQ ID NO: 2050222 - DNA, 15 bp, Homo sapiens
ccccgagatcaccgc

SEQ ID NO: 2050223 - DNA, 15 bp, Homo sapiens
cccgagatcaccgcg

SEQ ID NO: 2050224 - DNA, 15 bp, Homo sapiens
ccgagatcaccgcga

SEQ ID NO: 2050225 - DNA, 15 bp, Homo sapiens
cgagatcaccgcgaa

SEQ ID NO: 2050226 - DNA, 15 bp, Homo sapiens
gagatcaccgcgaag

SEQ ID NO: 2050227 - DNA, 15 bp, Homo sapiens
agatcaccgcgaagc

SEQ ID NO: 2050228 - DNA, 15 bp, Homo sapiens
gatcaccgcgaagct

SEQ ID NO: 2050229 - DNA, 15 bp, Homo sapiens
atcaccgcgaagctt

SEQ ID NO: 2050230 - DNA, 15 bp, Homo sapiens
tcaccgcgaagcttt

SEQ ID NO: 2050231 - DNA, 15 bp, Homo sapiens
caccgcgaagctttg

SEQ ID NO: 2050232 - DNA, 15 bp, Homo sapiens
accgcgaagctttgc

SEQ ID NO: 2050233 - DNA, 15 bp, Homo sapiens
ccgcgaagctttgcc

SEQ ID NO: 2050234 - DNA, 15 bp, Homo sapiens
cgcgaagctttgcct

SEQ ID NO: 2050235 - DNA, 15 bp, Homo sapiens
gcgaagctttgcctc

SEQ ID NO: 2050236 - DNA, 15 bp, Homo sapiens
cgaagctttgcctcc

SEQ ID NO: 2050237 - DNA, 15 bp, Homo sapiens
gaagctttgcctccg

SEQ ID NO: 2050238 - DNA, 15 bp, Homo sapiens
aagctttgcctccgc

SEQ ID NO: 2050239 - DNA, 15 bp, Homo sapiens
agctttgcctccgcc

SEQ ID NO: 2050240 - DNA, 15 bp, Homo sapiens
gctttgcctccgcca

SEQ ID NO: 2050241 - DNA, 15 bp, Homo sapiens
ctttgcctccgccaa

SEQ ID NO: 2050242 - DNA, 15 bp, Homo sapiens
tttgcctccgccaaa

SEQ ID NO: 2050243 - DNA, 15 bp, Homo sapiens
ttgcctccgccaaag

SEQ ID NO: 2050244 - DNA, 15 bp, Homo sapiens
tgcctccgccaaagt

SEQ ID NO: 2050245 - DNA, 15 bp, Homo sapiens
gcctccgccaaagta

SEQ ID NO: 2050246 - DNA, 15 bp, Homo sapiens
cctccgccaaagtac

SEQ ID NO: 2050247 - DNA, 15 bp, Homo sapiens
ctccgccaaagtacc

SEQ ID NO: 2050248 - DNA, 15 bp, Homo sapiens
tccgccaaagtaccc

SEQ ID NO: 2050249 - DNA, 15 bp, Homo sapiens
ccgccaaagtaccct

SEQ ID NO: 2050250 - DNA, 15 bp, Homo sapiens
cgccaaagtacccta

SEQ ID NO: 2050251 - DNA, 15 bp, Homo sapiens
gccaaagtaccctac

SEQ ID NO: 2050252 - DNA, 15 bp, Homo sapiens
ccaaagtaccctacc

SEQ ID NO: 2050253 - DNA, 15 bp, Homo sapiens
caaagtaccctaccc

SEQ ID NO: 2050254 - DNA, 15 bp, Homo sapiens
aaagtaccctaccca

SEQ ID NO: 2050255 - DNA, 15 bp, Homo sapiens
aagtaccctacccat

SEQ ID NO: 2050256 - DNA, 15 bp, Homo sapiens
agtaccctacccatc

SEQ ID NO: 2050257 - DNA, 15 bp, Homo sapiens
gtaccctacccatcc

SEQ ID NO: 2050258 - DNA, 15 bp, Homo sapiens
taccctacccatccc

SEQ ID NO: 2050259 - DNA, 15 bp, Homo sapiens
accctacccatccct

SEQ ID NO: 2050260 - DNA, 15 bp, Homo sapiens
ccctacccatcccta

SEQ ID NO: 2050261 - DNA, 15 bp, Homo sapiens
cctacccatccctag

SEQ ID NO: 2050262 - DNA, 15 bp, Homo sapiens
ctacccatccctagg

SEQ ID NO: 2050263 - DNA, 15 bp, Homo sapiens
tacccatccctaggc

SEQ ID NO: 2050264 - DNA, 15 bp, Homo sapiens
acccatccctaggcc

SEQ ID NO: 2050265 - DNA, 15 bp, Homo sapiens
cccatccctaggccc

SEQ ID NO: 2050266 - DNA, 15 bp, Homo sapiens
ccatccctaggcccc

SEQ ID NO: 2050267 - DNA, 15 bp, Homo sapiens
catccctaggcccca

SEQ ID NO: 2050268 - DNA, 15 bp, Homo sapiens
atccctaggccccaa

SEQ ID NO: 2050269 - DNA, 15 bp, Homo sapiens
tccctaggccccaac

SEQ ID NO: 2050270 - DNA, 15 bp, Homo sapiens
ccctaggccccaacg

SEQ ID NO: 2050271 - DNA, 15 bp, Homo sapiens
cctaggccccaacgg

SEQ ID NO: 2050272 - DNA, 15 bp, Homo sapiens
ctaggccccaacggc

SEQ ID NO: 2050273 - DNA, 15 bp, Homo sapiens
taggccccaacggct

SEQ ID NO: 2050274 - DNA, 15 bp, Homo sapiens
aggccccaacggctg

SEQ ID NO: 2050275 - DNA, 15 bp, Homo sapiens
ggccccaacggctga

SEQ ID NO: 2050276 - DNA, 15 bp, Homo sapiens
gccccaacggctgag

SEQ ID NO: 2050277 - DNA, 15 bp, Homo sapiens
ccccaacggctgaga

SEQ ID NO: 2050278 - DNA, 15 bp, Homo sapiens
cccaacggctgagag

SEQ ID NO: 2050279 - DNA, 15 bp, Homo sapiens
ccaacggctgagagg

SEQ ID NO: 2050280 - DNA, 15 bp, Homo sapiens
caacggctgagagga

SEQ ID NO: 2050281 - DNA, 15 bp, Homo sapiens
aacggctgagaggag

SEQ ID NO: 2050282 - DNA, 15 bp, Homo sapiens
acggctgagaggagt

SEQ ID NO: 2050283 - DNA, 15 bp, Homo sapiens
cggctgagaggagtg

SEQ ID NO: 2050284 - DNA, 15 bp, Homo sapiens
ggctgagaggagtgg

SEQ ID NO: 2050285 - DNA, 15 bp, Homo sapiens
gctgagaggagtggg

SEQ ID NO: 2050286 - DNA, 15 bp, Homo sapiens
ctgagaggagtgggg

SEQ ID NO: 2050287 - DNA, 15 bp, Homo sapiens
tgagaggagtggggg

SEQ ID NO: 2050288 - DNA, 15 bp, Homo sapiens
gagaggagtggggga

SEQ ID NO: 2050289 - DNA, 15 bp, Homo sapiens
agaggagtgggggag

SEQ ID NO: 2050290 - DNA, 15 bp, Homo sapiens
gaggagtgggggaga

SEQ ID NO: 2050291 - DNA, 15 bp, Homo sapiens
aggagtgggggagat

SEQ ID NO: 2050292 - DNA, 15 bp, Homo sapiens
ggagtgggggagatt

SEQ ID NO: 2050293 - DNA, 15 bp, Homo sapiens
gagtgggggagattt

SEQ ID NO: 2050294 - DNA, 15 bp, Homo sapiens
agtgggggagatttt

SEQ ID NO: 2050295 - DNA, 15 bp, Homo sapiens
gtgggggagattttg

SEQ ID NO: 2050296 - DNA, 15 bp, Homo sapiens
tgggggagattttgc

SEQ ID NO: 2050297 - DNA, 15 bp, Homo sapiens
gggggagattttgca

SEQ ID NO: 2050298 - DNA, 15 bp, Homo sapiens
ggggagattttgcac

SEQ ID NO: 2050299 - DNA, 15 bp, Homo sapiens
gggagattttgcaca

SEQ ID NO: 2050300 - DNA, 15 bp, Homo sapiens
ggagattttgcacac

SEQ ID NO: 2050301 - DNA, 15 bp, Homo sapiens
gagattttgcacact

SEQ ID NO: 2050302 - DNA, 15 bp, Homo sapiens
agattttgcacactg

SEQ ID NO: 2050303 - DNA, 15 bp, Homo sapiens
gattttgcacactgc

SEQ ID NO: 2050304 - DNA, 15 bp, Homo sapiens
attttgcacactgca

SEQ ID NO: 2050305 - DNA, 15 bp, Homo sapiens
ttttgcacactgcac

SEQ ID NO: 2050306 - DNA, 15 bp, Homo sapiens
tttgcacactgcacc

SEQ ID NO: 2050307 - DNA, 15 bp, Homo sapiens
ttgcacactgcaccc

SEQ ID NO: 2050308 - DNA, 15 bp, Homo sapiens
tgcacactgcacccc

SEQ ID NO: 2050309 - DNA, 15 bp, Homo sapiens
gcacactgcaccccc

SEQ ID NO: 2050310 - DNA, 15 bp, Homo sapiens
cacactgcacccccc

SEQ ID NO: 2050311 - DNA, 15 bp, Homo sapiens
acactgcacccccct

SEQ ID NO: 2050312 - DNA, 15 bp, Homo sapiens
cactgcacccccctt

SEQ ID NO: 2050313 - DNA, 15 bp, Homo sapiens
actgcaccccccttc

SEQ ID NO: 2050314 - DNA, 15 bp, Homo sapiens
ctgcaccccccttcc

SEQ ID NO: 2050315 - DNA, 15 bp, Homo sapiens
tgcaccccccttcct

SEQ ID NO: 2050316 - DNA, 15 bp, Homo sapiens
gcaccccccttcctc

SEQ ID NO: 2050317 - DNA, 15 bp, Homo sapiens
caccccccttcctcc

SEQ ID NO: 2050318 - DNA, 15 bp, Homo sapiens
accccccttcctcct

SEQ ID NO: 2050319 - DNA, 15 bp, Homo sapiens
ccccccttcctcctc

SEQ ID NO: 2050320 - DNA, 15 bp, Homo sapiens
cccccttcctcctct

SEQ ID NO: 2050321 - DNA, 15 bp, Homo sapiens
ccccttcctcctctc

SEQ ID NO: 2050322 - DNA, 15 bp, Homo sapiens
cccttcctcctctcc

SEQ ID NO: 2050323 - DNA, 15 bp, Homo sapiens
ccttcctcctctccc

SEQ ID NO: 2050324 - DNA, 15 bp, Homo sapiens
cttcctcctctcccc

SEQ ID NO: 2050325 - DNA, 15 bp, Homo sapiens
ttcctcctctcccca

SEQ ID NO: 2050326 - DNA, 15 bp, Homo sapiens
tcctcctctccccac

SEQ ID NO: 2050327 - DNA, 15 bp, Homo sapiens
cctcctctccccacc

SEQ ID NO: 2050328 - DNA, 15 bp, Homo sapiens
ctcctctccccaccc

SEQ ID NO: 2050329 - DNA, 15 bp, Homo sapiens
tcctctccccacccc

SEQ ID NO: 2050330 - DNA, 15 bp, Homo sapiens
cctctccccaccccc

SEQ ID NO: 2050331 - DNA, 15 bp, Homo sapiens
ctctccccaccccca

SEQ ID NO: 2050332 - DNA, 15 bp, Homo sapiens
tctccccacccccac

SEQ ID NO: 2050333 - DNA, 15 bp, Homo sapiens
ctccccacccccact

SEQ ID NO: 2050334 - DNA, 15 bp, Homo sapiens
tccccacccccactt

SEQ ID NO: 2050335 - DNA, 15 bp, Homo sapiens
ccccacccccacttc

SEQ ID NO: 2050336 - DNA, 15 bp, Homo sapiens
cccacccccacttcg

SEQ ID NO: 2050337 - DNA, 15 bp, Homo sapiens
ccacccccacttcgc

SEQ ID NO: 2050338 - DNA, 15 bp, Homo sapiens
cacccccacttcgcc

SEQ ID NO: 2050339 - DNA, 15 bp, Homo sapiens
acccccacttcgcca

SEQ ID NO: 2050340 - DNA, 15 bp, Homo sapiens
cccccacttcgccat

SEQ ID NO: 2050341 - DNA, 15 bp, Homo sapiens
ccccacttcgccatg

SEQ ID NO: 2050342 - DNA, 15 bp, Homo sapiens
cccacttcgccatgt

SEQ ID NO: 2050343 - DNA, 15 bp, Homo sapiens
ccacttcgccatgta

SEQ ID NO: 2050344 - DNA, 15 bp, Homo sapiens
cacttcgccatgtaa

SEQ ID NO: 2050345 - DNA, 15 bp, Homo sapiens
acttcgccatgtaaa

SEQ ID NO: 2050346 - DNA, 15 bp, Homo sapiens
cttcgccatgtaaac

SEQ ID NO: 2050347 - DNA, 15 bp, Homo sapiens
ttcgccatgtaaaca

SEQ ID NO: 2050348 - DNA, 15 bp, Homo sapiens
tcgccatgtaaacac

SEQ ID NO: 2050349 - DNA, 15 bp, Homo sapiens
cgccatgtaaacact

SEQ ID NO: 2050350 - DNA, 15 bp, Homo sapiens
gccatgtaaacacta

SEQ ID NO: 2050351 - DNA, 15 bp, Homo sapiens
ccatgtaaacactag

SEQ ID NO: 2050352 - DNA, 15 bp, Homo sapiens
catgtaaacactagg

SEQ ID NO: 2050353 - DNA, 15 bp, Homo sapiens
atgtaaacactagga

SEQ ID NO: 2050354 - DNA, 15 bp, Homo sapiens
tgtaaacactaggac

SEQ ID NO: 2050355 - DNA, 15 bp, Homo sapiens
gtaaacactaggact

SEQ ID NO: 2050356 - DNA, 15 bp, Homo sapiens
taaacactaggactt

SEQ ID NO: 2050357 - DNA, 15 bp, Homo sapiens
aaacactaggacttt

SEQ ID NO: 2050358 - DNA, 15 bp, Homo sapiens
aacactaggactttc

SEQ ID NO: 2050359 - DNA, 15 bp, Homo sapiens
acactaggactttct

SEQ ID NO: 2050360 - DNA, 15 bp, Homo sapiens
cactaggactttctc

SEQ ID NO: 2050361 - DNA, 15 bp, Homo sapiens
actaggactttctcg

SEQ ID NO: 2050362 - DNA, 15 bp, Homo sapiens
ctaggactttctcga

SEQ ID NO: 2050363 - DNA, 15 bp, Homo sapiens
taggactttctcgag

SEQ ID NO: 2050364 - DNA, 15 bp, Homo sapiens
aggactttctcgaga

SEQ ID NO: 2050365 - DNA, 15 bp, Homo sapiens
ggactttctcgagag

SEQ ID NO: 2050366 - DNA, 15 bp, Homo sapiens
gactttctcgagagc

SEQ ID NO: 2050367 - DNA, 15 bp, Homo sapiens
actttctcgagagcc

SEQ ID NO: 2050368 - DNA, 15 bp, Homo sapiens
ctttctcgagagcct

SEQ ID NO: 2050369 - DNA, 15 bp, Homo sapiens
tttctcgagagcctt

SEQ ID NO: 2050370 - DNA, 15 bp, Homo sapiens
ttctcgagagccttg

SEQ ID NO: 2050371 - DNA, 15 bp, Homo sapiens
tctcgagagccttgg

SEQ ID NO: 2050372 - DNA, 15 bp, Homo sapiens
ctcgagagccttgga

SEQ ID NO: 2050373 - DNA, 15 bp, Homo sapiens
tcgagagccttggag

SEQ ID NO: 2050374 - DNA, 15 bp, Homo sapiens
cgagagccttggaga

SEQ ID NO: 2050375 - DNA, 15 bp, Homo sapiens
gagagccttggagag

SEQ ID NO: 2050376 - DNA, 15 bp, Homo sapiens
agagccttggagagc

SEQ ID NO: 2050377 - DNA, 15 bp, Homo sapiens
gagccttggagagcc

SEQ ID NO: 2050378 - DNA, 15 bp, Homo sapiens
agccttggagagccg

SEQ ID NO: 2050379 - DNA, 15 bp, Homo sapiens
gccttggagagccgc

SEQ ID NO: 2050380 - DNA, 15 bp, Homo sapiens
ccttggagagccgct

SEQ ID NO: 2050381 - DNA, 15 bp, Homo sapiens
cttggagagccgctc

SEQ ID NO: 2050382 - DNA, 15 bp, Homo sapiens
ttggagagccgctct

SEQ ID NO: 2050383 - DNA, 15 bp, Homo sapiens
tggagagccgctcta

SEQ ID NO: 2050384 - DNA, 15 bp, Homo sapiens
ggagagccgctctag

SEQ ID NO: 2050385 - DNA, 15 bp, Homo sapiens
gagagccgctctagt

SEQ ID NO: 2050386 - DNA, 15 bp, Homo sapiens
agagccgctctagtg

SEQ ID NO: 2050387 - DNA, 15 bp, Homo sapiens
gagccgctctagtgg

SEQ ID NO: 2050388 - DNA, 15 bp, Homo sapiens
agccgctctagtggc

SEQ ID NO: 2050389 - DNA, 15 bp, Homo sapiens
gccgctctagtggct

SEQ ID NO: 2050390 - DNA, 15 bp, Homo sapiens
ccgctctagtggctt

SEQ ID NO: 2050391 - DNA, 15 bp, Homo sapiens
cgctctagtggcttc

SEQ ID NO: 2050392 - DNA, 15 bp, Homo sapiens
gctctagtggcttcg

SEQ ID NO: 2050393 - DNA, 15 bp, Homo sapiens
ctctagtggcttcgg

SEQ ID NO: 2050394 - DNA, 15 bp, Homo sapiens
tctagtggcttcggg

SEQ ID NO: 2050395 - DNA, 15 bp, Homo sapiens
ctagtggcttcgggc

SEQ ID NO: 2050396 - DNA, 15 bp, Homo sapiens
tagtggcttcgggcc

SEQ ID NO: 2050397 - DNA, 15 bp, Homo sapiens
agtggcttcgggccc

SEQ ID NO: 2050398 - DNA, 15 bp, Homo sapiens
gtggcttcgggccct

SEQ ID NO: 2050399 - DNA, 15 bp, Homo sapiens
tggcttcgggccctg

SEQ ID NO: 2050400 - DNA, 15 bp, Homo sapiens
ggcttcgggccctga

SEQ ID NO: 2050401 - DNA, 15 bp, Homo sapiens
gcttcgggccctgaa

SEQ ID NO: 2050402 - DNA, 15 bp, Homo sapiens
cttcgggccctgaaa

SEQ ID NO: 2050403 - DNA, 15 bp, Homo sapiens
ttcgggccctgaaac

SEQ ID NO: 2050404 - DNA, 15 bp, Homo sapiens
tcgggccctgaaacc

SEQ ID NO: 2050405 - DNA, 15 bp, Homo sapiens
cgggccctgaaaccc

SEQ ID NO: 2050406 - DNA, 15 bp, Homo sapiens
gggccctgaaacccc

SEQ ID NO: 2050407 - DNA, 15 bp, Homo sapiens
ggccctgaaacccca

SEQ ID NO: 2050408 - DNA, 15 bp, Homo sapiens
gccctgaaaccccag

SEQ ID NO: 2050409 - DNA, 15 bp, Homo sapiens
ccctgaaaccccagg

SEQ ID NO: 2050410 - DNA, 15 bp, Homo sapiens
cctgaaaccccaggc

SEQ ID NO: 2050411 - DNA, 15 bp, Homo sapiens
ctgaaaccccaggct

SEQ ID NO: 2050412 - DNA, 15 bp, Homo sapiens
tgaaaccccaggctg

SEQ ID NO: 2050413 - DNA, 15 bp, Homo sapiens
gaaaccccaggctgg

SEQ ID NO: 2050414 - DNA, 15 bp, Homo sapiens
aaaccccaggctggg

SEQ ID NO: 2050415 - DNA, 15 bp, Homo sapiens
aaccccaggctgggc

SEQ ID NO: 2050416 - DNA, 15 bp, Homo sapiens
accccaggctgggct

SEQ ID NO: 2050417 - DNA, 15 bp, Homo sapiens
ccccaggctgggctt

SEQ ID NO: 2050418 - DNA, 15 bp, Homo sapiens
cccaggctgggcttt

SEQ ID NO: 2050419 - DNA, 15 bp, Homo sapiens
ccaggctgggctttt

SEQ ID NO: 2050420 - DNA, 15 bp, Homo sapiens
caggctgggcttttt

SEQ ID NO: 2050421 - DNA, 15 bp, Homo sapiens
aggctgggctttttt

SEQ ID NO: 2050422 - DNA, 15 bp, Homo sapiens
ggctgggcttttttg

SEQ ID NO: 2050423 - DNA, 15 bp, Homo sapiens
gctgggcttttttga

SEQ ID NO: 2050424 - DNA, 15 bp, Homo sapiens
ctgggcttttttgat

SEQ ID NO: 2050425 - DNA, 15 bp, Homo sapiens
tgggcttttttgatg

SEQ ID NO: 2050426 - DNA, 15 bp, Homo sapiens
gggcttttttgatgt

SEQ ID NO: 2050427 - DNA, 15 bp, Homo sapiens
ggcttttttgatgtt

SEQ ID NO: 2050428 - DNA, 15 bp, Homo sapiens
gcttttttgatgttt

SEQ ID NO: 2050429 - DNA, 15 bp, Homo sapiens
cttttttgatgttta

SEQ ID NO: 2050430 - DNA, 15 bp, Homo sapiens
ttttttgatgtttag

SEQ ID NO: 2050431 - DNA, 15 bp, Homo sapiens
tttttgatgtttagc

SEQ ID NO: 2050432 - DNA, 15 bp, Homo sapiens
ttttgatgtttagca

SEQ ID NO: 2050433 - DNA, 15 bp, Homo sapiens
tttgatgtttagcat

SEQ ID NO: 2050434 - DNA, 15 bp, Homo sapiens
ttgatgtttagcatc

SEQ ID NO: 2050435 - DNA, 15 bp, Homo sapiens
tgatgtttagcatcc

SEQ ID NO: 2050436 - DNA, 15 bp, Homo sapiens
gatgtttagcatccc

SEQ ID NO: 2050437 - DNA, 15 bp, Homo sapiens
atgtttagcatccca

SEQ ID NO: 2050438 - DNA, 15 bp, Homo sapiens
tgtttagcatcccaa

SEQ ID NO: 2050439 - DNA, 15 bp, Homo sapiens
gtttagcatcccaaa

SEQ ID NO: 2050440 - DNA, 15 bp, Homo sapiens
tttagcatcccaaag

SEQ ID NO: 2050441 - DNA, 15 bp, Homo sapiens
ttagcatcccaaagc

SEQ ID NO: 2050442 - DNA, 15 bp, Homo sapiens
tagcatcccaaagct

SEQ ID NO: 2050443 - DNA, 15 bp, Homo sapiens
agcatcccaaagctg

SEQ ID NO: 2050444 - DNA, 15 bp, Homo sapiens
gcatcccaaagctgc

SEQ ID NO: 2050445 - DNA, 15 bp, Homo sapiens
catcccaaagctgct

SEQ ID NO: 2050446 - DNA, 15 bp, Homo sapiens
atcccaaagctgctc

SEQ ID NO: 2050447 - DNA, 15 bp, Homo sapiens
tcccaaagctgctcc

SEQ ID NO: 2050448 - DNA, 15 bp, Homo sapiens
cccaaagctgctccc

SEQ ID NO: 2050449 - DNA, 15 bp, Homo sapiens
ccaaagctgctcccc

SEQ ID NO: 2050450 - DNA, 15 bp, Homo sapiens
caaagctgctcccca

SEQ ID NO: 2050451 - DNA, 15 bp, Homo sapiens
aaagctgctccccac

SEQ ID NO: 2050452 - DNA, 15 bp, Homo sapiens
aagctgctccccacc

SEQ ID NO: 2050453 - DNA, 15 bp, Homo sapiens
agctgctccccaccc

SEQ ID NO: 2050454 - DNA, 15 bp, Homo sapiens
gctgctccccaccct

SEQ ID NO: 2050455 - DNA, 15 bp, Homo sapiens
ctgctccccaccctg

SEQ ID NO: 2050456 - DNA, 15 bp, Homo sapiens
tgctccccaccctgg

SEQ ID NO: 2050457 - DNA, 15 bp, Homo sapiens
gctccccaccctggc

SEQ ID NO: 2050458 - DNA, 15 bp, Homo sapiens
ctccccaccctggcc

SEQ ID NO: 2050459 - DNA, 15 bp, Homo sapiens
tccccaccctggccc

SEQ ID NO: 2050460 - DNA, 15 bp, Homo sapiens
ccccaccctggcccc

SEQ ID NO: 2050461 - DNA, 15 bp, Homo sapiens
cccaccctggcccca

SEQ ID NO: 2050462 - DNA, 15 bp, Homo sapiens
ccaccctggccccag

SEQ ID NO: 2050463 - DNA, 15 bp, Homo sapiens
ccctggccccagcct

SEQ ID NO: 2050464 - DNA, 15 bp, Homo sapiens
cctggccccagcctg

SEQ ID NO: 2050465 - DNA, 15 bp, Homo sapiens
ctggccccagcctgg

SEQ ID NO: 2050466 - DNA, 15 bp, Homo sapiens
tggccccagcctggg

SEQ ID NO: 2050467 - DNA, 15 bp, Homo sapiens
ggccccagcctggga

SEQ ID NO: 2050468 - DNA, 15 bp, Homo sapiens
gccccagcctgggaa

SEQ ID NO: 2050469 - DNA, 15 bp, Homo sapiens
ccccagcctgggaac

SEQ ID NO: 2050470 - DNA, 15 bp, Homo sapiens
cccagcctgggaact

SEQ ID NO: 2050471 - DNA, 15 bp, Homo sapiens
ccagcctgggaactg

SEQ ID NO: 2050472 - DNA, 15 bp, Homo sapiens
cagcctgggaactgg

SEQ ID NO: 2050473 - DNA, 15 bp, Homo sapiens
agcctgggaactggg

SEQ ID NO: 2050474 - DNA, 15 bp, Homo sapiens
gcctgggaactggga

SEQ ID NO: 2050475 - DNA, 15 bp, Homo sapiens
cctgggaactgggag

SEQ ID NO: 2050476 - DNA, 15 bp, Homo sapiens
ctgggaactgggagc

SEQ ID NO: 2050477 - DNA, 15 bp, Homo sapiens
tgggaactgggagct

SEQ ID NO: 2050478 - DNA, 15 bp, Homo sapiens
gggaactgggagctg

SEQ ID NO: 2050479 - DNA, 15 bp, Homo sapiens
ggaactgggagctgt

SEQ ID NO: 2050480 - DNA, 15 bp, Homo sapiens
gaactgggagctgtg

SEQ ID NO: 2050481 - DNA, 15 bp, Homo sapiens
aactgggagctgtgg

SEQ ID NO: 2050482 - DNA, 15 bp, Homo sapiens
actgggagctgtggg

SEQ ID NO: 2050483 - DNA, 15 bp, Homo sapiens
ctgggagctgtgggc

SEQ ID NO: 2050484 - DNA, 15 bp, Homo sapiens
tgggagctgtgggca

SEQ ID NO: 2050485 - DNA, 15 bp, Homo sapiens
gggagctgtgggcag

SEQ ID NO: 2050486 - DNA, 15 bp, Homo sapiens
ggagctgtgggcagg

SEQ ID NO: 2050487 - DNA, 15 bp, Homo sapiens
gagctgtgggcagga

SEQ ID NO: 2050488 - DNA, 15 bp, Homo sapiens
agctgtgggcaggag

SEQ ID NO: 2050489 - DNA, 15 bp, Homo sapiens
gctgtgggcaggaga

SEQ ID NO: 2050490 - DNA, 15 bp, Homo sapiens
ctgtgggcaggagag

SEQ ID NO: 2050491 - DNA, 15 bp, Homo sapiens
tgtgggcaggagagg

SEQ ID NO: 2050492 - DNA, 15 bp, Homo sapiens
gtgggcaggagagga

SEQ ID NO: 2050493 - DNA, 15 bp, Homo sapiens
tgggcaggagaggaa

SEQ ID NO: 2050494 - DNA, 15 bp, Homo sapiens
gggcaggagaggaag

SEQ ID NO: 2050495 - DNA, 15 bp, Homo sapiens
ggcaggagaggaagg

SEQ ID NO: 2050496 - DNA, 15 bp, Homo sapiens
gcaggagaggaagga

SEQ ID NO: 2050497 - DNA, 15 bp, Homo sapiens
caggagaggaaggaa

SEQ ID NO: 2050498 - DNA, 15 bp, Homo sapiens
aggagaggaaggaaa

SEQ ID NO: 2050499 - DNA, 15 bp, Homo sapiens
ggagaggaaggaaag

SEQ ID NO: 2050500 - DNA, 15 bp, Homo sapiens
gagaggaaggaaagc

SEQ ID NO: 2050501 - DNA, 15 bp, Homo sapiens
agaggaaggaaagca

SEQ ID NO: 2050502 - DNA, 15 bp, Homo sapiens
gaggaaggaaagcag

SEQ ID NO: 2050503 - DNA, 15 bp, Homo sapiens
aggaaggaaagcagc

SEQ ID NO: 2050504 - DNA, 15 bp, Homo sapiens
ggaaggaaagcagct

SEQ ID NO: 2050505 - DNA, 15 bp, Homo sapiens
gaaggaaagcagctc

SEQ ID NO: 2050506 - DNA, 15 bp, Homo sapiens
aaggaaagcagctct

SEQ ID NO: 2050507 - DNA, 15 bp, Homo sapiens
aggaaagcagctctc

SEQ ID NO: 2050508 - DNA, 15 bp, Homo sapiens
ggaaagcagctctct

SEQ ID NO: 2050509 - DNA, 15 bp, Homo sapiens
gaaagcagctctctc

SEQ ID NO: 2050510 - DNA, 15 bp, Homo sapiens
aaagcagctctctca

SEQ ID NO: 2050511 - DNA, 15 bp, Homo sapiens
aagcagctctctcag

SEQ ID NO: 2050512 - DNA, 15 bp, Homo sapiens
agcagctctctcagc

SEQ ID NO: 2050513 - DNA, 15 bp, Homo sapiens
gcagctctctcagct

SEQ ID NO: 2050514 - DNA, 15 bp, Homo sapiens
cagctctctcagcta

SEQ ID NO: 2050515 - DNA, 15 bp, Homo sapiens
agctctctcagctag

SEQ ID NO: 2050516 - DNA, 15 bp, Homo sapiens
gctctctcagctagc

SEQ ID NO: 2050517 - DNA, 15 bp, Homo sapiens
ctctctcagctagcg

SEQ ID NO: 2050518 - DNA, 15 bp, Homo sapiens
tctctcagctagcga

SEQ ID NO: 2050519 - DNA, 15 bp, Homo sapiens
ctctcagctagcgag

SEQ ID NO: 2050520 - DNA, 15 bp, Homo sapiens
tctcagctagcgagg

SEQ ID NO: 2050521 - DNA, 15 bp, Homo sapiens
ctcagctagcgaggg

SEQ ID NO: 2050522 - DNA, 15 bp, Homo sapiens
tcagctagcgagggg

SEQ ID NO: 2050523 - DNA, 15 bp, Homo sapiens
cagctagcgaggggg

SEQ ID NO: 2050524 - DNA, 15 bp, Homo sapiens
agctagcgagggggt

SEQ ID NO: 2050525 - DNA, 15 bp, Homo sapiens
gctagcgagggggtc

SEQ ID NO: 2050526 - DNA, 15 bp, Homo sapiens
ctagcgagggggtca

SEQ ID NO: 2050527 - DNA, 15 bp, Homo sapiens
tagcgagggggtcag

SEQ ID NO: 2050528 - DNA, 15 bp, Homo sapiens
agcgagggggtcagg

SEQ ID NO: 2050529 - DNA, 15 bp, Homo sapiens
gcgagggggtcaggg

SEQ ID NO: 2050530 - DNA, 15 bp, Homo sapiens
cgagggggtcaggga

SEQ ID NO: 2050531 - DNA, 15 bp, Homo sapiens
gagggggtcagggac

SEQ ID NO: 2050532 - DNA, 15 bp, Homo sapiens
agggggtcagggact

SEQ ID NO: 2050533 - DNA, 15 bp, Homo sapiens
gggggtcagggactg

SEQ ID NO: 2050534 - DNA, 15 bp, Homo sapiens
ggggtcagggactgg

SEQ ID NO: 2050535 - DNA, 15 bp, Homo sapiens
ggtcagggactgggc

SEQ ID NO: 2050536 - DNA, 15 bp, Homo sapiens
gtcagggactgggcc

SEQ ID NO: 2050537 - DNA, 15 bp, Homo sapiens
tcagggactgggcca

SEQ ID NO: 2050538 - DNA, 15 bp, Homo sapiens
cagggactgggccaa

SEQ ID NO: 2050539 - DNA, 15 bp, Homo sapiens
agggactgggccaag

SEQ ID NO: 2050540 - DNA, 15 bp, Homo sapiens
gggactgggccaagc

SEQ ID NO: 2050541 - DNA, 15 bp, Homo sapiens
ggactgggccaagct

SEQ ID NO: 2050542 - DNA, 15 bp, Homo sapiens
gactgggccaagctc

SEQ ID NO: 2050543 - DNA, 15 bp, Homo sapiens
actgggccaagctca

SEQ ID NO: 2050544 - DNA, 15 bp, Homo sapiens
ctgggccaagctcag

SEQ ID NO: 2050545 - DNA, 15 bp, Homo sapiens
tgggccaagctcaga

SEQ ID NO: 2050546 - DNA, 15 bp, Homo sapiens
gggccaagctcagaa

SEQ ID NO: 2050547 - DNA, 15 bp, Homo sapiens
ggccaagctcagaag

SEQ ID NO: 2050548 - DNA, 15 bp, Homo sapiens
gccaagctcagaagc

SEQ ID NO: 2050549 - DNA, 15 bp, Homo sapiens
ccaagctcagaagcg

SEQ ID NO: 2050550 - DNA, 15 bp, Homo sapiens
caagctcagaagcgg

SEQ ID NO: 2050551 - DNA, 15 bp, Homo sapiens
aagctcagaagcggg

SEQ ID NO: 2050552 - DNA, 15 bp, Homo sapiens
agctcagaagcgggg

SEQ ID NO: 2050553 - DNA, 15 bp, Homo sapiens
gctcagaagcgggga

SEQ ID NO: 2050554 - DNA, 15 bp, Homo sapiens
ctcagaagcggggag

SEQ ID NO: 2050555 - DNA, 15 bp, Homo sapiens
tcagaagcggggaga

SEQ ID NO: 2050556 - DNA, 15 bp, Homo sapiens
cagaagcggggagaa

SEQ ID NO: 2050557 - DNA, 15 bp, Homo sapiens
agaagcggggagaag

SEQ ID NO: 2050558 - DNA, 15 bp, Homo sapiens
gaagcggggagaaga

SEQ ID NO: 2050559 - DNA, 15 bp, Homo sapiens
aagcggggagaagag

SEQ ID NO: 2050560 - DNA, 15 bp, Homo sapiens
agcggggagaagagc

SEQ ID NO: 2050561 - DNA, 15 bp, Homo sapiens
gcggggagaagagcg

SEQ ID NO: 2050562 - DNA, 15 bp, Homo sapiens
cggggagaagagcga

SEQ ID NO: 2050563 - DNA, 15 bp, Homo sapiens
ggggagaagagcgag

SEQ ID NO: 2050564 - DNA, 15 bp, Homo sapiens
gggagaagagcgaga

SEQ ID NO: 2050565 - DNA, 15 bp, Homo sapiens
ggagaagagcgagac

SEQ ID NO: 2050566 - DNA, 15 bp, Homo sapiens
gagaagagcgagaca

SEQ ID NO: 2050567 - DNA, 15 bp, Homo sapiens
agaagagcgagacag

SEQ ID NO: 2050568 - DNA, 15 bp, Homo sapiens
gaagagcgagacaga

SEQ ID NO: 2050569 - DNA, 15 bp, Homo sapiens
aagagcgagacagag

SEQ ID NO: 2050570 - DNA, 15 bp, Homo sapiens
agagcgagacagaga

SEQ ID NO: 2050571 - DNA, 15 bp, Homo sapiens
gagcgagacagagat

SEQ ID NO: 2050572 - DNA, 15 bp, Homo sapiens
agcgagacagagatg

SEQ ID NO: 2050573 - DNA, 15 bp, Homo sapiens
gcgagacagagatgc

SEQ ID NO: 2050574 - DNA, 15 bp, Homo sapiens
cgagacagagatgct

SEQ ID NO: 2050575 - DNA, 15 bp, Homo sapiens
gagacagagatgctc

SEQ ID NO: 2050576 - DNA, 15 bp, Homo sapiens
agacagagatgctct

SEQ ID NO: 2050577 - DNA, 15 bp, Homo sapiens
gacagagatgctctg

SEQ ID NO: 2050578 - DNA, 15 bp, Homo sapiens
acagagatgctctga

SEQ ID NO: 2050579 - DNA, 15 bp, Homo sapiens
cagagatgctctgag

SEQ ID NO: 2050580 - DNA, 15 bp, Homo sapiens
agagatgctctgagc

SEQ ID NO: 2050581 - DNA, 15 bp, Homo sapiens
gagatgctctgagca

SEQ ID NO: 2050582 - DNA, 15 bp, Homo sapiens
agatgctctgagcag

SEQ ID NO: 2050583 - DNA, 15 bp, Homo sapiens
gatgctctgagcagg

SEQ ID NO: 2050584 - DNA, 15 bp, Homo sapiens
atgctctgagcaggg

SEQ ID NO: 2050585 - DNA, 15 bp, Homo sapiens
tgctctgagcagggg

SEQ ID NO: 2050586 - DNA, 15 bp, Homo sapiens
gctctgagcagggga

SEQ ID NO: 2050587 - DNA, 15 bp, Homo sapiens
ctctgagcaggggag

SEQ ID NO: 2050588 - DNA, 15 bp, Homo sapiens
tctgagcaggggaga

SEQ ID NO: 2050589 - DNA, 15 bp, Homo sapiens
ctgagcaggggagac

SEQ ID NO: 2050590 - DNA, 15 bp, Homo sapiens
tgagcaggggagaca

SEQ ID NO: 2050591 - DNA, 15 bp, Homo sapiens
gagcaggggagacag

SEQ ID NO: 2050592 - DNA, 15 bp, Homo sapiens
gcaggggagacaggg

SEQ ID NO: 2050593 - DNA, 15 bp, Homo sapiens
caggggagacaggga

SEQ ID NO: 2050594 - DNA, 15 bp, Homo sapiens
aggggagacagggat

SEQ ID NO: 2050595 - DNA, 15 bp, Homo sapiens
ggggagacagggatc

SEQ ID NO: 2050596 - DNA, 15 bp, Homo sapiens
gggagacagggatcc

SEQ ID NO: 2050597 - DNA, 15 bp, Homo sapiens
ggagacagggatccc

SEQ ID NO: 2050598 - DNA, 15 bp, Homo sapiens
gagacagggatcccg

SEQ ID NO: 2050599 - DNA, 15 bp, Homo sapiens
agacagggatcccgg

SEQ ID NO: 2050600 - DNA, 15 bp, Homo sapiens
gacagggatcccggg

SEQ ID NO: 2050601 - DNA, 15 bp, Homo sapiens
acagggatcccgggc

SEQ ID NO: 2050602 - DNA, 15 bp, Homo sapiens
cagggatcccgggct

SEQ ID NO: 2050603 - DNA, 15 bp, Homo sapiens
agggatcccgggctg

SEQ ID NO: 2050604 - DNA, 15 bp, Homo sapiens
gggatcccgggctgc

SEQ ID NO: 2050605 - DNA, 15 bp, Homo sapiens
ggatcccgggctgct

SEQ ID NO: 2050606 - DNA, 15 bp, Homo sapiens
gatcccgggctgctg

SEQ ID NO: 2050607 - DNA, 15 bp, Homo sapiens
atcccgggctgctgc

SEQ ID NO: 2050608 - DNA, 15 bp, Homo sapiens
tcccgggctgctgcc

SEQ ID NO: 2050609 - DNA, 15 bp, Homo sapiens
cccgggctgctgccg

SEQ ID NO: 2050610 - DNA, 15 bp, Homo sapiens
ccgggctgctgccgc

SEQ ID NO: 2050611 - DNA, 15 bp, Homo sapiens
cgggctgctgccgct

SEQ ID NO: 2050612 - DNA, 15 bp, Homo sapiens
gggctgctgccgcta

SEQ ID NO: 2050613 - DNA, 15 bp, Homo sapiens
ggctgctgccgctac

SEQ ID NO: 2050614 - DNA, 15 bp, Homo sapiens
gctgctgccgctacc

SEQ ID NO: 2050615 - DNA, 15 bp, Homo sapiens
ctgctgccgctacca

SEQ ID NO: 2050616 - DNA, 15 bp, Homo sapiens
tgctgccgctaccaa

SEQ ID NO: 2050617 - DNA, 15 bp, Homo sapiens
gctgccgctaccaac

SEQ ID NO: 2050618 - DNA, 15 bp, Homo sapiens
ctgccgctaccaaca

SEQ ID NO: 2050619 - DNA, 15 bp, Homo sapiens
tgccgctaccaacaa

SEQ ID NO: 2050620 - DNA, 15 bp, Homo sapiens
gccgctaccaacaag

SEQ ID NO: 2050621 - DNA, 15 bp, Homo sapiens
ccgctaccaacaagg

SEQ ID NO: 2050622 - DNA, 15 bp, Homo sapiens
cgctaccaacaaggg

SEQ ID NO: 2050623 - DNA, 15 bp, Homo sapiens
gctaccaacaagggt

SEQ ID NO: 2050624 - DNA, 15 bp, Homo sapiens
ctaccaacaagggta

SEQ ID NO: 2050625 - DNA, 15 bp, Homo sapiens
taccaacaagggtac

SEQ ID NO: 2050626 - DNA, 15 bp, Homo sapiens
accaacaagggtaca

SEQ ID NO: 2050627 - DNA, 15 bp, Homo sapiens
ccaacaagggtacac

SEQ ID NO: 2050628 - DNA, 15 bp, Homo sapiens
caacaagggtacaca

SEQ ID NO: 2050629 - DNA, 15 bp, Homo sapiens
aacaagggtacacac

SEQ ID NO: 2050630 - DNA, 15 bp, Homo sapiens
acaagggtacacact

SEQ ID NO: 2050631 - DNA, 15 bp, Homo sapiens
caagggtacacactg

SEQ ID NO: 2050632 - DNA, 15 bp, Homo sapiens
aagggtacacactgc

SEQ ID NO: 2050633 - DNA, 15 bp, Homo sapiens
agggtacacactgcg

SEQ ID NO: 2050634 - DNA, 15 bp, Homo sapiens
gggtacacactgcgg

SEQ ID NO: 2050635 - DNA, 15 bp, Homo sapiens
ggtacacactgcggt

SEQ ID NO: 2050636 - DNA, 15 bp, Homo sapiens
gtacacactgcggtc

SEQ ID NO: 2050637 - DNA, 15 bp, Homo sapiens
tacacactgcggtcc

SEQ ID NO: 2050638 - DNA, 15 bp, Homo sapiens
tattagttcactagg

SEQ ID NO: 2050639 - DNA, 15 bp, Homo sapiens
attagttcactaggt

SEQ ID NO: 2050640 - DNA, 15 bp, Homo sapiens
ttagttcactaggtc

SEQ ID NO: 2050641 - DNA, 15 bp, Homo sapiens
tagttcactaggtca

SEQ ID NO: 2050642 - DNA, 15 bp, Homo sapiens
agttcactaggtcac

SEQ ID NO: 2050643 - DNA, 15 bp, Homo sapiens
gttcactaggtcacg

SEQ ID NO: 2050644 - DNA, 15 bp, Homo sapiens
ttcactaggtcacga

SEQ ID NO: 2050645 - DNA, 15 bp, Homo sapiens
tcactaggtcacgac

SEQ ID NO: 2050646 - DNA, 15 bp, Homo sapiens
cactaggtcacgacg

SEQ ID NO: 2050647 - DNA, 15 bp, Homo sapiens
actaggtcacgacga

SEQ ID NO: 2050648 - DNA, 15 bp, Homo sapiens
ctaggtcacgacgat

SEQ ID NO: 2050649 - DNA, 15 bp, Homo sapiens
taggtcacgacgatg

SEQ ID NO: 2050650 - DNA, 15 bp, Homo sapiens
aggtcacgacgatga

SEQ ID NO: 2050651 - DNA, 15 bp, Homo sapiens
ggtcacgacgatgat

SEQ ID NO: 2050652 - DNA, 15 bp, Homo sapiens
gtcacgacgatgatg

SEQ ID NO: 2050653 - DNA, 15 bp, Homo sapiens
tcacgacgatgatgc

SEQ ID NO: 2050654 - DNA, 15 bp, Homo sapiens
cacgacgatgatgca

SEQ ID NO: 2050655 - DNA, 15 bp, Homo sapiens
acgacgatgatgcaa

SEQ ID NO: 2050656 - DNA, 15 bp, Homo sapiens
cgacgatgatgcaaa

SEQ ID NO: 2050657 - DNA, 15 bp, Homo sapiens
gacgatgatgcaaac

SEQ ID NO: 2050658 - DNA, 15 bp, Homo sapiens
acgatgatgcaaact

SEQ ID NO: 2050659 - DNA, 15 bp, Homo sapiens
cgatgatgcaaactc

SEQ ID NO: 2050660 - DNA, 15 bp, Homo sapiens
gatgatgcaaactct

SEQ ID NO: 2050661 - DNA, 15 bp, Homo sapiens
atgatgcaaactcta

SEQ ID NO: 2050662 - DNA, 15 bp, Homo sapiens
tgatgcaaactctaa

SEQ ID NO: 2050663 - DNA, 15 bp, Homo sapiens
gatgcaaactctaac

SEQ ID NO: 2050664 - DNA, 15 bp, Homo sapiens
atgcaaactctaact

SEQ ID NO: 2050665 - DNA, 15 bp, Homo sapiens
tgcaaactctaactt

SEQ ID NO: 2050666 - DNA, 15 bp, Homo sapiens
gcaaactctaacttg

SEQ ID NO: 2050667 - DNA, 15 bp, Homo sapiens
caaactctaacttgc

SEQ ID NO: 2050668 - DNA, 15 bp, Homo sapiens
aaactctaacttgca

SEQ ID NO: 2050669 - DNA, 15 bp, Homo sapiens
aactctaacttgcag

SEQ ID NO: 2050670 - DNA, 15 bp, Homo sapiens
actctaacttgcagg

SEQ ID NO: 2050671 - DNA, 15 bp, Homo sapiens
ctctaacttgcaggg

SEQ ID NO: 2050672 - DNA, 15 bp, Homo sapiens
tctaacttgcaggga

SEQ ID NO: 2050673 - DNA, 15 bp, Homo sapiens
ctaacttgcagggat

SEQ ID NO: 2050674 - DNA, 15 bp, Homo sapiens
taacttgcagggatt

SEQ ID NO: 2050675 - DNA, 15 bp, Homo sapiens
aacttgcagggattt

SEQ ID NO: 2050676 - DNA, 15 bp, Homo sapiens
acttgcagggatttt

SEQ ID NO: 2050677 - DNA, 15 bp, Homo sapiens
cttgcagggattttt

SEQ ID NO: 2050678 - DNA, 15 bp, Homo sapiens
ttgcagggattttta

SEQ ID NO: 2050679 - DNA, 15 bp, Homo sapiens
tgcagggatttttaa

SEQ ID NO: 2050680 - DNA, 15 bp, Homo sapiens
gcagggatttttaaa

SEQ ID NO: 2050681 - DNA, 15 bp, Homo sapiens
cagggatttttaaaa

SEQ ID NO: 2050682 - DNA, 15 bp, Homo sapiens
agggatttttaaaaa

SEQ ID NO: 2050683 - DNA, 15 bp, Homo sapiens
gggatttttaaaaaa

SEQ ID NO: 2050684 - DNA, 15 bp, Homo sapiens
ggatttttaaaaaag

SEQ ID NO: 2050685 - DNA, 15 bp, Homo sapiens
gatttttaaaaaaga

SEQ ID NO: 2050686 - DNA, 15 bp, Homo sapiens
atttttaaaaaagat

SEQ ID NO: 2050687 - DNA, 15 bp, Homo sapiens
tttttaaaaaagatc

SEQ ID NO: 2050688 - DNA, 15 bp, Homo sapiens
ttttaaaaaagatct

SEQ ID NO: 2050689 - DNA, 15 bp, Homo sapiens
tttaaaaaagatctt

SEQ ID NO: 2050690 - DNA, 15 bp, Homo sapiens
ttaaaaaagatctta

SEQ ID NO: 2050691 - DNA, 15 bp, Homo sapiens
taaaaaagatcttaa

SEQ ID NO: 2050692 - DNA, 15 bp, Homo sapiens
aaaaaagatcttaac

SEQ ID NO: 2050693 - DNA, 15 bp, Homo sapiens
aaaaagatcttaacg

SEQ ID NO: 2050694 - DNA, 15 bp, Homo sapiens
aaaagatcttaacgc

SEQ ID NO: 2050695 - DNA, 15 bp, Homo sapiens
aaagatcttaacgca

SEQ ID NO: 2050696 - DNA, 15 bp, Homo sapiens
aagatcttaacgcac

SEQ ID NO: 2050697 - DNA, 15 bp, Homo sapiens
agatcttaacgcaca

SEQ ID NO: 2050698 - DNA, 15 bp, Homo sapiens
gatcttaacgcacaa

SEQ ID NO: 2050699 - DNA, 15 bp, Homo sapiens
atcttaacgcacaat

SEQ ID NO: 2050700 - DNA, 15 bp, Homo sapiens
tcttaacgcacaatc

SEQ ID NO: 2050701 - DNA, 15 bp, Homo sapiens
cttaacgcacaatct

SEQ ID NO: 2050702 - DNA, 15 bp, Homo sapiens
ttaacgcacaatctt

SEQ ID NO: 2050703 - DNA, 15 bp, Homo sapiens
taacgcacaatcttt

SEQ ID NO: 2050704 - DNA, 15 bp, Homo sapiens
aacgcacaatctttc

SEQ ID NO: 2050705 - DNA, 15 bp, Homo sapiens
acgcacaatctttct

SEQ ID NO: 2050706 - DNA, 15 bp, Homo sapiens
cgcacaatctttctt

SEQ ID NO: 2050707 - DNA, 15 bp, Homo sapiens
gcacaatctttcttt

SEQ ID NO: 2050708 - DNA, 15 bp, Homo sapiens
cacaatctttctttg

SEQ ID NO: 2050709 - DNA, 15 bp, Homo sapiens
acaatctttctttgt

SEQ ID NO: 2050710 - DNA, 15 bp, Homo sapiens
caatctttctttgta

SEQ ID NO: 2050711 - DNA, 15 bp, Homo sapiens
aatctttctttgtac

SEQ ID NO: 2050712 - DNA, 15 bp, Homo sapiens
atctttctttgtaca

SEQ ID NO: 2050713 - DNA, 15 bp, Homo sapiens
tctttctttgtacaa

SEQ ID NO: 2050714 - DNA, 15 bp, Homo sapiens
ctttctttgtacaaa

SEQ ID NO: 2050715 - DNA, 15 bp, Homo sapiens
tttctttgtacaaat

SEQ ID NO: 2050716 - DNA, 15 bp, Homo sapiens
ttctttgtacaaata

SEQ ID NO: 2050717 - DNA, 15 bp, Homo sapiens
tctttgtacaaataa

SEQ ID NO: 2050718 - DNA, 15 bp, Homo sapiens
ctttgtacaaataaa

SEQ ID NO: 2050719 - DNA, 15 bp, Homo sapiens
tttgtacaaataaac

SEQ ID NO: 2050720 - DNA, 15 bp, Homo sapiens
ttgtacaaataaacg

SEQ ID NO: 2050721 - DNA, 15 bp, Homo sapiens
tgtacaaataaacga

SEQ ID NO: 2050722 - DNA, 15 bp, Homo sapiens
gtacaaataaacgaa

SEQ ID NO: 2050723 - DNA, 15 bp, Homo sapiens
tacaaataaacgaaa

SEQ ID NO: 2050724 - DNA, 15 bp, Homo sapiens
acaaataaacgaaac

SEQ ID NO: 2050725 - DNA, 15 bp, Homo sapiens
caaataaacgaaacc

SEQ ID NO: 2050726 - DNA, 15 bp, Homo sapiens
aaataaacgaaacca

SEQ ID NO: 2050727 - DNA, 15 bp, Homo sapiens
aataaacgaaaccaa

SEQ ID NO: 2050728 - DNA, 15 bp, Homo sapiens
ataaacgaaaccaaa

SEQ ID NO: 2050729 - DNA, 15 bp, Homo sapiens
taaacgaaaccaaac

SEQ ID NO: 2050730 - DNA, 15 bp, Homo sapiens
aaacgaaaccaaaca

SEQ ID NO: 2050731 - DNA, 15 bp, Homo sapiens
aacgaaaccaaacaa

SEQ ID NO: 2050732 - DNA, 15 bp, Homo sapiens
acgaaaccaaacaaa

SEQ ID NO: 2050733 - DNA, 15 bp, Homo sapiens
cgaaaccaaacaaag

SEQ ID NO: 2050734 - DNA, 15 bp, Homo sapiens
gaaaccaaacaaagc

SEQ ID NO: 2050735 - DNA, 15 bp, Homo sapiens
aaaccaaacaaagcc

SEQ ID NO: 2050736 - DNA, 15 bp, Homo sapiens
aaccaaacaaagcca

SEQ ID NO: 2050737 - DNA, 15 bp, Homo sapiens
accaaacaaagccag

SEQ ID NO: 2050738 - DNA, 15 bp, Homo sapiens
ccaaacaaagccagc

SEQ ID NO: 2050739 - DNA, 15 bp, Homo sapiens
caaacaaagccagcg

SEQ ID NO: 2050740 - DNA, 15 bp, Homo sapiens
aaacaaagccagcga

SEQ ID NO: 2050741 - DNA, 15 bp, Homo sapiens
aacaaagccagcgaa

SEQ ID NO: 2050742 - DNA, 15 bp, Homo sapiens
acaaagccagcgaac

SEQ ID NO: 2050743 - DNA, 15 bp, Homo sapiens
caaagccagcgaact

SEQ ID NO: 2050744 - DNA, 15 bp, Homo sapiens
aaagccagcgaacta

SEQ ID NO: 2050745 - DNA, 15 bp, Homo sapiens
aagccagcgaactac

SEQ ID NO: 2050746 - DNA, 15 bp, Homo sapiens
agccagcgaactact

SEQ ID NO: 2050747 - DNA, 15 bp, Homo sapiens
gccagcgaactactg

SEQ ID NO: 2050748 - DNA, 15 bp, Homo sapiens
ccagcgaactactgc

SEQ ID NO: 2050749 - DNA, 15 bp, Homo sapiens
cagcgaactactgct

SEQ ID NO: 2050750 - DNA, 15 bp, Homo sapiens
agcgaactactgctg

SEQ ID NO: 2050751 - DNA, 15 bp, Homo sapiens
gcgaactactgctgt

SEQ ID NO: 2050752 - DNA, 15 bp, Homo sapiens
cgaactactgctgtt

SEQ ID NO: 2050753 - DNA, 15 bp, Homo sapiens
gaactactgctgttt

SEQ ID NO: 2050754 - DNA, 15 bp, Homo sapiens
aactactgctgtttc

SEQ ID NO: 2050755 - DNA, 15 bp, Homo sapiens
actactgctgtttcc

SEQ ID NO: 2050756 - DNA, 15 bp, Homo sapiens
ctactgctgtttccc

SEQ ID NO: 2050757 - DNA, 15 bp, Homo sapiens
tactgctgtttccct

SEQ ID NO: 2050758 - DNA, 15 bp, Homo sapiens
actgctgtttccctc

SEQ ID NO: 2050759 - DNA, 15 bp, Homo sapiens
ctgctgtttccctcg

SEQ ID NO: 2050760 - DNA, 15 bp, Homo sapiens
tgctgtttccctcgt

SEQ ID NO: 2050761 - DNA, 15 bp, Homo sapiens
gctgtttccctcgtg

SEQ ID NO: 2050762 - DNA, 15 bp, Homo sapiens
ctgtttccctcgtga

SEQ ID NO: 2050763 - DNA, 15 bp, Homo sapiens
tgtttccctcgtgaa

SEQ ID NO: 2050764 - DNA, 15 bp, Homo sapiens
gtttccctcgtgaat

SEQ ID NO: 2050765 - DNA, 15 bp, Homo sapiens
tttccctcgtgaatt

SEQ ID NO: 2050766 - DNA, 15 bp, Homo sapiens
ttccctcgtgaattt

SEQ ID NO: 2050767 - DNA, 15 bp, Homo sapiens
tccctcgtgaatttt

SEQ ID NO: 2050768 - DNA, 15 bp, Homo sapiens
ccctcgtgaattttc

SEQ ID NO: 2050769 - DNA, 15 bp, Homo sapiens
cctcgtgaattttct

SEQ ID NO: 2050770 - DNA, 15 bp, Homo sapiens
ctcgtgaattttctt

SEQ ID NO: 2050771 - DNA, 15 bp, Homo sapiens
tcgtgaattttctta

SEQ ID NO: 2050772 - DNA, 15 bp, Homo sapiens
cgtgaattttcttaa

SEQ ID NO: 2050773 - DNA, 15 bp, Homo sapiens
gtgaattttcttaag

SEQ ID NO: 2050774 - DNA, 15 bp, Homo sapiens
tgaattttcttaagg

SEQ ID NO: 2050775 - DNA, 15 bp, Homo sapiens
gaattttcttaagga

SEQ ID NO: 2050776 - DNA, 15 bp, Homo sapiens
aattttcttaaggaa

SEQ ID NO: 2050777 - DNA, 15 bp, Homo sapiens
attttcttaaggaaa

SEQ ID NO: 2050778 - DNA, 15 bp, Homo sapiens
ttttcttaaggaaaa

SEQ ID NO: 2050779 - DNA, 15 bp, Homo sapiens
tttcttaaggaaaag

SEQ ID NO: 2050780 - DNA, 15 bp, Homo sapiens
ttcttaaggaaaaga

SEQ ID NO: 2050781 - DNA, 15 bp, Homo sapiens
tcttaaggaaaagag

SEQ ID NO: 2050782 - DNA, 15 bp, Homo sapiens
cttaaggaaaagaga

SEQ ID NO: 2050783 - DNA, 15 bp, Homo sapiens
ttaaggaaaagagag

SEQ ID NO: 2050784 - DNA, 15 bp, Homo sapiens
taaggaaaagagaga

SEQ ID NO: 2050785 - DNA, 15 bp, Homo sapiens
aaggaaaagagagat

SEQ ID NO: 2050786 - DNA, 15 bp, Homo sapiens
aggaaaagagagatt

SEQ ID NO: 2050787 - DNA, 15 bp, Homo sapiens
ggaaaagagagattc

SEQ ID NO: 2050788 - DNA, 15 bp, Homo sapiens
gaaaagagagattcc

SEQ ID NO: 2050789 - DNA, 15 bp, Homo sapiens
aaaagagagattcct

SEQ ID NO: 2050790 - DNA, 15 bp, Homo sapiens
aaagagagattcctt

SEQ ID NO: 2050791 - DNA, 15 bp, Homo sapiens
aagagagattccttc

SEQ ID NO: 2050792 - DNA, 15 bp, Homo sapiens
agagagattccttct

SEQ ID NO: 2050793 - DNA, 15 bp, Homo sapiens
gagagattccttctc

SEQ ID NO: 2050794 - DNA, 15 bp, Homo sapiens
agagattccttctct

SEQ ID NO: 2050795 - DNA, 15 bp, Homo sapiens
gagattccttctctc

SEQ ID NO: 2050796 - DNA, 15 bp, Homo sapiens
agattccttctctcc

SEQ ID NO: 2050797 - DNA, 15 bp, Homo sapiens
gattccttctctccc

SEQ ID NO: 2050798 - DNA, 15 bp, Homo sapiens
attccttctctcccc

SEQ ID NO: 2050799 - DNA, 15 bp, Homo sapiens
ttccttctctcccca

SEQ ID NO: 2050800 - DNA, 15 bp, Homo sapiens
tccttctctccccag

SEQ ID NO: 2050801 - DNA, 15 bp, Homo sapiens
ccttctctccccaga

SEQ ID NO: 2050802 - DNA, 15 bp, Homo sapiens
cttctctccccagat

SEQ ID NO: 2050803 - DNA, 15 bp, Homo sapiens
ttctctccccagata

SEQ ID NO: 2050804 - DNA, 15 bp, Homo sapiens
tctctccccagatat

SEQ ID NO: 2050805 - DNA, 15 bp, Homo sapiens
ctctccccagatatc

SEQ ID NO: 2050806 - DNA, 15 bp, Homo sapiens
tctccccagatatca

SEQ ID NO: 2050807 - DNA, 15 bp, Homo sapiens
ctccccagatatcaa

SEQ ID NO: 2050808 - DNA, 15 bp, Homo sapiens
tccccagatatcaac

SEQ ID NO: 2050809 - DNA, 15 bp, Homo sapiens
ccccagatatcaaca

SEQ ID NO: 2050810 - DNA, 15 bp, Homo sapiens
cccagatatcaacat

SEQ ID NO: 2050811 - DNA, 15 bp, Homo sapiens
ccagatatcaacatc

SEQ ID NO: 2050812 - DNA, 15 bp, Homo sapiens
cagatatcaacatct

SEQ ID NO: 2050813 - DNA, 15 bp, Homo sapiens
agatatcaacatcta

SEQ ID NO: 2050814 - DNA, 15 bp, Homo sapiens
gatatcaacatctaa

SEQ ID NO: 2050815 - DNA, 15 bp, Homo sapiens
atatcaacatctaac

SEQ ID NO: 2050816 - DNA, 15 bp, Homo sapiens
tatcaacatctaacg

SEQ ID NO: 2050817 - DNA, 15 bp, Homo sapiens
atcaacatctaacga

SEQ ID NO: 2050818 - DNA, 15 bp, Homo sapiens
tcaacatctaacgaa

SEQ ID NO: 2050819 - DNA, 15 bp, Homo sapiens
caacatctaacgaat

SEQ ID NO: 2050820 - DNA, 15 bp, Homo sapiens
aacatctaacgaatt

SEQ ID NO: 2050821 - DNA, 15 bp, Homo sapiens
acatctaacgaattt

SEQ ID NO: 2050822 - DNA, 15 bp, Homo sapiens
catctaacgaatttt

SEQ ID NO: 2050823 - DNA, 15 bp, Homo sapiens
atctaacgaattttc

SEQ ID NO: 2050824 - DNA, 15 bp, Homo sapiens
tctaacgaattttct

SEQ ID NO: 2050825 - DNA, 15 bp, Homo sapiens
ctaacgaattttcta

SEQ ID NO: 2050826 - DNA, 15 bp, Homo sapiens
taacgaattttctag

SEQ ID NO: 2050827 - DNA, 15 bp, Homo sapiens
aacgaattttctagg

SEQ ID NO: 2050828 - DNA, 15 bp, Homo sapiens
acgaattttctagga

SEQ ID NO: 2050829 - DNA, 15 bp, Homo sapiens
cgaattttctaggag

SEQ ID NO: 2050830 - DNA, 15 bp, Homo sapiens
gaattttctaggaga

SEQ ID NO: 2050831 - DNA, 15 bp, Homo sapiens
aattttctaggagac

SEQ ID NO: 2050832 - DNA, 15 bp, Homo sapiens
attttctaggagact

SEQ ID NO: 2050833 - DNA, 15 bp, Homo sapiens
ttttctaggagactg

SEQ ID NO: 2050834 - DNA, 15 bp, Homo sapiens
tttctaggagactga

SEQ ID NO: 2050835 - DNA, 15 bp, Homo sapiens
ttctaggagactgaa

SEQ ID NO: 2050836 - DNA, 15 bp, Homo sapiens
tctaggagactgaaa

SEQ ID NO: 2050837 - DNA, 15 bp, Homo sapiens
ctaggagactgaaac

SEQ ID NO: 2050838 - DNA, 15 bp, Homo sapiens
taggagactgaaact

SEQ ID NO: 2050839 - DNA, 15 bp, Homo sapiens
aggagactgaaactc

SEQ ID NO: 2050840 - DNA, 15 bp, Homo sapiens
ggagactgaaactca

SEQ ID NO: 2050841 - DNA, 15 bp, Homo sapiens
gagactgaaactcaa

SEQ ID NO: 2050842 - DNA, 15 bp, Homo sapiens
agactgaaactcaac

SEQ ID NO: 2050843 - DNA, 15 bp, Homo sapiens
gactgaaactcaacc

SEQ ID NO: 2050844 - DNA, 15 bp, Homo sapiens
actgaaactcaacct

SEQ ID NO: 2050845 - DNA, 15 bp, Homo sapiens
ctgaaactcaaccta

SEQ ID NO: 2050846 - DNA, 15 bp, Homo sapiens
tgaaactcaacctaa

SEQ ID NO: 2050847 - DNA, 15 bp, Homo sapiens
gaaactcaacctaat

SEQ ID NO: 2050848 - DNA, 15 bp, Homo sapiens
aaactcaacctaata

SEQ ID NO: 2050849 - DNA, 15 bp, Homo sapiens
aactcaacctaataa

SEQ ID NO: 2050850 - DNA, 15 bp, Homo sapiens
actcaacctaataat

SEQ ID NO: 2050851 - DNA, 15 bp, Homo sapiens
ctcaacctaataata

SEQ ID NO: 2050852 - DNA, 15 bp, Homo sapiens
tcaacctaataatag

SEQ ID NO: 2050853 - DNA, 15 bp, Homo sapiens
caacctaataatagt

SEQ ID NO: 2050854 - DNA, 15 bp, Homo sapiens
aacctaataatagta

SEQ ID NO: 2050855 - DNA, 15 bp, Homo sapiens
acctaataatagtat

SEQ ID NO: 2050856 - DNA, 15 bp, Homo sapiens
cctaataatagtatg

SEQ ID NO: 2050857 - DNA, 15 bp, Homo sapiens
ctaataatagtatgt

SEQ ID NO: 2050858 - DNA, 15 bp, Homo sapiens
taataatagtatgtg

SEQ ID NO: 2050859 - DNA, 15 bp, Homo sapiens
aataatagtatgtgc

SEQ ID NO: 2050860 - DNA, 15 bp, Homo sapiens
ataatagtatgtgct

SEQ ID NO: 2050861 - DNA, 15 bp, Homo sapiens
taatagtatgtgctt

SEQ ID NO: 2050862 - DNA, 15 bp, Homo sapiens
aatagtatgtgctta

SEQ ID NO: 2050863 - DNA, 15 bp, Homo sapiens
atagtatgtgcttaa

SEQ ID NO: 2050864 - DNA, 15 bp, Homo sapiens
tagtatgtgcttaat

SEQ ID NO: 2050865 - DNA, 15 bp, Homo sapiens
agtatgtgcttaatg

SEQ ID NO: 2050866 - DNA, 15 bp, Homo sapiens
gtatgtgcttaatgc

SEQ ID NO: 2050867 - DNA, 15 bp, Homo sapiens
tatgtgcttaatgct

SEQ ID NO: 2050868 - DNA, 15 bp, Homo sapiens
atgtgcttaatgctg

SEQ ID NO: 2050869 - DNA, 15 bp, Homo sapiens
tgtgcttaatgctga

SEQ ID NO: 2050870 - DNA, 15 bp, Homo sapiens
gtgcttaatgctgat

SEQ ID NO: 2050871 - DNA, 15 bp, Homo sapiens
tgcttaatgctgatt

SEQ ID NO: 2050872 - DNA, 15 bp, Homo sapiens
gcttaatgctgattc

SEQ ID NO: 2050873 - DNA, 15 bp, Homo sapiens
cttaatgctgattcc

SEQ ID NO: 2050874 - DNA, 15 bp, Homo sapiens
ttaatgctgattcca

SEQ ID NO: 2050875 - DNA, 15 bp, Homo sapiens
taatgctgattccat

SEQ ID NO: 2050876 - DNA, 15 bp, Homo sapiens
aatgctgattccatt

SEQ ID NO: 2050877 - DNA, 15 bp, Homo sapiens
atgctgattccattt

SEQ ID NO: 2050878 - DNA, 15 bp, Homo sapiens
tgctgattccatttt

SEQ ID NO: 2050879 - DNA, 15 bp, Homo sapiens
gctgattccattttt

SEQ ID NO: 2050880 - DNA, 15 bp, Homo sapiens
ctgattccatttttg

SEQ ID NO: 2050881 - DNA, 15 bp, Homo sapiens
tgattccatttttgt

SEQ ID NO: 2050882 - DNA, 15 bp, Homo sapiens
gattccatttttgtt

SEQ ID NO: 2050883 - DNA, 15 bp, Homo sapiens
attccatttttgttt

SEQ ID NO: 2050884 - DNA, 15 bp, Homo sapiens
ttccatttttgtttc

SEQ ID NO: 2050885 - DNA, 15 bp, Homo sapiens
tccatttttgtttca

SEQ ID NO: 2050886 - DNA, 15 bp, Homo sapiens
ccatttttgtttcaa

SEQ ID NO: 2050887 - DNA, 15 bp, Homo sapiens
catttttgtttcaaa

SEQ ID NO: 2050888 - DNA, 15 bp, Homo sapiens
atttttgtttcaaag

SEQ ID NO: 2050889 - DNA, 15 bp, Homo sapiens
tttttgtttcaaagg

SEQ ID NO: 2050890 - DNA, 15 bp, Homo sapiens
ttttgtttcaaaggg

SEQ ID NO: 2050891 - DNA, 15 bp, Homo sapiens
tttgtttcaaagggg

SEQ ID NO: 2050892 - DNA, 15 bp, Homo sapiens
ttgtttcaaaggggg

SEQ ID NO: 2050893 - DNA, 15 bp, Homo sapiens
tgtttcaaagggggg

SEQ ID NO: 2050894 - DNA, 15 bp, Homo sapiens
gtttcaaaggggggt

SEQ ID NO: 2050895 - DNA, 15 bp, Homo sapiens
tttcaaaggggggta

SEQ ID NO: 2050896 - DNA, 15 bp, Homo sapiens
ttcaaaggggggtaa

SEQ ID NO: 2050897 - DNA, 15 bp, Homo sapiens
tcaaaggggggtaat

SEQ ID NO: 2050898 - DNA, 15 bp, Homo sapiens
caaaggggggtaatt

SEQ ID NO: 2050899 - DNA, 15 bp, Homo sapiens
aaaggggggtaattt

SEQ ID NO: 2050900 - DNA, 15 bp, Homo sapiens
aaggggggtaattta

SEQ ID NO: 2050901 - DNA, 15 bp, Homo sapiens
aggggggtaatttat

SEQ ID NO: 2050902 - DNA, 15 bp, Homo sapiens
ggggggtaatttatt

SEQ ID NO: 2050903 - DNA, 15 bp, Homo sapiens
gggggtaatttatta

SEQ ID NO: 2050904 - DNA, 15 bp, Homo sapiens
ggggtaatttattag

SEQ ID NO: 2050905 - DNA, 15 bp, Homo sapiens
gggtaatttattagc

SEQ ID NO: 2050906 - DNA, 15 bp, Homo sapiens
ggtaatttattagct

SEQ ID NO: 2050907 - DNA, 15 bp, Homo sapiens
gtaatttattagctt

SEQ ID NO: 2050908 - DNA, 15 bp, Homo sapiens
taatttattagcttc

SEQ ID NO: 2050909 - DNA, 15 bp, Homo sapiens
aatttattagcttcc

SEQ ID NO: 2050910 - DNA, 15 bp, Homo sapiens
atttattagcttcct

SEQ ID NO: 2050911 - DNA, 15 bp, Homo sapiens
tttattagcttcctc

SEQ ID NO: 2050912 - DNA, 15 bp, Homo sapiens
ttattagcttcctca

SEQ ID NO: 2050913 - DNA, 15 bp, Homo sapiens
tattagcttcctcaa

SEQ ID NO: 2050914 - DNA, 15 bp, Homo sapiens
attagcttcctcaaa

SEQ ID NO: 2050915 - DNA, 15 bp, Homo sapiens
ttagcttcctcaaag

SEQ ID NO: 2050916 - DNA, 15 bp, Homo sapiens
tagcttcctcaaagt

SEQ ID NO: 2050917 - DNA, 15 bp, Homo sapiens
agcttcctcaaagtg

SEQ ID NO: 2050918 - DNA, 15 bp, Homo sapiens
gcttcctcaaagtgg

SEQ ID NO: 2050919 - DNA, 15 bp, Homo sapiens
cttcctcaaagtggt

SEQ ID NO: 2050920 - DNA, 15 bp, Homo sapiens
ttcctcaaagtggtg

SEQ ID NO: 2050921 - DNA, 15 bp, Homo sapiens
tcctcaaagtggtgc

SEQ ID NO: 2050922 - DNA, 15 bp, Homo sapiens
cctcaaagtggtgcc

SEQ ID NO: 2050923 - DNA, 15 bp, Homo sapiens
ctcaaagtggtgcct

SEQ ID NO: 2050924 - DNA, 15 bp, Homo sapiens
tcaaagtggtgcctc

SEQ ID NO: 2050925 - DNA, 15 bp, Homo sapiens
caaagtggtgcctcg

SEQ ID NO: 2050926 - DNA, 15 bp, Homo sapiens
aaagtggtgcctcgt

SEQ ID NO: 2050927 - DNA, 15 bp, Homo sapiens
aagtggtgcctcgta

SEQ ID NO: 2050928 - DNA, 15 bp, Homo sapiens
agtggtgcctcgtag

SEQ ID NO: 2050929 - DNA, 15 bp, Homo sapiens
gtggtgcctcgtagg

SEQ ID NO: 2050930 - DNA, 15 bp, Homo sapiens
tggtgcctcgtaggc

SEQ ID NO: 2050931 - DNA, 15 bp, Homo sapiens
ggtgcctcgtaggca

SEQ ID NO: 2050932 - DNA, 15 bp, Homo sapiens
gtgcctcgtaggcag

SEQ ID NO: 2050933 - DNA, 15 bp, Homo sapiens
tgcctcgtaggcagg

SEQ ID NO: 2050934 - DNA, 15 bp, Homo sapiens
gcctcgtaggcaggt

SEQ ID NO: 2050935 - DNA, 15 bp, Homo sapiens
cctcgtaggcaggtg

SEQ ID NO: 2050936 - DNA, 15 bp, Homo sapiens
ctcgtaggcaggtgt

SEQ ID NO: 2050937 - DNA, 15 bp, Homo sapiens
tcgtaggcaggtgtt

SEQ ID NO: 2050938 - DNA, 15 bp, Homo sapiens
cgtaggcaggtgttg

SEQ ID NO: 2050939 - DNA, 15 bp, Homo sapiens
gtaggcaggtgttgt

SEQ ID NO: 2050940 - DNA, 15 bp, Homo sapiens
taggcaggtgttgta

SEQ ID NO: 2050941 - DNA, 15 bp, Homo sapiens
aggcaggtgttgtat

SEQ ID NO: 2050942 - DNA, 15 bp, Homo sapiens
ggcaggtgttgtatt

SEQ ID NO: 2050943 - DNA, 15 bp, Homo sapiens
gcaggtgttgtattt

SEQ ID NO: 2050944 - DNA, 15 bp, Homo sapiens
caggtgttgtatttt

SEQ ID NO: 2050945 - DNA, 15 bp, Homo sapiens
aggtgttgtattttt

SEQ ID NO: 2050946 - DNA, 15 bp, Homo sapiens
ggtgttgtatttttt

SEQ ID NO: 2050947 - DNA, 15 bp, Homo sapiens
gtgttgtattttttg

SEQ ID NO: 2050948 - DNA, 15 bp, Homo sapiens
tgttgtattttttga

SEQ ID NO: 2050949 - DNA, 15 bp, Homo sapiens
gttgtattttttgat

SEQ ID NO: 2050950 - DNA, 15 bp, Homo sapiens
ttgtattttttgata

SEQ ID NO: 2050951 - DNA, 15 bp, Homo sapiens
tgtattttttgatat

SEQ ID NO: 2050952 - DNA, 15 bp, Homo sapiens
gtattttttgatatc

SEQ ID NO: 2050953 - DNA, 15 bp, Homo sapiens
tattttttgatatcc

SEQ ID NO: 2050954 - DNA, 15 bp, Homo sapiens
attttttgatatcct

SEQ ID NO: 2050955 - DNA, 15 bp, Homo sapiens
ttttttgatatcctt

SEQ ID NO: 2050956 - DNA, 15 bp, Homo sapiens
tttttgatatccttg

SEQ ID NO: 2050957 - DNA, 15 bp, Homo sapiens
ttttgatatccttgt

SEQ ID NO: 2050958 - DNA, 15 bp, Homo sapiens
tttgatatccttgta

SEQ ID NO: 2050959 - DNA, 15 bp, Homo sapiens
ttgatatccttgtaa

SEQ ID NO: 2050960 - DNA, 15 bp, Homo sapiens
tgatatccttgtaaa

SEQ ID NO: 2050961 - DNA, 15 bp, Homo sapiens
gatatccttgtaaag

SEQ ID NO: 2050962 - DNA, 15 bp, Homo sapiens
atatccttgtaaaga

SEQ ID NO: 2050963 - DNA, 15 bp, Homo sapiens
tatccttgtaaagag

SEQ ID NO: 2050964 - DNA, 15 bp, Homo sapiens
atccttgtaaagagt

SEQ ID NO: 2050965 - DNA, 15 bp, Homo sapiens
tccttgtaaagagtt

SEQ ID NO: 2050966 - DNA, 15 bp, Homo sapiens
ccttgtaaagagttt

SEQ ID NO: 2050967 - DNA, 15 bp, Homo sapiens
cttgtaaagagtttt

SEQ ID NO: 2050968 - DNA, 15 bp, Homo sapiens
tgtaaagagtttttg

SEQ ID NO: 2050969 - DNA, 15 bp, Homo sapiens
gtaaagagtttttgc

SEQ ID NO: 2050970 - DNA, 15 bp, Homo sapiens
taaagagtttttgcg

SEQ ID NO: 2050971 - DNA, 15 bp, Homo sapiens
aaagagtttttgcgt

SEQ ID NO: 2050972 - DNA, 15 bp, Homo sapiens
aagagtttttgcgtc

SEQ ID NO: 2050973 - DNA, 15 bp, Homo sapiens
agagtttttgcgtct

SEQ ID NO: 2050974 - DNA, 15 bp, Homo sapiens
gagtttttgcgtctg

SEQ ID NO: 2050975 - DNA, 15 bp, Homo sapiens
agtttttgcgtctgg

SEQ ID NO: 2050976 - DNA, 15 bp, Homo sapiens
gtttttgcgtctggg

SEQ ID NO: 2050977 - DNA, 15 bp, Homo sapiens
tttttgcgtctggga

SEQ ID NO: 2050978 - DNA, 15 bp, Homo sapiens
ttttgcgtctgggaa

SEQ ID NO: 2050979 - DNA, 15 bp, Homo sapiens
tttgcgtctgggaag

SEQ ID NO: 2050980 - DNA, 15 bp, Homo sapiens
ttgcgtctgggaaga

SEQ ID NO: 2050981 - DNA, 15 bp, Homo sapiens
tgcgtctgggaagat

SEQ ID NO: 2050982 - DNA, 15 bp, Homo sapiens
gcgtctgggaagatc

SEQ ID NO: 2050983 - DNA, 15 bp, Homo sapiens
cgtctgggaagatct

SEQ ID NO: 2050984 - DNA, 15 bp, Homo sapiens
gtctgggaagatctc

SEQ ID NO: 2050985 - DNA, 15 bp, Homo sapiens
tctgggaagatctca

SEQ ID NO: 2050986 - DNA, 15 bp, Homo sapiens
ctgggaagatctcag

SEQ ID NO: 2050987 - DNA, 15 bp, Homo sapiens
tgggaagatctcaga

SEQ ID NO: 2050988 - DNA, 15 bp, Homo sapiens
gggaagatctcagaa

SEQ ID NO: 2050989 - DNA, 15 bp, Homo sapiens
ggaagatctcagaag

SEQ ID NO: 2050990 - DNA, 15 bp, Homo sapiens
gaagatctcagaaga

SEQ ID NO: 2050991 - DNA, 15 bp, Homo sapiens
aagatctcagaagaa

SEQ ID NO: 2050992 - DNA, 15 bp, Homo sapiens
agatctcagaagaac

SEQ ID NO: 2050993 - DNA, 15 bp, Homo sapiens
gatctcagaagaacc

SEQ ID NO: 2050994 - DNA, 15 bp, Homo sapiens
atctcagaagaacca

SEQ ID NO: 2050995 - DNA, 15 bp, Homo sapiens
tctcagaagaaccaa

SEQ ID NO: 2050996 - DNA, 15 bp, Homo sapiens
ctcagaagaaccaat

SEQ ID NO: 2050997 - DNA, 15 bp, Homo sapiens
tcagaagaaccaata

SEQ ID NO: 2050998 - DNA, 15 bp, Homo sapiens
cagaagaaccaataa

SEQ ID NO: 2050999 - DNA, 15 bp, Homo sapiens
agaagaaccaataaa

SEQ ID NO: 2051000 - DNA, 15 bp, Homo sapiens
gaagaaccaataaat

SEQ ID NO: 2051001 - DNA, 15 bp, Homo sapiens
aagaaccaataaata

SEQ ID NO: 2051002 - DNA, 15 bp, Homo sapiens
agaaccaataaataa

SEQ ID NO: 2051003 - DNA, 15 bp, Homo sapiens
gaaccaataaataag

SEQ ID NO: 2051004 - DNA, 15 bp, Homo sapiens
aaccaataaataagg

SEQ ID NO: 2051005 - DNA, 15 bp, Homo sapiens
accaataaataaggt

SEQ ID NO: 2051006 - DNA, 15 bp, Homo sapiens
ccaataaataaggtg

SEQ ID NO: 2051007 - DNA, 15 bp, Homo sapiens
caataaataaggtgt

SEQ ID NO: 2051008 - DNA, 15 bp, Homo sapiens
aataaataaggtgtg

SEQ ID NO: 2051009 - DNA, 15 bp, Homo sapiens
ataaataaggtgtgt

SEQ ID NO: 2051010 - DNA, 15 bp, Homo sapiens
taaataaggtgtgtg

SEQ ID NO: 2051011 - DNA, 15 bp, Homo sapiens
aaataaggtgtgtgt

SEQ ID NO: 2051012 - DNA, 15 bp, Homo sapiens
aataaggtgtgtgta

SEQ ID NO: 2051013 - DNA, 15 bp, Homo sapiens
ataaggtgtgtgtat

SEQ ID NO: 2051014 - DNA, 15 bp, Homo sapiens
taaggtgtgtgtatg

SEQ ID NO: 2051015 - DNA, 15 bp, Homo sapiens
aaggtgtgtgtatgt

SEQ ID NO: 2051016 - DNA, 15 bp, Homo sapiens
aggtgtgtgtatgtt

SEQ ID NO: 2051017 - DNA, 15 bp, Homo sapiens
ggtgtgtgtatgttg

SEQ ID NO: 2051018 - DNA, 15 bp, Homo sapiens
gtgtgtgtatgttgg

SEQ ID NO: 2051019 - DNA, 15 bp, Homo sapiens
gtgtgtatgttgggg

SEQ ID NO: 2051020 - DNA, 15 bp, Homo sapiens
tgtgtatgttggggg

SEQ ID NO: 2051021 - DNA, 15 bp, Homo sapiens
gtgtatgttgggggg

SEQ ID NO: 2051022 - DNA, 15 bp, Homo sapiens
tgtatgttggggggt

SEQ ID NO: 2051023 - DNA, 15 bp, Homo sapiens
gtatgttggggggtg

SEQ ID NO: 2051024 - DNA, 15 bp, Homo sapiens
tatgttggggggtgg

SEQ ID NO: 2051025 - DNA, 15 bp, Homo sapiens
atgttggggggtgga

SEQ ID NO: 2051026 - DNA, 15 bp, Homo sapiens
tgttggggggtggag

SEQ ID NO: 2051027 - DNA, 15 bp, Homo sapiens
gttggggggtggagg

SEQ ID NO: 2051028 - DNA, 15 bp, Homo sapiens
ttggggggtggaggt

SEQ ID NO: 2051029 - DNA, 15 bp, Homo sapiens
tggggggtggaggtg

SEQ ID NO: 2051030 - DNA, 15 bp, Homo sapiens
ggggggtggaggtgg

SEQ ID NO: 2051031 - DNA, 15 bp, Homo sapiens
gggggtggaggtggg

SEQ ID NO: 2051032 - DNA, 15 bp, Homo sapiens
ggggtggaggtggga

SEQ ID NO: 2051033 - DNA, 15 bp, Homo sapiens
gggtggaggtgggat

SEQ ID NO: 2051034 - DNA, 15 bp, Homo sapiens
ggtggaggtgggatt

SEQ ID NO: 2051035 - DNA, 15 bp, Homo sapiens
gtggaggtgggattc

SEQ ID NO: 2051036 - DNA, 15 bp, Homo sapiens
tggaggtgggattct

SEQ ID NO: 2051037 - DNA, 15 bp, Homo sapiens
ggaggtgggattctg

SEQ ID NO: 2051038 - DNA, 15 bp, Homo sapiens
gaggtgggattctgt

SEQ ID NO: 2051039 - DNA, 15 bp, Homo sapiens
aggtgggattctgta

SEQ ID NO: 2051040 - DNA, 15 bp, Homo sapiens
ggtgggattctgtac

SEQ ID NO: 2051041 - DNA, 15 bp, Homo sapiens
gtgggattctgtaca

SEQ ID NO: 2051042 - DNA, 15 bp, Homo sapiens
tgggattctgtacag

SEQ ID NO: 2051043 - DNA, 15 bp, Homo sapiens
gggattctgtacagc

SEQ ID NO: 2051044 - DNA, 15 bp, Homo sapiens
ggattctgtacagct

SEQ ID NO: 2051045 - DNA, 15 bp, Homo sapiens
gattctgtacagctc

SEQ ID NO: 2051046 - DNA, 15 bp, Homo sapiens
attctgtacagctca

SEQ ID NO: 2051047 - DNA, 15 bp, Homo sapiens
ttctgtacagctcat

SEQ ID NO: 2051048 - DNA, 15 bp, Homo sapiens
tctgtacagctcatg

SEQ ID NO: 2051049 - DNA, 15 bp, Homo sapiens
ctgtacagctcatgg

SEQ ID NO: 2051050 - DNA, 15 bp, Homo sapiens
tgtacagctcatggc

SEQ ID NO: 2051051 - DNA, 15 bp, Homo sapiens
gtacagctcatggcc

SEQ ID NO: 2051052 - DNA, 15 bp, Homo sapiens
tacagctcatggccc

SEQ ID NO: 2051053 - DNA, 15 bp, Homo sapiens
acagctcatggccct

SEQ ID NO: 2051054 - DNA, 15 bp, Homo sapiens
cagctcatggccctg

SEQ ID NO: 2051055 - DNA, 15 bp, Homo sapiens
agctcatggccctgc

SEQ ID NO: 2051056 - DNA, 15 bp, Homo sapiens
gctcatggccctgct

SEQ ID NO: 2051057 - DNA, 15 bp, Homo sapiens
ctcatggccctgctt

SEQ ID NO: 2051058 - DNA, 15 bp, Homo sapiens
tcatggccctgcttg

SEQ ID NO: 2051059 - DNA, 15 bp, Homo sapiens
catggccctgcttgt

SEQ ID NO: 2051060 - DNA, 15 bp, Homo sapiens
atggccctgcttgtt

SEQ ID NO: 2051061 - DNA, 15 bp, Homo sapiens
tggccctgcttgttc

SEQ ID NO: 2051062 - DNA, 15 bp, Homo sapiens
ggccctgcttgttca

SEQ ID NO: 2051063 - DNA, 15 bp, Homo sapiens
gccctgcttgttcaa

SEQ ID NO: 2051064 - DNA, 15 bp, Homo sapiens
ccctgcttgttcaat

SEQ ID NO: 2051065 - DNA, 15 bp, Homo sapiens
cctgcttgttcaatt

SEQ ID NO: 2051066 - DNA, 15 bp, Homo sapiens
ctgcttgttcaattt

SEQ ID NO: 2051067 - DNA, 15 bp, Homo sapiens
tgcttgttcaatttc

SEQ ID NO: 2051068 - DNA, 15 bp, Homo sapiens
gcttgttcaatttca

SEQ ID NO: 2051069 - DNA, 15 bp, Homo sapiens
cttgttcaatttcat

SEQ ID NO: 2051070 - DNA, 15 bp, Homo sapiens
ttgttcaatttcatg

SEQ ID NO: 2051071 - DNA, 15 bp, Homo sapiens
tgttcaatttcatgc

SEQ ID NO: 2051072 - DNA, 15 bp, Homo sapiens
gttcaatttcatgca

SEQ ID NO: 2051073 - DNA, 15 bp, Homo sapiens
ttcaatttcatgcaa

SEQ ID NO: 2051074 - DNA, 15 bp, Homo sapiens
tcaatttcatgcaaa

SEQ ID NO: 2051075 - DNA, 15 bp, Homo sapiens
caatttcatgcaaaa

SEQ ID NO: 2051076 - DNA, 15 bp, Homo sapiens
aatttcatgcaaaac

SEQ ID NO: 2051077 - DNA, 15 bp, Homo sapiens
atttcatgcaaaact

SEQ ID NO: 2051078 - DNA, 15 bp, Homo sapiens
tttcatgcaaaactc

SEQ ID NO: 2051079 - DNA, 15 bp, Homo sapiens
ttcatgcaaaactca

SEQ ID NO: 2051080 - DNA, 15 bp, Homo sapiens
tcatgcaaaactcat

SEQ ID NO: 2051081 - DNA, 15 bp, Homo sapiens
catgcaaaactcatt

SEQ ID NO: 2051082 - DNA, 15 bp, Homo sapiens
atgcaaaactcattc

SEQ ID NO: 2051083 - DNA, 15 bp, Homo sapiens
tgcaaaactcattct

SEQ ID NO: 2051084 - DNA, 15 bp, Homo sapiens
gcaaaactcattcta

SEQ ID NO: 2051085 - DNA, 15 bp, Homo sapiens
caaaactcattctaa

SEQ ID NO: 2051086 - DNA, 15 bp, Homo sapiens
aaaactcattctaaa

SEQ ID NO: 2051087 - DNA, 15 bp, Homo sapiens
aaactcattctaaaa

SEQ ID NO: 2051088 - DNA, 15 bp, Homo sapiens
aactcattctaaaag

SEQ ID NO: 2051089 - DNA, 15 bp, Homo sapiens
actcattctaaaagc

SEQ ID NO: 2051090 - DNA, 15 bp, Homo sapiens
ctcattctaaaagcc

SEQ ID NO: 2051091 - DNA, 15 bp, Homo sapiens
tcattctaaaagccc

SEQ ID NO: 2051092 - DNA, 15 bp, Homo sapiens
cattctaaaagcccc

SEQ ID NO: 2051093 - DNA, 15 bp, Homo sapiens
attctaaaagcccca

SEQ ID NO: 2051094 - DNA, 15 bp, Homo sapiens
ttctaaaagccccag

SEQ ID NO: 2051095 - DNA, 15 bp, Homo sapiens
tctaaaagccccagg

SEQ ID NO: 2051096 - DNA, 15 bp, Homo sapiens
ctaaaagccccaggg

SEQ ID NO: 2051097 - DNA, 15 bp, Homo sapiens
taaaagccccagggt

SEQ ID NO: 2051098 - DNA, 15 bp, Homo sapiens
aaaagccccagggtt

SEQ ID NO: 2051099 - DNA, 15 bp, Homo sapiens
aaagccccagggttc

SEQ ID NO: 2051100 - DNA, 15 bp, Homo sapiens
aagccccagggttct

SEQ ID NO: 2051101 - DNA, 15 bp, Homo sapiens
agccccagggttctc

SEQ ID NO: 2051102 - DNA, 15 bp, Homo sapiens
gccccagggttctct

SEQ ID NO: 2051103 - DNA, 15 bp, Homo sapiens
ccccagggttctctt

SEQ ID NO: 2051104 - DNA, 15 bp, Homo sapiens
cccagggttctcttt

SEQ ID NO: 2051105 - DNA, 15 bp, Homo sapiens
ccagggttctcttta

SEQ ID NO: 2051106 - DNA, 15 bp, Homo sapiens
cagggttctctttaa

SEQ ID NO: 2051107 - DNA, 15 bp, Homo sapiens
agggttctctttaat

SEQ ID NO: 2051108 - DNA, 15 bp, Homo sapiens
gggttctctttaata

SEQ ID NO: 2051109 - DNA, 15 bp, Homo sapiens
ggttctctttaatag

SEQ ID NO: 2051110 - DNA, 15 bp, Homo sapiens
gttctctttaatagg

SEQ ID NO: 2051111 - DNA, 15 bp, Homo sapiens
ttctctttaataggg

SEQ ID NO: 2051112 - DNA, 15 bp, Homo sapiens
tctctttaatagggg

SEQ ID NO: 2051113 - DNA, 15 bp, Homo sapiens
ctctttaataggggc

SEQ ID NO: 2051114 - DNA, 15 bp, Homo sapiens
tctttaataggggcc

SEQ ID NO: 2051115 - DNA, 15 bp, Homo sapiens
ctttaataggggcca

SEQ ID NO: 2051116 - DNA, 15 bp, Homo sapiens
tttaataggggccaa

SEQ ID NO: 2051117 - DNA, 15 bp, Homo sapiens
ttaataggggccaaa

SEQ ID NO: 2051118 - DNA, 15 bp, Homo sapiens
taataggggccaaat

SEQ ID NO: 2051119 - DNA, 15 bp, Homo sapiens
aataggggccaaatg

SEQ ID NO: 2051120 - DNA, 15 bp, Homo sapiens
ataggggccaaatgg

SEQ ID NO: 2051121 - DNA, 15 bp, Homo sapiens
taggggccaaatggc

SEQ ID NO: 2051122 - DNA, 15 bp, Homo sapiens
aggggccaaatggca

SEQ ID NO: 2051123 - DNA, 15 bp, Homo sapiens
ggggccaaatggcag

SEQ ID NO: 2051124 - DNA, 15 bp, Homo sapiens
gggccaaatggcagg

SEQ ID NO: 2051125 - DNA, 15 bp, Homo sapiens
ggccaaatggcagga

SEQ ID NO: 2051126 - DNA, 15 bp, Homo sapiens
gccaaatggcaggaa

SEQ ID NO: 2051127 - DNA, 15 bp, Homo sapiens
ccaaatggcaggaac

SEQ ID NO: 2051128 - DNA, 15 bp, Homo sapiens
caaatggcaggaacc

SEQ ID NO: 2051129 - DNA, 15 bp, Homo sapiens
aaatggcaggaaccc

SEQ ID NO: 2051130 - DNA, 15 bp, Homo sapiens
aatggcaggaacccc

SEQ ID NO: 2051131 - DNA, 15 bp, Homo sapiens
atggcaggaacccca

SEQ ID NO: 2051132 - DNA, 15 bp, Homo sapiens
tggcaggaaccccaa

SEQ ID NO: 2051133 - DNA, 15 bp, Homo sapiens
ggcaggaaccccaaa

SEQ ID NO: 2051134 - DNA, 15 bp, Homo sapiens
gcaggaaccccaaag

SEQ ID NO: 2051135 - DNA, 15 bp, Homo sapiens
caggaaccccaaaga

SEQ ID NO: 2051136 - DNA, 15 bp, Homo sapiens
aggaaccccaaagat

SEQ ID NO: 2051137 - DNA, 15 bp, Homo sapiens
ggaaccccaaagatc

SEQ ID NO: 2051138 - DNA, 15 bp, Homo sapiens
gaaccccaaagatct

SEQ ID NO: 2051139 - DNA, 15 bp, Homo sapiens
aaccccaaagatcta

SEQ ID NO: 2051140 - DNA, 15 bp, Homo sapiens
accccaaagatctaa

SEQ ID NO: 2051141 - DNA, 15 bp, Homo sapiens
ccccaaagatctaaa

SEQ ID NO: 2051142 - DNA, 15 bp, Homo sapiens
cccaaagatctaaat

SEQ ID NO: 2051143 - DNA, 15 bp, Homo sapiens
ccaaagatctaaata

SEQ ID NO: 2051144 - DNA, 15 bp, Homo sapiens
caaagatctaaatat

SEQ ID NO: 2051145 - DNA, 15 bp, Homo sapiens
aaagatctaaatatt

SEQ ID NO: 2051146 - DNA, 15 bp, Homo sapiens
aagatctaaatattt

SEQ ID NO: 2051147 - DNA, 15 bp, Homo sapiens
agatctaaatatttc

SEQ ID NO: 2051148 - DNA, 15 bp, Homo sapiens
gatctaaatatttca

SEQ ID NO: 2051149 - DNA, 15 bp, Homo sapiens
atctaaatatttcac

SEQ ID NO: 2051150 - DNA, 15 bp, Homo sapiens
tctaaatatttcact

SEQ ID NO: 2051151 - DNA, 15 bp, Homo sapiens
ctaaatatttcactc

SEQ ID NO: 2051152 - DNA, 15 bp, Homo sapiens
taaatatttcactct

SEQ ID NO: 2051153 - DNA, 15 bp, Homo sapiens
aaatatttcactctt

SEQ ID NO: 2051154 - DNA, 15 bp, Homo sapiens
aatatttcactcttc

SEQ ID NO: 2051155 - DNA, 15 bp, Homo sapiens
atatttcactcttcc

SEQ ID NO: 2051156 - DNA, 15 bp, Homo sapiens
tatttcactcttcct

SEQ ID NO: 2051157 - DNA, 15 bp, Homo sapiens
atttcactcttcctc

SEQ ID NO: 2051158 - DNA, 15 bp, Homo sapiens
tttcactcttcctcc

SEQ ID NO: 2051159 - DNA, 15 bp, Homo sapiens
ttcactcttcctccc

SEQ ID NO: 2051160 - DNA, 15 bp, Homo sapiens
tcactcttcctccct

SEQ ID NO: 2051161 - DNA, 15 bp, Homo sapiens
cactcttcctccctg

SEQ ID NO: 2051162 - DNA, 15 bp, Homo sapiens
actcttcctccctgt

SEQ ID NO: 2051163 - DNA, 15 bp, Homo sapiens
ctcttcctccctgta

SEQ ID NO: 2051164 - DNA, 15 bp, Homo sapiens
tcttcctccctgtac

SEQ ID NO: 2051165 - DNA, 15 bp, Homo sapiens
cttcctccctgtacc

SEQ ID NO: 2051166 - DNA, 15 bp, Homo sapiens
ttcctccctgtacct

SEQ ID NO: 2051167 - DNA, 15 bp, Homo sapiens
tcctccctgtacctc

SEQ ID NO: 2051168 - DNA, 15 bp, Homo sapiens
cctccctgtacctcc

SEQ ID NO: 2051169 - DNA, 15 bp, Homo sapiens
ctccctgtacctccc

SEQ ID NO: 2051170 - DNA, 15 bp, Homo sapiens
tccctgtacctccct

SEQ ID NO: 2051171 - DNA, 15 bp, Homo sapiens
ccctgtacctccctc

SEQ ID NO: 2051172 - DNA, 15 bp, Homo sapiens
cctgtacctccctca

SEQ ID NO: 2051173 - DNA, 15 bp, Homo sapiens
ctgtacctccctcac

SEQ ID NO: 2051174 - DNA, 15 bp, Homo sapiens
tgtacctccctcact

SEQ ID NO: 2051175 - DNA, 15 bp, Homo sapiens
gtacctccctcactg

SEQ ID NO: 2051176 - DNA, 15 bp, Homo sapiens
tacctccctcactgc

SEQ ID NO: 2051177 - DNA, 15 bp, Homo sapiens
acctccctcactgcg

SEQ ID NO: 2051178 - DNA, 15 bp, Homo sapiens
cctccctcactgcgc

SEQ ID NO: 2051179 - DNA, 15 bp, Homo sapiens
ctccctcactgcgcc

SEQ ID NO: 2051180 - DNA, 15 bp, Homo sapiens
tccctcactgcgcct

SEQ ID NO: 2051181 - DNA, 15 bp, Homo sapiens
ccctcactgcgcctt

SEQ ID NO: 2051182 - DNA, 15 bp, Homo sapiens
cctcactgcgccttc

SEQ ID NO: 2051183 - DNA, 15 bp, Homo sapiens
ctcactgcgccttcc

SEQ ID NO: 2051184 - DNA, 15 bp, Homo sapiens
tcactgcgccttcca

SEQ ID NO: 2051185 - DNA, 15 bp, Homo sapiens
cactgcgccttccac

SEQ ID NO: 2051186 - DNA, 15 bp, Homo sapiens
actgcgccttccacc

SEQ ID NO: 2051187 - DNA, 15 bp, Homo sapiens
ctgcgccttccaccc

SEQ ID NO: 2051188 - DNA, 15 bp, Homo sapiens
tgcgccttccacccc

SEQ ID NO: 2051189 - DNA, 15 bp, Homo sapiens
gcgccttccaccccc

SEQ ID NO: 2051190 - DNA, 15 bp, Homo sapiens
cgccttccaccccca

SEQ ID NO: 2051191 - DNA, 15 bp, Homo sapiens
gccttccacccccag

SEQ ID NO: 2051192 - DNA, 15 bp, Homo sapiens
ccttccacccccagc

SEQ ID NO: 2051193 - DNA, 15 bp, Homo sapiens
cttccacccccagct

SEQ ID NO: 2051194 - DNA, 15 bp, Homo sapiens
ttccacccccagcta

SEQ ID NO: 2051195 - DNA, 15 bp, Homo sapiens
tccacccccagctat

SEQ ID NO: 2051196 - DNA, 15 bp, Homo sapiens
ccacccccagctata

SEQ ID NO: 2051197 - DNA, 15 bp, Homo sapiens
cacccccagctataa

SEQ ID NO: 2051198 - DNA, 15 bp, Homo sapiens
acccccagctataaa

SEQ ID NO: 2051199 - DNA, 15 bp, Homo sapiens
cccccagctataaat

SEQ ID NO: 2051200 - DNA, 15 bp, Homo sapiens
ccccagctataaatt

SEQ ID NO: 2051201 - DNA, 15 bp, Homo sapiens
cccagctataaattc

SEQ ID NO: 2051202 - DNA, 15 bp, Homo sapiens
ccagctataaattct

SEQ ID NO: 2051203 - DNA, 15 bp, Homo sapiens
cagctataaattcta

SEQ ID NO: 2051204 - DNA, 15 bp, Homo sapiens
agctataaattctag

SEQ ID NO: 2051205 - DNA, 15 bp, Homo sapiens
gctataaattctaga

SEQ ID NO: 2051206 - DNA, 15 bp, Homo sapiens
ctataaattctagat

SEQ ID NO: 2051207 - DNA, 15 bp, Homo sapiens
tataaattctagatt

SEQ ID NO: 2051208 - DNA, 15 bp, Homo sapiens
ataaattctagattc

SEQ ID NO: 2051209 - DNA, 15 bp, Homo sapiens
taaattctagattcc

SEQ ID NO: 2051210 - DNA, 15 bp, Homo sapiens
aaattctagattccc

SEQ ID NO: 2051211 - DNA, 15 bp, Homo sapiens
aattctagattcccc

SEQ ID NO: 2051212 - DNA, 15 bp, Homo sapiens
attctagattcccct

SEQ ID NO: 2051213 - DNA, 15 bp, Homo sapiens
ttctagattcccctc

SEQ ID NO: 2051214 - DNA, 15 bp, Homo sapiens
tctagattcccctcc

SEQ ID NO: 2051215 - DNA, 15 bp, Homo sapiens
ctagattcccctccc

SEQ ID NO: 2051216 - DNA, 15 bp, Homo sapiens
tagattcccctcccc

SEQ ID NO: 2051217 - DNA, 15 bp, Homo sapiens
agattcccctccccg

SEQ ID NO: 2051218 - DNA, 15 bp, Homo sapiens
gattcccctccccgc

SEQ ID NO: 2051219 - DNA, 15 bp, Homo sapiens
attcccctccccgcc

SEQ ID NO: 2051220 - DNA, 15 bp, Homo sapiens
ttcccctccccgccc

SEQ ID NO: 2051221 - DNA, 15 bp, Homo sapiens
tcccctccccgcccc

SEQ ID NO: 2051222 - DNA, 15 bp, Homo sapiens
cccctccccgccccc

SEQ ID NO: 2051223 - DNA, 15 bp, Homo sapiens
ccctccccgcccccc

SEQ ID NO: 2051224 - DNA, 15 bp, Homo sapiens
cctccccgccccccc

SEQ ID NO: 2051225 - DNA, 15 bp, Homo sapiens
ctccccgcccccccc

SEQ ID NO: 2051226 - DNA, 15 bp, Homo sapiens
tccccgccccccccc

SEQ ID NO: 2051227 - DNA, 15 bp, Homo sapiens
ccccgcccccccccc

SEQ ID NO: 2051228 - DNA, 15 bp, Homo sapiens
cccgcccccccccca

SEQ ID NO: 2051229 - DNA, 15 bp, Homo sapiens
ccgccccccccccac

SEQ ID NO: 2051230 - DNA, 15 bp, Homo sapiens
cgccccccccccacc

SEQ ID NO: 2051231 - DNA, 15 bp, Homo sapiens
gccccccccccaccc

SEQ ID NO: 2051232 - DNA, 15 bp, Homo sapiens
ccccccccccaccca

SEQ ID NO: 2051233 - DNA, 15 bp, Homo sapiens
cccccccccacccat

SEQ ID NO: 2051234 - DNA, 15 bp, Homo sapiens
ccccccccacccatc

SEQ ID NO: 2051235 - DNA, 15 bp, Homo sapiens
cccccccacccatcc

SEQ ID NO: 2051236 - DNA, 15 bp, Homo sapiens
ccccccacccatcct

SEQ ID NO: 2051237 - DNA, 15 bp, Homo sapiens
cccccacccatcctg

SEQ ID NO: 2051238 - DNA, 15 bp, Homo sapiens
ccccacccatcctgc

SEQ ID NO: 2051239 - DNA, 15 bp, Homo sapiens
cccacccatcctgcg

SEQ ID NO: 2051240 - DNA, 15 bp, Homo sapiens
ccacccatcctgcgg

SEQ ID NO: 2051241 - DNA, 15 bp, Homo sapiens
cacccatcctgcgga

SEQ ID NO: 2051242 - DNA, 15 bp, Homo sapiens
acccatcctgcggat

SEQ ID NO: 2051243 - DNA, 15 bp, Homo sapiens
cccatcctgcggata

SEQ ID NO: 2051244 - DNA, 15 bp, Homo sapiens
ccatcctgcggataa

SEQ ID NO: 2051245 - DNA, 15 bp, Homo sapiens
catcctgcggataat

SEQ ID NO: 2051246 - DNA, 15 bp, Homo sapiens
atcctgcggataatt

SEQ ID NO: 2051247 - DNA, 15 bp, Homo sapiens
tcctgcggataattg

SEQ ID NO: 2051248 - DNA, 15 bp, Homo sapiens
cctgcggataattga

SEQ ID NO: 2051249 - DNA, 15 bp, Homo sapiens
ctgcggataattgag

SEQ ID NO: 2051250 - DNA, 15 bp, Homo sapiens
tgcggataattgagt

SEQ ID NO: 2051251 - DNA, 15 bp, Homo sapiens
gcggataattgagtg

SEQ ID NO: 2051252 - DNA, 15 bp, Homo sapiens
cggataattgagtgg

SEQ ID NO: 2051253 - DNA, 15 bp, Homo sapiens
ggataattgagtggc

SEQ ID NO: 2051254 - DNA, 15 bp, Homo sapiens
gataattgagtggct

SEQ ID NO: 2051255 - DNA, 15 bp, Homo sapiens
ataattgagtggctc

SEQ ID NO: 2051256 - DNA, 15 bp, Homo sapiens
taattgagtggctca

SEQ ID NO: 2051257 - DNA, 15 bp, Homo sapiens
aattgagtggctcag

SEQ ID NO: 2051258 - DNA, 15 bp, Homo sapiens
attgagtggctcaga

SEQ ID NO: 2051259 - DNA, 15 bp, Homo sapiens
ttgagtggctcagag

SEQ ID NO: 2051260 - DNA, 15 bp, Homo sapiens
tgagtggctcagagg

SEQ ID NO: 2051261 - DNA, 15 bp, Homo sapiens
gagtggctcagaggc

SEQ ID NO: 2051262 - DNA, 15 bp, Homo sapiens
agtggctcagaggca

SEQ ID NO: 2051263 - DNA, 15 bp, Homo sapiens
gtggctcagaggcac

SEQ ID NO: 2051264 - DNA, 15 bp, Homo sapiens
tggctcagaggcact

SEQ ID NO: 2051265 - DNA, 15 bp, Homo sapiens
ggctcagaggcacta

SEQ ID NO: 2051266 - DNA, 15 bp, Homo sapiens
gctcagaggcactaa

SEQ ID NO: 2051267 - DNA, 15 bp, Homo sapiens
ctcagaggcactaat

SEQ ID NO: 2051268 - DNA, 15 bp, Homo sapiens
tcagaggcactaatc

SEQ ID NO: 2051269 - DNA, 15 bp, Homo sapiens
cagaggcactaatct

SEQ ID NO: 2051270 - DNA, 15 bp, Homo sapiens
agaggcactaatctg

SEQ ID NO: 2051271 - DNA, 15 bp, Homo sapiens
gaggcactaatctgc

SEQ ID NO: 2051272 - DNA, 15 bp, Homo sapiens
aggcactaatctgcc

SEQ ID NO: 2051273 - DNA, 15 bp, Homo sapiens
ggcactaatctgccc

SEQ ID NO: 2051274 - DNA, 15 bp, Homo sapiens
gcactaatctgccct

SEQ ID NO: 2051275 - DNA, 15 bp, Homo sapiens
cactaatctgccctg

SEQ ID NO: 2051276 - DNA, 15 bp, Homo sapiens
actaatctgccctgg

SEQ ID NO: 2051277 - DNA, 15 bp, Homo sapiens
ctaatctgccctggg

SEQ ID NO: 2051278 - DNA, 15 bp, Homo sapiens
taatctgccctgggg

SEQ ID NO: 2051279 - DNA, 15 bp, Homo sapiens
aatctgccctggggt

SEQ ID NO: 2051280 - DNA, 15 bp, Homo sapiens
atctgccctggggtg

SEQ ID NO: 2051281 - DNA, 15 bp, Homo sapiens
tctgccctggggtga

SEQ ID NO: 2051282 - DNA, 15 bp, Homo sapiens
ctgccctggggtgag

SEQ ID NO: 2051283 - DNA, 15 bp, Homo sapiens
tgccctggggtgagg

SEQ ID NO: 2051284 - DNA, 15 bp, Homo sapiens
gccctggggtgaggt

SEQ ID NO: 2051285 - DNA, 15 bp, Homo sapiens
ccctggggtgaggtg

SEQ ID NO: 2051286 - DNA, 15 bp, Homo sapiens
cctggggtgaggtgg

SEQ ID NO: 2051287 - DNA, 15 bp, Homo sapiens
ctggggtgaggtggg

SEQ ID NO: 2051288 - DNA, 15 bp, Homo sapiens
tggggtgaggtgggg

SEQ ID NO: 2051289 - DNA, 15 bp, Homo sapiens
ggggtgaggtggggc

SEQ ID NO: 2051290 - DNA, 15 bp, Homo sapiens
gggtgaggtggggct

SEQ ID NO: 2051291 - DNA, 15 bp, Homo sapiens
ggtgaggtggggctg

SEQ ID NO: 2051292 - DNA, 15 bp, Homo sapiens
gtgaggtggggctgg

SEQ ID NO: 2051293 - DNA, 15 bp, Homo sapiens
tgaggtggggctggc

SEQ ID NO: 2051294 - DNA, 15 bp, Homo sapiens
gaggtggggctggca

SEQ ID NO: 2051295 - DNA, 15 bp, Homo sapiens
aggtggggctggcag

SEQ ID NO: 2051296 - DNA, 15 bp, Homo sapiens
ggtggggctggcagt

SEQ ID NO: 2051297 - DNA, 15 bp, Homo sapiens
gtggggctggcagtg

SEQ ID NO: 2051298 - DNA, 15 bp, Homo sapiens
tggggctggcagtgg

SEQ ID NO: 2051299 - DNA, 15 bp, Homo sapiens
ggggctggcagtgga

SEQ ID NO: 2051300 - DNA, 15 bp, Homo sapiens
gggctggcagtggag

SEQ ID NO: 2051301 - DNA, 15 bp, Homo sapiens
ggctggcagtggagg

SEQ ID NO: 2051302 - DNA, 15 bp, Homo sapiens
gctggcagtggaggt

SEQ ID NO: 2051303 - DNA, 15 bp, Homo sapiens
ctggcagtggaggta

SEQ ID NO: 2051304 - DNA, 15 bp, Homo sapiens
tggcagtggaggtaa

SEQ ID NO: 2051305 - DNA, 15 bp, Homo sapiens
ggcagtggaggtaag

SEQ ID NO: 2051306 - DNA, 15 bp, Homo sapiens
gcagtggaggtaagg

SEQ ID NO: 2051307 - DNA, 15 bp, Homo sapiens
cagtggaggtaaggc

SEQ ID NO: 2051308 - DNA, 15 bp, Homo sapiens
agtggaggtaaggcc

SEQ ID NO: 2051309 - DNA, 15 bp, Homo sapiens
gtggaggtaaggcct

SEQ ID NO: 2051310 - DNA, 15 bp, Homo sapiens
tggaggtaaggcctc

SEQ ID NO: 2051311 - DNA, 15 bp, Homo sapiens
ggaggtaaggcctcc

SEQ ID NO: 2051312 - DNA, 15 bp, Homo sapiens
gaggtaaggcctccc

SEQ ID NO: 2051313 - DNA, 15 bp, Homo sapiens
aggtaaggcctccca

SEQ ID NO: 2051314 - DNA, 15 bp, Homo sapiens
ggtaaggcctcccac

SEQ ID NO: 2051315 - DNA, 15 bp, Homo sapiens
gtaaggcctcccaca

SEQ ID NO: 2051316 - DNA, 15 bp, Homo sapiens
taaggcctcccacag

SEQ ID NO: 2051317 - DNA, 15 bp, Homo sapiens
aaggcctcccacagg

SEQ ID NO: 2051318 - DNA, 15 bp, Homo sapiens
aggcctcccacaggc

SEQ ID NO: 2051319 - DNA, 15 bp, Homo sapiens
ggcctcccacaggct

SEQ ID NO: 2051320 - DNA, 15 bp, Homo sapiens
gcctcccacaggctc

SEQ ID NO: 2051321 - DNA, 15 bp, Homo sapiens
cctcccacaggctcc

SEQ ID NO: 2051322 - DNA, 15 bp, Homo sapiens
ctcccacaggctccc

SEQ ID NO: 2051323 - DNA, 15 bp, Homo sapiens
tcccacaggctccct

SEQ ID NO: 2051324 - DNA, 15 bp, Homo sapiens
cccacaggctccctg

SEQ ID NO: 2051325 - DNA, 15 bp, Homo sapiens
ccacaggctccctgg

SEQ ID NO: 2051326 - DNA, 15 bp, Homo sapiens
cacaggctccctggt

SEQ ID NO: 2051327 - DNA, 15 bp, Homo sapiens
acaggctccctggtt

SEQ ID NO: 2051328 - DNA, 15 bp, Homo sapiens
caggctccctggttc

SEQ ID NO: 2051329 - DNA, 15 bp, Homo sapiens
aggctccctggttcc

SEQ ID NO: 2051330 - DNA, 15 bp, Homo sapiens
ggctccctggttccg

SEQ ID NO: 2051331 - DNA, 15 bp, Homo sapiens
gctccctggttccgc

SEQ ID NO: 2051332 - DNA, 15 bp, Homo sapiens
ctccctggttccgca

SEQ ID NO: 2051333 - DNA, 15 bp, Homo sapiens
tccctggttccgcaa

SEQ ID NO: 2051334 - DNA, 15 bp, Homo sapiens
ccctggttccgcaaa

SEQ ID NO: 2051335 - DNA, 15 bp, Homo sapiens
cctggttccgcaaaa

SEQ ID NO: 2051336 - DNA, 15 bp, Homo sapiens
ctggttccgcaaaat

SEQ ID NO: 2051337 - DNA, 15 bp, Homo sapiens
tggttccgcaaaatg

SEQ ID NO: 2051338 - DNA, 15 bp, Homo sapiens
ggttccgcaaaatgg

SEQ ID NO: 2051339 - DNA, 15 bp, Homo sapiens
gttccgcaaaatggg

SEQ ID NO: 2051340 - DNA, 15 bp, Homo sapiens
ttccgcaaaatggga

SEQ ID NO: 2051341 - DNA, 15 bp, Homo sapiens
tccgcaaaatgggag

SEQ ID NO: 2051342 - DNA, 15 bp, Homo sapiens
ccgcaaaatgggagg

SEQ ID NO: 2051343 - DNA, 15 bp, Homo sapiens
cgcaaaatgggagga

SEQ ID NO: 2051344 - DNA, 15 bp, Homo sapiens
gcaaaatgggaggac

SEQ ID NO: 2051345 - DNA, 15 bp, Homo sapiens
caaaatgggaggaca

SEQ ID NO: 2051346 - DNA, 15 bp, Homo sapiens
aaaatgggaggacag

SEQ ID NO: 2051347 - DNA, 15 bp, Homo sapiens
aaatgggaggacaga

SEQ ID NO: 2051348 - DNA, 15 bp, Homo sapiens
aatgggaggacagaa

SEQ ID NO: 2051349 - DNA, 15 bp, Homo sapiens
atgggaggacagaac

SEQ ID NO: 2051350 - DNA, 15 bp, Homo sapiens
tgggaggacagaact

SEQ ID NO: 2051351 - DNA, 15 bp, Homo sapiens
gggaggacagaactc

SEQ ID NO: 2051352 - DNA, 15 bp, Homo sapiens
ggaggacagaactcc

SEQ ID NO: 2051353 - DNA, 15 bp, Homo sapiens
gaggacagaactcct

SEQ ID NO: 2051354 - DNA, 15 bp, Homo sapiens
aggacagaactccta

SEQ ID NO: 2051355 - DNA, 15 bp, Homo sapiens
ggacagaactcctac

SEQ ID NO: 2051356 - DNA, 15 bp, Homo sapiens
gacagaactcctaca

SEQ ID NO: 2051357 - DNA, 15 bp, Homo sapiens
acagaactcctacaa

SEQ ID NO: 2051358 - DNA, 15 bp, Homo sapiens
cagaactcctacaac

SEQ ID NO: 2051359 - DNA, 15 bp, Homo sapiens
agaactcctacaact

SEQ ID NO: 2051360 - DNA, 15 bp, Homo sapiens
gaactcctacaactg

SEQ ID NO: 2051361 - DNA, 15 bp, Homo sapiens
aactcctacaactgg

SEQ ID NO: 2051362 - DNA, 15 bp, Homo sapiens
actcctacaactggc

SEQ ID NO: 2051363 - DNA, 15 bp, Homo sapiens
ctcctacaactggca

SEQ ID NO: 2051364 - DNA, 15 bp, Homo sapiens
tcctacaactggcag

SEQ ID NO: 2051365 - DNA, 15 bp, Homo sapiens
cctacaactggcagg

SEQ ID NO: 2051366 - DNA, 15 bp, Homo sapiens
ctacaactggcagga

SEQ ID NO: 2051367 - DNA, 15 bp, Homo sapiens
tacaactggcaggag

SEQ ID NO: 2051368 - DNA, 15 bp, Homo sapiens
acaactggcaggagg

SEQ ID NO: 2051369 - DNA, 15 bp, Homo sapiens
caactggcaggaggt

SEQ ID NO: 2051370 - DNA, 15 bp, Homo sapiens
aactggcaggaggtg

SEQ ID NO: 2051371 - DNA, 15 bp, Homo sapiens
actggcaggaggtga

SEQ ID NO: 2051372 - DNA, 15 bp, Homo sapiens
ctggcaggaggtgaa

SEQ ID NO: 2051373 - DNA, 15 bp, Homo sapiens
tggcaggaggtgaag

SEQ ID NO: 2051374 - DNA, 15 bp, Homo sapiens
ggcaggaggtgaaga

SEQ ID NO: 2051375 - DNA, 15 bp, Homo sapiens
gcaggaggtgaagag

SEQ ID NO: 2051376 - DNA, 15 bp, Homo sapiens
caggaggtgaagagg

SEQ ID NO: 2051377 - DNA, 15 bp, Homo sapiens
aggaggtgaagagga

SEQ ID NO: 2051378 - DNA, 15 bp, Homo sapiens
ggaggtgaagaggac

SEQ ID NO: 2051379 - DNA, 15 bp, Homo sapiens
gaggtgaagaggacg

SEQ ID NO: 2051380 - DNA, 15 bp, Homo sapiens
aggtgaagaggacgc

SEQ ID NO: 2051381 - DNA, 15 bp, Homo sapiens
ggtgaagaggacgct

SEQ ID NO: 2051382 - DNA, 15 bp, Homo sapiens
gtgaagaggacgctg

SEQ ID NO: 2051383 - DNA, 15 bp, Homo sapiens
tgaagaggacgctgg

SEQ ID NO: 2051384 - DNA, 15 bp, Homo sapiens
gaagaggacgctggg

SEQ ID NO: 2051385 - DNA, 15 bp, Homo sapiens
aagaggacgctggga

SEQ ID NO: 2051386 - DNA, 15 bp, Homo sapiens
agaggacgctgggac

SEQ ID NO: 2051387 - DNA, 15 bp, Homo sapiens
gaggacgctgggacc

SEQ ID NO: 2051388 - DNA, 15 bp, Homo sapiens
aggacgctgggaccc

SEQ ID NO: 2051389 - DNA, 15 bp, Homo sapiens
ggacgctgggaccca

SEQ ID NO: 2051390 - DNA, 15 bp, Homo sapiens
gacgctgggacccac

SEQ ID NO: 2051391 - DNA, 15 bp, Homo sapiens
acgctgggacccaca

SEQ ID NO: 2051392 - DNA, 15 bp, Homo sapiens
cgctgggacccacag

SEQ ID NO: 2051393 - DNA, 15 bp, Homo sapiens
gctgggacccacagg

SEQ ID NO: 2051394 - DNA, 15 bp, Homo sapiens
ctgggacccacagga

SEQ ID NO: 2051395 - DNA, 15 bp, Homo sapiens
tgggacccacaggac

SEQ ID NO: 2051396 - DNA, 15 bp, Homo sapiens
gggacccacaggacc

SEQ ID NO: 2051397 - DNA, 15 bp, Homo sapiens
ggacccacaggacct

SEQ ID NO: 2051398 - DNA, 15 bp, Homo sapiens
gacccacaggaccta

SEQ ID NO: 2051399 - DNA, 15 bp, Homo sapiens
acccacaggacctag

SEQ ID NO: 2051400 - DNA, 15 bp, Homo sapiens
cccacaggacctagt

SEQ ID NO: 2051401 - DNA, 15 bp, Homo sapiens
ccacaggacctagtc

SEQ ID NO: 2051402 - DNA, 15 bp, Homo sapiens
cacaggacctagtct

SEQ ID NO: 2051403 - DNA, 15 bp, Homo sapiens
acaggacctagtctg

SEQ ID NO: 2051404 - DNA, 15 bp, Homo sapiens
caggacctagtctgc

SEQ ID NO: 2051405 - DNA, 15 bp, Homo sapiens
aggacctagtctgcc

SEQ ID NO: 2051406 - DNA, 15 bp, Homo sapiens
ggacctagtctgcca

SEQ ID NO: 2051407 - DNA, 15 bp, Homo sapiens
gacctagtctgccag

SEQ ID NO: 2051408 - DNA, 15 bp, Homo sapiens
acctagtctgccagg

SEQ ID NO: 2051409 - DNA, 15 bp, Homo sapiens
cctagtctgccaggg

SEQ ID NO: 2051410 - DNA, 15 bp, Homo sapiens
ctagtctgccagggg

SEQ ID NO: 2051411 - DNA, 15 bp, Homo sapiens
tagtctgccagggga

SEQ ID NO: 2051412 - DNA, 15 bp, Homo sapiens
agtctgccaggggaa

SEQ ID NO: 2051413 - DNA, 15 bp, Homo sapiens
gtctgccaggggaaa

SEQ ID NO: 2051414 - DNA, 15 bp, Homo sapiens
tctgccaggggaaag

SEQ ID NO: 2051415 - DNA, 15 bp, Homo sapiens
ctgccaggggaaagg

SEQ ID NO: 2051416 - DNA, 15 bp, Homo sapiens
tgccaggggaaaggg

SEQ ID NO: 2051417 - DNA, 15 bp, Homo sapiens
gccaggggaaaggga

SEQ ID NO: 2051418 - DNA, 15 bp, Homo sapiens
ccaggggaaagggaa

SEQ ID NO: 2051419 - DNA, 15 bp, Homo sapiens
caggggaaagggaaa

SEQ ID NO: 2051420 - DNA, 15 bp, Homo sapiens
aggggaaagggaaac

SEQ ID NO: 2051421 - DNA, 15 bp, Homo sapiens
ggggaaagggaaaca

SEQ ID NO: 2051422 - DNA, 15 bp, Homo sapiens
gggaaagggaaacag

SEQ ID NO: 2051423 - DNA, 15 bp, Homo sapiens
ggaaagggaaacagg

SEQ ID NO: 2051424 - DNA, 15 bp, Homo sapiens
aagggaaacaggctc

SEQ ID NO: 2051425 - DNA, 15 bp, Homo sapiens
agggaaacaggctcc

SEQ ID NO: 2051426 - DNA, 15 bp, Homo sapiens
gggaaacaggctccc

SEQ ID NO: 2051427 - DNA, 15 bp, Homo sapiens
ggaaacaggctcccc

SEQ ID NO: 2051428 - DNA, 15 bp, Homo sapiens
gaaacaggctcccct

SEQ ID NO: 2051429 - DNA, 15 bp, Homo sapiens
aaacaggctcccctg

SEQ ID NO: 2051430 - DNA, 15 bp, Homo sapiens
aacaggctcccctga

SEQ ID NO: 2051431 - DNA, 15 bp, Homo sapiens
acaggctcccctgac

SEQ ID NO: 2051432 - DNA, 15 bp, Homo sapiens
caggctcccctgact

SEQ ID NO: 2051433 - DNA, 15 bp, Homo sapiens
aggctcccctgacta

SEQ ID NO: 2051434 - DNA, 15 bp, Homo sapiens
ggctcccctgactaa

SEQ ID NO: 2051435 - DNA, 15 bp, Homo sapiens
gctcccctgactaag

SEQ ID NO: 2051436 - DNA, 15 bp, Homo sapiens
ctcccctgactaagg

SEQ ID NO: 2051437 - DNA, 15 bp, Homo sapiens
tcccctgactaagga

SEQ ID NO: 2051438 - DNA, 15 bp, Homo sapiens
cccctgactaaggac

SEQ ID NO: 2051439 - DNA, 15 bp, Homo sapiens
ccctgactaaggaca

SEQ ID NO: 2051440 - DNA, 15 bp, Homo sapiens
cctgactaaggacac

SEQ ID NO: 2051441 - DNA, 15 bp, Homo sapiens
ctgactaaggacaca

SEQ ID NO: 2051442 - DNA, 15 bp, Homo sapiens
tgactaaggacacag

SEQ ID NO: 2051443 - DNA, 15 bp, Homo sapiens
gactaaggacacagc

SEQ ID NO: 2051444 - DNA, 15 bp, Homo sapiens
actaaggacacagcc

SEQ ID NO: 2051445 - DNA, 15 bp, Homo sapiens
ctaaggacacagcct

SEQ ID NO: 2051446 - DNA, 15 bp, Homo sapiens
taaggacacagcctc

SEQ ID NO: 2051447 - DNA, 15 bp, Homo sapiens
aaggacacagcctca

SEQ ID NO: 2051448 - DNA, 15 bp, Homo sapiens
aggacacagcctcag

SEQ ID NO: 2051449 - DNA, 15 bp, Homo sapiens
ggacacagcctcaga

SEQ ID NO: 2051450 - DNA, 15 bp, Homo sapiens
gacacagcctcagac

SEQ ID NO: 2051451 - DNA, 15 bp, Homo sapiens
acacagcctcagacc

SEQ ID NO: 2051452 - DNA, 15 bp, Homo sapiens
cacagcctcagacca

SEQ ID NO: 2051453 - DNA, 15 bp, Homo sapiens
acagcctcagaccag

SEQ ID NO: 2051454 - DNA, 15 bp, Homo sapiens
cagcctcagaccagg

SEQ ID NO: 2051455 - DNA, 15 bp, Homo sapiens
agcctcagaccaggc

SEQ ID NO: 2051456 - DNA, 15 bp, Homo sapiens
gcctcagaccaggct

SEQ ID NO: 2051457 - DNA, 15 bp, Homo sapiens
cctcagaccaggctt

SEQ ID NO: 2051458 - DNA, 15 bp, Homo sapiens
ctcagaccaggcttg

SEQ ID NO: 2051459 - DNA, 15 bp, Homo sapiens
tcagaccaggcttgg

SEQ ID NO: 2051460 - DNA, 15 bp, Homo sapiens
cagaccaggcttggc

SEQ ID NO: 2051461 - DNA, 15 bp, Homo sapiens
agaccaggcttggct

SEQ ID NO: 2051462 - DNA, 15 bp, Homo sapiens
gaccaggcttggctg

SEQ ID NO: 2051463 - DNA, 15 bp, Homo sapiens
accaggcttggctgg

SEQ ID NO: 2051464 - DNA, 15 bp, Homo sapiens
ccaggcttggctggg

SEQ ID NO: 2051465 - DNA, 15 bp, Homo sapiens
caggcttggctgggt

SEQ ID NO: 2051466 - DNA, 15 bp, Homo sapiens
aggcttggctgggtg

SEQ ID NO: 2051467 - DNA, 15 bp, Homo sapiens
ggcttggctgggtgg

SEQ ID NO: 2051468 - DNA, 15 bp, Homo sapiens
gcttggctgggtgga

SEQ ID NO: 2051469 - DNA, 15 bp, Homo sapiens
cttggctgggtggac

SEQ ID NO: 2051470 - DNA, 15 bp, Homo sapiens
ttggctgggtggaca

SEQ ID NO: 2051471 - DNA, 15 bp, Homo sapiens
tggctgggtggacag

SEQ ID NO: 2051472 - DNA, 15 bp, Homo sapiens
ggctgggtggacagg

SEQ ID NO: 2051473 - DNA, 15 bp, Homo sapiens
gctgggtggacagga

SEQ ID NO: 2051474 - DNA, 15 bp, Homo sapiens
ctgggtggacaggaa

SEQ ID NO: 2051475 - DNA, 15 bp, Homo sapiens
tgggtggacaggaat

SEQ ID NO: 2051476 - DNA, 15 bp, Homo sapiens
gggtggacaggaatg

SEQ ID NO: 2051477 - DNA, 15 bp, Homo sapiens
ggtggacaggaatgt

SEQ ID NO: 2051478 - DNA, 15 bp, Homo sapiens
gtggacaggaatgtg

SEQ ID NO: 2051479 - DNA, 15 bp, Homo sapiens
tggacaggaatgtgg

SEQ ID NO: 2051480 - DNA, 15 bp, Homo sapiens
ggacaggaatgtggt

SEQ ID NO: 2051481 - DNA, 15 bp, Homo sapiens
gacaggaatgtggtg

SEQ ID NO: 2051482 - DNA, 15 bp, Homo sapiens
acaggaatgtggtgc

SEQ ID NO: 2051483 - DNA, 15 bp, Homo sapiens
caggaatgtggtgcc

SEQ ID NO: 2051484 - DNA, 15 bp, Homo sapiens
aggaatgtggtgccc

SEQ ID NO: 2051485 - DNA, 15 bp, Homo sapiens
ggaatgtggtgccca

SEQ ID NO: 2051486 - DNA, 15 bp, Homo sapiens
gaatgtggtgcccaa

SEQ ID NO: 2051487 - DNA, 15 bp, Homo sapiens
aatgtggtgcccaag

SEQ ID NO: 2051488 - DNA, 15 bp, Homo sapiens
atgtggtgcccaaga

SEQ ID NO: 2051489 - DNA, 15 bp, Homo sapiens
tgtggtgcccaagag

SEQ ID NO: 2051490 - DNA, 15 bp, Homo sapiens
gtggtgcccaagagc

SEQ ID NO: 2051491 - DNA, 15 bp, Homo sapiens
tggtgcccaagagca

SEQ ID NO: 2051492 - DNA, 15 bp, Homo sapiens
ggtgcccaagagcag

SEQ ID NO: 2051493 - DNA, 15 bp, Homo sapiens
gtgcccaagagcagc

SEQ ID NO: 2051494 - DNA, 15 bp, Homo sapiens
tgcccaagagcagca

SEQ ID NO: 2051495 - DNA, 15 bp, Homo sapiens
gcccaagagcagcag

SEQ ID NO: 2051496 - DNA, 15 bp, Homo sapiens
cccaagagcagcaga

SEQ ID NO: 2051497 - DNA, 15 bp, Homo sapiens
ccaagagcagcagag

SEQ ID NO: 2051498 - DNA, 15 bp, Homo sapiens
caagagcagcagaga

SEQ ID NO: 2051499 - DNA, 15 bp, Homo sapiens
aagagcagcagagat

SEQ ID NO: 2051500 - DNA, 15 bp, Homo sapiens
agagcagcagagatc

SEQ ID NO: 2051501 - DNA, 15 bp, Homo sapiens
gagcagcagagatcc

SEQ ID NO: 2051502 - DNA, 15 bp, Homo sapiens
agcagcagagatcca

SEQ ID NO: 2051503 - DNA, 15 bp, Homo sapiens
gcagcagagatccag

SEQ ID NO: 2051504 - DNA, 15 bp, Homo sapiens
cagcagagatccagg

SEQ ID NO: 2051505 - DNA, 15 bp, Homo sapiens
agcagagatccaggg

SEQ ID NO: 2051506 - DNA, 15 bp, Homo sapiens
gcagagatccagggt

SEQ ID NO: 2051507 - DNA, 15 bp, Homo sapiens
cagagatccagggta

SEQ ID NO: 2051508 - DNA, 15 bp, Homo sapiens
agagatccagggtag

SEQ ID NO: 2051509 - DNA, 15 bp, Homo sapiens
gagatccagggtagg

SEQ ID NO: 2051510 - DNA, 15 bp, Homo sapiens
agatccagggtagga

SEQ ID NO: 2051511 - DNA, 15 bp, Homo sapiens
gatccagggtaggaa

SEQ ID NO: 2051512 - DNA, 15 bp, Homo sapiens
atccagggtaggaag

SEQ ID NO: 2051513 - DNA, 15 bp, Homo sapiens
tccagggtaggaagt

SEQ ID NO: 2051514 - DNA, 15 bp, Homo sapiens
ccagggtaggaagtt

SEQ ID NO: 2051515 - DNA, 15 bp, Homo sapiens
cagggtaggaagttg

SEQ ID NO: 2051516 - DNA, 15 bp, Homo sapiens
agggtaggaagttgc

SEQ ID NO: 2051517 - DNA, 15 bp, Homo sapiens
gggtaggaagttgca

SEQ ID NO: 2051518 - DNA, 15 bp, Homo sapiens
ggtaggaagttgcag

SEQ ID NO: 2051519 - DNA, 15 bp, Homo sapiens
gtaggaagttgcagc

SEQ ID NO: 2051520 - DNA, 15 bp, Homo sapiens
taggaagttgcagcc

SEQ ID NO: 2051521 - DNA, 15 bp, Homo sapiens
aggaagttgcagcca

SEQ ID NO: 2051522 - DNA, 15 bp, Homo sapiens
ggaagttgcagccat

SEQ ID NO: 2051523 - DNA, 15 bp, Homo sapiens
gaagttgcagccatc

SEQ ID NO: 2051524 - DNA, 15 bp, Homo sapiens
aagttgcagccatct

SEQ ID NO: 2051525 - DNA, 15 bp, Homo sapiens
agttgcagccatctg

SEQ ID NO: 2051526 - DNA, 15 bp, Homo sapiens
gttgcagccatctga

SEQ ID NO: 2051527 - DNA, 15 bp, Homo sapiens
ttgcagccatctgaa

SEQ ID NO: 2051528 - DNA, 15 bp, Homo sapiens
tgcagccatctgaaa

SEQ ID NO: 2051529 - DNA, 15 bp, Homo sapiens
gcagccatctgaaaa

SEQ ID NO: 2051530 - DNA, 15 bp, Homo sapiens
cagccatctgaaaac

SEQ ID NO: 2051531 - DNA, 15 bp, Homo sapiens
agccatctgaaaacc

SEQ ID NO: 2051532 - DNA, 15 bp, Homo sapiens
gccatctgaaaaccc

SEQ ID NO: 2051533 - DNA, 15 bp, Homo sapiens
ccatctgaaaacccc

SEQ ID NO: 2051534 - DNA, 15 bp, Homo sapiens
catctgaaaacccca

SEQ ID NO: 2051535 - DNA, 15 bp, Homo sapiens
atctgaaaaccccat

SEQ ID NO: 2051536 - DNA, 15 bp, Homo sapiens
tctgaaaaccccata

SEQ ID NO: 2051537 - DNA, 15 bp, Homo sapiens
ctgaaaaccccatag

SEQ ID NO: 2051538 - DNA, 15 bp, Homo sapiens
tgaaaaccccataga

SEQ ID NO: 2051539 - DNA, 15 bp, Homo sapiens
gaaaaccccatagag

SEQ ID NO: 2051540 - DNA, 15 bp, Homo sapiens
aaaaccccatagaga

SEQ ID NO: 2051541 - DNA, 15 bp, Homo sapiens
aaaccccatagagat

SEQ ID NO: 2051542 - DNA, 15 bp, Homo sapiens
aaccccatagagata

SEQ ID NO: 2051543 - DNA, 15 bp, Homo sapiens
accccatagagatat

SEQ ID NO: 2051544 - DNA, 15 bp, Homo sapiens
ccccatagagatata

SEQ ID NO: 2051545 - DNA, 15 bp, Homo sapiens
cccatagagatatat

SEQ ID NO: 2051546 - DNA, 15 bp, Homo sapiens
ccatagagatatatt

SEQ ID NO: 2051547 - DNA, 15 bp, Homo sapiens
catagagatatattg

SEQ ID NO: 2051548 - DNA, 15 bp, Homo sapiens
atagagatatattgc

SEQ ID NO: 2051549 - DNA, 15 bp, Homo sapiens
tagagatatattgcc

SEQ ID NO: 2051550 - DNA, 15 bp, Homo sapiens
agagatatattgccc

SEQ ID NO: 2051551 - DNA, 15 bp, Homo sapiens
gagatatattgccca

SEQ ID NO: 2051552 - DNA, 15 bp, Homo sapiens
agatatattgcccac

SEQ ID NO: 2051553 - DNA, 15 bp, Homo sapiens
gatatattgcccaca

SEQ ID NO: 2051554 - DNA, 15 bp, Homo sapiens
atatattgcccacat

SEQ ID NO: 2051555 - DNA, 15 bp, Homo sapiens
tatattgcccacatg

SEQ ID NO: 2051556 - DNA, 15 bp, Homo sapiens
atattgcccacatga

SEQ ID NO: 2051557 - DNA, 15 bp, Homo sapiens
tattgcccacatgac

SEQ ID NO: 2051558 - DNA, 15 bp, Homo sapiens
attgcccacatgact

SEQ ID NO: 2051559 - DNA, 15 bp, Homo sapiens
ttgcccacatgacta

SEQ ID NO: 2051560 - DNA, 15 bp, Homo sapiens
tgcccacatgactat

SEQ ID NO: 2051561 - DNA, 15 bp, Homo sapiens
gcccacatgactatt

SEQ ID NO: 2051562 - DNA, 15 bp, Homo sapiens
cccacatgactattt

SEQ ID NO: 2051563 - DNA, 15 bp, Homo sapiens
ccacatgactatttc

SEQ ID NO: 2051564 - DNA, 15 bp, Homo sapiens
cacatgactatttct

SEQ ID NO: 2051565 - DNA, 15 bp, Homo sapiens
acatgactatttcta

SEQ ID NO: 2051566 - DNA, 15 bp, Homo sapiens
catgactatttctag

SEQ ID NO: 2051567 - DNA, 15 bp, Homo sapiens
atgactatttctaga

SEQ ID NO: 2051568 - DNA, 15 bp, Homo sapiens
tgactatttctagaa

SEQ ID NO: 2051569 - DNA, 15 bp, Homo sapiens
gactatttctagaag

SEQ ID NO: 2051570 - DNA, 15 bp, Homo sapiens
actatttctagaagt

SEQ ID NO: 2051571 - DNA, 15 bp, Homo sapiens
ctatttctagaagtg

SEQ ID NO: 2051572 - DNA, 15 bp, Homo sapiens
tatttctagaagtgg

SEQ ID NO: 2051573 - DNA, 15 bp, Homo sapiens
atttctagaagtggt

SEQ ID NO: 2051574 - DNA, 15 bp, Homo sapiens
tttctagaagtggtg

SEQ ID NO: 2051575 - DNA, 15 bp, Homo sapiens
ttctagaagtggtgg

SEQ ID NO: 2051576 - DNA, 15 bp, Homo sapiens
tctagaagtggtggt

SEQ ID NO: 2051577 - DNA, 15 bp, Homo sapiens
ctagaagtggtggtt

SEQ ID NO: 2051578 - DNA, 15 bp, Homo sapiens
tagaagtggtggttg

SEQ ID NO: 2051579 - DNA, 15 bp, Homo sapiens
agaagtggtggttga

SEQ ID NO: 2051580 - DNA, 15 bp, Homo sapiens
gaagtggtggttgat

SEQ ID NO: 2051581 - DNA, 15 bp, Homo sapiens
aagtggtggttgatc

SEQ ID NO: 2051582 - DNA, 15 bp, Homo sapiens
agtggtggttgatcc

SEQ ID NO: 2051583 - DNA, 15 bp, Homo sapiens
gtggtggttgatccc

SEQ ID NO: 2051584 - DNA, 15 bp, Homo sapiens
tggtggttgatccct

SEQ ID NO: 2051585 - DNA, 15 bp, Homo sapiens
ggtggttgatccctt

SEQ ID NO: 2051586 - DNA, 15 bp, Homo sapiens
gtggttgatcccttc

SEQ ID NO: 2051587 - DNA, 15 bp, Homo sapiens
tggttgatcccttca

SEQ ID NO: 2051588 - DNA, 15 bp, Homo sapiens
ggttgatcccttcac

SEQ ID NO: 2051589 - DNA, 15 bp, Homo sapiens
gttgatcccttcaca

SEQ ID NO: 2051590 - DNA, 15 bp, Homo sapiens
ttgatcccttcacac

SEQ ID NO: 2051591 - DNA, 15 bp, Homo sapiens
tgatcccttcacacc

SEQ ID NO: 2051592 - DNA, 15 bp, Homo sapiens
gatcccttcacacct

SEQ ID NO: 2051593 - DNA, 15 bp, Homo sapiens
atcccttcacacctt

SEQ ID NO: 2051594 - DNA, 15 bp, Homo sapiens
tcccttcacaccttc

SEQ ID NO: 2051595 - DNA, 15 bp, Homo sapiens
cccttcacaccttcc

SEQ ID NO: 2051596 - DNA, 15 bp, Homo sapiens
ccttcacaccttccc

SEQ ID NO: 2051597 - DNA, 15 bp, Homo sapiens
cttcacaccttcccg

SEQ ID NO: 2051598 - DNA, 15 bp, Homo sapiens
ttcacaccttcccgg

SEQ ID NO: 2051599 - DNA, 15 bp, Homo sapiens
tcacaccttcccgga

SEQ ID NO: 2051600 - DNA, 15 bp, Homo sapiens
cacaccttcccggat

SEQ ID NO: 2051601 - DNA, 15 bp, Homo sapiens
acaccttcccggatc

SEQ ID NO: 2051602 - DNA, 15 bp, Homo sapiens
caccttcccggatcc

SEQ ID NO: 2051603 - DNA, 15 bp, Homo sapiens
accttcccggatcca

SEQ ID NO: 2051604 - DNA, 15 bp, Homo sapiens
ccttcccggatccag

SEQ ID NO: 2051605 - DNA, 15 bp, Homo sapiens
cttcccggatccagg

SEQ ID NO: 2051606 - DNA, 15 bp, Homo sapiens
ttcccggatccagga

SEQ ID NO: 2051607 - DNA, 15 bp, Homo sapiens
tcccggatccaggat

SEQ ID NO: 2051608 - DNA, 15 bp, Homo sapiens
cccggatccaggata

SEQ ID NO: 2051609 - DNA, 15 bp, Homo sapiens
ccggatccaggatat

SEQ ID NO: 2051610 - DNA, 15 bp, Homo sapiens
cggatccaggatata

SEQ ID NO: 2051611 - DNA, 15 bp, Homo sapiens
ggatccaggatatac

SEQ ID NO: 2051612 - DNA, 15 bp, Homo sapiens
gatccaggatataca

SEQ ID NO: 2051613 - DNA, 15 bp, Homo sapiens
atccaggatatacag

SEQ ID NO: 2051614 - DNA, 15 bp, Homo sapiens
tccaggatatacagc

SEQ ID NO: 2051615 - DNA, 15 bp, Homo sapiens
ccaggatatacagcg

SEQ ID NO: 2051616 - DNA, 15 bp, Homo sapiens
caggatatacagcgg

SEQ ID NO: 2051617 - DNA, 15 bp, Homo sapiens
aggatatacagcggc

SEQ ID NO: 2051618 - DNA, 15 bp, Homo sapiens
ggatatacagcggct

SEQ ID NO: 2051619 - DNA, 15 bp, Homo sapiens
gatatacagcggctc

SEQ ID NO: 2051620 - DNA, 15 bp, Homo sapiens
atatacagcggctcg

SEQ ID NO: 2051621 - DNA, 15 bp, Homo sapiens
tatacagcggctcgc

SEQ ID NO: 2051622 - DNA, 15 bp, Homo sapiens
atacagcggctcgct

SEQ ID NO: 2051623 - DNA, 15 bp, Homo sapiens
tacagcggctcgcta

SEQ ID NO: 2051624 - DNA, 15 bp, Homo sapiens
acagcggctcgctag

SEQ ID NO: 2051625 - DNA, 15 bp, Homo sapiens
cagcggctcgctagc

SEQ ID NO: 2051626 - DNA, 15 bp, Homo sapiens
agcggctcgctagcc

SEQ ID NO: 2051627 - DNA, 15 bp, Homo sapiens
gcggctcgctagccc

SEQ ID NO: 2051628 - DNA, 15 bp, Homo sapiens
cggctcgctagccca

SEQ ID NO: 2051629 - DNA, 15 bp, Homo sapiens
ggctcgctagcccaa

SEQ ID NO: 2051630 - DNA, 15 bp, Homo sapiens
gctcgctagcccaag

SEQ ID NO: 2051631 - DNA, 15 bp, Homo sapiens
ctcgctagcccaagt

SEQ ID NO: 2051632 - DNA, 15 bp, Homo sapiens
tcgctagcccaagtc

SEQ ID NO: 2051633 - DNA, 15 bp, Homo sapiens
cgctagcccaagtct

SEQ ID NO: 2051634 - DNA, 15 bp, Homo sapiens
gctagcccaagtctt

SEQ ID NO: 2051635 - DNA, 15 bp, Homo sapiens
ctagcccaagtcttc

SEQ ID NO: 2051636 - DNA, 15 bp, Homo sapiens
tagcccaagtcttca

SEQ ID NO: 2051637 - DNA, 15 bp, Homo sapiens
agcccaagtcttcag

SEQ ID NO: 2051638 - DNA, 15 bp, Homo sapiens
gcccaagtcttcagg

SEQ ID NO: 2051639 - DNA, 15 bp, Homo sapiens
cccaagtcttcaggt

SEQ ID NO: 2051640 - DNA, 15 bp, Homo sapiens
ccaagtcttcaggtg

SEQ ID NO: 2051641 - DNA, 15 bp, Homo sapiens
caagtcttcaggtgc

SEQ ID NO: 2051642 - DNA, 15 bp, Homo sapiens
aagtcttcaggtgca

SEQ ID NO: 2051643 - DNA, 15 bp, Homo sapiens
agtcttcaggtgcaa

SEQ ID NO: 2051644 - DNA, 15 bp, Homo sapiens
gtcttcaggtgcaat

SEQ ID NO: 2051645 - DNA, 15 bp, Homo sapiens
tcttcaggtgcaatc

SEQ ID NO: 2051646 - DNA, 15 bp, Homo sapiens
cttcaggtgcaatcc

SEQ ID NO: 2051647 - DNA, 15 bp, Homo sapiens
ttcaggtgcaatccc

SEQ ID NO: 2051648 - DNA, 15 bp, Homo sapiens
tcaggtgcaatccca

SEQ ID NO: 2051649 - DNA, 15 bp, Homo sapiens
caggtgcaatcccag

SEQ ID NO: 2051650 - DNA, 15 bp, Homo sapiens
aggtgcaatcccagt

SEQ ID NO: 2051651 - DNA, 15 bp, Homo sapiens
ggtgcaatcccagtc

SEQ ID NO: 2051652 - DNA, 15 bp, Homo sapiens
gtgcaatcccagtca

SEQ ID NO: 2051653 - DNA, 15 bp, Homo sapiens
tgcaatcccagtcag

SEQ ID NO: 2051654 - DNA, 15 bp, Homo sapiens
gcaatcccagtcagg

SEQ ID NO: 2051655 - DNA, 15 bp, Homo sapiens
caatcccagtcaggg

SEQ ID NO: 2051656 - DNA, 15 bp, Homo sapiens
aatcccagtcaggga

SEQ ID NO: 2051657 - DNA, 15 bp, Homo sapiens
atcccagtcagggag

SEQ ID NO: 2051658 - DNA, 15 bp, Homo sapiens
tcccagtcagggaga

SEQ ID NO: 2051659 - DNA, 15 bp, Homo sapiens
cccagtcagggagaa

SEQ ID NO: 2051660 - DNA, 15 bp, Homo sapiens
ccagtcagggagaag

SEQ ID NO: 2051661 - DNA, 15 bp, Homo sapiens
cagtcagggagaaga

SEQ ID NO: 2051662 - DNA, 15 bp, Homo sapiens
agtcagggagaagaa

SEQ ID NO: 2051663 - DNA, 15 bp, Homo sapiens
gtcagggagaagaaa

SEQ ID NO: 2051664 - DNA, 15 bp, Homo sapiens
tcagggagaagaaac

SEQ ID NO: 2051665 - DNA, 15 bp, Homo sapiens
cagggagaagaaact

SEQ ID NO: 2051666 - DNA, 15 bp, Homo sapiens
agggagaagaaactt

SEQ ID NO: 2051667 - DNA, 15 bp, Homo sapiens
gggagaagaaacttc

SEQ ID NO: 2051668 - DNA, 15 bp, Homo sapiens
ggagaagaaacttca

SEQ ID NO: 2051669 - DNA, 15 bp, Homo sapiens
gagaagaaacttcac

SEQ ID NO: 2051670 - DNA, 15 bp, Homo sapiens
agaagaaacttcacc

SEQ ID NO: 2051671 - DNA, 15 bp, Homo sapiens
gaagaaacttcaccc

SEQ ID NO: 2051672 - DNA, 15 bp, Homo sapiens
aagaaacttcaccct

SEQ ID NO: 2051673 - DNA, 15 bp, Homo sapiens
gaaacttcaccctgc

SEQ ID NO: 2051674 - DNA, 15 bp, Homo sapiens
aaacttcaccctgcc

SEQ ID NO: 2051675 - DNA, 15 bp, Homo sapiens
aacttcaccctgccc

SEQ ID NO: 2051676 - DNA, 15 bp, Homo sapiens
acttcaccctgccct

SEQ ID NO: 2051677 - DNA, 15 bp, Homo sapiens
cttcaccctgccctc

SEQ ID NO: 2051678 - DNA, 15 bp, Homo sapiens
ttcaccctgccctcc

SEQ ID NO: 2051679 - DNA, 15 bp, Homo sapiens
tcaccctgccctcct

SEQ ID NO: 2051680 - DNA, 15 bp, Homo sapiens
caccctgccctcctc

SEQ ID NO: 2051681 - DNA, 15 bp, Homo sapiens
accctgccctcctca

SEQ ID NO: 2051682 - DNA, 15 bp, Homo sapiens
ccctgccctcctcag

SEQ ID NO: 2051683 - DNA, 15 bp, Homo sapiens
cctgccctcctcagg

SEQ ID NO: 2051684 - DNA, 15 bp, Homo sapiens
ctgccctcctcaggg

SEQ ID NO: 2051685 - DNA, 15 bp, Homo sapiens
tgccctcctcaggga

SEQ ID NO: 2051686 - DNA, 15 bp, Homo sapiens
gccctcctcagggag

SEQ ID NO: 2051687 - DNA, 15 bp, Homo sapiens
ccctcctcagggaga

SEQ ID NO: 2051688 - DNA, 15 bp, Homo sapiens
cctcctcagggagac

SEQ ID NO: 2051689 - DNA, 15 bp, Homo sapiens
ctcctcagggagacc

SEQ ID NO: 2051690 - DNA, 15 bp, Homo sapiens
tcctcagggagaccc

SEQ ID NO: 2051691 - DNA, 15 bp, Homo sapiens
cctcagggagacccc

SEQ ID NO: 2051692 - DNA, 15 bp, Homo sapiens
ctcagggagacccct

SEQ ID NO: 2051693 - DNA, 15 bp, Homo sapiens
tcagggagacccctc

SEQ ID NO: 2051694 - DNA, 15 bp, Homo sapiens
cagggagacccctcc

SEQ ID NO: 2051695 - DNA, 15 bp, Homo sapiens
agggagacccctcct

SEQ ID NO: 2051696 - DNA, 15 bp, Homo sapiens
gggagacccctcctg

SEQ ID NO: 2051697 - DNA, 15 bp, Homo sapiens
ggagacccctcctgc

SEQ ID NO: 2051698 - DNA, 15 bp, Homo sapiens
gagacccctcctgcc

SEQ ID NO: 2051699 - DNA, 15 bp, Homo sapiens
agacccctcctgcct

SEQ ID NO: 2051700 - DNA, 15 bp, Homo sapiens
gacccctcctgcctc

SEQ ID NO: 2051701 - DNA, 15 bp, Homo sapiens
acccctcctgcctcc

SEQ ID NO: 2051702 - DNA, 15 bp, Homo sapiens
cccctcctgcctccc

SEQ ID NO: 2051703 - DNA, 15 bp, Homo sapiens
ccctcctgcctcccc

SEQ ID NO: 2051704 - DNA, 15 bp, Homo sapiens
cctcctgcctcccca

SEQ ID NO: 2051705 - DNA, 15 bp, Homo sapiens
ctcctgcctccccag

SEQ ID NO: 2051706 - DNA, 15 bp, Homo sapiens
tcctgcctccccagt

SEQ ID NO: 2051707 - DNA, 15 bp, Homo sapiens
cctgcctccccagtg

SEQ ID NO: 2051708 - DNA, 15 bp, Homo sapiens
ctgcctccccagtgt

SEQ ID NO: 2051709 - DNA, 15 bp, Homo sapiens
tgcctccccagtgta

SEQ ID NO: 2051710 - DNA, 15 bp, Homo sapiens
gcctccccagtgtag

SEQ ID NO: 2051711 - DNA, 15 bp, Homo sapiens
cctccccagtgtagg

SEQ ID NO: 2051712 - DNA, 15 bp, Homo sapiens
ctccccagtgtaggt

SEQ ID NO: 2051713 - DNA, 15 bp, Homo sapiens
tccccagtgtaggta

SEQ ID NO: 2051714 - DNA, 15 bp, Homo sapiens
ccccagtgtaggtat

SEQ ID NO: 2051715 - DNA, 15 bp, Homo sapiens
cccagtgtaggtatg

SEQ ID NO: 2051716 - DNA, 15 bp, Homo sapiens
ccagtgtaggtatgt

SEQ ID NO: 2051717 - DNA, 15 bp, Homo sapiens
cagtgtaggtatgtg

SEQ ID NO: 2051718 - DNA, 15 bp, Homo sapiens
agtgtaggtatgtga

SEQ ID NO: 2051719 - DNA, 15 bp, Homo sapiens
gtgtaggtatgtgag

SEQ ID NO: 2051720 - DNA, 15 bp, Homo sapiens
tgtaggtatgtgaga

SEQ ID NO: 2051721 - DNA, 15 bp, Homo sapiens
gtaggtatgtgagac

SEQ ID NO: 2051722 - DNA, 15 bp, Homo sapiens
taggtatgtgagacc

SEQ ID NO: 2051723 - DNA, 15 bp, Homo sapiens
aggtatgtgagaccc

SEQ ID NO: 2051724 - DNA, 15 bp, Homo sapiens
ggtatgtgagaccct

SEQ ID NO: 2051725 - DNA, 15 bp, Homo sapiens
gtatgtgagaccctc

SEQ ID NO: 2051726 - DNA, 15 bp, Homo sapiens
tatgtgagaccctca

SEQ ID NO: 2051727 - DNA, 15 bp, Homo sapiens
atgtgagaccctcat

SEQ ID NO: 2051728 - DNA, 15 bp, Homo sapiens
tgtgagaccctcatt

SEQ ID NO: 2051729 - DNA, 15 bp, Homo sapiens
gtgagaccctcatta

SEQ ID NO: 2051730 - DNA, 15 bp, Homo sapiens
tgagaccctcattag

SEQ ID NO: 2051731 - DNA, 15 bp, Homo sapiens
gagaccctcattagg

SEQ ID NO: 2051732 - DNA, 15 bp, Homo sapiens
agaccctcattagga

SEQ ID NO: 2051733 - DNA, 15 bp, Homo sapiens
gaccctcattaggac

SEQ ID NO: 2051734 - DNA, 15 bp, Homo sapiens
accctcattaggacc

SEQ ID NO: 2051735 - DNA, 15 bp, Homo sapiens
ccctcattaggaccc

SEQ ID NO: 2051736 - DNA, 15 bp, Homo sapiens
cctcattaggacccc

SEQ ID NO: 2051737 - DNA, 15 bp, Homo sapiens
ctcattaggacccca

SEQ ID NO: 2051738 - DNA, 15 bp, Homo sapiens
tcattaggaccccaa

SEQ ID NO: 2051739 - DNA, 15 bp, Homo sapiens
cattaggaccccaag

SEQ ID NO: 2051740 - DNA, 15 bp, Homo sapiens
attaggaccccaaga

SEQ ID NO: 2051741 - DNA, 15 bp, Homo sapiens
ttaggaccccaagat

SEQ ID NO: 2051742 - DNA, 15 bp, Homo sapiens
taggaccccaagatc

SEQ ID NO: 2051743 - DNA, 15 bp, Homo sapiens
aggaccccaagatca

SEQ ID NO: 2051744 - DNA, 15 bp, Homo sapiens
ggaccccaagatcat

SEQ ID NO: 2051745 - DNA, 15 bp, Homo sapiens
gaccccaagatcatg

SEQ ID NO: 2051746 - DNA, 15 bp, Homo sapiens
accccaagatcatgt

SEQ ID NO: 2051747 - DNA, 15 bp, Homo sapiens
ccccaagatcatgtg

SEQ ID NO: 2051748 - DNA, 15 bp, Homo sapiens
cccaagatcatgtgc

SEQ ID NO: 2051749 - DNA, 15 bp, Homo sapiens
ccaagatcatgtgca

SEQ ID NO: 2051750 - DNA, 15 bp, Homo sapiens
caagatcatgtgcag

SEQ ID NO: 2051751 - DNA, 15 bp, Homo sapiens
aagatcatgtgcagg

SEQ ID NO: 2051752 - DNA, 15 bp, Homo sapiens
agatcatgtgcagga

SEQ ID NO: 2051753 - DNA, 15 bp, Homo sapiens
gatcatgtgcaggaa

SEQ ID NO: 2051754 - DNA, 15 bp, Homo sapiens
atcatgtgcaggaac

SEQ ID NO: 2051755 - DNA, 15 bp, Homo sapiens
tcatgtgcaggaaca

SEQ ID NO: 2051756 - DNA, 15 bp, Homo sapiens
catgtgcaggaacat

SEQ ID NO: 2051757 - DNA, 15 bp, Homo sapiens
atgtgcaggaacatc

SEQ ID NO: 2051758 - DNA, 15 bp, Homo sapiens
tgtgcaggaacatca

SEQ ID NO: 2051759 - DNA, 15 bp, Homo sapiens
gtgcaggaacatcaa

SEQ ID NO: 2051760 - DNA, 15 bp, Homo sapiens
tgcaggaacatcaag

SEQ ID NO: 2051761 - DNA, 15 bp, Homo sapiens
gcaggaacatcaagc

SEQ ID NO: 2051762 - DNA, 15 bp, Homo sapiens
caggaacatcaagca

SEQ ID NO: 2051763 - DNA, 15 bp, Homo sapiens
aggaacatcaagcat

SEQ ID NO: 2051764 - DNA, 15 bp, Homo sapiens
ggaacatcaagcatc

SEQ ID NO: 2051765 - DNA, 15 bp, Homo sapiens
gaacatcaagcatct

SEQ ID NO: 2051766 - DNA, 15 bp, Homo sapiens
aacatcaagcatctt

SEQ ID NO: 2051767 - DNA, 15 bp, Homo sapiens
acatcaagcatctta

SEQ ID NO: 2051768 - DNA, 15 bp, Homo sapiens
catcaagcatcttat

SEQ ID NO: 2051769 - DNA, 15 bp, Homo sapiens
atcaagcatcttatt

SEQ ID NO: 2051770 - DNA, 15 bp, Homo sapiens
tcaagcatcttattc

SEQ ID NO: 2051771 - DNA, 15 bp, Homo sapiens
caagcatcttattct

SEQ ID NO: 2051772 - DNA, 15 bp, Homo sapiens
aagcatcttattctt

SEQ ID NO: 2051773 - DNA, 15 bp, Homo sapiens
agcatcttattcttg

SEQ ID NO: 2051774 - DNA, 15 bp, Homo sapiens
gcatcttattcttgt

SEQ ID NO: 2051775 - DNA, 15 bp, Homo sapiens
catcttattcttgta

SEQ ID NO: 2051776 - DNA, 15 bp, Homo sapiens
atcttattcttgtat

SEQ ID NO: 2051777 - DNA, 15 bp, Homo sapiens
tcttattcttgtatt

SEQ ID NO: 2051778 - DNA, 15 bp, Homo sapiens
cttattcttgtattt

SEQ ID NO: 2051779 - DNA, 15 bp, Homo sapiens
ttattcttgtattta

SEQ ID NO: 2051780 - DNA, 15 bp, Homo sapiens
tattcttgtatttac

SEQ ID NO: 2051781 - DNA, 15 bp, Homo sapiens
attcttgtatttaca

SEQ ID NO: 2051782 - DNA, 15 bp, Homo sapiens
ttcttgtatttacaa

SEQ ID NO: 2051783 - DNA, 15 bp, Homo sapiens
tcttgtatttacaac

SEQ ID NO: 2051784 - DNA, 15 bp, Homo sapiens
cttgtatttacaacc

SEQ ID NO: 2051785 - DNA, 15 bp, Homo sapiens
ttgtatttacaacct

SEQ ID NO: 2051786 - DNA, 15 bp, Homo sapiens
tgtatttacaacctg

SEQ ID NO: 2051787 - DNA, 15 bp, Homo sapiens
gtatttacaacctgg

SEQ ID NO: 2051788 - DNA, 15 bp, Homo sapiens
tatttacaacctggt

SEQ ID NO: 2051789 - DNA, 15 bp, Homo sapiens
atttacaacctggtg

SEQ ID NO: 2051790 - DNA, 15 bp, Homo sapiens
tttacaacctggtgt

SEQ ID NO: 2051791 - DNA, 15 bp, Homo sapiens
ttacaacctggtgtg

SEQ ID NO: 2051792 - DNA, 15 bp, Homo sapiens
tacaacctggtgtga

SEQ ID NO: 2051793 - DNA, 15 bp, Homo sapiens
acaacctggtgtgac

SEQ ID NO: 2051794 - DNA, 15 bp, Homo sapiens
caacctggtgtgact

SEQ ID NO: 2051795 - DNA, 15 bp, Homo sapiens
aacctggtgtgactt

SEQ ID NO: 2051796 - DNA, 15 bp, Homo sapiens
acctggtgtgacttt

SEQ ID NO: 2051797 - DNA, 15 bp, Homo sapiens
cctggtgtgacttta

SEQ ID NO: 2051798 - DNA, 15 bp, Homo sapiens
ctggtgtgactttat

SEQ ID NO: 2051799 - DNA, 15 bp, Homo sapiens
tggtgtgactttatt

SEQ ID NO: 2051800 - DNA, 15 bp, Homo sapiens
ggtgtgactttatta

SEQ ID NO: 2051801 - DNA, 15 bp, Homo sapiens
gtgtgactttattat

SEQ ID NO: 2051802 - DNA, 15 bp, Homo sapiens
tgtgactttattatc

SEQ ID NO: 2051803 - DNA, 15 bp, Homo sapiens
gtgactttattatct

SEQ ID NO: 2051804 - DNA, 15 bp, Homo sapiens
tgactttattatcta

SEQ ID NO: 2051805 - DNA, 15 bp, Homo sapiens
gactttattatctac

SEQ ID NO: 2051806 - DNA, 15 bp, Homo sapiens
actttattatctact

SEQ ID NO: 2051807 - DNA, 15 bp, Homo sapiens
ctttattatctactt

SEQ ID NO: 2051808 - DNA, 15 bp, Homo sapiens
tttattatctacttt

SEQ ID NO: 2051809 - DNA, 15 bp, Homo sapiens
ttattatctactttt

SEQ ID NO: 2051810 - DNA, 15 bp, Homo sapiens
tattatctacttttc

SEQ ID NO: 2051811 - DNA, 15 bp, Homo sapiens
attatctacttttct

SEQ ID NO: 2051812 - DNA, 15 bp, Homo sapiens
ttatctacttttctt

SEQ ID NO: 2051813 - DNA, 15 bp, Homo sapiens
tatctacttttcttc

SEQ ID NO: 2051814 - DNA, 15 bp, Homo sapiens
atctacttttcttct

SEQ ID NO: 2051815 - DNA, 15 bp, Homo sapiens
tctacttttcttctg

SEQ ID NO: 2051816 - DNA, 15 bp, Homo sapiens
ctacttttcttctgt

SEQ ID NO: 2051817 - DNA, 15 bp, Homo sapiens
tacttttcttctgtt

SEQ ID NO: 2051818 - DNA, 15 bp, Homo sapiens
acttttcttctgttt

SEQ ID NO: 2051819 - DNA, 15 bp, Homo sapiens
cttttcttctgtttc

SEQ ID NO: 2051820 - DNA, 15 bp, Homo sapiens
ttttcttctgtttct

SEQ ID NO: 2051821 - DNA, 15 bp, Homo sapiens
tttcttctgtttctt

SEQ ID NO: 2051822 - DNA, 15 bp, Homo sapiens
ttcttctgtttcttc

SEQ ID NO: 2051823 - DNA, 15 bp, Homo sapiens
tcttctgtttcttca

SEQ ID NO: 2051824 - DNA, 15 bp, Homo sapiens
cttctgtttcttcat

SEQ ID NO: 2051825 - DNA, 15 bp, Homo sapiens
ttctgtttcttcatc

SEQ ID NO: 2051826 - DNA, 15 bp, Homo sapiens
tctgtttcttcatcc

SEQ ID NO: 2051827 - DNA, 15 bp, Homo sapiens
ctgtttcttcatcct

SEQ ID NO: 2051828 - DNA, 15 bp, Homo sapiens
tcttcatccttcccc

SEQ ID NO: 2051829 - DNA, 15 bp, Homo sapiens
cttcatccttcccca

SEQ ID NO: 2051830 - DNA, 15 bp, Homo sapiens
ttcatccttccccat

SEQ ID NO: 2051831 - DNA, 15 bp, Homo sapiens
tcatccttccccatt

SEQ ID NO: 2051832 - DNA, 15 bp, Homo sapiens
catccttccccattt

SEQ ID NO: 2051833 - DNA, 15 bp, Homo sapiens
atccttccccatttt

SEQ ID NO: 2051834 - DNA, 15 bp, Homo sapiens
tccttccccattttc

SEQ ID NO: 2051835 - DNA, 15 bp, Homo sapiens
ccttccccattttcc

SEQ ID NO: 2051836 - DNA, 15 bp, Homo sapiens
cttccccattttcca

SEQ ID NO: 2051837 - DNA, 15 bp, Homo sapiens
ttccccattttccat

SEQ ID NO: 2051838 - DNA, 15 bp, Homo sapiens
tccccattttccatt

SEQ ID NO: 2051839 - DNA, 15 bp, Homo sapiens
ccccattttccattt

SEQ ID NO: 2051840 - DNA, 15 bp, Homo sapiens
cccattttccatttc

SEQ ID NO: 2051841 - DNA, 15 bp, Homo sapiens
ccattttccatttct

SEQ ID NO: 2051842 - DNA, 15 bp, Homo sapiens
cattttccatttctt

SEQ ID NO: 2051843 - DNA, 15 bp, Homo sapiens
attttccatttcttt

SEQ ID NO: 2051844 - DNA, 15 bp, Homo sapiens
ttttccatttcttta

SEQ ID NO: 2051845 - DNA, 15 bp, Homo sapiens
tttccatttctttat

SEQ ID NO: 2051846 - DNA, 15 bp, Homo sapiens
ttccatttctttatt

SEQ ID NO: 2051847 - DNA, 15 bp, Homo sapiens
tccatttctttattc

SEQ ID NO: 2051848 - DNA, 15 bp, Homo sapiens
ccatttctttattcc

SEQ ID NO: 2051849 - DNA, 15 bp, Homo sapiens
catttctttattcca

SEQ ID NO: 2051850 - DNA, 15 bp, Homo sapiens
atttctttattccaa

SEQ ID NO: 2051851 - DNA, 15 bp, Homo sapiens
tttctttattccaat

SEQ ID NO: 2051852 - DNA, 15 bp, Homo sapiens
ttctttattccaatg

SEQ ID NO: 2051853 - DNA, 15 bp, Homo sapiens
tctttattccaatgc

SEQ ID NO: 2051854 - DNA, 15 bp, Homo sapiens
ctttattccaatgcc

SEQ ID NO: 2051855 - DNA, 15 bp, Homo sapiens
tttattccaatgccg

SEQ ID NO: 2051856 - DNA, 15 bp, Homo sapiens
ttattccaatgccga

SEQ ID NO: 2051857 - DNA, 15 bp, Homo sapiens
tattccaatgccgat

SEQ ID NO: 2051858 - DNA, 15 bp, Homo sapiens
attccaatgccgatg

SEQ ID NO: 2051859 - DNA, 15 bp, Homo sapiens
ttccaatgccgatgt

SEQ ID NO: 2051860 - DNA, 15 bp, Homo sapiens
tccaatgccgatgtt

SEQ ID NO: 2051861 - DNA, 15 bp, Homo sapiens
ccaatgccgatgttt

SEQ ID NO: 2051862 - DNA, 15 bp, Homo sapiens
caatgccgatgtttt

SEQ ID NO: 2051863 - DNA, 15 bp, Homo sapiens
aatgccgatgttttc

SEQ ID NO: 2051864 - DNA, 15 bp, Homo sapiens
atgccgatgttttct

SEQ ID NO: 2051865 - DNA, 15 bp, Homo sapiens
tgccgatgttttctt

SEQ ID NO: 2051866 - DNA, 15 bp, Homo sapiens
gccgatgttttcttt

SEQ ID NO: 2051867 - DNA, 15 bp, Homo sapiens
ccgatgttttctttg

SEQ ID NO: 2051868 - DNA, 15 bp, Homo sapiens
cgatgttttctttgc

SEQ ID NO: 2051869 - DNA, 15 bp, Homo sapiens
gatgttttctttgct

SEQ ID NO: 2051870 - DNA, 15 bp, Homo sapiens
atgttttctttgctt

SEQ ID NO: 2051871 - DNA, 15 bp, Homo sapiens
tgttttctttgcttt

SEQ ID NO: 2051872 - DNA, 15 bp, Homo sapiens
gttttctttgctttc

SEQ ID NO: 2051873 - DNA, 15 bp, Homo sapiens
ttttctttgctttct

SEQ ID NO: 2051874 - DNA, 15 bp, Homo sapiens
tttctttgctttctt

SEQ ID NO: 2051875 - DNA, 15 bp, Homo sapiens
ttctttgctttcttg

SEQ ID NO: 2051876 - DNA, 15 bp, Homo sapiens
tctttgctttcttgt

SEQ ID NO: 2051877 - DNA, 15 bp, Homo sapiens
ctttgctttcttgtc

SEQ ID NO: 2051878 - DNA, 15 bp, Homo sapiens
tttgctttcttgtcc

SEQ ID NO: 2051879 - DNA, 15 bp, Homo sapiens
ttgctttcttgtcca

SEQ ID NO: 2051880 - DNA, 15 bp, Homo sapiens
tgctttcttgtccaa

SEQ ID NO: 2051881 - DNA, 15 bp, Homo sapiens
gctttcttgtccaac

SEQ ID NO: 2051882 - DNA, 15 bp, Homo sapiens
ctttcttgtccaact

SEQ ID NO: 2051883 - DNA, 15 bp, Homo sapiens
tttcttgtccaactc

SEQ ID NO: 2051884 - DNA, 15 bp, Homo sapiens
ttcttgtccaactcc

SEQ ID NO: 2051885 - DNA, 15 bp, Homo sapiens
tcttgtccaactcca

SEQ ID NO: 2051886 - DNA, 15 bp, Homo sapiens
cttgtccaactccag

SEQ ID NO: 2051887 - DNA, 15 bp, Homo sapiens
ttgtccaactccagt

SEQ ID NO: 2051888 - DNA, 15 bp, Homo sapiens
tgtccaactccagtc

SEQ ID NO: 2051889 - DNA, 15 bp, Homo sapiens
gtccaactccagtca

SEQ ID NO: 2051890 - DNA, 15 bp, Homo sapiens
tccaactccagtcat

SEQ ID NO: 2051891 - DNA, 15 bp, Homo sapiens
ccaactccagtcatg

SEQ ID NO: 2051892 - DNA, 15 bp, Homo sapiens
caactccagtcatgg

SEQ ID NO: 2051893 - DNA, 15 bp, Homo sapiens
aactccagtcatggc

SEQ ID NO: 2051894 - DNA, 15 bp, Homo sapiens
actccagtcatggct

SEQ ID NO: 2051895 - DNA, 15 bp, Homo sapiens
ctccagtcatggctg

SEQ ID NO: 2051896 - DNA, 15 bp, Homo sapiens
tccagtcatggctgc

SEQ ID NO: 2051897 - DNA, 15 bp, Homo sapiens
ccagtcatggctgca

SEQ ID NO: 2051898 - DNA, 15 bp, Homo sapiens
cagtcatggctgcaa

SEQ ID NO: 2051899 - DNA, 15 bp, Homo sapiens
agtcatggctgcaat

SEQ ID NO: 2051900 - DNA, 15 bp, Homo sapiens
gtcatggctgcaatc

SEQ ID NO: 2051901 - DNA, 15 bp, Homo sapiens
tcatggctgcaatcc

SEQ ID NO: 2051902 - DNA, 15 bp, Homo sapiens
catggctgcaatcct

SEQ ID NO: 2051903 - DNA, 15 bp, Homo sapiens
atggctgcaatccta

SEQ ID NO: 2051904 - DNA, 15 bp, Homo sapiens
tggctgcaatcctac

SEQ ID NO: 2051905 - DNA, 15 bp, Homo sapiens
ggctgcaatcctact

SEQ ID NO: 2051906 - DNA, 15 bp, Homo sapiens
gctgcaatcctactt

SEQ ID NO: 2051907 - DNA, 15 bp, Homo sapiens
ctgcaatcctacttt

SEQ ID NO: 2051908 - DNA, 15 bp, Homo sapiens
tgcaatcctacttta

SEQ ID NO: 2051909 - DNA, 15 bp, Homo sapiens
gcaatcctactttat

SEQ ID NO: 2051910 - DNA, 15 bp, Homo sapiens
caatcctactttata

SEQ ID NO: 2051911 - DNA, 15 bp, Homo sapiens
aatcctactttatag

SEQ ID NO: 2051912 - DNA, 15 bp, Homo sapiens
atcctactttatagg

SEQ ID NO: 2051913 - DNA, 15 bp, Homo sapiens
tcctactttataggc

SEQ ID NO: 2051914 - DNA, 15 bp, Homo sapiens
cctactttataggca

SEQ ID NO: 2051915 - DNA, 15 bp, Homo sapiens
ctactttataggcaa

SEQ ID NO: 2051916 - DNA, 15 bp, Homo sapiens
tactttataggcaat

SEQ ID NO: 2051917 - DNA, 15 bp, Homo sapiens
actttataggcaatt

SEQ ID NO: 2051918 - DNA, 15 bp, Homo sapiens
ctttataggcaattc

SEQ ID NO: 2051919 - DNA, 15 bp, Homo sapiens
tttataggcaattcg

SEQ ID NO: 2051920 - DNA, 15 bp, Homo sapiens
ttataggcaattcgg

SEQ ID NO: 2051921 - DNA, 15 bp, Homo sapiens
tataggcaattcggt

SEQ ID NO: 2051922 - DNA, 15 bp, Homo sapiens
ataggcaattcggta

SEQ ID NO: 2051923 - DNA, 15 bp, Homo sapiens
taggcaattcggtat

SEQ ID NO: 2051924 - DNA, 15 bp, Homo sapiens
aggcaattcggtatt

SEQ ID NO: 2051925 - DNA, 15 bp, Homo sapiens
ggcaattcggtattg

SEQ ID NO: 2051926 - DNA, 15 bp, Homo sapiens
gcaattcggtattgt

SEQ ID NO: 2051927 - DNA, 15 bp, Homo sapiens
caattcggtattgtt

SEQ ID NO: 2051928 - DNA, 15 bp, Homo sapiens
aattcggtattgttt

SEQ ID NO: 2051929 - DNA, 15 bp, Homo sapiens
attcggtattgttta

SEQ ID NO: 2051930 - DNA, 15 bp, Homo sapiens
ttcggtattgtttat

SEQ ID NO: 2051931 - DNA, 15 bp, Homo sapiens
tcggtattgtttatc

SEQ ID NO: 2051932 - DNA, 15 bp, Homo sapiens
cggtattgtttatcc

SEQ ID NO: 2051933 - DNA, 15 bp, Homo sapiens
ggtattgtttatcct

SEQ ID NO: 2051934 - DNA, 15 bp, Homo sapiens
gtattgtttatccta

SEQ ID NO: 2051935 - DNA, 15 bp, Homo sapiens
tattgtttatcctaa

SEQ ID NO: 2051936 - DNA, 15 bp, Homo sapiens
attgtttatcctaat

SEQ ID NO: 2051937 - DNA, 15 bp, Homo sapiens
ttgtttatcctaatg

SEQ ID NO: 2051938 - DNA, 15 bp, Homo sapiens
tgtttatcctaatgt

SEQ ID NO: 2051939 - DNA, 15 bp, Homo sapiens
gtttatcctaatgtc

SEQ ID NO: 2051940 - DNA, 15 bp, Homo sapiens
tttatcctaatgtca

SEQ ID NO: 2051941 - DNA, 15 bp, Homo sapiens
ttatcctaatgtcag

SEQ ID NO: 2051942 - DNA, 15 bp, Homo sapiens
tatcctaatgtcagt

SEQ ID NO: 2051943 - DNA, 15 bp, Homo sapiens
atcctaatgtcagta

SEQ ID NO: 2051944 - DNA, 15 bp, Homo sapiens
tcctaatgtcagtac

SEQ ID NO: 2051945 - DNA, 15 bp, Homo sapiens
cctaatgtcagtact

SEQ ID NO: 2051946 - DNA, 15 bp, Homo sapiens
ctaatgtcagtacta

SEQ ID NO: 2051947 - DNA, 15 bp, Homo sapiens
taatgtcagtactaa

SEQ ID NO: 2051948 - DNA, 15 bp, Homo sapiens
aatgtcagtactaaa

SEQ ID NO: 2051949 - DNA, 15 bp, Homo sapiens
atgtcagtactaaaa

SEQ ID NO: 2051950 - DNA, 15 bp, Homo sapiens
tgtcagtactaaaag

SEQ ID NO: 2051951 - DNA, 15 bp, Homo sapiens
gtcagtactaaaagg

SEQ ID NO: 2051952 - DNA, 15 bp, Homo sapiens
tcagtactaaaagga

SEQ ID NO: 2051953 - DNA, 15 bp, Homo sapiens
cagtactaaaaggaa

SEQ ID NO: 2051954 - DNA, 15 bp, Homo sapiens
agtactaaaaggaaa

SEQ ID NO: 2051955 - DNA, 15 bp, Homo sapiens
gtactaaaaggaaaa

SEQ ID NO: 2051956 - DNA, 15 bp, Homo sapiens
tactaaaaggaaaag

SEQ ID NO: 2051957 - DNA, 15 bp, Homo sapiens
actaaaaggaaaagt

SEQ ID NO: 2051958 - DNA, 15 bp, Homo sapiens
ctaaaaggaaaagta

SEQ ID NO: 2051959 - DNA, 15 bp, Homo sapiens
taaaaggaaaagtag

SEQ ID NO: 2051960 - DNA, 15 bp, Homo sapiens
aaaaggaaaagtaga

SEQ ID NO: 2051961 - DNA, 15 bp, Homo sapiens
aaaggaaaagtagag

SEQ ID NO: 2051962 - DNA, 15 bp, Homo sapiens
aaggaaaagtagaga

SEQ ID NO: 2051963 - DNA, 15 bp, Homo sapiens
aggaaaagtagagaa

SEQ ID NO: 2051964 - DNA, 15 bp, Homo sapiens
ggaaaagtagagaaa

SEQ ID NO: 2051965 - DNA, 15 bp, Homo sapiens
gaaaagtagagaaag

SEQ ID NO: 2051966 - DNA, 15 bp, Homo sapiens
aaaagtagagaaagt

SEQ ID NO: 2051967 - DNA, 15 bp, Homo sapiens
aaagtagagaaagtg

SEQ ID NO: 2051968 - DNA, 15 bp, Homo sapiens
aagtagagaaagtgg

SEQ ID NO: 2051969 - DNA, 15 bp, Homo sapiens
agtagagaaagtgga

SEQ ID NO: 2051970 - DNA, 15 bp, Homo sapiens
gtagagaaagtggat

SEQ ID NO: 2051971 - DNA, 15 bp, Homo sapiens
tagagaaagtggata

SEQ ID NO: 2051972 - DNA, 15 bp, Homo sapiens
agagaaagtggatag

SEQ ID NO: 2051973 - DNA, 15 bp, Homo sapiens
gagaaagtggatagg

SEQ ID NO: 2051974 - DNA, 15 bp, Homo sapiens
agaaagtggataggc

SEQ ID NO: 2051975 - DNA, 15 bp, Homo sapiens
gaaagtggataggct

SEQ ID NO: 2051976 - DNA, 15 bp, Homo sapiens
aaagtggataggcta

SEQ ID NO: 2051977 - DNA, 15 bp, Homo sapiens
aagtggataggctaa

SEQ ID NO: 2051978 - DNA, 15 bp, Homo sapiens
agtggataggctaag

SEQ ID NO: 2051979 - DNA, 15 bp, Homo sapiens
gtggataggctaagt

SEQ ID NO: 2051980 - DNA, 15 bp, Homo sapiens
tggataggctaagta

SEQ ID NO: 2051981 - DNA, 15 bp, Homo sapiens
ggataggctaagtaa

SEQ ID NO: 2051982 - DNA, 15 bp, Homo sapiens
gataggctaagtaat

SEQ ID NO: 2051983 - DNA, 15 bp, Homo sapiens
ataggctaagtaata

SEQ ID NO: 2051984 - DNA, 15 bp, Homo sapiens
taggctaagtaataa

SEQ ID NO: 2051985 - DNA, 15 bp, Homo sapiens
aggctaagtaataaa

SEQ ID NO: 2051986 - DNA, 15 bp, Homo sapiens
ggctaagtaataaag

SEQ ID NO: 2051987 - DNA, 15 bp, Homo sapiens
gctaagtaataaaga

SEQ ID NO: 2051988 - DNA, 15 bp, Homo sapiens
ctaagtaataaagaa

SEQ ID NO: 2051989 - DNA, 15 bp, Homo sapiens
taagtaataaagaat

SEQ ID NO: 2051990 - DNA, 15 bp, Homo sapiens
aagtaataaagaatg

SEQ ID NO: 2051991 - DNA, 15 bp, Homo sapiens
agtaataaagaatga

SEQ ID NO: 2051992 - DNA, 15 bp, Homo sapiens
gtaataaagaatgaa

SEQ ID NO: 2051993 - DNA, 15 bp, Homo sapiens
taataaagaatgaaa

SEQ ID NO: 2051994 - DNA, 15 bp, Homo sapiens
aataaagaatgaaag

SEQ ID NO: 2051995 - DNA, 15 bp, Homo sapiens
ataaagaatgaaagc

SEQ ID NO: 2051996 - DNA, 15 bp, Homo sapiens
taaagaatgaaagcc

SEQ ID NO: 2051997 - DNA, 15 bp, Homo sapiens
aaagaatgaaagcca

SEQ ID NO: 2051998 - DNA, 15 bp, Homo sapiens
aagaatgaaagccag

SEQ ID NO: 2051999 - DNA, 15 bp, Homo sapiens
agaatgaaagccagt

SEQ ID NO: 2052000 - DNA, 15 bp, Homo sapiens
gaatgaaagccagta

SEQ ID NO: 2052001 - DNA, 15 bp, Homo sapiens
aatgaaagccagtaa

SEQ ID NO: 2052002 - DNA, 15 bp, Homo sapiens
atgaaagccagtaag

SEQ ID NO: 2052003 - DNA, 15 bp, Homo sapiens
tgaaagccagtaagg

SEQ ID NO: 2052004 - DNA, 15 bp, Homo sapiens
gaaagccagtaaggt

SEQ ID NO: 2052005 - DNA, 15 bp, Homo sapiens
aaagccagtaaggtc

SEQ ID NO: 2052006 - DNA, 15 bp, Homo sapiens
aagccagtaaggtcc

SEQ ID NO: 2052007 - DNA, 15 bp, Homo sapiens
agccagtaaggtcca

SEQ ID NO: 2052008 - DNA, 15 bp, Homo sapiens
gccagtaaggtccat

SEQ ID NO: 2052009 - DNA, 15 bp, Homo sapiens
ccagtaaggtccata

SEQ ID NO: 2052010 - DNA, 15 bp, Homo sapiens
cagtaaggtccatat

SEQ ID NO: 2052011 - DNA, 15 bp, Homo sapiens
agtaaggtccatatg

SEQ ID NO: 2052012 - DNA, 15 bp, Homo sapiens
gtaaggtccatatgg

SEQ ID NO: 2052013 - DNA, 15 bp, Homo sapiens
taaggtccatatggg

SEQ ID NO: 2052014 - DNA, 15 bp, Homo sapiens
aaggtccatatggga

SEQ ID NO: 2052015 - DNA, 15 bp, Homo sapiens
aggtccatatgggag

SEQ ID NO: 2052016 - DNA, 15 bp, Homo sapiens
ggtccatatgggaga

SEQ ID NO: 2052017 - DNA, 15 bp, Homo sapiens
gtccatatgggagac

SEQ ID NO: 2052018 - DNA, 15 bp, Homo sapiens
tccatatgggagacc

SEQ ID NO: 2052019 - DNA, 15 bp, Homo sapiens
ccatatgggagacca

SEQ ID NO: 2052020 - DNA, 15 bp, Homo sapiens
catatgggagaccag

SEQ ID NO: 2052021 - DNA, 15 bp, Homo sapiens
atatgggagaccagt

SEQ ID NO: 2052022 - DNA, 15 bp, Homo sapiens
tatgggagaccagtt

SEQ ID NO: 2052023 - DNA, 15 bp, Homo sapiens
atgggagaccagttg

SEQ ID NO: 2052024 - DNA, 15 bp, Homo sapiens
tgggagaccagttgg

SEQ ID NO: 2052025 - DNA, 15 bp, Homo sapiens
gggagaccagttggg

SEQ ID NO: 2052026 - DNA, 15 bp, Homo sapiens
ggagaccagttgggg

SEQ ID NO: 2052027 - DNA, 15 bp, Homo sapiens
gagaccagttgggga

SEQ ID NO: 2052028 - DNA, 15 bp, Homo sapiens
agaccagttggggag

SEQ ID NO: 2052029 - DNA, 15 bp, Homo sapiens
gaccagttggggagt

SEQ ID NO: 2052030 - DNA, 15 bp, Homo sapiens
accagttggggagta

SEQ ID NO: 2052031 - DNA, 15 bp, Homo sapiens
ccagttggggagtaa

SEQ ID NO: 2052032 - DNA, 15 bp, Homo sapiens
cagttggggagtaag

SEQ ID NO: 2052033 - DNA, 15 bp, Homo sapiens
agttggggagtaaga

SEQ ID NO: 2052034 - DNA, 15 bp, Homo sapiens
gttggggagtaagaa

SEQ ID NO: 2052035 - DNA, 15 bp, Homo sapiens
ttggggagtaagaag

SEQ ID NO: 2052036 - DNA, 15 bp, Homo sapiens
tggggagtaagaaga

SEQ ID NO: 2052037 - DNA, 15 bp, Homo sapiens
ggggagtaagaagac

SEQ ID NO: 2052038 - DNA, 15 bp, Homo sapiens
gggagtaagaagacc

SEQ ID NO: 2052039 - DNA, 15 bp, Homo sapiens
ggagtaagaagacca

SEQ ID NO: 2052040 - DNA, 15 bp, Homo sapiens
gagtaagaagaccag

SEQ ID NO: 2052041 - DNA, 15 bp, Homo sapiens
agtaagaagaccaga

SEQ ID NO: 2052042 - DNA, 15 bp, Homo sapiens
gtaagaagaccagag

SEQ ID NO: 2052043 - DNA, 15 bp, Homo sapiens
taagaagaccagaga

SEQ ID NO: 2052044 - DNA, 15 bp, Homo sapiens
aagaagaccagagaa

SEQ ID NO: 2052045 - DNA, 15 bp, Homo sapiens
agaagaccagagaag

SEQ ID NO: 2052046 - DNA, 15 bp, Homo sapiens
gaagaccagagaaga

SEQ ID NO: 2052047 - DNA, 15 bp, Homo sapiens
aagaccagagaagag

SEQ ID NO: 2052048 - DNA, 15 bp, Homo sapiens
agaccagagaagagc

SEQ ID NO: 2052049 - DNA, 15 bp, Homo sapiens
gaccagagaagagcc

SEQ ID NO: 2052050 - DNA, 15 bp, Homo sapiens
accagagaagagcca

SEQ ID NO: 2052051 - DNA, 15 bp, Homo sapiens
ccagagaagagccaa

SEQ ID NO: 2052052 - DNA, 15 bp, Homo sapiens
cagagaagagccaag

SEQ ID NO: 2052053 - DNA, 15 bp, Homo sapiens
agagaagagccaagg

SEQ ID NO: 2052054 - DNA, 15 bp, Homo sapiens
gagaagagccaaggt

SEQ ID NO: 2052055 - DNA, 15 bp, Homo sapiens
agaagagccaaggtc

SEQ ID NO: 2052056 - DNA, 15 bp, Homo sapiens
gaagagccaaggtca

SEQ ID NO: 2052057 - DNA, 15 bp, Homo sapiens
aagagccaaggtcag

SEQ ID NO: 2052058 - DNA, 15 bp, Homo sapiens
agagccaaggtcagc

SEQ ID NO: 2052059 - DNA, 15 bp, Homo sapiens
gagccaaggtcagcc

SEQ ID NO: 2052060 - DNA, 15 bp, Homo sapiens
agccaaggtcagcct

SEQ ID NO: 2052061 - DNA, 15 bp, Homo sapiens
gccaaggtcagccta

SEQ ID NO: 2052062 - DNA, 15 bp, Homo sapiens
ccaaggtcagcctat

SEQ ID NO: 2052063 - DNA, 15 bp, Homo sapiens
caaggtcagcctatc

SEQ ID NO: 2052064 - DNA, 15 bp, Homo sapiens
aaggtcagcctatca

SEQ ID NO: 2052065 - DNA, 15 bp, Homo sapiens
aggtcagcctatcaa

SEQ ID NO: 2052066 - DNA, 15 bp, Homo sapiens
ggtcagcctatcaaa

SEQ ID NO: 2052067 - DNA, 15 bp, Homo sapiens
gtcagcctatcaaag

SEQ ID NO: 2052068 - DNA, 15 bp, Homo sapiens
tcagcctatcaaagg

SEQ ID NO: 2052069 - DNA, 15 bp, Homo sapiens
cagcctatcaaagga

SEQ ID NO: 2052070 - DNA, 15 bp, Homo sapiens
agcctatcaaaggac

SEQ ID NO: 2052071 - DNA, 15 bp, Homo sapiens
gcctatcaaaggact

SEQ ID NO: 2052072 - DNA, 15 bp, Homo sapiens
cctatcaaaggacta

SEQ ID NO: 2052073 - DNA, 15 bp, Homo sapiens
ctatcaaaggactag

SEQ ID NO: 2052074 - DNA, 15 bp, Homo sapiens
tatcaaaggactagg

SEQ ID NO: 2052075 - DNA, 15 bp, Homo sapiens
atcaaaggactaggg

SEQ ID NO: 2052076 - DNA, 15 bp, Homo sapiens
tcaaaggactaggga

SEQ ID NO: 2052077 - DNA, 15 bp, Homo sapiens
caaaggactagggag

SEQ ID NO: 2052078 - DNA, 15 bp, Homo sapiens
aaaggactagggaga

SEQ ID NO: 2052079 - DNA, 15 bp, Homo sapiens
aaggactagggagaa

SEQ ID NO: 2052080 - DNA, 15 bp, Homo sapiens
aggactagggagaaa

SEQ ID NO: 2052081 - DNA, 15 bp, Homo sapiens
ggactagggagaaaa

SEQ ID NO: 2052082 - DNA, 15 bp, Homo sapiens
gactagggagaaaaa

SEQ ID NO: 2052083 - DNA, 15 bp, Homo sapiens
actagggagaaaaac

SEQ ID NO: 2052084 - DNA, 15 bp, Homo sapiens
ctagggagaaaaacg

SEQ ID NO: 2052085 - DNA, 15 bp, Homo sapiens
tagggagaaaaacga

SEQ ID NO: 2052086 - DNA, 15 bp, Homo sapiens
agggagaaaaacgat

SEQ ID NO: 2052087 - DNA, 15 bp, Homo sapiens
gggagaaaaacgata

SEQ ID NO: 2052088 - DNA, 15 bp, Homo sapiens
ggagaaaaacgatag

SEQ ID NO: 2052089 - DNA, 15 bp, Homo sapiens
gagaaaaacgataga

SEQ ID NO: 2052090 - DNA, 15 bp, Homo sapiens
agaaaaacgatagaa

SEQ ID NO: 2052091 - DNA, 15 bp, Homo sapiens
gaaaaacgatagaag

SEQ ID NO: 2052092 - DNA, 15 bp, Homo sapiens
aaaaacgatagaagc

SEQ ID NO: 2052093 - DNA, 15 bp, Homo sapiens
aaaacgatagaagca

SEQ ID NO: 2052094 - DNA, 15 bp, Homo sapiens
aaacgatagaagcaa

SEQ ID NO: 2052095 - DNA, 15 bp, Homo sapiens
aacgatagaagcaaa

SEQ ID NO: 2052096 - DNA, 15 bp, Homo sapiens
acgatagaagcaaag

SEQ ID NO: 2052097 - DNA, 15 bp, Homo sapiens
cgatagaagcaaaga

SEQ ID NO: 2052098 - DNA, 15 bp, Homo sapiens
gatagaagcaaagag

SEQ ID NO: 2052099 - DNA, 15 bp, Homo sapiens
atagaagcaaagaga

SEQ ID NO: 2052100 - DNA, 15 bp, Homo sapiens
tagaagcaaagagaa

SEQ ID NO: 2052101 - DNA, 15 bp, Homo sapiens
agaagcaaagagaag

SEQ ID NO: 2052102 - DNA, 15 bp, Homo sapiens
gaagcaaagagaagc

SEQ ID NO: 2052103 - DNA, 15 bp, Homo sapiens
aagcaaagagaagcc

SEQ ID NO: 2052104 - DNA, 15 bp, Homo sapiens
agcaaagagaagccg

SEQ ID NO: 2052105 - DNA, 15 bp, Homo sapiens
gcaaagagaagccgc

SEQ ID NO: 2052106 - DNA, 15 bp, Homo sapiens
caaagagaagccgca

SEQ ID NO: 2052107 - DNA, 15 bp, Homo sapiens
aaagagaagccgcag

SEQ ID NO: 2052108 - DNA, 15 bp, Homo sapiens
aagagaagccgcagc

SEQ ID NO: 2052109 - DNA, 15 bp, Homo sapiens
agagaagccgcagcc

SEQ ID NO: 2052110 - DNA, 15 bp, Homo sapiens
gagaagccgcagcct

SEQ ID NO: 2052111 - DNA, 15 bp, Homo sapiens
agaagccgcagcctg

SEQ ID NO: 2052112 - DNA, 15 bp, Homo sapiens
gaagccgcagcctgg

SEQ ID NO: 2052113 - DNA, 15 bp, Homo sapiens
aagccgcagcctgga

SEQ ID NO: 2052114 - DNA, 15 bp, Homo sapiens
agccgcagcctggag

SEQ ID NO: 2052115 - DNA, 15 bp, Homo sapiens
gccgcagcctggaga

SEQ ID NO: 2052116 - DNA, 15 bp, Homo sapiens
ccgcagcctggagaa

SEQ ID NO: 2052117 - DNA, 15 bp, Homo sapiens
cgcagcctggagaaa

SEQ ID NO: 2052118 - DNA, 15 bp, Homo sapiens
gcagcctggagaaaa

SEQ ID NO: 2052119 - DNA, 15 bp, Homo sapiens
cagcctggagaaaat

SEQ ID NO: 2052120 - DNA, 15 bp, Homo sapiens
agcctggagaaaatc

SEQ ID NO: 2052121 - DNA, 15 bp, Homo sapiens
gcctggagaaaatca

SEQ ID NO: 2052122 - DNA, 15 bp, Homo sapiens
cctggagaaaatcaa

SEQ ID NO: 2052123 - DNA, 15 bp, Homo sapiens
ctggagaaaatcaat

SEQ ID NO: 2052124 - DNA, 15 bp, Homo sapiens
tggagaaaatcaatt

SEQ ID NO: 2052125 - DNA, 15 bp, Homo sapiens
ggagaaaatcaatta

SEQ ID NO: 2052126 - DNA, 15 bp, Homo sapiens
gagaaaatcaattaa

SEQ ID NO: 2052127 - DNA, 15 bp, Homo sapiens
agaaaatcaattaat

SEQ ID NO: 2052128 - DNA, 15 bp, Homo sapiens
gaaaatcaattaatg

SEQ ID NO: 2052129 - DNA, 15 bp, Homo sapiens
aaaatcaattaatgt

SEQ ID NO: 2052130 - DNA, 15 bp, Homo sapiens
aaatcaattaatgtc

SEQ ID NO: 2052131 - DNA, 15 bp, Homo sapiens
aatcaattaatgtca

SEQ ID NO: 2052132 - DNA, 15 bp, Homo sapiens
atcaattaatgtcag

SEQ ID NO: 2052133 - DNA, 15 bp, Homo sapiens
tcaattaatgtcagt

SEQ ID NO: 2052134 - DNA, 15 bp, Homo sapiens
caattaatgtcagta

SEQ ID NO: 2052135 - DNA, 15 bp, Homo sapiens
aattaatgtcagtag

SEQ ID NO: 2052136 - DNA, 15 bp, Homo sapiens
attaatgtcagtaga

SEQ ID NO: 2052137 - DNA, 15 bp, Homo sapiens
ttaatgtcagtagat

SEQ ID NO: 2052138 - DNA, 15 bp, Homo sapiens
taatgtcagtagatg

SEQ ID NO: 2052139 - DNA, 15 bp, Homo sapiens
aatgtcagtagatgg

SEQ ID NO: 2052140 - DNA, 15 bp, Homo sapiens
atgtcagtagatggg

SEQ ID NO: 2052141 - DNA, 15 bp, Homo sapiens
tgtcagtagatgggg

SEQ ID NO: 2052142 - DNA, 15 bp, Homo sapiens
gtcagtagatgggga

SEQ ID NO: 2052143 - DNA, 15 bp, Homo sapiens
tcagtagatggggag

SEQ ID NO: 2052144 - DNA, 15 bp, Homo sapiens
cagtagatggggagg

SEQ ID NO: 2052145 - DNA, 15 bp, Homo sapiens
agtagatggggagga

SEQ ID NO: 2052146 - DNA, 15 bp, Homo sapiens
gtagatggggaggag

SEQ ID NO: 2052147 - DNA, 15 bp, Homo sapiens
tagatggggaggagg

SEQ ID NO: 2052148 - DNA, 15 bp, Homo sapiens
agatggggaggaggg

SEQ ID NO: 2052149 - DNA, 15 bp, Homo sapiens
gatggggaggaggga

SEQ ID NO: 2052150 - DNA, 15 bp, Homo sapiens
atggggaggagggag

SEQ ID NO: 2052151 - DNA, 15 bp, Homo sapiens
tggggaggagggagt

SEQ ID NO: 2052152 - DNA, 15 bp, Homo sapiens
ggggaggagggagta

SEQ ID NO: 2052153 - DNA, 15 bp, Homo sapiens
gggaggagggagtac

SEQ ID NO: 2052154 - DNA, 15 bp, Homo sapiens
ggaggagggagtaca

SEQ ID NO: 2052155 - DNA, 15 bp, Homo sapiens
gaggagggagtacag

SEQ ID NO: 2052156 - DNA, 15 bp, Homo sapiens
ggagggagtacagcc

SEQ ID NO: 2052157 - DNA, 15 bp, Homo sapiens
gagggagtacagccg

SEQ ID NO: 2052158 - DNA, 15 bp, Homo sapiens
agggagtacagccgg

SEQ ID NO: 2052159 - DNA, 15 bp, Homo sapiens
gggagtacagccggg

SEQ ID NO: 2052160 - DNA, 15 bp, Homo sapiens
ggagtacagccggga

SEQ ID NO: 2052161 - DNA, 15 bp, Homo sapiens
gagtacagccgggac

SEQ ID NO: 2052162 - DNA, 15 bp, Homo sapiens
agtacagccgggacc

SEQ ID NO: 2052163 - DNA, 15 bp, Homo sapiens
gtacagccgggaccc

SEQ ID NO: 2052164 - DNA, 15 bp, Homo sapiens
tacagccgggaccca

SEQ ID NO: 2052165 - DNA, 15 bp, Homo sapiens
acagccgggacccaa

SEQ ID NO: 2052166 - DNA, 15 bp, Homo sapiens
cagccgggacccaag

SEQ ID NO: 2052167 - DNA, 15 bp, Homo sapiens
agccgggacccaagg

SEQ ID NO: 2052168 - DNA, 15 bp, Homo sapiens
gccgggacccaaggc

SEQ ID NO: 2052169 - DNA, 15 bp, Homo sapiens
ccgggacccaaggca

SEQ ID NO: 2052170 - DNA, 15 bp, Homo sapiens
cgggacccaaggcat

SEQ ID NO: 2052171 - DNA, 15 bp, Homo sapiens
gggacccaaggcata

SEQ ID NO: 2052172 - DNA, 15 bp, Homo sapiens
ggacccaaggcatat

SEQ ID NO: 2052173 - DNA, 15 bp, Homo sapiens
gacccaaggcatatg

SEQ ID NO: 2052174 - DNA, 15 bp, Homo sapiens
acccaaggcatatgc

SEQ ID NO: 2052175 - DNA, 15 bp, Homo sapiens
cccaaggcatatgcc

SEQ ID NO: 2052176 - DNA, 15 bp, Homo sapiens
ccaaggcatatgcct

SEQ ID NO: 2052177 - DNA, 15 bp, Homo sapiens
caaggcatatgcctc

SEQ ID NO: 2052178 - DNA, 15 bp, Homo sapiens
aaggcatatgcctcc

SEQ ID NO: 2052179 - DNA, 15 bp, Homo sapiens
aggcatatgcctccc

SEQ ID NO: 2052180 - DNA, 15 bp, Homo sapiens
ggcatatgcctcccc

SEQ ID NO: 2052181 - DNA, 15 bp, Homo sapiens
gcatatgcctcccct

SEQ ID NO: 2052182 - DNA, 15 bp, Homo sapiens
catatgcctcccctg

SEQ ID NO: 2052183 - DNA, 15 bp, Homo sapiens
atatgcctcccctgg

SEQ ID NO: 2052184 - DNA, 15 bp, Homo sapiens
tatgcctcccctgga

SEQ ID NO: 2052185 - DNA, 15 bp, Homo sapiens
atgcctcccctggag

SEQ ID NO: 2052186 - DNA, 15 bp, Homo sapiens
tgcctcccctggagg

SEQ ID NO: 2052187 - DNA, 15 bp, Homo sapiens
gcctcccctggaggg

SEQ ID NO: 2052188 - DNA, 15 bp, Homo sapiens
cctcccctggagggg

SEQ ID NO: 2052189 - DNA, 15 bp, Homo sapiens
ctcccctggaggggc

SEQ ID NO: 2052190 - DNA, 15 bp, Homo sapiens
tcccctggaggggca

SEQ ID NO: 2052191 - DNA, 15 bp, Homo sapiens
cccctggaggggcat

SEQ ID NO: 2052192 - DNA, 15 bp, Homo sapiens
ccctggaggggcata

SEQ ID NO: 2052193 - DNA, 15 bp, Homo sapiens
cctggaggggcatag

SEQ ID NO: 2052194 - DNA, 15 bp, Homo sapiens
ctggaggggcataga

SEQ ID NO: 2052195 - DNA, 15 bp, Homo sapiens
tggaggggcatagag

SEQ ID NO: 2052196 - DNA, 15 bp, Homo sapiens
ggaggggcatagaga

SEQ ID NO: 2052197 - DNA, 15 bp, Homo sapiens
gaggggcatagagag

SEQ ID NO: 2052198 - DNA, 15 bp, Homo sapiens
aggggcatagagagg

SEQ ID NO: 2052199 - DNA, 15 bp, Homo sapiens
ggggcatagagaggg

SEQ ID NO: 2052200 - DNA, 15 bp, Homo sapiens
gggcatagagaggga

SEQ ID NO: 2052201 - DNA, 15 bp, Homo sapiens
ggcatagagagggat

SEQ ID NO: 2052202 - DNA, 15 bp, Homo sapiens
gcatagagagggata

SEQ ID NO: 2052203 - DNA, 15 bp, Homo sapiens
catagagagggataa

SEQ ID NO: 2052204 - DNA, 15 bp, Homo sapiens
atagagagggataag

SEQ ID NO: 2052205 - DNA, 15 bp, Homo sapiens
tagagagggataagg

SEQ ID NO: 2052206 - DNA, 15 bp, Homo sapiens
agagagggataaggg

SEQ ID NO: 2052207 - DNA, 15 bp, Homo sapiens
gagagggataagggg

SEQ ID NO: 2052208 - DNA, 15 bp, Homo sapiens
agagggataaggggg

SEQ ID NO: 2052209 - DNA, 15 bp, Homo sapiens
gagggataaggggga

SEQ ID NO: 2052210 - DNA, 15 bp, Homo sapiens
agggataagggggaa

SEQ ID NO: 2052211 - DNA, 15 bp, Homo sapiens
gggataagggggaag

SEQ ID NO: 2052212 - DNA, 15 bp, Homo sapiens
ggataagggggaagc

SEQ ID NO: 2052213 - DNA, 15 bp, Homo sapiens
gataagggggaagca

SEQ ID NO: 2052214 - DNA, 15 bp, Homo sapiens
ataagggggaagcag

SEQ ID NO: 2052215 - DNA, 15 bp, Homo sapiens
taagggggaagcaga

SEQ ID NO: 2052216 - DNA, 15 bp, Homo sapiens
aagggggaagcagat

SEQ ID NO: 2052217 - DNA, 15 bp, Homo sapiens
agggggaagcagatg

SEQ ID NO: 2052218 - DNA, 15 bp, Homo sapiens
gggggaagcagatgt

SEQ ID NO: 2052219 - DNA, 15 bp, Homo sapiens
ggggaagcagatgtg

SEQ ID NO: 2052220 - DNA, 15 bp, Homo sapiens
gggaagcagatgtgt

SEQ ID NO: 2052221 - DNA, 15 bp, Homo sapiens
ggaagcagatgtgtg

SEQ ID NO: 2052222 - DNA, 15 bp, Homo sapiens
gaagcagatgtgtgt

SEQ ID NO: 2052223 - DNA, 15 bp, Homo sapiens
aagcagatgtgtgta

SEQ ID NO: 2052224 - DNA, 15 bp, Homo sapiens
agcagatgtgtgtat

SEQ ID NO: 2052225 - DNA, 15 bp, Homo sapiens
gcagatgtgtgtatg

SEQ ID NO: 2052226 - DNA, 15 bp, Homo sapiens
cagatgtgtgtatgg

SEQ ID NO: 2052227 - DNA, 15 bp, Homo sapiens
agatgtgtgtatggc

SEQ ID NO: 2052228 - DNA, 15 bp, Homo sapiens
gatgtgtgtatggca

SEQ ID NO: 2052229 - DNA, 15 bp, Homo sapiens
atgtgtgtatggcag

SEQ ID NO: 2052230 - DNA, 15 bp, Homo sapiens
tgtgtgtatggcagt

SEQ ID NO: 2052231 - DNA, 15 bp, Homo sapiens
gtgtgtatggcagtc

SEQ ID NO: 2052232 - DNA, 15 bp, Homo sapiens
tgtgtatggcagtct

SEQ ID NO: 2052233 - DNA, 15 bp, Homo sapiens
gtgtatggcagtctg

SEQ ID NO: 2052234 - DNA, 15 bp, Homo sapiens
tgtatggcagtctgt

SEQ ID NO: 2052235 - DNA, 15 bp, Homo sapiens
gtatggcagtctgtc

SEQ ID NO: 2052236 - DNA, 15 bp, Homo sapiens
tatggcagtctgtct

SEQ ID NO: 2052237 - DNA, 15 bp, Homo sapiens
atggcagtctgtctc

SEQ ID NO: 2052238 - DNA, 15 bp, Homo sapiens
tggcagtctgtctct

SEQ ID NO: 2052239 - DNA, 15 bp, Homo sapiens
ggcagtctgtctctg

SEQ ID NO: 2052240 - DNA, 15 bp, Homo sapiens
gcagtctgtctctga

SEQ ID NO: 2052241 - DNA, 15 bp, Homo sapiens
cagtctgtctctgag

SEQ ID NO: 2052242 - DNA, 15 bp, Homo sapiens
agtctgtctctgagc

SEQ ID NO: 2052243 - DNA, 15 bp, Homo sapiens
gtctgtctctgagct

SEQ ID NO: 2052244 - DNA, 15 bp, Homo sapiens
tctgtctctgagctg

SEQ ID NO: 2052245 - DNA, 15 bp, Homo sapiens
ctgtctctgagctga

SEQ ID NO: 2052246 - DNA, 15 bp, Homo sapiens
tgtctctgagctgag

SEQ ID NO: 2052247 - DNA, 15 bp, Homo sapiens
gtctctgagctgagg

SEQ ID NO: 2052248 - DNA, 15 bp, Homo sapiens
tctctgagctgaggg

SEQ ID NO: 2052249 - DNA, 15 bp, Homo sapiens
ctctgagctgagggg

SEQ ID NO: 2052250 - DNA, 15 bp, Homo sapiens
tctgagctgaggggc

SEQ ID NO: 2052251 - DNA, 15 bp, Homo sapiens
ctgagctgaggggca

SEQ ID NO: 2052252 - DNA, 15 bp, Homo sapiens
tgagctgaggggcaa

SEQ ID NO: 2052253 - DNA, 15 bp, Homo sapiens
gagctgaggggcaaa

SEQ ID NO: 2052254 - DNA, 15 bp, Homo sapiens
agctgaggggcaaaa

SEQ ID NO: 2052255 - DNA, 15 bp, Homo sapiens
gctgaggggcaaaaa

SEQ ID NO: 2052256 - DNA, 15 bp, Homo sapiens
ctgaggggcaaaaac

SEQ ID NO: 2052257 - DNA, 15 bp, Homo sapiens
tgaggggcaaaaact

SEQ ID NO: 2052258 - DNA, 15 bp, Homo sapiens
gaggggcaaaaacta

SEQ ID NO: 2052259 - DNA, 15 bp, Homo sapiens
aggggcaaaaactag

SEQ ID NO: 2052260 - DNA, 15 bp, Homo sapiens
ggggcaaaaactagc

SEQ ID NO: 2052261 - DNA, 15 bp, Homo sapiens
gggcaaaaactagca

SEQ ID NO: 2052262 - DNA, 15 bp, Homo sapiens
ggcaaaaactagcaa

SEQ ID NO: 2052263 - DNA, 15 bp, Homo sapiens
gcaaaaactagcaaa

SEQ ID NO: 2052264 - DNA, 15 bp, Homo sapiens
caaaaactagcaaag

SEQ ID NO: 2052265 - DNA, 15 bp, Homo sapiens
aaaaactagcaaagc

SEQ ID NO: 2052266 - DNA, 15 bp, Homo sapiens
aaaactagcaaagct

SEQ ID NO: 2052267 - DNA, 15 bp, Homo sapiens
aaactagcaaagctt

SEQ ID NO: 2052268 - DNA, 15 bp, Homo sapiens
aactagcaaagcttg

SEQ ID NO: 2052269 - DNA, 15 bp, Homo sapiens
actagcaaagcttgc

SEQ ID NO: 2052270 - DNA, 15 bp, Homo sapiens
ctagcaaagcttgcc

SEQ ID NO: 2052271 - DNA, 15 bp, Homo sapiens
tagcaaagcttgcct

SEQ ID NO: 2052272 - DNA, 15 bp, Homo sapiens
agcaaagcttgcctt

SEQ ID NO: 2052273 - DNA, 15 bp, Homo sapiens
gcaaagcttgccttc

SEQ ID NO: 2052274 - DNA, 15 bp, Homo sapiens
caaagcttgccttcc

SEQ ID NO: 2052275 - DNA, 15 bp, Homo sapiens
aaagcttgccttccc

SEQ ID NO: 2052276 - DNA, 15 bp, Homo sapiens
aagcttgccttccct

SEQ ID NO: 2052277 - DNA, 15 bp, Homo sapiens
agcttgccttccctt

SEQ ID NO: 2052278 - DNA, 15 bp, Homo sapiens
gcttgccttcccttc

SEQ ID NO: 2052279 - DNA, 15 bp, Homo sapiens
cttgccttcccttct

SEQ ID NO: 2052280 - DNA, 15 bp, Homo sapiens
ttgccttcccttctt

SEQ ID NO: 2052281 - DNA, 15 bp, Homo sapiens
tgccttcccttcttc

SEQ ID NO: 2052282 - DNA, 15 bp, Homo sapiens
gccttcccttcttcc

SEQ ID NO: 2052283 - DNA, 15 bp, Homo sapiens
ccttcccttcttccg

SEQ ID NO: 2052284 - DNA, 15 bp, Homo sapiens
cttcccttcttccgg

SEQ ID NO: 2052285 - DNA, 15 bp, Homo sapiens
ttcccttcttccggg

SEQ ID NO: 2052286 - DNA, 15 bp, Homo sapiens
tcccttcttccgggc

SEQ ID NO: 2052287 - DNA, 15 bp, Homo sapiens
cccttcttccgggct

SEQ ID NO: 2052288 - DNA, 15 bp, Homo sapiens
ccttcttccgggctt

SEQ ID NO: 2052289 - DNA, 15 bp, Homo sapiens
cttcttccgggcttt

SEQ ID NO: 2052290 - DNA, 15 bp, Homo sapiens
ttcttccgggcttta

SEQ ID NO: 2052291 - DNA, 15 bp, Homo sapiens
tcttccgggctttaa

SEQ ID NO: 2052292 - DNA, 15 bp, Homo sapiens
cttccgggctttaag

SEQ ID NO: 2052293 - DNA, 15 bp, Homo sapiens
ttccgggctttaaga

SEQ ID NO: 2052294 - DNA, 15 bp, Homo sapiens
tccgggctttaagaa

SEQ ID NO: 2052295 - DNA, 15 bp, Homo sapiens
ccgggctttaagaag

SEQ ID NO: 2052296 - DNA, 15 bp, Homo sapiens
cgggctttaagaagg

SEQ ID NO: 2052297 - DNA, 15 bp, Homo sapiens
gggctttaagaaggg

SEQ ID NO: 2052298 - DNA, 15 bp, Homo sapiens
ggctttaagaagggg

SEQ ID NO: 2052299 - DNA, 15 bp, Homo sapiens
gctttaagaaggggg

SEQ ID NO: 2052300 - DNA, 15 bp, Homo sapiens
ctttaagaaggggga

SEQ ID NO: 2052301 - DNA, 15 bp, Homo sapiens
tttaagaagggggac

SEQ ID NO: 2052302 - DNA, 15 bp, Homo sapiens
ttaagaagggggact

SEQ ID NO: 2052303 - DNA, 15 bp, Homo sapiens
taagaagggggactg

SEQ ID NO: 2052304 - DNA, 15 bp, Homo sapiens
aagaagggggactgt

SEQ ID NO: 2052305 - DNA, 15 bp, Homo sapiens
agaagggggactgtc

SEQ ID NO: 2052306 - DNA, 15 bp, Homo sapiens
gaagggggactgtcc

SEQ ID NO: 2052307 - DNA, 15 bp, Homo sapiens
aagggggactgtcct

SEQ ID NO: 2052308 - DNA, 15 bp, Homo sapiens
agggggactgtcctg

SEQ ID NO: 2052309 - DNA, 15 bp, Homo sapiens
gggggactgtcctgc

SEQ ID NO: 2052310 - DNA, 15 bp, Homo sapiens
ggggactgtcctgcc

SEQ ID NO: 2052311 - DNA, 15 bp, Homo sapiens
gggactgtcctgcca

SEQ ID NO: 2052312 - DNA, 15 bp, Homo sapiens
ggactgtcctgccag

SEQ ID NO: 2052313 - DNA, 15 bp, Homo sapiens
gactgtcctgccaga

SEQ ID NO: 2052314 - DNA, 15 bp, Homo sapiens
actgtcctgccagag

SEQ ID NO: 2052315 - DNA, 15 bp, Homo sapiens
ctgtcctgccagagc

SEQ ID NO: 2052316 - DNA, 15 bp, Homo sapiens
tgtcctgccagagca

SEQ ID NO: 2052317 - DNA, 15 bp, Homo sapiens
gtcctgccagagcaa

SEQ ID NO: 2052318 - DNA, 15 bp, Homo sapiens
tcctgccagagcaaa

SEQ ID NO: 2052319 - DNA, 15 bp, Homo sapiens
cctgccagagcaaat

SEQ ID NO: 2052320 - DNA, 15 bp, Homo sapiens
ctgccagagcaaatt

SEQ ID NO: 2052321 - DNA, 15 bp, Homo sapiens
tgccagagcaaattg

SEQ ID NO: 2052322 - DNA, 15 bp, Homo sapiens
gccagagcaaattga

SEQ ID NO: 2052323 - DNA, 15 bp, Homo sapiens
ccagagcaaattgaa

SEQ ID NO: 2052324 - DNA, 15 bp, Homo sapiens
cagagcaaattgaaa

SEQ ID NO: 2052325 - DNA, 15 bp, Homo sapiens
agagcaaattgaaag

SEQ ID NO: 2052326 - DNA, 15 bp, Homo sapiens
gagcaaattgaaaga

SEQ ID NO: 2052327 - DNA, 15 bp, Homo sapiens
agcaaattgaaagac

SEQ ID NO: 2052328 - DNA, 15 bp, Homo sapiens
gcaaattgaaagact

SEQ ID NO: 2052329 - DNA, 15 bp, Homo sapiens
caaattgaaagactg

SEQ ID NO: 2052330 - DNA, 15 bp, Homo sapiens
aaattgaaagactgt

SEQ ID NO: 2052331 - DNA, 15 bp, Homo sapiens
aattgaaagactgtg

SEQ ID NO: 2052332 - DNA, 15 bp, Homo sapiens
attgaaagactgtgg

SEQ ID NO: 2052333 - DNA, 15 bp, Homo sapiens
ttgaaagactgtgga

SEQ ID NO: 2052334 - DNA, 15 bp, Homo sapiens
tgaaagactgtggag

SEQ ID NO: 2052335 - DNA, 15 bp, Homo sapiens
gaaagactgtggagc

SEQ ID NO: 2052336 - DNA, 15 bp, Homo sapiens
aaagactgtggagcc

SEQ ID NO: 2052337 - DNA, 15 bp, Homo sapiens
aagactgtggagccc

SEQ ID NO: 2052338 - DNA, 15 bp, Homo sapiens
agactgtggagccca

SEQ ID NO: 2052339 - DNA, 15 bp, Homo sapiens
gactgtggagcccag

SEQ ID NO: 2052340 - DNA, 15 bp, Homo sapiens
actgtggagcccagg

SEQ ID NO: 2052341 - DNA, 15 bp, Homo sapiens
ctgtggagcccaggg

SEQ ID NO: 2052342 - DNA, 15 bp, Homo sapiens
tgtggagcccagggg

SEQ ID NO: 2052343 - DNA, 15 bp, Homo sapiens
gtggagcccaggggt

SEQ ID NO: 2052344 - DNA, 15 bp, Homo sapiens
tggagcccaggggtc

SEQ ID NO: 2052345 - DNA, 15 bp, Homo sapiens
ggagcccaggggtca

SEQ ID NO: 2052346 - DNA, 15 bp, Homo sapiens
gagcccaggggtcag

SEQ ID NO: 2052347 - DNA, 15 bp, Homo sapiens
agcccaggggtcagg

SEQ ID NO: 2052348 - DNA, 15 bp, Homo sapiens
gcccaggggtcagga

SEQ ID NO: 2052349 - DNA, 15 bp, Homo sapiens
cccaggggtcaggac

SEQ ID NO: 2052350 - DNA, 15 bp, Homo sapiens
ccaggggtcaggact

SEQ ID NO: 2052351 - DNA, 15 bp, Homo sapiens
caggggtcaggactg

SEQ ID NO: 2052352 - DNA, 15 bp, Homo sapiens
aggggtcaggactgg

SEQ ID NO: 2052353 - DNA, 15 bp, Homo sapiens
ggggtcaggactggg

SEQ ID NO: 2052354 - DNA, 15 bp, Homo sapiens
gggtcaggactggga

SEQ ID NO: 2052355 - DNA, 15 bp, Homo sapiens
ggtcaggactgggag

SEQ ID NO: 2052356 - DNA, 15 bp, Homo sapiens
gtcaggactgggagt

SEQ ID NO: 2052357 - DNA, 15 bp, Homo sapiens
tcaggactgggagtt

SEQ ID NO: 2052358 - DNA, 15 bp, Homo sapiens
caggactgggagttc

SEQ ID NO: 2052359 - DNA, 15 bp, Homo sapiens
aggactgggagttcg

SEQ ID NO: 2052360 - DNA, 15 bp, Homo sapiens
ggactgggagttcgc

SEQ ID NO: 2052361 - DNA, 15 bp, Homo sapiens
gactgggagttcgcc

SEQ ID NO: 2052362 - DNA, 15 bp, Homo sapiens
actgggagttcgcca

SEQ ID NO: 2052363 - DNA, 15 bp, Homo sapiens
ctgggagttcgccag

SEQ ID NO: 2052364 - DNA, 15 bp, Homo sapiens
tgggagttcgccagc

SEQ ID NO: 2052365 - DNA, 15 bp, Homo sapiens
gggagttcgccagcc

SEQ ID NO: 2052366 - DNA, 15 bp, Homo sapiens
ggagttcgccagccg

SEQ ID NO: 2052367 - DNA, 15 bp, Homo sapiens
gagttcgccagccga

SEQ ID NO: 2052368 - DNA, 15 bp, Homo sapiens
agttcgccagccgaa

SEQ ID NO: 2052369 - DNA, 15 bp, Homo sapiens
gttcgccagccgaac

SEQ ID NO: 2052370 - DNA, 15 bp, Homo sapiens
ttcgccagccgaact

SEQ ID NO: 2052371 - DNA, 15 bp, Homo sapiens
tcgccagccgaactc

SEQ ID NO: 2052372 - DNA, 15 bp, Homo sapiens
cgccagccgaactcc

SEQ ID NO: 2052373 - DNA, 15 bp, Homo sapiens
gccagccgaactcca

SEQ ID NO: 2052374 - DNA, 15 bp, Homo sapiens
ccagccgaactccag

SEQ ID NO: 2052375 - DNA, 15 bp, Homo sapiens
cagccgaactccagc

SEQ ID NO: 2052376 - DNA, 15 bp, Homo sapiens
agccgaactccagcc

SEQ ID NO: 2052377 - DNA, 15 bp, Homo sapiens
gccgaactccagcct

SEQ ID NO: 2052378 - DNA, 15 bp, Homo sapiens
cgaactccagcctgc

SEQ ID NO: 2052379 - DNA, 15 bp, Homo sapiens
gaactccagcctgct

SEQ ID NO: 2052380 - DNA, 15 bp, Homo sapiens
aactccagcctgctc

SEQ ID NO: 2052381 - DNA, 15 bp, Homo sapiens
actccagcctgctcc

SEQ ID NO: 2052382 - DNA, 15 bp, Homo sapiens
ctccagcctgctcct

SEQ ID NO: 2052383 - DNA, 15 bp, Homo sapiens
tccagcctgctcctc

SEQ ID NO: 2052384 - DNA, 15 bp, Homo sapiens
ccagcctgctcctcc

SEQ ID NO: 2052385 - DNA, 15 bp, Homo sapiens
cagcctgctcctcca

SEQ ID NO: 2052386 - DNA, 15 bp, Homo sapiens
agcctgctcctccat

SEQ ID NO: 2052387 - DNA, 15 bp, Homo sapiens
gcctgctcctccatc

SEQ ID NO: 2052388 - DNA, 15 bp, Homo sapiens
cctgctcctccatcc

SEQ ID NO: 2052389 - DNA, 15 bp, Homo sapiens
ctgctcctccatcct

SEQ ID NO: 2052390 - DNA, 15 bp, Homo sapiens
tgctcctccatcctg

SEQ ID NO: 2052391 - DNA, 15 bp, Homo sapiens
gctcctccatcctgg

SEQ ID NO: 2052392 - DNA, 15 bp, Homo sapiens
ctcctccatcctgga

SEQ ID NO: 2052393 - DNA, 15 bp, Homo sapiens
tcctccatcctggat

SEQ ID NO: 2052394 - DNA, 15 bp, Homo sapiens
cctccatcctggatc

SEQ ID NO: 2052395 - DNA, 15 bp, Homo sapiens
ctccatcctggatcg

SEQ ID NO: 2052396 - DNA, 15 bp, Homo sapiens
tccatcctggatcgc

SEQ ID NO: 2052397 - DNA, 15 bp, Homo sapiens
ccatcctggatcgct

SEQ ID NO: 2052398 - DNA, 15 bp, Homo sapiens
catcctggatcgctc

SEQ ID NO: 2052399 - DNA, 15 bp, Homo sapiens
atcctggatcgctcc

SEQ ID NO: 2052400 - DNA, 15 bp, Homo sapiens
tcctggatcgctccg

SEQ ID NO: 2052401 - DNA, 15 bp, Homo sapiens
cctggatcgctccgg

SEQ ID NO: 2052402 - DNA, 15 bp, Homo sapiens
ctggatcgctccggg

SEQ ID NO: 2052403 - DNA, 15 bp, Homo sapiens
tggatcgctccgggt

SEQ ID NO: 2052404 - DNA, 15 bp, Homo sapiens
ggatcgctccgggtt

SEQ ID NO: 2052405 - DNA, 15 bp, Homo sapiens
gatcgctccgggttc

SEQ ID NO: 2052406 - DNA, 15 bp, Homo sapiens
atcgctccgggttct

SEQ ID NO: 2052407 - DNA, 15 bp, Homo sapiens
tcgctccgggttctg

SEQ ID NO: 2052408 - DNA, 15 bp, Homo sapiens
cgctccgggttctgt

SEQ ID NO: 2052409 - DNA, 15 bp, Homo sapiens
gctccgggttctgta

SEQ ID NO: 2052410 - DNA, 15 bp, Homo sapiens
ctccgggttctgtac

SEQ ID NO: 2052411 - DNA, 15 bp, Homo sapiens
tccgggttctgtacc

SEQ ID NO: 2052412 - DNA, 15 bp, Homo sapiens
ccgggttctgtaccc

SEQ ID NO: 2052413 - DNA, 15 bp, Homo sapiens
cgggttctgtacccc

SEQ ID NO: 2052414 - DNA, 15 bp, Homo sapiens
gggttctgtaccccg

SEQ ID NO: 2052415 - DNA, 15 bp, Homo sapiens
ggttctgtaccccgt

SEQ ID NO: 2052416 - DNA, 15 bp, Homo sapiens
gttctgtaccccgtg

SEQ ID NO: 2052417 - DNA, 15 bp, Homo sapiens
ttctgtaccccgtgg

SEQ ID NO: 2052418 - DNA, 15 bp, Homo sapiens
tctgtaccccgtgga

SEQ ID NO: 2052419 - DNA, 15 bp, Homo sapiens
ctgtaccccgtggag

SEQ ID NO: 2052420 - DNA, 15 bp, Homo sapiens
tgtaccccgtggagg

SEQ ID NO: 2052421 - DNA, 15 bp, Homo sapiens
gtaccccgtggagga

SEQ ID NO: 2052422 - DNA, 15 bp, Homo sapiens
taccccgtggaggaa

SEQ ID NO: 2052423 - DNA, 15 bp, Homo sapiens
accccgtggaggaac

SEQ ID NO: 2052424 - DNA, 15 bp, Homo sapiens
ccccgtggaggaaca

SEQ ID NO: 2052425 - DNA, 15 bp, Homo sapiens
cccgtggaggaacat

SEQ ID NO: 2052426 - DNA, 15 bp, Homo sapiens
ccgtggaggaacata

SEQ ID NO: 2052427 - DNA, 15 bp, Homo sapiens
cgtggaggaacatat

SEQ ID NO: 2052428 - DNA, 15 bp, Homo sapiens
gtggaggaacatatt

SEQ ID NO: 2052429 - DNA, 15 bp, Homo sapiens
tggaggaacatattc

SEQ ID NO: 2052430 - DNA, 15 bp, Homo sapiens
ggaggaacatattca

SEQ ID NO: 2052431 - DNA, 15 bp, Homo sapiens
gaggaacatattcaa

SEQ ID NO: 2052432 - DNA, 15 bp, Homo sapiens
aggaacatattcaag

SEQ ID NO: 2052433 - DNA, 15 bp, Homo sapiens
ggaacatattcaagg

SEQ ID NO: 2052434 - DNA, 15 bp, Homo sapiens
gaacatattcaaggg

SEQ ID NO: 2052435 - DNA, 15 bp, Homo sapiens
aacatattcaaggga

SEQ ID NO: 2052436 - DNA, 15 bp, Homo sapiens
acatattcaagggaa

SEQ ID NO: 2052437 - DNA, 15 bp, Homo sapiens
catattcaagggaac

SEQ ID NO: 2052438 - DNA, 15 bp, Homo sapiens
atattcaagggaacc

SEQ ID NO: 2052439 - DNA, 15 bp, Homo sapiens
tattcaagggaacct

SEQ ID NO: 2052440 - DNA, 15 bp, Homo sapiens
attcaagggaacctg

SEQ ID NO: 2052441 - DNA, 15 bp, Homo sapiens
ttcaagggaacctgg

SEQ ID NO: 2052442 - DNA, 15 bp, Homo sapiens
tcaagggaacctggg

SEQ ID NO: 2052443 - DNA, 15 bp, Homo sapiens
caagggaacctgggg

SEQ ID NO: 2052444 - DNA, 15 bp, Homo sapiens
aagggaacctggggg

SEQ ID NO: 2052445 - DNA, 15 bp, Homo sapiens
agggaacctgggggc

SEQ ID NO: 2052446 - DNA, 15 bp, Homo sapiens
gggaacctgggggca

SEQ ID NO: 2052447 - DNA, 15 bp, Homo sapiens
ggaacctgggggcag

SEQ ID NO: 2052448 - DNA, 15 bp, Homo sapiens
gaacctgggggcaga

SEQ ID NO: 2052449 - DNA, 15 bp, Homo sapiens
aacctgggggcagag

SEQ ID NO: 2052450 - DNA, 15 bp, Homo sapiens
acctgggggcagagg

SEQ ID NO: 2052451 - DNA, 15 bp, Homo sapiens
cctgggggcagaggg

SEQ ID NO: 2052452 - DNA, 15 bp, Homo sapiens
ctgggggcagagggc

SEQ ID NO: 2052453 - DNA, 15 bp, Homo sapiens
tgggggcagagggca

SEQ ID NO: 2052454 - DNA, 15 bp, Homo sapiens
gggggcagagggcaa

SEQ ID NO: 2052455 - DNA, 15 bp, Homo sapiens
ggggcagagggcaag

SEQ ID NO: 2052456 - DNA, 15 bp, Homo sapiens
gggcagagggcaagg

SEQ ID NO: 2052457 - DNA, 15 bp, Homo sapiens
ggcagagggcaaggc

SEQ ID NO: 2052458 - DNA, 15 bp, Homo sapiens
gcagagggcaaggcc

SEQ ID NO: 2052459 - DNA, 15 bp, Homo sapiens
cagagggcaaggcca

SEQ ID NO: 2052460 - DNA, 15 bp, Homo sapiens
agagggcaaggccaa

SEQ ID NO: 2052461 - DNA, 15 bp, Homo sapiens
gagggcaaggccaag

SEQ ID NO: 2052462 - DNA, 15 bp, Homo sapiens
agggcaaggccaagg

SEQ ID NO: 2052463 - DNA, 15 bp, Homo sapiens
gggcaaggccaaggg

SEQ ID NO: 2052464 - DNA, 15 bp, Homo sapiens
ggcaaggccaagggg

SEQ ID NO: 2052465 - DNA, 15 bp, Homo sapiens
gcaaggccaagggga

SEQ ID NO: 2052466 - DNA, 15 bp, Homo sapiens
caaggccaaggggag

SEQ ID NO: 2052467 - DNA, 15 bp, Homo sapiens
aaggccaaggggagg

SEQ ID NO: 2052468 - DNA, 15 bp, Homo sapiens
aggccaaggggaggg

SEQ ID NO: 2052469 - DNA, 15 bp, Homo sapiens
ggccaaggggagggg

SEQ ID NO: 2052470 - DNA, 15 bp, Homo sapiens
gccaaggggagggga

SEQ ID NO: 2052471 - DNA, 15 bp, Homo sapiens
ccaaggggaggggaa

SEQ ID NO: 2052472 - DNA, 15 bp, Homo sapiens
caaggggaggggaaa

SEQ ID NO: 2052473 - DNA, 15 bp, Homo sapiens
aaggggaggggaaat

SEQ ID NO: 2052474 - DNA, 15 bp, Homo sapiens
aggggaggggaaata

SEQ ID NO: 2052475 - DNA, 15 bp, Homo sapiens
ggggaggggaaatag

SEQ ID NO: 2052476 - DNA, 15 bp, Homo sapiens
gggaggggaaatagc

SEQ ID NO: 2052477 - DNA, 15 bp, Homo sapiens
ggaggggaaatagct

SEQ ID NO: 2052478 - DNA, 15 bp, Homo sapiens
gaggggaaatagctt

SEQ ID NO: 2052479 - DNA, 15 bp, Homo sapiens
aggggaaatagcttc

SEQ ID NO: 2052480 - DNA, 15 bp, Homo sapiens
ggggaaatagcttct

SEQ ID NO: 2052481 - DNA, 15 bp, Homo sapiens
gggaaatagcttcta

SEQ ID NO: 2052482 - DNA, 15 bp, Homo sapiens
ggaaatagcttctag

SEQ ID NO: 2052483 - DNA, 15 bp, Homo sapiens
gaaatagcttctaga

SEQ ID NO: 2052484 - DNA, 15 bp, Homo sapiens
aaatagcttctagaa

SEQ ID NO: 2052485 - DNA, 15 bp, Homo sapiens
aatagcttctagaaa

SEQ ID NO: 2052486 - DNA, 15 bp, Homo sapiens
atagcttctagaaac

SEQ ID NO: 2052487 - DNA, 15 bp, Homo sapiens
tagcttctagaaact

SEQ ID NO: 2052488 - DNA, 15 bp, Homo sapiens
agcttctagaaactt

SEQ ID NO: 2052489 - DNA, 15 bp, Homo sapiens
gcttctagaaacttc

SEQ ID NO: 2052490 - DNA, 15 bp, Homo sapiens
cttctagaaacttct

SEQ ID NO: 2052491 - DNA, 15 bp, Homo sapiens
ttctagaaacttctg

SEQ ID NO: 2052492 - DNA, 15 bp, Homo sapiens
tctagaaacttctgt

SEQ ID NO: 2052493 - DNA, 15 bp, Homo sapiens
ctagaaacttctgtg

SEQ ID NO: 2052494 - DNA, 15 bp, Homo sapiens
tagaaacttctgtgg

SEQ ID NO: 2052495 - DNA, 15 bp, Homo sapiens
agaaacttctgtgga

SEQ ID NO: 2052496 - DNA, 15 bp, Homo sapiens
gaaacttctgtggag

SEQ ID NO: 2052497 - DNA, 15 bp, Homo sapiens
aaacttctgtggaga

SEQ ID NO: 2052498 - DNA, 15 bp, Homo sapiens
aacttctgtggagac

SEQ ID NO: 2052499 - DNA, 15 bp, Homo sapiens
acttctgtggagaca

SEQ ID NO: 2052500 - DNA, 15 bp, Homo sapiens
cttctgtggagacag

SEQ ID NO: 2052501 - DNA, 15 bp, Homo sapiens
ttctgtggagacagg

SEQ ID NO: 2052502 - DNA, 15 bp, Homo sapiens
tctgtggagacaggc

SEQ ID NO: 2052503 - DNA, 15 bp, Homo sapiens
ctgtggagacaggca

SEQ ID NO: 2052504 - DNA, 15 bp, Homo sapiens
tgtggagacaggcaa

SEQ ID NO: 2052505 - DNA, 15 bp, Homo sapiens
gtggagacaggcaaa

SEQ ID NO: 2052506 - DNA, 15 bp, Homo sapiens
tggagacaggcaaaa

SEQ ID NO: 2052507 - DNA, 15 bp, Homo sapiens
ggagacaggcaaaac

SEQ ID NO: 2052508 - DNA, 15 bp, Homo sapiens
gagacaggcaaaact

SEQ ID NO: 2052509 - DNA, 15 bp, Homo sapiens
agacaggcaaaactc

SEQ ID NO: 2052510 - DNA, 15 bp, Homo sapiens
gacaggcaaaactct

SEQ ID NO: 2052511 - DNA, 15 bp, Homo sapiens
acaggcaaaactctt

SEQ ID NO: 2052512 - DNA, 15 bp, Homo sapiens
caggcaaaactcttt

SEQ ID NO: 2052513 - DNA, 15 bp, Homo sapiens
aggcaaaactctttt

SEQ ID NO: 2052514 - DNA, 15 bp, Homo sapiens
ggcaaaactcttttt

SEQ ID NO: 2052515 - DNA, 15 bp, Homo sapiens
gcaaaactctttttc

SEQ ID NO: 2052516 - DNA, 15 bp, Homo sapiens
caaaactctttttct

SEQ ID NO: 2052517 - DNA, 15 bp, Homo sapiens
aaaactctttttctg

SEQ ID NO: 2052518 - DNA, 15 bp, Homo sapiens
aaactctttttctgc

SEQ ID NO: 2052519 - DNA, 15 bp, Homo sapiens
aactctttttctgca

SEQ ID NO: 2052520 - DNA, 15 bp, Homo sapiens
actctttttctgcac

SEQ ID NO: 2052521 - DNA, 15 bp, Homo sapiens
ctctttttctgcaca

SEQ ID NO: 2052522 - DNA, 15 bp, Homo sapiens
tctttttctgcacac

SEQ ID NO: 2052523 - DNA, 15 bp, Homo sapiens
ctttttctgcacacg

SEQ ID NO: 2052524 - DNA, 15 bp, Homo sapiens
tttttctgcacacgt

SEQ ID NO: 2052525 - DNA, 15 bp, Homo sapiens
ttttctgcacacgtg

SEQ ID NO: 2052526 - DNA, 15 bp, Homo sapiens
tttctgcacacgtgt

SEQ ID NO: 2052527 - DNA, 15 bp, Homo sapiens
ttctgcacacgtgtc

SEQ ID NO: 2052528 - DNA, 15 bp, Homo sapiens
tctgcacacgtgtcc

SEQ ID NO: 2052529 - DNA, 15 bp, Homo sapiens
ctgcacacgtgtccc

SEQ ID NO: 2052530 - DNA, 15 bp, Homo sapiens
tgcacacgtgtccca

SEQ ID NO: 2052531 - DNA, 15 bp, Homo sapiens
gcacacgtgtcccat

SEQ ID NO: 2052532 - DNA, 15 bp, Homo sapiens
cacacgtgtcccatt

SEQ ID NO: 2052533 - DNA, 15 bp, Homo sapiens
acacgtgtcccattc

SEQ ID NO: 2052534 - DNA, 15 bp, Homo sapiens
cacgtgtcccattcc

SEQ ID NO: 2052535 - DNA, 15 bp, Homo sapiens
acgtgtcccattcct

SEQ ID NO: 2052536 - DNA, 15 bp, Homo sapiens
cgtgtcccattcctc

SEQ ID NO: 2052537 - DNA, 15 bp, Homo sapiens
gtgtcccattcctcc

SEQ ID NO: 2052538 - DNA, 15 bp, Homo sapiens
tgtcccattcctcct

SEQ ID NO: 2052539 - DNA, 15 bp, Homo sapiens
gtcccattcctcctc

SEQ ID NO: 2052540 - DNA, 15 bp, Homo sapiens
tcccattcctcctcc

SEQ ID NO: 2052541 - DNA, 15 bp, Homo sapiens
cccattcctcctccc

SEQ ID NO: 2052542 - DNA, 15 bp, Homo sapiens
ccattcctcctccct

SEQ ID NO: 2052543 - DNA, 15 bp, Homo sapiens
cattcctcctccctg

SEQ ID NO: 2052544 - DNA, 15 bp, Homo sapiens
attcctcctccctgt

SEQ ID NO: 2052545 - DNA, 15 bp, Homo sapiens
ttcctcctccctgta

SEQ ID NO: 2052546 - DNA, 15 bp, Homo sapiens
tcctcctccctgtag

SEQ ID NO: 2052547 - DNA, 15 bp, Homo sapiens
cctcctccctgtagt

SEQ ID NO: 2052548 - DNA, 15 bp, Homo sapiens
ctcctccctgtagtt

SEQ ID NO: 2052549 - DNA, 15 bp, Homo sapiens
tcctccctgtagttt

SEQ ID NO: 2052550 - DNA, 15 bp, Homo sapiens
cctccctgtagtttg

SEQ ID NO: 2052551 - DNA, 15 bp, Homo sapiens
ctccctgtagtttgg

SEQ ID NO: 2052552 - DNA, 15 bp, Homo sapiens
tccctgtagtttgga

SEQ ID NO: 2052553 - DNA, 15 bp, Homo sapiens
ccctgtagtttggag

SEQ ID NO: 2052554 - DNA, 15 bp, Homo sapiens
cctgtagtttggaga

SEQ ID NO: 2052555 - DNA, 15 bp, Homo sapiens
ctgtagtttggagag

SEQ ID NO: 2052556 - DNA, 15 bp, Homo sapiens
tgtagtttggagagg

SEQ ID NO: 2052557 - DNA, 15 bp, Homo sapiens
gtagtttggagaggg

SEQ ID NO: 2052558 - DNA, 15 bp, Homo sapiens
tagtttggagagggc

SEQ ID NO: 2052559 - DNA, 15 bp, Homo sapiens
agtttggagagggca

SEQ ID NO: 2052560 - DNA, 15 bp, Homo sapiens
gtttggagagggcat

SEQ ID NO: 2052561 - DNA, 15 bp, Homo sapiens
tttggagagggcatt

SEQ ID NO: 2052562 - DNA, 15 bp, Homo sapiens
ttggagagggcattt

SEQ ID NO: 2052563 - DNA, 15 bp, Homo sapiens
tggagagggcatttt

SEQ ID NO: 2052564 - DNA, 15 bp, Homo sapiens
ggagagggcatttta

SEQ ID NO: 2052565 - DNA, 15 bp, Homo sapiens
gagagggcattttag

SEQ ID NO: 2052566 - DNA, 15 bp, Homo sapiens
agagggcattttaga

SEQ ID NO: 2052567 - DNA, 15 bp, Homo sapiens
gagggcattttagaa

SEQ ID NO: 2052568 - DNA, 15 bp, Homo sapiens
agggcattttagaaa

SEQ ID NO: 2052569 - DNA, 15 bp, Homo sapiens
gggcattttagaaaa

SEQ ID NO: 2052570 - DNA, 15 bp, Homo sapiens
ggcattttagaaaaa

SEQ ID NO: 2052571 - DNA, 15 bp, Homo sapiens
gcattttagaaaaag

SEQ ID NO: 2052572 - DNA, 15 bp, Homo sapiens
cattttagaaaaaga

SEQ ID NO: 2052573 - DNA, 15 bp, Homo sapiens
attttagaaaaagag

SEQ ID NO: 2052574 - DNA, 15 bp, Homo sapiens
ttttagaaaaagagt

SEQ ID NO: 2052575 - DNA, 15 bp, Homo sapiens
tttagaaaaagagtc

SEQ ID NO: 2052576 - DNA, 15 bp, Homo sapiens
ttagaaaaagagtcc

SEQ ID NO: 2052577 - DNA, 15 bp, Homo sapiens
tagaaaaagagtccc

SEQ ID NO: 2052578 - DNA, 15 bp, Homo sapiens
agaaaaagagtccct

SEQ ID NO: 2052579 - DNA, 15 bp, Homo sapiens
gaaaaagagtccctt

SEQ ID NO: 2052580 - DNA, 15 bp, Homo sapiens
aaaaagagtcccttg

SEQ ID NO: 2052581 - DNA, 15 bp, Homo sapiens
aaaagagtcccttgg

SEQ ID NO: 2052582 - DNA, 15 bp, Homo sapiens
aaagagtcccttggt

SEQ ID NO: 2052583 - DNA, 15 bp, Homo sapiens
aagagtcccttggtt

SEQ ID NO: 2052584 - DNA, 15 bp, Homo sapiens
agagtcccttggttc

SEQ ID NO: 2052585 - DNA, 15 bp, Homo sapiens
gagtcccttggttcc

SEQ ID NO: 2052586 - DNA, 15 bp, Homo sapiens
agtcccttggttcct

SEQ ID NO: 2052587 - DNA, 15 bp, Homo sapiens
gtcccttggttcctt

SEQ ID NO: 2052588 - DNA, 15 bp, Homo sapiens
tcccttggttccttg

SEQ ID NO: 2052589 - DNA, 15 bp, Homo sapiens
cccttggttccttgg

SEQ ID NO: 2052590 - DNA, 15 bp, Homo sapiens
ccttggttccttggt

SEQ ID NO: 2052591 - DNA, 15 bp, Homo sapiens
cttggttccttggtt

SEQ ID NO: 2052592 - DNA, 15 bp, Homo sapiens
ttggttccttggttt

SEQ ID NO: 2052593 - DNA, 15 bp, Homo sapiens
tggttccttggtttt

SEQ ID NO: 2052594 - DNA, 15 bp, Homo sapiens
ggttccttggttttc

SEQ ID NO: 2052595 - DNA, 15 bp, Homo sapiens
gttccttggttttcc

SEQ ID NO: 2052596 - DNA, 15 bp, Homo sapiens
ttccttggttttccc

SEQ ID NO: 2052597 - DNA, 15 bp, Homo sapiens
tccttggttttcccc

SEQ ID NO: 2052598 - DNA, 15 bp, Homo sapiens
ccttggttttccccg

SEQ ID NO: 2052599 - DNA, 15 bp, Homo sapiens
cttggttttccccga

SEQ ID NO: 2052600 - DNA, 15 bp, Homo sapiens
ttggttttccccgaa

SEQ ID NO: 2052601 - DNA, 15 bp, Homo sapiens
tggttttccccgaac

SEQ ID NO: 2052602 - DNA, 15 bp, Homo sapiens
ggttttccccgaacc

SEQ ID NO: 2052603 - DNA, 15 bp, Homo sapiens
gttttccccgaacct

SEQ ID NO: 2052604 - DNA, 15 bp, Homo sapiens
ttttccccgaacctg

SEQ ID NO: 2052605 - DNA, 15 bp, Homo sapiens
tttccccgaacctga

SEQ ID NO: 2052606 - DNA, 15 bp, Homo sapiens
ttccccgaacctgag

SEQ ID NO: 2052607 - DNA, 15 bp, Homo sapiens
tccccgaacctgagg

SEQ ID NO: 2052608 - DNA, 15 bp, Homo sapiens
ccccgaacctgaggt

SEQ ID NO: 2052609 - DNA, 15 bp, Homo sapiens
cccgaacctgaggtt

SEQ ID NO: 2052610 - DNA, 15 bp, Homo sapiens
ccgaacctgaggttg

SEQ ID NO: 2052611 - DNA, 15 bp, Homo sapiens
cgaacctgaggttgg

SEQ ID NO: 2052612 - DNA, 15 bp, Homo sapiens
gaacctgaggttgga

SEQ ID NO: 2052613 - DNA, 15 bp, Homo sapiens
aacctgaggttggac

SEQ ID NO: 2052614 - DNA, 15 bp, Homo sapiens
acctgaggttggaca

SEQ ID NO: 2052615 - DNA, 15 bp, Homo sapiens
cctgaggttggacag

SEQ ID NO: 2052616 - DNA, 15 bp, Homo sapiens
ctgaggttggacagc

SEQ ID NO: 2052617 - DNA, 15 bp, Homo sapiens
tgaggttggacagcg

SEQ ID NO: 2052618 - DNA, 15 bp, Homo sapiens
gaggttggacagcgc

SEQ ID NO: 2052619 - DNA, 15 bp, Homo sapiens
aggttggacagcgcc

SEQ ID NO: 2052620 - DNA, 15 bp, Homo sapiens
ggttggacagcgccc

SEQ ID NO: 2052621 - DNA, 15 bp, Homo sapiens
gttggacagcgcccc

SEQ ID NO: 2052622 - DNA, 15 bp, Homo sapiens
ttggacagcgccccc

SEQ ID NO: 2052623 - DNA, 15 bp, Homo sapiens
tggacagcgccccct

SEQ ID NO: 2052624 - DNA, 15 bp, Homo sapiens
ggacagcgccccctt

SEQ ID NO: 2052625 - DNA, 15 bp, Homo sapiens
gacagcgcccccttt

SEQ ID NO: 2052626 - DNA, 15 bp, Homo sapiens
acagcgcccccttta

SEQ ID NO: 2052627 - DNA, 15 bp, Homo sapiens
cagcgccccctttat

SEQ ID NO: 2052628 - DNA, 15 bp, Homo sapiens
agcgccccctttatt

SEQ ID NO: 2052629 - DNA, 15 bp, Homo sapiens
gcgccccctttattc

SEQ ID NO: 2052630 - DNA, 15 bp, Homo sapiens
cgccccctttattct

SEQ ID NO: 2052631 - DNA, 15 bp, Homo sapiens
gccccctttattctc

SEQ ID NO: 2052632 - DNA, 15 bp, Homo sapiens
ccccctttattctcc

SEQ ID NO: 2052633 - DNA, 15 bp, Homo sapiens
cccctttattctccg

SEQ ID NO: 2052634 - DNA, 15 bp, Homo sapiens
ccctttattctccgc

SEQ ID NO: 2052635 - DNA, 15 bp, Homo sapiens
cctttattctccgcg

SEQ ID NO: 2052636 - DNA, 15 bp, Homo sapiens
ctttattctccgcga

SEQ ID NO: 2052637 - DNA, 15 bp, Homo sapiens
tttattctccgcgag

SEQ ID NO: 2052638 - DNA, 15 bp, Homo sapiens
ttattctccgcgagc

SEQ ID NO: 2052639 - DNA, 15 bp, Homo sapiens
tattctccgcgagcg

SEQ ID NO: 2052640 - DNA, 15 bp, Homo sapiens
attctccgcgagcgc

SEQ ID NO: 2052641 - DNA, 15 bp, Homo sapiens
ttctccgcgagcgca

SEQ ID NO: 2052642 - DNA, 15 bp, Homo sapiens
tctccgcgagcgcag

SEQ ID NO: 2052643 - DNA, 15 bp, Homo sapiens
ctccgcgagcgcagc

SEQ ID NO: 2052644 - DNA, 15 bp, Homo sapiens
tccgcgagcgcagcc

SEQ ID NO: 2052645 - DNA, 15 bp, Homo sapiens
ccgcgagcgcagcct

SEQ ID NO: 2052646 - DNA, 15 bp, Homo sapiens
cgcgagcgcagcctg

SEQ ID NO: 2052647 - DNA, 15 bp, Homo sapiens
gcgagcgcagcctgg

SEQ ID NO: 2052648 - DNA, 15 bp, Homo sapiens
cgagcgcagcctgga

SEQ ID NO: 2052649 - DNA, 15 bp, Homo sapiens
gagcgcagcctggac

SEQ ID NO: 2052650 - DNA, 15 bp, Homo sapiens
agcgcagcctggaca

SEQ ID NO: 2052651 - DNA, 15 bp, Homo sapiens
gcgcagcctggacaa

SEQ ID NO: 2052652 - DNA, 15 bp, Homo sapiens
cgcagcctggacaaa

SEQ ID NO: 2052653 - DNA, 15 bp, Homo sapiens
gcagcctggacaaag

SEQ ID NO: 2052654 - DNA, 15 bp, Homo sapiens
cagcctggacaaagg

SEQ ID NO: 2052655 - DNA, 15 bp, Homo sapiens
agcctggacaaaggc

SEQ ID NO: 2052656 - DNA, 15 bp, Homo sapiens
gcctggacaaaggcg

SEQ ID NO: 2052657 - DNA, 15 bp, Homo sapiens
cctggacaaaggcgt

SEQ ID NO: 2052658 - DNA, 15 bp, Homo sapiens
ctggacaaaggcgtc

SEQ ID NO: 2052659 - DNA, 15 bp, Homo sapiens
tggacaaaggcgtca

SEQ ID NO: 2052660 - DNA, 15 bp, Homo sapiens
ggacaaaggcgtcac

SEQ ID NO: 2052661 - DNA, 15 bp, Homo sapiens
gacaaaggcgtcact

SEQ ID NO: 2052662 - DNA, 15 bp, Homo sapiens
acaaaggcgtcactt

SEQ ID NO: 2052663 - DNA, 15 bp, Homo sapiens
caaaggcgtcacttg

SEQ ID NO: 2052664 - DNA, 15 bp, Homo sapiens
aaaggcgtcacttgg

SEQ ID NO: 2052665 - DNA, 15 bp, Homo sapiens
aaggcgtcacttgga

SEQ ID NO: 2052666 - DNA, 15 bp, Homo sapiens
aggcgtcacttggag

SEQ ID NO: 2052667 - DNA, 15 bp, Homo sapiens
ggcgtcacttggagg

SEQ ID NO: 2052668 - DNA, 15 bp, Homo sapiens
gcgtcacttggaggg

SEQ ID NO: 2052669 - DNA, 15 bp, Homo sapiens
cgtcacttggagggc

SEQ ID NO: 2052670 - DNA, 15 bp, Homo sapiens
gtcacttggagggcg

SEQ ID NO: 2052671 - DNA, 15 bp, Homo sapiens
tcacttggagggcgc

SEQ ID NO: 2052672 - DNA, 15 bp, Homo sapiens
cacttggagggcgcc

SEQ ID NO: 2052673 - DNA, 15 bp, Homo sapiens
acttggagggcgccc

SEQ ID NO: 2052674 - DNA, 15 bp, Homo sapiens
cttggagggcgcccc

SEQ ID NO: 2052675 - DNA, 15 bp, Homo sapiens
ttggagggcgcccca

SEQ ID NO: 2052676 - DNA, 15 bp, Homo sapiens
tggagggcgccccag

SEQ ID NO: 2052677 - DNA, 15 bp, Homo sapiens
ggagggcgccccagc

SEQ ID NO: 2052678 - DNA, 15 bp, Homo sapiens
gagggcgccccagct

SEQ ID NO: 2052679 - DNA, 15 bp, Homo sapiens
agggcgccccagctg

SEQ ID NO: 2052680 - DNA, 15 bp, Homo sapiens
gggcgccccagctgc

SEQ ID NO: 2052681 - DNA, 15 bp, Homo sapiens
ggcgccccagctgcc

SEQ ID NO: 2052682 - DNA, 15 bp, Homo sapiens
gcgccccagctgcct

SEQ ID NO: 2052683 - DNA, 15 bp, Homo sapiens
cgccccagctgcctg

SEQ ID NO: 2052684 - DNA, 15 bp, Homo sapiens
gccccagctgcctgg

SEQ ID NO: 2052685 - DNA, 15 bp, Homo sapiens
ccccagctgcctggg

SEQ ID NO: 2052686 - DNA, 15 bp, Homo sapiens
cccagctgcctggga

SEQ ID NO: 2052687 - DNA, 15 bp, Homo sapiens
ccagctgcctgggaa

SEQ ID NO: 2052688 - DNA, 15 bp, Homo sapiens
cagctgcctgggaac

SEQ ID NO: 2052689 - DNA, 15 bp, Homo sapiens
agctgcctgggaact

SEQ ID NO: 2052690 - DNA, 15 bp, Homo sapiens
gctgcctgggaactc

SEQ ID NO: 2052691 - DNA, 15 bp, Homo sapiens
ctgcctgggaactcc

SEQ ID NO: 2052692 - DNA, 15 bp, Homo sapiens
tgcctgggaactccg

SEQ ID NO: 2052693 - DNA, 15 bp, Homo sapiens
gcctgggaactccga

SEQ ID NO: 2052694 - DNA, 15 bp, Homo sapiens
cctgggaactccgag

SEQ ID NO: 2052695 - DNA, 15 bp, Homo sapiens
ctgggaactccgagc

SEQ ID NO: 2052696 - DNA, 15 bp, Homo sapiens
tgggaactccgagcg

SEQ ID NO: 2052697 - DNA, 15 bp, Homo sapiens
gggaactccgagcgg

SEQ ID NO: 2052698 - DNA, 15 bp, Homo sapiens
ggaactccgagcgga

SEQ ID NO: 2052699 - DNA, 15 bp, Homo sapiens
gaactccgagcggag

SEQ ID NO: 2052700 - DNA, 15 bp, Homo sapiens
aactccgagcggagc

SEQ ID NO: 2052701 - DNA, 15 bp, Homo sapiens
actccgagcggagcc

SEQ ID NO: 2052702 - DNA, 15 bp, Homo sapiens
ctccgagcggagccc

SEQ ID NO: 2052703 - DNA, 15 bp, Homo sapiens
tccgagcggagccca

SEQ ID NO: 2052704 - DNA, 15 bp, Homo sapiens
ccgagcggagcccat

SEQ ID NO: 2052705 - DNA, 15 bp, Homo sapiens
cgagcggagcccatc

SEQ ID NO: 2052706 - DNA, 15 bp, Homo sapiens
gagcggagcccatcc

SEQ ID NO: 2052707 - DNA, 15 bp, Homo sapiens
agcggagcccatccc

SEQ ID NO: 2052708 - DNA, 15 bp, Homo sapiens
gcggagcccatcccg

SEQ ID NO: 2052709 - DNA, 15 bp, Homo sapiens
cggagcccatcccgc

SEQ ID NO: 2052710 - DNA, 15 bp, Homo sapiens
ggagcccatcccgct

SEQ ID NO: 2052711 - DNA, 15 bp, Homo sapiens
gagcccatcccgctt

SEQ ID NO: 2052712 - DNA, 15 bp, Homo sapiens
agcccatcccgcttc

SEQ ID NO: 2052713 - DNA, 15 bp, Homo sapiens
gcccatcccgcttcc

SEQ ID NO: 2052714 - DNA, 15 bp, Homo sapiens
cccatcccgcttccc

SEQ ID NO: 2052715 - DNA, 15 bp, Homo sapiens
ccatcccgcttccct

SEQ ID NO: 2052716 - DNA, 15 bp, Homo sapiens
catcccgcttcccta

SEQ ID NO: 2052717 - DNA, 15 bp, Homo sapiens
atcccgcttccctaa

SEQ ID NO: 2052718 - DNA, 15 bp, Homo sapiens
tcccgcttccctaac

SEQ ID NO: 2052719 - DNA, 15 bp, Homo sapiens
cccgcttccctaacc

SEQ ID NO: 2052720 - DNA, 15 bp, Homo sapiens
ccgcttccctaaccc

SEQ ID NO: 2052721 - DNA, 15 bp, Homo sapiens
cgcttccctaacccg

SEQ ID NO: 2052722 - DNA, 15 bp, Homo sapiens
gcttccctaacccga

SEQ ID NO: 2052723 - DNA, 15 bp, Homo sapiens
cttccctaacccgag

SEQ ID NO: 2052724 - DNA, 15 bp, Homo sapiens
ttccctaacccgagt

SEQ ID NO: 2052725 - DNA, 15 bp, Homo sapiens
tccctaacccgagtc

SEQ ID NO: 2052726 - DNA, 15 bp, Homo sapiens
ccctaacccgagtcg

SEQ ID NO: 2052727 - DNA, 15 bp, Homo sapiens
cctaacccgagtcgt

SEQ ID NO: 2052728 - DNA, 15 bp, Homo sapiens
ctaacccgagtcgtt

SEQ ID NO: 2052729 - DNA, 15 bp, Homo sapiens
taacccgagtcgttt

SEQ ID NO: 2052730 - DNA, 15 bp, Homo sapiens
aacccgagtcgtttc

SEQ ID NO: 2052731 - DNA, 15 bp, Homo sapiens
acccgagtcgtttcc

SEQ ID NO: 2052732 - DNA, 15 bp, Homo sapiens
cccgagtcgtttccc

SEQ ID NO: 2052733 - DNA, 15 bp, Homo sapiens
ccgagtcgtttccca

SEQ ID NO: 2052734 - DNA, 15 bp, Homo sapiens
cgagtcgtttcccag

SEQ ID NO: 2052735 - DNA, 15 bp, Homo sapiens
gagtcgtttcccagg

SEQ ID NO: 2052736 - DNA, 15 bp, Homo sapiens
agtcgtttcccagga

SEQ ID NO: 2052737 - DNA, 15 bp, Homo sapiens
gtcgtttcccaggat

SEQ ID NO: 2052738 - DNA, 15 bp, Homo sapiens
tcgtttcccaggatg

SEQ ID NO: 2052739 - DNA, 15 bp, Homo sapiens
cgtttcccaggatgg

SEQ ID NO: 2052740 - DNA, 15 bp, Homo sapiens
gtttcccaggatgga

SEQ ID NO: 2052741 - DNA, 15 bp, Homo sapiens
tttcccaggatggaa

SEQ ID NO: 2052742 - DNA, 15 bp, Homo sapiens
ttcccaggatggaag

SEQ ID NO: 2052743 - DNA, 15 bp, Homo sapiens
tcccaggatggaagg

SEQ ID NO: 2052744 - DNA, 15 bp, Homo sapiens
cccaggatggaaggc

SEQ ID NO: 2052745 - DNA, 15 bp, Homo sapiens
ccaggatggaaggcg

SEQ ID NO: 2052746 - DNA, 15 bp, Homo sapiens
caggatggaaggcgg

SEQ ID NO: 2052747 - DNA, 15 bp, Homo sapiens
aggatggaaggcgga

SEQ ID NO: 2052748 - DNA, 15 bp, Homo sapiens
ggatggaaggcggat

SEQ ID NO: 2052749 - DNA, 15 bp, Homo sapiens
gatggaaggcggatc

SEQ ID NO: 2052750 - DNA, 15 bp, Homo sapiens
atggaaggcggatcc

SEQ ID NO: 2052751 - DNA, 15 bp, Homo sapiens
tggaaggcggatccc

SEQ ID NO: 2052752 - DNA, 15 bp, Homo sapiens
ggaaggcggatcccg

SEQ ID NO: 2052753 - DNA, 15 bp, Homo sapiens
gaaggcggatcccgg

SEQ ID NO: 2052754 - DNA, 15 bp, Homo sapiens
aaggcggatcccggc

SEQ ID NO: 2052755 - DNA, 15 bp, Homo sapiens
aggcggatcccggct

SEQ ID NO: 2052756 - DNA, 15 bp, Homo sapiens
ggcggatcccggctc

SEQ ID NO: 2052757 - DNA, 15 bp, Homo sapiens
gcggatcccggctcc

SEQ ID NO: 2052758 - DNA, 15 bp, Homo sapiens
cggatcccggctccc

SEQ ID NO: 2052759 - DNA, 15 bp, Homo sapiens
ggatcccggctcccc

SEQ ID NO: 2052760 - DNA, 15 bp, Homo sapiens
gatcccggctccccg

SEQ ID NO: 2052761 - DNA, 15 bp, Homo sapiens
atcccggctccccgc

SEQ ID NO: 2052762 - DNA, 15 bp, Homo sapiens
tcccggctccccgcg

SEQ ID NO: 2052763 - DNA, 15 bp, Homo sapiens
cccggctccccgcga

SEQ ID NO: 2052764 - DNA, 15 bp, Homo sapiens
ccggctccccgcgat

SEQ ID NO: 2052765 - DNA, 15 bp, Homo sapiens
cggctccccgcgatc

SEQ ID NO: 2052766 - DNA, 15 bp, Homo sapiens
ggctccccgcgatca

SEQ ID NO: 2052767 - DNA, 15 bp, Homo sapiens
gctccccgcgatcag

SEQ ID NO: 2052768 - DNA, 15 bp, Homo sapiens
ctccccgcgatcagg

SEQ ID NO: 2052769 - DNA, 15 bp, Homo sapiens
tccccgcgatcaggc

SEQ ID NO: 2052770 - DNA, 15 bp, Homo sapiens
ccccgcgatcaggct

SEQ ID NO: 2052771 - DNA, 15 bp, Homo sapiens
cccgcgatcaggcta

SEQ ID NO: 2052772 - DNA, 15 bp, Homo sapiens
ccgcgatcaggctag

SEQ ID NO: 2052773 - DNA, 15 bp, Homo sapiens
cgcgatcaggctagg

SEQ ID NO: 2052774 - DNA, 15 bp, Homo sapiens
gcgatcaggctaggc

SEQ ID NO: 2052775 - DNA, 15 bp, Homo sapiens
cgatcaggctaggcc

SEQ ID NO: 2052776 - DNA, 15 bp, Homo sapiens
gatcaggctaggccg

SEQ ID NO: 2052777 - DNA, 15 bp, Homo sapiens
atcaggctaggccgc

SEQ ID NO: 2052778 - DNA, 15 bp, Homo sapiens
tcaggctaggccgcg

SEQ ID NO: 2052779 - DNA, 15 bp, Homo sapiens
caggctaggccgcgg

SEQ ID NO: 2052780 - DNA, 15 bp, Homo sapiens
aggctaggccgcggg

SEQ ID NO: 2052781 - DNA, 15 bp, Homo sapiens
ggctaggccgcgggt

SEQ ID NO: 2052782 - DNA, 15 bp, Homo sapiens
gctaggccgcgggtt

SEQ ID NO: 2052783 - DNA, 15 bp, Homo sapiens
ctaggccgcgggttc

SEQ ID NO: 2052784 - DNA, 15 bp, Homo sapiens
taggccgcgggttct

SEQ ID NO: 2052785 - DNA, 15 bp, Homo sapiens
aggccgcgggttctg

SEQ ID NO: 2052786 - DNA, 15 bp, Homo sapiens
ggccgcgggttctgg

SEQ ID NO: 2052787 - DNA, 15 bp, Homo sapiens
gccgcgggttctggc

SEQ ID NO: 2052788 - DNA, 15 bp, Homo sapiens
ccgcgggttctggct

SEQ ID NO: 2052789 - DNA, 15 bp, Homo sapiens
cgcgggttctggctg

SEQ ID NO: 2052790 - DNA, 15 bp, Homo sapiens
gcgggttctggctgg

SEQ ID NO: 2052791 - DNA, 15 bp, Homo sapiens
cgggttctggctggg

SEQ ID NO: 2052792 - DNA, 15 bp, Homo sapiens
gggttctggctgggc

SEQ ID NO: 2052793 - DNA, 15 bp, Homo sapiens
ggttctggctgggct

SEQ ID NO: 2052794 - DNA, 15 bp, Homo sapiens
gttctggctgggctg

SEQ ID NO: 2052795 - DNA, 15 bp, Homo sapiens
ttctggctgggctgc

SEQ ID NO: 2052796 - DNA, 15 bp, Homo sapiens
tctggctgggctgca

SEQ ID NO: 2052797 - DNA, 15 bp, Homo sapiens
ctggctgggctgcac

SEQ ID NO: 2052798 - DNA, 15 bp, Homo sapiens
tggctgggctgcacc

SEQ ID NO: 2052799 - DNA, 15 bp, Homo sapiens
ggctgggctgcaccc

SEQ ID NO: 2052800 - DNA, 15 bp, Homo sapiens
gctgggctgcacccc

SEQ ID NO: 2052801 - DNA, 15 bp, Homo sapiens
ctgggctgcaccccc

SEQ ID NO: 2052802 - DNA, 15 bp, Homo sapiens
tgggctgcacccccc

SEQ ID NO: 2052803 - DNA, 15 bp, Homo sapiens
gggctgcacccccca

SEQ ID NO: 2052804 - DNA, 15 bp, Homo sapiens
ggctgcaccccccag

SEQ ID NO: 2052805 - DNA, 15 bp, Homo sapiens
gctgcaccccccagg

SEQ ID NO: 2052806 - DNA, 15 bp, Homo sapiens
ctgcaccccccaggt

SEQ ID NO: 2052807 - DNA, 15 bp, Homo sapiens
tgcaccccccaggtc

SEQ ID NO: 2052808 - DNA, 15 bp, Homo sapiens
gcaccccccaggtcc

SEQ ID NO: 2052809 - DNA, 15 bp, Homo sapiens
caccccccaggtccc

SEQ ID NO: 2052810 - DNA, 15 bp, Homo sapiens
accccccaggtcccc

SEQ ID NO: 2052811 - DNA, 15 bp, Homo sapiens
ccccccaggtccccg

SEQ ID NO: 2052812 - DNA, 15 bp, Homo sapiens
cccccaggtccccgc

SEQ ID NO: 2052813 - DNA, 15 bp, Homo sapiens
ccccaggtccccgcc

SEQ ID NO: 2052814 - DNA, 15 bp, Homo sapiens
cccaggtccccgccc

SEQ ID NO: 2052815 - DNA, 15 bp, Homo sapiens
ccaggtccccgcccc

SEQ ID NO: 2052816 - DNA, 15 bp, Homo sapiens
caggtccccgccccc

SEQ ID NO: 2052817 - DNA, 15 bp, Homo sapiens
aggtccccgccccca

SEQ ID NO: 2052818 - DNA, 15 bp, Homo sapiens
ggtccccgcccccag

SEQ ID NO: 2052819 - DNA, 15 bp, Homo sapiens
gtccccgcccccagc

SEQ ID NO: 2052820 - DNA, 15 bp, Homo sapiens
tccccgcccccagcc

SEQ ID NO: 2052821 - DNA, 15 bp, Homo sapiens
ccccgcccccagccc

SEQ ID NO: 2052822 - DNA, 15 bp, Homo sapiens
cccgcccccagcccc

SEQ ID NO: 2052823 - DNA, 15 bp, Homo sapiens
ccgcccccagccccc

SEQ ID NO: 2052824 - DNA, 15 bp, Homo sapiens
cgcccccagccccca

SEQ ID NO: 2052825 - DNA, 15 bp, Homo sapiens
gcccccagcccccac

SEQ ID NO: 2052826 - DNA, 15 bp, Homo sapiens
cccccagcccccacc

SEQ ID NO: 2052827 - DNA, 15 bp, Homo sapiens
ccccagcccccaccc

SEQ ID NO: 2052828 - DNA, 15 bp, Homo sapiens
cccagcccccaccct

SEQ ID NO: 2052829 - DNA, 15 bp, Homo sapiens
ccagcccccaccctc

SEQ ID NO: 2052830 - DNA, 15 bp, Homo sapiens
cagcccccaccctct

SEQ ID NO: 2052831 - DNA, 15 bp, Homo sapiens
agcccccaccctctg

SEQ ID NO: 2052832 - DNA, 15 bp, Homo sapiens
gcccccaccctctgc

SEQ ID NO: 2052833 - DNA, 15 bp, Homo sapiens
cccccaccctctgcc

SEQ ID NO: 2052834 - DNA, 15 bp, Homo sapiens
ccccaccctctgccc

SEQ ID NO: 2052835 - DNA, 15 bp, Homo sapiens
cccaccctctgcccc

SEQ ID NO: 2052836 - DNA, 15 bp, Homo sapiens
ccaccctctgcccct

SEQ ID NO: 2052837 - DNA, 15 bp, Homo sapiens
caccctctgcccctc

SEQ ID NO: 2052838 - DNA, 15 bp, Homo sapiens
accctctgcccctct

SEQ ID NO: 2052839 - DNA, 15 bp, Homo sapiens
ccctctgcccctctg

SEQ ID NO: 2052840 - DNA, 15 bp, Homo sapiens
cctctgcccctctgg

SEQ ID NO: 2052841 - DNA, 15 bp, Homo sapiens
ctctgcccctctggc

SEQ ID NO: 2052842 - DNA, 15 bp, Homo sapiens
tctgcccctctggcc

SEQ ID NO: 2052843 - DNA, 15 bp, Homo sapiens
ctgcccctctggccg

SEQ ID NO: 2052844 - DNA, 15 bp, Homo sapiens
tgcccctctggccgg

SEQ ID NO: 2052845 - DNA, 15 bp, Homo sapiens
gcccctctggccggg

SEQ ID NO: 2052846 - DNA, 15 bp, Homo sapiens
cccctctggccgggc

SEQ ID NO: 2052847 - DNA, 15 bp, Homo sapiens
ccctctggccgggct

SEQ ID NO: 2052848 - DNA, 15 bp, Homo sapiens
cctctggccgggctc

SEQ ID NO: 2052849 - DNA, 15 bp, Homo sapiens
ctctggccgggctcc

SEQ ID NO: 2052850 - DNA, 15 bp, Homo sapiens
tctggccgggctccg

SEQ ID NO: 2052851 - DNA, 15 bp, Homo sapiens
ctggccgggctccgc

SEQ ID NO: 2052852 - DNA, 15 bp, Homo sapiens
tggccgggctccgca

SEQ ID NO: 2052853 - DNA, 15 bp, Homo sapiens
ggccgggctccgcag

SEQ ID NO: 2052854 - DNA, 15 bp, Homo sapiens
gccgggctccgcagg

SEQ ID NO: 2052855 - DNA, 15 bp, Homo sapiens
ccgggctccgcaggg

SEQ ID NO: 2052856 - DNA, 15 bp, Homo sapiens
cgggctccgcagggc

SEQ ID NO: 2052857 - DNA, 15 bp, Homo sapiens
gggctccgcagggct

SEQ ID NO: 2052858 - DNA, 15 bp, Homo sapiens
ggctccgcagggctc

SEQ ID NO: 2052859 - DNA, 15 bp, Homo sapiens
gctccgcagggctct

SEQ ID NO: 2052860 - DNA, 15 bp, Homo sapiens
ctccgcagggctctc

SEQ ID NO: 2052861 - DNA, 15 bp, Homo sapiens
tccgcagggctctcg

SEQ ID NO: 2052862 - DNA, 15 bp, Homo sapiens
ccgcagggctctcgc

SEQ ID NO: 2052863 - DNA, 15 bp, Homo sapiens
cgcagggctctcgca

SEQ ID NO: 2052864 - DNA, 15 bp, Homo sapiens
gcagggctctcgcag

SEQ ID NO: 2052865 - DNA, 15 bp, Homo sapiens
cagggctctcgcagt

SEQ ID NO: 2052866 - DNA, 15 bp, Homo sapiens
agggctctcgcagtt

SEQ ID NO: 2052867 - DNA, 15 bp, Homo sapiens
gggctctcgcagttt

SEQ ID NO: 2052868 - DNA, 15 bp, Homo sapiens
ggctctcgcagtttc

SEQ ID NO: 2052869 - DNA, 15 bp, Homo sapiens
gctctcgcagtttcg

SEQ ID NO: 2052870 - DNA, 15 bp, Homo sapiens
ctctcgcagtttcgg

SEQ ID NO: 2052871 - DNA, 15 bp, Homo sapiens
tctcgcagtttcgga

SEQ ID NO: 2052872 - DNA, 15 bp, Homo sapiens
ctcgcagtttcggag

SEQ ID NO: 2052873 - DNA, 15 bp, Homo sapiens
tcgcagtttcggagc

SEQ ID NO: 2052874 - DNA, 15 bp, Homo sapiens
cgcagtttcggagcc

SEQ ID NO: 2052875 - DNA, 15 bp, Homo sapiens
gcagtttcggagccc

SEQ ID NO: 2052876 - DNA, 15 bp, Homo sapiens
cagtttcggagcccg

SEQ ID NO: 2052877 - DNA, 15 bp, Homo sapiens
agtttcggagcccgg

SEQ ID NO: 2052878 - DNA, 15 bp, Homo sapiens
gtttcggagcccggg

SEQ ID NO: 2052879 - DNA, 15 bp, Homo sapiens
tttcggagcccgggg

SEQ ID NO: 2052880 - DNA, 15 bp, Homo sapiens
ttcggagcccgggga

SEQ ID NO: 2052881 - DNA, 15 bp, Homo sapiens
tcggagcccggggac

SEQ ID NO: 2052882 - DNA, 15 bp, Homo sapiens
cggagcccggggacc

SEQ ID NO: 2052883 - DNA, 15 bp, Homo sapiens
ggagcccggggaccc

SEQ ID NO: 2052884 - DNA, 15 bp, Homo sapiens
gagcccggggacccc

SEQ ID NO: 2052885 - DNA, 15 bp, Homo sapiens
agcccggggaccccg

SEQ ID NO: 2052886 - DNA, 15 bp, Homo sapiens
gcccggggaccccgg

SEQ ID NO: 2052887 - DNA, 15 bp, Homo sapiens
cccggggaccccggc

SEQ ID NO: 2052888 - DNA, 15 bp, Homo sapiens
ccggggaccccggcg

SEQ ID NO: 2052889 - DNA, 15 bp, Homo sapiens
cggggaccccggcgc

SEQ ID NO: 2052890 - DNA, 15 bp, Homo sapiens
ggggaccccggcgca

SEQ ID NO: 2052891 - DNA, 15 bp, Homo sapiens
gggaccccggcgcag

SEQ ID NO: 2052892 - DNA, 15 bp, Homo sapiens
ggaccccggcgcagg

SEQ ID NO: 2052893 - DNA, 15 bp, Homo sapiens
gaccccggcgcagga

SEQ ID NO: 2052894 - DNA, 15 bp, Homo sapiens
accccggcgcaggag

SEQ ID NO: 2052895 - DNA, 15 bp, Homo sapiens
ccccggcgcaggagg

SEQ ID NO: 2052896 - DNA, 15 bp, Homo sapiens
cccggcgcaggagga

SEQ ID NO: 2052897 - DNA, 15 bp, Homo sapiens
ccggcgcaggaggag

SEQ ID NO: 2052898 - DNA, 15 bp, Homo sapiens
cggcgcaggaggagg

SEQ ID NO: 2052899 - DNA, 15 bp, Homo sapiens
ggcgcaggaggaggc

SEQ ID NO: 2052900 - DNA, 15 bp, Homo sapiens
gcgcaggaggaggcc

SEQ ID NO: 2052901 - DNA, 15 bp, Homo sapiens
cgcaggaggaggcct

SEQ ID NO: 2052902 - DNA, 15 bp, Homo sapiens
gcaggaggaggcctg

SEQ ID NO: 2052903 - DNA, 15 bp, Homo sapiens
caggaggaggcctgg

SEQ ID NO: 2052904 - DNA, 15 bp, Homo sapiens
aggaggaggcctggg

SEQ ID NO: 2052905 - DNA, 15 bp, Homo sapiens
ggaggaggcctgggc

SEQ ID NO: 2052906 - DNA, 15 bp, Homo sapiens
gaggaggcctgggct

SEQ ID NO: 2052907 - DNA, 15 bp, Homo sapiens
aggaggcctgggctt

SEQ ID NO: 2052908 - DNA, 15 bp, Homo sapiens
ggaggcctgggcttg

SEQ ID NO: 2052909 - DNA, 15 bp, Homo sapiens
gaggcctgggcttgc

SEQ ID NO: 2052910 - DNA, 15 bp, Homo sapiens
aggcctgggcttgcc

SEQ ID NO: 2052911 - DNA, 15 bp, Homo sapiens
ggcctgggcttgccc

SEQ ID NO: 2052912 - DNA, 15 bp, Homo sapiens
gcctgggcttgcccg

SEQ ID NO: 2052913 - DNA, 15 bp, Homo sapiens
cctgggcttgcccgg

SEQ ID NO: 2052914 - DNA, 15 bp, Homo sapiens
ctgggcttgcccggg

SEQ ID NO: 2052915 - DNA, 15 bp, Homo sapiens
tgggcttgcccgggg

SEQ ID NO: 2052916 - DNA, 15 bp, Homo sapiens
gggcttgcccggggg

SEQ ID NO: 2052917 - DNA, 15 bp, Homo sapiens
ggcttgcccgggggc

SEQ ID NO: 2052918 - DNA, 15 bp, Homo sapiens
gcttgcccgggggct

SEQ ID NO: 2052919 - DNA, 15 bp, Homo sapiens
cttgcccgggggctc

SEQ ID NO: 2052920 - DNA, 15 bp, Homo sapiens
ttgcccgggggctca

SEQ ID NO: 2052921 - DNA, 15 bp, Homo sapiens
tgcccgggggctcag

SEQ ID NO: 2052922 - DNA, 15 bp, Homo sapiens
gcccgggggctcagt

SEQ ID NO: 2052923 - DNA, 15 bp, Homo sapiens
cccgggggctcagtg

SEQ ID NO: 2052924 - DNA, 15 bp, Homo sapiens
ccgggggctcagtgt

SEQ ID NO: 2052925 - DNA, 15 bp, Homo sapiens
cgggggctcagtgtg

SEQ ID NO: 2052926 - DNA, 15 bp, Homo sapiens
gggggctcagtgtgg

SEQ ID NO: 2052927 - DNA, 15 bp, Homo sapiens
ggggctcagtgtgga

SEQ ID NO: 2052928 - DNA, 15 bp, Homo sapiens
gggctcagtgtggag

SEQ ID NO: 2052929 - DNA, 15 bp, Homo sapiens
ggctcagtgtggaga

SEQ ID NO: 2052930 - DNA, 15 bp, Homo sapiens
gctcagtgtggagag

SEQ ID NO: 2052931 - DNA, 15 bp, Homo sapiens
ctcagtgtggagaga

SEQ ID NO: 2052932 - DNA, 15 bp, Homo sapiens
tcagtgtggagagaa

SEQ ID NO: 2052933 - DNA, 15 bp, Homo sapiens
cagtgtggagagaag

SEQ ID NO: 2052934 - DNA, 15 bp, Homo sapiens
agtgtggagagaagg

SEQ ID NO: 2052935 - DNA, 15 bp, Homo sapiens
gtgtggagagaagga

SEQ ID NO: 2052936 - DNA, 15 bp, Homo sapiens
tgtggagagaaggag

SEQ ID NO: 2052937 - DNA, 15 bp, Homo sapiens
gtggagagaaggaga

SEQ ID NO: 2052938 - DNA, 15 bp, Homo sapiens
tggagagaaggagag

SEQ ID NO: 2052939 - DNA, 15 bp, Homo sapiens
ggagagaaggagagg

SEQ ID NO: 2052940 - DNA, 15 bp, Homo sapiens
gagagaaggagaggg

SEQ ID NO: 2052941 - DNA, 15 bp, Homo sapiens
agagaaggagagggg

SEQ ID NO: 2052942 - DNA, 15 bp, Homo sapiens
gagaaggagagggga

SEQ ID NO: 2052943 - DNA, 15 bp, Homo sapiens
agaaggagaggggag

SEQ ID NO: 2052944 - DNA, 15 bp, Homo sapiens
gaaggagaggggagt

SEQ ID NO: 2052945 - DNA, 15 bp, Homo sapiens
aaggagaggggagtc

SEQ ID NO: 2052946 - DNA, 15 bp, Homo sapiens
aggagaggggagtcc

SEQ ID NO: 2052947 - DNA, 15 bp, Homo sapiens
ggagaggggagtccc

SEQ ID NO: 2052948 - DNA, 15 bp, Homo sapiens
gagaggggagtcccc

SEQ ID NO: 2052949 - DNA, 15 bp, Homo sapiens
agaggggagtccccc

SEQ ID NO: 2052950 - DNA, 15 bp, Homo sapiens
gaggggagtccccca

SEQ ID NO: 2052951 - DNA, 15 bp, Homo sapiens
aggggagtcccccac

SEQ ID NO: 2052952 - DNA, 15 bp, Homo sapiens
ggggagtcccccacc

SEQ ID NO: 2052953 - DNA, 15 bp, Homo sapiens
gggagtcccccaccc

SEQ ID NO: 2052954 - DNA, 15 bp, Homo sapiens
ggagtcccccaccct

SEQ ID NO: 2052955 - DNA, 15 bp, Homo sapiens
gagtcccccaccctc

SEQ ID NO: 2052956 - DNA, 15 bp, Homo sapiens
agtcccccaccctcc

SEQ ID NO: 2052957 - DNA, 15 bp, Homo sapiens
gtcccccaccctcca

SEQ ID NO: 2052958 - DNA, 15 bp, Homo sapiens
tcccccaccctccag

SEQ ID NO: 2052959 - DNA, 15 bp, Homo sapiens
cccccaccctccagg

SEQ ID NO: 2052960 - DNA, 15 bp, Homo sapiens
ccccaccctccaggc

SEQ ID NO: 2052961 - DNA, 15 bp, Homo sapiens
cccaccctccaggct

SEQ ID NO: 2052962 - DNA, 15 bp, Homo sapiens
ccaccctccaggctg

SEQ ID NO: 2052963 - DNA, 15 bp, Homo sapiens
caccctccaggctgc

SEQ ID NO: 2052964 - DNA, 15 bp, Homo sapiens
accctccaggctgct

SEQ ID NO: 2052965 - DNA, 15 bp, Homo sapiens
ccctccaggctgctt

SEQ ID NO: 2052966 - DNA, 15 bp, Homo sapiens
cctccaggctgcttg

SEQ ID NO: 2052967 - DNA, 15 bp, Homo sapiens
ctccaggctgcttgg

SEQ ID NO: 2052968 - DNA, 15 bp, Homo sapiens
tccaggctgcttggg

SEQ ID NO: 2052969 - DNA, 15 bp, Homo sapiens
ccaggctgcttgggg

SEQ ID NO: 2052970 - DNA, 15 bp, Homo sapiens
caggctgcttgggga

SEQ ID NO: 2052971 - DNA, 15 bp, Homo sapiens
aggctgcttggggac

SEQ ID NO: 2052972 - DNA, 15 bp, Homo sapiens
ggctgcttggggact

SEQ ID NO: 2052973 - DNA, 15 bp, Homo sapiens
gctgcttggggactt

SEQ ID NO: 2052974 - DNA, 15 bp, Homo sapiens
ctgcttggggacttc

SEQ ID NO: 2052975 - DNA, 15 bp, Homo sapiens
tgcttggggacttcg

SEQ ID NO: 2052976 - DNA, 15 bp, Homo sapiens
gcttggggacttcga

SEQ ID NO: 2052977 - DNA, 15 bp, Homo sapiens
cttggggacttcgag

SEQ ID NO: 2052978 - DNA, 15 bp, Homo sapiens
ttggggacttcgagg

SEQ ID NO: 2052979 - DNA, 15 bp, Homo sapiens
tggggacttcgaggg

SEQ ID NO: 2052980 - DNA, 15 bp, Homo sapiens
ggacttcgaggggct

SEQ ID NO: 2052981 - DNA, 15 bp, Homo sapiens
gacttcgaggggctt

SEQ ID NO: 2052982 - DNA, 15 bp, Homo sapiens
acttcgaggggcttg

SEQ ID NO: 2052983 - DNA, 15 bp, Homo sapiens
cttcgaggggcttgg

SEQ ID NO: 2052984 - DNA, 15 bp, Homo sapiens
ttcgaggggcttgga

SEQ ID NO: 2052985 - DNA, 15 bp, Homo sapiens
tcgaggggcttggaa

SEQ ID NO: 2052986 - DNA, 15 bp, Homo sapiens
cgaggggcttggaat

SEQ ID NO: 2052987 - DNA, 15 bp, Homo sapiens
gaggggcttggaatc

SEQ ID NO: 2052988 - DNA, 15 bp, Homo sapiens
aggggcttggaatcc

SEQ ID NO: 2052989 - DNA, 15 bp, Homo sapiens
ggggcttggaatccg

SEQ ID NO: 2052990 - DNA, 15 bp, Homo sapiens
gggcttggaatccgg

SEQ ID NO: 2052991 - DNA, 15 bp, Homo sapiens
ggcttggaatccggg

SEQ ID NO: 2052992 - DNA, 15 bp, Homo sapiens
gcttggaatccgggt

SEQ ID NO: 2052993 - DNA, 15 bp, Homo sapiens
cttggaatccgggtc

SEQ ID NO: 2052994 - DNA, 15 bp, Homo sapiens
ttggaatccgggtcc

SEQ ID NO: 2052995 - DNA, 15 bp, Homo sapiens
tggaatccgggtcct

SEQ ID NO: 2052996 - DNA, 15 bp, Homo sapiens
ggaatccgggtcctc

SEQ ID NO: 2052997 - DNA, 15 bp, Homo sapiens
gaatccgggtcctcc

SEQ ID NO: 2052998 - DNA, 15 bp, Homo sapiens
aatccgggtcctccc

SEQ ID NO: 2052999 - DNA, 15 bp, Homo sapiens
atccgggtcctccct

SEQ ID NO: 2053000 - DNA, 15 bp, Homo sapiens
tccgggtcctccctt

SEQ ID NO: 2053001 - DNA, 15 bp, Homo sapiens
ccgggtcctcccttt

SEQ ID NO: 2053002 - DNA, 15 bp, Homo sapiens
cgggtcctccctttt

SEQ ID NO: 2053003 - DNA, 15 bp, Homo sapiens
gggtcctccctttta

SEQ ID NO: 2053004 - DNA, 15 bp, Homo sapiens
ggtcctcccttttat

SEQ ID NO: 2053005 - DNA, 15 bp, Homo sapiens
gtcctcccttttatg

SEQ ID NO: 2053006 - DNA, 15 bp, Homo sapiens
tcctcccttttatga

SEQ ID NO: 2053007 - DNA, 15 bp, Homo sapiens
cctcccttttatgag

SEQ ID NO: 2053008 - DNA, 15 bp, Homo sapiens
ctcccttttatgagg

SEQ ID NO: 2053009 - DNA, 15 bp, Homo sapiens
tcccttttatgaggt

SEQ ID NO: 2053010 - DNA, 15 bp, Homo sapiens
cccttttatgaggtt

SEQ ID NO: 2053011 - DNA, 15 bp, Homo sapiens
ccttttatgaggttc

SEQ ID NO: 2053012 - DNA, 15 bp, Homo sapiens
cttttatgaggttca

SEQ ID NO: 2053013 - DNA, 15 bp, Homo sapiens
ttttatgaggttcac

SEQ ID NO: 2053014 - DNA, 15 bp, Homo sapiens
tttatgaggttcaca

SEQ ID NO: 2053015 - DNA, 15 bp, Homo sapiens
ttatgaggttcacac

SEQ ID NO: 2053016 - DNA, 15 bp, Homo sapiens
tatgaggttcacaca

SEQ ID NO: 2053017 - DNA, 15 bp, Homo sapiens
atgaggttcacacac

SEQ ID NO: 2053018 - DNA, 15 bp, Homo sapiens
tgaggttcacacaca

SEQ ID NO: 2053019 - DNA, 15 bp, Homo sapiens
gaggttcacacacac

SEQ ID NO: 2053020 - DNA, 15 bp, Homo sapiens
aggttcacacacact

SEQ ID NO: 2053021 - DNA, 15 bp, Homo sapiens
ggttcacacacactg

SEQ ID NO: 2053022 - DNA, 15 bp, Homo sapiens
gttcacacacactgt

SEQ ID NO: 2053023 - DNA, 15 bp, Homo sapiens
ttcacacacactgtg

SEQ ID NO: 2053024 - DNA, 15 bp, Homo sapiens
tcacacacactgtga

SEQ ID NO: 2053025 - DNA, 15 bp, Homo sapiens
cacacacactgtgag

SEQ ID NO: 2053026 - DNA, 15 bp, Homo sapiens
acacacactgtgaga

SEQ ID NO: 2053027 - DNA, 15 bp, Homo sapiens
cacacactgtgagat

SEQ ID NO: 2053028 - DNA, 15 bp, Homo sapiens
acacactgtgagata

SEQ ID NO: 2053029 - DNA, 15 bp, Homo sapiens
cacactgtgagatat

SEQ ID NO: 2053030 - DNA, 15 bp, Homo sapiens
acactgtgagatatt

SEQ ID NO: 2053031 - DNA, 15 bp, Homo sapiens
cactgtgagatattt

SEQ ID NO: 2053032 - DNA, 15 bp, Homo sapiens
actgtgagatatttt

SEQ ID NO: 2053033 - DNA, 15 bp, Homo sapiens
ctgtgagatatttta

SEQ ID NO: 2053034 - DNA, 15 bp, Homo sapiens
tgtgagatattttag

SEQ ID NO: 2053035 - DNA, 15 bp, Homo sapiens
gtgagatattttagc

SEQ ID NO: 2053036 - DNA, 15 bp, Homo sapiens
tgagatattttagct

SEQ ID NO: 2053037 - DNA, 15 bp, Homo sapiens
gagatattttagctg

SEQ ID NO: 2053038 - DNA, 15 bp, Homo sapiens
agatattttagctgc

SEQ ID NO: 2053039 - DNA, 15 bp, Homo sapiens
gatattttagctgca

SEQ ID NO: 2053040 - DNA, 15 bp, Homo sapiens
atattttagctgcag

SEQ ID NO: 2053041 - DNA, 15 bp, Homo sapiens
tattttagctgcagc

SEQ ID NO: 2053042 - DNA, 15 bp, Homo sapiens
attttagctgcagca

SEQ ID NO: 2053043 - DNA, 15 bp, Homo sapiens
ttttagctgcagcac

SEQ ID NO: 2053044 - DNA, 15 bp, Homo sapiens
tttagctgcagcaca

SEQ ID NO: 2053045 - DNA, 15 bp, Homo sapiens
ttagctgcagcacaa

SEQ ID NO: 2053046 - DNA, 15 bp, Homo sapiens
tagctgcagcacaac

SEQ ID NO: 2053047 - DNA, 15 bp, Homo sapiens
agctgcagcacaacc

SEQ ID NO: 2053048 - DNA, 15 bp, Homo sapiens
gctgcagcacaaccc

SEQ ID NO: 2053049 - DNA, 15 bp, Homo sapiens
ctgcagcacaaccct

SEQ ID NO: 2053050 - DNA, 15 bp, Homo sapiens
tgcagcacaaccctt

SEQ ID NO: 2053051 - DNA, 15 bp, Homo sapiens
gcagcacaacccttt

SEQ ID NO: 2053052 - DNA, 15 bp, Homo sapiens
cagcacaaccctttt

SEQ ID NO: 2053053 - DNA, 15 bp, Homo sapiens
agcacaaccctttta

SEQ ID NO: 2053054 - DNA, 15 bp, Homo sapiens
gcacaacccttttaa

SEQ ID NO: 2053055 - DNA, 15 bp, Homo sapiens
cacaacccttttaat

SEQ ID NO: 2053056 - DNA, 15 bp, Homo sapiens
acaacccttttaata

SEQ ID NO: 2053057 - DNA, 15 bp, Homo sapiens
caacccttttaatac

SEQ ID NO: 2053058 - DNA, 15 bp, Homo sapiens
aacccttttaatacc

SEQ ID NO: 2053059 - DNA, 15 bp, Homo sapiens
acccttttaataccc

SEQ ID NO: 2053060 - DNA, 15 bp, Homo sapiens
cccttttaataccca

SEQ ID NO: 2053061 - DNA, 15 bp, Homo sapiens
ccttttaatacccag

SEQ ID NO: 2053062 - DNA, 15 bp, Homo sapiens
cttttaatacccagc

SEQ ID NO: 2053063 - DNA, 15 bp, Homo sapiens
ttttaatacccagca

SEQ ID NO: 2053064 - DNA, 15 bp, Homo sapiens
tttaatacccagcat

SEQ ID NO: 2053065 - DNA, 15 bp, Homo sapiens
ttaatacccagcatg

SEQ ID NO: 2053066 - DNA, 15 bp, Homo sapiens
taatacccagcatga

SEQ ID NO: 2053067 - DNA, 15 bp, Homo sapiens
aatacccagcatgac

SEQ ID NO: 2053068 - DNA, 15 bp, Homo sapiens
atacccagcatgaca

SEQ ID NO: 2053069 - DNA, 15 bp, Homo sapiens
tacccagcatgacat

SEQ ID NO: 2053070 - DNA, 15 bp, Homo sapiens
acccagcatgacatc

SEQ ID NO: 2053071 - DNA, 15 bp, Homo sapiens
cccagcatgacatcg

SEQ ID NO: 2053072 - DNA, 15 bp, Homo sapiens
ccagcatgacatcga

SEQ ID NO: 2053073 - DNA, 15 bp, Homo sapiens
cagcatgacatcgac

SEQ ID NO: 2053074 - DNA, 15 bp, Homo sapiens
agcatgacatcgact

SEQ ID NO: 2053075 - DNA, 15 bp, Homo sapiens
gcatgacatcgactg

SEQ ID NO: 2053076 - DNA, 15 bp, Homo sapiens
catgacatcgactgt

SEQ ID NO: 2053077 - DNA, 15 bp, Homo sapiens
atgacatcgactgtg

SEQ ID NO: 2053078 - DNA, 15 bp, Homo sapiens
tgacatcgactgtgt

SEQ ID NO: 2053079 - DNA, 15 bp, Homo sapiens
gacatcgactgtgtg

SEQ ID NO: 2053080 - DNA, 15 bp, Homo sapiens
acatcgactgtgtga

SEQ ID NO: 2053081 - DNA, 15 bp, Homo sapiens
catcgactgtgtgag

SEQ ID NO: 2053082 - DNA, 15 bp, Homo sapiens
atcgactgtgtgagc

SEQ ID NO: 2053083 - DNA, 15 bp, Homo sapiens
tcgactgtgtgagcg

SEQ ID NO: 2053084 - DNA, 15 bp, Homo sapiens
cgactgtgtgagcga

SEQ ID NO: 2053085 - DNA, 15 bp, Homo sapiens
gactgtgtgagcgag

SEQ ID NO: 2053086 - DNA, 15 bp, Homo sapiens
actgtgtgagcgagg

SEQ ID NO: 2053087 - DNA, 15 bp, Homo sapiens
ctgtgtgagcgaggc

SEQ ID NO: 2053088 - DNA, 15 bp, Homo sapiens
tgtgtgagcgaggcc

SEQ ID NO: 2053089 - DNA, 15 bp, Homo sapiens
gtgtgagcgaggccc

SEQ ID NO: 2053090 - DNA, 15 bp, Homo sapiens
tgtgagcgaggccct

SEQ ID NO: 2053091 - DNA, 15 bp, Homo sapiens
gtgagcgaggccctt

SEQ ID NO: 2053092 - DNA, 15 bp, Homo sapiens
tgagcgaggccctta

SEQ ID NO: 2053093 - DNA, 15 bp, Homo sapiens
gagcgaggcccttat

SEQ ID NO: 2053094 - DNA, 15 bp, Homo sapiens
agcgaggcccttatt

SEQ ID NO: 2053095 - DNA, 15 bp, Homo sapiens
gcgaggcccttattt

SEQ ID NO: 2053096 - DNA, 15 bp, Homo sapiens
cgaggcccttatttg

SEQ ID NO: 2053097 - DNA, 15 bp, Homo sapiens
gaggcccttatttgg

SEQ ID NO: 2053098 - DNA, 15 bp, Homo sapiens
aggcccttatttggt

SEQ ID NO: 2053099 - DNA, 15 bp, Homo sapiens
ggcccttatttggtt

SEQ ID NO: 2053100 - DNA, 15 bp, Homo sapiens
gcccttatttggttg

SEQ ID NO: 2053101 - DNA, 15 bp, Homo sapiens
cccttatttggttgg

SEQ ID NO: 2053102 - DNA, 15 bp, Homo sapiens
ccttatttggttggt

SEQ ID NO: 2053103 - DNA, 15 bp, Homo sapiens
cttatttggttggtg

SEQ ID NO: 2053104 - DNA, 15 bp, Homo sapiens
ttatttggttggtga

SEQ ID NO: 2053105 - DNA, 15 bp, Homo sapiens
tatttggttggtgaa

SEQ ID NO: 2053106 - DNA, 15 bp, Homo sapiens
atttggttggtgaac

SEQ ID NO: 2053107 - DNA, 15 bp, Homo sapiens
tttggttggtgaacg

SEQ ID NO: 2053108 - DNA, 15 bp, Homo sapiens
ttggttggtgaacgc

SEQ ID NO: 2053109 - DNA, 15 bp, Homo sapiens
tggttggtgaacgcc

SEQ ID NO: 2053110 - DNA, 15 bp, Homo sapiens
ggttggtgaacgccg

SEQ ID NO: 2053111 - DNA, 15 bp, Homo sapiens
gttggtgaacgccgg

SEQ ID NO: 2053112 - DNA, 15 bp, Homo sapiens
ttggtgaacgccggg

SEQ ID NO: 2053113 - DNA, 15 bp, Homo sapiens
tggtgaacgccgggg

SEQ ID NO: 2053114 - DNA, 15 bp, Homo sapiens
ggtgaacgccggggt

SEQ ID NO: 2053115 - DNA, 15 bp, Homo sapiens
gtgaacgccggggtg

SEQ ID NO: 2053116 - DNA, 15 bp, Homo sapiens
tgaacgccggggtgc

SEQ ID NO: 2053117 - DNA, 15 bp, Homo sapiens
gaacgccggggtgca

SEQ ID NO: 2053118 - DNA, 15 bp, Homo sapiens
aacgccggggtgcac

SEQ ID NO: 2053119 - DNA, 15 bp, Homo sapiens
acgccggggtgcaca

SEQ ID NO: 2053120 - DNA, 15 bp, Homo sapiens
cgccggggtgcacat

SEQ ID NO: 2053121 - DNA, 15 bp, Homo sapiens
gccggggtgcacatc

SEQ ID NO: 2053122 - DNA, 15 bp, Homo sapiens
ccggggtgcacatca

SEQ ID NO: 2053123 - DNA, 15 bp, Homo sapiens
cggggtgcacatcaa

SEQ ID NO: 2053124 - DNA, 15 bp, Homo sapiens
ggggtgcacatcaag

SEQ ID NO: 2053125 - DNA, 15 bp, Homo sapiens
gggtgcacatcaaga

SEQ ID NO: 2053126 - DNA, 15 bp, Homo sapiens
ggtgcacatcaagac

SEQ ID NO: 2053127 - DNA, 15 bp, Homo sapiens
gtgcacatcaagacg

SEQ ID NO: 2053128 - DNA, 15 bp, Homo sapiens
tgcacatcaagacgc

SEQ ID NO: 2053129 - DNA, 15 bp, Homo sapiens
gcacatcaagacgct

SEQ ID NO: 2053130 - DNA, 15 bp, Homo sapiens
cacatcaagacgctt

SEQ ID NO: 2053131 - DNA, 15 bp, Homo sapiens
acatcaagacgcttc

SEQ ID NO: 2053132 - DNA, 15 bp, Homo sapiens
catcaagacgcttcc

SEQ ID NO: 2053133 - DNA, 15 bp, Homo sapiens
atcaagacgcttccc

SEQ ID NO: 2053134 - DNA, 15 bp, Homo sapiens
tcaagacgcttccct

SEQ ID NO: 2053135 - DNA, 15 bp, Homo sapiens
caagacgcttccctg

SEQ ID NO: 2053136 - DNA, 15 bp, Homo sapiens
aagacgcttccctgc

SEQ ID NO: 2053137 - DNA, 15 bp, Homo sapiens
agacgcttccctgcc

SEQ ID NO: 2053138 - DNA, 15 bp, Homo sapiens
gacgcttccctgcct

SEQ ID NO: 2053139 - DNA, 15 bp, Homo sapiens
acgcttccctgcctg

SEQ ID NO: 2053140 - DNA, 15 bp, Homo sapiens
cgcttccctgcctgg

SEQ ID NO: 2053141 - DNA, 15 bp, Homo sapiens
gcttccctgcctggg

SEQ ID NO: 2053142 - DNA, 15 bp, Homo sapiens
cttccctgcctggga

SEQ ID NO: 2053143 - DNA, 15 bp, Homo sapiens
ttccctgcctgggag

SEQ ID NO: 2053144 - DNA, 15 bp, Homo sapiens
tccctgcctgggagg

SEQ ID NO: 2053145 - DNA, 15 bp, Homo sapiens
ccctgcctgggaggc

SEQ ID NO: 2053146 - DNA, 15 bp, Homo sapiens
cctgcctgggaggca

SEQ ID NO: 2053147 - DNA, 15 bp, Homo sapiens
ctgcctgggaggcac

SEQ ID NO: 2053148 - DNA, 15 bp, Homo sapiens
tgcctgggaggcaca

SEQ ID NO: 2053149 - DNA, 15 bp, Homo sapiens
gcctgggaggcacag

SEQ ID NO: 2053150 - DNA, 15 bp, Homo sapiens
cctgggaggcacaga

SEQ ID NO: 2053151 - DNA, 15 bp, Homo sapiens
ctgggaggcacagac

SEQ ID NO: 2053152 - DNA, 15 bp, Homo sapiens
tgggaggcacagacc

SEQ ID NO: 2053153 - DNA, 15 bp, Homo sapiens
gggaggcacagaccc

SEQ ID NO: 2053154 - DNA, 15 bp, Homo sapiens
ggaggcacagacccc

SEQ ID NO: 2053155 - DNA, 15 bp, Homo sapiens
gaggcacagacccct

SEQ ID NO: 2053156 - DNA, 15 bp, Homo sapiens
aggcacagacccctc

SEQ ID NO: 2053157 - DNA, 15 bp, Homo sapiens
ggcacagacccctct

SEQ ID NO: 2053158 - DNA, 15 bp, Homo sapiens
gcacagacccctctc

SEQ ID NO: 2053159 - DNA, 15 bp, Homo sapiens
cacagacccctctcc

SEQ ID NO: 2053160 - DNA, 15 bp, Homo sapiens
acagacccctctcca

SEQ ID NO: 2053161 - DNA, 15 bp, Homo sapiens
cagacccctctccag

SEQ ID NO: 2053162 - DNA, 15 bp, Homo sapiens
agacccctctccagg

SEQ ID NO: 2053163 - DNA, 15 bp, Homo sapiens
gacccctctccaggg

SEQ ID NO: 2053164 - DNA, 15 bp, Homo sapiens
acccctctccagggg

SEQ ID NO: 2053165 - DNA, 15 bp, Homo sapiens
cccctctccaggggc

SEQ ID NO: 2053166 - DNA, 15 bp, Homo sapiens
ccctctccaggggcc

SEQ ID NO: 2053167 - DNA, 15 bp, Homo sapiens
cctctccaggggccc

SEQ ID NO: 2053168 - DNA, 15 bp, Homo sapiens
ctctccaggggcccc

SEQ ID NO: 2053169 - DNA, 15 bp, Homo sapiens
tctccaggggccccg

SEQ ID NO: 2053170 - DNA, 15 bp, Homo sapiens
ctccaggggccccga

SEQ ID NO: 2053171 - DNA, 15 bp, Homo sapiens
tccaggggccccgag

SEQ ID NO: 2053172 - DNA, 15 bp, Homo sapiens
ccaggggccccgagg

SEQ ID NO: 2053173 - DNA, 15 bp, Homo sapiens
caggggccccgaggc

SEQ ID NO: 2053174 - DNA, 15 bp, Homo sapiens
aggggccccgaggcg

SEQ ID NO: 2053175 - DNA, 15 bp, Homo sapiens
ggggccccgaggcgg

SEQ ID NO: 2053176 - DNA, 15 bp, Homo sapiens
gggccccgaggcggg

SEQ ID NO: 2053177 - DNA, 15 bp, Homo sapiens
ggccccgaggcgggc

SEQ ID NO: 2053178 - DNA, 15 bp, Homo sapiens
gccccgaggcgggca

SEQ ID NO: 2053179 - DNA, 15 bp, Homo sapiens
ccccgaggcgggcaa

SEQ ID NO: 2053180 - DNA, 15 bp, Homo sapiens
cccgaggcgggcaag

SEQ ID NO: 2053181 - DNA, 15 bp, Homo sapiens
ccgaggcgggcaagc

SEQ ID NO: 2053182 - DNA, 15 bp, Homo sapiens
cgaggcgggcaagcg

SEQ ID NO: 2053183 - DNA, 15 bp, Homo sapiens
gaggcgggcaagcga

SEQ ID NO: 2053184 - DNA, 15 bp, Homo sapiens
aggcgggcaagcgag

SEQ ID NO: 2053185 - DNA, 15 bp, Homo sapiens
ggcgggcaagcgagg

SEQ ID NO: 2053186 - DNA, 15 bp, Homo sapiens
gcgggcaagcgaggt

SEQ ID NO: 2053187 - DNA, 15 bp, Homo sapiens
cgggcaagcgaggta

SEQ ID NO: 2053188 - DNA, 15 bp, Homo sapiens
gggcaagcgaggtag

SEQ ID NO: 2053189 - DNA, 15 bp, Homo sapiens
ggcaagcgaggtagc

SEQ ID NO: 2053190 - DNA, 15 bp, Homo sapiens
gcaagcgaggtagct

SEQ ID NO: 2053191 - DNA, 15 bp, Homo sapiens
caagcgaggtagctg

SEQ ID NO: 2053192 - DNA, 15 bp, Homo sapiens
aagcgaggtagctga

SEQ ID NO: 2053193 - DNA, 15 bp, Homo sapiens
agcgaggtagctgag

SEQ ID NO: 2053194 - DNA, 15 bp, Homo sapiens
gcgaggtagctgaga

SEQ ID NO: 2053195 - DNA, 15 bp, Homo sapiens
cgaggtagctgagag

SEQ ID NO: 2053196 - DNA, 15 bp, Homo sapiens
gaggtagctgagagg

SEQ ID NO: 2053197 - DNA, 15 bp, Homo sapiens
aggtagctgagaggg

SEQ ID NO: 2053198 - DNA, 15 bp, Homo sapiens
ggtagctgagaggga

SEQ ID NO: 2053199 - DNA, 15 bp, Homo sapiens
gtagctgagagggac

SEQ ID NO: 2053200 - DNA, 15 bp, Homo sapiens
tagctgagagggacc

SEQ ID NO: 2053201 - DNA, 15 bp, Homo sapiens
agctgagagggaccg

SEQ ID NO: 2053202 - DNA, 15 bp, Homo sapiens
gctgagagggaccgc

SEQ ID NO: 2053203 - DNA, 15 bp, Homo sapiens
ctgagagggaccgcg

SEQ ID NO: 2053204 - DNA, 15 bp, Homo sapiens
tgagagggaccgcgg

SEQ ID NO: 2053205 - DNA, 15 bp, Homo sapiens
gagagggaccgcggc

SEQ ID NO: 2053206 - DNA, 15 bp, Homo sapiens
agagggaccgcggcc

SEQ ID NO: 2053207 - DNA, 15 bp, Homo sapiens
gagggaccgcggccc

SEQ ID NO: 2053208 - DNA, 15 bp, Homo sapiens
agggaccgcggccca

SEQ ID NO: 2053209 - DNA, 15 bp, Homo sapiens
gggaccgcggcccag

SEQ ID NO: 2053210 - DNA, 15 bp, Homo sapiens
ggaccgcggcccagc

SEQ ID NO: 2053211 - DNA, 15 bp, Homo sapiens
gaccgcggcccagca

SEQ ID NO: 2053212 - DNA, 15 bp, Homo sapiens
accgcggcccagcat

SEQ ID NO: 2053213 - DNA, 15 bp, Homo sapiens
ccgcggcccagcatc

SEQ ID NO: 2053214 - DNA, 15 bp, Homo sapiens
cgcggcccagcatcg

SEQ ID NO: 2053215 - DNA, 15 bp, Homo sapiens
gcggcccagcatcgg

SEQ ID NO: 2053216 - DNA, 15 bp, Homo sapiens
cggcccagcatcggc

SEQ ID NO: 2053217 - DNA, 15 bp, Homo sapiens
ggcccagcatcggct

SEQ ID NO: 2053218 - DNA, 15 bp, Homo sapiens
gcccagcatcggctc

SEQ ID NO: 2053219 - DNA, 15 bp, Homo sapiens
cccagcatcggctcg

SEQ ID NO: 2053220 - DNA, 15 bp, Homo sapiens
ccagcatcggctcgt

SEQ ID NO: 2053221 - DNA, 15 bp, Homo sapiens
cagcatcggctcgtc

SEQ ID NO: 2053222 - DNA, 15 bp, Homo sapiens
agcatcggctcgtct

SEQ ID NO: 2053223 - DNA, 15 bp, Homo sapiens
gcatcggctcgtctg

SEQ ID NO: 2053224 - DNA, 15 bp, Homo sapiens
catcggctcgtctgg

SEQ ID NO: 2053225 - DNA, 15 bp, Homo sapiens
atcggctcgtctggg

SEQ ID NO: 2053226 - DNA, 15 bp, Homo sapiens
tcggctcgtctgggt

SEQ ID NO: 2053227 - DNA, 15 bp, Homo sapiens
cggctcgtctgggtg

SEQ ID NO: 2053228 - DNA, 15 bp, Homo sapiens
ggctcgtctgggtgg

SEQ ID NO: 2053229 - DNA, 15 bp, Homo sapiens
gctcgtctgggtggg

SEQ ID NO: 2053230 - DNA, 15 bp, Homo sapiens
ctcgtctgggtggga

SEQ ID NO: 2053231 - DNA, 15 bp, Homo sapiens
tcgtctgggtgggag

SEQ ID NO: 2053232 - DNA, 15 bp, Homo sapiens
cgtctgggtgggagg

SEQ ID NO: 2053233 - DNA, 15 bp, Homo sapiens
gtctgggtgggaggg

SEQ ID NO: 2053234 - DNA, 15 bp, Homo sapiens
tctgggtgggagggc

SEQ ID NO: 2053235 - DNA, 15 bp, Homo sapiens
ctgggtgggagggcg

SEQ ID NO: 2053236 - DNA, 15 bp, Homo sapiens
tgggtgggagggcgg

SEQ ID NO: 2053237 - DNA, 15 bp, Homo sapiens
gggtgggagggcggc

SEQ ID NO: 2053238 - DNA, 15 bp, Homo sapiens
ggtgggagggcggcc

SEQ ID NO: 2053239 - DNA, 15 bp, Homo sapiens
gtgggagggcggccg

SEQ ID NO: 2053240 - DNA, 15 bp, Homo sapiens
tgggagggcggccgc

SEQ ID NO: 2053241 - DNA, 15 bp, Homo sapiens
gggagggcggccgcc

SEQ ID NO: 2053242 - DNA, 15 bp, Homo sapiens
ggagggcggccgccc

SEQ ID NO: 2053243 - DNA, 15 bp, Homo sapiens
gagggcggccgccca

SEQ ID NO: 2053244 - DNA, 15 bp, Homo sapiens
agggcggccgcccag

SEQ ID NO: 2053245 - DNA, 15 bp, Homo sapiens
gggcggccgcccaga

SEQ ID NO: 2053246 - DNA, 15 bp, Homo sapiens
ggcggccgcccagac

SEQ ID NO: 2053247 - DNA, 15 bp, Homo sapiens
gcggccgcccagact

SEQ ID NO: 2053248 - DNA, 15 bp, Homo sapiens
cggccgcccagactt

SEQ ID NO: 2053249 - DNA, 15 bp, Homo sapiens
ggccgcccagacttc

SEQ ID NO: 2053250 - DNA, 15 bp, Homo sapiens
gccgcccagacttcc

SEQ ID NO: 2053251 - DNA, 15 bp, Homo sapiens
ccgcccagacttccc

SEQ ID NO: 2053252 - DNA, 15 bp, Homo sapiens
cgcccagacttcccg

SEQ ID NO: 2053253 - DNA, 15 bp, Homo sapiens
gcccagacttcccgc

SEQ ID NO: 2053254 - DNA, 15 bp, Homo sapiens
cccagacttcccgcg

SEQ ID NO: 2053255 - DNA, 15 bp, Homo sapiens
ccagacttcccgcgg

SEQ ID NO: 2053256 - DNA, 15 bp, Homo sapiens
cagacttcccgcggt

SEQ ID NO: 2053257 - DNA, 15 bp, Homo sapiens
agacttcccgcggtc

SEQ ID NO: 2053258 - DNA, 15 bp, Homo sapiens
gacttcccgcggtcg

SEQ ID NO: 2053259 - DNA, 15 bp, Homo sapiens
acttcccgcggtcgg

SEQ ID NO: 2053260 - DNA, 15 bp, Homo sapiens
cttcccgcggtcggc

SEQ ID NO: 2053261 - DNA, 15 bp, Homo sapiens
ttcccgcggtcggca

SEQ ID NO: 2053262 - DNA, 15 bp, Homo sapiens
tcccgcggtcggcac

SEQ ID NO: 2053263 - DNA, 15 bp, Homo sapiens
cccgcggtcggcacc

SEQ ID NO: 2053264 - DNA, 15 bp, Homo sapiens
ccgcggtcggcaccc

SEQ ID NO: 2053265 - DNA, 15 bp, Homo sapiens
cgcggtcggcacccc

SEQ ID NO: 2053266 - DNA, 15 bp, Homo sapiens
gcggtcggcaccccc

SEQ ID NO: 2053267 - DNA, 15 bp, Homo sapiens
cggtcggcaccccct

SEQ ID NO: 2053268 - DNA, 15 bp, Homo sapiens
ggtcggcaccccctg

SEQ ID NO: 2053269 - DNA, 15 bp, Homo sapiens
gtcggcaccccctgc

SEQ ID NO: 2053270 - DNA, 15 bp, Homo sapiens
tcggcaccccctgct

SEQ ID NO: 2053271 - DNA, 15 bp, Homo sapiens
cggcaccccctgctc

SEQ ID NO: 2053272 - DNA, 15 bp, Homo sapiens
ggcaccccctgctcg

SEQ ID NO: 2053273 - DNA, 15 bp, Homo sapiens
gcaccccctgctcgg

SEQ ID NO: 2053274 - DNA, 15 bp, Homo sapiens
caccccctgctcggc

SEQ ID NO: 2053275 - DNA, 15 bp, Homo sapiens
accccctgctcggcc

SEQ ID NO: 2053276 - DNA, 15 bp, Homo sapiens
ccccctgctcggccc

SEQ ID NO: 2053277 - DNA, 15 bp, Homo sapiens
cccctgctcggcccc

SEQ ID NO: 2053278 - DNA, 15 bp, Homo sapiens
ccctgctcggcccca

SEQ ID NO: 2053279 - DNA, 15 bp, Homo sapiens
cctgctcggccccag

SEQ ID NO: 2053280 - DNA, 15 bp, Homo sapiens
ctgctcggccccagc

SEQ ID NO: 2053281 - DNA, 15 bp, Homo sapiens
tgctcggccccagcc

SEQ ID NO: 2053282 - DNA, 15 bp, Homo sapiens
gctcggccccagccc

SEQ ID NO: 2053283 - DNA, 15 bp, Homo sapiens
ctcggccccagccca

SEQ ID NO: 2053284 - DNA, 15 bp, Homo sapiens
tcggccccagcccag

SEQ ID NO: 2053285 - DNA, 15 bp, Homo sapiens
cggccccagcccaga

SEQ ID NO: 2053286 - DNA, 15 bp, Homo sapiens
ggccccagcccagag

SEQ ID NO: 2053287 - DNA, 15 bp, Homo sapiens
gccccagcccagagg

SEQ ID NO: 2053288 - DNA, 15 bp, Homo sapiens
ccccagcccagaggc

SEQ ID NO: 2053289 - DNA, 15 bp, Homo sapiens
cccagcccagaggcc

SEQ ID NO: 2053290 - DNA, 15 bp, Homo sapiens
ccagcccagaggccg

SEQ ID NO: 2053291 - DNA, 15 bp, Homo sapiens
cagcccagaggccgc

SEQ ID NO: 2053292 - DNA, 15 bp, Homo sapiens
agcccagaggccgcc

SEQ ID NO: 2053293 - DNA, 15 bp, Homo sapiens
gcccagaggccgcca

SEQ ID NO: 2053294 - DNA, 15 bp, Homo sapiens
cccagaggccgccag

SEQ ID NO: 2053295 - DNA, 15 bp, Homo sapiens
ccagaggccgccagc

SEQ ID NO: 2053296 - DNA, 15 bp, Homo sapiens
cagaggccgccagca

SEQ ID NO: 2053297 - DNA, 15 bp, Homo sapiens
agaggccgccagcat

SEQ ID NO: 2053298 - DNA, 15 bp, Homo sapiens
gaggccgccagcatt

SEQ ID NO: 2053299 - DNA, 15 bp, Homo sapiens
aggccgccagcattt

SEQ ID NO: 2053300 - DNA, 15 bp, Homo sapiens
ggccgccagcatttg

SEQ ID NO: 2053301 - DNA, 15 bp, Homo sapiens
gccgccagcatttga

SEQ ID NO: 2053302 - DNA, 15 bp, Homo sapiens
ccgccagcatttgag

SEQ ID NO: 2053303 - DNA, 15 bp, Homo sapiens
cgccagcatttgagt

SEQ ID NO: 2053304 - DNA, 15 bp, Homo sapiens
gccagcatttgagtc

SEQ ID NO: 2053305 - DNA, 15 bp, Homo sapiens
ccagcatttgagtcc

SEQ ID NO: 2053306 - DNA, 15 bp, Homo sapiens
cagcatttgagtccc

SEQ ID NO: 2053307 - DNA, 15 bp, Homo sapiens
agcatttgagtcccc

SEQ ID NO: 2053308 - DNA, 15 bp, Homo sapiens
gcatttgagtccccg

SEQ ID NO: 2053309 - DNA, 15 bp, Homo sapiens
catttgagtccccgc

SEQ ID NO: 2053310 - DNA, 15 bp, Homo sapiens
atttgagtccccgcc

SEQ ID NO: 2053311 - DNA, 15 bp, Homo sapiens
tttgagtccccgccc

SEQ ID NO: 2053312 - DNA, 15 bp, Homo sapiens
ttgagtccccgccca

SEQ ID NO: 2053313 - DNA, 15 bp, Homo sapiens
tgagtccccgcccag

SEQ ID NO: 2053314 - DNA, 15 bp, Homo sapiens
gagtccccgcccagc

SEQ ID NO: 2053315 - DNA, 15 bp, Homo sapiens
agtccccgcccagcc

SEQ ID NO: 2053316 - DNA, 15 bp, Homo sapiens
gtccccgcccagccg

SEQ ID NO: 2053317 - DNA, 15 bp, Homo sapiens
tccccgcccagccgc

SEQ ID NO: 2053318 - DNA, 15 bp, Homo sapiens
ccccgcccagccgcg

SEQ ID NO: 2053319 - DNA, 15 bp, Homo sapiens
cccgcccagccgcgg

SEQ ID NO: 2053320 - DNA, 15 bp, Homo sapiens
ccgcccagccgcggc

SEQ ID NO: 2053321 - DNA, 15 bp, Homo sapiens
cgcccagccgcggct

SEQ ID NO: 2053322 - DNA, 15 bp, Homo sapiens
gcccagccgcggctc

SEQ ID NO: 2053323 - DNA, 15 bp, Homo sapiens
cccagccgcggctcc

SEQ ID NO: 2053324 - DNA, 15 bp, Homo sapiens
ccagccgcggctccg

SEQ ID NO: 2053325 - DNA, 15 bp, Homo sapiens
cagccgcggctccgc

SEQ ID NO: 2053326 - DNA, 15 bp, Homo sapiens
agccgcggctccgcc

SEQ ID NO: 2053327 - DNA, 15 bp, Homo sapiens
gccgcggctccgccg

SEQ ID NO: 2053328 - DNA, 15 bp, Homo sapiens
ccgcggctccgccgt

SEQ ID NO: 2053329 - DNA, 15 bp, Homo sapiens
cgcggctccgccgtc

SEQ ID NO: 2053330 - DNA, 15 bp, Homo sapiens
gcggctccgccgtcg

SEQ ID NO: 2053331 - DNA, 15 bp, Homo sapiens
cggctccgccgtcgg

SEQ ID NO: 2053332 - DNA, 15 bp, Homo sapiens
ggctccgccgtcggg

SEQ ID NO: 2053333 - DNA, 15 bp, Homo sapiens
gctccgccgtcgggg

SEQ ID NO: 2053334 - DNA, 15 bp, Homo sapiens
ctccgccgtcggggc

SEQ ID NO: 2053335 - DNA, 15 bp, Homo sapiens
tccgccgtcggggct

SEQ ID NO: 2053336 - DNA, 15 bp, Homo sapiens
ccgccgtcggggctt

SEQ ID NO: 2053337 - DNA, 15 bp, Homo sapiens
cgccgtcggggcttt

SEQ ID NO: 2053338 - DNA, 15 bp, Homo sapiens
gccgtcggggctttc

SEQ ID NO: 2053339 - DNA, 15 bp, Homo sapiens
ccgtcggggctttcc

SEQ ID NO: 2053340 - DNA, 15 bp, Homo sapiens
cgtcggggctttccc

SEQ ID NO: 2053341 - DNA, 15 bp, Homo sapiens
gtcggggctttcccc

SEQ ID NO: 2053342 - DNA, 15 bp, Homo sapiens
tcggggctttccccc

SEQ ID NO: 2053343 - DNA, 15 bp, Homo sapiens
cggggctttcccccg

SEQ ID NO: 2053344 - DNA, 15 bp, Homo sapiens
ggggctttcccccga

SEQ ID NO: 2053345 - DNA, 15 bp, Homo sapiens
gggctttcccccgaa

SEQ ID NO: 2053346 - DNA, 15 bp, Homo sapiens
ggctttcccccgaaa

SEQ ID NO: 2053347 - DNA, 15 bp, Homo sapiens
gctttcccccgaaag

SEQ ID NO: 2053348 - DNA, 15 bp, Homo sapiens
ctttcccccgaaagg

SEQ ID NO: 2053349 - DNA, 15 bp, Homo sapiens
tttcccccgaaaggc

SEQ ID NO: 2053350 - DNA, 15 bp, Homo sapiens
ttcccccgaaaggcc

SEQ ID NO: 2053351 - DNA, 15 bp, Homo sapiens
tcccccgaaaggccc

SEQ ID NO: 2053352 - DNA, 15 bp, Homo sapiens
cccccgaaaggccca

SEQ ID NO: 2053353 - DNA, 15 bp, Homo sapiens
ccccgaaaggcccag

SEQ ID NO: 2053354 - DNA, 15 bp, Homo sapiens
cccgaaaggcccagg

SEQ ID NO: 2053355 - DNA, 15 bp, Homo sapiens
ccgaaaggcccaggc

SEQ ID NO: 2053356 - DNA, 15 bp, Homo sapiens
cgaaaggcccaggcg

SEQ ID NO: 2053357 - DNA, 15 bp, Homo sapiens
gaaaggcccaggcgc

SEQ ID NO: 2053358 - DNA, 15 bp, Homo sapiens
aaaggcccaggcgcc

SEQ ID NO: 2053359 - DNA, 15 bp, Homo sapiens
aaggcccaggcgcca

SEQ ID NO: 2053360 - DNA, 15 bp, Homo sapiens
aggcccaggcgccac

SEQ ID NO: 2053361 - DNA, 15 bp, Homo sapiens
ggcccaggcgccacc

SEQ ID NO: 2053362 - DNA, 15 bp, Homo sapiens
gcccaggcgccacct

SEQ ID NO: 2053363 - DNA, 15 bp, Homo sapiens
cccaggcgccacctc

SEQ ID NO: 2053364 - DNA, 15 bp, Homo sapiens
ccaggcgccacctcg

SEQ ID NO: 2053365 - DNA, 15 bp, Homo sapiens
caggcgccacctcgc

SEQ ID NO: 2053366 - DNA, 15 bp, Homo sapiens
aggcgccacctcgcg

SEQ ID NO: 2053367 - DNA, 15 bp, Homo sapiens
ggcgccacctcgcga

SEQ ID NO: 2053368 - DNA, 15 bp, Homo sapiens
gcgccacctcgcgaa

SEQ ID NO: 2053369 - DNA, 15 bp, Homo sapiens
cgccacctcgcgaag

SEQ ID NO: 2053370 - DNA, 15 bp, Homo sapiens
gccacctcgcgaagt

SEQ ID NO: 2053371 - DNA, 15 bp, Homo sapiens
ccacctcgcgaagtc

SEQ ID NO: 2053372 - DNA, 15 bp, Homo sapiens
cacctcgcgaagtca

SEQ ID NO: 2053373 - DNA, 15 bp, Homo sapiens
acctcgcgaagtcag

SEQ ID NO: 2053374 - DNA, 15 bp, Homo sapiens
cctcgcgaagtcagc

SEQ ID NO: 2053375 - DNA, 15 bp, Homo sapiens
ctcgcgaagtcagct

SEQ ID NO: 2053376 - DNA, 15 bp, Homo sapiens
tcgcgaagtcagctt

SEQ ID NO: 2053377 - DNA, 15 bp, Homo sapiens
cgcgaagtcagcttg

SEQ ID NO: 2053378 - DNA, 15 bp, Homo sapiens
gcgaagtcagcttgg

SEQ ID NO: 2053379 - DNA, 15 bp, Homo sapiens
cgaagtcagcttggc

SEQ ID NO: 2053380 - DNA, 15 bp, Homo sapiens
gaagtcagcttggct

SEQ ID NO: 2053381 - DNA, 15 bp, Homo sapiens
aagtcagcttggctg

SEQ ID NO: 2053382 - DNA, 15 bp, Homo sapiens
agtcagcttggctgg

SEQ ID NO: 2053383 - DNA, 15 bp, Homo sapiens
gtcagcttggctggc

SEQ ID NO: 2053384 - DNA, 15 bp, Homo sapiens
tcagcttggctggct

SEQ ID NO: 2053385 - DNA, 15 bp, Homo sapiens
cagcttggctggctc

SEQ ID NO: 2053386 - DNA, 15 bp, Homo sapiens
agcttggctggctcc

SEQ ID NO: 2053387 - DNA, 15 bp, Homo sapiens
gcttggctggctcct

SEQ ID NO: 2053388 - DNA, 15 bp, Homo sapiens
cttggctggctcctg

SEQ ID NO: 2053389 - DNA, 15 bp, Homo sapiens
ttggctggctcctga

SEQ ID NO: 2053390 - DNA, 15 bp, Homo sapiens
tggctggctcctgag

SEQ ID NO: 2053391 - DNA, 15 bp, Homo sapiens
ggctggctcctgagc

SEQ ID NO: 2053392 - DNA, 15 bp, Homo sapiens
gctggctcctgagcc

SEQ ID NO: 2053393 - DNA, 15 bp, Homo sapiens
ctggctcctgagccc

SEQ ID NO: 2053394 - DNA, 15 bp, Homo sapiens
tggctcctgagcccg

SEQ ID NO: 2053395 - DNA, 15 bp, Homo sapiens
ggctcctgagcccgg

SEQ ID NO: 2053396 - DNA, 15 bp, Homo sapiens
gctcctgagcccggc

SEQ ID NO: 2053397 - DNA, 15 bp, Homo sapiens
ctcctgagcccggct

SEQ ID NO: 2053398 - DNA, 15 bp, Homo sapiens
tcctgagcccggctc

SEQ ID NO: 2053399 - DNA, 15 bp, Homo sapiens
cctgagcccggctct

SEQ ID NO: 2053400 - DNA, 15 bp, Homo sapiens
ctgagcccggctctg

SEQ ID NO: 2053401 - DNA, 15 bp, Homo sapiens
tgagcccggctctgc

SEQ ID NO: 2053402 - DNA, 15 bp, Homo sapiens
gagcccggctctgcc

SEQ ID NO: 2053403 - DNA, 15 bp, Homo sapiens
agcccggctctgcca

SEQ ID NO: 2053404 - DNA, 15 bp, Homo sapiens
gcccggctctgccac

SEQ ID NO: 2053405 - DNA, 15 bp, Homo sapiens
cccggctctgccacc

SEQ ID NO: 2053406 - DNA, 15 bp, Homo sapiens
ccggctctgccaccc

SEQ ID NO: 2053407 - DNA, 15 bp, Homo sapiens
cggctctgccacccc

SEQ ID NO: 2053408 - DNA, 15 bp, Homo sapiens
ggctctgccacccca

SEQ ID NO: 2053409 - DNA, 15 bp, Homo sapiens
gctctgccaccccaa

SEQ ID NO: 2053410 - DNA, 15 bp, Homo sapiens
ctctgccaccccaaa

SEQ ID NO: 2053411 - DNA, 15 bp, Homo sapiens
tctgccaccccaaag

SEQ ID NO: 2053412 - DNA, 15 bp, Homo sapiens
ctgccaccccaaagc

SEQ ID NO: 2053413 - DNA, 15 bp, Homo sapiens
tgccaccccaaagca

SEQ ID NO: 2053414 - DNA, 15 bp, Homo sapiens
gccaccccaaagcaa

SEQ ID NO: 2053415 - DNA, 15 bp, Homo sapiens
ccaccccaaagcaag

SEQ ID NO: 2053416 - DNA, 15 bp, Homo sapiens
caccccaaagcaagg

SEQ ID NO: 2053417 - DNA, 15 bp, Homo sapiens
accccaaagcaaggg

SEQ ID NO: 2053418 - DNA, 15 bp, Homo sapiens
ccccaaagcaagggg

SEQ ID NO: 2053419 - DNA, 15 bp, Homo sapiens
cccaaagcaaggggc

SEQ ID NO: 2053420 - DNA, 15 bp, Homo sapiens
ccaaagcaaggggcc

SEQ ID NO: 2053421 - DNA, 15 bp, Homo sapiens
caaagcaaggggccg

SEQ ID NO: 2053422 - DNA, 15 bp, Homo sapiens
aaagcaaggggccgt

SEQ ID NO: 2053423 - DNA, 15 bp, Homo sapiens
aagcaaggggccgta

SEQ ID NO: 2053424 - DNA, 15 bp, Homo sapiens
agcaaggggccgtac

SEQ ID NO: 2053425 - DNA, 15 bp, Homo sapiens
gcaaggggccgtacc

SEQ ID NO: 2053426 - DNA, 15 bp, Homo sapiens
caaggggccgtaccc

SEQ ID NO: 2053427 - DNA, 15 bp, Homo sapiens
aaggggccgtacccg

SEQ ID NO: 2053428 - DNA, 15 bp, Homo sapiens
aggggccgtacccgc

SEQ ID NO: 2053429 - DNA, 15 bp, Homo sapiens
ggggccgtacccgcg

SEQ ID NO: 2053430 - DNA, 15 bp, Homo sapiens
gggccgtacccgcgt

SEQ ID NO: 2053431 - DNA, 15 bp, Homo sapiens
ggccgtacccgcgtc

SEQ ID NO: 2053432 - DNA, 15 bp, Homo sapiens
gccgtacccgcgtcc

SEQ ID NO: 2053433 - DNA, 15 bp, Homo sapiens
ccgtacccgcgtcct

SEQ ID NO: 2053434 - DNA, 15 bp, Homo sapiens
cgtacccgcgtcctt

SEQ ID NO: 2053435 - DNA, 15 bp, Homo sapiens
gtacccgcgtccttc

SEQ ID NO: 2053436 - DNA, 15 bp, Homo sapiens
tacccgcgtccttcc

SEQ ID NO: 2053437 - DNA, 15 bp, Homo sapiens
acccgcgtccttcct

SEQ ID NO: 2053438 - DNA, 15 bp, Homo sapiens
cccgcgtccttcctc

SEQ ID NO: 2053439 - DNA, 15 bp, Homo sapiens
ccgcgtccttcctcg

SEQ ID NO: 2053440 - DNA, 15 bp, Homo sapiens
cgcgtccttcctcgg

SEQ ID NO: 2053441 - DNA, 15 bp, Homo sapiens
gcgtccttcctcggc

SEQ ID NO: 2053442 - DNA, 15 bp, Homo sapiens
cgtccttcctcggcg

SEQ ID NO: 2053443 - DNA, 15 bp, Homo sapiens
gtccttcctcggcga

SEQ ID NO: 2053444 - DNA, 15 bp, Homo sapiens
tccttcctcggcgac

SEQ ID NO: 2053445 - DNA, 15 bp, Homo sapiens
ccttcctcggcgacc

SEQ ID NO: 2053446 - DNA, 15 bp, Homo sapiens
cttcctcggcgaccc

SEQ ID NO: 2053447 - DNA, 15 bp, Homo sapiens
ttcctcggcgacccg

SEQ ID NO: 2053448 - DNA, 15 bp, Homo sapiens
tcctcggcgacccgc

SEQ ID NO: 2053449 - DNA, 15 bp, Homo sapiens
cctcggcgacccgcg

SEQ ID NO: 2053450 - DNA, 15 bp, Homo sapiens
ctcggcgacccgcgc

SEQ ID NO: 2053451 - DNA, 15 bp, Homo sapiens
tcggcgacccgcgcg

SEQ ID NO: 2053452 - DNA, 15 bp, Homo sapiens
cggcgacccgcgcgc

SEQ ID NO: 2053453 - DNA, 15 bp, Homo sapiens
ggcgacccgcgcgct

SEQ ID NO: 2053454 - DNA, 15 bp, Homo sapiens
gcgacccgcgcgctc

SEQ ID NO: 2053455 - DNA, 15 bp, Homo sapiens
cgacccgcgcgctcc

SEQ ID NO: 2053456 - DNA, 15 bp, Homo sapiens
gacccgcgcgctccc

SEQ ID NO: 2053457 - DNA, 15 bp, Homo sapiens
acccgcgcgctcccc

SEQ ID NO: 2053458 - DNA, 15 bp, Homo sapiens
cccgcgcgctcccct

SEQ ID NO: 2053459 - DNA, 15 bp, Homo sapiens
ccgcgcgctcccctc

SEQ ID NO: 2053460 - DNA, 15 bp, Homo sapiens
cgcgcgctcccctcc

SEQ ID NO: 2053461 - DNA, 15 bp, Homo sapiens
gcgcgctcccctccc

SEQ ID NO: 2053462 - DNA, 15 bp, Homo sapiens
cgcgctcccctccct

SEQ ID NO: 2053463 - DNA, 15 bp, Homo sapiens
gcgctcccctccctc

SEQ ID NO: 2053464 - DNA, 15 bp, Homo sapiens
cgctcccctccctct

SEQ ID NO: 2053465 - DNA, 15 bp, Homo sapiens
gctcccctccctctc

SEQ ID NO: 2053466 - DNA, 15 bp, Homo sapiens
ctcccctccctctcc

SEQ ID NO: 2053467 - DNA, 15 bp, Homo sapiens
tcccctccctctccg

SEQ ID NO: 2053468 - DNA, 15 bp, Homo sapiens
cccctccctctccgt

SEQ ID NO: 2053469 - DNA, 15 bp, Homo sapiens
ccctccctctccgtt

SEQ ID NO: 2053470 - DNA, 15 bp, Homo sapiens
cctccctctccgtta

SEQ ID NO: 2053471 - DNA, 15 bp, Homo sapiens
ctccctctccgttaa

SEQ ID NO: 2053472 - DNA, 15 bp, Homo sapiens
tccctctccgttaat

SEQ ID NO: 2053473 - DNA, 15 bp, Homo sapiens
ccctctccgttaata

SEQ ID NO: 2053474 - DNA, 15 bp, Homo sapiens
cctctccgttaatat

SEQ ID NO: 2053475 - DNA, 15 bp, Homo sapiens
ctctccgttaatatt

SEQ ID NO: 2053476 - DNA, 15 bp, Homo sapiens
tctccgttaatattc

SEQ ID NO: 2053477 - DNA, 15 bp, Homo sapiens
ctccgttaatattct

SEQ ID NO: 2053478 - DNA, 15 bp, Homo sapiens
tccgttaatattctc

SEQ ID NO: 2053479 - DNA, 15 bp, Homo sapiens
ccgttaatattctcc

SEQ ID NO: 2053480 - DNA, 15 bp, Homo sapiens
cgttaatattctccg

SEQ ID NO: 2053481 - DNA, 15 bp, Homo sapiens
gttaatattctccga

SEQ ID NO: 2053482 - DNA, 15 bp, Homo sapiens
ttaatattctccgat

SEQ ID NO: 2053483 - DNA, 15 bp, Homo sapiens
taatattctccgata

SEQ ID NO: 2053484 - DNA, 15 bp, Homo sapiens
aatattctccgataa

SEQ ID NO: 2053485 - DNA, 15 bp, Homo sapiens
atattctccgataat

SEQ ID NO: 2053486 - DNA, 15 bp, Homo sapiens
tattctccgataatt

SEQ ID NO: 2053487 - DNA, 15 bp, Homo sapiens
attctccgataattt

SEQ ID NO: 2053488 - DNA, 15 bp, Homo sapiens
ttctccgataatttc

SEQ ID NO: 2053489 - DNA, 15 bp, Homo sapiens
tctccgataatttcc

SEQ ID NO: 2053490 - DNA, 15 bp, Homo sapiens
ctccgataatttccg

SEQ ID NO: 2053491 - DNA, 15 bp, Homo sapiens
tccgataatttccga

SEQ ID NO: 2053492 - DNA, 15 bp, Homo sapiens
ccgataatttccgag

SEQ ID NO: 2053493 - DNA, 15 bp, Homo sapiens
cgataatttccgagg

SEQ ID NO: 2053494 - DNA, 15 bp, Homo sapiens
gataatttccgaggc

SEQ ID NO: 2053495 - DNA, 15 bp, Homo sapiens
ataatttccgaggca

SEQ ID NO: 2053496 - DNA, 15 bp, Homo sapiens
taatttccgaggcaa

SEQ ID NO: 2053497 - DNA, 15 bp, Homo sapiens
aatttccgaggcaaa

SEQ ID NO: 2053498 - DNA, 15 bp, Homo sapiens
atttccgaggcaaag

SEQ ID NO: 2053499 - DNA, 15 bp, Homo sapiens
tttccgaggcaaaga

SEQ ID NO: 2053500 - DNA, 15 bp, Homo sapiens
ttccgaggcaaagat

SEQ ID NO: 2053501 - DNA, 15 bp, Homo sapiens
tccgaggcaaagatt

SEQ ID NO: 2053502 - DNA, 15 bp, Homo sapiens
ccgaggcaaagattt

SEQ ID NO: 2053503 - DNA, 15 bp, Homo sapiens
cgaggcaaagatttc

SEQ ID NO: 2053504 - DNA, 15 bp, Homo sapiens
gaggcaaagatttct

SEQ ID NO: 2053505 - DNA, 15 bp, Homo sapiens
aggcaaagatttcta

SEQ ID NO: 2053506 - DNA, 15 bp, Homo sapiens
ggcaaagatttctat

SEQ ID NO: 2053507 - DNA, 15 bp, Homo sapiens
gcaaagatttctatc

SEQ ID NO: 2053508 - DNA, 15 bp, Homo sapiens
caaagatttctatct

SEQ ID NO: 2053509 - DNA, 15 bp, Homo sapiens
aaagatttctatctt

SEQ ID NO: 2053510 - DNA, 15 bp, Homo sapiens
aagatttctatcttt

SEQ ID NO: 2053511 - DNA, 15 bp, Homo sapiens
agatttctatctttt

SEQ ID NO: 2053512 - DNA, 15 bp, Homo sapiens
gatttctatcttttg

SEQ ID NO: 2053513 - DNA, 15 bp, Homo sapiens
atttctatcttttgg

SEQ ID NO: 2053514 - DNA, 15 bp, Homo sapiens
tttctatcttttggg

SEQ ID NO: 2053515 - DNA, 15 bp, Homo sapiens
ttctatcttttgggc

SEQ ID NO: 2053516 - DNA, 15 bp, Homo sapiens
tctatcttttgggcg

SEQ ID NO: 2053517 - DNA, 15 bp, Homo sapiens
ctatcttttgggcga

SEQ ID NO: 2053518 - DNA, 15 bp, Homo sapiens
tatcttttgggcgaa

SEQ ID NO: 2053519 - DNA, 15 bp, Homo sapiens
atcttttgggcgaat

SEQ ID NO: 2053520 - DNA, 15 bp, Homo sapiens
tcttttgggcgaatt

SEQ ID NO: 2053521 - DNA, 15 bp, Homo sapiens
cttttgggcgaattt

SEQ ID NO: 2053522 - DNA, 15 bp, Homo sapiens
ttttgggcgaatttg

SEQ ID NO: 2053523 - DNA, 15 bp, Homo sapiens
tttgggcgaatttgt

SEQ ID NO: 2053524 - DNA, 15 bp, Homo sapiens
ttgggcgaatttgtt

SEQ ID NO: 2053525 - DNA, 15 bp, Homo sapiens
tgggcgaatttgttt

SEQ ID NO: 2053526 - DNA, 15 bp, Homo sapiens
gggcgaatttgtttc

SEQ ID NO: 2053527 - DNA, 15 bp, Homo sapiens
ggcgaatttgtttca

SEQ ID NO: 2053528 - DNA, 15 bp, Homo sapiens
gcgaatttgtttcat

SEQ ID NO: 2053529 - DNA, 15 bp, Homo sapiens
cgaatttgtttcatc

SEQ ID NO: 2053530 - DNA, 15 bp, Homo sapiens
gaatttgtttcatct

SEQ ID NO: 2053531 - DNA, 15 bp, Homo sapiens
aatttgtttcatctc

SEQ ID NO: 2053532 - DNA, 15 bp, Homo sapiens
atttgtttcatctct

SEQ ID NO: 2053533 - DNA, 15 bp, Homo sapiens
tttgtttcatctctc

SEQ ID NO: 2053534 - DNA, 15 bp, Homo sapiens
ttgtttcatctctct

SEQ ID NO: 2053535 - DNA, 15 bp, Homo sapiens
tgtttcatctctctt

SEQ ID NO: 2053536 - DNA, 15 bp, Homo sapiens
gtttcatctctcttg

SEQ ID NO: 2053537 - DNA, 15 bp, Homo sapiens
tttcatctctcttga

SEQ ID NO: 2053538 - DNA, 15 bp, Homo sapiens
ttcatctctcttgaa

SEQ ID NO: 2053539 - DNA, 15 bp, Homo sapiens
tcatctctcttgaat

SEQ ID NO: 2053540 - DNA, 15 bp, Homo sapiens
catctctcttgaatt

SEQ ID NO: 2053541 - DNA, 15 bp, Homo sapiens
atctctcttgaattc

SEQ ID NO: 2053542 - DNA, 15 bp, Homo sapiens
tctctcttgaattca

SEQ ID NO: 2053543 - DNA, 15 bp, Homo sapiens
ctctcttgaattcag

SEQ ID NO: 2053544 - DNA, 15 bp, Homo sapiens
tctcttgaattcaga

SEQ ID NO: 2053545 - DNA, 15 bp, Homo sapiens
ctcttgaattcagaa

SEQ ID NO: 2053546 - DNA, 15 bp, Homo sapiens
tcttgaattcagaaa

SEQ ID NO: 2053547 - DNA, 15 bp, Homo sapiens
cttgaattcagaaat

SEQ ID NO: 2053548 - DNA, 15 bp, Homo sapiens
ttgaattcagaaatg

SEQ ID NO: 2053549 - DNA, 15 bp, Homo sapiens
tgaattcagaaatgg

SEQ ID NO: 2053550 - DNA, 15 bp, Homo sapiens
gaattcagaaatgga

SEQ ID NO: 2053551 - DNA, 15 bp, Homo sapiens
aattcagaaatggag

SEQ ID NO: 2053552 - DNA, 15 bp, Homo sapiens
attcagaaatggagc

SEQ ID NO: 2053553 - DNA, 15 bp, Homo sapiens
ttcagaaatggagcc

SEQ ID NO: 2053554 - DNA, 15 bp, Homo sapiens
tcagaaatggagcct

SEQ ID NO: 2053555 - DNA, 15 bp, Homo sapiens
cagaaatggagcctt

SEQ ID NO: 2053556 - DNA, 15 bp, Homo sapiens
agaaatggagccttc

SEQ ID NO: 2053557 - DNA, 15 bp, Homo sapiens
gaaatggagccttca

SEQ ID NO: 2053558 - DNA, 15 bp, Homo sapiens
aaatggagccttcaa

SEQ ID NO: 2053559 - DNA, 15 bp, Homo sapiens
aatggagccttcaaa

SEQ ID NO: 2053560 - DNA, 15 bp, Homo sapiens
atggagccttcaaaa

SEQ ID NO: 2053561 - DNA, 15 bp, Homo sapiens
tggagccttcaaaag

SEQ ID NO: 2053562 - DNA, 15 bp, Homo sapiens
ggagccttcaaaagt

SEQ ID NO: 2053563 - DNA, 15 bp, Homo sapiens
gagccttcaaaagtc

SEQ ID NO: 2053564 - DNA, 15 bp, Homo sapiens
agccttcaaaagtct

SEQ ID NO: 2053565 - DNA, 15 bp, Homo sapiens
gccttcaaaagtctt

SEQ ID NO: 2053566 - DNA, 15 bp, Homo sapiens
ccttcaaaagtctta

SEQ ID NO: 2053567 - DNA, 15 bp, Homo sapiens
cttcaaaagtcttaa

SEQ ID NO: 2053568 - DNA, 15 bp, Homo sapiens
ttcaaaagtcttaat

SEQ ID NO: 2053569 - DNA, 15 bp, Homo sapiens
tcaaaagtcttaatg

SEQ ID NO: 2053570 - DNA, 15 bp, Homo sapiens
caaaagtcttaatgt

SEQ ID NO: 2053571 - DNA, 15 bp, Homo sapiens
aaaagtcttaatgtg

SEQ ID NO: 2053572 - DNA, 15 bp, Homo sapiens
aaagtcttaatgtgt

SEQ ID NO: 2053573 - DNA, 15 bp, Homo sapiens
aagtcttaatgtgtg

SEQ ID NO: 2053574 - DNA, 15 bp, Homo sapiens
agtcttaatgtgtgt

SEQ ID NO: 2053575 - DNA, 15 bp, Homo sapiens
gtcttaatgtgtgtt

SEQ ID NO: 2053576 - DNA, 15 bp, Homo sapiens
tcttaatgtgtgttt

SEQ ID NO: 2053577 - DNA, 15 bp, Homo sapiens
cttaatgtgtgttta

SEQ ID NO: 2053578 - DNA, 15 bp, Homo sapiens
ttaatgtgtgtttat

SEQ ID NO: 2053579 - DNA, 15 bp, Homo sapiens
taatgtgtgtttatt

SEQ ID NO: 2053580 - DNA, 15 bp, Homo sapiens
aatgtgtgtttattt

SEQ ID NO: 2053581 - DNA, 15 bp, Homo sapiens
tgtgtgtttattttt

SEQ ID NO: 2053582 - DNA, 15 bp, Homo sapiens
gtgtgtttatttttt

SEQ ID NO: 2053583 - DNA, 15 bp, Homo sapiens
tgtgtttattttttc

SEQ ID NO: 2053584 - DNA, 15 bp, Homo sapiens
gtgtttattttttct

SEQ ID NO: 2053585 - DNA, 15 bp, Homo sapiens
tgtttattttttcta

SEQ ID NO: 2053586 - DNA, 15 bp, Homo sapiens
gtttattttttctag

SEQ ID NO: 2053587 - DNA, 15 bp, Homo sapiens
tttattttttctagc

SEQ ID NO: 2053588 - DNA, 15 bp, Homo sapiens
ttattttttctagca

SEQ ID NO: 2053589 - DNA, 15 bp, Homo sapiens
tattttttctagcat

SEQ ID NO: 2053590 - DNA, 15 bp, Homo sapiens
attttttctagcatt

SEQ ID NO: 2053591 - DNA, 15 bp, Homo sapiens
ttttttctagcattc

SEQ ID NO: 2053592 - DNA, 15 bp, Homo sapiens
tttttctagcattca

SEQ ID NO: 2053593 - DNA, 15 bp, Homo sapiens
ttttctagcattcaa

SEQ ID NO: 2053594 - DNA, 15 bp, Homo sapiens
tttctagcattcaaa

SEQ ID NO: 2053595 - DNA, 15 bp, Homo sapiens
ttctagcattcaaat

SEQ ID NO: 2053596 - DNA, 15 bp, Homo sapiens
tctagcattcaaatg

SEQ ID NO: 2053597 - DNA, 15 bp, Homo sapiens
ctagcattcaaatga

SEQ ID NO: 2053598 - DNA, 15 bp, Homo sapiens
tagcattcaaatgaa

SEQ ID NO: 2053599 - DNA, 15 bp, Homo sapiens
agcattcaaatgaat

SEQ ID NO: 2053600 - DNA, 15 bp, Homo sapiens
gcattcaaatgaatg

SEQ ID NO: 2053601 - DNA, 15 bp, Homo sapiens
cattcaaatgaatgc

SEQ ID NO: 2053602 - DNA, 15 bp, Homo sapiens
attcaaatgaatgcg

SEQ ID NO: 2053603 - DNA, 15 bp, Homo sapiens
ttcaaatgaatgcga

SEQ ID NO: 2053604 - DNA, 15 bp, Homo sapiens
tcaaatgaatgcgaa

SEQ ID NO: 2053605 - DNA, 15 bp, Homo sapiens
caaatgaatgcgaag

SEQ ID NO: 2053606 - DNA, 15 bp, Homo sapiens
aaatgaatgcgaagc

SEQ ID NO: 2053607 - DNA, 15 bp, Homo sapiens
aatgaatgcgaagcc

SEQ ID NO: 2053608 - DNA, 15 bp, Homo sapiens
atgaatgcgaagcca

SEQ ID NO: 2053609 - DNA, 15 bp, Homo sapiens
tgaatgcgaagccac

SEQ ID NO: 2053610 - DNA, 15 bp, Homo sapiens
gaatgcgaagccacg

SEQ ID NO: 2053611 - DNA, 15 bp, Homo sapiens
aatgcgaagccacgg

SEQ ID NO: 2053612 - DNA, 15 bp, Homo sapiens
atgcgaagccacgga

SEQ ID NO: 2053613 - DNA, 15 bp, Homo sapiens
tgcgaagccacggat

SEQ ID NO: 2053614 - DNA, 15 bp, Homo sapiens
gcgaagccacggatt

SEQ ID NO: 2053615 - DNA, 15 bp, Homo sapiens
cgaagccacggattg

SEQ ID NO: 2053616 - DNA, 15 bp, Homo sapiens
gaagccacggattga

SEQ ID NO: 2053617 - DNA, 15 bp, Homo sapiens
aagccacggattgaa

SEQ ID NO: 2053618 - DNA, 15 bp, Homo sapiens
agccacggattgaat

SEQ ID NO: 2053619 - DNA, 15 bp, Homo sapiens
gccacggattgaatc

SEQ ID NO: 2053620 - DNA, 15 bp, Homo sapiens
ccacggattgaatcc

SEQ ID NO: 2053621 - DNA, 15 bp, Homo sapiens
cacggattgaatccc

SEQ ID NO: 2053622 - DNA, 15 bp, Homo sapiens
acggattgaatcccg

SEQ ID NO: 2053623 - DNA, 15 bp, Homo sapiens
cggattgaatcccgt

SEQ ID NO: 2053624 - DNA, 15 bp, Homo sapiens
ggattgaatcccgtc

SEQ ID NO: 2053625 - DNA, 15 bp, Homo sapiens
gattgaatcccgtca

SEQ ID NO: 2053626 - DNA, 15 bp, Homo sapiens
attgaatcccgtcac

SEQ ID NO: 2053627 - DNA, 15 bp, Homo sapiens
ttgaatcccgtcact

SEQ ID NO: 2053628 - DNA, 15 bp, Homo sapiens
tgaatcccgtcactc

SEQ ID NO: 2053629 - DNA, 15 bp, Homo sapiens
gaatcccgtcactct

SEQ ID NO: 2053630 - DNA, 15 bp, Homo sapiens
aatcccgtcactctt

SEQ ID NO: 2053631 - DNA, 15 bp, Homo sapiens
atcccgtcactcttt

SEQ ID NO: 2053632 - DNA, 15 bp, Homo sapiens
tcccgtcactctttg

SEQ ID NO: 2053633 - DNA, 15 bp, Homo sapiens
cccgtcactctttgg

SEQ ID NO: 2053634 - DNA, 15 bp, Homo sapiens
ccgtcactctttggg

SEQ ID NO: 2053635 - DNA, 15 bp, Homo sapiens
cgtcactctttgggg

SEQ ID NO: 2053636 - DNA, 15 bp, Homo sapiens
gtcactctttggggg

SEQ ID NO: 2053637 - DNA, 15 bp, Homo sapiens
tcactctttgggggt

SEQ ID NO: 2053638 - DNA, 15 bp, Homo sapiens
cactctttgggggtt

SEQ ID NO: 2053639 - DNA, 15 bp, Homo sapiens
actctttgggggtta

SEQ ID NO: 2053640 - DNA, 15 bp, Homo sapiens
ctctttgggggttag

SEQ ID NO: 2053641 - DNA, 15 bp, Homo sapiens
tctttgggggttagc

SEQ ID NO: 2053642 - DNA, 15 bp, Homo sapiens
ctttgggggttagct

SEQ ID NO: 2053643 - DNA, 15 bp, Homo sapiens
tttgggggttagctt

SEQ ID NO: 2053644 - DNA, 15 bp, Homo sapiens
ttgggggttagcttc

SEQ ID NO: 2053645 - DNA, 15 bp, Homo sapiens
tgggggttagcttct

SEQ ID NO: 2053646 - DNA, 15 bp, Homo sapiens
gggggttagcttctc

SEQ ID NO: 2053647 - DNA, 15 bp, Homo sapiens
ggggttagcttctcc

SEQ ID NO: 2053648 - DNA, 15 bp, Homo sapiens
gggttagcttctccc

SEQ ID NO: 2053649 - DNA, 15 bp, Homo sapiens
ggttagcttctcccg

SEQ ID NO: 2053650 - DNA, 15 bp, Homo sapiens
gttagcttctcccga

SEQ ID NO: 2053651 - DNA, 15 bp, Homo sapiens
ttagcttctcccgat

SEQ ID NO: 2053652 - DNA, 15 bp, Homo sapiens
tagcttctcccgata

SEQ ID NO: 2053653 - DNA, 15 bp, Homo sapiens
agcttctcccgatat

SEQ ID NO: 2053654 - DNA, 15 bp, Homo sapiens
gcttctcccgatatt

SEQ ID NO: 2053655 - DNA, 15 bp, Homo sapiens
cttctcccgatattt

SEQ ID NO: 2053656 - DNA, 15 bp, Homo sapiens
ctagtgaactaatat

SEQ ID NO: 2053657 - DNA, 15 bp, Homo sapiens
tagtgaactaatatt

SEQ ID NO: 2053658 - DNA, 15 bp, Homo sapiens
agtgaactaatattt

SEQ ID NO: 2053659 - DNA, 15 bp, Homo sapiens
gtgaactaatatttg

SEQ ID NO: 2053660 - DNA, 15 bp, Homo sapiens
tgaactaatatttgt

SEQ ID NO: 2053661 - DNA, 15 bp, Homo sapiens
gaactaatatttgta

SEQ ID NO: 2053662 - DNA, 15 bp, Homo sapiens
aactaatatttgtat

SEQ ID NO: 2053663 - DNA, 15 bp, Homo sapiens
actaatatttgtata

SEQ ID NO: 2053664 - DNA, 15 bp, Homo sapiens
ctaatatttgtatat

SEQ ID NO: 2053665 - DNA, 15 bp, Homo sapiens
taatatttgtatatt

SEQ ID NO: 2053666 - DNA, 15 bp, Homo sapiens
aatatttgtatattc

SEQ ID NO: 2053667 - DNA, 15 bp, Homo sapiens
atatttgtatattct

SEQ ID NO: 2053668 - DNA, 15 bp, Homo sapiens
tatttgtatattctg

SEQ ID NO: 2053669 - DNA, 15 bp, Homo sapiens
atttgtatattctgg

SEQ ID NO: 2053670 - DNA, 15 bp, Homo sapiens
tttgtatattctggg

SEQ ID NO: 2053671 - DNA, 15 bp, Homo sapiens
ttgtatattctggga

SEQ ID NO: 2053672 - DNA, 15 bp, Homo sapiens
tgtatattctgggat

SEQ ID NO: 2053673 - DNA, 15 bp, Homo sapiens
gtatattctgggatc

SEQ ID NO: 2053674 - DNA, 15 bp, Homo sapiens
tatattctgggatcg

SEQ ID NO: 2053675 - DNA, 15 bp, Homo sapiens
atattctgggatcga

SEQ ID NO: 2053676 - DNA, 15 bp, Homo sapiens
tattctgggatcgaa

SEQ ID NO: 2053677 - DNA, 15 bp, Homo sapiens
attctgggatcgaaa

SEQ ID NO: 2053678 - DNA, 15 bp, Homo sapiens
ttctgggatcgaaat

SEQ ID NO: 2053679 - DNA, 15 bp, Homo sapiens
tctgggatcgaaatt

SEQ ID NO: 2053680 - DNA, 15 bp, Homo sapiens
ctgggatcgaaattc

SEQ ID NO: 2053681 - DNA, 15 bp, Homo sapiens
tgggatcgaaattcc

SEQ ID NO: 2053682 - DNA, 15 bp, Homo sapiens
gggatcgaaattccg

SEQ ID NO: 2053683 - DNA, 15 bp, Homo sapiens
ggatcgaaattccga

SEQ ID NO: 2053684 - DNA, 15 bp, Homo sapiens
gatcgaaattccgag

SEQ ID NO: 2053685 - DNA, 15 bp, Homo sapiens
atcgaaattccgagg

SEQ ID NO: 2053686 - DNA, 15 bp, Homo sapiens
tcgaaattccgagga

SEQ ID NO: 2053687 - DNA, 15 bp, Homo sapiens
cgaaattccgaggaa

SEQ ID NO: 2053688 - DNA, 15 bp, Homo sapiens
gaaattccgaggaag

SEQ ID NO: 2053689 - DNA, 15 bp, Homo sapiens
aaattccgaggaagt

SEQ ID NO: 2053690 - DNA, 15 bp, Homo sapiens
aattccgaggaagtt

SEQ ID NO: 2053691 - DNA, 15 bp, Homo sapiens
attccgaggaagttt

SEQ ID NO: 2053692 - DNA, 15 bp, Homo sapiens
ttccgaggaagtttc

SEQ ID NO: 2053693 - DNA, 15 bp, Homo sapiens
tccgaggaagtttct

SEQ ID NO: 2053694 - DNA, 15 bp, Homo sapiens
ccgaggaagtttctg

SEQ ID NO: 2053695 - DNA, 15 bp, Homo sapiens
cgaggaagtttctgc

SEQ ID NO: 2053696 - DNA, 15 bp, Homo sapiens
gaggaagtttctgct

SEQ ID NO: 2053697 - DNA, 15 bp, Homo sapiens
aggaagtttctgctc

SEQ ID NO: 2053698 - DNA, 15 bp, Homo sapiens
ggaagtttctgctct

SEQ ID NO: 2053699 - DNA, 15 bp, Homo sapiens
gaagtttctgctctt

SEQ ID NO: 2053700 - DNA, 15 bp, Homo sapiens
aagtttctgctcttc

SEQ ID NO: 2053701 - DNA, 15 bp, Homo sapiens
agtttctgctcttcc

SEQ ID NO: 2053702 - DNA, 15 bp, Homo sapiens
gtttctgctcttccg

SEQ ID NO: 2053703 - DNA, 15 bp, Homo sapiens
tttctgctcttccgc

SEQ ID NO: 2053704 - DNA, 15 bp, Homo sapiens
ttctgctcttccgca

SEQ ID NO: 2053705 - DNA, 15 bp, Homo sapiens
tctgctcttccgcac

SEQ ID NO: 2053706 - DNA, 15 bp, Homo sapiens
ctgctcttccgcaca

SEQ ID NO: 2053707 - DNA, 15 bp, Homo sapiens
tgctcttccgcacac

SEQ ID NO: 2053708 - DNA, 15 bp, Homo sapiens
gctcttccgcacacc

SEQ ID NO: 2053709 - DNA, 15 bp, Homo sapiens
ctcttccgcacacca

SEQ ID NO: 2053710 - DNA, 15 bp, Homo sapiens
tcttccgcacaccag

SEQ ID NO: 2053711 - DNA, 15 bp, Homo sapiens
cttccgcacaccaga

SEQ ID NO: 2053712 - DNA, 15 bp, Homo sapiens
ttccgcacaccagac

SEQ ID NO: 2053713 - DNA, 15 bp, Homo sapiens
tccgcacaccagact

SEQ ID NO: 2053714 - DNA, 15 bp, Homo sapiens
ccgcacaccagactt

SEQ ID NO: 2053715 - DNA, 15 bp, Homo sapiens
cgcacaccagacttg

SEQ ID NO: 2053716 - DNA, 15 bp, Homo sapiens
gcacaccagacttgc

SEQ ID NO: 2053717 - DNA, 15 bp, Homo sapiens
cacaccagacttgcc

SEQ ID NO: 2053718 - DNA, 15 bp, Homo sapiens
acaccagacttgccg

SEQ ID NO: 2053719 - DNA, 15 bp, Homo sapiens
caccagacttgccgg

SEQ ID NO: 2053720 - DNA, 15 bp, Homo sapiens
accagacttgccggt

SEQ ID NO: 2053721 - DNA, 15 bp, Homo sapiens
ccagacttgccggtg

SEQ ID NO: 2053722 - DNA, 15 bp, Homo sapiens
cagacttgccggtgt

SEQ ID NO: 2053723 - DNA, 15 bp, Homo sapiens
agacttgccggtgtg

SEQ ID NO: 2053724 - DNA, 15 bp, Homo sapiens
gacttgccggtgtgg

SEQ ID NO: 2053725 - DNA, 15 bp, Homo sapiens
acttgccggtgtggt

SEQ ID NO: 2053726 - DNA, 15 bp, Homo sapiens
cttgccggtgtggtc

SEQ ID NO: 2053727 - DNA, 15 bp, Homo sapiens
ttgccggtgtggtct

SEQ ID NO: 2053728 - DNA, 15 bp, Homo sapiens
tgccggtgtggtctc

SEQ ID NO: 2053729 - DNA, 15 bp, Homo sapiens
gccggtgtggtctcc

SEQ ID NO: 2053730 - DNA, 15 bp, Homo sapiens
ccggtgtggtctcca

SEQ ID NO: 2053731 - DNA, 15 bp, Homo sapiens
cggtgtggtctccag

SEQ ID NO: 2053732 - DNA, 15 bp, Homo sapiens
ggtgtggtctccagg

SEQ ID NO: 2053733 - DNA, 15 bp, Homo sapiens
gtgtggtctccagga

SEQ ID NO: 2053734 - DNA, 15 bp, Homo sapiens
tgtggtctccaggag

SEQ ID NO: 2053735 - DNA, 15 bp, Homo sapiens
gtggtctccaggagg

SEQ ID NO: 2053736 - DNA, 15 bp, Homo sapiens
tggtctccaggaggg

SEQ ID NO: 2053737 - DNA, 15 bp, Homo sapiens
ggtctccaggagggg

SEQ ID NO: 2053738 - DNA, 15 bp, Homo sapiens
gtctccaggaggggt

SEQ ID NO: 2053739 - DNA, 15 bp, Homo sapiens
tctccaggaggggtt

SEQ ID NO: 2053740 - DNA, 15 bp, Homo sapiens
ctccaggaggggttg

SEQ ID NO: 2053741 - DNA, 15 bp, Homo sapiens
tccaggaggggttgg

SEQ ID NO: 2053742 - DNA, 15 bp, Homo sapiens
ccaggaggggttggg

SEQ ID NO: 2053743 - DNA, 15 bp, Homo sapiens
caggaggggttgggg

SEQ ID NO: 2053744 - DNA, 15 bp, Homo sapiens
aggaggggttggggg

SEQ ID NO: 2053745 - DNA, 15 bp, Homo sapiens
ggaggggttgggggc

SEQ ID NO: 2053746 - DNA, 15 bp, Homo sapiens
gaggggttgggggcc

SEQ ID NO: 2053747 - DNA, 15 bp, Homo sapiens
aggggttgggggccg

SEQ ID NO: 2053748 - DNA, 15 bp, Homo sapiens
ggggttgggggccgc

SEQ ID NO: 2053749 - DNA, 15 bp, Homo sapiens
gggttgggggccgcg

SEQ ID NO: 2053750 - DNA, 15 bp, Homo sapiens
ggttgggggccgcgt

SEQ ID NO: 2053751 - DNA, 15 bp, Homo sapiens
gttgggggccgcgtc

SEQ ID NO: 2053752 - DNA, 15 bp, Homo sapiens
ttgggggccgcgtcc

SEQ ID NO: 2053753 - DNA, 15 bp, Homo sapiens
tgggggccgcgtcct

SEQ ID NO: 2053754 - DNA, 15 bp, Homo sapiens
gggggccgcgtcctc

SEQ ID NO: 2053755 - DNA, 15 bp, Homo sapiens
ggggccgcgtcctca

SEQ ID NO: 2053756 - DNA, 15 bp, Homo sapiens
gggccgcgtcctcag

SEQ ID NO: 2053757 - DNA, 15 bp, Homo sapiens
ggccgcgtcctcagg

SEQ ID NO: 2053758 - DNA, 15 bp, Homo sapiens
gccgcgtcctcaggg

SEQ ID NO: 2053759 - DNA, 15 bp, Homo sapiens
ccgcgtcctcagggg

SEQ ID NO: 2053760 - DNA, 15 bp, Homo sapiens
cgcgtcctcaggggg

SEQ ID NO: 2053761 - DNA, 15 bp, Homo sapiens
gcgtcctcagggggc

SEQ ID NO: 2053762 - DNA, 15 bp, Homo sapiens
cgtcctcagggggcg

SEQ ID NO: 2053763 - DNA, 15 bp, Homo sapiens
gtcctcagggggcgc

SEQ ID NO: 2053764 - DNA, 15 bp, Homo sapiens
tcctcagggggcgcg

SEQ ID NO: 2053765 - DNA, 15 bp, Homo sapiens
cctcagggggcgcgc

SEQ ID NO: 2053766 - DNA, 15 bp, Homo sapiens
ctcagggggcgcgcg

SEQ ID NO: 2053767 - DNA, 15 bp, Homo sapiens
tcagggggcgcgcgg

SEQ ID NO: 2053768 - DNA, 15 bp, Homo sapiens
cagggggcgcgcggc

SEQ ID NO: 2053769 - DNA, 15 bp, Homo sapiens
agggggcgcgcggcc

SEQ ID NO: 2053770 - DNA, 15 bp, Homo sapiens
gggggcgcgcggccg

SEQ ID NO: 2053771 - DNA, 15 bp, Homo sapiens
ggggcgcgcggccga

SEQ ID NO: 2053772 - DNA, 15 bp, Homo sapiens
gggcgcgcggccgag

SEQ ID NO: 2053773 - DNA, 15 bp, Homo sapiens
ggcgcgcggccgagg

SEQ ID NO: 2053774 - DNA, 15 bp, Homo sapiens
gcgcgcggccgaggc

SEQ ID NO: 2053775 - DNA, 15 bp, Homo sapiens
cgcgcggccgaggct

SEQ ID NO: 2053776 - DNA, 15 bp, Homo sapiens
gcgcggccgaggctg

SEQ ID NO: 2053777 - DNA, 15 bp, Homo sapiens
cgcggccgaggctgt

SEQ ID NO: 2053778 - DNA, 15 bp, Homo sapiens
gcggccgaggctgtt

SEQ ID NO: 2053779 - DNA, 15 bp, Homo sapiens
cggccgaggctgttc

SEQ ID NO: 2053780 - DNA, 15 bp, Homo sapiens
ggccgaggctgttcc

SEQ ID NO: 2053781 - DNA, 15 bp, Homo sapiens
gccgaggctgttccc

SEQ ID NO: 2053782 - DNA, 15 bp, Homo sapiens
ccgaggctgttccca

SEQ ID NO: 2053783 - DNA, 15 bp, Homo sapiens
cgaggctgttcccag

SEQ ID NO: 2053784 - DNA, 15 bp, Homo sapiens
gaggctgttcccagc

SEQ ID NO: 2053785 - DNA, 15 bp, Homo sapiens
aggctgttcccagcg

SEQ ID NO: 2053786 - DNA, 15 bp, Homo sapiens
ggctgttcccagcgc

SEQ ID NO: 2053787 - DNA, 15 bp, Homo sapiens
gctgttcccagcgcg

SEQ ID NO: 2053788 - DNA, 15 bp, Homo sapiens
ctgttcccagcgcgg

SEQ ID NO: 2053789 - DNA, 15 bp, Homo sapiens
tgttcccagcgcggg

SEQ ID NO: 2053790 - DNA, 15 bp, Homo sapiens
gttcccagcgcggga

SEQ ID NO: 2053791 - DNA, 15 bp, Homo sapiens
ttcccagcgcgggaa

SEQ ID NO: 2053792 - DNA, 15 bp, Homo sapiens
tcccagcgcgggaac

SEQ ID NO: 2053793 - DNA, 15 bp, Homo sapiens
cccagcgcgggaacg

SEQ ID NO: 2053794 - DNA, 15 bp, Homo sapiens
ccagcgcgggaacgg

SEQ ID NO: 2053795 - DNA, 15 bp, Homo sapiens
cagcgcgggaacggg

SEQ ID NO: 2053796 - DNA, 15 bp, Homo sapiens
agcgcgggaacggga

SEQ ID NO: 2053797 - DNA, 15 bp, Homo sapiens
gcgcgggaacgggag

SEQ ID NO: 2053798 - DNA, 15 bp, Homo sapiens
cgcgggaacgggagg

SEQ ID NO: 2053799 - DNA, 15 bp, Homo sapiens
gcgggaacgggaggg

SEQ ID NO: 2053800 - DNA, 15 bp, Homo sapiens
cgggaacgggaggga

SEQ ID NO: 2053801 - DNA, 15 bp, Homo sapiens
gggaacgggagggag

SEQ ID NO: 2053802 - DNA, 15 bp, Homo sapiens
ggaacgggagggaga

SEQ ID NO: 2053803 - DNA, 15 bp, Homo sapiens
gaacgggagggagaa

SEQ ID NO: 2053804 - DNA, 15 bp, Homo sapiens
aacgggagggagaac

SEQ ID NO: 2053805 - DNA, 15 bp, Homo sapiens
acgggagggagaacc

SEQ ID NO: 2053806 - DNA, 15 bp, Homo sapiens
cgggagggagaacct

SEQ ID NO: 2053807 - DNA, 15 bp, Homo sapiens
gggagggagaacctg

SEQ ID NO: 2053808 - DNA, 15 bp, Homo sapiens
ggagggagaacctgg

SEQ ID NO: 2053809 - DNA, 15 bp, Homo sapiens
gagggagaacctggg

SEQ ID NO: 2053810 - DNA, 15 bp, Homo sapiens
agggagaacctgggc

SEQ ID NO: 2053811 - DNA, 15 bp, Homo sapiens
gggagaacctgggca

SEQ ID NO: 2053812 - DNA, 15 bp, Homo sapiens
ggagaacctgggcag

SEQ ID NO: 2053813 - DNA, 15 bp, Homo sapiens
gagaacctgggcagg

SEQ ID NO: 2053814 - DNA, 15 bp, Homo sapiens
agaacctgggcaggg

SEQ ID NO: 2053815 - DNA, 15 bp, Homo sapiens
gaacctgggcagggg

SEQ ID NO: 2053816 - DNA, 15 bp, Homo sapiens
aacctgggcaggggc

SEQ ID NO: 2053817 - DNA, 15 bp, Homo sapiens
acctgggcaggggcg

SEQ ID NO: 2053818 - DNA, 15 bp, Homo sapiens
cctgggcaggggcgg

SEQ ID NO: 2053819 - DNA, 15 bp, Homo sapiens
ctgggcaggggcggg

SEQ ID NO: 2053820 - DNA, 15 bp, Homo sapiens
tgggcaggggcgggg

SEQ ID NO: 2053821 - DNA, 15 bp, Homo sapiens
gggcaggggcggggc

SEQ ID NO: 2053822 - DNA, 15 bp, Homo sapiens
ggcaggggcggggcg

SEQ ID NO: 2053823 - DNA, 15 bp, Homo sapiens
gcaggggcggggcgg

SEQ ID NO: 2053824 - DNA, 15 bp, Homo sapiens
caggggcggggcggg

SEQ ID NO: 2053825 - DNA, 15 bp, Homo sapiens
aggggcggggcgggg

SEQ ID NO: 2053826 - DNA, 15 bp, Homo sapiens
ggcggggcgcgggga

SEQ ID NO: 2053827 - DNA, 15 bp, Homo sapiens
gcggggcgcggggac

SEQ ID NO: 2053828 - DNA, 15 bp, Homo sapiens
cggggcgcggggacc

SEQ ID NO: 2053829 - DNA, 15 bp, Homo sapiens
ggggcgcggggacct

SEQ ID NO: 2053830 - DNA, 15 bp, Homo sapiens
gggcgcggggacctg

SEQ ID NO: 2053831 - DNA, 15 bp, Homo sapiens
ggcgcggggacctgg

SEQ ID NO: 2053832 - DNA, 15 bp, Homo sapiens
gcgcggggacctggg

SEQ ID NO: 2053833 - DNA, 15 bp, Homo sapiens
cgcggggacctgggt

SEQ ID NO: 2053834 - DNA, 15 bp, Homo sapiens
gcggggacctgggta

SEQ ID NO: 2053835 - DNA, 15 bp, Homo sapiens
cggggacctgggtac

SEQ ID NO: 2053836 - DNA, 15 bp, Homo sapiens
ggggacctgggtacg

SEQ ID NO: 2053837 - DNA, 15 bp, Homo sapiens
gggacctgggtacgc

SEQ ID NO: 2053838 - DNA, 15 bp, Homo sapiens
ggacctgggtacgcg

SEQ ID NO: 2053839 - DNA, 15 bp, Homo sapiens
gacctgggtacgcgg

SEQ ID NO: 2053840 - DNA, 15 bp, Homo sapiens
acctgggtacgcgga

SEQ ID NO: 2053841 - DNA, 15 bp, Homo sapiens
cctgggtacgcggag

SEQ ID NO: 2053842 - DNA, 15 bp, Homo sapiens
ctgggtacgcggaga

SEQ ID NO: 2053843 - DNA, 15 bp, Homo sapiens
tgggtacgcggagac

SEQ ID NO: 2053844 - DNA, 15 bp, Homo sapiens
gggtacgcggagacg

SEQ ID NO: 2053845 - DNA, 15 bp, Homo sapiens
ggtacgcggagacgc

SEQ ID NO: 2053846 - DNA, 15 bp, Homo sapiens
gtacgcggagacgcg

SEQ ID NO: 2053847 - DNA, 15 bp, Homo sapiens
tacgcggagacgcgg

SEQ ID NO: 2053848 - DNA, 15 bp, Homo sapiens
acgcggagacgcggg

SEQ ID NO: 2053849 - DNA, 15 bp, Homo sapiens
cgcggagacgcgggg

SEQ ID NO: 2053850 - DNA, 15 bp, Homo sapiens
gcggagacgcggggc

SEQ ID NO: 2053851 - DNA, 15 bp, Homo sapiens
cggagacgcggggcg

SEQ ID NO: 2053852 - DNA, 15 bp, Homo sapiens
ggagacgcggggcgg

SEQ ID NO: 2053853 - DNA, 15 bp, Homo sapiens
gagacgcggggcggg

SEQ ID NO: 2053854 - DNA, 15 bp, Homo sapiens
agacgcggggcgggc

SEQ ID NO: 2053855 - DNA, 15 bp, Homo sapiens
gacgcggggcgggcg

SEQ ID NO: 2053856 - DNA, 15 bp, Homo sapiens
acgcggggcgggcgg

SEQ ID NO: 2053857 - DNA, 15 bp, Homo sapiens
cggggcgggcggggg

SEQ ID NO: 2053858 - DNA, 15 bp, Homo sapiens
ggggcgggcgggggc

SEQ ID NO: 2053859 - DNA, 15 bp, Homo sapiens
gggcgggcgggggcc

SEQ ID NO: 2053860 - DNA, 15 bp, Homo sapiens
ggcgggcgggggccg

SEQ ID NO: 2053861 - DNA, 15 bp, Homo sapiens
gcgggcgggggccga

SEQ ID NO: 2053862 - DNA, 15 bp, Homo sapiens
cgggcgggggccgag

SEQ ID NO: 2053863 - DNA, 15 bp, Homo sapiens
gggcgggggccgaga

SEQ ID NO: 2053864 - DNA, 15 bp, Homo sapiens
ggcgggggccgagag

SEQ ID NO: 2053865 - DNA, 15 bp, Homo sapiens
gcgggggccgagagc

SEQ ID NO: 2053866 - DNA, 15 bp, Homo sapiens
cgggggccgagagcg

SEQ ID NO: 2053867 - DNA, 15 bp, Homo sapiens
gggggccgagagcga

SEQ ID NO: 2053868 - DNA, 15 bp, Homo sapiens
ggggccgagagcgag

SEQ ID NO: 2053869 - DNA, 15 bp, Homo sapiens
gggccgagagcgagg

SEQ ID NO: 2053870 - DNA, 15 bp, Homo sapiens
ggccgagagcgaggc

SEQ ID NO: 2053871 - DNA, 15 bp, Homo sapiens
gccgagagcgaggct

SEQ ID NO: 2053872 - DNA, 15 bp, Homo sapiens
ccgagagcgaggctg

SEQ ID NO: 2053873 - DNA, 15 bp, Homo sapiens
cgagagcgaggctgc

SEQ ID NO: 2053874 - DNA, 15 bp, Homo sapiens
gagagcgaggctgcc

SEQ ID NO: 2053875 - DNA, 15 bp, Homo sapiens
agagcgaggctgccg

SEQ ID NO: 2053876 - DNA, 15 bp, Homo sapiens
gagcgaggctgccgg

SEQ ID NO: 2053877 - DNA, 15 bp, Homo sapiens
agcgaggctgccggc

SEQ ID NO: 2053878 - DNA, 15 bp, Homo sapiens
gcgaggctgccggct

SEQ ID NO: 2053879 - DNA, 15 bp, Homo sapiens
cgaggctgccggctg

SEQ ID NO: 2053880 - DNA, 15 bp, Homo sapiens
gaggctgccggctgg

SEQ ID NO: 2053881 - DNA, 15 bp, Homo sapiens
aggctgccggctggg

SEQ ID NO: 2053882 - DNA, 15 bp, Homo sapiens
ggctgccggctgggt

SEQ ID NO: 2053883 - DNA, 15 bp, Homo sapiens
gctgccggctgggtg

SEQ ID NO: 2053884 - DNA, 15 bp, Homo sapiens
ctgccggctgggtgt

SEQ ID NO: 2053885 - DNA, 15 bp, Homo sapiens
tgccggctgggtgtt

SEQ ID NO: 2053886 - DNA, 15 bp, Homo sapiens
gccggctgggtgttg

SEQ ID NO: 2053887 - DNA, 15 bp, Homo sapiens
ccggctgggtgttgg

SEQ ID NO: 2053888 - DNA, 15 bp, Homo sapiens
cggctgggtgttggg

SEQ ID NO: 2053889 - DNA, 15 bp, Homo sapiens
ggctgggtgttggga

SEQ ID NO: 2053890 - DNA, 15 bp, Homo sapiens
gctgggtgttgggag

SEQ ID NO: 2053891 - DNA, 15 bp, Homo sapiens
ctgggtgttgggaga

SEQ ID NO: 2053892 - DNA, 15 bp, Homo sapiens
tgggtgttgggagag

SEQ ID NO: 2053893 - DNA, 15 bp, Homo sapiens
gggtgttgggagaga

SEQ ID NO: 2053894 - DNA, 15 bp, Homo sapiens
ggtgttgggagagag

SEQ ID NO: 2053895 - DNA, 15 bp, Homo sapiens
gtgttgggagagagg

SEQ ID NO: 2053896 - DNA, 15 bp, Homo sapiens
tgttgggagagaggc

SEQ ID NO: 2053897 - DNA, 15 bp, Homo sapiens
gttgggagagaggcc

SEQ ID NO: 2053898 - DNA, 15 bp, Homo sapiens
ttgggagagaggccg

SEQ ID NO: 2053899 - DNA, 15 bp, Homo sapiens
tgggagagaggccgc

SEQ ID NO: 2053900 - DNA, 15 bp, Homo sapiens
gggagagaggccgcg

SEQ ID NO: 2053901 - DNA, 15 bp, Homo sapiens
ggagagaggccgcgg

SEQ ID NO: 2053902 - DNA, 15 bp, Homo sapiens
gagagaggccgcggg

SEQ ID NO: 2053903 - DNA, 15 bp, Homo sapiens
agagaggccgcgggt

SEQ ID NO: 2053904 - DNA, 15 bp, Homo sapiens
gagaggccgcgggtg

SEQ ID NO: 2053905 - DNA, 15 bp, Homo sapiens
agaggccgcgggtgg

SEQ ID NO: 2053906 - DNA, 15 bp, Homo sapiens
gaggccgcgggtgga

SEQ ID NO: 2053907 - DNA, 15 bp, Homo sapiens
aggccgcgggtggac

SEQ ID NO: 2053908 - DNA, 15 bp, Homo sapiens
ggccgcgggtggacg

SEQ ID NO: 2053909 - DNA, 15 bp, Homo sapiens
gccgcgggtggacgg

SEQ ID NO: 2053910 - DNA, 15 bp, Homo sapiens
ccgcgggtggacggg

SEQ ID NO: 2053911 - DNA, 15 bp, Homo sapiens
cgcgggtggacgggg

SEQ ID NO: 2053912 - DNA, 15 bp, Homo sapiens
gcgggtggacggggt

SEQ ID NO: 2053913 - DNA, 15 bp, Homo sapiens
cgggtggacggggta

SEQ ID NO: 2053914 - DNA, 15 bp, Homo sapiens
gggtggacggggtaa

SEQ ID NO: 2053915 - DNA, 15 bp, Homo sapiens
ggtggacggggtaag

SEQ ID NO: 2053916 - DNA, 15 bp, Homo sapiens
gtggacggggtaagg

SEQ ID NO: 2053917 - DNA, 15 bp, Homo sapiens
tggacggggtaagga

SEQ ID NO: 2053918 - DNA, 15 bp, Homo sapiens
ggacggggtaaggac

SEQ ID NO: 2053919 - DNA, 15 bp, Homo sapiens
gacggggtaaggact

SEQ ID NO: 2053920 - DNA, 15 bp, Homo sapiens
acggggtaaggactg

SEQ ID NO: 2053921 - DNA, 15 bp, Homo sapiens
cggggtaaggactgg

SEQ ID NO: 2053922 - DNA, 15 bp, Homo sapiens
ggggtaaggactggg

SEQ ID NO: 2053923 - DNA, 15 bp, Homo sapiens
gggtaaggactggga

SEQ ID NO: 2053924 - DNA, 15 bp, Homo sapiens
ggtaaggactgggac

SEQ ID NO: 2053925 - DNA, 15 bp, Homo sapiens
gtaaggactgggact

SEQ ID NO: 2053926 - DNA, 15 bp, Homo sapiens
taaggactgggactg

SEQ ID NO: 2053927 - DNA, 15 bp, Homo sapiens
aaggactgggactgg

SEQ ID NO: 2053928 - DNA, 15 bp, Homo sapiens
aggactgggactggg

SEQ ID NO: 2053929 - DNA, 15 bp, Homo sapiens
ggactgggactgggg

SEQ ID NO: 2053930 - DNA, 15 bp, Homo sapiens
gactgggactgggga

SEQ ID NO: 2053931 - DNA, 15 bp, Homo sapiens
actgggactggggag

SEQ ID NO: 2053932 - DNA, 15 bp, Homo sapiens
ctgggactggggaga

SEQ ID NO: 2053933 - DNA, 15 bp, Homo sapiens
tgggactggggagac

SEQ ID NO: 2053934 - DNA, 15 bp, Homo sapiens
gggactggggagact

SEQ ID NO: 2053935 - DNA, 15 bp, Homo sapiens
ggactggggagactg

SEQ ID NO: 2053936 - DNA, 15 bp, Homo sapiens
gactggggagactga

SEQ ID NO: 2053937 - DNA, 15 bp, Homo sapiens
actggggagactgag

SEQ ID NO: 2053938 - DNA, 15 bp, Homo sapiens
ctggggagactgaga

SEQ ID NO: 2053939 - DNA, 15 bp, Homo sapiens
tggggagactgagag

SEQ ID NO: 2053940 - DNA, 15 bp, Homo sapiens
ggggagactgagagc

SEQ ID NO: 2053941 - DNA, 15 bp, Homo sapiens
gggagactgagagct

SEQ ID NO: 2053942 - DNA, 15 bp, Homo sapiens
ggagactgagagctg

SEQ ID NO: 2053943 - DNA, 15 bp, Homo sapiens
gagactgagagctgg

SEQ ID NO: 2053944 - DNA, 15 bp, Homo sapiens
agactgagagctggg

SEQ ID NO: 2053945 - DNA, 15 bp, Homo sapiens
gactgagagctgggg

SEQ ID NO: 2053946 - DNA, 15 bp, Homo sapiens
actgagagctggggg

SEQ ID NO: 2053947 - DNA, 15 bp, Homo sapiens
ctgagagctgggggg

SEQ ID NO: 2053948 - DNA, 15 bp, Homo sapiens
tgagagctggggggt

SEQ ID NO: 2053949 - DNA, 15 bp, Homo sapiens
gagagctggggggtg

SEQ ID NO: 2053950 - DNA, 15 bp, Homo sapiens
agagctggggggtgc

SEQ ID NO: 2053951 - DNA, 15 bp, Homo sapiens
gagctggggggtgcg

SEQ ID NO: 2053952 - DNA, 15 bp, Homo sapiens
agctggggggtgcgg

SEQ ID NO: 2053953 - DNA, 15 bp, Homo sapiens
gctggggggtgcggg

SEQ ID NO: 2053954 - DNA, 15 bp, Homo sapiens
ctggggggtgcgggg

SEQ ID NO: 2053955 - DNA, 15 bp, Homo sapiens
tggggggtgcgggga

SEQ ID NO: 2053956 - DNA, 15 bp, Homo sapiens
ggggggtgcggggag

SEQ ID NO: 2053957 - DNA, 15 bp, Homo sapiens
gggggtgcggggagg

SEQ ID NO: 2053958 - DNA, 15 bp, Homo sapiens
ggggtgcggggagga

SEQ ID NO: 2053959 - DNA, 15 bp, Homo sapiens
gggtgcggggaggat

SEQ ID NO: 2053960 - DNA, 15 bp, Homo sapiens
ggtgcggggaggatg

SEQ ID NO: 2053961 - DNA, 15 bp, Homo sapiens
gtgcggggaggatga

SEQ ID NO: 2053962 - DNA, 15 bp, Homo sapiens
tgcggggaggatgag

SEQ ID NO: 2053963 - DNA, 15 bp, Homo sapiens
gcggggaggatgagg

SEQ ID NO: 2053964 - DNA, 15 bp, Homo sapiens
cggggaggatgaggc

SEQ ID NO: 2053965 - DNA, 15 bp, Homo sapiens
ggggaggatgaggct

SEQ ID NO: 2053966 - DNA, 15 bp, Homo sapiens
gggaggatgaggctg

SEQ ID NO: 2053967 - DNA, 15 bp, Homo sapiens
ggaggatgaggctgc

SEQ ID NO: 2053968 - DNA, 15 bp, Homo sapiens
gaggatgaggctgcg

SEQ ID NO: 2053969 - DNA, 15 bp, Homo sapiens
aggatgaggctgcgg

SEQ ID NO: 2053970 - DNA, 15 bp, Homo sapiens
ggatgaggctgcgga

SEQ ID NO: 2053971 - DNA, 15 bp, Homo sapiens
gatgaggctgcggac

SEQ ID NO: 2053972 - DNA, 15 bp, Homo sapiens
atgaggctgcggaca

SEQ ID NO: 2053973 - DNA, 15 bp, Homo sapiens
tgaggctgcggacag

SEQ ID NO: 2053974 - DNA, 15 bp, Homo sapiens
gaggctgcggacagg

SEQ ID NO: 2053975 - DNA, 15 bp, Homo sapiens
aggctgcggacagga

SEQ ID NO: 2053976 - DNA, 15 bp, Homo sapiens
ggctgcggacaggaa

SEQ ID NO: 2053977 - DNA, 15 bp, Homo sapiens
gctgcggacaggaaa

SEQ ID NO: 2053978 - DNA, 15 bp, Homo sapiens
ctgcggacaggaaac

SEQ ID NO: 2053979 - DNA, 15 bp, Homo sapiens
tgcggacaggaaacg

SEQ ID NO: 2053980 - DNA, 15 bp, Homo sapiens
gcggacaggaaacga

SEQ ID NO: 2053981 - DNA, 15 bp, Homo sapiens
cggacaggaaacgaa

SEQ ID NO: 2053982 - DNA, 15 bp, Homo sapiens
ggacaggaaacgaag

SEQ ID NO: 2053983 - DNA, 15 bp, Homo sapiens
gacaggaaacgaagg

SEQ ID NO: 2053984 - DNA, 15 bp, Homo sapiens
acaggaaacgaaggg

SEQ ID NO: 2053985 - DNA, 15 bp, Homo sapiens
caggaaacgaagggc

SEQ ID NO: 2053986 - DNA, 15 bp, Homo sapiens
aggaaacgaagggcc

SEQ ID NO: 2053987 - DNA, 15 bp, Homo sapiens
ggaaacgaagggcct

SEQ ID NO: 2053988 - DNA, 15 bp, Homo sapiens
gaaacgaagggcctg

SEQ ID NO: 2053989 - DNA, 15 bp, Homo sapiens
aaacgaagggcctgg

SEQ ID NO: 2053990 - DNA, 15 bp, Homo sapiens
aacgaagggcctggg

SEQ ID NO: 2053991 - DNA, 15 bp, Homo sapiens
acgaagggcctggga

SEQ ID NO: 2053992 - DNA, 15 bp, Homo sapiens
cgaagggcctgggac

SEQ ID NO: 2053993 - DNA, 15 bp, Homo sapiens
gaagggcctgggaca

SEQ ID NO: 2053994 - DNA, 15 bp, Homo sapiens
aagggcctgggacag

SEQ ID NO: 2053995 - DNA, 15 bp, Homo sapiens
ggcctgggacagctg

SEQ ID NO: 2053996 - DNA, 15 bp, Homo sapiens
gcctgggacagctgc

SEQ ID NO: 2053997 - DNA, 15 bp, Homo sapiens
cctgggacagctgct

SEQ ID NO: 2053998 - DNA, 15 bp, Homo sapiens
ctgggacagctgctt

SEQ ID NO: 2053999 - DNA, 15 bp, Homo sapiens
tgggacagctgcttc

SEQ ID NO: 2054000 - DNA, 15 bp, Homo sapiens
gggacagctgcttct

SEQ ID NO: 2054001 - DNA, 15 bp, Homo sapiens
ggacagctgcttctc

SEQ ID NO: 2054002 - DNA, 15 bp, Homo sapiens
gacagctgcttctct

SEQ ID NO: 2054003 - DNA, 15 bp, Homo sapiens
acagctgcttctctt

SEQ ID NO: 2054004 - DNA, 15 bp, Homo sapiens
cagctgcttctcttg

SEQ ID NO: 2054005 - DNA, 15 bp, Homo sapiens
agctgcttctcttgg

SEQ ID NO: 2054006 - DNA, 15 bp, Homo sapiens
gctgcttctcttggt

SEQ ID NO: 2054007 - DNA, 15 bp, Homo sapiens
ctgcttctcttggtc

SEQ ID NO: 2054008 - DNA, 15 bp, Homo sapiens
tgcttctcttggtcc

SEQ ID NO: 2054009 - DNA, 15 bp, Homo sapiens
gcttctcttggtcct

SEQ ID NO: 2054010 - DNA, 15 bp, Homo sapiens
cttctcttggtccta

SEQ ID NO: 2054011 - DNA, 15 bp, Homo sapiens
ttctcttggtcctag

SEQ ID NO: 2054012 - DNA, 15 bp, Homo sapiens
tctcttggtcctaga

SEQ ID NO: 2054013 - DNA, 15 bp, Homo sapiens
ctcttggtcctagaa

SEQ ID NO: 2054014 - DNA, 15 bp, Homo sapiens
cttggtcctagaaac

SEQ ID NO: 2054015 - DNA, 15 bp, Homo sapiens
ttggtcctagaaacc

SEQ ID NO: 2054016 - DNA, 15 bp, Homo sapiens
tggtcctagaaacca

SEQ ID NO: 2054017 - DNA, 15 bp, Homo sapiens
ggtcctagaaaccaa

SEQ ID NO: 2054018 - DNA, 15 bp, Homo sapiens
gtcctagaaaccaaa

SEQ ID NO: 2054019 - DNA, 15 bp, Homo sapiens
tcctagaaaccaaac

SEQ ID NO: 2054020 - DNA, 15 bp, Homo sapiens
cctagaaaccaaact

SEQ ID NO: 2054021 - DNA, 15 bp, Homo sapiens
ctagaaaccaaactt

SEQ ID NO: 2054022 - DNA, 15 bp, Homo sapiens
tagaaaccaaacttt

SEQ ID NO: 2054023 - DNA, 15 bp, Homo sapiens
agaaaccaaactttc

SEQ ID NO: 2054024 - DNA, 15 bp, Homo sapiens
gaaaccaaactttcg

SEQ ID NO: 2054025 - DNA, 15 bp, Homo sapiens
aaaccaaactttcgt

SEQ ID NO: 2054026 - DNA, 15 bp, Homo sapiens
aaccaaactttcgta

SEQ ID NO: 2054027 - DNA, 15 bp, Homo sapiens
accaaactttcgtag

SEQ ID NO: 2054028 - DNA, 15 bp, Homo sapiens
ccaaactttcgtagc

SEQ ID NO: 2054029 - DNA, 15 bp, Homo sapiens
caaactttcgtagcg

SEQ ID NO: 2054030 - DNA, 15 bp, Homo sapiens
aaactttcgtagcga

SEQ ID NO: 2054031 - DNA, 15 bp, Homo sapiens
aactttcgtagcgag

SEQ ID NO: 2054032 - DNA, 15 bp, Homo sapiens
actttcgtagcgaga

SEQ ID NO: 2054033 - DNA, 15 bp, Homo sapiens
ctttcgtagcgagag

SEQ ID NO: 2054034 - DNA, 15 bp, Homo sapiens
tttcgtagcgagaga

SEQ ID NO: 2054035 - DNA, 15 bp, Homo sapiens
ttcgtagcgagagac

SEQ ID NO: 2054036 - DNA, 15 bp, Homo sapiens
tcgtagcgagagacc

SEQ ID NO: 2054037 - DNA, 15 bp, Homo sapiens
cgtagcgagagaccc

SEQ ID NO: 2054038 - DNA, 15 bp, Homo sapiens
gtagcgagagaccct

SEQ ID NO: 2054039 - DNA, 15 bp, Homo sapiens
tagcgagagacccta

SEQ ID NO: 2054040 - DNA, 15 bp, Homo sapiens
agcgagagaccctaa

SEQ ID NO: 2054041 - DNA, 15 bp, Homo sapiens
gcgagagaccctaag

SEQ ID NO: 2054042 - DNA, 15 bp, Homo sapiens
cgagagaccctaaga

SEQ ID NO: 2054043 - DNA, 15 bp, Homo sapiens
gagagaccctaagac

SEQ ID NO: 2054044 - DNA, 15 bp, Homo sapiens
agagaccctaagaca

SEQ ID NO: 2054045 - DNA, 15 bp, Homo sapiens
gagaccctaagacag

SEQ ID NO: 2054046 - DNA, 15 bp, Homo sapiens
agaccctaagacagc

SEQ ID NO: 2054047 - DNA, 15 bp, Homo sapiens
gaccctaagacagct

SEQ ID NO: 2054048 - DNA, 15 bp, Homo sapiens
accctaagacagctc

SEQ ID NO: 2054049 - DNA, 15 bp, Homo sapiens
ccctaagacagctcg

SEQ ID NO: 2054050 - DNA, 15 bp, Homo sapiens
cctaagacagctcga

SEQ ID NO: 2054051 - DNA, 15 bp, Homo sapiens
ctaagacagctcgag

SEQ ID NO: 2054052 - DNA, 15 bp, Homo sapiens
taagacagctcgaga

SEQ ID NO: 2054053 - DNA, 15 bp, Homo sapiens
aagacagctcgagat

SEQ ID NO: 2054054 - DNA, 15 bp, Homo sapiens
agacagctcgagatt

SEQ ID NO: 2054055 - DNA, 15 bp, Homo sapiens
gacagctcgagattt

SEQ ID NO: 2054056 - DNA, 15 bp, Homo sapiens
acagctcgagatttc

SEQ ID NO: 2054057 - DNA, 15 bp, Homo sapiens
cagctcgagatttca

SEQ ID NO: 2054058 - DNA, 15 bp, Homo sapiens
agctcgagatttcaa

SEQ ID NO: 2054059 - DNA, 15 bp, Homo sapiens
gctcgagatttcaag

SEQ ID NO: 2054060 - DNA, 15 bp, Homo sapiens
ctcgagatttcaagt

SEQ ID NO: 2054061 - DNA, 15 bp, Homo sapiens
tcgagatttcaagtg

SEQ ID NO: 2054062 - DNA, 15 bp, Homo sapiens
cgagatttcaagtgt

SEQ ID NO: 2054063 - DNA, 15 bp, Homo sapiens
gagatttcaagtgtc

SEQ ID NO: 2054064 - DNA, 15 bp, Homo sapiens
agatttcaagtgtcc

SEQ ID NO: 2054065 - DNA, 15 bp, Homo sapiens
gatttcaagtgtcca

SEQ ID NO: 2054066 - DNA, 15 bp, Homo sapiens
atttcaagtgtccac

SEQ ID NO: 2054067 - DNA, 15 bp, Homo sapiens
tttcaagtgtccaca

SEQ ID NO: 2054068 - DNA, 15 bp, Homo sapiens
ttcaagtgtccacac

SEQ ID NO: 2054069 - DNA, 15 bp, Homo sapiens
tcaagtgtccacact

SEQ ID NO: 2054070 - DNA, 15 bp, Homo sapiens
caagtgtccacactt

SEQ ID NO: 2054071 - DNA, 15 bp, Homo sapiens
aagtgtccacacttc

SEQ ID NO: 2054072 - DNA, 15 bp, Homo sapiens
agtgtccacacttct

SEQ ID NO: 2054073 - DNA, 15 bp, Homo sapiens
gtgtccacacttcta

SEQ ID NO: 2054074 - DNA, 15 bp, Homo sapiens
tgtccacacttctag

SEQ ID NO: 2054075 - DNA, 15 bp, Homo sapiens
gtccacacttctagt

SEQ ID NO: 2054076 - DNA, 15 bp, Homo sapiens
tccacacttctagtt

SEQ ID NO: 2054077 - DNA, 15 bp, Homo sapiens
ccacacttctagttt

SEQ ID NO: 2054078 - DNA, 15 bp, Homo sapiens
cacacttctagttta

SEQ ID NO: 2054079 - DNA, 15 bp, Homo sapiens
acacttctagtttag

SEQ ID NO: 2054080 - DNA, 15 bp, Homo sapiens
cacttctagtttaga

SEQ ID NO: 2054081 - DNA, 15 bp, Homo sapiens
acttctagtttagac

SEQ ID NO: 2054082 - DNA, 15 bp, Homo sapiens
cttctagtttagaca

SEQ ID NO: 2054083 - DNA, 15 bp, Homo sapiens
ttctagtttagacat

SEQ ID NO: 2054084 - DNA, 15 bp, Homo sapiens
tctagtttagacatt

SEQ ID NO: 2054085 - DNA, 15 bp, Homo sapiens
ctagtttagacattt

SEQ ID NO: 2054086 - DNA, 15 bp, Homo sapiens
tagtttagacatttg

SEQ ID NO: 2054087 - DNA, 15 bp, Homo sapiens
agtttagacatttgg

SEQ ID NO: 2054088 - DNA, 15 bp, Homo sapiens
gtttagacatttggc

SEQ ID NO: 2054089 - DNA, 15 bp, Homo sapiens
tttagacatttggca

SEQ ID NO: 2054090 - DNA, 15 bp, Homo sapiens
ttagacatttggcaa

SEQ ID NO: 2054091 - DNA, 15 bp, Homo sapiens
tagacatttggcaac

SEQ ID NO: 2054092 - DNA, 15 bp, Homo sapiens
agacatttggcaacc

SEQ ID NO: 2054093 - DNA, 15 bp, Homo sapiens
gacatttggcaacca

SEQ ID NO: 2054094 - DNA, 15 bp, Homo sapiens
acatttggcaaccaa

SEQ ID NO: 2054095 - DNA, 15 bp, Homo sapiens
catttggcaaccaat

SEQ ID NO: 2054096 - DNA, 15 bp, Homo sapiens
atttggcaaccaatt

SEQ ID NO: 2054097 - DNA, 15 bp, Homo sapiens
tttggcaaccaattc

SEQ ID NO: 2054098 - DNA, 15 bp, Homo sapiens
ttggcaaccaattcg

SEQ ID NO: 2054099 - DNA, 15 bp, Homo sapiens
tggcaaccaattcgg

SEQ ID NO: 2054100 - DNA, 15 bp, Homo sapiens
ggcaaccaattcgga

SEQ ID NO: 2054101 - DNA, 15 bp, Homo sapiens
gcaaccaattcggaa

SEQ ID NO: 2054102 - DNA, 15 bp, Homo sapiens
caaccaattcggaac

SEQ ID NO: 2054103 - DNA, 15 bp, Homo sapiens
aaccaattcggaaca

SEQ ID NO: 2054104 - DNA, 15 bp, Homo sapiens
accaattcggaacag

SEQ ID NO: 2054105 - DNA, 15 bp, Homo sapiens
ccaattcggaacagc

SEQ ID NO: 2054106 - DNA, 15 bp, Homo sapiens
caattcggaacagcc

SEQ ID NO: 2054107 - DNA, 15 bp, Homo sapiens
aattcggaacagccg

SEQ ID NO: 2054108 - DNA, 15 bp, Homo sapiens
attcggaacagccgg

SEQ ID NO: 2054109 - DNA, 15 bp, Homo sapiens
ttcggaacagccggg

SEQ ID NO: 2054110 - DNA, 15 bp, Homo sapiens
tcggaacagccgggc

SEQ ID NO: 2054111 - DNA, 15 bp, Homo sapiens
cggaacagccgggcc

SEQ ID NO: 2054112 - DNA, 15 bp, Homo sapiens
ggaacagccgggccg

SEQ ID NO: 2054113 - DNA, 15 bp, Homo sapiens
gaacagccgggccgc

SEQ ID NO: 2054114 - DNA, 15 bp, Homo sapiens
aacagccgggccgcg

SEQ ID NO: 2054115 - DNA, 15 bp, Homo sapiens
acagccgggccgcga

SEQ ID NO: 2054116 - DNA, 15 bp, Homo sapiens
cagccgggccgcgag

SEQ ID NO: 2054117 - DNA, 15 bp, Homo sapiens
agccgggccgcgagg

SEQ ID NO: 2054118 - DNA, 15 bp, Homo sapiens
gccgggccgcgaggg

SEQ ID NO: 2054119 - DNA, 15 bp, Homo sapiens
ccgggccgcgagggg

SEQ ID NO: 2054120 - DNA, 15 bp, Homo sapiens
cgggccgcgaggggc

SEQ ID NO: 2054121 - DNA, 15 bp, Homo sapiens
gggccgcgaggggcc

SEQ ID NO: 2054122 - DNA, 15 bp, Homo sapiens
ggccgcgaggggccc

SEQ ID NO: 2054123 - DNA, 15 bp, Homo sapiens
gccgcgaggggcccc

SEQ ID NO: 2054124 - DNA, 15 bp, Homo sapiens
ccgcgaggggccccc

SEQ ID NO: 2054125 - DNA, 15 bp, Homo sapiens
cgcgaggggccccca

SEQ ID NO: 2054126 - DNA, 15 bp, Homo sapiens
gcgaggggcccccag

SEQ ID NO: 2054127 - DNA, 15 bp, Homo sapiens
cgaggggcccccagg

SEQ ID NO: 2054128 - DNA, 15 bp, Homo sapiens
gaggggcccccaggt

SEQ ID NO: 2054129 - DNA, 15 bp, Homo sapiens
aggggcccccaggtc

SEQ ID NO: 2054130 - DNA, 15 bp, Homo sapiens
ggggcccccaggtct

SEQ ID NO: 2054131 - DNA, 15 bp, Homo sapiens
gggcccccaggtctt

SEQ ID NO: 2054132 - DNA, 15 bp, Homo sapiens
ggcccccaggtcttt

SEQ ID NO: 2054133 - DNA, 15 bp, Homo sapiens
gcccccaggtctttg

SEQ ID NO: 2054134 - DNA, 15 bp, Homo sapiens
cccccaggtctttgg

SEQ ID NO: 2054135 - DNA, 15 bp, Homo sapiens
ccccaggtctttggc

SEQ ID NO: 2054136 - DNA, 15 bp, Homo sapiens
cccaggtctttggcg

SEQ ID NO: 2054137 - DNA, 15 bp, Homo sapiens
ccaggtctttggcgg

SEQ ID NO: 2054138 - DNA, 15 bp, Homo sapiens
caggtctttggcggc

SEQ ID NO: 2054139 - DNA, 15 bp, Homo sapiens
aggtctttggcggcg

SEQ ID NO: 2054140 - DNA, 15 bp, Homo sapiens
ggtctttggcggcgt

SEQ ID NO: 2054141 - DNA, 15 bp, Homo sapiens
gtctttggcggcgtc

SEQ ID NO: 2054142 - DNA, 15 bp, Homo sapiens
tctttggcggcgtcg

SEQ ID NO: 2054143 - DNA, 15 bp, Homo sapiens
ctttggcggcgtcgt

SEQ ID NO: 2054144 - DNA, 15 bp, Homo sapiens
tttggcggcgtcgtt

SEQ ID NO: 2054145 - DNA, 15 bp, Homo sapiens
ttggcggcgtcgttg

SEQ ID NO: 2054146 - DNA, 15 bp, Homo sapiens
tggcggcgtcgttgg

SEQ ID NO: 2054147 - DNA, 15 bp, Homo sapiens
ggcggcgtcgttggg

SEQ ID NO: 2054148 - DNA, 15 bp, Homo sapiens
gcggcgtcgttggga

SEQ ID NO: 2054149 - DNA, 15 bp, Homo sapiens
cggcgtcgttgggag

SEQ ID NO: 2054150 - DNA, 15 bp, Homo sapiens
ggcgtcgttgggagg

SEQ ID NO: 2054151 - DNA, 15 bp, Homo sapiens
gcgtcgttgggaggc

SEQ ID NO: 2054152 - DNA, 15 bp, Homo sapiens
cgtcgttgggaggcc

SEQ ID NO: 2054153 - DNA, 15 bp, Homo sapiens
gtcgttgggaggccg

SEQ ID NO: 2054154 - DNA, 15 bp, Homo sapiens
tcgttgggaggccgc

SEQ ID NO: 2054155 - DNA, 15 bp, Homo sapiens
cgttgggaggccgcg

SEQ ID NO: 2054156 - DNA, 15 bp, Homo sapiens
gttgggaggccgcgg

SEQ ID NO: 2054157 - DNA, 15 bp, Homo sapiens
ttgggaggccgcgga

SEQ ID NO: 2054158 - DNA, 15 bp, Homo sapiens
tgggaggccgcggag

SEQ ID NO: 2054159 - DNA, 15 bp, Homo sapiens
gggaggccgcggagt

SEQ ID NO: 2054160 - DNA, 15 bp, Homo sapiens
ggaggccgcggagtt

SEQ ID NO: 2054161 - DNA, 15 bp, Homo sapiens
gaggccgcggagttg

SEQ ID NO: 2054162 - DNA, 15 bp, Homo sapiens
aggccgcggagttgt

SEQ ID NO: 2054163 - DNA, 15 bp, Homo sapiens
ggccgcggagttgtc

SEQ ID NO: 2054164 - DNA, 15 bp, Homo sapiens
gccgcggagttgtcc

SEQ ID NO: 2054165 - DNA, 15 bp, Homo sapiens
ccgcggagttgtccc

SEQ ID NO: 2054166 - DNA, 15 bp, Homo sapiens
cgcggagttgtccct

SEQ ID NO: 2054167 - DNA, 15 bp, Homo sapiens
gcggagttgtccctg

SEQ ID NO: 2054168 - DNA, 15 bp, Homo sapiens
cggagttgtccctgg

SEQ ID NO: 2054169 - DNA, 15 bp, Homo sapiens
ggagttgtccctggg

SEQ ID NO: 2054170 - DNA, 15 bp, Homo sapiens
gagttgtccctgggc

SEQ ID NO: 2054171 - DNA, 15 bp, Homo sapiens
agttgtccctgggct

SEQ ID NO: 2054172 - DNA, 15 bp, Homo sapiens
gttgtccctgggctt

SEQ ID NO: 2054173 - DNA, 15 bp, Homo sapiens
ttgtccctgggcttc

SEQ ID NO: 2054174 - DNA, 15 bp, Homo sapiens
tgtccctgggcttcc

SEQ ID NO: 2054175 - DNA, 15 bp, Homo sapiens
gtccctgggcttccc

SEQ ID NO: 2054176 - DNA, 15 bp, Homo sapiens
tccctgggcttccct

SEQ ID NO: 2054177 - DNA, 15 bp, Homo sapiens
ccctgggcttccctg

SEQ ID NO: 2054178 - DNA, 15 bp, Homo sapiens
cctgggcttccctga

SEQ ID NO: 2054179 - DNA, 15 bp, Homo sapiens
ctgggcttccctgaa

SEQ ID NO: 2054180 - DNA, 15 bp, Homo sapiens
tgggcttccctgaag

SEQ ID NO: 2054181 - DNA, 15 bp, Homo sapiens
gggcttccctgaagg

SEQ ID NO: 2054182 - DNA, 15 bp, Homo sapiens
ggcttccctgaaggc

SEQ ID NO: 2054183 - DNA, 15 bp, Homo sapiens
gcttccctgaaggcc

SEQ ID NO: 2054184 - DNA, 15 bp, Homo sapiens
cttccctgaaggccc

SEQ ID NO: 2054185 - DNA, 15 bp, Homo sapiens
ttccctgaaggcccc

SEQ ID NO: 2054186 - DNA, 15 bp, Homo sapiens
tccctgaaggccccg

SEQ ID NO: 2054187 - DNA, 15 bp, Homo sapiens
ccctgaaggccccgc

SEQ ID NO: 2054188 - DNA, 15 bp, Homo sapiens
cctgaaggccccgca

SEQ ID NO: 2054189 - DNA, 15 bp, Homo sapiens
ctgaaggccccgcag

SEQ ID NO: 2054190 - DNA, 15 bp, Homo sapiens
tgaaggccccgcaga

SEQ ID NO: 2054191 - DNA, 15 bp, Homo sapiens
gaaggccccgcagac

SEQ ID NO: 2054192 - DNA, 15 bp, Homo sapiens
aaggccccgcagact

SEQ ID NO: 2054193 - DNA, 15 bp, Homo sapiens
aggccccgcagactc

SEQ ID NO: 2054194 - DNA, 15 bp, Homo sapiens
ggccccgcagactcc

SEQ ID NO: 2054195 - DNA, 15 bp, Homo sapiens
gccccgcagactccc

SEQ ID NO: 2054196 - DNA, 15 bp, Homo sapiens
ccccgcagactcccc

SEQ ID NO: 2054197 - DNA, 15 bp, Homo sapiens
cccgcagactccccg

SEQ ID NO: 2054198 - DNA, 15 bp, Homo sapiens
ccgcagactccccgc

SEQ ID NO: 2054199 - DNA, 15 bp, Homo sapiens
cgcagactccccgcc

SEQ ID NO: 2054200 - DNA, 15 bp, Homo sapiens
gcagactccccgcca

SEQ ID NO: 2054201 - DNA, 15 bp, Homo sapiens
cagactccccgccag

SEQ ID NO: 2054202 - DNA, 15 bp, Homo sapiens
agactccccgccagt

SEQ ID NO: 2054203 - DNA, 15 bp, Homo sapiens
gactccccgccagtc

SEQ ID NO: 2054204 - DNA, 15 bp, Homo sapiens
actccccgccagtcc

SEQ ID NO: 2054205 - DNA, 15 bp, Homo sapiens
ctccccgccagtccc

SEQ ID NO: 2054206 - DNA, 15 bp, Homo sapiens
tccccgccagtcccg

SEQ ID NO: 2054207 - DNA, 15 bp, Homo sapiens
ccccgccagtcccgg

SEQ ID NO: 2054208 - DNA, 15 bp, Homo sapiens
cccgccagtcccggc

SEQ ID NO: 2054209 - DNA, 15 bp, Homo sapiens
ccgccagtcccggcc

SEQ ID NO: 2054210 - DNA, 15 bp, Homo sapiens
cgccagtcccggcca

SEQ ID NO: 2054211 - DNA, 15 bp, Homo sapiens
gccagtcccggccac

SEQ ID NO: 2054212 - DNA, 15 bp, Homo sapiens
ccagtcccggccaca

SEQ ID NO: 2054213 - DNA, 15 bp, Homo sapiens
cagtcccggccacac

SEQ ID NO: 2054214 - DNA, 15 bp, Homo sapiens
agtcccggccacacc

SEQ ID NO: 2054215 - DNA, 15 bp, Homo sapiens
gtcccggccacaccc

SEQ ID NO: 2054216 - DNA, 15 bp, Homo sapiens
tcccggccacaccca

SEQ ID NO: 2054217 - DNA, 15 bp, Homo sapiens
cccggccacacccag

SEQ ID NO: 2054218 - DNA, 15 bp, Homo sapiens
ccggccacacccagc

SEQ ID NO: 2054219 - DNA, 15 bp, Homo sapiens
cggccacacccagcc

SEQ ID NO: 2054220 - DNA, 15 bp, Homo sapiens
ggccacacccagcca

SEQ ID NO: 2054221 - DNA, 15 bp, Homo sapiens
gccacacccagccag

SEQ ID NO: 2054222 - DNA, 15 bp, Homo sapiens
acacccagccagggc

SEQ ID NO: 2054223 - DNA, 15 bp, Homo sapiens
cacccagccagggct

SEQ ID NO: 2054224 - DNA, 15 bp, Homo sapiens
acccagccagggctt

SEQ ID NO: 2054225 - DNA, 15 bp, Homo sapiens
cccagccagggcttt

SEQ ID NO: 2054226 - DNA, 15 bp, Homo sapiens
ccagccagggctttg

SEQ ID NO: 2054227 - DNA, 15 bp, Homo sapiens
cagccagggctttgc

SEQ ID NO: 2054228 - DNA, 15 bp, Homo sapiens
agccagggctttgca

SEQ ID NO: 2054229 - DNA, 15 bp, Homo sapiens
gccagggctttgcag

SEQ ID NO: 2054230 - DNA, 15 bp, Homo sapiens
ccagggctttgcagc

SEQ ID NO: 2054231 - DNA, 15 bp, Homo sapiens
cagggctttgcagct

SEQ ID NO: 2054232 - DNA, 15 bp, Homo sapiens
agggctttgcagctc

SEQ ID NO: 2054233 - DNA, 15 bp, Homo sapiens
gggctttgcagctcc

SEQ ID NO: 2054234 - DNA, 15 bp, Homo sapiens
ggctttgcagctcca

SEQ ID NO: 2054235 - DNA, 15 bp, Homo sapiens
gctttgcagctccag

SEQ ID NO: 2054236 - DNA, 15 bp, Homo sapiens
ctttgcagctccagc

SEQ ID NO: 2054237 - DNA, 15 bp, Homo sapiens
tttgcagctccagcc

SEQ ID NO: 2054238 - DNA, 15 bp, Homo sapiens
ttgcagctccagcct

SEQ ID NO: 2054239 - DNA, 15 bp, Homo sapiens
tgcagctccagcctg

SEQ ID NO: 2054240 - DNA, 15 bp, Homo sapiens
gcagctccagcctga

SEQ ID NO: 2054241 - DNA, 15 bp, Homo sapiens
cagctccagcctgag

SEQ ID NO: 2054242 - DNA, 15 bp, Homo sapiens
agctccagcctgaga

SEQ ID NO: 2054243 - DNA, 15 bp, Homo sapiens
gctccagcctgagaa

SEQ ID NO: 2054244 - DNA, 15 bp, Homo sapiens
ctccagcctgagaat

SEQ ID NO: 2054245 - DNA, 15 bp, Homo sapiens
tccagcctgagaatg

SEQ ID NO: 2054246 - DNA, 15 bp, Homo sapiens
ccagcctgagaatgt

SEQ ID NO: 2054247 - DNA, 15 bp, Homo sapiens
cagcctgagaatgtt

SEQ ID NO: 2054248 - DNA, 15 bp, Homo sapiens
agcctgagaatgtta

SEQ ID NO: 2054249 - DNA, 15 bp, Homo sapiens
gcctgagaatgttag

SEQ ID NO: 2054250 - DNA, 15 bp, Homo sapiens
cctgagaatgttagc

SEQ ID NO: 2054251 - DNA, 15 bp, Homo sapiens
ctgagaatgttagcc

SEQ ID NO: 2054252 - DNA, 15 bp, Homo sapiens
tgagaatgttagccc

SEQ ID NO: 2054253 - DNA, 15 bp, Homo sapiens
gagaatgttagcccc

SEQ ID NO: 2054254 - DNA, 15 bp, Homo sapiens
agaatgttagccccg

SEQ ID NO: 2054255 - DNA, 15 bp, Homo sapiens
gaatgttagccccgg

SEQ ID NO: 2054256 - DNA, 15 bp, Homo sapiens
aatgttagccccggc

SEQ ID NO: 2054257 - DNA, 15 bp, Homo sapiens
atgttagccccggca

SEQ ID NO: 2054258 - DNA, 15 bp, Homo sapiens
tgttagccccggcaa

SEQ ID NO: 2054259 - DNA, 15 bp, Homo sapiens
gttagccccggcaac

SEQ ID NO: 2054260 - DNA, 15 bp, Homo sapiens
ttagccccggcaacc

SEQ ID NO: 2054261 - DNA, 15 bp, Homo sapiens
tagccccggcaaccc

SEQ ID NO: 2054262 - DNA, 15 bp, Homo sapiens
agccccggcaacccc

SEQ ID NO: 2054263 - DNA, 15 bp, Homo sapiens
gccccggcaacccct

SEQ ID NO: 2054264 - DNA, 15 bp, Homo sapiens
ccccggcaacccctt

SEQ ID NO: 2054265 - DNA, 15 bp, Homo sapiens
cccggcaaccccttc

SEQ ID NO: 2054266 - DNA, 15 bp, Homo sapiens
ccggcaaccccttct

SEQ ID NO: 2054267 - DNA, 15 bp, Homo sapiens
cggcaaccccttctg

SEQ ID NO: 2054268 - DNA, 15 bp, Homo sapiens
ggcaaccccttctgg

SEQ ID NO: 2054269 - DNA, 15 bp, Homo sapiens
gcaaccccttctggc

SEQ ID NO: 2054270 - DNA, 15 bp, Homo sapiens
caaccccttctggcg

SEQ ID NO: 2054271 - DNA, 15 bp, Homo sapiens
aaccccttctggcgg

SEQ ID NO: 2054272 - DNA, 15 bp, Homo sapiens
accccttctggcggt

SEQ ID NO: 2054273 - DNA, 15 bp, Homo sapiens
ccccttctggcggtt

SEQ ID NO: 2054274 - DNA, 15 bp, Homo sapiens
cccttctggcggttg

SEQ ID NO: 2054275 - DNA, 15 bp, Homo sapiens
ccttctggcggttgt

SEQ ID NO: 2054276 - DNA, 15 bp, Homo sapiens
cttctggcggttgtt

SEQ ID NO: 2054277 - DNA, 15 bp, Homo sapiens
ttctggcggttgttc

SEQ ID NO: 2054278 - DNA, 15 bp, Homo sapiens
tctggcggttgttcc

SEQ ID NO: 2054279 - DNA, 15 bp, Homo sapiens
ctggcggttgttcct

SEQ ID NO: 2054280 - DNA, 15 bp, Homo sapiens
tggcggttgttcctt

SEQ ID NO: 2054281 - DNA, 15 bp, Homo sapiens
ggcggttgttccttt

SEQ ID NO: 2054282 - DNA, 15 bp, Homo sapiens
gcggttgttccttta

SEQ ID NO: 2054283 - DNA, 15 bp, Homo sapiens
cggttgttcctttaa

SEQ ID NO: 2054284 - DNA, 15 bp, Homo sapiens
ggttgttcctttaaa

SEQ ID NO: 2054285 - DNA, 15 bp, Homo sapiens
gttgttcctttaaaa

SEQ ID NO: 2054286 - DNA, 15 bp, Homo sapiens
ttgttcctttaaaaa

SEQ ID NO: 2054287 - DNA, 15 bp, Homo sapiens
tgttcctttaaaaac

SEQ ID NO: 2054288 - DNA, 15 bp, Homo sapiens
gttcctttaaaaacc

SEQ ID NO: 2054289 - DNA, 15 bp, Homo sapiens
ttcctttaaaaacca

SEQ ID NO: 2054290 - DNA, 15 bp, Homo sapiens
tcctttaaaaaccaa

SEQ ID NO: 2054291 - DNA, 15 bp, Homo sapiens
cctttaaaaaccaat

SEQ ID NO: 2054292 - DNA, 15 bp, Homo sapiens
ctttaaaaaccaatt

SEQ ID NO: 2054293 - DNA, 15 bp, Homo sapiens
tttaaaaaccaattc

SEQ ID NO: 2054294 - DNA, 15 bp, Homo sapiens
ttaaaaaccaattca

SEQ ID NO: 2054295 - DNA, 15 bp, Homo sapiens
taaaaaccaattcat

SEQ ID NO: 2054296 - DNA, 15 bp, Homo sapiens
aaaaaccaattcatt

SEQ ID NO: 2054297 - DNA, 15 bp, Homo sapiens
aaaaccaattcattt

SEQ ID NO: 2054298 - DNA, 15 bp, Homo sapiens
aaaccaattcatttt

SEQ ID NO: 2054299 - DNA, 15 bp, Homo sapiens
aaccaattcattttt

SEQ ID NO: 2054300 - DNA, 15 bp, Homo sapiens
accaattcatttttt

SEQ ID NO: 2054301 - DNA, 15 bp, Homo sapiens
ccaattcattttttc

SEQ ID NO: 2054302 - DNA, 15 bp, Homo sapiens
caattcattttttcc

SEQ ID NO: 2054303 - DNA, 15 bp, Homo sapiens
aattcattttttcca

SEQ ID NO: 2054304 - DNA, 15 bp, Homo sapiens
attcattttttccat

SEQ ID NO: 2054305 - DNA, 15 bp, Homo sapiens
ttcattttttccatc

SEQ ID NO: 2054306 - DNA, 15 bp, Homo sapiens
tcattttttccatca

SEQ ID NO: 2054307 - DNA, 15 bp, Homo sapiens
cattttttccatcaa

SEQ ID NO: 2054308 - DNA, 15 bp, Homo sapiens
attttttccatcaag

SEQ ID NO: 2054309 - DNA, 15 bp, Homo sapiens
ttttttccatcaagt

SEQ ID NO: 2054310 - DNA, 15 bp, Homo sapiens
tttttccatcaagtc

SEQ ID NO: 2054311 - DNA, 15 bp, Homo sapiens
ttttccatcaagtct

SEQ ID NO: 2054312 - DNA, 15 bp, Homo sapiens
tttccatcaagtctt

SEQ ID NO: 2054313 - DNA, 15 bp, Homo sapiens
ttccatcaagtcttc

SEQ ID NO: 2054314 - DNA, 15 bp, Homo sapiens
tccatcaagtcttct

SEQ ID NO: 2054315 - DNA, 15 bp, Homo sapiens
ccatcaagtcttcta

SEQ ID NO: 2054316 - DNA, 15 bp, Homo sapiens
catcaagtcttctac

SEQ ID NO: 2054317 - DNA, 15 bp, Homo sapiens
atcaagtcttctacc

SEQ ID NO: 2054318 - DNA, 15 bp, Homo sapiens
tcaagtcttctaccc

SEQ ID NO: 2054319 - DNA, 15 bp, Homo sapiens
caagtcttctaccca

SEQ ID NO: 2054320 - DNA, 15 bp, Homo sapiens
aagtcttctacccaa

SEQ ID NO: 2054321 - DNA, 15 bp, Homo sapiens
agtcttctacccaat

SEQ ID NO: 2054322 - DNA, 15 bp, Homo sapiens
gtcttctacccaatg

SEQ ID NO: 2054323 - DNA, 15 bp, Homo sapiens
tcttctacccaatgg

SEQ ID NO: 2054324 - DNA, 15 bp, Homo sapiens
cttctacccaatggg

SEQ ID NO: 2054325 - DNA, 15 bp, Homo sapiens
ttctacccaatgggt

SEQ ID NO: 2054326 - DNA, 15 bp, Homo sapiens
tctacccaatgggta

SEQ ID NO: 2054327 - DNA, 15 bp, Homo sapiens
ctacccaatgggtag

SEQ ID NO: 2054328 - DNA, 15 bp, Homo sapiens
tacccaatgggtaga

SEQ ID NO: 2054329 - DNA, 15 bp, Homo sapiens
acccaatgggtagac

SEQ ID NO: 2054330 - DNA, 15 bp, Homo sapiens
cccaatgggtagact

SEQ ID NO: 2054331 - DNA, 15 bp, Homo sapiens
ccaatgggtagactc

SEQ ID NO: 2054332 - DNA, 15 bp, Homo sapiens
caatgggtagactct

SEQ ID NO: 2054333 - DNA, 15 bp, Homo sapiens
aatgggtagactctt

SEQ ID NO: 2054334 - DNA, 15 bp, Homo sapiens
atgggtagactcttc

SEQ ID NO: 2054335 - DNA, 15 bp, Homo sapiens
tgggtagactcttcg

SEQ ID NO: 2054336 - DNA, 15 bp, Homo sapiens
gggtagactcttcgt

SEQ ID NO: 2054337 - DNA, 15 bp, Homo sapiens
ggtagactcttcgtt

SEQ ID NO: 2054338 - DNA, 15 bp, Homo sapiens
gtagactcttcgtta

SEQ ID NO: 2054339 - DNA, 15 bp, Homo sapiens
tagactcttcgttaa

SEQ ID NO: 2054340 - DNA, 15 bp, Homo sapiens
agactcttcgttaaa

SEQ ID NO: 2054341 - DNA, 15 bp, Homo sapiens
gactcttcgttaaat

SEQ ID NO: 2054342 - DNA, 15 bp, Homo sapiens
actcttcgttaaatg

SEQ ID NO: 2054343 - DNA, 15 bp, Homo sapiens
ctcttcgttaaatga

SEQ ID NO: 2054344 - DNA, 15 bp, Homo sapiens
tcttcgttaaatgac

SEQ ID NO: 2054345 - DNA, 15 bp, Homo sapiens
cttcgttaaatgact

SEQ ID NO: 2054346 - DNA, 15 bp, Homo sapiens
ttcgttaaatgactg

SEQ ID NO: 2054347 - DNA, 15 bp, Homo sapiens
tcgttaaatgactgt

SEQ ID NO: 2054348 - DNA, 15 bp, Homo sapiens
cgttaaatgactgtt

SEQ ID NO: 2054349 - DNA, 15 bp, Homo sapiens
gttaaatgactgtta

SEQ ID NO: 2054350 - DNA, 15 bp, Homo sapiens
ttaaatgactgttaa

SEQ ID NO: 2054351 - DNA, 15 bp, Homo sapiens
taaatgactgttaac

SEQ ID NO: 2054352 - DNA, 15 bp, Homo sapiens
aaatgactgttaacc

SEQ ID NO: 2054353 - DNA, 15 bp, Homo sapiens
aatgactgttaacca

SEQ ID NO: 2054354 - DNA, 15 bp, Homo sapiens
atgactgttaaccag

SEQ ID NO: 2054355 - DNA, 15 bp, Homo sapiens
tgactgttaaccagt

SEQ ID NO: 2054356 - DNA, 15 bp, Homo sapiens
gactgttaaccagta

SEQ ID NO: 2054357 - DNA, 15 bp, Homo sapiens
actgttaaccagtac

SEQ ID NO: 2054358 - DNA, 15 bp, Homo sapiens
ctgttaaccagtact

SEQ ID NO: 2054359 - DNA, 15 bp, Homo sapiens
tgttaaccagtactg

SEQ ID NO: 2054360 - DNA, 15 bp, Homo sapiens
gttaaccagtactga

SEQ ID NO: 2054361 - DNA, 15 bp, Homo sapiens
ttaaccagtactgag

SEQ ID NO: 2054362 - DNA, 15 bp, Homo sapiens
taaccagtactgagg

SEQ ID NO: 2054363 - DNA, 15 bp, Homo sapiens
aaccagtactgagga

SEQ ID NO: 2054364 - DNA, 15 bp, Homo sapiens
accagtactgaggag

SEQ ID NO: 2054365 - DNA, 15 bp, Homo sapiens
ccagtactgaggaga

SEQ ID NO: 2054366 - DNA, 15 bp, Homo sapiens
cagtactgaggagaa

SEQ ID NO: 2054367 - DNA, 15 bp, Homo sapiens
agtactgaggagaag

SEQ ID NO: 2054368 - DNA, 15 bp, Homo sapiens
gtactgaggagaagc

SEQ ID NO: 2054369 - DNA, 15 bp, Homo sapiens
tactgaggagaagca

SEQ ID NO: 2054370 - DNA, 15 bp, Homo sapiens
actgaggagaagcac

SEQ ID NO: 2054371 - DNA, 15 bp, Homo sapiens
ctgaggagaagcaca

SEQ ID NO: 2054372 - DNA, 15 bp, Homo sapiens
tgaggagaagcacaa

SEQ ID NO: 2054373 - DNA, 15 bp, Homo sapiens
gaggagaagcacaat

SEQ ID NO: 2054374 - DNA, 15 bp, Homo sapiens
aggagaagcacaatc

SEQ ID NO: 2054375 - DNA, 15 bp, Homo sapiens
ggagaagcacaatca

SEQ ID NO: 2054376 - DNA, 15 bp, Homo sapiens
gagaagcacaatcaa

SEQ ID NO: 2054377 - DNA, 15 bp, Homo sapiens
agaagcacaatcaac

SEQ ID NO: 2054378 - DNA, 15 bp, Homo sapiens
gaagcacaatcaaca

SEQ ID NO: 2054379 - DNA, 15 bp, Homo sapiens
aagcacaatcaacat

SEQ ID NO: 2054380 - DNA, 15 bp, Homo sapiens
agcacaatcaacata

SEQ ID NO: 2054381 - DNA, 15 bp, Homo sapiens
gcacaatcaacatag

SEQ ID NO: 2054382 - DNA, 15 bp, Homo sapiens
cacaatcaacatagt

SEQ ID NO: 2054383 - DNA, 15 bp, Homo sapiens
acaatcaacatagtt

SEQ ID NO: 2054384 - DNA, 15 bp, Homo sapiens
caatcaacatagttt

SEQ ID NO: 2054385 - DNA, 15 bp, Homo sapiens
aatcaacatagtttc

SEQ ID NO: 2054386 - DNA, 15 bp, Homo sapiens
atcaacatagtttct

SEQ ID NO: 2054387 - DNA, 15 bp, Homo sapiens
tcaacatagtttctc

SEQ ID NO: 2054388 - DNA, 15 bp, Homo sapiens
caacatagtttctct

SEQ ID NO: 2054389 - DNA, 15 bp, Homo sapiens
aacatagtttctctg

SEQ ID NO: 2054390 - DNA, 15 bp, Homo sapiens
acatagtttctctgt

SEQ ID NO: 2054391 - DNA, 15 bp, Homo sapiens
catagtttctctgtc

SEQ ID NO: 2054392 - DNA, 15 bp, Homo sapiens
atagtttctctgtca

SEQ ID NO: 2054393 - DNA, 15 bp, Homo sapiens
tagtttctctgtcac

SEQ ID NO: 2054394 - DNA, 15 bp, Homo sapiens
agtttctctgtcacc

SEQ ID NO: 2054395 - DNA, 15 bp, Homo sapiens
gtttctctgtcacct

SEQ ID NO: 2054396 - DNA, 15 bp, Homo sapiens
tttctctgtcacctt

SEQ ID NO: 2054397 - DNA, 15 bp, Homo sapiens
ttctctgtcaccttt

SEQ ID NO: 2054398 - DNA, 15 bp, Homo sapiens
tctctgtcacctttc

SEQ ID NO: 2054399 - DNA, 15 bp, Homo sapiens
ctctgtcacctttct

SEQ ID NO: 2054400 - DNA, 15 bp, Homo sapiens
tctgtcacctttctt

SEQ ID NO: 2054401 - DNA, 15 bp, Homo sapiens
ctgtcacctttcttg

SEQ ID NO: 2054402 - DNA, 15 bp, Homo sapiens
tgtcacctttcttgc

SEQ ID NO: 2054403 - DNA, 15 bp, Homo sapiens
gtcacctttcttgcc

SEQ ID NO: 2054404 - DNA, 15 bp, Homo sapiens
tcacctttcttgccg

SEQ ID NO: 2054405 - DNA, 15 bp, Homo sapiens
cacctttcttgccgg

SEQ ID NO: 2054406 - DNA, 15 bp, Homo sapiens
acctttcttgccggt

SEQ ID NO: 2054407 - DNA, 15 bp, Homo sapiens
cctttcttgccggtt

SEQ ID NO: 2054408 - DNA, 15 bp, Homo sapiens
ctttcttgccggttt

SEQ ID NO: 2054409 - DNA, 15 bp, Homo sapiens
tttcttgccggtttt

SEQ ID NO: 2054410 - DNA, 15 bp, Homo sapiens
ttcttgccggttttt

SEQ ID NO: 2054411 - DNA, 15 bp, Homo sapiens
tcttgccggtttttt

SEQ ID NO: 2054412 - DNA, 15 bp, Homo sapiens
cttgccggttttttc

SEQ ID NO: 2054413 - DNA, 15 bp, Homo sapiens
ttgccggttttttcc

SEQ ID NO: 2054414 - DNA, 15 bp, Homo sapiens
tgccggttttttcct

SEQ ID NO: 2054415 - DNA, 15 bp, Homo sapiens
gccggttttttcctc

SEQ ID NO: 2054416 - DNA, 15 bp, Homo sapiens
ccggttttttcctcc

SEQ ID NO: 2054417 - DNA, 15 bp, Homo sapiens
cggttttttcctccc

SEQ ID NO: 2054418 - DNA, 15 bp, Homo sapiens
ggttttttcctccca

SEQ ID NO: 2054419 - DNA, 15 bp, Homo sapiens
gttttttcctcccaa

SEQ ID NO: 2054420 - DNA, 15 bp, Homo sapiens
ttttttcctcccaac

SEQ ID NO: 2054421 - DNA, 15 bp, Homo sapiens
tttttcctcccaacc

SEQ ID NO: 2054422 - DNA, 15 bp, Homo sapiens
ttttcctcccaacca

SEQ ID NO: 2054423 - DNA, 15 bp, Homo sapiens
tttcctcccaaccat

SEQ ID NO: 2054424 - DNA, 15 bp, Homo sapiens
ttcctcccaaccatg

SEQ ID NO: 2054425 - DNA, 15 bp, Homo sapiens
tcctcccaaccatgg

SEQ ID NO: 2054426 - DNA, 15 bp, Homo sapiens
cctcccaaccatgga

SEQ ID NO: 2054427 - DNA, 15 bp, Homo sapiens
ctcccaaccatggag

SEQ ID NO: 2054428 - DNA, 15 bp, Homo sapiens
tcccaaccatggagt

SEQ ID NO: 2054429 - DNA, 15 bp, Homo sapiens
cccaaccatggagtc

SEQ ID NO: 2054430 - DNA, 15 bp, Homo sapiens
ccaaccatggagtct

SEQ ID NO: 2054431 - DNA, 15 bp, Homo sapiens
caaccatggagtctc

SEQ ID NO: 2054432 - DNA, 15 bp, Homo sapiens
aaccatggagtctcc

SEQ ID NO: 2054433 - DNA, 15 bp, Homo sapiens
accatggagtctcca

SEQ ID NO: 2054434 - DNA, 15 bp, Homo sapiens
ccatggagtctccat

SEQ ID NO: 2054435 - DNA, 15 bp, Homo sapiens
catggagtctccatt

SEQ ID NO: 2054436 - DNA, 15 bp, Homo sapiens
atggagtctccattt

SEQ ID NO: 2054437 - DNA, 15 bp, Homo sapiens
tggagtctccatttt

SEQ ID NO: 2054438 - DNA, 15 bp, Homo sapiens
ggagtctccattttc

SEQ ID NO: 2054439 - DNA, 15 bp, Homo sapiens
gagtctccattttct

SEQ ID NO: 2054440 - DNA, 15 bp, Homo sapiens
agtctccattttcta

SEQ ID NO: 2054441 - DNA, 15 bp, Homo sapiens
gtctccattttctaa

SEQ ID NO: 2054442 - DNA, 15 bp, Homo sapiens
tctccattttctaag

SEQ ID NO: 2054443 - DNA, 15 bp, Homo sapiens
ctccattttctaagc

SEQ ID NO: 2054444 - DNA, 15 bp, Homo sapiens
tccattttctaagca

SEQ ID NO: 2054445 - DNA, 15 bp, Homo sapiens
ccattttctaagcaa

SEQ ID NO: 2054446 - DNA, 15 bp, Homo sapiens
cattttctaagcaat

SEQ ID NO: 2054447 - DNA, 15 bp, Homo sapiens
attttctaagcaatt

SEQ ID NO: 2054448 - DNA, 15 bp, Homo sapiens
ttttctaagcaatta

SEQ ID NO: 2054449 - DNA, 15 bp, Homo sapiens
tttctaagcaattaa

SEQ ID NO: 2054450 - DNA, 15 bp, Homo sapiens
ttctaagcaattaaa

SEQ ID NO: 2054451 - DNA, 15 bp, Homo sapiens
tctaagcaattaaat

SEQ ID NO: 2054452 - DNA, 15 bp, Homo sapiens
ctaagcaattaaatt

SEQ ID NO: 2054453 - DNA, 15 bp, Homo sapiens
taagcaattaaatta

SEQ ID NO: 2054454 - DNA, 15 bp, Homo sapiens
aagcaattaaattat

SEQ ID NO: 2054455 - DNA, 15 bp, Homo sapiens
agcaattaaattata

SEQ ID NO: 2054456 - DNA, 15 bp, Homo sapiens
gcaattaaattatat

SEQ ID NO: 2054457 - DNA, 15 bp, Homo sapiens
caattaaattatata

SEQ ID NO: 2054458 - DNA, 15 bp, Homo sapiens
aattaaattatatat

SEQ ID NO: 2054459 - DNA, 15 bp, Homo sapiens
attaaattatatatt

SEQ ID NO: 2054460 - DNA, 15 bp, Homo sapiens
ttaaattatatattc

SEQ ID NO: 2054461 - DNA, 15 bp, Homo sapiens
taaattatatattca

SEQ ID NO: 2054462 - DNA, 15 bp, Homo sapiens
aaattatatattcaa

SEQ ID NO: 2054463 - DNA, 15 bp, Homo sapiens
aattatatattcaac

SEQ ID NO: 2054464 - DNA, 15 bp, Homo sapiens
attatatattcaaca

SEQ ID NO: 2054465 - DNA, 15 bp, Homo sapiens
ttatatattcaacag

SEQ ID NO: 2054466 - DNA, 15 bp, Homo sapiens
tatatattcaacagg

SEQ ID NO: 2054467 - DNA, 15 bp, Homo sapiens
atatattcaacagga

SEQ ID NO: 2054468 - DNA, 15 bp, Homo sapiens
tatattcaacaggaa

SEQ ID NO: 2054469 - DNA, 15 bp, Homo sapiens
atattcaacaggaac

SEQ ID NO: 2054470 - DNA, 15 bp, Homo sapiens
tattcaacaggaaca

SEQ ID NO: 2054471 - DNA, 15 bp, Homo sapiens
attcaacaggaacat

SEQ ID NO: 2054472 - DNA, 15 bp, Homo sapiens
ttcaacaggaacatt

SEQ ID NO: 2054473 - DNA, 15 bp, Homo sapiens
tcaacaggaacattc

SEQ ID NO: 2054474 - DNA, 15 bp, Homo sapiens
caacaggaacattcc

SEQ ID NO: 2054475 - DNA, 15 bp, Homo sapiens
aacaggaacattcca

SEQ ID NO: 2054476 - DNA, 15 bp, Homo sapiens
acaggaacattccat

SEQ ID NO: 2054477 - DNA, 15 bp, Homo sapiens
caggaacattccatt

SEQ ID NO: 2054478 - DNA, 15 bp, Homo sapiens
aggaacattccattt

SEQ ID NO: 2054479 - DNA, 15 bp, Homo sapiens
ggaacattccattta

SEQ ID NO: 2054480 - DNA, 15 bp, Homo sapiens
gaacattccatttaa

SEQ ID NO: 2054481 - DNA, 15 bp, Homo sapiens
aacattccatttaaa

SEQ ID NO: 2054482 - DNA, 15 bp, Homo sapiens
acattccatttaaaa

SEQ ID NO: 2054483 - DNA, 15 bp, Homo sapiens
cattccatttaaaat

SEQ ID NO: 2054484 - DNA, 15 bp, Homo sapiens
attccatttaaaatg

SEQ ID NO: 2054485 - DNA, 15 bp, Homo sapiens
ttccatttaaaatgg

SEQ ID NO: 2054486 - DNA, 15 bp, Homo sapiens
tccatttaaaatggt

SEQ ID NO: 2054487 - DNA, 15 bp, Homo sapiens
ccatttaaaatggtt

SEQ ID NO: 2054488 - DNA, 15 bp, Homo sapiens
catttaaaatggttc

SEQ ID NO: 2054489 - DNA, 15 bp, Homo sapiens
atttaaaatggttcg

SEQ ID NO: 2054490 - DNA, 15 bp, Homo sapiens
tttaaaatggttcgg

SEQ ID NO: 2054491 - DNA, 15 bp, Homo sapiens
ttaaaatggttcggg

SEQ ID NO: 2054492 - DNA, 15 bp, Homo sapiens
taaaatggttcggga

SEQ ID NO: 2054493 - DNA, 15 bp, Homo sapiens
aaaatggttcgggac

SEQ ID NO: 2054494 - DNA, 15 bp, Homo sapiens
aaatggttcgggaca

SEQ ID NO: 2054495 - DNA, 15 bp, Homo sapiens
aatggttcgggacag

SEQ ID NO: 2054496 - DNA, 15 bp, Homo sapiens
atggttcgggacaga

SEQ ID NO: 2054497 - DNA, 15 bp, Homo sapiens
tggttcgggacagaa

SEQ ID NO: 2054498 - DNA, 15 bp, Homo sapiens
ggttcgggacagaag

SEQ ID NO: 2054499 - DNA, 15 bp, Homo sapiens
gttcgggacagaaga

SEQ ID NO: 2054500 - DNA, 15 bp, Homo sapiens
ttcgggacagaagac

SEQ ID NO: 2054501 - DNA, 15 bp, Homo sapiens
tcgggacagaagact

SEQ ID NO: 2054502 - DNA, 15 bp, Homo sapiens
cgggacagaagactg

SEQ ID NO: 2054503 - DNA, 15 bp, Homo sapiens
gggacagaagactga

SEQ ID NO: 2054504 - DNA, 15 bp, Homo sapiens
ggacagaagactgat

SEQ ID NO: 2054505 - DNA, 15 bp, Homo sapiens
gacagaagactgatg

SEQ ID NO: 2054506 - DNA, 15 bp, Homo sapiens
acagaagactgatgc

SEQ ID NO: 2054507 - DNA, 15 bp, Homo sapiens
cagaagactgatgca

SEQ ID NO: 2054508 - DNA, 15 bp, Homo sapiens
agaagactgatgcac

SEQ ID NO: 2054509 - DNA, 15 bp, Homo sapiens
gaagactgatgcaca

SEQ ID NO: 2054510 - DNA, 15 bp, Homo sapiens
aagactgatgcacaa

SEQ ID NO: 2054511 - DNA, 15 bp, Homo sapiens
agactgatgcacaag

SEQ ID NO: 2054512 - DNA, 15 bp, Homo sapiens
gactgatgcacaagg

SEQ ID NO: 2054513 - DNA, 15 bp, Homo sapiens
actgatgcacaaggt

SEQ ID NO: 2054514 - DNA, 15 bp, Homo sapiens
ctgatgcacaaggtc

SEQ ID NO: 2054515 - DNA, 15 bp, Homo sapiens
tgatgcacaaggtct

SEQ ID NO: 2054516 - DNA, 15 bp, Homo sapiens
gatgcacaaggtctg

SEQ ID NO: 2054517 - DNA, 15 bp, Homo sapiens
atgcacaaggtctga

SEQ ID NO: 2054518 - DNA, 15 bp, Homo sapiens
tgcacaaggtctgaa

SEQ ID NO: 2054519 - DNA, 15 bp, Homo sapiens
gcacaaggtctgaag

SEQ ID NO: 2054520 - DNA, 15 bp, Homo sapiens
cacaaggtctgaagc

SEQ ID NO: 2054521 - DNA, 15 bp, Homo sapiens
acaaggtctgaagct

SEQ ID NO: 2054522 - DNA, 15 bp, Homo sapiens
caaggtctgaagctg

SEQ ID NO: 2054523 - DNA, 15 bp, Homo sapiens
aaggtctgaagctgg

SEQ ID NO: 2054524 - DNA, 15 bp, Homo sapiens
aggtctgaagctgga

SEQ ID NO: 2054525 - DNA, 15 bp, Homo sapiens
ggtctgaagctggaa

SEQ ID NO: 2054526 - DNA, 15 bp, Homo sapiens
gtctgaagctggaag

SEQ ID NO: 2054527 - DNA, 15 bp, Homo sapiens
tctgaagctggaaga

SEQ ID NO: 2054528 - DNA, 15 bp, Homo sapiens
ctgaagctggaagaa

SEQ ID NO: 2054529 - DNA, 15 bp, Homo sapiens
tgaagctggaagaaa

SEQ ID NO: 2054530 - DNA, 15 bp, Homo sapiens
gaagctggaagaaaa

SEQ ID NO: 2054531 - DNA, 15 bp, Homo sapiens
aagctggaagaaaat

SEQ ID NO: 2054532 - DNA, 15 bp, Homo sapiens
agctggaagaaaata

SEQ ID NO: 2054533 - DNA, 15 bp, Homo sapiens
gctggaagaaaatat

SEQ ID NO: 2054534 - DNA, 15 bp, Homo sapiens
ctggaagaaaatatt

SEQ ID NO: 2054535 - DNA, 15 bp, Homo sapiens
tggaagaaaatattt

SEQ ID NO: 2054536 - DNA, 15 bp, Homo sapiens
ggaagaaaatattta

SEQ ID NO: 2054537 - DNA, 15 bp, Homo sapiens
gaagaaaatatttag

SEQ ID NO: 2054538 - DNA, 15 bp, Homo sapiens
aagaaaatatttagt

SEQ ID NO: 2054539 - DNA, 15 bp, Homo sapiens
agaaaatatttagtg

SEQ ID NO: 2054540 - DNA, 15 bp, Homo sapiens
gaaaatatttagtgc

SEQ ID NO: 2054541 - DNA, 15 bp, Homo sapiens
aaaatatttagtgct

SEQ ID NO: 2054542 - DNA, 15 bp, Homo sapiens
aaatatttagtgctt

SEQ ID NO: 2054543 - DNA, 15 bp, Homo sapiens
aatatttagtgcttg

SEQ ID NO: 2054544 - DNA, 15 bp, Homo sapiens
atatttagtgcttgc

SEQ ID NO: 2054545 - DNA, 15 bp, Homo sapiens
tatttagtgcttgcc

SEQ ID NO: 2054546 - DNA, 15 bp, Homo sapiens
atttagtgcttgcct

SEQ ID NO: 2054547 - DNA, 15 bp, Homo sapiens
tttagtgcttgccta

SEQ ID NO: 2054548 - DNA, 15 bp, Homo sapiens
ttagtgcttgcctac

SEQ ID NO: 2054549 - DNA, 15 bp, Homo sapiens
tagtgcttgcctaca

SEQ ID NO: 2054550 - DNA, 15 bp, Homo sapiens
agtgcttgcctacag

SEQ ID NO: 2054551 - DNA, 15 bp, Homo sapiens
gtgcttgcctacaga

SEQ ID NO: 2054552 - DNA, 15 bp, Homo sapiens
tgcttgcctacagat

SEQ ID NO: 2054553 - DNA, 15 bp, Homo sapiens
gcttgcctacagatt

SEQ ID NO: 2054554 - DNA, 15 bp, Homo sapiens
cttgcctacagattc

SEQ ID NO: 2054555 - DNA, 15 bp, Homo sapiens
ttgcctacagattct

SEQ ID NO: 2054556 - DNA, 15 bp, Homo sapiens
tgcctacagattctg

SEQ ID NO: 2054557 - DNA, 15 bp, Homo sapiens
gcctacagattctgt

SEQ ID NO: 2054558 - DNA, 15 bp, Homo sapiens
cctacagattctgtc

SEQ ID NO: 2054559 - DNA, 15 bp, Homo sapiens
ctacagattctgtca

SEQ ID NO: 2054560 - DNA, 15 bp, Homo sapiens
tacagattctgtcac

SEQ ID NO: 2054561 - DNA, 15 bp, Homo sapiens
acagattctgtcacc

SEQ ID NO: 2054562 - DNA, 15 bp, Homo sapiens
cagattctgtcaccc

SEQ ID NO: 2054563 - DNA, 15 bp, Homo sapiens
agattctgtcaccca

SEQ ID NO: 2054564 - DNA, 15 bp, Homo sapiens
gattctgtcacccat

SEQ ID NO: 2054565 - DNA, 15 bp, Homo sapiens
attctgtcacccatc

SEQ ID NO: 2054566 - DNA, 15 bp, Homo sapiens
ttctgtcacccatca

SEQ ID NO: 2054567 - DNA, 15 bp, Homo sapiens
tctgtcacccatcat

SEQ ID NO: 2054568 - DNA, 15 bp, Homo sapiens
ctgtcacccatcatc

SEQ ID NO: 2054569 - DNA, 15 bp, Homo sapiens
tgtcacccatcatct

SEQ ID NO: 2054570 - DNA, 15 bp, Homo sapiens
gtcacccatcatctg

SEQ ID NO: 2054571 - DNA, 15 bp, Homo sapiens
tcacccatcatctgc

SEQ ID NO: 2054572 - DNA, 15 bp, Homo sapiens
cacccatcatctgct

SEQ ID NO: 2054573 - DNA, 15 bp, Homo sapiens
acccatcatctgctc

SEQ ID NO: 2054574 - DNA, 15 bp, Homo sapiens
cccatcatctgctcg

SEQ ID NO: 2054575 - DNA, 15 bp, Homo sapiens
ccatcatctgctcgg

SEQ ID NO: 2054576 - DNA, 15 bp, Homo sapiens
catcatctgctcgga

SEQ ID NO: 2054577 - DNA, 15 bp, Homo sapiens
atcatctgctcggaa

SEQ ID NO: 2054578 - DNA, 15 bp, Homo sapiens
tcatctgctcggaat

SEQ ID NO: 2054579 - DNA, 15 bp, Homo sapiens
catctgctcggaatg

SEQ ID NO: 2054580 - DNA, 15 bp, Homo sapiens
atctgctcggaatgc

SEQ ID NO: 2054581 - DNA, 15 bp, Homo sapiens
tctgctcggaatgcg

SEQ ID NO: 2054582 - DNA, 15 bp, Homo sapiens
ctgctcggaatgcgc

SEQ ID NO: 2054583 - DNA, 15 bp, Homo sapiens
tgctcggaatgcgct

SEQ ID NO: 2054584 - DNA, 15 bp, Homo sapiens
gctcggaatgcgctc

SEQ ID NO: 2054585 - DNA, 15 bp, Homo sapiens
ctcggaatgcgctcc

SEQ ID NO: 2054586 - DNA, 15 bp, Homo sapiens
tcggaatgcgctccg

SEQ ID NO: 2054587 - DNA, 15 bp, Homo sapiens
cggaatgcgctccgt

SEQ ID NO: 2054588 - DNA, 15 bp, Homo sapiens
ggaatgcgctccgta

SEQ ID NO: 2054589 - DNA, 15 bp, Homo sapiens
gaatgcgctccgtat

SEQ ID NO: 2054590 - DNA, 15 bp, Homo sapiens
aatgcgctccgtatc

SEQ ID NO: 2054591 - DNA, 15 bp, Homo sapiens
atgcgctccgtatct

SEQ ID NO: 2054592 - DNA, 15 bp, Homo sapiens
tgcgctccgtatctt

SEQ ID NO: 2054593 - DNA, 15 bp, Homo sapiens
gcgctccgtatcttt

SEQ ID NO: 2054594 - DNA, 15 bp, Homo sapiens
cgctccgtatctttc

SEQ ID NO: 2054595 - DNA, 15 bp, Homo sapiens
gctccgtatctttca

SEQ ID NO: 2054596 - DNA, 15 bp, Homo sapiens
ctccgtatctttcag

SEQ ID NO: 2054597 - DNA, 15 bp, Homo sapiens
tccgtatctttcagc

SEQ ID NO: 2054598 - DNA, 15 bp, Homo sapiens
ccgtatctttcagcg

SEQ ID NO: 2054599 - DNA, 15 bp, Homo sapiens
cgtatctttcagcgt

SEQ ID NO: 2054600 - DNA, 15 bp, Homo sapiens
gtatctttcagcgtg

SEQ ID NO: 2054601 - DNA, 15 bp, Homo sapiens
atctttcagcgtgtc

SEQ ID NO: 2054602 - DNA, 15 bp, Homo sapiens
tctttcagcgtgtcc

SEQ ID NO: 2054603 - DNA, 15 bp, Homo sapiens
ctttcagcgtgtccg

SEQ ID NO: 2054604 - DNA, 15 bp, Homo sapiens
tttcagcgtgtccgg

SEQ ID NO: 2054605 - DNA, 15 bp, Homo sapiens
ttcagcgtgtccggc

SEQ ID NO: 2054606 - DNA, 15 bp, Homo sapiens
tcagcgtgtccggct

SEQ ID NO: 2054607 - DNA, 15 bp, Homo sapiens
cagcgtgtccggctc

SEQ ID NO: 2054608 - DNA, 15 bp, Homo sapiens
agcgtgtccggctct

SEQ ID NO: 2054609 - DNA, 15 bp, Homo sapiens
gcgtgtccggctctt

SEQ ID NO: 2054610 - DNA, 15 bp, Homo sapiens
cgtgtccggctctta

SEQ ID NO: 2054611 - DNA, 15 bp, Homo sapiens
gtgtccggctcttat

SEQ ID NO: 2054612 - DNA, 15 bp, Homo sapiens
tgtccggctcttatg

SEQ ID NO: 2054613 - DNA, 15 bp, Homo sapiens
gtccggctcttatga

SEQ ID NO: 2054614 - DNA, 15 bp, Homo sapiens
tccggctcttatgat

SEQ ID NO: 2054615 - DNA, 15 bp, Homo sapiens
ccggctcttatgatt

SEQ ID NO: 2054616 - DNA, 15 bp, Homo sapiens
cggctcttatgattg

SEQ ID NO: 2054617 - DNA, 15 bp, Homo sapiens
ggctcttatgattgc

SEQ ID NO: 2054618 - DNA, 15 bp, Homo sapiens
gctcttatgattgca

SEQ ID NO: 2054619 - DNA, 15 bp, Homo sapiens
ctcttatgattgcaa

SEQ ID NO: 2054620 - DNA, 15 bp, Homo sapiens
tcttatgattgcaaa

SEQ ID NO: 2054621 - DNA, 15 bp, Homo sapiens
cttatgattgcaaat

SEQ ID NO: 2054622 - DNA, 15 bp, Homo sapiens
ttatgattgcaaatg

SEQ ID NO: 2054623 - DNA, 15 bp, Homo sapiens
tatgattgcaaatgg

SEQ ID NO: 2054624 - DNA, 15 bp, Homo sapiens
atgattgcaaatggc

SEQ ID NO: 2054625 - DNA, 15 bp, Homo sapiens
tgattgcaaatggcc

SEQ ID NO: 2054626 - DNA, 15 bp, Homo sapiens
gattgcaaatggccc

SEQ ID NO: 2054627 - DNA, 15 bp, Homo sapiens
attgcaaatggccct

SEQ ID NO: 2054628 - DNA, 15 bp, Homo sapiens
ttgcaaatggccctg

SEQ ID NO: 2054629 - DNA, 15 bp, Homo sapiens
tgcaaatggccctgt

SEQ ID NO: 2054630 - DNA, 15 bp, Homo sapiens
gcaaatggccctgtt

SEQ ID NO: 2054631 - DNA, 15 bp, Homo sapiens
caaatggccctgttt

SEQ ID NO: 2054632 - DNA, 15 bp, Homo sapiens
aaatggccctgtttt

SEQ ID NO: 2054633 - DNA, 15 bp, Homo sapiens
aatggccctgttttc

SEQ ID NO: 2054634 - DNA, 15 bp, Homo sapiens
atggccctgttttca

SEQ ID NO: 2054635 - DNA, 15 bp, Homo sapiens
tggccctgttttcaa

SEQ ID NO: 2054636 - DNA, 15 bp, Homo sapiens
ggccctgttttcaaa

SEQ ID NO: 2054637 - DNA, 15 bp, Homo sapiens
gccctgttttcaaat

SEQ ID NO: 2054638 - DNA, 15 bp, Homo sapiens
ccctgttttcaaatg

SEQ ID NO: 2054639 - DNA, 15 bp, Homo sapiens
cctgttttcaaatgg

SEQ ID NO: 2054640 - DNA, 15 bp, Homo sapiens
ctgttttcaaatgga

SEQ ID NO: 2054641 - DNA, 15 bp, Homo sapiens
tgttttcaaatggaa

SEQ ID NO: 2054642 - DNA, 15 bp, Homo sapiens
gttttcaaatggaaa

SEQ ID NO: 2054643 - DNA, 15 bp, Homo sapiens
ttttcaaatggaaat

SEQ ID NO: 2054644 - DNA, 15 bp, Homo sapiens
tttcaaatggaaata

SEQ ID NO: 2054645 - DNA, 15 bp, Homo sapiens
ttcaaatggaaataa

SEQ ID NO: 2054646 - DNA, 15 bp, Homo sapiens
tcaaatggaaataag

SEQ ID NO: 2054647 - DNA, 15 bp, Homo sapiens
caaatggaaataaga

SEQ ID NO: 2054648 - DNA, 15 bp, Homo sapiens
aaatggaaataagac

SEQ ID NO: 2054649 - DNA, 15 bp, Homo sapiens
aatggaaataagact

SEQ ID NO: 2054650 - DNA, 15 bp, Homo sapiens
atggaaataagactt

SEQ ID NO: 2054651 - DNA, 15 bp, Homo sapiens
tggaaataagacttg

SEQ ID NO: 2054652 - DNA, 15 bp, Homo sapiens
ggaaataagacttgc

SEQ ID NO: 2054653 - DNA, 15 bp, Homo sapiens
gaaataagacttgca

SEQ ID NO: 2054654 - DNA, 15 bp, Homo sapiens
aaataagacttgcaa

SEQ ID NO: 2054655 - DNA, 15 bp, Homo sapiens
aataagacttgcaaa

SEQ ID NO: 2054656 - DNA, 15 bp, Homo sapiens
ataagacttgcaaac

SEQ ID NO: 2054657 - DNA, 15 bp, Homo sapiens
taagacttgcaaact

SEQ ID NO: 2054658 - DNA, 15 bp, Homo sapiens
aagacttgcaaactg

SEQ ID NO: 2054659 - DNA, 15 bp, Homo sapiens
agacttgcaaactga

SEQ ID NO: 2054660 - DNA, 15 bp, Homo sapiens
gacttgcaaactgat

SEQ ID NO: 2054661 - DNA, 15 bp, Homo sapiens
acttgcaaactgatt

SEQ ID NO: 2054662 - DNA, 15 bp, Homo sapiens
cttgcaaactgatta

SEQ ID NO: 2054663 - DNA, 15 bp, Homo sapiens
ttgcaaactgattat

SEQ ID NO: 2054664 - DNA, 15 bp, Homo sapiens
tgcaaactgattatg

SEQ ID NO: 2054665 - DNA, 15 bp, Homo sapiens
gcaaactgattatgt

SEQ ID NO: 2054666 - DNA, 15 bp, Homo sapiens
caaactgattatgtg

SEQ ID NO: 2054667 - DNA, 15 bp, Homo sapiens
aaactgattatgtgt

SEQ ID NO: 2054668 - DNA, 15 bp, Homo sapiens
aactgattatgtgta

SEQ ID NO: 2054669 - DNA, 15 bp, Homo sapiens
actgattatgtgtat

SEQ ID NO: 2054670 - DNA, 15 bp, Homo sapiens
ctgattatgtgtatt

SEQ ID NO: 2054671 - DNA, 15 bp, Homo sapiens
tgattatgtgtattg

SEQ ID NO: 2054672 - DNA, 15 bp, Homo sapiens
gattatgtgtattga

SEQ ID NO: 2054673 - DNA, 15 bp, Homo sapiens
attatgtgtattgaa

SEQ ID NO: 2054674 - DNA, 15 bp, Homo sapiens
ttatgtgtattgaat

SEQ ID NO: 2054675 - DNA, 15 bp, Homo sapiens
tatgtgtattgaatc

SEQ ID NO: 2054676 - DNA, 15 bp, Homo sapiens
atgtgtattgaatca

SEQ ID NO: 2054677 - DNA, 15 bp, Homo sapiens
tgtgtattgaatcag

SEQ ID NO: 2054678 - DNA, 15 bp, Homo sapiens
gtgtattgaatcaga

SEQ ID NO: 2054679 - DNA, 15 bp, Homo sapiens
tgtattgaatcagaa

SEQ ID NO: 2054680 - DNA, 15 bp, Homo sapiens
gtattgaatcagaat

SEQ ID NO: 2054681 - DNA, 15 bp, Homo sapiens
tattgaatcagaatc

SEQ ID NO: 2054682 - DNA, 15 bp, Homo sapiens
attgaatcagaatca

SEQ ID NO: 2054683 - DNA, 15 bp, Homo sapiens
ttgaatcagaatcac

SEQ ID NO: 2054684 - DNA, 15 bp, Homo sapiens
tgaatcagaatcact

SEQ ID NO: 2054685 - DNA, 15 bp, Homo sapiens
gaatcagaatcactc

SEQ ID NO: 2054686 - DNA, 15 bp, Homo sapiens
aatcagaatcactcg

SEQ ID NO: 2054687 - DNA, 15 bp, Homo sapiens
atcagaatcactcgc

SEQ ID NO: 2054688 - DNA, 15 bp, Homo sapiens
tcagaatcactcgct

SEQ ID NO: 2054689 - DNA, 15 bp, Homo sapiens
cagaatcactcgcta

SEQ ID NO: 2054690 - DNA, 15 bp, Homo sapiens
agaatcactcgctag

SEQ ID NO: 2054691 - DNA, 15 bp, Homo sapiens
gaatcactcgctaga

SEQ ID NO: 2054692 - DNA, 15 bp, Homo sapiens
aatcactcgctagat

SEQ ID NO: 2054693 - DNA, 15 bp, Homo sapiens
atcactcgctagatc

SEQ ID NO: 2054694 - DNA, 15 bp, Homo sapiens
tcactcgctagatcc

SEQ ID NO: 2054695 - DNA, 15 bp, Homo sapiens
cactcgctagatcct

SEQ ID NO: 2054696 - DNA, 15 bp, Homo sapiens
actcgctagatcctc

SEQ ID NO: 2054697 - DNA, 15 bp, Homo sapiens
ctcgctagatcctct

SEQ ID NO: 2054698 - DNA, 15 bp, Homo sapiens
tcgctagatcctctt

SEQ ID NO: 2054699 - DNA, 15 bp, Homo sapiens
cgctagatcctcttg

SEQ ID NO: 2054700 - DNA, 15 bp, Homo sapiens
gctagatcctcttgt

SEQ ID NO: 2054701 - DNA, 15 bp, Homo sapiens
ctagatcctcttgtt

SEQ ID NO: 2054702 - DNA, 15 bp, Homo sapiens
tagatcctcttgttt

SEQ ID NO: 2054703 - DNA, 15 bp, Homo sapiens
agatcctcttgttta

SEQ ID NO: 2054704 - DNA, 15 bp, Homo sapiens
gatcctcttgtttaa

SEQ ID NO: 2054705 - DNA, 15 bp, Homo sapiens
atcctcttgtttaaa

SEQ ID NO: 2054706 - DNA, 15 bp, Homo sapiens
tcctcttgtttaaaa

SEQ ID NO: 2054707 - DNA, 15 bp, Homo sapiens
cctcttgtttaaaat

SEQ ID NO: 2054708 - DNA, 15 bp, Homo sapiens
ctcttgtttaaaatg

SEQ ID NO: 2054709 - DNA, 15 bp, Homo sapiens
tcttgtttaaaatgt

SEQ ID NO: 2054710 - DNA, 15 bp, Homo sapiens
cttgtttaaaatgta

SEQ ID NO: 2054711 - DNA, 15 bp, Homo sapiens
ttgtttaaaatgtat

SEQ ID NO: 2054712 - DNA, 15 bp, Homo sapiens
tgtttaaaatgtatt

SEQ ID NO: 2054713 - DNA, 15 bp, Homo sapiens
gtttaaaatgtattg

SEQ ID NO: 2054714 - DNA, 15 bp, Homo sapiens
tttaaaatgtattga

SEQ ID NO: 2054715 - DNA, 15 bp, Homo sapiens
ttaaaatgtattgaa

SEQ ID NO: 2054716 - DNA, 15 bp, Homo sapiens
taaaatgtattgaaa

SEQ ID NO: 2054717 - DNA, 15 bp, Homo sapiens
aaaatgtattgaaaa

SEQ ID NO: 2054718 - DNA, 15 bp, Homo sapiens
aaatgtattgaaaaa

SEQ ID NO: 2054719 - DNA, 15 bp, Homo sapiens
aatgtattgaaaaaa

SEQ ID NO: 2054720 - DNA, 15 bp, Homo sapiens
atgtattgaaaaaag

SEQ ID NO: 2054721 - DNA, 15 bp, Homo sapiens
tgtattgaaaaaagg

SEQ ID NO: 2054722 - DNA, 15 bp, Homo sapiens
gtattgaaaaaagga

SEQ ID NO: 2054723 - DNA, 15 bp, Homo sapiens
tattgaaaaaaggat

SEQ ID NO: 2054724 - DNA, 15 bp, Homo sapiens
attgaaaaaaggatg

SEQ ID NO: 2054725 - DNA, 15 bp, Homo sapiens
ttgaaaaaaggatga

SEQ ID NO: 2054726 - DNA, 15 bp, Homo sapiens
tgaaaaaaggatgat

SEQ ID NO: 2054727 - DNA, 15 bp, Homo sapiens
gaaaaaaggatgatg

SEQ ID NO: 2054728 - DNA, 15 bp, Homo sapiens
aaaaaaggatgatgg

SEQ ID NO: 2054729 - DNA, 15 bp, Homo sapiens
aaaaaggatgatggg

SEQ ID NO: 2054730 - DNA, 15 bp, Homo sapiens
aaaaggatgatgggt

SEQ ID NO: 2054731 - DNA, 15 bp, Homo sapiens
aaaggatgatgggtg

SEQ ID NO: 2054732 - DNA, 15 bp, Homo sapiens
aaggatgatgggtgc

SEQ ID NO: 2054733 - DNA, 15 bp, Homo sapiens
aggatgatgggtgca

SEQ ID NO: 2054734 - DNA, 15 bp, Homo sapiens
ggatgatgggtgcag

SEQ ID NO: 2054735 - DNA, 15 bp, Homo sapiens
gatgatgggtgcaga

SEQ ID NO: 2054736 - DNA, 15 bp, Homo sapiens
atgatgggtgcagac

SEQ ID NO: 2054737 - DNA, 15 bp, Homo sapiens
tgatgggtgcagacc

SEQ ID NO: 2054738 - DNA, 15 bp, Homo sapiens
gatgggtgcagacct

SEQ ID NO: 2054739 - DNA, 15 bp, Homo sapiens
atgggtgcagacctc

SEQ ID NO: 2054740 - DNA, 15 bp, Homo sapiens
tgggtgcagacctct

SEQ ID NO: 2054741 - DNA, 15 bp, Homo sapiens
gggtgcagacctctg

SEQ ID NO: 2054742 - DNA, 15 bp, Homo sapiens
ggtgcagacctctgt

SEQ ID NO: 2054743 - DNA, 15 bp, Homo sapiens
gtgcagacctctgta

SEQ ID NO: 2054744 - DNA, 15 bp, Homo sapiens
tgcagacctctgtaa

SEQ ID NO: 2054745 - DNA, 15 bp, Homo sapiens
gcagacctctgtaac

SEQ ID NO: 2054746 - DNA, 15 bp, Homo sapiens
cagacctctgtaacc

SEQ ID NO: 2054747 - DNA, 15 bp, Homo sapiens
agacctctgtaacca

SEQ ID NO: 2054748 - DNA, 15 bp, Homo sapiens
gacctctgtaaccag

SEQ ID NO: 2054749 - DNA, 15 bp, Homo sapiens
acctctgtaaccagc

SEQ ID NO: 2054750 - DNA, 15 bp, Homo sapiens
cctctgtaaccagct

SEQ ID NO: 2054751 - DNA, 15 bp, Homo sapiens
ctctgtaaccagctc

SEQ ID NO: 2054752 - DNA, 15 bp, Homo sapiens
tctgtaaccagctct

SEQ ID NO: 2054753 - DNA, 15 bp, Homo sapiens
ctgtaaccagctctg

SEQ ID NO: 2054754 - DNA, 15 bp, Homo sapiens
tgtaaccagctctgt

SEQ ID NO: 2054755 - DNA, 15 bp, Homo sapiens
gtaaccagctctgtc

SEQ ID NO: 2054756 - DNA, 15 bp, Homo sapiens
taaccagctctgtct

SEQ ID NO: 2054757 - DNA, 15 bp, Homo sapiens
aaccagctctgtctc

SEQ ID NO: 2054758 - DNA, 15 bp, Homo sapiens
accagctctgtctct

SEQ ID NO: 2054759 - DNA, 15 bp, Homo sapiens
ccagctctgtctctt

SEQ ID NO: 2054760 - DNA, 15 bp, Homo sapiens
cagctctgtctcttc

SEQ ID NO: 2054761 - DNA, 15 bp, Homo sapiens
agctctgtctcttct

SEQ ID NO: 2054762 - DNA, 15 bp, Homo sapiens
gctctgtctcttctc

SEQ ID NO: 2054763 - DNA, 15 bp, Homo sapiens
ctgtctcttctctgg

SEQ ID NO: 2054764 - DNA, 15 bp, Homo sapiens
tgtctcttctctggg

SEQ ID NO: 2054765 - DNA, 15 bp, Homo sapiens
gtctcttctctggga

SEQ ID NO: 2054766 - DNA, 15 bp, Homo sapiens
tctcttctctgggag

SEQ ID NO: 2054767 - DNA, 15 bp, Homo sapiens
ctcttctctgggagg

SEQ ID NO: 2054768 - DNA, 15 bp, Homo sapiens
tcttctctgggaggt

SEQ ID NO: 2054769 - DNA, 15 bp, Homo sapiens
cttctctgggaggtc

SEQ ID NO: 2054770 - DNA, 15 bp, Homo sapiens
ttctctgggaggtcg

SEQ ID NO: 2054771 - DNA, 15 bp, Homo sapiens
tctctgggaggtcga

SEQ ID NO: 2054772 - DNA, 15 bp, Homo sapiens
ctctgggaggtcgat

SEQ ID NO: 2054773 - DNA, 15 bp, Homo sapiens
tctgggaggtcgatc

SEQ ID NO: 2054774 - DNA, 15 bp, Homo sapiens
ctgggaggtcgatct

SEQ ID NO: 2054775 - DNA, 15 bp, Homo sapiens
tgggaggtcgatcta

SEQ ID NO: 2054776 - DNA, 15 bp, Homo sapiens
gggaggtcgatctat

SEQ ID NO: 2054777 - DNA, 15 bp, Homo sapiens
ggaggtcgatctatt

SEQ ID NO: 2054778 - DNA, 15 bp, Homo sapiens
gaggtcgatctattt

SEQ ID NO: 2054779 - DNA, 15 bp, Homo sapiens
aggtcgatctatttt

SEQ ID NO: 2054780 - DNA, 15 bp, Homo sapiens
ggtcgatctattttg

SEQ ID NO: 2054781 - DNA, 15 bp, Homo sapiens
gtcgatctattttgc

SEQ ID NO: 2054782 - DNA, 15 bp, Homo sapiens
tcgatctattttgca

SEQ ID NO: 2054783 - DNA, 15 bp, Homo sapiens
cgatctattttgcaa

SEQ ID NO: 2054784 - DNA, 15 bp, Homo sapiens
gatctattttgcaac

SEQ ID NO: 2054785 - DNA, 15 bp, Homo sapiens
atctattttgcaact

SEQ ID NO: 2054786 - DNA, 15 bp, Homo sapiens
tctattttgcaactt

SEQ ID NO: 2054787 - DNA, 15 bp, Homo sapiens
ctattttgcaacttt

SEQ ID NO: 2054788 - DNA, 15 bp, Homo sapiens
tattttgcaactttt

SEQ ID NO: 2054789 - DNA, 15 bp, Homo sapiens
attttgcaacttttt

SEQ ID NO: 2054790 - DNA, 15 bp, Homo sapiens
ttttgcaactttttg

SEQ ID NO: 2054791 - DNA, 15 bp, Homo sapiens
tttgcaactttttgc

SEQ ID NO: 2054792 - DNA, 15 bp, Homo sapiens
ttgcaactttttgcc

SEQ ID NO: 2054793 - DNA, 15 bp, Homo sapiens
tgcaactttttgcca

SEQ ID NO: 2054794 - DNA, 15 bp, Homo sapiens
gcaactttttgccat

SEQ ID NO: 2054795 - DNA, 15 bp, Homo sapiens
caactttttgccatt

SEQ ID NO: 2054796 - DNA, 15 bp, Homo sapiens
aactttttgccattt

SEQ ID NO: 2054797 - DNA, 15 bp, Homo sapiens
actttttgccatttg

SEQ ID NO: 2054798 - DNA, 15 bp, Homo sapiens
ctttttgccatttga

SEQ ID NO: 2054799 - DNA, 15 bp, Homo sapiens
tttttgccatttgag

SEQ ID NO: 2054800 - DNA, 15 bp, Homo sapiens
ttttgccatttgagc

SEQ ID NO: 2054801 - DNA, 15 bp, Homo sapiens
tttgccatttgagcg

SEQ ID NO: 2054802 - DNA, 15 bp, Homo sapiens
ttgccatttgagcgt

SEQ ID NO: 2054803 - DNA, 15 bp, Homo sapiens
tgccatttgagcgtg

SEQ ID NO: 2054804 - DNA, 15 bp, Homo sapiens
gccatttgagcgtgt

SEQ ID NO: 2054805 - DNA, 15 bp, Homo sapiens
ccatttgagcgtgtt

SEQ ID NO: 2054806 - DNA, 15 bp, Homo sapiens
catttgagcgtgttt

SEQ ID NO: 2054807 - DNA, 15 bp, Homo sapiens
atttgagcgtgtttc

SEQ ID NO: 2054808 - DNA, 15 bp, Homo sapiens
tttgagcgtgtttca

SEQ ID NO: 2054809 - DNA, 15 bp, Homo sapiens
ttgagcgtgtttcag

SEQ ID NO: 2054810 - DNA, 15 bp, Homo sapiens
tgagcgtgtttcagc

SEQ ID NO: 2054811 - DNA, 15 bp, Homo sapiens
gagcgtgtttcagcc

SEQ ID NO: 2054812 - DNA, 15 bp, Homo sapiens
agcgtgtttcagcca

SEQ ID NO: 2054813 - DNA, 15 bp, Homo sapiens
gcgtgtttcagccag

SEQ ID NO: 2054814 - DNA, 15 bp, Homo sapiens
cgtgtttcagccaga

SEQ ID NO: 2054815 - DNA, 15 bp, Homo sapiens
gtgtttcagccagat

SEQ ID NO: 2054816 - DNA, 15 bp, Homo sapiens
tgtttcagccagata

SEQ ID NO: 2054817 - DNA, 15 bp, Homo sapiens
gtttcagccagataa

SEQ ID NO: 2054818 - DNA, 15 bp, Homo sapiens
tttcagccagataat

SEQ ID NO: 2054819 - DNA, 15 bp, Homo sapiens
ttcagccagataatt

SEQ ID NO: 2054820 - DNA, 15 bp, Homo sapiens
tcagccagataatta

SEQ ID NO: 2054821 - DNA, 15 bp, Homo sapiens
cagccagataattac

SEQ ID NO: 2054822 - DNA, 15 bp, Homo sapiens
agccagataattacg

SEQ ID NO: 2054823 - DNA, 15 bp, Homo sapiens
gccagataattacgt

SEQ ID NO: 2054824 - DNA, 15 bp, Homo sapiens
ccagataattacgtt

SEQ ID NO: 2054825 - DNA, 15 bp, Homo sapiens
cagataattacgttg

SEQ ID NO: 2054826 - DNA, 15 bp, Homo sapiens
agataattacgttgc

SEQ ID NO: 2054827 - DNA, 15 bp, Homo sapiens
gataattacgttgcc

SEQ ID NO: 2054828 - DNA, 15 bp, Homo sapiens
ataattacgttgcca

SEQ ID NO: 2054829 - DNA, 15 bp, Homo sapiens
taattacgttgccat

SEQ ID NO: 2054830 - DNA, 15 bp, Homo sapiens
aattacgttgccatt

SEQ ID NO: 2054831 - DNA, 15 bp, Homo sapiens
attacgttgccattg

SEQ ID NO: 2054832 - DNA, 15 bp, Homo sapiens
ttacgttgccattgt

SEQ ID NO: 2054833 - DNA, 15 bp, Homo sapiens
tacgttgccattgtg

SEQ ID NO: 2054834 - DNA, 15 bp, Homo sapiens
acgttgccattgtgt

SEQ ID NO: 2054835 - DNA, 15 bp, Homo sapiens
cgttgccattgtgtt

SEQ ID NO: 2054836 - DNA, 15 bp, Homo sapiens
gttgccattgtgtta

SEQ ID NO: 2054837 - DNA, 15 bp, Homo sapiens
ttgccattgtgttac

SEQ ID NO: 2054838 - DNA, 15 bp, Homo sapiens
tgccattgtgttacc

SEQ ID NO: 2054839 - DNA, 15 bp, Homo sapiens
gccattgtgttaccg

SEQ ID NO: 2054840 - DNA, 15 bp, Homo sapiens
ccattgtgttaccgg

SEQ ID NO: 2054841 - DNA, 15 bp, Homo sapiens
cattgtgttaccggc

SEQ ID NO: 2054842 - DNA, 15 bp, Homo sapiens
attgtgttaccggcc

SEQ ID NO: 2054843 - DNA, 15 bp, Homo sapiens
ttgtgttaccggccc

SEQ ID NO: 2054844 - DNA, 15 bp, Homo sapiens
tgtgttaccggccca

SEQ ID NO: 2054845 - DNA, 15 bp, Homo sapiens
gtgttaccggcccaa

SEQ ID NO: 2054846 - DNA, 15 bp, Homo sapiens
tgttaccggcccaaa

SEQ ID NO: 2054847 - DNA, 15 bp, Homo sapiens
gttaccggcccaaag

SEQ ID NO: 2054848 - DNA, 15 bp, Homo sapiens
ttaccggcccaaagc

SEQ ID NO: 2054849 - DNA, 15 bp, Homo sapiens
taccggcccaaagct

SEQ ID NO: 2054850 - DNA, 15 bp, Homo sapiens
accggcccaaagctc

SEQ ID NO: 2054851 - DNA, 15 bp, Homo sapiens
ccggcccaaagctca

SEQ ID NO: 2054852 - DNA, 15 bp, Homo sapiens
cggcccaaagctcag

SEQ ID NO: 2054853 - DNA, 15 bp, Homo sapiens
ggcccaaagctcaga

SEQ ID NO: 2054854 - DNA, 15 bp, Homo sapiens
gcccaaagctcagac

SEQ ID NO: 2054855 - DNA, 15 bp, Homo sapiens
cccaaagctcagaca

SEQ ID NO: 2054856 - DNA, 15 bp, Homo sapiens
aagctcagacagggt

SEQ ID NO: 2054857 - DNA, 15 bp, Homo sapiens
agctcagacagggta

SEQ ID NO: 2054858 - DNA, 15 bp, Homo sapiens
gctcagacagggtac

SEQ ID NO: 2054859 - DNA, 15 bp, Homo sapiens
ctcagacagggtaca

SEQ ID NO: 2054860 - DNA, 15 bp, Homo sapiens
tcagacagggtacac

SEQ ID NO: 2054861 - DNA, 15 bp, Homo sapiens
cagacagggtacaca

SEQ ID NO: 2054862 - DNA, 15 bp, Homo sapiens
agacagggtacacac

SEQ ID NO: 2054863 - DNA, 15 bp, Homo sapiens
gacagggtacacaca

SEQ ID NO: 2054864 - DNA, 15 bp, Homo sapiens
acagggtacacacac

SEQ ID NO: 2054865 - DNA, 15 bp, Homo sapiens
cagggtacacacacc

SEQ ID NO: 2054866 - DNA, 15 bp, Homo sapiens
agggtacacacacca

SEQ ID NO: 2054867 - DNA, 15 bp, Homo sapiens
gggtacacacaccac

SEQ ID NO: 2054868 - DNA, 15 bp, Homo sapiens
ggtacacacaccacc

SEQ ID NO: 2054869 - DNA, 15 bp, Homo sapiens
gtacacacaccacca

SEQ ID NO: 2054870 - DNA, 15 bp, Homo sapiens
tacacacaccaccac

SEQ ID NO: 2054871 - DNA, 15 bp, Homo sapiens
acacacaccaccacc

SEQ ID NO: 2054872 - DNA, 15 bp, Homo sapiens
cacacaccaccaccc

SEQ ID NO: 2054873 - DNA, 15 bp, Homo sapiens
acacaccaccaccca

SEQ ID NO: 2054874 - DNA, 15 bp, Homo sapiens
cacaccaccacccag

SEQ ID NO: 2054875 - DNA, 15 bp, Homo sapiens
acaccaccacccagc

SEQ ID NO: 2054876 - DNA, 15 bp, Homo sapiens
caccaccacccagcc

SEQ ID NO: 2054877 - DNA, 15 bp, Homo sapiens
accaccacccagccg

SEQ ID NO: 2054878 - DNA, 15 bp, Homo sapiens
ccaccacccagccgt

SEQ ID NO: 2054879 - DNA, 15 bp, Homo sapiens
caccacccagccgtc

SEQ ID NO: 2054880 - DNA, 15 bp, Homo sapiens
accacccagccgtct

SEQ ID NO: 2054881 - DNA, 15 bp, Homo sapiens
ccacccagccgtctc

SEQ ID NO: 2054882 - DNA, 15 bp, Homo sapiens
cacccagccgtctcc

SEQ ID NO: 2054883 - DNA, 15 bp, Homo sapiens
acccagccgtctccc

SEQ ID NO: 2054884 - DNA, 15 bp, Homo sapiens
cccagccgtctccca

SEQ ID NO: 2054885 - DNA, 15 bp, Homo sapiens
ccagccgtctcccag

SEQ ID NO: 2054886 - DNA, 15 bp, Homo sapiens
cagccgtctcccagg

SEQ ID NO: 2054887 - DNA, 15 bp, Homo sapiens
agccgtctcccaggc

SEQ ID NO: 2054888 - DNA, 15 bp, Homo sapiens
gccgtctcccaggcc

SEQ ID NO: 2054889 - DNA, 15 bp, Homo sapiens
ccgtctcccaggccc

SEQ ID NO: 2054890 - DNA, 15 bp, Homo sapiens
cgtctcccaggccct

SEQ ID NO: 2054891 - DNA, 15 bp, Homo sapiens
tctcccaggccctcc

SEQ ID NO: 2054892 - DNA, 15 bp, Homo sapiens
ctcccaggccctccc

SEQ ID NO: 2054893 - DNA, 15 bp, Homo sapiens
tcccaggccctcccc

SEQ ID NO: 2054894 - DNA, 15 bp, Homo sapiens
cccaggccctcccca

SEQ ID NO: 2054895 - DNA, 15 bp, Homo sapiens
ccaggccctccccac

SEQ ID NO: 2054896 - DNA, 15 bp, Homo sapiens
caggccctccccact

SEQ ID NO: 2054897 - DNA, 15 bp, Homo sapiens
aggccctccccacta

SEQ ID NO: 2054898 - DNA, 15 bp, Homo sapiens
ggccctccccactag

SEQ ID NO: 2054899 - DNA, 15 bp, Homo sapiens
gccctccccactagg

SEQ ID NO: 2054900 - DNA, 15 bp, Homo sapiens
ccctccccactagga

SEQ ID NO: 2054901 - DNA, 15 bp, Homo sapiens
cctccccactaggat

SEQ ID NO: 2054902 - DNA, 15 bp, Homo sapiens
ctccccactaggatc

SEQ ID NO: 2054903 - DNA, 15 bp, Homo sapiens
tccccactaggatca

SEQ ID NO: 2054904 - DNA, 15 bp, Homo sapiens
ccccactaggatcac

SEQ ID NO: 2054905 - DNA, 15 bp, Homo sapiens
cccactaggatcacc

SEQ ID NO: 2054906 - DNA, 15 bp, Homo sapiens
ccactaggatcaccc

SEQ ID NO: 2054907 - DNA, 15 bp, Homo sapiens
cactaggatcacccc

SEQ ID NO: 2054908 - DNA, 15 bp, Homo sapiens
actaggatcaccccc

SEQ ID NO: 2054909 - DNA, 15 bp, Homo sapiens
ctaggatcaccccct

SEQ ID NO: 2054910 - DNA, 15 bp, Homo sapiens
taggatcacccccta

SEQ ID NO: 2054911 - DNA, 15 bp, Homo sapiens
aggatcaccccctaa

SEQ ID NO: 2054912 - DNA, 15 bp, Homo sapiens
ggatcaccccctaaa

SEQ ID NO: 2054913 - DNA, 15 bp, Homo sapiens
gatcaccccctaaac

SEQ ID NO: 2054914 - DNA, 15 bp, Homo sapiens
atcaccccctaaaca

SEQ ID NO: 2054915 - DNA, 15 bp, Homo sapiens
tcaccccctaaacac

SEQ ID NO: 2054916 - DNA, 15 bp, Homo sapiens
caccccctaaacacc

SEQ ID NO: 2054917 - DNA, 15 bp, Homo sapiens
accccctaaacacca

SEQ ID NO: 2054918 - DNA, 15 bp, Homo sapiens
ccccctaaacaccac

SEQ ID NO: 2054919 - DNA, 15 bp, Homo sapiens
cccctaaacaccaca

SEQ ID NO: 2054920 - DNA, 15 bp, Homo sapiens
ccctaaacaccacag

SEQ ID NO: 2054921 - DNA, 15 bp, Homo sapiens
cctaaacaccacagg

SEQ ID NO: 2054922 - DNA, 15 bp, Homo sapiens
ctaaacaccacaggc

SEQ ID NO: 2054923 - DNA, 15 bp, Homo sapiens
taaacaccacaggca

SEQ ID NO: 2054924 - DNA, 15 bp, Homo sapiens
aaacaccacaggcac

SEQ ID NO: 2054925 - DNA, 15 bp, Homo sapiens
aacaccacaggcaca

SEQ ID NO: 2054926 - DNA, 15 bp, Homo sapiens
acaccacaggcacat

SEQ ID NO: 2054927 - DNA, 15 bp, Homo sapiens
caccacaggcacatg

SEQ ID NO: 2054928 - DNA, 15 bp, Homo sapiens
accacaggcacatga

SEQ ID NO: 2054929 - DNA, 15 bp, Homo sapiens
ccacaggcacatgac

SEQ ID NO: 2054930 - DNA, 15 bp, Homo sapiens
cacaggcacatgaca

SEQ ID NO: 2054931 - DNA, 15 bp, Homo sapiens
acaggcacatgacac

SEQ ID NO: 2054932 - DNA, 15 bp, Homo sapiens
caggcacatgacaca

SEQ ID NO: 2054933 - DNA, 15 bp, Homo sapiens
aggcacatgacacag

SEQ ID NO: 2054934 - DNA, 15 bp, Homo sapiens
ggcacatgacacagt

SEQ ID NO: 2054935 - DNA, 15 bp, Homo sapiens
gcacatgacacagtc

SEQ ID NO: 2054936 - DNA, 15 bp, Homo sapiens
cacatgacacagtca

SEQ ID NO: 2054937 - DNA, 15 bp, Homo sapiens
acatgacacagtcat

SEQ ID NO: 2054938 - DNA, 15 bp, Homo sapiens
catgacacagtcatc

SEQ ID NO: 2054939 - DNA, 15 bp, Homo sapiens
atgacacagtcatcc

SEQ ID NO: 2054940 - DNA, 15 bp, Homo sapiens
tgacacagtcatcca

SEQ ID NO: 2054941 - DNA, 15 bp, Homo sapiens
gacacagtcatccac

SEQ ID NO: 2054942 - DNA, 15 bp, Homo sapiens
acacagtcatccacc

SEQ ID NO: 2054943 - DNA, 15 bp, Homo sapiens
cacagtcatccacca

SEQ ID NO: 2054944 - DNA, 15 bp, Homo sapiens
acagtcatccaccac

SEQ ID NO: 2054945 - DNA, 15 bp, Homo sapiens
cagtcatccaccacc

SEQ ID NO: 2054946 - DNA, 15 bp, Homo sapiens
agtcatccaccacca

SEQ ID NO: 2054947 - DNA, 15 bp, Homo sapiens
gtcatccaccaccat

SEQ ID NO: 2054948 - DNA, 15 bp, Homo sapiens
tcatccaccaccatc

SEQ ID NO: 2054949 - DNA, 15 bp, Homo sapiens
catccaccaccatcc

SEQ ID NO: 2054950 - DNA, 15 bp, Homo sapiens
atccaccaccatccc

SEQ ID NO: 2054951 - DNA, 15 bp, Homo sapiens
tccaccaccatcccc

SEQ ID NO: 2054952 - DNA, 15 bp, Homo sapiens
ccaccaccatcccca

SEQ ID NO: 2054953 - DNA, 15 bp, Homo sapiens
caccaccatccccac

SEQ ID NO: 2054954 - DNA, 15 bp, Homo sapiens
accaccatccccacc

SEQ ID NO: 2054955 - DNA, 15 bp, Homo sapiens
ccaccatccccacct

SEQ ID NO: 2054956 - DNA, 15 bp, Homo sapiens
caccatccccacctc

SEQ ID NO: 2054957 - DNA, 15 bp, Homo sapiens
accatccccacctcc

SEQ ID NO: 2054958 - DNA, 15 bp, Homo sapiens
ccatccccacctccc

SEQ ID NO: 2054959 - DNA, 15 bp, Homo sapiens
catccccacctcccc

SEQ ID NO: 2054960 - DNA, 15 bp, Homo sapiens
atccccacctcccca

SEQ ID NO: 2054961 - DNA, 15 bp, Homo sapiens
tccccacctccccat

SEQ ID NO: 2054962 - DNA, 15 bp, Homo sapiens
ccccacctccccatc

SEQ ID NO: 2054963 - DNA, 15 bp, Homo sapiens
cccacctccccatca

SEQ ID NO: 2054964 - DNA, 15 bp, Homo sapiens
ccacctccccatcac

SEQ ID NO: 2054965 - DNA, 15 bp, Homo sapiens
cacctccccatcact

SEQ ID NO: 2054966 - DNA, 15 bp, Homo sapiens
acctccccatcactg

SEQ ID NO: 2054967 - DNA, 15 bp, Homo sapiens
cctccccatcactgt

SEQ ID NO: 2054968 - DNA, 15 bp, Homo sapiens
ctccccatcactgtg

SEQ ID NO: 2054969 - DNA, 15 bp, Homo sapiens
tccccatcactgtga

SEQ ID NO: 2054970 - DNA, 15 bp, Homo sapiens
ccccatcactgtgac

SEQ ID NO: 2054971 - DNA, 15 bp, Homo sapiens
cccatcactgtgacc

SEQ ID NO: 2054972 - DNA, 15 bp, Homo sapiens
ccatcactgtgaccc

SEQ ID NO: 2054973 - DNA, 15 bp, Homo sapiens
catcactgtgaccca

SEQ ID NO: 2054974 - DNA, 15 bp, Homo sapiens
atcactgtgacccag

SEQ ID NO: 2054975 - DNA, 15 bp, Homo sapiens
tcactgtgacccagc

SEQ ID NO: 2054976 - DNA, 15 bp, Homo sapiens
cactgtgacccagct

SEQ ID NO: 2054977 - DNA, 15 bp, Homo sapiens
actgtgacccagcta

SEQ ID NO: 2054978 - DNA, 15 bp, Homo sapiens
ctgtgacccagctat

SEQ ID NO: 2054979 - DNA, 15 bp, Homo sapiens
tgtgacccagctata

SEQ ID NO: 2054980 - DNA, 15 bp, Homo sapiens
gtgacccagctatat

SEQ ID NO: 2054981 - DNA, 15 bp, Homo sapiens
tgacccagctatata

SEQ ID NO: 2054982 - DNA, 15 bp, Homo sapiens
gacccagctatatat

SEQ ID NO: 2054983 - DNA, 15 bp, Homo sapiens
acccagctatatata

SEQ ID NO: 2054984 - DNA, 15 bp, Homo sapiens
cccagctatatataa

SEQ ID NO: 2054985 - DNA, 15 bp, Homo sapiens
ccagctatatataac

SEQ ID NO: 2054986 - DNA, 15 bp, Homo sapiens
cagctatatataacc

SEQ ID NO: 2054987 - DNA, 15 bp, Homo sapiens
agctatatataacca

SEQ ID NO: 2054988 - DNA, 15 bp, Homo sapiens
gctatatataaccag

SEQ ID NO: 2054989 - DNA, 15 bp, Homo sapiens
ctatatataaccagc

SEQ ID NO: 2054990 - DNA, 15 bp, Homo sapiens
tatatataaccagca

SEQ ID NO: 2054991 - DNA, 15 bp, Homo sapiens
atatataaccagcac

SEQ ID NO: 2054992 - DNA, 15 bp, Homo sapiens
tatataaccagcact

SEQ ID NO: 2054993 - DNA, 15 bp, Homo sapiens
atataaccagcactt

SEQ ID NO: 2054994 - DNA, 15 bp, Homo sapiens
tataaccagcacttc

SEQ ID NO: 2054995 - DNA, 15 bp, Homo sapiens
ataaccagcacttct

SEQ ID NO: 2054996 - DNA, 15 bp, Homo sapiens
taaccagcacttctc

SEQ ID NO: 2054997 - DNA, 15 bp, Homo sapiens
aaccagcacttctca

SEQ ID NO: 2054998 - DNA, 15 bp, Homo sapiens
accagcacttctcag

SEQ ID NO: 2054999 - DNA, 15 bp, Homo sapiens
ccagcacttctcagc

SEQ ID NO: 2055000 - DNA, 15 bp, Homo sapiens
cagcacttctcagct

SEQ ID NO: 2055001 - DNA, 15 bp, Homo sapiens
agcacttctcagctg

SEQ ID NO: 2055002 - DNA, 15 bp, Homo sapiens
gcacttctcagctgc

SEQ ID NO: 2055003 - DNA, 15 bp, Homo sapiens
cacttctcagctgcc

SEQ ID NO: 2055004 - DNA, 15 bp, Homo sapiens
acttctcagctgcca

SEQ ID NO: 2055005 - DNA, 15 bp, Homo sapiens
cttctcagctgccac

SEQ ID NO: 2055006 - DNA, 15 bp, Homo sapiens
ttctcagctgccaca

SEQ ID NO: 2055007 - DNA, 15 bp, Homo sapiens
tctcagctgccacaa

SEQ ID NO: 2055008 - DNA, 15 bp, Homo sapiens
ctcagctgccacaac

SEQ ID NO: 2055009 - DNA, 15 bp, Homo sapiens
tcagctgccacaacc

SEQ ID NO: 2055010 - DNA, 15 bp, Homo sapiens
cagctgccacaaccg

SEQ ID NO: 2055011 - DNA, 15 bp, Homo sapiens
agctgccacaaccgc

SEQ ID NO: 2055012 - DNA, 15 bp, Homo sapiens
gctgccacaaccgcc

SEQ ID NO: 2055013 - DNA, 15 bp, Homo sapiens
ctgccacaaccgccc

SEQ ID NO: 2055014 - DNA, 15 bp, Homo sapiens
tgccacaaccgccct

SEQ ID NO: 2055015 - DNA, 15 bp, Homo sapiens
gccacaaccgccctc

SEQ ID NO: 2055016 - DNA, 15 bp, Homo sapiens
ccacaaccgccctca

SEQ ID NO: 2055017 - DNA, 15 bp, Homo sapiens
cacaaccgccctcag

SEQ ID NO: 2055018 - DNA, 15 bp, Homo sapiens
acaaccgccctcaga

SEQ ID NO: 2055019 - DNA, 15 bp, Homo sapiens
caaccgccctcagaa

SEQ ID NO: 2055020 - DNA, 15 bp, Homo sapiens
aaccgccctcagaag

SEQ ID NO: 2055021 - DNA, 15 bp, Homo sapiens
accgccctcagaagc

SEQ ID NO: 2055022 - DNA, 15 bp, Homo sapiens
ccgccctcagaagcc

SEQ ID NO: 2055023 - DNA, 15 bp, Homo sapiens
cgccctcagaagccc

SEQ ID NO: 2055024 - DNA, 15 bp, Homo sapiens
gccctcagaagccca

SEQ ID NO: 2055025 - DNA, 15 bp, Homo sapiens
ccctcagaagcccac

SEQ ID NO: 2055026 - DNA, 15 bp, Homo sapiens
cctcagaagcccaca

SEQ ID NO: 2055027 - DNA, 15 bp, Homo sapiens
ctcagaagcccacac

SEQ ID NO: 2055028 - DNA, 15 bp, Homo sapiens
tcagaagcccacaca

SEQ ID NO: 2055029 - DNA, 15 bp, Homo sapiens
cagaagcccacacac

SEQ ID NO: 2055030 - DNA, 15 bp, Homo sapiens
agaagcccacacact

SEQ ID NO: 2055031 - DNA, 15 bp, Homo sapiens
gaagcccacacactt

SEQ ID NO: 2055032 - DNA, 15 bp, Homo sapiens
aagcccacacacttt

SEQ ID NO: 2055033 - DNA, 15 bp, Homo sapiens
agcccacacactttc

SEQ ID NO: 2055034 - DNA, 15 bp, Homo sapiens
gcccacacactttca

SEQ ID NO: 2055035 - DNA, 15 bp, Homo sapiens
cccacacactttcac

SEQ ID NO: 2055036 - DNA, 15 bp, Homo sapiens
ccacacactttcacc

SEQ ID NO: 2055037 - DNA, 15 bp, Homo sapiens
cacacactttcacca

SEQ ID NO: 2055038 - DNA, 15 bp, Homo sapiens
acacactttcaccag

SEQ ID NO: 2055039 - DNA, 15 bp, Homo sapiens
cacactttcaccagg

SEQ ID NO: 2055040 - DNA, 15 bp, Homo sapiens
acactttcaccagga

SEQ ID NO: 2055041 - DNA, 15 bp, Homo sapiens
cactttcaccaggaa

SEQ ID NO: 2055042 - DNA, 15 bp, Homo sapiens
actttcaccaggaat

SEQ ID NO: 2055043 - DNA, 15 bp, Homo sapiens
ctttcaccaggaata

SEQ ID NO: 2055044 - DNA, 15 bp, Homo sapiens
tttcaccaggaatag

SEQ ID NO: 2055045 - DNA, 15 bp, Homo sapiens
ttcaccaggaatagt

SEQ ID NO: 2055046 - DNA, 15 bp, Homo sapiens
tcaccaggaatagtt

SEQ ID NO: 2055047 - DNA, 15 bp, Homo sapiens
caccaggaatagttg

SEQ ID NO: 2055048 - DNA, 15 bp, Homo sapiens
accaggaatagttgt

SEQ ID NO: 2055049 - DNA, 15 bp, Homo sapiens
ccaggaatagttgtt

SEQ ID NO: 2055050 - DNA, 15 bp, Homo sapiens
caggaatagttgttt

SEQ ID NO: 2055051 - DNA, 15 bp, Homo sapiens
aggaatagttgtttc

SEQ ID NO: 2055052 - DNA, 15 bp, Homo sapiens
ggaatagttgtttct

SEQ ID NO: 2055053 - DNA, 15 bp, Homo sapiens
gaatagttgtttctg

SEQ ID NO: 2055054 - DNA, 15 bp, Homo sapiens
aatagttgtttctgt

SEQ ID NO: 2055055 - DNA, 15 bp, Homo sapiens
atagttgtttctgtt

SEQ ID NO: 2055056 - DNA, 15 bp, Homo sapiens
tagttgtttctgttt

SEQ ID NO: 2055057 - DNA, 15 bp, Homo sapiens
agttgtttctgtttt

SEQ ID NO: 2055058 - DNA, 15 bp, Homo sapiens
gttgtttctgttttc

SEQ ID NO: 2055059 - DNA, 15 bp, Homo sapiens
ttgtttctgttttct

SEQ ID NO: 2055060 - DNA, 15 bp, Homo sapiens
tgtttctgttttctc

SEQ ID NO: 2055061 - DNA, 15 bp, Homo sapiens
gtttctgttttctcc

SEQ ID NO: 2055062 - DNA, 15 bp, Homo sapiens
tttctgttttctccc

SEQ ID NO: 2055063 - DNA, 15 bp, Homo sapiens
ttctgttttctccca

SEQ ID NO: 2055064 - DNA, 15 bp, Homo sapiens
tctgttttctcccag

SEQ ID NO: 2055065 - DNA, 15 bp, Homo sapiens
ctgttttctcccagt

SEQ ID NO: 2055066 - DNA, 15 bp, Homo sapiens
tgttttctcccagta

SEQ ID NO: 2055067 - DNA, 15 bp, Homo sapiens
gttttctcccagtat

SEQ ID NO: 2055068 - DNA, 15 bp, Homo sapiens
ttttctcccagtatc

SEQ ID NO: 2055069 - DNA, 15 bp, Homo sapiens
tttctcccagtatcc

SEQ ID NO: 2055070 - DNA, 15 bp, Homo sapiens
ttctcccagtatcct

SEQ ID NO: 2055071 - DNA, 15 bp, Homo sapiens
tctcccagtatcctt

SEQ ID NO: 2055072 - DNA, 15 bp, Homo sapiens
ctcccagtatccttt

SEQ ID NO: 2055073 - DNA, 15 bp, Homo sapiens
tcccagtatcctttc

SEQ ID NO: 2055074 - DNA, 15 bp, Homo sapiens
cccagtatcctttcc

SEQ ID NO: 2055075 - DNA, 15 bp, Homo sapiens
ccagtatcctttccg

SEQ ID NO: 2055076 - DNA, 15 bp, Homo sapiens
cagtatcctttccgg

SEQ ID NO: 2055077 - DNA, 15 bp, Homo sapiens
agtatcctttccggc

SEQ ID NO: 2055078 - DNA, 15 bp, Homo sapiens
gtatcctttccggcc

SEQ ID NO: 2055079 - DNA, 15 bp, Homo sapiens
tatcctttccggccc

SEQ ID NO: 2055080 - DNA, 15 bp, Homo sapiens
atcctttccggcccc

SEQ ID NO: 2055081 - DNA, 15 bp, Homo sapiens
tcctttccggccccc

SEQ ID NO: 2055082 - DNA, 15 bp, Homo sapiens
cctttccggccccct

SEQ ID NO: 2055083 - DNA, 15 bp, Homo sapiens
ctttccggccccctt

SEQ ID NO: 2055084 - DNA, 15 bp, Homo sapiens
tttccggcccccttt

SEQ ID NO: 2055085 - DNA, 15 bp, Homo sapiens
ttccggccccctttc

SEQ ID NO: 2055086 - DNA, 15 bp, Homo sapiens
tccggccccctttct

SEQ ID NO: 2055087 - DNA, 15 bp, Homo sapiens
ccggccccctttctc

SEQ ID NO: 2055088 - DNA, 15 bp, Homo sapiens
cggccccctttctct

SEQ ID NO: 2055089 - DNA, 15 bp, Homo sapiens
ggccccctttctctc

SEQ ID NO: 2055090 - DNA, 15 bp, Homo sapiens
gccccctttctctct

SEQ ID NO: 2055091 - DNA, 15 bp, Homo sapiens
cccctttctctcttc

SEQ ID NO: 2055092 - DNA, 15 bp, Homo sapiens
ccctttctctcttct

SEQ ID NO: 2055093 - DNA, 15 bp, Homo sapiens
cctttctctcttctg

SEQ ID NO: 2055094 - DNA, 15 bp, Homo sapiens
ctttctctcttctgt

SEQ ID NO: 2055095 - DNA, 15 bp, Homo sapiens
tttctctcttctgtc

SEQ ID NO: 2055096 - DNA, 15 bp, Homo sapiens
ttctctcttctgtct

SEQ ID NO: 2055097 - DNA, 15 bp, Homo sapiens
tctctcttctgtctt

SEQ ID NO: 2055098 - DNA, 15 bp, Homo sapiens
ctctcttctgtcttt

SEQ ID NO: 2055099 - DNA, 15 bp, Homo sapiens
tctcttctgtctttc

SEQ ID NO: 2055100 - DNA, 15 bp, Homo sapiens
ctcttctgtctttcc

SEQ ID NO: 2055101 - DNA, 15 bp, Homo sapiens
tcttctgtctttcca

SEQ ID NO: 2055102 - DNA, 15 bp, Homo sapiens
cttctgtctttccaa

SEQ ID NO: 2055103 - DNA, 15 bp, Homo sapiens
ttctgtctttccaat

SEQ ID NO: 2055104 - DNA, 15 bp, Homo sapiens
tctgtctttccaatg

SEQ ID NO: 2055105 - DNA, 15 bp, Homo sapiens
ctgtctttccaatga

SEQ ID NO: 2055106 - DNA, 15 bp, Homo sapiens
tgtctttccaatgag

SEQ ID NO: 2055107 - DNA, 15 bp, Homo sapiens
gtctttccaatgagc

SEQ ID NO: 2055108 - DNA, 15 bp, Homo sapiens
tctttccaatgagca

SEQ ID NO: 2055109 - DNA, 15 bp, Homo sapiens
ctttccaatgagcag

SEQ ID NO: 2055110 - DNA, 15 bp, Homo sapiens
tttccaatgagcaga

SEQ ID NO: 2055111 - DNA, 15 bp, Homo sapiens
ttccaatgagcagaa

SEQ ID NO: 2055112 - DNA, 15 bp, Homo sapiens
tccaatgagcagaac

SEQ ID NO: 2055113 - DNA, 15 bp, Homo sapiens
ccaatgagcagaacc

SEQ ID NO: 2055114 - DNA, 15 bp, Homo sapiens
caatgagcagaacca

SEQ ID NO: 2055115 - DNA, 15 bp, Homo sapiens
aatgagcagaaccac

SEQ ID NO: 2055116 - DNA, 15 bp, Homo sapiens
atgagcagaaccaca

SEQ ID NO: 2055117 - DNA, 15 bp, Homo sapiens
tgagcagaaccacat

SEQ ID NO: 2055118 - DNA, 15 bp, Homo sapiens
gagcagaaccacata

SEQ ID NO: 2055119 - DNA, 15 bp, Homo sapiens
agcagaaccacatac

SEQ ID NO: 2055120 - DNA, 15 bp, Homo sapiens
gcagaaccacataca

SEQ ID NO: 2055121 - DNA, 15 bp, Homo sapiens
cagaaccacatacac

SEQ ID NO: 2055122 - DNA, 15 bp, Homo sapiens
agaaccacatacaca

SEQ ID NO: 2055123 - DNA, 15 bp, Homo sapiens
gaaccacatacacaa

SEQ ID NO: 2055124 - DNA, 15 bp, Homo sapiens
aaccacatacacaac

SEQ ID NO: 2055125 - DNA, 15 bp, Homo sapiens
accacatacacaacc

SEQ ID NO: 2055126 - DNA, 15 bp, Homo sapiens
ccacatacacaaccc

SEQ ID NO: 2055127 - DNA, 15 bp, Homo sapiens
cacatacacaacccc

SEQ ID NO: 2055128 - DNA, 15 bp, Homo sapiens
acatacacaaccccc

SEQ ID NO: 2055129 - DNA, 15 bp, Homo sapiens
catacacaaccccca

SEQ ID NO: 2055130 - DNA, 15 bp, Homo sapiens
atacacaacccccaa

SEQ ID NO: 2055131 - DNA, 15 bp, Homo sapiens
tacacaacccccaaa

SEQ ID NO: 2055132 - DNA, 15 bp, Homo sapiens
acacaacccccaaat

SEQ ID NO: 2055133 - DNA, 15 bp, Homo sapiens
cacaacccccaaata

SEQ ID NO: 2055134 - DNA, 15 bp, Homo sapiens
acaacccccaaatag

SEQ ID NO: 2055135 - DNA, 15 bp, Homo sapiens
caacccccaaatagc

SEQ ID NO: 2055136 - DNA, 15 bp, Homo sapiens
aacccccaaatagct

SEQ ID NO: 2055137 - DNA, 15 bp, Homo sapiens
acccccaaatagctt

SEQ ID NO: 2055138 - DNA, 15 bp, Homo sapiens
cccccaaatagcttt

SEQ ID NO: 2055139 - DNA, 15 bp, Homo sapiens
ccccaaatagctttc

SEQ ID NO: 2055140 - DNA, 15 bp, Homo sapiens
cccaaatagctttca

SEQ ID NO: 2055141 - DNA, 15 bp, Homo sapiens
ccaaatagctttcac

SEQ ID NO: 2055142 - DNA, 15 bp, Homo sapiens
caaatagctttcaca

SEQ ID NO: 2055143 - DNA, 15 bp, Homo sapiens
aaatagctttcacag

SEQ ID NO: 2055144 - DNA, 15 bp, Homo sapiens
aatagctttcacagg

SEQ ID NO: 2055145 - DNA, 15 bp, Homo sapiens
atagctttcacaggc

SEQ ID NO: 2055146 - DNA, 15 bp, Homo sapiens
tagctttcacaggca

SEQ ID NO: 2055147 - DNA, 15 bp, Homo sapiens
agctttcacaggcac

SEQ ID NO: 2055148 - DNA, 15 bp, Homo sapiens
gctttcacaggcaca

SEQ ID NO: 2055149 - DNA, 15 bp, Homo sapiens
ctttcacaggcacac

SEQ ID NO: 2055150 - DNA, 15 bp, Homo sapiens
tttcacaggcacacc

SEQ ID NO: 2055151 - DNA, 15 bp, Homo sapiens
ttcacaggcacacca

SEQ ID NO: 2055152 - DNA, 15 bp, Homo sapiens
tcacaggcacaccac

SEQ ID NO: 2055153 - DNA, 15 bp, Homo sapiens
cacaggcacaccacc

SEQ ID NO: 2055154 - DNA, 15 bp, Homo sapiens
acaggcacaccacca

SEQ ID NO: 2055155 - DNA, 15 bp, Homo sapiens
caggcacaccaccaa

SEQ ID NO: 2055156 - DNA, 15 bp, Homo sapiens
aggcacaccaccaat

SEQ ID NO: 2055157 - DNA, 15 bp, Homo sapiens
ggcacaccaccaatg

SEQ ID NO: 2055158 - DNA, 15 bp, Homo sapiens
gcacaccaccaatgc

SEQ ID NO: 2055159 - DNA, 15 bp, Homo sapiens
cacaccaccaatgca

SEQ ID NO: 2055160 - DNA, 15 bp, Homo sapiens
acaccaccaatgcaa

SEQ ID NO: 2055161 - DNA, 15 bp, Homo sapiens
caccaccaatgcaat

SEQ ID NO: 2055162 - DNA, 15 bp, Homo sapiens
accaccaatgcaatc

SEQ ID NO: 2055163 - DNA, 15 bp, Homo sapiens
ccaccaatgcaatct

SEQ ID NO: 2055164 - DNA, 15 bp, Homo sapiens
caccaatgcaatcta

SEQ ID NO: 2055165 - DNA, 15 bp, Homo sapiens
accaatgcaatctaa

SEQ ID NO: 2055166 - DNA, 15 bp, Homo sapiens
ccaatgcaatctaag

SEQ ID NO: 2055167 - DNA, 15 bp, Homo sapiens
caatgcaatctaagt

SEQ ID NO: 2055168 - DNA, 15 bp, Homo sapiens
aatgcaatctaagta

SEQ ID NO: 2055169 - DNA, 15 bp, Homo sapiens
atgcaatctaagtat

SEQ ID NO: 2055170 - DNA, 15 bp, Homo sapiens
tgcaatctaagtatt

SEQ ID NO: 2055171 - DNA, 15 bp, Homo sapiens
gcaatctaagtattt

SEQ ID NO: 2055172 - DNA, 15 bp, Homo sapiens
caatctaagtattta

SEQ ID NO: 2055173 - DNA, 15 bp, Homo sapiens
aatctaagtatttag

SEQ ID NO: 2055174 - DNA, 15 bp, Homo sapiens
atctaagtatttagc

SEQ ID NO: 2055175 - DNA, 15 bp, Homo sapiens
tctaagtatttagcc

SEQ ID NO: 2055176 - DNA, 15 bp, Homo sapiens
ctaagtatttagcca

SEQ ID NO: 2055177 - DNA, 15 bp, Homo sapiens
taagtatttagccat

SEQ ID NO: 2055178 - DNA, 15 bp, Homo sapiens
aagtatttagccatg

SEQ ID NO: 2055179 - DNA, 15 bp, Homo sapiens
agtatttagccatgt

SEQ ID NO: 2055180 - DNA, 15 bp, Homo sapiens
gtatttagccatgtt

SEQ ID NO: 2055181 - DNA, 15 bp, Homo sapiens
tatttagccatgttg

SEQ ID NO: 2055182 - DNA, 15 bp, Homo sapiens
atttagccatgttga

SEQ ID NO: 2055183 - DNA, 15 bp, Homo sapiens
tttagccatgttgag

SEQ ID NO: 2055184 - DNA, 15 bp, Homo sapiens
ttagccatgttgaga

SEQ ID NO: 2055185 - DNA, 15 bp, Homo sapiens
tagccatgttgagaa

SEQ ID NO: 2055186 - DNA, 15 bp, Homo sapiens
agccatgttgagaat

SEQ ID NO: 2055187 - DNA, 15 bp, Homo sapiens
gccatgttgagaatt

SEQ ID NO: 2055188 - DNA, 15 bp, Homo sapiens
ccatgttgagaattt

SEQ ID NO: 2055189 - DNA, 15 bp, Homo sapiens
catgttgagaatttt

SEQ ID NO: 2055190 - DNA, 15 bp, Homo sapiens
atgttgagaattttc

SEQ ID NO: 2055191 - DNA, 15 bp, Homo sapiens
tgttgagaattttca

SEQ ID NO: 2055192 - DNA, 15 bp, Homo sapiens
gttgagaattttcaa

SEQ ID NO: 2055193 - DNA, 15 bp, Homo sapiens
ttgagaattttcaac

SEQ ID NO: 2055194 - DNA, 15 bp, Homo sapiens
tgagaattttcaaca

SEQ ID NO: 2055195 - DNA, 15 bp, Homo sapiens
gagaattttcaacaa

SEQ ID NO: 2055196 - DNA, 15 bp, Homo sapiens
agaattttcaacaac

SEQ ID NO: 2055197 - DNA, 15 bp, Homo sapiens
gaattttcaacaact

SEQ ID NO: 2055198 - DNA, 15 bp, Homo sapiens
aattttcaacaacta

SEQ ID NO: 2055199 - DNA, 15 bp, Homo sapiens
attttcaacaactaa

SEQ ID NO: 2055200 - DNA, 15 bp, Homo sapiens
ttttcaacaactaac

SEQ ID NO: 2055201 - DNA, 15 bp, Homo sapiens
tttcaacaactaact

SEQ ID NO: 2055202 - DNA, 15 bp, Homo sapiens
ttcaacaactaactg

SEQ ID NO: 2055203 - DNA, 15 bp, Homo sapiens
tcaacaactaactgt

SEQ ID NO: 2055204 - DNA, 15 bp, Homo sapiens
caacaactaactgtg

SEQ ID NO: 2055205 - DNA, 15 bp, Homo sapiens
aacaactaactgtgt

SEQ ID NO: 2055206 - DNA, 15 bp, Homo sapiens
acaactaactgtgtt

SEQ ID NO: 2055207 - DNA, 15 bp, Homo sapiens
caactaactgtgttg

SEQ ID NO: 2055208 - DNA, 15 bp, Homo sapiens
aactaactgtgttga

SEQ ID NO: 2055209 - DNA, 15 bp, Homo sapiens
actaactgtgttgat

SEQ ID NO: 2055210 - DNA, 15 bp, Homo sapiens
ctaactgtgttgatg

SEQ ID NO: 2055211 - DNA, 15 bp, Homo sapiens
taactgtgttgatgt

SEQ ID NO: 2055212 - DNA, 15 bp, Homo sapiens
aactgtgttgatgtg

SEQ ID NO: 2055213 - DNA, 15 bp, Homo sapiens
actgtgttgatgtgg

SEQ ID NO: 2055214 - DNA, 15 bp, Homo sapiens
ctgtgttgatgtggc

SEQ ID NO: 2055215 - DNA, 15 bp, Homo sapiens
tgtgttgatgtggca

SEQ ID NO: 2055216 - DNA, 15 bp, Homo sapiens
gtgttgatgtggcat

SEQ ID NO: 2055217 - DNA, 15 bp, Homo sapiens
tgttgatgtggcatt

SEQ ID NO: 2055218 - DNA, 15 bp, Homo sapiens
gttgatgtggcattg

SEQ ID NO: 2055219 - DNA, 15 bp, Homo sapiens
ttgatgtggcattgt

SEQ ID NO: 2055220 - DNA, 15 bp, Homo sapiens
tgatgtggcattgta

SEQ ID NO: 2055221 - DNA, 15 bp, Homo sapiens
gatgtggcattgtaa

SEQ ID NO: 2055222 - DNA, 15 bp, Homo sapiens
atgtggcattgtaat

SEQ ID NO: 2055223 - DNA, 15 bp, Homo sapiens
tgtggcattgtaatt

SEQ ID NO: 2055224 - DNA, 15 bp, Homo sapiens
gtggcattgtaattg

SEQ ID NO: 2055225 - DNA, 15 bp, Homo sapiens
tggcattgtaattgt

SEQ ID NO: 2055226 - DNA, 15 bp, Homo sapiens
ggcattgtaattgtt

SEQ ID NO: 2055227 - DNA, 15 bp, Homo sapiens
gcattgtaattgtta

SEQ ID NO: 2055228 - DNA, 15 bp, Homo sapiens
cattgtaattgttag

SEQ ID NO: 2055229 - DNA, 15 bp, Homo sapiens
attgtaattgttaga

SEQ ID NO: 2055230 - DNA, 15 bp, Homo sapiens
ttgtaattgttagaa

SEQ ID NO: 2055231 - DNA, 15 bp, Homo sapiens
tgtaattgttagaaa

SEQ ID NO: 2055232 - DNA, 15 bp, Homo sapiens
gtaattgttagaaaa

SEQ ID NO: 2055233 - DNA, 15 bp, Homo sapiens
taattgttagaaaat

SEQ ID NO: 2055234 - DNA, 15 bp, Homo sapiens
aattgttagaaaatg

SEQ ID NO: 2055235 - DNA, 15 bp, Homo sapiens
attgttagaaaatgg

SEQ ID NO: 2055236 - DNA, 15 bp, Homo sapiens
ttgttagaaaatggt

SEQ ID NO: 2055237 - DNA, 15 bp, Homo sapiens
tgttagaaaatggtt

SEQ ID NO: 2055238 - DNA, 15 bp, Homo sapiens
gttagaaaatggtta

SEQ ID NO: 2055239 - DNA, 15 bp, Homo sapiens
ttagaaaatggttaa

SEQ ID NO: 2055240 - DNA, 15 bp, Homo sapiens
tagaaaatggttaat

SEQ ID NO: 2055241 - DNA, 15 bp, Homo sapiens
agaaaatggttaata

SEQ ID NO: 2055242 - DNA, 15 bp, Homo sapiens
gaaaatggttaatac

SEQ ID NO: 2055243 - DNA, 15 bp, Homo sapiens
aaaatggttaataca

SEQ ID NO: 2055244 - DNA, 15 bp, Homo sapiens
aaatggttaatacag

SEQ ID NO: 2055245 - DNA, 15 bp, Homo sapiens
aatggttaatacagg

SEQ ID NO: 2055246 - DNA, 15 bp, Homo sapiens
atggttaatacagga

SEQ ID NO: 2055247 - DNA, 15 bp, Homo sapiens
tggttaatacaggaa

SEQ ID NO: 2055248 - DNA, 15 bp, Homo sapiens
ggttaatacaggaag

SEQ ID NO: 2055249 - DNA, 15 bp, Homo sapiens
gttaatacaggaagg

SEQ ID NO: 2055250 - DNA, 15 bp, Homo sapiens
ttaatacaggaaggt

SEQ ID NO: 2055251 - DNA, 15 bp, Homo sapiens
taatacaggaaggtt

SEQ ID NO: 2055252 - DNA, 15 bp, Homo sapiens
aatacaggaaggtta

SEQ ID NO: 2055253 - DNA, 15 bp, Homo sapiens
atacaggaaggttac

SEQ ID NO: 2055254 - DNA, 15 bp, Homo sapiens
tacaggaaggttact

SEQ ID NO: 2055255 - DNA, 15 bp, Homo sapiens
acaggaaggttactg

SEQ ID NO: 2055256 - DNA, 15 bp, Homo sapiens
caggaaggttactgt

SEQ ID NO: 2055257 - DNA, 15 bp, Homo sapiens
aggaaggttactgtg

SEQ ID NO: 2055258 - DNA, 15 bp, Homo sapiens
ggaaggttactgtga

SEQ ID NO: 2055259 - DNA, 15 bp, Homo sapiens
gaaggttactgtgaa

SEQ ID NO: 2055260 - DNA, 15 bp, Homo sapiens
aaggttactgtgaac

SEQ ID NO: 2055261 - DNA, 15 bp, Homo sapiens
aggttactgtgaaca

SEQ ID NO: 2055262 - DNA, 15 bp, Homo sapiens
ggttactgtgaacat

SEQ ID NO: 2055263 - DNA, 15 bp, Homo sapiens
gttactgtgaacatg

SEQ ID NO: 2055264 - DNA, 15 bp, Homo sapiens
ttactgtgaacatgt

SEQ ID NO: 2055265 - DNA, 15 bp, Homo sapiens
tactgtgaacatgtt

SEQ ID NO: 2055266 - DNA, 15 bp, Homo sapiens
actgtgaacatgttt

SEQ ID NO: 2055267 - DNA, 15 bp, Homo sapiens
ctgtgaacatgtttg

SEQ ID NO: 2055268 - DNA, 15 bp, Homo sapiens
tgtgaacatgtttgt

SEQ ID NO: 2055269 - DNA, 15 bp, Homo sapiens
gtgaacatgtttgta

SEQ ID NO: 2055270 - DNA, 15 bp, Homo sapiens
tgaacatgtttgtat

SEQ ID NO: 2055271 - DNA, 15 bp, Homo sapiens
gaacatgtttgtatg

SEQ ID NO: 2055272 - DNA, 15 bp, Homo sapiens
aacatgtttgtatgc

SEQ ID NO: 2055273 - DNA, 15 bp, Homo sapiens
acatgtttgtatgct

SEQ ID NO: 2055274 - DNA, 15 bp, Homo sapiens
catgtttgtatgcta

SEQ ID NO: 2055275 - DNA, 15 bp, Homo sapiens
atgtttgtatgctac

SEQ ID NO: 2055276 - DNA, 15 bp, Homo sapiens
tgtttgtatgctacc

SEQ ID NO: 2055277 - DNA, 15 bp, Homo sapiens
gtttgtatgctacca

SEQ ID NO: 2055278 - DNA, 15 bp, Homo sapiens
tttgtatgctaccac

SEQ ID NO: 2055279 - DNA, 15 bp, Homo sapiens
ttgtatgctaccaca

SEQ ID NO: 2055280 - DNA, 15 bp, Homo sapiens
tgtatgctaccacat

SEQ ID NO: 2055281 - DNA, 15 bp, Homo sapiens
gtatgctaccacata

SEQ ID NO: 2055282 - DNA, 15 bp, Homo sapiens
tatgctaccacatac

SEQ ID NO: 2055283 - DNA, 15 bp, Homo sapiens
atgctaccacatacc

SEQ ID NO: 2055284 - DNA, 15 bp, Homo sapiens
tgctaccacatacct

SEQ ID NO: 2055285 - DNA, 15 bp, Homo sapiens
gctaccacatacctc

SEQ ID NO: 2055286 - DNA, 15 bp, Homo sapiens
ctaccacatacctca

SEQ ID NO: 2055287 - DNA, 15 bp, Homo sapiens
taccacatacctcaa

SEQ ID NO: 2055288 - DNA, 15 bp, Homo sapiens
accacatacctcaaa

SEQ ID NO: 2055289 - DNA, 15 bp, Homo sapiens
ccacatacctcaaag

SEQ ID NO: 2055290 - DNA, 15 bp, Homo sapiens
cacatacctcaaagg

SEQ ID NO: 2055291 - DNA, 15 bp, Homo sapiens
acatacctcaaaggg

SEQ ID NO: 2055292 - DNA, 15 bp, Homo sapiens
catacctcaaagggt

SEQ ID NO: 2055293 - DNA, 15 bp, Homo sapiens
atacctcaaagggtt

SEQ ID NO: 2055294 - DNA, 15 bp, Homo sapiens
tacctcaaagggttt

SEQ ID NO: 2055295 - DNA, 15 bp, Homo sapiens
acctcaaagggtttc

SEQ ID NO: 2055296 - DNA, 15 bp, Homo sapiens
cctcaaagggtttct

SEQ ID NO: 2055297 - DNA, 15 bp, Homo sapiens
ctcaaagggtttctc

SEQ ID NO: 2055298 - DNA, 15 bp, Homo sapiens
tcaaagggtttctct

SEQ ID NO: 2055299 - DNA, 15 bp, Homo sapiens
caaagggtttctctt

SEQ ID NO: 2055300 - DNA, 15 bp, Homo sapiens
aaagggtttctcttt

SEQ ID NO: 2055301 - DNA, 15 bp, Homo sapiens
aagggtttctctttc

SEQ ID NO: 2055302 - DNA, 15 bp, Homo sapiens
agggtttctctttct

SEQ ID NO: 2055303 - DNA, 15 bp, Homo sapiens
gggtttctctttctc

SEQ ID NO: 2055304 - DNA, 15 bp, Homo sapiens
ggtttctctttctct

SEQ ID NO: 2055305 - DNA, 15 bp, Homo sapiens
gtttctctttctctt

SEQ ID NO: 2055306 - DNA, 15 bp, Homo sapiens
tttctctttctcttt

SEQ ID NO: 2055307 - DNA, 15 bp, Homo sapiens
ttctctttctcttta

SEQ ID NO: 2055308 - DNA, 15 bp, Homo sapiens
tctctttctctttac

SEQ ID NO: 2055309 - DNA, 15 bp, Homo sapiens
ctctttctctttacc

SEQ ID NO: 2055310 - DNA, 15 bp, Homo sapiens
tctttctctttaccc

SEQ ID NO: 2055311 - DNA, 15 bp, Homo sapiens
ctttctctttacccc

SEQ ID NO: 2055312 - DNA, 15 bp, Homo sapiens
tttctctttacccct

SEQ ID NO: 2055313 - DNA, 15 bp, Homo sapiens
ttctctttaccccta

SEQ ID NO: 2055314 - DNA, 15 bp, Homo sapiens
tctctttacccctac

SEQ ID NO: 2055315 - DNA, 15 bp, Homo sapiens
ctctttacccctacc

SEQ ID NO: 2055316 - DNA, 15 bp, Homo sapiens
tctttacccctaccc

SEQ ID NO: 2055317 - DNA, 15 bp, Homo sapiens
ctttacccctaccca

SEQ ID NO: 2055318 - DNA, 15 bp, Homo sapiens
tttacccctacccag

SEQ ID NO: 2055319 - DNA, 15 bp, Homo sapiens
ttacccctacccagt

SEQ ID NO: 2055320 - DNA, 15 bp, Homo sapiens
tacccctacccagtg

SEQ ID NO: 2055321 - DNA, 15 bp, Homo sapiens
acccctacccagtgc

SEQ ID NO: 2055322 - DNA, 15 bp, Homo sapiens
cccctacccagtgct

SEQ ID NO: 2055323 - DNA, 15 bp, Homo sapiens
ccctacccagtgcta

SEQ ID NO: 2055324 - DNA, 15 bp, Homo sapiens
cctacccagtgctaa

SEQ ID NO: 2055325 - DNA, 15 bp, Homo sapiens
ctacccagtgctaaa

SEQ ID NO: 2055326 - DNA, 15 bp, Homo sapiens
tacccagtgctaaat

SEQ ID NO: 2055327 - DNA, 15 bp, Homo sapiens
acccagtgctaaatg

SEQ ID NO: 2055328 - DNA, 15 bp, Homo sapiens
cccagtgctaaatga

SEQ ID NO: 2055329 - DNA, 15 bp, Homo sapiens
ccagtgctaaatgat

SEQ ID NO: 2055330 - DNA, 15 bp, Homo sapiens
cagtgctaaatgatg

SEQ ID NO: 2055331 - DNA, 15 bp, Homo sapiens
agtgctaaatgatgg

SEQ ID NO: 2055332 - DNA, 15 bp, Homo sapiens
gtgctaaatgatggc

SEQ ID NO: 2055333 - DNA, 15 bp, Homo sapiens
tgctaaatgatggcc

SEQ ID NO: 2055334 - DNA, 15 bp, Homo sapiens
gctaaatgatggcca

SEQ ID NO: 2055335 - DNA, 15 bp, Homo sapiens
ctaaatgatggccat

SEQ ID NO: 2055336 - DNA, 15 bp, Homo sapiens
taaatgatggccatg

SEQ ID NO: 2055337 - DNA, 15 bp, Homo sapiens
aaatgatggccatga

SEQ ID NO: 2055338 - DNA, 15 bp, Homo sapiens
aatgatggccatgag

SEQ ID NO: 2055339 - DNA, 15 bp, Homo sapiens
atgatggccatgagt

SEQ ID NO: 2055340 - DNA, 15 bp, Homo sapiens
tgatggccatgagtg

SEQ ID NO: 2055341 - DNA, 15 bp, Homo sapiens
gatggccatgagtgg

SEQ ID NO: 2055342 - DNA, 15 bp, Homo sapiens
atggccatgagtggg

SEQ ID NO: 2055343 - DNA, 15 bp, Homo sapiens
tggccatgagtgggt

SEQ ID NO: 2055344 - DNA, 15 bp, Homo sapiens
ggccatgagtgggtt

SEQ ID NO: 2055345 - DNA, 15 bp, Homo sapiens
gccatgagtgggttg

SEQ ID NO: 2055346 - DNA, 15 bp, Homo sapiens
ccatgagtgggttgg

SEQ ID NO: 2055347 - DNA, 15 bp, Homo sapiens
catgagtgggttggc

SEQ ID NO: 2055348 - DNA, 15 bp, Homo sapiens
atgagtgggttggct

SEQ ID NO: 2055349 - DNA, 15 bp, Homo sapiens
tgagtgggttggctt

SEQ ID NO: 2055350 - DNA, 15 bp, Homo sapiens
gagtgggttggcttt

SEQ ID NO: 2055351 - DNA, 15 bp, Homo sapiens
agtgggttggctttt

SEQ ID NO: 2055352 - DNA, 15 bp, Homo sapiens
gtgggttggcttttt

SEQ ID NO: 2055353 - DNA, 15 bp, Homo sapiens
tgggttggctttttg

SEQ ID NO: 2055354 - DNA, 15 bp, Homo sapiens
gggttggctttttgt

SEQ ID NO: 2055355 - DNA, 15 bp, Homo sapiens
ggttggctttttgtt

SEQ ID NO: 2055356 - DNA, 15 bp, Homo sapiens
gttggctttttgtta

SEQ ID NO: 2055357 - DNA, 15 bp, Homo sapiens
ttggctttttgttaa

SEQ ID NO: 2055358 - DNA, 15 bp, Homo sapiens
tggctttttgttaaa

SEQ ID NO: 2055359 - DNA, 15 bp, Homo sapiens
ggctttttgttaaat

SEQ ID NO: 2055360 - DNA, 15 bp, Homo sapiens
gctttttgttaaata

SEQ ID NO: 2055361 - DNA, 15 bp, Homo sapiens
ctttttgttaaatat

SEQ ID NO: 2055362 - DNA, 15 bp, Homo sapiens
tttttgttaaatatt

SEQ ID NO: 2055363 - DNA, 15 bp, Homo sapiens
ttttgttaaatattt

SEQ ID NO: 2055364 - DNA, 15 bp, Homo sapiens
tttgttaaatatttc

SEQ ID NO: 2055365 - DNA, 15 bp, Homo sapiens
ttgttaaatatttcc

SEQ ID NO: 2055366 - DNA, 15 bp, Homo sapiens
tgttaaatatttcca

SEQ ID NO: 2055367 - DNA, 15 bp, Homo sapiens
gttaaatatttccaa

SEQ ID NO: 2055368 - DNA, 15 bp, Homo sapiens
ttaaatatttccaaa

SEQ ID NO: 2055369 - DNA, 15 bp, Homo sapiens
taaatatttccaaaa

SEQ ID NO: 2055370 - DNA, 15 bp, Homo sapiens
aaatatttccaaaaa

SEQ ID NO: 2055371 - DNA, 15 bp, Homo sapiens
aatatttccaaaaac

SEQ ID NO: 2055372 - DNA, 15 bp, Homo sapiens
atatttccaaaaact

SEQ ID NO: 2055373 - DNA, 15 bp, Homo sapiens
tatttccaaaaactt

SEQ ID NO: 2055374 - DNA, 15 bp, Homo sapiens
atttccaaaaacttt

SEQ ID NO: 2055375 - DNA, 15 bp, Homo sapiens
tttccaaaaactttt

SEQ ID NO: 2055376 - DNA, 15 bp, Homo sapiens
ttccaaaaacttttt

SEQ ID NO: 2055377 - DNA, 15 bp, Homo sapiens
tccaaaaactttttc

SEQ ID NO: 2055378 - DNA, 15 bp, Homo sapiens
ccaaaaactttttct

SEQ ID NO: 2055379 - DNA, 15 bp, Homo sapiens
caaaaactttttctg

SEQ ID NO: 2055380 - DNA, 15 bp, Homo sapiens
aaaaactttttctgt

SEQ ID NO: 2055381 - DNA, 15 bp, Homo sapiens
aaaactttttctgtt

SEQ ID NO: 2055382 - DNA, 15 bp, Homo sapiens
aaactttttctgttt

SEQ ID NO: 2055383 - DNA, 15 bp, Homo sapiens
aactttttctgtttg

SEQ ID NO: 2055384 - DNA, 15 bp, Homo sapiens
actttttctgtttga

SEQ ID NO: 2055385 - DNA, 15 bp, Homo sapiens
ctttttctgtttgat

SEQ ID NO: 2055386 - DNA, 15 bp, Homo sapiens
tttttctgtttgatt

SEQ ID NO: 2055387 - DNA, 15 bp, Homo sapiens
ttttctgtttgattt

SEQ ID NO: 2055388 - DNA, 15 bp, Homo sapiens
tttctgtttgatttc

SEQ ID NO: 2055389 - DNA, 15 bp, Homo sapiens
ttctgtttgatttca

SEQ ID NO: 2055390 - DNA, 15 bp, Homo sapiens
tctgtttgatttcag

SEQ ID NO: 2055391 - DNA, 15 bp, Homo sapiens
ctgtttgatttcagt

SEQ ID NO: 2055392 - DNA, 15 bp, Homo sapiens
tgtttgatttcagta

SEQ ID NO: 2055393 - DNA, 15 bp, Homo sapiens
gtttgatttcagtac

SEQ ID NO: 2055394 - DNA, 15 bp, Homo sapiens
tttgatttcagtacg

SEQ ID NO: 2055395 - DNA, 15 bp, Homo sapiens
ttgatttcagtacga

SEQ ID NO: 2055396 - DNA, 15 bp, Homo sapiens
tgatttcagtacgaa

SEQ ID NO: 2055397 - DNA, 15 bp, Homo sapiens
gatttcagtacgaag

SEQ ID NO: 2055398 - DNA, 15 bp, Homo sapiens
atttcagtacgaagc

SEQ ID NO: 2055399 - DNA, 15 bp, Homo sapiens
tttcagtacgaagcc

SEQ ID NO: 2055400 - DNA, 15 bp, Homo sapiens
ttcagtacgaagcca

SEQ ID NO: 2055401 - DNA, 15 bp, Homo sapiens
tcagtacgaagccaa

SEQ ID NO: 2055402 - DNA, 15 bp, Homo sapiens
cagtacgaagccaat

SEQ ID NO: 2055403 - DNA, 15 bp, Homo sapiens
agtacgaagccaatg

SEQ ID NO: 2055404 - DNA, 15 bp, Homo sapiens
gtacgaagccaatgg

SEQ ID NO: 2055405 - DNA, 15 bp, Homo sapiens
tacgaagccaatgga

SEQ ID NO: 2055406 - DNA, 15 bp, Homo sapiens
acgaagccaatggac

SEQ ID NO: 2055407 - DNA, 15 bp, Homo sapiens
cgaagccaatggact

SEQ ID NO: 2055408 - DNA, 15 bp, Homo sapiens
gaagccaatggacta

SEQ ID NO: 2055409 - DNA, 15 bp, Homo sapiens
aagccaatggactat

SEQ ID NO: 2055410 - DNA, 15 bp, Homo sapiens
agccaatggactatg

SEQ ID NO: 2055411 - DNA, 15 bp, Homo sapiens
gccaatggactatgt

SEQ ID NO: 2055412 - DNA, 15 bp, Homo sapiens
ccaatggactatgta

SEQ ID NO: 2055413 - DNA, 15 bp, Homo sapiens
caatggactatgtag

SEQ ID NO: 2055414 - DNA, 15 bp, Homo sapiens
aatggactatgtaga

SEQ ID NO: 2055415 - DNA, 15 bp, Homo sapiens
atggactatgtagat

SEQ ID NO: 2055416 - DNA, 15 bp, Homo sapiens
tggactatgtagatg

SEQ ID NO: 2055417 - DNA, 15 bp, Homo sapiens
ggactatgtagatgt

SEQ ID NO: 2055418 - DNA, 15 bp, Homo sapiens
gactatgtagatgtg

SEQ ID NO: 2055419 - DNA, 15 bp, Homo sapiens
actatgtagatgtgt

SEQ ID NO: 2055420 - DNA, 15 bp, Homo sapiens
ctatgtagatgtgta

SEQ ID NO: 2055421 - DNA, 15 bp, Homo sapiens
tatgtagatgtgtag

SEQ ID NO: 2055422 - DNA, 15 bp, Homo sapiens
tgtagatgtgtagag

SEQ ID NO: 2055423 - DNA, 15 bp, Homo sapiens
gtagatgtgtagaga

SEQ ID NO: 2055424 - DNA, 15 bp, Homo sapiens
tagatgtgtagagag

SEQ ID NO: 2055425 - DNA, 15 bp, Homo sapiens
agatgtgtagagaga

SEQ ID NO: 2055426 - DNA, 15 bp, Homo sapiens
gatgtgtagagagat

SEQ ID NO: 2055427 - DNA, 15 bp, Homo sapiens
atgtgtagagagatg

SEQ ID NO: 2055428 - DNA, 15 bp, Homo sapiens
tgtgtagagagatgt

SEQ ID NO: 2055429 - DNA, 15 bp, Homo sapiens
gtgtagagagatgtc

SEQ ID NO: 2055430 - DNA, 15 bp, Homo sapiens
tgtagagagatgtct

SEQ ID NO: 2055431 - DNA, 15 bp, Homo sapiens
gtagagagatgtctg

SEQ ID NO: 2055432 - DNA, 15 bp, Homo sapiens
tagagagatgtctga

SEQ ID NO: 2055433 - DNA, 15 bp, Homo sapiens
agagagatgtctgag

SEQ ID NO: 2055434 - DNA, 15 bp, Homo sapiens
gagagatgtctgagt

SEQ ID NO: 2055435 - DNA, 15 bp, Homo sapiens
agagatgtctgagtt

SEQ ID NO: 2055436 - DNA, 15 bp, Homo sapiens
gagatgtctgagttt

SEQ ID NO: 2055437 - DNA, 15 bp, Homo sapiens
agatgtctgagtttt

SEQ ID NO: 2055438 - DNA, 15 bp, Homo sapiens
gatgtctgagtttta

SEQ ID NO: 2055439 - DNA, 15 bp, Homo sapiens
atgtctgagttttat

SEQ ID NO: 2055440 - DNA, 15 bp, Homo sapiens
tgtctgagttttatc

SEQ ID NO: 2055441 - DNA, 15 bp, Homo sapiens
gtctgagttttatct

SEQ ID NO: 2055442 - DNA, 15 bp, Homo sapiens
tctgagttttatcta

SEQ ID NO: 2055443 - DNA, 15 bp, Homo sapiens
ctgagttttatctat

SEQ ID NO: 2055444 - DNA, 15 bp, Homo sapiens
tgagttttatctatt

SEQ ID NO: 2055445 - DNA, 15 bp, Homo sapiens
gagttttatctattg

SEQ ID NO: 2055446 - DNA, 15 bp, Homo sapiens
agttttatctattgc

SEQ ID NO: 2055447 - DNA, 15 bp, Homo sapiens
gttttatctattgcg

SEQ ID NO: 2055448 - DNA, 15 bp, Homo sapiens
ttttatctattgcgt

SEQ ID NO: 2055449 - DNA, 15 bp, Homo sapiens
tttatctattgcgtg

SEQ ID NO: 2055450 - DNA, 15 bp, Homo sapiens
ttatctattgcgtga

SEQ ID NO: 2055451 - DNA, 15 bp, Homo sapiens
tatctattgcgtgag

SEQ ID NO: 2055452 - DNA, 15 bp, Homo sapiens
atctattgcgtgagt

SEQ ID NO: 2055453 - DNA, 15 bp, Homo sapiens
tctattgcgtgagtt

SEQ ID NO: 2055454 - DNA, 15 bp, Homo sapiens
ctattgcgtgagttg

SEQ ID NO: 2055455 - DNA, 15 bp, Homo sapiens
tattgcgtgagttgt

SEQ ID NO: 2055456 - DNA, 15 bp, Homo sapiens
attgcgtgagttgta

SEQ ID NO: 2055457 - DNA, 15 bp, Homo sapiens
ttgcgtgagttgtag

SEQ ID NO: 2055458 - DNA, 15 bp, Homo sapiens
tgcgtgagttgtagg

SEQ ID NO: 2055459 - DNA, 15 bp, Homo sapiens
gcgtgagttgtaggt

SEQ ID NO: 2055460 - DNA, 15 bp, Homo sapiens
cgtgagttgtaggta

SEQ ID NO: 2055461 - DNA, 15 bp, Homo sapiens
gtgagttgtaggtat

SEQ ID NO: 2055462 - DNA, 15 bp, Homo sapiens
tgagttgtaggtatg

SEQ ID NO: 2055463 - DNA, 15 bp, Homo sapiens
gagttgtaggtatga

SEQ ID NO: 2055464 - DNA, 15 bp, Homo sapiens
agttgtaggtatgat

SEQ ID NO: 2055465 - DNA, 15 bp, Homo sapiens
gttgtaggtatgata

SEQ ID NO: 2055466 - DNA, 15 bp, Homo sapiens
ttgtaggtatgatac

SEQ ID NO: 2055467 - DNA, 15 bp, Homo sapiens
tgtaggtatgataca

SEQ ID NO: 2055468 - DNA, 15 bp, Homo sapiens
gtaggtatgatacaa

SEQ ID NO: 2055469 - DNA, 15 bp, Homo sapiens
taggtatgatacaat

SEQ ID NO: 2055470 - DNA, 15 bp, Homo sapiens
aggtatgatacaatg

SEQ ID NO: 2055471 - DNA, 15 bp, Homo sapiens
ggtatgatacaatgc

SEQ ID NO: 2055472 - DNA, 15 bp, Homo sapiens
gtatgatacaatgca

SEQ ID NO: 2055473 - DNA, 15 bp, Homo sapiens
tatgatacaatgcag

SEQ ID NO: 2055474 - DNA, 15 bp, Homo sapiens
atgatacaatgcagc

SEQ ID NO: 2055475 - DNA, 15 bp, Homo sapiens
tgatacaatgcagca

SEQ ID NO: 2055476 - DNA, 15 bp, Homo sapiens
gatacaatgcagcac

SEQ ID NO: 2055477 - DNA, 15 bp, Homo sapiens
atacaatgcagcact

SEQ ID NO: 2055478 - DNA, 15 bp, Homo sapiens
tacaatgcagcactt

SEQ ID NO: 2055479 - DNA, 15 bp, Homo sapiens
acaatgcagcacttc

SEQ ID NO: 2055480 - DNA, 15 bp, Homo sapiens
caatgcagcacttcc

SEQ ID NO: 2055481 - DNA, 15 bp, Homo sapiens
aatgcagcacttcca

SEQ ID NO: 2055482 - DNA, 15 bp, Homo sapiens
atgcagcacttccaa

SEQ ID NO: 2055483 - DNA, 15 bp, Homo sapiens
tgcagcacttccaaa

SEQ ID NO: 2055484 - DNA, 15 bp, Homo sapiens
gcagcacttccaaag

SEQ ID NO: 2055485 - DNA, 15 bp, Homo sapiens
cagcacttccaaagt

SEQ ID NO: 2055486 - DNA, 15 bp, Homo sapiens
agcacttccaaagtt

SEQ ID NO: 2055487 - DNA, 15 bp, Homo sapiens
gcacttccaaagttt

SEQ ID NO: 2055488 - DNA, 15 bp, Homo sapiens
cacttccaaagttta

SEQ ID NO: 2055489 - DNA, 15 bp, Homo sapiens
acttccaaagtttac

SEQ ID NO: 2055490 - DNA, 15 bp, Homo sapiens
cttccaaagtttact

SEQ ID NO: 2055491 - DNA, 15 bp, Homo sapiens
ttccaaagtttactg

SEQ ID NO: 2055492 - DNA, 15 bp, Homo sapiens
tccaaagtttactgc

SEQ ID NO: 2055493 - DNA, 15 bp, Homo sapiens
ccaaagtttactgca

SEQ ID NO: 2055494 - DNA, 15 bp, Homo sapiens
caaagtttactgcac

SEQ ID NO: 2055495 - DNA, 15 bp, Homo sapiens
aaagtttactgcacc

SEQ ID NO: 2055496 - DNA, 15 bp, Homo sapiens
aagtttactgcaccc

SEQ ID NO: 2055497 - DNA, 15 bp, Homo sapiens
agtttactgcaccca

SEQ ID NO: 2055498 - DNA, 15 bp, Homo sapiens
gtttactgcacccag

SEQ ID NO: 2055499 - DNA, 15 bp, Homo sapiens
tttactgcacccagg

SEQ ID NO: 2055500 - DNA, 15 bp, Homo sapiens
ttactgcacccaggt

SEQ ID NO: 2055501 - DNA, 15 bp, Homo sapiens
tactgcacccaggtc

SEQ ID NO: 2055502 - DNA, 15 bp, Homo sapiens
actgcacccaggtcg

SEQ ID NO: 2055503 - DNA, 15 bp, Homo sapiens
ctgcacccaggtcga

SEQ ID NO: 2055504 - DNA, 15 bp, Homo sapiens
tgcacccaggtcgag

SEQ ID NO: 2055505 - DNA, 15 bp, Homo sapiens
gcacccaggtcgagg

SEQ ID NO: 2055506 - DNA, 15 bp, Homo sapiens
cacccaggtcgaggc

SEQ ID NO: 2055507 - DNA, 15 bp, Homo sapiens
acccaggtcgaggct

SEQ ID NO: 2055508 - DNA, 15 bp, Homo sapiens
cccaggtcgaggctc

SEQ ID NO: 2055509 - DNA, 15 bp, Homo sapiens
ccaggtcgaggctca

SEQ ID NO: 2055510 - DNA, 15 bp, Homo sapiens
caggtcgaggctcag

SEQ ID NO: 2055511 - DNA, 15 bp, Homo sapiens
aggtcgaggctcagg

SEQ ID NO: 2055512 - DNA, 15 bp, Homo sapiens
ggtcgaggctcagga

SEQ ID NO: 2055513 - DNA, 15 bp, Homo sapiens
gtcgaggctcaggag

SEQ ID NO: 2055514 - DNA, 15 bp, Homo sapiens
tcgaggctcaggagt

SEQ ID NO: 2055515 - DNA, 15 bp, Homo sapiens
cgaggctcaggagtc

SEQ ID NO: 2055516 - DNA, 15 bp, Homo sapiens
gaggctcaggagtcc

SEQ ID NO: 2055517 - DNA, 15 bp, Homo sapiens
aggctcaggagtcct

SEQ ID NO: 2055518 - DNA, 15 bp, Homo sapiens
ggctcaggagtcctg

SEQ ID NO: 2055519 - DNA, 15 bp, Homo sapiens
gctcaggagtcctgt

SEQ ID NO: 2055520 - DNA, 15 bp, Homo sapiens
ctcaggagtcctgtc

SEQ ID NO: 2055521 - DNA, 15 bp, Homo sapiens
tcaggagtcctgtca

SEQ ID NO: 2055522 - DNA, 15 bp, Homo sapiens
caggagtcctgtcag

SEQ ID NO: 2055523 - DNA, 15 bp, Homo sapiens
aggagtcctgtcagg

SEQ ID NO: 2055524 - DNA, 15 bp, Homo sapiens
ggagtcctgtcaggg

SEQ ID NO: 2055525 - DNA, 15 bp, Homo sapiens
gagtcctgtcaggga

SEQ ID NO: 2055526 - DNA, 15 bp, Homo sapiens
agtcctgtcagggaa

SEQ ID NO: 2055527 - DNA, 15 bp, Homo sapiens
gtcctgtcagggaac

SEQ ID NO: 2055528 - DNA, 15 bp, Homo sapiens
tcctgtcagggaaca

SEQ ID NO: 2055529 - DNA, 15 bp, Homo sapiens
cctgtcagggaacag

SEQ ID NO: 2055530 - DNA, 15 bp, Homo sapiens
ctgtcagggaacagt

SEQ ID NO: 2055531 - DNA, 15 bp, Homo sapiens
tgtcagggaacagtg

SEQ ID NO: 2055532 - DNA, 15 bp, Homo sapiens
gtcagggaacagtgc

SEQ ID NO: 2055533 - DNA, 15 bp, Homo sapiens
tcagggaacagtgct

SEQ ID NO: 2055534 - DNA, 15 bp, Homo sapiens
cagggaacagtgctg

SEQ ID NO: 2055535 - DNA, 15 bp, Homo sapiens
agggaacagtgctgc

SEQ ID NO: 2055536 - DNA, 15 bp, Homo sapiens
gggaacagtgctgcc

SEQ ID NO: 2055537 - DNA, 15 bp, Homo sapiens
ggaacagtgctgcca

SEQ ID NO: 2055538 - DNA, 15 bp, Homo sapiens
gaacagtgctgccag

SEQ ID NO: 2055539 - DNA, 15 bp, Homo sapiens
aacagtgctgccagg

SEQ ID NO: 2055540 - DNA, 15 bp, Homo sapiens
acagtgctgccaggg

SEQ ID NO: 2055541 - DNA, 15 bp, Homo sapiens
cagtgctgccaggga

SEQ ID NO: 2055542 - DNA, 15 bp, Homo sapiens
agtgctgccagggag

SEQ ID NO: 2055543 - DNA, 15 bp, Homo sapiens
gtgctgccagggagt

SEQ ID NO: 2055544 - DNA, 15 bp, Homo sapiens
tgctgccagggagta

SEQ ID NO: 2055545 - DNA, 15 bp, Homo sapiens
gctgccagggagtag

SEQ ID NO: 2055546 - DNA, 15 bp, Homo sapiens
ctgccagggagtagt

SEQ ID NO: 2055547 - DNA, 15 bp, Homo sapiens
tgccagggagtagta

SEQ ID NO: 2055548 - DNA, 15 bp, Homo sapiens
gccagggagtagtaa

SEQ ID NO: 2055549 - DNA, 15 bp, Homo sapiens
ccagggagtagtaat

SEQ ID NO: 2055550 - DNA, 15 bp, Homo sapiens
cagggagtagtaatc

SEQ ID NO: 2055551 - DNA, 15 bp, Homo sapiens
agggagtagtaatcg

SEQ ID NO: 2055552 - DNA, 15 bp, Homo sapiens
gggagtagtaatcga

SEQ ID NO: 2055553 - DNA, 15 bp, Homo sapiens
ggagtagtaatcgac

SEQ ID NO: 2055554 - DNA, 15 bp, Homo sapiens
gagtagtaatcgaca

SEQ ID NO: 2055555 - DNA, 15 bp, Homo sapiens
agtagtaatcgacat

SEQ ID NO: 2055556 - DNA, 15 bp, Homo sapiens
gtagtaatcgacatt

SEQ ID NO: 2055557 - DNA, 15 bp, Homo sapiens
tagtaatcgacattt

SEQ ID NO: 2055558 - DNA, 15 bp, Homo sapiens
agtaatcgacatttc

SEQ ID NO: 2055559 - DNA, 15 bp, Homo sapiens
gtaatcgacatttca

SEQ ID NO: 2055560 - DNA, 15 bp, Homo sapiens
taatcgacatttcag

SEQ ID NO: 2055561 - DNA, 15 bp, Homo sapiens
aatcgacatttcagt

SEQ ID NO: 2055562 - DNA, 15 bp, Homo sapiens
atcgacatttcagtt

SEQ ID NO: 2055563 - DNA, 15 bp, Homo sapiens
tcgacatttcagtta

SEQ ID NO: 2055564 - DNA, 15 bp, Homo sapiens
cgacatttcagttaa

SEQ ID NO: 2055565 - DNA, 15 bp, Homo sapiens
gacatttcagttaat

SEQ ID NO: 2055566 - DNA, 15 bp, Homo sapiens
acatttcagttaata

SEQ ID NO: 2055567 - DNA, 15 bp, Homo sapiens
catttcagttaatac

SEQ ID NO: 2055568 - DNA, 15 bp, Homo sapiens
atttcagttaatact

SEQ ID NO: 2055569 - DNA, 15 bp, Homo sapiens
tttcagttaatactg

SEQ ID NO: 2055570 - DNA, 15 bp, Homo sapiens
ttcagttaatactgc

SEQ ID NO: 2055571 - DNA, 15 bp, Homo sapiens
tcagttaatactgcc

SEQ ID NO: 2055572 - DNA, 15 bp, Homo sapiens
cagttaatactgcca

SEQ ID NO: 2055573 - DNA, 15 bp, Homo sapiens
agttaatactgccag

SEQ ID NO: 2055574 - DNA, 15 bp, Homo sapiens
gttaatactgccagg

SEQ ID NO: 2055575 - DNA, 15 bp, Homo sapiens
ttaatactgccaggt

SEQ ID NO: 2055576 - DNA, 15 bp, Homo sapiens
taatactgccaggtc

SEQ ID NO: 2055577 - DNA, 15 bp, Homo sapiens
aatactgccaggtca

SEQ ID NO: 2055578 - DNA, 15 bp, Homo sapiens
atactgccaggtcac

SEQ ID NO: 2055579 - DNA, 15 bp, Homo sapiens
tactgccaggtcaca

SEQ ID NO: 2055580 - DNA, 15 bp, Homo sapiens
actgccaggtcacag

SEQ ID NO: 2055581 - DNA, 15 bp, Homo sapiens
ctgccaggtcacagg

SEQ ID NO: 2055582 - DNA, 15 bp, Homo sapiens
tgccaggtcacaggg

SEQ ID NO: 2055583 - DNA, 15 bp, Homo sapiens
gccaggtcacagggc

SEQ ID NO: 2055584 - DNA, 15 bp, Homo sapiens
ccaggtcacagggca

SEQ ID NO: 2055585 - DNA, 15 bp, Homo sapiens
caggtcacagggcag

SEQ ID NO: 2055586 - DNA, 15 bp, Homo sapiens
aggtcacagggcagt

SEQ ID NO: 2055587 - DNA, 15 bp, Homo sapiens
ggtcacagggcagta

SEQ ID NO: 2055588 - DNA, 15 bp, Homo sapiens
gtcacagggcagtaa

SEQ ID NO: 2055589 - DNA, 15 bp, Homo sapiens
tcacagggcagtaac

SEQ ID NO: 2055590 - DNA, 15 bp, Homo sapiens
cacagggcagtaacg

SEQ ID NO: 2055591 - DNA, 15 bp, Homo sapiens
acagggcagtaacga

SEQ ID NO: 2055592 - DNA, 15 bp, Homo sapiens
cagggcagtaacgaa

SEQ ID NO: 2055593 - DNA, 15 bp, Homo sapiens
agggcagtaacgaac

SEQ ID NO: 2055594 - DNA, 15 bp, Homo sapiens
gggcagtaacgaact

SEQ ID NO: 2055595 - DNA, 15 bp, Homo sapiens
ggcagtaacgaacta

SEQ ID NO: 2055596 - DNA, 15 bp, Homo sapiens
gcagtaacgaactag

SEQ ID NO: 2055597 - DNA, 15 bp, Homo sapiens
cagtaacgaactagc

SEQ ID NO: 2055598 - DNA, 15 bp, Homo sapiens
agtaacgaactagct

SEQ ID NO: 2055599 - DNA, 15 bp, Homo sapiens
gtaacgaactagcta

SEQ ID NO: 2055600 - DNA, 15 bp, Homo sapiens
taacgaactagctac

SEQ ID NO: 2055601 - DNA, 15 bp, Homo sapiens
aacgaactagctaca

SEQ ID NO: 2055602 - DNA, 15 bp, Homo sapiens
acgaactagctacaa

SEQ ID NO: 2055603 - DNA, 15 bp, Homo sapiens
cgaactagctacaat

SEQ ID NO: 2055604 - DNA, 15 bp, Homo sapiens
gaactagctacaatt

SEQ ID NO: 2055605 - DNA, 15 bp, Homo sapiens
aactagctacaattt

SEQ ID NO: 2055606 - DNA, 15 bp, Homo sapiens
actagctacaatttc

SEQ ID NO: 2055607 - DNA, 15 bp, Homo sapiens
ctagctacaatttct

SEQ ID NO: 2055608 - DNA, 15 bp, Homo sapiens
tagctacaatttctg

SEQ ID NO: 2055609 - DNA, 15 bp, Homo sapiens
agctacaatttctgt

SEQ ID NO: 2055610 - DNA, 15 bp, Homo sapiens
gctacaatttctgtc

SEQ ID NO: 2055611 - DNA, 15 bp, Homo sapiens
ctacaatttctgtct

SEQ ID NO: 2055612 - DNA, 15 bp, Homo sapiens
tacaatttctgtctg

SEQ ID NO: 2055613 - DNA, 15 bp, Homo sapiens
acaatttctgtctgc

SEQ ID NO: 2055614 - DNA, 15 bp, Homo sapiens
caatttctgtctgct

SEQ ID NO: 2055615 - DNA, 15 bp, Homo sapiens
aatttctgtctgctg

SEQ ID NO: 2055616 - DNA, 15 bp, Homo sapiens
atttctgtctgctgt

SEQ ID NO: 2055617 - DNA, 15 bp, Homo sapiens
tttctgtctgctgtg

SEQ ID NO: 2055618 - DNA, 15 bp, Homo sapiens
ttctgtctgctgtgg

SEQ ID NO: 2055619 - DNA, 15 bp, Homo sapiens
tctgtctgctgtggc

SEQ ID NO: 2055620 - DNA, 15 bp, Homo sapiens
ctgtctgctgtggct

SEQ ID NO: 2055621 - DNA, 15 bp, Homo sapiens
tgtctgctgtggctt

SEQ ID NO: 2055622 - DNA, 15 bp, Homo sapiens
gtctgctgtggcttg

SEQ ID NO: 2055623 - DNA, 15 bp, Homo sapiens
tctgctgtggcttga

SEQ ID NO: 2055624 - DNA, 15 bp, Homo sapiens
ctgctgtggcttgag

SEQ ID NO: 2055625 - DNA, 15 bp, Homo sapiens
tgctgtggcttgagg

SEQ ID NO: 2055626 - DNA, 15 bp, Homo sapiens
gctgtggcttgaggt

SEQ ID NO: 2055627 - DNA, 15 bp, Homo sapiens
ctgtggcttgaggta

SEQ ID NO: 2055628 - DNA, 15 bp, Homo sapiens
tgtggcttgaggtag

SEQ ID NO: 2055629 - DNA, 15 bp, Homo sapiens
gtggcttgaggtagg

SEQ ID NO: 2055630 - DNA, 15 bp, Homo sapiens
tggcttgaggtagga

SEQ ID NO: 2055631 - DNA, 15 bp, Homo sapiens
ggcttgaggtaggaa

SEQ ID NO: 2055632 - DNA, 15 bp, Homo sapiens
gcttgaggtaggaat

SEQ ID NO: 2055633 - DNA, 15 bp, Homo sapiens
cttgaggtaggaatg

SEQ ID NO: 2055634 - DNA, 15 bp, Homo sapiens
ttgaggtaggaatgt

SEQ ID NO: 2055635 - DNA, 15 bp, Homo sapiens
tgaggtaggaatgtg

SEQ ID NO: 2055636 - DNA, 15 bp, Homo sapiens
gaggtaggaatgtgt

SEQ ID NO: 2055637 - DNA, 15 bp, Homo sapiens
aggtaggaatgtgtg

SEQ ID NO: 2055638 - DNA, 15 bp, Homo sapiens
ggtaggaatgtgtgc

SEQ ID NO: 2055639 - DNA, 15 bp, Homo sapiens
gtaggaatgtgtgct

SEQ ID NO: 2055640 - DNA, 15 bp, Homo sapiens
taggaatgtgtgctg

SEQ ID NO: 2055641 - DNA, 15 bp, Homo sapiens
aggaatgtgtgctgt

SEQ ID NO: 2055642 - DNA, 15 bp, Homo sapiens
ggaatgtgtgctgtg

SEQ ID NO: 2055643 - DNA, 15 bp, Homo sapiens
gaatgtgtgctgtgt

SEQ ID NO: 2055644 - DNA, 15 bp, Homo sapiens
aatgtgtgctgtgtg

SEQ ID NO: 2055645 - DNA, 15 bp, Homo sapiens
atgtgtgctgtgtgc

SEQ ID NO: 2055646 - DNA, 15 bp, Homo sapiens
tgtgtgctgtgtgca

SEQ ID NO: 2055647 - DNA, 15 bp, Homo sapiens
gtgtgctgtgtgcac

SEQ ID NO: 2055648 - DNA, 15 bp, Homo sapiens
tgtgctgtgtgcacc

SEQ ID NO: 2055649 - DNA, 15 bp, Homo sapiens
gtgctgtgtgcacca

SEQ ID NO: 2055650 - DNA, 15 bp, Homo sapiens
tgctgtgtgcaccac

SEQ ID NO: 2055651 - DNA, 15 bp, Homo sapiens
gctgtgtgcaccacg

SEQ ID NO: 2055652 - DNA, 15 bp, Homo sapiens
ctgtgtgcaccacgg

SEQ ID NO: 2055653 - DNA, 15 bp, Homo sapiens
tgtgtgcaccacggt

SEQ ID NO: 2055654 - DNA, 15 bp, Homo sapiens
gtgtgcaccacggtg

SEQ ID NO: 2055655 - DNA, 15 bp, Homo sapiens
tgtgcaccacggtgg

SEQ ID NO: 2055656 - DNA, 15 bp, Homo sapiens
gtgcaccacggtggt

SEQ ID NO: 2055657 - DNA, 15 bp, Homo sapiens
tgcaccacggtggtt

SEQ ID NO: 2055658 - DNA, 15 bp, Homo sapiens
gcaccacggtggttt

SEQ ID NO: 2055659 - DNA, 15 bp, Homo sapiens
caccacggtggtttg

SEQ ID NO: 2055660 - DNA, 15 bp, Homo sapiens
accacggtggtttga

SEQ ID NO: 2055661 - DNA, 15 bp, Homo sapiens
ccacggtggtttgac

SEQ ID NO: 2055662 - DNA, 15 bp, Homo sapiens
cacggtggtttgaca

SEQ ID NO: 2055663 - DNA, 15 bp, Homo sapiens
acggtggtttgacag

SEQ ID NO: 2055664 - DNA, 15 bp, Homo sapiens
cggtggtttgacagt

SEQ ID NO: 2055665 - DNA, 15 bp, Homo sapiens
ggtggtttgacagtt

SEQ ID NO: 2055666 - DNA, 15 bp, Homo sapiens
gtggtttgacagttg

SEQ ID NO: 2055667 - DNA, 15 bp, Homo sapiens
tggtttgacagttgc

SEQ ID NO: 2055668 - DNA, 15 bp, Homo sapiens
ggtttgacagttgca

SEQ ID NO: 2055669 - DNA, 15 bp, Homo sapiens
gtttgacagttgcaa

SEQ ID NO: 2055670 - DNA, 15 bp, Homo sapiens
tttgacagttgcaat

SEQ ID NO: 2055671 - DNA, 15 bp, Homo sapiens
ttgacagttgcaatt

SEQ ID NO: 2055672 - DNA, 15 bp, Homo sapiens
tgacagttgcaattc

SEQ ID NO: 2055673 - DNA, 15 bp, Homo sapiens
gacagttgcaattct

SEQ ID NO: 2055674 - DNA, 15 bp, Homo sapiens
acagttgcaattctt

SEQ ID NO: 2055675 - DNA, 15 bp, Homo sapiens
cagttgcaattcttt

SEQ ID NO: 2055676 - DNA, 15 bp, Homo sapiens
agttgcaattctttc

SEQ ID NO: 2055677 - DNA, 15 bp, Homo sapiens
gttgcaattctttct

SEQ ID NO: 2055678 - DNA, 15 bp, Homo sapiens
ttgcaattctttctg

SEQ ID NO: 2055679 - DNA, 15 bp, Homo sapiens
tgcaattctttctga

SEQ ID NO: 2055680 - DNA, 15 bp, Homo sapiens
gcaattctttctgaa

SEQ ID NO: 2055681 - DNA, 15 bp, Homo sapiens
caattctttctgaag

SEQ ID NO: 2055682 - DNA, 15 bp, Homo sapiens
aattctttctgaagt

SEQ ID NO: 2055683 - DNA, 15 bp, Homo sapiens
attctttctgaagta

SEQ ID NO: 2055684 - DNA, 15 bp, Homo sapiens
ttctttctgaagtag

SEQ ID NO: 2055685 - DNA, 15 bp, Homo sapiens
tctttctgaagtaga

SEQ ID NO: 2055686 - DNA, 15 bp, Homo sapiens
ctttctgaagtagaa

SEQ ID NO: 2055687 - DNA, 15 bp, Homo sapiens
tttctgaagtagaat

SEQ ID NO: 2055688 - DNA, 15 bp, Homo sapiens
ttctgaagtagaatc

SEQ ID NO: 2055689 - DNA, 15 bp, Homo sapiens
tctgaagtagaatca

SEQ ID NO: 2055690 - DNA, 15 bp, Homo sapiens
ctgaagtagaatcag

SEQ ID NO: 2055691 - DNA, 15 bp, Homo sapiens
tgaagtagaatcaga

SEQ ID NO: 2055692 - DNA, 15 bp, Homo sapiens
gaagtagaatcagaa

SEQ ID NO: 2055693 - DNA, 15 bp, Homo sapiens
aagtagaatcagaag

SEQ ID NO: 2055694 - DNA, 15 bp, Homo sapiens
agtagaatcagaagg

SEQ ID NO: 2055695 - DNA, 15 bp, Homo sapiens
gtagaatcagaaggg

SEQ ID NO: 2055696 - DNA, 15 bp, Homo sapiens
tagaatcagaaggga

SEQ ID NO: 2055697 - DNA, 15 bp, Homo sapiens
agaatcagaagggaa

SEQ ID NO: 2055698 - DNA, 15 bp, Homo sapiens
gaatcagaagggaag

SEQ ID NO: 2055699 - DNA, 15 bp, Homo sapiens
aatcagaagggaagg

SEQ ID NO: 2055700 - DNA, 15 bp, Homo sapiens
atcagaagggaagga

SEQ ID NO: 2055701 - DNA, 15 bp, Homo sapiens
tcagaagggaaggaa

SEQ ID NO: 2055702 - DNA, 15 bp, Homo sapiens
cagaagggaaggaag

SEQ ID NO: 2055703 - DNA, 15 bp, Homo sapiens
agaagggaaggaaga

SEQ ID NO: 2055704 - DNA, 15 bp, Homo sapiens
gaagggaaggaagaa

SEQ ID NO: 2055705 - DNA, 15 bp, Homo sapiens
aagggaaggaagaag

SEQ ID NO: 2055706 - DNA, 15 bp, Homo sapiens
agggaaggaagaagc

SEQ ID NO: 2055707 - DNA, 15 bp, Homo sapiens
gggaaggaagaagct

SEQ ID NO: 2055708 - DNA, 15 bp, Homo sapiens
ggaaggaagaagctg

SEQ ID NO: 2055709 - DNA, 15 bp, Homo sapiens
gaaggaagaagctgc

SEQ ID NO: 2055710 - DNA, 15 bp, Homo sapiens
aaggaagaagctgcc

SEQ ID NO: 2055711 - DNA, 15 bp, Homo sapiens
aggaagaagctgcca

SEQ ID NO: 2055712 - DNA, 15 bp, Homo sapiens
ggaagaagctgccac

SEQ ID NO: 2055713 - DNA, 15 bp, Homo sapiens
gaagaagctgccact

SEQ ID NO: 2055714 - DNA, 15 bp, Homo sapiens
aagaagctgccactg

SEQ ID NO: 2055715 - DNA, 15 bp, Homo sapiens
agaagctgccactgc

SEQ ID NO: 2055716 - DNA, 15 bp, Homo sapiens
gaagctgccactgcc

SEQ ID NO: 2055717 - DNA, 15 bp, Homo sapiens
aagctgccactgccc

SEQ ID NO: 2055718 - DNA, 15 bp, Homo sapiens
agctgccactgccca

SEQ ID NO: 2055719 - DNA, 15 bp, Homo sapiens
gctgccactgcccag

SEQ ID NO: 2055720 - DNA, 15 bp, Homo sapiens
ctgccactgcccagc

SEQ ID NO: 2055721 - DNA, 15 bp, Homo sapiens
tgccactgcccagcc

SEQ ID NO: 2055722 - DNA, 15 bp, Homo sapiens
gccactgcccagccc

SEQ ID NO: 2055723 - DNA, 15 bp, Homo sapiens
ccactgcccagcccc

SEQ ID NO: 2055724 - DNA, 15 bp, Homo sapiens
cactgcccagccccc

SEQ ID NO: 2055725 - DNA, 15 bp, Homo sapiens
actgcccagcccccc

SEQ ID NO: 2055726 - DNA, 15 bp, Homo sapiens
ctgcccagcccccca

SEQ ID NO: 2055727 - DNA, 15 bp, Homo sapiens
tgcccagccccccag

SEQ ID NO: 2055728 - DNA, 15 bp, Homo sapiens
gcccagccccccagg

SEQ ID NO: 2055729 - DNA, 15 bp, Homo sapiens
cccagccccccaggc

SEQ ID NO: 2055730 - DNA, 15 bp, Homo sapiens
ccagccccccaggcc

SEQ ID NO: 2055731 - DNA, 15 bp, Homo sapiens
cagccccccaggccc

SEQ ID NO: 2055732 - DNA, 15 bp, Homo sapiens
agccccccaggccct

SEQ ID NO: 2055733 - DNA, 15 bp, Homo sapiens
gccccccaggccctt

SEQ ID NO: 2055734 - DNA, 15 bp, Homo sapiens
ccccccaggccctta

SEQ ID NO: 2055735 - DNA, 15 bp, Homo sapiens
cccccaggcccttag

SEQ ID NO: 2055736 - DNA, 15 bp, Homo sapiens
ccccaggcccttagt

SEQ ID NO: 2055737 - DNA, 15 bp, Homo sapiens
cccaggcccttagtc

SEQ ID NO: 2055738 - DNA, 15 bp, Homo sapiens
ccaggcccttagtcc

SEQ ID NO: 2055739 - DNA, 15 bp, Homo sapiens
caggcccttagtccc

SEQ ID NO: 2055740 - DNA, 15 bp, Homo sapiens
aggcccttagtccca

SEQ ID NO: 2055741 - DNA, 15 bp, Homo sapiens
ggcccttagtcccac

SEQ ID NO: 2055742 - DNA, 15 bp, Homo sapiens
gcccttagtcccacc

SEQ ID NO: 2055743 - DNA, 15 bp, Homo sapiens
cccttagtcccaccc

SEQ ID NO: 2055744 - DNA, 15 bp, Homo sapiens
ccttagtcccacccc

SEQ ID NO: 2055745 - DNA, 15 bp, Homo sapiens
cttagtcccacccca

SEQ ID NO: 2055746 - DNA, 15 bp, Homo sapiens
ttagtcccaccccag

SEQ ID NO: 2055747 - DNA, 15 bp, Homo sapiens
tagtcccaccccagg

SEQ ID NO: 2055748 - DNA, 15 bp, Homo sapiens
agtcccaccccaggc

SEQ ID NO: 2055749 - DNA, 15 bp, Homo sapiens
gtcccaccccaggcc

SEQ ID NO: 2055750 - DNA, 15 bp, Homo sapiens
tcccaccccaggcct

SEQ ID NO: 2055751 - DNA, 15 bp, Homo sapiens
cccaccccaggcctt

SEQ ID NO: 2055752 - DNA, 15 bp, Homo sapiens
ccaccccaggccttg

SEQ ID NO: 2055753 - DNA, 15 bp, Homo sapiens
caccccaggccttgc

SEQ ID NO: 2055754 - DNA, 15 bp, Homo sapiens
accccaggccttgca

SEQ ID NO: 2055755 - DNA, 15 bp, Homo sapiens
ccccaggccttgcag

SEQ ID NO: 2055756 - DNA, 15 bp, Homo sapiens
cccaggccttgcaga

SEQ ID NO: 2055757 - DNA, 15 bp, Homo sapiens
ccaggccttgcagac

SEQ ID NO: 2055758 - DNA, 15 bp, Homo sapiens
caggccttgcagacc

SEQ ID NO: 2055759 - DNA, 15 bp, Homo sapiens
aggccttgcagacct

SEQ ID NO: 2055760 - DNA, 15 bp, Homo sapiens
ggccttgcagacctt

SEQ ID NO: 2055761 - DNA, 15 bp, Homo sapiens
gccttgcagaccttg

SEQ ID NO: 2055762 - DNA, 15 bp, Homo sapiens
ccttgcagaccttga

SEQ ID NO: 2055763 - DNA, 15 bp, Homo sapiens
cttgcagaccttgag

SEQ ID NO: 2055764 - DNA, 15 bp, Homo sapiens
ttgcagaccttgagg

SEQ ID NO: 2055765 - DNA, 15 bp, Homo sapiens
tgcagaccttgaggc

SEQ ID NO: 2055766 - DNA, 15 bp, Homo sapiens
gcagaccttgaggca

SEQ ID NO: 2055767 - DNA, 15 bp, Homo sapiens
cagaccttgaggcac

SEQ ID NO: 2055768 - DNA, 15 bp, Homo sapiens
agaccttgaggcacc

SEQ ID NO: 2055769 - DNA, 15 bp, Homo sapiens
gaccttgaggcacca

SEQ ID NO: 2055770 - DNA, 15 bp, Homo sapiens
accttgaggcaccat

SEQ ID NO: 2055771 - DNA, 15 bp, Homo sapiens
ccttgaggcaccatc

SEQ ID NO: 2055772 - DNA, 15 bp, Homo sapiens
cttgaggcaccatca

SEQ ID NO: 2055773 - DNA, 15 bp, Homo sapiens
ttgaggcaccatcaa

SEQ ID NO: 2055774 - DNA, 15 bp, Homo sapiens
tgaggcaccatcaag

SEQ ID NO: 2055775 - DNA, 15 bp, Homo sapiens
gaggcaccatcaagt

SEQ ID NO: 2055776 - DNA, 15 bp, Homo sapiens
aggcaccatcaagtg

SEQ ID NO: 2055777 - DNA, 15 bp, Homo sapiens
ggcaccatcaagtgg

SEQ ID NO: 2055778 - DNA, 15 bp, Homo sapiens
gcaccatcaagtggc

SEQ ID NO: 2055779 - DNA, 15 bp, Homo sapiens
caccatcaagtggcc

SEQ ID NO: 2055780 - DNA, 15 bp, Homo sapiens
accatcaagtggcca

SEQ ID NO: 2055781 - DNA, 15 bp, Homo sapiens
ccatcaagtggccag

SEQ ID NO: 2055782 - DNA, 15 bp, Homo sapiens
catcaagtggccagg

SEQ ID NO: 2055783 - DNA, 15 bp, Homo sapiens
atcaagtggccaggc

SEQ ID NO: 2055784 - DNA, 15 bp, Homo sapiens
tcaagtggccaggca

SEQ ID NO: 2055785 - DNA, 15 bp, Homo sapiens
caagtggccaggcag

SEQ ID NO: 2055786 - DNA, 15 bp, Homo sapiens
aagtggccaggcaga

SEQ ID NO: 2055787 - DNA, 15 bp, Homo sapiens
agtggccaggcagag

SEQ ID NO: 2055788 - DNA, 15 bp, Homo sapiens
gtggccaggcagaga

SEQ ID NO: 2055789 - DNA, 15 bp, Homo sapiens
tggccaggcagagag

SEQ ID NO: 2055790 - DNA, 15 bp, Homo sapiens
ggccaggcagagaga

SEQ ID NO: 2055791 - DNA, 15 bp, Homo sapiens
gccaggcagagagag

SEQ ID NO: 2055792 - DNA, 15 bp, Homo sapiens
ccaggcagagagaga

SEQ ID NO: 2055793 - DNA, 15 bp, Homo sapiens
caggcagagagagag

SEQ ID NO: 2055794 - DNA, 15 bp, Homo sapiens
aggcagagagagaga

SEQ ID NO: 2055795 - DNA, 15 bp, Homo sapiens
ggcagagagagagat

SEQ ID NO: 2055796 - DNA, 15 bp, Homo sapiens
gcagagagagagatt

SEQ ID NO: 2055797 - DNA, 15 bp, Homo sapiens
cagagagagagattt

SEQ ID NO: 2055798 - DNA, 15 bp, Homo sapiens
agagagagagattta

SEQ ID NO: 2055799 - DNA, 15 bp, Homo sapiens
gagagagagatttaa

SEQ ID NO: 2055800 - DNA, 15 bp, Homo sapiens
agagagagatttaat

SEQ ID NO: 2055801 - DNA, 15 bp, Homo sapiens
gagagagatttaatc

SEQ ID NO: 2055802 - DNA, 15 bp, Homo sapiens
agagagatttaatcc

SEQ ID NO: 2055803 - DNA, 15 bp, Homo sapiens
gagagatttaatcct

SEQ ID NO: 2055804 - DNA, 15 bp, Homo sapiens
agagatttaatcctc

SEQ ID NO: 2055805 - DNA, 15 bp, Homo sapiens
gagatttaatcctct

SEQ ID NO: 2055806 - DNA, 15 bp, Homo sapiens
agatttaatcctctg

SEQ ID NO: 2055807 - DNA, 15 bp, Homo sapiens
gatttaatcctctgc

SEQ ID NO: 2055808 - DNA, 15 bp, Homo sapiens
atttaatcctctgcg

SEQ ID NO: 2055809 - DNA, 15 bp, Homo sapiens
tttaatcctctgcgg

SEQ ID NO: 2055810 - DNA, 15 bp, Homo sapiens
ttaatcctctgcggc

SEQ ID NO: 2055811 - DNA, 15 bp, Homo sapiens
taatcctctgcggct

SEQ ID NO: 2055812 - DNA, 15 bp, Homo sapiens
aatcctctgcggctt

SEQ ID NO: 2055813 - DNA, 15 bp, Homo sapiens
atcctctgcggcttg

SEQ ID NO: 2055814 - DNA, 15 bp, Homo sapiens
tcctctgcggcttga

SEQ ID NO: 2055815 - DNA, 15 bp, Homo sapiens
cctctgcggcttgag

SEQ ID NO: 2055816 - DNA, 15 bp, Homo sapiens
ctctgcggcttgagt

SEQ ID NO: 2055817 - DNA, 15 bp, Homo sapiens
tctgcggcttgagtc

SEQ ID NO: 2055818 - DNA, 15 bp, Homo sapiens
ctgcggcttgagtct

SEQ ID NO: 2055819 - DNA, 15 bp, Homo sapiens
tgcggcttgagtctc

SEQ ID NO: 2055820 - DNA, 15 bp, Homo sapiens
gcggcttgagtctcc

SEQ ID NO: 2055821 - DNA, 15 bp, Homo sapiens
cggcttgagtctcct

SEQ ID NO: 2055822 - DNA, 15 bp, Homo sapiens
ggcttgagtctcctc

SEQ ID NO: 2055823 - DNA, 15 bp, Homo sapiens
gcttgagtctcctct

SEQ ID NO: 2055824 - DNA, 15 bp, Homo sapiens
cttgagtctcctcta

SEQ ID NO: 2055825 - DNA, 15 bp, Homo sapiens
ttgagtctcctctag

SEQ ID NO: 2055826 - DNA, 15 bp, Homo sapiens
tgagtctcctctaga

SEQ ID NO: 2055827 - DNA, 15 bp, Homo sapiens
gagtctcctctagaa

SEQ ID NO: 2055828 - DNA, 15 bp, Homo sapiens
agtctcctctagaag

SEQ ID NO: 2055829 - DNA, 15 bp, Homo sapiens
gtctcctctagaagt

SEQ ID NO: 2055830 - DNA, 15 bp, Homo sapiens
tctcctctagaagtc

SEQ ID NO: 2055831 - DNA, 15 bp, Homo sapiens
ctcctctagaagtct

SEQ ID NO: 2055832 - DNA, 15 bp, Homo sapiens
tcctctagaagtctg

SEQ ID NO: 2055833 - DNA, 15 bp, Homo sapiens
cctctagaagtctgt

SEQ ID NO: 2055834 - DNA, 15 bp, Homo sapiens
ctctagaagtctgtc

SEQ ID NO: 2055835 - DNA, 15 bp, Homo sapiens
tctagaagtctgtcg

SEQ ID NO: 2055836 - DNA, 15 bp, Homo sapiens
ctagaagtctgtcgc

SEQ ID NO: 2055837 - DNA, 15 bp, Homo sapiens
tagaagtctgtcgct

SEQ ID NO: 2055838 - DNA, 15 bp, Homo sapiens
agaagtctgtcgctg

SEQ ID NO: 2055839 - DNA, 15 bp, Homo sapiens
gaagtctgtcgctgc

SEQ ID NO: 2055840 - DNA, 15 bp, Homo sapiens
aagtctgtcgctgca

SEQ ID NO: 2055841 - DNA, 15 bp, Homo sapiens
agtctgtcgctgcaa

SEQ ID NO: 2055842 - DNA, 15 bp, Homo sapiens
gtctgtcgctgcaag

SEQ ID NO: 2055843 - DNA, 15 bp, Homo sapiens
tctgtcgctgcaagt

SEQ ID NO: 2055844 - DNA, 15 bp, Homo sapiens
ctgtcgctgcaagtc

SEQ ID NO: 2055845 - DNA, 15 bp, Homo sapiens
tgtcgctgcaagtct

SEQ ID NO: 2055846 - DNA, 15 bp, Homo sapiens
gtcgctgcaagtctg

SEQ ID NO: 2055847 - DNA, 15 bp, Homo sapiens
tcgctgcaagtctgt

SEQ ID NO: 2055848 - DNA, 15 bp, Homo sapiens
cgctgcaagtctgtt

SEQ ID NO: 2055849 - DNA, 15 bp, Homo sapiens
gctgcaagtctgttt

SEQ ID NO: 2055850 - DNA, 15 bp, Homo sapiens
ctgcaagtctgttta

SEQ ID NO: 2055851 - DNA, 15 bp, Homo sapiens
tgcaagtctgtttag

SEQ ID NO: 2055852 - DNA, 15 bp, Homo sapiens
gcaagtctgtttaga

SEQ ID NO: 2055853 - DNA, 15 bp, Homo sapiens
caagtctgtttagag

SEQ ID NO: 2055854 - DNA, 15 bp, Homo sapiens
aagtctgtttagaga

SEQ ID NO: 2055855 - DNA, 15 bp, Homo sapiens
agtctgtttagagac

SEQ ID NO: 2055856 - DNA, 15 bp, Homo sapiens
gtctgtttagagacc

SEQ ID NO: 2055857 - DNA, 15 bp, Homo sapiens
tctgtttagagacct

SEQ ID NO: 2055858 - DNA, 15 bp, Homo sapiens
ctgtttagagaccta

SEQ ID NO: 2055859 - DNA, 15 bp, Homo sapiens
tgtttagagacctaa

SEQ ID NO: 2055860 - DNA, 15 bp, Homo sapiens
gtttagagacctaat

SEQ ID NO: 2055861 - DNA, 15 bp, Homo sapiens
tttagagacctaatg

SEQ ID NO: 2055862 - DNA, 15 bp, Homo sapiens
ttagagacctaatgc

SEQ ID NO: 2055863 - DNA, 15 bp, Homo sapiens
tagagacctaatgct

SEQ ID NO: 2055864 - DNA, 15 bp, Homo sapiens
agagacctaatgctc

SEQ ID NO: 2055865 - DNA, 15 bp, Homo sapiens
gagacctaatgctct

SEQ ID NO: 2055866 - DNA, 15 bp, Homo sapiens
agacctaatgctctg

SEQ ID NO: 2055867 - DNA, 15 bp, Homo sapiens
gacctaatgctctgg

SEQ ID NO: 2055868 - DNA, 15 bp, Homo sapiens
acctaatgctctgga

SEQ ID NO: 2055869 - DNA, 15 bp, Homo sapiens
cctaatgctctggaa

SEQ ID NO: 2055870 - DNA, 15 bp, Homo sapiens
ctaatgctctggaag

SEQ ID NO: 2055871 - DNA, 15 bp, Homo sapiens
taatgctctggaagc

SEQ ID NO: 2055872 - DNA, 15 bp, Homo sapiens
aatgctctggaagcg

SEQ ID NO: 2055873 - DNA, 15 bp, Homo sapiens
atgctctggaagcgt

SEQ ID NO: 2055874 - DNA, 15 bp, Homo sapiens
tgctctggaagcgtc

SEQ ID NO: 2055875 - DNA, 15 bp, Homo sapiens
gctctggaagcgtct

SEQ ID NO: 2055876 - DNA, 15 bp, Homo sapiens
ctctggaagcgtctg

SEQ ID NO: 2055877 - DNA, 15 bp, Homo sapiens
tctggaagcgtctgt

SEQ ID NO: 2055878 - DNA, 15 bp, Homo sapiens
ctggaagcgtctgtt

SEQ ID NO: 2055879 - DNA, 15 bp, Homo sapiens
tggaagcgtctgttg

SEQ ID NO: 2055880 - DNA, 15 bp, Homo sapiens
ggaagcgtctgttgg

SEQ ID NO: 2055881 - DNA, 15 bp, Homo sapiens
gaagcgtctgttggg

SEQ ID NO: 2055882 - DNA, 15 bp, Homo sapiens
aagcgtctgttggga

SEQ ID NO: 2055883 - DNA, 15 bp, Homo sapiens
agcgtctgttgggac

SEQ ID NO: 2055884 - DNA, 15 bp, Homo sapiens
gcgtctgttgggacc

SEQ ID NO: 2055885 - DNA, 15 bp, Homo sapiens
cgtctgttgggacca

SEQ ID NO: 2055886 - DNA, 15 bp, Homo sapiens
gtctgttgggaccat

SEQ ID NO: 2055887 - DNA, 15 bp, Homo sapiens
tctgttgggaccata

SEQ ID NO: 2055888 - DNA, 15 bp, Homo sapiens
ctgttgggaccataa

SEQ ID NO: 2055889 - DNA, 15 bp, Homo sapiens
tgttgggaccataac

SEQ ID NO: 2055890 - DNA, 15 bp, Homo sapiens
gttgggaccataact

SEQ ID NO: 2055891 - DNA, 15 bp, Homo sapiens
ttgggaccataactt

SEQ ID NO: 2055892 - DNA, 15 bp, Homo sapiens
tgggaccataacttt

SEQ ID NO: 2055893 - DNA, 15 bp, Homo sapiens
gggaccataactttg

SEQ ID NO: 2055894 - DNA, 15 bp, Homo sapiens
ggaccataactttgc

SEQ ID NO: 2055895 - DNA, 15 bp, Homo sapiens
gaccataactttgcg

SEQ ID NO: 2055896 - DNA, 15 bp, Homo sapiens
accataactttgcga

SEQ ID NO: 2055897 - DNA, 15 bp, Homo sapiens
ccataactttgcgag

SEQ ID NO: 2055898 - DNA, 15 bp, Homo sapiens
cataactttgcgagg

SEQ ID NO: 2055899 - DNA, 15 bp, Homo sapiens
ataactttgcgaggt

SEQ ID NO: 2055900 - DNA, 15 bp, Homo sapiens
taactttgcgaggtt

SEQ ID NO: 2055901 - DNA, 15 bp, Homo sapiens
aactttgcgaggttc

SEQ ID NO: 2055902 - DNA, 15 bp, Homo sapiens
actttgcgaggttcg

SEQ ID NO: 2055903 - DNA, 15 bp, Homo sapiens
ctttgcgaggttcgc

SEQ ID NO: 2055904 - DNA, 15 bp, Homo sapiens
tttgcgaggttcgct

SEQ ID NO: 2055905 - DNA, 15 bp, Homo sapiens
ttgcgaggttcgctt

SEQ ID NO: 2055906 - DNA, 15 bp, Homo sapiens
tgcgaggttcgcttt

SEQ ID NO: 2055907 - DNA, 15 bp, Homo sapiens
gcgaggttcgcttta

SEQ ID NO: 2055908 - DNA, 15 bp, Homo sapiens
cgaggttcgctttac

SEQ ID NO: 2055909 - DNA, 15 bp, Homo sapiens
gaggttcgctttaca

SEQ ID NO: 2055910 - DNA, 15 bp, Homo sapiens
aggttcgctttacac

SEQ ID NO: 2055911 - DNA, 15 bp, Homo sapiens
ggttcgctttacaca

SEQ ID NO: 2055912 - DNA, 15 bp, Homo sapiens
gttcgctttacacat

SEQ ID NO: 2055913 - DNA, 15 bp, Homo sapiens
ttcgctttacacata

SEQ ID NO: 2055914 - DNA, 15 bp, Homo sapiens
tcgctttacacatag

SEQ ID NO: 2055915 - DNA, 15 bp, Homo sapiens
cgctttacacatagg

SEQ ID NO: 2055916 - DNA, 15 bp, Homo sapiens
gctttacacataggc

SEQ ID NO: 2055917 - DNA, 15 bp, Homo sapiens
ctttacacataggca

SEQ ID NO: 2055918 - DNA, 15 bp, Homo sapiens
tttacacataggcat

SEQ ID NO: 2055919 - DNA, 15 bp, Homo sapiens
ttacacataggcata

SEQ ID NO: 2055920 - DNA, 15 bp, Homo sapiens
tacacataggcatat

SEQ ID NO: 2055921 - DNA, 15 bp, Homo sapiens
acacataggcatatc

SEQ ID NO: 2055922 - DNA, 15 bp, Homo sapiens
cacataggcatatcc

SEQ ID NO: 2055923 - DNA, 15 bp, Homo sapiens
acataggcatatcca

SEQ ID NO: 2055924 - DNA, 15 bp, Homo sapiens
cataggcatatccag

SEQ ID NO: 2055925 - DNA, 15 bp, Homo sapiens
ataggcatatccagt

SEQ ID NO: 2055926 - DNA, 15 bp, Homo sapiens
taggcatatccagtt

SEQ ID NO: 2055927 - DNA, 15 bp, Homo sapiens
aggcatatccagttc

SEQ ID NO: 2055928 - DNA, 15 bp, Homo sapiens
ggcatatccagttcc

SEQ ID NO: 2055929 - DNA, 15 bp, Homo sapiens
gcatatccagttcct

SEQ ID NO: 2055930 - DNA, 15 bp, Homo sapiens
catatccagttcctt

SEQ ID NO: 2055931 - DNA, 15 bp, Homo sapiens
atatccagttcctta

SEQ ID NO: 2055932 - DNA, 15 bp, Homo sapiens
tatccagttccttag

SEQ ID NO: 2055933 - DNA, 15 bp, Homo sapiens
atccagttccttaga

SEQ ID NO: 2055934 - DNA, 15 bp, Homo sapiens
tccagttccttagac

SEQ ID NO: 2055935 - DNA, 15 bp, Homo sapiens
ccagttccttagaca

SEQ ID NO: 2055936 - DNA, 15 bp, Homo sapiens
cagttccttagacat

SEQ ID NO: 2055937 - DNA, 15 bp, Homo sapiens
agttccttagacatt

SEQ ID NO: 2055938 - DNA, 15 bp, Homo sapiens
gttccttagacattg

SEQ ID NO: 2055939 - DNA, 15 bp, Homo sapiens
ttccttagacattga

SEQ ID NO: 2055940 - DNA, 15 bp, Homo sapiens
tccttagacattgac

SEQ ID NO: 2055941 - DNA, 15 bp, Homo sapiens
ccttagacattgact

SEQ ID NO: 2055942 - DNA, 15 bp, Homo sapiens
cttagacattgactg

SEQ ID NO: 2055943 - DNA, 15 bp, Homo sapiens
ttagacattgactgg

SEQ ID NO: 2055944 - DNA, 15 bp, Homo sapiens
tagacattgactggg

SEQ ID NO: 2055945 - DNA, 15 bp, Homo sapiens
agacattgactgggt

SEQ ID NO: 2055946 - DNA, 15 bp, Homo sapiens
gacattgactgggtc

SEQ ID NO: 2055947 - DNA, 15 bp, Homo sapiens
acattgactgggtct

SEQ ID NO: 2055948 - DNA, 15 bp, Homo sapiens
cattgactgggtctc

SEQ ID NO: 2055949 - DNA, 15 bp, Homo sapiens
attgactgggtctcc

SEQ ID NO: 2055950 - DNA, 15 bp, Homo sapiens
ttgactgggtctcct

SEQ ID NO: 2055951 - DNA, 15 bp, Homo sapiens
tgactgggtctcctg

SEQ ID NO: 2055952 - DNA, 15 bp, Homo sapiens
gactgggtctcctgg

SEQ ID NO: 2055953 - DNA, 15 bp, Homo sapiens
actgggtctcctggg

SEQ ID NO: 2055954 - DNA, 15 bp, Homo sapiens
ctgggtctcctgggt

SEQ ID NO: 2055955 - DNA, 15 bp, Homo sapiens
tgggtctcctgggtt

SEQ ID NO: 2055956 - DNA, 15 bp, Homo sapiens
gggtctcctgggttg

SEQ ID NO: 2055957 - DNA, 15 bp, Homo sapiens
ggtctcctgggttgc

SEQ ID NO: 2055958 - DNA, 15 bp, Homo sapiens
gtctcctgggttgcg

SEQ ID NO: 2055959 - DNA, 15 bp, Homo sapiens
tctcctgggttgcgg

SEQ ID NO: 2055960 - DNA, 15 bp, Homo sapiens
ctcctgggttgcggc

SEQ ID NO: 2055961 - DNA, 15 bp, Homo sapiens
tcctgggttgcggca

SEQ ID NO: 2055962 - DNA, 15 bp, Homo sapiens
cctgggttgcggcag

SEQ ID NO: 2055963 - DNA, 15 bp, Homo sapiens
ctgggttgcggcaga

SEQ ID NO: 2055964 - DNA, 15 bp, Homo sapiens
tgggttgcggcagag

SEQ ID NO: 2055965 - DNA, 15 bp, Homo sapiens
gggttgcggcagagc

SEQ ID NO: 2055966 - DNA, 15 bp, Homo sapiens
ggttgcggcagagcg

SEQ ID NO: 2055967 - DNA, 15 bp, Homo sapiens
gttgcggcagagcgt

SEQ ID NO: 2055968 - DNA, 15 bp, Homo sapiens
ttgcggcagagcgtg

SEQ ID NO: 2055969 - DNA, 15 bp, Homo sapiens
tgcggcagagcgtgc

SEQ ID NO: 2055970 - DNA, 15 bp, Homo sapiens
gcggcagagcgtgca

SEQ ID NO: 2055971 - DNA, 15 bp, Homo sapiens
cggcagagcgtgcag

SEQ ID NO: 2055972 - DNA, 15 bp, Homo sapiens
ggcagagcgtgcagt

SEQ ID NO: 2055973 - DNA, 15 bp, Homo sapiens
gcagagcgtgcagtc

SEQ ID NO: 2055974 - DNA, 15 bp, Homo sapiens
cagagcgtgcagtca

SEQ ID NO: 2055975 - DNA, 15 bp, Homo sapiens
agagcgtgcagtcag

SEQ ID NO: 2055976 - DNA, 15 bp, Homo sapiens
gagcgtgcagtcagc

SEQ ID NO: 2055977 - DNA, 15 bp, Homo sapiens
agcgtgcagtcagct

SEQ ID NO: 2055978 - DNA, 15 bp, Homo sapiens
gcgtgcagtcagctc

SEQ ID NO: 2055979 - DNA, 15 bp, Homo sapiens
cgtgcagtcagctca

SEQ ID NO: 2055980 - DNA, 15 bp, Homo sapiens
gtgcagtcagctcag

SEQ ID NO: 2055981 - DNA, 15 bp, Homo sapiens
tgcagtcagctcaga

SEQ ID NO: 2055982 - DNA, 15 bp, Homo sapiens
gcagtcagctcagag

SEQ ID NO: 2055983 - DNA, 15 bp, Homo sapiens
cagtcagctcagagg

SEQ ID NO: 2055984 - DNA, 15 bp, Homo sapiens
agtcagctcagagga

SEQ ID NO: 2055985 - DNA, 15 bp, Homo sapiens
gtcagctcagaggaa

SEQ ID NO: 2055986 - DNA, 15 bp, Homo sapiens
tcagctcagaggaac

SEQ ID NO: 2055987 - DNA, 15 bp, Homo sapiens
cagctcagaggaact

SEQ ID NO: 2055988 - DNA, 15 bp, Homo sapiens
agctcagaggaacta

SEQ ID NO: 2055989 - DNA, 15 bp, Homo sapiens
gctcagaggaactag

SEQ ID NO: 2055990 - DNA, 15 bp, Homo sapiens
ctcagaggaactagc

SEQ ID NO: 2055991 - DNA, 15 bp, Homo sapiens
tcagaggaactagct

SEQ ID NO: 2055992 - DNA, 15 bp, Homo sapiens
cagaggaactagctc

SEQ ID NO: 2055993 - DNA, 15 bp, Homo sapiens
agaggaactagctct

SEQ ID NO: 2055994 - DNA, 15 bp, Homo sapiens
gaggaactagctctc

SEQ ID NO: 2055995 - DNA, 15 bp, Homo sapiens
aggaactagctctcg

SEQ ID NO: 2055996 - DNA, 15 bp, Homo sapiens
ggaactagctctcgg

SEQ ID NO: 2055997 - DNA, 15 bp, Homo sapiens
gaactagctctcggt

SEQ ID NO: 2055998 - DNA, 15 bp, Homo sapiens
aactagctctcggtc

SEQ ID NO: 2055999 - DNA, 15 bp, Homo sapiens
actagctctcggtcc

SEQ ID NO: 2056000 - DNA, 15 bp, Homo sapiens
ctagctctcggtcct

SEQ ID NO: 2056001 - DNA, 15 bp, Homo sapiens
tagctctcggtcctc

SEQ ID NO: 2056002 - DNA, 15 bp, Homo sapiens
agctctcggtcctct

SEQ ID NO: 2056003 - DNA, 15 bp, Homo sapiens
gctctcggtcctctt

SEQ ID NO: 2056004 - DNA, 15 bp, Homo sapiens
ctctcggtcctctta

SEQ ID NO: 2056005 - DNA, 15 bp, Homo sapiens
tctcggtcctcttag

SEQ ID NO: 2056006 - DNA, 15 bp, Homo sapiens
ctcggtcctcttagt

SEQ ID NO: 2056007 - DNA, 15 bp, Homo sapiens
tcggtcctcttagtg

SEQ ID NO: 2056008 - DNA, 15 bp, Homo sapiens
cggtcctcttagtgt

SEQ ID NO: 2056009 - DNA, 15 bp, Homo sapiens
ggtcctcttagtgtc

SEQ ID NO: 2056010 - DNA, 15 bp, Homo sapiens
gtcctcttagtgtca

SEQ ID NO: 2056011 - DNA, 15 bp, Homo sapiens
tcctcttagtgtcat

SEQ ID NO: 2056012 - DNA, 15 bp, Homo sapiens
cctcttagtgtcatt

SEQ ID NO: 2056013 - DNA, 15 bp, Homo sapiens
ctcttagtgtcatta

SEQ ID NO: 2056014 - DNA, 15 bp, Homo sapiens
tcttagtgtcattat

SEQ ID NO: 2056015 - DNA, 15 bp, Homo sapiens
cttagtgtcattatg

SEQ ID NO: 2056016 - DNA, 15 bp, Homo sapiens
ttagtgtcattatgg

SEQ ID NO: 2056017 - DNA, 15 bp, Homo sapiens
tagtgtcattatggt

SEQ ID NO: 2056018 - DNA, 15 bp, Homo sapiens
agtgtcattatggta

SEQ ID NO: 2056019 - DNA, 15 bp, Homo sapiens
gtgtcattatggtaa

SEQ ID NO: 2056020 - DNA, 15 bp, Homo sapiens
tgtcattatggtaat

SEQ ID NO: 2056021 - DNA, 15 bp, Homo sapiens
gtcattatggtaatt

SEQ ID NO: 2056022 - DNA, 15 bp, Homo sapiens
tcattatggtaattc

SEQ ID NO: 2056023 - DNA, 15 bp, Homo sapiens
cattatggtaattca

SEQ ID NO: 2056024 - DNA, 15 bp, Homo sapiens
attatggtaattcac

SEQ ID NO: 2056025 - DNA, 15 bp, Homo sapiens
ttatggtaattcaca

SEQ ID NO: 2056026 - DNA, 15 bp, Homo sapiens
tatggtaattcacag

SEQ ID NO: 2056027 - DNA, 15 bp, Homo sapiens
atggtaattcacagg

SEQ ID NO: 2056028 - DNA, 15 bp, Homo sapiens
tggtaattcacaggt

SEQ ID NO: 2056029 - DNA, 15 bp, Homo sapiens
ggtaattcacaggtt

SEQ ID NO: 2056030 - DNA, 15 bp, Homo sapiens
gtaattcacaggttt

SEQ ID NO: 2056031 - DNA, 15 bp, Homo sapiens
taattcacaggttta

SEQ ID NO: 2056032 - DNA, 15 bp, Homo sapiens
aattcacaggtttac

SEQ ID NO: 2056033 - DNA, 15 bp, Homo sapiens
attcacaggtttact

SEQ ID NO: 2056034 - DNA, 15 bp, Homo sapiens
ttcacaggtttactt

SEQ ID NO: 2056035 - DNA, 15 bp, Homo sapiens
tcacaggtttacttc

SEQ ID NO: 2056036 - DNA, 15 bp, Homo sapiens
cacaggtttacttct

SEQ ID NO: 2056037 - DNA, 15 bp, Homo sapiens
acaggtttacttctg

SEQ ID NO: 2056038 - DNA, 15 bp, Homo sapiens
caggtttacttctgc

SEQ ID NO: 2056039 - DNA, 15 bp, Homo sapiens
aggtttacttctgcg

SEQ ID NO: 2056040 - DNA, 15 bp, Homo sapiens
ggtttacttctgcgc

SEQ ID NO: 2056041 - DNA, 15 bp, Homo sapiens
gtttacttctgcgcg

SEQ ID NO: 2056042 - DNA, 15 bp, Homo sapiens
tttacttctgcgcgc

SEQ ID NO: 2056043 - DNA, 15 bp, Homo sapiens
ttacttctgcgcgcg

SEQ ID NO: 2056044 - DNA, 15 bp, Homo sapiens
tacttctgcgcgcgc

SEQ ID NO: 2056045 - DNA, 15 bp, Homo sapiens
acttctgcgcgcgcg

SEQ ID NO: 2056046 - DNA, 15 bp, Homo sapiens
cttctgcgcgcgcgc

SEQ ID NO: 2056047 - DNA, 15 bp, Homo sapiens
ttctgcgcgcgcgca

SEQ ID NO: 2056048 - DNA, 15 bp, Homo sapiens
tctgcgcgcgcgcac

SEQ ID NO: 2056049 - DNA, 15 bp, Homo sapiens
ctgcgcgcgcgcact

SEQ ID NO: 2056050 - DNA, 15 bp, Homo sapiens
tgcgcgcgcgcactc

SEQ ID NO: 2056051 - DNA, 15 bp, Homo sapiens
gcgcgcgcgcactca

SEQ ID NO: 2056052 - DNA, 15 bp, Homo sapiens
cgcgcgcgcactcag

SEQ ID NO: 2056053 - DNA, 15 bp, Homo sapiens
gcgcgcgcactcagc

SEQ ID NO: 2056054 - DNA, 15 bp, Homo sapiens
cgcgcgcactcagcc

SEQ ID NO: 2056055 - DNA, 15 bp, Homo sapiens
gcgcgcactcagccc

SEQ ID NO: 2056056 - DNA, 15 bp, Homo sapiens
cgcgcactcagcccc

SEQ ID NO: 2056057 - DNA, 15 bp, Homo sapiens
gcgcactcagccccg

SEQ ID NO: 2056058 - DNA, 15 bp, Homo sapiens
cgcactcagccccgt

SEQ ID NO: 2056059 - DNA, 15 bp, Homo sapiens
gcactcagccccgtg

SEQ ID NO: 2056060 - DNA, 15 bp, Homo sapiens
cactcagccccgtgt

SEQ ID NO: 2056061 - DNA, 15 bp, Homo sapiens
actcagccccgtgtg

SEQ ID NO: 2056062 - DNA, 15 bp, Homo sapiens
ctcagccccgtgtgt

SEQ ID NO: 2056063 - DNA, 15 bp, Homo sapiens
tcagccccgtgtgtg

SEQ ID NO: 2056064 - DNA, 15 bp, Homo sapiens
cagccccgtgtgtgc

SEQ ID NO: 2056065 - DNA, 15 bp, Homo sapiens
agccccgtgtgtgct

SEQ ID NO: 2056066 - DNA, 15 bp, Homo sapiens
gccccgtgtgtgctg

SEQ ID NO: 2056067 - DNA, 15 bp, Homo sapiens
ccccgtgtgtgctgc

SEQ ID NO: 2056068 - DNA, 15 bp, Homo sapiens
cccgtgtgtgctgct

SEQ ID NO: 2056069 - DNA, 15 bp, Homo sapiens
ccgtgtgtgctgctg

SEQ ID NO: 2056070 - DNA, 15 bp, Homo sapiens
cgtgtgtgctgctga

SEQ ID NO: 2056071 - DNA, 15 bp, Homo sapiens
gtgtgtgctgctgag

SEQ ID NO: 2056072 - DNA, 15 bp, Homo sapiens
tgtgtgctgctgaga

SEQ ID NO: 2056073 - DNA, 15 bp, Homo sapiens
gtgtgctgctgagat

SEQ ID NO: 2056074 - DNA, 15 bp, Homo sapiens
tgtgctgctgagatc

SEQ ID NO: 2056075 - DNA, 15 bp, Homo sapiens
gtgctgctgagatca

SEQ ID NO: 2056076 - DNA, 15 bp, Homo sapiens
tgctgctgagatcag

SEQ ID NO: 2056077 - DNA, 15 bp, Homo sapiens
gctgctgagatcagg

SEQ ID NO: 2056078 - DNA, 15 bp, Homo sapiens
ctgctgagatcaggt

SEQ ID NO: 2056079 - DNA, 15 bp, Homo sapiens
tgctgagatcaggta

SEQ ID NO: 2056080 - DNA, 15 bp, Homo sapiens
gctgagatcaggtaa

SEQ ID NO: 2056081 - DNA, 15 bp, Homo sapiens
ctgagatcaggtaaa

SEQ ID NO: 2056082 - DNA, 15 bp, Homo sapiens
tgagatcaggtaaat

SEQ ID NO: 2056083 - DNA, 15 bp, Homo sapiens
gagatcaggtaaatc

SEQ ID NO: 2056084 - DNA, 15 bp, Homo sapiens
agatcaggtaaatca

SEQ ID NO: 2056085 - DNA, 15 bp, Homo sapiens
gatcaggtaaatcag

SEQ ID NO: 2056086 - DNA, 15 bp, Homo sapiens
atcaggtaaatcagt

SEQ ID NO: 2056087 - DNA, 15 bp, Homo sapiens
tcaggtaaatcagta

SEQ ID NO: 2056088 - DNA, 15 bp, Homo sapiens
caggtaaatcagtag

SEQ ID NO: 2056089 - DNA, 15 bp, Homo sapiens
aggtaaatcagtagc

SEQ ID NO: 2056090 - DNA, 15 bp, Homo sapiens
ggtaaatcagtagca

SEQ ID NO: 2056091 - DNA, 15 bp, Homo sapiens
gtaaatcagtagcac

SEQ ID NO: 2056092 - DNA, 15 bp, Homo sapiens
taaatcagtagcacg

SEQ ID NO: 2056093 - DNA, 15 bp, Homo sapiens
aaatcagtagcacgc

SEQ ID NO: 2056094 - DNA, 15 bp, Homo sapiens
aatcagtagcacgcg

SEQ ID NO: 2056095 - DNA, 15 bp, Homo sapiens
atcagtagcacgcgg

SEQ ID NO: 2056096 - DNA, 15 bp, Homo sapiens
tcagtagcacgcggg

SEQ ID NO: 2056097 - DNA, 15 bp, Homo sapiens
cagtagcacgcgggc

SEQ ID NO: 2056098 - DNA, 15 bp, Homo sapiens
agtagcacgcgggcc

SEQ ID NO: 2056099 - DNA, 15 bp, Homo sapiens
gtagcacgcgggcca

SEQ ID NO: 2056100 - DNA, 15 bp, Homo sapiens
tagcacgcgggccaa

SEQ ID NO: 2056101 - DNA, 15 bp, Homo sapiens
agcacgcgggccaaa

SEQ ID NO: 2056102 - DNA, 15 bp, Homo sapiens
gcacgcgggccaaat

SEQ ID NO: 2056103 - DNA, 15 bp, Homo sapiens
cacgcgggccaaata

SEQ ID NO: 2056104 - DNA, 15 bp, Homo sapiens
acgcgggccaaataa

SEQ ID NO: 2056105 - DNA, 15 bp, Homo sapiens
cgcgggccaaataaa

SEQ ID NO: 2056106 - DNA, 15 bp, Homo sapiens
gcgggccaaataaag

SEQ ID NO: 2056107 - DNA, 15 bp, Homo sapiens
cgggccaaataaagc

SEQ ID NO: 2056108 - DNA, 15 bp, Homo sapiens
gggccaaataaagcc

SEQ ID NO: 2056109 - DNA, 15 bp, Homo sapiens
ggccaaataaagcct

SEQ ID NO: 2056110 - DNA, 15 bp, Homo sapiens
gccaaataaagcctt

SEQ ID NO: 2056111 - DNA, 15 bp, Homo sapiens
ccaaataaagccttg

SEQ ID NO: 2056112 - DNA, 15 bp, Homo sapiens
caaataaagccttgt

SEQ ID NO: 2056113 - DNA, 15 bp, Homo sapiens
aaataaagccttgtt

SEQ ID NO: 2056114 - DNA, 15 bp, Homo sapiens
aataaagccttgttt

SEQ ID NO: 2056115 - DNA, 15 bp, Homo sapiens
ataaagccttgtttt

SEQ ID NO: 2056116 - DNA, 15 bp, Homo sapiens
taaagccttgttttc

SEQ ID NO: 2056117 - DNA, 15 bp, Homo sapiens
aaagccttgttttcc

SEQ ID NO: 2056118 - DNA, 15 bp, Homo sapiens
aagccttgttttcct

SEQ ID NO: 2056119 - DNA, 15 bp, Homo sapiens
agccttgttttccta

SEQ ID NO: 2056120 - DNA, 15 bp, Homo sapiens
gccttgttttcctag

SEQ ID NO: 2056121 - DNA, 15 bp, Homo sapiens
ccttgttttcctaga

SEQ ID NO: 2056122 - DNA, 15 bp, Homo sapiens
cttgttttcctagag

SEQ ID NO: 2056123 - DNA, 15 bp, Homo sapiens
ttgttttcctagagc

SEQ ID NO: 2056124 - DNA, 15 bp, Homo sapiens
tgttttcctagagct

SEQ ID NO: 2056125 - DNA, 15 bp, Homo sapiens
gttttcctagagctt

SEQ ID NO: 2056126 - DNA, 15 bp, Homo sapiens
ttttcctagagcttt

SEQ ID NO: 2056127 - DNA, 15 bp, Homo sapiens
tttcctagagctttg

SEQ ID NO: 2056128 - DNA, 15 bp, Homo sapiens
ttcctagagctttgg

SEQ ID NO: 2056129 - DNA, 15 bp, Homo sapiens
tcctagagctttgga

SEQ ID NO: 2056130 - DNA, 15 bp, Homo sapiens
cctagagctttggac

SEQ ID NO: 2056131 - DNA, 15 bp, Homo sapiens
ctagagctttggact

SEQ ID NO: 2056132 - DNA, 15 bp, Homo sapiens
tagagctttggactt

SEQ ID NO: 2056133 - DNA, 15 bp, Homo sapiens
agagctttggacttt

SEQ ID NO: 2056134 - DNA, 15 bp, Homo sapiens
gagctttggactttt

SEQ ID NO: 2056135 - DNA, 15 bp, Homo sapiens
agctttggactttta

SEQ ID NO: 2056136 - DNA, 15 bp, Homo sapiens
gctttggacttttag

SEQ ID NO: 2056137 - DNA, 15 bp, Homo sapiens
ctttggacttttaga

SEQ ID NO: 2056138 - DNA, 15 bp, Homo sapiens
tttggacttttagag

SEQ ID NO: 2056139 - DNA, 15 bp, Homo sapiens
ttggacttttagagc

SEQ ID NO: 2056140 - DNA, 15 bp, Homo sapiens
tggacttttagagca

SEQ ID NO: 2056141 - DNA, 15 bp, Homo sapiens
ggacttttagagcag

SEQ ID NO: 2056142 - DNA, 15 bp, Homo sapiens
gacttttagagcagc

SEQ ID NO: 2056143 - DNA, 15 bp, Homo sapiens
acttttagagcagca

SEQ ID NO: 2056144 - DNA, 15 bp, Homo sapiens
cttttagagcagcag

SEQ ID NO: 2056145 - DNA, 15 bp, Homo sapiens
ttttagagcagcagc

SEQ ID NO: 2056146 - DNA, 15 bp, Homo sapiens
tttagagcagcagca

SEQ ID NO: 2056147 - DNA, 15 bp, Homo sapiens
ttagagcagcagcat

SEQ ID NO: 2056148 - DNA, 15 bp, Homo sapiens
tagagcagcagcatt

SEQ ID NO: 2056149 - DNA, 15 bp, Homo sapiens
agagcagcagcatta

SEQ ID NO: 2056150 - DNA, 15 bp, Homo sapiens
gagcagcagcattag

SEQ ID NO: 2056151 - DNA, 15 bp, Homo sapiens
agcagcagcattagg

SEQ ID NO: 2056152 - DNA, 15 bp, Homo sapiens
gcagcagcattagga

SEQ ID NO: 2056153 - DNA, 15 bp, Homo sapiens
cagcagcattaggag

SEQ ID NO: 2056154 - DNA, 15 bp, Homo sapiens
agcagcattaggagg

SEQ ID NO: 2056155 - DNA, 15 bp, Homo sapiens
gcagcattaggaggg

SEQ ID NO: 2056156 - DNA, 15 bp, Homo sapiens
cagcattaggaggga

SEQ ID NO: 2056157 - DNA, 15 bp, Homo sapiens
agcattaggagggag

SEQ ID NO: 2056158 - DNA, 15 bp, Homo sapiens
gcattaggagggaga

SEQ ID NO: 2056159 - DNA, 15 bp, Homo sapiens
cattaggagggagaa

SEQ ID NO: 2056160 - DNA, 15 bp, Homo sapiens
attaggagggagaat

SEQ ID NO: 2056161 - DNA, 15 bp, Homo sapiens
ttaggagggagaatg

SEQ ID NO: 2056162 - DNA, 15 bp, Homo sapiens
taggagggagaatgc

SEQ ID NO: 2056163 - DNA, 15 bp, Homo sapiens
aggagggagaatgct

SEQ ID NO: 2056164 - DNA, 15 bp, Homo sapiens
ggagggagaatgcta

SEQ ID NO: 2056165 - DNA, 15 bp, Homo sapiens
gagggagaatgctag

SEQ ID NO: 2056166 - DNA, 15 bp, Homo sapiens
agggagaatgctagg

SEQ ID NO: 2056167 - DNA, 15 bp, Homo sapiens
gggagaatgctaggc

SEQ ID NO: 2056168 - DNA, 15 bp, Homo sapiens
ggagaatgctaggca

SEQ ID NO: 2056169 - DNA, 15 bp, Homo sapiens
gagaatgctaggcaa

SEQ ID NO: 2056170 - DNA, 15 bp, Homo sapiens
agaatgctaggcaag

SEQ ID NO: 2056171 - DNA, 15 bp, Homo sapiens
gaatgctaggcaagg

SEQ ID NO: 2056172 - DNA, 15 bp, Homo sapiens
aatgctaggcaaggc

SEQ ID NO: 2056173 - DNA, 15 bp, Homo sapiens
atgctaggcaaggca

SEQ ID NO: 2056174 - DNA, 15 bp, Homo sapiens
tgctaggcaaggcag

SEQ ID NO: 2056175 - DNA, 15 bp, Homo sapiens
gctaggcaaggcaga

SEQ ID NO: 2056176 - DNA, 15 bp, Homo sapiens
ctaggcaaggcagac

SEQ ID NO: 2056177 - DNA, 15 bp, Homo sapiens
taggcaaggcagacg

SEQ ID NO: 2056178 - DNA, 15 bp, Homo sapiens
aggcaaggcagacgc

SEQ ID NO: 2056179 - DNA, 15 bp, Homo sapiens
ggcaaggcagacgct

SEQ ID NO: 2056180 - DNA, 15 bp, Homo sapiens
gcaaggcagacgcta

SEQ ID NO: 2056181 - DNA, 15 bp, Homo sapiens
caaggcagacgctaa

SEQ ID NO: 2056182 - DNA, 15 bp, Homo sapiens
aaggcagacgctaac

SEQ ID NO: 2056183 - DNA, 15 bp, Homo sapiens
aggcagacgctaacc

SEQ ID NO: 2056184 - DNA, 15 bp, Homo sapiens
ggcagacgctaacct

SEQ ID NO: 2056185 - DNA, 15 bp, Homo sapiens
gcagacgctaacctg

SEQ ID NO: 2056186 - DNA, 15 bp, Homo sapiens
cagacgctaacctgt

SEQ ID NO: 2056187 - DNA, 15 bp, Homo sapiens
agacgctaacctgtt

SEQ ID NO: 2056188 - DNA, 15 bp, Homo sapiens
gacgctaacctgttg

SEQ ID NO: 2056189 - DNA, 15 bp, Homo sapiens
acgctaacctgttgt

SEQ ID NO: 2056190 - DNA, 15 bp, Homo sapiens
cgctaacctgttgtg

SEQ ID NO: 2056191 - DNA, 15 bp, Homo sapiens
gctaacctgttgtgg

SEQ ID NO: 2056192 - DNA, 15 bp, Homo sapiens
ctaacctgttgtggg

SEQ ID NO: 2056193 - DNA, 15 bp, Homo sapiens
taacctgttgtgggt

SEQ ID NO: 2056194 - DNA, 15 bp, Homo sapiens
aacctgttgtgggtc

SEQ ID NO: 2056195 - DNA, 15 bp, Homo sapiens
acctgttgtgggtca

SEQ ID NO: 2056196 - DNA, 15 bp, Homo sapiens
cctgttgtgggtcat

SEQ ID NO: 2056197 - DNA, 15 bp, Homo sapiens
ctgttgtgggtcatt

SEQ ID NO: 2056198 - DNA, 15 bp, Homo sapiens
tgttgtgggtcattt

SEQ ID NO: 2056199 - DNA, 15 bp, Homo sapiens
gttgtgggtcatttt

SEQ ID NO: 2056200 - DNA, 15 bp, Homo sapiens
ttgtgggtcattttc

SEQ ID NO: 2056201 - DNA, 15 bp, Homo sapiens
tgtgggtcattttcc

SEQ ID NO: 2056202 - DNA, 15 bp, Homo sapiens
gtgggtcattttcca

SEQ ID NO: 2056203 - DNA, 15 bp, Homo sapiens
tgggtcattttccat

SEQ ID NO: 2056204 - DNA, 15 bp, Homo sapiens
gggtcattttccata

SEQ ID NO: 2056205 - DNA, 15 bp, Homo sapiens
ggtcattttccatag

SEQ ID NO: 2056206 - DNA, 15 bp, Homo sapiens
gtcattttccataga

SEQ ID NO: 2056207 - DNA, 15 bp, Homo sapiens
tcattttccatagac

SEQ ID NO: 2056208 - DNA, 15 bp, Homo sapiens
cattttccatagact

SEQ ID NO: 2056209 - DNA, 15 bp, Homo sapiens
attttccatagactg

SEQ ID NO: 2056210 - DNA, 15 bp, Homo sapiens
ttttccatagactgg

SEQ ID NO: 2056211 - DNA, 15 bp, Homo sapiens
tttccatagactgga

SEQ ID NO: 2056212 - DNA, 15 bp, Homo sapiens
ttccatagactggat

SEQ ID NO: 2056213 - DNA, 15 bp, Homo sapiens
tccatagactggatc

SEQ ID NO: 2056214 - DNA, 15 bp, Homo sapiens
ccatagactggatcc

SEQ ID NO: 2056215 - DNA, 15 bp, Homo sapiens
catagactggatcca

SEQ ID NO: 2056216 - DNA, 15 bp, Homo sapiens
atagactggatccag

SEQ ID NO: 2056217 - DNA, 15 bp, Homo sapiens
tagactggatccaga

SEQ ID NO: 2056218 - DNA, 15 bp, Homo sapiens
agactggatccagag

SEQ ID NO: 2056219 - DNA, 15 bp, Homo sapiens
gactggatccagagc

SEQ ID NO: 2056220 - DNA, 15 bp, Homo sapiens
actggatccagagca

SEQ ID NO: 2056221 - DNA, 15 bp, Homo sapiens
ctggatccagagcac

SEQ ID NO: 2056222 - DNA, 15 bp, Homo sapiens
tggatccagagcaca

SEQ ID NO: 2056223 - DNA, 15 bp, Homo sapiens
ggatccagagcacag

SEQ ID NO: 2056224 - DNA, 15 bp, Homo sapiens
gatccagagcacagg

SEQ ID NO: 2056225 - DNA, 15 bp, Homo sapiens
atccagagcacaggg

SEQ ID NO: 2056226 - DNA, 15 bp, Homo sapiens
tccagagcacaggga

SEQ ID NO: 2056227 - DNA, 15 bp, Homo sapiens
ccagagcacagggac

SEQ ID NO: 2056228 - DNA, 15 bp, Homo sapiens
cagagcacagggaca

SEQ ID NO: 2056229 - DNA, 15 bp, Homo sapiens
agagcacagggacag

SEQ ID NO: 2056230 - DNA, 15 bp, Homo sapiens
gagcacagggacagg

SEQ ID NO: 2056231 - DNA, 15 bp, Homo sapiens
agcacagggacaggg

SEQ ID NO: 2056232 - DNA, 15 bp, Homo sapiens
gcacagggacagggg

SEQ ID NO: 2056233 - DNA, 15 bp, Homo sapiens
cacagggacagggga

SEQ ID NO: 2056234 - DNA, 15 bp, Homo sapiens
acagggacaggggaa

SEQ ID NO: 2056235 - DNA, 15 bp, Homo sapiens
cagggacaggggaag

SEQ ID NO: 2056236 - DNA, 15 bp, Homo sapiens
agggacaggggaagg

SEQ ID NO: 2056237 - DNA, 15 bp, Homo sapiens
gggacaggggaagga

SEQ ID NO: 2056238 - DNA, 15 bp, Homo sapiens
ggacaggggaaggat

SEQ ID NO: 2056239 - DNA, 15 bp, Homo sapiens
gacaggggaaggata

SEQ ID NO: 2056240 - DNA, 15 bp, Homo sapiens
acaggggaaggatat

SEQ ID NO: 2056241 - DNA, 15 bp, Homo sapiens
caggggaaggatatc

SEQ ID NO: 2056242 - DNA, 15 bp, Homo sapiens
aggggaaggatatcc

SEQ ID NO: 2056243 - DNA, 15 bp, Homo sapiens
ggggaaggatatcca

SEQ ID NO: 2056244 - DNA, 15 bp, Homo sapiens
gggaaggatatccaa

SEQ ID NO: 2056245 - DNA, 15 bp, Homo sapiens
ggaaggatatccaaa

SEQ ID NO: 2056246 - DNA, 15 bp, Homo sapiens
gaaggatatccaaag

SEQ ID NO: 2056247 - DNA, 15 bp, Homo sapiens
aaggatatccaaaga

SEQ ID NO: 2056248 - DNA, 15 bp, Homo sapiens
aggatatccaaagat

SEQ ID NO: 2056249 - DNA, 15 bp, Homo sapiens
ggatatccaaagata

SEQ ID NO: 2056250 - DNA, 15 bp, Homo sapiens
gatatccaaagatac

SEQ ID NO: 2056251 - DNA, 15 bp, Homo sapiens
atatccaaagatact

SEQ ID NO: 2056252 - DNA, 15 bp, Homo sapiens
tatccaaagatactt

SEQ ID NO: 2056253 - DNA, 15 bp, Homo sapiens
atccaaagatacttg

SEQ ID NO: 2056254 - DNA, 15 bp, Homo sapiens
tccaaagatacttgg

SEQ ID NO: 2056255 - DNA, 15 bp, Homo sapiens
ccaaagatacttggt

SEQ ID NO: 2056256 - DNA, 15 bp, Homo sapiens
caaagatacttggtg

SEQ ID NO: 2056257 - DNA, 15 bp, Homo sapiens
aaagatacttggtgg

SEQ ID NO: 2056258 - DNA, 15 bp, Homo sapiens
aagatacttggtggc

SEQ ID NO: 2056259 - DNA, 15 bp, Homo sapiens
agatacttggtggcc

SEQ ID NO: 2056260 - DNA, 15 bp, Homo sapiens
gatacttggtggcct

SEQ ID NO: 2056261 - DNA, 15 bp, Homo sapiens
atacttggtggcctg

SEQ ID NO: 2056262 - DNA, 15 bp, Homo sapiens
tacttggtggcctga

SEQ ID NO: 2056263 - DNA, 15 bp, Homo sapiens
acttggtggcctgat

SEQ ID NO: 2056264 - DNA, 15 bp, Homo sapiens
cttggtggcctgata

SEQ ID NO: 2056265 - DNA, 15 bp, Homo sapiens
ttggtggcctgatag

SEQ ID NO: 2056266 - DNA, 15 bp, Homo sapiens
tggtggcctgatagc

SEQ ID NO: 2056267 - DNA, 15 bp, Homo sapiens
ggtggcctgatagct

SEQ ID NO: 2056268 - DNA, 15 bp, Homo sapiens
gtggcctgatagctc

SEQ ID NO: 2056269 - DNA, 15 bp, Homo sapiens
tggcctgatagctct

SEQ ID NO: 2056270 - DNA, 15 bp, Homo sapiens
ggcctgatagctctg

SEQ ID NO: 2056271 - DNA, 15 bp, Homo sapiens
gcctgatagctctga

SEQ ID NO: 2056272 - DNA, 15 bp, Homo sapiens
cctgatagctctgat

SEQ ID NO: 2056273 - DNA, 15 bp, Homo sapiens
ctgatagctctgatt

SEQ ID NO: 2056274 - DNA, 15 bp, Homo sapiens
tgatagctctgattt

SEQ ID NO: 2056275 - DNA, 15 bp, Homo sapiens
gatagctctgatttt

SEQ ID NO: 2056276 - DNA, 15 bp, Homo sapiens
atagctctgatttta

SEQ ID NO: 2056277 - DNA, 15 bp, Homo sapiens
tagctctgattttat

SEQ ID NO: 2056278 - DNA, 15 bp, Homo sapiens
agctctgattttata

SEQ ID NO: 2056279 - DNA, 15 bp, Homo sapiens
gctctgattttatat

SEQ ID NO: 2056280 - DNA, 15 bp, Homo sapiens
ctctgattttatata

SEQ ID NO: 2056281 - DNA, 15 bp, Homo sapiens
tctgattttatataa

SEQ ID NO: 2056282 - DNA, 15 bp, Homo sapiens
ctgattttatataaa

SEQ ID NO: 2056283 - DNA, 15 bp, Homo sapiens
tgattttatataaat

SEQ ID NO: 2056284 - DNA, 15 bp, Homo sapiens
gattttatataaatg

SEQ ID NO: 2056285 - DNA, 15 bp, Homo sapiens
attttatataaatga

SEQ ID NO: 2056286 - DNA, 15 bp, Homo sapiens
ttttatataaatgaa

SEQ ID NO: 2056287 - DNA, 15 bp, Homo sapiens
tttatataaatgaat

SEQ ID NO: 2056288 - DNA, 15 bp, Homo sapiens
ttatataaatgaatg

SEQ ID NO: 2056289 - DNA, 15 bp, Homo sapiens
tatataaatgaatga

SEQ ID NO: 2056290 - DNA, 15 bp, Homo sapiens
atataaatgaatgat

SEQ ID NO: 2056291 - DNA, 15 bp, Homo sapiens
tataaatgaatgatc

SEQ ID NO: 2056292 - DNA, 15 bp, Homo sapiens
ataaatgaatgatca

SEQ ID NO: 2056293 - DNA, 15 bp, Homo sapiens
taaatgaatgatcaa

SEQ ID NO: 2056294 - DNA, 15 bp, Homo sapiens
aaatgaatgatcaac

SEQ ID NO: 2056295 - DNA, 15 bp, Homo sapiens
aatgaatgatcaaca

SEQ ID NO: 2056296 - DNA, 15 bp, Homo sapiens
atgaatgatcaacaa

SEQ ID NO: 2056297 - DNA, 15 bp, Homo sapiens
tgaatgatcaacaat

SEQ ID NO: 2056298 - DNA, 15 bp, Homo sapiens
gaatgatcaacaatc

SEQ ID NO: 2056299 - DNA, 15 bp, Homo sapiens
aatgatcaacaatca

SEQ ID NO: 2056300 - DNA, 15 bp, Homo sapiens
atgatcaacaatcac

SEQ ID NO: 2056301 - DNA, 15 bp, Homo sapiens
tgatcaacaatcacc

SEQ ID NO: 2056302 - DNA, 15 bp, Homo sapiens
gatcaacaatcacca

SEQ ID NO: 2056303 - DNA, 15 bp, Homo sapiens
atcaacaatcaccaa

SEQ ID NO: 2056304 - DNA, 15 bp, Homo sapiens
tcaacaatcaccaat

SEQ ID NO: 2056305 - DNA, 15 bp, Homo sapiens
caacaatcaccaata

SEQ ID NO: 2056306 - DNA, 15 bp, Homo sapiens
aacaatcaccaatac

SEQ ID NO: 2056307 - DNA, 15 bp, Homo sapiens
acaatcaccaatact

SEQ ID NO: 2056308 - DNA, 15 bp, Homo sapiens
caatcaccaatactc

SEQ ID NO: 2056309 - DNA, 15 bp, Homo sapiens
aatcaccaatactct

SEQ ID NO: 2056310 - DNA, 15 bp, Homo sapiens
atcaccaatactcta

SEQ ID NO: 2056311 - DNA, 15 bp, Homo sapiens
tcaccaatactctag

SEQ ID NO: 2056312 - DNA, 15 bp, Homo sapiens
caccaatactctaga

SEQ ID NO: 2056313 - DNA, 15 bp, Homo sapiens
accaatactctagaa

SEQ ID NO: 2056314 - DNA, 15 bp, Homo sapiens
ccaatactctagaaa

SEQ ID NO: 2056315 - DNA, 15 bp, Homo sapiens
caatactctagaaat

SEQ ID NO: 2056316 - DNA, 15 bp, Homo sapiens
aatactctagaaata

SEQ ID NO: 2056317 - DNA, 15 bp, Homo sapiens
atactctagaaatag

SEQ ID NO: 2056318 - DNA, 15 bp, Homo sapiens
tactctagaaataga

SEQ ID NO: 2056319 - DNA, 15 bp, Homo sapiens
actctagaaatagaa

SEQ ID NO: 2056320 - DNA, 15 bp, Homo sapiens
ctctagaaatagaat

SEQ ID NO: 2056321 - DNA, 15 bp, Homo sapiens
tctagaaatagaatg

SEQ ID NO: 2056322 - DNA, 15 bp, Homo sapiens
ctagaaatagaatgt

SEQ ID NO: 2056323 - DNA, 15 bp, Homo sapiens
tagaaatagaatgtt

SEQ ID NO: 2056324 - DNA, 15 bp, Homo sapiens
agaaatagaatgttt

SEQ ID NO: 2056325 - DNA, 15 bp, Homo sapiens
gaaatagaatgtttg

SEQ ID NO: 2056326 - DNA, 15 bp, Homo sapiens
aaatagaatgtttga

SEQ ID NO: 2056327 - DNA, 15 bp, Homo sapiens
aatagaatgtttgac

SEQ ID NO: 2056328 - DNA, 15 bp, Homo sapiens
atagaatgtttgaca

SEQ ID NO: 2056329 - DNA, 15 bp, Homo sapiens
tagaatgtttgacac

SEQ ID NO: 2056330 - DNA, 15 bp, Homo sapiens
agaatgtttgacact

SEQ ID NO: 2056331 - DNA, 15 bp, Homo sapiens
gaatgtttgacactc

SEQ ID NO: 2056332 - DNA, 15 bp, Homo sapiens
aatgtttgacactcc

SEQ ID NO: 2056333 - DNA, 15 bp, Homo sapiens
atgtttgacactcca

SEQ ID NO: 2056334 - DNA, 15 bp, Homo sapiens
tgtttgacactccac

SEQ ID NO: 2056335 - DNA, 15 bp, Homo sapiens
gtttgacactccacc

SEQ ID NO: 2056336 - DNA, 15 bp, Homo sapiens
tttgacactccacca

SEQ ID NO: 2056337 - DNA, 15 bp, Homo sapiens
ttgacactccaccaa

SEQ ID NO: 2056338 - DNA, 15 bp, Homo sapiens
tgacactccaccaac

SEQ ID NO: 2056339 - DNA, 15 bp, Homo sapiens
gacactccaccaaca

SEQ ID NO: 2056340 - DNA, 15 bp, Homo sapiens
acactccaccaacag

SEQ ID NO: 2056341 - DNA, 15 bp, Homo sapiens
cactccaccaacagt

SEQ ID NO: 2056342 - DNA, 15 bp, Homo sapiens
actccaccaacagtc

SEQ ID NO: 2056343 - DNA, 15 bp, Homo sapiens
ctccaccaacagtct

SEQ ID NO: 2056344 - DNA, 15 bp, Homo sapiens
tccaccaacagtctg

SEQ ID NO: 2056345 - DNA, 15 bp, Homo sapiens
ccaccaacagtctgc

SEQ ID NO: 2056346 - DNA, 15 bp, Homo sapiens
caccaacagtctgct

SEQ ID NO: 2056347 - DNA, 15 bp, Homo sapiens
accaacagtctgctg

SEQ ID NO: 2056348 - DNA, 15 bp, Homo sapiens
ccaacagtctgctgt

SEQ ID NO: 2056349 - DNA, 15 bp, Homo sapiens
caacagtctgctgtt

SEQ ID NO: 2056350 - DNA, 15 bp, Homo sapiens
aacagtctgctgtta

SEQ ID NO: 2056351 - DNA, 15 bp, Homo sapiens
acagtctgctgttac

SEQ ID NO: 2056352 - DNA, 15 bp, Homo sapiens
cagtctgctgttact

SEQ ID NO: 2056353 - DNA, 15 bp, Homo sapiens
agtctgctgttacta

SEQ ID NO: 2056354 - DNA, 15 bp, Homo sapiens
gtctgctgttactag

SEQ ID NO: 2056355 - DNA, 15 bp, Homo sapiens
tctgctgttactagc

SEQ ID NO: 2056356 - DNA, 15 bp, Homo sapiens
ctgctgttactagca

SEQ ID NO: 2056357 - DNA, 15 bp, Homo sapiens
tgctgttactagcag

SEQ ID NO: 2056358 - DNA, 15 bp, Homo sapiens
gctgttactagcagc

SEQ ID NO: 2056359 - DNA, 15 bp, Homo sapiens
ctgttactagcagca

SEQ ID NO: 2056360 - DNA, 15 bp, Homo sapiens
tgttactagcagcaa

SEQ ID NO: 2056361 - DNA, 15 bp, Homo sapiens
gttactagcagcaag

SEQ ID NO: 2056362 - DNA, 15 bp, Homo sapiens
ttactagcagcaaga

SEQ ID NO: 2056363 - DNA, 15 bp, Homo sapiens
tactagcagcaagat

SEQ ID NO: 2056364 - DNA, 15 bp, Homo sapiens
actagcagcaagatc

SEQ ID NO: 2056365 - DNA, 15 bp, Homo sapiens
ctagcagcaagatct

SEQ ID NO: 2056366 - DNA, 15 bp, Homo sapiens
tagcagcaagatcta

SEQ ID NO: 2056367 - DNA, 15 bp, Homo sapiens
agcagcaagatctaa

SEQ ID NO: 2056368 - DNA, 15 bp, Homo sapiens
gcagcaagatctaac

SEQ ID NO: 2056369 - DNA, 15 bp, Homo sapiens
cagcaagatctaaca

SEQ ID NO: 2056370 - DNA, 15 bp, Homo sapiens
agcaagatctaacaa

SEQ ID NO: 2056371 - DNA, 15 bp, Homo sapiens
gcaagatctaacaat

SEQ ID NO: 2056372 - DNA, 15 bp, Homo sapiens
caagatctaacaatc

SEQ ID NO: 2056373 - DNA, 15 bp, Homo sapiens
aagatctaacaatca

SEQ ID NO: 2056374 - DNA, 15 bp, Homo sapiens
agatctaacaatcaa

SEQ ID NO: 2056375 - DNA, 15 bp, Homo sapiens
gatctaacaatcaaa

SEQ ID NO: 2056376 - DNA, 15 bp, Homo sapiens
atctaacaatcaaag

SEQ ID NO: 2056377 - DNA, 15 bp, Homo sapiens
tctaacaatcaaaga

SEQ ID NO: 2056378 - DNA, 15 bp, Homo sapiens
ctaacaatcaaagac

SEQ ID NO: 2056379 - DNA, 15 bp, Homo sapiens
taacaatcaaagacc

SEQ ID NO: 2056380 - DNA, 15 bp, Homo sapiens
aacaatcaaagaccg

SEQ ID NO: 2056381 - DNA, 15 bp, Homo sapiens
acaatcaaagaccgg

SEQ ID NO: 2056382 - DNA, 15 bp, Homo sapiens
caatcaaagaccgga

SEQ ID NO: 2056383 - DNA, 15 bp, Homo sapiens
aatcaaagaccggat

SEQ ID NO: 2056384 - DNA, 15 bp, Homo sapiens
atcaaagaccggatt

SEQ ID NO: 2056385 - DNA, 15 bp, Homo sapiens
tcaaagaccggattc

SEQ ID NO: 2056386 - DNA, 15 bp, Homo sapiens
caaagaccggattcc

SEQ ID NO: 2056387 - DNA, 15 bp, Homo sapiens
aaagaccggattccc

SEQ ID NO: 2056388 - DNA, 15 bp, Homo sapiens
aagaccggattcccc

SEQ ID NO: 2056389 - DNA, 15 bp, Homo sapiens
agaccggattcccca

SEQ ID NO: 2056390 - DNA, 15 bp, Homo sapiens
gaccggattccccag

SEQ ID NO: 2056391 - DNA, 15 bp, Homo sapiens
accggattccccaga

SEQ ID NO: 2056392 - DNA, 15 bp, Homo sapiens
ccggattccccagaa

SEQ ID NO: 2056393 - DNA, 15 bp, Homo sapiens
cggattccccagaaa

SEQ ID NO: 2056394 - DNA, 15 bp, Homo sapiens
ggattccccagaaat

SEQ ID NO: 2056395 - DNA, 15 bp, Homo sapiens
gattccccagaaatg

SEQ ID NO: 2056396 - DNA, 15 bp, Homo sapiens
attccccagaaatgt

SEQ ID NO: 2056397 - DNA, 15 bp, Homo sapiens
ttccccagaaatgtg

SEQ ID NO: 2056398 - DNA, 15 bp, Homo sapiens
tccccagaaatgtgt

SEQ ID NO: 2056399 - DNA, 15 bp, Homo sapiens
ccccagaaatgtgtg

SEQ ID NO: 2056400 - DNA, 15 bp, Homo sapiens
cccagaaatgtgtga

SEQ ID NO: 2056401 - DNA, 15 bp, Homo sapiens
ccagaaatgtgtgaa

SEQ ID NO: 2056402 - DNA, 15 bp, Homo sapiens
cagaaatgtgtgaaa

SEQ ID NO: 2056403 - DNA, 15 bp, Homo sapiens
agaaatgtgtgaaat

SEQ ID NO: 2056404 - DNA, 15 bp, Homo sapiens
gaaatgtgtgaaata

SEQ ID NO: 2056405 - DNA, 15 bp, Homo sapiens
aaatgtgtgaaatag

SEQ ID NO: 2056406 - DNA, 15 bp, Homo sapiens
aatgtgtgaaataga

SEQ ID NO: 2056407 - DNA, 15 bp, Homo sapiens
atgtgtgaaatagag

SEQ ID NO: 2056408 - DNA, 15 bp, Homo sapiens
tgtgtgaaatagagg

SEQ ID NO: 2056409 - DNA, 15 bp, Homo sapiens
gtgtgaaatagaggg

SEQ ID NO: 2056410 - DNA, 15 bp, Homo sapiens
tgtgaaatagagggg

SEQ ID NO: 2056411 - DNA, 15 bp, Homo sapiens
gtgaaatagagggga

SEQ ID NO: 2056412 - DNA, 15 bp, Homo sapiens
tgaaatagaggggaa

SEQ ID NO: 2056413 - DNA, 15 bp, Homo sapiens
gaaatagaggggaaa

SEQ ID NO: 2056414 - DNA, 15 bp, Homo sapiens
aaatagaggggaaaa

SEQ ID NO: 2056415 - DNA, 15 bp, Homo sapiens
aatagaggggaaaag

SEQ ID NO: 2056416 - DNA, 15 bp, Homo sapiens
atagaggggaaaagg

SEQ ID NO: 2056417 - DNA, 15 bp, Homo sapiens
tagaggggaaaaggg

SEQ ID NO: 2056418 - DNA, 15 bp, Homo sapiens
agaggggaaaaggga

SEQ ID NO: 2056419 - DNA, 15 bp, Homo sapiens
gaggggaaaagggag

SEQ ID NO: 2056420 - DNA, 15 bp, Homo sapiens
aggggaaaagggaga

SEQ ID NO: 2056421 - DNA, 15 bp, Homo sapiens
ggggaaaagggagaa

SEQ ID NO: 2056422 - DNA, 15 bp, Homo sapiens
gggaaaagggagaag

SEQ ID NO: 2056423 - DNA, 15 bp, Homo sapiens
ggaaaagggagaaga

SEQ ID NO: 2056424 - DNA, 15 bp, Homo sapiens
gaaaagggagaagaa

SEQ ID NO: 2056425 - DNA, 15 bp, Homo sapiens
aaaagggagaagaaa

SEQ ID NO: 2056426 - DNA, 15 bp, Homo sapiens
aaagggagaagaaaa

SEQ ID NO: 2056427 - DNA, 15 bp, Homo sapiens
aagggagaagaaaaa

SEQ ID NO: 2056428 - DNA, 15 bp, Homo sapiens
agggagaagaaaaaa

SEQ ID NO: 2056429 - DNA, 15 bp, Homo sapiens
gggagaagaaaaaaa

SEQ ID NO: 2056430 - DNA, 15 bp, Homo sapiens
ggagaagaaaaaaaa

SEQ ID NO: 2056431 - DNA, 15 bp, Homo sapiens
gagaagaaaaaaaat

SEQ ID NO: 2056432 - DNA, 15 bp, Homo sapiens
agaagaaaaaaaatt

SEQ ID NO: 2056433 - DNA, 15 bp, Homo sapiens
gaagaaaaaaaattt

SEQ ID NO: 2056434 - DNA, 15 bp, Homo sapiens
aagaaaaaaaatttg

SEQ ID NO: 2056435 - DNA, 15 bp, Homo sapiens
agaaaaaaaatttgt

SEQ ID NO: 2056436 - DNA, 15 bp, Homo sapiens
gaaaaaaaatttgtc

SEQ ID NO: 2056437 - DNA, 15 bp, Homo sapiens
aaaaaaaatttgtct

SEQ ID NO: 2056438 - DNA, 15 bp, Homo sapiens
aaaaaaatttgtctt

SEQ ID NO: 2056439 - DNA, 15 bp, Homo sapiens
aaaaaatttgtcttt

SEQ ID NO: 2056440 - DNA, 15 bp, Homo sapiens
aaaaatttgtctttt

SEQ ID NO: 2056441 - DNA, 15 bp, Homo sapiens
aaaatttgtcttttt

SEQ ID NO: 2056442 - DNA, 15 bp, Homo sapiens
aaatttgtctttttc

SEQ ID NO: 2056443 - DNA, 15 bp, Homo sapiens
aatttgtctttttcc

SEQ ID NO: 2056444 - DNA, 15 bp, Homo sapiens
atttgtctttttcct

SEQ ID NO: 2056445 - DNA, 15 bp, Homo sapiens
tttgtctttttcctt

SEQ ID NO: 2056446 - DNA, 15 bp, Homo sapiens
ttgtctttttccttg

SEQ ID NO: 2056447 - DNA, 15 bp, Homo sapiens
tgtctttttccttgt

SEQ ID NO: 2056448 - DNA, 15 bp, Homo sapiens
gtctttttccttgtt

SEQ ID NO: 2056449 - DNA, 15 bp, Homo sapiens
tctttttccttgttg

SEQ ID NO: 2056450 - DNA, 15 bp, Homo sapiens
ctttttccttgttgt

SEQ ID NO: 2056451 - DNA, 15 bp, Homo sapiens
tttttccttgttgtc

SEQ ID NO: 2056452 - DNA, 15 bp, Homo sapiens
ttttccttgttgtca

SEQ ID NO: 2056453 - DNA, 15 bp, Homo sapiens
tttccttgttgtcag

SEQ ID NO: 2056454 - DNA, 15 bp, Homo sapiens
ttccttgttgtcaga

SEQ ID NO: 2056455 - DNA, 15 bp, Homo sapiens
tccttgttgtcagac

SEQ ID NO: 2056456 - DNA, 15 bp, Homo sapiens
ccttgttgtcagaca

SEQ ID NO: 2056457 - DNA, 15 bp, Homo sapiens
cttgttgtcagacaa

SEQ ID NO: 2056458 - DNA, 15 bp, Homo sapiens
ttgttgtcagacaac

SEQ ID NO: 2056459 - DNA, 15 bp, Homo sapiens
tgttgtcagacaaca

SEQ ID NO: 2056460 - DNA, 15 bp, Homo sapiens
gttgtcagacaacac

SEQ ID NO: 2056461 - DNA, 15 bp, Homo sapiens
ttgtcagacaacact

SEQ ID NO: 2056462 - DNA, 15 bp, Homo sapiens
tgtcagacaacactc

SEQ ID NO: 2056463 - DNA, 15 bp, Homo sapiens
gtcagacaacactca

SEQ ID NO: 2056464 - DNA, 15 bp, Homo sapiens
tcagacaacactcag

SEQ ID NO: 2056465 - DNA, 15 bp, Homo sapiens
cagacaacactcaga

SEQ ID NO: 2056466 - DNA, 15 bp, Homo sapiens
agacaacactcagac

SEQ ID NO: 2056467 - DNA, 15 bp, Homo sapiens
gacaacactcagacc

SEQ ID NO: 2056468 - DNA, 15 bp, Homo sapiens
acaacactcagacct

SEQ ID NO: 2056469 - DNA, 15 bp, Homo sapiens
caacactcagacctg

SEQ ID NO: 2056470 - DNA, 15 bp, Homo sapiens
aacactcagacctgc

SEQ ID NO: 2056471 - DNA, 15 bp, Homo sapiens
acactcagacctgca

SEQ ID NO: 2056472 - DNA, 15 bp, Homo sapiens
cactcagacctgcat

SEQ ID NO: 2056473 - DNA, 15 bp, Homo sapiens
actcagacctgcatt

SEQ ID NO: 2056474 - DNA, 15 bp, Homo sapiens
ctcagacctgcattc

SEQ ID NO: 2056475 - DNA, 15 bp, Homo sapiens
tcagacctgcattct

SEQ ID NO: 2056476 - DNA, 15 bp, Homo sapiens
cagacctgcattctt

SEQ ID NO: 2056477 - DNA, 15 bp, Homo sapiens
agacctgcattctta

SEQ ID NO: 2056478 - DNA, 15 bp, Homo sapiens
gacctgcattcttat

SEQ ID NO: 2056479 - DNA, 15 bp, Homo sapiens
acctgcattcttatt

SEQ ID NO: 2056480 - DNA, 15 bp, Homo sapiens
cctgcattcttattt

SEQ ID NO: 2056481 - DNA, 15 bp, Homo sapiens
ctgcattcttatttc

SEQ ID NO: 2056482 - DNA, 15 bp, Homo sapiens
tgcattcttatttcc

SEQ ID NO: 2056483 - DNA, 15 bp, Homo sapiens
gcattcttatttcca

SEQ ID NO: 2056484 - DNA, 15 bp, Homo sapiens
cattcttatttccac

SEQ ID NO: 2056485 - DNA, 15 bp, Homo sapiens
attcttatttccact

SEQ ID NO: 2056486 - DNA, 15 bp, Homo sapiens
ttcttatttccacta

SEQ ID NO: 2056487 - DNA, 15 bp, Homo sapiens
tcttatttccactac

SEQ ID NO: 2056488 - DNA, 15 bp, Homo sapiens
cttatttccactact

SEQ ID NO: 2056489 - DNA, 15 bp, Homo sapiens
ttatttccactacta

SEQ ID NO: 2056490 - DNA, 15 bp, Homo sapiens
tatttccactactat

SEQ ID NO: 2056491 - DNA, 15 bp, Homo sapiens
atttccactactatg

SEQ ID NO: 2056492 - DNA, 15 bp, Homo sapiens
tttccactactatgt

SEQ ID NO: 2056493 - DNA, 15 bp, Homo sapiens
ttccactactatgtg

SEQ ID NO: 2056494 - DNA, 15 bp, Homo sapiens
tccactactatgtga

SEQ ID NO: 2056495 - DNA, 15 bp, Homo sapiens
ccactactatgtgaa

SEQ ID NO: 2056496 - DNA, 15 bp, Homo sapiens
cactactatgtgaag

SEQ ID NO: 2056497 - DNA, 15 bp, Homo sapiens
actactatgtgaagg

SEQ ID NO: 2056498 - DNA, 15 bp, Homo sapiens
ctactatgtgaaggc

SEQ ID NO: 2056499 - DNA, 15 bp, Homo sapiens
tactatgtgaaggct

SEQ ID NO: 2056500 - DNA, 15 bp, Homo sapiens
actatgtgaaggctt

SEQ ID NO: 2056501 - DNA, 15 bp, Homo sapiens
ctatgtgaaggctta

SEQ ID NO: 2056502 - DNA, 15 bp, Homo sapiens
tatgtgaaggcttaa

SEQ ID NO: 2056503 - DNA, 15 bp, Homo sapiens
atgtgaaggcttaaa

SEQ ID NO: 2056504 - DNA, 15 bp, Homo sapiens
tgtgaaggcttaaag

SEQ ID NO: 2056505 - DNA, 15 bp, Homo sapiens
gtgaaggcttaaagt

SEQ ID NO: 2056506 - DNA, 15 bp, Homo sapiens
tgaaggcttaaagtg

SEQ ID NO: 2056507 - DNA, 15 bp, Homo sapiens
gaaggcttaaagtgt

SEQ ID NO: 2056508 - DNA, 15 bp, Homo sapiens
aaggcttaaagtgtg

SEQ ID NO: 2056509 - DNA, 15 bp, Homo sapiens
aggcttaaagtgtga

SEQ ID NO: 2056510 - DNA, 15 bp, Homo sapiens
ggcttaaagtgtgaa

SEQ ID NO: 2056511 - DNA, 15 bp, Homo sapiens
gcttaaagtgtgaaa

SEQ ID NO: 2056512 - DNA, 15 bp, Homo sapiens
cttaaagtgtgaaat

SEQ ID NO: 2056513 - DNA, 15 bp, Homo sapiens
ttaaagtgtgaaatc

SEQ ID NO: 2056514 - DNA, 15 bp, Homo sapiens
taaagtgtgaaatca

SEQ ID NO: 2056515 - DNA, 15 bp, Homo sapiens
aaagtgtgaaatcaa

SEQ ID NO: 2056516 - DNA, 15 bp, Homo sapiens
aagtgtgaaatcaag

SEQ ID NO: 2056517 - DNA, 15 bp, Homo sapiens
agtgtgaaatcaaga

SEQ ID NO: 2056518 - DNA, 15 bp, Homo sapiens
gtgtgaaatcaagag

SEQ ID NO: 2056519 - DNA, 15 bp, Homo sapiens
tgtgaaatcaagagg

SEQ ID NO: 2056520 - DNA, 15 bp, Homo sapiens
gtgaaatcaagagga

SEQ ID NO: 2056521 - DNA, 15 bp, Homo sapiens
tgaaatcaagaggac

SEQ ID NO: 2056522 - DNA, 15 bp, Homo sapiens
gaaatcaagaggacg

SEQ ID NO: 2056523 - DNA, 15 bp, Homo sapiens
aaatcaagaggacgt

SEQ ID NO: 2056524 - DNA, 15 bp, Homo sapiens
aatcaagaggacgtt

SEQ ID NO: 2056525 - DNA, 15 bp, Homo sapiens
atcaagaggacgttt

SEQ ID NO: 2056526 - DNA, 15 bp, Homo sapiens
tcaagaggacgtttg

SEQ ID NO: 2056527 - DNA, 15 bp, Homo sapiens
caagaggacgtttgc

SEQ ID NO: 2056528 - DNA, 15 bp, Homo sapiens
aagaggacgtttgca

SEQ ID NO: 2056529 - DNA, 15 bp, Homo sapiens
agaggacgtttgcaa

SEQ ID NO: 2056530 - DNA, 15 bp, Homo sapiens
gaggacgtttgcaac

SEQ ID NO: 2056531 - DNA, 15 bp, Homo sapiens
aggacgtttgcaaca

SEQ ID NO: 2056532 - DNA, 15 bp, Homo sapiens
ggacgtttgcaacaa

SEQ ID NO: 2056533 - DNA, 15 bp, Homo sapiens
gacgtttgcaacaaa

SEQ ID NO: 2056534 - DNA, 15 bp, Homo sapiens
acgtttgcaacaaat

SEQ ID NO: 2056535 - DNA, 15 bp, Homo sapiens
cgtttgcaacaaatg

SEQ ID NO: 2056536 - DNA, 15 bp, Homo sapiens
gtttgcaacaaatgc

SEQ ID NO: 2056537 - DNA, 15 bp, Homo sapiens
tttgcaacaaatgcg

SEQ ID NO: 2056538 - DNA, 15 bp, Homo sapiens
ttgcaacaaatgcgg

SEQ ID NO: 2056539 - DNA, 15 bp, Homo sapiens
tgcaacaaatgcgga

SEQ ID NO: 2056540 - DNA, 15 bp, Homo sapiens
gcaacaaatgcggag

SEQ ID NO: 2056541 - DNA, 15 bp, Homo sapiens
caacaaatgcggagc

SEQ ID NO: 2056542 - DNA, 15 bp, Homo sapiens
aacaaatgcggagca

SEQ ID NO: 2056543 - DNA, 15 bp, Homo sapiens
acaaatgcggagcag

SEQ ID NO: 2056544 - DNA, 15 bp, Homo sapiens
caaatgcggagcaga

SEQ ID NO: 2056545 - DNA, 15 bp, Homo sapiens
aaatgcggagcagaa

SEQ ID NO: 2056546 - DNA, 15 bp, Homo sapiens
aatgcggagcagaaa

SEQ ID NO: 2056547 - DNA, 15 bp, Homo sapiens
atgcggagcagaaac

SEQ ID NO: 2056548 - DNA, 15 bp, Homo sapiens
tgcggagcagaaaca

SEQ ID NO: 2056549 - DNA, 15 bp, Homo sapiens
gcggagcagaaacag

SEQ ID NO: 2056550 - DNA, 15 bp, Homo sapiens
cggagcagaaacagt

SEQ ID NO: 2056551 - DNA, 15 bp, Homo sapiens
ggagcagaaacagtt

SEQ ID NO: 2056552 - DNA, 15 bp, Homo sapiens
gagcagaaacagttt

SEQ ID NO: 2056553 - DNA, 15 bp, Homo sapiens
agcagaaacagtttt

SEQ ID NO: 2056554 - DNA, 15 bp, Homo sapiens
gcagaaacagttttc

SEQ ID NO: 2056555 - DNA, 15 bp, Homo sapiens
cagaaacagttttca

SEQ ID NO: 2056556 - DNA, 15 bp, Homo sapiens
agaaacagttttcat

SEQ ID NO: 2056557 - DNA, 15 bp, Homo sapiens
gaaacagttttcatt

SEQ ID NO: 2056558 - DNA, 15 bp, Homo sapiens
aaacagttttcattt

SEQ ID NO: 2056559 - DNA, 15 bp, Homo sapiens
aacagttttcatttg

SEQ ID NO: 2056560 - DNA, 15 bp, Homo sapiens
acagttttcatttgt

SEQ ID NO: 2056561 - DNA, 15 bp, Homo sapiens
cagttttcatttgtt

SEQ ID NO: 2056562 - DNA, 15 bp, Homo sapiens
agttttcatttgttc

SEQ ID NO: 2056563 - DNA, 15 bp, Homo sapiens
gttttcatttgttcg

SEQ ID NO: 2056564 - DNA, 15 bp, Homo sapiens
ttttcatttgttcgt

SEQ ID NO: 2056565 - DNA, 15 bp, Homo sapiens
tttcatttgttcgtt

SEQ ID NO: 2056566 - DNA, 15 bp, Homo sapiens
ttcatttgttcgttg

SEQ ID NO: 2056567 - DNA, 15 bp, Homo sapiens
tcatttgttcgttgc

SEQ ID NO: 2056568 - DNA, 15 bp, Homo sapiens
catttgttcgttgct

SEQ ID NO: 2056569 - DNA, 15 bp, Homo sapiens
atttgttcgttgctg

SEQ ID NO: 2056570 - DNA, 15 bp, Homo sapiens
tttgttcgttgctgt

SEQ ID NO: 2056571 - DNA, 15 bp, Homo sapiens
ttgttcgttgctgtt

SEQ ID NO: 2056572 - DNA, 15 bp, Homo sapiens
tgttcgttgctgttg

SEQ ID NO: 2056573 - DNA, 15 bp, Homo sapiens
gttcgttgctgttgt

SEQ ID NO: 2056574 - DNA, 15 bp, Homo sapiens
ttcgttgctgttgtt

SEQ ID NO: 2056575 - DNA, 15 bp, Homo sapiens
tcgttgctgttgttg

SEQ ID NO: 2056576 - DNA, 15 bp, Homo sapiens
cgttgctgttgttgc

SEQ ID NO: 2056577 - DNA, 15 bp, Homo sapiens
gttgctgttgttgcc

SEQ ID NO: 2056578 - DNA, 15 bp, Homo sapiens
ttgctgttgttgccc

SEQ ID NO: 2056579 - DNA, 15 bp, Homo sapiens
tgctgttgttgcccc

SEQ ID NO: 2056580 - DNA, 15 bp, Homo sapiens
gctgttgttgcccca

SEQ ID NO: 2056581 - DNA, 15 bp, Homo sapiens
ctgttgttgccccag

SEQ ID NO: 2056582 - DNA, 15 bp, Homo sapiens
tgttgttgccccagg

SEQ ID NO: 2056583 - DNA, 15 bp, Homo sapiens
gttgttgccccaggg

SEQ ID NO: 2056584 - DNA, 15 bp, Homo sapiens
ttgttgccccagggc

SEQ ID NO: 2056585 - DNA, 15 bp, Homo sapiens
tgttgccccagggcg

SEQ ID NO: 2056586 - DNA, 15 bp, Homo sapiens
gttgccccagggcgg

SEQ ID NO: 2056587 - DNA, 15 bp, Homo sapiens
ttgccccagggcggt

SEQ ID NO: 2056588 - DNA, 15 bp, Homo sapiens
tgccccagggcggta

SEQ ID NO: 2056589 - DNA, 15 bp, Homo sapiens
gccccagggcggtag

SEQ ID NO: 2056590 - DNA, 15 bp, Homo sapiens
ccccagggcggtagt

SEQ ID NO: 2056591 - DNA, 15 bp, Homo sapiens
cccagggcggtagta

SEQ ID NO: 2056592 - DNA, 15 bp, Homo sapiens
ccagggcggtagtat

SEQ ID NO: 2056593 - DNA, 15 bp, Homo sapiens
cagggcggtagtatt

SEQ ID NO: 2056594 - DNA, 15 bp, Homo sapiens
agggcggtagtattt

SEQ ID NO: 2056595 - DNA, 15 bp, Homo sapiens
gggcggtagtattta

SEQ ID NO: 2056596 - DNA, 15 bp, Homo sapiens
ggcggtagtatttat

SEQ ID NO: 2056597 - DNA, 15 bp, Homo sapiens
gcggtagtatttata

SEQ ID NO: 2056598 - DNA, 15 bp, Homo sapiens
cggtagtatttatac

SEQ ID NO: 2056599 - DNA, 15 bp, Homo sapiens
ggtagtatttatacc

SEQ ID NO: 2056600 - DNA, 15 bp, Homo sapiens
gtagtatttatacca

SEQ ID NO: 2056601 - DNA, 15 bp, Homo sapiens
tagtatttataccag

SEQ ID NO: 2056602 - DNA, 15 bp, Homo sapiens
agtatttataccagt

SEQ ID NO: 2056603 - DNA, 15 bp, Homo sapiens
gtatttataccagtg

SEQ ID NO: 2056604 - DNA, 15 bp, Homo sapiens
tatttataccagtga

SEQ ID NO: 2056605 - DNA, 15 bp, Homo sapiens
atttataccagtgat

SEQ ID NO: 2056606 - DNA, 15 bp, Homo sapiens
tttataccagtgatt

SEQ ID NO: 2056607 - DNA, 15 bp, Homo sapiens
ttataccagtgattt

SEQ ID NO: 2056608 - DNA, 15 bp, Homo sapiens
tataccagtgatttt

SEQ ID NO: 2056609 - DNA, 15 bp, Homo sapiens
ataccagtgattttt

SEQ ID NO: 2056610 - DNA, 15 bp, Homo sapiens
taccagtgattttta

SEQ ID NO: 2056611 - DNA, 15 bp, Homo sapiens
accagtgatttttat

SEQ ID NO: 2056612 - DNA, 15 bp, Homo sapiens
ccagtgatttttata

SEQ ID NO: 2056613 - DNA, 15 bp, Homo sapiens
cagtgatttttatag

SEQ ID NO: 2056614 - DNA, 15 bp, Homo sapiens
agtgatttttataga

SEQ ID NO: 2056615 - DNA, 15 bp, Homo sapiens
gtgatttttatagat

SEQ ID NO: 2056616 - DNA, 15 bp, Homo sapiens
tgatttttatagatg

SEQ ID NO: 2056617 - DNA, 15 bp, Homo sapiens
gatttttatagatgg

SEQ ID NO: 2056618 - DNA, 15 bp, Homo sapiens
atttttatagatgga

SEQ ID NO: 2056619 - DNA, 15 bp, Homo sapiens
tttttatagatggat

SEQ ID NO: 2056620 - DNA, 15 bp, Homo sapiens
ttttatagatggata

SEQ ID NO: 2056621 - DNA, 15 bp, Homo sapiens
tttatagatggataa

SEQ ID NO: 2056622 - DNA, 15 bp, Homo sapiens
ttatagatggataat

SEQ ID NO: 2056623 - DNA, 15 bp, Homo sapiens
tatagatggataata

SEQ ID NO: 2056624 - DNA, 15 bp, Homo sapiens
atagatggataatag

SEQ ID NO: 2056625 - DNA, 15 bp, Homo sapiens
tagatggataataga

SEQ ID NO: 2056626 - DNA, 15 bp, Homo sapiens
agatggataatagaa

SEQ ID NO: 2056627 - DNA, 15 bp, Homo sapiens
gatggataatagaag

SEQ ID NO: 2056628 - DNA, 15 bp, Homo sapiens
atggataatagaagt

SEQ ID NO: 2056629 - DNA, 15 bp, Homo sapiens
tggataatagaagtt

SEQ ID NO: 2056630 - DNA, 15 bp, Homo sapiens
ggataatagaagttc

SEQ ID NO: 2056631 - DNA, 15 bp, Homo sapiens
gataatagaagttcg

SEQ ID NO: 2056632 - DNA, 15 bp, Homo sapiens
ataatagaagttcgg

SEQ ID NO: 2056633 - DNA, 15 bp, Homo sapiens
taatagaagttcggc

SEQ ID NO: 2056634 - DNA, 15 bp, Homo sapiens
aatagaagttcggca

SEQ ID NO: 2056635 - DNA, 15 bp, Homo sapiens
atagaagttcggcaa

SEQ ID NO: 2056636 - DNA, 15 bp, Homo sapiens
tagaagttcggcaag

SEQ ID NO: 2056637 - DNA, 15 bp, Homo sapiens
agaagttcggcaagg

SEQ ID NO: 2056638 - DNA, 15 bp, Homo sapiens
gaagttcggcaaggg

SEQ ID NO: 2056639 - DNA, 15 bp, Homo sapiens
aagttcggcaaggga

SEQ ID NO: 2056640 - DNA, 15 bp, Homo sapiens
agttcggcaagggac

SEQ ID NO: 2056641 - DNA, 15 bp, Homo sapiens
gttcggcaagggaca

SEQ ID NO: 2056642 - DNA, 15 bp, Homo sapiens
ttcggcaagggacaa

SEQ ID NO: 2056643 - DNA, 15 bp, Homo sapiens
tcggcaagggacaat

SEQ ID NO: 2056644 - DNA, 15 bp, Homo sapiens
cggcaagggacaatt

SEQ ID NO: 2056645 - DNA, 15 bp, Homo sapiens
ggcaagggacaattt

SEQ ID NO: 2056646 - DNA, 15 bp, Homo sapiens
gcaagggacaatttt

SEQ ID NO: 2056647 - DNA, 15 bp, Homo sapiens
caagggacaattttt

SEQ ID NO: 2056648 - DNA, 15 bp, Homo sapiens
aagggacaatttttt

SEQ ID NO: 2056649 - DNA, 15 bp, Homo sapiens
agggacaattttttt

SEQ ID NO: 2056650 - DNA, 15 bp, Homo sapiens
gggacaatttttttg

SEQ ID NO: 2056651 - DNA, 15 bp, Homo sapiens
ggacaatttttttgt

SEQ ID NO: 2056652 - DNA, 15 bp, Homo sapiens
gacaatttttttgtt

SEQ ID NO: 2056653 - DNA, 15 bp, Homo sapiens
acaatttttttgttg

SEQ ID NO: 2056654 - DNA, 15 bp, Homo sapiens
caatttttttgttgt

SEQ ID NO: 2056655 - DNA, 15 bp, Homo sapiens
aatttttttgttgtt

SEQ ID NO: 2056656 - DNA, 15 bp, Homo sapiens
atttttttgttgttg

SEQ ID NO: 2056657 - DNA, 15 bp, Homo sapiens
tttttttgttgttgt

SEQ ID NO: 2056658 - DNA, 15 bp, Homo sapiens
tttgttgttgttata

SEQ ID NO: 2056659 - DNA, 15 bp, Homo sapiens
ttgttgttgttatag

SEQ ID NO: 2056660 - DNA, 15 bp, Homo sapiens
tgttgttgttataga

SEQ ID NO: 2056661 - DNA, 15 bp, Homo sapiens
gttgttgttatagaa

SEQ ID NO: 2056662 - DNA, 15 bp, Homo sapiens
ttgttgttatagaat

SEQ ID NO: 2056663 - DNA, 15 bp, Homo sapiens
tgttgttatagaatg

SEQ ID NO: 2056664 - DNA, 15 bp, Homo sapiens
gttgttatagaatgt

SEQ ID NO: 2056665 - DNA, 15 bp, Homo sapiens
ttgttatagaatgtc

SEQ ID NO: 2056666 - DNA, 15 bp, Homo sapiens
tgttatagaatgtct

SEQ ID NO: 2056667 - DNA, 15 bp, Homo sapiens
gttatagaatgtctc

SEQ ID NO: 2056668 - DNA, 15 bp, Homo sapiens
ttatagaatgtctca

SEQ ID NO: 2056669 - DNA, 15 bp, Homo sapiens
tatagaatgtctcaa

SEQ ID NO: 2056670 - DNA, 15 bp, Homo sapiens
atagaatgtctcaaa

SEQ ID NO: 2056671 - DNA, 15 bp, Homo sapiens
tagaatgtctcaaaa

SEQ ID NO: 2056672 - DNA, 15 bp, Homo sapiens
agaatgtctcaaaaa

SEQ ID NO: 2056673 - DNA, 15 bp, Homo sapiens
gaatgtctcaaaaag

SEQ ID NO: 2056674 - DNA, 15 bp, Homo sapiens
aatgtctcaaaaagt

SEQ ID NO: 2056675 - DNA, 15 bp, Homo sapiens
atgtctcaaaaagtc

SEQ ID NO: 2056676 - DNA, 15 bp, Homo sapiens
tgtctcaaaaagtct

SEQ ID NO: 2056677 - DNA, 15 bp, Homo sapiens
gtctcaaaaagtctt

SEQ ID NO: 2056678 - DNA, 15 bp, Homo sapiens
tctcaaaaagtctta

SEQ ID NO: 2056679 - DNA, 15 bp, Homo sapiens
ctcaaaaagtcttat

SEQ ID NO: 2056680 - DNA, 15 bp, Homo sapiens
tcaaaaagtcttatc

SEQ ID NO: 2056681 - DNA, 15 bp, Homo sapiens
caaaaagtcttatcc

SEQ ID NO: 2056682 - DNA, 15 bp, Homo sapiens
aaaaagtcttatcca

SEQ ID NO: 2056683 - DNA, 15 bp, Homo sapiens
aaaagtcttatccac

SEQ ID NO: 2056684 - DNA, 15 bp, Homo sapiens
aaagtcttatccaca

SEQ ID NO: 2056685 - DNA, 15 bp, Homo sapiens
aagtcttatccacag

SEQ ID NO: 2056686 - DNA, 15 bp, Homo sapiens
agtcttatccacagc

SEQ ID NO: 2056687 - DNA, 15 bp, Homo sapiens
gtcttatccacagct

SEQ ID NO: 2056688 - DNA, 15 bp, Homo sapiens
tcttatccacagctg

SEQ ID NO: 2056689 - DNA, 15 bp, Homo sapiens
cttatccacagctgt

SEQ ID NO: 2056690 - DNA, 15 bp, Homo sapiens
ttatccacagctgtg

SEQ ID NO: 2056691 - DNA, 15 bp, Homo sapiens
tatccacagctgtgt

SEQ ID NO: 2056692 - DNA, 15 bp, Homo sapiens
atccacagctgtgtc

SEQ ID NO: 2056693 - DNA, 15 bp, Homo sapiens
tccacagctgtgtct

SEQ ID NO: 2056694 - DNA, 15 bp, Homo sapiens
ccacagctgtgtctc

SEQ ID NO: 2056695 - DNA, 15 bp, Homo sapiens
cacagctgtgtctca

SEQ ID NO: 2056696 - DNA, 15 bp, Homo sapiens
acagctgtgtctcag

SEQ ID NO: 2056697 - DNA, 15 bp, Homo sapiens
cagctgtgtctcaga

SEQ ID NO: 2056698 - DNA, 15 bp, Homo sapiens
agctgtgtctcagac

SEQ ID NO: 2056699 - DNA, 15 bp, Homo sapiens
gctgtgtctcagaca

SEQ ID NO: 2056700 - DNA, 15 bp, Homo sapiens
ctgtgtctcagacac

SEQ ID NO: 2056701 - DNA, 15 bp, Homo sapiens
tgtgtctcagacacc

SEQ ID NO: 2056702 - DNA, 15 bp, Homo sapiens
gtgtctcagacacca

SEQ ID NO: 2056703 - DNA, 15 bp, Homo sapiens
tgtctcagacaccaa

SEQ ID NO: 2056704 - DNA, 15 bp, Homo sapiens
gtctcagacaccaag

SEQ ID NO: 2056705 - DNA, 15 bp, Homo sapiens
tctcagacaccaagt

SEQ ID NO: 2056706 - DNA, 15 bp, Homo sapiens
ctcagacaccaagtt

SEQ ID NO: 2056707 - DNA, 15 bp, Homo sapiens
tcagacaccaagttc

SEQ ID NO: 2056708 - DNA, 15 bp, Homo sapiens
cagacaccaagttca

SEQ ID NO: 2056709 - DNA, 15 bp, Homo sapiens
acaccaagttcaaat

SEQ ID NO: 2056710 - DNA, 15 bp, Homo sapiens
caccaagttcaaatt

SEQ ID NO: 2056711 - DNA, 15 bp, Homo sapiens
accaagttcaaatta

SEQ ID NO: 2056712 - DNA, 15 bp, Homo sapiens
ccaagttcaaattat

SEQ ID NO: 2056713 - DNA, 15 bp, Homo sapiens
caagttcaaattatt

SEQ ID NO: 2056714 - DNA, 15 bp, Homo sapiens
aagttcaaattattt

SEQ ID NO: 2056715 - DNA, 15 bp, Homo sapiens
agttcaaattattta

SEQ ID NO: 2056716 - DNA, 15 bp, Homo sapiens
gttcaaattatttag

SEQ ID NO: 2056717 - DNA, 15 bp, Homo sapiens
ttcaaattatttagg

SEQ ID NO: 2056718 - DNA, 15 bp, Homo sapiens
tcaaattatttagga

SEQ ID NO: 2056719 - DNA, 15 bp, Homo sapiens
caaattatttaggaa

SEQ ID NO: 2056720 - DNA, 15 bp, Homo sapiens
aaattatttaggaat

SEQ ID NO: 2056721 - DNA, 15 bp, Homo sapiens
aattatttaggaata

SEQ ID NO: 2056722 - DNA, 15 bp, Homo sapiens
attatttaggaataa

SEQ ID NO: 2056723 - DNA, 15 bp, Homo sapiens
ttatttaggaataaa

SEQ ID NO: 2056724 - DNA, 15 bp, Homo sapiens
tatttaggaataaat

SEQ ID NO: 2056725 - DNA, 15 bp, Homo sapiens
atttaggaataaatt

SEQ ID NO: 2056726 - DNA, 15 bp, Homo sapiens
tttaggaataaattt

SEQ ID NO: 2056727 - DNA, 15 bp, Homo sapiens
ttaggaataaatttt

SEQ ID NO: 2056728 - DNA, 15 bp, Homo sapiens
taggaataaatttta

SEQ ID NO: 2056729 - DNA, 15 bp, Homo sapiens
aggaataaattttaa

SEQ ID NO: 2056730 - DNA, 15 bp, Homo sapiens
ggaataaattttaaa

SEQ ID NO: 2056731 - DNA, 15 bp, Homo sapiens
gaataaattttaaaa

SEQ ID NO: 2056732 - DNA, 15 bp, Homo sapiens
aataaattttaaaat

SEQ ID NO: 2056733 - DNA, 15 bp, Homo sapiens
ataaattttaaaatt

SEQ ID NO: 2056734 - DNA, 15 bp, Homo sapiens
taaattttaaaattt

SEQ ID NO: 2056735 - DNA, 15 bp, Homo sapiens
aaattttaaaatttc

SEQ ID NO: 2056736 - DNA, 15 bp, Homo sapiens
aattttaaaatttcc

SEQ ID NO: 2056737 - DNA, 15 bp, Homo sapiens
attttaaaatttcct

SEQ ID NO: 2056738 - DNA, 15 bp, Homo sapiens
ttttaaaatttccta

SEQ ID NO: 2056739 - DNA, 15 bp, Homo sapiens
tttaaaatttcctaa

SEQ ID NO: 2056740 - DNA, 15 bp, Homo sapiens
ttaaaatttcctaaa

SEQ ID NO: 2056741 - DNA, 15 bp, Homo sapiens
taaaatttcctaaaa

SEQ ID NO: 2056742 - DNA, 15 bp, Homo sapiens
aaaatttcctaaaac

SEQ ID NO: 2056743 - DNA, 15 bp, Homo sapiens
aaatttcctaaaaca

SEQ ID NO: 2056744 - DNA, 15 bp, Homo sapiens
aatttcctaaaacat

SEQ ID NO: 2056745 - DNA, 15 bp, Homo sapiens
atttcctaaaacata

SEQ ID NO: 2056746 - DNA, 15 bp, Homo sapiens
tttcctaaaacataa

SEQ ID NO: 2056747 - DNA, 15 bp, Homo sapiens
ttcctaaaacataat

SEQ ID NO: 2056748 - DNA, 15 bp, Homo sapiens
tcctaaaacataatt

SEQ ID NO: 2056749 - DNA, 15 bp, Homo sapiens
cctaaaacataatta

SEQ ID NO: 2056750 - DNA, 15 bp, Homo sapiens
ctaaaacataattag

SEQ ID NO: 2056751 - DNA, 15 bp, Homo sapiens
taaaacataattagt

SEQ ID NO: 2056752 - DNA, 15 bp, Homo sapiens
aaaacataattagtt

SEQ ID NO: 2056753 - DNA, 15 bp, Homo sapiens
aaacataattagtta

SEQ ID NO: 2056754 - DNA, 15 bp, Homo sapiens
aacataattagttat

SEQ ID NO: 2056755 - DNA, 15 bp, Homo sapiens
acataattagttatc

SEQ ID NO: 2056756 - DNA, 15 bp, Homo sapiens
cataattagttatcc

SEQ ID NO: 2056757 - DNA, 15 bp, Homo sapiens
ataattagttatcca

SEQ ID NO: 2056758 - DNA, 15 bp, Homo sapiens
taattagttatccag

SEQ ID NO: 2056759 - DNA, 15 bp, Homo sapiens
aattagttatccaga

SEQ ID NO: 2056760 - DNA, 15 bp, Homo sapiens
attagttatccagag

SEQ ID NO: 2056761 - DNA, 15 bp, Homo sapiens
ttagttatccagagt

SEQ ID NO: 2056762 - DNA, 15 bp, Homo sapiens
tagttatccagagtt

SEQ ID NO: 2056763 - DNA, 15 bp, Homo sapiens
agttatccagagttt

SEQ ID NO: 2056764 - DNA, 15 bp, Homo sapiens
gttatccagagtttc

SEQ ID NO: 2056765 - DNA, 15 bp, Homo sapiens
ttatccagagtttca

SEQ ID NO: 2056766 - DNA, 15 bp, Homo sapiens
tatccagagtttcac

SEQ ID NO: 2056767 - DNA, 15 bp, Homo sapiens
atccagagtttcaca

SEQ ID NO: 2056768 - DNA, 15 bp, Homo sapiens
tccagagtttcacat

SEQ ID NO: 2056769 - DNA, 15 bp, Homo sapiens
ccagagtttcacatg

SEQ ID NO: 2056770 - DNA, 15 bp, Homo sapiens
cagagtttcacatga

SEQ ID NO: 2056771 - DNA, 15 bp, Homo sapiens
agagtttcacatgac

SEQ ID NO: 2056772 - DNA, 15 bp, Homo sapiens
gagtttcacatgaca

SEQ ID NO: 2056773 - DNA, 15 bp, Homo sapiens
agtttcacatgacaa

SEQ ID NO: 2056774 - DNA, 15 bp, Homo sapiens
gtttcacatgacaat

SEQ ID NO: 2056775 - DNA, 15 bp, Homo sapiens
tttcacatgacaata

SEQ ID NO: 2056776 - DNA, 15 bp, Homo sapiens
ttcacatgacaataa

SEQ ID NO: 2056777 - DNA, 15 bp, Homo sapiens
tcacatgacaataaa

SEQ ID NO: 2056778 - DNA, 15 bp, Homo sapiens
cacatgacaataaat

SEQ ID NO: 2056779 - DNA, 15 bp, Homo sapiens
acatgacaataaata

SEQ ID NO: 2056780 - DNA, 15 bp, Homo sapiens
catgacaataaataa

SEQ ID NO: 2056781 - DNA, 15 bp, Homo sapiens
atgacaataaataaa

SEQ ID NO: 2056782 - DNA, 15 bp, Homo sapiens
tgacaataaataaat

SEQ ID NO: 2056783 - DNA, 15 bp, Homo sapiens
gacaataaataaata

SEQ ID NO: 2056784 - DNA, 15 bp, Homo sapiens
acaataaataaatat

SEQ ID NO: 2056785 - DNA, 15 bp, Homo sapiens
caataaataaatatt

SEQ ID NO: 2056786 - DNA, 15 bp, Homo sapiens
aataaataaatattc

SEQ ID NO: 2056787 - DNA, 15 bp, Homo sapiens
ataaataaatattct

SEQ ID NO: 2056788 - DNA, 15 bp, Homo sapiens
taaataaatattctg

SEQ ID NO: 2056789 - DNA, 15 bp, Homo sapiens
aaataaatattctga

SEQ ID NO: 2056790 - DNA, 15 bp, Homo sapiens
aataaatattctgac

SEQ ID NO: 2056791 - DNA, 15 bp, Homo sapiens
ataaatattctgact

SEQ ID NO: 2056792 - DNA, 15 bp, Homo sapiens
taaatattctgactt

SEQ ID NO: 2056793 - DNA, 15 bp, Homo sapiens
aaatattctgactta

SEQ ID NO: 2056794 - DNA, 15 bp, Homo sapiens
aatattctgacttaa

SEQ ID NO: 2056795 - DNA, 15 bp, Homo sapiens
atattctgacttaaa

SEQ ID NO: 2056796 - DNA, 15 bp, Homo sapiens
tattctgacttaaag

SEQ ID NO: 2056797 - DNA, 15 bp, Homo sapiens
attctgacttaaagt

SEQ ID NO: 2056798 - DNA, 15 bp, Homo sapiens
ttctgacttaaagtg

SEQ ID NO: 2056799 - DNA, 15 bp, Homo sapiens
tctgacttaaagtgg

SEQ ID NO: 2056800 - DNA, 15 bp, Homo sapiens
ctgacttaaagtggg

SEQ ID NO: 2056801 - DNA, 15 bp, Homo sapiens
tgacttaaagtgggt

SEQ ID NO: 2056802 - DNA, 15 bp, Homo sapiens
gacttaaagtgggta

SEQ ID NO: 2056803 - DNA, 15 bp, Homo sapiens
acttaaagtgggtaa

SEQ ID NO: 2056804 - DNA, 15 bp, Homo sapiens
cttaaagtgggtaaa

SEQ ID NO: 2056805 - DNA, 15 bp, Homo sapiens
ttaaagtgggtaaaa

SEQ ID NO: 2056806 - DNA, 15 bp, Homo sapiens
taaagtgggtaaaac

SEQ ID NO: 2056807 - DNA, 15 bp, Homo sapiens
aaagtgggtaaaact

SEQ ID NO: 2056808 - DNA, 15 bp, Homo sapiens
aagtgggtaaaacta

SEQ ID NO: 2056809 - DNA, 15 bp, Homo sapiens
agtgggtaaaactaa

SEQ ID NO: 2056810 - DNA, 15 bp, Homo sapiens
gtgggtaaaactaaa

SEQ ID NO: 2056811 - DNA, 15 bp, Homo sapiens
tgggtaaaactaaag

SEQ ID NO: 2056812 - DNA, 15 bp, Homo sapiens
gggtaaaactaaagg

SEQ ID NO: 2056813 - DNA, 15 bp, Homo sapiens
ggtaaaactaaaggg

SEQ ID NO: 2056814 - DNA, 15 bp, Homo sapiens
gtaaaactaaagggt

SEQ ID NO: 2056815 - DNA, 15 bp, Homo sapiens
taaaactaaagggtt

SEQ ID NO: 2056816 - DNA, 15 bp, Homo sapiens
aaaactaaagggttt

SEQ ID NO: 2056817 - DNA, 15 bp, Homo sapiens
aaactaaagggtttt

SEQ ID NO: 2056818 - DNA, 15 bp, Homo sapiens
aactaaagggttttg

SEQ ID NO: 2056819 - DNA, 15 bp, Homo sapiens
actaaagggttttgg

SEQ ID NO: 2056820 - DNA, 15 bp, Homo sapiens
ctaaagggttttggt

SEQ ID NO: 2056821 - DNA, 15 bp, Homo sapiens
taaagggttttggtc

SEQ ID NO: 2056822 - DNA, 15 bp, Homo sapiens
aaagggttttggtct

SEQ ID NO: 2056823 - DNA, 15 bp, Homo sapiens
aagggttttggtcta

SEQ ID NO: 2056824 - DNA, 15 bp, Homo sapiens
agggttttggtctat

SEQ ID NO: 2056825 - DNA, 15 bp, Homo sapiens
gggttttggtctatt

SEQ ID NO: 2056826 - DNA, 15 bp, Homo sapiens
ggttttggtctattt

SEQ ID NO: 2056827 - DNA, 15 bp, Homo sapiens
gttttggtctatttg

SEQ ID NO: 2056828 - DNA, 15 bp, Homo sapiens
ttttggtctatttga

SEQ ID NO: 2056829 - DNA, 15 bp, Homo sapiens
tttggtctatttgaa

SEQ ID NO: 2056830 - DNA, 15 bp, Homo sapiens
ttggtctatttgaat

SEQ ID NO: 2056831 - DNA, 15 bp, Homo sapiens
tggtctatttgaatt

SEQ ID NO: 2056832 - DNA, 15 bp, Homo sapiens
ggtctatttgaattt

SEQ ID NO: 2056833 - DNA, 15 bp, Homo sapiens
gtctatttgaatttt

SEQ ID NO: 2056834 - DNA, 15 bp, Homo sapiens
tctatttgaattttt

SEQ ID NO: 2056835 - DNA, 15 bp, Homo sapiens
ctatttgaatttttc

SEQ ID NO: 2056836 - DNA, 15 bp, Homo sapiens
tatttgaatttttca

SEQ ID NO: 2056837 - DNA, 15 bp, Homo sapiens
atttgaatttttcaa

SEQ ID NO: 2056838 - DNA, 15 bp, Homo sapiens
tttgaatttttcaag

SEQ ID NO: 2056839 - DNA, 15 bp, Homo sapiens
ttgaatttttcaagg

SEQ ID NO: 2056840 - DNA, 15 bp, Homo sapiens
tgaatttttcaagga

SEQ ID NO: 2056841 - DNA, 15 bp, Homo sapiens
gaatttttcaaggaa

SEQ ID NO: 2056842 - DNA, 15 bp, Homo sapiens
aatttttcaaggaaa

SEQ ID NO: 2056843 - DNA, 15 bp, Homo sapiens
atttttcaaggaaac

SEQ ID NO: 2056844 - DNA, 15 bp, Homo sapiens
tttttcaaggaaact

SEQ ID NO: 2056845 - DNA, 15 bp, Homo sapiens
ttttcaaggaaactt

SEQ ID NO: 2056846 - DNA, 15 bp, Homo sapiens
tttcaaggaaacttt

SEQ ID NO: 2056847 - DNA, 15 bp, Homo sapiens
ttcaaggaaactttt

SEQ ID NO: 2056848 - DNA, 15 bp, Homo sapiens
tcaaggaaacttttt

SEQ ID NO: 2056849 - DNA, 15 bp, Homo sapiens
caaggaaactttttc

SEQ ID NO: 2056850 - DNA, 15 bp, Homo sapiens
aaggaaactttttca

SEQ ID NO: 2056851 - DNA, 15 bp, Homo sapiens
aggaaactttttcat

SEQ ID NO: 2056852 - DNA, 15 bp, Homo sapiens
ggaaactttttcatg

SEQ ID NO: 2056853 - DNA, 15 bp, Homo sapiens
gaaactttttcatga

SEQ ID NO: 2056854 - DNA, 15 bp, Homo sapiens
aaactttttcatgag

SEQ ID NO: 2056855 - DNA, 15 bp, Homo sapiens
aactttttcatgaga

SEQ ID NO: 2056856 - DNA, 15 bp, Homo sapiens
actttttcatgagac

SEQ ID NO: 2056857 - DNA, 15 bp, Homo sapiens
ctttttcatgagaca

SEQ ID NO: 2056858 - DNA, 15 bp, Homo sapiens
tttttcatgagacac

SEQ ID NO: 2056859 - DNA, 15 bp, Homo sapiens
ttttcatgagacacc

SEQ ID NO: 2056860 - DNA, 15 bp, Homo sapiens
tttcatgagacacct

SEQ ID NO: 2056861 - DNA, 15 bp, Homo sapiens
ttcatgagacacctt

SEQ ID NO: 2056862 - DNA, 15 bp, Homo sapiens
tcatgagacacctta

SEQ ID NO: 2056863 - DNA, 15 bp, Homo sapiens
catgagacaccttaa

SEQ ID NO: 2056864 - DNA, 15 bp, Homo sapiens
atgagacaccttaat

SEQ ID NO: 2056865 - DNA, 15 bp, Homo sapiens
tgagacaccttaatt

SEQ ID NO: 2056866 - DNA, 15 bp, Homo sapiens
gagacaccttaattg

SEQ ID NO: 2056867 - DNA, 15 bp, Homo sapiens
agacaccttaattga

SEQ ID NO: 2056868 - DNA, 15 bp, Homo sapiens
gacaccttaattgag

SEQ ID NO: 2056869 - DNA, 15 bp, Homo sapiens
acaccttaattgagg

SEQ ID NO: 2056870 - DNA, 15 bp, Homo sapiens
caccttaattgaggt

SEQ ID NO: 2056871 - DNA, 15 bp, Homo sapiens
accttaattgaggta

SEQ ID NO: 2056872 - DNA, 15 bp, Homo sapiens
ccttaattgaggtag

SEQ ID NO: 2056873 - DNA, 15 bp, Homo sapiens
cttaattgaggtagt

SEQ ID NO: 2056874 - DNA, 15 bp, Homo sapiens
ttaattgaggtagtg

SEQ ID NO: 2056875 - DNA, 15 bp, Homo sapiens
taattgaggtagtga

SEQ ID NO: 2056876 - DNA, 15 bp, Homo sapiens
aattgaggtagtgaa

SEQ ID NO: 2056877 - DNA, 15 bp, Homo sapiens
attgaggtagtgaat

SEQ ID NO: 2056878 - DNA, 15 bp, Homo sapiens
ttgaggtagtgaatt

SEQ ID NO: 2056879 - DNA, 15 bp, Homo sapiens
tgaggtagtgaattt

SEQ ID NO: 2056880 - DNA, 15 bp, Homo sapiens
gaggtagtgaattta

SEQ ID NO: 2056881 - DNA, 15 bp, Homo sapiens
aggtagtgaatttat

SEQ ID NO: 2056882 - DNA, 15 bp, Homo sapiens
ggtagtgaatttatt

SEQ ID NO: 2056883 - DNA, 15 bp, Homo sapiens
gtagtgaatttattc

SEQ ID NO: 2056884 - DNA, 15 bp, Homo sapiens
tagtgaatttattca

SEQ ID NO: 2056885 - DNA, 15 bp, Homo sapiens
agtgaatttattcaa

SEQ ID NO: 2056886 - DNA, 15 bp, Homo sapiens
gtgaatttattcaat

SEQ ID NO: 2056887 - DNA, 15 bp, Homo sapiens
tgaatttattcaatg

SEQ ID NO: 2056888 - DNA, 15 bp, Homo sapiens
gaatttattcaatgt

SEQ ID NO: 2056889 - DNA, 15 bp, Homo sapiens
aatttattcaatgtt

SEQ ID NO: 2056890 - DNA, 15 bp, Homo sapiens
atttattcaatgttc

SEQ ID NO: 2056891 - DNA, 15 bp, Homo sapiens
tttattcaatgttct

SEQ ID NO: 2056892 - DNA, 15 bp, Homo sapiens
ttattcaatgttctt

SEQ ID NO: 2056893 - DNA, 15 bp, Homo sapiens
tattcaatgttcttg

SEQ ID NO: 2056894 - DNA, 15 bp, Homo sapiens
attcaatgttcttgc

SEQ ID NO: 2056895 - DNA, 15 bp, Homo sapiens
ttcaatgttcttgca

SEQ ID NO: 2056896 - DNA, 15 bp, Homo sapiens
tcaatgttcttgcat

SEQ ID NO: 2056897 - DNA, 15 bp, Homo sapiens
caatgttcttgcatc

SEQ ID NO: 2056898 - DNA, 15 bp, Homo sapiens
aatgttcttgcatct

SEQ ID NO: 2056899 - DNA, 15 bp, Homo sapiens
atgttcttgcatcta

SEQ ID NO: 2056900 - DNA, 15 bp, Homo sapiens
tgttcttgcatctaa

SEQ ID NO: 2056901 - DNA, 15 bp, Homo sapiens
gttcttgcatctaac

SEQ ID NO: 2056902 - DNA, 15 bp, Homo sapiens
ttcttgcatctaaca

SEQ ID NO: 2056903 - DNA, 15 bp, Homo sapiens
tcttgcatctaacag

SEQ ID NO: 2056904 - DNA, 15 bp, Homo sapiens
cttgcatctaacagg

SEQ ID NO: 2056905 - DNA, 15 bp, Homo sapiens
ttgcatctaacaggt

SEQ ID NO: 2056906 - DNA, 15 bp, Homo sapiens
tgcatctaacaggtt

SEQ ID NO: 2056907 - DNA, 15 bp, Homo sapiens
gcatctaacaggttc

SEQ ID NO: 2056908 - DNA, 15 bp, Homo sapiens
catctaacaggttct

SEQ ID NO: 2056909 - DNA, 15 bp, Homo sapiens
atctaacaggttctg

SEQ ID NO: 2056910 - DNA, 15 bp, Homo sapiens
tctaacaggttctgt

SEQ ID NO: 2056911 - DNA, 15 bp, Homo sapiens
ctaacaggttctgta

SEQ ID NO: 2056912 - DNA, 15 bp, Homo sapiens
taacaggttctgtaa

SEQ ID NO: 2056913 - DNA, 15 bp, Homo sapiens
aacaggttctgtaaa

SEQ ID NO: 2056914 - DNA, 15 bp, Homo sapiens
acaggttctgtaaaa

SEQ ID NO: 2056915 - DNA, 15 bp, Homo sapiens
caggttctgtaaaat

SEQ ID NO: 2056916 - DNA, 15 bp, Homo sapiens
aggttctgtaaaatc

SEQ ID NO: 2056917 - DNA, 15 bp, Homo sapiens
ggttctgtaaaatct

SEQ ID NO: 2056918 - DNA, 15 bp, Homo sapiens
gttctgtaaaatctc

SEQ ID NO: 2056919 - DNA, 15 bp, Homo sapiens
ttctgtaaaatctct

SEQ ID NO: 2056920 - DNA, 15 bp, Homo sapiens
tctgtaaaatctctg

SEQ ID NO: 2056921 - DNA, 15 bp, Homo sapiens
ctgtaaaatctctga

SEQ ID NO: 2056922 - DNA, 15 bp, Homo sapiens
tgtaaaatctctgag

SEQ ID NO: 2056923 - DNA, 15 bp, Homo sapiens
gtaaaatctctgaga

SEQ ID NO: 2056924 - DNA, 15 bp, Homo sapiens
taaaatctctgagaa

SEQ ID NO: 2056925 - DNA, 15 bp, Homo sapiens
aaaatctctgagaat

SEQ ID NO: 2056926 - DNA, 15 bp, Homo sapiens
aaatctctgagaatt

SEQ ID NO: 2056927 - DNA, 15 bp, Homo sapiens
aatctctgagaattc

SEQ ID NO: 2056928 - DNA, 15 bp, Homo sapiens
atctctgagaattct

SEQ ID NO: 2056929 - DNA, 15 bp, Homo sapiens
tctctgagaattcta

SEQ ID NO: 2056930 - DNA, 15 bp, Homo sapiens
ctctgagaattctat

SEQ ID NO: 2056931 - DNA, 15 bp, Homo sapiens
tctgagaattctata

SEQ ID NO: 2056932 - DNA, 15 bp, Homo sapiens
ctgagaattctatat

SEQ ID NO: 2056933 - DNA, 15 bp, Homo sapiens
tgagaattctatatt

SEQ ID NO: 2056934 - DNA, 15 bp, Homo sapiens
gagaattctatatta

SEQ ID NO: 2056935 - DNA, 15 bp, Homo sapiens
agaattctatattac

SEQ ID NO: 2056936 - DNA, 15 bp, Homo sapiens
gaattctatattaca

SEQ ID NO: 2056937 - DNA, 15 bp, Homo sapiens
aattctatattacag

SEQ ID NO: 2056938 - DNA, 15 bp, Homo sapiens
attctatattacagt

SEQ ID NO: 2056939 - DNA, 15 bp, Homo sapiens
ttctatattacagtt

SEQ ID NO: 2056940 - DNA, 15 bp, Homo sapiens
tctatattacagttt

SEQ ID NO: 2056941 - DNA, 15 bp, Homo sapiens
ctatattacagtttt

SEQ ID NO: 2056942 - DNA, 15 bp, Homo sapiens
tatattacagttttt

SEQ ID NO: 2056943 - DNA, 15 bp, Homo sapiens
atattacagtttttg

SEQ ID NO: 2056944 - DNA, 15 bp, Homo sapiens
tattacagtttttga

SEQ ID NO: 2056945 - DNA, 15 bp, Homo sapiens
attacagtttttgaa

SEQ ID NO: 2056946 - DNA, 15 bp, Homo sapiens
ttacagtttttgaat

SEQ ID NO: 2056947 - DNA, 15 bp, Homo sapiens
tacagtttttgaata

SEQ ID NO: 2056948 - DNA, 15 bp, Homo sapiens
acagtttttgaatat

SEQ ID NO: 2056949 - DNA, 15 bp, Homo sapiens
cagtttttgaatatc

SEQ ID NO: 2056950 - DNA, 15 bp, Homo sapiens
agtttttgaatatct

SEQ ID NO: 2056951 - DNA, 15 bp, Homo sapiens
gtttttgaatatctt

SEQ ID NO: 2056952 - DNA, 15 bp, Homo sapiens
tttttgaatatctta

SEQ ID NO: 2056953 - DNA, 15 bp, Homo sapiens
ttttgaatatcttat

SEQ ID NO: 2056954 - DNA, 15 bp, Homo sapiens
tttgaatatcttata

SEQ ID NO: 2056955 - DNA, 15 bp, Homo sapiens
ttgaatatcttataa

SEQ ID NO: 2056956 - DNA, 15 bp, Homo sapiens
tgaatatcttataaa

SEQ ID NO: 2056957 - DNA, 15 bp, Homo sapiens
gaatatcttataaaa

SEQ ID NO: 2056958 - DNA, 15 bp, Homo sapiens
aatatcttataaaat

SEQ ID NO: 2056959 - DNA, 15 bp, Homo sapiens
atatcttataaaata

SEQ ID NO: 2056960 - DNA, 15 bp, Homo sapiens
tatcttataaaatag

SEQ ID NO: 2056961 - DNA, 15 bp, Homo sapiens
atcttataaaataga

SEQ ID NO: 2056962 - DNA, 15 bp, Homo sapiens
tcttataaaatagat

SEQ ID NO: 2056963 - DNA, 15 bp, Homo sapiens
cttataaaatagata

SEQ ID NO: 2056964 - DNA, 15 bp, Homo sapiens
ttataaaatagatat

SEQ ID NO: 2056965 - DNA, 15 bp, Homo sapiens
tataaaatagatata

SEQ ID NO: 2056966 - DNA, 15 bp, Homo sapiens
ataaaatagatatat

SEQ ID NO: 2056967 - DNA, 15 bp, Homo sapiens
taaaatagatatatg

SEQ ID NO: 2056968 - DNA, 15 bp, Homo sapiens
aaaatagatatatgt

SEQ ID NO: 2056969 - DNA, 15 bp, Homo sapiens
aaatagatatatgtg

SEQ ID NO: 2056970 - DNA, 15 bp, Homo sapiens
aatagatatatgtgt

SEQ ID NO: 2056971 - DNA, 15 bp, Homo sapiens
atagatatatgtgtg

SEQ ID NO: 2056972 - DNA, 15 bp, Homo sapiens
tagatatatgtgtgt

SEQ ID NO: 2056973 - DNA, 15 bp, Homo sapiens
agatatatgtgtgta

SEQ ID NO: 2056974 - DNA, 15 bp, Homo sapiens
gatatatgtgtgtaa

SEQ ID NO: 2056975 - DNA, 15 bp, Homo sapiens
atatatgtgtgtaag

SEQ ID NO: 2056976 - DNA, 15 bp, Homo sapiens
tatatgtgtgtaaga

SEQ ID NO: 2056977 - DNA, 15 bp, Homo sapiens
atatgtgtgtaagat

SEQ ID NO: 2056978 - DNA, 15 bp, Homo sapiens
tatgtgtgtaagata

SEQ ID NO: 2056979 - DNA, 15 bp, Homo sapiens
atgtgtgtaagatag

SEQ ID NO: 2056980 - DNA, 15 bp, Homo sapiens
tgtgtgtaagataga

SEQ ID NO: 2056981 - DNA, 15 bp, Homo sapiens
gtgtgtaagatagat

SEQ ID NO: 2056982 - DNA, 15 bp, Homo sapiens
tgtgtaagatagata

SEQ ID NO: 2056983 - DNA, 15 bp, Homo sapiens
gtgtaagatagatac

SEQ ID NO: 2056984 - DNA, 15 bp, Homo sapiens
tgtaagatagataca

SEQ ID NO: 2056985 - DNA, 15 bp, Homo sapiens
gtaagatagatacat

SEQ ID NO: 2056986 - DNA, 15 bp, Homo sapiens
taagatagatacata

SEQ ID NO: 2056987 - DNA, 15 bp, Homo sapiens
aagatagatacatat

SEQ ID NO: 2056988 - DNA, 15 bp, Homo sapiens
agatagatacatatg

SEQ ID NO: 2056989 - DNA, 15 bp, Homo sapiens
gatagatacatatgt

SEQ ID NO: 2056990 - DNA, 15 bp, Homo sapiens
atagatacatatgta

SEQ ID NO: 2056991 - DNA, 15 bp, Homo sapiens
tagatacatatgtat

SEQ ID NO: 2056992 - DNA, 15 bp, Homo sapiens
agatacatatgtata

SEQ ID NO: 2056993 - DNA, 15 bp, Homo sapiens
gatacatatgtatat

SEQ ID NO: 2056994 - DNA, 15 bp, Homo sapiens
atacatatgtatata

SEQ ID NO: 2056995 - DNA, 15 bp, Homo sapiens
tacatatgtatatat

SEQ ID NO: 2056996 - DNA, 15 bp, Homo sapiens
acatatgtatatata

SEQ ID NO: 2056997 - DNA, 15 bp, Homo sapiens
catatgtatatatac

SEQ ID NO: 2056998 - DNA, 15 bp, Homo sapiens
atatgtatatataca

SEQ ID NO: 2056999 - DNA, 15 bp, Homo sapiens
tatgtatatatacat

SEQ ID NO: 2057000 - DNA, 15 bp, Homo sapiens
atgtatatatacatg

SEQ ID NO: 2057001 - DNA, 15 bp, Homo sapiens
tgtatatatacatgt

SEQ ID NO: 2057002 - DNA, 15 bp, Homo sapiens
gtatatatacatgtg

SEQ ID NO: 2057003 - DNA, 15 bp, Homo sapiens
tatatatacatgtgt

SEQ ID NO: 2057004 - DNA, 15 bp, Homo sapiens
atatatacatgtgta

SEQ ID NO: 2057005 - DNA, 15 bp, Homo sapiens
tatatacatgtgtat

SEQ ID NO: 2057006 - DNA, 15 bp, Homo sapiens
atatacatgtgtata

SEQ ID NO: 2057007 - DNA, 15 bp, Homo sapiens
tatacatgtgtataa

SEQ ID NO: 2057008 - DNA, 15 bp, Homo sapiens
atacatgtgtataag

SEQ ID NO: 2057009 - DNA, 15 bp, Homo sapiens
tacatgtgtataaga

SEQ ID NO: 2057010 - DNA, 15 bp, Homo sapiens
acatgtgtataagag

SEQ ID NO: 2057011 - DNA, 15 bp, Homo sapiens
catgtgtataagaga

SEQ ID NO: 2057012 - DNA, 15 bp, Homo sapiens
atgtgtataagagat

SEQ ID NO: 2057013 - DNA, 15 bp, Homo sapiens
tgtgtataagagata

SEQ ID NO: 2057014 - DNA, 15 bp, Homo sapiens
gtgtataagagatac

SEQ ID NO: 2057015 - DNA, 15 bp, Homo sapiens
tgtataagagataca

SEQ ID NO: 2057016 - DNA, 15 bp, Homo sapiens
gtataagagatacat

SEQ ID NO: 2057017 - DNA, 15 bp, Homo sapiens
tataagagatacata

SEQ ID NO: 2057018 - DNA, 15 bp, Homo sapiens
ataagagatacatat

SEQ ID NO: 2057019 - DNA, 15 bp, Homo sapiens
taagagatacatatg

SEQ ID NO: 2057020 - DNA, 15 bp, Homo sapiens
aagagatacatatgt

SEQ ID NO: 2057021 - DNA, 15 bp, Homo sapiens
agagatacatatgta

SEQ ID NO: 2057022 - DNA, 15 bp, Homo sapiens
gagatacatatgtat

SEQ ID NO: 2057023 - DNA, 15 bp, Homo sapiens
atgtgtataagagag

SEQ ID NO: 2057024 - DNA, 15 bp, Homo sapiens
tgtgtataagagaga

SEQ ID NO: 2057025 - DNA, 15 bp, Homo sapiens
gtgtataagagagat

SEQ ID NO: 2057026 - DNA, 15 bp, Homo sapiens
tgtataagagagata

SEQ ID NO: 2057027 - DNA, 15 bp, Homo sapiens
gtataagagagatac

SEQ ID NO: 2057028 - DNA, 15 bp, Homo sapiens
tataagagagataca

SEQ ID NO: 2057029 - DNA, 15 bp, Homo sapiens
ataagagagatacat

SEQ ID NO: 2057030 - DNA, 15 bp, Homo sapiens
taagagagatacata

SEQ ID NO: 2057031 - DNA, 15 bp, Homo sapiens
aagagagatacatat

SEQ ID NO: 2057032 - DNA, 15 bp, Homo sapiens
agagagatacatatg

SEQ ID NO: 2057033 - DNA, 15 bp, Homo sapiens
gagagatacatatgt

SEQ ID NO: 2057034 - DNA, 15 bp, Homo sapiens
gtgtataagagagac

SEQ ID NO: 2057035 - DNA, 15 bp, Homo sapiens
tgtataagagagaca

SEQ ID NO: 2057036 - DNA, 15 bp, Homo sapiens
gtataagagagacac

SEQ ID NO: 2057037 - DNA, 15 bp, Homo sapiens
tataagagagacaca

SEQ ID NO: 2057038 - DNA, 15 bp, Homo sapiens
ataagagagacacat

SEQ ID NO: 2057039 - DNA, 15 bp, Homo sapiens
taagagagacacata

SEQ ID NO: 2057040 - DNA, 15 bp, Homo sapiens
aagagagacacatat

SEQ ID NO: 2057041 - DNA, 15 bp, Homo sapiens
agagagacacatatg

SEQ ID NO: 2057042 - DNA, 15 bp, Homo sapiens
gagagacacatatgt

SEQ ID NO: 2057043 - DNA, 15 bp, Homo sapiens
agagacacatatgta

SEQ ID NO: 2057044 - DNA, 15 bp, Homo sapiens
gagacacatatgtat

SEQ ID NO: 2057045 - DNA, 15 bp, Homo sapiens
agacacatatgtata

SEQ ID NO: 2057046 - DNA, 15 bp, Homo sapiens
gacacatatgtatat

SEQ ID NO: 2057047 - DNA, 15 bp, Homo sapiens
acacatatgtatata

SEQ ID NO: 2057048 - DNA, 15 bp, Homo sapiens
cacatatgtatatat

SEQ ID NO: 2057049 - DNA, 15 bp, Homo sapiens
atatgtatatatacc

SEQ ID NO: 2057050 - DNA, 15 bp, Homo sapiens
tatgtatatatacct

SEQ ID NO: 2057051 - DNA, 15 bp, Homo sapiens
atgtatatatacctc

SEQ ID NO: 2057052 - DNA, 15 bp, Homo sapiens
tgtatatatacctct

SEQ ID NO: 2057053 - DNA, 15 bp, Homo sapiens
gtatatatacctcta

SEQ ID NO: 2057054 - DNA, 15 bp, Homo sapiens
tatatatacctctat

SEQ ID NO: 2057055 - DNA, 15 bp, Homo sapiens
atatatacctctata

SEQ ID NO: 2057056 - DNA, 15 bp, Homo sapiens
tatatacctctatac

SEQ ID NO: 2057057 - DNA, 15 bp, Homo sapiens
atatacctctataca

SEQ ID NO: 2057058 - DNA, 15 bp, Homo sapiens
tatacctctatacac

SEQ ID NO: 2057059 - DNA, 15 bp, Homo sapiens
atacctctatacaca

SEQ ID NO: 2057060 - DNA, 15 bp, Homo sapiens
tacctctatacacac

SEQ ID NO: 2057061 - DNA, 15 bp, Homo sapiens
acctctatacacaca

SEQ ID NO: 2057062 - DNA, 15 bp, Homo sapiens
cctctatacacacat

SEQ ID NO: 2057063 - DNA, 15 bp, Homo sapiens
ctctatacacacata

SEQ ID NO: 2057064 - DNA, 15 bp, Homo sapiens
tctatacacacatac

SEQ ID NO: 2057065 - DNA, 15 bp, Homo sapiens
tatacacacatacat

SEQ ID NO: 2057066 - DNA, 15 bp, Homo sapiens
tacacacatacatat

SEQ ID NO: 2057067 - DNA, 15 bp, Homo sapiens
cacatacatatatac

SEQ ID NO: 2057068 - DNA, 15 bp, Homo sapiens
acatacatatataca

SEQ ID NO: 2057069 - DNA, 15 bp, Homo sapiens
catacatatatacat

SEQ ID NO: 2057070 - DNA, 15 bp, Homo sapiens
atacatatatacata

SEQ ID NO: 2057071 - DNA, 15 bp, Homo sapiens
tacatatatacatag

SEQ ID NO: 2057072 - DNA, 15 bp, Homo sapiens
acatatatacataga

SEQ ID NO: 2057073 - DNA, 15 bp, Homo sapiens
catatatacatagaa

SEQ ID NO: 2057074 - DNA, 15 bp, Homo sapiens
atatatacatagaaa

SEQ ID NO: 2057075 - DNA, 15 bp, Homo sapiens
tatatacatagaaat

SEQ ID NO: 2057076 - DNA, 15 bp, Homo sapiens
atatacatagaaatc

SEQ ID NO: 2057077 - DNA, 15 bp, Homo sapiens
tatacatagaaatct

SEQ ID NO: 2057078 - DNA, 15 bp, Homo sapiens
atacatagaaatctg

SEQ ID NO: 2057079 - DNA, 15 bp, Homo sapiens
tacatagaaatctgt

SEQ ID NO: 2057080 - DNA, 15 bp, Homo sapiens
acatagaaatctgtg

SEQ ID NO: 2057081 - DNA, 15 bp, Homo sapiens
catagaaatctgtgt

SEQ ID NO: 2057082 - DNA, 15 bp, Homo sapiens
atagaaatctgtgtg

SEQ ID NO: 2057083 - DNA, 15 bp, Homo sapiens
tagaaatctgtgtgc

SEQ ID NO: 2057084 - DNA, 15 bp, Homo sapiens
agaaatctgtgtgca

SEQ ID NO: 2057085 - DNA, 15 bp, Homo sapiens
gaaatctgtgtgcaa

SEQ ID NO: 2057086 - DNA, 15 bp, Homo sapiens
aaatctgtgtgcaat

SEQ ID NO: 2057087 - DNA, 15 bp, Homo sapiens
aatctgtgtgcaatc

SEQ ID NO: 2057088 - DNA, 15 bp, Homo sapiens
atctgtgtgcaatca

SEQ ID NO: 2057089 - DNA, 15 bp, Homo sapiens
tctgtgtgcaatcac

SEQ ID NO: 2057090 - DNA, 15 bp, Homo sapiens
ctgtgtgcaatcact

SEQ ID NO: 2057091 - DNA, 15 bp, Homo sapiens
tgtgtgcaatcactt

SEQ ID NO: 2057092 - DNA, 15 bp, Homo sapiens
gtgtgcaatcactta

SEQ ID NO: 2057093 - DNA, 15 bp, Homo sapiens
tgtgcaatcacttac

SEQ ID NO: 2057094 - DNA, 15 bp, Homo sapiens
gtgcaatcacttaca

SEQ ID NO: 2057095 - DNA, 15 bp, Homo sapiens
tgcaatcacttacaa

SEQ ID NO: 2057096 - DNA, 15 bp, Homo sapiens
gcaatcacttacaaa

SEQ ID NO: 2057097 - DNA, 15 bp, Homo sapiens
caatcacttacaaag

SEQ ID NO: 2057098 - DNA, 15 bp, Homo sapiens
aatcacttacaaagt

SEQ ID NO: 2057099 - DNA, 15 bp, Homo sapiens
atcacttacaaagta

SEQ ID NO: 2057100 - DNA, 15 bp, Homo sapiens
tcacttacaaagtag

SEQ ID NO: 2057101 - DNA, 15 bp, Homo sapiens
cacttacaaagtagg

SEQ ID NO: 2057102 - DNA, 15 bp, Homo sapiens
acttacaaagtaggc

SEQ ID NO: 2057103 - DNA, 15 bp, Homo sapiens
cttacaaagtaggca

SEQ ID NO: 2057104 - DNA, 15 bp, Homo sapiens
ttacaaagtaggcag

SEQ ID NO: 2057105 - DNA, 15 bp, Homo sapiens
tacaaagtaggcaga

SEQ ID NO: 2057106 - DNA, 15 bp, Homo sapiens
acaaagtaggcagaa

SEQ ID NO: 2057107 - DNA, 15 bp, Homo sapiens
caaagtaggcagaat

SEQ ID NO: 2057108 - DNA, 15 bp, Homo sapiens
aaagtaggcagaatc

SEQ ID NO: 2057109 - DNA, 15 bp, Homo sapiens
aagtaggcagaatca

SEQ ID NO: 2057110 - DNA, 15 bp, Homo sapiens
agtaggcagaatcag

SEQ ID NO: 2057111 - DNA, 15 bp, Homo sapiens
gtaggcagaatcaga

SEQ ID NO: 2057112 - DNA, 15 bp, Homo sapiens
taggcagaatcagat

SEQ ID NO: 2057113 - DNA, 15 bp, Homo sapiens
aggcagaatcagatg

SEQ ID NO: 2057114 - DNA, 15 bp, Homo sapiens
ggcagaatcagatgt

SEQ ID NO: 2057115 - DNA, 15 bp, Homo sapiens
gcagaatcagatgtg

SEQ ID NO: 2057116 - DNA, 15 bp, Homo sapiens
cagaatcagatgtgg

SEQ ID NO: 2057117 - DNA, 15 bp, Homo sapiens
agaatcagatgtgga

SEQ ID NO: 2057118 - DNA, 15 bp, Homo sapiens
gaatcagatgtggat

SEQ ID NO: 2057119 - DNA, 15 bp, Homo sapiens
aatcagatgtggatt

SEQ ID NO: 2057120 - DNA, 15 bp, Homo sapiens
atcagatgtggattt

SEQ ID NO: 2057121 - DNA, 15 bp, Homo sapiens
tcagatgtggatttt

SEQ ID NO: 2057122 - DNA, 15 bp, Homo sapiens
cagatgtggatttta

SEQ ID NO: 2057123 - DNA, 15 bp, Homo sapiens
agatgtggattttag

SEQ ID NO: 2057124 - DNA, 15 bp, Homo sapiens
gatgtggattttagg

SEQ ID NO: 2057125 - DNA, 15 bp, Homo sapiens
atgtggattttaggt

SEQ ID NO: 2057126 - DNA, 15 bp, Homo sapiens
tgtggattttaggtg

SEQ ID NO: 2057127 - DNA, 15 bp, Homo sapiens
gtggattttaggtgg

SEQ ID NO: 2057128 - DNA, 15 bp, Homo sapiens
tggattttaggtggg

SEQ ID NO: 2057129 - DNA, 15 bp, Homo sapiens
ggattttaggtggga

SEQ ID NO: 2057130 - DNA, 15 bp, Homo sapiens
gattttaggtgggag

SEQ ID NO: 2057131 - DNA, 15 bp, Homo sapiens
attttaggtgggagg

SEQ ID NO: 2057132 - DNA, 15 bp, Homo sapiens
ttttaggtgggaggc

SEQ ID NO: 2057133 - DNA, 15 bp, Homo sapiens
tttaggtgggaggca

SEQ ID NO: 2057134 - DNA, 15 bp, Homo sapiens
ttaggtgggaggcaa

SEQ ID NO: 2057135 - DNA, 15 bp, Homo sapiens
taggtgggaggcaag

SEQ ID NO: 2057136 - DNA, 15 bp, Homo sapiens
aggtgggaggcaaga

SEQ ID NO: 2057137 - DNA, 15 bp, Homo sapiens
ggtgggaggcaagag

SEQ ID NO: 2057138 - DNA, 15 bp, Homo sapiens
gtgggaggcaagagt

SEQ ID NO: 2057139 - DNA, 15 bp, Homo sapiens
tgggaggcaagagtt

SEQ ID NO: 2057140 - DNA, 15 bp, Homo sapiens
gggaggcaagagttt

SEQ ID NO: 2057141 - DNA, 15 bp, Homo sapiens
ggaggcaagagtttt

SEQ ID NO: 2057142 - DNA, 15 bp, Homo sapiens
gaggcaagagttttc

SEQ ID NO: 2057143 - DNA, 15 bp, Homo sapiens
aggcaagagttttct

SEQ ID NO: 2057144 - DNA, 15 bp, Homo sapiens
ggcaagagttttctt

SEQ ID NO: 2057145 - DNA, 15 bp, Homo sapiens
gcaagagttttcttt

SEQ ID NO: 2057146 - DNA, 15 bp, Homo sapiens
caagagttttcttta

SEQ ID NO: 2057147 - DNA, 15 bp, Homo sapiens
agagttttctttaac

SEQ ID NO: 2057148 - DNA, 15 bp, Homo sapiens
gagttttctttaaca

SEQ ID NO: 2057149 - DNA, 15 bp, Homo sapiens
agttttctttaacaa

SEQ ID NO: 2057150 - DNA, 15 bp, Homo sapiens
gttttctttaacaag

SEQ ID NO: 2057151 - DNA, 15 bp, Homo sapiens
ttttctttaacaagt

SEQ ID NO: 2057152 - DNA, 15 bp, Homo sapiens
tttctttaacaagtc

SEQ ID NO: 2057153 - DNA, 15 bp, Homo sapiens
ttctttaacaagtcc

SEQ ID NO: 2057154 - DNA, 15 bp, Homo sapiens
tctttaacaagtcct

SEQ ID NO: 2057155 - DNA, 15 bp, Homo sapiens
tttaacaagtccttt

SEQ ID NO: 2057156 - DNA, 15 bp, Homo sapiens
ttaacaagtcctttg

SEQ ID NO: 2057157 - DNA, 15 bp, Homo sapiens
taacaagtcctttgc

SEQ ID NO: 2057158 - DNA, 15 bp, Homo sapiens
aacaagtcctttgcc

SEQ ID NO: 2057159 - DNA, 15 bp, Homo sapiens
acaagtcctttgcct

SEQ ID NO: 2057160 - DNA, 15 bp, Homo sapiens
caagtcctttgcctg

SEQ ID NO: 2057161 - DNA, 15 bp, Homo sapiens
aagtcctttgcctgc

SEQ ID NO: 2057162 - DNA, 15 bp, Homo sapiens
agtcctttgcctgcc

SEQ ID NO: 2057163 - DNA, 15 bp, Homo sapiens
gtcctttgcctgcca

SEQ ID NO: 2057164 - DNA, 15 bp, Homo sapiens
tcctttgcctgccac

SEQ ID NO: 2057165 - DNA, 15 bp, Homo sapiens
cctttgcctgccaca

SEQ ID NO: 2057166 - DNA, 15 bp, Homo sapiens
ctttgcctgccacat

SEQ ID NO: 2057167 - DNA, 15 bp, Homo sapiens
tttgcctgccacatt

SEQ ID NO: 2057168 - DNA, 15 bp, Homo sapiens
ttgcctgccacattt

SEQ ID NO: 2057169 - DNA, 15 bp, Homo sapiens
tgcctgccacattta

SEQ ID NO: 2057170 - DNA, 15 bp, Homo sapiens
gcctgccacatttat

SEQ ID NO: 2057171 - DNA, 15 bp, Homo sapiens
cctgccacatttatg

SEQ ID NO: 2057172 - DNA, 15 bp, Homo sapiens
ctgccacatttatgt

SEQ ID NO: 2057173 - DNA, 15 bp, Homo sapiens
tgccacatttatgtt

SEQ ID NO: 2057174 - DNA, 15 bp, Homo sapiens
gccacatttatgtta

SEQ ID NO: 2057175 - DNA, 15 bp, Homo sapiens
ccacatttatgttat

SEQ ID NO: 2057176 - DNA, 15 bp, Homo sapiens
cacatttatgttatg

SEQ ID NO: 2057177 - DNA, 15 bp, Homo sapiens
acatttatgttatgt

SEQ ID NO: 2057178 - DNA, 15 bp, Homo sapiens
catttatgttatgtt

SEQ ID NO: 2057179 - DNA, 15 bp, Homo sapiens
atttatgttatgttt

SEQ ID NO: 2057180 - DNA, 15 bp, Homo sapiens
tttatgttatgtttt

SEQ ID NO: 2057181 - DNA, 15 bp, Homo sapiens
ttatgttatgtttta

SEQ ID NO: 2057182 - DNA, 15 bp, Homo sapiens
tatgttatgttttat

SEQ ID NO: 2057183 - DNA, 15 bp, Homo sapiens
atgttatgttttatt

SEQ ID NO: 2057184 - DNA, 15 bp, Homo sapiens
tgttatgttttattt

SEQ ID NO: 2057185 - DNA, 15 bp, Homo sapiens
gttatgttttattta

SEQ ID NO: 2057186 - DNA, 15 bp, Homo sapiens
ttatgttttatttat

SEQ ID NO: 2057187 - DNA, 15 bp, Homo sapiens
tatgttttatttata

SEQ ID NO: 2057188 - DNA, 15 bp, Homo sapiens
atgttttatttatat

SEQ ID NO: 2057189 - DNA, 15 bp, Homo sapiens
tgttttatttatatt

SEQ ID NO: 2057190 - DNA, 15 bp, Homo sapiens
gttttatttatattt

SEQ ID NO: 2057191 - DNA, 15 bp, Homo sapiens
ttttatttatatttc

SEQ ID NO: 2057192 - DNA, 15 bp, Homo sapiens
tttatttatatttca

SEQ ID NO: 2057193 - DNA, 15 bp, Homo sapiens
ttatttatatttcag

SEQ ID NO: 2057194 - DNA, 15 bp, Homo sapiens
tatttatatttcagg

SEQ ID NO: 2057195 - DNA, 15 bp, Homo sapiens
atttatatttcaggc

SEQ ID NO: 2057196 - DNA, 15 bp, Homo sapiens
tttatatttcaggca

SEQ ID NO: 2057197 - DNA, 15 bp, Homo sapiens
ttatatttcaggcag

SEQ ID NO: 2057198 - DNA, 15 bp, Homo sapiens
tatatttcaggcaga

SEQ ID NO: 2057199 - DNA, 15 bp, Homo sapiens
atatttcaggcagag

SEQ ID NO: 2057200 - DNA, 15 bp, Homo sapiens
tatttcaggcagagc

SEQ ID NO: 2057201 - DNA, 15 bp, Homo sapiens
atttcaggcagagca

SEQ ID NO: 2057202 - DNA, 15 bp, Homo sapiens
tttcaggcagagcac

SEQ ID NO: 2057203 - DNA, 15 bp, Homo sapiens
ttcaggcagagcact

SEQ ID NO: 2057204 - DNA, 15 bp, Homo sapiens
tcaggcagagcacta

SEQ ID NO: 2057205 - DNA, 15 bp, Homo sapiens
caggcagagcactaa

SEQ ID NO: 2057206 - DNA, 15 bp, Homo sapiens
aggcagagcactaac

SEQ ID NO: 2057207 - DNA, 15 bp, Homo sapiens
ggcagagcactaaca

SEQ ID NO: 2057208 - DNA, 15 bp, Homo sapiens
gcagagcactaacag

SEQ ID NO: 2057209 - DNA, 15 bp, Homo sapiens
cagagcactaacagt

SEQ ID NO: 2057210 - DNA, 15 bp, Homo sapiens
agagcactaacagtg

SEQ ID NO: 2057211 - DNA, 15 bp, Homo sapiens
gagcactaacagtga

SEQ ID NO: 2057212 - DNA, 15 bp, Homo sapiens
agcactaacagtgat

SEQ ID NO: 2057213 - DNA, 15 bp, Homo sapiens
gcactaacagtgatc

SEQ ID NO: 2057214 - DNA, 15 bp, Homo sapiens
cactaacagtgatca

SEQ ID NO: 2057215 - DNA, 15 bp, Homo sapiens
actaacagtgatcaa

SEQ ID NO: 2057216 - DNA, 15 bp, Homo sapiens
ctaacagtgatcaat

SEQ ID NO: 2057217 - DNA, 15 bp, Homo sapiens
taacagtgatcaatt

SEQ ID NO: 2057218 - DNA, 15 bp, Homo sapiens
aacagtgatcaattt

SEQ ID NO: 2057219 - DNA, 15 bp, Homo sapiens
acagtgatcaattta

SEQ ID NO: 2057220 - DNA, 15 bp, Homo sapiens
cagtgatcaatttat

SEQ ID NO: 2057221 - DNA, 15 bp, Homo sapiens
agtgatcaatttatg

SEQ ID NO: 2057222 - DNA, 15 bp, Homo sapiens
gtgatcaatttatgt

SEQ ID NO: 2057223 - DNA, 15 bp, Homo sapiens
tgatcaatttatgtt

SEQ ID NO: 2057224 - DNA, 15 bp, Homo sapiens
gatcaatttatgttg

SEQ ID NO: 2057225 - DNA, 15 bp, Homo sapiens
atcaatttatgttga

SEQ ID NO: 2057226 - DNA, 15 bp, Homo sapiens
tcaatttatgttgaa

SEQ ID NO: 2057227 - DNA, 15 bp, Homo sapiens
caatttatgttgaag

SEQ ID NO: 2057228 - DNA, 15 bp, Homo sapiens
aatttatgttgaagg

SEQ ID NO: 2057229 - DNA, 15 bp, Homo sapiens
atttatgttgaaggg

SEQ ID NO: 2057230 - DNA, 15 bp, Homo sapiens
tttatgttgaagggt

SEQ ID NO: 2057231 - DNA, 15 bp, Homo sapiens
ttatgttgaagggtc

SEQ ID NO: 2057232 - DNA, 15 bp, Homo sapiens
tatgttgaagggtcc

SEQ ID NO: 2057233 - DNA, 15 bp, Homo sapiens
atgttgaagggtcct

SEQ ID NO: 2057234 - DNA, 15 bp, Homo sapiens
tgttgaagggtcctg

SEQ ID NO: 2057235 - DNA, 15 bp, Homo sapiens
gttgaagggtcctgc

SEQ ID NO: 2057236 - DNA, 15 bp, Homo sapiens
ttgaagggtcctgca

SEQ ID NO: 2057237 - DNA, 15 bp, Homo sapiens
tgaagggtcctgcaa

SEQ ID NO: 2057238 - DNA, 15 bp, Homo sapiens
gaagggtcctgcaaa

SEQ ID NO: 2057239 - DNA, 15 bp, Homo sapiens
aagggtcctgcaaat

SEQ ID NO: 2057240 - DNA, 15 bp, Homo sapiens
agggtcctgcaaata

SEQ ID NO: 2057241 - DNA, 15 bp, Homo sapiens
gggtcctgcaaataa

SEQ ID NO: 2057242 - DNA, 15 bp, Homo sapiens
ggtcctgcaaataac

SEQ ID NO: 2057243 - DNA, 15 bp, Homo sapiens
gtcctgcaaataaca

SEQ ID NO: 2057244 - DNA, 15 bp, Homo sapiens
tcctgcaaataacaa

SEQ ID NO: 2057245 - DNA, 15 bp, Homo sapiens
cctgcaaataacaaa

SEQ ID NO: 2057246 - DNA, 15 bp, Homo sapiens
ctgcaaataacaaaa

SEQ ID NO: 2057247 - DNA, 15 bp, Homo sapiens
tgcaaataacaaaaa

SEQ ID NO: 2057248 - DNA, 15 bp, Homo sapiens
gcaaataacaaaaat

SEQ ID NO: 2057249 - DNA, 15 bp, Homo sapiens
caaataacaaaaata

SEQ ID NO: 2057250 - DNA, 15 bp, Homo sapiens
aaataacaaaaatag

SEQ ID NO: 2057251 - DNA, 15 bp, Homo sapiens
aataacaaaaataga

SEQ ID NO: 2057252 - DNA, 15 bp, Homo sapiens
ataacaaaaatagat

SEQ ID NO: 2057253 - DNA, 15 bp, Homo sapiens
taacaaaaatagata

SEQ ID NO: 2057254 - DNA, 15 bp, Homo sapiens
aacaaaaatagataa

SEQ ID NO: 2057255 - DNA, 15 bp, Homo sapiens
acaaaaatagataaa

SEQ ID NO: 2057256 - DNA, 15 bp, Homo sapiens
caaaaatagataaaa

SEQ ID NO: 2057257 - DNA, 15 bp, Homo sapiens
aaaaatagataaaac

SEQ ID NO: 2057258 - DNA, 15 bp, Homo sapiens
aaaatagataaaaca

SEQ ID NO: 2057259 - DNA, 15 bp, Homo sapiens
aaatagataaaacag

SEQ ID NO: 2057260 - DNA, 15 bp, Homo sapiens
aatagataaaacagg

SEQ ID NO: 2057261 - DNA, 15 bp, Homo sapiens
atagataaaacagga

SEQ ID NO: 2057262 - DNA, 15 bp, Homo sapiens
tagataaaacaggaa

SEQ ID NO: 2057263 - DNA, 15 bp, Homo sapiens
agataaaacaggaaa

SEQ ID NO: 2057264 - DNA, 15 bp, Homo sapiens
gataaaacaggaaaa

SEQ ID NO: 2057265 - DNA, 15 bp, Homo sapiens
ataaaacaggaaaat

SEQ ID NO: 2057266 - DNA, 15 bp, Homo sapiens
taaaacaggaaaatg

SEQ ID NO: 2057267 - DNA, 15 bp, Homo sapiens
aaaacaggaaaatga

SEQ ID NO: 2057268 - DNA, 15 bp, Homo sapiens
aaacaggaaaatgaa

SEQ ID NO: 2057269 - DNA, 15 bp, Homo sapiens
aacaggaaaatgaat

SEQ ID NO: 2057270 - DNA, 15 bp, Homo sapiens
acaggaaaatgaatt

SEQ ID NO: 2057271 - DNA, 15 bp, Homo sapiens
caggaaaatgaattt

SEQ ID NO: 2057272 - DNA, 15 bp, Homo sapiens
aggaaaatgaattta

SEQ ID NO: 2057273 - DNA, 15 bp, Homo sapiens
ggaaaatgaatttaa

SEQ ID NO: 2057274 - DNA, 15 bp, Homo sapiens
gaaaatgaatttaaa

SEQ ID NO: 2057275 - DNA, 15 bp, Homo sapiens
aaaatgaatttaaat

SEQ ID NO: 2057276 - DNA, 15 bp, Homo sapiens
aaatgaatttaaatc

SEQ ID NO: 2057277 - DNA, 15 bp, Homo sapiens
aatgaatttaaatct

SEQ ID NO: 2057278 - DNA, 15 bp, Homo sapiens
atgaatttaaatctc

SEQ ID NO: 2057279 - DNA, 15 bp, Homo sapiens
tgaatttaaatctca

SEQ ID NO: 2057280 - DNA, 15 bp, Homo sapiens
gaatttaaatctcac

SEQ ID NO: 2057281 - DNA, 15 bp, Homo sapiens
aatttaaatctcacc

SEQ ID NO: 2057282 - DNA, 15 bp, Homo sapiens
atttaaatctcaccc

SEQ ID NO: 2057283 - DNA, 15 bp, Homo sapiens
tttaaatctcaccct

SEQ ID NO: 2057284 - DNA, 15 bp, Homo sapiens
ttaaatctcaccctt

SEQ ID NO: 2057285 - DNA, 15 bp, Homo sapiens
taaatctcacccttt

SEQ ID NO: 2057286 - DNA, 15 bp, Homo sapiens
aaatctcaccctttc

SEQ ID NO: 2057287 - DNA, 15 bp, Homo sapiens
aatctcaccctttcc

SEQ ID NO: 2057288 - DNA, 15 bp, Homo sapiens
atctcaccctttcca

SEQ ID NO: 2057289 - DNA, 15 bp, Homo sapiens
tctcaccctttccaa

SEQ ID NO: 2057290 - DNA, 15 bp, Homo sapiens
ctcaccctttccaaa

SEQ ID NO: 2057291 - DNA, 15 bp, Homo sapiens
tcaccctttccaaaa

SEQ ID NO: 2057292 - DNA, 15 bp, Homo sapiens
caccctttccaaaac

SEQ ID NO: 2057293 - DNA, 15 bp, Homo sapiens
accctttccaaaact

SEQ ID NO: 2057294 - DNA, 15 bp, Homo sapiens
ccctttccaaaactt

SEQ ID NO: 2057295 - DNA, 15 bp, Homo sapiens
cctttccaaaacttt

SEQ ID NO: 2057296 - DNA, 15 bp, Homo sapiens
ctttccaaaactttg

SEQ ID NO: 2057297 - DNA, 15 bp, Homo sapiens
tttccaaaactttgc

SEQ ID NO: 2057298 - DNA, 15 bp, Homo sapiens
ttccaaaactttgct

SEQ ID NO: 2057299 - DNA, 15 bp, Homo sapiens
tccaaaactttgcta

SEQ ID NO: 2057300 - DNA, 15 bp, Homo sapiens
ccaaaactttgctac

SEQ ID NO: 2057301 - DNA, 15 bp, Homo sapiens
caaaactttgctaca

SEQ ID NO: 2057302 - DNA, 15 bp, Homo sapiens
aaaactttgctacaa

SEQ ID NO: 2057303 - DNA, 15 bp, Homo sapiens
aaactttgctacaac

SEQ ID NO: 2057304 - DNA, 15 bp, Homo sapiens
aactttgctacaact

SEQ ID NO: 2057305 - DNA, 15 bp, Homo sapiens
actttgctacaactc

SEQ ID NO: 2057306 - DNA, 15 bp, Homo sapiens
ctttgctacaactca

SEQ ID NO: 2057307 - DNA, 15 bp, Homo sapiens
tttgctacaactcat

SEQ ID NO: 2057308 - DNA, 15 bp, Homo sapiens
ttgctacaactcata

SEQ ID NO: 2057309 - DNA, 15 bp, Homo sapiens
tgctacaactcataa

SEQ ID NO: 2057310 - DNA, 15 bp, Homo sapiens
gctacaactcataat

SEQ ID NO: 2057311 - DNA, 15 bp, Homo sapiens
ctacaactcataata

SEQ ID NO: 2057312 - DNA, 15 bp, Homo sapiens
tacaactcataataa

SEQ ID NO: 2057313 - DNA, 15 bp, Homo sapiens
acaactcataataac

SEQ ID NO: 2057314 - DNA, 15 bp, Homo sapiens
caactcataataaca

SEQ ID NO: 2057315 - DNA, 15 bp, Homo sapiens
aactcataataacaa

SEQ ID NO: 2057316 - DNA, 15 bp, Homo sapiens
actcataataacaag

SEQ ID NO: 2057317 - DNA, 15 bp, Homo sapiens
ctcataataacaagg

SEQ ID NO: 2057318 - DNA, 15 bp, Homo sapiens
tcataataacaaggg

SEQ ID NO: 2057319 - DNA, 15 bp, Homo sapiens
cataataacaagggt

SEQ ID NO: 2057320 - DNA, 15 bp, Homo sapiens
ataataacaagggta

SEQ ID NO: 2057321 - DNA, 15 bp, Homo sapiens
taataacaagggtaa

SEQ ID NO: 2057322 - DNA, 15 bp, Homo sapiens
aataacaagggtaat

SEQ ID NO: 2057323 - DNA, 15 bp, Homo sapiens
ataacaagggtaata

SEQ ID NO: 2057324 - DNA, 15 bp, Homo sapiens
taacaagggtaataa

SEQ ID NO: 2057325 - DNA, 15 bp, Homo sapiens
aacaagggtaataaa

SEQ ID NO: 2057326 - DNA, 15 bp, Homo sapiens
acaagggtaataaat

SEQ ID NO: 2057327 - DNA, 15 bp, Homo sapiens
caagggtaataaatg

SEQ ID NO: 2057328 - DNA, 15 bp, Homo sapiens
aagggtaataaatgc

SEQ ID NO: 2057329 - DNA, 15 bp, Homo sapiens
agggtaataaatgct

SEQ ID NO: 2057330 - DNA, 15 bp, Homo sapiens
gggtaataaatgctt

SEQ ID NO: 2057331 - DNA, 15 bp, Homo sapiens
ggtaataaatgctta

SEQ ID NO: 2057332 - DNA, 15 bp, Homo sapiens
gtaataaatgcttac

SEQ ID NO: 2057333 - DNA, 15 bp, Homo sapiens
taataaatgcttacg

SEQ ID NO: 2057334 - DNA, 15 bp, Homo sapiens
aataaatgcttacga

SEQ ID NO: 2057335 - DNA, 15 bp, Homo sapiens
ataaatgcttacgaa

SEQ ID NO: 2057336 - DNA, 15 bp, Homo sapiens
taaatgcttacgaag

SEQ ID NO: 2057337 - DNA, 15 bp, Homo sapiens
aaatgcttacgaagc

SEQ ID NO: 2057338 - DNA, 15 bp, Homo sapiens
aatgcttacgaagca

SEQ ID NO: 2057339 - DNA, 15 bp, Homo sapiens
atgcttacgaagcag

SEQ ID NO: 2057340 - DNA, 15 bp, Homo sapiens
tgcttacgaagcaga

SEQ ID NO: 2057341 - DNA, 15 bp, Homo sapiens
gcttacgaagcagag

SEQ ID NO: 2057342 - DNA, 15 bp, Homo sapiens
cttacgaagcagagg

SEQ ID NO: 2057343 - DNA, 15 bp, Homo sapiens
ttacgaagcagaggt

SEQ ID NO: 2057344 - DNA, 15 bp, Homo sapiens
tacgaagcagaggtc

SEQ ID NO: 2057345 - DNA, 15 bp, Homo sapiens
acgaagcagaggtca

SEQ ID NO: 2057346 - DNA, 15 bp, Homo sapiens
cgaagcagaggtcaa

SEQ ID NO: 2057347 - DNA, 15 bp, Homo sapiens
gaagcagaggtcaaa

SEQ ID NO: 2057348 - DNA, 15 bp, Homo sapiens
aagcagaggtcaaac

SEQ ID NO: 2057349 - DNA, 15 bp, Homo sapiens
agcagaggtcaaacg

SEQ ID NO: 2057350 - DNA, 15 bp, Homo sapiens
gcagaggtcaaacgg

SEQ ID NO: 2057351 - DNA, 15 bp, Homo sapiens
cagaggtcaaacggg

SEQ ID NO: 2057352 - DNA, 15 bp, Homo sapiens
agaggtcaaacggga

SEQ ID NO: 2057353 - DNA, 15 bp, Homo sapiens
gaggtcaaacgggaa

SEQ ID NO: 2057354 - DNA, 15 bp, Homo sapiens
aggtcaaacgggaaa

SEQ ID NO: 2057355 - DNA, 15 bp, Homo sapiens
ggtcaaacgggaaac

SEQ ID NO: 2057356 - DNA, 15 bp, Homo sapiens
gtcaaacgggaaaca

SEQ ID NO: 2057357 - DNA, 15 bp, Homo sapiens
tcaaacgggaaacat

SEQ ID NO: 2057358 - DNA, 15 bp, Homo sapiens
caaacgggaaacatt

SEQ ID NO: 2057359 - DNA, 15 bp, Homo sapiens
aaacgggaaacatta

SEQ ID NO: 2057360 - DNA, 15 bp, Homo sapiens
aacgggaaacattag

SEQ ID NO: 2057361 - DNA, 15 bp, Homo sapiens
acgggaaacattagc

SEQ ID NO: 2057362 - DNA, 15 bp, Homo sapiens
cgggaaacattagca

SEQ ID NO: 2057363 - DNA, 15 bp, Homo sapiens
gggaaacattagcaa

SEQ ID NO: 2057364 - DNA, 15 bp, Homo sapiens
ggaaacattagcaaa

SEQ ID NO: 2057365 - DNA, 15 bp, Homo sapiens
gaaacattagcaaac

SEQ ID NO: 2057366 - DNA, 15 bp, Homo sapiens
aaacattagcaaacg

SEQ ID NO: 2057367 - DNA, 15 bp, Homo sapiens
aacattagcaaacga

SEQ ID NO: 2057368 - DNA, 15 bp, Homo sapiens
acattagcaaacgag

SEQ ID NO: 2057369 - DNA, 15 bp, Homo sapiens
cattagcaaacgagg

SEQ ID NO: 2057370 - DNA, 15 bp, Homo sapiens
attagcaaacgagga

SEQ ID NO: 2057371 - DNA, 15 bp, Homo sapiens
ttagcaaacgaggag

SEQ ID NO: 2057372 - DNA, 15 bp, Homo sapiens
tagcaaacgaggaga

SEQ ID NO: 2057373 - DNA, 15 bp, Homo sapiens
agcaaacgaggagag

SEQ ID NO: 2057374 - DNA, 15 bp, Homo sapiens
gcaaacgaggagagg

SEQ ID NO: 2057375 - DNA, 15 bp, Homo sapiens
caaacgaggagaggc

SEQ ID NO: 2057376 - DNA, 15 bp, Homo sapiens
aaacgaggagaggcg

SEQ ID NO: 2057377 - DNA, 15 bp, Homo sapiens
aacgaggagaggcgc

SEQ ID NO: 2057378 - DNA, 15 bp, Homo sapiens
acgaggagaggcgca

SEQ ID NO: 2057379 - DNA, 15 bp, Homo sapiens
cgaggagaggcgcag

SEQ ID NO: 2057380 - DNA, 15 bp, Homo sapiens
gaggagaggcgcagg

SEQ ID NO: 2057381 - DNA, 15 bp, Homo sapiens
aggagaggcgcagga

SEQ ID NO: 2057382 - DNA, 15 bp, Homo sapiens
ggagaggcgcaggag

SEQ ID NO: 2057383 - DNA, 15 bp, Homo sapiens
gagaggcgcaggagc

SEQ ID NO: 2057384 - DNA, 15 bp, Homo sapiens
agaggcgcaggagcc

SEQ ID NO: 2057385 - DNA, 15 bp, Homo sapiens
gaggcgcaggagccc

SEQ ID NO: 2057386 - DNA, 15 bp, Homo sapiens
aggcgcaggagccca

SEQ ID NO: 2057387 - DNA, 15 bp, Homo sapiens
ggcgcaggagcccag

SEQ ID NO: 2057388 - DNA, 15 bp, Homo sapiens
gcgcaggagcccagg

SEQ ID NO: 2057389 - DNA, 15 bp, Homo sapiens
cgcaggagcccagga

SEQ ID NO: 2057390 - DNA, 15 bp, Homo sapiens
gcaggagcccaggat

SEQ ID NO: 2057391 - DNA, 15 bp, Homo sapiens
caggagcccaggatc

SEQ ID NO: 2057392 - DNA, 15 bp, Homo sapiens
aggagcccaggatca

SEQ ID NO: 2057393 - DNA, 15 bp, Homo sapiens
ggagcccaggatcat

SEQ ID NO: 2057394 - DNA, 15 bp, Homo sapiens
gagcccaggatcatg

SEQ ID NO: 2057395 - DNA, 15 bp, Homo sapiens
agcccaggatcatgc

SEQ ID NO: 2057396 - DNA, 15 bp, Homo sapiens
gcccaggatcatgcc

SEQ ID NO: 2057397 - DNA, 15 bp, Homo sapiens
cccaggatcatgcct

SEQ ID NO: 2057398 - DNA, 15 bp, Homo sapiens
ccaggatcatgcctc

SEQ ID NO: 2057399 - DNA, 15 bp, Homo sapiens
caggatcatgcctcg

SEQ ID NO: 2057400 - DNA, 15 bp, Homo sapiens
aggatcatgcctcga

SEQ ID NO: 2057401 - DNA, 15 bp, Homo sapiens
ggatcatgcctcgat

SEQ ID NO: 2057402 - DNA, 15 bp, Homo sapiens
gatcatgcctcgatg

SEQ ID NO: 2057403 - DNA, 15 bp, Homo sapiens
atcatgcctcgatgc

SEQ ID NO: 2057404 - DNA, 15 bp, Homo sapiens
tcatgcctcgatgcc

SEQ ID NO: 2057405 - DNA, 15 bp, Homo sapiens
catgcctcgatgccc

SEQ ID NO: 2057406 - DNA, 15 bp, Homo sapiens
atgcctcgatgccca

SEQ ID NO: 2057407 - DNA, 15 bp, Homo sapiens
tgcctcgatgcccac

SEQ ID NO: 2057408 - DNA, 15 bp, Homo sapiens
gcctcgatgcccacc

SEQ ID NO: 2057409 - DNA, 15 bp, Homo sapiens
cctcgatgcccacca

SEQ ID NO: 2057410 - DNA, 15 bp, Homo sapiens
ctcgatgcccaccaa

SEQ ID NO: 2057411 - DNA, 15 bp, Homo sapiens
tcgatgcccaccaag

SEQ ID NO: 2057412 - DNA, 15 bp, Homo sapiens
cgatgcccaccaagt

SEQ ID NO: 2057413 - DNA, 15 bp, Homo sapiens
gatgcccaccaagtt

SEQ ID NO: 2057414 - DNA, 15 bp, Homo sapiens
atgcccaccaagttg

SEQ ID NO: 2057415 - DNA, 15 bp, Homo sapiens
tgcccaccaagttgg

SEQ ID NO: 2057416 - DNA, 15 bp, Homo sapiens
gcccaccaagttggg

SEQ ID NO: 2057417 - DNA, 15 bp, Homo sapiens
cccaccaagttgggc

SEQ ID NO: 2057418 - DNA, 15 bp, Homo sapiens
ccaccaagttgggca

SEQ ID NO: 2057419 - DNA, 15 bp, Homo sapiens
caccaagttgggcat

SEQ ID NO: 2057420 - DNA, 15 bp, Homo sapiens
accaagttgggcatt

SEQ ID NO: 2057421 - DNA, 15 bp, Homo sapiens
ccaagttgggcatta

SEQ ID NO: 2057422 - DNA, 15 bp, Homo sapiens
caagttgggcattag

SEQ ID NO: 2057423 - DNA, 15 bp, Homo sapiens
aagttgggcattagg

SEQ ID NO: 2057424 - DNA, 15 bp, Homo sapiens
agttgggcattaggt

SEQ ID NO: 2057425 - DNA, 15 bp, Homo sapiens
gttgggcattaggtc

SEQ ID NO: 2057426 - DNA, 15 bp, Homo sapiens
ttgggcattaggtca

SEQ ID NO: 2057427 - DNA, 15 bp, Homo sapiens
tgggcattaggtcac

SEQ ID NO: 2057428 - DNA, 15 bp, Homo sapiens
gggcattaggtcact

SEQ ID NO: 2057429 - DNA, 15 bp, Homo sapiens
ggcattaggtcacta

SEQ ID NO: 2057430 - DNA, 15 bp, Homo sapiens
gcattaggtcactat

SEQ ID NO: 2057431 - DNA, 15 bp, Homo sapiens
cattaggtcactatc

SEQ ID NO: 2057432 - DNA, 15 bp, Homo sapiens
attaggtcactatca

SEQ ID NO: 2057433 - DNA, 15 bp, Homo sapiens
ttaggtcactatcag

SEQ ID NO: 2057434 - DNA, 15 bp, Homo sapiens
taggtcactatcaga

SEQ ID NO: 2057435 - DNA, 15 bp, Homo sapiens
aggtcactatcagag

SEQ ID NO: 2057436 - DNA, 15 bp, Homo sapiens
ggtcactatcagaga

SEQ ID NO: 2057437 - DNA, 15 bp, Homo sapiens
gtcactatcagagag

SEQ ID NO: 2057438 - DNA, 15 bp, Homo sapiens
tcactatcagagaga

SEQ ID NO: 2057439 - DNA, 15 bp, Homo sapiens
cactatcagagagaa

SEQ ID NO: 2057440 - DNA, 15 bp, Homo sapiens
actatcagagagaaa

SEQ ID NO: 2057441 - DNA, 15 bp, Homo sapiens
ctatcagagagaaat

SEQ ID NO: 2057442 - DNA, 15 bp, Homo sapiens
tatcagagagaaatg

SEQ ID NO: 2057443 - DNA, 15 bp, Homo sapiens
atcagagagaaatgc

SEQ ID NO: 2057444 - DNA, 15 bp, Homo sapiens
tcagagagaaatgca

SEQ ID NO: 2057445 - DNA, 15 bp, Homo sapiens
cagagagaaatgcag

SEQ ID NO: 2057446 - DNA, 15 bp, Homo sapiens
agagagaaatgcagc

SEQ ID NO: 2057447 - DNA, 15 bp, Homo sapiens
gagagaaatgcagcc

SEQ ID NO: 2057448 - DNA, 15 bp, Homo sapiens
agagaaatgcagcca

SEQ ID NO: 2057449 - DNA, 15 bp, Homo sapiens
gagaaatgcagccag

SEQ ID NO: 2057450 - DNA, 15 bp, Homo sapiens
agaaatgcagccagc

SEQ ID NO: 2057451 - DNA, 15 bp, Homo sapiens
gaaatgcagccagcc

SEQ ID NO: 2057452 - DNA, 15 bp, Homo sapiens
aaatgcagccagcca

SEQ ID NO: 2057453 - DNA, 15 bp, Homo sapiens
aatgcagccagccac

SEQ ID NO: 2057454 - DNA, 15 bp, Homo sapiens
atgcagccagccact

SEQ ID NO: 2057455 - DNA, 15 bp, Homo sapiens
tgcagccagccactt

SEQ ID NO: 2057456 - DNA, 15 bp, Homo sapiens
gcagccagccacttc

SEQ ID NO: 2057457 - DNA, 15 bp, Homo sapiens
cagccagccacttca

SEQ ID NO: 2057458 - DNA, 15 bp, Homo sapiens
agccagccacttcag

SEQ ID NO: 2057459 - DNA, 15 bp, Homo sapiens
gccagccacttcagc

SEQ ID NO: 2057460 - DNA, 15 bp, Homo sapiens
ccagccacttcagct

SEQ ID NO: 2057461 - DNA, 15 bp, Homo sapiens
cagccacttcagcta

SEQ ID NO: 2057462 - DNA, 15 bp, Homo sapiens
agccacttcagctat

SEQ ID NO: 2057463 - DNA, 15 bp, Homo sapiens
gccacttcagctatg

SEQ ID NO: 2057464 - DNA, 15 bp, Homo sapiens
ccacttcagctatgg

SEQ ID NO: 2057465 - DNA, 15 bp, Homo sapiens
cacttcagctatggc

SEQ ID NO: 2057466 - DNA, 15 bp, Homo sapiens
acttcagctatggct

SEQ ID NO: 2057467 - DNA, 15 bp, Homo sapiens
cttcagctatggctt

SEQ ID NO: 2057468 - DNA, 15 bp, Homo sapiens
ttcagctatggcttc

SEQ ID NO: 2057469 - DNA, 15 bp, Homo sapiens
tcagctatggcttca

SEQ ID NO: 2057470 - DNA, 15 bp, Homo sapiens
cagctatggcttcag

SEQ ID NO: 2057471 - DNA, 15 bp, Homo sapiens
agctatggcttcagc

SEQ ID NO: 2057472 - DNA, 15 bp, Homo sapiens
gctatggcttcagct

SEQ ID NO: 2057473 - DNA, 15 bp, Homo sapiens
ctatggcttcagctg

SEQ ID NO: 2057474 - DNA, 15 bp, Homo sapiens
tatggcttcagctga

SEQ ID NO: 2057475 - DNA, 15 bp, Homo sapiens
atggcttcagctgag

SEQ ID NO: 2057476 - DNA, 15 bp, Homo sapiens
tggcttcagctgagg

SEQ ID NO: 2057477 - DNA, 15 bp, Homo sapiens
ggcttcagctgaggc

SEQ ID NO: 2057478 - DNA, 15 bp, Homo sapiens
gcttcagctgaggca

SEQ ID NO: 2057479 - DNA, 15 bp, Homo sapiens
cttcagctgaggcaa

SEQ ID NO: 2057480 - DNA, 15 bp, Homo sapiens
ttcagctgaggcaaa

SEQ ID NO: 2057481 - DNA, 15 bp, Homo sapiens
tcagctgaggcaaaa

SEQ ID NO: 2057482 - DNA, 15 bp, Homo sapiens
cagctgaggcaaaag

SEQ ID NO: 2057483 - DNA, 15 bp, Homo sapiens
agctgaggcaaaagc

SEQ ID NO: 2057484 - DNA, 15 bp, Homo sapiens
gctgaggcaaaagct

SEQ ID NO: 2057485 - DNA, 15 bp, Homo sapiens
ctgaggcaaaagctg

SEQ ID NO: 2057486 - DNA, 15 bp, Homo sapiens
tgaggcaaaagctgt

SEQ ID NO: 2057487 - DNA, 15 bp, Homo sapiens
gaggcaaaagctgtg

SEQ ID NO: 2057488 - DNA, 15 bp, Homo sapiens
aggcaaaagctgtgc

SEQ ID NO: 2057489 - DNA, 15 bp, Homo sapiens
ggcaaaagctgtgct

SEQ ID NO: 2057490 - DNA, 15 bp, Homo sapiens
gcaaaagctgtgctg

SEQ ID NO: 2057491 - DNA, 15 bp, Homo sapiens
caaaagctgtgctgc

SEQ ID NO: 2057492 - DNA, 15 bp, Homo sapiens
aaaagctgtgctgcc

SEQ ID NO: 2057493 - DNA, 15 bp, Homo sapiens
aaagctgtgctgcca

SEQ ID NO: 2057494 - DNA, 15 bp, Homo sapiens
aagctgtgctgccaa

SEQ ID NO: 2057495 - DNA, 15 bp, Homo sapiens
agctgtgctgccaag

SEQ ID NO: 2057496 - DNA, 15 bp, Homo sapiens
gctgtgctgccaagt

SEQ ID NO: 2057497 - DNA, 15 bp, Homo sapiens
ctgtgctgccaagtt

SEQ ID NO: 2057498 - DNA, 15 bp, Homo sapiens
tgtgctgccaagttg

SEQ ID NO: 2057499 - DNA, 15 bp, Homo sapiens
gtgctgccaagttgc

SEQ ID NO: 2057500 - DNA, 15 bp, Homo sapiens
tgctgccaagttgct

SEQ ID NO: 2057501 - DNA, 15 bp, Homo sapiens
gctgccaagttgctg

SEQ ID NO: 2057502 - DNA, 15 bp, Homo sapiens
ctgccaagttgctga

SEQ ID NO: 2057503 - DNA, 15 bp, Homo sapiens
tgccaagttgctgaa

SEQ ID NO: 2057504 - DNA, 15 bp, Homo sapiens
gccaagttgctgaac

SEQ ID NO: 2057505 - DNA, 15 bp, Homo sapiens
ccaagttgctgaacc

SEQ ID NO: 2057506 - DNA, 15 bp, Homo sapiens
caagttgctgaacct

SEQ ID NO: 2057507 - DNA, 15 bp, Homo sapiens
aagttgctgaacctg

SEQ ID NO: 2057508 - DNA, 15 bp, Homo sapiens
agttgctgaacctgc

SEQ ID NO: 2057509 - DNA, 15 bp, Homo sapiens
gttgctgaacctgct

SEQ ID NO: 2057510 - DNA, 15 bp, Homo sapiens
ttgctgaacctgctc

SEQ ID NO: 2057511 - DNA, 15 bp, Homo sapiens
tgctgaacctgctct

SEQ ID NO: 2057512 - DNA, 15 bp, Homo sapiens
gctgaacctgctctt

SEQ ID NO: 2057513 - DNA, 15 bp, Homo sapiens
ctgaacctgctcttt

SEQ ID NO: 2057514 - DNA, 15 bp, Homo sapiens
tgaacctgctctttc

SEQ ID NO: 2057515 - DNA, 15 bp, Homo sapiens
gaacctgctctttct

SEQ ID NO: 2057516 - DNA, 15 bp, Homo sapiens
aacctgctctttctc

SEQ ID NO: 2057517 - DNA, 15 bp, Homo sapiens
acctgctctttctcc

SEQ ID NO: 2057518 - DNA, 15 bp, Homo sapiens
cctgctctttctccg

SEQ ID NO: 2057519 - DNA, 15 bp, Homo sapiens
ctgctctttctccgt

SEQ ID NO: 2057520 - DNA, 15 bp, Homo sapiens
tgctctttctccgtt

SEQ ID NO: 2057521 - DNA, 15 bp, Homo sapiens
gctctttctccgttc

SEQ ID NO: 2057522 - DNA, 15 bp, Homo sapiens
ctctttctccgttcc

SEQ ID NO: 2057523 - DNA, 15 bp, Homo sapiens
tctttctccgttcct

SEQ ID NO: 2057524 - DNA, 15 bp, Homo sapiens
ctttctccgttcctt

SEQ ID NO: 2057525 - DNA, 15 bp, Homo sapiens
tttctccgttccttt

SEQ ID NO: 2057526 - DNA, 15 bp, Homo sapiens
ttctccgttcctttg

SEQ ID NO: 2057527 - DNA, 15 bp, Homo sapiens
tctccgttcctttga

SEQ ID NO: 2057528 - DNA, 15 bp, Homo sapiens
ctccgttcctttgag

SEQ ID NO: 2057529 - DNA, 15 bp, Homo sapiens
tccgttcctttgaga

SEQ ID NO: 2057530 - DNA, 15 bp, Homo sapiens
ccgttcctttgagat

SEQ ID NO: 2057531 - DNA, 15 bp, Homo sapiens
cgttcctttgagatt

SEQ ID NO: 2057532 - DNA, 15 bp, Homo sapiens
gttcctttgagattc

SEQ ID NO: 2057533 - DNA, 15 bp, Homo sapiens
ttcctttgagattca

SEQ ID NO: 2057534 - DNA, 15 bp, Homo sapiens
tcctttgagattcat

SEQ ID NO: 2057535 - DNA, 15 bp, Homo sapiens
cctttgagattcatt

SEQ ID NO: 2057536 - DNA, 15 bp, Homo sapiens
ctttgagattcatta

SEQ ID NO: 2057537 - DNA, 15 bp, Homo sapiens
tttgagattcattaa

SEQ ID NO: 2057538 - DNA, 15 bp, Homo sapiens
ttgagattcattaaa

SEQ ID NO: 2057539 - DNA, 15 bp, Homo sapiens
tgagattcattaaag

SEQ ID NO: 2057540 - DNA, 15 bp, Homo sapiens
gagattcattaaaga

SEQ ID NO: 2057541 - DNA, 15 bp, Homo sapiens
agattcattaaagaa

SEQ ID NO: 2057542 - DNA, 15 bp, Homo sapiens
gattcattaaagaaa

SEQ ID NO: 2057543 - DNA, 15 bp, Homo sapiens
attcattaaagaaag

SEQ ID NO: 2057544 - DNA, 15 bp, Homo sapiens
ttcattaaagaaagt

SEQ ID NO: 2057545 - DNA, 15 bp, Homo sapiens
tcattaaagaaagtt

SEQ ID NO: 2057546 - DNA, 15 bp, Homo sapiens
cattaaagaaagttc

SEQ ID NO: 2057547 - DNA, 15 bp, Homo sapiens
attaaagaaagttca

SEQ ID NO: 2057548 - DNA, 15 bp, Homo sapiens
ttaaagaaagttcag

SEQ ID NO: 2057549 - DNA, 15 bp, Homo sapiens
taaagaaagttcaga

SEQ ID NO: 2057550 - DNA, 15 bp, Homo sapiens
aaagaaagttcagaa

SEQ ID NO: 2057551 - DNA, 15 bp, Homo sapiens
aagaaagttcagaaa

SEQ ID NO: 2057552 - DNA, 15 bp, Homo sapiens
agaaagttcagaaac

SEQ ID NO: 2057553 - DNA, 15 bp, Homo sapiens
gaaagttcagaaaca

SEQ ID NO: 2057554 - DNA, 15 bp, Homo sapiens
aaagttcagaaacac

SEQ ID NO: 2057555 - DNA, 15 bp, Homo sapiens
aagttcagaaacaca

SEQ ID NO: 2057556 - DNA, 15 bp, Homo sapiens
agttcagaaacacaa

SEQ ID NO: 2057557 - DNA, 15 bp, Homo sapiens
gttcagaaacacaac

SEQ ID NO: 2057558 - DNA, 15 bp, Homo sapiens
ttcagaaacacaact

SEQ ID NO: 2057559 - DNA, 15 bp, Homo sapiens
tcagaaacacaacta

SEQ ID NO: 2057560 - DNA, 15 bp, Homo sapiens
cagaaacacaactac

SEQ ID NO: 2057561 - DNA, 15 bp, Homo sapiens
agaaacacaactaca

SEQ ID NO: 2057562 - DNA, 15 bp, Homo sapiens
gaaacacaactacat

SEQ ID NO: 2057563 - DNA, 15 bp, Homo sapiens
aaacacaactacatg

SEQ ID NO: 2057564 - DNA, 15 bp, Homo sapiens
aacacaactacatga

SEQ ID NO: 2057565 - DNA, 15 bp, Homo sapiens
acacaactacatgag

SEQ ID NO: 2057566 - DNA, 15 bp, Homo sapiens
cacaactacatgagg

SEQ ID NO: 2057567 - DNA, 15 bp, Homo sapiens
acaactacatgaggt

SEQ ID NO: 2057568 - DNA, 15 bp, Homo sapiens
caactacatgaggtg

SEQ ID NO: 2057569 - DNA, 15 bp, Homo sapiens
aactacatgaggtga

SEQ ID NO: 2057570 - DNA, 15 bp, Homo sapiens
actacatgaggtgag

SEQ ID NO: 2057571 - DNA, 15 bp, Homo sapiens
ctacatgaggtgagg

SEQ ID NO: 2057572 - DNA, 15 bp, Homo sapiens
tacatgaggtgagga

SEQ ID NO: 2057573 - DNA, 15 bp, Homo sapiens
acatgaggtgaggat

SEQ ID NO: 2057574 - DNA, 15 bp, Homo sapiens
catgaggtgaggata

SEQ ID NO: 2057575 - DNA, 15 bp, Homo sapiens
atgaggtgaggataa

SEQ ID NO: 2057576 - DNA, 15 bp, Homo sapiens
tgaggtgaggataag

SEQ ID NO: 2057577 - DNA, 15 bp, Homo sapiens
gaggtgaggataagg

SEQ ID NO: 2057578 - DNA, 15 bp, Homo sapiens
aggtgaggataaggg

SEQ ID NO: 2057579 - DNA, 15 bp, Homo sapiens
ggtgaggataagggc

SEQ ID NO: 2057580 - DNA, 15 bp, Homo sapiens
gtgaggataagggca

SEQ ID NO: 2057581 - DNA, 15 bp, Homo sapiens
tgaggataagggcat

SEQ ID NO: 2057582 - DNA, 15 bp, Homo sapiens
gaggataagggcata

SEQ ID NO: 2057583 - DNA, 15 bp, Homo sapiens
aggataagggcatat

SEQ ID NO: 2057584 - DNA, 15 bp, Homo sapiens
ggataagggcatatg

SEQ ID NO: 2057585 - DNA, 15 bp, Homo sapiens
gataagggcatatgc

SEQ ID NO: 2057586 - DNA, 15 bp, Homo sapiens
ataagggcatatgca

SEQ ID NO: 2057587 - DNA, 15 bp, Homo sapiens
taagggcatatgcag

SEQ ID NO: 2057588 - DNA, 15 bp, Homo sapiens
aagggcatatgcaga

SEQ ID NO: 2057589 - DNA, 15 bp, Homo sapiens
agggcatatgcagac

SEQ ID NO: 2057590 - DNA, 15 bp, Homo sapiens
gggcatatgcagacc

SEQ ID NO: 2057591 - DNA, 15 bp, Homo sapiens
ggcatatgcagaccc

SEQ ID NO: 2057592 - DNA, 15 bp, Homo sapiens
gcatatgcagacccc

SEQ ID NO: 2057593 - DNA, 15 bp, Homo sapiens
catatgcagaccccc

SEQ ID NO: 2057594 - DNA, 15 bp, Homo sapiens
atatgcagaccccct

SEQ ID NO: 2057595 - DNA, 15 bp, Homo sapiens
tatgcagaccccctt

SEQ ID NO: 2057596 - DNA, 15 bp, Homo sapiens
atgcagacccccttc

SEQ ID NO: 2057597 - DNA, 15 bp, Homo sapiens
tgcagacccccttca

SEQ ID NO: 2057598 - DNA, 15 bp, Homo sapiens
gcagacccccttcaa

SEQ ID NO: 2057599 - DNA, 15 bp, Homo sapiens
cagacccccttcaat

SEQ ID NO: 2057600 - DNA, 15 bp, Homo sapiens
agacccccttcaata

SEQ ID NO: 2057601 - DNA, 15 bp, Homo sapiens
gacccccttcaataa

SEQ ID NO: 2057602 - DNA, 15 bp, Homo sapiens
acccccttcaataaa

SEQ ID NO: 2057603 - DNA, 15 bp, Homo sapiens
cccccttcaataaaa

SEQ ID NO: 2057604 - DNA, 15 bp, Homo sapiens
ccccttcaataaaac

SEQ ID NO: 2057605 - DNA, 15 bp, Homo sapiens
cccttcaataaaact

SEQ ID NO: 2057606 - DNA, 15 bp, Homo sapiens
ccttcaataaaactt

SEQ ID NO: 2057607 - DNA, 15 bp, Homo sapiens
cttcaataaaactta

SEQ ID NO: 2057608 - DNA, 15 bp, Homo sapiens
ttcaataaaacttac

SEQ ID NO: 2057609 - DNA, 15 bp, Homo sapiens
tcaataaaacttact

SEQ ID NO: 2057610 - DNA, 15 bp, Homo sapiens
caataaaacttactt

SEQ ID NO: 2057611 - DNA, 15 bp, Homo sapiens
aataaaacttacttt

SEQ ID NO: 2057612 - DNA, 15 bp, Homo sapiens
ataaaacttactttc

SEQ ID NO: 2057613 - DNA, 15 bp, Homo sapiens
taaaacttactttca

SEQ ID NO: 2057614 - DNA, 15 bp, Homo sapiens
aaaacttactttcat

SEQ ID NO: 2057615 - DNA, 15 bp, Homo sapiens
aaacttactttcatc

SEQ ID NO: 2057616 - DNA, 15 bp, Homo sapiens
aacttactttcatct

SEQ ID NO: 2057617 - DNA, 15 bp, Homo sapiens
acttactttcatcta

SEQ ID NO: 2057618 - DNA, 15 bp, Homo sapiens
cttactttcatctac

SEQ ID NO: 2057619 - DNA, 15 bp, Homo sapiens
ttactttcatctact

SEQ ID NO: 2057620 - DNA, 15 bp, Homo sapiens
tactttcatctactc

SEQ ID NO: 2057621 - DNA, 15 bp, Homo sapiens
actttcatctactcc

SEQ ID NO: 2057622 - DNA, 15 bp, Homo sapiens
ctttcatctactccc

SEQ ID NO: 2057623 - DNA, 15 bp, Homo sapiens
tttcatctactccca

SEQ ID NO: 2057624 - DNA, 15 bp, Homo sapiens
ttcatctactcccat

SEQ ID NO: 2057625 - DNA, 15 bp, Homo sapiens
tcatctactcccatc

SEQ ID NO: 2057626 - DNA, 15 bp, Homo sapiens
catctactcccatcc

SEQ ID NO: 2057627 - DNA, 15 bp, Homo sapiens
atctactcccatcca

SEQ ID NO: 2057628 - DNA, 15 bp, Homo sapiens
tctactcccatccat

SEQ ID NO: 2057629 - DNA, 15 bp, Homo sapiens
ctactcccatccata

SEQ ID NO: 2057630 - DNA, 15 bp, Homo sapiens
tactcccatccatat

SEQ ID NO: 2057631 - DNA, 15 bp, Homo sapiens
actcccatccatatc

SEQ ID NO: 2057632 - DNA, 15 bp, Homo sapiens
ctcccatccatatcc

SEQ ID NO: 2057633 - DNA, 15 bp, Homo sapiens
tcccatccatatcca

SEQ ID NO: 2057634 - DNA, 15 bp, Homo sapiens
cccatccatatccaa

SEQ ID NO: 2057635 - DNA, 15 bp, Homo sapiens
ccatccatatccaaa

SEQ ID NO: 2057636 - DNA, 15 bp, Homo sapiens
catccatatccaaat

SEQ ID NO: 2057637 - DNA, 15 bp, Homo sapiens
atccatatccaaatc

SEQ ID NO: 2057638 - DNA, 15 bp, Homo sapiens
tccatatccaaatcc

SEQ ID NO: 2057639 - DNA, 15 bp, Homo sapiens
ccatatccaaatccc

SEQ ID NO: 2057640 - DNA, 15 bp, Homo sapiens
catatccaaatccct

SEQ ID NO: 2057641 - DNA, 15 bp, Homo sapiens
atatccaaatccctc

SEQ ID NO: 2057642 - DNA, 15 bp, Homo sapiens
tatccaaatccctca

SEQ ID NO: 2057643 - DNA, 15 bp, Homo sapiens
atccaaatccctcag

SEQ ID NO: 2057644 - DNA, 15 bp, Homo sapiens
tccaaatccctcagc

SEQ ID NO: 2057645 - DNA, 15 bp, Homo sapiens
ccaaatccctcagct

SEQ ID NO: 2057646 - DNA, 15 bp, Homo sapiens
caaatccctcagctt

SEQ ID NO: 2057647 - DNA, 15 bp, Homo sapiens
aaatccctcagcttg

SEQ ID NO: 2057648 - DNA, 15 bp, Homo sapiens
aatccctcagcttgg

SEQ ID NO: 2057649 - DNA, 15 bp, Homo sapiens
atccctcagcttggg

SEQ ID NO: 2057650 - DNA, 15 bp, Homo sapiens
tccctcagcttgggt

SEQ ID NO: 2057651 - DNA, 15 bp, Homo sapiens
ccctcagcttgggtg

SEQ ID NO: 2057652 - DNA, 15 bp, Homo sapiens
cctcagcttgggtgg

SEQ ID NO: 2057653 - DNA, 15 bp, Homo sapiens
ctcagcttgggtgga

SEQ ID NO: 2057654 - DNA, 15 bp, Homo sapiens
tcagcttgggtggac

SEQ ID NO: 2057655 - DNA, 15 bp, Homo sapiens
cagcttgggtggaca

SEQ ID NO: 2057656 - DNA, 15 bp, Homo sapiens
agcttgggtggacaa

SEQ ID NO: 2057657 - DNA, 15 bp, Homo sapiens
gcttgggtggacaaa

SEQ ID NO: 2057658 - DNA, 15 bp, Homo sapiens
cttgggtggacaaac

SEQ ID NO: 2057659 - DNA, 15 bp, Homo sapiens
ttgggtggacaaact

SEQ ID NO: 2057660 - DNA, 15 bp, Homo sapiens
tgggtggacaaactt

SEQ ID NO: 2057661 - DNA, 15 bp, Homo sapiens
gggtggacaaacttt

SEQ ID NO: 2057662 - DNA, 15 bp, Homo sapiens
ggtggacaaactttc

SEQ ID NO: 2057663 - DNA, 15 bp, Homo sapiens
gtggacaaactttcc

SEQ ID NO: 2057664 - DNA, 15 bp, Homo sapiens
tggacaaactttcca

SEQ ID NO: 2057665 - DNA, 15 bp, Homo sapiens
ggacaaactttccag

SEQ ID NO: 2057666 - DNA, 15 bp, Homo sapiens
gacaaactttccaga

SEQ ID NO: 2057667 - DNA, 15 bp, Homo sapiens
acaaactttccagag

SEQ ID NO: 2057668 - DNA, 15 bp, Homo sapiens
caaactttccagaga

SEQ ID NO: 2057669 - DNA, 15 bp, Homo sapiens
aaactttccagagag

SEQ ID NO: 2057670 - DNA, 15 bp, Homo sapiens
aactttccagagagg

SEQ ID NO: 2057671 - DNA, 15 bp, Homo sapiens
actttccagagaggg

SEQ ID NO: 2057672 - DNA, 15 bp, Homo sapiens
ctttccagagagggt

SEQ ID NO: 2057673 - DNA, 15 bp, Homo sapiens
tttccagagagggtg

SEQ ID NO: 2057674 - DNA, 15 bp, Homo sapiens
ttccagagagggtga

SEQ ID NO: 2057675 - DNA, 15 bp, Homo sapiens
tccagagagggtgac

SEQ ID NO: 2057676 - DNA, 15 bp, Homo sapiens
ccagagagggtgact

SEQ ID NO: 2057677 - DNA, 15 bp, Homo sapiens
cagagagggtgactg

SEQ ID NO: 2057678 - DNA, 15 bp, Homo sapiens
agagagggtgactga

SEQ ID NO: 2057679 - DNA, 15 bp, Homo sapiens
gagagggtgactgaa

SEQ ID NO: 2057680 - DNA, 15 bp, Homo sapiens
agagggtgactgaaa

SEQ ID NO: 2057681 - DNA, 15 bp, Homo sapiens
gagggtgactgaaaa

SEQ ID NO: 2057682 - DNA, 15 bp, Homo sapiens
agggtgactgaaaat

SEQ ID NO: 2057683 - DNA, 15 bp, Homo sapiens
gggtgactgaaaata

SEQ ID NO: 2057684 - DNA, 15 bp, Homo sapiens
ggtgactgaaaataa

SEQ ID NO: 2057685 - DNA, 15 bp, Homo sapiens
gtgactgaaaataag

SEQ ID NO: 2057686 - DNA, 15 bp, Homo sapiens
tgactgaaaataaga

SEQ ID NO: 2057687 - DNA, 15 bp, Homo sapiens
gactgaaaataagat

SEQ ID NO: 2057688 - DNA, 15 bp, Homo sapiens
actgaaaataagata

SEQ ID NO: 2057689 - DNA, 15 bp, Homo sapiens
ctgaaaataagatac

SEQ ID NO: 2057690 - DNA, 15 bp, Homo sapiens
tgaaaataagatact

SEQ ID NO: 2057691 - DNA, 15 bp, Homo sapiens
gaaaataagatactc

SEQ ID NO: 2057692 - DNA, 15 bp, Homo sapiens
aaaataagatactcc

SEQ ID NO: 2057693 - DNA, 15 bp, Homo sapiens
aaataagatactcct

SEQ ID NO: 2057694 - DNA, 15 bp, Homo sapiens
aataagatactcctt

SEQ ID NO: 2057695 - DNA, 15 bp, Homo sapiens
ataagatactccttc

SEQ ID NO: 2057696 - DNA, 15 bp, Homo sapiens
taagatactccttct

SEQ ID NO: 2057697 - DNA, 15 bp, Homo sapiens
aagatactccttcta

SEQ ID NO: 2057698 - DNA, 15 bp, Homo sapiens
agatactccttctag

SEQ ID NO: 2057699 - DNA, 15 bp, Homo sapiens
gatactccttctaga

SEQ ID NO: 2057700 - DNA, 15 bp, Homo sapiens
atactccttctagaa

SEQ ID NO: 2057701 - DNA, 15 bp, Homo sapiens
tactccttctagaaa

SEQ ID NO: 2057702 - DNA, 15 bp, Homo sapiens
actccttctagaaac

SEQ ID NO: 2057703 - DNA, 15 bp, Homo sapiens
ctccttctagaaaca

SEQ ID NO: 2057704 - DNA, 15 bp, Homo sapiens
tccttctagaaacaa

SEQ ID NO: 2057705 - DNA, 15 bp, Homo sapiens
ccttctagaaacaac

SEQ ID NO: 2057706 - DNA, 15 bp, Homo sapiens
cttctagaaacaact

SEQ ID NO: 2057707 - DNA, 15 bp, Homo sapiens
ttctagaaacaactg

SEQ ID NO: 2057708 - DNA, 15 bp, Homo sapiens
tctagaaacaactgg

SEQ ID NO: 2057709 - DNA, 15 bp, Homo sapiens
ctagaaacaactggc

SEQ ID NO: 2057710 - DNA, 15 bp, Homo sapiens
tagaaacaactggcc

SEQ ID NO: 2057711 - DNA, 15 bp, Homo sapiens
agaaacaactggccg

SEQ ID NO: 2057712 - DNA, 15 bp, Homo sapiens
gaaacaactggccga

SEQ ID NO: 2057713 - DNA, 15 bp, Homo sapiens
aaacaactggccgaa

SEQ ID NO: 2057714 - DNA, 15 bp, Homo sapiens
aacaactggccgaag

SEQ ID NO: 2057715 - DNA, 15 bp, Homo sapiens
acaactggccgaagg

SEQ ID NO: 2057716 - DNA, 15 bp, Homo sapiens
caactggccgaaggg

SEQ ID NO: 2057717 - DNA, 15 bp, Homo sapiens
aactggccgaagggg

SEQ ID NO: 2057718 - DNA, 15 bp, Homo sapiens
actggccgaaggggc

SEQ ID NO: 2057719 - DNA, 15 bp, Homo sapiens
ctggccgaaggggca

SEQ ID NO: 2057720 - DNA, 15 bp, Homo sapiens
tggccgaaggggcac

SEQ ID NO: 2057721 - DNA, 15 bp, Homo sapiens
ggccgaaggggcacc

SEQ ID NO: 2057722 - DNA, 15 bp, Homo sapiens
gccgaaggggcacca

SEQ ID NO: 2057723 - DNA, 15 bp, Homo sapiens
ccgaaggggcaccag

SEQ ID NO: 2057724 - DNA, 15 bp, Homo sapiens
cgaaggggcaccaga

SEQ ID NO: 2057725 - DNA, 15 bp, Homo sapiens
gaaggggcaccagaa

SEQ ID NO: 2057726 - DNA, 15 bp, Homo sapiens
aaggggcaccagaaa

SEQ ID NO: 2057727 - DNA, 15 bp, Homo sapiens
aggggcaccagaaaa

SEQ ID NO: 2057728 - DNA, 15 bp, Homo sapiens
ggggcaccagaaaac

SEQ ID NO: 2057729 - DNA, 15 bp, Homo sapiens
gggcaccagaaaact

SEQ ID NO: 2057730 - DNA, 15 bp, Homo sapiens
ggcaccagaaaactt

SEQ ID NO: 2057731 - DNA, 15 bp, Homo sapiens
gcaccagaaaacttt

SEQ ID NO: 2057732 - DNA, 15 bp, Homo sapiens
caccagaaaactttc

SEQ ID NO: 2057733 - DNA, 15 bp, Homo sapiens
accagaaaactttct

SEQ ID NO: 2057734 - DNA, 15 bp, Homo sapiens
ccagaaaactttcta

SEQ ID NO: 2057735 - DNA, 15 bp, Homo sapiens
cagaaaactttctat

SEQ ID NO: 2057736 - DNA, 15 bp, Homo sapiens
agaaaactttctatg

SEQ ID NO: 2057737 - DNA, 15 bp, Homo sapiens
gaaaactttctatgc

SEQ ID NO: 2057738 - DNA, 15 bp, Homo sapiens
aaaactttctatgct

SEQ ID NO: 2057739 - DNA, 15 bp, Homo sapiens
aaactttctatgctc

SEQ ID NO: 2057740 - DNA, 15 bp, Homo sapiens
aactttctatgctcc

SEQ ID NO: 2057741 - DNA, 15 bp, Homo sapiens
actttctatgctcca

SEQ ID NO: 2057742 - DNA, 15 bp, Homo sapiens
ctttctatgctccaa

SEQ ID NO: 2057743 - DNA, 15 bp, Homo sapiens
tttctatgctccaag

SEQ ID NO: 2057744 - DNA, 15 bp, Homo sapiens
ttctatgctccaagt

SEQ ID NO: 2057745 - DNA, 15 bp, Homo sapiens
tctatgctccaagtt

SEQ ID NO: 2057746 - DNA, 15 bp, Homo sapiens
ctatgctccaagttg

SEQ ID NO: 2057747 - DNA, 15 bp, Homo sapiens
tatgctccaagttga

SEQ ID NO: 2057748 - DNA, 15 bp, Homo sapiens
atgctccaagttgag

SEQ ID NO: 2057749 - DNA, 15 bp, Homo sapiens
tgctccaagttgagg

SEQ ID NO: 2057750 - DNA, 15 bp, Homo sapiens
gctccaagttgaggt

SEQ ID NO: 2057751 - DNA, 15 bp, Homo sapiens
ctccaagttgaggta

SEQ ID NO: 2057752 - DNA, 15 bp, Homo sapiens
tccaagttgaggtaa

SEQ ID NO: 2057753 - DNA, 15 bp, Homo sapiens
ccaagttgaggtaag

SEQ ID NO: 2057754 - DNA, 15 bp, Homo sapiens
caagttgaggtaagc

SEQ ID NO: 2057755 - DNA, 15 bp, Homo sapiens
aagttgaggtaagct

SEQ ID NO: 2057756 - DNA, 15 bp, Homo sapiens
agttgaggtaagcta

SEQ ID NO: 2057757 - DNA, 15 bp, Homo sapiens
gttgaggtaagctac

SEQ ID NO: 2057758 - DNA, 15 bp, Homo sapiens
ttgaggtaagctacc

SEQ ID NO: 2057759 - DNA, 15 bp, Homo sapiens
tgaggtaagctacca

SEQ ID NO: 2057760 - DNA, 15 bp, Homo sapiens
gaggtaagctaccaa

SEQ ID NO: 2057761 - DNA, 15 bp, Homo sapiens
aggtaagctaccaaa

SEQ ID NO: 2057762 - DNA, 15 bp, Homo sapiens
ggtaagctaccaaat

SEQ ID NO: 2057763 - DNA, 15 bp, Homo sapiens
gtaagctaccaaatt

SEQ ID NO: 2057764 - DNA, 15 bp, Homo sapiens
taagctaccaaattg

SEQ ID NO: 2057765 - DNA, 15 bp, Homo sapiens
aagctaccaaattgg

SEQ ID NO: 2057766 - DNA, 15 bp, Homo sapiens
agctaccaaattggg

SEQ ID NO: 2057767 - DNA, 15 bp, Homo sapiens
gctaccaaattgggc

SEQ ID NO: 2057768 - DNA, 15 bp, Homo sapiens
ctaccaaattgggcc

SEQ ID NO: 2057769 - DNA, 15 bp, Homo sapiens
taccaaattgggccc

SEQ ID NO: 2057770 - DNA, 15 bp, Homo sapiens
accaaattgggcccc

SEQ ID NO: 2057771 - DNA, 15 bp, Homo sapiens
ccaaattgggcccca

SEQ ID NO: 2057772 - DNA, 15 bp, Homo sapiens
caaattgggccccac

SEQ ID NO: 2057773 - DNA, 15 bp, Homo sapiens
aaattgggccccaca

SEQ ID NO: 2057774 - DNA, 15 bp, Homo sapiens
aattgggccccacag

SEQ ID NO: 2057775 - DNA, 15 bp, Homo sapiens
attgggccccacaga

SEQ ID NO: 2057776 - DNA, 15 bp, Homo sapiens
ttgggccccacagag

SEQ ID NO: 2057777 - DNA, 15 bp, Homo sapiens
tgggccccacagagg

SEQ ID NO: 2057778 - DNA, 15 bp, Homo sapiens
gggccccacagaggg

SEQ ID NO: 2057779 - DNA, 15 bp, Homo sapiens
ggccccacagagggt

SEQ ID NO: 2057780 - DNA, 15 bp, Homo sapiens
gccccacagagggtg

SEQ ID NO: 2057781 - DNA, 15 bp, Homo sapiens
ccccacagagggtgg

SEQ ID NO: 2057782 - DNA, 15 bp, Homo sapiens
cccacagagggtggc

SEQ ID NO: 2057783 - DNA, 15 bp, Homo sapiens
ccacagagggtggcc

SEQ ID NO: 2057784 - DNA, 15 bp, Homo sapiens
cacagagggtggcct

SEQ ID NO: 2057785 - DNA, 15 bp, Homo sapiens
acagagggtggcctg

SEQ ID NO: 2057786 - DNA, 15 bp, Homo sapiens
cagagggtggcctga

SEQ ID NO: 2057787 - DNA, 15 bp, Homo sapiens
agagggtggcctgaa

SEQ ID NO: 2057788 - DNA, 15 bp, Homo sapiens
gagggtggcctgaag

SEQ ID NO: 2057789 - DNA, 15 bp, Homo sapiens
agggtggcctgaagt

SEQ ID NO: 2057790 - DNA, 15 bp, Homo sapiens
gggtggcctgaagtc

SEQ ID NO: 2057791 - DNA, 15 bp, Homo sapiens
ggtggcctgaagtct

SEQ ID NO: 2057792 - DNA, 15 bp, Homo sapiens
gtggcctgaagtctc

SEQ ID NO: 2057793 - DNA, 15 bp, Homo sapiens
tggcctgaagtctca

SEQ ID NO: 2057794 - DNA, 15 bp, Homo sapiens
ggcctgaagtctcag

SEQ ID NO: 2057795 - DNA, 15 bp, Homo sapiens
gcctgaagtctcaga

SEQ ID NO: 2057796 - DNA, 15 bp, Homo sapiens
cctgaagtctcagaa

SEQ ID NO: 2057797 - DNA, 15 bp, Homo sapiens
ctgaagtctcagaaa

SEQ ID NO: 2057798 - DNA, 15 bp, Homo sapiens
tgaagtctcagaaac

SEQ ID NO: 2057799 - DNA, 15 bp, Homo sapiens
gaagtctcagaaaca

SEQ ID NO: 2057800 - DNA, 15 bp, Homo sapiens
aagtctcagaaacac

SEQ ID NO: 2057801 - DNA, 15 bp, Homo sapiens
agtctcagaaacaca

SEQ ID NO: 2057802 - DNA, 15 bp, Homo sapiens
gtctcagaaacacag

SEQ ID NO: 2057803 - DNA, 15 bp, Homo sapiens
tctcagaaacacagc

SEQ ID NO: 2057804 - DNA, 15 bp, Homo sapiens
ctcagaaacacagct

SEQ ID NO: 2057805 - DNA, 15 bp, Homo sapiens
tcagaaacacagctg

SEQ ID NO: 2057806 - DNA, 15 bp, Homo sapiens
cagaaacacagctgc

SEQ ID NO: 2057807 - DNA, 15 bp, Homo sapiens
agaaacacagctgca

SEQ ID NO: 2057808 - DNA, 15 bp, Homo sapiens
gaaacacagctgcac

SEQ ID NO: 2057809 - DNA, 15 bp, Homo sapiens
aaacacagctgcaca

SEQ ID NO: 2057810 - DNA, 15 bp, Homo sapiens
aacacagctgcacaa

SEQ ID NO: 2057811 - DNA, 15 bp, Homo sapiens
acacagctgcacaag

SEQ ID NO: 2057812 - DNA, 15 bp, Homo sapiens
cacagctgcacaagg

SEQ ID NO: 2057813 - DNA, 15 bp, Homo sapiens
acagctgcacaagga

SEQ ID NO: 2057814 - DNA, 15 bp, Homo sapiens
cagctgcacaaggag

SEQ ID NO: 2057815 - DNA, 15 bp, Homo sapiens
agctgcacaaggagg

SEQ ID NO: 2057816 - DNA, 15 bp, Homo sapiens
gctgcacaaggagga

SEQ ID NO: 2057817 - DNA, 15 bp, Homo sapiens
ctgcacaaggaggaa

SEQ ID NO: 2057818 - DNA, 15 bp, Homo sapiens
tgcacaaggaggaac

SEQ ID NO: 2057819 - DNA, 15 bp, Homo sapiens
gcacaaggaggaacg

SEQ ID NO: 2057820 - DNA, 15 bp, Homo sapiens
cacaaggaggaacgc

SEQ ID NO: 2057821 - DNA, 15 bp, Homo sapiens
acaaggaggaacgcg

SEQ ID NO: 2057822 - DNA, 15 bp, Homo sapiens
caaggaggaacgcgt

SEQ ID NO: 2057823 - DNA, 15 bp, Homo sapiens
aaggaggaacgcgtc

SEQ ID NO: 2057824 - DNA, 15 bp, Homo sapiens
aggaggaacgcgtca

SEQ ID NO: 2057825 - DNA, 15 bp, Homo sapiens
ggaggaacgcgtcag

SEQ ID NO: 2057826 - DNA, 15 bp, Homo sapiens
gaggaacgcgtcagc

SEQ ID NO: 2057827 - DNA, 15 bp, Homo sapiens
aggaacgcgtcagcc

SEQ ID NO: 2057828 - DNA, 15 bp, Homo sapiens
ggaacgcgtcagcca

SEQ ID NO: 2057829 - DNA, 15 bp, Homo sapiens
gaacgcgtcagccag

SEQ ID NO: 2057830 - DNA, 15 bp, Homo sapiens
aacgcgtcagccaga

SEQ ID NO: 2057831 - DNA, 15 bp, Homo sapiens
acgcgtcagccagaa

SEQ ID NO: 2057832 - DNA, 15 bp, Homo sapiens
cgcgtcagccagaag

SEQ ID NO: 2057833 - DNA, 15 bp, Homo sapiens
gcgtcagccagaagg

SEQ ID NO: 2057834 - DNA, 15 bp, Homo sapiens
cgtcagccagaaggc

SEQ ID NO: 2057835 - DNA, 15 bp, Homo sapiens
gtcagccagaaggca

SEQ ID NO: 2057836 - DNA, 15 bp, Homo sapiens
tcagccagaaggcag

SEQ ID NO: 2057837 - DNA, 15 bp, Homo sapiens
cagccagaaggcagg

SEQ ID NO: 2057838 - DNA, 15 bp, Homo sapiens
agccagaaggcaggg

SEQ ID NO: 2057839 - DNA, 15 bp, Homo sapiens
gccagaaggcaggga

SEQ ID NO: 2057840 - DNA, 15 bp, Homo sapiens
ccagaaggcagggag

SEQ ID NO: 2057841 - DNA, 15 bp, Homo sapiens
cagaaggcagggaga

SEQ ID NO: 2057842 - DNA, 15 bp, Homo sapiens
agaaggcagggagag

SEQ ID NO: 2057843 - DNA, 15 bp, Homo sapiens
gaaggcagggagagc

SEQ ID NO: 2057844 - DNA, 15 bp, Homo sapiens
aaggcagggagagcc

SEQ ID NO: 2057845 - DNA, 15 bp, Homo sapiens
aggcagggagagcca

SEQ ID NO: 2057846 - DNA, 15 bp, Homo sapiens
ggcagggagagccag

SEQ ID NO: 2057847 - DNA, 15 bp, Homo sapiens
gcagggagagccaga

SEQ ID NO: 2057848 - DNA, 15 bp, Homo sapiens
cagggagagccagag

SEQ ID NO: 2057849 - DNA, 15 bp, Homo sapiens
agggagagccagagg

SEQ ID NO: 2057850 - DNA, 15 bp, Homo sapiens
gggagagccagagga

SEQ ID NO: 2057851 - DNA, 15 bp, Homo sapiens
ggagagccagaggaa

SEQ ID NO: 2057852 - DNA, 15 bp, Homo sapiens
gagagccagaggaac

SEQ ID NO: 2057853 - DNA, 15 bp, Homo sapiens
agagccagaggaaca

SEQ ID NO: 2057854 - DNA, 15 bp, Homo sapiens
gagccagaggaacat

SEQ ID NO: 2057855 - DNA, 15 bp, Homo sapiens
agccagaggaacatg

SEQ ID NO: 2057856 - DNA, 15 bp, Homo sapiens
gccagaggaacatgg

SEQ ID NO: 2057857 - DNA, 15 bp, Homo sapiens
ccagaggaacatggt

SEQ ID NO: 2057858 - DNA, 15 bp, Homo sapiens
cagaggaacatggtg

SEQ ID NO: 2057859 - DNA, 15 bp, Homo sapiens
agaggaacatggtgt

SEQ ID NO: 2057860 - DNA, 15 bp, Homo sapiens
gaggaacatggtgtc

SEQ ID NO: 2057861 - DNA, 15 bp, Homo sapiens
aggaacatggtgtcc

SEQ ID NO: 2057862 - DNA, 15 bp, Homo sapiens
ggaacatggtgtcca

SEQ ID NO: 2057863 - DNA, 15 bp, Homo sapiens
gaacatggtgtccag

SEQ ID NO: 2057864 - DNA, 15 bp, Homo sapiens
aacatggtgtccagc

SEQ ID NO: 2057865 - DNA, 15 bp, Homo sapiens
acatggtgtccagcg

SEQ ID NO: 2057866 - DNA, 15 bp, Homo sapiens
catggtgtccagcgt

SEQ ID NO: 2057867 - DNA, 15 bp, Homo sapiens
atggtgtccagcgtc

SEQ ID NO: 2057868 - DNA, 15 bp, Homo sapiens
tggtgtccagcgtct

SEQ ID NO: 2057869 - DNA, 15 bp, Homo sapiens
ggtgtccagcgtctc

SEQ ID NO: 2057870 - DNA, 15 bp, Homo sapiens
gtgtccagcgtctcc

SEQ ID NO: 2057871 - DNA, 15 bp, Homo sapiens
tgtccagcgtctcct

SEQ ID NO: 2057872 - DNA, 15 bp, Homo sapiens
gtccagcgtctccta

SEQ ID NO: 2057873 - DNA, 15 bp, Homo sapiens
tccagcgtctcctaa

SEQ ID NO: 2057874 - DNA, 15 bp, Homo sapiens
ccagcgtctcctaac

SEQ ID NO: 2057875 - DNA, 15 bp, Homo sapiens
cagcgtctcctaacc

SEQ ID NO: 2057876 - DNA, 15 bp, Homo sapiens
agcgtctcctaacca

SEQ ID NO: 2057877 - DNA, 15 bp, Homo sapiens
gcgtctcctaaccag

SEQ ID NO: 2057878 - DNA, 15 bp, Homo sapiens
cgtctcctaaccagg

SEQ ID NO: 2057879 - DNA, 15 bp, Homo sapiens
gtctcctaaccagga

SEQ ID NO: 2057880 - DNA, 15 bp, Homo sapiens
tctcctaaccaggat

SEQ ID NO: 2057881 - DNA, 15 bp, Homo sapiens
ctcctaaccaggatc

SEQ ID NO: 2057882 - DNA, 15 bp, Homo sapiens
tcctaaccaggatct

SEQ ID NO: 2057883 - DNA, 15 bp, Homo sapiens
cctaaccaggatcta

SEQ ID NO: 2057884 - DNA, 15 bp, Homo sapiens
ctaaccaggatctag

SEQ ID NO: 2057885 - DNA, 15 bp, Homo sapiens
taaccaggatctagc

SEQ ID NO: 2057886 - DNA, 15 bp, Homo sapiens
aaccaggatctagcc

SEQ ID NO: 2057887 - DNA, 15 bp, Homo sapiens
accaggatctagccg

SEQ ID NO: 2057888 - DNA, 15 bp, Homo sapiens
ccaggatctagccga

SEQ ID NO: 2057889 - DNA, 15 bp, Homo sapiens
caggatctagccgag

SEQ ID NO: 2057890 - DNA, 15 bp, Homo sapiens
aggatctagccgagc

SEQ ID NO: 2057891 - DNA, 15 bp, Homo sapiens
ggatctagccgagca

SEQ ID NO: 2057892 - DNA, 15 bp, Homo sapiens
gatctagccgagcag

SEQ ID NO: 2057893 - DNA, 15 bp, Homo sapiens
atctagccgagcaga

SEQ ID NO: 2057894 - DNA, 15 bp, Homo sapiens
tctagccgagcagag

SEQ ID NO: 2057895 - DNA, 15 bp, Homo sapiens
ctagccgagcagaga

SEQ ID NO: 2057896 - DNA, 15 bp, Homo sapiens
tagccgagcagagaa

SEQ ID NO: 2057897 - DNA, 15 bp, Homo sapiens
agccgagcagagaaa

SEQ ID NO: 2057898 - DNA, 15 bp, Homo sapiens
gccgagcagagaaaa

SEQ ID NO: 2057899 - DNA, 15 bp, Homo sapiens
ccgagcagagaaaac

SEQ ID NO: 2057900 - DNA, 15 bp, Homo sapiens
cgagcagagaaaaca

SEQ ID NO: 2057901 - DNA, 15 bp, Homo sapiens
gagcagagaaaacat

SEQ ID NO: 2057902 - DNA, 15 bp, Homo sapiens
agcagagaaaacatt

SEQ ID NO: 2057903 - DNA, 15 bp, Homo sapiens
gcagagaaaacattc

SEQ ID NO: 2057904 - DNA, 15 bp, Homo sapiens
cagagaaaacattca

SEQ ID NO: 2057905 - DNA, 15 bp, Homo sapiens
agagaaaacattcag

SEQ ID NO: 2057906 - DNA, 15 bp, Homo sapiens
gagaaaacattcagc

SEQ ID NO: 2057907 - DNA, 15 bp, Homo sapiens
agaaaacattcagcc

SEQ ID NO: 2057908 - DNA, 15 bp, Homo sapiens
gaaaacattcagcct

SEQ ID NO: 2057909 - DNA, 15 bp, Homo sapiens
aaaacattcagcctc

SEQ ID NO: 2057910 - DNA, 15 bp, Homo sapiens
aaacattcagcctcc

SEQ ID NO: 2057911 - DNA, 15 bp, Homo sapiens
aacattcagcctcct

SEQ ID NO: 2057912 - DNA, 15 bp, Homo sapiens
acattcagcctcctc

SEQ ID NO: 2057913 - DNA, 15 bp, Homo sapiens
cattcagcctcctcc

SEQ ID NO: 2057914 - DNA, 15 bp, Homo sapiens
attcagcctcctccc

SEQ ID NO: 2057915 - DNA, 15 bp, Homo sapiens
ttcagcctcctccct

SEQ ID NO: 2057916 - DNA, 15 bp, Homo sapiens
tcagcctcctccctc

SEQ ID NO: 2057917 - DNA, 15 bp, Homo sapiens
cagcctcctccctcc

SEQ ID NO: 2057918 - DNA, 15 bp, Homo sapiens
agcctcctccctccc

SEQ ID NO: 2057919 - DNA, 15 bp, Homo sapiens
gcctcctccctccca

SEQ ID NO: 2057920 - DNA, 15 bp, Homo sapiens
cctcctccctcccaa

SEQ ID NO: 2057921 - DNA, 15 bp, Homo sapiens
ctcctccctcccaat

SEQ ID NO: 2057922 - DNA, 15 bp, Homo sapiens
tcctccctcccaata

SEQ ID NO: 2057923 - DNA, 15 bp, Homo sapiens
cctccctcccaatac

SEQ ID NO: 2057924 - DNA, 15 bp, Homo sapiens
ctccctcccaatacc

SEQ ID NO: 2057925 - DNA, 15 bp, Homo sapiens
tccctcccaataccc

SEQ ID NO: 2057926 - DNA, 15 bp, Homo sapiens
ccctcccaatacccg

SEQ ID NO: 2057927 - DNA, 15 bp, Homo sapiens
cctcccaatacccgt

SEQ ID NO: 2057928 - DNA, 15 bp, Homo sapiens
ctcccaatacccgtg

SEQ ID NO: 2057929 - DNA, 15 bp, Homo sapiens
tcccaatacccgtgt

SEQ ID NO: 2057930 - DNA, 15 bp, Homo sapiens
cccaatacccgtgtc

SEQ ID NO: 2057931 - DNA, 15 bp, Homo sapiens
ccaatacccgtgtct

SEQ ID NO: 2057932 - DNA, 15 bp, Homo sapiens
caatacccgtgtctg

SEQ ID NO: 2057933 - DNA, 15 bp, Homo sapiens
aatacccgtgtctgt

SEQ ID NO: 2057934 - DNA, 15 bp, Homo sapiens
atacccgtgtctgtc

SEQ ID NO: 2057935 - DNA, 15 bp, Homo sapiens
tacccgtgtctgtca

SEQ ID NO: 2057936 - DNA, 15 bp, Homo sapiens
acccgtgtctgtcac

SEQ ID NO: 2057937 - DNA, 15 bp, Homo sapiens
cccgtgtctgtcact

SEQ ID NO: 2057938 - DNA, 15 bp, Homo sapiens
ccgtgtctgtcactt

SEQ ID NO: 2057939 - DNA, 15 bp, Homo sapiens
cgtgtctgtcacttt

SEQ ID NO: 2057940 - DNA, 15 bp, Homo sapiens
gtgtctgtcactttc

SEQ ID NO: 2057941 - DNA, 15 bp, Homo sapiens
tgtctgtcactttct

SEQ ID NO: 2057942 - DNA, 15 bp, Homo sapiens
gtctgtcactttctt

SEQ ID NO: 2057943 - DNA, 15 bp, Homo sapiens
tctgtcactttcttt

SEQ ID NO: 2057944 - DNA, 15 bp, Homo sapiens
ctgtcactttctttc

SEQ ID NO: 2057945 - DNA, 15 bp, Homo sapiens
tgtcactttctttcc

SEQ ID NO: 2057946 - DNA, 15 bp, Homo sapiens
gtcactttctttcca

SEQ ID NO: 2057947 - DNA, 15 bp, Homo sapiens
tcactttctttccat

SEQ ID NO: 2057948 - DNA, 15 bp, Homo sapiens
cactttctttccatt

SEQ ID NO: 2057949 - DNA, 15 bp, Homo sapiens
actttctttccattc

SEQ ID NO: 2057950 - DNA, 15 bp, Homo sapiens
ctttctttccattca

SEQ ID NO: 2057951 - DNA, 15 bp, Homo sapiens
tttctttccattcaa

SEQ ID NO: 2057952 - DNA, 15 bp, Homo sapiens
ttctttccattcaaa

SEQ ID NO: 2057953 - DNA, 15 bp, Homo sapiens
tctttccattcaaaa

SEQ ID NO: 2057954 - DNA, 15 bp, Homo sapiens
ctttccattcaaaaa

SEQ ID NO: 2057955 - DNA, 15 bp, Homo sapiens
tttccattcaaaaag

SEQ ID NO: 2057956 - DNA, 15 bp, Homo sapiens
ttccattcaaaaaga

SEQ ID NO: 2057957 - DNA, 15 bp, Homo sapiens
tccattcaaaaagaa

SEQ ID NO: 2057958 - DNA, 15 bp, Homo sapiens
ccattcaaaaagaaa

SEQ ID NO: 2057959 - DNA, 15 bp, Homo sapiens
cattcaaaaagaaag

SEQ ID NO: 2057960 - DNA, 15 bp, Homo sapiens
attcaaaaagaaagt

SEQ ID NO: 2057961 - DNA, 15 bp, Homo sapiens
ttcaaaaagaaagtc

SEQ ID NO: 2057962 - DNA, 15 bp, Homo sapiens
tcaaaaagaaagtcc

SEQ ID NO: 2057963 - DNA, 15 bp, Homo sapiens
caaaaagaaagtcct

SEQ ID NO: 2057964 - DNA, 15 bp, Homo sapiens
aaaaagaaagtccta

SEQ ID NO: 2057965 - DNA, 15 bp, Homo sapiens
aaaagaaagtcctag

SEQ ID NO: 2057966 - DNA, 15 bp, Homo sapiens
aaagaaagtcctagt

SEQ ID NO: 2057967 - DNA, 15 bp, Homo sapiens
aagaaagtcctagtt

SEQ ID NO: 2057968 - DNA, 15 bp, Homo sapiens
agaaagtcctagttg

SEQ ID NO: 2057969 - DNA, 15 bp, Homo sapiens
gaaagtcctagttga

SEQ ID NO: 2057970 - DNA, 15 bp, Homo sapiens
aaagtcctagttgaa

SEQ ID NO: 2057971 - DNA, 15 bp, Homo sapiens
aagtcctagttgaac

SEQ ID NO: 2057972 - DNA, 15 bp, Homo sapiens
agtcctagttgaact

SEQ ID NO: 2057973 - DNA, 15 bp, Homo sapiens
gtcctagttgaacta

SEQ ID NO: 2057974 - DNA, 15 bp, Homo sapiens
tcctagttgaactaa

SEQ ID NO: 2057975 - DNA, 15 bp, Homo sapiens
cctagttgaactaaa

SEQ ID NO: 2057976 - DNA, 15 bp, Homo sapiens
ctagttgaactaaac

SEQ ID NO: 2057977 - DNA, 15 bp, Homo sapiens
tagttgaactaaaca

SEQ ID NO: 2057978 - DNA, 15 bp, Homo sapiens
agttgaactaaacaa

SEQ ID NO: 2057979 - DNA, 15 bp, Homo sapiens
gttgaactaaacaag

SEQ ID NO: 2057980 - DNA, 15 bp, Homo sapiens
ttgaactaaacaagc

SEQ ID NO: 2057981 - DNA, 15 bp, Homo sapiens
tgaactaaacaagcc

SEQ ID NO: 2057982 - DNA, 15 bp, Homo sapiens
gaactaaacaagcca

SEQ ID NO: 2057983 - DNA, 15 bp, Homo sapiens
aactaaacaagccag

SEQ ID NO: 2057984 - DNA, 15 bp, Homo sapiens
actaaacaagccagt

SEQ ID NO: 2057985 - DNA, 15 bp, Homo sapiens
ctaaacaagccagta

SEQ ID NO: 2057986 - DNA, 15 bp, Homo sapiens
taaacaagccagtaa

SEQ ID NO: 2057987 - DNA, 15 bp, Homo sapiens
aaacaagccagtaac

SEQ ID NO: 2057988 - DNA, 15 bp, Homo sapiens
aacaagccagtaacc

SEQ ID NO: 2057989 - DNA, 15 bp, Homo sapiens
acaagccagtaaccc

SEQ ID NO: 2057990 - DNA, 15 bp, Homo sapiens
caagccagtaaccca

SEQ ID NO: 2057991 - DNA, 15 bp, Homo sapiens
aagccagtaacccat

SEQ ID NO: 2057992 - DNA, 15 bp, Homo sapiens
agccagtaacccatg

SEQ ID NO: 2057993 - DNA, 15 bp, Homo sapiens
gccagtaacccatgc

SEQ ID NO: 2057994 - DNA, 15 bp, Homo sapiens
ccagtaacccatgcc

SEQ ID NO: 2057995 - DNA, 15 bp, Homo sapiens
cagtaacccatgcct

SEQ ID NO: 2057996 - DNA, 15 bp, Homo sapiens
agtaacccatgccta

SEQ ID NO: 2057997 - DNA, 15 bp, Homo sapiens
gtaacccatgcctaa

SEQ ID NO: 2057998 - DNA, 15 bp, Homo sapiens
taacccatgcctaag

SEQ ID NO: 2057999 - DNA, 15 bp, Homo sapiens
aacccatgcctaaga

SEQ ID NO: 2058000 - DNA, 15 bp, Homo sapiens
acccatgcctaagaa

SEQ ID NO: 2058001 - DNA, 15 bp, Homo sapiens
cccatgcctaagaat

SEQ ID NO: 2058002 - DNA, 15 bp, Homo sapiens
ccatgcctaagaatc

SEQ ID NO: 2058003 - DNA, 15 bp, Homo sapiens
catgcctaagaatca

SEQ ID NO: 2058004 - DNA, 15 bp, Homo sapiens
atgcctaagaatcat

SEQ ID NO: 2058005 - DNA, 15 bp, Homo sapiens
tgcctaagaatcata

SEQ ID NO: 2058006 - DNA, 15 bp, Homo sapiens
gcctaagaatcatat

SEQ ID NO: 2058007 - DNA, 15 bp, Homo sapiens
cctaagaatcatatc

SEQ ID NO: 2058008 - DNA, 15 bp, Homo sapiens
ctaagaatcatatca

SEQ ID NO: 2058009 - DNA, 15 bp, Homo sapiens
taagaatcatatcat

SEQ ID NO: 2058010 - DNA, 15 bp, Homo sapiens
aagaatcatatcatc

SEQ ID NO: 2058011 - DNA, 15 bp, Homo sapiens
agaatcatatcatct

SEQ ID NO: 2058012 - DNA, 15 bp, Homo sapiens
gaatcatatcatctc

SEQ ID NO: 2058013 - DNA, 15 bp, Homo sapiens
aatcatatcatctca

SEQ ID NO: 2058014 - DNA, 15 bp, Homo sapiens
atcatatcatctcag

SEQ ID NO: 2058015 - DNA, 15 bp, Homo sapiens
tcatatcatctcaga

SEQ ID NO: 2058016 - DNA, 15 bp, Homo sapiens
catatcatctcagat

SEQ ID NO: 2058017 - DNA, 15 bp, Homo sapiens
atatcatctcagatt

SEQ ID NO: 2058018 - DNA, 15 bp, Homo sapiens
tatcatctcagattc

SEQ ID NO: 2058019 - DNA, 15 bp, Homo sapiens
atcatctcagattct

SEQ ID NO: 2058020 - DNA, 15 bp, Homo sapiens
tcatctcagattctc

SEQ ID NO: 2058021 - DNA, 15 bp, Homo sapiens
catctcagattctca

SEQ ID NO: 2058022 - DNA, 15 bp, Homo sapiens
atctcagattctcat

SEQ ID NO: 2058023 - DNA, 15 bp, Homo sapiens
tctcagattctcatc

SEQ ID NO: 2058024 - DNA, 15 bp, Homo sapiens
ctcagattctcatct

SEQ ID NO: 2058025 - DNA, 15 bp, Homo sapiens
tcagattctcatctc

SEQ ID NO: 2058026 - DNA, 15 bp, Homo sapiens
cagattctcatctcc

SEQ ID NO: 2058027 - DNA, 15 bp, Homo sapiens
agattctcatctccc

SEQ ID NO: 2058028 - DNA, 15 bp, Homo sapiens
gattctcatctccca

SEQ ID NO: 2058029 - DNA, 15 bp, Homo sapiens
attctcatctcccaa

SEQ ID NO: 2058030 - DNA, 15 bp, Homo sapiens
ttctcatctcccaat

SEQ ID NO: 2058031 - DNA, 15 bp, Homo sapiens
tctcatctcccaatg

SEQ ID NO: 2058032 - DNA, 15 bp, Homo sapiens
ctcatctcccaatgg

SEQ ID NO: 2058033 - DNA, 15 bp, Homo sapiens
tcatctcccaatggg

SEQ ID NO: 2058034 - DNA, 15 bp, Homo sapiens
catctcccaatgggc

SEQ ID NO: 2058035 - DNA, 15 bp, Homo sapiens
atctcccaatgggct

SEQ ID NO: 2058036 - DNA, 15 bp, Homo sapiens
tctcccaatgggctt

SEQ ID NO: 2058037 - DNA, 15 bp, Homo sapiens
ctcccaatgggcttt

SEQ ID NO: 2058038 - DNA, 15 bp, Homo sapiens
tcccaatgggctttc

SEQ ID NO: 2058039 - DNA, 15 bp, Homo sapiens
cccaatgggctttct

SEQ ID NO: 2058040 - DNA, 15 bp, Homo sapiens
ccaatgggctttcta

SEQ ID NO: 2058041 - DNA, 15 bp, Homo sapiens
caatgggctttctag

SEQ ID NO: 2058042 - DNA, 15 bp, Homo sapiens
aatgggctttctagt

SEQ ID NO: 2058043 - DNA, 15 bp, Homo sapiens
atgggctttctagtt

SEQ ID NO: 2058044 - DNA, 15 bp, Homo sapiens
tgggctttctagttc

SEQ ID NO: 2058045 - DNA, 15 bp, Homo sapiens
gggctttctagttct

SEQ ID NO: 2058046 - DNA, 15 bp, Homo sapiens
ggctttctagttctc

SEQ ID NO: 2058047 - DNA, 15 bp, Homo sapiens
gctttctagttctcc

SEQ ID NO: 2058048 - DNA, 15 bp, Homo sapiens
ctttctagttctcca

SEQ ID NO: 2058049 - DNA, 15 bp, Homo sapiens
tttctagttctccac

SEQ ID NO: 2058050 - DNA, 15 bp, Homo sapiens
ttctagttctccaca

SEQ ID NO: 2058051 - DNA, 15 bp, Homo sapiens
tctagttctccacaa

SEQ ID NO: 2058052 - DNA, 15 bp, Homo sapiens
ctagttctccacaaa

SEQ ID NO: 2058053 - DNA, 15 bp, Homo sapiens
tagttctccacaaat

SEQ ID NO: 2058054 - DNA, 15 bp, Homo sapiens
agttctccacaaata

SEQ ID NO: 2058055 - DNA, 15 bp, Homo sapiens
gttctccacaaataa

SEQ ID NO: 2058056 - DNA, 15 bp, Homo sapiens
ttctccacaaataaa

SEQ ID NO: 2058057 - DNA, 15 bp, Homo sapiens
tctccacaaataaaa

SEQ ID NO: 2058058 - DNA, 15 bp, Homo sapiens
ctccacaaataaaat

SEQ ID NO: 2058059 - DNA, 15 bp, Homo sapiens
tccacaaataaaatc

SEQ ID NO: 2058060 - DNA, 15 bp, Homo sapiens
ccacaaataaaatcg

SEQ ID NO: 2058061 - DNA, 15 bp, Homo sapiens
cacaaataaaatcgt

SEQ ID NO: 2058062 - DNA, 15 bp, Homo sapiens
acaaataaaatcgtc

SEQ ID NO: 2058063 - DNA, 15 bp, Homo sapiens
caaataaaatcgtct

SEQ ID NO: 2058064 - DNA, 15 bp, Homo sapiens
aaataaaatcgtcta

SEQ ID NO: 2058065 - DNA, 15 bp, Homo sapiens
aataaaatcgtctac

SEQ ID NO: 2058066 - DNA, 15 bp, Homo sapiens
ataaaatcgtctact

SEQ ID NO: 2058067 - DNA, 15 bp, Homo sapiens
taaaatcgtctactc

SEQ ID NO: 2058068 - DNA, 15 bp, Homo sapiens
aaaatcgtctactct

SEQ ID NO: 2058069 - DNA, 15 bp, Homo sapiens
aaatcgtctactctg

SEQ ID NO: 2058070 - DNA, 15 bp, Homo sapiens
aatcgtctactctgc

SEQ ID NO: 2058071 - DNA, 15 bp, Homo sapiens
atcgtctactctgct

SEQ ID NO: 2058072 - DNA, 15 bp, Homo sapiens
tcgtctactctgctt

SEQ ID NO: 2058073 - DNA, 15 bp, Homo sapiens
cgtctactctgcttc

SEQ ID NO: 2058074 - DNA, 15 bp, Homo sapiens
gtctactctgcttcc

SEQ ID NO: 2058075 - DNA, 15 bp, Homo sapiens
tctactctgcttcct

SEQ ID NO: 2058076 - DNA, 15 bp, Homo sapiens
ctactctgcttcctc

SEQ ID NO: 2058077 - DNA, 15 bp, Homo sapiens
tactctgcttcctcg

SEQ ID NO: 2058078 - DNA, 15 bp, Homo sapiens
actctgcttcctcgc

SEQ ID NO: 2058079 - DNA, 15 bp, Homo sapiens
ctctgcttcctcgcg

SEQ ID NO: 2058080 - DNA, 15 bp, Homo sapiens
tctgcttcctcgcgc

SEQ ID NO: 2058081 - DNA, 15 bp, Homo sapiens
ctgcttcctcgcgct

SEQ ID NO: 2058082 - DNA, 15 bp, Homo sapiens
tgcttcctcgcgcta

SEQ ID NO: 2058083 - DNA, 15 bp, Homo sapiens
gcttcctcgcgctaa

SEQ ID NO: 2058084 - DNA, 15 bp, Homo sapiens
cttcctcgcgctaat

SEQ ID NO: 2058085 - DNA, 15 bp, Homo sapiens
ttcctcgcgctaata

SEQ ID NO: 2058086 - DNA, 15 bp, Homo sapiens
tcctcgcgctaataa

SEQ ID NO: 2058087 - DNA, 15 bp, Homo sapiens
cctcgcgctaataat

SEQ ID NO: 2058088 - DNA, 15 bp, Homo sapiens
ctcgcgctaataatt

SEQ ID NO: 2058089 - DNA, 15 bp, Homo sapiens
tcgcgctaataattg

SEQ ID NO: 2058090 - DNA, 15 bp, Homo sapiens
cgcgctaataattgg

SEQ ID NO: 2058091 - DNA, 15 bp, Homo sapiens
gcgctaataattggg

SEQ ID NO: 2058092 - DNA, 15 bp, Homo sapiens
cgctaataattgggg

SEQ ID NO: 2058093 - DNA, 15 bp, Homo sapiens
gctaataattggggg

SEQ ID NO: 2058094 - DNA, 15 bp, Homo sapiens
ctaataattgggggg

SEQ ID NO: 2058095 - DNA, 15 bp, Homo sapiens
taataattggggggt

SEQ ID NO: 2058096 - DNA, 15 bp, Homo sapiens
aataattggggggtg

SEQ ID NO: 2058097 - DNA, 15 bp, Homo sapiens
ataattggggggtgg

SEQ ID NO: 2058098 - DNA, 15 bp, Homo sapiens
taattggggggtggg

SEQ ID NO: 2058099 - DNA, 15 bp, Homo sapiens
aattggggggtgggg

SEQ ID NO: 2058100 - DNA, 15 bp, Homo sapiens
attggggggtgggga

SEQ ID NO: 2058101 - DNA, 15 bp, Homo sapiens
ttggggggtggggag

SEQ ID NO: 2058102 - DNA, 15 bp, Homo sapiens
tggggggtggggagc

SEQ ID NO: 2058103 - DNA, 15 bp, Homo sapiens
ggggggtggggagca

SEQ ID NO: 2058104 - DNA, 15 bp, Homo sapiens
gggggtggggagcag

SEQ ID NO: 2058105 - DNA, 15 bp, Homo sapiens
ggggtggggagcagg

SEQ ID NO: 2058106 - DNA, 15 bp, Homo sapiens
gggtggggagcaggg

SEQ ID NO: 2058107 - DNA, 15 bp, Homo sapiens
ggtggggagcaggga

SEQ ID NO: 2058108 - DNA, 15 bp, Homo sapiens
gtggggagcagggaa

SEQ ID NO: 2058109 - DNA, 15 bp, Homo sapiens
tggggagcagggaag

SEQ ID NO: 2058110 - DNA, 15 bp, Homo sapiens
ggggagcagggaagg

SEQ ID NO: 2058111 - DNA, 15 bp, Homo sapiens
gggagcagggaaggg

SEQ ID NO: 2058112 - DNA, 15 bp, Homo sapiens
ggagcagggaaggga

SEQ ID NO: 2058113 - DNA, 15 bp, Homo sapiens
gagcagggaagggag

SEQ ID NO: 2058114 - DNA, 15 bp, Homo sapiens
agcagggaagggaga

SEQ ID NO: 2058115 - DNA, 15 bp, Homo sapiens
gcagggaagggagag

SEQ ID NO: 2058116 - DNA, 15 bp, Homo sapiens
cagggaagggagagc

SEQ ID NO: 2058117 - DNA, 15 bp, Homo sapiens
agggaagggagagcg

SEQ ID NO: 2058118 - DNA, 15 bp, Homo sapiens
gggaagggagagcga

SEQ ID NO: 2058119 - DNA, 15 bp, Homo sapiens
ggaagggagagcgat

SEQ ID NO: 2058120 - DNA, 15 bp, Homo sapiens
gaagggagagcgatg

SEQ ID NO: 2058121 - DNA, 15 bp, Homo sapiens
aagggagagcgatgt

SEQ ID NO: 2058122 - DNA, 15 bp, Homo sapiens
agggagagcgatgtc

SEQ ID NO: 2058123 - DNA, 15 bp, Homo sapiens
gggagagcgatgtct

SEQ ID NO: 2058124 - DNA, 15 bp, Homo sapiens
ggagagcgatgtctg

SEQ ID NO: 2058125 - DNA, 15 bp, Homo sapiens
gagagcgatgtctgg

SEQ ID NO: 2058126 - DNA, 15 bp, Homo sapiens
agagcgatgtctgga

SEQ ID NO: 2058127 - DNA, 15 bp, Homo sapiens
gagcgatgtctggag

SEQ ID NO: 2058128 - DNA, 15 bp, Homo sapiens
agcgatgtctggaga

SEQ ID NO: 2058129 - DNA, 15 bp, Homo sapiens
gcgatgtctggagac

SEQ ID NO: 2058130 - DNA, 15 bp, Homo sapiens
cgatgtctggagaca

SEQ ID NO: 2058131 - DNA, 15 bp, Homo sapiens
gatgtctggagacat

SEQ ID NO: 2058132 - DNA, 15 bp, Homo sapiens
atgtctggagacata

SEQ ID NO: 2058133 - DNA, 15 bp, Homo sapiens
tgtctggagacatat

SEQ ID NO: 2058134 - DNA, 15 bp, Homo sapiens
gtctggagacatatg

SEQ ID NO: 2058135 - DNA, 15 bp, Homo sapiens
tctggagacatatga

SEQ ID NO: 2058136 - DNA, 15 bp, Homo sapiens
ctggagacatatgat

SEQ ID NO: 2058137 - DNA, 15 bp, Homo sapiens
tggagacatatgatc

SEQ ID NO: 2058138 - DNA, 15 bp, Homo sapiens
ggagacatatgatca

SEQ ID NO: 2058139 - DNA, 15 bp, Homo sapiens
gagacatatgatcag

SEQ ID NO: 2058140 - DNA, 15 bp, Homo sapiens
agacatatgatcaga

SEQ ID NO: 2058141 - DNA, 15 bp, Homo sapiens
gacatatgatcagaa

SEQ ID NO: 2058142 - DNA, 15 bp, Homo sapiens
acatatgatcagaat

SEQ ID NO: 2058143 - DNA, 15 bp, Homo sapiens
catatgatcagaatt

SEQ ID NO: 2058144 - DNA, 15 bp, Homo sapiens
atatgatcagaattc

SEQ ID NO: 2058145 - DNA, 15 bp, Homo sapiens
tatgatcagaattca

SEQ ID NO: 2058146 - DNA, 15 bp, Homo sapiens
atgatcagaattcaa

SEQ ID NO: 2058147 - DNA, 15 bp, Homo sapiens
tgatcagaattcaag

SEQ ID NO: 2058148 - DNA, 15 bp, Homo sapiens
gatcagaattcaagg

SEQ ID NO: 2058149 - DNA, 15 bp, Homo sapiens
atcagaattcaaggc

SEQ ID NO: 2058150 - DNA, 15 bp, Homo sapiens
tcagaattcaaggca

SEQ ID NO: 2058151 - DNA, 15 bp, Homo sapiens
cagaattcaaggcag

SEQ ID NO: 2058152 - DNA, 15 bp, Homo sapiens
agaattcaaggcagc

SEQ ID NO: 2058153 - DNA, 15 bp, Homo sapiens
gaattcaaggcagct

SEQ ID NO: 2058154 - DNA, 15 bp, Homo sapiens
aattcaaggcagctt

SEQ ID NO: 2058155 - DNA, 15 bp, Homo sapiens
attcaaggcagcttc

SEQ ID NO: 2058156 - DNA, 15 bp, Homo sapiens
ttcaaggcagcttct

SEQ ID NO: 2058157 - DNA, 15 bp, Homo sapiens
tcaaggcagcttctc

SEQ ID NO: 2058158 - DNA, 15 bp, Homo sapiens
caaggcagcttctca

SEQ ID NO: 2058159 - DNA, 15 bp, Homo sapiens
aaggcagcttctcac

SEQ ID NO: 2058160 - DNA, 15 bp, Homo sapiens
aggcagcttctcaca

SEQ ID NO: 2058161 - DNA, 15 bp, Homo sapiens
ggcagcttctcacaa

SEQ ID NO: 2058162 - DNA, 15 bp, Homo sapiens
gcagcttctcacaac

SEQ ID NO: 2058163 - DNA, 15 bp, Homo sapiens
cagcttctcacaact

SEQ ID NO: 2058164 - DNA, 15 bp, Homo sapiens
agcttctcacaactc

SEQ ID NO: 2058165 - DNA, 15 bp, Homo sapiens
gcttctcacaactct

SEQ ID NO: 2058166 - DNA, 15 bp, Homo sapiens
cttctcacaactctc

SEQ ID NO: 2058167 - DNA, 15 bp, Homo sapiens
ttctcacaactctct

SEQ ID NO: 2058168 - DNA, 15 bp, Homo sapiens
tctcacaactctctt

SEQ ID NO: 2058169 - DNA, 15 bp, Homo sapiens
ctcacaactctcttg

SEQ ID NO: 2058170 - DNA, 15 bp, Homo sapiens
tcacaactctcttgt

SEQ ID NO: 2058171 - DNA, 15 bp, Homo sapiens
cacaactctcttgtt

SEQ ID NO: 2058172 - DNA, 15 bp, Homo sapiens
acaactctcttgttt

SEQ ID NO: 2058173 - DNA, 15 bp, Homo sapiens
caactctcttgttta

SEQ ID NO: 2058174 - DNA, 15 bp, Homo sapiens
aactctcttgtttat

SEQ ID NO: 2058175 - DNA, 15 bp, Homo sapiens
actctcttgtttata

SEQ ID NO: 2058176 - DNA, 15 bp, Homo sapiens
ctctcttgtttatag

SEQ ID NO: 2058177 - DNA, 15 bp, Homo sapiens
tctcttgtttataga

SEQ ID NO: 2058178 - DNA, 15 bp, Homo sapiens
ctcttgtttatagaa

SEQ ID NO: 2058179 - DNA, 15 bp, Homo sapiens
tcttgtttatagaaa

SEQ ID NO: 2058180 - DNA, 15 bp, Homo sapiens
cttgtttatagaaaa

SEQ ID NO: 2058181 - DNA, 15 bp, Homo sapiens
ttgtttatagaaaat

SEQ ID NO: 2058182 - DNA, 15 bp, Homo sapiens
tgtttatagaaaatg

SEQ ID NO: 2058183 - DNA, 15 bp, Homo sapiens
gtttatagaaaatga

SEQ ID NO: 2058184 - DNA, 15 bp, Homo sapiens
tttatagaaaatgaa

SEQ ID NO: 2058185 - DNA, 15 bp, Homo sapiens
ttatagaaaatgaat

SEQ ID NO: 2058186 - DNA, 15 bp, Homo sapiens
tatagaaaatgaatg

SEQ ID NO: 2058187 - DNA, 15 bp, Homo sapiens
atagaaaatgaatgt

SEQ ID NO: 2058188 - DNA, 15 bp, Homo sapiens
tagaaaatgaatgtc

SEQ ID NO: 2058189 - DNA, 15 bp, Homo sapiens
agaaaatgaatgtct

SEQ ID NO: 2058190 - DNA, 15 bp, Homo sapiens
gaaaatgaatgtctg

SEQ ID NO: 2058191 - DNA, 15 bp, Homo sapiens
aaaatgaatgtctgc

SEQ ID NO: 2058192 - DNA, 15 bp, Homo sapiens
aaatgaatgtctgcc

SEQ ID NO: 2058193 - DNA, 15 bp, Homo sapiens
aatgaatgtctgcct

SEQ ID NO: 2058194 - DNA, 15 bp, Homo sapiens
atgaatgtctgcctg

SEQ ID NO: 2058195 - DNA, 15 bp, Homo sapiens
tgaatgtctgcctgg

SEQ ID NO: 2058196 - DNA, 15 bp, Homo sapiens
gaatgtctgcctggc

SEQ ID NO: 2058197 - DNA, 15 bp, Homo sapiens
aatgtctgcctggct

SEQ ID NO: 2058198 - DNA, 15 bp, Homo sapiens
atgtctgcctggctt

SEQ ID NO: 2058199 - DNA, 15 bp, Homo sapiens
tgtctgcctggcttg

SEQ ID NO: 2058200 - DNA, 15 bp, Homo sapiens
gtctgcctggcttgc

SEQ ID NO: 2058201 - DNA, 15 bp, Homo sapiens
tctgcctggcttgct

SEQ ID NO: 2058202 - DNA, 15 bp, Homo sapiens
ctgcctggcttgctt

SEQ ID NO: 2058203 - DNA, 15 bp, Homo sapiens
tgcctggcttgcttt

SEQ ID NO: 2058204 - DNA, 15 bp, Homo sapiens
gcctggcttgctttt

SEQ ID NO: 2058205 - DNA, 15 bp, Homo sapiens
cctggcttgctttta

SEQ ID NO: 2058206 - DNA, 15 bp, Homo sapiens
ctggcttgcttttag

SEQ ID NO: 2058207 - DNA, 15 bp, Homo sapiens
tggcttgcttttagt

SEQ ID NO: 2058208 - DNA, 15 bp, Homo sapiens
ggcttgcttttagtt

SEQ ID NO: 2058209 - DNA, 15 bp, Homo sapiens
gcttgcttttagttc

SEQ ID NO: 2058210 - DNA, 15 bp, Homo sapiens
cttgcttttagttca

SEQ ID NO: 2058211 - DNA, 15 bp, Homo sapiens
ttgcttttagttcag

SEQ ID NO: 2058212 - DNA, 15 bp, Homo sapiens
tgcttttagttcaga

SEQ ID NO: 2058213 - DNA, 15 bp, Homo sapiens
gcttttagttcagaa

SEQ ID NO: 2058214 - DNA, 15 bp, Homo sapiens
cttttagttcagaaa

SEQ ID NO: 2058215 - DNA, 15 bp, Homo sapiens
ttttagttcagaaaa

SEQ ID NO: 2058216 - DNA, 15 bp, Homo sapiens
tttagttcagaaaag

SEQ ID NO: 2058217 - DNA, 15 bp, Homo sapiens
ttagttcagaaaagg

SEQ ID NO: 2058218 - DNA, 15 bp, Homo sapiens
tagttcagaaaaggg

SEQ ID NO: 2058219 - DNA, 15 bp, Homo sapiens
agttcagaaaagggg

SEQ ID NO: 2058220 - DNA, 15 bp, Homo sapiens
gttcagaaaaggggt

SEQ ID NO: 2058221 - DNA, 15 bp, Homo sapiens
ttcagaaaaggggtc

SEQ ID NO: 2058222 - DNA, 15 bp, Homo sapiens
tcagaaaaggggtca

SEQ ID NO: 2058223 - DNA, 15 bp, Homo sapiens
cagaaaaggggtcag

SEQ ID NO: 2058224 - DNA, 15 bp, Homo sapiens
agaaaaggggtcagt

SEQ ID NO: 2058225 - DNA, 15 bp, Homo sapiens
gaaaaggggtcagtc

SEQ ID NO: 2058226 - DNA, 15 bp, Homo sapiens
aaaaggggtcagtct

SEQ ID NO: 2058227 - DNA, 15 bp, Homo sapiens
aaaggggtcagtctt

SEQ ID NO: 2058228 - DNA, 15 bp, Homo sapiens
aaggggtcagtcttt

SEQ ID NO: 2058229 - DNA, 15 bp, Homo sapiens
aggggtcagtcttta

SEQ ID NO: 2058230 - DNA, 15 bp, Homo sapiens
ggggtcagtctttat

SEQ ID NO: 2058231 - DNA, 15 bp, Homo sapiens
gggtcagtctttatc

SEQ ID NO: 2058232 - DNA, 15 bp, Homo sapiens
ggtcagtctttatca

SEQ ID NO: 2058233 - DNA, 15 bp, Homo sapiens
gtcagtctttatcag

SEQ ID NO: 2058234 - DNA, 15 bp, Homo sapiens
tcagtctttatcagc

SEQ ID NO: 2058235 - DNA, 15 bp, Homo sapiens
cagtctttatcagca

SEQ ID NO: 2058236 - DNA, 15 bp, Homo sapiens
agtctttatcagcac

SEQ ID NO: 2058237 - DNA, 15 bp, Homo sapiens
gtctttatcagcacg

SEQ ID NO: 2058238 - DNA, 15 bp, Homo sapiens
tctttatcagcacgg

SEQ ID NO: 2058239 - DNA, 15 bp, Homo sapiens
ctttatcagcacggt

SEQ ID NO: 2058240 - DNA, 15 bp, Homo sapiens
tttatcagcacggtt

SEQ ID NO: 2058241 - DNA, 15 bp, Homo sapiens
ttatcagcacggttc

SEQ ID NO: 2058242 - DNA, 15 bp, Homo sapiens
tatcagcacggttca

SEQ ID NO: 2058243 - DNA, 15 bp, Homo sapiens
atcagcacggttcac

SEQ ID NO: 2058244 - DNA, 15 bp, Homo sapiens
tcagcacggttcaca

SEQ ID NO: 2058245 - DNA, 15 bp, Homo sapiens
cagcacggttcacac

SEQ ID NO: 2058246 - DNA, 15 bp, Homo sapiens
agcacggttcacaca

SEQ ID NO: 2058247 - DNA, 15 bp, Homo sapiens
gcacggttcacacag

SEQ ID NO: 2058248 - DNA, 15 bp, Homo sapiens
cacggttcacacaga

SEQ ID NO: 2058249 - DNA, 15 bp, Homo sapiens
acggttcacacagat

SEQ ID NO: 2058250 - DNA, 15 bp, Homo sapiens
cggttcacacagatc

SEQ ID NO: 2058251 - DNA, 15 bp, Homo sapiens
ggttcacacagatcc

SEQ ID NO: 2058252 - DNA, 15 bp, Homo sapiens
gttcacacagatcct

SEQ ID NO: 2058253 - DNA, 15 bp, Homo sapiens
ttcacacagatcctg

SEQ ID NO: 2058254 - DNA, 15 bp, Homo sapiens
tcacacagatcctgg

SEQ ID NO: 2058255 - DNA, 15 bp, Homo sapiens
cacacagatcctgga

SEQ ID NO: 2058256 - DNA, 15 bp, Homo sapiens
acacagatcctggat

SEQ ID NO: 2058257 - DNA, 15 bp, Homo sapiens
cacagatcctggatt

SEQ ID NO: 2058258 - DNA, 15 bp, Homo sapiens
acagatcctggattt

SEQ ID NO: 2058259 - DNA, 15 bp, Homo sapiens
cagatcctggatttt

SEQ ID NO: 2058260 - DNA, 15 bp, Homo sapiens
agatcctggattttt

SEQ ID NO: 2058261 - DNA, 15 bp, Homo sapiens
gatcctggatttttt

SEQ ID NO: 2058262 - DNA, 15 bp, Homo sapiens
atcctggattttttt

SEQ ID NO: 2058263 - DNA, 15 bp, Homo sapiens
tcctggatttttttt

SEQ ID NO: 2058264 - DNA, 15 bp, Homo sapiens
cctggattttttttc

SEQ ID NO: 2058265 - DNA, 15 bp, Homo sapiens
ctggattttttttcc

SEQ ID NO: 2058266 - DNA, 15 bp, Homo sapiens
tggattttttttccc

SEQ ID NO: 2058267 - DNA, 15 bp, Homo sapiens
ggattttttttccct

SEQ ID NO: 2058268 - DNA, 15 bp, Homo sapiens
gattttttttccctt

SEQ ID NO: 2058269 - DNA, 15 bp, Homo sapiens
attttttttccctta

SEQ ID NO: 2058270 - DNA, 15 bp, Homo sapiens
ttttttttcccttat

SEQ ID NO: 2058271 - DNA, 15 bp, Homo sapiens
tttttttcccttatc

SEQ ID NO: 2058272 - DNA, 15 bp, Homo sapiens
ttttttcccttatct

SEQ ID NO: 2058273 - DNA, 15 bp, Homo sapiens
tttttcccttatctt

SEQ ID NO: 2058274 - DNA, 15 bp, Homo sapiens
ttttcccttatctta

SEQ ID NO: 2058275 - DNA, 15 bp, Homo sapiens
tttcccttatcttaa

SEQ ID NO: 2058276 - DNA, 15 bp, Homo sapiens
ttcccttatcttaaa

SEQ ID NO: 2058277 - DNA, 15 bp, Homo sapiens
tcccttatcttaaat

SEQ ID NO: 2058278 - DNA, 15 bp, Homo sapiens
cccttatcttaaatt

SEQ ID NO: 2058279 - DNA, 15 bp, Homo sapiens
ccttatcttaaattg

SEQ ID NO: 2058280 - DNA, 15 bp, Homo sapiens
cttatcttaaattga

SEQ ID NO: 2058281 - DNA, 15 bp, Homo sapiens
ttatcttaaattgac

SEQ ID NO: 2058282 - DNA, 15 bp, Homo sapiens
tatcttaaattgacc

SEQ ID NO: 2058283 - DNA, 15 bp, Homo sapiens
atcttaaattgaccc

SEQ ID NO: 2058284 - DNA, 15 bp, Homo sapiens
tcttaaattgacccg

SEQ ID NO: 2058285 - DNA, 15 bp, Homo sapiens
cttaaattgacccgc

SEQ ID NO: 2058286 - DNA, 15 bp, Homo sapiens
ttaaattgacccgct

SEQ ID NO: 2058287 - DNA, 15 bp, Homo sapiens
taaattgacccgctt

SEQ ID NO: 2058288 - DNA, 15 bp, Homo sapiens
aaattgacccgcttt

SEQ ID NO: 2058289 - DNA, 15 bp, Homo sapiens
aattgacccgctttt

SEQ ID NO: 2058290 - DNA, 15 bp, Homo sapiens
attgacccgctttta

SEQ ID NO: 2058291 - DNA, 15 bp, Homo sapiens
ttgacccgcttttaa

SEQ ID NO: 2058292 - DNA, 15 bp, Homo sapiens
tgacccgcttttaag

SEQ ID NO: 2058293 - DNA, 15 bp, Homo sapiens
gacccgcttttaaga

SEQ ID NO: 2058294 - DNA, 15 bp, Homo sapiens
acccgcttttaagat

SEQ ID NO: 2058295 - DNA, 15 bp, Homo sapiens
cccgcttttaagata

SEQ ID NO: 2058296 - DNA, 15 bp, Homo sapiens
ccgcttttaagataa

SEQ ID NO: 2058297 - DNA, 15 bp, Homo sapiens
cgcttttaagataaa

SEQ ID NO: 2058298 - DNA, 15 bp, Homo sapiens
gcttttaagataaag

SEQ ID NO: 2058299 - DNA, 15 bp, Homo sapiens
cttttaagataaaga

SEQ ID NO: 2058300 - DNA, 15 bp, Homo sapiens
ttttaagataaagac

SEQ ID NO: 2058301 - DNA, 15 bp, Homo sapiens
tttaagataaagaca

SEQ ID NO: 2058302 - DNA, 15 bp, Homo sapiens
ttaagataaagacat

SEQ ID NO: 2058303 - DNA, 15 bp, Homo sapiens
taagataaagacata

SEQ ID NO: 2058304 - DNA, 15 bp, Homo sapiens
aagataaagacataa

SEQ ID NO: 2058305 - DNA, 15 bp, Homo sapiens
agataaagacataat

SEQ ID NO: 2058306 - DNA, 15 bp, Homo sapiens
gataaagacataata

SEQ ID NO: 2058307 - DNA, 15 bp, Homo sapiens
ataaagacataatag

SEQ ID NO: 2058308 - DNA, 15 bp, Homo sapiens
taaagacataataga

SEQ ID NO: 2058309 - DNA, 15 bp, Homo sapiens
aaagacataatagag

SEQ ID NO: 2058310 - DNA, 15 bp, Homo sapiens
aagacataatagaga

SEQ ID NO: 2058311 - DNA, 15 bp, Homo sapiens
agacataatagagaa

SEQ ID NO: 2058312 - DNA, 15 bp, Homo sapiens
gacataatagagaaa

SEQ ID NO: 2058313 - DNA, 15 bp, Homo sapiens
acataatagagaaag

SEQ ID NO: 2058314 - DNA, 15 bp, Homo sapiens
cataatagagaaagc

SEQ ID NO: 2058315 - DNA, 15 bp, Homo sapiens
ataatagagaaagca

SEQ ID NO: 2058316 - DNA, 15 bp, Homo sapiens
taatagagaaagcat

SEQ ID NO: 2058317 - DNA, 15 bp, Homo sapiens
atagagaaagcattg

SEQ ID NO: 2058318 - DNA, 15 bp, Homo sapiens
tagagaaagcattga

SEQ ID NO: 2058319 - DNA, 15 bp, Homo sapiens
agagaaagcattgac

SEQ ID NO: 2058320 - DNA, 15 bp, Homo sapiens
gagaaagcattgacc

SEQ ID NO: 2058321 - DNA, 15 bp, Homo sapiens
agaaagcattgacct

SEQ ID NO: 2058322 - DNA, 15 bp, Homo sapiens
gaaagcattgacctt

SEQ ID NO: 2058323 - DNA, 15 bp, Homo sapiens
aaagcattgacctta

SEQ ID NO: 2058324 - DNA, 15 bp, Homo sapiens
aagcattgaccttac

SEQ ID NO: 2058325 - DNA, 15 bp, Homo sapiens
agcattgaccttacc

SEQ ID NO: 2058326 - DNA, 15 bp, Homo sapiens
gcattgaccttacct

SEQ ID NO: 2058327 - DNA, 15 bp, Homo sapiens
cattgaccttacctg

SEQ ID NO: 2058328 - DNA, 15 bp, Homo sapiens
attgaccttacctgg

SEQ ID NO: 2058329 - DNA, 15 bp, Homo sapiens
ttgaccttacctggt

SEQ ID NO: 2058330 - DNA, 15 bp, Homo sapiens
tgaccttacctggtc

SEQ ID NO: 2058331 - DNA, 15 bp, Homo sapiens
gaccttacctggtcc

SEQ ID NO: 2058332 - DNA, 15 bp, Homo sapiens
accttacctggtccc

SEQ ID NO: 2058333 - DNA, 15 bp, Homo sapiens
ccttacctggtccct

SEQ ID NO: 2058334 - DNA, 15 bp, Homo sapiens
cttacctggtcccta

SEQ ID NO: 2058335 - DNA, 15 bp, Homo sapiens
ttacctggtccctaa

SEQ ID NO: 2058336 - DNA, 15 bp, Homo sapiens
tacctggtccctaat

SEQ ID NO: 2058337 - DNA, 15 bp, Homo sapiens
acctggtccctaatg

SEQ ID NO: 2058338 - DNA, 15 bp, Homo sapiens
cctggtccctaatga

SEQ ID NO: 2058339 - DNA, 15 bp, Homo sapiens
ctggtccctaatgag

SEQ ID NO: 2058340 - DNA, 15 bp, Homo sapiens
tggtccctaatgagt

SEQ ID NO: 2058341 - DNA, 15 bp, Homo sapiens
ggtccctaatgagtt

SEQ ID NO: 2058342 - DNA, 15 bp, Homo sapiens
gtccctaatgagttg

SEQ ID NO: 2058343 - DNA, 15 bp, Homo sapiens
tccctaatgagttgg

SEQ ID NO: 2058344 - DNA, 15 bp, Homo sapiens
ccctaatgagttgga

SEQ ID NO: 2058345 - DNA, 15 bp, Homo sapiens
cctaatgagttggaa

SEQ ID NO: 2058346 - DNA, 15 bp, Homo sapiens
ctaatgagttggaag

SEQ ID NO: 2058347 - DNA, 15 bp, Homo sapiens
taatgagttggaagt

SEQ ID NO: 2058348 - DNA, 15 bp, Homo sapiens
aatgagttggaagtc

SEQ ID NO: 2058349 - DNA, 15 bp, Homo sapiens
atgagttggaagtca

SEQ ID NO: 2058350 - DNA, 15 bp, Homo sapiens
tgagttggaagtcag

SEQ ID NO: 2058351 - DNA, 15 bp, Homo sapiens
gagttggaagtcaga

SEQ ID NO: 2058352 - DNA, 15 bp, Homo sapiens
agttggaagtcagaa

SEQ ID NO: 2058353 - DNA, 15 bp, Homo sapiens
gttggaagtcagaaa

SEQ ID NO: 2058354 - DNA, 15 bp, Homo sapiens
ttggaagtcagaaaa

SEQ ID NO: 2058355 - DNA, 15 bp, Homo sapiens
tggaagtcagaaaac

SEQ ID NO: 2058356 - DNA, 15 bp, Homo sapiens
ggaagtcagaaaacc

SEQ ID NO: 2058357 - DNA, 15 bp, Homo sapiens
gaagtcagaaaaccc

SEQ ID NO: 2058358 - DNA, 15 bp, Homo sapiens
aagtcagaaaacccg

SEQ ID NO: 2058359 - DNA, 15 bp, Homo sapiens
agtcagaaaacccgg

SEQ ID NO: 2058360 - DNA, 15 bp, Homo sapiens
gtcagaaaacccggc

SEQ ID NO: 2058361 - DNA, 15 bp, Homo sapiens
tcagaaaacccggct

SEQ ID NO: 2058362 - DNA, 15 bp, Homo sapiens
cagaaaacccggctc

SEQ ID NO: 2058363 - DNA, 15 bp, Homo sapiens
agaaaacccggctct

SEQ ID NO: 2058364 - DNA, 15 bp, Homo sapiens
gaaaacccggctctc

SEQ ID NO: 2058365 - DNA, 15 bp, Homo sapiens
aaaacccggctctca

SEQ ID NO: 2058366 - DNA, 15 bp, Homo sapiens
aaacccggctctcat

SEQ ID NO: 2058367 - DNA, 15 bp, Homo sapiens
aacccggctctcatt

SEQ ID NO: 2058368 - DNA, 15 bp, Homo sapiens
acccggctctcattt

SEQ ID NO: 2058369 - DNA, 15 bp, Homo sapiens
cccggctctcatttc

SEQ ID NO: 2058370 - DNA, 15 bp, Homo sapiens
ccggctctcatttcc

SEQ ID NO: 2058371 - DNA, 15 bp, Homo sapiens
cggctctcatttcct

SEQ ID NO: 2058372 - DNA, 15 bp, Homo sapiens
ggctctcatttcctc

SEQ ID NO: 2058373 - DNA, 15 bp, Homo sapiens
gctctcatttcctct

SEQ ID NO: 2058374 - DNA, 15 bp, Homo sapiens
ctctcatttcctctt

SEQ ID NO: 2058375 - DNA, 15 bp, Homo sapiens
tctcatttcctctta

SEQ ID NO: 2058376 - DNA, 15 bp, Homo sapiens
ctcatttcctcttat

SEQ ID NO: 2058377 - DNA, 15 bp, Homo sapiens
tcatttcctcttatc

SEQ ID NO: 2058378 - DNA, 15 bp, Homo sapiens
catttcctcttatct

SEQ ID NO: 2058379 - DNA, 15 bp, Homo sapiens
atttcctcttatctg

SEQ ID NO: 2058380 - DNA, 15 bp, Homo sapiens
tttcctcttatctgg

SEQ ID NO: 2058381 - DNA, 15 bp, Homo sapiens
ttcctcttatctgga

SEQ ID NO: 2058382 - DNA, 15 bp, Homo sapiens
tcctcttatctggat

SEQ ID NO: 2058383 - DNA, 15 bp, Homo sapiens
cctcttatctggatc

SEQ ID NO: 2058384 - DNA, 15 bp, Homo sapiens
ctcttatctggatcg

SEQ ID NO: 2058385 - DNA, 15 bp, Homo sapiens
tcttatctggatcgc

SEQ ID NO: 2058386 - DNA, 15 bp, Homo sapiens
cttatctggatcgcc

SEQ ID NO: 2058387 - DNA, 15 bp, Homo sapiens
ttatctggatcgcct

SEQ ID NO: 2058388 - DNA, 15 bp, Homo sapiens
tatctggatcgcctg

SEQ ID NO: 2058389 - DNA, 15 bp, Homo sapiens
atctggatcgcctga

SEQ ID NO: 2058390 - DNA, 15 bp, Homo sapiens
tctggatcgcctgag

SEQ ID NO: 2058391 - DNA, 15 bp, Homo sapiens
ctggatcgcctgaga

SEQ ID NO: 2058392 - DNA, 15 bp, Homo sapiens
tggatcgcctgagaa

SEQ ID NO: 2058393 - DNA, 15 bp, Homo sapiens
ggatcgcctgagaag

SEQ ID NO: 2058394 - DNA, 15 bp, Homo sapiens
gatcgcctgagaaga

SEQ ID NO: 2058395 - DNA, 15 bp, Homo sapiens
atcgcctgagaagag

SEQ ID NO: 2058396 - DNA, 15 bp, Homo sapiens
tcgcctgagaagaga

SEQ ID NO: 2058397 - DNA, 15 bp, Homo sapiens
cgcctgagaagagac

SEQ ID NO: 2058398 - DNA, 15 bp, Homo sapiens
gcctgagaagagact

SEQ ID NO: 2058399 - DNA, 15 bp, Homo sapiens
cctgagaagagactc

SEQ ID NO: 2058400 - DNA, 15 bp, Homo sapiens
ctgagaagagactcg

SEQ ID NO: 2058401 - DNA, 15 bp, Homo sapiens
tgagaagagactcgc

SEQ ID NO: 2058402 - DNA, 15 bp, Homo sapiens
gagaagagactcgcg

SEQ ID NO: 2058403 - DNA, 15 bp, Homo sapiens
agaagagactcgcgc

SEQ ID NO: 2058404 - DNA, 15 bp, Homo sapiens
gaagagactcgcgct

SEQ ID NO: 2058405 - DNA, 15 bp, Homo sapiens
aagagactcgcgcta

SEQ ID NO: 2058406 - DNA, 15 bp, Homo sapiens
agagactcgcgctac

SEQ ID NO: 2058407 - DNA, 15 bp, Homo sapiens
gagactcgcgctacc

SEQ ID NO: 2058408 - DNA, 15 bp, Homo sapiens
agactcgcgctacct

SEQ ID NO: 2058409 - DNA, 15 bp, Homo sapiens
gactcgcgctacctt

SEQ ID NO: 2058410 - DNA, 15 bp, Homo sapiens
actcgcgctaccttt

SEQ ID NO: 2058411 - DNA, 15 bp, Homo sapiens
ctcgcgctacctttt

SEQ ID NO: 2058412 - DNA, 15 bp, Homo sapiens
tcgcgctaccttttg

SEQ ID NO: 2058413 - DNA, 15 bp, Homo sapiens
cgcgctaccttttgt

SEQ ID NO: 2058414 - DNA, 15 bp, Homo sapiens
gcgctaccttttgtg

SEQ ID NO: 2058415 - DNA, 15 bp, Homo sapiens
cgctaccttttgtgc

SEQ ID NO: 2058416 - DNA, 15 bp, Homo sapiens
gctaccttttgtgca

SEQ ID NO: 2058417 - DNA, 15 bp, Homo sapiens
ctaccttttgtgcac

SEQ ID NO: 2058418 - DNA, 15 bp, Homo sapiens
taccttttgtgcact

SEQ ID NO: 2058419 - DNA, 15 bp, Homo sapiens
accttttgtgcactc

SEQ ID NO: 2058420 - DNA, 15 bp, Homo sapiens
ccttttgtgcactcg

SEQ ID NO: 2058421 - DNA, 15 bp, Homo sapiens
cttttgtgcactcgc

SEQ ID NO: 2058422 - DNA, 15 bp, Homo sapiens
ttttgtgcactcgcg

SEQ ID NO: 2058423 - DNA, 15 bp, Homo sapiens
tttgtgcactcgcgc

SEQ ID NO: 2058424 - DNA, 15 bp, Homo sapiens
ttgtgcactcgcgcc

SEQ ID NO: 2058425 - DNA, 15 bp, Homo sapiens
tgtgcactcgcgcct

SEQ ID NO: 2058426 - DNA, 15 bp, Homo sapiens
gtgcactcgcgcctc

SEQ ID NO: 2058427 - DNA, 15 bp, Homo sapiens
tgcactcgcgcctcg

SEQ ID NO: 2058428 - DNA, 15 bp, Homo sapiens
gcactcgcgcctcga

SEQ ID NO: 2058429 - DNA, 15 bp, Homo sapiens
cactcgcgcctcgag

SEQ ID NO: 2058430 - DNA, 15 bp, Homo sapiens
actcgcgcctcgaga

SEQ ID NO: 2058431 - DNA, 15 bp, Homo sapiens
ctcgcgcctcgagat

SEQ ID NO: 2058432 - DNA, 15 bp, Homo sapiens
tcgcgcctcgagata

SEQ ID NO: 2058433 - DNA, 15 bp, Homo sapiens
cgcgcctcgagatag

SEQ ID NO: 2058434 - DNA, 15 bp, Homo sapiens
gcgcctcgagatagc

SEQ ID NO: 2058435 - DNA, 15 bp, Homo sapiens
cgcctcgagatagcc

SEQ ID NO: 2058436 - DNA, 15 bp, Homo sapiens
gcctcgagatagccc

SEQ ID NO: 2058437 - DNA, 15 bp, Homo sapiens
cctcgagatagcccc

SEQ ID NO: 2058438 - DNA, 15 bp, Homo sapiens
ctcgagatagcccct

SEQ ID NO: 2058439 - DNA, 15 bp, Homo sapiens
tcgagatagcccctc

SEQ ID NO: 2058440 - DNA, 15 bp, Homo sapiens
cgagatagcccctca

SEQ ID NO: 2058441 - DNA, 15 bp, Homo sapiens
gagatagcccctcac

SEQ ID NO: 2058442 - DNA, 15 bp, Homo sapiens
agatagcccctcact

SEQ ID NO: 2058443 - DNA, 15 bp, Homo sapiens
gatagcccctcactg

SEQ ID NO: 2058444 - DNA, 15 bp, Homo sapiens
atagcccctcactga

SEQ ID NO: 2058445 - DNA, 15 bp, Homo sapiens
tagcccctcactgac

SEQ ID NO: 2058446 - DNA, 15 bp, Homo sapiens
agcccctcactgacg

SEQ ID NO: 2058447 - DNA, 15 bp, Homo sapiens
gcccctcactgacgc

SEQ ID NO: 2058448 - DNA, 15 bp, Homo sapiens
cccctcactgacgcc

SEQ ID NO: 2058449 - DNA, 15 bp, Homo sapiens
ccctcactgacgcct

SEQ ID NO: 2058450 - DNA, 15 bp, Homo sapiens
cctcactgacgcctg

SEQ ID NO: 2058451 - DNA, 15 bp, Homo sapiens
ctcactgacgcctgg

SEQ ID NO: 2058452 - DNA, 15 bp, Homo sapiens
tcactgacgcctgga

SEQ ID NO: 2058453 - DNA, 15 bp, Homo sapiens
cactgacgcctggac

SEQ ID NO: 2058454 - DNA, 15 bp, Homo sapiens
actgacgcctggacg

SEQ ID NO: 2058455 - DNA, 15 bp, Homo sapiens
ctgacgcctggacgc

SEQ ID NO: 2058456 - DNA, 15 bp, Homo sapiens
tgacgcctggacgcg

SEQ ID NO: 2058457 - DNA, 15 bp, Homo sapiens
gacgcctggacgcgg

SEQ ID NO: 2058458 - DNA, 15 bp, Homo sapiens
acgcctggacgcggt

SEQ ID NO: 2058459 - DNA, 15 bp, Homo sapiens
cgcctggacgcggtg

SEQ ID NO: 2058460 - DNA, 15 bp, Homo sapiens
gcctggacgcggtga

SEQ ID NO: 2058461 - DNA, 15 bp, Homo sapiens
cctggacgcggtgag

SEQ ID NO: 2058462 - DNA, 15 bp, Homo sapiens
ctggacgcggtgagc

SEQ ID NO: 2058463 - DNA, 15 bp, Homo sapiens
tggacgcggtgagcg

SEQ ID NO: 2058464 - DNA, 15 bp, Homo sapiens
ggacgcggtgagcgc

SEQ ID NO: 2058465 - DNA, 15 bp, Homo sapiens
gacgcggtgagcgcg

SEQ ID NO: 2058466 - DNA, 15 bp, Homo sapiens
acgcggtgagcgcgc

SEQ ID NO: 2058467 - DNA, 15 bp, Homo sapiens
cgcggtgagcgcgct

SEQ ID NO: 2058468 - DNA, 15 bp, Homo sapiens
gcggtgagcgcgctg

SEQ ID NO: 2058469 - DNA, 15 bp, Homo sapiens
cggtgagcgcgctga

SEQ ID NO: 2058470 - DNA, 15 bp, Homo sapiens
ggtgagcgcgctgaa

SEQ ID NO: 2058471 - DNA, 15 bp, Homo sapiens
gtgagcgcgctgaag

SEQ ID NO: 2058472 - DNA, 15 bp, Homo sapiens
tgagcgcgctgaagg

SEQ ID NO: 2058473 - DNA, 15 bp, Homo sapiens
gagcgcgctgaaggc

SEQ ID NO: 2058474 - DNA, 15 bp, Homo sapiens
agcgcgctgaaggct

SEQ ID NO: 2058475 - DNA, 15 bp, Homo sapiens
gcgcgctgaaggctg

SEQ ID NO: 2058476 - DNA, 15 bp, Homo sapiens
cgcgctgaaggctgt

SEQ ID NO: 2058477 - DNA, 15 bp, Homo sapiens
gcgctgaaggctgtg

SEQ ID NO: 2058478 - DNA, 15 bp, Homo sapiens
cgctgaaggctgtgc

SEQ ID NO: 2058479 - DNA, 15 bp, Homo sapiens
gctgaaggctgtgcg

SEQ ID NO: 2058480 - DNA, 15 bp, Homo sapiens
ctgaaggctgtgcgg

SEQ ID NO: 2058481 - DNA, 15 bp, Homo sapiens
tgaaggctgtgcggc

SEQ ID NO: 2058482 - DNA, 15 bp, Homo sapiens
gaaggctgtgcggcc

SEQ ID NO: 2058483 - DNA, 15 bp, Homo sapiens
aaggctgtgcggcct

SEQ ID NO: 2058484 - DNA, 15 bp, Homo sapiens
aggctgtgcggcctc

SEQ ID NO: 2058485 - DNA, 15 bp, Homo sapiens
ggctgtgcggcctct

SEQ ID NO: 2058486 - DNA, 15 bp, Homo sapiens
gctgtgcggcctcta

SEQ ID NO: 2058487 - DNA, 15 bp, Homo sapiens
ctgtgcggcctctaa

SEQ ID NO: 2058488 - DNA, 15 bp, Homo sapiens
tgtgcggcctctaaa

SEQ ID NO: 2058489 - DNA, 15 bp, Homo sapiens
gtgcggcctctaaag

SEQ ID NO: 2058490 - DNA, 15 bp, Homo sapiens
tgcggcctctaaagt

SEQ ID NO: 2058491 - DNA, 15 bp, Homo sapiens
gcggcctctaaagtc

SEQ ID NO: 2058492 - DNA, 15 bp, Homo sapiens
cggcctctaaagtct

SEQ ID NO: 2058493 - DNA, 15 bp, Homo sapiens
ggcctctaaagtctc

SEQ ID NO: 2058494 - DNA, 15 bp, Homo sapiens
gcctctaaagtctca

SEQ ID NO: 2058495 - DNA, 15 bp, Homo sapiens
cctctaaagtctcag

SEQ ID NO: 2058496 - DNA, 15 bp, Homo sapiens
ctctaaagtctcaga

SEQ ID NO: 2058497 - DNA, 15 bp, Homo sapiens
tctaaagtctcagaa

SEQ ID NO: 2058498 - DNA, 15 bp, Homo sapiens
ctaaagtctcagaat

SEQ ID NO: 2058499 - DNA, 15 bp, Homo sapiens
taaagtctcagaatt

SEQ ID NO: 2058500 - DNA, 15 bp, Homo sapiens
aaagtctcagaattc

SEQ ID NO: 2058501 - DNA, 15 bp, Homo sapiens
aagtctcagaattcc

SEQ ID NO: 2058502 - DNA, 15 bp, Homo sapiens
agtctcagaattcct

SEQ ID NO: 2058503 - DNA, 15 bp, Homo sapiens
gtctcagaattcctc

SEQ ID NO: 2058504 - DNA, 15 bp, Homo sapiens
tctcagaattcctcc

SEQ ID NO: 2058505 - DNA, 15 bp, Homo sapiens
ctcagaattcctccc

SEQ ID NO: 2058506 - DNA, 15 bp, Homo sapiens
tcagaattcctccct

SEQ ID NO: 2058507 - DNA, 15 bp, Homo sapiens
cagaattcctccctg

SEQ ID NO: 2058508 - DNA, 15 bp, Homo sapiens
agaattcctccctgc

SEQ ID NO: 2058509 - DNA, 15 bp, Homo sapiens
gaattcctccctgcg

SEQ ID NO: 2058510 - DNA, 15 bp, Homo sapiens
aattcctccctgcgg

SEQ ID NO: 2058511 - DNA, 15 bp, Homo sapiens
attcctccctgcggc

SEQ ID NO: 2058512 - DNA, 15 bp, Homo sapiens
ttcctccctgcggcc

SEQ ID NO: 2058513 - DNA, 15 bp, Homo sapiens
tcctccctgcggcct

SEQ ID NO: 2058514 - DNA, 15 bp, Homo sapiens
cctccctgcggcctc

SEQ ID NO: 2058515 - DNA, 15 bp, Homo sapiens
ctccctgcggcctca

SEQ ID NO: 2058516 - DNA, 15 bp, Homo sapiens
tccctgcggcctcaa

SEQ ID NO: 2058517 - DNA, 15 bp, Homo sapiens
ccctgcggcctcaaa

SEQ ID NO: 2058518 - DNA, 15 bp, Homo sapiens
cctgcggcctcaaaa

SEQ ID NO: 2058519 - DNA, 15 bp, Homo sapiens
ctgcggcctcaaaat

SEQ ID NO: 2058520 - DNA, 15 bp, Homo sapiens
tgcggcctcaaaatt

SEQ ID NO: 2058521 - DNA, 15 bp, Homo sapiens
gcggcctcaaaattg

SEQ ID NO: 2058522 - DNA, 15 bp, Homo sapiens
cggcctcaaaattgg

SEQ ID NO: 2058523 - DNA, 15 bp, Homo sapiens
ggcctcaaaattgga

SEQ ID NO: 2058524 - DNA, 15 bp, Homo sapiens
gcctcaaaattggag

SEQ ID NO: 2058525 - DNA, 15 bp, Homo sapiens
cctcaaaattggaga

SEQ ID NO: 2058526 - DNA, 15 bp, Homo sapiens
ctcaaaattggagag

SEQ ID NO: 2058527 - DNA, 15 bp, Homo sapiens
tcaaaattggagagt

SEQ ID NO: 2058528 - DNA, 15 bp, Homo sapiens
caaaattggagagtt

SEQ ID NO: 2058529 - DNA, 15 bp, Homo sapiens
aaaattggagagttg

SEQ ID NO: 2058530 - DNA, 15 bp, Homo sapiens
aaattggagagttgg

SEQ ID NO: 2058531 - DNA, 15 bp, Homo sapiens
aattggagagttgga

SEQ ID NO: 2058532 - DNA, 15 bp, Homo sapiens
attggagagttggat

SEQ ID NO: 2058533 - DNA, 15 bp, Homo sapiens
ttggagagttggatt

SEQ ID NO: 2058534 - DNA, 15 bp, Homo sapiens
tggagagttggattc

SEQ ID NO: 2058535 - DNA, 15 bp, Homo sapiens
ggagagttggattcc

SEQ ID NO: 2058536 - DNA, 15 bp, Homo sapiens
gagagttggattcca

SEQ ID NO: 2058537 - DNA, 15 bp, Homo sapiens
agagttggattccag

SEQ ID NO: 2058538 - DNA, 15 bp, Homo sapiens
gagttggattccaga

SEQ ID NO: 2058539 - DNA, 15 bp, Homo sapiens
agttggattccagac

SEQ ID NO: 2058540 - DNA, 15 bp, Homo sapiens
gttggattccagacc

SEQ ID NO: 2058541 - DNA, 15 bp, Homo sapiens
ttggattccagacca

SEQ ID NO: 2058542 - DNA, 15 bp, Homo sapiens
tggattccagaccaa

SEQ ID NO: 2058543 - DNA, 15 bp, Homo sapiens
ggattccagaccaag

SEQ ID NO: 2058544 - DNA, 15 bp, Homo sapiens
gattccagaccaaga

SEQ ID NO: 2058545 - DNA, 15 bp, Homo sapiens
attccagaccaagac

SEQ ID NO: 2058546 - DNA, 15 bp, Homo sapiens
ttccagaccaagaca

SEQ ID NO: 2058547 - DNA, 15 bp, Homo sapiens
tccagaccaagacac

SEQ ID NO: 2058548 - DNA, 15 bp, Homo sapiens
ccagaccaagacact

SEQ ID NO: 2058549 - DNA, 15 bp, Homo sapiens
cagaccaagacactg

SEQ ID NO: 2058550 - DNA, 15 bp, Homo sapiens
agaccaagacactgt

SEQ ID NO: 2058551 - DNA, 15 bp, Homo sapiens
gaccaagacactgtc

SEQ ID NO: 2058552 - DNA, 15 bp, Homo sapiens
accaagacactgtca

SEQ ID NO: 2058553 - DNA, 15 bp, Homo sapiens
ccaagacactgtcac

SEQ ID NO: 2058554 - DNA, 15 bp, Homo sapiens
caagacactgtcact

SEQ ID NO: 2058555 - DNA, 15 bp, Homo sapiens
aagacactgtcacta

SEQ ID NO: 2058556 - DNA, 15 bp, Homo sapiens
agacactgtcactag

SEQ ID NO: 2058557 - DNA, 15 bp, Homo sapiens
gacactgtcactaga

SEQ ID NO: 2058558 - DNA, 15 bp, Homo sapiens
acactgtcactagag

SEQ ID NO: 2058559 - DNA, 15 bp, Homo sapiens
cactgtcactagagc

SEQ ID NO: 2058560 - DNA, 15 bp, Homo sapiens
actgtcactagagct

SEQ ID NO: 2058561 - DNA, 15 bp, Homo sapiens
ctgtcactagagctc

SEQ ID NO: 2058562 - DNA, 15 bp, Homo sapiens
tgtcactagagctcc

SEQ ID NO: 2058563 - DNA, 15 bp, Homo sapiens
gtcactagagctccc

SEQ ID NO: 2058564 - DNA, 15 bp, Homo sapiens
tcactagagctccct

SEQ ID NO: 2058565 - DNA, 15 bp, Homo sapiens
cactagagctcccta

SEQ ID NO: 2058566 - DNA, 15 bp, Homo sapiens
actagagctccctag

SEQ ID NO: 2058567 - DNA, 15 bp, Homo sapiens
ctagagctccctagc

SEQ ID NO: 2058568 - DNA, 15 bp, Homo sapiens
tagagctccctagcc

SEQ ID NO: 2058569 - DNA, 15 bp, Homo sapiens
agagctccctagccc

SEQ ID NO: 2058570 - DNA, 15 bp, Homo sapiens
gagctccctagccct

SEQ ID NO: 2058571 - DNA, 15 bp, Homo sapiens
agctccctagccctg

SEQ ID NO: 2058572 - DNA, 15 bp, Homo sapiens
gctccctagccctgg

SEQ ID NO: 2058573 - DNA, 15 bp, Homo sapiens
ctccctagccctggc

SEQ ID NO: 2058574 - DNA, 15 bp, Homo sapiens
tccctagccctggcc

SEQ ID NO: 2058575 - DNA, 15 bp, Homo sapiens
ccctagccctggccc

SEQ ID NO: 2058576 - DNA, 15 bp, Homo sapiens
cctagccctggccca

SEQ ID NO: 2058577 - DNA, 15 bp, Homo sapiens
ctagccctggcccag

SEQ ID NO: 2058578 - DNA, 15 bp, Homo sapiens
tagccctggcccagg

SEQ ID NO: 2058579 - DNA, 15 bp, Homo sapiens
agccctggcccagga

SEQ ID NO: 2058580 - DNA, 15 bp, Homo sapiens
gccctggcccaggaa

SEQ ID NO: 2058581 - DNA, 15 bp, Homo sapiens
ccctggcccaggaag

SEQ ID NO: 2058582 - DNA, 15 bp, Homo sapiens
cctggcccaggaaga

SEQ ID NO: 2058583 - DNA, 15 bp, Homo sapiens
ctggcccaggaagat

SEQ ID NO: 2058584 - DNA, 15 bp, Homo sapiens
tggcccaggaagatt

SEQ ID NO: 2058585 - DNA, 15 bp, Homo sapiens
ggcccaggaagattt

SEQ ID NO: 2058586 - DNA, 15 bp, Homo sapiens
gcccaggaagattta

SEQ ID NO: 2058587 - DNA, 15 bp, Homo sapiens
cccaggaagatttaa

SEQ ID NO: 2058588 - DNA, 15 bp, Homo sapiens
ccaggaagatttaaa

SEQ ID NO: 2058589 - DNA, 15 bp, Homo sapiens
caggaagatttaaaa

SEQ ID NO: 2058590 - DNA, 15 bp, Homo sapiens
aggaagatttaaaat

SEQ ID NO: 2058591 - DNA, 15 bp, Homo sapiens
ggaagatttaaaatc

SEQ ID NO: 2058592 - DNA, 15 bp, Homo sapiens
gaagatttaaaatcc

SEQ ID NO: 2058593 - DNA, 15 bp, Homo sapiens
aagatttaaaatccc

SEQ ID NO: 2058594 - DNA, 15 bp, Homo sapiens
agatttaaaatccct

SEQ ID NO: 2058595 - DNA, 15 bp, Homo sapiens
gatttaaaatccctt

SEQ ID NO: 2058596 - DNA, 15 bp, Homo sapiens
atttaaaatccctta

SEQ ID NO: 2058597 - DNA, 15 bp, Homo sapiens
tttaaaatcccttaa

SEQ ID NO: 2058598 - DNA, 15 bp, Homo sapiens
ttaaaatcccttaaa

SEQ ID NO: 2058599 - DNA, 15 bp, Homo sapiens
taaaatcccttaaaa

SEQ ID NO: 2058600 - DNA, 15 bp, Homo sapiens
aaaatcccttaaaat

SEQ ID NO: 2058601 - DNA, 15 bp, Homo sapiens
aaatcccttaaaatc

SEQ ID NO: 2058602 - DNA, 15 bp, Homo sapiens
aatcccttaaaatcc

SEQ ID NO: 2058603 - DNA, 15 bp, Homo sapiens
atcccttaaaatccc

SEQ ID NO: 2058604 - DNA, 15 bp, Homo sapiens
tcccttaaaatccct

SEQ ID NO: 2058605 - DNA, 15 bp, Homo sapiens
cccttaaaatccctt

SEQ ID NO: 2058606 - DNA, 15 bp, Homo sapiens
ccttaaaatccctta

SEQ ID NO: 2058607 - DNA, 15 bp, Homo sapiens
cttaaaatcccttag

SEQ ID NO: 2058608 - DNA, 15 bp, Homo sapiens
ttaaaatcccttaga

SEQ ID NO: 2058609 - DNA, 15 bp, Homo sapiens
taaaatcccttagac

SEQ ID NO: 2058610 - DNA, 15 bp, Homo sapiens
aaaatcccttagact

SEQ ID NO: 2058611 - DNA, 15 bp, Homo sapiens
aaatcccttagactt

SEQ ID NO: 2058612 - DNA, 15 bp, Homo sapiens
aatcccttagacttg

SEQ ID NO: 2058613 - DNA, 15 bp, Homo sapiens
atcccttagacttgc

SEQ ID NO: 2058614 - DNA, 15 bp, Homo sapiens
tcccttagacttgct

SEQ ID NO: 2058615 - DNA, 15 bp, Homo sapiens
cccttagacttgctc

SEQ ID NO: 2058616 - DNA, 15 bp, Homo sapiens
ccttagacttgctcc

SEQ ID NO: 2058617 - DNA, 15 bp, Homo sapiens
cttagacttgctccc

SEQ ID NO: 2058618 - DNA, 15 bp, Homo sapiens
ttagacttgctcccg

SEQ ID NO: 2058619 - DNA, 15 bp, Homo sapiens
tagacttgctcccga

SEQ ID NO: 2058620 - DNA, 15 bp, Homo sapiens
agacttgctcccgag

SEQ ID NO: 2058621 - DNA, 15 bp, Homo sapiens
gacttgctcccgagc

SEQ ID NO: 2058622 - DNA, 15 bp, Homo sapiens
acttgctcccgagca

SEQ ID NO: 2058623 - DNA, 15 bp, Homo sapiens
cttgctcccgagcaa

SEQ ID NO: 2058624 - DNA, 15 bp, Homo sapiens
ttgctcccgagcaag

SEQ ID NO: 2058625 - DNA, 15 bp, Homo sapiens
tgctcccgagcaagt

SEQ ID NO: 2058626 - DNA, 15 bp, Homo sapiens
gctcccgagcaagtc

SEQ ID NO: 2058627 - DNA, 15 bp, Homo sapiens
ctcccgagcaagtct

SEQ ID NO: 2058628 - DNA, 15 bp, Homo sapiens
tcccgagcaagtctt

SEQ ID NO: 2058629 - DNA, 15 bp, Homo sapiens
cccgagcaagtcttt

SEQ ID NO: 2058630 - DNA, 15 bp, Homo sapiens
ccgagcaagtctttc

SEQ ID NO: 2058631 - DNA, 15 bp, Homo sapiens
cgagcaagtctttcc

SEQ ID NO: 2058632 - DNA, 15 bp, Homo sapiens
gagcaagtctttccc

SEQ ID NO: 2058633 - DNA, 15 bp, Homo sapiens
agcaagtctttccct

SEQ ID NO: 2058634 - DNA, 15 bp, Homo sapiens
gcaagtctttcccta

SEQ ID NO: 2058635 - DNA, 15 bp, Homo sapiens
caagtctttccctat

SEQ ID NO: 2058636 - DNA, 15 bp, Homo sapiens
aagtctttccctatg

SEQ ID NO: 2058637 - DNA, 15 bp, Homo sapiens
agtctttccctatga

SEQ ID NO: 2058638 - DNA, 15 bp, Homo sapiens
gtctttccctatgaa

SEQ ID NO: 2058639 - DNA, 15 bp, Homo sapiens
tctttccctatgaaa

SEQ ID NO: 2058640 - DNA, 15 bp, Homo sapiens
ctttccctatgaaag

SEQ ID NO: 2058641 - DNA, 15 bp, Homo sapiens
tttccctatgaaagg

SEQ ID NO: 2058642 - DNA, 15 bp, Homo sapiens
ttccctatgaaaggc

SEQ ID NO: 2058643 - DNA, 15 bp, Homo sapiens
tccctatgaaaggcc

SEQ ID NO: 2058644 - DNA, 15 bp, Homo sapiens
ccctatgaaaggcca

SEQ ID NO: 2058645 - DNA, 15 bp, Homo sapiens
cctatgaaaggccaa

SEQ ID NO: 2058646 - DNA, 15 bp, Homo sapiens
ctatgaaaggccaaa

SEQ ID NO: 2058647 - DNA, 15 bp, Homo sapiens
tatgaaaggccaaac

SEQ ID NO: 2058648 - DNA, 15 bp, Homo sapiens
atgaaaggccaaact

SEQ ID NO: 2058649 - DNA, 15 bp, Homo sapiens
tgaaaggccaaactc

SEQ ID NO: 2058650 - DNA, 15 bp, Homo sapiens
gaaaggccaaactct

SEQ ID NO: 2058651 - DNA, 15 bp, Homo sapiens
aaaggccaaactcta

SEQ ID NO: 2058652 - DNA, 15 bp, Homo sapiens
aaggccaaactctaa

SEQ ID NO: 2058653 - DNA, 15 bp, Homo sapiens
aggccaaactctaag

SEQ ID NO: 2058654 - DNA, 15 bp, Homo sapiens
ggccaaactctaagc

SEQ ID NO: 2058655 - DNA, 15 bp, Homo sapiens
gccaaactctaagct

SEQ ID NO: 2058656 - DNA, 15 bp, Homo sapiens
ccaaactctaagctt

SEQ ID NO: 2058657 - DNA, 15 bp, Homo sapiens
caaactctaagcttc

SEQ ID NO: 2058658 - DNA, 15 bp, Homo sapiens
aaactctaagcttcg

SEQ ID NO: 2058659 - DNA, 15 bp, Homo sapiens
aactctaagcttcgt

SEQ ID NO: 2058660 - DNA, 15 bp, Homo sapiens
actctaagcttcgtg

SEQ ID NO: 2058661 - DNA, 15 bp, Homo sapiens
ctctaagcttcgtga

SEQ ID NO: 2058662 - DNA, 15 bp, Homo sapiens
tctaagcttcgtgaa

SEQ ID NO: 2058663 - DNA, 15 bp, Homo sapiens
ctaagcttcgtgaag

SEQ ID NO: 2058664 - DNA, 15 bp, Homo sapiens
taagcttcgtgaaga

SEQ ID NO: 2058665 - DNA, 15 bp, Homo sapiens
aagcttcgtgaagaa

SEQ ID NO: 2058666 - DNA, 15 bp, Homo sapiens
agcttcgtgaagaag

SEQ ID NO: 2058667 - DNA, 15 bp, Homo sapiens
gcttcgtgaagaagc

SEQ ID NO: 2058668 - DNA, 15 bp, Homo sapiens
cttcgtgaagaagcc

SEQ ID NO: 2058669 - DNA, 15 bp, Homo sapiens
ttcgtgaagaagcct

SEQ ID NO: 2058670 - DNA, 15 bp, Homo sapiens
tcgtgaagaagcctc

SEQ ID NO: 2058671 - DNA, 15 bp, Homo sapiens
cgtgaagaagcctcc

SEQ ID NO: 2058672 - DNA, 15 bp, Homo sapiens
gtgaagaagcctcct

SEQ ID NO: 2058673 - DNA, 15 bp, Homo sapiens
tgaagaagcctccta

SEQ ID NO: 2058674 - DNA, 15 bp, Homo sapiens
gaagaagcctcctac

SEQ ID NO: 2058675 - DNA, 15 bp, Homo sapiens
aagaagcctcctaca

SEQ ID NO: 2058676 - DNA, 15 bp, Homo sapiens
agaagcctcctacaa

SEQ ID NO: 2058677 - DNA, 15 bp, Homo sapiens
gaagcctcctacaag

SEQ ID NO: 2058678 - DNA, 15 bp, Homo sapiens
aagcctcctacaagg

SEQ ID NO: 2058679 - DNA, 15 bp, Homo sapiens
agcctcctacaagga

SEQ ID NO: 2058680 - DNA, 15 bp, Homo sapiens
gcctcctacaaggac

SEQ ID NO: 2058681 - DNA, 15 bp, Homo sapiens
cctcctacaaggaca

SEQ ID NO: 2058682 - DNA, 15 bp, Homo sapiens
ctcctacaaggacac

SEQ ID NO: 2058683 - DNA, 15 bp, Homo sapiens
tcctacaaggacact

SEQ ID NO: 2058684 - DNA, 15 bp, Homo sapiens
cctacaaggacactg

SEQ ID NO: 2058685 - DNA, 15 bp, Homo sapiens
ctacaaggacactgg

SEQ ID NO: 2058686 - DNA, 15 bp, Homo sapiens
tacaaggacactggt

SEQ ID NO: 2058687 - DNA, 15 bp, Homo sapiens
acaaggacactggtc

SEQ ID NO: 2058688 - DNA, 15 bp, Homo sapiens
caaggacactggtct

SEQ ID NO: 2058689 - DNA, 15 bp, Homo sapiens
aaggacactggtctg

SEQ ID NO: 2058690 - DNA, 15 bp, Homo sapiens
aggacactggtctgg

SEQ ID NO: 2058691 - DNA, 15 bp, Homo sapiens
ggacactggtctgga

SEQ ID NO: 2058692 - DNA, 15 bp, Homo sapiens
gacactggtctggag

SEQ ID NO: 2058693 - DNA, 15 bp, Homo sapiens
acactggtctggagc

SEQ ID NO: 2058694 - DNA, 15 bp, Homo sapiens
cactggtctggagcg

SEQ ID NO: 2058695 - DNA, 15 bp, Homo sapiens
actggtctggagcgc

SEQ ID NO: 2058696 - DNA, 15 bp, Homo sapiens
ctggtctggagcgcc

SEQ ID NO: 2058697 - DNA, 15 bp, Homo sapiens
tggtctggagcgccc

SEQ ID NO: 2058698 - DNA, 15 bp, Homo sapiens
ggtctggagcgcccg

SEQ ID NO: 2058699 - DNA, 15 bp, Homo sapiens
gtctggagcgcccgg

SEQ ID NO: 2058700 - DNA, 15 bp, Homo sapiens
tctggagcgcccggg

SEQ ID NO: 2058701 - DNA, 15 bp, Homo sapiens
ctggagcgcccgggc

SEQ ID NO: 2058702 - DNA, 15 bp, Homo sapiens
tggagcgcccgggcc

SEQ ID NO: 2058703 - DNA, 15 bp, Homo sapiens
ggagcgcccgggcct

SEQ ID NO: 2058704 - DNA, 15 bp, Homo sapiens
gagcgcccgggcctc

SEQ ID NO: 2058705 - DNA, 15 bp, Homo sapiens
agcgcccgggcctcc

SEQ ID NO: 2058706 - DNA, 15 bp, Homo sapiens
gcgcccgggcctccg

SEQ ID NO: 2058707 - DNA, 15 bp, Homo sapiens
cgcccgggcctccgc

SEQ ID NO: 2058708 - DNA, 15 bp, Homo sapiens
gcccgggcctccgcg

SEQ ID NO: 2058709 - DNA, 15 bp, Homo sapiens
cccgggcctccgcgt

SEQ ID NO: 2058710 - DNA, 15 bp, Homo sapiens
ccgggcctccgcgtc

SEQ ID NO: 2058711 - DNA, 15 bp, Homo sapiens
cgggcctccgcgtct

SEQ ID NO: 2058712 - DNA, 15 bp, Homo sapiens
gggcctccgcgtctc

SEQ ID NO: 2058713 - DNA, 15 bp, Homo sapiens
ggcctccgcgtctcc

SEQ ID NO: 2058714 - DNA, 15 bp, Homo sapiens
gcctccgcgtctcca

SEQ ID NO: 2058715 - DNA, 15 bp, Homo sapiens
cctccgcgtctccag

SEQ ID NO: 2058716 - DNA, 15 bp, Homo sapiens
ctccgcgtctccagg

SEQ ID NO: 2058717 - DNA, 15 bp, Homo sapiens
tccgcgtctccagga

SEQ ID NO: 2058718 - DNA, 15 bp, Homo sapiens
ccgcgtctccaggag

SEQ ID NO: 2058719 - DNA, 15 bp, Homo sapiens
cgcgtctccaggagt

SEQ ID NO: 2058720 - DNA, 15 bp, Homo sapiens
gcgtctccaggagtg

SEQ ID NO: 2058721 - DNA, 15 bp, Homo sapiens
cgtctccaggagtgc

SEQ ID NO: 2058722 - DNA, 15 bp, Homo sapiens
gtctccaggagtgcg

SEQ ID NO: 2058723 - DNA, 15 bp, Homo sapiens
tctccaggagtgcgc

SEQ ID NO: 2058724 - DNA, 15 bp, Homo sapiens
ctccaggagtgcgcg

SEQ ID NO: 2058725 - DNA, 15 bp, Homo sapiens
tccaggagtgcgcgc

SEQ ID NO: 2058726 - DNA, 15 bp, Homo sapiens
ccaggagtgcgcgcc

SEQ ID NO: 2058727 - DNA, 15 bp, Homo sapiens
caggagtgcgcgccc

SEQ ID NO: 2058728 - DNA, 15 bp, Homo sapiens
aggagtgcgcgccca

SEQ ID NO: 2058729 - DNA, 15 bp, Homo sapiens
ggagtgcgcgcccag

SEQ ID NO: 2058730 - DNA, 15 bp, Homo sapiens
gagtgcgcgcccaga

SEQ ID NO: 2058731 - DNA, 15 bp, Homo sapiens
agtgcgcgcccagag

SEQ ID NO: 2058732 - DNA, 15 bp, Homo sapiens
gtgcgcgcccagagc

SEQ ID NO: 2058733 - DNA, 15 bp, Homo sapiens
tgcgcgcccagagcg

SEQ ID NO: 2058734 - DNA, 15 bp, Homo sapiens
gcgcgcccagagcgt

SEQ ID NO: 2058735 - DNA, 15 bp, Homo sapiens
cgcgcccagagcgtt

SEQ ID NO: 2058736 - DNA, 15 bp, Homo sapiens
gcgcccagagcgttt

SEQ ID NO: 2058737 - DNA, 15 bp, Homo sapiens
cgcccagagcgtttc

SEQ ID NO: 2058738 - DNA, 15 bp, Homo sapiens
gcccagagcgtttct

SEQ ID NO: 2058739 - DNA, 15 bp, Homo sapiens
cccagagcgtttcta

SEQ ID NO: 2058740 - DNA, 15 bp, Homo sapiens
ccagagcgtttctag

SEQ ID NO: 2058741 - DNA, 15 bp, Homo sapiens
cagagcgtttctagc

SEQ ID NO: 2058742 - DNA, 15 bp, Homo sapiens
agagcgtttctagcg

SEQ ID NO: 2058743 - DNA, 15 bp, Homo sapiens
gagcgtttctagcgg

SEQ ID NO: 2058744 - DNA, 15 bp, Homo sapiens
agcgtttctagcgga

SEQ ID NO: 2058745 - DNA, 15 bp, Homo sapiens
gcgtttctagcggag

SEQ ID NO: 2058746 - DNA, 15 bp, Homo sapiens
cgtttctagcggaga

SEQ ID NO: 2058747 - DNA, 15 bp, Homo sapiens
gtttctagcggagac

SEQ ID NO: 2058748 - DNA, 15 bp, Homo sapiens
tttctagcggagact

SEQ ID NO: 2058749 - DNA, 15 bp, Homo sapiens
ttctagcggagactg

SEQ ID NO: 2058750 - DNA, 15 bp, Homo sapiens
tctagcggagactgc

SEQ ID NO: 2058751 - DNA, 15 bp, Homo sapiens
ctagcggagactgcc

SEQ ID NO: 2058752 - DNA, 15 bp, Homo sapiens
tagcggagactgccc

SEQ ID NO: 2058753 - DNA, 15 bp, Homo sapiens
agcggagactgccca

SEQ ID NO: 2058754 - DNA, 15 bp, Homo sapiens
gcggagactgcccag

SEQ ID NO: 2058755 - DNA, 15 bp, Homo sapiens
cggagactgcccagg

SEQ ID NO: 2058756 - DNA, 15 bp, Homo sapiens
ggagactgcccaggc

SEQ ID NO: 2058757 - DNA, 15 bp, Homo sapiens
gagactgcccaggcc

SEQ ID NO: 2058758 - DNA, 15 bp, Homo sapiens
agactgcccaggcct

SEQ ID NO: 2058759 - DNA, 15 bp, Homo sapiens
gactgcccaggcctg

SEQ ID NO: 2058760 - DNA, 15 bp, Homo sapiens
ctgcccaggcctggc

SEQ ID NO: 2058761 - DNA, 15 bp, Homo sapiens
tgcccaggcctggct

SEQ ID NO: 2058762 - DNA, 15 bp, Homo sapiens
gcccaggcctggctc

SEQ ID NO: 2058763 - DNA, 15 bp, Homo sapiens
cccaggcctggctcg

SEQ ID NO: 2058764 - DNA, 15 bp, Homo sapiens
ccaggcctggctcgg

SEQ ID NO: 2058765 - DNA, 15 bp, Homo sapiens
caggcctggctcgga

SEQ ID NO: 2058766 - DNA, 15 bp, Homo sapiens
aggcctggctcggat

SEQ ID NO: 2058767 - DNA, 15 bp, Homo sapiens
ggcctggctcggatt

SEQ ID NO: 2058768 - DNA, 15 bp, Homo sapiens
gcctggctcggattt

SEQ ID NO: 2058769 - DNA, 15 bp, Homo sapiens
cctggctcggatttc

SEQ ID NO: 2058770 - DNA, 15 bp, Homo sapiens
ctggctcggatttca

SEQ ID NO: 2058771 - DNA, 15 bp, Homo sapiens
tggctcggatttcag

SEQ ID NO: 2058772 - DNA, 15 bp, Homo sapiens
ggctcggatttcagt

SEQ ID NO: 2058773 - DNA, 15 bp, Homo sapiens
gctcggatttcagtc

SEQ ID NO: 2058774 - DNA, 15 bp, Homo sapiens
ctcggatttcagtcg

SEQ ID NO: 2058775 - DNA, 15 bp, Homo sapiens
tcggatttcagtcgc

SEQ ID NO: 2058776 - DNA, 15 bp, Homo sapiens
cggatttcagtcgcg

SEQ ID NO: 2058777 - DNA, 15 bp, Homo sapiens
ggatttcagtcgcgg

SEQ ID NO: 2058778 - DNA, 15 bp, Homo sapiens
gatttcagtcgcggg

SEQ ID NO: 2058779 - DNA, 15 bp, Homo sapiens
atttcagtcgcgggg

SEQ ID NO: 2058780 - DNA, 15 bp, Homo sapiens
tttcagtcgcggggc

SEQ ID NO: 2058781 - DNA, 15 bp, Homo sapiens
ttcagtcgcggggcc

SEQ ID NO: 2058782 - DNA, 15 bp, Homo sapiens
tcagtcgcggggccc

SEQ ID NO: 2058783 - DNA, 15 bp, Homo sapiens
cagtcgcggggcccc

SEQ ID NO: 2058784 - DNA, 15 bp, Homo sapiens
agtcgcggggcccca

SEQ ID NO: 2058785 - DNA, 15 bp, Homo sapiens
gtcgcggggccccag

SEQ ID NO: 2058786 - DNA, 15 bp, Homo sapiens
tcgcggggccccagg

SEQ ID NO: 2058787 - DNA, 15 bp, Homo sapiens
cgcggggccccaggc

SEQ ID NO: 2058788 - DNA, 15 bp, Homo sapiens
gcggggccccaggct

SEQ ID NO: 2058789 - DNA, 15 bp, Homo sapiens
cggggccccaggcta

SEQ ID NO: 2058790 - DNA, 15 bp, Homo sapiens
ggggccccaggctac

SEQ ID NO: 2058791 - DNA, 15 bp, Homo sapiens
gggccccaggctact

SEQ ID NO: 2058792 - DNA, 15 bp, Homo sapiens
ggccccaggctactt

SEQ ID NO: 2058793 - DNA, 15 bp, Homo sapiens
gccccaggctacttc

SEQ ID NO: 2058794 - DNA, 15 bp, Homo sapiens
ccccaggctacttcc

SEQ ID NO: 2058795 - DNA, 15 bp, Homo sapiens
cccaggctacttccc

SEQ ID NO: 2058796 - DNA, 15 bp, Homo sapiens
ccaggctacttccca

SEQ ID NO: 2058797 - DNA, 15 bp, Homo sapiens
caggctacttcccac

SEQ ID NO: 2058798 - DNA, 15 bp, Homo sapiens
aggctacttcccacc

SEQ ID NO: 2058799 - DNA, 15 bp, Homo sapiens
ggctacttcccaccg

SEQ ID NO: 2058800 - DNA, 15 bp, Homo sapiens
gctacttcccaccgg

SEQ ID NO: 2058801 - DNA, 15 bp, Homo sapiens
ctacttcccaccggg

SEQ ID NO: 2058802 - DNA, 15 bp, Homo sapiens
tacttcccaccgggc

SEQ ID NO: 2058803 - DNA, 15 bp, Homo sapiens
acttcccaccgggcc

SEQ ID NO: 2058804 - DNA, 15 bp, Homo sapiens
cttcccaccgggcca

SEQ ID NO: 2058805 - DNA, 15 bp, Homo sapiens
ttcccaccgggccag

SEQ ID NO: 2058806 - DNA, 15 bp, Homo sapiens
tcccaccgggccagc

SEQ ID NO: 2058807 - DNA, 15 bp, Homo sapiens
cccaccgggccagca

SEQ ID NO: 2058808 - DNA, 15 bp, Homo sapiens
ccaccgggccagcag

SEQ ID NO: 2058809 - DNA, 15 bp, Homo sapiens
caccgggccagcagc

SEQ ID NO: 2058810 - DNA, 15 bp, Homo sapiens
accgggccagcagca

SEQ ID NO: 2058811 - DNA, 15 bp, Homo sapiens
ccgggccagcagcag

SEQ ID NO: 2058812 - DNA, 15 bp, Homo sapiens
cgggccagcagcagg

SEQ ID NO: 2058813 - DNA, 15 bp, Homo sapiens
gggccagcagcaggg

SEQ ID NO: 2058814 - DNA, 15 bp, Homo sapiens
ccagcagcagggccg

SEQ ID NO: 2058815 - DNA, 15 bp, Homo sapiens
cagcagcagggccga

SEQ ID NO: 2058816 - DNA, 15 bp, Homo sapiens
agcagcagggccgag

SEQ ID NO: 2058817 - DNA, 15 bp, Homo sapiens
gcagcagggccgagc

SEQ ID NO: 2058818 - DNA, 15 bp, Homo sapiens
cagcagggccgagcc

SEQ ID NO: 2058819 - DNA, 15 bp, Homo sapiens
agcagggccgagccg

SEQ ID NO: 2058820 - DNA, 15 bp, Homo sapiens
gcagggccgagccgc

SEQ ID NO: 2058821 - DNA, 15 bp, Homo sapiens
cagggccgagccgct

SEQ ID NO: 2058822 - DNA, 15 bp, Homo sapiens
agggccgagccgctg

SEQ ID NO: 2058823 - DNA, 15 bp, Homo sapiens
gggccgagccgctgc

SEQ ID NO: 2058824 - DNA, 15 bp, Homo sapiens
ggccgagccgctgcc

SEQ ID NO: 2058825 - DNA, 15 bp, Homo sapiens
gccgagccgctgccc

SEQ ID NO: 2058826 - DNA, 15 bp, Homo sapiens
ccgagccgctgccct

SEQ ID NO: 2058827 - DNA, 15 bp, Homo sapiens
cgagccgctgccctg

SEQ ID NO: 2058828 - DNA, 15 bp, Homo sapiens
gagccgctgccctgt

SEQ ID NO: 2058829 - DNA, 15 bp, Homo sapiens
agccgctgccctgtt

SEQ ID NO: 2058830 - DNA, 15 bp, Homo sapiens
gccgctgccctgttg

SEQ ID NO: 2058831 - DNA, 15 bp, Homo sapiens
ccgctgccctgttgg

SEQ ID NO: 2058832 - DNA, 15 bp, Homo sapiens
cgctgccctgttggc

SEQ ID NO: 2058833 - DNA, 15 bp, Homo sapiens
gctgccctgttggct

SEQ ID NO: 2058834 - DNA, 15 bp, Homo sapiens
ctgccctgttggctg

SEQ ID NO: 2058835 - DNA, 15 bp, Homo sapiens
tgccctgttggctga

SEQ ID NO: 2058836 - DNA, 15 bp, Homo sapiens
gccctgttggctgag

SEQ ID NO: 2058837 - DNA, 15 bp, Homo sapiens
ccctgttggctgagg

SEQ ID NO: 2058838 - DNA, 15 bp, Homo sapiens
cctgttggctgaggc

SEQ ID NO: 2058839 - DNA, 15 bp, Homo sapiens
ctgttggctgaggca

SEQ ID NO: 2058840 - DNA, 15 bp, Homo sapiens
tgttggctgaggcat

SEQ ID NO: 2058841 - DNA, 15 bp, Homo sapiens
gttggctgaggcatt

SEQ ID NO: 2058842 - DNA, 15 bp, Homo sapiens
ttggctgaggcattc

SEQ ID NO: 2058843 - DNA, 15 bp, Homo sapiens
tggctgaggcattcc

SEQ ID NO: 2058844 - DNA, 15 bp, Homo sapiens
ggctgaggcattccc

SEQ ID NO: 2058845 - DNA, 15 bp, Homo sapiens
gctgaggcattccct

SEQ ID NO: 2058846 - DNA, 15 bp, Homo sapiens
ctgaggcattccctg

SEQ ID NO: 2058847 - DNA, 15 bp, Homo sapiens
tgaggcattccctgc

SEQ ID NO: 2058848 - DNA, 15 bp, Homo sapiens
gaggcattccctgcc

SEQ ID NO: 2058849 - DNA, 15 bp, Homo sapiens
aggcattccctgccc

SEQ ID NO: 2058850 - DNA, 15 bp, Homo sapiens
ggcattccctgcccc

SEQ ID NO: 2058851 - DNA, 15 bp, Homo sapiens
gcattccctgccccc

SEQ ID NO: 2058852 - DNA, 15 bp, Homo sapiens
cattccctgccccca

SEQ ID NO: 2058853 - DNA, 15 bp, Homo sapiens
attccctgcccccac

SEQ ID NO: 2058854 - DNA, 15 bp, Homo sapiens
ttccctgcccccacc

SEQ ID NO: 2058855 - DNA, 15 bp, Homo sapiens
tccctgcccccaccc

SEQ ID NO: 2058856 - DNA, 15 bp, Homo sapiens
ccctgcccccacccc

SEQ ID NO: 2058857 - DNA, 15 bp, Homo sapiens
cctgcccccaccccc

SEQ ID NO: 2058858 - DNA, 15 bp, Homo sapiens
ctgcccccacccccc

SEQ ID NO: 2058859 - DNA, 15 bp, Homo sapiens
tgcccccacccccct

SEQ ID NO: 2058860 - DNA, 15 bp, Homo sapiens
gcccccacccccctc

SEQ ID NO: 2058861 - DNA, 15 bp, Homo sapiens
cccccacccccctcc

SEQ ID NO: 2058862 - DNA, 15 bp, Homo sapiens
ccccacccccctcct

SEQ ID NO: 2058863 - DNA, 15 bp, Homo sapiens
cccacccccctcctg

SEQ ID NO: 2058864 - DNA, 15 bp, Homo sapiens
ccacccccctcctgg

SEQ ID NO: 2058865 - DNA, 15 bp, Homo sapiens
cacccccctcctggc

SEQ ID NO: 2058866 - DNA, 15 bp, Homo sapiens
acccccctcctggcc

SEQ ID NO: 2058867 - DNA, 15 bp, Homo sapiens
cccccctcctggcct

SEQ ID NO: 2058868 - DNA, 15 bp, Homo sapiens
ccccctcctggcctt

SEQ ID NO: 2058869 - DNA, 15 bp, Homo sapiens
cccctcctggccttg

SEQ ID NO: 2058870 - DNA, 15 bp, Homo sapiens
ccctcctggccttga

SEQ ID NO: 2058871 - DNA, 15 bp, Homo sapiens
cctcctggccttgag

SEQ ID NO: 2058872 - DNA, 15 bp, Homo sapiens
ctcctggccttgagg

SEQ ID NO: 2058873 - DNA, 15 bp, Homo sapiens
tcctggccttgagga

SEQ ID NO: 2058874 - DNA, 15 bp, Homo sapiens
cctggccttgaggac

SEQ ID NO: 2058875 - DNA, 15 bp, Homo sapiens
ctggccttgaggacc

SEQ ID NO: 2058876 - DNA, 15 bp, Homo sapiens
tggccttgaggaccg

SEQ ID NO: 2058877 - DNA, 15 bp, Homo sapiens
ggccttgaggaccgc

SEQ ID NO: 2058878 - DNA, 15 bp, Homo sapiens
gccttgaggaccgca

SEQ ID NO: 2058879 - DNA, 15 bp, Homo sapiens
ccttgaggaccgcag

SEQ ID NO: 2058880 - DNA, 15 bp, Homo sapiens
cttgaggaccgcagt

SEQ ID NO: 2058881 - DNA, 15 bp, Homo sapiens
ttgaggaccgcagtg

SEQ ID NO: 2058882 - DNA, 15 bp, Homo sapiens
tgaggaccgcagtgt

SEQ ID NO: 2058883 - DNA, 15 bp, Homo sapiens
gaggaccgcagtgtg

SEQ ID NO: 2058884 - DNA, 15 bp, Homo sapiens
aggaccgcagtgtgt

SEQ ID NO: 2058885 - DNA, 15 bp, Homo sapiens
ggaccgcagtgtgta

SEQ ID NO: 2058886 - DNA, 15 bp, Homo sapiens
gaccgcagtgtgtac

SEQ ID NO: 2058887 - DNA, 15 bp, Homo sapiens
accgcagtgtgtacc

SEQ ID NO: 2058888 - DNA, 15 bp, Homo sapiens
ccgcagtgtgtaccc

SEQ ID NO: 2058889 - DNA, 15 bp, Homo sapiens
cgcagtgtgtaccct

SEQ ID NO: 2058890 - DNA, 15 bp, Homo sapiens
gcagtgtgtaccctt

SEQ ID NO: 2058891 - DNA, 15 bp, Homo sapiens
cagtgtgtacccttg

SEQ ID NO: 2058892 - DNA, 15 bp, Homo sapiens
agtgtgtacccttgt

SEQ ID NO: 2058893 - DNA, 15 bp, Homo sapiens
gtgtgtacccttgtt

SEQ ID NO: 2058894 - DNA, 15 bp, Homo sapiens
tgtgtacccttgttg

SEQ ID NO: 2058895 - DNA, 15 bp, Homo sapiens
gtgtacccttgttgg

SEQ ID NO: 2058896 - DNA, 15 bp, Homo sapiens
tgtacccttgttggt

SEQ ID NO: 2058897 - DNA, 15 bp, Homo sapiens
gtacccttgttggta

SEQ ID NO: 2058898 - DNA, 15 bp, Homo sapiens
tacccttgttggtag

SEQ ID NO: 2058899 - DNA, 15 bp, Homo sapiens
acccttgttggtagc

SEQ ID NO: 2058900 - DNA, 15 bp, Homo sapiens
cccttgttggtagcg

SEQ ID NO: 2058901 - DNA, 15 bp, Homo sapiens
ccttgttggtagcgg

SEQ ID NO: 2058902 - DNA, 15 bp, Homo sapiens
cttgttggtagcggc

SEQ ID NO: 2058903 - DNA, 15 bp, Homo sapiens
ttgttggtagcggca

SEQ ID NO: 2058904 - DNA, 15 bp, Homo sapiens
tgttggtagcggcag

SEQ ID NO: 2058905 - DNA, 15 bp, Homo sapiens
gttggtagcggcagc

SEQ ID NO: 2058906 - DNA, 15 bp, Homo sapiens
ttggtagcggcagca

SEQ ID NO: 2058907 - DNA, 15 bp, Homo sapiens
tggtagcggcagcag

SEQ ID NO: 2058908 - DNA, 15 bp, Homo sapiens
ggtagcggcagcagc

SEQ ID NO: 2058909 - DNA, 15 bp, Homo sapiens
gtagcggcagcagcc

SEQ ID NO: 2058910 - DNA, 15 bp, Homo sapiens
tagcggcagcagccc

SEQ ID NO: 2058911 - DNA, 15 bp, Homo sapiens
agcggcagcagcccg

SEQ ID NO: 2058912 - DNA, 15 bp, Homo sapiens
gcggcagcagcccgg

SEQ ID NO: 2058913 - DNA, 15 bp, Homo sapiens
cggcagcagcccggg

SEQ ID NO: 2058914 - DNA, 15 bp, Homo sapiens
ggcagcagcccggga

SEQ ID NO: 2058915 - DNA, 15 bp, Homo sapiens
gcagcagcccgggat

SEQ ID NO: 2058916 - DNA, 15 bp, Homo sapiens
cagcagcccgggatc

SEQ ID NO: 2058917 - DNA, 15 bp, Homo sapiens
agcagcccgggatcc

SEQ ID NO: 2058918 - DNA, 15 bp, Homo sapiens
gcagcccgggatccc

SEQ ID NO: 2058919 - DNA, 15 bp, Homo sapiens
cagcccgggatccct

SEQ ID NO: 2058920 - DNA, 15 bp, Homo sapiens
agcccgggatccctg

SEQ ID NO: 2058921 - DNA, 15 bp, Homo sapiens
gcccgggatccctgt

SEQ ID NO: 2058922 - DNA, 15 bp, Homo sapiens
cccgggatccctgtc

SEQ ID NO: 2058923 - DNA, 15 bp, Homo sapiens
ccgggatccctgtct

SEQ ID NO: 2058924 - DNA, 15 bp, Homo sapiens
cgggatccctgtctc

SEQ ID NO: 2058925 - DNA, 15 bp, Homo sapiens
gggatccctgtctcc

SEQ ID NO: 2058926 - DNA, 15 bp, Homo sapiens
ggatccctgtctccc

SEQ ID NO: 2058927 - DNA, 15 bp, Homo sapiens
gatccctgtctcccc

SEQ ID NO: 2058928 - DNA, 15 bp, Homo sapiens
atccctgtctcccct

SEQ ID NO: 2058929 - DNA, 15 bp, Homo sapiens
tccctgtctcccctg

SEQ ID NO: 2058930 - DNA, 15 bp, Homo sapiens
ccctgtctcccctgc

SEQ ID NO: 2058931 - DNA, 15 bp, Homo sapiens
cctgtctcccctgct

SEQ ID NO: 2058932 - DNA, 15 bp, Homo sapiens
ctgtctcccctgctc

SEQ ID NO: 2058933 - DNA, 15 bp, Homo sapiens
tgtctcccctgctca

SEQ ID NO: 2058934 - DNA, 15 bp, Homo sapiens
gtctcccctgctcag

SEQ ID NO: 2058935 - DNA, 15 bp, Homo sapiens
tctcccctgctcaga

SEQ ID NO: 2058936 - DNA, 15 bp, Homo sapiens
ctcccctgctcagag

SEQ ID NO: 2058937 - DNA, 15 bp, Homo sapiens
tcccctgctcagagc

SEQ ID NO: 2058938 - DNA, 15 bp, Homo sapiens
cccctgctcagagca

SEQ ID NO: 2058939 - DNA, 15 bp, Homo sapiens
ccctgctcagagcat

SEQ ID NO: 2058940 - DNA, 15 bp, Homo sapiens
cctgctcagagcatc

SEQ ID NO: 2058941 - DNA, 15 bp, Homo sapiens
ctgctcagagcatct

SEQ ID NO: 2058942 - DNA, 15 bp, Homo sapiens
tgctcagagcatctc

SEQ ID NO: 2058943 - DNA, 15 bp, Homo sapiens
gctcagagcatctct

SEQ ID NO: 2058944 - DNA, 15 bp, Homo sapiens
ctcagagcatctctg

SEQ ID NO: 2058945 - DNA, 15 bp, Homo sapiens
tcagagcatctctgt

SEQ ID NO: 2058946 - DNA, 15 bp, Homo sapiens
cagagcatctctgtc

SEQ ID NO: 2058947 - DNA, 15 bp, Homo sapiens
agagcatctctgtct

SEQ ID NO: 2058948 - DNA, 15 bp, Homo sapiens
gagcatctctgtctc

SEQ ID NO: 2058949 - DNA, 15 bp, Homo sapiens
agcatctctgtctcg

SEQ ID NO: 2058950 - DNA, 15 bp, Homo sapiens
gcatctctgtctcgc

SEQ ID NO: 2058951 - DNA, 15 bp, Homo sapiens
catctctgtctcgct

SEQ ID NO: 2058952 - DNA, 15 bp, Homo sapiens
atctctgtctcgctc

SEQ ID NO: 2058953 - DNA, 15 bp, Homo sapiens
tctctgtctcgctct

SEQ ID NO: 2058954 - DNA, 15 bp, Homo sapiens
ctctgtctcgctctt

SEQ ID NO: 2058955 - DNA, 15 bp, Homo sapiens
tctgtctcgctcttc

SEQ ID NO: 2058956 - DNA, 15 bp, Homo sapiens
ctgtctcgctcttct

SEQ ID NO: 2058957 - DNA, 15 bp, Homo sapiens
tgtctcgctcttctc

SEQ ID NO: 2058958 - DNA, 15 bp, Homo sapiens
gtctcgctcttctcc

SEQ ID NO: 2058959 - DNA, 15 bp, Homo sapiens
tctcgctcttctccc

SEQ ID NO: 2058960 - DNA, 15 bp, Homo sapiens
ctcgctcttctcccc

SEQ ID NO: 2058961 - DNA, 15 bp, Homo sapiens
tcgctcttctccccg

SEQ ID NO: 2058962 - DNA, 15 bp, Homo sapiens
cgctcttctccccgc

SEQ ID NO: 2058963 - DNA, 15 bp, Homo sapiens
gctcttctccccgct

SEQ ID NO: 2058964 - DNA, 15 bp, Homo sapiens
ctcttctccccgctt

SEQ ID NO: 2058965 - DNA, 15 bp, Homo sapiens
tcttctccccgcttc

SEQ ID NO: 2058966 - DNA, 15 bp, Homo sapiens
cttctccccgcttct

SEQ ID NO: 2058967 - DNA, 15 bp, Homo sapiens
ttctccccgcttctg

SEQ ID NO: 2058968 - DNA, 15 bp, Homo sapiens
tctccccgcttctga

SEQ ID NO: 2058969 - DNA, 15 bp, Homo sapiens
ctccccgcttctgag

SEQ ID NO: 2058970 - DNA, 15 bp, Homo sapiens
tccccgcttctgagc

SEQ ID NO: 2058971 - DNA, 15 bp, Homo sapiens
ccccgcttctgagct

SEQ ID NO: 2058972 - DNA, 15 bp, Homo sapiens
cccgcttctgagctt

SEQ ID NO: 2058973 - DNA, 15 bp, Homo sapiens
ccgcttctgagcttg

SEQ ID NO: 2058974 - DNA, 15 bp, Homo sapiens
cgcttctgagcttgg

SEQ ID NO: 2058975 - DNA, 15 bp, Homo sapiens
gcttctgagcttggc

SEQ ID NO: 2058976 - DNA, 15 bp, Homo sapiens
cttctgagcttggcc

SEQ ID NO: 2058977 - DNA, 15 bp, Homo sapiens
ttctgagcttggccc

SEQ ID NO: 2058978 - DNA, 15 bp, Homo sapiens
tctgagcttggccca

SEQ ID NO: 2058979 - DNA, 15 bp, Homo sapiens
ctgagcttggcccag

SEQ ID NO: 2058980 - DNA, 15 bp, Homo sapiens
tgagcttggcccagt

SEQ ID NO: 2058981 - DNA, 15 bp, Homo sapiens
gagcttggcccagtc

SEQ ID NO: 2058982 - DNA, 15 bp, Homo sapiens
agcttggcccagtcc

SEQ ID NO: 2058983 - DNA, 15 bp, Homo sapiens
gcttggcccagtccc

SEQ ID NO: 2058984 - DNA, 15 bp, Homo sapiens
cttggcccagtccct

SEQ ID NO: 2058985 - DNA, 15 bp, Homo sapiens
ttggcccagtccctg

SEQ ID NO: 2058986 - DNA, 15 bp, Homo sapiens
tggcccagtccctga

SEQ ID NO: 2058987 - DNA, 15 bp, Homo sapiens
ggcccagtccctgac

SEQ ID NO: 2058988 - DNA, 15 bp, Homo sapiens
gcccagtccctgacc

SEQ ID NO: 2058989 - DNA, 15 bp, Homo sapiens
cccagtccctgaccc

SEQ ID NO: 2058990 - DNA, 15 bp, Homo sapiens
ccagtccctgacccc

SEQ ID NO: 2058991 - DNA, 15 bp, Homo sapiens
cagtccctgaccccc

SEQ ID NO: 2058992 - DNA, 15 bp, Homo sapiens
agtccctgaccccct

SEQ ID NO: 2058993 - DNA, 15 bp, Homo sapiens
gtccctgaccccctc

SEQ ID NO: 2058994 - DNA, 15 bp, Homo sapiens
tccctgaccccctcg

SEQ ID NO: 2058995 - DNA, 15 bp, Homo sapiens
ccctgaccccctcgc

SEQ ID NO: 2058996 - DNA, 15 bp, Homo sapiens
cctgaccccctcgct

SEQ ID NO: 2058997 - DNA, 15 bp, Homo sapiens
ctgaccccctcgcta

SEQ ID NO: 2058998 - DNA, 15 bp, Homo sapiens
tgaccccctcgctag

SEQ ID NO: 2058999 - DNA, 15 bp, Homo sapiens
gaccccctcgctagc

SEQ ID NO: 2059000 - DNA, 15 bp, Homo sapiens
accccctcgctagct

SEQ ID NO: 2059001 - DNA, 15 bp, Homo sapiens
ccccctcgctagctg

SEQ ID NO: 2059002 - DNA, 15 bp, Homo sapiens
cccctcgctagctga

SEQ ID NO: 2059003 - DNA, 15 bp, Homo sapiens
ccctcgctagctgag

SEQ ID NO: 2059004 - DNA, 15 bp, Homo sapiens
cctcgctagctgaga

SEQ ID NO: 2059005 - DNA, 15 bp, Homo sapiens
ctcgctagctgagag

SEQ ID NO: 2059006 - DNA, 15 bp, Homo sapiens
tcgctagctgagaga

SEQ ID NO: 2059007 - DNA, 15 bp, Homo sapiens
cgctagctgagagag

SEQ ID NO: 2059008 - DNA, 15 bp, Homo sapiens
gctagctgagagagc

SEQ ID NO: 2059009 - DNA, 15 bp, Homo sapiens
ctagctgagagagct

SEQ ID NO: 2059010 - DNA, 15 bp, Homo sapiens
tagctgagagagctg

SEQ ID NO: 2059011 - DNA, 15 bp, Homo sapiens
agctgagagagctgc

SEQ ID NO: 2059012 - DNA, 15 bp, Homo sapiens
gctgagagagctgct

SEQ ID NO: 2059013 - DNA, 15 bp, Homo sapiens
ctgagagagctgctt

SEQ ID NO: 2059014 - DNA, 15 bp, Homo sapiens
tgagagagctgcttt

SEQ ID NO: 2059015 - DNA, 15 bp, Homo sapiens
gagagagctgctttc

SEQ ID NO: 2059016 - DNA, 15 bp, Homo sapiens
agagagctgctttcc

SEQ ID NO: 2059017 - DNA, 15 bp, Homo sapiens
gagagctgctttcct

SEQ ID NO: 2059018 - DNA, 15 bp, Homo sapiens
agagctgctttcctt

SEQ ID NO: 2059019 - DNA, 15 bp, Homo sapiens
gagctgctttccttc

SEQ ID NO: 2059020 - DNA, 15 bp, Homo sapiens
agctgctttccttcc

SEQ ID NO: 2059021 - DNA, 15 bp, Homo sapiens
gctgctttccttcct

SEQ ID NO: 2059022 - DNA, 15 bp, Homo sapiens
ctgctttccttcctc

SEQ ID NO: 2059023 - DNA, 15 bp, Homo sapiens
tgctttccttcctct

SEQ ID NO: 2059024 - DNA, 15 bp, Homo sapiens
gctttccttcctctc

SEQ ID NO: 2059025 - DNA, 15 bp, Homo sapiens
ctttccttcctctcc

SEQ ID NO: 2059026 - DNA, 15 bp, Homo sapiens
tttccttcctctcct

SEQ ID NO: 2059027 - DNA, 15 bp, Homo sapiens
ttccttcctctcctg

SEQ ID NO: 2059028 - DNA, 15 bp, Homo sapiens
tccttcctctcctgc

SEQ ID NO: 2059029 - DNA, 15 bp, Homo sapiens
ccttcctctcctgcc

SEQ ID NO: 2059030 - DNA, 15 bp, Homo sapiens
cttcctctcctgccc

SEQ ID NO: 2059031 - DNA, 15 bp, Homo sapiens
cctctcctgcccaca

SEQ ID NO: 2059032 - DNA, 15 bp, Homo sapiens
ctctcctgcccacag

SEQ ID NO: 2059033 - DNA, 15 bp, Homo sapiens
tctcctgcccacagc

SEQ ID NO: 2059034 - DNA, 15 bp, Homo sapiens
ctcctgcccacagct

SEQ ID NO: 2059035 - DNA, 15 bp, Homo sapiens
tcctgcccacagctc

SEQ ID NO: 2059036 - DNA, 15 bp, Homo sapiens
cctgcccacagctcc

SEQ ID NO: 2059037 - DNA, 15 bp, Homo sapiens
ctgcccacagctccc

SEQ ID NO: 2059038 - DNA, 15 bp, Homo sapiens
tgcccacagctccca

SEQ ID NO: 2059039 - DNA, 15 bp, Homo sapiens
gcccacagctcccag

SEQ ID NO: 2059040 - DNA, 15 bp, Homo sapiens
cccacagctcccagt

SEQ ID NO: 2059041 - DNA, 15 bp, Homo sapiens
ccacagctcccagtt

SEQ ID NO: 2059042 - DNA, 15 bp, Homo sapiens
cacagctcccagttc

SEQ ID NO: 2059043 - DNA, 15 bp, Homo sapiens
acagctcccagttcc

SEQ ID NO: 2059044 - DNA, 15 bp, Homo sapiens
cagctcccagttccc

SEQ ID NO: 2059045 - DNA, 15 bp, Homo sapiens
agctcccagttccca

SEQ ID NO: 2059046 - DNA, 15 bp, Homo sapiens
gctcccagttcccag

SEQ ID NO: 2059047 - DNA, 15 bp, Homo sapiens
ctcccagttcccagg

SEQ ID NO: 2059048 - DNA, 15 bp, Homo sapiens
tcccagttcccaggc

SEQ ID NO: 2059049 - DNA, 15 bp, Homo sapiens
cccagttcccaggct

SEQ ID NO: 2059050 - DNA, 15 bp, Homo sapiens
ccagttcccaggctg

SEQ ID NO: 2059051 - DNA, 15 bp, Homo sapiens
cagttcccaggctgg

SEQ ID NO: 2059052 - DNA, 15 bp, Homo sapiens
agttcccaggctggg

SEQ ID NO: 2059053 - DNA, 15 bp, Homo sapiens
gttcccaggctgggg

SEQ ID NO: 2059054 - DNA, 15 bp, Homo sapiens
ttcccaggctggggc

SEQ ID NO: 2059055 - DNA, 15 bp, Homo sapiens
tcccaggctggggcc

SEQ ID NO: 2059056 - DNA, 15 bp, Homo sapiens
cccaggctggggcca

SEQ ID NO: 2059057 - DNA, 15 bp, Homo sapiens
ccaggctggggccag

SEQ ID NO: 2059058 - DNA, 15 bp, Homo sapiens
caggctggggccagg

SEQ ID NO: 2059059 - DNA, 15 bp, Homo sapiens
aggctggggccaggg

SEQ ID NO: 2059060 - DNA, 15 bp, Homo sapiens
ggctggggccagggt

SEQ ID NO: 2059061 - DNA, 15 bp, Homo sapiens
gctggggccagggtg

SEQ ID NO: 2059062 - DNA, 15 bp, Homo sapiens
ctggggccagggtgg

SEQ ID NO: 2059063 - DNA, 15 bp, Homo sapiens
tggggccagggtggg

SEQ ID NO: 2059064 - DNA, 15 bp, Homo sapiens
ggggccagggtgggg

SEQ ID NO: 2059065 - DNA, 15 bp, Homo sapiens
gggccagggtgggga

SEQ ID NO: 2059066 - DNA, 15 bp, Homo sapiens
ggccagggtggggag

SEQ ID NO: 2059067 - DNA, 15 bp, Homo sapiens
gccagggtggggagc

SEQ ID NO: 2059068 - DNA, 15 bp, Homo sapiens
ccagggtggggagca

SEQ ID NO: 2059069 - DNA, 15 bp, Homo sapiens
cagggtggggagcag

SEQ ID NO: 2059070 - DNA, 15 bp, Homo sapiens
agggtggggagcagc

SEQ ID NO: 2059071 - DNA, 15 bp, Homo sapiens
gggtggggagcagct

SEQ ID NO: 2059072 - DNA, 15 bp, Homo sapiens
ggtggggagcagctt

SEQ ID NO: 2059073 - DNA, 15 bp, Homo sapiens
gtggggagcagcttt

SEQ ID NO: 2059074 - DNA, 15 bp, Homo sapiens
tggggagcagctttg

SEQ ID NO: 2059075 - DNA, 15 bp, Homo sapiens
ggggagcagctttgg

SEQ ID NO: 2059076 - DNA, 15 bp, Homo sapiens
gggagcagctttggg

SEQ ID NO: 2059077 - DNA, 15 bp, Homo sapiens
ggagcagctttggga

SEQ ID NO: 2059078 - DNA, 15 bp, Homo sapiens
gagcagctttgggat

SEQ ID NO: 2059079 - DNA, 15 bp, Homo sapiens
agcagctttgggatg

SEQ ID NO: 2059080 - DNA, 15 bp, Homo sapiens
gcagctttgggatgc

SEQ ID NO: 2059081 - DNA, 15 bp, Homo sapiens
cagctttgggatgct

SEQ ID NO: 2059082 - DNA, 15 bp, Homo sapiens
agctttgggatgcta

SEQ ID NO: 2059083 - DNA, 15 bp, Homo sapiens
gctttgggatgctaa

SEQ ID NO: 2059084 - DNA, 15 bp, Homo sapiens
ctttgggatgctaaa

SEQ ID NO: 2059085 - DNA, 15 bp, Homo sapiens
tttgggatgctaaac

SEQ ID NO: 2059086 - DNA, 15 bp, Homo sapiens
ttgggatgctaaaca

SEQ ID NO: 2059087 - DNA, 15 bp, Homo sapiens
tgggatgctaaacat

SEQ ID NO: 2059088 - DNA, 15 bp, Homo sapiens
gggatgctaaacatc

SEQ ID NO: 2059089 - DNA, 15 bp, Homo sapiens
ggatgctaaacatca

SEQ ID NO: 2059090 - DNA, 15 bp, Homo sapiens
gatgctaaacatcaa

SEQ ID NO: 2059091 - DNA, 15 bp, Homo sapiens
atgctaaacatcaaa

SEQ ID NO: 2059092 - DNA, 15 bp, Homo sapiens
tgctaaacatcaaaa

SEQ ID NO: 2059093 - DNA, 15 bp, Homo sapiens
gctaaacatcaaaaa

SEQ ID NO: 2059094 - DNA, 15 bp, Homo sapiens
ctaaacatcaaaaaa

SEQ ID NO: 2059095 - DNA, 15 bp, Homo sapiens
taaacatcaaaaaag

SEQ ID NO: 2059096 - DNA, 15 bp, Homo sapiens
aaacatcaaaaaagc

SEQ ID NO: 2059097 - DNA, 15 bp, Homo sapiens
aacatcaaaaaagcc

SEQ ID NO: 2059098 - DNA, 15 bp, Homo sapiens
acatcaaaaaagccc

SEQ ID NO: 2059099 - DNA, 15 bp, Homo sapiens
catcaaaaaagccca

SEQ ID NO: 2059100 - DNA, 15 bp, Homo sapiens
atcaaaaaagcccag

SEQ ID NO: 2059101 - DNA, 15 bp, Homo sapiens
tcaaaaaagcccagc

SEQ ID NO: 2059102 - DNA, 15 bp, Homo sapiens
caaaaaagcccagcc

SEQ ID NO: 2059103 - DNA, 15 bp, Homo sapiens
aaaaaagcccagcct

SEQ ID NO: 2059104 - DNA, 15 bp, Homo sapiens
aaaaagcccagcctg

SEQ ID NO: 2059105 - DNA, 15 bp, Homo sapiens
aaaagcccagcctgg

SEQ ID NO: 2059106 - DNA, 15 bp, Homo sapiens
aaagcccagcctggg

SEQ ID NO: 2059107 - DNA, 15 bp, Homo sapiens
aagcccagcctgggg

SEQ ID NO: 2059108 - DNA, 15 bp, Homo sapiens
agcccagcctggggt

SEQ ID NO: 2059109 - DNA, 15 bp, Homo sapiens
gcccagcctggggtt

SEQ ID NO: 2059110 - DNA, 15 bp, Homo sapiens
cccagcctggggttt

SEQ ID NO: 2059111 - DNA, 15 bp, Homo sapiens
ccagcctggggtttc

SEQ ID NO: 2059112 - DNA, 15 bp, Homo sapiens
cagcctggggtttca

SEQ ID NO: 2059113 - DNA, 15 bp, Homo sapiens
agcctggggtttcag

SEQ ID NO: 2059114 - DNA, 15 bp, Homo sapiens
gcctggggtttcagg

SEQ ID NO: 2059115 - DNA, 15 bp, Homo sapiens
cctggggtttcaggg

SEQ ID NO: 2059116 - DNA, 15 bp, Homo sapiens
ctggggtttcagggc

SEQ ID NO: 2059117 - DNA, 15 bp, Homo sapiens
tggggtttcagggcc

SEQ ID NO: 2059118 - DNA, 15 bp, Homo sapiens
ggggtttcagggccc

SEQ ID NO: 2059119 - DNA, 15 bp, Homo sapiens
gggtttcagggcccg

SEQ ID NO: 2059120 - DNA, 15 bp, Homo sapiens
ggtttcagggcccga

SEQ ID NO: 2059121 - DNA, 15 bp, Homo sapiens
gtttcagggcccgaa

SEQ ID NO: 2059122 - DNA, 15 bp, Homo sapiens
tttcagggcccgaag

SEQ ID NO: 2059123 - DNA, 15 bp, Homo sapiens
ttcagggcccgaagc

SEQ ID NO: 2059124 - DNA, 15 bp, Homo sapiens
tcagggcccgaagcc

SEQ ID NO: 2059125 - DNA, 15 bp, Homo sapiens
cagggcccgaagcca

SEQ ID NO: 2059126 - DNA, 15 bp, Homo sapiens
agggcccgaagccac

SEQ ID NO: 2059127 - DNA, 15 bp, Homo sapiens
gggcccgaagccact

SEQ ID NO: 2059128 - DNA, 15 bp, Homo sapiens
ggcccgaagccacta

SEQ ID NO: 2059129 - DNA, 15 bp, Homo sapiens
gcccgaagccactag

SEQ ID NO: 2059130 - DNA, 15 bp, Homo sapiens
cccgaagccactaga

SEQ ID NO: 2059131 - DNA, 15 bp, Homo sapiens
ccgaagccactagag

SEQ ID NO: 2059132 - DNA, 15 bp, Homo sapiens
cgaagccactagagc

SEQ ID NO: 2059133 - DNA, 15 bp, Homo sapiens
gaagccactagagcg

SEQ ID NO: 2059134 - DNA, 15 bp, Homo sapiens
aagccactagagcgg

SEQ ID NO: 2059135 - DNA, 15 bp, Homo sapiens
agccactagagcggc

SEQ ID NO: 2059136 - DNA, 15 bp, Homo sapiens
gccactagagcggct

SEQ ID NO: 2059137 - DNA, 15 bp, Homo sapiens
ccactagagcggctc

SEQ ID NO: 2059138 - DNA, 15 bp, Homo sapiens
cactagagcggctct

SEQ ID NO: 2059139 - DNA, 15 bp, Homo sapiens
actagagcggctctc

SEQ ID NO: 2059140 - DNA, 15 bp, Homo sapiens
ctagagcggctctcc

SEQ ID NO: 2059141 - DNA, 15 bp, Homo sapiens
tagagcggctctcca

SEQ ID NO: 2059142 - DNA, 15 bp, Homo sapiens
agagcggctctccaa

SEQ ID NO: 2059143 - DNA, 15 bp, Homo sapiens
gagcggctctccaag

SEQ ID NO: 2059144 - DNA, 15 bp, Homo sapiens
agcggctctccaagg

SEQ ID NO: 2059145 - DNA, 15 bp, Homo sapiens
gcggctctccaaggc

SEQ ID NO: 2059146 - DNA, 15 bp, Homo sapiens
cggctctccaaggct

SEQ ID NO: 2059147 - DNA, 15 bp, Homo sapiens
ggctctccaaggctc

SEQ ID NO: 2059148 - DNA, 15 bp, Homo sapiens
gctctccaaggctct

SEQ ID NO: 2059149 - DNA, 15 bp, Homo sapiens
ctctccaaggctctc

SEQ ID NO: 2059150 - DNA, 15 bp, Homo sapiens
tctccaaggctctcg

SEQ ID NO: 2059151 - DNA, 15 bp, Homo sapiens
ctccaaggctctcga

SEQ ID NO: 2059152 - DNA, 15 bp, Homo sapiens
tccaaggctctcgag

SEQ ID NO: 2059153 - DNA, 15 bp, Homo sapiens
ccaaggctctcgaga

SEQ ID NO: 2059154 - DNA, 15 bp, Homo sapiens
caaggctctcgagaa

SEQ ID NO: 2059155 - DNA, 15 bp, Homo sapiens
aaggctctcgagaaa

SEQ ID NO: 2059156 - DNA, 15 bp, Homo sapiens
aggctctcgagaaag

SEQ ID NO: 2059157 - DNA, 15 bp, Homo sapiens
ggctctcgagaaagt

SEQ ID NO: 2059158 - DNA, 15 bp, Homo sapiens
gctctcgagaaagtc

SEQ ID NO: 2059159 - DNA, 15 bp, Homo sapiens
ctctcgagaaagtcc

SEQ ID NO: 2059160 - DNA, 15 bp, Homo sapiens
tctcgagaaagtcct

SEQ ID NO: 2059161 - DNA, 15 bp, Homo sapiens
ctcgagaaagtccta

SEQ ID NO: 2059162 - DNA, 15 bp, Homo sapiens
tcgagaaagtcctag

SEQ ID NO: 2059163 - DNA, 15 bp, Homo sapiens
cgagaaagtcctagt

SEQ ID NO: 2059164 - DNA, 15 bp, Homo sapiens
gagaaagtcctagtg

SEQ ID NO: 2059165 - DNA, 15 bp, Homo sapiens
agaaagtcctagtgt

SEQ ID NO: 2059166 - DNA, 15 bp, Homo sapiens
gaaagtcctagtgtt

SEQ ID NO: 2059167 - DNA, 15 bp, Homo sapiens
aaagtcctagtgttt

SEQ ID NO: 2059168 - DNA, 15 bp, Homo sapiens
aagtcctagtgttta

SEQ ID NO: 2059169 - DNA, 15 bp, Homo sapiens
agtcctagtgtttac

SEQ ID NO: 2059170 - DNA, 15 bp, Homo sapiens
gtcctagtgtttaca

SEQ ID NO: 2059171 - DNA, 15 bp, Homo sapiens
tcctagtgtttacat

SEQ ID NO: 2059172 - DNA, 15 bp, Homo sapiens
cctagtgtttacatg

SEQ ID NO: 2059173 - DNA, 15 bp, Homo sapiens
ctagtgtttacatgg

SEQ ID NO: 2059174 - DNA, 15 bp, Homo sapiens
tagtgtttacatggc

SEQ ID NO: 2059175 - DNA, 15 bp, Homo sapiens
agtgtttacatggcg

SEQ ID NO: 2059176 - DNA, 15 bp, Homo sapiens
gtgtttacatggcga

SEQ ID NO: 2059177 - DNA, 15 bp, Homo sapiens
tgtttacatggcgaa

SEQ ID NO: 2059178 - DNA, 15 bp, Homo sapiens
gtttacatggcgaag

SEQ ID NO: 2059179 - DNA, 15 bp, Homo sapiens
tttacatggcgaagt

SEQ ID NO: 2059180 - DNA, 15 bp, Homo sapiens
ttacatggcgaagtg

SEQ ID NO: 2059181 - DNA, 15 bp, Homo sapiens
tacatggcgaagtgg

SEQ ID NO: 2059182 - DNA, 15 bp, Homo sapiens
acatggcgaagtggg

SEQ ID NO: 2059183 - DNA, 15 bp, Homo sapiens
catggcgaagtgggg

SEQ ID NO: 2059184 - DNA, 15 bp, Homo sapiens
atggcgaagtggggg

SEQ ID NO: 2059185 - DNA, 15 bp, Homo sapiens
tggcgaagtgggggt

SEQ ID NO: 2059186 - DNA, 15 bp, Homo sapiens
ggcgaagtgggggtg

SEQ ID NO: 2059187 - DNA, 15 bp, Homo sapiens
gcgaagtgggggtgg

SEQ ID NO: 2059188 - DNA, 15 bp, Homo sapiens
cgaagtgggggtggg

SEQ ID NO: 2059189 - DNA, 15 bp, Homo sapiens
gaagtgggggtgggg

SEQ ID NO: 2059190 - DNA, 15 bp, Homo sapiens
aagtgggggtgggga

SEQ ID NO: 2059191 - DNA, 15 bp, Homo sapiens
agtgggggtggggag

SEQ ID NO: 2059192 - DNA, 15 bp, Homo sapiens
tggggagaggaggaa

SEQ ID NO: 2059193 - DNA, 15 bp, Homo sapiens
ggggagaggaggaag

SEQ ID NO: 2059194 - DNA, 15 bp, Homo sapiens
gggagaggaggaagg

SEQ ID NO: 2059195 - DNA, 15 bp, Homo sapiens
ggagaggaggaaggg

SEQ ID NO: 2059196 - DNA, 15 bp, Homo sapiens
gagaggaggaagggg

SEQ ID NO: 2059197 - DNA, 15 bp, Homo sapiens
agaggaggaaggggg

SEQ ID NO: 2059198 - DNA, 15 bp, Homo sapiens
gaggaggaagggggg

SEQ ID NO: 2059199 - DNA, 15 bp, Homo sapiens
aggaggaaggggggt

SEQ ID NO: 2059200 - DNA, 15 bp, Homo sapiens
ggaggaaggggggtg

SEQ ID NO: 2059201 - DNA, 15 bp, Homo sapiens
gaggaaggggggtgc

SEQ ID NO: 2059202 - DNA, 15 bp, Homo sapiens
aggaaggggggtgca

SEQ ID NO: 2059203 - DNA, 15 bp, Homo sapiens
ggaaggggggtgcag

SEQ ID NO: 2059204 - DNA, 15 bp, Homo sapiens
gaaggggggtgcagt

SEQ ID NO: 2059205 - DNA, 15 bp, Homo sapiens
aaggggggtgcagtg

SEQ ID NO: 2059206 - DNA, 15 bp, Homo sapiens
aggggggtgcagtgt

SEQ ID NO: 2059207 - DNA, 15 bp, Homo sapiens
ggggggtgcagtgtg

SEQ ID NO: 2059208 - DNA, 15 bp, Homo sapiens
gggggtgcagtgtgc

SEQ ID NO: 2059209 - DNA, 15 bp, Homo sapiens
ggggtgcagtgtgca

SEQ ID NO: 2059210 - DNA, 15 bp, Homo sapiens
gggtgcagtgtgcaa

SEQ ID NO: 2059211 - DNA, 15 bp, Homo sapiens
ggtgcagtgtgcaaa

SEQ ID NO: 2059212 - DNA, 15 bp, Homo sapiens
gtgcagtgtgcaaaa

SEQ ID NO: 2059213 - DNA, 15 bp, Homo sapiens
tgcagtgtgcaaaat

SEQ ID NO: 2059214 - DNA, 15 bp, Homo sapiens
gcagtgtgcaaaatc

SEQ ID NO: 2059215 - DNA, 15 bp, Homo sapiens
cagtgtgcaaaatct

SEQ ID NO: 2059216 - DNA, 15 bp, Homo sapiens
agtgtgcaaaatctc

SEQ ID NO: 2059217 - DNA, 15 bp, Homo sapiens
gtgtgcaaaatctcc

SEQ ID NO: 2059218 - DNA, 15 bp, Homo sapiens
tgtgcaaaatctccc

SEQ ID NO: 2059219 - DNA, 15 bp, Homo sapiens
gtgcaaaatctcccc

SEQ ID NO: 2059220 - DNA, 15 bp, Homo sapiens
tgcaaaatctccccc

SEQ ID NO: 2059221 - DNA, 15 bp, Homo sapiens
gcaaaatctccccca

SEQ ID NO: 2059222 - DNA, 15 bp, Homo sapiens
caaaatctcccccac

SEQ ID NO: 2059223 - DNA, 15 bp, Homo sapiens
aaaatctcccccact

SEQ ID NO: 2059224 - DNA, 15 bp, Homo sapiens
aaatctcccccactc

SEQ ID NO: 2059225 - DNA, 15 bp, Homo sapiens
aatctcccccactcc

SEQ ID NO: 2059226 - DNA, 15 bp, Homo sapiens
atctcccccactcct

SEQ ID NO: 2059227 - DNA, 15 bp, Homo sapiens
tctcccccactcctc

SEQ ID NO: 2059228 - DNA, 15 bp, Homo sapiens
ctcccccactcctct

SEQ ID NO: 2059229 - DNA, 15 bp, Homo sapiens
tcccccactcctctc

SEQ ID NO: 2059230 - DNA, 15 bp, Homo sapiens
cccccactcctctca

SEQ ID NO: 2059231 - DNA, 15 bp, Homo sapiens
ccccactcctctcag

SEQ ID NO: 2059232 - DNA, 15 bp, Homo sapiens
cccactcctctcagc

SEQ ID NO: 2059233 - DNA, 15 bp, Homo sapiens
ccactcctctcagcc

SEQ ID NO: 2059234 - DNA, 15 bp, Homo sapiens
cactcctctcagccg

SEQ ID NO: 2059235 - DNA, 15 bp, Homo sapiens
actcctctcagccgt

SEQ ID NO: 2059236 - DNA, 15 bp, Homo sapiens
ctcctctcagccgtt

SEQ ID NO: 2059237 - DNA, 15 bp, Homo sapiens
tcctctcagccgttg

SEQ ID NO: 2059238 - DNA, 15 bp, Homo sapiens
cctctcagccgttgg

SEQ ID NO: 2059239 - DNA, 15 bp, Homo sapiens
ctctcagccgttggg

SEQ ID NO: 2059240 - DNA, 15 bp, Homo sapiens
tctcagccgttgggg

SEQ ID NO: 2059241 - DNA, 15 bp, Homo sapiens
ctcagccgttggggc

SEQ ID NO: 2059242 - DNA, 15 bp, Homo sapiens
tcagccgttggggcc

SEQ ID NO: 2059243 - DNA, 15 bp, Homo sapiens
cagccgttggggcct

SEQ ID NO: 2059244 - DNA, 15 bp, Homo sapiens
agccgttggggccta

SEQ ID NO: 2059245 - DNA, 15 bp, Homo sapiens
gccgttggggcctag

SEQ ID NO: 2059246 - DNA, 15 bp, Homo sapiens
ccgttggggcctagg

SEQ ID NO: 2059247 - DNA, 15 bp, Homo sapiens
cgttggggcctaggg

SEQ ID NO: 2059248 - DNA, 15 bp, Homo sapiens
gttggggcctaggga

SEQ ID NO: 2059249 - DNA, 15 bp, Homo sapiens
ttggggcctagggat

SEQ ID NO: 2059250 - DNA, 15 bp, Homo sapiens
tggggcctagggatg

SEQ ID NO: 2059251 - DNA, 15 bp, Homo sapiens
ggggcctagggatgg

SEQ ID NO: 2059252 - DNA, 15 bp, Homo sapiens
gggcctagggatggg

SEQ ID NO: 2059253 - DNA, 15 bp, Homo sapiens
ggcctagggatgggt

SEQ ID NO: 2059254 - DNA, 15 bp, Homo sapiens
gcctagggatgggta

SEQ ID NO: 2059255 - DNA, 15 bp, Homo sapiens
cctagggatgggtag

SEQ ID NO: 2059256 - DNA, 15 bp, Homo sapiens
ctagggatgggtagg

SEQ ID NO: 2059257 - DNA, 15 bp, Homo sapiens
tagggatgggtaggg

SEQ ID NO: 2059258 - DNA, 15 bp, Homo sapiens
agggatgggtagggt

SEQ ID NO: 2059259 - DNA, 15 bp, Homo sapiens
gggatgggtagggta

SEQ ID NO: 2059260 - DNA, 15 bp, Homo sapiens
ggatgggtagggtac

SEQ ID NO: 2059261 - DNA, 15 bp, Homo sapiens
gatgggtagggtact

SEQ ID NO: 2059262 - DNA, 15 bp, Homo sapiens
atgggtagggtactt

SEQ ID NO: 2059263 - DNA, 15 bp, Homo sapiens
tgggtagggtacttt

SEQ ID NO: 2059264 - DNA, 15 bp, Homo sapiens
gggtagggtactttg

SEQ ID NO: 2059265 - DNA, 15 bp, Homo sapiens
ggtagggtactttgg

SEQ ID NO: 2059266 - DNA, 15 bp, Homo sapiens
gtagggtactttggc

SEQ ID NO: 2059267 - DNA, 15 bp, Homo sapiens
tagggtactttggcg

SEQ ID NO: 2059268 - DNA, 15 bp, Homo sapiens
agggtactttggcgg

SEQ ID NO: 2059269 - DNA, 15 bp, Homo sapiens
gggtactttggcgga

SEQ ID NO: 2059270 - DNA, 15 bp, Homo sapiens
ggtactttggcggag

SEQ ID NO: 2059271 - DNA, 15 bp, Homo sapiens
gtactttggcggagg

SEQ ID NO: 2059272 - DNA, 15 bp, Homo sapiens
tactttggcggaggc

SEQ ID NO: 2059273 - DNA, 15 bp, Homo sapiens
actttggcggaggca

SEQ ID NO: 2059274 - DNA, 15 bp, Homo sapiens
ctttggcggaggcaa

SEQ ID NO: 2059275 - DNA, 15 bp, Homo sapiens
tttggcggaggcaaa

SEQ ID NO: 2059276 - DNA, 15 bp, Homo sapiens
ttggcggaggcaaag

SEQ ID NO: 2059277 - DNA, 15 bp, Homo sapiens
tggcggaggcaaagc

SEQ ID NO: 2059278 - DNA, 15 bp, Homo sapiens
ggcggaggcaaagct

SEQ ID NO: 2059279 - DNA, 15 bp, Homo sapiens
gcggaggcaaagctt

SEQ ID NO: 2059280 - DNA, 15 bp, Homo sapiens
cggaggcaaagcttc

SEQ ID NO: 2059281 - DNA, 15 bp, Homo sapiens
ggaggcaaagcttcg

SEQ ID NO: 2059282 - DNA, 15 bp, Homo sapiens
gaggcaaagcttcgc

SEQ ID NO: 2059283 - DNA, 15 bp, Homo sapiens
aggcaaagcttcgcg

SEQ ID NO: 2059284 - DNA, 15 bp, Homo sapiens
ggcaaagcttcgcgg

SEQ ID NO: 2059285 - DNA, 15 bp, Homo sapiens
gcaaagcttcgcggt

SEQ ID NO: 2059286 - DNA, 15 bp, Homo sapiens
caaagcttcgcggtg

SEQ ID NO: 2059287 - DNA, 15 bp, Homo sapiens
aaagcttcgcggtga

SEQ ID NO: 2059288 - DNA, 15 bp, Homo sapiens
aagcttcgcggtgat

SEQ ID NO: 2059289 - DNA, 15 bp, Homo sapiens
agcttcgcggtgatc

SEQ ID NO: 2059290 - DNA, 15 bp, Homo sapiens
gcttcgcggtgatct

SEQ ID NO: 2059291 - DNA, 15 bp, Homo sapiens
cttcgcggtgatctc

SEQ ID NO: 2059292 - DNA, 15 bp, Homo sapiens
ttcgcggtgatctcg

SEQ ID NO: 2059293 - DNA, 15 bp, Homo sapiens
tcgcggtgatctcgg

SEQ ID NO: 2059294 - DNA, 15 bp, Homo sapiens
cgcggtgatctcggg

SEQ ID NO: 2059295 - DNA, 15 bp, Homo sapiens
gcggtgatctcgggg

SEQ ID NO: 2059296 - DNA, 15 bp, Homo sapiens
cggtgatctcggggt

SEQ ID NO: 2059297 - DNA, 15 bp, Homo sapiens
ggtgatctcggggtg

SEQ ID NO: 2059298 - DNA, 15 bp, Homo sapiens
gtgatctcggggtga

SEQ ID NO: 2059299 - DNA, 15 bp, Homo sapiens
tgatctcggggtgaa

SEQ ID NO: 2059300 - DNA, 15 bp, Homo sapiens
gatctcggggtgaac

SEQ ID NO: 2059301 - DNA, 15 bp, Homo sapiens
atctcggggtgaacc

SEQ ID NO: 2059302 - DNA, 15 bp, Homo sapiens
tctcggggtgaaccg

SEQ ID NO: 2059303 - DNA, 15 bp, Homo sapiens
ctcggggtgaaccgt

SEQ ID NO: 2059304 - DNA, 15 bp, Homo sapiens
tcggggtgaaccgta

SEQ ID NO: 2059305 - DNA, 15 bp, Homo sapiens
cggggtgaaccgtac

SEQ ID NO: 2059306 - DNA, 15 bp, Homo sapiens
ggggtgaaccgtact

SEQ ID NO: 2059307 - DNA, 15 bp, Homo sapiens
gggtgaaccgtactt

SEQ ID NO: 2059308 - DNA, 15 bp, Homo sapiens
ggtgaaccgtacttg

SEQ ID NO: 2059309 - DNA, 15 bp, Homo sapiens
gtgaaccgtacttgc

SEQ ID NO: 2059310 - DNA, 15 bp, Homo sapiens
tgaaccgtacttgct

SEQ ID NO: 2059311 - DNA, 15 bp, Homo sapiens
gaaccgtacttgctc

SEQ ID NO: 2059312 - DNA, 15 bp, Homo sapiens
aaccgtacttgctcc

SEQ ID NO: 2059313 - DNA, 15 bp, Homo sapiens
accgtacttgctccc

SEQ ID NO: 2059314 - DNA, 15 bp, Homo sapiens
ccgtacttgctccca

SEQ ID NO: 2059315 - DNA, 15 bp, Homo sapiens
cgtacttgctcccaa

SEQ ID NO: 2059316 - DNA, 15 bp, Homo sapiens
gtacttgctcccaaa

SEQ ID NO: 2059317 - DNA, 15 bp, Homo sapiens
tacttgctcccaaac

SEQ ID NO: 2059318 - DNA, 15 bp, Homo sapiens
acttgctcccaaacc

SEQ ID NO: 2059319 - DNA, 15 bp, Homo sapiens
cttgctcccaaacct

SEQ ID NO: 2059320 - DNA, 15 bp, Homo sapiens
ttgctcccaaacctc

SEQ ID NO: 2059321 - DNA, 15 bp, Homo sapiens
tgctcccaaacctcg

SEQ ID NO: 2059322 - DNA, 15 bp, Homo sapiens
gctcccaaacctcgg

SEQ ID NO: 2059323 - DNA, 15 bp, Homo sapiens
ctcccaaacctcgga

SEQ ID NO: 2059324 - DNA, 15 bp, Homo sapiens
tcccaaacctcggaa

SEQ ID NO: 2059325 - DNA, 15 bp, Homo sapiens
cccaaacctcggaag

SEQ ID NO: 2059326 - DNA, 15 bp, Homo sapiens
ccaaacctcggaagc

SEQ ID NO: 2059327 - DNA, 15 bp, Homo sapiens
caaacctcggaagct

SEQ ID NO: 2059328 - DNA, 15 bp, Homo sapiens
aaacctcggaagctt

SEQ ID NO: 2059329 - DNA, 15 bp, Homo sapiens
aacctcggaagcttc

SEQ ID NO: 2059330 - DNA, 15 bp, Homo sapiens
acctcggaagcttcc

SEQ ID NO: 2059331 - DNA, 15 bp, Homo sapiens
cctcggaagcttcca

SEQ ID NO: 2059332 - DNA, 15 bp, Homo sapiens
ctcggaagcttccaa

SEQ ID NO: 2059333 - DNA, 15 bp, Homo sapiens
tcggaagcttccaag

SEQ ID NO: 2059334 - DNA, 15 bp, Homo sapiens
cggaagcttccaagc

SEQ ID NO: 2059335 - DNA, 15 bp, Homo sapiens
ggaagcttccaagca

SEQ ID NO: 2059336 - DNA, 15 bp, Homo sapiens
gaagcttccaagcac

SEQ ID NO: 2059337 - DNA, 15 bp, Homo sapiens
aagcttccaagcacc

SEQ ID NO: 2059338 - DNA, 15 bp, Homo sapiens
agcttccaagcacct

SEQ ID NO: 2059339 - DNA, 15 bp, Homo sapiens
gcttccaagcacctc

SEQ ID NO: 2059340 - DNA, 15 bp, Homo sapiens
cttccaagcacctca

SEQ ID NO: 2059341 - DNA, 15 bp, Homo sapiens
ttccaagcacctcag

SEQ ID NO: 2059342 - DNA, 15 bp, Homo sapiens
tccaagcacctcagc

SEQ ID NO: 2059343 - DNA, 15 bp, Homo sapiens
ccaagcacctcagcg

SEQ ID NO: 2059344 - DNA, 15 bp, Homo sapiens
caagcacctcagcgc

SEQ ID NO: 2059345 - DNA, 15 bp, Homo sapiens
aagcacctcagcgcc

SEQ ID NO: 2059346 - DNA, 15 bp, Homo sapiens
agcacctcagcgcca

SEQ ID NO: 2059347 - DNA, 15 bp, Homo sapiens
gcacctcagcgccag

SEQ ID NO: 2059348 - DNA, 15 bp, Homo sapiens
cacctcagcgccagg

SEQ ID NO: 2059349 - DNA, 15 bp, Homo sapiens
acctcagcgccaggg

SEQ ID NO: 2059350 - DNA, 15 bp, Homo sapiens
cctcagcgccagggg

SEQ ID NO: 2059351 - DNA, 15 bp, Homo sapiens
ctcagcgccaggggc

SEQ ID NO: 2059352 - DNA, 15 bp, Homo sapiens
tcagcgccaggggca

SEQ ID NO: 2059353 - DNA, 15 bp, Homo sapiens
cagcgccaggggcat

SEQ ID NO: 2059354 - DNA, 15 bp, Homo sapiens
agcgccaggggcatc

SEQ ID NO: 2059355 - DNA, 15 bp, Homo sapiens
gcgccaggggcatcc

SEQ ID NO: 2059356 - DNA, 15 bp, Homo sapiens
cgccaggggcatcct

SEQ ID NO: 2059357 - DNA, 15 bp, Homo sapiens
gccaggggcatcctc

SEQ ID NO: 2059358 - DNA, 15 bp, Homo sapiens
ccaggggcatcctca

SEQ ID NO: 2059359 - DNA, 15 bp, Homo sapiens
caggggcatcctcag

SEQ ID NO: 2059360 - DNA, 15 bp, Homo sapiens
aggggcatcctcaga

SEQ ID NO: 2059361 - DNA, 15 bp, Homo sapiens
ggggcatcctcagaa

SEQ ID NO: 2059362 - DNA, 15 bp, Homo sapiens
gggcatcctcagaat

SEQ ID NO: 2059363 - DNA, 15 bp, Homo sapiens
ggcatcctcagaatg

SEQ ID NO: 2059364 - DNA, 15 bp, Homo sapiens
gcatcctcagaatgc

SEQ ID NO: 2059365 - DNA, 15 bp, Homo sapiens
catcctcagaatgct

SEQ ID NO: 2059366 - DNA, 15 bp, Homo sapiens
atcctcagaatgctg

SEQ ID NO: 2059367 - DNA, 15 bp, Homo sapiens
tcctcagaatgctga

SEQ ID NO: 2059368 - DNA, 15 bp, Homo sapiens
cctcagaatgctgat

SEQ ID NO: 2059369 - DNA, 15 bp, Homo sapiens
agaatgctgatttct

SEQ ID NO: 2059370 - DNA, 15 bp, Homo sapiens
gaatgctgatttctc

SEQ ID NO: 2059371 - DNA, 15 bp, Homo sapiens
aatgctgatttctcc

SEQ ID NO: 2059372 - DNA, 15 bp, Homo sapiens
atgctgatttctccg

SEQ ID NO: 2059373 - DNA, 15 bp, Homo sapiens
tgctgatttctccga

SEQ ID NO: 2059374 - DNA, 15 bp, Homo sapiens
gctgatttctccgag

SEQ ID NO: 2059375 - DNA, 15 bp, Homo sapiens
ctgatttctccgaga

SEQ ID NO: 2059376 - DNA, 15 bp, Homo sapiens
tgatttctccgagag

SEQ ID NO: 2059377 - DNA, 15 bp, Homo sapiens
gatttctccgagagg

SEQ ID NO: 2059378 - DNA, 15 bp, Homo sapiens
atttctccgagaggg

SEQ ID NO: 2059379 - DNA, 15 bp, Homo sapiens
tttctccgagagggg

SEQ ID NO: 2059380 - DNA, 15 bp, Homo sapiens
ttctccgagagggga

SEQ ID NO: 2059381 - DNA, 15 bp, Homo sapiens
tctccgagaggggag

SEQ ID NO: 2059382 - DNA, 15 bp, Homo sapiens
ctccgagaggggagg

SEQ ID NO: 2059383 - DNA, 15 bp, Homo sapiens
tccgagaggggaggc

SEQ ID NO: 2059384 - DNA, 15 bp, Homo sapiens
ccgagaggggaggcc

SEQ ID NO: 2059385 - DNA, 15 bp, Homo sapiens
cgagaggggaggcca

SEQ ID NO: 2059386 - DNA, 15 bp, Homo sapiens
gagaggggaggccag

SEQ ID NO: 2059387 - DNA, 15 bp, Homo sapiens
agaggggaggccaga

SEQ ID NO: 2059388 - DNA, 15 bp, Homo sapiens
gaggggaggccagaa

SEQ ID NO: 2059389 - DNA, 15 bp, Homo sapiens
aggggaggccagaaa

SEQ ID NO: 2059390 - DNA, 15 bp, Homo sapiens
ggggaggccagaaat

SEQ ID NO: 2059391 - DNA, 15 bp, Homo sapiens
gggaggccagaaatt

SEQ ID NO: 2059392 - DNA, 15 bp, Homo sapiens
ggaggccagaaattg

SEQ ID NO: 2059393 - DNA, 15 bp, Homo sapiens
gaggccagaaattgg

SEQ ID NO: 2059394 - DNA, 15 bp, Homo sapiens
aggccagaaattggg

SEQ ID NO: 2059395 - DNA, 15 bp, Homo sapiens
ggccagaaattgggc

SEQ ID NO: 2059396 - DNA, 15 bp, Homo sapiens
gccagaaattgggca

SEQ ID NO: 2059397 - DNA, 15 bp, Homo sapiens
ccagaaattgggcac

SEQ ID NO: 2059398 - DNA, 15 bp, Homo sapiens
cagaaattgggcacg

SEQ ID NO: 2059399 - DNA, 15 bp, Homo sapiens
agaaattgggcacga

SEQ ID NO: 2059400 - DNA, 15 bp, Homo sapiens
gaaattgggcacgag

SEQ ID NO: 2059401 - DNA, 15 bp, Homo sapiens
aaattgggcacgagt

SEQ ID NO: 2059402 - DNA, 15 bp, Homo sapiens
aattgggcacgagtt

SEQ ID NO: 2059403 - DNA, 15 bp, Homo sapiens
attgggcacgagttg

SEQ ID NO: 2059404 - DNA, 15 bp, Homo sapiens
ttgggcacgagttga

SEQ ID NO: 2059405 - DNA, 15 bp, Homo sapiens
tgggcacgagttgat

SEQ ID NO: 2059406 - DNA, 15 bp, Homo sapiens
gggcacgagttgatg

SEQ ID NO: 2059407 - DNA, 15 bp, Homo sapiens
ggcacgagttgatgc

SEQ ID NO: 2059408 - DNA, 15 bp, Homo sapiens
gcacgagttgatgca

SEQ ID NO: 2059409 - DNA, 15 bp, Homo sapiens
cacgagttgatgcag

SEQ ID NO: 2059410 - DNA, 15 bp, Homo sapiens
acgagttgatgcagg

SEQ ID NO: 2059411 - DNA, 15 bp, Homo sapiens
cgagttgatgcagga

SEQ ID NO: 2059412 - DNA, 15 bp, Homo sapiens
gagttgatgcaggag

SEQ ID NO: 2059413 - DNA, 15 bp, Homo sapiens
agttgatgcaggaga

SEQ ID NO: 2059414 - DNA, 15 bp, Homo sapiens
gttgatgcaggagat

SEQ ID NO: 2059415 - DNA, 15 bp, Homo sapiens
ttgatgcaggagatt

SEQ ID NO: 2059416 - DNA, 15 bp, Homo sapiens
tgatgcaggagattc

SEQ ID NO: 2059417 - DNA, 15 bp, Homo sapiens
gatgcaggagattcc

SEQ ID NO: 2059418 - DNA, 15 bp, Homo sapiens
atgcaggagattccc

SEQ ID NO: 2059419 - DNA, 15 bp, Homo sapiens
tgcaggagattccca

SEQ ID NO: 2059420 - DNA, 15 bp, Homo sapiens
gcaggagattcccag

SEQ ID NO: 2059421 - DNA, 15 bp, Homo sapiens
caggagattcccaga

SEQ ID NO: 2059422 - DNA, 15 bp, Homo sapiens
aggagattcccagaa

SEQ ID NO: 2059423 - DNA, 15 bp, Homo sapiens
ggagattcccagaaa

SEQ ID NO: 2059424 - DNA, 15 bp, Homo sapiens
gagattcccagaaag

SEQ ID NO: 2059425 - DNA, 15 bp, Homo sapiens
agattcccagaaagg

SEQ ID NO: 2059426 - DNA, 15 bp, Homo sapiens
gattcccagaaagga

SEQ ID NO: 2059427 - DNA, 15 bp, Homo sapiens
attcccagaaaggag

SEQ ID NO: 2059428 - DNA, 15 bp, Homo sapiens
ttcccagaaaggagg

SEQ ID NO: 2059429 - DNA, 15 bp, Homo sapiens
tcccagaaaggagga

SEQ ID NO: 2059430 - DNA, 15 bp, Homo sapiens
cccagaaaggaggac

SEQ ID NO: 2059431 - DNA, 15 bp, Homo sapiens
ccagaaaggaggact

SEQ ID NO: 2059432 - DNA, 15 bp, Homo sapiens
cagaaaggaggactg

SEQ ID NO: 2059433 - DNA, 15 bp, Homo sapiens
agaaaggaggactgt

SEQ ID NO: 2059434 - DNA, 15 bp, Homo sapiens
gaaaggaggactgtc

SEQ ID NO: 2059435 - DNA, 15 bp, Homo sapiens
aaaggaggactgtcg

SEQ ID NO: 2059436 - DNA, 15 bp, Homo sapiens
aaggaggactgtcgg

SEQ ID NO: 2059437 - DNA, 15 bp, Homo sapiens
aggaggactgtcggc

SEQ ID NO: 2059438 - DNA, 15 bp, Homo sapiens
ggaggactgtcggct

SEQ ID NO: 2059439 - DNA, 15 bp, Homo sapiens
gaggactgtcggctt

SEQ ID NO: 2059440 - DNA, 15 bp, Homo sapiens
aggactgtcggcttt

SEQ ID NO: 2059441 - DNA, 15 bp, Homo sapiens
ggactgtcggctttc

SEQ ID NO: 2059442 - DNA, 15 bp, Homo sapiens
gactgtcggctttcc

SEQ ID NO: 2059443 - DNA, 15 bp, Homo sapiens
actgtcggctttcca

SEQ ID NO: 2059444 - DNA, 15 bp, Homo sapiens
ctgtcggctttccag

SEQ ID NO: 2059445 - DNA, 15 bp, Homo sapiens
tgtcggctttccaga

SEQ ID NO: 2059446 - DNA, 15 bp, Homo sapiens
gtcggctttccagaa

SEQ ID NO: 2059447 - DNA, 15 bp, Homo sapiens
tcggctttccagaag

SEQ ID NO: 2059448 - DNA, 15 bp, Homo sapiens
cggctttccagaagc

SEQ ID NO: 2059449 - DNA, 15 bp, Homo sapiens
ggctttccagaagcc

SEQ ID NO: 2059450 - DNA, 15 bp, Homo sapiens
gctttccagaagccg

SEQ ID NO: 2059451 - DNA, 15 bp, Homo sapiens
ctttccagaagccga

SEQ ID NO: 2059452 - DNA, 15 bp, Homo sapiens
tttccagaagccgac

SEQ ID NO: 2059453 - DNA, 15 bp, Homo sapiens
ttccagaagccgacg

SEQ ID NO: 2059454 - DNA, 15 bp, Homo sapiens
tccagaagccgacgg

SEQ ID NO: 2059455 - DNA, 15 bp, Homo sapiens
ccagaagccgacggt

SEQ ID NO: 2059456 - DNA, 15 bp, Homo sapiens
cagaagccgacggtg

SEQ ID NO: 2059457 - DNA, 15 bp, Homo sapiens
agaagccgacggtgc

SEQ ID NO: 2059458 - DNA, 15 bp, Homo sapiens
gaagccgacggtgct

SEQ ID NO: 2059459 - DNA, 15 bp, Homo sapiens
aagccgacggtgctg

SEQ ID NO: 2059460 - DNA, 15 bp, Homo sapiens
agccgacggtgctgt

SEQ ID NO: 2059461 - DNA, 15 bp, Homo sapiens
gccgacggtgctgta

SEQ ID NO: 2059462 - DNA, 15 bp, Homo sapiens
ccgacggtgctgtag

SEQ ID NO: 2059463 - DNA, 15 bp, Homo sapiens
cgacggtgctgtagg

SEQ ID NO: 2059464 - DNA, 15 bp, Homo sapiens
gacggtgctgtaggg

SEQ ID NO: 2059465 - DNA, 15 bp, Homo sapiens
acggtgctgtagggg

SEQ ID NO: 2059466 - DNA, 15 bp, Homo sapiens
cggtgctgtaggggc

SEQ ID NO: 2059467 - DNA, 15 bp, Homo sapiens
ggtgctgtaggggcg

SEQ ID NO: 2059468 - DNA, 15 bp, Homo sapiens
gtgctgtaggggcgg

SEQ ID NO: 2059469 - DNA, 15 bp, Homo sapiens
tgctgtaggggcgga

SEQ ID NO: 2059470 - DNA, 15 bp, Homo sapiens
gctgtaggggcggag

SEQ ID NO: 2059471 - DNA, 15 bp, Homo sapiens
ctgtaggggcggagg

SEQ ID NO: 2059472 - DNA, 15 bp, Homo sapiens
tgtaggggcggaggg

SEQ ID NO: 2059473 - DNA, 15 bp, Homo sapiens
gtaggggcggagggt

SEQ ID NO: 2059474 - DNA, 15 bp, Homo sapiens
taggggcggagggtg

SEQ ID NO: 2059475 - DNA, 15 bp, Homo sapiens
aggggcggagggtgt

SEQ ID NO: 2059476 - DNA, 15 bp, Homo sapiens
ggggcggagggtgtc

SEQ ID NO: 2059477 - DNA, 15 bp, Homo sapiens
ggcggagggtgtccc

SEQ ID NO: 2059478 - DNA, 15 bp, Homo sapiens
gcggagggtgtcccc

SEQ ID NO: 2059479 - DNA, 15 bp, Homo sapiens
cggagggtgtcccca

SEQ ID NO: 2059480 - DNA, 15 bp, Homo sapiens
ggagggtgtccccag

SEQ ID NO: 2059481 - DNA, 15 bp, Homo sapiens
gagggtgtccccagg

SEQ ID NO: 2059482 - DNA, 15 bp, Homo sapiens
agggtgtccccaggt

SEQ ID NO: 2059483 - DNA, 15 bp, Homo sapiens
gggtgtccccaggtt

SEQ ID NO: 2059484 - DNA, 15 bp, Homo sapiens
ggtgtccccaggttg

SEQ ID NO: 2059485 - DNA, 15 bp, Homo sapiens
gtgtccccaggttgc

SEQ ID NO: 2059486 - DNA, 15 bp, Homo sapiens
tgtccccaggttgcg

SEQ ID NO: 2059487 - DNA, 15 bp, Homo sapiens
gtccccaggttgcgg

SEQ ID NO: 2059488 - DNA, 15 bp, Homo sapiens
tccccaggttgcgga

SEQ ID NO: 2059489 - DNA, 15 bp, Homo sapiens
ccccaggttgcggaa

SEQ ID NO: 2059490 - DNA, 15 bp, Homo sapiens
cccaggttgcggaac

SEQ ID NO: 2059491 - DNA, 15 bp, Homo sapiens
ccaggttgcggaacc

SEQ ID NO: 2059492 - DNA, 15 bp, Homo sapiens
caggttgcggaaccc

SEQ ID NO: 2059493 - DNA, 15 bp, Homo sapiens
aggttgcggaaccct

SEQ ID NO: 2059494 - DNA, 15 bp, Homo sapiens
ggttgcggaaccctc

SEQ ID NO: 2059495 - DNA, 15 bp, Homo sapiens
gttgcggaaccctct

SEQ ID NO: 2059496 - DNA, 15 bp, Homo sapiens
ttgcggaaccctctt

SEQ ID NO: 2059497 - DNA, 15 bp, Homo sapiens
tgcggaaccctcttg

SEQ ID NO: 2059498 - DNA, 15 bp, Homo sapiens
gcggaaccctcttgc

SEQ ID NO: 2059499 - DNA, 15 bp, Homo sapiens
cggaaccctcttgca

SEQ ID NO: 2059500 - DNA, 15 bp, Homo sapiens
ggaaccctcttgcac

SEQ ID NO: 2059501 - DNA, 15 bp, Homo sapiens
gaaccctcttgcact

SEQ ID NO: 2059502 - DNA, 15 bp, Homo sapiens
aaccctcttgcactg

SEQ ID NO: 2059503 - DNA, 15 bp, Homo sapiens
accctcttgcactgc

SEQ ID NO: 2059504 - DNA, 15 bp, Homo sapiens
ccctcttgcactgct

SEQ ID NO: 2059505 - DNA, 15 bp, Homo sapiens
cctcttgcactgctc

SEQ ID NO: 2059506 - DNA, 15 bp, Homo sapiens
ctcttgcactgctcc

SEQ ID NO: 2059507 - DNA, 15 bp, Homo sapiens
tcttgcactgctccc

SEQ ID NO: 2059508 - DNA, 15 bp, Homo sapiens
cttgcactgctccca

SEQ ID NO: 2059509 - DNA, 15 bp, Homo sapiens
ttgcactgctcccag

SEQ ID NO: 2059510 - DNA, 15 bp, Homo sapiens
tgcactgctcccagc

SEQ ID NO: 2059511 - DNA, 15 bp, Homo sapiens
gcactgctcccagcg

SEQ ID NO: 2059512 - DNA, 15 bp, Homo sapiens
cactgctcccagcgc

SEQ ID NO: 2059513 - DNA, 15 bp, Homo sapiens
actgctcccagcgcg

SEQ ID NO: 2059514 - DNA, 15 bp, Homo sapiens
ctgctcccagcgcgc

SEQ ID NO: 2059515 - DNA, 15 bp, Homo sapiens
tgctcccagcgcgca

SEQ ID NO: 2059516 - DNA, 15 bp, Homo sapiens
gctcccagcgcgcac

SEQ ID NO: 2059517 - DNA, 15 bp, Homo sapiens
ctcccagcgcgcacc

SEQ ID NO: 2059518 - DNA, 15 bp, Homo sapiens
tcccagcgcgcacct

SEQ ID NO: 2059519 - DNA, 15 bp, Homo sapiens
cccagcgcgcaccta

SEQ ID NO: 2059520 - DNA, 15 bp, Homo sapiens
ccagcgcgcacctat

SEQ ID NO: 2059521 - DNA, 15 bp, Homo sapiens
cagcgcgcacctatt

SEQ ID NO: 2059522 - DNA, 15 bp, Homo sapiens
agcgcgcacctattt

SEQ ID NO: 2059523 - DNA, 15 bp, Homo sapiens
gcgcgcacctatttc

SEQ ID NO: 2059524 - DNA, 15 bp, Homo sapiens
cgcgcacctatttcc

SEQ ID NO: 2059525 - DNA, 15 bp, Homo sapiens
gcgcacctatttccc

SEQ ID NO: 2059526 - DNA, 15 bp, Homo sapiens
cgcacctatttccct

SEQ ID NO: 2059527 - DNA, 15 bp, Homo sapiens
gcacctatttcccta

SEQ ID NO: 2059528 - DNA, 15 bp, Homo sapiens
cacctatttccctaa

SEQ ID NO: 2059529 - DNA, 15 bp, Homo sapiens
acctatttccctaat

SEQ ID NO: 2059530 - DNA, 15 bp, Homo sapiens
cctatttccctaatg

SEQ ID NO: 2059531 - DNA, 15 bp, Homo sapiens
ctatttccctaatga

SEQ ID NO: 2059532 - DNA, 15 bp, Homo sapiens
tatttccctaatgaa

SEQ ID NO: 2059533 - DNA, 15 bp, Homo sapiens
atttccctaatgaaa

SEQ ID NO: 2059534 - DNA, 15 bp, Homo sapiens
tttccctaatgaaac

SEQ ID NO: 2059535 - DNA, 15 bp, Homo sapiens
ttccctaatgaaacg

SEQ ID NO: 2059536 - DNA, 15 bp, Homo sapiens
tccctaatgaaacgc

SEQ ID NO: 2059537 - DNA, 15 bp, Homo sapiens
ccctaatgaaacgct

SEQ ID NO: 2059538 - DNA, 15 bp, Homo sapiens
cctaatgaaacgctt

SEQ ID NO: 2059539 - DNA, 15 bp, Homo sapiens
ctaatgaaacgcttc

SEQ ID NO: 2059540 - DNA, 15 bp, Homo sapiens
taatgaaacgcttca

SEQ ID NO: 2059541 - DNA, 15 bp, Homo sapiens
aatgaaacgcttcag

SEQ ID NO: 2059542 - DNA, 15 bp, Homo sapiens
atgaaacgcttcaga

SEQ ID NO: 2059543 - DNA, 15 bp, Homo sapiens
tgaaacgcttcagat

SEQ ID NO: 2059544 - DNA, 15 bp, Homo sapiens
gaaacgcttcagatt

SEQ ID NO: 2059545 - DNA, 15 bp, Homo sapiens
aaacgcttcagattg

SEQ ID NO: 2059546 - DNA, 15 bp, Homo sapiens
aacgcttcagattgc

SEQ ID NO: 2059547 - DNA, 15 bp, Homo sapiens
acgcttcagattgcg

SEQ ID NO: 2059548 - DNA, 15 bp, Homo sapiens
cgcttcagattgcgt

SEQ ID NO: 2059549 - DNA, 15 bp, Homo sapiens
gcttcagattgcgtt

SEQ ID NO: 2059550 - DNA, 15 bp, Homo sapiens
cttcagattgcgttc

SEQ ID NO: 2059551 - DNA, 15 bp, Homo sapiens
ttcagattgcgttct

SEQ ID NO: 2059552 - DNA, 15 bp, Homo sapiens
tcagattgcgttcta

SEQ ID NO: 2059553 - DNA, 15 bp, Homo sapiens
cagattgcgttctag

SEQ ID NO: 2059554 - DNA, 15 bp, Homo sapiens
agattgcgttctagg

SEQ ID NO: 2059555 - DNA, 15 bp, Homo sapiens
gattgcgttctaggt

SEQ ID NO: 2059556 - DNA, 15 bp, Homo sapiens
attgcgttctaggtc

SEQ ID NO: 2059557 - DNA, 15 bp, Homo sapiens
ttgcgttctaggtct

SEQ ID NO: 2059558 - DNA, 15 bp, Homo sapiens
tgcgttctaggtctc

SEQ ID NO: 2059559 - DNA, 15 bp, Homo sapiens
gcgttctaggtctct

SEQ ID NO: 2059560 - DNA, 15 bp, Homo sapiens
cgttctaggtctctt

SEQ ID NO: 2059561 - DNA, 15 bp, Homo sapiens
gttctaggtctcttc

SEQ ID NO: 2059562 - DNA, 15 bp, Homo sapiens
ttctaggtctcttcc

SEQ ID NO: 2059563 - DNA, 15 bp, Homo sapiens
tctaggtctcttccc

SEQ ID NO: 2059564 - DNA, 15 bp, Homo sapiens
ctaggtctcttcccg

SEQ ID NO: 2059565 - DNA, 15 bp, Homo sapiens
taggtctcttcccgc

SEQ ID NO: 2059566 - DNA, 15 bp, Homo sapiens
aggtctcttcccgca

SEQ ID NO: 2059567 - DNA, 15 bp, Homo sapiens
ggtctcttcccgcag

SEQ ID NO: 2059568 - DNA, 15 bp, Homo sapiens
gtctcttcccgcagc

SEQ ID NO: 2059569 - DNA, 15 bp, Homo sapiens
tctcttcccgcagct

SEQ ID NO: 2059570 - DNA, 15 bp, Homo sapiens
ctcttcccgcagctg

SEQ ID NO: 2059571 - DNA, 15 bp, Homo sapiens
tcttcccgcagctgc

SEQ ID NO: 2059572 - DNA, 15 bp, Homo sapiens
cttcccgcagctgcg

SEQ ID NO: 2059573 - DNA, 15 bp, Homo sapiens
ttcccgcagctgcga

SEQ ID NO: 2059574 - DNA, 15 bp, Homo sapiens
tcccgcagctgcgac

SEQ ID NO: 2059575 - DNA, 15 bp, Homo sapiens
cccgcagctgcgaca

SEQ ID NO: 2059576 - DNA, 15 bp, Homo sapiens
ccgcagctgcgacaa

SEQ ID NO: 2059577 - DNA, 15 bp, Homo sapiens
cgcagctgcgacaat

SEQ ID NO: 2059578 - DNA, 15 bp, Homo sapiens
gcagctgcgacaatt

SEQ ID NO: 2059579 - DNA, 15 bp, Homo sapiens
cagctgcgacaattc

SEQ ID NO: 2059580 - DNA, 15 bp, Homo sapiens
agctgcgacaattcc

SEQ ID NO: 2059581 - DNA, 15 bp, Homo sapiens
gctgcgacaattccc

SEQ ID NO: 2059582 - DNA, 15 bp, Homo sapiens
ctgcgacaattcccc

SEQ ID NO: 2059583 - DNA, 15 bp, Homo sapiens
tgcgacaattccccc

SEQ ID NO: 2059584 - DNA, 15 bp, Homo sapiens
gcgacaattccccca

SEQ ID NO: 2059585 - DNA, 15 bp, Homo sapiens
cgacaattcccccag

SEQ ID NO: 2059586 - DNA, 15 bp, Homo sapiens
gacaattcccccagc

SEQ ID NO: 2059587 - DNA, 15 bp, Homo sapiens
acaattcccccagcc

SEQ ID NO: 2059588 - DNA, 15 bp, Homo sapiens
caattcccccagccg

SEQ ID NO: 2059589 - DNA, 15 bp, Homo sapiens
aattcccccagccgg

SEQ ID NO: 2059590 - DNA, 15 bp, Homo sapiens
attcccccagccggg

SEQ ID NO: 2059591 - DNA, 15 bp, Homo sapiens
ttcccccagccggga

SEQ ID NO: 2059592 - DNA, 15 bp, Homo sapiens
tcccccagccgggag

SEQ ID NO: 2059593 - DNA, 15 bp, Homo sapiens
cccccagccgggagc

SEQ ID NO: 2059594 - DNA, 15 bp, Homo sapiens
ccccagccgggagcg

SEQ ID NO: 2059595 - DNA, 15 bp, Homo sapiens
cccagccgggagcgg

SEQ ID NO: 2059596 - DNA, 15 bp, Homo sapiens
ccagccgggagcggg

SEQ ID NO: 2059597 - DNA, 15 bp, Homo sapiens
cagccgggagcggga

SEQ ID NO: 2059598 - DNA, 15 bp, Homo sapiens
agccgggagcgggag

SEQ ID NO: 2059599 - DNA, 15 bp, Homo sapiens
gccgggagcgggagc

SEQ ID NO: 2059600 - DNA, 15 bp, Homo sapiens
ccgggagcgggagcg

SEQ ID NO: 2059601 - DNA, 15 bp, Homo sapiens
cgggagcgggagcgg

SEQ ID NO: 2059602 - DNA, 15 bp, Homo sapiens
gggagcgggagcgga

SEQ ID NO: 2059603 - DNA, 15 bp, Homo sapiens
ggagcgggagcggat

SEQ ID NO: 2059604 - DNA, 15 bp, Homo sapiens
gagcgggagcggatg

SEQ ID NO: 2059605 - DNA, 15 bp, Homo sapiens
agcgggagcggatgg

SEQ ID NO: 2059606 - DNA, 15 bp, Homo sapiens
gcgggagcggatgga

SEQ ID NO: 2059607 - DNA, 15 bp, Homo sapiens
cgggagcggatggag

SEQ ID NO: 2059608 - DNA, 15 bp, Homo sapiens
gggagcggatggagc

SEQ ID NO: 2059609 - DNA, 15 bp, Homo sapiens
ggagcggatggagcc

SEQ ID NO: 2059610 - DNA, 15 bp, Homo sapiens
gagcggatggagcca

SEQ ID NO: 2059611 - DNA, 15 bp, Homo sapiens
agcggatggagccag

SEQ ID NO: 2059612 - DNA, 15 bp, Homo sapiens
gcggatggagccagc

SEQ ID NO: 2059613 - DNA, 15 bp, Homo sapiens
cggatggagccagcg

SEQ ID NO: 2059614 - DNA, 15 bp, Homo sapiens
ggatggagccagcgt

SEQ ID NO: 2059615 - DNA, 15 bp, Homo sapiens
gatggagccagcgta

SEQ ID NO: 2059616 - DNA, 15 bp, Homo sapiens
atggagccagcgtaa

SEQ ID NO: 2059617 - DNA, 15 bp, Homo sapiens
tggagccagcgtaat

SEQ ID NO: 2059618 - DNA, 15 bp, Homo sapiens
ggagccagcgtaatt

SEQ ID NO: 2059619 - DNA, 15 bp, Homo sapiens
gagccagcgtaattg

SEQ ID NO: 2059620 - DNA, 15 bp, Homo sapiens
agccagcgtaattga

SEQ ID NO: 2059621 - DNA, 15 bp, Homo sapiens
gccagcgtaattgat

SEQ ID NO: 2059622 - DNA, 15 bp, Homo sapiens
ccagcgtaattgatg

SEQ ID NO: 2059623 - DNA, 15 bp, Homo sapiens
cagcgtaattgatgg

SEQ ID NO: 2059624 - DNA, 15 bp, Homo sapiens
agcgtaattgatggc

SEQ ID NO: 2059625 - DNA, 15 bp, Homo sapiens
gcgtaattgatggca

SEQ ID NO: 2059626 - DNA, 15 bp, Homo sapiens
cgtaattgatggcaa

SEQ ID NO: 2059627 - DNA, 15 bp, Homo sapiens
gtaattgatggcaag

SEQ ID NO: 2059628 - DNA, 15 bp, Homo sapiens
taattgatggcaaga

SEQ ID NO: 2059629 - DNA, 15 bp, Homo sapiens
aattgatggcaagaa

SEQ ID NO: 2059630 - DNA, 15 bp, Homo sapiens
attgatggcaagaaa

SEQ ID NO: 2059631 - DNA, 15 bp, Homo sapiens
ttgatggcaagaaag

SEQ ID NO: 2059632 - DNA, 15 bp, Homo sapiens
tgatggcaagaaaga

SEQ ID NO: 2059633 - DNA, 15 bp, Homo sapiens
gatggcaagaaagag

SEQ ID NO: 2059634 - DNA, 15 bp, Homo sapiens
atggcaagaaagagg

SEQ ID NO: 2059635 - DNA, 15 bp, Homo sapiens
tggcaagaaagaggc

SEQ ID NO: 2059636 - DNA, 15 bp, Homo sapiens
ggcaagaaagaggct

SEQ ID NO: 2059637 - DNA, 15 bp, Homo sapiens
gcaagaaagaggctg

SEQ ID NO: 2059638 - DNA, 15 bp, Homo sapiens
caagaaagaggctga

SEQ ID NO: 2059639 - DNA, 15 bp, Homo sapiens
aagaaagaggctgag

SEQ ID NO: 2059640 - DNA, 15 bp, Homo sapiens
agaaagaggctgagg

SEQ ID NO: 2059641 - DNA, 15 bp, Homo sapiens
gaaagaggctgaggt

SEQ ID NO: 2059642 - DNA, 15 bp, Homo sapiens
aaagaggctgaggtc

SEQ ID NO: 2059643 - DNA, 15 bp, Homo sapiens
aagaggctgaggtcc

SEQ ID NO: 2059644 - DNA, 15 bp, Homo sapiens
agaggctgaggtcct

SEQ ID NO: 2059645 - DNA, 15 bp, Homo sapiens
gaggctgaggtcctg

SEQ ID NO: 2059646 - DNA, 15 bp, Homo sapiens
aggctgaggtcctgt

SEQ ID NO: 2059647 - DNA, 15 bp, Homo sapiens
ggctgaggtcctgtt

SEQ ID NO: 2059648 - DNA, 15 bp, Homo sapiens
gctgaggtcctgttt

SEQ ID NO: 2059649 - DNA, 15 bp, Homo sapiens
ctgaggtcctgtttg

SEQ ID NO: 2059650 - DNA, 15 bp, Homo sapiens
tgaggtcctgtttgt

SEQ ID NO: 2059651 - DNA, 15 bp, Homo sapiens
gaggtcctgtttgtc

SEQ ID NO: 2059652 - DNA, 15 bp, Homo sapiens
aggtcctgtttgtct

SEQ ID NO: 2059653 - DNA, 15 bp, Homo sapiens
ggtcctgtttgtctc

SEQ ID NO: 2059654 - DNA, 15 bp, Homo sapiens
gtcctgtttgtctcg

SEQ ID NO: 2059655 - DNA, 15 bp, Homo sapiens
tcctgtttgtctcgg

SEQ ID NO: 2059656 - DNA, 15 bp, Homo sapiens
cctgtttgtctcggt

SEQ ID NO: 2059657 - DNA, 15 bp, Homo sapiens
ctgtttgtctcggtc

SEQ ID NO: 2059658 - DNA, 15 bp, Homo sapiens
tgtttgtctcggtcc

SEQ ID NO: 2059659 - DNA, 15 bp, Homo sapiens
gtttgtctcggtccg

SEQ ID NO: 2059660 - DNA, 15 bp, Homo sapiens
tttgtctcggtccgc

SEQ ID NO: 2059661 - DNA, 15 bp, Homo sapiens
ttgtctcggtccgca

SEQ ID NO: 2059662 - DNA, 15 bp, Homo sapiens
tgtctcggtccgcaa

SEQ ID NO: 2059663 - DNA, 15 bp, Homo sapiens
gtctcggtccgcaaa

SEQ ID NO: 2059664 - DNA, 15 bp, Homo sapiens
tctcggtccgcaaac

SEQ ID NO: 2059665 - DNA, 15 bp, Homo sapiens
ctcggtccgcaaacc

SEQ ID NO: 2059666 - DNA, 15 bp, Homo sapiens
tcggtccgcaaaccc

SEQ ID NO: 2059667 - DNA, 15 bp, Homo sapiens
cggtccgcaaacccg

SEQ ID NO: 2059668 - DNA, 15 bp, Homo sapiens
ggtccgcaaacccga

SEQ ID NO: 2059669 - DNA, 15 bp, Homo sapiens
gtccgcaaacccgat

SEQ ID NO: 2059670 - DNA, 15 bp, Homo sapiens
tccgcaaacccgatt

SEQ ID NO: 2059671 - DNA, 15 bp, Homo sapiens
ccgcaaacccgattg

SEQ ID NO: 2059672 - DNA, 15 bp, Homo sapiens
cgcaaacccgattga

SEQ ID NO: 2059673 - DNA, 15 bp, Homo sapiens
gcaaacccgattgag

SEQ ID NO: 2059674 - DNA, 15 bp, Homo sapiens
caaacccgattgagt

SEQ ID NO: 2059675 - DNA, 15 bp, Homo sapiens
aaacccgattgagtt

SEQ ID NO: 2059676 - DNA, 15 bp, Homo sapiens
aacccgattgagttc

SEQ ID NO: 2059677 - DNA, 15 bp, Homo sapiens
acccgattgagttca

SEQ ID NO: 2059678 - DNA, 15 bp, Homo sapiens
cccgattgagttcac

SEQ ID NO: 2059679 - DNA, 15 bp, Homo sapiens
ccgattgagttcacc

SEQ ID NO: 2059680 - DNA, 15 bp, Homo sapiens
cgattgagttcacct

SEQ ID NO: 2059681 - DNA, 15 bp, Homo sapiens
gattgagttcacctt

SEQ ID NO: 2059682 - DNA, 15 bp, Homo sapiens
attgagttcaccttt

SEQ ID NO: 2059683 - DNA, 15 bp, Homo sapiens
ttgagttcacctttc

SEQ ID NO: 2059684 - DNA, 15 bp, Homo sapiens
tgagttcacctttcc

SEQ ID NO: 2059685 - DNA, 15 bp, Homo sapiens
gagttcacctttccc

SEQ ID NO: 2059686 - DNA, 15 bp, Homo sapiens
agttcacctttcccc

SEQ ID NO: 2059687 - DNA, 15 bp, Homo sapiens
gttcacctttccccg

SEQ ID NO: 2059688 - DNA, 15 bp, Homo sapiens
ttcacctttccccgg

SEQ ID NO: 2059689 - DNA, 15 bp, Homo sapiens
tcacctttccccggg

SEQ ID NO: 2059690 - DNA, 15 bp, Homo sapiens
cacctttccccggga

SEQ ID NO: 2059691 - DNA, 15 bp, Homo sapiens
acctttccccgggac

SEQ ID NO: 2059692 - DNA, 15 bp, Homo sapiens
cctttccccgggaca

SEQ ID NO: 2059693 - DNA, 15 bp, Homo sapiens
ctttccccgggacaa

SEQ ID NO: 2059694 - DNA, 15 bp, Homo sapiens
tttccccgggacaag

SEQ ID NO: 2059695 - DNA, 15 bp, Homo sapiens
ttccccgggacaagt

SEQ ID NO: 2059696 - DNA, 15 bp, Homo sapiens
tccccgggacaagta

SEQ ID NO: 2059697 - DNA, 15 bp, Homo sapiens
ccccgggacaagtaa

SEQ ID NO: 2059698 - DNA, 15 bp, Homo sapiens
cccgggacaagtaaa

SEQ ID NO: 2059699 - DNA, 15 bp, Homo sapiens
ccgggacaagtaaac

SEQ ID NO: 2059700 - DNA, 15 bp, Homo sapiens
cgggacaagtaaaca

SEQ ID NO: 2059701 - DNA, 15 bp, Homo sapiens
gggacaagtaaacag

SEQ ID NO: 2059702 - DNA, 15 bp, Homo sapiens
ggacaagtaaacaga

SEQ ID NO: 2059703 - DNA, 15 bp, Homo sapiens
gacaagtaaacagac

SEQ ID NO: 2059704 - DNA, 15 bp, Homo sapiens
acaagtaaacagact

SEQ ID NO: 2059705 - DNA, 15 bp, Homo sapiens
caagtaaacagactt

SEQ ID NO: 2059706 - DNA, 15 bp, Homo sapiens
aagtaaacagacttc

SEQ ID NO: 2059707 - DNA, 15 bp, Homo sapiens
agtaaacagacttca

SEQ ID NO: 2059708 - DNA, 15 bp, Homo sapiens
gtaaacagacttcaa

SEQ ID NO: 2059709 - DNA, 15 bp, Homo sapiens
taaacagacttcaaa

SEQ ID NO: 2059710 - DNA, 15 bp, Homo sapiens
aaacagacttcaaac

SEQ ID NO: 2059711 - DNA, 15 bp, Homo sapiens
aacagacttcaaact

SEQ ID NO: 2059712 - DNA, 15 bp, Homo sapiens
acagacttcaaacta

SEQ ID NO: 2059713 - DNA, 15 bp, Homo sapiens
cagacttcaaactat

SEQ ID NO: 2059714 - DNA, 15 bp, Homo sapiens
agacttcaaactatg

SEQ ID NO: 2059715 - DNA, 15 bp, Homo sapiens
gacttcaaactatgc

SEQ ID NO: 2059716 - DNA, 15 bp, Homo sapiens
acttcaaactatgcc

SEQ ID NO: 2059717 - DNA, 15 bp, Homo sapiens
cttcaaactatgccg

SEQ ID NO: 2059718 - DNA, 15 bp, Homo sapiens
ttcaaactatgccga

SEQ ID NO: 2059719 - DNA, 15 bp, Homo sapiens
tcaaactatgccgac

SEQ ID NO: 2059720 - DNA, 15 bp, Homo sapiens
caaactatgccgact

SEQ ID NO: 2059721 - DNA, 15 bp, Homo sapiens
aaactatgccgactg

SEQ ID NO: 2059722 - DNA, 15 bp, Homo sapiens
aactatgccgactgt

SEQ ID NO: 2059723 - DNA, 15 bp, Homo sapiens
actatgccgactgta

SEQ ID NO: 2059724 - DNA, 15 bp, Homo sapiens
ctatgccgactgtag

SEQ ID NO: 2059725 - DNA, 15 bp, Homo sapiens
tatgccgactgtaga

SEQ ID NO: 2059726 - DNA, 15 bp, Homo sapiens
atgccgactgtagac

SEQ ID NO: 2059727 - DNA, 15 bp, Homo sapiens
tgccgactgtagacg

SEQ ID NO: 2059728 - DNA, 15 bp, Homo sapiens
gccgactgtagacgg

SEQ ID NO: 2059729 - DNA, 15 bp, Homo sapiens
ccgactgtagacggc

SEQ ID NO: 2059730 - DNA, 15 bp, Homo sapiens
cgactgtagacggcg

SEQ ID NO: 2059731 - DNA, 15 bp, Homo sapiens
gactgtagacggcga

SEQ ID NO: 2059732 - DNA, 15 bp, Homo sapiens
actgtagacggcgag

SEQ ID NO: 2059733 - DNA, 15 bp, Homo sapiens
ctgtagacggcgagg

SEQ ID NO: 2059734 - DNA, 15 bp, Homo sapiens
tgtagacggcgagga

SEQ ID NO: 2059735 - DNA, 15 bp, Homo sapiens
gtagacggcgaggag

SEQ ID NO: 2059736 - DNA, 15 bp, Homo sapiens
tagacggcgaggaga

SEQ ID NO: 2059737 - DNA, 15 bp, Homo sapiens
agacggcgaggagaa

SEQ ID NO: 2059738 - DNA, 15 bp, Homo sapiens
gacggcgaggagaag

SEQ ID NO: 2059739 - DNA, 15 bp, Homo sapiens
acggcgaggagaaga

SEQ ID NO: 2059740 - DNA, 15 bp, Homo sapiens
cggcgaggagaagaa

SEQ ID NO: 2059741 - DNA, 15 bp, Homo sapiens
ggcgaggagaagaat

SEQ ID NO: 2059742 - DNA, 15 bp, Homo sapiens
gcgaggagaagaatg

SEQ ID NO: 2059743 - DNA, 15 bp, Homo sapiens
cgaggagaagaatgt

SEQ ID NO: 2059744 - DNA, 15 bp, Homo sapiens
gaggagaagaatgta

SEQ ID NO: 2059745 - DNA, 15 bp, Homo sapiens
aggagaagaatgtat

SEQ ID NO: 2059746 - DNA, 15 bp, Homo sapiens
ggagaagaatgtatt

SEQ ID NO: 2059747 - DNA, 15 bp, Homo sapiens
gagaagaatgtattt

SEQ ID NO: 2059748 - DNA, 15 bp, Homo sapiens
agaagaatgtatttg

SEQ ID NO: 2059749 - DNA, 15 bp, Homo sapiens
gaagaatgtatttga

SEQ ID NO: 2059750 - DNA, 15 bp, Homo sapiens
aagaatgtatttgat

SEQ ID NO: 2059751 - DNA, 15 bp, Homo sapiens
agaatgtatttgatg

SEQ ID NO: 2059752 - DNA, 15 bp, Homo sapiens
gaatgtatttgatgg

SEQ ID NO: 2059753 - DNA, 15 bp, Homo sapiens
aatgtatttgatgga

SEQ ID NO: 2059754 - DNA, 15 bp, Homo sapiens
atgtatttgatggaa

SEQ ID NO: 2059755 - DNA, 15 bp, Homo sapiens
tgtatttgatggaaa

SEQ ID NO: 2059756 - DNA, 15 bp, Homo sapiens
gtatttgatggaaac

SEQ ID NO: 2059757 - DNA, 15 bp, Homo sapiens
tatttgatggaaact

SEQ ID NO: 2059758 - DNA, 15 bp, Homo sapiens
atttgatggaaactc

SEQ ID NO: 2059759 - DNA, 15 bp, Homo sapiens
tttgatggaaactcc

SEQ ID NO: 2059760 - DNA, 15 bp, Homo sapiens
ttgatggaaactcca

SEQ ID NO: 2059761 - DNA, 15 bp, Homo sapiens
tgatggaaactccat

SEQ ID NO: 2059762 - DNA, 15 bp, Homo sapiens
gatggaaactccatc

SEQ ID NO: 2059763 - DNA, 15 bp, Homo sapiens
atggaaactccatcc

SEQ ID NO: 2059764 - DNA, 15 bp, Homo sapiens
tggaaactccatcca

SEQ ID NO: 2059765 - DNA, 15 bp, Homo sapiens
ggaaactccatccaa

SEQ ID NO: 2059766 - DNA, 15 bp, Homo sapiens
gaaactccatccaat

SEQ ID NO: 2059767 - DNA, 15 bp, Homo sapiens
aaactccatccaatg

SEQ ID NO: 2059768 - DNA, 15 bp, Homo sapiens
aactccatccaatgc

SEQ ID NO: 2059769 - DNA, 15 bp, Homo sapiens
actccatccaatgca

SEQ ID NO: 2059770 - DNA, 15 bp, Homo sapiens
ctccatccaatgcaa

SEQ ID NO: 2059771 - DNA, 15 bp, Homo sapiens
tccatccaatgcaaa

SEQ ID NO: 2059772 - DNA, 15 bp, Homo sapiens
ccatccaatgcaaag

SEQ ID NO: 2059773 - DNA, 15 bp, Homo sapiens
catccaatgcaaaga

SEQ ID NO: 2059774 - DNA, 15 bp, Homo sapiens
atccaatgcaaagat

SEQ ID NO: 2059775 - DNA, 15 bp, Homo sapiens
tccaatgcaaagatg

SEQ ID NO: 2059776 - DNA, 15 bp, Homo sapiens
ccaatgcaaagatga

SEQ ID NO: 2059777 - DNA, 15 bp, Homo sapiens
caatgcaaagatgat

SEQ ID NO: 2059778 - DNA, 15 bp, Homo sapiens
ccccagtgagggcac

SEQ ID NO: 2059779 - DNA, 15 bp, Homo sapiens
cccagtgagggcacc

SEQ ID NO: 2059780 - DNA, 15 bp, Homo sapiens
ccagtgagggcacct

SEQ ID NO: 2059781 - DNA, 15 bp, Homo sapiens
cagtgagggcacctg

SEQ ID NO: 2059782 - DNA, 15 bp, Homo sapiens
agtgagggcacctgc

SEQ ID NO: 2059783 - DNA, 15 bp, Homo sapiens
gtgagggcacctgct

SEQ ID NO: 2059784 - DNA, 15 bp, Homo sapiens
tgagggcacctgctc

SEQ ID NO: 2059785 - DNA, 15 bp, Homo sapiens
gagggcacctgctcg

SEQ ID NO: 2059786 - DNA, 15 bp, Homo sapiens
agggcacctgctcgg

SEQ ID NO: 2059787 - DNA, 15 bp, Homo sapiens
gggcacctgctcgga

SEQ ID NO: 2059788 - DNA, 15 bp, Homo sapiens
ggcacctgctcggac

SEQ ID NO: 2059789 - DNA, 15 bp, Homo sapiens
gcacctgctcggacc

SEQ ID NO: 2059790 - DNA, 15 bp, Homo sapiens
cacctgctcggaccc

SEQ ID NO: 2059791 - DNA, 15 bp, Homo sapiens
acctgctcggaccct

SEQ ID NO: 2059792 - DNA, 15 bp, Homo sapiens
cctgctcggaccctt

SEQ ID NO: 2059793 - DNA, 15 bp, Homo sapiens
ctgctcggaccctta

SEQ ID NO: 2059794 - DNA, 15 bp, Homo sapiens
tgctcggacccttag

SEQ ID NO: 2059795 - DNA, 15 bp, Homo sapiens
gctcggacccttaga

SEQ ID NO: 2059796 - DNA, 15 bp, Homo sapiens
ctcggacccttagag

SEQ ID NO: 2059797 - DNA, 15 bp, Homo sapiens
tcggacccttagagt

SEQ ID NO: 2059798 - DNA, 15 bp, Homo sapiens
cggacccttagagtc

SEQ ID NO: 2059799 - DNA, 15 bp, Homo sapiens
ggacccttagagtcc

SEQ ID NO: 2059800 - DNA, 15 bp, Homo sapiens
gacccttagagtccc

SEQ ID NO: 2059801 - DNA, 15 bp, Homo sapiens
acccttagagtcccc

SEQ ID NO: 2059802 - DNA, 15 bp, Homo sapiens
cccttagagtcccct

SEQ ID NO: 2059803 - DNA, 15 bp, Homo sapiens
ccttagagtcccctc

SEQ ID NO: 2059804 - DNA, 15 bp, Homo sapiens
cttagagtcccctct

SEQ ID NO: 2059805 - DNA, 15 bp, Homo sapiens
ttagagtcccctctg

SEQ ID NO: 2059806 - DNA, 15 bp, Homo sapiens
tagagtcccctctgg

SEQ ID NO: 2059807 - DNA, 15 bp, Homo sapiens
agagtcccctctgga

SEQ ID NO: 2059808 - DNA, 15 bp, Homo sapiens
gagtcccctctggaa

SEQ ID NO: 2059809 - DNA, 15 bp, Homo sapiens
agtcccctctggaac

SEQ ID NO: 2059810 - DNA, 15 bp, Homo sapiens
gtcccctctggaact

SEQ ID NO: 2059811 - DNA, 15 bp, Homo sapiens
tcccctctggaactg

SEQ ID NO: 2059812 - DNA, 15 bp, Homo sapiens
cccctctggaactgc

SEQ ID NO: 2059813 - DNA, 15 bp, Homo sapiens
ccctctggaactgcg

SEQ ID NO: 2059814 - DNA, 15 bp, Homo sapiens
cctctggaactgcga

SEQ ID NO: 2059815 - DNA, 15 bp, Homo sapiens
ctctggaactgcgag

SEQ ID NO: 2059816 - DNA, 15 bp, Homo sapiens
tctggaactgcgagt

SEQ ID NO: 2059817 - DNA, 15 bp, Homo sapiens
ctggaactgcgagtc

SEQ ID NO: 2059818 - DNA, 15 bp, Homo sapiens
tggaactgcgagtcc

SEQ ID NO: 2059819 - DNA, 15 bp, Homo sapiens
ggaactgcgagtcct

SEQ ID NO: 2059820 - DNA, 15 bp, Homo sapiens
gaactgcgagtcctc

SEQ ID NO: 2059821 - DNA, 15 bp, Homo sapiens
aactgcgagtcctcc

SEQ ID NO: 2059822 - DNA, 15 bp, Homo sapiens
actgcgagtcctccc

SEQ ID NO: 2059823 - DNA, 15 bp, Homo sapiens
ctgcgagtcctccca

SEQ ID NO: 2059824 - DNA, 15 bp, Homo sapiens
tgcgagtcctcccac

SEQ ID NO: 2059825 - DNA, 15 bp, Homo sapiens
gcgagtcctcccacc

SEQ ID NO: 2059826 - DNA, 15 bp, Homo sapiens
cgagtcctcccacct

SEQ ID NO: 2059827 - DNA, 15 bp, Homo sapiens
gagtcctcccacctg

SEQ ID NO: 2059828 - DNA, 15 bp, Homo sapiens
agtcctcccacctgc

SEQ ID NO: 2059829 - DNA, 15 bp, Homo sapiens
gtcctcccacctgcc

SEQ ID NO: 2059830 - DNA, 15 bp, Homo sapiens
tcctcccacctgccc

SEQ ID NO: 2059831 - DNA, 15 bp, Homo sapiens
cctcccacctgccca

SEQ ID NO: 2059832 - DNA, 15 bp, Homo sapiens
ctcccacctgcccag

SEQ ID NO: 2059833 - DNA, 15 bp, Homo sapiens
tcccacctgcccaga

SEQ ID NO: 2059834 - DNA, 15 bp, Homo sapiens
cccacctgcccagac

SEQ ID NO: 2059835 - DNA, 15 bp, Homo sapiens
ccacctgcccagact

SEQ ID NO: 2059836 - DNA, 15 bp, Homo sapiens
cacctgcccagactc

SEQ ID NO: 2059837 - DNA, 15 bp, Homo sapiens
acctgcccagactcc

SEQ ID NO: 2059838 - DNA, 15 bp, Homo sapiens
cctgcccagactccg

SEQ ID NO: 2059839 - DNA, 15 bp, Homo sapiens
ctgcccagactccgc

SEQ ID NO: 2059840 - DNA, 15 bp, Homo sapiens
tgcccagactccgct

SEQ ID NO: 2059841 - DNA, 15 bp, Homo sapiens
gcccagactccgctg

SEQ ID NO: 2059842 - DNA, 15 bp, Homo sapiens
cccagactccgctgg

SEQ ID NO: 2059843 - DNA, 15 bp, Homo sapiens
ccagactccgctgga

SEQ ID NO: 2059844 - DNA, 15 bp, Homo sapiens
cagactccgctggag

SEQ ID NO: 2059845 - DNA, 15 bp, Homo sapiens
agactccgctggaga

SEQ ID NO: 2059846 - DNA, 15 bp, Homo sapiens
gactccgctggagag

SEQ ID NO: 2059847 - DNA, 15 bp, Homo sapiens
actccgctggagaga

SEQ ID NO: 2059848 - DNA, 15 bp, Homo sapiens
ctccgctggagagag

SEQ ID NO: 2059849 - DNA, 15 bp, Homo sapiens
tccgctggagagagg

SEQ ID NO: 2059850 - DNA, 15 bp, Homo sapiens
ccgctggagagaggg

SEQ ID NO: 2059851 - DNA, 15 bp, Homo sapiens
cgctggagagagggc

SEQ ID NO: 2059852 - DNA, 15 bp, Homo sapiens
gctggagagagggcc

SEQ ID NO: 2059853 - DNA, 15 bp, Homo sapiens
ctggagagagggccg

SEQ ID NO: 2059854 - DNA, 15 bp, Homo sapiens
tggagagagggccgg

SEQ ID NO: 2059855 - DNA, 15 bp, Homo sapiens
ggagagagggccggg

SEQ ID NO: 2059856 - DNA, 15 bp, Homo sapiens
gagagagggccgggc

SEQ ID NO: 2059857 - DNA, 15 bp, Homo sapiens
agagagggccgggcc

SEQ ID NO: 2059858 - DNA, 15 bp, Homo sapiens
gagagggccgggccg

SEQ ID NO: 2059859 - DNA, 15 bp, Homo sapiens
agagggccgggccgg

SEQ ID NO: 2059860 - DNA, 15 bp, Homo sapiens
gagggccgggccggg

SEQ ID NO: 2059861 - DNA, 15 bp, Homo sapiens
agggccgggccgggc

SEQ ID NO: 2059862 - DNA, 15 bp, Homo sapiens
gggccgggccgggcg

SEQ ID NO: 2059863 - DNA, 15 bp, Homo sapiens
ggccgggccgggcgc

SEQ ID NO: 2059864 - DNA, 15 bp, Homo sapiens
gccgggccgggcgct

SEQ ID NO: 2059865 - DNA, 15 bp, Homo sapiens
ccgggccgggcgctc

SEQ ID NO: 2059866 - DNA, 15 bp, Homo sapiens
cgggccgggcgctcg

SEQ ID NO: 2059867 - DNA, 15 bp, Homo sapiens
gggccgggcgctcga

SEQ ID NO: 2059868 - DNA, 15 bp, Homo sapiens
ggccgggcgctcgag

SEQ ID NO: 2059869 - DNA, 15 bp, Homo sapiens
gccgggcgctcgagt

SEQ ID NO: 2059870 - DNA, 15 bp, Homo sapiens
ccgggcgctcgagtg

SEQ ID NO: 2059871 - DNA, 15 bp, Homo sapiens
cgggcgctcgagtgc

SEQ ID NO: 2059872 - DNA, 15 bp, Homo sapiens
gggcgctcgagtgcc

SEQ ID NO: 2059873 - DNA, 15 bp, Homo sapiens
ggcgctcgagtgcct

SEQ ID NO: 2059874 - DNA, 15 bp, Homo sapiens
gcgctcgagtgcctc

SEQ ID NO: 2059875 - DNA, 15 bp, Homo sapiens
cgctcgagtgcctcc

SEQ ID NO: 2059876 - DNA, 15 bp, Homo sapiens
gctcgagtgcctccc

SEQ ID NO: 2059877 - DNA, 15 bp, Homo sapiens
ctcgagtgcctccca

SEQ ID NO: 2059878 - DNA, 15 bp, Homo sapiens
tcgagtgcctcccaa

SEQ ID NO: 2059879 - DNA, 15 bp, Homo sapiens
cgagtgcctcccaac

SEQ ID NO: 2059880 - DNA, 15 bp, Homo sapiens
gagtgcctcccaaca

SEQ ID NO: 2059881 - DNA, 15 bp, Homo sapiens
agtgcctcccaacag

SEQ ID NO: 2059882 - DNA, 15 bp, Homo sapiens
gtgcctcccaacagg

SEQ ID NO: 2059883 - DNA, 15 bp, Homo sapiens
tgcctcccaacaggg

SEQ ID NO: 2059884 - DNA, 15 bp, Homo sapiens
gcctcccaacagggc

SEQ ID NO: 2059885 - DNA, 15 bp, Homo sapiens
cctcccaacagggca

SEQ ID NO: 2059886 - DNA, 15 bp, Homo sapiens
ctcccaacagggcag

SEQ ID NO: 2059887 - DNA, 15 bp, Homo sapiens
tcccaacagggcagc

SEQ ID NO: 2059888 - DNA, 15 bp, Homo sapiens
cccaacagggcagcc

SEQ ID NO: 2059889 - DNA, 15 bp, Homo sapiens
ccaacagggcagcct

SEQ ID NO: 2059890 - DNA, 15 bp, Homo sapiens
caacagggcagcctc

SEQ ID NO: 2059891 - DNA, 15 bp, Homo sapiens
aacagggcagcctcc

SEQ ID NO: 2059892 - DNA, 15 bp, Homo sapiens
acagggcagcctccc

SEQ ID NO: 2059893 - DNA, 15 bp, Homo sapiens
cagggcagcctccct

SEQ ID NO: 2059894 - DNA, 15 bp, Homo sapiens
agggcagcctccctc

SEQ ID NO: 2059895 - DNA, 15 bp, Homo sapiens
gggcagcctccctcc

SEQ ID NO: 2059896 - DNA, 15 bp, Homo sapiens
gcagcctccctcctg

SEQ ID NO: 2059897 - DNA, 15 bp, Homo sapiens
cagcctccctcctgg

SEQ ID NO: 2059898 - DNA, 15 bp, Homo sapiens
agcctccctcctggc

SEQ ID NO: 2059899 - DNA, 15 bp, Homo sapiens
gcctccctcctggcc

SEQ ID NO: 2059900 - DNA, 15 bp, Homo sapiens
cctccctcctggccc

SEQ ID NO: 2059901 - DNA, 15 bp, Homo sapiens
ctccctcctggcccg

SEQ ID NO: 2059902 - DNA, 15 bp, Homo sapiens
tccctcctggcccgg

SEQ ID NO: 2059903 - DNA, 15 bp, Homo sapiens
ccctcctggcccggt

SEQ ID NO: 2059904 - DNA, 15 bp, Homo sapiens
cctcctggcccggtc

SEQ ID NO: 2059905 - DNA, 15 bp, Homo sapiens
ctcctggcccggtct

SEQ ID NO: 2059906 - DNA, 15 bp, Homo sapiens
tcctggcccggtcta

SEQ ID NO: 2059907 - DNA, 15 bp, Homo sapiens
cctggcccggtctag

SEQ ID NO: 2059908 - DNA, 15 bp, Homo sapiens
ctggcccggtctagc

SEQ ID NO: 2059909 - DNA, 15 bp, Homo sapiens
tggcccggtctagcc

SEQ ID NO: 2059910 - DNA, 15 bp, Homo sapiens
ggcccggtctagcct

SEQ ID NO: 2059911 - DNA, 15 bp, Homo sapiens
gcccggtctagcctc

SEQ ID NO: 2059912 - DNA, 15 bp, Homo sapiens
cccggtctagcctct

SEQ ID NO: 2059913 - DNA, 15 bp, Homo sapiens
ccggtctagcctctc

SEQ ID NO: 2059914 - DNA, 15 bp, Homo sapiens
cggtctagcctctcc

SEQ ID NO: 2059915 - DNA, 15 bp, Homo sapiens
ggtctagcctctccg

SEQ ID NO: 2059916 - DNA, 15 bp, Homo sapiens
gtctagcctctccgc

SEQ ID NO: 2059917 - DNA, 15 bp, Homo sapiens
tctagcctctccgcg

SEQ ID NO: 2059918 - DNA, 15 bp, Homo sapiens
ctagcctctccgcgc

SEQ ID NO: 2059919 - DNA, 15 bp, Homo sapiens
tagcctctccgcgct

SEQ ID NO: 2059920 - DNA, 15 bp, Homo sapiens
agcctctccgcgctc

SEQ ID NO: 2059921 - DNA, 15 bp, Homo sapiens
gcctctccgcgctct

SEQ ID NO: 2059922 - DNA, 15 bp, Homo sapiens
cctctccgcgctctg

SEQ ID NO: 2059923 - DNA, 15 bp, Homo sapiens
ctctccgcgctctgc

SEQ ID NO: 2059924 - DNA, 15 bp, Homo sapiens
tctccgcgctctgct

SEQ ID NO: 2059925 - DNA, 15 bp, Homo sapiens
ctccgcgctctgctc

SEQ ID NO: 2059926 - DNA, 15 bp, Homo sapiens
tccgcgctctgctcg

SEQ ID NO: 2059927 - DNA, 15 bp, Homo sapiens
ccgcgctctgctcgc

SEQ ID NO: 2059928 - DNA, 15 bp, Homo sapiens
cgcgctctgctcgcc

SEQ ID NO: 2059929 - DNA, 15 bp, Homo sapiens
gcgctctgctcgccc

SEQ ID NO: 2059930 - DNA, 15 bp, Homo sapiens
cgctctgctcgcccc

SEQ ID NO: 2059931 - DNA, 15 bp, Homo sapiens
gctctgctcgcccct

SEQ ID NO: 2059932 - DNA, 15 bp, Homo sapiens
ctctgctcgcccctg

SEQ ID NO: 2059933 - DNA, 15 bp, Homo sapiens
tctgctcgcccctgc

SEQ ID NO: 2059934 - DNA, 15 bp, Homo sapiens
ctgctcgcccctgct

SEQ ID NO: 2059935 - DNA, 15 bp, Homo sapiens
tgctcgcccctgctc

SEQ ID NO: 2059936 - DNA, 15 bp, Homo sapiens
gctcgcccctgctcc

SEQ ID NO: 2059937 - DNA, 15 bp, Homo sapiens
ctcgcccctgctcct

SEQ ID NO: 2059938 - DNA, 15 bp, Homo sapiens
tcgcccctgctcctt

SEQ ID NO: 2059939 - DNA, 15 bp, Homo sapiens
cgcccctgctccttg

SEQ ID NO: 2059940 - DNA, 15 bp, Homo sapiens
gcccctgctccttga

SEQ ID NO: 2059941 - DNA, 15 bp, Homo sapiens
cccctgctccttgag

SEQ ID NO: 2059942 - DNA, 15 bp, Homo sapiens
ccctgctccttgagc

SEQ ID NO: 2059943 - DNA, 15 bp, Homo sapiens
cctgctccttgagct

SEQ ID NO: 2059944 - DNA, 15 bp, Homo sapiens
ctgctccttgagctc

SEQ ID NO: 2059945 - DNA, 15 bp, Homo sapiens
tgctccttgagctcg

SEQ ID NO: 2059946 - DNA, 15 bp, Homo sapiens
gctccttgagctcgg

SEQ ID NO: 2059947 - DNA, 15 bp, Homo sapiens
ctccttgagctcggg

SEQ ID NO: 2059948 - DNA, 15 bp, Homo sapiens
tccttgagctcgggg

SEQ ID NO: 2059949 - DNA, 15 bp, Homo sapiens
ccttgagctcggggt

SEQ ID NO: 2059950 - DNA, 15 bp, Homo sapiens
cttgagctcggggtc

SEQ ID NO: 2059951 - DNA, 15 bp, Homo sapiens
ttgagctcggggtcg

SEQ ID NO: 2059952 - DNA, 15 bp, Homo sapiens
tgagctcggggtcgc

SEQ ID NO: 2059953 - DNA, 15 bp, Homo sapiens
gagctcggggtcgct

SEQ ID NO: 2059954 - DNA, 15 bp, Homo sapiens
agctcggggtcgctt

SEQ ID NO: 2059955 - DNA, 15 bp, Homo sapiens
gctcggggtcgcttc

SEQ ID NO: 2059956 - DNA, 15 bp, Homo sapiens
ctcggggtcgcttcc

SEQ ID NO: 2059957 - DNA, 15 bp, Homo sapiens
tcggggtcgcttccc

SEQ ID NO: 2059958 - DNA, 15 bp, Homo sapiens
cggggtcgcttccct

SEQ ID NO: 2059959 - DNA, 15 bp, Homo sapiens
ggggtcgcttccctt

SEQ ID NO: 2059960 - DNA, 15 bp, Homo sapiens
gggtcgcttcccttg

SEQ ID NO: 2059961 - DNA, 15 bp, Homo sapiens
ggtcgcttcccttgg

SEQ ID NO: 2059962 - DNA, 15 bp, Homo sapiens
gtcgcttcccttggc

SEQ ID NO: 2059963 - DNA, 15 bp, Homo sapiens
tcgcttcccttggct

SEQ ID NO: 2059964 - DNA, 15 bp, Homo sapiens
cgcttcccttggctc

SEQ ID NO: 2059965 - DNA, 15 bp, Homo sapiens
gcttcccttggctcc

SEQ ID NO: 2059966 - DNA, 15 bp, Homo sapiens
cttcccttggctccc

SEQ ID NO: 2059967 - DNA, 15 bp, Homo sapiens
ttcccttggctcccc

SEQ ID NO: 2059968 - DNA, 15 bp, Homo sapiens
tcccttggctccccg

SEQ ID NO: 2059969 - DNA, 15 bp, Homo sapiens
cccttggctccccga

SEQ ID NO: 2059970 - DNA, 15 bp, Homo sapiens
ccttggctccccgag

SEQ ID NO: 2059971 - DNA, 15 bp, Homo sapiens
cttggctccccgagg

SEQ ID NO: 2059972 - DNA, 15 bp, Homo sapiens
ttggctccccgaggt

SEQ ID NO: 2059973 - DNA, 15 bp, Homo sapiens
tggctccccgaggtc

SEQ ID NO: 2059974 - DNA, 15 bp, Homo sapiens
ggctccccgaggtct

SEQ ID NO: 2059975 - DNA, 15 bp, Homo sapiens
gctccccgaggtctt

SEQ ID NO: 2059976 - DNA, 15 bp, Homo sapiens
ctccccgaggtcttc

SEQ ID NO: 2059977 - DNA, 15 bp, Homo sapiens
tccccgaggtcttct

SEQ ID NO: 2059978 - DNA, 15 bp, Homo sapiens
ccccgaggtcttctg

SEQ ID NO: 2059979 - DNA, 15 bp, Homo sapiens
cccgaggtcttctgc

SEQ ID NO: 2059980 - DNA, 15 bp, Homo sapiens
ccgaggtcttctgcg

SEQ ID NO: 2059981 - DNA, 15 bp, Homo sapiens
cgaggtcttctgcgc

SEQ ID NO: 2059982 - DNA, 15 bp, Homo sapiens
gaggtcttctgcgcc

SEQ ID NO: 2059983 - DNA, 15 bp, Homo sapiens
aggtcttctgcgccg

SEQ ID NO: 2059984 - DNA, 15 bp, Homo sapiens
ggtcttctgcgccga

SEQ ID NO: 2059985 - DNA, 15 bp, Homo sapiens
gtcttctgcgccgag

SEQ ID NO: 2059986 - DNA, 15 bp, Homo sapiens
tcttctgcgccgagc

SEQ ID NO: 2059987 - DNA, 15 bp, Homo sapiens
cttctgcgccgagca

SEQ ID NO: 2059988 - DNA, 15 bp, Homo sapiens
ttctgcgccgagcag

SEQ ID NO: 2059989 - DNA, 15 bp, Homo sapiens
tctgcgccgagcaga

SEQ ID NO: 2059990 - DNA, 15 bp, Homo sapiens
ctgcgccgagcagag

SEQ ID NO: 2059991 - DNA, 15 bp, Homo sapiens
tgcgccgagcagagc

SEQ ID NO: 2059992 - DNA, 15 bp, Homo sapiens
gcgccgagcagagct

SEQ ID NO: 2059993 - DNA, 15 bp, Homo sapiens
cgccgagcagagctg

SEQ ID NO: 2059994 - DNA, 15 bp, Homo sapiens
gccgagcagagctgc

SEQ ID NO: 2059995 - DNA, 15 bp, Homo sapiens
ccgagcagagctgcc

SEQ ID NO: 2059996 - DNA, 15 bp, Homo sapiens
cgagcagagctgcca

SEQ ID NO: 2059997 - DNA, 15 bp, Homo sapiens
gagcagagctgccag

SEQ ID NO: 2059998 - DNA, 15 bp, Homo sapiens
agcagagctgccagt

SEQ ID NO: 2059999 - DNA, 15 bp, Homo sapiens
gcagagctgccagtc

SEQ ID NO: 2060000 - DNA, 15 bp, Homo sapiens
cagagctgccagtcc

SEQ ID NO: 2060001 - DNA, 15 bp, Homo sapiens
agagctgccagtcca

SEQ ID NO: 2060002 - DNA, 15 bp, Homo sapiens
gagctgccagtccac

SEQ ID NO: 2060003 - DNA, 15 bp, Homo sapiens
agctgccagtccacc

SEQ ID NO: 2060004 - DNA, 15 bp, Homo sapiens
gctgccagtccaccg

SEQ ID NO: 2060005 - DNA, 15 bp, Homo sapiens
ctgccagtccaccgc

SEQ ID NO: 2060006 - DNA, 15 bp, Homo sapiens
tgccagtccaccgcg

SEQ ID NO: 2060007 - DNA, 15 bp, Homo sapiens
gccagtccaccgcgc

SEQ ID NO: 2060008 - DNA, 15 bp, Homo sapiens
ccagtccaccgcgcc

SEQ ID NO: 2060009 - DNA, 15 bp, Homo sapiens
cagtccaccgcgcct

SEQ ID NO: 2060010 - DNA, 15 bp, Homo sapiens
agtccaccgcgccta

SEQ ID NO: 2060011 - DNA, 15 bp, Homo sapiens
gtccaccgcgcctag

SEQ ID NO: 2060012 - DNA, 15 bp, Homo sapiens
tccaccgcgcctagg

SEQ ID NO: 2060013 - DNA, 15 bp, Homo sapiens
ccaccgcgcctagga

SEQ ID NO: 2060014 - DNA, 15 bp, Homo sapiens
caccgcgcctaggag

SEQ ID NO: 2060015 - DNA, 15 bp, Homo sapiens
accgcgcctaggaga

SEQ ID NO: 2060016 - DNA, 15 bp, Homo sapiens
ccgcgcctaggagac

SEQ ID NO: 2060017 - DNA, 15 bp, Homo sapiens
cgcgcctaggagacg

SEQ ID NO: 2060018 - DNA, 15 bp, Homo sapiens
gcgcctaggagacgc

SEQ ID NO: 2060019 - DNA, 15 bp, Homo sapiens
cgcctaggagacgcc

SEQ ID NO: 2060020 - DNA, 15 bp, Homo sapiens
gcctaggagacgccg

SEQ ID NO: 2060021 - DNA, 15 bp, Homo sapiens
cctaggagacgccga

SEQ ID NO: 2060022 - DNA, 15 bp, Homo sapiens
ctaggagacgccgag

SEQ ID NO: 2060023 - DNA, 15 bp, Homo sapiens
taggagacgccgagt

SEQ ID NO: 2060024 - DNA, 15 bp, Homo sapiens
aggagacgccgagta

SEQ ID NO: 2060025 - DNA, 15 bp, Homo sapiens
ggagacgccgagtac

SEQ ID NO: 2060026 - DNA, 15 bp, Homo sapiens
gagacgccgagtacc

SEQ ID NO: 2060027 - DNA, 15 bp, Homo sapiens
agacgccgagtaccc

SEQ ID NO: 2060028 - DNA, 15 bp, Homo sapiens
gacgccgagtacccg

SEQ ID NO: 2060029 - DNA, 15 bp, Homo sapiens
acgccgagtacccgc

SEQ ID NO: 2060030 - DNA, 15 bp, Homo sapiens
cgccgagtacccgca

SEQ ID NO: 2060031 - DNA, 15 bp, Homo sapiens
gccgagtacccgcat

SEQ ID NO: 2060032 - DNA, 15 bp, Homo sapiens
ccgagtacccgcatc

SEQ ID NO: 2060033 - DNA, 15 bp, Homo sapiens
cgagtacccgcatct

SEQ ID NO: 2060034 - DNA, 15 bp, Homo sapiens
gagtacccgcatctg

SEQ ID NO: 2060035 - DNA, 15 bp, Homo sapiens
agtacccgcatctga

SEQ ID NO: 2060036 - DNA, 15 bp, Homo sapiens
gtacccgcatctgac

SEQ ID NO: 2060037 - DNA, 15 bp, Homo sapiens
tacccgcatctgacc

SEQ ID NO: 2060038 - DNA, 15 bp, Homo sapiens
acccgcatctgaccg

SEQ ID NO: 2060039 - DNA, 15 bp, Homo sapiens
cccgcatctgaccgc

SEQ ID NO: 2060040 - DNA, 15 bp, Homo sapiens
ccgcatctgaccgca

SEQ ID NO: 2060041 - DNA, 15 bp, Homo sapiens
cgcatctgaccgcag

SEQ ID NO: 2060042 - DNA, 15 bp, Homo sapiens
gcatctgaccgcagg

SEQ ID NO: 2060043 - DNA, 15 bp, Homo sapiens
catctgaccgcagga

SEQ ID NO: 2060044 - DNA, 15 bp, Homo sapiens
atctgaccgcaggac

SEQ ID NO: 2060045 - DNA, 15 bp, Homo sapiens
tctgaccgcaggacc

SEQ ID NO: 2060046 - DNA, 15 bp, Homo sapiens
ctgaccgcaggaccc

SEQ ID NO: 2060047 - DNA, 15 bp, Homo sapiens
tgaccgcaggacccc

SEQ ID NO: 2060048 - DNA, 15 bp, Homo sapiens
gaccgcaggacccca

SEQ ID NO: 2060049 - DNA, 15 bp, Homo sapiens
accgcaggaccccag

SEQ ID NO: 2060050 - DNA, 15 bp, Homo sapiens
ccgcaggaccccagc

SEQ ID NO: 2060051 - DNA, 15 bp, Homo sapiens
cgcaggaccccagcg

SEQ ID NO: 2060052 - DNA, 15 bp, Homo sapiens
gcaggaccccagcgc

SEQ ID NO: 2060053 - DNA, 15 bp, Homo sapiens
caggaccccagcgct

SEQ ID NO: 2060054 - DNA, 15 bp, Homo sapiens
aggaccccagcgcta

SEQ ID NO: 2060055 - DNA, 15 bp, Homo sapiens
ggaccccagcgctac

SEQ ID NO: 2060056 - DNA, 15 bp, Homo sapiens
gaccccagcgctacc

SEQ ID NO: 2060057 - DNA, 15 bp, Homo sapiens
accccagcgctacca

SEQ ID NO: 2060058 - DNA, 15 bp, Homo sapiens
ccccagcgctaccaa

SEQ ID NO: 2060059 - DNA, 15 bp, Homo sapiens
cccagcgctaccaag

SEQ ID NO: 2060060 - DNA, 15 bp, Homo sapiens
ccagcgctaccaagt

SEQ ID NO: 2060061 - DNA, 15 bp, Homo sapiens
cagcgctaccaagtg

SEQ ID NO: 2060062 - DNA, 15 bp, Homo sapiens
agcgctaccaagtgc

SEQ ID NO: 2060063 - DNA, 15 bp, Homo sapiens
gcgctaccaagtgcc

SEQ ID NO: 2060064 - DNA, 15 bp, Homo sapiens
cgctaccaagtgcct

SEQ ID NO: 2060065 - DNA, 15 bp, Homo sapiens
gctaccaagtgcctg

SEQ ID NO: 2060066 - DNA, 15 bp, Homo sapiens
ctaccaagtgcctgt

SEQ ID NO: 2060067 - DNA, 15 bp, Homo sapiens
taccaagtgcctgtt

SEQ ID NO: 2060068 - DNA, 15 bp, Homo sapiens
accaagtgcctgttc

SEQ ID NO: 2060069 - DNA, 15 bp, Homo sapiens
ccaagtgcctgttct

SEQ ID NO: 2060070 - DNA, 15 bp, Homo sapiens
caagtgcctgttctt

SEQ ID NO: 2060071 - DNA, 15 bp, Homo sapiens
aagtgcctgttcttg

SEQ ID NO: 2060072 - DNA, 15 bp, Homo sapiens
agtgcctgttcttgg

SEQ ID NO: 2060073 - DNA, 15 bp, Homo sapiens
gtgcctgttcttgga

SEQ ID NO: 2060074 - DNA, 15 bp, Homo sapiens
tgcctgttcttggac

SEQ ID NO: 2060075 - DNA, 15 bp, Homo sapiens
gcctgttcttggacc

SEQ ID NO: 2060076 - DNA, 15 bp, Homo sapiens
cctgttcttggaccc

SEQ ID NO: 2060077 - DNA, 15 bp, Homo sapiens
ctgttcttggacccc

SEQ ID NO: 2060078 - DNA, 15 bp, Homo sapiens
tgttcttggaccccc

SEQ ID NO: 2060079 - DNA, 15 bp, Homo sapiens
gttcttggaccccca

SEQ ID NO: 2060080 - DNA, 15 bp, Homo sapiens
ttcttggacccccag

SEQ ID NO: 2060081 - DNA, 15 bp, Homo sapiens
tcttggacccccagc

SEQ ID NO: 2060082 - DNA, 15 bp, Homo sapiens
cttggacccccagcc

SEQ ID NO: 2060083 - DNA, 15 bp, Homo sapiens
ttggacccccagccg

SEQ ID NO: 2060084 - DNA, 15 bp, Homo sapiens
tggacccccagccga

SEQ ID NO: 2060085 - DNA, 15 bp, Homo sapiens
ggacccccagccgag

SEQ ID NO: 2060086 - DNA, 15 bp, Homo sapiens
gacccccagccgagc

SEQ ID NO: 2060087 - DNA, 15 bp, Homo sapiens
acccccagccgagca

SEQ ID NO: 2060088 - DNA, 15 bp, Homo sapiens
cccccagccgagcag

SEQ ID NO: 2060089 - DNA, 15 bp, Homo sapiens
ccccagccgagcagg

SEQ ID NO: 2060090 - DNA, 15 bp, Homo sapiens
cccagccgagcaggg

SEQ ID NO: 2060091 - DNA, 15 bp, Homo sapiens
ccagccgagcagggg

SEQ ID NO: 2060092 - DNA, 15 bp, Homo sapiens
cagccgagcaggggg

SEQ ID NO: 2060093 - DNA, 15 bp, Homo sapiens
agccgagcaggggga

SEQ ID NO: 2060094 - DNA, 15 bp, Homo sapiens
gccgagcagggggaa

SEQ ID NO: 2060095 - DNA, 15 bp, Homo sapiens
ccgagcagggggaag

SEQ ID NO: 2060096 - DNA, 15 bp, Homo sapiens
cgagcagggggaagc

SEQ ID NO: 2060097 - DNA, 15 bp, Homo sapiens
gagcagggggaagca

SEQ ID NO: 2060098 - DNA, 15 bp, Homo sapiens
agcagggggaagcat

SEQ ID NO: 2060099 - DNA, 15 bp, Homo sapiens
gcagggggaagcatc

SEQ ID NO: 2060100 - DNA, 15 bp, Homo sapiens
cagggggaagcatcc

SEQ ID NO: 2060101 - DNA, 15 bp, Homo sapiens
agggggaagcatccc

SEQ ID NO: 2060102 - DNA, 15 bp, Homo sapiens
gggggaagcatcccc

SEQ ID NO: 2060103 - DNA, 15 bp, Homo sapiens
ggggaagcatcccca

SEQ ID NO: 2060104 - DNA, 15 bp, Homo sapiens
gggaagcatccccag

SEQ ID NO: 2060105 - DNA, 15 bp, Homo sapiens
ggaagcatccccagc

SEQ ID NO: 2060106 - DNA, 15 bp, Homo sapiens
gaagcatccccagct

SEQ ID NO: 2060107 - DNA, 15 bp, Homo sapiens
aagcatccccagctc

SEQ ID NO: 2060108 - DNA, 15 bp, Homo sapiens
agcatccccagctcc

SEQ ID NO: 2060109 - DNA, 15 bp, Homo sapiens
gcatccccagctccc

SEQ ID NO: 2060110 - DNA, 15 bp, Homo sapiens
catccccagctcccg

SEQ ID NO: 2060111 - DNA, 15 bp, Homo sapiens
atccccagctcccgc

SEQ ID NO: 2060112 - DNA, 15 bp, Homo sapiens
tccccagctcccgca

SEQ ID NO: 2060113 - DNA, 15 bp, Homo sapiens
ccccagctcccgcac

SEQ ID NO: 2060114 - DNA, 15 bp, Homo sapiens
cccagctcccgcacc

SEQ ID NO: 2060115 - DNA, 15 bp, Homo sapiens
ccagctcccgcaccc

SEQ ID NO: 2060116 - DNA, 15 bp, Homo sapiens
cagctcccgcaccca

SEQ ID NO: 2060117 - DNA, 15 bp, Homo sapiens
agctcccgcacccaa

SEQ ID NO: 2060118 - DNA, 15 bp, Homo sapiens
gctcccgcacccaag

SEQ ID NO: 2060119 - DNA, 15 bp, Homo sapiens
ctcccgcacccaagt

SEQ ID NO: 2060120 - DNA, 15 bp, Homo sapiens
tcccgcacccaagtc

SEQ ID NO: 2060121 - DNA, 15 bp, Homo sapiens
cccgcacccaagtcc

SEQ ID NO: 2060122 - DNA, 15 bp, Homo sapiens
ccgcacccaagtccc

SEQ ID NO: 2060123 - DNA, 15 bp, Homo sapiens
cgcacccaagtccct

SEQ ID NO: 2060124 - DNA, 15 bp, Homo sapiens
gcacccaagtccctg

SEQ ID NO: 2060125 - DNA, 15 bp, Homo sapiens
cacccaagtccctgg

SEQ ID NO: 2060126 - DNA, 15 bp, Homo sapiens
acccaagtccctggc

SEQ ID NO: 2060127 - DNA, 15 bp, Homo sapiens
cccaagtccctggcg

SEQ ID NO: 2060128 - DNA, 15 bp, Homo sapiens
ccaagtccctggcgc

SEQ ID NO: 2060129 - DNA, 15 bp, Homo sapiens
caagtccctggcgcc

SEQ ID NO: 2060130 - DNA, 15 bp, Homo sapiens
aagtccctggcgccg

SEQ ID NO: 2060131 - DNA, 15 bp, Homo sapiens
agtccctggcgccgc

SEQ ID NO: 2060132 - DNA, 15 bp, Homo sapiens
gtccctggcgccgct

SEQ ID NO: 2060133 - DNA, 15 bp, Homo sapiens
tccctggcgccgctg

SEQ ID NO: 2060134 - DNA, 15 bp, Homo sapiens
ccctggcgccgctgc

SEQ ID NO: 2060135 - DNA, 15 bp, Homo sapiens
cctggcgccgctgcc

SEQ ID NO: 2060136 - DNA, 15 bp, Homo sapiens
ctggcgccgctgccg

SEQ ID NO: 2060137 - DNA, 15 bp, Homo sapiens
tggcgccgctgccgg

SEQ ID NO: 2060138 - DNA, 15 bp, Homo sapiens
ggcgccgctgccggg

SEQ ID NO: 2060139 - DNA, 15 bp, Homo sapiens
gcgccgctgccgggc

SEQ ID NO: 2060140 - DNA, 15 bp, Homo sapiens
cgccgctgccgggcc

SEQ ID NO: 2060141 - DNA, 15 bp, Homo sapiens
gccgctgccgggccg

SEQ ID NO: 2060142 - DNA, 15 bp, Homo sapiens
ccgctgccgggccgc

SEQ ID NO: 2060143 - DNA, 15 bp, Homo sapiens
cgctgccgggccgcc

SEQ ID NO: 2060144 - DNA, 15 bp, Homo sapiens
gctgccgggccgccc

SEQ ID NO: 2060145 - DNA, 15 bp, Homo sapiens
ctgccgggccgccct

SEQ ID NO: 2060146 - DNA, 15 bp, Homo sapiens
tgccgggccgccctc

SEQ ID NO: 2060147 - DNA, 15 bp, Homo sapiens
gccgggccgccctcc

SEQ ID NO: 2060148 - DNA, 15 bp, Homo sapiens
ccgggccgccctccc

SEQ ID NO: 2060149 - DNA, 15 bp, Homo sapiens
cgggccgccctccct

SEQ ID NO: 2060150 - DNA, 15 bp, Homo sapiens
gggccgccctccctg

SEQ ID NO: 2060151 - DNA, 15 bp, Homo sapiens
ggccgccctccctga

SEQ ID NO: 2060152 - DNA, 15 bp, Homo sapiens
gccgccctccctgat

SEQ ID NO: 2060153 - DNA, 15 bp, Homo sapiens
ccgccctccctgatg

SEQ ID NO: 2060154 - DNA, 15 bp, Homo sapiens
cgccctccctgatgc

SEQ ID NO: 2060155 - DNA, 15 bp, Homo sapiens
gccctccctgatgcc

SEQ ID NO: 2060156 - DNA, 15 bp, Homo sapiens
ccctccctgatgccc

SEQ ID NO: 2060157 - DNA, 15 bp, Homo sapiens
cctccctgatgccca

SEQ ID NO: 2060158 - DNA, 15 bp, Homo sapiens
ctccctgatgcccag

SEQ ID NO: 2060159 - DNA, 15 bp, Homo sapiens
tccctgatgcccagc

SEQ ID NO: 2060160 - DNA, 15 bp, Homo sapiens
ccctgatgcccagcg

SEQ ID NO: 2060161 - DNA, 15 bp, Homo sapiens
cctgatgcccagcgc

SEQ ID NO: 2060162 - DNA, 15 bp, Homo sapiens
ctgatgcccagcgcg

SEQ ID NO: 2060163 - DNA, 15 bp, Homo sapiens
tgatgcccagcgcgc

SEQ ID NO: 2060164 - DNA, 15 bp, Homo sapiens
gatgcccagcgcgca

SEQ ID NO: 2060165 - DNA, 15 bp, Homo sapiens
atgcccagcgcgcag

SEQ ID NO: 2060166 - DNA, 15 bp, Homo sapiens
tgcccagcgcgcagc

SEQ ID NO: 2060167 - DNA, 15 bp, Homo sapiens
gcccagcgcgcagcc

SEQ ID NO: 2060168 - DNA, 15 bp, Homo sapiens
cccagcgcgcagcct

SEQ ID NO: 2060169 - DNA, 15 bp, Homo sapiens
ccagcgcgcagcctg

SEQ ID NO: 2060170 - DNA, 15 bp, Homo sapiens
cagcgcgcagcctgc

SEQ ID NO: 2060171 - DNA, 15 bp, Homo sapiens
agcgcgcagcctgcc

SEQ ID NO: 2060172 - DNA, 15 bp, Homo sapiens
gcgcgcagcctgccg

SEQ ID NO: 2060173 - DNA, 15 bp, Homo sapiens
cgcgcagcctgccgg

SEQ ID NO: 2060174 - DNA, 15 bp, Homo sapiens
gcgcagcctgccggc

SEQ ID NO: 2060175 - DNA, 15 bp, Homo sapiens
cgcagcctgccggcg

SEQ ID NO: 2060176 - DNA, 15 bp, Homo sapiens
gcagcctgccggcgc

SEQ ID NO: 2060177 - DNA, 15 bp, Homo sapiens
cagcctgccggcgcc

SEQ ID NO: 2060178 - DNA, 15 bp, Homo sapiens
agcctgccggcgccg

SEQ ID NO: 2060179 - DNA, 15 bp, Homo sapiens
gcctgccggcgccgc

SEQ ID NO: 2060180 - DNA, 15 bp, Homo sapiens
cctgccggcgccgcg

SEQ ID NO: 2060181 - DNA, 15 bp, Homo sapiens
ctgccggcgccgcgc

SEQ ID NO: 2060182 - DNA, 15 bp, Homo sapiens
tgccggcgccgcgcc

SEQ ID NO: 2060183 - DNA, 15 bp, Homo sapiens
gccggcgccgcgcct

SEQ ID NO: 2060184 - DNA, 15 bp, Homo sapiens
ccggcgccgcgcctt

SEQ ID NO: 2060185 - DNA, 15 bp, Homo sapiens
cggcgccgcgccttc

SEQ ID NO: 2060186 - DNA, 15 bp, Homo sapiens
ggcgccgcgccttct

SEQ ID NO: 2060187 - DNA, 15 bp, Homo sapiens
gcgccgcgccttctg

SEQ ID NO: 2060188 - DNA, 15 bp, Homo sapiens
cgccgcgccttctgg

SEQ ID NO: 2060189 - DNA, 15 bp, Homo sapiens
gccgcgccttctgga

SEQ ID NO: 2060190 - DNA, 15 bp, Homo sapiens
ccgcgccttctggac

SEQ ID NO: 2060191 - DNA, 15 bp, Homo sapiens
cgcgccttctggacg

SEQ ID NO: 2060192 - DNA, 15 bp, Homo sapiens
gcgccttctggacgg

SEQ ID NO: 2060193 - DNA, 15 bp, Homo sapiens
cgccttctggacggc

SEQ ID NO: 2060194 - DNA, 15 bp, Homo sapiens
gccttctggacggct

SEQ ID NO: 2060195 - DNA, 15 bp, Homo sapiens
ccttctggacggctc

SEQ ID NO: 2060196 - DNA, 15 bp, Homo sapiens
cttctggacggctct

SEQ ID NO: 2060197 - DNA, 15 bp, Homo sapiens
ttctggacggctctc

SEQ ID NO: 2060198 - DNA, 15 bp, Homo sapiens
tctggacggctctcg

SEQ ID NO: 2060199 - DNA, 15 bp, Homo sapiens
ctggacggctctcgc

SEQ ID NO: 2060200 - DNA, 15 bp, Homo sapiens
tggacggctctcgcc

SEQ ID NO: 2060201 - DNA, 15 bp, Homo sapiens
ggacggctctcgccg

SEQ ID NO: 2060202 - DNA, 15 bp, Homo sapiens
gacggctctcgccgc

SEQ ID NO: 2060203 - DNA, 15 bp, Homo sapiens
acggctctcgccgca

SEQ ID NO: 2060204 - DNA, 15 bp, Homo sapiens
cggctctcgccgcac

SEQ ID NO: 2060205 - DNA, 15 bp, Homo sapiens
ggctctcgccgcacc

SEQ ID NO: 2060206 - DNA, 15 bp, Homo sapiens
gctctcgccgcacct

SEQ ID NO: 2060207 - DNA, 15 bp, Homo sapiens
ctctcgccgcacctc

SEQ ID NO: 2060208 - DNA, 15 bp, Homo sapiens
tctcgccgcacctcc

SEQ ID NO: 2060209 - DNA, 15 bp, Homo sapiens
ctcgccgcacctcct

SEQ ID NO: 2060210 - DNA, 15 bp, Homo sapiens
tcgccgcacctcctg

SEQ ID NO: 2060211 - DNA, 15 bp, Homo sapiens
cgccgcacctcctga

SEQ ID NO: 2060212 - DNA, 15 bp, Homo sapiens
gccgcacctcctgag

SEQ ID NO: 2060213 - DNA, 15 bp, Homo sapiens
ccgcacctcctgagc

SEQ ID NO: 2060214 - DNA, 15 bp, Homo sapiens
cgcacctcctgagct

SEQ ID NO: 2060215 - DNA, 15 bp, Homo sapiens
gcacctcctgagctc

SEQ ID NO: 2060216 - DNA, 15 bp, Homo sapiens
cacctcctgagctca

SEQ ID NO: 2060217 - DNA, 15 bp, Homo sapiens
acctcctgagctcag

SEQ ID NO: 2060218 - DNA, 15 bp, Homo sapiens
cctcctgagctcagc

SEQ ID NO: 2060219 - DNA, 15 bp, Homo sapiens
ctcctgagctcagcc

SEQ ID NO: 2060220 - DNA, 15 bp, Homo sapiens
tcctgagctcagccc

SEQ ID NO: 2060221 - DNA, 15 bp, Homo sapiens
cctgagctcagcccg

SEQ ID NO: 2060222 - DNA, 15 bp, Homo sapiens
ctgagctcagcccgc

SEQ ID NO: 2060223 - DNA, 15 bp, Homo sapiens
tgagctcagcccgcg

SEQ ID NO: 2060224 - DNA, 15 bp, Homo sapiens
gagctcagcccgcgg

SEQ ID NO: 2060225 - DNA, 15 bp, Homo sapiens
agctcagcccgcggc

SEQ ID NO: 2060226 - DNA, 15 bp, Homo sapiens
gctcagcccgcggcc

SEQ ID NO: 2060227 - DNA, 15 bp, Homo sapiens
ctcagcccgcggccc

SEQ ID NO: 2060228 - DNA, 15 bp, Homo sapiens
tcagcccgcggcccc

SEQ ID NO: 2060229 - DNA, 15 bp, Homo sapiens
cagcccgcggccccg

SEQ ID NO: 2060230 - DNA, 15 bp, Homo sapiens
agcccgcggccccgc

SEQ ID NO: 2060231 - DNA, 15 bp, Homo sapiens
gcccgcggccccgca

SEQ ID NO: 2060232 - DNA, 15 bp, Homo sapiens
cccgcggccccgcag

SEQ ID NO: 2060233 - DNA, 15 bp, Homo sapiens
ccgcggccccgcagt

SEQ ID NO: 2060234 - DNA, 15 bp, Homo sapiens
cgcggccccgcagtg

SEQ ID NO: 2060235 - DNA, 15 bp, Homo sapiens
gcggccccgcagtgg

SEQ ID NO: 2060236 - DNA, 15 bp, Homo sapiens
cggccccgcagtggg

SEQ ID NO: 2060237 - DNA, 15 bp, Homo sapiens
ggccccgcagtgggg

SEQ ID NO: 2060238 - DNA, 15 bp, Homo sapiens
gccccgcagtggggc

SEQ ID NO: 2060239 - DNA, 15 bp, Homo sapiens
ccccgcagtggggcg

SEQ ID NO: 2060240 - DNA, 15 bp, Homo sapiens
cccgcagtggggcgg

SEQ ID NO: 2060241 - DNA, 15 bp, Homo sapiens
ccgcagtggggcggc

SEQ ID NO: 2060242 - DNA, 15 bp, Homo sapiens
cgcagtggggcggcc

SEQ ID NO: 2060243 - DNA, 15 bp, Homo sapiens
gcagtggggcggcct

SEQ ID NO: 2060244 - DNA, 15 bp, Homo sapiens
cagtggggcggcctc

SEQ ID NO: 2060245 - DNA, 15 bp, Homo sapiens
agtggggcggcctca

SEQ ID NO: 2060246 - DNA, 15 bp, Homo sapiens
gtggggcggcctcac

SEQ ID NO: 2060247 - DNA, 15 bp, Homo sapiens
tggggcggcctcact

SEQ ID NO: 2060248 - DNA, 15 bp, Homo sapiens
ggggcggcctcactt

SEQ ID NO: 2060249 - DNA, 15 bp, Homo sapiens
gggcggcctcactta

SEQ ID NO: 2060250 - DNA, 15 bp, Homo sapiens
ggcggcctcacttac

SEQ ID NO: 2060251 - DNA, 15 bp, Homo sapiens
gcggcctcacttact

SEQ ID NO: 2060252 - DNA, 15 bp, Homo sapiens
cggcctcacttactg

SEQ ID NO: 2060253 - DNA, 15 bp, Homo sapiens
ggcctcacttactgg

SEQ ID NO: 2060254 - DNA, 15 bp, Homo sapiens
gcctcacttactggc

SEQ ID NO: 2060255 - DNA, 15 bp, Homo sapiens
cctcacttactggcg

SEQ ID NO: 2060256 - DNA, 15 bp, Homo sapiens
ctcacttactggcgg

SEQ ID NO: 2060257 - DNA, 15 bp, Homo sapiens
tcacttactggcggg

SEQ ID NO: 2060258 - DNA, 15 bp, Homo sapiens
cacttactggcgggg

SEQ ID NO: 2060259 - DNA, 15 bp, Homo sapiens
acttactggcgggga

SEQ ID NO: 2060260 - DNA, 15 bp, Homo sapiens
cttactggcggggaa

SEQ ID NO: 2060261 - DNA, 15 bp, Homo sapiens
ttactggcggggaag

SEQ ID NO: 2060262 - DNA, 15 bp, Homo sapiens
tactggcggggaagc

SEQ ID NO: 2060263 - DNA, 15 bp, Homo sapiens
actggcggggaagcg

SEQ ID NO: 2060264 - DNA, 15 bp, Homo sapiens
ctggcggggaagcgc

SEQ ID NO: 2060265 - DNA, 15 bp, Homo sapiens
tggcggggaagcgcg

SEQ ID NO: 2060266 - DNA, 15 bp, Homo sapiens
ggcggggaagcgcgg

SEQ ID NO: 2060267 - DNA, 15 bp, Homo sapiens
gcggggaagcgcggg

SEQ ID NO: 2060268 - DNA, 15 bp, Homo sapiens
cggggaagcgcgggt

SEQ ID NO: 2060269 - DNA, 15 bp, Homo sapiens
ggggaagcgcgggtc

SEQ ID NO: 2060270 - DNA, 15 bp, Homo sapiens
gggaagcgcgggtct

SEQ ID NO: 2060271 - DNA, 15 bp, Homo sapiens
ggaagcgcgggtctg

SEQ ID NO: 2060272 - DNA, 15 bp, Homo sapiens
gaagcgcgggtctgg

SEQ ID NO: 2060273 - DNA, 15 bp, Homo sapiens
aagcgcgggtctggg

SEQ ID NO: 2060274 - DNA, 15 bp, Homo sapiens
agcgcgggtctgggt

SEQ ID NO: 2060275 - DNA, 15 bp, Homo sapiens
gcgcgggtctgggtt

SEQ ID NO: 2060276 - DNA, 15 bp, Homo sapiens
cgcgggtctgggttg

SEQ ID NO: 2060277 - DNA, 15 bp, Homo sapiens
gcgggtctgggttgg

SEQ ID NO: 2060278 - DNA, 15 bp, Homo sapiens
cgggtctgggttggc

SEQ ID NO: 2060279 - DNA, 15 bp, Homo sapiens
gggtctgggttggcg

SEQ ID NO: 2060280 - DNA, 15 bp, Homo sapiens
ggtctgggttggcgc

SEQ ID NO: 2060281 - DNA, 15 bp, Homo sapiens
gtctgggttggcgcc

SEQ ID NO: 2060282 - DNA, 15 bp, Homo sapiens
tctgggttggcgccg

SEQ ID NO: 2060283 - DNA, 15 bp, Homo sapiens
ctgggttggcgccgt

SEQ ID NO: 2060284 - DNA, 15 bp, Homo sapiens
tgggttggcgccgta

SEQ ID NO: 2060285 - DNA, 15 bp, Homo sapiens
gggttggcgccgtac

SEQ ID NO: 2060286 - DNA, 15 bp, Homo sapiens
ggttggcgccgtacc

SEQ ID NO: 2060287 - DNA, 15 bp, Homo sapiens
gttggcgccgtacca

SEQ ID NO: 2060288 - DNA, 15 bp, Homo sapiens
ttggcgccgtaccat

SEQ ID NO: 2060289 - DNA, 15 bp, Homo sapiens
tggcgccgtaccatc

SEQ ID NO: 2060290 - DNA, 15 bp, Homo sapiens
ggcgccgtaccatcc

SEQ ID NO: 2060291 - DNA, 15 bp, Homo sapiens
gcgccgtaccatccg

SEQ ID NO: 2060292 - DNA, 15 bp, Homo sapiens
cgccgtaccatccgg

SEQ ID NO: 2060293 - DNA, 15 bp, Homo sapiens
gccgtaccatccggg

SEQ ID NO: 2060294 - DNA, 15 bp, Homo sapiens
ccgtaccatccgggg

SEQ ID NO: 2060295 - DNA, 15 bp, Homo sapiens
cgtaccatccggggc

SEQ ID NO: 2060296 - DNA, 15 bp, Homo sapiens
gtaccatccggggcc

SEQ ID NO: 2060297 - DNA, 15 bp, Homo sapiens
taccatccggggcca

SEQ ID NO: 2060298 - DNA, 15 bp, Homo sapiens
accatccggggccag

SEQ ID NO: 2060299 - DNA, 15 bp, Homo sapiens
ccatccggggccaga

SEQ ID NO: 2060300 - DNA, 15 bp, Homo sapiens
catccggggccagag

SEQ ID NO: 2060301 - DNA, 15 bp, Homo sapiens
atccggggccagagg

SEQ ID NO: 2060302 - DNA, 15 bp, Homo sapiens
tccggggccagaggc

SEQ ID NO: 2060303 - DNA, 15 bp, Homo sapiens
ccggggccagaggcg

SEQ ID NO: 2060304 - DNA, 15 bp, Homo sapiens
cggggccagaggcgc

SEQ ID NO: 2060305 - DNA, 15 bp, Homo sapiens
ggggccagaggcgct

SEQ ID NO: 2060306 - DNA, 15 bp, Homo sapiens
gggccagaggcgctg

SEQ ID NO: 2060307 - DNA, 15 bp, Homo sapiens
ggccagaggcgctgt

SEQ ID NO: 2060308 - DNA, 15 bp, Homo sapiens
gccagaggcgctgtt

SEQ ID NO: 2060309 - DNA, 15 bp, Homo sapiens
ccagaggcgctgttc

SEQ ID NO: 2060310 - DNA, 15 bp, Homo sapiens
cagaggcgctgttcc

SEQ ID NO: 2060311 - DNA, 15 bp, Homo sapiens
agaggcgctgttcct

SEQ ID NO: 2060312 - DNA, 15 bp, Homo sapiens
gaggcgctgttcctc

SEQ ID NO: 2060313 - DNA, 15 bp, Homo sapiens
aggcgctgttcctca

SEQ ID NO: 2060314 - DNA, 15 bp, Homo sapiens
ggcgctgttcctcat

SEQ ID NO: 2060315 - DNA, 15 bp, Homo sapiens
gcgctgttcctcatg

SEQ ID NO: 2060316 - DNA, 15 bp, Homo sapiens
cgctgttcctcatgg

SEQ ID NO: 2060317 - DNA, 15 bp, Homo sapiens
gctgttcctcatggt

SEQ ID NO: 2060318 - DNA, 15 bp, Homo sapiens
ctgttcctcatggtg

SEQ ID NO: 2060319 - DNA, 15 bp, Homo sapiens
tgttcctcatggtgt

SEQ ID NO: 2060320 - DNA, 15 bp, Homo sapiens
gttcctcatggtgtc

SEQ ID NO: 2060321 - DNA, 15 bp, Homo sapiens
ttcctcatggtgtcc

SEQ ID NO: 2060322 - DNA, 15 bp, Homo sapiens
tcctcatggtgtcct

SEQ ID NO: 2060323 - DNA, 15 bp, Homo sapiens
cctcatggtgtcctg

SEQ ID NO: 2060324 - DNA, 15 bp, Homo sapiens
ctcatggtgtcctgg

SEQ ID NO: 2060325 - DNA, 15 bp, Homo sapiens
tcatggtgtcctggt

SEQ ID NO: 2060326 - DNA, 15 bp, Homo sapiens
catggtgtcctggta

SEQ ID NO: 2060327 - DNA, 15 bp, Homo sapiens
atggtgtcctggtac

SEQ ID NO: 2060328 - DNA, 15 bp, Homo sapiens
tggtgtcctggtacg

SEQ ID NO: 2060329 - DNA, 15 bp, Homo sapiens
ggtgtcctggtacgg

SEQ ID NO: 2060330 - DNA, 15 bp, Homo sapiens
gtgtcctggtacggc

SEQ ID NO: 2060331 - DNA, 15 bp, Homo sapiens
tgtcctggtacggcg

SEQ ID NO: 2060332 - DNA, 15 bp, Homo sapiens
gtcctggtacggcgg

SEQ ID NO: 2060333 - DNA, 15 bp, Homo sapiens
tcctggtacggcggc

SEQ ID NO: 2060334 - DNA, 15 bp, Homo sapiens
cctggtacggcggca

SEQ ID NO: 2060335 - DNA, 15 bp, Homo sapiens
ctggtacggcggcag

SEQ ID NO: 2060336 - DNA, 15 bp, Homo sapiens
tggtacggcggcagc

SEQ ID NO: 2060337 - DNA, 15 bp, Homo sapiens
ggtacggcggcagct

SEQ ID NO: 2060338 - DNA, 15 bp, Homo sapiens
gtacggcggcagctc

SEQ ID NO: 2060339 - DNA, 15 bp, Homo sapiens
tacggcggcagctcg

SEQ ID NO: 2060340 - DNA, 15 bp, Homo sapiens
acggcggcagctcgc

SEQ ID NO: 2060341 - DNA, 15 bp, Homo sapiens
cggcggcagctcgct

SEQ ID NO: 2060342 - DNA, 15 bp, Homo sapiens
ggcggcagctcgctc

SEQ ID NO: 2060343 - DNA, 15 bp, Homo sapiens
gcggcagctcgctca

SEQ ID NO: 2060344 - DNA, 15 bp, Homo sapiens
cggcagctcgctcat

SEQ ID NO: 2060345 - DNA, 15 bp, Homo sapiens
ggcagctcgctcatg

SEQ ID NO: 2060346 - DNA, 15 bp, Homo sapiens
gcagctcgctcatgt

SEQ ID NO: 2060347 - DNA, 15 bp, Homo sapiens
cagctcgctcatgtt

SEQ ID NO: 2060348 - DNA, 15 bp, Homo sapiens
agctcgctcatgttg

SEQ ID NO: 2060349 - DNA, 15 bp, Homo sapiens
gctcgctcatgttgc

SEQ ID NO: 2060350 - DNA, 15 bp, Homo sapiens
ctcgctcatgttgcc

SEQ ID NO: 2060351 - DNA, 15 bp, Homo sapiens
tcgctcatgttgccc

SEQ ID NO: 2060352 - DNA, 15 bp, Homo sapiens
cgctcatgttgccca

SEQ ID NO: 2060353 - DNA, 15 bp, Homo sapiens
gctcatgttgcccag

SEQ ID NO: 2060354 - DNA, 15 bp, Homo sapiens
ctcatgttgcccagg

SEQ ID NO: 2060355 - DNA, 15 bp, Homo sapiens
tcatgttgcccaggt

SEQ ID NO: 2060356 - DNA, 15 bp, Homo sapiens
catgttgcccaggtt

SEQ ID NO: 2060357 - DNA, 15 bp, Homo sapiens
atgttgcccaggttg

SEQ ID NO: 2060358 - DNA, 15 bp, Homo sapiens
tgttgcccaggttgc

SEQ ID NO: 2060359 - DNA, 15 bp, Homo sapiens
gttgcccaggttgcc

SEQ ID NO: 2060360 - DNA, 15 bp, Homo sapiens
ttgcccaggttgccg

SEQ ID NO: 2060361 - DNA, 15 bp, Homo sapiens
tgcccaggttgccgt

SEQ ID NO: 2060362 - DNA, 15 bp, Homo sapiens
gcccaggttgccgtt

SEQ ID NO: 2060363 - DNA, 15 bp, Homo sapiens
cccaggttgccgttg

SEQ ID NO: 2060364 - DNA, 15 bp, Homo sapiens
ccaggttgccgttgc

SEQ ID NO: 2060365 - DNA, 15 bp, Homo sapiens
caggttgccgttgca

SEQ ID NO: 2060366 - DNA, 15 bp, Homo sapiens
aggttgccgttgcag

SEQ ID NO: 2060367 - DNA, 15 bp, Homo sapiens
ggttgccgttgcagt

SEQ ID NO: 2060368 - DNA, 15 bp, Homo sapiens
gttgccgttgcagta

SEQ ID NO: 2060369 - DNA, 15 bp, Homo sapiens
ttgccgttgcagtag

SEQ ID NO: 2060370 - DNA, 15 bp, Homo sapiens
tgccgttgcagtagc

SEQ ID NO: 2060371 - DNA, 15 bp, Homo sapiens
gccgttgcagtagcc

SEQ ID NO: 2060372 - DNA, 15 bp, Homo sapiens
ccgttgcagtagccc

SEQ ID NO: 2060373 - DNA, 15 bp, Homo sapiens
cgttgcagtagcccc

SEQ ID NO: 2060374 - DNA, 15 bp, Homo sapiens
gttgcagtagccccc

SEQ ID NO: 2060375 - DNA, 15 bp, Homo sapiens
ttgcagtagcccccc

SEQ ID NO: 2060376 - DNA, 15 bp, Homo sapiens
tgcagtagcccccca

SEQ ID NO: 2060377 - DNA, 15 bp, Homo sapiens
gcagtagccccccac

SEQ ID NO: 2060378 - DNA, 15 bp, Homo sapiens
cagtagccccccacg

SEQ ID NO: 2060379 - DNA, 15 bp, Homo sapiens
agtagccccccacgg

SEQ ID NO: 2060380 - DNA, 15 bp, Homo sapiens
gtagccccccacggc

SEQ ID NO: 2060381 - DNA, 15 bp, Homo sapiens
tagccccccacggcg

SEQ ID NO: 2060382 - DNA, 15 bp, Homo sapiens
agccccccacggcgg

SEQ ID NO: 2060383 - DNA, 15 bp, Homo sapiens
gccccccacggcgga

SEQ ID NO: 2060384 - DNA, 15 bp, Homo sapiens
ccccccacggcggag

SEQ ID NO: 2060385 - DNA, 15 bp, Homo sapiens
cccccacggcggagt

SEQ ID NO: 2060386 - DNA, 15 bp, Homo sapiens
ccccacggcggagtg

SEQ ID NO: 2060387 - DNA, 15 bp, Homo sapiens
cccacggcggagtgc

SEQ ID NO: 2060388 - DNA, 15 bp, Homo sapiens
ccacggcggagtgcg

SEQ ID NO: 2060389 - DNA, 15 bp, Homo sapiens
cacggcggagtgcga

SEQ ID NO: 2060390 - DNA, 15 bp, Homo sapiens
acggcggagtgcgag

SEQ ID NO: 2060391 - DNA, 15 bp, Homo sapiens
cggcggagtgcgaga

SEQ ID NO: 2060392 - DNA, 15 bp, Homo sapiens
ggcggagtgcgagag

SEQ ID NO: 2060393 - DNA, 15 bp, Homo sapiens
gcggagtgcgagagc

SEQ ID NO: 2060394 - DNA, 15 bp, Homo sapiens
cggagtgcgagagct

SEQ ID NO: 2060395 - DNA, 15 bp, Homo sapiens
ggagtgcgagagctg

SEQ ID NO: 2060396 - DNA, 15 bp, Homo sapiens
gagtgcgagagctgg

SEQ ID NO: 2060397 - DNA, 15 bp, Homo sapiens
agtgcgagagctggg

SEQ ID NO: 2060398 - DNA, 15 bp, Homo sapiens
gtgcgagagctgggg

SEQ ID NO: 2060399 - DNA, 15 bp, Homo sapiens
tgcgagagctggggc

SEQ ID NO: 2060400 - DNA, 15 bp, Homo sapiens
gcgagagctggggca

SEQ ID NO: 2060401 - DNA, 15 bp, Homo sapiens
cgagagctggggcac

SEQ ID NO: 2060402 - DNA, 15 bp, Homo sapiens
gagagctggggcacc

SEQ ID NO: 2060403 - DNA, 15 bp, Homo sapiens
agagctggggcaccc

SEQ ID NO: 2060404 - DNA, 15 bp, Homo sapiens
gagctggggcacccc

SEQ ID NO: 2060405 - DNA, 15 bp, Homo sapiens
agctggggcaccccc

SEQ ID NO: 2060406 - DNA, 15 bp, Homo sapiens
gctggggcacccccg

SEQ ID NO: 2060407 - DNA, 15 bp, Homo sapiens
ctggggcacccccgc

SEQ ID NO: 2060408 - DNA, 15 bp, Homo sapiens
tggggcacccccgcc

SEQ ID NO: 2060409 - DNA, 15 bp, Homo sapiens
ggggcacccccgccg

SEQ ID NO: 2060410 - DNA, 15 bp, Homo sapiens
gggcacccccgccgc

SEQ ID NO: 2060411 - DNA, 15 bp, Homo sapiens
ggcacccccgccgcc

SEQ ID NO: 2060412 - DNA, 15 bp, Homo sapiens
gcacccccgccgccg

SEQ ID NO: 2060413 - DNA, 15 bp, Homo sapiens
cacccccgccgccgt

SEQ ID NO: 2060414 - DNA, 15 bp, Homo sapiens
acccccgccgccgtc

SEQ ID NO: 2060415 - DNA, 15 bp, Homo sapiens
cccccgccgccgtca

SEQ ID NO: 2060416 - DNA, 15 bp, Homo sapiens
ccccgccgccgtcat

SEQ ID NO: 2060417 - DNA, 15 bp, Homo sapiens
cccgccgccgtcatg

SEQ ID NO: 2060418 - DNA, 15 bp, Homo sapiens
ccgccgccgtcatgt

SEQ ID NO: 2060419 - DNA, 15 bp, Homo sapiens
cgccgccgtcatgtg

SEQ ID NO: 2060420 - DNA, 15 bp, Homo sapiens
gccgccgtcatgtgg

SEQ ID NO: 2060421 - DNA, 15 bp, Homo sapiens
ccgccgtcatgtggt

SEQ ID NO: 2060422 - DNA, 15 bp, Homo sapiens
cgccgtcatgtggta

SEQ ID NO: 2060423 - DNA, 15 bp, Homo sapiens
gccgtcatgtggtag

SEQ ID NO: 2060424 - DNA, 15 bp, Homo sapiens
ccgtcatgtggtagg

SEQ ID NO: 2060425 - DNA, 15 bp, Homo sapiens
cgtcatgtggtaggc

SEQ ID NO: 2060426 - DNA, 15 bp, Homo sapiens
gtcatgtggtaggcg

SEQ ID NO: 2060427 - DNA, 15 bp, Homo sapiens
tcatgtggtaggcgg

SEQ ID NO: 2060428 - DNA, 15 bp, Homo sapiens
catgtggtaggcggc

SEQ ID NO: 2060429 - DNA, 15 bp, Homo sapiens
atgtggtaggcggcg

SEQ ID NO: 2060430 - DNA, 15 bp, Homo sapiens
tgtggtaggcggcgg

SEQ ID NO: 2060431 - DNA, 15 bp, Homo sapiens
gtggtaggcggcggt

SEQ ID NO: 2060432 - DNA, 15 bp, Homo sapiens
tggtaggcggcggtg

SEQ ID NO: 2060433 - DNA, 15 bp, Homo sapiens
ggtaggcggcggtga

SEQ ID NO: 2060434 - DNA, 15 bp, Homo sapiens
gtaggcggcggtgac

SEQ ID NO: 2060435 - DNA, 15 bp, Homo sapiens
taggcggcggtgacg

SEQ ID NO: 2060436 - DNA, 15 bp, Homo sapiens
aggcggcggtgacgg

SEQ ID NO: 2060437 - DNA, 15 bp, Homo sapiens
ggcggcggtgacggc

SEQ ID NO: 2060438 - DNA, 15 bp, Homo sapiens
gcggcggtgacggcg

SEQ ID NO: 2060439 - DNA, 15 bp, Homo sapiens
cggcggtgacggcgc

SEQ ID NO: 2060440 - DNA, 15 bp, Homo sapiens
ggcggtgacggcgcc

SEQ ID NO: 2060441 - DNA, 15 bp, Homo sapiens
gcggtgacggcgccg

SEQ ID NO: 2060442 - DNA, 15 bp, Homo sapiens
cggtgacggcgccgt

SEQ ID NO: 2060443 - DNA, 15 bp, Homo sapiens
ggtgacggcgccgtg

SEQ ID NO: 2060444 - DNA, 15 bp, Homo sapiens
gtgacggcgccgtgg

SEQ ID NO: 2060445 - DNA, 15 bp, Homo sapiens
tgacggcgccgtggt

SEQ ID NO: 2060446 - DNA, 15 bp, Homo sapiens
gacggcgccgtggtg

SEQ ID NO: 2060447 - DNA, 15 bp, Homo sapiens
acggcgccgtggtgc

SEQ ID NO: 2060448 - DNA, 15 bp, Homo sapiens
cggcgccgtggtgcc

SEQ ID NO: 2060449 - DNA, 15 bp, Homo sapiens
ggcgccgtggtgccc

SEQ ID NO: 2060450 - DNA, 15 bp, Homo sapiens
gcgccgtggtgcccc

SEQ ID NO: 2060451 - DNA, 15 bp, Homo sapiens
cgccgtggtgcccca

SEQ ID NO: 2060452 - DNA, 15 bp, Homo sapiens
gccgtggtgccccac

SEQ ID NO: 2060453 - DNA, 15 bp, Homo sapiens
ccgtggtgccccacg

SEQ ID NO: 2060454 - DNA, 15 bp, Homo sapiens
cgtggtgccccacgg

SEQ ID NO: 2060455 - DNA, 15 bp, Homo sapiens
gtggtgccccacggc

SEQ ID NO: 2060456 - DNA, 15 bp, Homo sapiens
tggtgccccacggcg

SEQ ID NO: 2060457 - DNA, 15 bp, Homo sapiens
ggtgccccacggcgt

SEQ ID NO: 2060458 - DNA, 15 bp, Homo sapiens
gtgccccacggcgtg

SEQ ID NO: 2060459 - DNA, 15 bp, Homo sapiens
tgccccacggcgtgc

SEQ ID NO: 2060460 - DNA, 15 bp, Homo sapiens
gccccacggcgtgct

SEQ ID NO: 2060461 - DNA, 15 bp, Homo sapiens
ccccacggcgtgctg

SEQ ID NO: 2060462 - DNA, 15 bp, Homo sapiens
cccacggcgtgctgc

SEQ ID NO: 2060463 - DNA, 15 bp, Homo sapiens
ccacggcgtgctgct

SEQ ID NO: 2060464 - DNA, 15 bp, Homo sapiens
cacggcgtgctgctg

SEQ ID NO: 2060465 - DNA, 15 bp, Homo sapiens
acggcgtgctgctgc

SEQ ID NO: 2060466 - DNA, 15 bp, Homo sapiens
cggcgtgctgctgca

SEQ ID NO: 2060467 - DNA, 15 bp, Homo sapiens
ggcgtgctgctgcat

SEQ ID NO: 2060468 - DNA, 15 bp, Homo sapiens
gcgtgctgctgcatg

SEQ ID NO: 2060469 - DNA, 15 bp, Homo sapiens
cgtgctgctgcatgg

SEQ ID NO: 2060470 - DNA, 15 bp, Homo sapiens
gtgctgctgcatggc

SEQ ID NO: 2060471 - DNA, 15 bp, Homo sapiens
tgctgctgcatggcc

SEQ ID NO: 2060472 - DNA, 15 bp, Homo sapiens
gctgctgcatggccg

SEQ ID NO: 2060473 - DNA, 15 bp, Homo sapiens
ctgctgcatggccgc

SEQ ID NO: 2060474 - DNA, 15 bp, Homo sapiens
tgctgcatggccgct

SEQ ID NO: 2060475 - DNA, 15 bp, Homo sapiens
gctgcatggccgctg

SEQ ID NO: 2060476 - DNA, 15 bp, Homo sapiens
ctgcatggccgctgt

SEQ ID NO: 2060477 - DNA, 15 bp, Homo sapiens
tgcatggccgctgtt

SEQ ID NO: 2060478 - DNA, 15 bp, Homo sapiens
gcatggccgctgttg

SEQ ID NO: 2060479 - DNA, 15 bp, Homo sapiens
catggccgctgttgg

SEQ ID NO: 2060480 - DNA, 15 bp, Homo sapiens
atggccgctgttggc

SEQ ID NO: 2060481 - DNA, 15 bp, Homo sapiens
tggccgctgttggcg

SEQ ID NO: 2060482 - DNA, 15 bp, Homo sapiens
ggccgctgttggcgg

SEQ ID NO: 2060483 - DNA, 15 bp, Homo sapiens
gccgctgttggcggt

SEQ ID NO: 2060484 - DNA, 15 bp, Homo sapiens
ccgctgttggcggtg

SEQ ID NO: 2060485 - DNA, 15 bp, Homo sapiens
cgctgttggcggtgc

SEQ ID NO: 2060486 - DNA, 15 bp, Homo sapiens
gctgttggcggtgcc

SEQ ID NO: 2060487 - DNA, 15 bp, Homo sapiens
ctgttggcggtgccg

SEQ ID NO: 2060488 - DNA, 15 bp, Homo sapiens
tgttggcggtgccgc

SEQ ID NO: 2060489 - DNA, 15 bp, Homo sapiens
gttggcggtgccgcc

SEQ ID NO: 2060490 - DNA, 15 bp, Homo sapiens
ttggcggtgccgcct

SEQ ID NO: 2060491 - DNA, 15 bp, Homo sapiens
tggcggtgccgcctg

SEQ ID NO: 2060492 - DNA, 15 bp, Homo sapiens
ggcggtgccgcctgg

SEQ ID NO: 2060493 - DNA, 15 bp, Homo sapiens
gcggtgccgcctggc

SEQ ID NO: 2060494 - DNA, 15 bp, Homo sapiens
cggtgccgcctggcc

SEQ ID NO: 2060495 - DNA, 15 bp, Homo sapiens
ggtgccgcctggccc

SEQ ID NO: 2060496 - DNA, 15 bp, Homo sapiens
gtgccgcctggccct

SEQ ID NO: 2060497 - DNA, 15 bp, Homo sapiens
tgccgcctggccctg

SEQ ID NO: 2060498 - DNA, 15 bp, Homo sapiens
gccgcctggccctgc

SEQ ID NO: 2060499 - DNA, 15 bp, Homo sapiens
ccgcctggccctgcc

SEQ ID NO: 2060500 - DNA, 15 bp, Homo sapiens
cgcctggccctgcct

SEQ ID NO: 2060501 - DNA, 15 bp, Homo sapiens
gcctggccctgcctg

SEQ ID NO: 2060502 - DNA, 15 bp, Homo sapiens
cctggccctgcctgt

SEQ ID NO: 2060503 - DNA, 15 bp, Homo sapiens
ctggccctgcctgta

SEQ ID NO: 2060504 - DNA, 15 bp, Homo sapiens
tggccctgcctgtac

SEQ ID NO: 2060505 - DNA, 15 bp, Homo sapiens
ggccctgcctgtacg

SEQ ID NO: 2060506 - DNA, 15 bp, Homo sapiens
gccctgcctgtacgc

SEQ ID NO: 2060507 - DNA, 15 bp, Homo sapiens
ccctgcctgtacgcc

SEQ ID NO: 2060508 - DNA, 15 bp, Homo sapiens
cctgcctgtacgccg

SEQ ID NO: 2060509 - DNA, 15 bp, Homo sapiens
ctgcctgtacgccgc

SEQ ID NO: 2060510 - DNA, 15 bp, Homo sapiens
tgcctgtacgccgcc

SEQ ID NO: 2060511 - DNA, 15 bp, Homo sapiens
gcctgtacgccgcca

SEQ ID NO: 2060512 - DNA, 15 bp, Homo sapiens
cctgtacgccgccag

SEQ ID NO: 2060513 - DNA, 15 bp, Homo sapiens
ctgtacgccgccagc

SEQ ID NO: 2060514 - DNA, 15 bp, Homo sapiens
tgtacgccgccagcg

SEQ ID NO: 2060515 - DNA, 15 bp, Homo sapiens
gtacgccgccagcgg

SEQ ID NO: 2060516 - DNA, 15 bp, Homo sapiens
tacgccgccagcgga

SEQ ID NO: 2060517 - DNA, 15 bp, Homo sapiens
acgccgccagcggag

SEQ ID NO: 2060518 - DNA, 15 bp, Homo sapiens
cgccgccagcggagc

SEQ ID NO: 2060519 - DNA, 15 bp, Homo sapiens
gccgccagcggagcc

SEQ ID NO: 2060520 - DNA, 15 bp, Homo sapiens
ccgccagcggagccc

SEQ ID NO: 2060521 - DNA, 15 bp, Homo sapiens
cgccagcggagcccc

SEQ ID NO: 2060522 - DNA, 15 bp, Homo sapiens
gccagcggagccccg

SEQ ID NO: 2060523 - DNA, 15 bp, Homo sapiens
ccagcggagccccga

SEQ ID NO: 2060524 - DNA, 15 bp, Homo sapiens
cagcggagccccgag

SEQ ID NO: 2060525 - DNA, 15 bp, Homo sapiens
agcggagccccgagg

SEQ ID NO: 2060526 - DNA, 15 bp, Homo sapiens
gcggagccccgaggc

SEQ ID NO: 2060527 - DNA, 15 bp, Homo sapiens
cggagccccgaggcc

SEQ ID NO: 2060528 - DNA, 15 bp, Homo sapiens
ggagccccgaggccg

SEQ ID NO: 2060529 - DNA, 15 bp, Homo sapiens
gagccccgaggccgc

SEQ ID NO: 2060530 - DNA, 15 bp, Homo sapiens
agccccgaggccgcc

SEQ ID NO: 2060531 - DNA, 15 bp, Homo sapiens
gccccgaggccgccg

SEQ ID NO: 2060532 - DNA, 15 bp, Homo sapiens
ccccgaggccgccgc

SEQ ID NO: 2060533 - DNA, 15 bp, Homo sapiens
cccgaggccgccgcc

SEQ ID NO: 2060534 - DNA, 15 bp, Homo sapiens
ccgaggccgccgccc

SEQ ID NO: 2060535 - DNA, 15 bp, Homo sapiens
cgaggccgccgccct

SEQ ID NO: 2060536 - DNA, 15 bp, Homo sapiens
gaggccgccgccctc

SEQ ID NO: 2060537 - DNA, 15 bp, Homo sapiens
aggccgccgccctcc

SEQ ID NO: 2060538 - DNA, 15 bp, Homo sapiens
ggccgccgccctcca

SEQ ID NO: 2060539 - DNA, 15 bp, Homo sapiens
gccgccgccctccat

SEQ ID NO: 2060540 - DNA, 15 bp, Homo sapiens
ccgccgccctccatg

SEQ ID NO: 2060541 - DNA, 15 bp, Homo sapiens
cgccgccctccatgc

SEQ ID NO: 2060542 - DNA, 15 bp, Homo sapiens
gccgccctccatgcc

SEQ ID NO: 2060543 - DNA, 15 bp, Homo sapiens
ccgccctccatgccc

SEQ ID NO: 2060544 - DNA, 15 bp, Homo sapiens
cgccctccatgccca

SEQ ID NO: 2060545 - DNA, 15 bp, Homo sapiens
gccctccatgcccac

SEQ ID NO: 2060546 - DNA, 15 bp, Homo sapiens
ccctccatgcccact

SEQ ID NO: 2060547 - DNA, 15 bp, Homo sapiens
cctccatgcccactt

SEQ ID NO: 2060548 - DNA, 15 bp, Homo sapiens
ctccatgcccacttt

SEQ ID NO: 2060549 - DNA, 15 bp, Homo sapiens
tccatgcccactttc

SEQ ID NO: 2060550 - DNA, 15 bp, Homo sapiens
ccatgcccactttct

SEQ ID NO: 2060551 - DNA, 15 bp, Homo sapiens
catgcccactttctt

SEQ ID NO: 2060552 - DNA, 15 bp, Homo sapiens
atgcccactttcttg

SEQ ID NO: 2060553 - DNA, 15 bp, Homo sapiens
tgcccactttcttgt

SEQ ID NO: 2060554 - DNA, 15 bp, Homo sapiens
gcccactttcttgta

SEQ ID NO: 2060555 - DNA, 15 bp, Homo sapiens
cccactttcttgtag

SEQ ID NO: 2060556 - DNA, 15 bp, Homo sapiens
ccactttcttgtagc

SEQ ID NO: 2060557 - DNA, 15 bp, Homo sapiens
cactttcttgtagct

SEQ ID NO: 2060558 - DNA, 15 bp, Homo sapiens
actttcttgtagctt

SEQ ID NO: 2060559 - DNA, 15 bp, Homo sapiens
ctttcttgtagcttt

SEQ ID NO: 2060560 - DNA, 15 bp, Homo sapiens
tttcttgtagctttc

SEQ ID NO: 2060561 - DNA, 15 bp, Homo sapiens
ttcttgtagctttcc

SEQ ID NO: 2060562 - DNA, 15 bp, Homo sapiens
tcttgtagctttcct

SEQ ID NO: 2060563 - DNA, 15 bp, Homo sapiens
cttgtagctttcctc

SEQ ID NO: 2060564 - DNA, 15 bp, Homo sapiens
ttgtagctttcctcc

SEQ ID NO: 2060565 - DNA, 15 bp, Homo sapiens
tgtagctttcctcca

SEQ ID NO: 2060566 - DNA, 15 bp, Homo sapiens
gtagctttcctccag

SEQ ID NO: 2060567 - DNA, 15 bp, Homo sapiens
tagctttcctccagg

SEQ ID NO: 2060568 - DNA, 15 bp, Homo sapiens
agctttcctccaggg

SEQ ID NO: 2060569 - DNA, 15 bp, Homo sapiens
gctttcctccagggg

SEQ ID NO: 2060570 - DNA, 15 bp, Homo sapiens
ctttcctccagggga

SEQ ID NO: 2060571 - DNA, 15 bp, Homo sapiens
tttcctccaggggac

SEQ ID NO: 2060572 - DNA, 15 bp, Homo sapiens
ttcctccaggggact

SEQ ID NO: 2060573 - DNA, 15 bp, Homo sapiens
tcctccaggggactc

SEQ ID NO: 2060574 - DNA, 15 bp, Homo sapiens
cctccaggggactca

SEQ ID NO: 2060575 - DNA, 15 bp, Homo sapiens
ctccaggggactcaa

SEQ ID NO: 2060576 - DNA, 15 bp, Homo sapiens
tccaggggactcaag

SEQ ID NO: 2060577 - DNA, 15 bp, Homo sapiens
ccaggggactcaaga

SEQ ID NO: 2060578 - DNA, 15 bp, Homo sapiens
caggggactcaagat

SEQ ID NO: 2060579 - DNA, 15 bp, Homo sapiens
aggggactcaagatg

SEQ ID NO: 2060580 - DNA, 15 bp, Homo sapiens
ggggactcaagatgt

SEQ ID NO: 2060581 - DNA, 15 bp, Homo sapiens
gggactcaagatgtc

SEQ ID NO: 2060582 - DNA, 15 bp, Homo sapiens
ggactcaagatgtca

SEQ ID NO: 2060583 - DNA, 15 bp, Homo sapiens
gactcaagatgtcag

SEQ ID NO: 2060584 - DNA, 15 bp, Homo sapiens
actcaagatgtcaga

SEQ ID NO: 2060585 - DNA, 15 bp, Homo sapiens
ctcaagatgtcagac

SEQ ID NO: 2060586 - DNA, 15 bp, Homo sapiens
tcaagatgtcagaca

SEQ ID NO: 2060587 - DNA, 15 bp, Homo sapiens
caagatgtcagacac

SEQ ID NO: 2060588 - DNA, 15 bp, Homo sapiens
aagatgtcagacact

SEQ ID NO: 2060589 - DNA, 15 bp, Homo sapiens
agatgtcagacactg

SEQ ID NO: 2060590 - DNA, 15 bp, Homo sapiens
gatgtcagacactga

SEQ ID NO: 2060591 - DNA, 15 bp, Homo sapiens
atgtcagacactgag

SEQ ID NO: 2060592 - DNA, 15 bp, Homo sapiens
tgtcagacactgaga

SEQ ID NO: 2060593 - DNA, 15 bp, Homo sapiens
gtcagacactgagaa

SEQ ID NO: 2060594 - DNA, 15 bp, Homo sapiens
tcagacactgagaac

SEQ ID NO: 2060595 - DNA, 15 bp, Homo sapiens
cagacactgagaacg

SEQ ID NO: 2060596 - DNA, 15 bp, Homo sapiens
agacactgagaacgg

SEQ ID NO: 2060597 - DNA, 15 bp, Homo sapiens
gacactgagaacgga

SEQ ID NO: 2060598 - DNA, 15 bp, Homo sapiens
acactgagaacggag

SEQ ID NO: 2060599 - DNA, 15 bp, Homo sapiens
cactgagaacggagt

SEQ ID NO: 2060600 - DNA, 15 bp, Homo sapiens
actgagaacggagtc

SEQ ID NO: 2060601 - DNA, 15 bp, Homo sapiens
ctgagaacggagtcg

SEQ ID NO: 2060602 - DNA, 15 bp, Homo sapiens
tgagaacggagtcgt

SEQ ID NO: 2060603 - DNA, 15 bp, Homo sapiens
gagaacggagtcgtg

SEQ ID NO: 2060604 - DNA, 15 bp, Homo sapiens
agaacggagtcgtgt

SEQ ID NO: 2060605 - DNA, 15 bp, Homo sapiens
gaacggagtcgtgtg

SEQ ID NO: 2060606 - DNA, 15 bp, Homo sapiens
aacggagtcgtgtgc

SEQ ID NO: 2060607 - DNA, 15 bp, Homo sapiens
acggagtcgtgtgct

SEQ ID NO: 2060608 - DNA, 15 bp, Homo sapiens
cggagtcgtgtgctt

SEQ ID NO: 2060609 - DNA, 15 bp, Homo sapiens
ggagtcgtgtgcttt

SEQ ID NO: 2060610 - DNA, 15 bp, Homo sapiens
gagtcgtgtgctttg

SEQ ID NO: 2060611 - DNA, 15 bp, Homo sapiens
agtcgtgtgctttgg

SEQ ID NO: 2060612 - DNA, 15 bp, Homo sapiens
gtcgtgtgctttgga

SEQ ID NO: 2060613 - DNA, 15 bp, Homo sapiens
tcgtgtgctttggac

SEQ ID NO: 2060614 - DNA, 15 bp, Homo sapiens
cgtgtgctttggact

SEQ ID NO: 2060615 - DNA, 15 bp, Homo sapiens
gtgtgctttggactc

SEQ ID NO: 2060616 - DNA, 15 bp, Homo sapiens
tgtgctttggactca

SEQ ID NO: 2060617 - DNA, 15 bp, Homo sapiens
gtgctttggactcat

SEQ ID NO: 2060618 - DNA, 15 bp, Homo sapiens
tgctttggactcatc

SEQ ID NO: 2060619 - DNA, 15 bp, Homo sapiens
gctttggactcatcg

SEQ ID NO: 2060620 - DNA, 15 bp, Homo sapiens
ctttggactcatcga

SEQ ID NO: 2060621 - DNA, 15 bp, Homo sapiens
tttggactcatcgac

SEQ ID NO: 2060622 - DNA, 15 bp, Homo sapiens
ttggactcatcgaca

SEQ ID NO: 2060623 - DNA, 15 bp, Homo sapiens
tggactcatcgacat

SEQ ID NO: 2060624 - DNA, 15 bp, Homo sapiens
ggactcatcgacatg

SEQ ID NO: 2060625 - DNA, 15 bp, Homo sapiens
gactcatcgacatga

SEQ ID NO: 2060626 - DNA, 15 bp, Homo sapiens
actcatcgacatgat

SEQ ID NO: 2060627 - DNA, 15 bp, Homo sapiens
ctcatcgacatgatt

SEQ ID NO: 2060628 - DNA, 15 bp, Homo sapiens
tcatcgacatgattc

SEQ ID NO: 2060629 - DNA, 15 bp, Homo sapiens
catcgacatgattcg

SEQ ID NO: 2060630 - DNA, 15 bp, Homo sapiens
atcgacatgattcgg

SEQ ID NO: 2060631 - DNA, 15 bp, Homo sapiens
tcgacatgattcggc

SEQ ID NO: 2060632 - DNA, 15 bp, Homo sapiens
cgacatgattcggcg

SEQ ID NO: 2060633 - DNA, 15 bp, Homo sapiens
gacatgattcggcgg

SEQ ID NO: 2060634 - DNA, 15 bp, Homo sapiens
acatgattcggcggc

SEQ ID NO: 2060635 - DNA, 15 bp, Homo sapiens
catgattcggcggcg

SEQ ID NO: 2060636 - DNA, 15 bp, Homo sapiens
atgattcggcggcgg

SEQ ID NO: 2060637 - DNA, 15 bp, Homo sapiens
tgattcggcggcggc

SEQ ID NO: 2060638 - DNA, 15 bp, Homo sapiens
gattcggcggcggct

SEQ ID NO: 2060639 - DNA, 15 bp, Homo sapiens
attcggcggcggctg

SEQ ID NO: 2060640 - DNA, 15 bp, Homo sapiens
ttcggcggcggctgg

SEQ ID NO: 2060641 - DNA, 15 bp, Homo sapiens
tcggcggcggctgga

SEQ ID NO: 2060642 - DNA, 15 bp, Homo sapiens
cggcggcggctggag

SEQ ID NO: 2060643 - DNA, 15 bp, Homo sapiens
ggcggcggctggagg

SEQ ID NO: 2060644 - DNA, 15 bp, Homo sapiens
gcggcggctggagga

SEQ ID NO: 2060645 - DNA, 15 bp, Homo sapiens
cggcggctggaggag

SEQ ID NO: 2060646 - DNA, 15 bp, Homo sapiens
ggcggctggaggagg

SEQ ID NO: 2060647 - DNA, 15 bp, Homo sapiens
gcggctggaggagga

SEQ ID NO: 2060648 - DNA, 15 bp, Homo sapiens
cggctggaggaggaa

SEQ ID NO: 2060649 - DNA, 15 bp, Homo sapiens
ggctggaggaggaag

SEQ ID NO: 2060650 - DNA, 15 bp, Homo sapiens
gctggaggaggaagg

SEQ ID NO: 2060651 - DNA, 15 bp, Homo sapiens
ctggaggaggaagga

SEQ ID NO: 2060652 - DNA, 15 bp, Homo sapiens
tggaggaggaaggaa

SEQ ID NO: 2060653 - DNA, 15 bp, Homo sapiens
ggaggaggaaggaag

SEQ ID NO: 2060654 - DNA, 15 bp, Homo sapiens
gaggaggaaggaaga

SEQ ID NO: 2060655 - DNA, 15 bp, Homo sapiens
aggaggaaggaagag

SEQ ID NO: 2060656 - DNA, 15 bp, Homo sapiens
ggaggaaggaagagg

SEQ ID NO: 2060657 - DNA, 15 bp, Homo sapiens
gaggaaggaagagga

SEQ ID NO: 2060658 - DNA, 15 bp, Homo sapiens
aggaaggaagaggag

SEQ ID NO: 2060659 - DNA, 15 bp, Homo sapiens
ggaaggaagaggagg

SEQ ID NO: 2060660 - DNA, 15 bp, Homo sapiens
gaaggaagaggagga

SEQ ID NO: 2060661 - DNA, 15 bp, Homo sapiens
aaggaagaggaggaa

SEQ ID NO: 2060662 - DNA, 15 bp, Homo sapiens
aggaagaggaggaaa

SEQ ID NO: 2060663 - DNA, 15 bp, Homo sapiens
ggaagaggaggaaaa

SEQ ID NO: 2060664 - DNA, 15 bp, Homo sapiens
gaagaggaggaaaaa

SEQ ID NO: 2060665 - DNA, 15 bp, Homo sapiens
aagaggaggaaaaaa

SEQ ID NO: 2060666 - DNA, 15 bp, Homo sapiens
agaggaggaaaaaaa

SEQ ID NO: 2060667 - DNA, 15 bp, Homo sapiens
gaggaggaaaaaaaa

SEQ ID NO: 2060668 - DNA, 15 bp, Homo sapiens
aggaggaaaaaaaag

SEQ ID NO: 2060669 - DNA, 15 bp, Homo sapiens
ggaggaaaaaaaagg

SEQ ID NO: 2060670 - DNA, 15 bp, Homo sapiens
gaggaaaaaaaaggg

SEQ ID NO: 2060671 - DNA, 15 bp, Homo sapiens
aggaaaaaaaaggga

SEQ ID NO: 2060672 - DNA, 15 bp, Homo sapiens
ggaaaaaaaagggag

SEQ ID NO: 2060673 - DNA, 15 bp, Homo sapiens
gaaaaaaaagggaga

SEQ ID NO: 2060674 - DNA, 15 bp, Homo sapiens
aaaaaaaagggagag

SEQ ID NO: 2060675 - DNA, 15 bp, Homo sapiens
aaaaaaagggagagg

SEQ ID NO: 2060676 - DNA, 15 bp, Homo sapiens
aaaaaagggagaggg

SEQ ID NO: 2060677 - DNA, 15 bp, Homo sapiens
aaaaagggagagggg

SEQ ID NO: 2060678 - DNA, 15 bp, Homo sapiens
aaaagggagaggggg

SEQ ID NO: 2060679 - DNA, 15 bp, Homo sapiens
aaagggagaggggga

SEQ ID NO: 2060680 - DNA, 15 bp, Homo sapiens
aagggagagggggaa

SEQ ID NO: 2060681 - DNA, 15 bp, Homo sapiens
agggagagggggaag

SEQ ID NO: 2060682 - DNA, 15 bp, Homo sapiens
gggagagggggaagg

SEQ ID NO: 2060683 - DNA, 15 bp, Homo sapiens
ggagagggggaaggc

SEQ ID NO: 2060684 - DNA, 15 bp, Homo sapiens
gagagggggaaggcg

SEQ ID NO: 2060685 - DNA, 15 bp, Homo sapiens
agagggggaaggcga

SEQ ID NO: 2060686 - DNA, 15 bp, Homo sapiens
gagggggaaggcgaa

SEQ ID NO: 2060687 - DNA, 15 bp, Homo sapiens
agggggaaggcgaag

SEQ ID NO: 2060688 - DNA, 15 bp, Homo sapiens
gggggaaggcgaagc

SEQ ID NO: 2060689 - DNA, 15 bp, Homo sapiens
ggggaaggcgaagcc

SEQ ID NO: 2060690 - DNA, 15 bp, Homo sapiens
gggaaggcgaagcct

SEQ ID NO: 2060691 - DNA, 15 bp, Homo sapiens
ggaaggcgaagcctc

SEQ ID NO: 2060692 - DNA, 15 bp, Homo sapiens
gaaggcgaagcctcg

SEQ ID NO: 2060693 - DNA, 15 bp, Homo sapiens
aaggcgaagcctcgc

SEQ ID NO: 2060694 - DNA, 15 bp, Homo sapiens
aggcgaagcctcgct

SEQ ID NO: 2060695 - DNA, 15 bp, Homo sapiens
ggcgaagcctcgctg

SEQ ID NO: 2060696 - DNA, 15 bp, Homo sapiens
gcgaagcctcgctgc

SEQ ID NO: 2060697 - DNA, 15 bp, Homo sapiens
cgaagcctcgctgct

SEQ ID NO: 2060698 - DNA, 15 bp, Homo sapiens
gaagcctcgctgctt

SEQ ID NO: 2060699 - DNA, 15 bp, Homo sapiens
aagcctcgctgcttt

SEQ ID NO: 2060700 - DNA, 15 bp, Homo sapiens
agcctcgctgctttt

SEQ ID NO: 2060701 - DNA, 15 bp, Homo sapiens
gcctcgctgcttttt

SEQ ID NO: 2060702 - DNA, 15 bp, Homo sapiens
cctcgctgctttttt

SEQ ID NO: 2060703 - DNA, 15 bp, Homo sapiens
ctcgctgcttttttt

SEQ ID NO: 2060704 - DNA, 15 bp, Homo sapiens
tcgctgctttttttt

SEQ ID NO: 2060705 - DNA, 15 bp, Homo sapiens
cgctgcttttttttt

SEQ ID NO: 2060706 - DNA, 15 bp, Homo sapiens
gctgctttttttttc

SEQ ID NO: 2060707 - DNA, 15 bp, Homo sapiens
ctgctttttttttct

SEQ ID NO: 2060708 - DNA, 15 bp, Homo sapiens
tgctttttttttctc

SEQ ID NO: 2060709 - DNA, 15 bp, Homo sapiens
gctttttttttctcc

SEQ ID NO: 2060710 - DNA, 15 bp, Homo sapiens
ctttttttttctccc

SEQ ID NO: 2060711 - DNA, 15 bp, Homo sapiens
tttttttttctccct

SEQ ID NO: 2060712 - DNA, 15 bp, Homo sapiens
ttttttttctccctt

SEQ ID NO: 2060713 - DNA, 15 bp, Homo sapiens
tttttttctcccttt

SEQ ID NO: 2060714 - DNA, 15 bp, Homo sapiens
ttttttctccctttg

SEQ ID NO: 2060715 - DNA, 15 bp, Homo sapiens
tttttctccctttgc

SEQ ID NO: 2060716 - DNA, 15 bp, Homo sapiens
ttttctccctttgcc

SEQ ID NO: 2060717 - DNA, 15 bp, Homo sapiens
tttctccctttgcca

SEQ ID NO: 2060718 - DNA, 15 bp, Homo sapiens
ttctccctttgccaa

SEQ ID NO: 2060719 - DNA, 15 bp, Homo sapiens
tctccctttgccaaa

SEQ ID NO: 2060720 - DNA, 15 bp, Homo sapiens
ctccctttgccaaat

SEQ ID NO: 2060721 - DNA, 15 bp, Homo sapiens
tccctttgccaaata

SEQ ID NO: 2060722 - DNA, 15 bp, Homo sapiens
ccctttgccaaatat

SEQ ID NO: 2060723 - DNA, 15 bp, Homo sapiens
cctttgccaaatatt

SEQ ID NO: 2060724 - DNA, 15 bp, Homo sapiens
ctttgccaaatattc

SEQ ID NO: 2060725 - DNA, 15 bp, Homo sapiens
tttgccaaatattct

SEQ ID NO: 2060726 - DNA, 15 bp, Homo sapiens
ttgccaaatattctg

SEQ ID NO: 2060727 - DNA, 15 bp, Homo sapiens
tgccaaatattctgg

SEQ ID NO: 2060728 - DNA, 15 bp, Homo sapiens
gccaaatattctggt

SEQ ID NO: 2060729 - DNA, 15 bp, Homo sapiens
ccaaatattctggtg

SEQ ID NO: 2060730 - DNA, 15 bp, Homo sapiens
caaatattctggtgt

SEQ ID NO: 2060731 - DNA, 15 bp, Homo sapiens
aaatattctggtgtt

SEQ ID NO: 2060732 - DNA, 15 bp, Homo sapiens
aatattctggtgtta

SEQ ID NO: 2060733 - DNA, 15 bp, Homo sapiens
atattctggtgttac

SEQ ID NO: 2060734 - DNA, 15 bp, Homo sapiens
tattctggtgttacc

SEQ ID NO: 2060735 - DNA, 15 bp, Homo sapiens
attctggtgttacct

SEQ ID NO: 2060736 - DNA, 15 bp, Homo sapiens
ttctggtgttacctt

SEQ ID NO: 2060737 - DNA, 15 bp, Homo sapiens
tctggtgttacctta

SEQ ID NO: 2060738 - DNA, 15 bp, Homo sapiens
ctggtgttaccttaa

SEQ ID NO: 2060739 - DNA, 15 bp, Homo sapiens
tggtgttaccttaac

SEQ ID NO: 2060740 - DNA, 15 bp, Homo sapiens
ggtgttaccttaacg

SEQ ID NO: 2060741 - DNA, 15 bp, Homo sapiens
gtgttaccttaacgc

SEQ ID NO: 2060742 - DNA, 15 bp, Homo sapiens
tgttaccttaacgcc

SEQ ID NO: 2060743 - DNA, 15 bp, Homo sapiens
gttaccttaacgccg

SEQ ID NO: 2060744 - DNA, 15 bp, Homo sapiens
ttaccttaacgccga

SEQ ID NO: 2060745 - DNA, 15 bp, Homo sapiens
taccttaacgccgat

SEQ ID NO: 2060746 - DNA, 15 bp, Homo sapiens
accttaacgccgatc

SEQ ID NO: 2060747 - DNA, 15 bp, Homo sapiens
ccttaacgccgatct

SEQ ID NO: 2060748 - DNA, 15 bp, Homo sapiens
cttaacgccgatctt

SEQ ID NO: 2060749 - DNA, 15 bp, Homo sapiens
ttaacgccgatcttg

SEQ ID NO: 2060750 - DNA, 15 bp, Homo sapiens
taacgccgatcttgt

SEQ ID NO: 2060751 - DNA, 15 bp, Homo sapiens
aacgccgatcttgtt

SEQ ID NO: 2060752 - DNA, 15 bp, Homo sapiens
acgccgatcttgttg

SEQ ID NO: 2060753 - DNA, 15 bp, Homo sapiens
cgccgatcttgttgg

SEQ ID NO: 2060754 - DNA, 15 bp, Homo sapiens
gccgatcttgttgga

SEQ ID NO: 2060755 - DNA, 15 bp, Homo sapiens
ccgatcttgttggat

SEQ ID NO: 2060756 - DNA, 15 bp, Homo sapiens
cgatcttgttggatg

SEQ ID NO: 2060757 - DNA, 15 bp, Homo sapiens
gatcttgttggatgt

SEQ ID NO: 2060758 - DNA, 15 bp, Homo sapiens
atcttgttggatgta

SEQ ID NO: 2060759 - DNA, 15 bp, Homo sapiens
tcttgttggatgtac

SEQ ID NO: 2060760 - DNA, 15 bp, Homo sapiens
cttgttggatgtaca

SEQ ID NO: 2060761 - DNA, 15 bp, Homo sapiens
ttgttggatgtacac

SEQ ID NO: 2060762 - DNA, 15 bp, Homo sapiens
tgttggatgtacacg

SEQ ID NO: 2060763 - DNA, 15 bp, Homo sapiens
gttggatgtacacgt

SEQ ID NO: 2060764 - DNA, 15 bp, Homo sapiens
ttggatgtacacgta

SEQ ID NO: 2060765 - DNA, 15 bp, Homo sapiens
tggatgtacacgtaa

SEQ ID NO: 2060766 - DNA, 15 bp, Homo sapiens
ggatgtacacgtaac

SEQ ID NO: 2060767 - DNA, 15 bp, Homo sapiens
gatgtacacgtaacg

SEQ ID NO: 2060768 - DNA, 15 bp, Homo sapiens
atgtacacgtaacgg

SEQ ID NO: 2060769 - DNA, 15 bp, Homo sapiens
tgtacacgtaacgga

SEQ ID NO: 2060770 - DNA, 15 bp, Homo sapiens
gtacacgtaacggag

SEQ ID NO: 2060771 - DNA, 15 bp, Homo sapiens
tacacgtaacggagt

SEQ ID NO: 2060772 - DNA, 15 bp, Homo sapiens
acacgtaacggagtg

SEQ ID NO: 2060773 - DNA, 15 bp, Homo sapiens
cacgtaacggagtgg

SEQ ID NO: 2060774 - DNA, 15 bp, Homo sapiens
acgtaacggagtgga

SEQ ID NO: 2060775 - DNA, 15 bp, Homo sapiens
cgtaacggagtggac

SEQ ID NO: 2060776 - DNA, 15 bp, Homo sapiens
gtaacggagtggacc

SEQ ID NO: 2060777 - DNA, 15 bp, Homo sapiens
taacggagtggaccg

SEQ ID NO: 2060778 - DNA, 15 bp, Homo sapiens
aacggagtggaccga

SEQ ID NO: 2060779 - DNA, 15 bp, Homo sapiens
acggagtggaccgag

SEQ ID NO: 2060780 - DNA, 15 bp, Homo sapiens
cggagtggaccgagt

SEQ ID NO: 2060781 - DNA, 15 bp, Homo sapiens
ggagtggaccgagtc

SEQ ID NO: 2060782 - DNA, 15 bp, Homo sapiens
gagtggaccgagtcc

SEQ ID NO: 2060783 - DNA, 15 bp, Homo sapiens
agtggaccgagtcct

SEQ ID NO: 2060784 - DNA, 15 bp, Homo sapiens
gtggaccgagtcctc

SEQ ID NO: 2060785 - DNA, 15 bp, Homo sapiens
tggaccgagtcctcc

SEQ ID NO: 2060786 - DNA, 15 bp, Homo sapiens
ggaccgagtcctcct

SEQ ID NO: 2060787 - DNA, 15 bp, Homo sapiens
gaccgagtcctcctt

SEQ ID NO: 2060788 - DNA, 15 bp, Homo sapiens
accgagtcctcctta

SEQ ID NO: 2060789 - DNA, 15 bp, Homo sapiens
ccgagtcctccttaa

SEQ ID NO: 2060790 - DNA, 15 bp, Homo sapiens
cgagtcctccttaat

SEQ ID NO: 2060791 - DNA, 15 bp, Homo sapiens
gagtcctccttaatt

SEQ ID NO: 2060792 - DNA, 15 bp, Homo sapiens
agtcctccttaattg

SEQ ID NO: 2060793 - DNA, 15 bp, Homo sapiens
gtcctccttaattgg

SEQ ID NO: 2060794 - DNA, 15 bp, Homo sapiens
tcctccttaattggc

SEQ ID NO: 2060795 - DNA, 15 bp, Homo sapiens
cctccttaattggct

SEQ ID NO: 2060796 - DNA, 15 bp, Homo sapiens
ctccttaattggctt

SEQ ID NO: 2060797 - DNA, 15 bp, Homo sapiens
tccttaattggcttg

SEQ ID NO: 2060798 - DNA, 15 bp, Homo sapiens
ccttaattggcttga

SEQ ID NO: 2060799 - DNA, 15 bp, Homo sapiens
cttaattggcttgag

SEQ ID NO: 2060800 - DNA, 15 bp, Homo sapiens
ttaattggcttgagt

SEQ ID NO: 2060801 - DNA, 15 bp, Homo sapiens
taattggcttgagtg

SEQ ID NO: 2060802 - DNA, 15 bp, Homo sapiens
aattggcttgagtgg

SEQ ID NO: 2060803 - DNA, 15 bp, Homo sapiens
attggcttgagtgga

SEQ ID NO: 2060804 - DNA, 15 bp, Homo sapiens
ttggcttgagtggag

SEQ ID NO: 2060805 - DNA, 15 bp, Homo sapiens
tggcttgagtggagg

SEQ ID NO: 2060806 - DNA, 15 bp, Homo sapiens
ggcttgagtggaggc

SEQ ID NO: 2060807 - DNA, 15 bp, Homo sapiens
gcttgagtggaggct

SEQ ID NO: 2060808 - DNA, 15 bp, Homo sapiens
cttgagtggaggctc

SEQ ID NO: 2060809 - DNA, 15 bp, Homo sapiens
ttgagtggaggctcg

SEQ ID NO: 2060810 - DNA, 15 bp, Homo sapiens
tgagtggaggctcgg

SEQ ID NO: 2060811 - DNA, 15 bp, Homo sapiens
gagtggaggctcggg

SEQ ID NO: 2060812 - DNA, 15 bp, Homo sapiens
agtggaggctcgggg

SEQ ID NO: 2060813 - DNA, 15 bp, Homo sapiens
gtggaggctcggggg

SEQ ID NO: 2060814 - DNA, 15 bp, Homo sapiens
tggaggctcgggggc

SEQ ID NO: 2060815 - DNA, 15 bp, Homo sapiens
ggaggctcgggggct

SEQ ID NO: 2060816 - DNA, 15 bp, Homo sapiens
gaggctcgggggctg

SEQ ID NO: 2060817 - DNA, 15 bp, Homo sapiens
aggctcgggggctgc

SEQ ID NO: 2060818 - DNA, 15 bp, Homo sapiens
ggctcgggggctgcc

SEQ ID NO: 2060819 - DNA, 15 bp, Homo sapiens
gctcgggggctgcct

SEQ ID NO: 2060820 - DNA, 15 bp, Homo sapiens
ctcgggggctgcctc

SEQ ID NO: 2060821 - DNA, 15 bp, Homo sapiens
tcgggggctgcctcg

SEQ ID NO: 2060822 - DNA, 15 bp, Homo sapiens
cgggggctgcctcgc

SEQ ID NO: 2060823 - DNA, 15 bp, Homo sapiens
gggggctgcctcgcg

SEQ ID NO: 2060824 - DNA, 15 bp, Homo sapiens
ggggctgcctcgcgt

SEQ ID NO: 2060825 - DNA, 15 bp, Homo sapiens
gggctgcctcgcgtt

SEQ ID NO: 2060826 - DNA, 15 bp, Homo sapiens
ggctgcctcgcgttt

SEQ ID NO: 2060827 - DNA, 15 bp, Homo sapiens
gctgcctcgcgtttg

SEQ ID NO: 2060828 - DNA, 15 bp, Homo sapiens
ctgcctcgcgtttgt

SEQ ID NO: 2060829 - DNA, 15 bp, Homo sapiens
tgcctcgcgtttgtt

SEQ ID NO: 2060830 - DNA, 15 bp, Homo sapiens
gcctcgcgtttgttt

SEQ ID NO: 2060831 - DNA, 15 bp, Homo sapiens
cctcgcgtttgtttt

SEQ ID NO: 2060832 - DNA, 15 bp, Homo sapiens
ctcgcgtttgtttta

SEQ ID NO: 2060833 - DNA, 15 bp, Homo sapiens
tcgcgtttgttttag

SEQ ID NO: 2060834 - DNA, 15 bp, Homo sapiens
cgcgtttgttttagc

SEQ ID NO: 2060835 - DNA, 15 bp, Homo sapiens
gcgtttgttttagcc

SEQ ID NO: 2060836 - DNA, 15 bp, Homo sapiens
cgtttgttttagccc

SEQ ID NO: 2060837 - DNA, 15 bp, Homo sapiens
gtttgttttagcccg

SEQ ID NO: 2060838 - DNA, 15 bp, Homo sapiens
tttgttttagcccgg

SEQ ID NO: 2060839 - DNA, 15 bp, Homo sapiens
ttgttttagcccggc

SEQ ID NO: 2060840 - DNA, 15 bp, Homo sapiens
tgttttagcccggcg

SEQ ID NO: 2060841 - DNA, 15 bp, Homo sapiens
gttttagcccggcgc

SEQ ID NO: 2060842 - DNA, 15 bp, Homo sapiens
ttttagcccggcgcc

SEQ ID NO: 2060843 - DNA, 15 bp, Homo sapiens
tttagcccggcgcca

SEQ ID NO: 2060844 - DNA, 15 bp, Homo sapiens
ttagcccggcgccag

SEQ ID NO: 2060845 - DNA, 15 bp, Homo sapiens
tagcccggcgccagg

SEQ ID NO: 2060846 - DNA, 15 bp, Homo sapiens
agcccggcgccaggt

SEQ ID NO: 2060847 - DNA, 15 bp, Homo sapiens
gcccggcgccaggtt

SEQ ID NO: 2060848 - DNA, 15 bp, Homo sapiens
cccggcgccaggttt

SEQ ID NO: 2060849 - DNA, 15 bp, Homo sapiens
ccggcgccaggtttt

SEQ ID NO: 2060850 - DNA, 15 bp, Homo sapiens
cggcgccaggtttta

SEQ ID NO: 2060851 - DNA, 15 bp, Homo sapiens
ggcgccaggttttag

SEQ ID NO: 2060852 - DNA, 15 bp, Homo sapiens
gcgccaggttttagg

SEQ ID NO: 2060853 - DNA, 15 bp, Homo sapiens
cgccaggttttaggc

SEQ ID NO: 2060854 - DNA, 15 bp, Homo sapiens
gccaggttttaggca

SEQ ID NO: 2060855 - DNA, 15 bp, Homo sapiens
ccaggttttaggcag

SEQ ID NO: 2060856 - DNA, 15 bp, Homo sapiens
caggttttaggcagc

SEQ ID NO: 2060857 - DNA, 15 bp, Homo sapiens
aggttttaggcagcc

SEQ ID NO: 2060858 - DNA, 15 bp, Homo sapiens
ggttttaggcagcca

SEQ ID NO: 2060859 - DNA, 15 bp, Homo sapiens
gttttaggcagccac

SEQ ID NO: 2060860 - DNA, 15 bp, Homo sapiens
ttttaggcagccacc

SEQ ID NO: 2060861 - DNA, 15 bp, Homo sapiens
tttaggcagccacca

SEQ ID NO: 2060862 - DNA, 15 bp, Homo sapiens
ttaggcagccaccag

SEQ ID NO: 2060863 - DNA, 15 bp, Homo sapiens
taggcagccaccaga

SEQ ID NO: 2060864 - DNA, 15 bp, Homo sapiens
aggcagccaccagag

SEQ ID NO: 2060865 - DNA, 15 bp, Homo sapiens
ggcagccaccagagg

SEQ ID NO: 2060866 - DNA, 15 bp, Homo sapiens
gcagccaccagaggc

SEQ ID NO: 2060867 - DNA, 15 bp, Homo sapiens
cagccaccagaggcg

SEQ ID NO: 2060868 - DNA, 15 bp, Homo sapiens
agccaccagaggcgg

SEQ ID NO: 2060869 - DNA, 15 bp, Homo sapiens
gccaccagaggcggg

SEQ ID NO: 2060870 - DNA, 15 bp, Homo sapiens
ccaccagaggcgggg

SEQ ID NO: 2060871 - DNA, 15 bp, Homo sapiens
caccagaggcggggc

SEQ ID NO: 2060872 - DNA, 15 bp, Homo sapiens
accagaggcggggcg

SEQ ID NO: 2060873 - DNA, 15 bp, Homo sapiens
ccagaggcggggcgt

SEQ ID NO: 2060874 - DNA, 15 bp, Homo sapiens
cagaggcggggcgta

SEQ ID NO: 2060875 - DNA, 15 bp, Homo sapiens
agaggcggggcgtaa

SEQ ID NO: 2060876 - DNA, 15 bp, Homo sapiens
gaggcggggcgtaag

SEQ ID NO: 2060877 - DNA, 15 bp, Homo sapiens
aggcggggcgtaagc

SEQ ID NO: 2060878 - DNA, 15 bp, Homo sapiens
ggcggggcgtaagcg

SEQ ID NO: 2060879 - DNA, 15 bp, Homo sapiens
gcggggcgtaagcgc

SEQ ID NO: 2060880 - DNA, 15 bp, Homo sapiens
cggggcgtaagcgct

SEQ ID NO: 2060881 - DNA, 15 bp, Homo sapiens
ggggcgtaagcgcta

SEQ ID NO: 2060882 - DNA, 15 bp, Homo sapiens
gggcgtaagcgctaa

SEQ ID NO: 2060883 - DNA, 15 bp, Homo sapiens
ggcgtaagcgctaaa

SEQ ID NO: 2060884 - DNA, 15 bp, Homo sapiens
gcgtaagcgctaaag

SEQ ID NO: 2060885 - DNA, 15 bp, Homo sapiens
cgtaagcgctaaagc

SEQ ID NO: 2060886 - DNA, 15 bp, Homo sapiens
gtaagcgctaaagca

SEQ ID NO: 2060887 - DNA, 15 bp, Homo sapiens
taagcgctaaagcaa

SEQ ID NO: 2060888 - DNA, 15 bp, Homo sapiens
aagcgctaaagcaac

SEQ ID NO: 2060889 - DNA, 15 bp, Homo sapiens
agcgctaaagcaaca

SEQ ID NO: 2060890 - DNA, 15 bp, Homo sapiens
gcgctaaagcaacaa

SEQ ID NO: 2060891 - DNA, 15 bp, Homo sapiens
cgctaaagcaacaag

SEQ ID NO: 2060892 - DNA, 15 bp, Homo sapiens
gctaaagcaacaaga

SEQ ID NO: 2060893 - DNA, 15 bp, Homo sapiens
ctaaagcaacaagac

SEQ ID NO: 2060894 - DNA, 15 bp, Homo sapiens
taaagcaacaagaca

SEQ ID NO: 2060895 - DNA, 15 bp, Homo sapiens
aaagcaacaagacaa

SEQ ID NO: 2060896 - DNA, 15 bp, Homo sapiens
aagcaacaagacaat

SEQ ID NO: 2060897 - DNA, 15 bp, Homo sapiens
agcaacaagacaata

SEQ ID NO: 2060898 - DNA, 15 bp, Homo sapiens
gcaacaagacaatag

SEQ ID NO: 2060899 - DNA, 15 bp, Homo sapiens
caacaagacaataga

SEQ ID NO: 2060900 - DNA, 15 bp, Homo sapiens
aacaagacaatagaa

SEQ ID NO: 2060901 - DNA, 15 bp, Homo sapiens
acaagacaatagaag

SEQ ID NO: 2060902 - DNA, 15 bp, Homo sapiens
caagacaatagaagc

SEQ ID NO: 2060903 - DNA, 15 bp, Homo sapiens
aagacaatagaagcc

SEQ ID NO: 2060904 - DNA, 15 bp, Homo sapiens
agacaatagaagcct

SEQ ID NO: 2060905 - DNA, 15 bp, Homo sapiens
gacaatagaagccta

SEQ ID NO: 2060906 - DNA, 15 bp, Homo sapiens
acaatagaagcctac

SEQ ID NO: 2060907 - DNA, 15 bp, Homo sapiens
caatagaagcctaca

SEQ ID NO: 2060908 - DNA, 15 bp, Homo sapiens
aatagaagcctacat

SEQ ID NO: 2060909 - DNA, 15 bp, Homo sapiens
atagaagcctacatc

SEQ ID NO: 2060910 - DNA, 15 bp, Homo sapiens
tagaagcctacatct

SEQ ID NO: 2060911 - DNA, 15 bp, Homo sapiens
agaagcctacatctt

SEQ ID NO: 2060912 - DNA, 15 bp, Homo sapiens
gaagcctacatcttg

SEQ ID NO: 2060913 - DNA, 15 bp, Homo sapiens
aagcctacatcttgc

SEQ ID NO: 2060914 - DNA, 15 bp, Homo sapiens
agcctacatcttgcc

SEQ ID NO: 2060915 - DNA, 15 bp, Homo sapiens
gcctacatcttgccc

SEQ ID NO: 2060916 - DNA, 15 bp, Homo sapiens
cctacatcttgcccg

SEQ ID NO: 2060917 - DNA, 15 bp, Homo sapiens
ctacatcttgcccga

SEQ ID NO: 2060918 - DNA, 15 bp, Homo sapiens
tacatcttgcccgag

SEQ ID NO: 2060919 - DNA, 15 bp, Homo sapiens
acatcttgcccgaga

SEQ ID NO: 2060920 - DNA, 15 bp, Homo sapiens
catcttgcccgagat

SEQ ID NO: 2060921 - DNA, 15 bp, Homo sapiens
atcttgcccgagata

SEQ ID NO: 2060922 - DNA, 15 bp, Homo sapiens
tcttgcccgagataa

SEQ ID NO: 2060923 - DNA, 15 bp, Homo sapiens
cttgcccgagataat

SEQ ID NO: 2060924 - DNA, 15 bp, Homo sapiens
ttgcccgagataatt

SEQ ID NO: 2060925 - DNA, 15 bp, Homo sapiens
tgcccgagataatta

SEQ ID NO: 2060926 - DNA, 15 bp, Homo sapiens
gcccgagataattag

SEQ ID NO: 2060927 - DNA, 15 bp, Homo sapiens
cccgagataattagc

SEQ ID NO: 2060928 - DNA, 15 bp, Homo sapiens
ccgagataattagct

SEQ ID NO: 2060929 - DNA, 15 bp, Homo sapiens
cgagataattagctt

SEQ ID NO: 2060930 - DNA, 15 bp, Homo sapiens
gagataattagctta

SEQ ID NO: 2060931 - DNA, 15 bp, Homo sapiens
agataattagcttac

SEQ ID NO: 2060932 - DNA, 15 bp, Homo sapiens
gataattagcttaca

SEQ ID NO: 2060933 - DNA, 15 bp, Homo sapiens
ataattagcttacat

SEQ ID NO: 2060934 - DNA, 15 bp, Homo sapiens
taattagcttacatg

SEQ ID NO: 2060935 - DNA, 15 bp, Homo sapiens
aattagcttacatgc

SEQ ID NO: 2060936 - DNA, 15 bp, Homo sapiens
attagcttacatgct

SEQ ID NO: 2060937 - DNA, 15 bp, Homo sapiens
ttagcttacatgctg

SEQ ID NO: 2060938 - DNA, 15 bp, Homo sapiens
tagcttacatgctga

SEQ ID NO: 2060939 - DNA, 15 bp, Homo sapiens
agcttacatgctgat

SEQ ID NO: 2060940 - DNA, 15 bp, Homo sapiens
gcttacatgctgatg

SEQ ID NO: 2060941 - DNA, 15 bp, Homo sapiens
cttacatgctgatga

SEQ ID NO: 2060942 - DNA, 15 bp, Homo sapiens
ttacatgctgatgac

SEQ ID NO: 2060943 - DNA, 15 bp, Homo sapiens
tacatgctgatgaca

SEQ ID NO: 2060944 - DNA, 15 bp, Homo sapiens
acatgctgatgacaa

SEQ ID NO: 2060945 - DNA, 15 bp, Homo sapiens
catgctgatgacaag

SEQ ID NO: 2060946 - DNA, 15 bp, Homo sapiens
atgctgatgacaagg

SEQ ID NO: 2060947 - DNA, 15 bp, Homo sapiens
tgctgatgacaaggt

SEQ ID NO: 2060948 - DNA, 15 bp, Homo sapiens
gctgatgacaaggta

SEQ ID NO: 2060949 - DNA, 15 bp, Homo sapiens
ctgatgacaaggtaa

SEQ ID NO: 2060950 - DNA, 15 bp, Homo sapiens
tgatgacaaggtaaa

SEQ ID NO: 2060951 - DNA, 15 bp, Homo sapiens
gatgacaaggtaaac

SEQ ID NO: 2060952 - DNA, 15 bp, Homo sapiens
atgacaaggtaaaca

SEQ ID NO: 2060953 - DNA, 15 bp, Homo sapiens
tgacaaggtaaacac

SEQ ID NO: 2060954 - DNA, 15 bp, Homo sapiens
gacaaggtaaacacc

SEQ ID NO: 2060955 - DNA, 15 bp, Homo sapiens
acaaggtaaacacct

SEQ ID NO: 2060956 - DNA, 15 bp, Homo sapiens
caaggtaaacacctt

SEQ ID NO: 2060957 - DNA, 15 bp, Homo sapiens
aaggtaaacaccttt

SEQ ID NO: 2060958 - DNA, 15 bp, Homo sapiens
aggtaaacaccttta

SEQ ID NO: 2060959 - DNA, 15 bp, Homo sapiens
ggtaaacacctttaa

SEQ ID NO: 2060960 - DNA, 15 bp, Homo sapiens
gtaaacacctttaag

SEQ ID NO: 2060961 - DNA, 15 bp, Homo sapiens
taaacacctttaagt

SEQ ID NO: 2060962 - DNA, 15 bp, Homo sapiens
aaacacctttaagtt

SEQ ID NO: 2060963 - DNA, 15 bp, Homo sapiens
aacacctttaagttt

SEQ ID NO: 2060964 - DNA, 15 bp, Homo sapiens
acacctttaagtttc

SEQ ID NO: 2060965 - DNA, 15 bp, Homo sapiens
cacctttaagtttca

SEQ ID NO: 2060966 - DNA, 15 bp, Homo sapiens
acctttaagtttcac

SEQ ID NO: 2060967 - DNA, 15 bp, Homo sapiens
cctttaagtttcact

SEQ ID NO: 2060968 - DNA, 15 bp, Homo sapiens
ctttaagtttcactt

SEQ ID NO: 2060969 - DNA, 15 bp, Homo sapiens
tttaagtttcacttg

SEQ ID NO: 2060970 - DNA, 15 bp, Homo sapiens
ttaagtttcacttgt

SEQ ID NO: 2060971 - DNA, 15 bp, Homo sapiens
taagtttcacttgtc

SEQ ID NO: 2060972 - DNA, 15 bp, Homo sapiens
aagtttcacttgtca

SEQ ID NO: 2060973 - DNA, 15 bp, Homo sapiens
agtttcacttgtcag

SEQ ID NO: 2060974 - DNA, 15 bp, Homo sapiens
gtttcacttgtcagg

SEQ ID NO: 2060975 - DNA, 15 bp, Homo sapiens
tttcacttgtcagga

SEQ ID NO: 2060976 - DNA, 15 bp, Homo sapiens
ttcacttgtcaggat

SEQ ID NO: 2060977 - DNA, 15 bp, Homo sapiens
tcacttgtcaggatt

SEQ ID NO: 2060978 - DNA, 15 bp, Homo sapiens
cacttgtcaggattt

SEQ ID NO: 2060979 - DNA, 15 bp, Homo sapiens
acttgtcaggatttt

SEQ ID NO: 2060980 - DNA, 15 bp, Homo sapiens
cttgtcaggattttt

SEQ ID NO: 2060981 - DNA, 15 bp, Homo sapiens
ttgtcaggattttta

SEQ ID NO: 2060982 - DNA, 15 bp, Homo sapiens
tgtcaggatttttag

SEQ ID NO: 2060983 - DNA, 15 bp, Homo sapiens
gtcaggatttttagg

SEQ ID NO: 2060984 - DNA, 15 bp, Homo sapiens
tcaggatttttaggt

SEQ ID NO: 2060985 - DNA, 15 bp, Homo sapiens
caggatttttaggtc

SEQ ID NO: 2060986 - DNA, 15 bp, Homo sapiens
aggatttttaggtct

SEQ ID NO: 2060987 - DNA, 15 bp, Homo sapiens
ggatttttaggtctc

SEQ ID NO: 2060988 - DNA, 15 bp, Homo sapiens
gatttttaggtctca

SEQ ID NO: 2060989 - DNA, 15 bp, Homo sapiens
atttttaggtctcaa

SEQ ID NO: 2060990 - DNA, 15 bp, Homo sapiens
tttttaggtctcaaa

SEQ ID NO: 2060991 - DNA, 15 bp, Homo sapiens
ttttaggtctcaaag

SEQ ID NO: 2060992 - DNA, 15 bp, Homo sapiens
tttaggtctcaaaga

SEQ ID NO: 2060993 - DNA, 15 bp, Homo sapiens
ttaggtctcaaagag

SEQ ID NO: 2060994 - DNA, 15 bp, Homo sapiens
taggtctcaaagaga

SEQ ID NO: 2060995 - DNA, 15 bp, Homo sapiens
aggtctcaaagagag

SEQ ID NO: 2060996 - DNA, 15 bp, Homo sapiens
ggtctcaaagagaga

SEQ ID NO: 2060997 - DNA, 15 bp, Homo sapiens
gtctcaaagagagag

SEQ ID NO: 2060998 - DNA, 15 bp, Homo sapiens
tctcaaagagagaga

SEQ ID NO: 2060999 - DNA, 15 bp, Homo sapiens
ctcaaagagagagag

SEQ ID NO: 2061000 - DNA, 15 bp, Homo sapiens
tcaaagagagagaga

SEQ ID NO: 2061001 - DNA, 15 bp, Homo sapiens
caaagagagagagag

SEQ ID NO: 2061002 - DNA, 15 bp, Homo sapiens
gagagagagagaggc

SEQ ID NO: 2061003 - DNA, 15 bp, Homo sapiens
agagagagagaggca

SEQ ID NO: 2061004 - DNA, 15 bp, Homo sapiens
gagagagagaggcag

SEQ ID NO: 2061005 - DNA, 15 bp, Homo sapiens
agagagagaggcaga

SEQ ID NO: 2061006 - DNA, 15 bp, Homo sapiens
gagagagaggcagag

SEQ ID NO: 2061007 - DNA, 15 bp, Homo sapiens
agagagaggcagaga

SEQ ID NO: 2061008 - DNA, 15 bp, Homo sapiens
gagagaggcagagac

SEQ ID NO: 2061009 - DNA, 15 bp, Homo sapiens
agagaggcagagacg

SEQ ID NO: 2061010 - DNA, 15 bp, Homo sapiens
gagaggcagagacga

SEQ ID NO: 2061011 - DNA, 15 bp, Homo sapiens
agaggcagagacgag

SEQ ID NO: 2061012 - DNA, 15 bp, Homo sapiens
gaggcagagacgaga

SEQ ID NO: 2061013 - DNA, 15 bp, Homo sapiens
aggcagagacgagac

SEQ ID NO: 2061014 - DNA, 15 bp, Homo sapiens
ggcagagacgagacc

SEQ ID NO: 2061015 - DNA, 15 bp, Homo sapiens
gcagagacgagaccc

SEQ ID NO: 2061016 - DNA, 15 bp, Homo sapiens
cagagacgagaccca

SEQ ID NO: 2061017 - DNA, 15 bp, Homo sapiens
agagacgagacccaa

SEQ ID NO: 2061018 - DNA, 15 bp, Homo sapiens
gagacgagacccaaa

SEQ ID NO: 2061019 - DNA, 15 bp, Homo sapiens
agacgagacccaaag

SEQ ID NO: 2061020 - DNA, 15 bp, Homo sapiens
gacgagacccaaagc

SEQ ID NO: 2061021 - DNA, 15 bp, Homo sapiens
acgagacccaaagca

SEQ ID NO: 2061022 - DNA, 15 bp, Homo sapiens
cgagacccaaagcat

SEQ ID NO: 2061023 - DNA, 15 bp, Homo sapiens
gagacccaaagcatt

SEQ ID NO: 2061024 - DNA, 15 bp, Homo sapiens
agacccaaagcattt

SEQ ID NO: 2061025 - DNA, 15 bp, Homo sapiens
gacccaaagcatttc

SEQ ID NO: 2061026 - DNA, 15 bp, Homo sapiens
acccaaagcatttcc

SEQ ID NO: 2061027 - DNA, 15 bp, Homo sapiens
cccaaagcatttccc

SEQ ID NO: 2061028 - DNA, 15 bp, Homo sapiens
ccaaagcatttcccc

SEQ ID NO: 2061029 - DNA, 15 bp, Homo sapiens
caaagcatttccccc

SEQ ID NO: 2061030 - DNA, 15 bp, Homo sapiens
aaagcatttcccccc

SEQ ID NO: 2061031 - DNA, 15 bp, Homo sapiens
aagcatttcccccct

SEQ ID NO: 2061032 - DNA, 15 bp, Homo sapiens
agcatttcccccctc

SEQ ID NO: 2061033 - DNA, 15 bp, Homo sapiens
gcatttcccccctcc

SEQ ID NO: 2061034 - DNA, 15 bp, Homo sapiens
catttcccccctccc

SEQ ID NO: 2061035 - DNA, 15 bp, Homo sapiens
atttcccccctccct

SEQ ID NO: 2061036 - DNA, 15 bp, Homo sapiens
tttcccccctccctt

SEQ ID NO: 2061037 - DNA, 15 bp, Homo sapiens
ttcccccctcccttg

SEQ ID NO: 2061038 - DNA, 15 bp, Homo sapiens
tcccccctcccttgg

SEQ ID NO: 2061039 - DNA, 15 bp, Homo sapiens
cccccctcccttgga

SEQ ID NO: 2061040 - DNA, 15 bp, Homo sapiens
ccccctcccttggac

SEQ ID NO: 2061041 - DNA, 15 bp, Homo sapiens
cccctcccttggaca

SEQ ID NO: 2061042 - DNA, 15 bp, Homo sapiens
ccctcccttggacac

SEQ ID NO: 2061043 - DNA, 15 bp, Homo sapiens
cctcccttggacacc

SEQ ID NO: 2061044 - DNA, 15 bp, Homo sapiens
ctcccttggacaccc

SEQ ID NO: 2061045 - DNA, 15 bp, Homo sapiens
tcccttggacacccc

SEQ ID NO: 2061046 - DNA, 15 bp, Homo sapiens
cccttggacaccccc

SEQ ID NO: 2061047 - DNA, 15 bp, Homo sapiens
ccttggacaccccca

SEQ ID NO: 2061048 - DNA, 15 bp, Homo sapiens
cttggacacccccac

SEQ ID NO: 2061049 - DNA, 15 bp, Homo sapiens
ttggacacccccacc

SEQ ID NO: 2061050 - DNA, 15 bp, Homo sapiens
tggacacccccaccc

SEQ ID NO: 2061051 - DNA, 15 bp, Homo sapiens
ggacacccccacccc

SEQ ID NO: 2061052 - DNA, 15 bp, Homo sapiens
gacacccccaccccc

SEQ ID NO: 2061053 - DNA, 15 bp, Homo sapiens
acacccccaccccca

SEQ ID NO: 2061054 - DNA, 15 bp, Homo sapiens
cacccccacccccat

SEQ ID NO: 2061055 - DNA, 15 bp, Homo sapiens
acccccacccccatt

SEQ ID NO: 2061056 - DNA, 15 bp, Homo sapiens
cccccacccccattt

SEQ ID NO: 2061057 - DNA, 15 bp, Homo sapiens
ccccacccccatttt

SEQ ID NO: 2061058 - DNA, 15 bp, Homo sapiens
cccacccccattttt

SEQ ID NO: 2061059 - DNA, 15 bp, Homo sapiens
ccacccccatttttt

SEQ ID NO: 2061060 - DNA, 15 bp, Homo sapiens
cacccccattttttg

SEQ ID NO: 2061061 - DNA, 15 bp, Homo sapiens
acccccattttttgt

SEQ ID NO: 2061062 - DNA, 15 bp, Homo sapiens
cccccattttttgtg

SEQ ID NO: 2061063 - DNA, 15 bp, Homo sapiens
ccccattttttgtgg

SEQ ID NO: 2061064 - DNA, 15 bp, Homo sapiens
cccattttttgtggg

SEQ ID NO: 2061065 - DNA, 15 bp, Homo sapiens
ccattttttgtgggg

SEQ ID NO: 2061066 - DNA, 15 bp, Homo sapiens
cattttttgtggggt

SEQ ID NO: 2061067 - DNA, 15 bp, Homo sapiens
attttttgtggggta

SEQ ID NO: 2061068 - DNA, 15 bp, Homo sapiens
ttttttgtggggtac

SEQ ID NO: 2061069 - DNA, 15 bp, Homo sapiens
tttttgtggggtacc

SEQ ID NO: 2061070 - DNA, 15 bp, Homo sapiens
ttttgtggggtacca

SEQ ID NO: 2061071 - DNA, 15 bp, Homo sapiens
tttgtggggtaccag

SEQ ID NO: 2061072 - DNA, 15 bp, Homo sapiens
ttgtggggtaccagc

SEQ ID NO: 2061073 - DNA, 15 bp, Homo sapiens
tgtggggtaccagcg

SEQ ID NO: 2061074 - DNA, 15 bp, Homo sapiens
gtggggtaccagcgg

SEQ ID NO: 2061075 - DNA, 15 bp, Homo sapiens
tggggtaccagcgga

SEQ ID NO: 2061076 - DNA, 15 bp, Homo sapiens
ggggtaccagcggag

SEQ ID NO: 2061077 - DNA, 15 bp, Homo sapiens
gggtaccagcggagc

SEQ ID NO: 2061078 - DNA, 15 bp, Homo sapiens
ggtaccagcggagcg

SEQ ID NO: 2061079 - DNA, 15 bp, Homo sapiens
gtaccagcggagcgc

SEQ ID NO: 2061080 - DNA, 15 bp, Homo sapiens
taccagcggagcgcg

SEQ ID NO: 2061081 - DNA, 15 bp, Homo sapiens
accagcggagcgcgg

SEQ ID NO: 2061082 - DNA, 15 bp, Homo sapiens
ccagcggagcgcggg

SEQ ID NO: 2061083 - DNA, 15 bp, Homo sapiens
cagcggagcgcgggg

SEQ ID NO: 2061084 - DNA, 15 bp, Homo sapiens
agcggagcgcgggga

SEQ ID NO: 2061085 - DNA, 15 bp, Homo sapiens
gcggagcgcggggag

SEQ ID NO: 2061086 - DNA, 15 bp, Homo sapiens
cggagcgcggggagg

SEQ ID NO: 2061087 - DNA, 15 bp, Homo sapiens
ggagcgcggggagga

SEQ ID NO: 2061088 - DNA, 15 bp, Homo sapiens
gagcgcggggaggag

SEQ ID NO: 2061089 - DNA, 15 bp, Homo sapiens
agcgcggggaggagg

SEQ ID NO: 2061090 - DNA, 15 bp, Homo sapiens
gcgcggggaggaggt

SEQ ID NO: 2061091 - DNA, 15 bp, Homo sapiens
cgcggggaggaggtg

SEQ ID NO: 2061092 - DNA, 15 bp, Homo sapiens
gcggggaggaggtgg

SEQ ID NO: 2061093 - DNA, 15 bp, Homo sapiens
cggggaggaggtgga

SEQ ID NO: 2061094 - DNA, 15 bp, Homo sapiens
ggggaggaggtggag

SEQ ID NO: 2061095 - DNA, 15 bp, Homo sapiens
gggaggaggtggagg

SEQ ID NO: 2061096 - DNA, 15 bp, Homo sapiens
ggaggaggtggaggg

SEQ ID NO: 2061097 - DNA, 15 bp, Homo sapiens
gaggaggtggagggg

SEQ ID NO: 2061098 - DNA, 15 bp, Homo sapiens
aggaggtggagggga

SEQ ID NO: 2061099 - DNA, 15 bp, Homo sapiens
ggaggtggaggggag

SEQ ID NO: 2061100 - DNA, 15 bp, Homo sapiens
gaggtggaggggagg

SEQ ID NO: 2061101 - DNA, 15 bp, Homo sapiens
aggtggaggggaggg

SEQ ID NO: 2061102 - DNA, 15 bp, Homo sapiens
ggtggaggggagggg

SEQ ID NO: 2061103 - DNA, 15 bp, Homo sapiens
tggaggggaggggaa

SEQ ID NO: 2061104 - DNA, 15 bp, Homo sapiens
ggaggggaggggaag

SEQ ID NO: 2061105 - DNA, 15 bp, Homo sapiens
gaggggaggggaagg

SEQ ID NO: 2061106 - DNA, 15 bp, Homo sapiens
aggggaggggaagga

SEQ ID NO: 2061107 - DNA, 15 bp, Homo sapiens
ggggaggggaaggag

SEQ ID NO: 2061108 - DNA, 15 bp, Homo sapiens
gggaggggaaggagg

SEQ ID NO: 2061109 - DNA, 15 bp, Homo sapiens
ggaggggaaggagga

SEQ ID NO: 2061110 - DNA, 15 bp, Homo sapiens
gaggggaaggaggag

SEQ ID NO: 2061111 - DNA, 15 bp, Homo sapiens
aggggaaggaggagg

SEQ ID NO: 2061112 - DNA, 15 bp, Homo sapiens
ggggaaggaggaggg

SEQ ID NO: 2061113 - DNA, 15 bp, Homo sapiens
gggaaggaggaggga

SEQ ID NO: 2061114 - DNA, 15 bp, Homo sapiens
ggaaggaggagggaa

SEQ ID NO: 2061115 - DNA, 15 bp, Homo sapiens
gaaggaggagggaac

SEQ ID NO: 2061116 - DNA, 15 bp, Homo sapiens
aaggaggagggaacc

SEQ ID NO: 2061117 - DNA, 15 bp, Homo sapiens
aggaggagggaaccg

SEQ ID NO: 2061118 - DNA, 15 bp, Homo sapiens
ggaggagggaaccga

SEQ ID NO: 2061119 - DNA, 15 bp, Homo sapiens
gaggagggaaccgag

SEQ ID NO: 2061120 - DNA, 15 bp, Homo sapiens
aggagggaaccgaga

SEQ ID NO: 2061121 - DNA, 15 bp, Homo sapiens
ggagggaaccgagag

SEQ ID NO: 2061122 - DNA, 15 bp, Homo sapiens
gagggaaccgagagc

SEQ ID NO: 2061123 - DNA, 15 bp, Homo sapiens
agggaaccgagagcg

SEQ ID NO: 2061124 - DNA, 15 bp, Homo sapiens
gggaaccgagagcgg

SEQ ID NO: 2061125 - DNA, 15 bp, Homo sapiens
ggaaccgagagcggg

SEQ ID NO: 2061126 - DNA, 15 bp, Homo sapiens
gaaccgagagcgggg

SEQ ID NO: 2061127 - DNA, 15 bp, Homo sapiens
aaccgagagcgggga

SEQ ID NO: 2061128 - DNA, 15 bp, Homo sapiens
accgagagcggggag

SEQ ID NO: 2061129 - DNA, 15 bp, Homo sapiens
ccgagagcggggagg

SEQ ID NO: 2061130 - DNA, 15 bp, Homo sapiens
cgagagcggggaggg

SEQ ID NO: 2061131 - DNA, 15 bp, Homo sapiens
gagagcggggagggc

SEQ ID NO: 2061132 - DNA, 15 bp, Homo sapiens
agagcggggagggca

SEQ ID NO: 2061133 - DNA, 15 bp, Homo sapiens
gagcggggagggcag

SEQ ID NO: 2061134 - DNA, 15 bp, Homo sapiens
agcggggagggcagg

SEQ ID NO: 2061135 - DNA, 15 bp, Homo sapiens
gcggggagggcagga

SEQ ID NO: 2061136 - DNA, 15 bp, Homo sapiens
cggggagggcaggag

SEQ ID NO: 2061137 - DNA, 15 bp, Homo sapiens
ggggagggcaggagg

SEQ ID NO: 2061138 - DNA, 15 bp, Homo sapiens
gggagggcaggaggt

SEQ ID NO: 2061139 - DNA, 15 bp, Homo sapiens
ggagggcaggaggtg

SEQ ID NO: 2061140 - DNA, 15 bp, Homo sapiens
gagggcaggaggtgg

SEQ ID NO: 2061141 - DNA, 15 bp, Homo sapiens
agggcaggaggtggg

SEQ ID NO: 2061142 - DNA, 15 bp, Homo sapiens
gggcaggaggtgggg

SEQ ID NO: 2061143 - DNA, 15 bp, Homo sapiens
ggcaggaggtggggt

SEQ ID NO: 2061144 - DNA, 15 bp, Homo sapiens
gcaggaggtggggtg

SEQ ID NO: 2061145 - DNA, 15 bp, Homo sapiens
caggaggtggggtgg

SEQ ID NO: 2061146 - DNA, 15 bp, Homo sapiens
aggaggtggggtggg

SEQ ID NO: 2061147 - DNA, 15 bp, Homo sapiens
ggaggtggggtgggg

SEQ ID NO: 2061148 - DNA, 15 bp, Homo sapiens
gaggtggggtggggg

SEQ ID NO: 2061149 - DNA, 15 bp, Homo sapiens
aggtggggtggggga

SEQ ID NO: 2061150 - DNA, 15 bp, Homo sapiens
ggtggggtgggggag

SEQ ID NO: 2061151 - DNA, 15 bp, Homo sapiens
gtggggtgggggagt

SEQ ID NO: 2061152 - DNA, 15 bp, Homo sapiens
tggggtgggggagta

SEQ ID NO: 2061153 - DNA, 15 bp, Homo sapiens
ggggtgggggagtaa

SEQ ID NO: 2061154 - DNA, 15 bp, Homo sapiens
gggtgggggagtaac

SEQ ID NO: 2061155 - DNA, 15 bp, Homo sapiens
ggtgggggagtaaca

SEQ ID NO: 2061156 - DNA, 15 bp, Homo sapiens
gtgggggagtaacag

SEQ ID NO: 2061157 - DNA, 15 bp, Homo sapiens
tgggggagtaacaga

SEQ ID NO: 2061158 - DNA, 15 bp, Homo sapiens
gggggagtaacagag

SEQ ID NO: 2061159 - DNA, 15 bp, Homo sapiens
ggggagtaacagagg

SEQ ID NO: 2061160 - DNA, 15 bp, Homo sapiens
gggagtaacagagga

SEQ ID NO: 2061161 - DNA, 15 bp, Homo sapiens
ggagtaacagaggag

SEQ ID NO: 2061162 - DNA, 15 bp, Homo sapiens
gagtaacagaggagg

SEQ ID NO: 2061163 - DNA, 15 bp, Homo sapiens
agtaacagaggagga

SEQ ID NO: 2061164 - DNA, 15 bp, Homo sapiens
gtaacagaggaggag

SEQ ID NO: 2061165 - DNA, 15 bp, Homo sapiens
taacagaggaggaga

SEQ ID NO: 2061166 - DNA, 15 bp, Homo sapiens
aacagaggaggagag

SEQ ID NO: 2061167 - DNA, 15 bp, Homo sapiens
acagaggaggagaga

SEQ ID NO: 2061168 - DNA, 15 bp, Homo sapiens
cagaggaggagagat

SEQ ID NO: 2061169 - DNA, 15 bp, Homo sapiens
agaggaggagagatg

SEQ ID NO: 2061170 - DNA, 15 bp, Homo sapiens
gaggaggagagatgg

SEQ ID NO: 2061171 - DNA, 15 bp, Homo sapiens
aggaggagagatggt

SEQ ID NO: 2061172 - DNA, 15 bp, Homo sapiens
ggaggagagatggtt

SEQ ID NO: 2061173 - DNA, 15 bp, Homo sapiens
gaggagagatggttg

SEQ ID NO: 2061174 - DNA, 15 bp, Homo sapiens
aggagagatggttga

SEQ ID NO: 2061175 - DNA, 15 bp, Homo sapiens
ggagagatggttgag

SEQ ID NO: 2061176 - DNA, 15 bp, Homo sapiens
gagagatggttgaga

SEQ ID NO: 2061177 - DNA, 15 bp, Homo sapiens
agagatggttgagag

SEQ ID NO: 2061178 - DNA, 15 bp, Homo sapiens
gagatggttgagagg

SEQ ID NO: 2061179 - DNA, 15 bp, Homo sapiens
agatggttgagagga

SEQ ID NO: 2061180 - DNA, 15 bp, Homo sapiens
gatggttgagaggaa

SEQ ID NO: 2061181 - DNA, 15 bp, Homo sapiens
atggttgagaggaag

SEQ ID NO: 2061182 - DNA, 15 bp, Homo sapiens
tggttgagaggaagg

SEQ ID NO: 2061183 - DNA, 15 bp, Homo sapiens
ggttgagaggaagga

SEQ ID NO: 2061184 - DNA, 15 bp, Homo sapiens
gttgagaggaaggaa

SEQ ID NO: 2061185 - DNA, 15 bp, Homo sapiens
ttgagaggaaggaag

SEQ ID NO: 2061186 - DNA, 15 bp, Homo sapiens
tgagaggaaggaagg

SEQ ID NO: 2061187 - DNA, 15 bp, Homo sapiens
gagaggaaggaaggt

SEQ ID NO: 2061188 - DNA, 15 bp, Homo sapiens
agaggaaggaaggtg

SEQ ID NO: 2061189 - DNA, 15 bp, Homo sapiens
gaggaaggaaggtga

SEQ ID NO: 2061190 - DNA, 15 bp, Homo sapiens
aggaaggaaggtgaa

SEQ ID NO: 2061191 - DNA, 15 bp, Homo sapiens
ggaaggaaggtgaat

SEQ ID NO: 2061192 - DNA, 15 bp, Homo sapiens
gaaggaaggtgaatg

SEQ ID NO: 2061193 - DNA, 15 bp, Homo sapiens
aaggaaggtgaatgc

SEQ ID NO: 2061194 - DNA, 15 bp, Homo sapiens
aggaaggtgaatgct

SEQ ID NO: 2061195 - DNA, 15 bp, Homo sapiens
ggaaggtgaatgctg

SEQ ID NO: 2061196 - DNA, 15 bp, Homo sapiens
gaaggtgaatgctgc

SEQ ID NO: 2061197 - DNA, 15 bp, Homo sapiens
aaggtgaatgctgct

SEQ ID NO: 2061198 - DNA, 15 bp, Homo sapiens
aggtgaatgctgctt

SEQ ID NO: 2061199 - DNA, 15 bp, Homo sapiens
ggtgaatgctgcttt

SEQ ID NO: 2061200 - DNA, 15 bp, Homo sapiens
gtgaatgctgctttg

SEQ ID NO: 2061201 - DNA, 15 bp, Homo sapiens
tgaatgctgctttgc

SEQ ID NO: 2061202 - DNA, 15 bp, Homo sapiens
gaatgctgctttgca

SEQ ID NO: 2061203 - DNA, 15 bp, Homo sapiens
aatgctgctttgcaa

SEQ ID NO: 2061204 - DNA, 15 bp, Homo sapiens
atgctgctttgcaac

SEQ ID NO: 2061205 - DNA, 15 bp, Homo sapiens
tgctgctttgcaacc

SEQ ID NO: 2061206 - DNA, 15 bp, Homo sapiens
gctgctttgcaacca

SEQ ID NO: 2061207 - DNA, 15 bp, Homo sapiens
ctgctttgcaaccaa

SEQ ID NO: 2061208 - DNA, 15 bp, Homo sapiens
tgctttgcaaccaac

SEQ ID NO: 2061209 - DNA, 15 bp, Homo sapiens
gctttgcaaccaact

SEQ ID NO: 2061210 - DNA, 15 bp, Homo sapiens
ctttgcaaccaactt

SEQ ID NO: 2061211 - DNA, 15 bp, Homo sapiens
tttgcaaccaacttg

SEQ ID NO: 2061212 - DNA, 15 bp, Homo sapiens
ttgcaaccaacttgc

SEQ ID NO: 2061213 - DNA, 15 bp, Homo sapiens
tgcaaccaacttgcg

SEQ ID NO: 2061214 - DNA, 15 bp, Homo sapiens
gcaaccaacttgcgg

SEQ ID NO: 2061215 - DNA, 15 bp, Homo sapiens
caaccaacttgcgga

SEQ ID NO: 2061216 - DNA, 15 bp, Homo sapiens
aaccaacttgcggag

SEQ ID NO: 2061217 - DNA, 15 bp, Homo sapiens
accaacttgcggagt

SEQ ID NO: 2061218 - DNA, 15 bp, Homo sapiens
ccaacttgcggagtt

SEQ ID NO: 2061219 - DNA, 15 bp, Homo sapiens
caacttgcggagtta

SEQ ID NO: 2061220 - DNA, 15 bp, Homo sapiens
aacttgcggagttac

SEQ ID NO: 2061221 - DNA, 15 bp, Homo sapiens
acttgcggagttaca

SEQ ID NO: 2061222 - DNA, 15 bp, Homo sapiens
cttgcggagttacaa

SEQ ID NO: 2061223 - DNA, 15 bp, Homo sapiens
ttgcggagttacaaa

SEQ ID NO: 2061224 - DNA, 15 bp, Homo sapiens
tgcggagttacaaag

SEQ ID NO: 2061225 - DNA, 15 bp, Homo sapiens
gcggagttacaaagt

SEQ ID NO: 2061226 - DNA, 15 bp, Homo sapiens
cggagttacaaagtg

SEQ ID NO: 2061227 - DNA, 15 bp, Homo sapiens
ggagttacaaagtgg

SEQ ID NO: 2061228 - DNA, 15 bp, Homo sapiens
gagttacaaagtgga

SEQ ID NO: 2061229 - DNA, 15 bp, Homo sapiens
agttacaaagtggaa

SEQ ID NO: 2061230 - DNA, 15 bp, Homo sapiens
gttacaaagtggaac

SEQ ID NO: 2061231 - DNA, 15 bp, Homo sapiens
ttacaaagtggaacc

SEQ ID NO: 2061232 - DNA, 15 bp, Homo sapiens
tacaaagtggaacca

SEQ ID NO: 2061233 - DNA, 15 bp, Homo sapiens
acaaagtggaaccac

SEQ ID NO: 2061234 - DNA, 15 bp, Homo sapiens
caaagtggaaccact

SEQ ID NO: 2061235 - DNA, 15 bp, Homo sapiens
aaagtggaaccactt

SEQ ID NO: 2061236 - DNA, 15 bp, Homo sapiens
aagtggaaccacttt

SEQ ID NO: 2061237 - DNA, 15 bp, Homo sapiens
agtggaaccactttc

SEQ ID NO: 2061238 - DNA, 15 bp, Homo sapiens
gtggaaccactttcc

SEQ ID NO: 2061239 - DNA, 15 bp, Homo sapiens
tggaaccactttcca

SEQ ID NO: 2061240 - DNA, 15 bp, Homo sapiens
ggaaccactttccaa

SEQ ID NO: 2061241 - DNA, 15 bp, Homo sapiens
gaaccactttccaat

SEQ ID NO: 2061242 - DNA, 15 bp, Homo sapiens
aaccactttccaatt

SEQ ID NO: 2061243 - DNA, 15 bp, Homo sapiens
accactttccaattc

SEQ ID NO: 2061244 - DNA, 15 bp, Homo sapiens
ccactttccaattcg

SEQ ID NO: 2061245 - DNA, 15 bp, Homo sapiens
cactttccaattcgg

SEQ ID NO: 2061246 - DNA, 15 bp, Homo sapiens
actttccaattcggt

SEQ ID NO: 2061247 - DNA, 15 bp, Homo sapiens
ctttccaattcggtc

SEQ ID NO: 2061248 - DNA, 15 bp, Homo sapiens
tttccaattcggtcg

SEQ ID NO: 2061249 - DNA, 15 bp, Homo sapiens
ttccaattcggtcgg

SEQ ID NO: 2061250 - DNA, 15 bp, Homo sapiens
tccaattcggtcggg

SEQ ID NO: 2061251 - DNA, 15 bp, Homo sapiens
ccaattcggtcgggg

SEQ ID NO: 2061252 - DNA, 15 bp, Homo sapiens
caattcggtcggggt

SEQ ID NO: 2061253 - DNA, 15 bp, Homo sapiens
aattcggtcggggtt

SEQ ID NO: 2061254 - DNA, 15 bp, Homo sapiens
attcggtcggggttc

SEQ ID NO: 2061255 - DNA, 15 bp, Homo sapiens
ttcggtcggggttcc

SEQ ID NO: 2061256 - DNA, 15 bp, Homo sapiens
tcggtcggggttccc

SEQ ID NO: 2061257 - DNA, 15 bp, Homo sapiens
cggtcggggttcccc

SEQ ID NO: 2061258 - DNA, 15 bp, Homo sapiens
ggtcggggttccccg

SEQ ID NO: 2061259 - DNA, 15 bp, Homo sapiens
gtcggggttccccgg

SEQ ID NO: 2061260 - DNA, 15 bp, Homo sapiens
tcggggttccccggg

SEQ ID NO: 2061261 - DNA, 15 bp, Homo sapiens
cggggttccccgggc

SEQ ID NO: 2061262 - DNA, 15 bp, Homo sapiens
ggggttccccgggca

SEQ ID NO: 2061263 - DNA, 15 bp, Homo sapiens
gggttccccgggcac

SEQ ID NO: 2061264 - DNA, 15 bp, Homo sapiens
ggttccccgggcacg

SEQ ID NO: 2061265 - DNA, 15 bp, Homo sapiens
gttccccgggcacgg

SEQ ID NO: 2061266 - DNA, 15 bp, Homo sapiens
ttccccgggcacgga

SEQ ID NO: 2061267 - DNA, 15 bp, Homo sapiens
tccccgggcacggac

SEQ ID NO: 2061268 - DNA, 15 bp, Homo sapiens
ccccgggcacggaca

SEQ ID NO: 2061269 - DNA, 15 bp, Homo sapiens
cccgggcacggacag

SEQ ID NO: 2061270 - DNA, 15 bp, Homo sapiens
ccgggcacggacagg

SEQ ID NO: 2061271 - DNA, 15 bp, Homo sapiens
cgggcacggacaggt

SEQ ID NO: 2061272 - DNA, 15 bp, Homo sapiens
gggcacggacaggtc

SEQ ID NO: 2061273 - DNA, 15 bp, Homo sapiens
ggcacggacaggtct

SEQ ID NO: 2061274 - DNA, 15 bp, Homo sapiens
gcacggacaggtctt

SEQ ID NO: 2061275 - DNA, 15 bp, Homo sapiens
cacggacaggtcttt

SEQ ID NO: 2061276 - DNA, 15 bp, Homo sapiens
acggacaggtcttta

SEQ ID NO: 2061277 - DNA, 15 bp, Homo sapiens
cggacaggtctttag

SEQ ID NO: 2061278 - DNA, 15 bp, Homo sapiens
ggacaggtctttagg

SEQ ID NO: 2061279 - DNA, 15 bp, Homo sapiens
gacaggtctttagga

SEQ ID NO: 2061280 - DNA, 15 bp, Homo sapiens
acaggtctttaggag

SEQ ID NO: 2061281 - DNA, 15 bp, Homo sapiens
caggtctttaggagg

SEQ ID NO: 2061282 - DNA, 15 bp, Homo sapiens
aggtctttaggagga

SEQ ID NO: 2061283 - DNA, 15 bp, Homo sapiens
ggtctttaggaggag

SEQ ID NO: 2061284 - DNA, 15 bp, Homo sapiens
gtctttaggaggagg

SEQ ID NO: 2061285 - DNA, 15 bp, Homo sapiens
tctttaggaggaggg

SEQ ID NO: 2061286 - DNA, 15 bp, Homo sapiens
ctttaggaggagggg

SEQ ID NO: 2061287 - DNA, 15 bp, Homo sapiens
tttaggaggaggggg

SEQ ID NO: 2061288 - DNA, 15 bp, Homo sapiens
ttaggaggagggggc

SEQ ID NO: 2061289 - DNA, 15 bp, Homo sapiens
taggaggagggggct

SEQ ID NO: 2061290 - DNA, 15 bp, Homo sapiens
aggaggagggggctg

SEQ ID NO: 2061291 - DNA, 15 bp, Homo sapiens
ggaggagggggctga

SEQ ID NO: 2061292 - DNA, 15 bp, Homo sapiens
aggagggggctgagg

SEQ ID NO: 2061293 - DNA, 15 bp, Homo sapiens
ggagggggctgaggg

SEQ ID NO: 2061294 - DNA, 15 bp, Homo sapiens
gagggggctgaggga

SEQ ID NO: 2061295 - DNA, 15 bp, Homo sapiens
agggggctgagggac

SEQ ID NO: 2061296 - DNA, 15 bp, Homo sapiens
gggggctgagggaca

SEQ ID NO: 2061297 - DNA, 15 bp, Homo sapiens
ggggctgagggacag

SEQ ID NO: 2061298 - DNA, 15 bp, Homo sapiens
gggctgagggacagg

SEQ ID NO: 2061299 - DNA, 15 bp, Homo sapiens
ggctgagggacaggg

SEQ ID NO: 2061300 - DNA, 15 bp, Homo sapiens
gctgagggacagggt

SEQ ID NO: 2061301 - DNA, 15 bp, Homo sapiens
ctgagggacagggtg

SEQ ID NO: 2061302 - DNA, 15 bp, Homo sapiens
tgagggacagggtgg

SEQ ID NO: 2061303 - DNA, 15 bp, Homo sapiens
gagggacagggtggg

SEQ ID NO: 2061304 - DNA, 15 bp, Homo sapiens
agggacagggtgggg

SEQ ID NO: 2061305 - DNA, 15 bp, Homo sapiens
gggacagggtggggg

SEQ ID NO: 2061306 - DNA, 15 bp, Homo sapiens
ggacagggtgggggt

SEQ ID NO: 2061307 - DNA, 15 bp, Homo sapiens
gacagggtgggggtt

SEQ ID NO: 2061308 - DNA, 15 bp, Homo sapiens
acagggtgggggttt

SEQ ID NO: 2061309 - DNA, 15 bp, Homo sapiens
cagggtgggggtttc

SEQ ID NO: 2061310 - DNA, 15 bp, Homo sapiens
agggtgggggtttca

SEQ ID NO: 2061311 - DNA, 15 bp, Homo sapiens
gggtgggggtttcac

SEQ ID NO: 2061312 - DNA, 15 bp, Homo sapiens
ggtgggggtttcacc

SEQ ID NO: 2061313 - DNA, 15 bp, Homo sapiens
gtgggggtttcacct

SEQ ID NO: 2061314 - DNA, 15 bp, Homo sapiens
tgggggtttcacctg

SEQ ID NO: 2061315 - DNA, 15 bp, Homo sapiens
gggggtttcacctga

SEQ ID NO: 2061316 - DNA, 15 bp, Homo sapiens
ggggtttcacctgag

SEQ ID NO: 2061317 - DNA, 15 bp, Homo sapiens
gggtttcacctgagc

SEQ ID NO: 2061318 - DNA, 15 bp, Homo sapiens
ggtttcacctgagcc

SEQ ID NO: 2061319 - DNA, 15 bp, Homo sapiens
gtttcacctgagcct

SEQ ID NO: 2061320 - DNA, 15 bp, Homo sapiens
tttcacctgagcctg

SEQ ID NO: 2061321 - DNA, 15 bp, Homo sapiens
ttcacctgagcctgc

SEQ ID NO: 2061322 - DNA, 15 bp, Homo sapiens
tcacctgagcctgcc

SEQ ID NO: 2061323 - DNA, 15 bp, Homo sapiens
cacctgagcctgccg

SEQ ID NO: 2061324 - DNA, 15 bp, Homo sapiens
acctgagcctgccgg

SEQ ID NO: 2061325 - DNA, 15 bp, Homo sapiens
cctgagcctgccggg

SEQ ID NO: 2061326 - DNA, 15 bp, Homo sapiens
ctgagcctgccgggg

SEQ ID NO: 2061327 - DNA, 15 bp, Homo sapiens
tgagcctgccggggc

SEQ ID NO: 2061328 - DNA, 15 bp, Homo sapiens
gagcctgccggggct

SEQ ID NO: 2061329 - DNA, 15 bp, Homo sapiens
agcctgccggggctg

SEQ ID NO: 2061330 - DNA, 15 bp, Homo sapiens
gcctgccggggctgc

SEQ ID NO: 2061331 - DNA, 15 bp, Homo sapiens
cctgccggggctgct

SEQ ID NO: 2061332 - DNA, 15 bp, Homo sapiens
ctgccggggctgctc

SEQ ID NO: 2061333 - DNA, 15 bp, Homo sapiens
tgccggggctgctcc

SEQ ID NO: 2061334 - DNA, 15 bp, Homo sapiens
gccggggctgctcct

SEQ ID NO: 2061335 - DNA, 15 bp, Homo sapiens
ccggggctgctcctc

SEQ ID NO: 2061336 - DNA, 15 bp, Homo sapiens
cggggctgctcctcc

SEQ ID NO: 2061337 - DNA, 15 bp, Homo sapiens
ggggctgctcctccc

SEQ ID NO: 2061338 - DNA, 15 bp, Homo sapiens
gggctgctcctccct

SEQ ID NO: 2061339 - DNA, 15 bp, Homo sapiens
ggctgctcctccctc

SEQ ID NO: 2061340 - DNA, 15 bp, Homo sapiens
gctgctcctccctcc

SEQ ID NO: 2061341 - DNA, 15 bp, Homo sapiens
ctgctcctccctccc

SEQ ID NO: 2061342 - DNA, 15 bp, Homo sapiens
tgctcctccctcccg

SEQ ID NO: 2061343 - DNA, 15 bp, Homo sapiens
gctcctccctcccgc

SEQ ID NO: 2061344 - DNA, 15 bp, Homo sapiens
ctcctccctcccgcc

SEQ ID NO: 2061345 - DNA, 15 bp, Homo sapiens
tcctccctcccgccg

SEQ ID NO: 2061346 - DNA, 15 bp, Homo sapiens
cctccctcccgccgc

SEQ ID NO: 2061347 - DNA, 15 bp, Homo sapiens
ctccctcccgccgcg

SEQ ID NO: 2061348 - DNA, 15 bp, Homo sapiens
tccctcccgccgcgg

SEQ ID NO: 2061349 - DNA, 15 bp, Homo sapiens
ccctcccgccgcggc

SEQ ID NO: 2061350 - DNA, 15 bp, Homo sapiens
cctcccgccgcggcc

SEQ ID NO: 2061351 - DNA, 15 bp, Homo sapiens
ctcccgccgcggcct

SEQ ID NO: 2061352 - DNA, 15 bp, Homo sapiens
tcccgccgcggcctc

SEQ ID NO: 2061353 - DNA, 15 bp, Homo sapiens
cccgccgcggcctcc

SEQ ID NO: 2061354 - DNA, 15 bp, Homo sapiens
ccgccgcggcctccc

SEQ ID NO: 2061355 - DNA, 15 bp, Homo sapiens
cgccgcggcctccca

SEQ ID NO: 2061356 - DNA, 15 bp, Homo sapiens
gccgcggcctcccag

SEQ ID NO: 2061357 - DNA, 15 bp, Homo sapiens
ccgcggcctcccagc

SEQ ID NO: 2061358 - DNA, 15 bp, Homo sapiens
cgcggcctcccagcc

SEQ ID NO: 2061359 - DNA, 15 bp, Homo sapiens
gcggcctcccagccc

SEQ ID NO: 2061360 - DNA, 15 bp, Homo sapiens
cggcctcccagcccc

SEQ ID NO: 2061361 - DNA, 15 bp, Homo sapiens
ggcctcccagccccg

SEQ ID NO: 2061362 - DNA, 15 bp, Homo sapiens
gcctcccagccccgc

SEQ ID NO: 2061363 - DNA, 15 bp, Homo sapiens
cctcccagccccgcg

SEQ ID NO: 2061364 - DNA, 15 bp, Homo sapiens
ctcccagccccgcgc

SEQ ID NO: 2061365 - DNA, 15 bp, Homo sapiens
tcccagccccgcgcc

SEQ ID NO: 2061366 - DNA, 15 bp, Homo sapiens
cccagccccgcgcct

SEQ ID NO: 2061367 - DNA, 15 bp, Homo sapiens
ccagccccgcgcctt

SEQ ID NO: 2061368 - DNA, 15 bp, Homo sapiens
cagccccgcgccttc

SEQ ID NO: 2061369 - DNA, 15 bp, Homo sapiens
agccccgcgccttcc

SEQ ID NO: 2061370 - DNA, 15 bp, Homo sapiens
gccccgcgccttccc

SEQ ID NO: 2061371 - DNA, 15 bp, Homo sapiens
ccccgcgccttccca

SEQ ID NO: 2061372 - DNA, 15 bp, Homo sapiens
cccgcgccttcccac

SEQ ID NO: 2061373 - DNA, 15 bp, Homo sapiens
ccgcgccttcccact

SEQ ID NO: 2061374 - DNA, 15 bp, Homo sapiens
cgcgccttcccactg

SEQ ID NO: 2061375 - DNA, 15 bp, Homo sapiens
gcgccttcccactgc

SEQ ID NO: 2061376 - DNA, 15 bp, Homo sapiens
cgccttcccactgcc

SEQ ID NO: 2061377 - DNA, 15 bp, Homo sapiens
gccttcccactgcct

SEQ ID NO: 2061378 - DNA, 15 bp, Homo sapiens
ccttcccactgcctc

SEQ ID NO: 2061379 - DNA, 15 bp, Homo sapiens
cttcccactgcctcc

SEQ ID NO: 2061380 - DNA, 15 bp, Homo sapiens
ttcccactgcctccg

SEQ ID NO: 2061381 - DNA, 15 bp, Homo sapiens
tcccactgcctccgg

SEQ ID NO: 2061382 - DNA, 15 bp, Homo sapiens
cccactgcctccgga

SEQ ID NO: 2061383 - DNA, 15 bp, Homo sapiens
ccactgcctccggac

SEQ ID NO: 2061384 - DNA, 15 bp, Homo sapiens
cactgcctccggacc

SEQ ID NO: 2061385 - DNA, 15 bp, Homo sapiens
actgcctccggacca

SEQ ID NO: 2061386 - DNA, 15 bp, Homo sapiens
ctgcctccggaccac

SEQ ID NO: 2061387 - DNA, 15 bp, Homo sapiens
tgcctccggaccaca

SEQ ID NO: 2061388 - DNA, 15 bp, Homo sapiens
gcctccggaccacat

SEQ ID NO: 2061389 - DNA, 15 bp, Homo sapiens
cctccggaccacatc

SEQ ID NO: 2061390 - DNA, 15 bp, Homo sapiens
ctccggaccacatcg

SEQ ID NO: 2061391 - DNA, 15 bp, Homo sapiens
tccggaccacatcgg

SEQ ID NO: 2061392 - DNA, 15 bp, Homo sapiens
ccggaccacatcggg

SEQ ID NO: 2061393 - DNA, 15 bp, Homo sapiens
cggaccacatcgggc

SEQ ID NO: 2061394 - DNA, 15 bp, Homo sapiens
ggaccacatcgggct

SEQ ID NO: 2061395 - DNA, 15 bp, Homo sapiens
gaccacatcgggctt

SEQ ID NO: 2061396 - DNA, 15 bp, Homo sapiens
accacatcgggcttc

SEQ ID NO: 2061397 - DNA, 15 bp, Homo sapiens
ccacatcgggcttcg

SEQ ID NO: 2061398 - DNA, 15 bp, Homo sapiens
cacatcgggcttcgc

SEQ ID NO: 2061399 - DNA, 15 bp, Homo sapiens
acatcgggcttcgct

SEQ ID NO: 2061400 - DNA, 15 bp, Homo sapiens
catcgggcttcgctg

SEQ ID NO: 2061401 - DNA, 15 bp, Homo sapiens
atcgggcttcgctgc

SEQ ID NO: 2061402 - DNA, 15 bp, Homo sapiens
tcgggcttcgctgcg

SEQ ID NO: 2061403 - DNA, 15 bp, Homo sapiens
cgggcttcgctgcgc

SEQ ID NO: 2061404 - DNA, 15 bp, Homo sapiens
gggcttcgctgcgct

SEQ ID NO: 2061405 - DNA, 15 bp, Homo sapiens
ggcttcgctgcgctg

SEQ ID NO: 2061406 - DNA, 15 bp, Homo sapiens
gcttcgctgcgctga

SEQ ID NO: 2061407 - DNA, 15 bp, Homo sapiens
cttcgctgcgctgag

SEQ ID NO: 2061408 - DNA, 15 bp, Homo sapiens
ttcgctgcgctgagc

SEQ ID NO: 2061409 - DNA, 15 bp, Homo sapiens
tcgctgcgctgagcc

SEQ ID NO: 2061410 - DNA, 15 bp, Homo sapiens
cgctgcgctgagccc

SEQ ID NO: 2061411 - DNA, 15 bp, Homo sapiens
gctgcgctgagcccc

SEQ ID NO: 2061412 - DNA, 15 bp, Homo sapiens
ctgcgctgagcccca

SEQ ID NO: 2061413 - DNA, 15 bp, Homo sapiens
tgcgctgagccccag

SEQ ID NO: 2061414 - DNA, 15 bp, Homo sapiens
gcgctgagccccagt

SEQ ID NO: 2061415 - DNA, 15 bp, Homo sapiens
cgctgagccccagtc

SEQ ID NO: 2061416 - DNA, 15 bp, Homo sapiens
gctgagccccagtcg

SEQ ID NO: 2061417 - DNA, 15 bp, Homo sapiens
ctgagccccagtcgc

SEQ ID NO: 2061418 - DNA, 15 bp, Homo sapiens
tgagccccagtcgcc

SEQ ID NO: 2061419 - DNA, 15 bp, Homo sapiens
gagccccagtcgcca

SEQ ID NO: 2061420 - DNA, 15 bp, Homo sapiens
agccccagtcgccaa

SEQ ID NO: 2061421 - DNA, 15 bp, Homo sapiens
gccccagtcgccaac

SEQ ID NO: 2061422 - DNA, 15 bp, Homo sapiens
ccccagtcgccaaca

SEQ ID NO: 2061423 - DNA, 15 bp, Homo sapiens
cccagtcgccaacaa

SEQ ID NO: 2061424 - DNA, 15 bp, Homo sapiens
ccagtcgccaacaaa

SEQ ID NO: 2061425 - DNA, 15 bp, Homo sapiens
cagtcgccaacaaat

SEQ ID NO: 2061426 - DNA, 15 bp, Homo sapiens
agtcgccaacaaatg

SEQ ID NO: 2061427 - DNA, 15 bp, Homo sapiens
gtcgccaacaaatga

SEQ ID NO: 2061428 - DNA, 15 bp, Homo sapiens
tcgccaacaaatgag

SEQ ID NO: 2061429 - DNA, 15 bp, Homo sapiens
cgccaacaaatgagc

SEQ ID NO: 2061430 - DNA, 15 bp, Homo sapiens
gccaacaaatgagcg

SEQ ID NO: 2061431 - DNA, 15 bp, Homo sapiens
ccaacaaatgagcga

SEQ ID NO: 2061432 - DNA, 15 bp, Homo sapiens
caacaaatgagcgag

SEQ ID NO: 2061433 - DNA, 15 bp, Homo sapiens
aacaaatgagcgagc

SEQ ID NO: 2061434 - DNA, 15 bp, Homo sapiens
acaaatgagcgagcg

SEQ ID NO: 2061435 - DNA, 15 bp, Homo sapiens
caaatgagcgagcga

SEQ ID NO: 2061436 - DNA, 15 bp, Homo sapiens
aaatgagcgagcgag

SEQ ID NO: 2061437 - DNA, 15 bp, Homo sapiens
aatgagcgagcgagt

SEQ ID NO: 2061438 - DNA, 15 bp, Homo sapiens
atgagcgagcgagtc

SEQ ID NO: 2061439 - DNA, 15 bp, Homo sapiens
tgagcgagcgagtct

SEQ ID NO: 2061440 - DNA, 15 bp, Homo sapiens
gagcgagcgagtctg

SEQ ID NO: 2061441 - DNA, 15 bp, Homo sapiens
agcgagcgagtctgg

SEQ ID NO: 2061442 - DNA, 15 bp, Homo sapiens
gcgagcgagtctggg

SEQ ID NO: 2061443 - DNA, 15 bp, Homo sapiens
cgagcgagtctgggg

SEQ ID NO: 2061444 - DNA, 15 bp, Homo sapiens
gagcgagtctgggga

SEQ ID NO: 2061445 - DNA, 15 bp, Homo sapiens
agcgagtctggggac

SEQ ID NO: 2061446 - DNA, 15 bp, Homo sapiens
gcgagtctggggacg

SEQ ID NO: 2061447 - DNA, 15 bp, Homo sapiens
cgagtctggggacga

SEQ ID NO: 2061448 - DNA, 15 bp, Homo sapiens
gagtctggggacgaa

SEQ ID NO: 2061449 - DNA, 15 bp, Homo sapiens
agtctggggacgaac

SEQ ID NO: 2061450 - DNA, 15 bp, Homo sapiens
gtctggggacgaacc

SEQ ID NO: 2061451 - DNA, 15 bp, Homo sapiens
tctggggacgaaccc

SEQ ID NO: 2061452 - DNA, 15 bp, Homo sapiens
ctggggacgaaccct

SEQ ID NO: 2061453 - DNA, 15 bp, Homo sapiens
tggggacgaaccctg

SEQ ID NO: 2061454 - DNA, 15 bp, Homo sapiens
ggggacgaaccctgg

SEQ ID NO: 2061455 - DNA, 15 bp, Homo sapiens
gggacgaaccctggg

SEQ ID NO: 2061456 - DNA, 15 bp, Homo sapiens
ggacgaaccctgggg

SEQ ID NO: 2061457 - DNA, 15 bp, Homo sapiens
gacgaaccctggggc

SEQ ID NO: 2061458 - DNA, 15 bp, Homo sapiens
acgaaccctggggcc

SEQ ID NO: 2061459 - DNA, 15 bp, Homo sapiens
cgaaccctggggccg

SEQ ID NO: 2061460 - DNA, 15 bp, Homo sapiens
gaaccctggggccgc

SEQ ID NO: 2061461 - DNA, 15 bp, Homo sapiens
aaccctggggccgca

SEQ ID NO: 2061462 - DNA, 15 bp, Homo sapiens
accctggggccgcac

SEQ ID NO: 2061463 - DNA, 15 bp, Homo sapiens
ccctggggccgcact

SEQ ID NO: 2061464 - DNA, 15 bp, Homo sapiens
cctggggccgcactg

SEQ ID NO: 2061465 - DNA, 15 bp, Homo sapiens
ctggggccgcactgt

SEQ ID NO: 2061466 - DNA, 15 bp, Homo sapiens
tggggccgcactgtt

SEQ ID NO: 2061467 - DNA, 15 bp, Homo sapiens
ggggccgcactgttg

SEQ ID NO: 2061468 - DNA, 15 bp, Homo sapiens
gggccgcactgttgg

SEQ ID NO: 2061469 - DNA, 15 bp, Homo sapiens
ggccgcactgttggt

SEQ ID NO: 2061470 - DNA, 15 bp, Homo sapiens
gccgcactgttggtc

SEQ ID NO: 2061471 - DNA, 15 bp, Homo sapiens
ccgcactgttggtct

SEQ ID NO: 2061472 - DNA, 15 bp, Homo sapiens
cgcactgttggtcta

SEQ ID NO: 2061473 - DNA, 15 bp, Homo sapiens
gcactgttggtctac

SEQ ID NO: 2061474 - DNA, 15 bp, Homo sapiens
cactgttggtctacg

SEQ ID NO: 2061475 - DNA, 15 bp, Homo sapiens
actgttggtctacgt

SEQ ID NO: 2061476 - DNA, 15 bp, Homo sapiens
ctgttggtctacgtg

SEQ ID NO: 2061477 - DNA, 15 bp, Homo sapiens
tgttggtctacgtgt

SEQ ID NO: 2061478 - DNA, 15 bp, Homo sapiens
gttggtctacgtgtc

SEQ ID NO: 2061479 - DNA, 15 bp, Homo sapiens
ttggtctacgtgtct

SEQ ID NO: 2061480 - DNA, 15 bp, Homo sapiens
tggtctacgtgtctg

SEQ ID NO: 2061481 - DNA, 15 bp, Homo sapiens
ggtctacgtgtctgt

SEQ ID NO: 2061482 - DNA, 15 bp, Homo sapiens
gtctacgtgtctgtc

SEQ ID NO: 2061483 - DNA, 15 bp, Homo sapiens
tctacgtgtctgtca

SEQ ID NO: 2061484 - DNA, 15 bp, Homo sapiens
ctacgtgtctgtcag

SEQ ID NO: 2061485 - DNA, 15 bp, Homo sapiens
tacgtgtctgtcagt

SEQ ID NO: 2061486 - DNA, 15 bp, Homo sapiens
acgtgtctgtcagtc

SEQ ID NO: 2061487 - DNA, 15 bp, Homo sapiens
cgtgtctgtcagtct

SEQ ID NO: 2061488 - DNA, 15 bp, Homo sapiens
gtgtctgtcagtctg

SEQ ID NO: 2061489 - DNA, 15 bp, Homo sapiens
tgtctgtcagtctgt

SEQ ID NO: 2061490 - DNA, 15 bp, Homo sapiens
gtctgtcagtctgtc

SEQ ID NO: 2061491 - DNA, 15 bp, Homo sapiens
tctgtcagtctgtct

SEQ ID NO: 2061492 - DNA, 15 bp, Homo sapiens
ctgtcagtctgtctg

SEQ ID NO: 2061493 - DNA, 15 bp, Homo sapiens
tgtcagtctgtctgc

SEQ ID NO: 2061494 - DNA, 15 bp, Homo sapiens
gtcagtctgtctgcc

SEQ ID NO: 2061495 - DNA, 15 bp, Homo sapiens
tcagtctgtctgcct

SEQ ID NO: 2061496 - DNA, 15 bp, Homo sapiens
cagtctgtctgcctc

SEQ ID NO: 2061497 - DNA, 15 bp, Homo sapiens
agtctgtctgcctct

SEQ ID NO: 2061498 - DNA, 15 bp, Homo sapiens
gtctgtctgcctctc

SEQ ID NO: 2061499 - DNA, 15 bp, Homo sapiens
tctgtctgcctctct

SEQ ID NO: 2061500 - DNA, 15 bp, Homo sapiens
ctgtctgcctctctt

SEQ ID NO: 2061501 - DNA, 15 bp, Homo sapiens
tgtctgcctctcttc

SEQ ID NO: 2061502 - DNA, 15 bp, Homo sapiens
gtctgcctctcttct

SEQ ID NO: 2061503 - DNA, 15 bp, Homo sapiens
tctgcctctcttctg

SEQ ID NO: 2061504 - DNA, 15 bp, Homo sapiens
ctgcctctcttctgc

SEQ ID NO: 2061505 - DNA, 15 bp, Homo sapiens
tgcctctcttctgcc

SEQ ID NO: 2061506 - DNA, 15 bp, Homo sapiens
gcctctcttctgccg

SEQ ID NO: 2061507 - DNA, 15 bp, Homo sapiens
cctctcttctgccgc

SEQ ID NO: 2061508 - DNA, 15 bp, Homo sapiens
ctctcttctgccgcc

SEQ ID NO: 2061509 - DNA, 15 bp, Homo sapiens
tctcttctgccgccg

SEQ ID NO: 2061510 - DNA, 15 bp, Homo sapiens
ctcttctgccgccgt

SEQ ID NO: 2061511 - DNA, 15 bp, Homo sapiens
tcttctgccgccgtc

SEQ ID NO: 2061512 - DNA, 15 bp, Homo sapiens
cttctgccgccgtca

SEQ ID NO: 2061513 - DNA, 15 bp, Homo sapiens
ttctgccgccgtcag

SEQ ID NO: 2061514 - DNA, 15 bp, Homo sapiens
tctgccgccgtcaga

SEQ ID NO: 2061515 - DNA, 15 bp, Homo sapiens
ctgccgccgtcagag

SEQ ID NO: 2061516 - DNA, 15 bp, Homo sapiens
tgccgccgtcagagg

SEQ ID NO: 2061517 - DNA, 15 bp, Homo sapiens
gccgccgtcagaggg

SEQ ID NO: 2061518 - DNA, 15 bp, Homo sapiens
ccgccgtcagaggga

SEQ ID NO: 2061519 - DNA, 15 bp, Homo sapiens
cgccgtcagagggac

SEQ ID NO: 2061520 - DNA, 15 bp, Homo sapiens
gccgtcagagggaca

SEQ ID NO: 2061521 - DNA, 15 bp, Homo sapiens
ccgtcagagggacac

SEQ ID NO: 2061522 - DNA, 15 bp, Homo sapiens
cgtcagagggacacc

SEQ ID NO: 2061523 - DNA, 15 bp, Homo sapiens
gtcagagggacacct

SEQ ID NO: 2061524 - DNA, 15 bp, Homo sapiens
tcagagggacacctc

SEQ ID NO: 2061525 - DNA, 15 bp, Homo sapiens
cagagggacacctct

SEQ ID NO: 2061526 - DNA, 15 bp, Homo sapiens
agagggacacctctg

SEQ ID NO: 2061527 - DNA, 15 bp, Homo sapiens
gagggacacctctgc

SEQ ID NO: 2061528 - DNA, 15 bp, Homo sapiens
agggacacctctgct

SEQ ID NO: 2061529 - DNA, 15 bp, Homo sapiens
gggacacctctgctc

SEQ ID NO: 2061530 - DNA, 15 bp, Homo sapiens
ggacacctctgctcc

SEQ ID NO: 2061531 - DNA, 15 bp, Homo sapiens
gacacctctgctccc

SEQ ID NO: 2061532 - DNA, 15 bp, Homo sapiens
acacctctgctcccc

SEQ ID NO: 2061533 - DNA, 15 bp, Homo sapiens
cacctctgctccccg

SEQ ID NO: 2061534 - DNA, 15 bp, Homo sapiens
acctctgctccccgc

SEQ ID NO: 2061535 - DNA, 15 bp, Homo sapiens
cctctgctccccgcc

SEQ ID NO: 2061536 - DNA, 15 bp, Homo sapiens
ctctgctccccgccc

SEQ ID NO: 2061537 - DNA, 15 bp, Homo sapiens
tctgctccccgcccc

SEQ ID NO: 2061538 - DNA, 15 bp, Homo sapiens
ctgctccccgccccc

SEQ ID NO: 2061539 - DNA, 15 bp, Homo sapiens
tgctccccgccccct

SEQ ID NO: 2061540 - DNA, 15 bp, Homo sapiens
gctccccgccccctt

SEQ ID NO: 2061541 - DNA, 15 bp, Homo sapiens
ctccccgcccccttt

SEQ ID NO: 2061542 - DNA, 15 bp, Homo sapiens
tccccgccccctttc

SEQ ID NO: 2061543 - DNA, 15 bp, Homo sapiens
ccccgccccctttcc

SEQ ID NO: 2061544 - DNA, 15 bp, Homo sapiens
cccgccccctttccc

SEQ ID NO: 2061545 - DNA, 15 bp, Homo sapiens
ccgccccctttcccc

SEQ ID NO: 2061546 - DNA, 15 bp, Homo sapiens
cgccccctttccccc

SEQ ID NO: 2061547 - DNA, 15 bp, Homo sapiens
gccccctttccccct

SEQ ID NO: 2061548 - DNA, 15 bp, Homo sapiens
ccccctttcccccta

SEQ ID NO: 2061549 - DNA, 15 bp, Homo sapiens
cccctttccccctac

SEQ ID NO: 2061550 - DNA, 15 bp, Homo sapiens
ccctttccccctacc

SEQ ID NO: 2061551 - DNA, 15 bp, Homo sapiens
cctttccccctaccg

SEQ ID NO: 2061552 - DNA, 15 bp, Homo sapiens
ctttccccctaccgg

SEQ ID NO: 2061553 - DNA, 15 bp, Homo sapiens
tttccccctaccgga

SEQ ID NO: 2061554 - DNA, 15 bp, Homo sapiens
ttccccctaccggag

SEQ ID NO: 2061555 - DNA, 15 bp, Homo sapiens
tccccctaccggaga

SEQ ID NO: 2061556 - DNA, 15 bp, Homo sapiens
ccccctaccggagag

SEQ ID NO: 2061557 - DNA, 15 bp, Homo sapiens
cccctaccggagaga

SEQ ID NO: 2061558 - DNA, 15 bp, Homo sapiens
ccctaccggagagaa

SEQ ID NO: 2061559 - DNA, 15 bp, Homo sapiens
cctaccggagagaat

SEQ ID NO: 2061560 - DNA, 15 bp, Homo sapiens
ctaccggagagaatc

SEQ ID NO: 2061561 - DNA, 15 bp, Homo sapiens
taccggagagaatcc

SEQ ID NO: 2061562 - DNA, 15 bp, Homo sapiens
accggagagaatccg

SEQ ID NO: 2061563 - DNA, 15 bp, Homo sapiens
ccggagagaatccga

SEQ ID NO: 2061564 - DNA, 15 bp, Homo sapiens
cggagagaatccgag

SEQ ID NO: 2061565 - DNA, 15 bp, Homo sapiens
ggagagaatccgagc

SEQ ID NO: 2061566 - DNA, 15 bp, Homo sapiens
gagagaatccgagcg

SEQ ID NO: 2061567 - DNA, 15 bp, Homo sapiens
agagaatccgagcgg

SEQ ID NO: 2061568 - DNA, 15 bp, Homo sapiens
gagaatccgagcggg

SEQ ID NO: 2061569 - DNA, 15 bp, Homo sapiens
agaatccgagcgggc

SEQ ID NO: 2061570 - DNA, 15 bp, Homo sapiens
gaatccgagcgggcg

SEQ ID NO: 2061571 - DNA, 15 bp, Homo sapiens
aatccgagcgggcgg

SEQ ID NO: 2061572 - DNA, 15 bp, Homo sapiens
atccgagcgggcgga

SEQ ID NO: 2061573 - DNA, 15 bp, Homo sapiens
tccgagcgggcggag

SEQ ID NO: 2061574 - DNA, 15 bp, Homo sapiens
ccgagcgggcggagg

SEQ ID NO: 2061575 - DNA, 15 bp, Homo sapiens
cgagcgggcggaggg

SEQ ID NO: 2061576 - DNA, 15 bp, Homo sapiens
gagcgggcggagggg

SEQ ID NO: 2061577 - DNA, 15 bp, Homo sapiens
agcgggcggaggggg

SEQ ID NO: 2061578 - DNA, 15 bp, Homo sapiens
gcgggcggagggggc

SEQ ID NO: 2061579 - DNA, 15 bp, Homo sapiens
cgggcggagggggcg

SEQ ID NO: 2061580 - DNA, 15 bp, Homo sapiens
gggcggagggggcgc

SEQ ID NO: 2061581 - DNA, 15 bp, Homo sapiens
ggcggagggggcgct

SEQ ID NO: 2061582 - DNA, 15 bp, Homo sapiens
gcggagggggcgctg

SEQ ID NO: 2061583 - DNA, 15 bp, Homo sapiens
cggagggggcgctga

SEQ ID NO: 2061584 - DNA, 15 bp, Homo sapiens
ggagggggcgctgag

SEQ ID NO: 2061585 - DNA, 15 bp, Homo sapiens
gagggggcgctgagt

SEQ ID NO: 2061586 - DNA, 15 bp, Homo sapiens
agggggcgctgagta

SEQ ID NO: 2061587 - DNA, 15 bp, Homo sapiens
gggggcgctgagtag

SEQ ID NO: 2061588 - DNA, 15 bp, Homo sapiens
ggggcgctgagtagg

SEQ ID NO: 2061589 - DNA, 15 bp, Homo sapiens
gggcgctgagtaggg

SEQ ID NO: 2061590 - DNA, 15 bp, Homo sapiens
ggcgctgagtagggg

SEQ ID NO: 2061591 - DNA, 15 bp, Homo sapiens
gcgctgagtagggga

SEQ ID NO: 2061592 - DNA, 15 bp, Homo sapiens
cgctgagtaggggat

SEQ ID NO: 2061593 - DNA, 15 bp, Homo sapiens
gctgagtaggggatc

SEQ ID NO: 2061594 - DNA, 15 bp, Homo sapiens
ctgagtaggggatcg

SEQ ID NO: 2061595 - DNA, 15 bp, Homo sapiens
tgagtaggggatcga

SEQ ID NO: 2061596 - DNA, 15 bp, Homo sapiens
gagtaggggatcgac

SEQ ID NO: 2061597 - DNA, 15 bp, Homo sapiens
agtaggggatcgact

SEQ ID NO: 2061598 - DNA, 15 bp, Homo sapiens
gtaggggatcgactg

SEQ ID NO: 2061599 - DNA, 15 bp, Homo sapiens
taggggatcgactgc

SEQ ID NO: 2061600 - DNA, 15 bp, Homo sapiens
aggggatcgactgcc

SEQ ID NO: 2061601 - DNA, 15 bp, Homo sapiens
ggggatcgactgcct

SEQ ID NO: 2061602 - DNA, 15 bp, Homo sapiens
gggatcgactgcctc

SEQ ID NO: 2061603 - DNA, 15 bp, Homo sapiens
ggatcgactgcctcc

SEQ ID NO: 2061604 - DNA, 15 bp, Homo sapiens
gatcgactgcctccc

SEQ ID NO: 2061605 - DNA, 15 bp, Homo sapiens
atcgactgcctcccg

SEQ ID NO: 2061606 - DNA, 15 bp, Homo sapiens
tcgactgcctcccgg

SEQ ID NO: 2061607 - DNA, 15 bp, Homo sapiens
cgactgcctcccgga

SEQ ID NO: 2061608 - DNA, 15 bp, Homo sapiens
gactgcctcccggag

SEQ ID NO: 2061609 - DNA, 15 bp, Homo sapiens
actgcctcccggagg

SEQ ID NO: 2061610 - DNA, 15 bp, Homo sapiens
ctgcctcccggaggc

SEQ ID NO: 2061611 - DNA, 15 bp, Homo sapiens
tgcctcccggaggct

SEQ ID NO: 2061612 - DNA, 15 bp, Homo sapiens
gcctcccggaggctg

SEQ ID NO: 2061613 - DNA, 15 bp, Homo sapiens
cctcccggaggctgt

SEQ ID NO: 2061614 - DNA, 15 bp, Homo sapiens
ctcccggaggctgtc

SEQ ID NO: 2061615 - DNA, 15 bp, Homo sapiens
tcccggaggctgtcc

SEQ ID NO: 2061616 - DNA, 15 bp, Homo sapiens
cccggaggctgtccc

SEQ ID NO: 2061617 - DNA, 15 bp, Homo sapiens
ccggaggctgtcccg

SEQ ID NO: 2061618 - DNA, 15 bp, Homo sapiens
cggaggctgtcccgg

SEQ ID NO: 2061619 - DNA, 15 bp, Homo sapiens
ggaggctgtcccgga

SEQ ID NO: 2061620 - DNA, 15 bp, Homo sapiens
gaggctgtcccggat

SEQ ID NO: 2061621 - DNA, 15 bp, Homo sapiens
aggctgtcccggatc

SEQ ID NO: 2061622 - DNA, 15 bp, Homo sapiens
ggctgtcccggatcc

SEQ ID NO: 2061623 - DNA, 15 bp, Homo sapiens
gctgtcccggatccc

SEQ ID NO: 2061624 - DNA, 15 bp, Homo sapiens
ctgtcccggatcccc

SEQ ID NO: 2061625 - DNA, 15 bp, Homo sapiens
tgtcccggatccccg

SEQ ID NO: 2061626 - DNA, 15 bp, Homo sapiens
gtcccggatccccga

SEQ ID NO: 2061627 - DNA, 15 bp, Homo sapiens
tcccggatccccgag

SEQ ID NO: 2061628 - DNA, 15 bp, Homo sapiens
cccggatccccgagc

SEQ ID NO: 2061629 - DNA, 15 bp, Homo sapiens
ccggatccccgagcc

SEQ ID NO: 2061630 - DNA, 15 bp, Homo sapiens
cggatccccgagcca

SEQ ID NO: 2061631 - DNA, 15 bp, Homo sapiens
ggatccccgagccac

SEQ ID NO: 2061632 - DNA, 15 bp, Homo sapiens
gatccccgagccaca

SEQ ID NO: 2061633 - DNA, 15 bp, Homo sapiens
atccccgagccacaa

SEQ ID NO: 2061634 - DNA, 15 bp, Homo sapiens
tccccgagccacaac

SEQ ID NO: 2061635 - DNA, 15 bp, Homo sapiens
ccccgagccacaacc

SEQ ID NO: 2061636 - DNA, 15 bp, Homo sapiens
cccgagccacaaccc

SEQ ID NO: 2061637 - DNA, 15 bp, Homo sapiens
ccgagccacaacccg

SEQ ID NO: 2061638 - DNA, 15 bp, Homo sapiens
cgagccacaacccgc

SEQ ID NO: 2061639 - DNA, 15 bp, Homo sapiens
gagccacaacccgcc

SEQ ID NO: 2061640 - DNA, 15 bp, Homo sapiens
agccacaacccgccc

SEQ ID NO: 2061641 - DNA, 15 bp, Homo sapiens
gccacaacccgcccc

SEQ ID NO: 2061642 - DNA, 15 bp, Homo sapiens
ccacaacccgccccc

SEQ ID NO: 2061643 - DNA, 15 bp, Homo sapiens
cacaacccgcccccg

SEQ ID NO: 2061644 - DNA, 15 bp, Homo sapiens
acaacccgcccccgc

SEQ ID NO: 2061645 - DNA, 15 bp, Homo sapiens
caacccgcccccgca

SEQ ID NO: 2061646 - DNA, 15 bp, Homo sapiens
aacccgcccccgcag

SEQ ID NO: 2061647 - DNA, 15 bp, Homo sapiens
acccgcccccgcagc

SEQ ID NO: 2061648 - DNA, 15 bp, Homo sapiens
cccgcccccgcagct

SEQ ID NO: 2061649 - DNA, 15 bp, Homo sapiens
ccgcccccgcagctc

SEQ ID NO: 2061650 - DNA, 15 bp, Homo sapiens
cgcccccgcagctca

SEQ ID NO: 2061651 - DNA, 15 bp, Homo sapiens
gcccccgcagctcag

SEQ ID NO: 2061652 - DNA, 15 bp, Homo sapiens
cccccgcagctcagg

SEQ ID NO: 2061653 - DNA, 15 bp, Homo sapiens
ccccgcagctcaggg

SEQ ID NO: 2061654 - DNA, 15 bp, Homo sapiens
cccgcagctcagggg

SEQ ID NO: 2061655 - DNA, 15 bp, Homo sapiens
ccgcagctcaggggt

SEQ ID NO: 2061656 - DNA, 15 bp, Homo sapiens
cgcagctcaggggtt

SEQ ID NO: 2061657 - DNA, 15 bp, Homo sapiens
gcagctcaggggttt

SEQ ID NO: 2061658 - DNA, 15 bp, Homo sapiens
cagctcaggggtttt

SEQ ID NO: 2061659 - DNA, 15 bp, Homo sapiens
agctcaggggttttt

SEQ ID NO: 2061660 - DNA, 15 bp, Homo sapiens
gctcaggggtttttc

SEQ ID NO: 2061661 - DNA, 15 bp, Homo sapiens
ctcaggggtttttca

SEQ ID NO: 2061662 - DNA, 15 bp, Homo sapiens
tcaggggtttttcag

SEQ ID NO: 2061663 - DNA, 15 bp, Homo sapiens
caggggtttttcagt

SEQ ID NO: 2061664 - DNA, 15 bp, Homo sapiens
aggggtttttcagtg

SEQ ID NO: 2061665 - DNA, 15 bp, Homo sapiens
ggggtttttcagtgg

SEQ ID NO: 2061666 - DNA, 15 bp, Homo sapiens
gggtttttcagtggg

SEQ ID NO: 2061667 - DNA, 15 bp, Homo sapiens
ggtttttcagtgggc

SEQ ID NO: 2061668 - DNA, 15 bp, Homo sapiens
gtttttcagtgggcc

SEQ ID NO: 2061669 - DNA, 15 bp, Homo sapiens
tttttcagtgggcca

SEQ ID NO: 2061670 - DNA, 15 bp, Homo sapiens
ttttcagtgggccac

SEQ ID NO: 2061671 - DNA, 15 bp, Homo sapiens
tttcagtgggccacc

SEQ ID NO: 2061672 - DNA, 15 bp, Homo sapiens
ttcagtgggccaccc

SEQ ID NO: 2061673 - DNA, 15 bp, Homo sapiens
tcagtgggccacccc

SEQ ID NO: 2061674 - DNA, 15 bp, Homo sapiens
cagtgggccaccccc

SEQ ID NO: 2061675 - DNA, 15 bp, Homo sapiens
agtgggccacccccg

SEQ ID NO: 2061676 - DNA, 15 bp, Homo sapiens
gtgggccacccccgc

SEQ ID NO: 2061677 - DNA, 15 bp, Homo sapiens
tgggccacccccgct

SEQ ID NO: 2061678 - DNA, 15 bp, Homo sapiens
gggccacccccgcta

SEQ ID NO: 2061679 - DNA, 15 bp, Homo sapiens
ggccacccccgctaa

SEQ ID NO: 2061680 - DNA, 15 bp, Homo sapiens
gccacccccgctaac

SEQ ID NO: 2061681 - DNA, 15 bp, Homo sapiens
ccacccccgctaaca

SEQ ID NO: 2061682 - DNA, 15 bp, Homo sapiens
cacccccgctaacac

SEQ ID NO: 2061683 - DNA, 15 bp, Homo sapiens
acccccgctaacacg

SEQ ID NO: 2061684 - DNA, 15 bp, Homo sapiens
cccccgctaacacgc

SEQ ID NO: 2061685 - DNA, 15 bp, Homo sapiens
ccccgctaacacgcc

SEQ ID NO: 2061686 - DNA, 15 bp, Homo sapiens
cccgctaacacgcct

SEQ ID NO: 2061687 - DNA, 15 bp, Homo sapiens
ccgctaacacgcctc

SEQ ID NO: 2061688 - DNA, 15 bp, Homo sapiens
cgctaacacgcctcc

SEQ ID NO: 2061689 - DNA, 15 bp, Homo sapiens
gctaacacgcctccc

SEQ ID NO: 2061690 - DNA, 15 bp, Homo sapiens
ctaacacgcctcccc

SEQ ID NO: 2061691 - DNA, 15 bp, Homo sapiens
taacacgcctccccc

SEQ ID NO: 2061692 - DNA, 15 bp, Homo sapiens
aacacgcctccccca

SEQ ID NO: 2061693 - DNA, 15 bp, Homo sapiens
acacgcctcccccaa

SEQ ID NO: 2061694 - DNA, 15 bp, Homo sapiens
cacgcctcccccaag

SEQ ID NO: 2061695 - DNA, 15 bp, Homo sapiens
acgcctcccccaagg

SEQ ID NO: 2061696 - DNA, 15 bp, Homo sapiens
cgcctcccccaaggt

SEQ ID NO: 2061697 - DNA, 15 bp, Homo sapiens
gcctcccccaaggtc

SEQ ID NO: 2061698 - DNA, 15 bp, Homo sapiens
cctcccccaaggtct

SEQ ID NO: 2061699 - DNA, 15 bp, Homo sapiens
ctcccccaaggtctt

SEQ ID NO: 2061700 - DNA, 15 bp, Homo sapiens
tcccccaaggtcttc

SEQ ID NO: 2061701 - DNA, 15 bp, Homo sapiens
cccccaaggtcttcc

SEQ ID NO: 2061702 - DNA, 15 bp, Homo sapiens
ccccaaggtcttccc

SEQ ID NO: 2061703 - DNA, 15 bp, Homo sapiens
cccaaggtcttcccc

SEQ ID NO: 2061704 - DNA, 15 bp, Homo sapiens
ccaaggtcttccccc

SEQ ID NO: 2061705 - DNA, 15 bp, Homo sapiens
caaggtcttcccccc

SEQ ID NO: 2061706 - DNA, 15 bp, Homo sapiens
aaggtcttccccccc

SEQ ID NO: 2061707 - DNA, 15 bp, Homo sapiens
aggtcttcccccccc

SEQ ID NO: 2061708 - DNA, 15 bp, Homo sapiens
ggtcttccccccccc

SEQ ID NO: 2061709 - DNA, 15 bp, Homo sapiens
gtcttcccccccccc

SEQ ID NO: 2061710 - DNA, 15 bp, Homo sapiens
tcttccccccccccc

SEQ ID NO: 2061711 - DNA, 15 bp, Homo sapiens
cttcccccccccccc

SEQ ID NO: 2061712 - DNA, 15 bp, Homo sapiens
ttccccccccccccc

SEQ ID NO: 2061713 - DNA, 15 bp, Homo sapiens
tcccccccccccccc

SEQ ID NO: 2061714 - DNA, 15 bp, Homo sapiens
cccccccccccccca

SEQ ID NO: 2061715 - DNA, 15 bp, Homo sapiens
cccccccccccccac

SEQ ID NO: 2061716 - DNA, 15 bp, Homo sapiens
ccccccccccccacc

SEQ ID NO: 2061717 - DNA, 15 bp, Homo sapiens
cccccccccccaccc

SEQ ID NO: 2061718 - DNA, 15 bp, Homo sapiens
ccccccccccacccc

SEQ ID NO: 2061719 - DNA, 15 bp, Homo sapiens
cccccccccaccccc

SEQ ID NO: 2061720 - DNA, 15 bp, Homo sapiens
ccccccccacccccg

SEQ ID NO: 2061721 - DNA, 15 bp, Homo sapiens
cccccccacccccgg

SEQ ID NO: 2061722 - DNA, 15 bp, Homo sapiens
ccccccacccccggc

SEQ ID NO: 2061723 - DNA, 15 bp, Homo sapiens
cccccacccccggcc

SEQ ID NO: 2061724 - DNA, 15 bp, Homo sapiens
ccccacccccggccg

SEQ ID NO: 2061725 - DNA, 15 bp, Homo sapiens
cccacccccggccga

SEQ ID NO: 2061726 - DNA, 15 bp, Homo sapiens
ccacccccggccgag

SEQ ID NO: 2061727 - DNA, 15 bp, Homo sapiens
cacccccggccgagc

SEQ ID NO: 2061728 - DNA, 15 bp, Homo sapiens
acccccggccgagca

SEQ ID NO: 2061729 - DNA, 15 bp, Homo sapiens
cccccggccgagcaa

SEQ ID NO: 2061730 - DNA, 15 bp, Homo sapiens
ccccggccgagcaaa

SEQ ID NO: 2061731 - DNA, 15 bp, Homo sapiens
cccggccgagcaaac

SEQ ID NO: 2061732 - DNA, 15 bp, Homo sapiens
ccggccgagcaaaca

SEQ ID NO: 2061733 - DNA, 15 bp, Homo sapiens
cggccgagcaaacac

SEQ ID NO: 2061734 - DNA, 15 bp, Homo sapiens
ggccgagcaaacaca

SEQ ID NO: 2061735 - DNA, 15 bp, Homo sapiens
gccgagcaaacacag

SEQ ID NO: 2061736 - DNA, 15 bp, Homo sapiens
ccgagcaaacacagc

SEQ ID NO: 2061737 - DNA, 15 bp, Homo sapiens
cgagcaaacacagca

SEQ ID NO: 2061738 - DNA, 15 bp, Homo sapiens
gagcaaacacagcac

SEQ ID NO: 2061739 - DNA, 15 bp, Homo sapiens
agcaaacacagcact

SEQ ID NO: 2061740 - DNA, 15 bp, Homo sapiens
gcaaacacagcactg

SEQ ID NO: 2061741 - DNA, 15 bp, Homo sapiens
caaacacagcactgg

SEQ ID NO: 2061742 - DNA, 15 bp, Homo sapiens
aaacacagcactggc

SEQ ID NO: 2061743 - DNA, 15 bp, Homo sapiens
aacacagcactggcc

SEQ ID NO: 2061744 - DNA, 15 bp, Homo sapiens
acacagcactggccc

SEQ ID NO: 2061745 - DNA, 15 bp, Homo sapiens
cacagcactggcccc

SEQ ID NO: 2061746 - DNA, 15 bp, Homo sapiens
acagcactggccccc

SEQ ID NO: 2061747 - DNA, 15 bp, Homo sapiens
cagcactggccccca

SEQ ID NO: 2061748 - DNA, 15 bp, Homo sapiens
agcactggcccccag

SEQ ID NO: 2061749 - DNA, 15 bp, Homo sapiens
gcactggcccccaga

SEQ ID NO: 2061750 - DNA, 15 bp, Homo sapiens
cactggcccccagag

SEQ ID NO: 2061751 - DNA, 15 bp, Homo sapiens
actggcccccagagc

SEQ ID NO: 2061752 - DNA, 15 bp, Homo sapiens
ctggcccccagagct

SEQ ID NO: 2061753 - DNA, 15 bp, Homo sapiens
tggcccccagagctg

SEQ ID NO: 2061754 - DNA, 15 bp, Homo sapiens
ggcccccagagctgg

SEQ ID NO: 2061755 - DNA, 15 bp, Homo sapiens
gcccccagagctggg

SEQ ID NO: 2061756 - DNA, 15 bp, Homo sapiens
cccccagagctggga

SEQ ID NO: 2061757 - DNA, 15 bp, Homo sapiens
ccccagagctgggag

SEQ ID NO: 2061758 - DNA, 15 bp, Homo sapiens
cccagagctgggagg

SEQ ID NO: 2061759 - DNA, 15 bp, Homo sapiens
ccagagctgggagga

SEQ ID NO: 2061760 - DNA, 15 bp, Homo sapiens
cagagctgggaggat

SEQ ID NO: 2061761 - DNA, 15 bp, Homo sapiens
agagctgggaggatg

SEQ ID NO: 2061762 - DNA, 15 bp, Homo sapiens
gagctgggaggatgg

SEQ ID NO: 2061763 - DNA, 15 bp, Homo sapiens
agctgggaggatggg

SEQ ID NO: 2061764 - DNA, 15 bp, Homo sapiens
gctgggaggatggga

SEQ ID NO: 2061765 - DNA, 15 bp, Homo sapiens
ctgggaggatgggaa

SEQ ID NO: 2061766 - DNA, 15 bp, Homo sapiens
tgggaggatgggaag

SEQ ID NO: 2061767 - DNA, 15 bp, Homo sapiens
gggaggatgggaagg

SEQ ID NO: 2061768 - DNA, 15 bp, Homo sapiens
ggaggatgggaaggg

SEQ ID NO: 2061769 - DNA, 15 bp, Homo sapiens
gaggatgggaagggg

SEQ ID NO: 2061770 - DNA, 15 bp, Homo sapiens
aggatgggaaggggt

SEQ ID NO: 2061771 - DNA, 15 bp, Homo sapiens
ggatgggaaggggtc

SEQ ID NO: 2061772 - DNA, 15 bp, Homo sapiens
gatgggaaggggtct

SEQ ID NO: 2061773 - DNA, 15 bp, Homo sapiens
atgggaaggggtctc

SEQ ID NO: 2061774 - DNA, 15 bp, Homo sapiens
tgggaaggggtctca

SEQ ID NO: 2061775 - DNA, 15 bp, Homo sapiens
gggaaggggtctcac

SEQ ID NO: 2061776 - DNA, 15 bp, Homo sapiens
ggaaggggtctcacg

SEQ ID NO: 2061777 - DNA, 15 bp, Homo sapiens
gaaggggtctcacgg

SEQ ID NO: 2061778 - DNA, 15 bp, Homo sapiens
aaggggtctcacggg

SEQ ID NO: 2061779 - DNA, 15 bp, Homo sapiens
aggggtctcacggga

SEQ ID NO: 2061780 - DNA, 15 bp, Homo sapiens
ggggtctcacgggag

SEQ ID NO: 2061781 - DNA, 15 bp, Homo sapiens
gggtctcacgggagg

SEQ ID NO: 2061782 - DNA, 15 bp, Homo sapiens
ggtctcacgggaggg

SEQ ID NO: 2061783 - DNA, 15 bp, Homo sapiens
gtctcacgggagggt

SEQ ID NO: 2061784 - DNA, 15 bp, Homo sapiens
tctcacgggagggtc

SEQ ID NO: 2061785 - DNA, 15 bp, Homo sapiens
ctcacgggagggtcc

SEQ ID NO: 2061786 - DNA, 15 bp, Homo sapiens
tcacgggagggtccg

SEQ ID NO: 2061787 - DNA, 15 bp, Homo sapiens
cacgggagggtccgt

SEQ ID NO: 2061788 - DNA, 15 bp, Homo sapiens
acgggagggtccgtc

SEQ ID NO: 2061789 - DNA, 15 bp, Homo sapiens
cgggagggtccgtca

SEQ ID NO: 2061790 - DNA, 15 bp, Homo sapiens
gggagggtccgtcac

SEQ ID NO: 2061791 - DNA, 15 bp, Homo sapiens
ggagggtccgtcact

SEQ ID NO: 2061792 - DNA, 15 bp, Homo sapiens
gagggtccgtcactg

SEQ ID NO: 2061793 - DNA, 15 bp, Homo sapiens
agggtccgtcactga

SEQ ID NO: 2061794 - DNA, 15 bp, Homo sapiens
gggtccgtcactgaa

SEQ ID NO: 2061795 - DNA, 15 bp, Homo sapiens
ggtccgtcactgaag

SEQ ID NO: 2061796 - DNA, 15 bp, Homo sapiens
gtccgtcactgaagt

SEQ ID NO: 2061797 - DNA, 15 bp, Homo sapiens
tccgtcactgaagtt

SEQ ID NO: 2061798 - DNA, 15 bp, Homo sapiens
ccgtcactgaagttg

SEQ ID NO: 2061799 - DNA, 15 bp, Homo sapiens
cgtcactgaagttgc

SEQ ID NO: 2061800 - DNA, 15 bp, Homo sapiens
gtcactgaagttgcc

SEQ ID NO: 2061801 - DNA, 15 bp, Homo sapiens
tcactgaagttgccc

SEQ ID NO: 2061802 - DNA, 15 bp, Homo sapiens
cactgaagttgcccc

SEQ ID NO: 2061803 - DNA, 15 bp, Homo sapiens
actgaagttgcccca

SEQ ID NO: 2061804 - DNA, 15 bp, Homo sapiens
ctgaagttgccccac

SEQ ID NO: 2061805 - DNA, 15 bp, Homo sapiens
tgaagttgccccacc

SEQ ID NO: 2061806 - DNA, 15 bp, Homo sapiens
gaagttgccccacct

SEQ ID NO: 2061807 - DNA, 15 bp, Homo sapiens
aagttgccccacctc

SEQ ID NO: 2061808 - DNA, 15 bp, Homo sapiens
agttgccccacctcg

SEQ ID NO: 2061809 - DNA, 15 bp, Homo sapiens
gttgccccacctcga

SEQ ID NO: 2061810 - DNA, 15 bp, Homo sapiens
ttgccccacctcgaa

SEQ ID NO: 2061811 - DNA, 15 bp, Homo sapiens
tgccccacctcgaac

SEQ ID NO: 2061812 - DNA, 15 bp, Homo sapiens
gccccacctcgaaca

SEQ ID NO: 2061813 - DNA, 15 bp, Homo sapiens
ccccacctcgaacaa

SEQ ID NO: 2061814 - DNA, 15 bp, Homo sapiens
cccacctcgaacaaa

SEQ ID NO: 2061815 - DNA, 15 bp, Homo sapiens
ccacctcgaacaaac

SEQ ID NO: 2061816 - DNA, 15 bp, Homo sapiens
cacctcgaacaaacc

SEQ ID NO: 2061817 - DNA, 15 bp, Homo sapiens
acctcgaacaaacct

SEQ ID NO: 2061818 - DNA, 15 bp, Homo sapiens
cctcgaacaaacctg

SEQ ID NO: 2061819 - DNA, 15 bp, Homo sapiens
ctcgaacaaacctgg

SEQ ID NO: 2061820 - DNA, 15 bp, Homo sapiens
tcgaacaaacctggt

SEQ ID NO: 2061821 - DNA, 15 bp, Homo sapiens
cgaacaaacctggtg

SEQ ID NO: 2061822 - DNA, 15 bp, Homo sapiens
gaacaaacctggtgt

SEQ ID NO: 2061823 - DNA, 15 bp, Homo sapiens
aacaaacctggtgtc

SEQ ID NO: 2061824 - DNA, 15 bp, Homo sapiens
acaaacctggtgtcc

SEQ ID NO: 2061825 - DNA, 15 bp, Homo sapiens
caaacctggtgtccc

SEQ ID NO: 2061826 - DNA, 15 bp, Homo sapiens
aaacctggtgtccct

SEQ ID NO: 2061827 - DNA, 15 bp, Homo sapiens
aacctggtgtccctg

SEQ ID NO: 2061828 - DNA, 15 bp, Homo sapiens
acctggtgtccctga

SEQ ID NO: 2061829 - DNA, 15 bp, Homo sapiens
cctggtgtccctgac

SEQ ID NO: 2061830 - DNA, 15 bp, Homo sapiens
ctggtgtccctgacc

SEQ ID NO: 2061831 - DNA, 15 bp, Homo sapiens
tggtgtccctgaccc

SEQ ID NO: 2061832 - DNA, 15 bp, Homo sapiens
ggtgtccctgaccct

SEQ ID NO: 2061833 - DNA, 15 bp, Homo sapiens
gtgtccctgaccctc

SEQ ID NO: 2061834 - DNA, 15 bp, Homo sapiens
tgtccctgaccctcg

SEQ ID NO: 2061835 - DNA, 15 bp, Homo sapiens
gtccctgaccctcgc

SEQ ID NO: 2061836 - DNA, 15 bp, Homo sapiens
tccctgaccctcgcc

SEQ ID NO: 2061837 - DNA, 15 bp, Homo sapiens
ccctgaccctcgccc

SEQ ID NO: 2061838 - DNA, 15 bp, Homo sapiens
cctgaccctcgccca

SEQ ID NO: 2061839 - DNA, 15 bp, Homo sapiens
ctgaccctcgcccat

SEQ ID NO: 2061840 - DNA, 15 bp, Homo sapiens
tgaccctcgcccatc

SEQ ID NO: 2061841 - DNA, 15 bp, Homo sapiens
gaccctcgcccatct

SEQ ID NO: 2061842 - DNA, 15 bp, Homo sapiens
accctcgcccatctc

SEQ ID NO: 2061843 - DNA, 15 bp, Homo sapiens
ccctcgcccatctcc

SEQ ID NO: 2061844 - DNA, 15 bp, Homo sapiens
cctcgcccatctccc

SEQ ID NO: 2061845 - DNA, 15 bp, Homo sapiens
ctcgcccatctccca

SEQ ID NO: 2061846 - DNA, 15 bp, Homo sapiens
tcgcccatctcccag

SEQ ID NO: 2061847 - DNA, 15 bp, Homo sapiens
cgcccatctcccaga

SEQ ID NO: 2061848 - DNA, 15 bp, Homo sapiens
gcccatctcccagac

SEQ ID NO: 2061849 - DNA, 15 bp, Homo sapiens
cccatctcccagaca

SEQ ID NO: 2061850 - DNA, 15 bp, Homo sapiens
ccatctcccagacac

SEQ ID NO: 2061851 - DNA, 15 bp, Homo sapiens
catctcccagacacg

SEQ ID NO: 2061852 - DNA, 15 bp, Homo sapiens
atctcccagacacgc

SEQ ID NO: 2061853 - DNA, 15 bp, Homo sapiens
tctcccagacacgcg

SEQ ID NO: 2061854 - DNA, 15 bp, Homo sapiens
ctcccagacacgcgg

SEQ ID NO: 2061855 - DNA, 15 bp, Homo sapiens
tcccagacacgcggg

SEQ ID NO: 2061856 - DNA, 15 bp, Homo sapiens
cccagacacgcgggg

SEQ ID NO: 2061857 - DNA, 15 bp, Homo sapiens
ccagacacgcgggga

SEQ ID NO: 2061858 - DNA, 15 bp, Homo sapiens
cagacacgcggggat

SEQ ID NO: 2061859 - DNA, 15 bp, Homo sapiens
agacacgcggggatc

SEQ ID NO: 2061860 - DNA, 15 bp, Homo sapiens
gacacgcggggatct

SEQ ID NO: 2061861 - DNA, 15 bp, Homo sapiens
acacgcggggatctg

SEQ ID NO: 2061862 - DNA, 15 bp, Homo sapiens
cacgcggggatctgg

SEQ ID NO: 2061863 - DNA, 15 bp, Homo sapiens
acgcggggatctggg

SEQ ID NO: 2061864 - DNA, 15 bp, Homo sapiens
cgcggggatctgggg

SEQ ID NO: 2061865 - DNA, 15 bp, Homo sapiens
gcggggatctggggc

SEQ ID NO: 2061866 - DNA, 15 bp, Homo sapiens
cggggatctggggct

SEQ ID NO: 2061867 - DNA, 15 bp, Homo sapiens
ggggatctggggctg

SEQ ID NO: 2061868 - DNA, 15 bp, Homo sapiens
gggatctggggctgg

SEQ ID NO: 2061869 - DNA, 15 bp, Homo sapiens
ggatctggggctgga

SEQ ID NO: 2061870 - DNA, 15 bp, Homo sapiens
gatctggggctggag

SEQ ID NO: 2061871 - DNA, 15 bp, Homo sapiens
atctggggctggagc

SEQ ID NO: 2061872 - DNA, 15 bp, Homo sapiens
tctggggctggagct

SEQ ID NO: 2061873 - DNA, 15 bp, Homo sapiens
ctggggctggagctg

SEQ ID NO: 2061874 - DNA, 15 bp, Homo sapiens
tggggctggagctga

SEQ ID NO: 2061875 - DNA, 15 bp, Homo sapiens
ggggctggagctgac

SEQ ID NO: 2061876 - DNA, 15 bp, Homo sapiens
gggctggagctgact

SEQ ID NO: 2061877 - DNA, 15 bp, Homo sapiens
ggctggagctgactt

SEQ ID NO: 2061878 - DNA, 15 bp, Homo sapiens
gctggagctgacttt

SEQ ID NO: 2061879 - DNA, 15 bp, Homo sapiens
ctggagctgactttc

SEQ ID NO: 2061880 - DNA, 15 bp, Homo sapiens
tggagctgactttcc

SEQ ID NO: 2061881 - DNA, 15 bp, Homo sapiens
ggagctgactttccg

SEQ ID NO: 2061882 - DNA, 15 bp, Homo sapiens
gagctgactttccga

SEQ ID NO: 2061883 - DNA, 15 bp, Homo sapiens
agctgactttccgag

SEQ ID NO: 2061884 - DNA, 15 bp, Homo sapiens
gctgactttccgagg

SEQ ID NO: 2061885 - DNA, 15 bp, Homo sapiens
ctgactttccgagga

SEQ ID NO: 2061886 - DNA, 15 bp, Homo sapiens
tgactttccgaggac

SEQ ID NO: 2061887 - DNA, 15 bp, Homo sapiens
gactttccgaggaca

SEQ ID NO: 2061888 - DNA, 15 bp, Homo sapiens
actttccgaggacat

SEQ ID NO: 2061889 - DNA, 15 bp, Homo sapiens
ctttccgaggacatc

SEQ ID NO: 2061890 - DNA, 15 bp, Homo sapiens
tttccgaggacatca

SEQ ID NO: 2061891 - DNA, 15 bp, Homo sapiens
ttccgaggacatcac

SEQ ID NO: 2061892 - DNA, 15 bp, Homo sapiens
tccgaggacatcaca

SEQ ID NO: 2061893 - DNA, 15 bp, Homo sapiens
ccgaggacatcacag

SEQ ID NO: 2061894 - DNA, 15 bp, Homo sapiens
cgaggacatcacagc

SEQ ID NO: 2061895 - DNA, 15 bp, Homo sapiens
gaggacatcacagcc

SEQ ID NO: 2061896 - DNA, 15 bp, Homo sapiens
aggacatcacagccc

SEQ ID NO: 2061897 - DNA, 15 bp, Homo sapiens
ggacatcacagcccc

SEQ ID NO: 2061898 - DNA, 15 bp, Homo sapiens
gacatcacagcccca

SEQ ID NO: 2061899 - DNA, 15 bp, Homo sapiens
acatcacagccccag

SEQ ID NO: 2061900 - DNA, 15 bp, Homo sapiens
catcacagccccagc

SEQ ID NO: 2061901 - DNA, 15 bp, Homo sapiens
atcacagccccagca

SEQ ID NO: 2061902 - DNA, 15 bp, Homo sapiens
tcacagccccagcac

SEQ ID NO: 2061903 - DNA, 15 bp, Homo sapiens
cacagccccagcacc

SEQ ID NO: 2061904 - DNA, 15 bp, Homo sapiens
acagccccagcaccc

SEQ ID NO: 2061905 - DNA, 15 bp, Homo sapiens
cagccccagcacccg

SEQ ID NO: 2061906 - DNA, 15 bp, Homo sapiens
agccccagcacccga

SEQ ID NO: 2061907 - DNA, 15 bp, Homo sapiens
gccccagcacccgag

SEQ ID NO: 2061908 - DNA, 15 bp, Homo sapiens
ccccagcacccgagc

SEQ ID NO: 2061909 - DNA, 15 bp, Homo sapiens
cccagcacccgagcc

SEQ ID NO: 2061910 - DNA, 15 bp, Homo sapiens
ccagcacccgagccc

SEQ ID NO: 2061911 - DNA, 15 bp, Homo sapiens
cagcacccgagccca

SEQ ID NO: 2061912 - DNA, 15 bp, Homo sapiens
agcacccgagcccag

SEQ ID NO: 2061913 - DNA, 15 bp, Homo sapiens
gcacccgagcccaga

SEQ ID NO: 2061914 - DNA, 15 bp, Homo sapiens
cacccgagcccagag

SEQ ID NO: 2061915 - DNA, 15 bp, Homo sapiens
acccgagcccagagc

SEQ ID NO: 2061916 - DNA, 15 bp, Homo sapiens
cccgagcccagagcc

SEQ ID NO: 2061917 - DNA, 15 bp, Homo sapiens
ccgagcccagagcca

SEQ ID NO: 2061918 - DNA, 15 bp, Homo sapiens
cgagcccagagccac

SEQ ID NO: 2061919 - DNA, 15 bp, Homo sapiens
gagcccagagccacg

SEQ ID NO: 2061920 - DNA, 15 bp, Homo sapiens
agcccagagccacgc

SEQ ID NO: 2061921 - DNA, 15 bp, Homo sapiens
gcccagagccacgct

SEQ ID NO: 2061922 - DNA, 15 bp, Homo sapiens
cccagagccacgctg

SEQ ID NO: 2061923 - DNA, 15 bp, Homo sapiens
ccagagccacgctgt

SEQ ID NO: 2061924 - DNA, 15 bp, Homo sapiens
cagagccacgctgtt

SEQ ID NO: 2061925 - DNA, 15 bp, Homo sapiens
agagccacgctgttt

SEQ ID NO: 2061926 - DNA, 15 bp, Homo sapiens
gagccacgctgtttt

SEQ ID NO: 2061927 - DNA, 15 bp, Homo sapiens
agccacgctgttttc

SEQ ID NO: 2061928 - DNA, 15 bp, Homo sapiens
gccacgctgttttcc

SEQ ID NO: 2061929 - DNA, 15 bp, Homo sapiens
ccacgctgttttccc

SEQ ID NO: 2061930 - DNA, 15 bp, Homo sapiens
cacgctgttttcccc

SEQ ID NO: 2061931 - DNA, 15 bp, Homo sapiens
acgctgttttcccct

SEQ ID NO: 2061932 - DNA, 15 bp, Homo sapiens
cgctgttttcccctc

SEQ ID NO: 2061933 - DNA, 15 bp, Homo sapiens
gctgttttcccctct

SEQ ID NO: 2061934 - DNA, 15 bp, Homo sapiens
ctgttttcccctctg

SEQ ID NO: 2061935 - DNA, 15 bp, Homo sapiens
tgttttcccctctga

SEQ ID NO: 2061936 - DNA, 15 bp, Homo sapiens
gttttcccctctgat

SEQ ID NO: 2061937 - DNA, 15 bp, Homo sapiens
ttttcccctctgatg

SEQ ID NO: 2061938 - DNA, 15 bp, Homo sapiens
tttcccctctgatgc

SEQ ID NO: 2061939 - DNA, 15 bp, Homo sapiens
ttcccctctgatgct

SEQ ID NO: 2061940 - DNA, 15 bp, Homo sapiens
tcccctctgatgctt

SEQ ID NO: 2061941 - DNA, 15 bp, Homo sapiens
cccctctgatgcttc

SEQ ID NO: 2061942 - DNA, 15 bp, Homo sapiens
ccctctgatgcttca

SEQ ID NO: 2061943 - DNA, 15 bp, Homo sapiens
cctctgatgcttcag

SEQ ID NO: 2061944 - DNA, 15 bp, Homo sapiens
ctctgatgcttcagg

SEQ ID NO: 2061945 - DNA, 15 bp, Homo sapiens
tctgatgcttcaggg

SEQ ID NO: 2061946 - DNA, 15 bp, Homo sapiens
ctgatgcttcaggga

SEQ ID NO: 2061947 - DNA, 15 bp, Homo sapiens
tgatgcttcagggag

SEQ ID NO: 2061948 - DNA, 15 bp, Homo sapiens
gatgcttcagggagc

SEQ ID NO: 2061949 - DNA, 15 bp, Homo sapiens
atgcttcagggagcg

SEQ ID NO: 2061950 - DNA, 15 bp, Homo sapiens
tgcttcagggagcgc

SEQ ID NO: 2061951 - DNA, 15 bp, Homo sapiens
gcttcagggagcgcg

SEQ ID NO: 2061952 - DNA, 15 bp, Homo sapiens
cttcagggagcgcgc

SEQ ID NO: 2061953 - DNA, 15 bp, Homo sapiens
ttcagggagcgcgcg

SEQ ID NO: 2061954 - DNA, 15 bp, Homo sapiens
tcagggagcgcgcga

SEQ ID NO: 2061955 - DNA, 15 bp, Homo sapiens
cagggagcgcgcgag

SEQ ID NO: 2061956 - DNA, 15 bp, Homo sapiens
agggagcgcgcgagc

SEQ ID NO: 2061957 - DNA, 15 bp, Homo sapiens
gggagcgcgcgagca

SEQ ID NO: 2061958 - DNA, 15 bp, Homo sapiens
ggagcgcgcgagcag

SEQ ID NO: 2061959 - DNA, 15 bp, Homo sapiens
gagcgcgcgagcagg

SEQ ID NO: 2061960 - DNA, 15 bp, Homo sapiens
agcgcgcgagcaggg

SEQ ID NO: 2061961 - DNA, 15 bp, Homo sapiens
gcgcgcgagcaggga

SEQ ID NO: 2061962 - DNA, 15 bp, Homo sapiens
cgcgcgagcagggag

SEQ ID NO: 2061963 - DNA, 15 bp, Homo sapiens
gcgcgagcagggagc

SEQ ID NO: 2061964 - DNA, 15 bp, Homo sapiens
cgcgagcagggagcg

SEQ ID NO: 2061965 - DNA, 15 bp, Homo sapiens
gcgagcagggagcgg

SEQ ID NO: 2061966 - DNA, 15 bp, Homo sapiens
cgagcagggagcggc

SEQ ID NO: 2061967 - DNA, 15 bp, Homo sapiens
gagcagggagcggcg

SEQ ID NO: 2061968 - DNA, 15 bp, Homo sapiens
agcagggagcggcgt

SEQ ID NO: 2061969 - DNA, 15 bp, Homo sapiens
gcagggagcggcgtg

SEQ ID NO: 2061970 - DNA, 15 bp, Homo sapiens
cagggagcggcgtga

SEQ ID NO: 2061971 - DNA, 15 bp, Homo sapiens
agggagcggcgtgag

SEQ ID NO: 2061972 - DNA, 15 bp, Homo sapiens
gggagcggcgtgagt

SEQ ID NO: 2061973 - DNA, 15 bp, Homo sapiens
ggagcggcgtgagtg

SEQ ID NO: 2061974 - DNA, 15 bp, Homo sapiens
gagcggcgtgagtgc

SEQ ID NO: 2061975 - DNA, 15 bp, Homo sapiens
agcggcgtgagtgcc

SEQ ID NO: 2061976 - DNA, 15 bp, Homo sapiens
gcggcgtgagtgccc

SEQ ID NO: 2061977 - DNA, 15 bp, Homo sapiens
cggcgtgagtgcccg

SEQ ID NO: 2061978 - DNA, 15 bp, Homo sapiens
ggcgtgagtgcccgt

SEQ ID NO: 2061979 - DNA, 15 bp, Homo sapiens
gcgtgagtgcccgtc

SEQ ID NO: 2061980 - DNA, 15 bp, Homo sapiens
cgtgagtgcccgtct

SEQ ID NO: 2061981 - DNA, 15 bp, Homo sapiens
gtgagtgcccgtctg

SEQ ID NO: 2061982 - DNA, 15 bp, Homo sapiens
tgagtgcccgtctgt

SEQ ID NO: 2061983 - DNA, 15 bp, Homo sapiens
gagtgcccgtctgtc

SEQ ID NO: 2061984 - DNA, 15 bp, Homo sapiens
agtgcccgtctgtct

SEQ ID NO: 2061985 - DNA, 15 bp, Homo sapiens
gtgcccgtctgtctg

SEQ ID NO: 2061986 - DNA, 15 bp, Homo sapiens
tgcccgtctgtctgt

SEQ ID NO: 2061987 - DNA, 15 bp, Homo sapiens
gcccgtctgtctgtt

SEQ ID NO: 2061988 - DNA, 15 bp, Homo sapiens
cccgtctgtctgttg

SEQ ID NO: 2061989 - DNA, 15 bp, Homo sapiens
ccgtctgtctgttgc

SEQ ID NO: 2061990 - DNA, 15 bp, Homo sapiens
cgtctgtctgttgcc

SEQ ID NO: 2061991 - DNA, 15 bp, Homo sapiens
gtctgtctgttgccg

SEQ ID NO: 2061992 - DNA, 15 bp, Homo sapiens
tctgtctgttgccgg

SEQ ID NO: 2061993 - DNA, 15 bp, Homo sapiens
ctgtctgttgccggg

SEQ ID NO: 2061994 - DNA, 15 bp, Homo sapiens
tgtctgttgccgggc

SEQ ID NO: 2061995 - DNA, 15 bp, Homo sapiens
gtctgttgccgggcg

SEQ ID NO: 2061996 - DNA, 15 bp, Homo sapiens
tctgttgccgggcgg

SEQ ID NO: 2061997 - DNA, 15 bp, Homo sapiens
ctgttgccgggcgga

SEQ ID NO: 2061998 - DNA, 15 bp, Homo sapiens
tgttgccgggcggaa

SEQ ID NO: 2061999 - DNA, 15 bp, Homo sapiens
gttgccgggcggaac

SEQ ID NO: 2062000 - DNA, 15 bp, Homo sapiens
ttgccgggcggaact

SEQ ID NO: 2062001 - DNA, 15 bp, Homo sapiens
tgccgggcggaactg

SEQ ID NO: 2062002 - DNA, 15 bp, Homo sapiens
gccgggcggaactga

SEQ ID NO: 2062003 - DNA, 15 bp, Homo sapiens
ccgggcggaactgag

SEQ ID NO: 2062004 - DNA, 15 bp, Homo sapiens
cgggcggaactgagc

SEQ ID NO: 2062005 - DNA, 15 bp, Homo sapiens
gggcggaactgagcc

SEQ ID NO: 2062006 - DNA, 15 bp, Homo sapiens
ggcggaactgagcct

SEQ ID NO: 2062007 - DNA, 15 bp, Homo sapiens
gcggaactgagcctg

SEQ ID NO: 2062008 - DNA, 15 bp, Homo sapiens
cggaactgagcctga

SEQ ID NO: 2062009 - DNA, 15 bp, Homo sapiens
ggaactgagcctgaa

SEQ ID NO: 2062010 - DNA, 15 bp, Homo sapiens
gaactgagcctgaac

SEQ ID NO: 2062011 - DNA, 15 bp, Homo sapiens
aactgagcctgaacc

SEQ ID NO: 2062012 - DNA, 15 bp, Homo sapiens
actgagcctgaaccc

SEQ ID NO: 2062013 - DNA, 15 bp, Homo sapiens
ctgagcctgaacccc

SEQ ID NO: 2062014 - DNA, 15 bp, Homo sapiens
tgagcctgaaccccg

SEQ ID NO: 2062015 - DNA, 15 bp, Homo sapiens
gagcctgaaccccgg

SEQ ID NO: 2062016 - DNA, 15 bp, Homo sapiens
agcctgaaccccggc

SEQ ID NO: 2062017 - DNA, 15 bp, Homo sapiens
gcctgaaccccggcg

SEQ ID NO: 2062018 - DNA, 15 bp, Homo sapiens
cctgaaccccggcgg

SEQ ID NO: 2062019 - DNA, 15 bp, Homo sapiens
ctgaaccccggcggc

SEQ ID NO: 2062020 - DNA, 15 bp, Homo sapiens
tgaaccccggcggct

SEQ ID NO: 2062021 - DNA, 15 bp, Homo sapiens
gaaccccggcggctg

SEQ ID NO: 2062022 - DNA, 15 bp, Homo sapiens
aaccccggcggctgg

SEQ ID NO: 2062023 - DNA, 15 bp, Homo sapiens
accccggcggctgga

SEQ ID NO: 2062024 - DNA, 15 bp, Homo sapiens
ccccggcggctggag

SEQ ID NO: 2062025 - DNA, 15 bp, Homo sapiens
cccggcggctggagc

SEQ ID NO: 2062026 - DNA, 15 bp, Homo sapiens
ccggcggctggagcg

SEQ ID NO: 2062027 - DNA, 15 bp, Homo sapiens
cggcggctggagcgc

SEQ ID NO: 2062028 - DNA, 15 bp, Homo sapiens
ggcggctggagcgct

SEQ ID NO: 2062029 - DNA, 15 bp, Homo sapiens
gcggctggagcgctg

SEQ ID NO: 2062030 - DNA, 15 bp, Homo sapiens
cggctggagcgctgg

SEQ ID NO: 2062031 - DNA, 15 bp, Homo sapiens
ggctggagcgctggc

SEQ ID NO: 2062032 - DNA, 15 bp, Homo sapiens
gctggagcgctggcc

SEQ ID NO: 2062033 - DNA, 15 bp, Homo sapiens
ctggagcgctggcca

SEQ ID NO: 2062034 - DNA, 15 bp, Homo sapiens
tggagcgctggccag

SEQ ID NO: 2062035 - DNA, 15 bp, Homo sapiens
ggagcgctggccagg

SEQ ID NO: 2062036 - DNA, 15 bp, Homo sapiens
gagcgctggccagga

SEQ ID NO: 2062037 - DNA, 15 bp, Homo sapiens
agcgctggccaggag

SEQ ID NO: 2062038 - DNA, 15 bp, Homo sapiens
gcgctggccaggagg

SEQ ID NO: 2062039 - DNA, 15 bp, Homo sapiens
cgctggccaggaggg

SEQ ID NO: 2062040 - DNA, 15 bp, Homo sapiens
ctggccaggaggggg

SEQ ID NO: 2062041 - DNA, 15 bp, Homo sapiens
tggccaggagggggc

SEQ ID NO: 2062042 - DNA, 15 bp, Homo sapiens
ggccaggagggggcg

SEQ ID NO: 2062043 - DNA, 15 bp, Homo sapiens
gccaggagggggcga

SEQ ID NO: 2062044 - DNA, 15 bp, Homo sapiens
ccaggagggggcgaa

SEQ ID NO: 2062045 - DNA, 15 bp, Homo sapiens
caggagggggcgaat

SEQ ID NO: 2062046 - DNA, 15 bp, Homo sapiens
aggagggggcgaatg

SEQ ID NO: 2062047 - DNA, 15 bp, Homo sapiens
ggagggggcgaatgc

SEQ ID NO: 2062048 - DNA, 15 bp, Homo sapiens
gagggggcgaatgcc

SEQ ID NO: 2062049 - DNA, 15 bp, Homo sapiens
agggggcgaatgccg

SEQ ID NO: 2062050 - DNA, 15 bp, Homo sapiens
gggggcgaatgccga

SEQ ID NO: 2062051 - DNA, 15 bp, Homo sapiens
ggggcgaatgccgag

SEQ ID NO: 2062052 - DNA, 15 bp, Homo sapiens
gggcgaatgccgagg

SEQ ID NO: 2062053 - DNA, 15 bp, Homo sapiens
ggcgaatgccgaggt

SEQ ID NO: 2062054 - DNA, 15 bp, Homo sapiens
gcgaatgccgaggtg

SEQ ID NO: 2062055 - DNA, 15 bp, Homo sapiens
cgaatgccgaggtgc

SEQ ID NO: 2062056 - DNA, 15 bp, Homo sapiens
gaatgccgaggtgcg

SEQ ID NO: 2062057 - DNA, 15 bp, Homo sapiens
aatgccgaggtgcgg

SEQ ID NO: 2062058 - DNA, 15 bp, Homo sapiens
atgccgaggtgcggg

SEQ ID NO: 2062059 - DNA, 15 bp, Homo sapiens
tgccgaggtgcgggc

SEQ ID NO: 2062060 - DNA, 15 bp, Homo sapiens
gccgaggtgcgggca

SEQ ID NO: 2062061 - DNA, 15 bp, Homo sapiens
ccgaggtgcgggcag

SEQ ID NO: 2062062 - DNA, 15 bp, Homo sapiens
cgaggtgcgggcagc

SEQ ID NO: 2062063 - DNA, 15 bp, Homo sapiens
gaggtgcgggcagct

SEQ ID NO: 2062064 - DNA, 15 bp, Homo sapiens
aggtgcgggcagctc

SEQ ID NO: 2062065 - DNA, 15 bp, Homo sapiens
ggtgcgggcagctca

SEQ ID NO: 2062066 - DNA, 15 bp, Homo sapiens
gtgcgggcagctcag

SEQ ID NO: 2062067 - DNA, 15 bp, Homo sapiens
tgcgggcagctcagc

SEQ ID NO: 2062068 - DNA, 15 bp, Homo sapiens
gcgggcagctcagcg

SEQ ID NO: 2062069 - DNA, 15 bp, Homo sapiens
cgggcagctcagcgg

SEQ ID NO: 2062070 - DNA, 15 bp, Homo sapiens
gggcagctcagcggg

SEQ ID NO: 2062071 - DNA, 15 bp, Homo sapiens
ggcagctcagcgggc

SEQ ID NO: 2062072 - DNA, 15 bp, Homo sapiens
gcagctcagcgggcg

SEQ ID NO: 2062073 - DNA, 15 bp, Homo sapiens
cagctcagcgggcgg

SEQ ID NO: 2062074 - DNA, 15 bp, Homo sapiens
agctcagcgggcggg

SEQ ID NO: 2062075 - DNA, 15 bp, Homo sapiens
gctcagcgggcggga

SEQ ID NO: 2062076 - DNA, 15 bp, Homo sapiens
ctcagcgggcgggag

SEQ ID NO: 2062077 - DNA, 15 bp, Homo sapiens
tcagcgggcgggagg

SEQ ID NO: 2062078 - DNA, 15 bp, Homo sapiens
cagcgggcgggaggc

SEQ ID NO: 2062079 - DNA, 15 bp, Homo sapiens
agcgggcgggaggct

SEQ ID NO: 2062080 - DNA, 15 bp, Homo sapiens
gcgggcgggaggctg

SEQ ID NO: 2062081 - DNA, 15 bp, Homo sapiens
cgggcgggaggctgg

SEQ ID NO: 2062082 - DNA, 15 bp, Homo sapiens
gggcgggaggctggg

SEQ ID NO: 2062083 - DNA, 15 bp, Homo sapiens
ggcgggaggctgggc

SEQ ID NO: 2062084 - DNA, 15 bp, Homo sapiens
gcgggaggctgggcc

SEQ ID NO: 2062085 - DNA, 15 bp, Homo sapiens
cgggaggctgggccg

SEQ ID NO: 2062086 - DNA, 15 bp, Homo sapiens
gggaggctgggccga

SEQ ID NO: 2062087 - DNA, 15 bp, Homo sapiens
ggaggctgggccgag

SEQ ID NO: 2062088 - DNA, 15 bp, Homo sapiens
gaggctgggccgagg

SEQ ID NO: 2062089 - DNA, 15 bp, Homo sapiens
aggctgggccgaggc

SEQ ID NO: 2062090 - DNA, 15 bp, Homo sapiens
ggctgggccgaggct

SEQ ID NO: 2062091 - DNA, 15 bp, Homo sapiens
gctgggccgaggctc

SEQ ID NO: 2062092 - DNA, 15 bp, Homo sapiens
ctgggccgaggctcg

SEQ ID NO: 2062093 - DNA, 15 bp, Homo sapiens
tgggccgaggctcgc

SEQ ID NO: 2062094 - DNA, 15 bp, Homo sapiens
gggccgaggctcgcc

SEQ ID NO: 2062095 - DNA, 15 bp, Homo sapiens
ggccgaggctcgcct

SEQ ID NO: 2062096 - DNA, 15 bp, Homo sapiens
gccgaggctcgcctc

SEQ ID NO: 2062097 - DNA, 15 bp, Homo sapiens
ccgaggctcgcctcc

SEQ ID NO: 2062098 - DNA, 15 bp, Homo sapiens
cgaggctcgcctccg

SEQ ID NO: 2062099 - DNA, 15 bp, Homo sapiens
gaggctcgcctccgc

SEQ ID NO: 2062100 - DNA, 15 bp, Homo sapiens
aggctcgcctccgcc

SEQ ID NO: 2062101 - DNA, 15 bp, Homo sapiens
ggctcgcctccgccc

SEQ ID NO: 2062102 - DNA, 15 bp, Homo sapiens
gctcgcctccgcccg

SEQ ID NO: 2062103 - DNA, 15 bp, Homo sapiens
ctcgcctccgcccgc

SEQ ID NO: 2062104 - DNA, 15 bp, Homo sapiens
tcgcctccgcccgca

SEQ ID NO: 2062105 - DNA, 15 bp, Homo sapiens
cgcctccgcccgcag

SEQ ID NO: 2062106 - DNA, 15 bp, Homo sapiens
gcctccgcccgcagc

SEQ ID NO: 2062107 - DNA, 15 bp, Homo sapiens
cctccgcccgcagct

SEQ ID NO: 2062108 - DNA, 15 bp, Homo sapiens
ctccgcccgcagctc

SEQ ID NO: 2062109 - DNA, 15 bp, Homo sapiens
tccgcccgcagctca

SEQ ID NO: 2062110 - DNA, 15 bp, Homo sapiens
ccgcccgcagctcag

SEQ ID NO: 2062111 - DNA, 15 bp, Homo sapiens
cgcccgcagctcagc

SEQ ID NO: 2062112 - DNA, 15 bp, Homo sapiens
gcccgcagctcagcc

SEQ ID NO: 2062113 - DNA, 15 bp, Homo sapiens
cccgcagctcagcca

SEQ ID NO: 2062114 - DNA, 15 bp, Homo sapiens
ccgcagctcagccat

SEQ ID NO: 2062115 - DNA, 15 bp, Homo sapiens
cgcagctcagccatg

SEQ ID NO: 2062116 - DNA, 15 bp, Homo sapiens
gcagctcagccatgc

SEQ ID NO: 2062117 - DNA, 15 bp, Homo sapiens
cagctcagccatgca

SEQ ID NO: 2062118 - DNA, 15 bp, Homo sapiens
agctcagccatgcaa

SEQ ID NO: 2062119 - DNA, 15 bp, Homo sapiens
gctcagccatgcaaa

SEQ ID NO: 2062120 - DNA, 15 bp, Homo sapiens
ctcagccatgcaaaa

SEQ ID NO: 2062121 - DNA, 15 bp, Homo sapiens
tcagccatgcaaaag

SEQ ID NO: 2062122 - DNA, 15 bp, Homo sapiens
cagccatgcaaaagt

SEQ ID NO: 2062123 - DNA, 15 bp, Homo sapiens
agccatgcaaaagtg

SEQ ID NO: 2062124 - DNA, 15 bp, Homo sapiens
gccatgcaaaagtgc

SEQ ID NO: 2062125 - DNA, 15 bp, Homo sapiens
ccatgcaaaagtgct

SEQ ID NO: 2062126 - DNA, 15 bp, Homo sapiens
catgcaaaagtgctc

SEQ ID NO: 2062127 - DNA, 15 bp, Homo sapiens
atgcaaaagtgctct

SEQ ID NO: 2062128 - DNA, 15 bp, Homo sapiens
tgcaaaagtgctctt

SEQ ID NO: 2062129 - DNA, 15 bp, Homo sapiens
gcaaaagtgctcttg

SEQ ID NO: 2062130 - DNA, 15 bp, Homo sapiens
caaaagtgctcttgc

SEQ ID NO: 2062131 - DNA, 15 bp, Homo sapiens
aaaagtgctcttgct

SEQ ID NO: 2062132 - DNA, 15 bp, Homo sapiens
aaagtgctcttgctt

SEQ ID NO: 2062133 - DNA, 15 bp, Homo sapiens
aagtgctcttgcttc

SEQ ID NO: 2062134 - DNA, 15 bp, Homo sapiens
agtgctcttgcttcc

SEQ ID NO: 2062135 - DNA, 15 bp, Homo sapiens
gtgctcttgcttccc

SEQ ID NO: 2062136 - DNA, 15 bp, Homo sapiens
tgctcttgcttcccg

SEQ ID NO: 2062137 - DNA, 15 bp, Homo sapiens
gctcttgcttcccgg

SEQ ID NO: 2062138 - DNA, 15 bp, Homo sapiens
ctcttgcttcccggg

SEQ ID NO: 2062139 - DNA, 15 bp, Homo sapiens
tcttgcttcccggga

SEQ ID NO: 2062140 - DNA, 15 bp, Homo sapiens
cttgcttcccgggaa

SEQ ID NO: 2062141 - DNA, 15 bp, Homo sapiens
ttgcttcccgggaat

SEQ ID NO: 2062142 - DNA, 15 bp, Homo sapiens
tgcttcccgggaata

SEQ ID NO: 2062143 - DNA, 15 bp, Homo sapiens
gcttcccgggaataa

SEQ ID NO: 2062144 - DNA, 15 bp, Homo sapiens
cttcccgggaataac

SEQ ID NO: 2062145 - DNA, 15 bp, Homo sapiens
ttcccgggaataacc

SEQ ID NO: 2062146 - DNA, 15 bp, Homo sapiens
tcccgggaataacca

SEQ ID NO: 2062147 - DNA, 15 bp, Homo sapiens
cccgggaataaccaa

SEQ ID NO: 2062148 - DNA, 15 bp, Homo sapiens
ccgggaataaccaaa

SEQ ID NO: 2062149 - DNA, 15 bp, Homo sapiens
cgggaataaccaaat

SEQ ID NO: 2062150 - DNA, 15 bp, Homo sapiens
gggaataaccaaata

SEQ ID NO: 2062151 - DNA, 15 bp, Homo sapiens
ggaataaccaaatat

SEQ ID NO: 2062152 - DNA, 15 bp, Homo sapiens
gaataaccaaatatc

SEQ ID NO: 2062153 - DNA, 15 bp, Homo sapiens
aataaccaaatatct

SEQ ID NO: 2062154 - DNA, 15 bp, Homo sapiens
ataaccaaatatctt

SEQ ID NO: 2062155 - DNA, 15 bp, Homo sapiens
taaccaaatatcttt

SEQ ID NO: 2062156 - DNA, 15 bp, Homo sapiens
aaccaaatatctttg

SEQ ID NO: 2062157 - DNA, 15 bp, Homo sapiens
accaaatatctttgt

SEQ ID NO: 2062158 - DNA, 15 bp, Homo sapiens
ccaaatatctttgtt

SEQ ID NO: 2062159 - DNA, 15 bp, Homo sapiens
caaatatctttgttt

SEQ ID NO: 2062160 - DNA, 15 bp, Homo sapiens
aaatatctttgttta

SEQ ID NO: 2062161 - DNA, 15 bp, Homo sapiens
aatatctttgtttaa

SEQ ID NO: 2062162 - DNA, 15 bp, Homo sapiens
atatctttgtttaaa

SEQ ID NO: 2062163 - DNA, 15 bp, Homo sapiens
tatctttgtttaaag

SEQ ID NO: 2062164 - DNA, 15 bp, Homo sapiens
atctttgtttaaagt

SEQ ID NO: 2062165 - DNA, 15 bp, Homo sapiens
tctttgtttaaagtg

SEQ ID NO: 2062166 - DNA, 15 bp, Homo sapiens
ctttgtttaaagtgg

SEQ ID NO: 2062167 - DNA, 15 bp, Homo sapiens
tttgtttaaagtggt

SEQ ID NO: 2062168 - DNA, 15 bp, Homo sapiens
ttgtttaaagtggtg

SEQ ID NO: 2062169 - DNA, 15 bp, Homo sapiens
tgtttaaagtggtgg

SEQ ID NO: 2062170 - DNA, 15 bp, Homo sapiens
gtttaaagtggtggc

SEQ ID NO: 2062171 - DNA, 15 bp, Homo sapiens
tttaaagtggtggcg

SEQ ID NO: 2062172 - DNA, 15 bp, Homo sapiens
ttaaagtggtggcgt

SEQ ID NO: 2062173 - DNA, 15 bp, Homo sapiens
taaagtggtggcgta

SEQ ID NO: 2062174 - DNA, 15 bp, Homo sapiens
aaagtggtggcgtaa

SEQ ID NO: 2062175 - DNA, 15 bp, Homo sapiens
aagtggtggcgtaaa

SEQ ID NO: 2062176 - DNA, 15 bp, Homo sapiens
agtggtggcgtaaat

SEQ ID NO: 2062177 - DNA, 15 bp, Homo sapiens
gtggtggcgtaaatg

SEQ ID NO: 2062178 - DNA, 15 bp, Homo sapiens
tggtggcgtaaatgg

SEQ ID NO: 2062179 - DNA, 15 bp, Homo sapiens
ggtggcgtaaatggc

SEQ ID NO: 2062180 - DNA, 15 bp, Homo sapiens
gtggcgtaaatggcc

SEQ ID NO: 2062181 - DNA, 15 bp, Homo sapiens
tggcgtaaatggcca

SEQ ID NO: 2062182 - DNA, 15 bp, Homo sapiens
ggcgtaaatggccag

SEQ ID NO: 2062183 - DNA, 15 bp, Homo sapiens
gcgtaaatggccagt

SEQ ID NO: 2062184 - DNA, 15 bp, Homo sapiens
cgtaaatggccagtc

SEQ ID NO: 2062185 - DNA, 15 bp, Homo sapiens
gtaaatggccagtcg

SEQ ID NO: 2062186 - DNA, 15 bp, Homo sapiens
taaatggccagtcgc

SEQ ID NO: 2062187 - DNA, 15 bp, Homo sapiens
aaatggccagtcgct

SEQ ID NO: 2062188 - DNA, 15 bp, Homo sapiens
aatggccagtcgctt

SEQ ID NO: 2062189 - DNA, 15 bp, Homo sapiens
atggccagtcgcttt

SEQ ID NO: 2062190 - DNA, 15 bp, Homo sapiens
tggccagtcgctttg

SEQ ID NO: 2062191 - DNA, 15 bp, Homo sapiens
ggccagtcgctttgt

SEQ ID NO: 2062192 - DNA, 15 bp, Homo sapiens
gccagtcgctttgtg

SEQ ID NO: 2062193 - DNA, 15 bp, Homo sapiens
ccagtcgctttgtgg

SEQ ID NO: 2062194 - DNA, 15 bp, Homo sapiens
cagtcgctttgtggc

SEQ ID NO: 2062195 - DNA, 15 bp, Homo sapiens
agtcgctttgtggcc

SEQ ID NO: 2062196 - DNA, 15 bp, Homo sapiens
gtcgctttgtggcca

SEQ ID NO: 2062197 - DNA, 15 bp, Homo sapiens
tcgctttgtggccac

SEQ ID NO: 2062198 - DNA, 15 bp, Homo sapiens
cgctttgtggccacg

SEQ ID NO: 2062199 - DNA, 15 bp, Homo sapiens
gctttgtggccacgc

SEQ ID NO: 2062200 - DNA, 15 bp, Homo sapiens
ctttgtggccacgct

SEQ ID NO: 2062201 - DNA, 15 bp, Homo sapiens
tttgtggccacgctg

SEQ ID NO: 2062202 - DNA, 15 bp, Homo sapiens
ttgtggccacgctgg

SEQ ID NO: 2062203 - DNA, 15 bp, Homo sapiens
tgtggccacgctgga

SEQ ID NO: 2062204 - DNA, 15 bp, Homo sapiens
gtggccacgctggat

SEQ ID NO: 2062205 - DNA, 15 bp, Homo sapiens
tggccacgctggata

SEQ ID NO: 2062206 - DNA, 15 bp, Homo sapiens
ggccacgctggatat

SEQ ID NO: 2062207 - DNA, 15 bp, Homo sapiens
gccacgctggatatt

SEQ ID NO: 2062208 - DNA, 15 bp, Homo sapiens
ccacgctggatatta

SEQ ID NO: 2062209 - DNA, 15 bp, Homo sapiens
cacgctggatattag

SEQ ID NO: 2062210 - DNA, 15 bp, Homo sapiens
acgctggatattagt

SEQ ID NO: 2062211 - DNA, 15 bp, Homo sapiens
cgctggatattagta

SEQ ID NO: 2062212 - DNA, 15 bp, Homo sapiens
gctggatattagtag

SEQ ID NO: 2062213 - DNA, 15 bp, Homo sapiens
ctggatattagtaga

SEQ ID NO: 2062214 - DNA, 15 bp, Homo sapiens
tggatattagtagat

SEQ ID NO: 2062215 - DNA, 15 bp, Homo sapiens
ggatattagtagatg

SEQ ID NO: 2062216 - DNA, 15 bp, Homo sapiens
gatattagtagatga

SEQ ID NO: 2062217 - DNA, 15 bp, Homo sapiens
atattagtagatgag

SEQ ID NO: 2062218 - DNA, 15 bp, Homo sapiens
tattagtagatgagg

SEQ ID NO: 2062219 - DNA, 15 bp, Homo sapiens
attagtagatgagga

SEQ ID NO: 2062220 - DNA, 15 bp, Homo sapiens
ttagtagatgaggat

SEQ ID NO: 2062221 - DNA, 15 bp, Homo sapiens
tagtagatgaggatc

SEQ ID NO: 2062222 - DNA, 15 bp, Homo sapiens
agtagatgaggatca

SEQ ID NO: 2062223 - DNA, 15 bp, Homo sapiens
gtagatgaggatcat

SEQ ID NO: 2062224 - DNA, 15 bp, Homo sapiens
tagatgaggatcatt

SEQ ID NO: 2062225 - DNA, 15 bp, Homo sapiens
agatgaggatcattc

SEQ ID NO: 2062226 - DNA, 15 bp, Homo sapiens
gatgaggatcattct

SEQ ID NO: 2062227 - DNA, 15 bp, Homo sapiens
atgaggatcattctg

SEQ ID NO: 2062228 - DNA, 15 bp, Homo sapiens
tgaggatcattctgc

SEQ ID NO: 2062229 - DNA, 15 bp, Homo sapiens
gaggatcattctgct

SEQ ID NO: 2062230 - DNA, 15 bp, Homo sapiens
aggatcattctgctt

SEQ ID NO: 2062231 - DNA, 15 bp, Homo sapiens
ggatcattctgcttc

SEQ ID NO: 2062232 - DNA, 15 bp, Homo sapiens
gatcattctgcttca

SEQ ID NO: 2062233 - DNA, 15 bp, Homo sapiens
atcattctgcttcaa

SEQ ID NO: 2062234 - DNA, 15 bp, Homo sapiens
tcattctgcttcaat

SEQ ID NO: 2062235 - DNA, 15 bp, Homo sapiens
cattctgcttcaatt

SEQ ID NO: 2062236 - DNA, 15 bp, Homo sapiens
attctgcttcaattg

SEQ ID NO: 2062237 - DNA, 15 bp, Homo sapiens
ttctgcttcaattgg

SEQ ID NO: 2062238 - DNA, 15 bp, Homo sapiens
tctgcttcaattggg

SEQ ID NO: 2062239 - DNA, 15 bp, Homo sapiens
ctgcttcaattgggc

SEQ ID NO: 2062240 - DNA, 15 bp, Homo sapiens
tgcttcaattgggcg

SEQ ID NO: 2062241 - DNA, 15 bp, Homo sapiens
gcttcaattgggcgc

SEQ ID NO: 2062242 - DNA, 15 bp, Homo sapiens
cttcaattgggcgcc

SEQ ID NO: 2062243 - DNA, 15 bp, Homo sapiens
ttcaattgggcgcct

SEQ ID NO: 2062244 - DNA, 15 bp, Homo sapiens
tcaattgggcgcctc

SEQ ID NO: 2062245 - DNA, 15 bp, Homo sapiens
caattgggcgcctct

SEQ ID NO: 2062246 - DNA, 15 bp, Homo sapiens
aattgggcgcctctc

SEQ ID NO: 2062247 - DNA, 15 bp, Homo sapiens
attgggcgcctctca

SEQ ID NO: 2062248 - DNA, 15 bp, Homo sapiens
ttgggcgcctctcat

SEQ ID NO: 2062249 - DNA, 15 bp, Homo sapiens
tgggcgcctctcatc

SEQ ID NO: 2062250 - DNA, 15 bp, Homo sapiens
gggcgcctctcatcc

SEQ ID NO: 2062251 - DNA, 15 bp, Homo sapiens
ggcgcctctcatccg

SEQ ID NO: 2062252 - DNA, 15 bp, Homo sapiens
gcgcctctcatccga

SEQ ID NO: 2062253 - DNA, 15 bp, Homo sapiens
cgcctctcatccgac

SEQ ID NO: 2062254 - DNA, 15 bp, Homo sapiens
gcctctcatccgacg

SEQ ID NO: 2062255 - DNA, 15 bp, Homo sapiens
cctctcatccgacga

SEQ ID NO: 2062256 - DNA, 15 bp, Homo sapiens
ctctcatccgacgag

SEQ ID NO: 2062257 - DNA, 15 bp, Homo sapiens
tctcatccgacgagc

SEQ ID NO: 2062258 - DNA, 15 bp, Homo sapiens
ctcatccgacgagca

SEQ ID NO: 2062259 - DNA, 15 bp, Homo sapiens
tcatccgacgagcaa

SEQ ID NO: 2062260 - DNA, 15 bp, Homo sapiens
catccgacgagcaag

SEQ ID NO: 2062261 - DNA, 15 bp, Homo sapiens
atccgacgagcaaga

SEQ ID NO: 2062262 - DNA, 15 bp, Homo sapiens
tccgacgagcaagaa

SEQ ID NO: 2062263 - DNA, 15 bp, Homo sapiens
ccgacgagcaagaaa

SEQ ID NO: 2062264 - DNA, 15 bp, Homo sapiens
cgacgagcaagaaac

SEQ ID NO: 2062265 - DNA, 15 bp, Homo sapiens
gacgagcaagaaact

SEQ ID NO: 2062266 - DNA, 15 bp, Homo sapiens
acgagcaagaaactg

SEQ ID NO: 2062267 - DNA, 15 bp, Homo sapiens
cgagcaagaaactgc

SEQ ID NO: 2062268 - DNA, 15 bp, Homo sapiens
gagcaagaaactgct

SEQ ID NO: 2062269 - DNA, 15 bp, Homo sapiens
agcaagaaactgctt

SEQ ID NO: 2062270 - DNA, 15 bp, Homo sapiens
gcaagaaactgctta

SEQ ID NO: 2062271 - DNA, 15 bp, Homo sapiens
caagaaactgcttag

SEQ ID NO: 2062272 - DNA, 15 bp, Homo sapiens
aagaaactgcttagg

SEQ ID NO: 2062273 - DNA, 15 bp, Homo sapiens
agaaactgcttagga

SEQ ID NO: 2062274 - DNA, 15 bp, Homo sapiens
gaaactgcttaggag

SEQ ID NO: 2062275 - DNA, 15 bp, Homo sapiens
aaactgcttaggagg

SEQ ID NO: 2062276 - DNA, 15 bp, Homo sapiens
aactgcttaggagga

SEQ ID NO: 2062277 - DNA, 15 bp, Homo sapiens
actgcttaggaggaa

SEQ ID NO: 2062278 - DNA, 15 bp, Homo sapiens
ctgcttaggaggaag

SEQ ID NO: 2062279 - DNA, 15 bp, Homo sapiens
tgcttaggaggaaga

SEQ ID NO: 2062280 - DNA, 15 bp, Homo sapiens
gcttaggaggaagag

SEQ ID NO: 2062281 - DNA, 15 bp, Homo sapiens
cttaggaggaagagg

SEQ ID NO: 2062282 - DNA, 15 bp, Homo sapiens
ttaggaggaagaggg

SEQ ID NO: 2062283 - DNA, 15 bp, Homo sapiens
taggaggaagagggt

SEQ ID NO: 2062284 - DNA, 15 bp, Homo sapiens
aggaggaagagggtt

SEQ ID NO: 2062285 - DNA, 15 bp, Homo sapiens
ggaggaagagggttt

SEQ ID NO: 2062286 - DNA, 15 bp, Homo sapiens
gaggaagagggtttc

SEQ ID NO: 2062287 - DNA, 15 bp, Homo sapiens
aggaagagggtttcc

SEQ ID NO: 2062288 - DNA, 15 bp, Homo sapiens
ggaagagggtttcct

SEQ ID NO: 2062289 - DNA, 15 bp, Homo sapiens
gaagagggtttcctg

SEQ ID NO: 2062290 - DNA, 15 bp, Homo sapiens
aagagggtttcctgt

SEQ ID NO: 2062291 - DNA, 15 bp, Homo sapiens
agagggtttcctgtc

SEQ ID NO: 2062292 - DNA, 15 bp, Homo sapiens
gagggtttcctgtct

SEQ ID NO: 2062293 - DNA, 15 bp, Homo sapiens
agggtttcctgtctg

SEQ ID NO: 2062294 - DNA, 15 bp, Homo sapiens
gggtttcctgtctgc

SEQ ID NO: 2062295 - DNA, 15 bp, Homo sapiens
ggtttcctgtctgcg

SEQ ID NO: 2062296 - DNA, 15 bp, Homo sapiens
gtttcctgtctgcgc

SEQ ID NO: 2062297 - DNA, 15 bp, Homo sapiens
tttcctgtctgcgcg

SEQ ID NO: 2062298 - DNA, 15 bp, Homo sapiens
ttcctgtctgcgcgt

SEQ ID NO: 2062299 - DNA, 15 bp, Homo sapiens
tcctgtctgcgcgtt

SEQ ID NO: 2062300 - DNA, 15 bp, Homo sapiens
cctgtctgcgcgttc

SEQ ID NO: 2062301 - DNA, 15 bp, Homo sapiens
ctgtctgcgcgttcc

SEQ ID NO: 2062302 - DNA, 15 bp, Homo sapiens
tgtctgcgcgttccc

SEQ ID NO: 2062303 - DNA, 15 bp, Homo sapiens
gtctgcgcgttccca

SEQ ID NO: 2062304 - DNA, 15 bp, Homo sapiens
tctgcgcgttcccag

SEQ ID NO: 2062305 - DNA, 15 bp, Homo sapiens
ctgcgcgttcccagg

SEQ ID NO: 2062306 - DNA, 15 bp, Homo sapiens
tgcgcgttcccaggc

SEQ ID NO: 2062307 - DNA, 15 bp, Homo sapiens
gcgcgttcccaggct

SEQ ID NO: 2062308 - DNA, 15 bp, Homo sapiens
cgcgttcccaggctt

SEQ ID NO: 2062309 - DNA, 15 bp, Homo sapiens
gcgttcccaggcttc

SEQ ID NO: 2062310 - DNA, 15 bp, Homo sapiens
cgttcccaggcttca

SEQ ID NO: 2062311 - DNA, 15 bp, Homo sapiens
gttcccaggcttcaa

SEQ ID NO: 2062312 - DNA, 15 bp, Homo sapiens
ttcccaggcttcaag

SEQ ID NO: 2062313 - DNA, 15 bp, Homo sapiens
tcccaggcttcaagt

SEQ ID NO: 2062314 - DNA, 15 bp, Homo sapiens
cccaggcttcaagtg

SEQ ID NO: 2062315 - DNA, 15 bp, Homo sapiens
ccaggcttcaagtgt

SEQ ID NO: 2062316 - DNA, 15 bp, Homo sapiens
caggcttcaagtgtg

SEQ ID NO: 2062317 - DNA, 15 bp, Homo sapiens
aggcttcaagtgtgg

SEQ ID NO: 2062318 - DNA, 15 bp, Homo sapiens
ggcttcaagtgtggg

SEQ ID NO: 2062319 - DNA, 15 bp, Homo sapiens
gcttcaagtgtgggc

SEQ ID NO: 2062320 - DNA, 15 bp, Homo sapiens
cttcaagtgtgggcc

SEQ ID NO: 2062321 - DNA, 15 bp, Homo sapiens
ttcaagtgtgggccc

SEQ ID NO: 2062322 - DNA, 15 bp, Homo sapiens
tcaagtgtgggcccc

SEQ ID NO: 2062323 - DNA, 15 bp, Homo sapiens
caagtgtgggccccg

SEQ ID NO: 2062324 - DNA, 15 bp, Homo sapiens
aagtgtgggccccgc

SEQ ID NO: 2062325 - DNA, 15 bp, Homo sapiens
agtgtgggccccgcg

SEQ ID NO: 2062326 - DNA, 15 bp, Homo sapiens
gtgtgggccccgcgc

SEQ ID NO: 2062327 - DNA, 15 bp, Homo sapiens
tgtgggccccgcgcc

SEQ ID NO: 2062328 - DNA, 15 bp, Homo sapiens
gtgggccccgcgcct

SEQ ID NO: 2062329 - DNA, 15 bp, Homo sapiens
tgggccccgcgcctt

SEQ ID NO: 2062330 - DNA, 15 bp, Homo sapiens
gggccccgcgccttg

SEQ ID NO: 2062331 - DNA, 15 bp, Homo sapiens
ggccccgcgccttga

SEQ ID NO: 2062332 - DNA, 15 bp, Homo sapiens
gccccgcgccttgag

SEQ ID NO: 2062333 - DNA, 15 bp, Homo sapiens
ccccgcgccttgagg

SEQ ID NO: 2062334 - DNA, 15 bp, Homo sapiens
cccgcgccttgaggg

SEQ ID NO: 2062335 - DNA, 15 bp, Homo sapiens
ccgcgccttgagggt

SEQ ID NO: 2062336 - DNA, 15 bp, Homo sapiens
cgcgccttgagggtc

SEQ ID NO: 2062337 - DNA, 15 bp, Homo sapiens
gcgccttgagggtcc

SEQ ID NO: 2062338 - DNA, 15 bp, Homo sapiens
cgccttgagggtcct

SEQ ID NO: 2062339 - DNA, 15 bp, Homo sapiens
gccttgagggtcctt

SEQ ID NO: 2062340 - DNA, 15 bp, Homo sapiens
ccttgagggtccttg

SEQ ID NO: 2062341 - DNA, 15 bp, Homo sapiens
cttgagggtccttgg

SEQ ID NO: 2062342 - DNA, 15 bp, Homo sapiens
ttgagggtccttggg

SEQ ID NO: 2062343 - DNA, 15 bp, Homo sapiens
tgagggtccttgggc

SEQ ID NO: 2062344 - DNA, 15 bp, Homo sapiens
gagggtccttgggcg

SEQ ID NO: 2062345 - DNA, 15 bp, Homo sapiens
agggtccttgggcgc

SEQ ID NO: 2062346 - DNA, 15 bp, Homo sapiens
gggtccttgggcgcc

SEQ ID NO: 2062347 - DNA, 15 bp, Homo sapiens
ggtccttgggcgcct

SEQ ID NO: 2062348 - DNA, 15 bp, Homo sapiens
gtccttgggcgcctg

SEQ ID NO: 2062349 - DNA, 15 bp, Homo sapiens
tccttgggcgcctgg

SEQ ID NO: 2062350 - DNA, 15 bp, Homo sapiens
ccttgggcgcctggc

SEQ ID NO: 2062351 - DNA, 15 bp, Homo sapiens
cttgggcgcctggcg

SEQ ID NO: 2062352 - DNA, 15 bp, Homo sapiens
ttgggcgcctggcga

SEQ ID NO: 2062353 - DNA, 15 bp, Homo sapiens
tgggcgcctggcgag

SEQ ID NO: 2062354 - DNA, 15 bp, Homo sapiens
gggcgcctggcgagg

SEQ ID NO: 2062355 - DNA, 15 bp, Homo sapiens
ggcgcctggcgaggg

SEQ ID NO: 2062356 - DNA, 15 bp, Homo sapiens
gcgcctggcgagggg

SEQ ID NO: 2062357 - DNA, 15 bp, Homo sapiens
cgcctggcgaggggg

SEQ ID NO: 2062358 - DNA, 15 bp, Homo sapiens
gcctggcgaggggga

SEQ ID NO: 2062359 - DNA, 15 bp, Homo sapiens
cctggcgagggggag

SEQ ID NO: 2062360 - DNA, 15 bp, Homo sapiens
ctggcgagggggagc

SEQ ID NO: 2062361 - DNA, 15 bp, Homo sapiens
tggcgagggggagct

SEQ ID NO: 2062362 - DNA, 15 bp, Homo sapiens
ggcgagggggagctg

SEQ ID NO: 2062363 - DNA, 15 bp, Homo sapiens
gcgagggggagctgt

SEQ ID NO: 2062364 - DNA, 15 bp, Homo sapiens
cgagggggagctgtg

SEQ ID NO: 2062365 - DNA, 15 bp, Homo sapiens
gagggggagctgtgg

SEQ ID NO: 2062366 - DNA, 15 bp, Homo sapiens
agggggagctgtggg

SEQ ID NO: 2062367 - DNA, 15 bp, Homo sapiens
gggggagctgtgggc

SEQ ID NO: 2062368 - DNA, 15 bp, Homo sapiens
ggggagctgtgggct

SEQ ID NO: 2062369 - DNA, 15 bp, Homo sapiens
gggagctgtgggctg

SEQ ID NO: 2062370 - DNA, 15 bp, Homo sapiens
ggagctgtgggctgc

SEQ ID NO: 2062371 - DNA, 15 bp, Homo sapiens
gagctgtgggctgcg

SEQ ID NO: 2062372 - DNA, 15 bp, Homo sapiens
agctgtgggctgcgc

SEQ ID NO: 2062373 - DNA, 15 bp, Homo sapiens
gctgtgggctgcgct

SEQ ID NO: 2062374 - DNA, 15 bp, Homo sapiens
ctgtgggctgcgctc

SEQ ID NO: 2062375 - DNA, 15 bp, Homo sapiens
tgtgggctgcgctcc

SEQ ID NO: 2062376 - DNA, 15 bp, Homo sapiens
gtgggctgcgctccc

SEQ ID NO: 2062377 - DNA, 15 bp, Homo sapiens
tgggctgcgctcccc

SEQ ID NO: 2062378 - DNA, 15 bp, Homo sapiens
gggctgcgctcccca

SEQ ID NO: 2062379 - DNA, 15 bp, Homo sapiens
ggctgcgctccccag

SEQ ID NO: 2062380 - DNA, 15 bp, Homo sapiens
gctgcgctccccagc

SEQ ID NO: 2062381 - DNA, 15 bp, Homo sapiens
ctgcgctccccagcg

SEQ ID NO: 2062382 - DNA, 15 bp, Homo sapiens
tgcgctccccagcgg

SEQ ID NO: 2062383 - DNA, 15 bp, Homo sapiens
gcgctccccagcgga

SEQ ID NO: 2062384 - DNA, 15 bp, Homo sapiens
cgctccccagcggaa

SEQ ID NO: 2062385 - DNA, 15 bp, Homo sapiens
gctccccagcggaat

SEQ ID NO: 2062386 - DNA, 15 bp, Homo sapiens
ctccccagcggaatc

SEQ ID NO: 2062387 - DNA, 15 bp, Homo sapiens
tccccagcggaatcg

SEQ ID NO: 2062388 - DNA, 15 bp, Homo sapiens
ccccagcggaatcgg

SEQ ID NO: 2062389 - DNA, 15 bp, Homo sapiens
cccagcggaatcggg

SEQ ID NO: 2062390 - DNA, 15 bp, Homo sapiens
ccagcggaatcgggg

SEQ ID NO: 2062391 - DNA, 15 bp, Homo sapiens
cagcggaatcggggg

SEQ ID NO: 2062392 - DNA, 15 bp, Homo sapiens
agcggaatcgggggt

SEQ ID NO: 2062393 - DNA, 15 bp, Homo sapiens
gcggaatcgggggtg

SEQ ID NO: 2062394 - DNA, 15 bp, Homo sapiens
cggaatcgggggtgt

SEQ ID NO: 2062395 - DNA, 15 bp, Homo sapiens
ggaatcgggggtgtc

SEQ ID NO: 2062396 - DNA, 15 bp, Homo sapiens
gaatcgggggtgtcc

SEQ ID NO: 2062397 - DNA, 15 bp, Homo sapiens
aatcgggggtgtccc

SEQ ID NO: 2062398 - DNA, 15 bp, Homo sapiens
atcgggggtgtcccc

SEQ ID NO: 2062399 - DNA, 15 bp, Homo sapiens
tcgggggtgtccccc

SEQ ID NO: 2062400 - DNA, 15 bp, Homo sapiens
cgggggtgtcccccg

SEQ ID NO: 2062401 - DNA, 15 bp, Homo sapiens
gggggtgtcccccgc

SEQ ID NO: 2062402 - DNA, 15 bp, Homo sapiens
ggggtgtcccccgcg

SEQ ID NO: 2062403 - DNA, 15 bp, Homo sapiens
gggtgtcccccgcgt

SEQ ID NO: 2062404 - DNA, 15 bp, Homo sapiens
ggtgtcccccgcgtt

SEQ ID NO: 2062405 - DNA, 15 bp, Homo sapiens
gtgtcccccgcgttg

SEQ ID NO: 2062406 - DNA, 15 bp, Homo sapiens
tgtcccccgcgttgc

SEQ ID NO: 2062407 - DNA, 15 bp, Homo sapiens
gtcccccgcgttgct

SEQ ID NO: 2062408 - DNA, 15 bp, Homo sapiens
tcccccgcgttgctc

SEQ ID NO: 2062409 - DNA, 15 bp, Homo sapiens
cccccgcgttgctcc

SEQ ID NO: 2062410 - DNA, 15 bp, Homo sapiens
ccccgcgttgctccg

SEQ ID NO: 2062411 - DNA, 15 bp, Homo sapiens
cccgcgttgctccgg

SEQ ID NO: 2062412 - DNA, 15 bp, Homo sapiens
ccgcgttgctccggc

SEQ ID NO: 2062413 - DNA, 15 bp, Homo sapiens
cgcgttgctccggcc

SEQ ID NO: 2062414 - DNA, 15 bp, Homo sapiens
gcgttgctccggcca

SEQ ID NO: 2062415 - DNA, 15 bp, Homo sapiens
cgttgctccggccag

SEQ ID NO: 2062416 - DNA, 15 bp, Homo sapiens
gttgctccggccagg

SEQ ID NO: 2062417 - DNA, 15 bp, Homo sapiens
ttgctccggccaggc

SEQ ID NO: 2062418 - DNA, 15 bp, Homo sapiens
tgctccggccaggcc

SEQ ID NO: 2062419 - DNA, 15 bp, Homo sapiens
gctccggccaggccg

SEQ ID NO: 2062420 - DNA, 15 bp, Homo sapiens
ctccggccaggccgg

SEQ ID NO: 2062421 - DNA, 15 bp, Homo sapiens
tccggccaggccggg

SEQ ID NO: 2062422 - DNA, 15 bp, Homo sapiens
ccggccaggccgggg

SEQ ID NO: 2062423 - DNA, 15 bp, Homo sapiens
cggccaggccggggc

SEQ ID NO: 2062424 - DNA, 15 bp, Homo sapiens
ggccaggccggggcc

SEQ ID NO: 2062425 - DNA, 15 bp, Homo sapiens
gccaggccggggcct

SEQ ID NO: 2062426 - DNA, 15 bp, Homo sapiens
ccaggccggggcctg

SEQ ID NO: 2062427 - DNA, 15 bp, Homo sapiens
caggccggggcctgc

SEQ ID NO: 2062428 - DNA, 15 bp, Homo sapiens
aggccggggcctgca

SEQ ID NO: 2062429 - DNA, 15 bp, Homo sapiens
ggccggggcctgcag

SEQ ID NO: 2062430 - DNA, 15 bp, Homo sapiens
gccggggcctgcagc

SEQ ID NO: 2062431 - DNA, 15 bp, Homo sapiens
ccggggcctgcagcc

SEQ ID NO: 2062432 - DNA, 15 bp, Homo sapiens
cggggcctgcagccg

SEQ ID NO: 2062433 - DNA, 15 bp, Homo sapiens
ggggcctgcagccga

SEQ ID NO: 2062434 - DNA, 15 bp, Homo sapiens
gggcctgcagccgag

SEQ ID NO: 2062435 - DNA, 15 bp, Homo sapiens
ggcctgcagccgagt

SEQ ID NO: 2062436 - DNA, 15 bp, Homo sapiens
gcctgcagccgagtc

SEQ ID NO: 2062437 - DNA, 15 bp, Homo sapiens
cctgcagccgagtcg

SEQ ID NO: 2062438 - DNA, 15 bp, Homo sapiens
ctgcagccgagtcga

SEQ ID NO: 2062439 - DNA, 15 bp, Homo sapiens
tgcagccgagtcgac

SEQ ID NO: 2062440 - DNA, 15 bp, Homo sapiens
gcagccgagtcgact

SEQ ID NO: 2062441 - DNA, 15 bp, Homo sapiens
cagccgagtcgacta

SEQ ID NO: 2062442 - DNA, 15 bp, Homo sapiens
agccgagtcgactac

SEQ ID NO: 2062443 - DNA, 15 bp, Homo sapiens
gccgagtcgactacc

SEQ ID NO: 2062444 - DNA, 15 bp, Homo sapiens
ccgagtcgactaccg

SEQ ID NO: 2062445 - DNA, 15 bp, Homo sapiens
cgagtcgactaccga

SEQ ID NO: 2062446 - DNA, 15 bp, Homo sapiens
gagtcgactaccgag

SEQ ID NO: 2062447 - DNA, 15 bp, Homo sapiens
agtcgactaccgagt

SEQ ID NO: 2062448 - DNA, 15 bp, Homo sapiens
gtcgactaccgagtg

SEQ ID NO: 2062449 - DNA, 15 bp, Homo sapiens
tcgactaccgagtgg

SEQ ID NO: 2062450 - DNA, 15 bp, Homo sapiens
cgactaccgagtgga

SEQ ID NO: 2062451 - DNA, 15 bp, Homo sapiens
gactaccgagtggag

SEQ ID NO: 2062452 - DNA, 15 bp, Homo sapiens
actaccgagtggagc

SEQ ID NO: 2062453 - DNA, 15 bp, Homo sapiens
ctaccgagtggagca

SEQ ID NO: 2062454 - DNA, 15 bp, Homo sapiens
taccgagtggagcac

SEQ ID NO: 2062455 - DNA, 15 bp, Homo sapiens
accgagtggagcact

SEQ ID NO: 2062456 - DNA, 15 bp, Homo sapiens
ccgagtggagcactg

SEQ ID NO: 2062457 - DNA, 15 bp, Homo sapiens
cgagtggagcactga

SEQ ID NO: 2062458 - DNA, 15 bp, Homo sapiens
gagtggagcactgaa

SEQ ID NO: 2062459 - DNA, 15 bp, Homo sapiens
agtggagcactgaac

SEQ ID NO: 2062460 - DNA, 15 bp, Homo sapiens
gtggagcactgaacg

SEQ ID NO: 2062461 - DNA, 15 bp, Homo sapiens
tggagcactgaacgg

SEQ ID NO: 2062462 - DNA, 15 bp, Homo sapiens
ggagcactgaacggc

SEQ ID NO: 2062463 - DNA, 15 bp, Homo sapiens
gagcactgaacggcg

SEQ ID NO: 2062464 - DNA, 15 bp, Homo sapiens
agcactgaacggcgc

SEQ ID NO: 2062465 - DNA, 15 bp, Homo sapiens
gcactgaacggcgcg

SEQ ID NO: 2062466 - DNA, 15 bp, Homo sapiens
cactgaacggcgcgg

SEQ ID NO: 2062467 - DNA, 15 bp, Homo sapiens
actgaacggcgcgga

SEQ ID NO: 2062468 - DNA, 15 bp, Homo sapiens
ctgaacggcgcggat

SEQ ID NO: 2062469 - DNA, 15 bp, Homo sapiens
tgaacggcgcggatt

SEQ ID NO: 2062470 - DNA, 15 bp, Homo sapiens
gaacggcgcggattt

SEQ ID NO: 2062471 - DNA, 15 bp, Homo sapiens
aacggcgcggatttt

SEQ ID NO: 2062472 - DNA, 15 bp, Homo sapiens
acggcgcggattttg

SEQ ID NO: 2062473 - DNA, 15 bp, Homo sapiens
cggcgcggattttga

SEQ ID NO: 2062474 - DNA, 15 bp, Homo sapiens
ggcgcggattttgag

SEQ ID NO: 2062475 - DNA, 15 bp, Homo sapiens
gcgcggattttgaga

SEQ ID NO: 2062476 - DNA, 15 bp, Homo sapiens
cgcggattttgagac

SEQ ID NO: 2062477 - DNA, 15 bp, Homo sapiens
gcggattttgagacc

SEQ ID NO: 2062478 - DNA, 15 bp, Homo sapiens
cggattttgagaccg

SEQ ID NO: 2062479 - DNA, 15 bp, Homo sapiens
ggattttgagaccga

SEQ ID NO: 2062480 - DNA, 15 bp, Homo sapiens
gattttgagaccgac

SEQ ID NO: 2062481 - DNA, 15 bp, Homo sapiens
attttgagaccgact

SEQ ID NO: 2062482 - DNA, 15 bp, Homo sapiens
ttttgagaccgactc

SEQ ID NO: 2062483 - DNA, 15 bp, Homo sapiens
tttgagaccgactcc

SEQ ID NO: 2062484 - DNA, 15 bp, Homo sapiens
ttgagaccgactccg

SEQ ID NO: 2062485 - DNA, 15 bp, Homo sapiens
tgagaccgactccgg

SEQ ID NO: 2062486 - DNA, 15 bp, Homo sapiens
gagaccgactccggt

SEQ ID NO: 2062487 - DNA, 15 bp, Homo sapiens
agaccgactccggtt

SEQ ID NO: 2062488 - DNA, 15 bp, Homo sapiens
gaccgactccggttt

SEQ ID NO: 2062489 - DNA, 15 bp, Homo sapiens
accgactccggtttt

SEQ ID NO: 2062490 - DNA, 15 bp, Homo sapiens
ccgactccggttttt

SEQ ID NO: 2062491 - DNA, 15 bp, Homo sapiens
cgactccggtttttg

SEQ ID NO: 2062492 - DNA, 15 bp, Homo sapiens
gactccggtttttgt

SEQ ID NO: 2062493 - DNA, 15 bp, Homo sapiens
actccggtttttgtc

SEQ ID NO: 2062494 - DNA, 15 bp, Homo sapiens
ctccggtttttgtcc

SEQ ID NO: 2062495 - DNA, 15 bp, Homo sapiens
tccggtttttgtcct

SEQ ID NO: 2062496 - DNA, 15 bp, Homo sapiens
ccggtttttgtcctt

SEQ ID NO: 2062497 - DNA, 15 bp, Homo sapiens
cggtttttgtccttg

SEQ ID NO: 2062498 - DNA, 15 bp, Homo sapiens
ggtttttgtccttgg

SEQ ID NO: 2062499 - DNA, 15 bp, Homo sapiens
gtttttgtccttgga

SEQ ID NO: 2062500 - DNA, 15 bp, Homo sapiens
tttttgtccttggat

SEQ ID NO: 2062501 - DNA, 15 bp, Homo sapiens
ttttgtccttggatt

SEQ ID NO: 2062502 - DNA, 15 bp, Homo sapiens
tttgtccttggattt

SEQ ID NO: 2062503 - DNA, 15 bp, Homo sapiens
ttgtccttggatttt

SEQ ID NO: 2062504 - DNA, 15 bp, Homo sapiens
tgtccttggatttta

SEQ ID NO: 2062505 - DNA, 15 bp, Homo sapiens
gtccttggattttaa

SEQ ID NO: 2062506 - DNA, 15 bp, Homo sapiens
tccttggattttaaa

SEQ ID NO: 2062507 - DNA, 15 bp, Homo sapiens
ccttggattttaaac

SEQ ID NO: 2062508 - DNA, 15 bp, Homo sapiens
cttggattttaaacg

SEQ ID NO: 2062509 - DNA, 15 bp, Homo sapiens
ttggattttaaacgt

SEQ ID NO: 2062510 - DNA, 15 bp, Homo sapiens
tggattttaaacgtt

SEQ ID NO: 2062511 - DNA, 15 bp, Homo sapiens
ggattttaaacgttt

SEQ ID NO: 2062512 - DNA, 15 bp, Homo sapiens
gattttaaacgtttt

SEQ ID NO: 2062513 - DNA, 15 bp, Homo sapiens
attttaaacgttttt

SEQ ID NO: 2062514 - DNA, 15 bp, Homo sapiens
ttttaaacgttttta

SEQ ID NO: 2062515 - DNA, 15 bp, Homo sapiens
tttaaacgtttttat

SEQ ID NO: 2062516 - DNA, 15 bp, Homo sapiens
ttaaacgtttttatc

SEQ ID NO: 2062517 - DNA, 15 bp, Homo sapiens
taaacgtttttatca

SEQ ID NO: 2062518 - DNA, 15 bp, Homo sapiens
aaacgtttttatcat

SEQ ID NO: 2062519 - DNA, 15 bp, Homo sapiens
aacgtttttatcatt

SEQ ID NO: 2062520 - DNA, 15 bp, Homo sapiens
acgtttttatcattg

SEQ ID NO: 2062521 - DNA, 15 bp, Homo sapiens
cgtttttatcattgt

SEQ ID NO: 2062522 - DNA, 15 bp, Homo sapiens
gtttttatcattgtt

SEQ ID NO: 2062523 - DNA, 15 bp, Homo sapiens
tttttatcattgttt

SEQ ID NO: 2062524 - DNA, 15 bp, Homo sapiens
ttttatcattgtttt

SEQ ID NO: 2062525 - DNA, 15 bp, Homo sapiens
tttatcattgttttt

SEQ ID NO: 2062526 - DNA, 15 bp, Homo sapiens
ttatcattgtttttg

SEQ ID NO: 2062527 - DNA, 15 bp, Homo sapiens
tatcattgtttttgt

SEQ ID NO: 2062528 - DNA, 15 bp, Homo sapiens
atcattgtttttgtt

SEQ ID NO: 2062529 - DNA, 15 bp, Homo sapiens
tcattgtttttgttt

SEQ ID NO: 2062530 - DNA, 15 bp, Homo sapiens
cattgtttttgtttt

SEQ ID NO: 2062531 - DNA, 15 bp, Homo sapiens
attgtttttgttttg

SEQ ID NO: 2062532 - DNA, 15 bp, Homo sapiens
ttgtttttgttttgc

SEQ ID NO: 2062533 - DNA, 15 bp, Homo sapiens
tgtttttgttttgct

SEQ ID NO: 2062534 - DNA, 15 bp, Homo sapiens
tttttgttttgcttt

SEQ ID NO: 2062535 - DNA, 15 bp, Homo sapiens
ttttgttttgctttc

SEQ ID NO: 2062536 - DNA, 15 bp, Homo sapiens
tttgttttgctttct

SEQ ID NO: 2062537 - DNA, 15 bp, Homo sapiens
ttgttttgctttctc

SEQ ID NO: 2062538 - DNA, 15 bp, Homo sapiens
tgttttgctttctcc

SEQ ID NO: 2062539 - DNA, 15 bp, Homo sapiens
gttttgctttctcct

SEQ ID NO: 2062540 - DNA, 15 bp, Homo sapiens
ttttgctttctcctt

SEQ ID NO: 2062541 - DNA, 15 bp, Homo sapiens
tttgctttctcctta

SEQ ID NO: 2062542 - DNA, 15 bp, Homo sapiens
ttgctttctccttag

SEQ ID NO: 2062543 - DNA, 15 bp, Homo sapiens
tgctttctccttagc

SEQ ID NO: 2062544 - DNA, 15 bp, Homo sapiens
gctttctccttagct

SEQ ID NO: 2062545 - DNA, 15 bp, Homo sapiens
ctttctccttagctg

SEQ ID NO: 2062546 - DNA, 15 bp, Homo sapiens
tttctccttagctgt

SEQ ID NO: 2062547 - DNA, 15 bp, Homo sapiens
ttctccttagctgtt

SEQ ID NO: 2062548 - DNA, 15 bp, Homo sapiens
tctccttagctgttt

SEQ ID NO: 2062549 - DNA, 15 bp, Homo sapiens
ctccttagctgtttt

SEQ ID NO: 2062550 - DNA, 15 bp, Homo sapiens
tccttagctgtttta

SEQ ID NO: 2062551 - DNA, 15 bp, Homo sapiens
ccttagctgttttag

SEQ ID NO: 2062552 - DNA, 15 bp, Homo sapiens
cttagctgttttagt

SEQ ID NO: 2062553 - DNA, 15 bp, Homo sapiens
ttagctgttttagtc

SEQ ID NO: 2062554 - DNA, 15 bp, Homo sapiens
tagctgttttagtct

SEQ ID NO: 2062555 - DNA, 15 bp, Homo sapiens
agctgttttagtctc

SEQ ID NO: 2062556 - DNA, 15 bp, Homo sapiens
gctgttttagtctcc

SEQ ID NO: 2062557 - DNA, 15 bp, Homo sapiens
ctgttttagtctcct

SEQ ID NO: 2062558 - DNA, 15 bp, Homo sapiens
tgttttagtctcctc

SEQ ID NO: 2062559 - DNA, 15 bp, Homo sapiens
gttttagtctcctct

SEQ ID NO: 2062560 - DNA, 15 bp, Homo sapiens
ttttagtctcctctg

SEQ ID NO: 2062561 - DNA, 15 bp, Homo sapiens
tttagtctcctctgc

SEQ ID NO: 2062562 - DNA, 15 bp, Homo sapiens
ttagtctcctctgcg

SEQ ID NO: 2062563 - DNA, 15 bp, Homo sapiens
tagtctcctctgcgc

SEQ ID NO: 2062564 - DNA, 15 bp, Homo sapiens
agtctcctctgcgcg

SEQ ID NO: 2062565 - DNA, 15 bp, Homo sapiens
gtctcctctgcgcgc

SEQ ID NO: 2062566 - DNA, 15 bp, Homo sapiens
tctcctctgcgcgcc

SEQ ID NO: 2062567 - DNA, 15 bp, Homo sapiens
ctcctctgcgcgcca

SEQ ID NO: 2062568 - DNA, 15 bp, Homo sapiens
tcctctgcgcgccag

SEQ ID NO: 2062569 - DNA, 15 bp, Homo sapiens
cctctgcgcgccagg

SEQ ID NO: 2062570 - DNA, 15 bp, Homo sapiens
ctctgcgcgccaggg

SEQ ID NO: 2062571 - DNA, 15 bp, Homo sapiens
tctgcgcgccagggg

SEQ ID NO: 2062572 - DNA, 15 bp, Homo sapiens
ctgcgcgccaggggc

SEQ ID NO: 2062573 - DNA, 15 bp, Homo sapiens
tgcgcgccaggggct

SEQ ID NO: 2062574 - DNA, 15 bp, Homo sapiens
gcgcgccaggggctg

SEQ ID NO: 2062575 - DNA, 15 bp, Homo sapiens
cgcgccaggggctgg

SEQ ID NO: 2062576 - DNA, 15 bp, Homo sapiens
gcgccaggggctggg

SEQ ID NO: 2062577 - DNA, 15 bp, Homo sapiens
cgccaggggctggga

SEQ ID NO: 2062578 - DNA, 15 bp, Homo sapiens
gccaggggctgggag

SEQ ID NO: 2062579 - DNA, 15 bp, Homo sapiens
ccaggggctgggagg

SEQ ID NO: 2062580 - DNA, 15 bp, Homo sapiens
caggggctgggaggg

SEQ ID NO: 2062581 - DNA, 15 bp, Homo sapiens
aggggctgggagggc

SEQ ID NO: 2062582 - DNA, 15 bp, Homo sapiens
ggggctgggagggcg

SEQ ID NO: 2062583 - DNA, 15 bp, Homo sapiens
gggctgggagggcgg

SEQ ID NO: 2062584 - DNA, 15 bp, Homo sapiens
ggctgggagggcgga

SEQ ID NO: 2062585 - DNA, 15 bp, Homo sapiens
gctgggagggcggag

SEQ ID NO: 2062586 - DNA, 15 bp, Homo sapiens
ctgggagggcggagc

SEQ ID NO: 2062587 - DNA, 15 bp, Homo sapiens
tgggagggcggagcg

SEQ ID NO: 2062588 - DNA, 15 bp, Homo sapiens
gggagggcggagcgc

SEQ ID NO: 2062589 - DNA, 15 bp, Homo sapiens
ggagggcggagcgct

SEQ ID NO: 2062590 - DNA, 15 bp, Homo sapiens
gagggcggagcgctc

SEQ ID NO: 2062591 - DNA, 15 bp, Homo sapiens
agggcggagcgctcc

SEQ ID NO: 2062592 - DNA, 15 bp, Homo sapiens
gggcggagcgctccc

SEQ ID NO: 2062593 - DNA, 15 bp, Homo sapiens
ggcggagcgctcccc

SEQ ID NO: 2062594 - DNA, 15 bp, Homo sapiens
gcggagcgctccccg

SEQ ID NO: 2062595 - DNA, 15 bp, Homo sapiens
cggagcgctccccgg

SEQ ID NO: 2062596 - DNA, 15 bp, Homo sapiens
ggagcgctccccggc

SEQ ID NO: 2062597 - DNA, 15 bp, Homo sapiens
gagcgctccccggcc

SEQ ID NO: 2062598 - DNA, 15 bp, Homo sapiens
agcgctccccggccg

SEQ ID NO: 2062599 - DNA, 15 bp, Homo sapiens
gcgctccccggccgg

SEQ ID NO: 2062600 - DNA, 15 bp, Homo sapiens
cgctccccggccggc

SEQ ID NO: 2062601 - DNA, 15 bp, Homo sapiens
gctccccggccggcc

SEQ ID NO: 2062602 - DNA, 15 bp, Homo sapiens
ctccccggccggccc

SEQ ID NO: 2062603 - DNA, 15 bp, Homo sapiens
tccccggccggcccc

SEQ ID NO: 2062604 - DNA, 15 bp, Homo sapiens
ccccggccggccccg

SEQ ID NO: 2062605 - DNA, 15 bp, Homo sapiens
cccggccggccccgg

SEQ ID NO: 2062606 - DNA, 15 bp, Homo sapiens
ccggccggccccggc

SEQ ID NO: 2062607 - DNA, 15 bp, Homo sapiens
cggccggccccggca

SEQ ID NO: 2062608 - DNA, 15 bp, Homo sapiens
ggccggccccggcag

SEQ ID NO: 2062609 - DNA, 15 bp, Homo sapiens
gccggccccggcagg

SEQ ID NO: 2062610 - DNA, 15 bp, Homo sapiens
ccggccccggcaggt

SEQ ID NO: 2062611 - DNA, 15 bp, Homo sapiens
cggccccggcaggtg

SEQ ID NO: 2062612 - DNA, 15 bp, Homo sapiens
ggccccggcaggtgc

SEQ ID NO: 2062613 - DNA, 15 bp, Homo sapiens
gccccggcaggtgcc

SEQ ID NO: 2062614 - DNA, 15 bp, Homo sapiens
ccccggcaggtgcct

SEQ ID NO: 2062615 - DNA, 15 bp, Homo sapiens
cccggcaggtgcctc

SEQ ID NO: 2062616 - DNA, 15 bp, Homo sapiens
ccggcaggtgcctcc

SEQ ID NO: 2062617 - DNA, 15 bp, Homo sapiens
cggcaggtgcctcca

SEQ ID NO: 2062618 - DNA, 15 bp, Homo sapiens
ggcaggtgcctccaa

SEQ ID NO: 2062619 - DNA, 15 bp, Homo sapiens
gcaggtgcctccaag

SEQ ID NO: 2062620 - DNA, 15 bp, Homo sapiens
caggtgcctccaaga

SEQ ID NO: 2062621 - DNA, 15 bp, Homo sapiens
aggtgcctccaagac

SEQ ID NO: 2062622 - DNA, 15 bp, Homo sapiens
ggtgcctccaagaca

SEQ ID NO: 2062623 - DNA, 15 bp, Homo sapiens
gtgcctccaagacac

SEQ ID NO: 2062624 - DNA, 15 bp, Homo sapiens
tgcctccaagacacc

SEQ ID NO: 2062625 - DNA, 15 bp, Homo sapiens
gcctccaagacaccc

SEQ ID NO: 2062626 - DNA, 15 bp, Homo sapiens
cctccaagacacccg

SEQ ID NO: 2062627 - DNA, 15 bp, Homo sapiens
ctccaagacacccgc

SEQ ID NO: 2062628 - DNA, 15 bp, Homo sapiens
tccaagacacccgcg

SEQ ID NO: 2062629 - DNA, 15 bp, Homo sapiens
ccaagacacccgcgc

SEQ ID NO: 2062630 - DNA, 15 bp, Homo sapiens
caagacacccgcgct

SEQ ID NO: 2062631 - DNA, 15 bp, Homo sapiens
aagacacccgcgctg

SEQ ID NO: 2062632 - DNA, 15 bp, Homo sapiens
agacacccgcgctgg

SEQ ID NO: 2062633 - DNA, 15 bp, Homo sapiens
gacacccgcgctggt

SEQ ID NO: 2062634 - DNA, 15 bp, Homo sapiens
acacccgcgctggtc

SEQ ID NO: 2062635 - DNA, 15 bp, Homo sapiens
cacccgcgctggtca

SEQ ID NO: 2062636 - DNA, 15 bp, Homo sapiens
acccgcgctggtcaa

SEQ ID NO: 2062637 - DNA, 15 bp, Homo sapiens
cccgcgctggtcaag

SEQ ID NO: 2062638 - DNA, 15 bp, Homo sapiens
ccgcgctggtcaagg

SEQ ID NO: 2062639 - DNA, 15 bp, Homo sapiens
cgcgctggtcaagga

SEQ ID NO: 2062640 - DNA, 15 bp, Homo sapiens
gcgctggtcaaggag

SEQ ID NO: 2062641 - DNA, 15 bp, Homo sapiens
cgctggtcaaggagc

SEQ ID NO: 2062642 - DNA, 15 bp, Homo sapiens
gctggtcaaggagct

SEQ ID NO: 2062643 - DNA, 15 bp, Homo sapiens
ctggtcaaggagctt

SEQ ID NO: 2062644 - DNA, 15 bp, Homo sapiens
tggtcaaggagcttc

SEQ ID NO: 2062645 - DNA, 15 bp, Homo sapiens
ggtcaaggagcttct

SEQ ID NO: 2062646 - DNA, 15 bp, Homo sapiens
gtcaaggagcttctt

SEQ ID NO: 2062647 - DNA, 15 bp, Homo sapiens
tcaaggagcttcttg

SEQ ID NO: 2062648 - DNA, 15 bp, Homo sapiens
caaggagcttcttga

SEQ ID NO: 2062649 - DNA, 15 bp, Homo sapiens
aaggagcttcttgaa

SEQ ID NO: 2062650 - DNA, 15 bp, Homo sapiens
aggagcttcttgaat

SEQ ID NO: 2062651 - DNA, 15 bp, Homo sapiens
ggagcttcttgaatt

SEQ ID NO: 2062652 - DNA, 15 bp, Homo sapiens
gagcttcttgaattt

SEQ ID NO: 2062653 - DNA, 15 bp, Homo sapiens
agcttcttgaattta

SEQ ID NO: 2062654 - DNA, 15 bp, Homo sapiens
gcttcttgaatttag

SEQ ID NO: 2062655 - DNA, 15 bp, Homo sapiens
cttcttgaatttagt

SEQ ID NO: 2062656 - DNA, 15 bp, Homo sapiens
ttcttgaatttagtt

SEQ ID NO: 2062657 - DNA, 15 bp, Homo sapiens
tcttgaatttagttt

SEQ ID NO: 2062658 - DNA, 15 bp, Homo sapiens
cttgaatttagtttt

SEQ ID NO: 2062659 - DNA, 15 bp, Homo sapiens
ttgaatttagttttt

SEQ ID NO: 2062660 - DNA, 15 bp, Homo sapiens
tgaatttagtttttg

SEQ ID NO: 2062661 - DNA, 15 bp, Homo sapiens
gaatttagtttttgt

SEQ ID NO: 2062662 - DNA, 15 bp, Homo sapiens
aatttagtttttgtt

SEQ ID NO: 2062663 - DNA, 15 bp, Homo sapiens
atttagtttttgttt

SEQ ID NO: 2062664 - DNA, 15 bp, Homo sapiens
tttagtttttgtttt

SEQ ID NO: 2062665 - DNA, 15 bp, Homo sapiens
ttagtttttgttttc

SEQ ID NO: 2062666 - DNA, 15 bp, Homo sapiens
tagtttttgttttca

SEQ ID NO: 2062667 - DNA, 15 bp, Homo sapiens
agtttttgttttcac

SEQ ID NO: 2062668 - DNA, 15 bp, Homo sapiens
gtttttgttttcaca

SEQ ID NO: 2062669 - DNA, 15 bp, Homo sapiens
tttttgttttcacat

SEQ ID NO: 2062670 - DNA, 15 bp, Homo sapiens
ttttgttttcacatt

SEQ ID NO: 2062671 - DNA, 15 bp, Homo sapiens
tttgttttcacattt

SEQ ID NO: 2062672 - DNA, 15 bp, Homo sapiens
ttgttttcacatttt

SEQ ID NO: 2062673 - DNA, 15 bp, Homo sapiens
tgttttcacattttc

SEQ ID NO: 2062674 - DNA, 15 bp, Homo sapiens
gttttcacattttct

SEQ ID NO: 2062675 - DNA, 15 bp, Homo sapiens
ttttcacattttctt

SEQ ID NO: 2062676 - DNA, 15 bp, Homo sapiens
tttcacattttcttt

SEQ ID NO: 2062677 - DNA, 15 bp, Homo sapiens
ttcacattttctttc

SEQ ID NO: 2062678 - DNA, 15 bp, Homo sapiens
tcacattttctttcc

SEQ ID NO: 2062679 - DNA, 15 bp, Homo sapiens
cacattttctttccc

SEQ ID NO: 2062680 - DNA, 15 bp, Homo sapiens
acattttctttcccc

SEQ ID NO: 2062681 - DNA, 15 bp, Homo sapiens
cattttctttcccct

SEQ ID NO: 2062682 - DNA, 15 bp, Homo sapiens
attttctttcccctc

SEQ ID NO: 2062683 - DNA, 15 bp, Homo sapiens
ttttctttcccctcc

SEQ ID NO: 2062684 - DNA, 15 bp, Homo sapiens
tttctttcccctcct

SEQ ID NO: 2062685 - DNA, 15 bp, Homo sapiens
ttctttcccctcctt

SEQ ID NO: 2062686 - DNA, 15 bp, Homo sapiens
tctttcccctccttg

SEQ ID NO: 2062687 - DNA, 15 bp, Homo sapiens
ctttcccctccttgt

SEQ ID NO: 2062688 - DNA, 15 bp, Homo sapiens
tttcccctccttgta

SEQ ID NO: 2062689 - DNA, 15 bp, Homo sapiens
ttcccctccttgtag

SEQ ID NO: 2062690 - DNA, 15 bp, Homo sapiens
tcccctccttgtaga

SEQ ID NO: 2062691 - DNA, 15 bp, Homo sapiens
cccctccttgtagag

SEQ ID NO: 2062692 - DNA, 15 bp, Homo sapiens
ccctccttgtagaga

SEQ ID NO: 2062693 - DNA, 15 bp, Homo sapiens
cctccttgtagagaa

SEQ ID NO: 2062694 - DNA, 15 bp, Homo sapiens
ctccttgtagagaag

SEQ ID NO: 2062695 - DNA, 15 bp, Homo sapiens
tccttgtagagaagg

SEQ ID NO: 2062696 - DNA, 15 bp, Homo sapiens
ccttgtagagaagga

SEQ ID NO: 2062697 - DNA, 15 bp, Homo sapiens
cttgtagagaaggag

SEQ ID NO: 2062698 - DNA, 15 bp, Homo sapiens
ttgtagagaaggagc

SEQ ID NO: 2062699 - DNA, 15 bp, Homo sapiens
tgtagagaaggagct

SEQ ID NO: 2062700 - DNA, 15 bp, Homo sapiens
gtagagaaggagctc

SEQ ID NO: 2062701 - DNA, 15 bp, Homo sapiens
tagagaaggagctcc

SEQ ID NO: 2062702 - DNA, 15 bp, Homo sapiens
agagaaggagctcct

SEQ ID NO: 2062703 - DNA, 15 bp, Homo sapiens
gagaaggagctcctg

SEQ ID NO: 2062704 - DNA, 15 bp, Homo sapiens
agaaggagctcctga

SEQ ID NO: 2062705 - DNA, 15 bp, Homo sapiens
gaaggagctcctgat

SEQ ID NO: 2062706 - DNA, 15 bp, Homo sapiens
aaggagctcctgatc

SEQ ID NO: 2062707 - DNA, 15 bp, Homo sapiens
aggagctcctgatca

SEQ ID NO: 2062708 - DNA, 15 bp, Homo sapiens
ggagctcctgatcat

SEQ ID NO: 2062709 - DNA, 15 bp, Homo sapiens
gagctcctgatcatg

SEQ ID NO: 2062710 - DNA, 15 bp, Homo sapiens
agctcctgatcatga

SEQ ID NO: 2062711 - DNA, 15 bp, Homo sapiens
gctcctgatcatgac

SEQ ID NO: 2062712 - DNA, 15 bp, Homo sapiens
ctcctgatcatgacg

SEQ ID NO: 2062713 - DNA, 15 bp, Homo sapiens
tcctgatcatgacga

SEQ ID NO: 2062714 - DNA, 15 bp, Homo sapiens
cctgatcatgacgaa

SEQ ID NO: 2062715 - DNA, 15 bp, Homo sapiens
ctgatcatgacgaac

SEQ ID NO: 2062716 - DNA, 15 bp, Homo sapiens
tgatcatgacgaaca

SEQ ID NO: 2062717 - DNA, 15 bp, Homo sapiens
gatcatgacgaacag

SEQ ID NO: 2062718 - DNA, 15 bp, Homo sapiens
atcatgacgaacagg

SEQ ID NO: 2062719 - DNA, 15 bp, Homo sapiens
tcatgacgaacaggc

SEQ ID NO: 2062720 - DNA, 15 bp, Homo sapiens
catgacgaacaggca

SEQ ID NO: 2062721 - DNA, 15 bp, Homo sapiens
atgacgaacaggcag

SEQ ID NO: 2062722 - DNA, 15 bp, Homo sapiens
tgacgaacaggcagt

SEQ ID NO: 2062723 - DNA, 15 bp, Homo sapiens
gacgaacaggcagtt

SEQ ID NO: 2062724 - DNA, 15 bp, Homo sapiens
acgaacaggcagttt

SEQ ID NO: 2062725 - DNA, 15 bp, Homo sapiens
cgaacaggcagtttt

SEQ ID NO: 2062726 - DNA, 15 bp, Homo sapiens
gaacaggcagttttg

SEQ ID NO: 2062727 - DNA, 15 bp, Homo sapiens
aacaggcagttttga

SEQ ID NO: 2062728 - DNA, 15 bp, Homo sapiens
acaggcagttttgag

SEQ ID NO: 2062729 - DNA, 15 bp, Homo sapiens
caggcagttttgagc

SEQ ID NO: 2062730 - DNA, 15 bp, Homo sapiens
aggcagttttgagct

SEQ ID NO: 2062731 - DNA, 15 bp, Homo sapiens
ggcagttttgagcta

SEQ ID NO: 2062732 - DNA, 15 bp, Homo sapiens
gcagttttgagctac

SEQ ID NO: 2062733 - DNA, 15 bp, Homo sapiens
cagttttgagctact

SEQ ID NO: 2062734 - DNA, 15 bp, Homo sapiens
agttttgagctactt

SEQ ID NO: 2062735 - DNA, 15 bp, Homo sapiens
gttttgagctactta

SEQ ID NO: 2062736 - DNA, 15 bp, Homo sapiens
ttttgagctacttaa

SEQ ID NO: 2062737 - DNA, 15 bp, Homo sapiens
tttgagctacttaat

SEQ ID NO: 2062738 - DNA, 15 bp, Homo sapiens
ttgagctacttaatt

SEQ ID NO: 2062739 - DNA, 15 bp, Homo sapiens
tgagctacttaattc

SEQ ID NO: 2062740 - DNA, 15 bp, Homo sapiens
gagctacttaattca

SEQ ID NO: 2062741 - DNA, 15 bp, Homo sapiens
agctacttaattcat

SEQ ID NO: 2062742 - DNA, 15 bp, Homo sapiens
gctacttaattcatc

SEQ ID NO: 2062743 - DNA, 15 bp, Homo sapiens
ctacttaattcatcc

SEQ ID NO: 2062744 - DNA, 15 bp, Homo sapiens
tacttaattcatccg

SEQ ID NO: 2062745 - DNA, 15 bp, Homo sapiens
acttaattcatccgg

SEQ ID NO: 2062746 - DNA, 15 bp, Homo sapiens
cttaattcatccggg

SEQ ID NO: 2062747 - DNA, 15 bp, Homo sapiens
ttaattcatccgggc

SEQ ID NO: 2062748 - DNA, 15 bp, Homo sapiens
taattcatccgggct

SEQ ID NO: 2062749 - DNA, 15 bp, Homo sapiens
aattcatccgggctc

SEQ ID NO: 2062750 - DNA, 15 bp, Homo sapiens
attcatccgggctcc

SEQ ID NO: 2062751 - DNA, 15 bp, Homo sapiens
ttcatccgggctccc

SEQ ID NO: 2062752 - DNA, 15 bp, Homo sapiens
tcatccgggctccct

SEQ ID NO: 2062753 - DNA, 15 bp, Homo sapiens
catccgggctccctt

SEQ ID NO: 2062754 - DNA, 15 bp, Homo sapiens
atccgggctcccttt

SEQ ID NO: 2062755 - DNA, 15 bp, Homo sapiens
tccgggctccctttt

SEQ ID NO: 2062756 - DNA, 15 bp, Homo sapiens
ccgggctcccttttt

SEQ ID NO: 2062757 - DNA, 15 bp, Homo sapiens
cgggctccctttttt

SEQ ID NO: 2062758 - DNA, 15 bp, Homo sapiens
gggctcccttttttt

SEQ ID NO: 2062759 - DNA, 15 bp, Homo sapiens
ggctcccttttttta

SEQ ID NO: 2062760 - DNA, 15 bp, Homo sapiens
gctccctttttttat

SEQ ID NO: 2062761 - DNA, 15 bp, Homo sapiens
ctccctttttttatt

SEQ ID NO: 2062762 - DNA, 15 bp, Homo sapiens
tccctttttttatta

SEQ ID NO: 2062763 - DNA, 15 bp, Homo sapiens
ccctttttttattaa

SEQ ID NO: 2062764 - DNA, 15 bp, Homo sapiens
cctttttttattaat

SEQ ID NO: 2062765 - DNA, 15 bp, Homo sapiens
ctttttttattaata

SEQ ID NO: 2062766 - DNA, 15 bp, Homo sapiens
tttttttattaatag

SEQ ID NO: 2062767 - DNA, 15 bp, Homo sapiens
ttttttattaatagc

SEQ ID NO: 2062768 - DNA, 15 bp, Homo sapiens
tttttattaatagca

SEQ ID NO: 2062769 - DNA, 15 bp, Homo sapiens
ttttattaatagcaa

SEQ ID NO: 2062770 - DNA, 15 bp, Homo sapiens
tttattaatagcaat

SEQ ID NO: 2062771 - DNA, 15 bp, Homo sapiens
ttattaatagcaatt

SEQ ID NO: 2062772 - DNA, 15 bp, Homo sapiens
tattaatagcaatta

SEQ ID NO: 2062773 - DNA, 15 bp, Homo sapiens
attaatagcaattac

SEQ ID NO: 2062774 - DNA, 15 bp, Homo sapiens
ttaatagcaattaca

SEQ ID NO: 2062775 - DNA, 15 bp, Homo sapiens
taatagcaattacag

SEQ ID NO: 2062776 - DNA, 15 bp, Homo sapiens
aatagcaattacagt

SEQ ID NO: 2062777 - DNA, 15 bp, Homo sapiens
atagcaattacagta

SEQ ID NO: 2062778 - DNA, 15 bp, Homo sapiens
tagcaattacagtag

SEQ ID NO: 2062779 - DNA, 15 bp, Homo sapiens
agcaattacagtaga

SEQ ID NO: 2062780 - DNA, 15 bp, Homo sapiens
gcaattacagtagag

SEQ ID NO: 2062781 - DNA, 15 bp, Homo sapiens
caattacagtagaga

SEQ ID NO: 2062782 - DNA, 15 bp, Homo sapiens
aattacagtagagaa

SEQ ID NO: 2062783 - DNA, 15 bp, Homo sapiens
attacagtagagaaa

SEQ ID NO: 2062784 - DNA, 15 bp, Homo sapiens
ttacagtagagaaag

SEQ ID NO: 2062785 - DNA, 15 bp, Homo sapiens
tacagtagagaaagt

SEQ ID NO: 2062786 - DNA, 15 bp, Homo sapiens
acagtagagaaagtt

SEQ ID NO: 2062787 - DNA, 15 bp, Homo sapiens
cagtagagaaagttt

SEQ ID NO: 2062788 - DNA, 15 bp, Homo sapiens
agtagagaaagtttt

SEQ ID NO: 2062789 - DNA, 15 bp, Homo sapiens
gtagagaaagtttta

SEQ ID NO: 2062790 - DNA, 15 bp, Homo sapiens
tagagaaagttttat

SEQ ID NO: 2062791 - DNA, 15 bp, Homo sapiens
agagaaagttttatt

SEQ ID NO: 2062792 - DNA, 15 bp, Homo sapiens
gagaaagttttattt

SEQ ID NO: 2062793 - DNA, 15 bp, Homo sapiens
agaaagttttattta

SEQ ID NO: 2062794 - DNA, 15 bp, Homo sapiens
gaaagttttatttat

SEQ ID NO: 2062795 - DNA, 15 bp, Homo sapiens
aaagttttatttatt

SEQ ID NO: 2062796 - DNA, 15 bp, Homo sapiens
aagttttatttattt

SEQ ID NO: 2062797 - DNA, 15 bp, Homo sapiens
agttttatttatttt

SEQ ID NO: 2062798 - DNA, 15 bp, Homo sapiens
gttttatttattttt

SEQ ID NO: 2062799 - DNA, 15 bp, Homo sapiens
tatttatttttaaag

SEQ ID NO: 2062800 - DNA, 15 bp, Homo sapiens
atttatttttaaaga

SEQ ID NO: 2062801 - DNA, 15 bp, Homo sapiens
ttatttttaaagatt

SEQ ID NO: 2062802 - DNA, 15 bp, Homo sapiens
atttttaaagatttc

SEQ ID NO: 2062803 - DNA, 15 bp, Homo sapiens
tttttaaagatttca

SEQ ID NO: 2062804 - DNA, 15 bp, Homo sapiens
ttttaaagatttcag

SEQ ID NO: 2062805 - DNA, 15 bp, Homo sapiens
tttaaagatttcagc

SEQ ID NO: 2062806 - DNA, 15 bp, Homo sapiens
ttaaagatttcagcc

SEQ ID NO: 2062807 - DNA, 15 bp, Homo sapiens
taaagatttcagccc

SEQ ID NO: 2062808 - DNA, 15 bp, Homo sapiens
aaagatttcagccct

SEQ ID NO: 2062809 - DNA, 15 bp, Homo sapiens
aagatttcagccctc

SEQ ID NO: 2062810 - DNA, 15 bp, Homo sapiens
agatttcagccctct

SEQ ID NO: 2062811 - DNA, 15 bp, Homo sapiens
gatttcagccctctc

SEQ ID NO: 2062812 - DNA, 15 bp, Homo sapiens
atttcagccctctcc

SEQ ID NO: 2062813 - DNA, 15 bp, Homo sapiens
tttcagccctctcct

SEQ ID NO: 2062814 - DNA, 15 bp, Homo sapiens
ttcagccctctcctt

SEQ ID NO: 2062815 - DNA, 15 bp, Homo sapiens
tcagccctctccttg

SEQ ID NO: 2062816 - DNA, 15 bp, Homo sapiens
cagccctctccttga

SEQ ID NO: 2062817 - DNA, 15 bp, Homo sapiens
agccctctccttgaa

SEQ ID NO: 2062818 - DNA, 15 bp, Homo sapiens
gccctctccttgaag

SEQ ID NO: 2062819 - DNA, 15 bp, Homo sapiens
ccctctccttgaaga

SEQ ID NO: 2062820 - DNA, 15 bp, Homo sapiens
cctctccttgaagag

SEQ ID NO: 2062821 - DNA, 15 bp, Homo sapiens
ctctccttgaagaga

SEQ ID NO: 2062822 - DNA, 15 bp, Homo sapiens
tctccttgaagagag

SEQ ID NO: 2062823 - DNA, 15 bp, Homo sapiens
ctccttgaagagagc

SEQ ID NO: 2062824 - DNA, 15 bp, Homo sapiens
tccttgaagagagct

SEQ ID NO: 2062825 - DNA, 15 bp, Homo sapiens
ccttgaagagagctc

SEQ ID NO: 2062826 - DNA, 15 bp, Homo sapiens
cttgaagagagctct

SEQ ID NO: 2062827 - DNA, 15 bp, Homo sapiens
ttgaagagagctctt

SEQ ID NO: 2062828 - DNA, 15 bp, Homo sapiens
tgaagagagctctta

SEQ ID NO: 2062829 - DNA, 15 bp, Homo sapiens
gaagagagctcttac

SEQ ID NO: 2062830 - DNA, 15 bp, Homo sapiens
aagagagctcttact

SEQ ID NO: 2062831 - DNA, 15 bp, Homo sapiens
agagagctcttactc

SEQ ID NO: 2062832 - DNA, 15 bp, Homo sapiens
gagagctcttactcc

SEQ ID NO: 2062833 - DNA, 15 bp, Homo sapiens
agagctcttactccc

SEQ ID NO: 2062834 - DNA, 15 bp, Homo sapiens
gagctcttactccct

SEQ ID NO: 2062835 - DNA, 15 bp, Homo sapiens
agctcttactccctc

SEQ ID NO: 2062836 - DNA, 15 bp, Homo sapiens
gctcttactccctca

SEQ ID NO: 2062837 - DNA, 15 bp, Homo sapiens
ctcttactccctcaa

SEQ ID NO: 2062838 - DNA, 15 bp, Homo sapiens
tcttactccctcaat

SEQ ID NO: 2062839 - DNA, 15 bp, Homo sapiens
cttactccctcaata

SEQ ID NO: 2062840 - DNA, 15 bp, Homo sapiens
ttactccctcaatac

SEQ ID NO: 2062841 - DNA, 15 bp, Homo sapiens
tactccctcaataca

SEQ ID NO: 2062842 - DNA, 15 bp, Homo sapiens
actccctcaatacaa

SEQ ID NO: 2062843 - DNA, 15 bp, Homo sapiens
ctccctcaatacaaa

SEQ ID NO: 2062844 - DNA, 15 bp, Homo sapiens
tccctcaatacaaag

SEQ ID NO: 2062845 - DNA, 15 bp, Homo sapiens
ccctcaatacaaagc

SEQ ID NO: 2062846 - DNA, 15 bp, Homo sapiens
cctcaatacaaagcc

SEQ ID NO: 2062847 - DNA, 15 bp, Homo sapiens
ctcaatacaaagcca

SEQ ID NO: 2062848 - DNA, 15 bp, Homo sapiens
tcaatacaaagccaa

SEQ ID NO: 2062849 - DNA, 15 bp, Homo sapiens
caatacaaagccaac

SEQ ID NO: 2062850 - DNA, 15 bp, Homo sapiens
aatacaaagccaact

SEQ ID NO: 2062851 - DNA, 15 bp, Homo sapiens
atacaaagccaactt

SEQ ID NO: 2062852 - DNA, 15 bp, Homo sapiens
tacaaagccaacttc

SEQ ID NO: 2062853 - DNA, 15 bp, Homo sapiens
acaaagccaacttct

SEQ ID NO: 2062854 - DNA, 15 bp, Homo sapiens
caaagccaacttcta

SEQ ID NO: 2062855 - DNA, 15 bp, Homo sapiens
aaagccaacttctat

SEQ ID NO: 2062856 - DNA, 15 bp, Homo sapiens
aagccaacttctata

SEQ ID NO: 2062857 - DNA, 15 bp, Homo sapiens
agccaacttctataa

SEQ ID NO: 2062858 - DNA, 15 bp, Homo sapiens
gccaacttctataat

SEQ ID NO: 2062859 - DNA, 15 bp, Homo sapiens
ccaacttctataata

SEQ ID NO: 2062860 - DNA, 15 bp, Homo sapiens
caacttctataataa

SEQ ID NO: 2062861 - DNA, 15 bp, Homo sapiens
aacttctataataac

SEQ ID NO: 2062862 - DNA, 15 bp, Homo sapiens
acttctataataaca

SEQ ID NO: 2062863 - DNA, 15 bp, Homo sapiens
cttctataataacat

SEQ ID NO: 2062864 - DNA, 15 bp, Homo sapiens
ttctataataacatt

SEQ ID NO: 2062865 - DNA, 15 bp, Homo sapiens
tctataataacattc

SEQ ID NO: 2062866 - DNA, 15 bp, Homo sapiens
ctataataacattcg

SEQ ID NO: 2062867 - DNA, 15 bp, Homo sapiens
tataataacattcgc

SEQ ID NO: 2062868 - DNA, 15 bp, Homo sapiens
ataataacattcgct

SEQ ID NO: 2062869 - DNA, 15 bp, Homo sapiens
taataacattcgctt

SEQ ID NO: 2062870 - DNA, 15 bp, Homo sapiens
aataacattcgcttt

SEQ ID NO: 2062871 - DNA, 15 bp, Homo sapiens
ataacattcgctttt

SEQ ID NO: 2062872 - DNA, 15 bp, Homo sapiens
taacattcgcttttc

SEQ ID NO: 2062873 - DNA, 15 bp, Homo sapiens
aacattcgcttttct

SEQ ID NO: 2062874 - DNA, 15 bp, Homo sapiens
acattcgcttttctc

SEQ ID NO: 2062875 - DNA, 15 bp, Homo sapiens
cattcgcttttctca

SEQ ID NO: 2062876 - DNA, 15 bp, Homo sapiens
attcgcttttctcac

SEQ ID NO: 2062877 - DNA, 15 bp, Homo sapiens
ttcgcttttctcacc

SEQ ID NO: 2062878 - DNA, 15 bp, Homo sapiens
tcgcttttctcaccg

SEQ ID NO: 2062879 - DNA, 15 bp, Homo sapiens
cgcttttctcaccgc

SEQ ID NO: 2062880 - DNA, 15 bp, Homo sapiens
gcttttctcaccgcc

SEQ ID NO: 2062881 - DNA, 15 bp, Homo sapiens
cttttctcaccgcct

SEQ ID NO: 2062882 - DNA, 15 bp, Homo sapiens
ttttctcaccgccta

SEQ ID NO: 2062883 - DNA, 15 bp, Homo sapiens
tttctcaccgcctac

SEQ ID NO: 2062884 - DNA, 15 bp, Homo sapiens
ttctcaccgcctacc

SEQ ID NO: 2062885 - DNA, 15 bp, Homo sapiens
tctcaccgcctacct

SEQ ID NO: 2062886 - DNA, 15 bp, Homo sapiens
ctcaccgcctacctt

SEQ ID NO: 2062887 - DNA, 15 bp, Homo sapiens
tcaccgcctaccttc

SEQ ID NO: 2062888 - DNA, 15 bp, Homo sapiens
caccgcctaccttct

SEQ ID NO: 2062889 - DNA, 15 bp, Homo sapiens
accgcctaccttctt

SEQ ID NO: 2062890 - DNA, 15 bp, Homo sapiens
ccgcctaccttcttt

SEQ ID NO: 2062891 - DNA, 15 bp, Homo sapiens
cgcctaccttcttta

SEQ ID NO: 2062892 - DNA, 15 bp, Homo sapiens
gcctaccttctttac

SEQ ID NO: 2062893 - DNA, 15 bp, Homo sapiens
cctaccttctttacc

SEQ ID NO: 2062894 - DNA, 15 bp, Homo sapiens
ctaccttctttacca

SEQ ID NO: 2062895 - DNA, 15 bp, Homo sapiens
taccttctttaccag

SEQ ID NO: 2062896 - DNA, 15 bp, Homo sapiens
accttctttaccagg

SEQ ID NO: 2062897 - DNA, 15 bp, Homo sapiens
ccttctttaccaggg

SEQ ID NO: 2062898 - DNA, 15 bp, Homo sapiens
cttctttaccagggt

SEQ ID NO: 2062899 - DNA, 15 bp, Homo sapiens
ttctttaccagggta

SEQ ID NO: 2062900 - DNA, 15 bp, Homo sapiens
tctttaccagggtaa

SEQ ID NO: 2062901 - DNA, 15 bp, Homo sapiens
ctttaccagggtaaa

SEQ ID NO: 2062902 - DNA, 15 bp, Homo sapiens
tttaccagggtaaag

SEQ ID NO: 2062903 - DNA, 15 bp, Homo sapiens
ttaccagggtaaaga

SEQ ID NO: 2062904 - DNA, 15 bp, Homo sapiens
taccagggtaaagaa

SEQ ID NO: 2062905 - DNA, 15 bp, Homo sapiens
accagggtaaagaaa

SEQ ID NO: 2062906 - DNA, 15 bp, Homo sapiens
ccagggtaaagaaag

SEQ ID NO: 2062907 - DNA, 15 bp, Homo sapiens
cagggtaaagaaagc

SEQ ID NO: 2062908 - DNA, 15 bp, Homo sapiens
agggtaaagaaagct

SEQ ID NO: 2062909 - DNA, 15 bp, Homo sapiens
gggtaaagaaagctc

SEQ ID NO: 2062910 - DNA, 15 bp, Homo sapiens
ggtaaagaaagctca

SEQ ID NO: 2062911 - DNA, 15 bp, Homo sapiens
gtaaagaaagctcag

SEQ ID NO: 2062912 - DNA, 15 bp, Homo sapiens
taaagaaagctcagg

SEQ ID NO: 2062913 - DNA, 15 bp, Homo sapiens
aaagaaagctcagga

SEQ ID NO: 2062914 - DNA, 15 bp, Homo sapiens
aagaaagctcaggac

SEQ ID NO: 2062915 - DNA, 15 bp, Homo sapiens
agaaagctcaggaca

SEQ ID NO: 2062916 - DNA, 15 bp, Homo sapiens
gaaagctcaggacac

SEQ ID NO: 2062917 - DNA, 15 bp, Homo sapiens
aaagctcaggacacc

SEQ ID NO: 2062918 - DNA, 15 bp, Homo sapiens
aagctcaggacaccc

SEQ ID NO: 2062919 - DNA, 15 bp, Homo sapiens
agctcaggacaccct

SEQ ID NO: 2062920 - DNA, 15 bp, Homo sapiens
gctcaggacaccctc

SEQ ID NO: 2062921 - DNA, 15 bp, Homo sapiens
ctcaggacaccctcc

SEQ ID NO: 2062922 - DNA, 15 bp, Homo sapiens
tcaggacaccctccg

SEQ ID NO: 2062923 - DNA, 15 bp, Homo sapiens
caggacaccctccgc

SEQ ID NO: 2062924 - DNA, 15 bp, Homo sapiens
aggacaccctccgcc

SEQ ID NO: 2062925 - DNA, 15 bp, Homo sapiens
ggacaccctccgccc

SEQ ID NO: 2062926 - DNA, 15 bp, Homo sapiens
gacaccctccgccct

SEQ ID NO: 2062927 - DNA, 15 bp, Homo sapiens
acaccctccgccctc

SEQ ID NO: 2062928 - DNA, 15 bp, Homo sapiens
caccctccgccctcc

SEQ ID NO: 2062929 - DNA, 15 bp, Homo sapiens
accctccgccctccc

SEQ ID NO: 2062930 - DNA, 15 bp, Homo sapiens
ccctccgccctccca

SEQ ID NO: 2062931 - DNA, 15 bp, Homo sapiens
cctccgccctcccac

SEQ ID NO: 2062932 - DNA, 15 bp, Homo sapiens
ctccgccctcccacc

SEQ ID NO: 2062933 - DNA, 15 bp, Homo sapiens
tccgccctcccacct

SEQ ID NO: 2062934 - DNA, 15 bp, Homo sapiens
cgccctcccacctgc

SEQ ID NO: 2062935 - DNA, 15 bp, Homo sapiens
gccctcccacctgcg

SEQ ID NO: 2062936 - DNA, 15 bp, Homo sapiens
ccctcccacctgcgc

SEQ ID NO: 2062937 - DNA, 15 bp, Homo sapiens
cctcccacctgcgcc

SEQ ID NO: 2062938 - DNA, 15 bp, Homo sapiens
ctcccacctgcgccc

SEQ ID NO: 2062939 - DNA, 15 bp, Homo sapiens
tcccacctgcgcccg

SEQ ID NO: 2062940 - DNA, 15 bp, Homo sapiens
cccacctgcgcccgc

SEQ ID NO: 2062941 - DNA, 15 bp, Homo sapiens
ccacctgcgcccgcg

SEQ ID NO: 2062942 - DNA, 15 bp, Homo sapiens
cacctgcgcccgcgt

SEQ ID NO: 2062943 - DNA, 15 bp, Homo sapiens
acctgcgcccgcgtt

SEQ ID NO: 2062944 - DNA, 15 bp, Homo sapiens
cctgcgcccgcgttt

SEQ ID NO: 2062945 - DNA, 15 bp, Homo sapiens
ctgcgcccgcgtttt

SEQ ID NO: 2062946 - DNA, 15 bp, Homo sapiens
tgcgcccgcgttttt

SEQ ID NO: 2062947 - DNA, 15 bp, Homo sapiens
gcgcccgcgtttttg

SEQ ID NO: 2062948 - DNA, 15 bp, Homo sapiens
cgcccgcgtttttgt

SEQ ID NO: 2062949 - DNA, 15 bp, Homo sapiens
gcccgcgtttttgtg

SEQ ID NO: 2062950 - DNA, 15 bp, Homo sapiens
cccgcgtttttgtgc

SEQ ID NO: 2062951 - DNA, 15 bp, Homo sapiens
ccgcgtttttgtgcg

SEQ ID NO: 2062952 - DNA, 15 bp, Homo sapiens
cgcgtttttgtgcgg

SEQ ID NO: 2062953 - DNA, 15 bp, Homo sapiens
gcgtttttgtgcggt

SEQ ID NO: 2062954 - DNA, 15 bp, Homo sapiens
cgtttttgtgcggtc

SEQ ID NO: 2062955 - DNA, 15 bp, Homo sapiens
gtttttgtgcggtcc

SEQ ID NO: 2062956 - DNA, 15 bp, Homo sapiens
tttttgtgcggtccc

SEQ ID NO: 2062957 - DNA, 15 bp, Homo sapiens
ttttgtgcggtcccc

SEQ ID NO: 2062958 - DNA, 15 bp, Homo sapiens
tttgtgcggtcccca

SEQ ID NO: 2062959 - DNA, 15 bp, Homo sapiens
ttgtgcggtccccac

SEQ ID NO: 2062960 - DNA, 15 bp, Homo sapiens
tgtgcggtccccacg

SEQ ID NO: 2062961 - DNA, 15 bp, Homo sapiens
gtgcggtccccacgg

SEQ ID NO: 2062962 - DNA, 15 bp, Homo sapiens
tgcggtccccacggc

SEQ ID NO: 2062963 - DNA, 15 bp, Homo sapiens
gcggtccccacggca

SEQ ID NO: 2062964 - DNA, 15 bp, Homo sapiens
cggtccccacggcag

SEQ ID NO: 2062965 - DNA, 15 bp, Homo sapiens
ggtccccacggcaga

SEQ ID NO: 2062966 - DNA, 15 bp, Homo sapiens
gtccccacggcagag

SEQ ID NO: 2062967 - DNA, 15 bp, Homo sapiens
tccccacggcagagc

SEQ ID NO: 2062968 - DNA, 15 bp, Homo sapiens
ccccacggcagagct

SEQ ID NO: 2062969 - DNA, 15 bp, Homo sapiens
cccacggcagagctg

SEQ ID NO: 2062970 - DNA, 15 bp, Homo sapiens
ccacggcagagctgg

SEQ ID NO: 2062971 - DNA, 15 bp, Homo sapiens
cacggcagagctggg

SEQ ID NO: 2062972 - DNA, 15 bp, Homo sapiens
acggcagagctgggg

SEQ ID NO: 2062973 - DNA, 15 bp, Homo sapiens
cggcagagctgggga

SEQ ID NO: 2062974 - DNA, 15 bp, Homo sapiens
ggcagagctggggag

SEQ ID NO: 2062975 - DNA, 15 bp, Homo sapiens
gcagagctggggagg

SEQ ID NO: 2062976 - DNA, 15 bp, Homo sapiens
cagagctggggaggc

SEQ ID NO: 2062977 - DNA, 15 bp, Homo sapiens
agagctggggaggcc

SEQ ID NO: 2062978 - DNA, 15 bp, Homo sapiens
gagctggggaggcca

SEQ ID NO: 2062979 - DNA, 15 bp, Homo sapiens
agctggggaggccac

SEQ ID NO: 2062980 - DNA, 15 bp, Homo sapiens
gctggggaggccacc

SEQ ID NO: 2062981 - DNA, 15 bp, Homo sapiens
ctggggaggccaccc

SEQ ID NO: 2062982 - DNA, 15 bp, Homo sapiens
tggggaggccaccct

SEQ ID NO: 2062983 - DNA, 15 bp, Homo sapiens
ggggaggccacccta

SEQ ID NO: 2062984 - DNA, 15 bp, Homo sapiens
gggaggccaccctac

SEQ ID NO: 2062985 - DNA, 15 bp, Homo sapiens
ggaggccaccctacg

SEQ ID NO: 2062986 - DNA, 15 bp, Homo sapiens
gaggccaccctacgt

SEQ ID NO: 2062987 - DNA, 15 bp, Homo sapiens
aggccaccctacgtt

SEQ ID NO: 2062988 - DNA, 15 bp, Homo sapiens
ggccaccctacgttt

SEQ ID NO: 2062989 - DNA, 15 bp, Homo sapiens
gccaccctacgtttg

SEQ ID NO: 2062990 - DNA, 15 bp, Homo sapiens
ccaccctacgtttgc

SEQ ID NO: 2062991 - DNA, 15 bp, Homo sapiens
caccctacgtttgcg

SEQ ID NO: 2062992 - DNA, 15 bp, Homo sapiens
accctacgtttgcgc

SEQ ID NO: 2062993 - DNA, 15 bp, Homo sapiens
ccctacgtttgcgca

SEQ ID NO: 2062994 - DNA, 15 bp, Homo sapiens
cctacgtttgcgcag

SEQ ID NO: 2062995 - DNA, 15 bp, Homo sapiens
ctacgtttgcgcagg

SEQ ID NO: 2062996 - DNA, 15 bp, Homo sapiens
tacgtttgcgcaggg

SEQ ID NO: 2062997 - DNA, 15 bp, Homo sapiens
acgtttgcgcaggga

SEQ ID NO: 2062998 - DNA, 15 bp, Homo sapiens
cgtttgcgcagggag

SEQ ID NO: 2062999 - DNA, 15 bp, Homo sapiens
gtttgcgcagggaga

SEQ ID NO: 2063000 - DNA, 15 bp, Homo sapiens
tttgcgcagggagac

SEQ ID NO: 2063001 - DNA, 15 bp, Homo sapiens
ttgcgcagggagacg

SEQ ID NO: 2063002 - DNA, 15 bp, Homo sapiens
tgcgcagggagacgc

SEQ ID NO: 2063003 - DNA, 15 bp, Homo sapiens
gcgcagggagacgcg

SEQ ID NO: 2063004 - DNA, 15 bp, Homo sapiens
cgcagggagacgcgc

SEQ ID NO: 2063005 - DNA, 15 bp, Homo sapiens
gcagggagacgcgct

SEQ ID NO: 2063006 - DNA, 15 bp, Homo sapiens
cagggagacgcgctc

SEQ ID NO: 2063007 - DNA, 15 bp, Homo sapiens
agggagacgcgctcg

SEQ ID NO: 2063008 - DNA, 15 bp, Homo sapiens
gggagacgcgctcgc

SEQ ID NO: 2063009 - DNA, 15 bp, Homo sapiens
ggagacgcgctcgcc

SEQ ID NO: 2063010 - DNA, 15 bp, Homo sapiens
gagacgcgctcgccg

SEQ ID NO: 2063011 - DNA, 15 bp, Homo sapiens
agacgcgctcgccgc

SEQ ID NO: 2063012 - DNA, 15 bp, Homo sapiens
gacgcgctcgccgct

SEQ ID NO: 2063013 - DNA, 15 bp, Homo sapiens
acgcgctcgccgctg

SEQ ID NO: 2063014 - DNA, 15 bp, Homo sapiens
cgcgctcgccgctgg

SEQ ID NO: 2063015 - DNA, 15 bp, Homo sapiens
gcgctcgccgctggt

SEQ ID NO: 2063016 - DNA, 15 bp, Homo sapiens
cgctcgccgctggtg

SEQ ID NO: 2063017 - DNA, 15 bp, Homo sapiens
gctcgccgctggtgt

SEQ ID NO: 2063018 - DNA, 15 bp, Homo sapiens
ctcgccgctggtgtt

SEQ ID NO: 2063019 - DNA, 15 bp, Homo sapiens
tcgccgctggtgttg

SEQ ID NO: 2063020 - DNA, 15 bp, Homo sapiens
cgccgctggtgttgc

SEQ ID NO: 2063021 - DNA, 15 bp, Homo sapiens
gccgctggtgttgcg

SEQ ID NO: 2063022 - DNA, 15 bp, Homo sapiens
ccgctggtgttgcga

SEQ ID NO: 2063023 - DNA, 15 bp, Homo sapiens
cgctggtgttgcgaa

SEQ ID NO: 2063024 - DNA, 15 bp, Homo sapiens
gctggtgttgcgaaa

SEQ ID NO: 2063025 - DNA, 15 bp, Homo sapiens
ctggtgttgcgaaag

SEQ ID NO: 2063026 - DNA, 15 bp, Homo sapiens
tggtgttgcgaaaga

SEQ ID NO: 2063027 - DNA, 15 bp, Homo sapiens
ggtgttgcgaaagac

SEQ ID NO: 2063028 - DNA, 15 bp, Homo sapiens
gtgttgcgaaagacc

SEQ ID NO: 2063029 - DNA, 15 bp, Homo sapiens
tgttgcgaaagacca

SEQ ID NO: 2063030 - DNA, 15 bp, Homo sapiens
gttgcgaaagaccag

SEQ ID NO: 2063031 - DNA, 15 bp, Homo sapiens
ttgcgaaagaccaga

SEQ ID NO: 2063032 - DNA, 15 bp, Homo sapiens
tgcgaaagaccagag

SEQ ID NO: 2063033 - DNA, 15 bp, Homo sapiens
gcgaaagaccagagc

SEQ ID NO: 2063034 - DNA, 15 bp, Homo sapiens
cgaaagaccagagcg

SEQ ID NO: 2063035 - DNA, 15 bp, Homo sapiens
gaaagaccagagcga

SEQ ID NO: 2063036 - DNA, 15 bp, Homo sapiens
aaagaccagagcgaa

SEQ ID NO: 2063037 - DNA, 15 bp, Homo sapiens
aagaccagagcgaag

SEQ ID NO: 2063038 - DNA, 15 bp, Homo sapiens
agaccagagcgaagc

SEQ ID NO: 2063039 - DNA, 15 bp, Homo sapiens
gaccagagcgaagcc

SEQ ID NO: 2063040 - DNA, 15 bp, Homo sapiens
accagagcgaagccc

SEQ ID NO: 2063041 - DNA, 15 bp, Homo sapiens
ccagagcgaagcccg

SEQ ID NO: 2063042 - DNA, 15 bp, Homo sapiens
cagagcgaagcccgg

SEQ ID NO: 2063043 - DNA, 15 bp, Homo sapiens
agagcgaagcccggc

SEQ ID NO: 2063044 - DNA, 15 bp, Homo sapiens
gagcgaagcccggct

SEQ ID NO: 2063045 - DNA, 15 bp, Homo sapiens
agcgaagcccggctc

SEQ ID NO: 2063046 - DNA, 15 bp, Homo sapiens
gcgaagcccggctcc

SEQ ID NO: 2063047 - DNA, 15 bp, Homo sapiens
cgaagcccggctcct

SEQ ID NO: 2063048 - DNA, 15 bp, Homo sapiens
gaagcccggctcctt

SEQ ID NO: 2063049 - DNA, 15 bp, Homo sapiens
aagcccggctccttg

SEQ ID NO: 2063050 - DNA, 15 bp, Homo sapiens
agcccggctccttgc

SEQ ID NO: 2063051 - DNA, 15 bp, Homo sapiens
gcccggctccttgcc

SEQ ID NO: 2063052 - DNA, 15 bp, Homo sapiens
cccggctccttgccc

SEQ ID NO: 2063053 - DNA, 15 bp, Homo sapiens
ccggctccttgccct

SEQ ID NO: 2063054 - DNA, 15 bp, Homo sapiens
cggctccttgccctt

SEQ ID NO: 2063055 - DNA, 15 bp, Homo sapiens
ggctccttgcccttc

SEQ ID NO: 2063056 - DNA, 15 bp, Homo sapiens
gctccttgcccttcc

SEQ ID NO: 2063057 - DNA, 15 bp, Homo sapiens
ctccttgcccttcct

SEQ ID NO: 2063058 - DNA, 15 bp, Homo sapiens
tccttgcccttcctt

SEQ ID NO: 2063059 - DNA, 15 bp, Homo sapiens
ccttgcccttccttc

SEQ ID NO: 2063060 - DNA, 15 bp, Homo sapiens
cttgcccttccttcc

SEQ ID NO: 2063061 - DNA, 15 bp, Homo sapiens
ttgcccttccttccc

SEQ ID NO: 2063062 - DNA, 15 bp, Homo sapiens
tgcccttccttccca

SEQ ID NO: 2063063 - DNA, 15 bp, Homo sapiens
gcccttccttcccag

SEQ ID NO: 2063064 - DNA, 15 bp, Homo sapiens
cccttccttcccagg

SEQ ID NO: 2063065 - DNA, 15 bp, Homo sapiens
ccttccttcccaggg

SEQ ID NO: 2063066 - DNA, 15 bp, Homo sapiens
cttccttcccagggg

SEQ ID NO: 2063067 - DNA, 15 bp, Homo sapiens
ttccttcccaggggc

SEQ ID NO: 2063068 - DNA, 15 bp, Homo sapiens
tccttcccaggggct

SEQ ID NO: 2063069 - DNA, 15 bp, Homo sapiens
ccttcccaggggctt

SEQ ID NO: 2063070 - DNA, 15 bp, Homo sapiens
cttcccaggggcttc

SEQ ID NO: 2063071 - DNA, 15 bp, Homo sapiens
ttcccaggggcttct

SEQ ID NO: 2063072 - DNA, 15 bp, Homo sapiens
tcccaggggcttctc

SEQ ID NO: 2063073 - DNA, 15 bp, Homo sapiens
cccaggggcttctct

SEQ ID NO: 2063074 - DNA, 15 bp, Homo sapiens
ccaggggcttctctg

SEQ ID NO: 2063075 - DNA, 15 bp, Homo sapiens
caggggcttctctgg

SEQ ID NO: 2063076 - DNA, 15 bp, Homo sapiens
aggggcttctctggg

SEQ ID NO: 2063077 - DNA, 15 bp, Homo sapiens
ggggcttctctgggg

SEQ ID NO: 2063078 - DNA, 15 bp, Homo sapiens
gggcttctctggggg

SEQ ID NO: 2063079 - DNA, 15 bp, Homo sapiens
ggcttctctgggggg

SEQ ID NO: 2063080 - DNA, 15 bp, Homo sapiens
gcttctctggggggc

SEQ ID NO: 2063081 - DNA, 15 bp, Homo sapiens
cttctctggggggcg

SEQ ID NO: 2063082 - DNA, 15 bp, Homo sapiens
ttctctggggggcgc

SEQ ID NO: 2063083 - DNA, 15 bp, Homo sapiens
tctctggggggcgct

SEQ ID NO: 2063084 - DNA, 15 bp, Homo sapiens
ctctggggggcgctc

SEQ ID NO: 2063085 - DNA, 15 bp, Homo sapiens
tctggggggcgctct

SEQ ID NO: 2063086 - DNA, 15 bp, Homo sapiens
ctggggggcgctctc

SEQ ID NO: 2063087 - DNA, 15 bp, Homo sapiens
tggggggcgctctca

SEQ ID NO: 2063088 - DNA, 15 bp, Homo sapiens
ggggggcgctctcag

SEQ ID NO: 2063089 - DNA, 15 bp, Homo sapiens
gggggcgctctcagg

SEQ ID NO: 2063090 - DNA, 15 bp, Homo sapiens
ggggcgctctcaggc

SEQ ID NO: 2063091 - DNA, 15 bp, Homo sapiens
gggcgctctcaggcc

SEQ ID NO: 2063092 - DNA, 15 bp, Homo sapiens
ggcgctctcaggccc

SEQ ID NO: 2063093 - DNA, 15 bp, Homo sapiens
gcgctctcaggcccc

SEQ ID NO: 2063094 - DNA, 15 bp, Homo sapiens
cgctctcaggccccg

SEQ ID NO: 2063095 - DNA, 15 bp, Homo sapiens
gctctcaggccccga

SEQ ID NO: 2063096 - DNA, 15 bp, Homo sapiens
ctctcaggccccgac

SEQ ID NO: 2063097 - DNA, 15 bp, Homo sapiens
tctcaggccccgacg

SEQ ID NO: 2063098 - DNA, 15 bp, Homo sapiens
ctcaggccccgacga

SEQ ID NO: 2063099 - DNA, 15 bp, Homo sapiens
tcaggccccgacgaa

SEQ ID NO: 2063100 - DNA, 15 bp, Homo sapiens
caggccccgacgaac

SEQ ID NO: 2063101 - DNA, 15 bp, Homo sapiens
aggccccgacgaact

SEQ ID NO: 2063102 - DNA, 15 bp, Homo sapiens
ggccccgacgaactg

SEQ ID NO: 2063103 - DNA, 15 bp, Homo sapiens
gccccgacgaactga

SEQ ID NO: 2063104 - DNA, 15 bp, Homo sapiens
ccccgacgaactgag

SEQ ID NO: 2063105 - DNA, 15 bp, Homo sapiens
cccgacgaactgagc

SEQ ID NO: 2063106 - DNA, 15 bp, Homo sapiens
ccgacgaactgagca

SEQ ID NO: 2063107 - DNA, 15 bp, Homo sapiens
cgacgaactgagcat

SEQ ID NO: 2063108 - DNA, 15 bp, Homo sapiens
gacgaactgagcatt

SEQ ID NO: 2063109 - DNA, 15 bp, Homo sapiens
acgaactgagcattg

SEQ ID NO: 2063110 - DNA, 15 bp, Homo sapiens
cgaactgagcattga

SEQ ID NO: 2063111 - DNA, 15 bp, Homo sapiens
gaactgagcattgat

SEQ ID NO: 2063112 - DNA, 15 bp, Homo sapiens
aactgagcattgatc

SEQ ID NO: 2063113 - DNA, 15 bp, Homo sapiens
actgagcattgatca

SEQ ID NO: 2063114 - DNA, 15 bp, Homo sapiens
ctgagcattgatcac

SEQ ID NO: 2063115 - DNA, 15 bp, Homo sapiens
tgagcattgatcact

SEQ ID NO: 2063116 - DNA, 15 bp, Homo sapiens
gagcattgatcactg

SEQ ID NO: 2063117 - DNA, 15 bp, Homo sapiens
agcattgatcactgt

SEQ ID NO: 2063118 - DNA, 15 bp, Homo sapiens
gcattgatcactgtg

SEQ ID NO: 2063119 - DNA, 15 bp, Homo sapiens
cattgatcactgtgg

SEQ ID NO: 2063120 - DNA, 15 bp, Homo sapiens
attgatcactgtggt

SEQ ID NO: 2063121 - DNA, 15 bp, Homo sapiens
ttgatcactgtggtg

SEQ ID NO: 2063122 - DNA, 15 bp, Homo sapiens
tgatcactgtggtgg

SEQ ID NO: 2063123 - DNA, 15 bp, Homo sapiens
gatcactgtggtggc

SEQ ID NO: 2063124 - DNA, 15 bp, Homo sapiens
atcactgtggtggct

SEQ ID NO: 2063125 - DNA, 15 bp, Homo sapiens
tcactgtggtggcta

SEQ ID NO: 2063126 - DNA, 15 bp, Homo sapiens
cactgtggtggctaa

SEQ ID NO: 2063127 - DNA, 15 bp, Homo sapiens
actgtggtggctaag

SEQ ID NO: 2063128 - DNA, 15 bp, Homo sapiens
ctgtggtggctaagc

SEQ ID NO: 2063129 - DNA, 15 bp, Homo sapiens
tgtggtggctaagca

SEQ ID NO: 2063130 - DNA, 15 bp, Homo sapiens
gtggtggctaagcaa

SEQ ID NO: 2063131 - DNA, 15 bp, Homo sapiens
tggtggctaagcaag

SEQ ID NO: 2063132 - DNA, 15 bp, Homo sapiens
ggtggctaagcaagg

SEQ ID NO: 2063133 - DNA, 15 bp, Homo sapiens
gtggctaagcaagga

SEQ ID NO: 2063134 - DNA, 15 bp, Homo sapiens
tggctaagcaaggag

SEQ ID NO: 2063135 - DNA, 15 bp, Homo sapiens
ggctaagcaaggagg

SEQ ID NO: 2063136 - DNA, 15 bp, Homo sapiens
gctaagcaaggaggg

SEQ ID NO: 2063137 - DNA, 15 bp, Homo sapiens
ctaagcaaggagggg

SEQ ID NO: 2063138 - DNA, 15 bp, Homo sapiens
taagcaaggagggga

SEQ ID NO: 2063139 - DNA, 15 bp, Homo sapiens
aagcaaggaggggag

SEQ ID NO: 2063140 - DNA, 15 bp, Homo sapiens
agcaaggaggggagg

SEQ ID NO: 2063141 - DNA, 15 bp, Homo sapiens
gcaaggaggggaggc

SEQ ID NO: 2063142 - DNA, 15 bp, Homo sapiens
caaggaggggaggcg

SEQ ID NO: 2063143 - DNA, 15 bp, Homo sapiens
aaggaggggaggcga

SEQ ID NO: 2063144 - DNA, 15 bp, Homo sapiens
aggaggggaggcgac

SEQ ID NO: 2063145 - DNA, 15 bp, Homo sapiens
ggaggggaggcgacg

SEQ ID NO: 2063146 - DNA, 15 bp, Homo sapiens
gaggggaggcgacgc

SEQ ID NO: 2063147 - DNA, 15 bp, Homo sapiens
aggggaggcgacgcc

SEQ ID NO: 2063148 - DNA, 15 bp, Homo sapiens
ggggaggcgacgccg

SEQ ID NO: 2063149 - DNA, 15 bp, Homo sapiens
gggaggcgacgccgg

SEQ ID NO: 2063150 - DNA, 15 bp, Homo sapiens
ggaggcgacgccggg

SEQ ID NO: 2063151 - DNA, 15 bp, Homo sapiens
gaggcgacgccgggc

SEQ ID NO: 2063152 - DNA, 15 bp, Homo sapiens
aggcgacgccgggct

SEQ ID NO: 2063153 - DNA, 15 bp, Homo sapiens
ggcgacgccgggctt

SEQ ID NO: 2063154 - DNA, 15 bp, Homo sapiens
gcgacgccgggctta

SEQ ID NO: 2063155 - DNA, 15 bp, Homo sapiens
cgacgccgggcttaa

SEQ ID NO: 2063156 - DNA, 15 bp, Homo sapiens
gacgccgggcttaag

SEQ ID NO: 2063157 - DNA, 15 bp, Homo sapiens
acgccgggcttaagc

SEQ ID NO: 2063158 - DNA, 15 bp, Homo sapiens
cgccgggcttaagcg

SEQ ID NO: 2063159 - DNA, 15 bp, Homo sapiens
gccgggcttaagcga

SEQ ID NO: 2063160 - DNA, 15 bp, Homo sapiens
ccgggcttaagcgaa

SEQ ID NO: 2063161 - DNA, 15 bp, Homo sapiens
cgggcttaagcgaac

SEQ ID NO: 2063162 - DNA, 15 bp, Homo sapiens
gggcttaagcgaacc

SEQ ID NO: 2063163 - DNA, 15 bp, Homo sapiens
ggcttaagcgaacca

SEQ ID NO: 2063164 - DNA, 15 bp, Homo sapiens
gcttaagcgaaccac

SEQ ID NO: 2063165 - DNA, 15 bp, Homo sapiens
cttaagcgaaccaca

SEQ ID NO: 2063166 - DNA, 15 bp, Homo sapiens
ttaagcgaaccacag

SEQ ID NO: 2063167 - DNA, 15 bp, Homo sapiens
taagcgaaccacaga

SEQ ID NO: 2063168 - DNA, 15 bp, Homo sapiens
aagcgaaccacagag

SEQ ID NO: 2063169 - DNA, 15 bp, Homo sapiens
agcgaaccacagagg

SEQ ID NO: 2063170 - DNA, 15 bp, Homo sapiens
gcgaaccacagagga

SEQ ID NO: 2063171 - DNA, 15 bp, Homo sapiens
cgaaccacagaggag

SEQ ID NO: 2063172 - DNA, 15 bp, Homo sapiens
gaaccacagaggaga

SEQ ID NO: 2063173 - DNA, 15 bp, Homo sapiens
aaccacagaggagaa

SEQ ID NO: 2063174 - DNA, 15 bp, Homo sapiens
accacagaggagaac

SEQ ID NO: 2063175 - DNA, 15 bp, Homo sapiens
ccacagaggagaact

SEQ ID NO: 2063176 - DNA, 15 bp, Homo sapiens
cacagaggagaactg

SEQ ID NO: 2063177 - DNA, 15 bp, Homo sapiens
acagaggagaactgg

SEQ ID NO: 2063178 - DNA, 15 bp, Homo sapiens
cagaggagaactggc

SEQ ID NO: 2063179 - DNA, 15 bp, Homo sapiens
agaggagaactggca

SEQ ID NO: 2063180 - DNA, 15 bp, Homo sapiens
gaggagaactggcaa

SEQ ID NO: 2063181 - DNA, 15 bp, Homo sapiens
aggagaactggcaac

SEQ ID NO: 2063182 - DNA, 15 bp, Homo sapiens
ggagaactggcaacg

SEQ ID NO: 2063183 - DNA, 15 bp, Homo sapiens
gagaactggcaacgc

SEQ ID NO: 2063184 - DNA, 15 bp, Homo sapiens
agaactggcaacgct

SEQ ID NO: 2063185 - DNA, 15 bp, Homo sapiens
gaactggcaacgctg

SEQ ID NO: 2063186 - DNA, 15 bp, Homo sapiens
aactggcaacgctga

SEQ ID NO: 2063187 - DNA, 15 bp, Homo sapiens
actggcaacgctgaa

SEQ ID NO: 2063188 - DNA, 15 bp, Homo sapiens
ctggcaacgctgaat

SEQ ID NO: 2063189 - DNA, 15 bp, Homo sapiens
tggcaacgctgaata

SEQ ID NO: 2063190 - DNA, 15 bp, Homo sapiens
ggcaacgctgaatac

SEQ ID NO: 2063191 - DNA, 15 bp, Homo sapiens
gcaacgctgaataca

SEQ ID NO: 2063192 - DNA, 15 bp, Homo sapiens
caacgctgaatacag

SEQ ID NO: 2063193 - DNA, 15 bp, Homo sapiens
aacgctgaatacaga

SEQ ID NO: 2063194 - DNA, 15 bp, Homo sapiens
acgctgaatacagac

SEQ ID NO: 2063195 - DNA, 15 bp, Homo sapiens
cgctgaatacagacc

SEQ ID NO: 2063196 - DNA, 15 bp, Homo sapiens
gctgaatacagacct

SEQ ID NO: 2063197 - DNA, 15 bp, Homo sapiens
ctgaatacagacctt

SEQ ID NO: 2063198 - DNA, 15 bp, Homo sapiens
tgaatacagaccttg

SEQ ID NO: 2063199 - DNA, 15 bp, Homo sapiens
gaatacagaccttgt

SEQ ID NO: 2063200 - DNA, 15 bp, Homo sapiens
aatacagaccttgtc

SEQ ID NO: 2063201 - DNA, 15 bp, Homo sapiens
atacagaccttgtct

SEQ ID NO: 2063202 - DNA, 15 bp, Homo sapiens
tacagaccttgtctg

SEQ ID NO: 2063203 - DNA, 15 bp, Homo sapiens
acagaccttgtctgc

SEQ ID NO: 2063204 - DNA, 15 bp, Homo sapiens
cagaccttgtctgca

SEQ ID NO: 2063205 - DNA, 15 bp, Homo sapiens
agaccttgtctgcag

SEQ ID NO: 2063206 - DNA, 15 bp, Homo sapiens
gaccttgtctgcagg

SEQ ID NO: 2063207 - DNA, 15 bp, Homo sapiens
accttgtctgcaggc

SEQ ID NO: 2063208 - DNA, 15 bp, Homo sapiens
ccttgtctgcaggcg

SEQ ID NO: 2063209 - DNA, 15 bp, Homo sapiens
cttgtctgcaggcgc

SEQ ID NO: 2063210 - DNA, 15 bp, Homo sapiens
ttgtctgcaggcgcg

SEQ ID NO: 2063211 - DNA, 15 bp, Homo sapiens
tgtctgcaggcgcga

SEQ ID NO: 2063212 - DNA, 15 bp, Homo sapiens
gtctgcaggcgcgac

SEQ ID NO: 2063213 - DNA, 15 bp, Homo sapiens
tctgcaggcgcgacc

SEQ ID NO: 2063214 - DNA, 15 bp, Homo sapiens
ctgcaggcgcgacct

SEQ ID NO: 2063215 - DNA, 15 bp, Homo sapiens
tgcaggcgcgacctg

SEQ ID NO: 2063216 - DNA, 15 bp, Homo sapiens
gcaggcgcgacctgg

SEQ ID NO: 2063217 - DNA, 15 bp, Homo sapiens
caggcgcgacctggc

SEQ ID NO: 2063218 - DNA, 15 bp, Homo sapiens
aggcgcgacctggcc

SEQ ID NO: 2063219 - DNA, 15 bp, Homo sapiens
ggcgcgacctggccg

SEQ ID NO: 2063220 - DNA, 15 bp, Homo sapiens
gcgcgacctggccgg

SEQ ID NO: 2063221 - DNA, 15 bp, Homo sapiens
cgcgacctggccggg

SEQ ID NO: 2063222 - DNA, 15 bp, Homo sapiens
gcgacctggccgggc

SEQ ID NO: 2063223 - DNA, 15 bp, Homo sapiens
cgacctggccgggcc

SEQ ID NO: 2063224 - DNA, 15 bp, Homo sapiens
gacctggccgggcct

SEQ ID NO: 2063225 - DNA, 15 bp, Homo sapiens
acctggccgggcctg

SEQ ID NO: 2063226 - DNA, 15 bp, Homo sapiens
cctggccgggcctga

SEQ ID NO: 2063227 - DNA, 15 bp, Homo sapiens
ctggccgggcctgag

SEQ ID NO: 2063228 - DNA, 15 bp, Homo sapiens
tggccgggcctgagt

SEQ ID NO: 2063229 - DNA, 15 bp, Homo sapiens
ggccgggcctgagtc

SEQ ID NO: 2063230 - DNA, 15 bp, Homo sapiens
gccgggcctgagtcc

SEQ ID NO: 2063231 - DNA, 15 bp, Homo sapiens
ccgggcctgagtccc

SEQ ID NO: 2063232 - DNA, 15 bp, Homo sapiens
cgggcctgagtcccg

SEQ ID NO: 2063233 - DNA, 15 bp, Homo sapiens
gggcctgagtcccga

SEQ ID NO: 2063234 - DNA, 15 bp, Homo sapiens
ggcctgagtcccgaa

SEQ ID NO: 2063235 - DNA, 15 bp, Homo sapiens
gcctgagtcccgaat

SEQ ID NO: 2063236 - DNA, 15 bp, Homo sapiens
cctgagtcccgaatg

SEQ ID NO: 2063237 - DNA, 15 bp, Homo sapiens
ctgagtcccgaatgg

SEQ ID NO: 2063238 - DNA, 15 bp, Homo sapiens
tgagtcccgaatggg

SEQ ID NO: 2063239 - DNA, 15 bp, Homo sapiens
gagtcccgaatgggg

SEQ ID NO: 2063240 - DNA, 15 bp, Homo sapiens
agtcccgaatggggt

SEQ ID NO: 2063241 - DNA, 15 bp, Homo sapiens
gtcccgaatggggtc

SEQ ID NO: 2063242 - DNA, 15 bp, Homo sapiens
tcccgaatggggtct

SEQ ID NO: 2063243 - DNA, 15 bp, Homo sapiens
cccgaatggggtcta

SEQ ID NO: 2063244 - DNA, 15 bp, Homo sapiens
ccgaatggggtctaa

SEQ ID NO: 2063245 - DNA, 15 bp, Homo sapiens
cgaatggggtctaat

SEQ ID NO: 2063246 - DNA, 15 bp, Homo sapiens
gaatggggtctaatt

SEQ ID NO: 2063247 - DNA, 15 bp, Homo sapiens
aatggggtctaattg

SEQ ID NO: 2063248 - DNA, 15 bp, Homo sapiens
atggggtctaattgc

SEQ ID NO: 2063249 - DNA, 15 bp, Homo sapiens
tggggtctaattgcg

SEQ ID NO: 2063250 - DNA, 15 bp, Homo sapiens
ggggtctaattgcga

SEQ ID NO: 2063251 - DNA, 15 bp, Homo sapiens
gggtctaattgcgaa

SEQ ID NO: 2063252 - DNA, 15 bp, Homo sapiens
ggtctaattgcgaag

SEQ ID NO: 2063253 - DNA, 15 bp, Homo sapiens
gtctaattgcgaagg

SEQ ID NO: 2063254 - DNA, 15 bp, Homo sapiens
tctaattgcgaaggc

SEQ ID NO: 2063255 - DNA, 15 bp, Homo sapiens
ctaattgcgaaggcg

SEQ ID NO: 2063256 - DNA, 15 bp, Homo sapiens
taattgcgaaggcgg

SEQ ID NO: 2063257 - DNA, 15 bp, Homo sapiens
aattgcgaaggcggg

SEQ ID NO: 2063258 - DNA, 15 bp, Homo sapiens
attgcgaaggcgggg

SEQ ID NO: 2063259 - DNA, 15 bp, Homo sapiens
ttgcgaaggcggggt

SEQ ID NO: 2063260 - DNA, 15 bp, Homo sapiens
tgcgaaggcggggtg

SEQ ID NO: 2063261 - DNA, 15 bp, Homo sapiens
gcgaaggcggggtgg

SEQ ID NO: 2063262 - DNA, 15 bp, Homo sapiens
cgaaggcggggtggg

SEQ ID NO: 2063263 - DNA, 15 bp, Homo sapiens
gaaggcggggtgggt

SEQ ID NO: 2063264 - DNA, 15 bp, Homo sapiens
aaggcggggtgggtt

SEQ ID NO: 2063265 - DNA, 15 bp, Homo sapiens
aggcggggtgggttt

SEQ ID NO: 2063266 - DNA, 15 bp, Homo sapiens
ggcggggtgggtttc

SEQ ID NO: 2063267 - DNA, 15 bp, Homo sapiens
gcggggtgggtttcc

SEQ ID NO: 2063268 - DNA, 15 bp, Homo sapiens
cggggtgggtttccc

SEQ ID NO: 2063269 - DNA, 15 bp, Homo sapiens
ggggtgggtttccca

SEQ ID NO: 2063270 - DNA, 15 bp, Homo sapiens
gggtgggtttcccag

SEQ ID NO: 2063271 - DNA, 15 bp, Homo sapiens
ggtgggtttcccagt

SEQ ID NO: 2063272 - DNA, 15 bp, Homo sapiens
gtgggtttcccagtc

SEQ ID NO: 2063273 - DNA, 15 bp, Homo sapiens
tgggtttcccagtca

SEQ ID NO: 2063274 - DNA, 15 bp, Homo sapiens
gggtttcccagtcac

SEQ ID NO: 2063275 - DNA, 15 bp, Homo sapiens
ggtttcccagtcacc

SEQ ID NO: 2063276 - DNA, 15 bp, Homo sapiens
gtttcccagtcaccc

SEQ ID NO: 2063277 - DNA, 15 bp, Homo sapiens
tttcccagtcaccca

SEQ ID NO: 2063278 - DNA, 15 bp, Homo sapiens
ttcccagtcacccag

SEQ ID NO: 2063279 - DNA, 15 bp, Homo sapiens
tcccagtcacccagc

SEQ ID NO: 2063280 - DNA, 15 bp, Homo sapiens
cccagtcacccagct

SEQ ID NO: 2063281 - DNA, 15 bp, Homo sapiens
ccagtcacccagctt

SEQ ID NO: 2063282 - DNA, 15 bp, Homo sapiens
cagtcacccagcttc

SEQ ID NO: 2063283 - DNA, 15 bp, Homo sapiens
agtcacccagcttct

SEQ ID NO: 2063284 - DNA, 15 bp, Homo sapiens
gtcacccagcttctt

SEQ ID NO: 2063285 - DNA, 15 bp, Homo sapiens
tcacccagcttcttt

SEQ ID NO: 2063286 - DNA, 15 bp, Homo sapiens
cacccagcttctttc

SEQ ID NO: 2063287 - DNA, 15 bp, Homo sapiens
acccagcttctttct

SEQ ID NO: 2063288 - DNA, 15 bp, Homo sapiens
cccagcttctttctc

SEQ ID NO: 2063289 - DNA, 15 bp, Homo sapiens
ccagcttctttctct

SEQ ID NO: 2063290 - DNA, 15 bp, Homo sapiens
cagcttctttctctc

SEQ ID NO: 2063291 - DNA, 15 bp, Homo sapiens
agcttctttctctca

SEQ ID NO: 2063292 - DNA, 15 bp, Homo sapiens
gcttctttctctcac

SEQ ID NO: 2063293 - DNA, 15 bp, Homo sapiens
cttctttctctcact

SEQ ID NO: 2063294 - DNA, 15 bp, Homo sapiens
ttctttctctcactc

SEQ ID NO: 2063295 - DNA, 15 bp, Homo sapiens
tctttctctcactcg

SEQ ID NO: 2063296 - DNA, 15 bp, Homo sapiens
ctttctctcactcgc

SEQ ID NO: 2063297 - DNA, 15 bp, Homo sapiens
tttctctcactcgcc

SEQ ID NO: 2063298 - DNA, 15 bp, Homo sapiens
ttctctcactcgcca

SEQ ID NO: 2063299 - DNA, 15 bp, Homo sapiens
tctctcactcgccat

SEQ ID NO: 2063300 - DNA, 15 bp, Homo sapiens
ctctcactcgccatt

SEQ ID NO: 2063301 - DNA, 15 bp, Homo sapiens
tctcactcgccatta

SEQ ID NO: 2063302 - DNA, 15 bp, Homo sapiens
ctcactcgccattat

SEQ ID NO: 2063303 - DNA, 15 bp, Homo sapiens
tcactcgccattatt

SEQ ID NO: 2063304 - DNA, 15 bp, Homo sapiens
cactcgccattattt

SEQ ID NO: 2063305 - DNA, 15 bp, Homo sapiens
actcgccattatttc

SEQ ID NO: 2063306 - DNA, 15 bp, Homo sapiens
ctcgccattatttca

SEQ ID NO: 2063307 - DNA, 15 bp, Homo sapiens
tcgccattatttcat

SEQ ID NO: 2063308 - DNA, 15 bp, Homo sapiens
cgccattatttcata

SEQ ID NO: 2063309 - DNA, 15 bp, Homo sapiens
gccattatttcatag

SEQ ID NO: 2063310 - DNA, 15 bp, Homo sapiens
ccattatttcatagt

SEQ ID NO: 2063311 - DNA, 15 bp, Homo sapiens
cattatttcatagtt

SEQ ID NO: 2063312 - DNA, 15 bp, Homo sapiens
attatttcatagttg

SEQ ID NO: 2063313 - DNA, 15 bp, Homo sapiens
ttatttcatagttgt

SEQ ID NO: 2063314 - DNA, 15 bp, Homo sapiens
tatttcatagttgtt

SEQ ID NO: 2063315 - DNA, 15 bp, Homo sapiens
atttcatagttgttt

SEQ ID NO: 2063316 - DNA, 15 bp, Homo sapiens
tttcatagttgtttg

SEQ ID NO: 2063317 - DNA, 15 bp, Homo sapiens
ttcatagttgtttgt

SEQ ID NO: 2063318 - DNA, 15 bp, Homo sapiens
tcatagttgtttgta

SEQ ID NO: 2063319 - DNA, 15 bp, Homo sapiens
catagttgtttgtaa

SEQ ID NO: 2063320 - DNA, 15 bp, Homo sapiens
atagttgtttgtaag

SEQ ID NO: 2063321 - DNA, 15 bp, Homo sapiens
tagttgtttgtaagt

SEQ ID NO: 2063322 - DNA, 15 bp, Homo sapiens
agttgtttgtaagtt

SEQ ID NO: 2063323 - DNA, 15 bp, Homo sapiens
gttgtttgtaagttt

SEQ ID NO: 2063324 - DNA, 15 bp, Homo sapiens
ttgtttgtaagttta

SEQ ID NO: 2063325 - DNA, 15 bp, Homo sapiens
tgtttgtaagtttaa

SEQ ID NO: 2063326 - DNA, 15 bp, Homo sapiens
gtttgtaagtttaag

SEQ ID NO: 2063327 - DNA, 15 bp, Homo sapiens
tttgtaagtttaagg

SEQ ID NO: 2063328 - DNA, 15 bp, Homo sapiens
ttgtaagtttaagga

SEQ ID NO: 2063329 - DNA, 15 bp, Homo sapiens
tgtaagtttaaggaa

SEQ ID NO: 2063330 - DNA, 15 bp, Homo sapiens
gtaagtttaaggaac

SEQ ID NO: 2063331 - DNA, 15 bp, Homo sapiens
taagtttaaggaaca

SEQ ID NO: 2063332 - DNA, 15 bp, Homo sapiens
aagtttaaggaacac

SEQ ID NO: 2063333 - DNA, 15 bp, Homo sapiens
agtttaaggaacacc

SEQ ID NO: 2063334 - DNA, 15 bp, Homo sapiens
gtttaaggaacacca

SEQ ID NO: 2063335 - DNA, 15 bp, Homo sapiens
tttaaggaacaccaa

SEQ ID NO: 2063336 - DNA, 15 bp, Homo sapiens
ttaaggaacaccaag

SEQ ID NO: 2063337 - DNA, 15 bp, Homo sapiens
taaggaacaccaagt

SEQ ID NO: 2063338 - DNA, 15 bp, Homo sapiens
aaggaacaccaagtg

SEQ ID NO: 2063339 - DNA, 15 bp, Homo sapiens
aggaacaccaagtgt

SEQ ID NO: 2063340 - DNA, 15 bp, Homo sapiens
ggaacaccaagtgta

SEQ ID NO: 2063341 - DNA, 15 bp, Homo sapiens
gaacaccaagtgtag

SEQ ID NO: 2063342 - DNA, 15 bp, Homo sapiens
aacaccaagtgtaga

SEQ ID NO: 2063343 - DNA, 15 bp, Homo sapiens
acaccaagtgtagaa

SEQ ID NO: 2063344 - DNA, 15 bp, Homo sapiens
caccaagtgtagaat

SEQ ID NO: 2063345 - DNA, 15 bp, Homo sapiens
accaagtgtagaatg

SEQ ID NO: 2063346 - DNA, 15 bp, Homo sapiens
ccaagtgtagaatgt

SEQ ID NO: 2063347 - DNA, 15 bp, Homo sapiens
caagtgtagaatgtt

SEQ ID NO: 2063348 - DNA, 15 bp, Homo sapiens
aagtgtagaatgttg

SEQ ID NO: 2063349 - DNA, 15 bp, Homo sapiens
agtgtagaatgttgt

SEQ ID NO: 2063350 - DNA, 15 bp, Homo sapiens
gtgtagaatgttgta

SEQ ID NO: 2063351 - DNA, 15 bp, Homo sapiens
tgtagaatgttgtac

SEQ ID NO: 2063352 - DNA, 15 bp, Homo sapiens
gtagaatgttgtaca

SEQ ID NO: 2063353 - DNA, 15 bp, Homo sapiens
tagaatgttgtacat

SEQ ID NO: 2063354 - DNA, 15 bp, Homo sapiens
agaatgttgtacatc

SEQ ID NO: 2063355 - DNA, 15 bp, Homo sapiens
gaatgttgtacatct

SEQ ID NO: 2063356 - DNA, 15 bp, Homo sapiens
aatgttgtacatctc

SEQ ID NO: 2063357 - DNA, 15 bp, Homo sapiens
atgttgtacatctct

SEQ ID NO: 2063358 - DNA, 15 bp, Homo sapiens
tgttgtacatctctt

SEQ ID NO: 2063359 - DNA, 15 bp, Homo sapiens
gttgtacatctcttc

SEQ ID NO: 2063360 - DNA, 15 bp, Homo sapiens
ttgtacatctcttcc

SEQ ID NO: 2063361 - DNA, 15 bp, Homo sapiens
tgtacatctcttcca

SEQ ID NO: 2063362 - DNA, 15 bp, Homo sapiens
gtacatctcttccag

SEQ ID NO: 2063363 - DNA, 15 bp, Homo sapiens
tacatctcttccagt

SEQ ID NO: 2063364 - DNA, 15 bp, Homo sapiens
acatctcttccagtc

SEQ ID NO: 2063365 - DNA, 15 bp, Homo sapiens
catctcttccagtct

SEQ ID NO: 2063366 - DNA, 15 bp, Homo sapiens
atctcttccagtctc

SEQ ID NO: 2063367 - DNA, 15 bp, Homo sapiens
tctcttccagtctca

SEQ ID NO: 2063368 - DNA, 15 bp, Homo sapiens
ctcttccagtctcaa

SEQ ID NO: 2063369 - DNA, 15 bp, Homo sapiens
tcttccagtctcaac

SEQ ID NO: 2063370 - DNA, 15 bp, Homo sapiens
cttccagtctcaacg

SEQ ID NO: 2063371 - DNA, 15 bp, Homo sapiens
ttccagtctcaacgc

SEQ ID NO: 2063372 - DNA, 15 bp, Homo sapiens
tccagtctcaacgcc

SEQ ID NO: 2063373 - DNA, 15 bp, Homo sapiens
ccagtctcaacgcca

SEQ ID NO: 2063374 - DNA, 15 bp, Homo sapiens
cagtctcaacgccat

SEQ ID NO: 2063375 - DNA, 15 bp, Homo sapiens
agtctcaacgccatt

SEQ ID NO: 2063376 - DNA, 15 bp, Homo sapiens
gtctcaacgccattt

SEQ ID NO: 2063377 - DNA, 15 bp, Homo sapiens
tctcaacgccattta

SEQ ID NO: 2063378 - DNA, 15 bp, Homo sapiens
ctcaacgccatttag

SEQ ID NO: 2063379 - DNA, 15 bp, Homo sapiens
tcaacgccatttaga

SEQ ID NO: 2063380 - DNA, 15 bp, Homo sapiens
caacgccatttagaa

SEQ ID NO: 2063381 - DNA, 15 bp, Homo sapiens
aacgccatttagaaa

SEQ ID NO: 2063382 - DNA, 15 bp, Homo sapiens
acgccatttagaaat

SEQ ID NO: 2063383 - DNA, 15 bp, Homo sapiens
cgccatttagaaatg

SEQ ID NO: 2063384 - DNA, 15 bp, Homo sapiens
gccatttagaaatgg

SEQ ID NO: 2063385 - DNA, 15 bp, Homo sapiens
ccatttagaaatgga

SEQ ID NO: 2063386 - DNA, 15 bp, Homo sapiens
catttagaaatggag

SEQ ID NO: 2063387 - DNA, 15 bp, Homo sapiens
atttagaaatggaga

SEQ ID NO: 2063388 - DNA, 15 bp, Homo sapiens
tttagaaatggagat

SEQ ID NO: 2063389 - DNA, 15 bp, Homo sapiens
ttagaaatggagatc

SEQ ID NO: 2063390 - DNA, 15 bp, Homo sapiens
tagaaatggagatca

SEQ ID NO: 2063391 - DNA, 15 bp, Homo sapiens
agaaatggagatcaa

SEQ ID NO: 2063392 - DNA, 15 bp, Homo sapiens
gaaatggagatcaat

SEQ ID NO: 2063393 - DNA, 15 bp, Homo sapiens
aaatggagatcaatc

SEQ ID NO: 2063394 - DNA, 15 bp, Homo sapiens
aatggagatcaatct

SEQ ID NO: 2063395 - DNA, 15 bp, Homo sapiens
atggagatcaatctt

SEQ ID NO: 2063396 - DNA, 15 bp, Homo sapiens
tggagatcaatcttc

SEQ ID NO: 2063397 - DNA, 15 bp, Homo sapiens
ggagatcaatcttca

SEQ ID NO: 2063398 - DNA, 15 bp, Homo sapiens
gagatcaatcttcac

SEQ ID NO: 2063399 - DNA, 15 bp, Homo sapiens
agatcaatcttcaca

SEQ ID NO: 2063400 - DNA, 15 bp, Homo sapiens
gatcaatcttcacaa

SEQ ID NO: 2063401 - DNA, 15 bp, Homo sapiens
atcaatcttcacaag

SEQ ID NO: 2063402 - DNA, 15 bp, Homo sapiens
tcaatcttcacaagg

SEQ ID NO: 2063403 - DNA, 15 bp, Homo sapiens
caatcttcacaaggt

SEQ ID NO: 2063404 - DNA, 15 bp, Homo sapiens
aatcttcacaaggtt

SEQ ID NO: 2063405 - DNA, 15 bp, Homo sapiens
atcttcacaaggttt

SEQ ID NO: 2063406 - DNA, 15 bp, Homo sapiens
tcttcacaaggtttt

SEQ ID NO: 2063407 - DNA, 15 bp, Homo sapiens
cttcacaaggttttt

SEQ ID NO: 2063408 - DNA, 15 bp, Homo sapiens
ttcacaaggtttttg

SEQ ID NO: 2063409 - DNA, 15 bp, Homo sapiens
tcacaaggtttttgt

SEQ ID NO: 2063410 - DNA, 15 bp, Homo sapiens
cacaaggtttttgtg

SEQ ID NO: 2063411 - DNA, 15 bp, Homo sapiens
acaaggtttttgtga

SEQ ID NO: 2063412 - DNA, 15 bp, Homo sapiens
caaggtttttgtgag

SEQ ID NO: 2063413 - DNA, 15 bp, Homo sapiens
aaggtttttgtgaga

SEQ ID NO: 2063414 - DNA, 15 bp, Homo sapiens
aggtttttgtgagat

SEQ ID NO: 2063415 - DNA, 15 bp, Homo sapiens
ggtttttgtgagatt

SEQ ID NO: 2063416 - DNA, 15 bp, Homo sapiens
gtttttgtgagattc

SEQ ID NO: 2063417 - DNA, 15 bp, Homo sapiens
tttttgtgagattca

SEQ ID NO: 2063418 - DNA, 15 bp, Homo sapiens
ttttgtgagattcaa

SEQ ID NO: 2063419 - DNA, 15 bp, Homo sapiens
tttgtgagattcaag

SEQ ID NO: 2063420 - DNA, 15 bp, Homo sapiens
ttgtgagattcaagt

SEQ ID NO: 2063421 - DNA, 15 bp, Homo sapiens
tgtgagattcaagta

SEQ ID NO: 2063422 - DNA, 15 bp, Homo sapiens
gtgagattcaagtaa

SEQ ID NO: 2063423 - DNA, 15 bp, Homo sapiens
tgagattcaagtaag

SEQ ID NO: 2063424 - DNA, 15 bp, Homo sapiens
gagattcaagtaaga

SEQ ID NO: 2063425 - DNA, 15 bp, Homo sapiens
agattcaagtaagat

SEQ ID NO: 2063426 - DNA, 15 bp, Homo sapiens
gattcaagtaagatg

SEQ ID NO: 2063427 - DNA, 15 bp, Homo sapiens
attcaagtaagatga

SEQ ID NO: 2063428 - DNA, 15 bp, Homo sapiens
ttcaagtaagatgaa

SEQ ID NO: 2063429 - DNA, 15 bp, Homo sapiens
tcaagtaagatgaag

SEQ ID NO: 2063430 - DNA, 15 bp, Homo sapiens
caagtaagatgaagc

SEQ ID NO: 2063431 - DNA, 15 bp, Homo sapiens
aagtaagatgaagca

SEQ ID NO: 2063432 - DNA, 15 bp, Homo sapiens
agtaagatgaagcac

SEQ ID NO: 2063433 - DNA, 15 bp, Homo sapiens
gtaagatgaagcaca

SEQ ID NO: 2063434 - DNA, 15 bp, Homo sapiens
taagatgaagcacat

SEQ ID NO: 2063435 - DNA, 15 bp, Homo sapiens
aagatgaagcacatc

SEQ ID NO: 2063436 - DNA, 15 bp, Homo sapiens
agatgaagcacatca

SEQ ID NO: 2063437 - DNA, 15 bp, Homo sapiens
gatgaagcacatcaa

SEQ ID NO: 2063438 - DNA, 15 bp, Homo sapiens
atgaagcacatcaaa

SEQ ID NO: 2063439 - DNA, 15 bp, Homo sapiens
tgaagcacatcaaaa

SEQ ID NO: 2063440 - DNA, 15 bp, Homo sapiens
gaagcacatcaaaat

SEQ ID NO: 2063441 - DNA, 15 bp, Homo sapiens
aagcacatcaaaatg

SEQ ID NO: 2063442 - DNA, 15 bp, Homo sapiens
agcacatcaaaatgc

SEQ ID NO: 2063443 - DNA, 15 bp, Homo sapiens
gcacatcaaaatgct

SEQ ID NO: 2063444 - DNA, 15 bp, Homo sapiens
cacatcaaaatgctt

SEQ ID NO: 2063445 - DNA, 15 bp, Homo sapiens
acatcaaaatgcttt

SEQ ID NO: 2063446 - DNA, 15 bp, Homo sapiens
catcaaaatgctttg

SEQ ID NO: 2063447 - DNA, 15 bp, Homo sapiens
atcaaaatgctttga

SEQ ID NO: 2063448 - DNA, 15 bp, Homo sapiens
tcaaaatgctttgaa

SEQ ID NO: 2063449 - DNA, 15 bp, Homo sapiens
caaaatgctttgaaa

SEQ ID NO: 2063450 - DNA, 15 bp, Homo sapiens
aaaatgctttgaaag

SEQ ID NO: 2063451 - DNA, 15 bp, Homo sapiens
aaatgctttgaaagc

SEQ ID NO: 2063452 - DNA, 15 bp, Homo sapiens
aatgctttgaaagct

SEQ ID NO: 2063453 - DNA, 15 bp, Homo sapiens
atgctttgaaagctt

SEQ ID NO: 2063454 - DNA, 15 bp, Homo sapiens
tgctttgaaagcttt

SEQ ID NO: 2063455 - DNA, 15 bp, Homo sapiens
gctttgaaagctttg

SEQ ID NO: 2063456 - DNA, 15 bp, Homo sapiens
ctttgaaagctttga

SEQ ID NO: 2063457 - DNA, 15 bp, Homo sapiens
tttgaaagctttgaa

SEQ ID NO: 2063458 - DNA, 15 bp, Homo sapiens
ttgaaagctttgaat

SEQ ID NO: 2063459 - DNA, 15 bp, Homo sapiens
tgaaagctttgaatg

SEQ ID NO: 2063460 - DNA, 15 bp, Homo sapiens
gaaagctttgaatgt

SEQ ID NO: 2063461 - DNA, 15 bp, Homo sapiens
aaagctttgaatgtt

SEQ ID NO: 2063462 - DNA, 15 bp, Homo sapiens
aagctttgaatgttt

SEQ ID NO: 2063463 - DNA, 15 bp, Homo sapiens
agctttgaatgtttt

SEQ ID NO: 2063464 - DNA, 15 bp, Homo sapiens
gctttgaatgttttt

SEQ ID NO: 2063465 - DNA, 15 bp, Homo sapiens
ctttgaatgtttttc

SEQ ID NO: 2063466 - DNA, 15 bp, Homo sapiens
tttgaatgtttttca

SEQ ID NO: 2063467 - DNA, 15 bp, Homo sapiens
ttgaatgtttttcag

SEQ ID NO: 2063468 - DNA, 15 bp, Homo sapiens
tgaatgtttttcagc

SEQ ID NO: 2063469 - DNA, 15 bp, Homo sapiens
gaatgtttttcagct

SEQ ID NO: 2063470 - DNA, 15 bp, Homo sapiens
aatgtttttcagctc

SEQ ID NO: 2063471 - DNA, 15 bp, Homo sapiens
atgtttttcagctca

SEQ ID NO: 2063472 - DNA, 15 bp, Homo sapiens
tgtttttcagctcag

SEQ ID NO: 2063473 - DNA, 15 bp, Homo sapiens
gtttttcagctcagt

SEQ ID NO: 2063474 - DNA, 15 bp, Homo sapiens
tttttcagctcagtg

SEQ ID NO: 2063475 - DNA, 15 bp, Homo sapiens
ttttcagctcagtgc

SEQ ID NO: 2063476 - DNA, 15 bp, Homo sapiens
tttcagctcagtgcc

SEQ ID NO: 2063477 - DNA, 15 bp, Homo sapiens
ttcagctcagtgcca

SEQ ID NO: 2063478 - DNA, 15 bp, Homo sapiens
tcagctcagtgccag

SEQ ID NO: 2063479 - DNA, 15 bp, Homo sapiens
cagctcagtgccagc

SEQ ID NO: 2063480 - DNA, 15 bp, Homo sapiens
agctcagtgccagca

SEQ ID NO: 2063481 - DNA, 15 bp, Homo sapiens
gctcagtgccagcac

SEQ ID NO: 2063482 - DNA, 15 bp, Homo sapiens
ctcagtgccagcact

SEQ ID NO: 2063483 - DNA, 15 bp, Homo sapiens
tcagtgccagcactg

SEQ ID NO: 2063484 - DNA, 15 bp, Homo sapiens
cagtgccagcactgg

SEQ ID NO: 2063485 - DNA, 15 bp, Homo sapiens
agtgccagcactgga

SEQ ID NO: 2063486 - DNA, 15 bp, Homo sapiens
gtgccagcactggag

SEQ ID NO: 2063487 - DNA, 15 bp, Homo sapiens
tgccagcactggaga

SEQ ID NO: 2063488 - DNA, 15 bp, Homo sapiens
gccagcactggagat

SEQ ID NO: 2063489 - DNA, 15 bp, Homo sapiens
ccagcactggagatt

SEQ ID NO: 2063490 - DNA, 15 bp, Homo sapiens
cagcactggagattg

SEQ ID NO: 2063491 - DNA, 15 bp, Homo sapiens
agcactggagattgc

SEQ ID NO: 2063492 - DNA, 15 bp, Homo sapiens
gcactggagattgcg

SEQ ID NO: 2063493 - DNA, 15 bp, Homo sapiens
cactggagattgcgg

SEQ ID NO: 2063494 - DNA, 15 bp, Homo sapiens
actggagattgcggt

SEQ ID NO: 2063495 - DNA, 15 bp, Homo sapiens
ctggagattgcggta

SEQ ID NO: 2063496 - DNA, 15 bp, Homo sapiens
tggagattgcggtag

SEQ ID NO: 2063497 - DNA, 15 bp, Homo sapiens
ggagattgcggtagt

SEQ ID NO: 2063498 - DNA, 15 bp, Homo sapiens
gagattgcggtagtt

SEQ ID NO: 2063499 - DNA, 15 bp, Homo sapiens
agattgcggtagtta

SEQ ID NO: 2063500 - DNA, 15 bp, Homo sapiens
gattgcggtagttat

SEQ ID NO: 2063501 - DNA, 15 bp, Homo sapiens
attgcggtagttatt

SEQ ID NO: 2063502 - DNA, 15 bp, Homo sapiens
ttgcggtagttatta

SEQ ID NO: 2063503 - DNA, 15 bp, Homo sapiens
tgcggtagttattat

SEQ ID NO: 2063504 - DNA, 15 bp, Homo sapiens
gcggtagttattatc

SEQ ID NO: 2063505 - DNA, 15 bp, Homo sapiens
cggtagttattatca

SEQ ID NO: 2063506 - DNA, 15 bp, Homo sapiens
ggtagttattatcat

SEQ ID NO: 2063507 - DNA, 15 bp, Homo sapiens
gtagttattatcatg

SEQ ID NO: 2063508 - DNA, 15 bp, Homo sapiens
tagttattatcatga

SEQ ID NO: 2063509 - DNA, 15 bp, Homo sapiens
agttattatcatgac

SEQ ID NO: 2063510 - DNA, 15 bp, Homo sapiens
gttattatcatgact

SEQ ID NO: 2063511 - DNA, 15 bp, Homo sapiens
ttattatcatgacta

SEQ ID NO: 2063512 - DNA, 15 bp, Homo sapiens
tattatcatgactat

SEQ ID NO: 2063513 - DNA, 15 bp, Homo sapiens
attatcatgactatc

SEQ ID NO: 2063514 - DNA, 15 bp, Homo sapiens
ttatcatgactatcc

SEQ ID NO: 2063515 - DNA, 15 bp, Homo sapiens
tatcatgactatccc

SEQ ID NO: 2063516 - DNA, 15 bp, Homo sapiens
atcatgactatcccc

SEQ ID NO: 2063517 - DNA, 15 bp, Homo sapiens
tcatgactatcccca

SEQ ID NO: 2063518 - DNA, 15 bp, Homo sapiens
catgactatccccac

SEQ ID NO: 2063519 - DNA, 15 bp, Homo sapiens
atgactatccccacc

SEQ ID NO: 2063520 - DNA, 15 bp, Homo sapiens
tgactatccccaccc

SEQ ID NO: 2063521 - DNA, 15 bp, Homo sapiens
gactatccccacccc

SEQ ID NO: 2063522 - DNA, 15 bp, Homo sapiens
actatccccaccccc

SEQ ID NO: 2063523 - DNA, 15 bp, Homo sapiens
ctatccccaccccct

SEQ ID NO: 2063524 - DNA, 15 bp, Homo sapiens
tatccccaccccctc

SEQ ID NO: 2063525 - DNA, 15 bp, Homo sapiens
atccccaccccctct

SEQ ID NO: 2063526 - DNA, 15 bp, Homo sapiens
tccccaccccctctt

SEQ ID NO: 2063527 - DNA, 15 bp, Homo sapiens
ccccaccccctctta

SEQ ID NO: 2063528 - DNA, 15 bp, Homo sapiens
cccaccccctcttag

SEQ ID NO: 2063529 - DNA, 15 bp, Homo sapiens
ccaccccctcttagg

SEQ ID NO: 2063530 - DNA, 15 bp, Homo sapiens
caccccctcttaggt

SEQ ID NO: 2063531 - DNA, 15 bp, Homo sapiens
accccctcttaggtc

SEQ ID NO: 2063532 - DNA, 15 bp, Homo sapiens
ccccctcttaggtcc

SEQ ID NO: 2063533 - DNA, 15 bp, Homo sapiens
cccctcttaggtccc

SEQ ID NO: 2063534 - DNA, 15 bp, Homo sapiens
ccctcttaggtccca

SEQ ID NO: 2063535 - DNA, 15 bp, Homo sapiens
cctcttaggtcccaa

SEQ ID NO: 2063536 - DNA, 15 bp, Homo sapiens
ctcttaggtcccaag

SEQ ID NO: 2063537 - DNA, 15 bp, Homo sapiens
tcttaggtcccaaga

SEQ ID NO: 2063538 - DNA, 15 bp, Homo sapiens
cttaggtcccaagac

SEQ ID NO: 2063539 - DNA, 15 bp, Homo sapiens
ttaggtcccaagacc

SEQ ID NO: 2063540 - DNA, 15 bp, Homo sapiens
taggtcccaagacct

SEQ ID NO: 2063541 - DNA, 15 bp, Homo sapiens
aggtcccaagacctg

SEQ ID NO: 2063542 - DNA, 15 bp, Homo sapiens
ggtcccaagacctga

SEQ ID NO: 2063543 - DNA, 15 bp, Homo sapiens
gtcccaagacctgag

SEQ ID NO: 2063544 - DNA, 15 bp, Homo sapiens
tcccaagacctgagt

SEQ ID NO: 2063545 - DNA, 15 bp, Homo sapiens
cccaagacctgagta

SEQ ID NO: 2063546 - DNA, 15 bp, Homo sapiens
ccaagacctgagtaa

SEQ ID NO: 2063547 - DNA, 15 bp, Homo sapiens
caagacctgagtaaa

SEQ ID NO: 2063548 - DNA, 15 bp, Homo sapiens
aagacctgagtaaaa

SEQ ID NO: 2063549 - DNA, 15 bp, Homo sapiens
agacctgagtaaaag

SEQ ID NO: 2063550 - DNA, 15 bp, Homo sapiens
gacctgagtaaaagg

SEQ ID NO: 2063551 - DNA, 15 bp, Homo sapiens
acctgagtaaaagga

SEQ ID NO: 2063552 - DNA, 15 bp, Homo sapiens
cctgagtaaaaggaa

SEQ ID NO: 2063553 - DNA, 15 bp, Homo sapiens
ctgagtaaaaggaag

SEQ ID NO: 2063554 - DNA, 15 bp, Homo sapiens
tgagtaaaaggaaga

SEQ ID NO: 2063555 - DNA, 15 bp, Homo sapiens
gagtaaaaggaagag

SEQ ID NO: 2063556 - DNA, 15 bp, Homo sapiens
agtaaaaggaagagt

SEQ ID NO: 2063557 - DNA, 15 bp, Homo sapiens
gtaaaaggaagagtt

SEQ ID NO: 2063558 - DNA, 15 bp, Homo sapiens
taaaaggaagagttg

SEQ ID NO: 2063559 - DNA, 15 bp, Homo sapiens
aaaaggaagagttgg

SEQ ID NO: 2063560 - DNA, 15 bp, Homo sapiens
aaaggaagagttggg

SEQ ID NO: 2063561 - DNA, 15 bp, Homo sapiens
aaggaagagttgggt

SEQ ID NO: 2063562 - DNA, 15 bp, Homo sapiens
aggaagagttgggtg

SEQ ID NO: 2063563 - DNA, 15 bp, Homo sapiens
ggaagagttgggtga

SEQ ID NO: 2063564 - DNA, 15 bp, Homo sapiens
gaagagttgggtgaa

SEQ ID NO: 2063565 - DNA, 15 bp, Homo sapiens
aagagttgggtgaat

SEQ ID NO: 2063566 - DNA, 15 bp, Homo sapiens
agagttgggtgaatc

SEQ ID NO: 2063567 - DNA, 15 bp, Homo sapiens
gagttgggtgaatct

SEQ ID NO: 2063568 - DNA, 15 bp, Homo sapiens
agttgggtgaatctt

SEQ ID NO: 2063569 - DNA, 15 bp, Homo sapiens
gttgggtgaatcttc

SEQ ID NO: 2063570 - DNA, 15 bp, Homo sapiens
ttgggtgaatcttcc

SEQ ID NO: 2063571 - DNA, 15 bp, Homo sapiens
tgggtgaatcttcca

SEQ ID NO: 2063572 - DNA, 15 bp, Homo sapiens
gggtgaatcttccac

SEQ ID NO: 2063573 - DNA, 15 bp, Homo sapiens
ggtgaatcttccaca

SEQ ID NO: 2063574 - DNA, 15 bp, Homo sapiens
gtgaatcttccacag

SEQ ID NO: 2063575 - DNA, 15 bp, Homo sapiens
tgaatcttccacagc

SEQ ID NO: 2063576 - DNA, 15 bp, Homo sapiens
gaatcttccacagcc

SEQ ID NO: 2063577 - DNA, 15 bp, Homo sapiens
aatcttccacagccc

SEQ ID NO: 2063578 - DNA, 15 bp, Homo sapiens
atcttccacagcccc

SEQ ID NO: 2063579 - DNA, 15 bp, Homo sapiens
tcttccacagcccct

SEQ ID NO: 2063580 - DNA, 15 bp, Homo sapiens
cttccacagccccta

SEQ ID NO: 2063581 - DNA, 15 bp, Homo sapiens
ttccacagcccctag

SEQ ID NO: 2063582 - DNA, 15 bp, Homo sapiens
tccacagcccctagg

SEQ ID NO: 2063583 - DNA, 15 bp, Homo sapiens
ccacagcccctaggt

SEQ ID NO: 2063584 - DNA, 15 bp, Homo sapiens
cacagcccctaggtc

SEQ ID NO: 2063585 - DNA, 15 bp, Homo sapiens
acagcccctaggtcc

SEQ ID NO: 2063586 - DNA, 15 bp, Homo sapiens
cagcccctaggtcct

SEQ ID NO: 2063587 - DNA, 15 bp, Homo sapiens
agcccctaggtcctg

SEQ ID NO: 2063588 - DNA, 15 bp, Homo sapiens
gcccctaggtcctgt

SEQ ID NO: 2063589 - DNA, 15 bp, Homo sapiens
cccctaggtcctgtc

SEQ ID NO: 2063590 - DNA, 15 bp, Homo sapiens
ccctaggtcctgtct

SEQ ID NO: 2063591 - DNA, 15 bp, Homo sapiens
cctaggtcctgtctt

SEQ ID NO: 2063592 - DNA, 15 bp, Homo sapiens
ctaggtcctgtcttc

SEQ ID NO: 2063593 - DNA, 15 bp, Homo sapiens
taggtcctgtcttct

SEQ ID NO: 2063594 - DNA, 15 bp, Homo sapiens
aggtcctgtcttctc

SEQ ID NO: 2063595 - DNA, 15 bp, Homo sapiens
ggtcctgtcttctcg

SEQ ID NO: 2063596 - DNA, 15 bp, Homo sapiens
gtcctgtcttctcgg

SEQ ID NO: 2063597 - DNA, 15 bp, Homo sapiens
tcctgtcttctcggc

SEQ ID NO: 2063598 - DNA, 15 bp, Homo sapiens
cctgtcttctcggcc

SEQ ID NO: 2063599 - DNA, 15 bp, Homo sapiens
ctgtcttctcggcct

SEQ ID NO: 2063600 - DNA, 15 bp, Homo sapiens
tgtcttctcggcctt

SEQ ID NO: 2063601 - DNA, 15 bp, Homo sapiens
gtcttctcggccttc

SEQ ID NO: 2063602 - DNA, 15 bp, Homo sapiens
tcttctcggccttcg

SEQ ID NO: 2063603 - DNA, 15 bp, Homo sapiens
cttctcggccttcgt

SEQ ID NO: 2063604 - DNA, 15 bp, Homo sapiens
ttctcggccttcgtc

SEQ ID NO: 2063605 - DNA, 15 bp, Homo sapiens
tctcggccttcgtcc

SEQ ID NO: 2063606 - DNA, 15 bp, Homo sapiens
ctcggccttcgtccc

SEQ ID NO: 2063607 - DNA, 15 bp, Homo sapiens
tcggccttcgtccct

SEQ ID NO: 2063608 - DNA, 15 bp, Homo sapiens
cggccttcgtccctt

SEQ ID NO: 2063609 - DNA, 15 bp, Homo sapiens
ggccttcgtcccttg

SEQ ID NO: 2063610 - DNA, 15 bp, Homo sapiens
gccttcgtcccttgg

SEQ ID NO: 2063611 - DNA, 15 bp, Homo sapiens
ccttcgtcccttggc

SEQ ID NO: 2063612 - DNA, 15 bp, Homo sapiens
cttcgtcccttggca

SEQ ID NO: 2063613 - DNA, 15 bp, Homo sapiens
ttcgtcccttggcag

SEQ ID NO: 2063614 - DNA, 15 bp, Homo sapiens
tcgtcccttggcagc

SEQ ID NO: 2063615 - DNA, 15 bp, Homo sapiens
cgtcccttggcagct

SEQ ID NO: 2063616 - DNA, 15 bp, Homo sapiens
gtcccttggcagctt

SEQ ID NO: 2063617 - DNA, 15 bp, Homo sapiens
tcccttggcagcttt

SEQ ID NO: 2063618 - DNA, 15 bp, Homo sapiens
cccttggcagctttt

SEQ ID NO: 2063619 - DNA, 15 bp, Homo sapiens
ccttggcagcttttc

SEQ ID NO: 2063620 - DNA, 15 bp, Homo sapiens
cttggcagcttttca

SEQ ID NO: 2063621 - DNA, 15 bp, Homo sapiens
ttggcagcttttcaa

SEQ ID NO: 2063622 - DNA, 15 bp, Homo sapiens
tggcagcttttcaac

SEQ ID NO: 2063623 - DNA, 15 bp, Homo sapiens
ggcagcttttcaacc

SEQ ID NO: 2063624 - DNA, 15 bp, Homo sapiens
gcagcttttcaacct

SEQ ID NO: 2063625 - DNA, 15 bp, Homo sapiens
cagcttttcaacctc

SEQ ID NO: 2063626 - DNA, 15 bp, Homo sapiens
agcttttcaacctct

SEQ ID NO: 2063627 - DNA, 15 bp, Homo sapiens
gcttttcaacctctc

SEQ ID NO: 2063628 - DNA, 15 bp, Homo sapiens
cttttcaacctctca

SEQ ID NO: 2063629 - DNA, 15 bp, Homo sapiens
ttttcaacctctcag

SEQ ID NO: 2063630 - DNA, 15 bp, Homo sapiens
tttcaacctctcagc

SEQ ID NO: 2063631 - DNA, 15 bp, Homo sapiens
ttcaacctctcagca

SEQ ID NO: 2063632 - DNA, 15 bp, Homo sapiens
tcaacctctcagcag

SEQ ID NO: 2063633 - DNA, 15 bp, Homo sapiens
caacctctcagcagg

SEQ ID NO: 2063634 - DNA, 15 bp, Homo sapiens
aacctctcagcaggc

SEQ ID NO: 2063635 - DNA, 15 bp, Homo sapiens
acctctcagcaggcc

SEQ ID NO: 2063636 - DNA, 15 bp, Homo sapiens
cctctcagcaggcca

SEQ ID NO: 2063637 - DNA, 15 bp, Homo sapiens
ctctcagcaggccac

SEQ ID NO: 2063638 - DNA, 15 bp, Homo sapiens
tctcagcaggccaca

SEQ ID NO: 2063639 - DNA, 15 bp, Homo sapiens
ctcagcaggccacag

SEQ ID NO: 2063640 - DNA, 15 bp, Homo sapiens
tcagcaggccacagg

SEQ ID NO: 2063641 - DNA, 15 bp, Homo sapiens
cagcaggccacaggc

SEQ ID NO: 2063642 - DNA, 15 bp, Homo sapiens
agcaggccacaggcg

SEQ ID NO: 2063643 - DNA, 15 bp, Homo sapiens
gcaggccacaggcgc

SEQ ID NO: 2063644 - DNA, 15 bp, Homo sapiens
caggccacaggcgca

SEQ ID NO: 2063645 - DNA, 15 bp, Homo sapiens
aggccacaggcgcac

SEQ ID NO: 2063646 - DNA, 15 bp, Homo sapiens
ggccacaggcgcacg

SEQ ID NO: 2063647 - DNA, 15 bp, Homo sapiens
gccacaggcgcacgt

SEQ ID NO: 2063648 - DNA, 15 bp, Homo sapiens
ccacaggcgcacgtg

SEQ ID NO: 2063649 - DNA, 15 bp, Homo sapiens
cacaggcgcacgtgg

SEQ ID NO: 2063650 - DNA, 15 bp, Homo sapiens
acaggcgcacgtggc

SEQ ID NO: 2063651 - DNA, 15 bp, Homo sapiens
caggcgcacgtggct

SEQ ID NO: 2063652 - DNA, 15 bp, Homo sapiens
aggcgcacgtggctg

SEQ ID NO: 2063653 - DNA, 15 bp, Homo sapiens
ggcgcacgtggctgg

SEQ ID NO: 2063654 - DNA, 15 bp, Homo sapiens
gcgcacgtggctggc

SEQ ID NO: 2063655 - DNA, 15 bp, Homo sapiens
cgcacgtggctggca

SEQ ID NO: 2063656 - DNA, 15 bp, Homo sapiens
gcacgtggctggcag

SEQ ID NO: 2063657 - DNA, 15 bp, Homo sapiens
cacgtggctggcagc

SEQ ID NO: 2063658 - DNA, 15 bp, Homo sapiens
acgtggctggcagct

SEQ ID NO: 2063659 - DNA, 15 bp, Homo sapiens
cgtggctggcagctc

SEQ ID NO: 2063660 - DNA, 15 bp, Homo sapiens
gtggctggcagctcc

SEQ ID NO: 2063661 - DNA, 15 bp, Homo sapiens
tggctggcagctccc

SEQ ID NO: 2063662 - DNA, 15 bp, Homo sapiens
ggctggcagctcccc

SEQ ID NO: 2063663 - DNA, 15 bp, Homo sapiens
gctggcagctccccg

SEQ ID NO: 2063664 - DNA, 15 bp, Homo sapiens
ctggcagctccccgg

SEQ ID NO: 2063665 - DNA, 15 bp, Homo sapiens
tggcagctccccggc

SEQ ID NO: 2063666 - DNA, 15 bp, Homo sapiens
ggcagctccccggcc

SEQ ID NO: 2063667 - DNA, 15 bp, Homo sapiens
gcagctccccggcct

SEQ ID NO: 2063668 - DNA, 15 bp, Homo sapiens
cagctccccggcctc

SEQ ID NO: 2063669 - DNA, 15 bp, Homo sapiens
agctccccggcctcc

SEQ ID NO: 2063670 - DNA, 15 bp, Homo sapiens
gctccccggcctccg

SEQ ID NO: 2063671 - DNA, 15 bp, Homo sapiens
ctccccggcctccgg

SEQ ID NO: 2063672 - DNA, 15 bp, Homo sapiens
tccccggcctccggc

SEQ ID NO: 2063673 - DNA, 15 bp, Homo sapiens
ccccggcctccggct

SEQ ID NO: 2063674 - DNA, 15 bp, Homo sapiens
cccggcctccggctc

SEQ ID NO: 2063675 - DNA, 15 bp, Homo sapiens
ccggcctccggctct

SEQ ID NO: 2063676 - DNA, 15 bp, Homo sapiens
cggcctccggctctg

SEQ ID NO: 2063677 - DNA, 15 bp, Homo sapiens
ggcctccggctctga

SEQ ID NO: 2063678 - DNA, 15 bp, Homo sapiens
gcctccggctctgac

SEQ ID NO: 2063679 - DNA, 15 bp, Homo sapiens
cctccggctctgaca

SEQ ID NO: 2063680 - DNA, 15 bp, Homo sapiens
ctccggctctgacag

SEQ ID NO: 2063681 - DNA, 15 bp, Homo sapiens
tccggctctgacagt

SEQ ID NO: 2063682 - DNA, 15 bp, Homo sapiens
ccggctctgacagtc

SEQ ID NO: 2063683 - DNA, 15 bp, Homo sapiens
cggctctgacagtcc

SEQ ID NO: 2063684 - DNA, 15 bp, Homo sapiens
ggctctgacagtccg

SEQ ID NO: 2063685 - DNA, 15 bp, Homo sapiens
gctctgacagtccgg

SEQ ID NO: 2063686 - DNA, 15 bp, Homo sapiens
ctctgacagtccggg

SEQ ID NO: 2063687 - DNA, 15 bp, Homo sapiens
tctgacagtccgggg

SEQ ID NO: 2063688 - DNA, 15 bp, Homo sapiens
ctgacagtccggggg

SEQ ID NO: 2063689 - DNA, 15 bp, Homo sapiens
tgacagtccgggggc

SEQ ID NO: 2063690 - DNA, 15 bp, Homo sapiens
gacagtccgggggca

SEQ ID NO: 2063691 - DNA, 15 bp, Homo sapiens
acagtccgggggcaa

SEQ ID NO: 2063692 - DNA, 15 bp, Homo sapiens
cagtccgggggcaac

SEQ ID NO: 2063693 - DNA, 15 bp, Homo sapiens
agtccgggggcaacc

SEQ ID NO: 2063694 - DNA, 15 bp, Homo sapiens
gtccgggggcaacca

SEQ ID NO: 2063695 - DNA, 15 bp, Homo sapiens
tccgggggcaaccag

SEQ ID NO: 2063696 - DNA, 15 bp, Homo sapiens
ccgggggcaaccagg

SEQ ID NO: 2063697 - DNA, 15 bp, Homo sapiens
cgggggcaaccaggc

SEQ ID NO: 2063698 - DNA, 15 bp, Homo sapiens
gggggcaaccaggcc

SEQ ID NO: 2063699 - DNA, 15 bp, Homo sapiens
ggggcaaccaggcct

SEQ ID NO: 2063700 - DNA, 15 bp, Homo sapiens
gggcaaccaggcctg

SEQ ID NO: 2063701 - DNA, 15 bp, Homo sapiens
ggcaaccaggcctgc

SEQ ID NO: 2063702 - DNA, 15 bp, Homo sapiens
gcaaccaggcctgca

SEQ ID NO: 2063703 - DNA, 15 bp, Homo sapiens
caaccaggcctgcag

SEQ ID NO: 2063704 - DNA, 15 bp, Homo sapiens
aaccaggcctgcagt

SEQ ID NO: 2063705 - DNA, 15 bp, Homo sapiens
accaggcctgcagtt

SEQ ID NO: 2063706 - DNA, 15 bp, Homo sapiens
ccaggcctgcagttc

SEQ ID NO: 2063707 - DNA, 15 bp, Homo sapiens
caggcctgcagttct

SEQ ID NO: 2063708 - DNA, 15 bp, Homo sapiens
aggcctgcagttctc

SEQ ID NO: 2063709 - DNA, 15 bp, Homo sapiens
ggcctgcagttctcg

SEQ ID NO: 2063710 - DNA, 15 bp, Homo sapiens
gcctgcagttctcga

SEQ ID NO: 2063711 - DNA, 15 bp, Homo sapiens
cctgcagttctcgag

SEQ ID NO: 2063712 - DNA, 15 bp, Homo sapiens
ctgcagttctcgagg

SEQ ID NO: 2063713 - DNA, 15 bp, Homo sapiens
tgcagttctcgagga

SEQ ID NO: 2063714 - DNA, 15 bp, Homo sapiens
gcagttctcgaggaa

SEQ ID NO: 2063715 - DNA, 15 bp, Homo sapiens
cagttctcgaggaaa

SEQ ID NO: 2063716 - DNA, 15 bp, Homo sapiens
agttctcgaggaaac

SEQ ID NO: 2063717 - DNA, 15 bp, Homo sapiens
gttctcgaggaaacc

SEQ ID NO: 2063718 - DNA, 15 bp, Homo sapiens
ttctcgaggaaaccc

SEQ ID NO: 2063719 - DNA, 15 bp, Homo sapiens
tctcgaggaaacccc

SEQ ID NO: 2063720 - DNA, 15 bp, Homo sapiens
ctcgaggaaaccccc

SEQ ID NO: 2063721 - DNA, 15 bp, Homo sapiens
tcgaggaaaccccca

SEQ ID NO: 2063722 - DNA, 15 bp, Homo sapiens
cgaggaaacccccag

SEQ ID NO: 2063723 - DNA, 15 bp, Homo sapiens
gaggaaacccccagc

SEQ ID NO: 2063724 - DNA, 15 bp, Homo sapiens
aggaaacccccagcc

SEQ ID NO: 2063725 - DNA, 15 bp, Homo sapiens
ggaaacccccagccc

SEQ ID NO: 2063726 - DNA, 15 bp, Homo sapiens
gaaacccccagcccc

SEQ ID NO: 2063727 - DNA, 15 bp, Homo sapiens
aaacccccagccccc

SEQ ID NO: 2063728 - DNA, 15 bp, Homo sapiens
aacccccagcccccc

SEQ ID NO: 2063729 - DNA, 15 bp, Homo sapiens
acccccagcccccca

SEQ ID NO: 2063730 - DNA, 15 bp, Homo sapiens
cccccagccccccac

SEQ ID NO: 2063731 - DNA, 15 bp, Homo sapiens
ccccagccccccacg

SEQ ID NO: 2063732 - DNA, 15 bp, Homo sapiens
cccagccccccacgt

SEQ ID NO: 2063733 - DNA, 15 bp, Homo sapiens
ccagccccccacgtc

SEQ ID NO: 2063734 - DNA, 15 bp, Homo sapiens
cagccccccacgtct

SEQ ID NO: 2063735 - DNA, 15 bp, Homo sapiens
agccccccacgtctc

SEQ ID NO: 2063736 - DNA, 15 bp, Homo sapiens
gccccccacgtctcg

SEQ ID NO: 2063737 - DNA, 15 bp, Homo sapiens
ccccccacgtctcgt

SEQ ID NO: 2063738 - DNA, 15 bp, Homo sapiens
cccccacgtctcgtt

SEQ ID NO: 2063739 - DNA, 15 bp, Homo sapiens
ccccacgtctcgttc

SEQ ID NO: 2063740 - DNA, 15 bp, Homo sapiens
cccacgtctcgttct

SEQ ID NO: 2063741 - DNA, 15 bp, Homo sapiens
ccacgtctcgttctg

SEQ ID NO: 2063742 - DNA, 15 bp, Homo sapiens
cacgtctcgttctgg

SEQ ID NO: 2063743 - DNA, 15 bp, Homo sapiens
acgtctcgttctgga

SEQ ID NO: 2063744 - DNA, 15 bp, Homo sapiens
cgtctcgttctggac

SEQ ID NO: 2063745 - DNA, 15 bp, Homo sapiens
gtctcgttctggacc

SEQ ID NO: 2063746 - DNA, 15 bp, Homo sapiens
tctcgttctggacca

SEQ ID NO: 2063747 - DNA, 15 bp, Homo sapiens
ctcgttctggaccag

SEQ ID NO: 2063748 - DNA, 15 bp, Homo sapiens
tcgttctggaccagg

SEQ ID NO: 2063749 - DNA, 15 bp, Homo sapiens
cgttctggaccagga

SEQ ID NO: 2063750 - DNA, 15 bp, Homo sapiens
gttctggaccaggaa

SEQ ID NO: 2063751 - DNA, 15 bp, Homo sapiens
ttctggaccaggaac

SEQ ID NO: 2063752 - DNA, 15 bp, Homo sapiens
tctggaccaggaacc

SEQ ID NO: 2063753 - DNA, 15 bp, Homo sapiens
ctggaccaggaaccc

SEQ ID NO: 2063754 - DNA, 15 bp, Homo sapiens
tggaccaggaacccc

SEQ ID NO: 2063755 - DNA, 15 bp, Homo sapiens
ggaccaggaaccccc

SEQ ID NO: 2063756 - DNA, 15 bp, Homo sapiens
gaccaggaaccccct

SEQ ID NO: 2063757 - DNA, 15 bp, Homo sapiens
accaggaaccccctc

SEQ ID NO: 2063758 - DNA, 15 bp, Homo sapiens
ccaggaaccccctcc

SEQ ID NO: 2063759 - DNA, 15 bp, Homo sapiens
caggaaccccctccc

SEQ ID NO: 2063760 - DNA, 15 bp, Homo sapiens
aggaaccccctcccc

SEQ ID NO: 2063761 - DNA, 15 bp, Homo sapiens
ggaaccccctcccca

SEQ ID NO: 2063762 - DNA, 15 bp, Homo sapiens
gaaccccctccccaa

SEQ ID NO: 2063763 - DNA, 15 bp, Homo sapiens
aaccccctccccaac

SEQ ID NO: 2063764 - DNA, 15 bp, Homo sapiens
accccctccccaaca

SEQ ID NO: 2063765 - DNA, 15 bp, Homo sapiens
ccccctccccaacaa

SEQ ID NO: 2063766 - DNA, 15 bp, Homo sapiens
cccctccccaacaac

SEQ ID NO: 2063767 - DNA, 15 bp, Homo sapiens
ccctccccaacaacc

SEQ ID NO: 2063768 - DNA, 15 bp, Homo sapiens
cctccccaacaaccg

SEQ ID NO: 2063769 - DNA, 15 bp, Homo sapiens
ctccccaacaaccgc

SEQ ID NO: 2063770 - DNA, 15 bp, Homo sapiens
tccccaacaaccgcg

SEQ ID NO: 2063771 - DNA, 15 bp, Homo sapiens
ccccaacaaccgcgc

SEQ ID NO: 2063772 - DNA, 15 bp, Homo sapiens
cccaacaaccgcgca

SEQ ID NO: 2063773 - DNA, 15 bp, Homo sapiens
ccaacaaccgcgcag

SEQ ID NO: 2063774 - DNA, 15 bp, Homo sapiens
caacaaccgcgcagc

SEQ ID NO: 2063775 - DNA, 15 bp, Homo sapiens
aacaaccgcgcagca

SEQ ID NO: 2063776 - DNA, 15 bp, Homo sapiens
acaaccgcgcagcaa

SEQ ID NO: 2063777 - DNA, 15 bp, Homo sapiens
caaccgcgcagcaag

SEQ ID NO: 2063778 - DNA, 15 bp, Homo sapiens
aaccgcgcagcaagt

SEQ ID NO: 2063779 - DNA, 15 bp, Homo sapiens
accgcgcagcaagtg

SEQ ID NO: 2063780 - DNA, 15 bp, Homo sapiens
ccgcgcagcaagtgg

SEQ ID NO: 2063781 - DNA, 15 bp, Homo sapiens
cgcgcagcaagtggc

SEQ ID NO: 2063782 - DNA, 15 bp, Homo sapiens
gcgcagcaagtggcg

SEQ ID NO: 2063783 - DNA, 15 bp, Homo sapiens
cgcagcaagtggcga

SEQ ID NO: 2063784 - DNA, 15 bp, Homo sapiens
gcagcaagtggcgac

SEQ ID NO: 2063785 - DNA, 15 bp, Homo sapiens
cagcaagtggcgact

SEQ ID NO: 2063786 - DNA, 15 bp, Homo sapiens
agcaagtggcgactc

SEQ ID NO: 2063787 - DNA, 15 bp, Homo sapiens
gcaagtggcgactct

SEQ ID NO: 2063788 - DNA, 15 bp, Homo sapiens
caagtggcgactctg

SEQ ID NO: 2063789 - DNA, 15 bp, Homo sapiens
aagtggcgactctgg

SEQ ID NO: 2063790 - DNA, 15 bp, Homo sapiens
agtggcgactctggg

SEQ ID NO: 2063791 - DNA, 15 bp, Homo sapiens
gtggcgactctggga

SEQ ID NO: 2063792 - DNA, 15 bp, Homo sapiens
tggcgactctgggag

SEQ ID NO: 2063793 - DNA, 15 bp, Homo sapiens
ggcgactctgggagc

SEQ ID NO: 2063794 - DNA, 15 bp, Homo sapiens
gcgactctgggagct

SEQ ID NO: 2063795 - DNA, 15 bp, Homo sapiens
cgactctgggagctg

SEQ ID NO: 2063796 - DNA, 15 bp, Homo sapiens
gactctgggagctga

SEQ ID NO: 2063797 - DNA, 15 bp, Homo sapiens
actctgggagctgaa

SEQ ID NO: 2063798 - DNA, 15 bp, Homo sapiens
ctctgggagctgaac

SEQ ID NO: 2063799 - DNA, 15 bp, Homo sapiens
tctgggagctgaact

SEQ ID NO: 2063800 - DNA, 15 bp, Homo sapiens
ctgggagctgaactg

SEQ ID NO: 2063801 - DNA, 15 bp, Homo sapiens
tgggagctgaactgg

SEQ ID NO: 2063802 - DNA, 15 bp, Homo sapiens
gggagctgaactgga

SEQ ID NO: 2063803 - DNA, 15 bp, Homo sapiens
ggagctgaactggag

SEQ ID NO: 2063804 - DNA, 15 bp, Homo sapiens
gagctgaactggagt

SEQ ID NO: 2063805 - DNA, 15 bp, Homo sapiens
agctgaactggagtg

SEQ ID NO: 2063806 - DNA, 15 bp, Homo sapiens
gctgaactggagtgg

SEQ ID NO: 2063807 - DNA, 15 bp, Homo sapiens
ctgaactggagtgga

SEQ ID NO: 2063808 - DNA, 15 bp, Homo sapiens
tgaactggagtggag

SEQ ID NO: 2063809 - DNA, 15 bp, Homo sapiens
gaactggagtggagc

SEQ ID NO: 2063810 - DNA, 15 bp, Homo sapiens
aactggagtggagct

SEQ ID NO: 2063811 - DNA, 15 bp, Homo sapiens
actggagtggagctc

SEQ ID NO: 2063812 - DNA, 15 bp, Homo sapiens
ctggagtggagctcg

SEQ ID NO: 2063813 - DNA, 15 bp, Homo sapiens
tggagtggagctcga

SEQ ID NO: 2063814 - DNA, 15 bp, Homo sapiens
ggagtggagctcgaa

SEQ ID NO: 2063815 - DNA, 15 bp, Homo sapiens
gagtggagctcgaag

SEQ ID NO: 2063816 - DNA, 15 bp, Homo sapiens
agtggagctcgaagt

SEQ ID NO: 2063817 - DNA, 15 bp, Homo sapiens
gtggagctcgaagtg

SEQ ID NO: 2063818 - DNA, 15 bp, Homo sapiens
tggagctcgaagtgg

SEQ ID NO: 2063819 - DNA, 15 bp, Homo sapiens
ggagctcgaagtggc

SEQ ID NO: 2063820 - DNA, 15 bp, Homo sapiens
gagctcgaagtggct

SEQ ID NO: 2063821 - DNA, 15 bp, Homo sapiens
agctcgaagtggctg

SEQ ID NO: 2063822 - DNA, 15 bp, Homo sapiens
gctcgaagtggctgg

SEQ ID NO: 2063823 - DNA, 15 bp, Homo sapiens
ctcgaagtggctggg

SEQ ID NO: 2063824 - DNA, 15 bp, Homo sapiens
tcgaagtggctgggg

SEQ ID NO: 2063825 - DNA, 15 bp, Homo sapiens
cgaagtggctggggc

SEQ ID NO: 2063826 - DNA, 15 bp, Homo sapiens
gaagtggctggggcg

SEQ ID NO: 2063827 - DNA, 15 bp, Homo sapiens
aagtggctggggcgg

SEQ ID NO: 2063828 - DNA, 15 bp, Homo sapiens
agtggctggggcggg

SEQ ID NO: 2063829 - DNA, 15 bp, Homo sapiens
gtggctggggcgggc

SEQ ID NO: 2063830 - DNA, 15 bp, Homo sapiens
tggctggggcgggca

SEQ ID NO: 2063831 - DNA, 15 bp, Homo sapiens
ggctggggcgggcaa

SEQ ID NO: 2063832 - DNA, 15 bp, Homo sapiens
gctggggcgggcaaa

SEQ ID NO: 2063833 - DNA, 15 bp, Homo sapiens
ctggggcgggcaaag

SEQ ID NO: 2063834 - DNA, 15 bp, Homo sapiens
tggggcgggcaaaga

SEQ ID NO: 2063835 - DNA, 15 bp, Homo sapiens
ggggcgggcaaagac

SEQ ID NO: 2063836 - DNA, 15 bp, Homo sapiens
gggcgggcaaagact

SEQ ID NO: 2063837 - DNA, 15 bp, Homo sapiens
ggcgggcaaagactc

SEQ ID NO: 2063838 - DNA, 15 bp, Homo sapiens
gcgggcaaagactcc

SEQ ID NO: 2063839 - DNA, 15 bp, Homo sapiens
cgggcaaagactccc

SEQ ID NO: 2063840 - DNA, 15 bp, Homo sapiens
gggcaaagactcccg

SEQ ID NO: 2063841 - DNA, 15 bp, Homo sapiens
ggcaaagactcccgc

SEQ ID NO: 2063842 - DNA, 15 bp, Homo sapiens
gcaaagactcccgct

SEQ ID NO: 2063843 - DNA, 15 bp, Homo sapiens
caaagactcccgctt

SEQ ID NO: 2063844 - DNA, 15 bp, Homo sapiens
aaagactcccgcttc

SEQ ID NO: 2063845 - DNA, 15 bp, Homo sapiens
aagactcccgcttca

SEQ ID NO: 2063846 - DNA, 15 bp, Homo sapiens
agactcccgcttcac

SEQ ID NO: 2063847 - DNA, 15 bp, Homo sapiens
gactcccgcttcact

SEQ ID NO: 2063848 - DNA, 15 bp, Homo sapiens
actcccgcttcactc

SEQ ID NO: 2063849 - DNA, 15 bp, Homo sapiens
ctcccgcttcactct

SEQ ID NO: 2063850 - DNA, 15 bp, Homo sapiens
tcccgcttcactctg

SEQ ID NO: 2063851 - DNA, 15 bp, Homo sapiens
cccgcttcactctgg

SEQ ID NO: 2063852 - DNA, 15 bp, Homo sapiens
ccgcttcactctggg

SEQ ID NO: 2063853 - DNA, 15 bp, Homo sapiens
cgcttcactctggga

SEQ ID NO: 2063854 - DNA, 15 bp, Homo sapiens
gcttcactctgggac

SEQ ID NO: 2063855 - DNA, 15 bp, Homo sapiens
cttcactctgggaca

SEQ ID NO: 2063856 - DNA, 15 bp, Homo sapiens
ttcactctgggacac

SEQ ID NO: 2063857 - DNA, 15 bp, Homo sapiens
tcactctgggacaca

SEQ ID NO: 2063858 - DNA, 15 bp, Homo sapiens
cactctgggacacaa

SEQ ID NO: 2063859 - DNA, 15 bp, Homo sapiens
actctgggacacaac

SEQ ID NO: 2063860 - DNA, 15 bp, Homo sapiens
ctctgggacacaact

SEQ ID NO: 2063861 - DNA, 15 bp, Homo sapiens
tctgggacacaactg

SEQ ID NO: 2063862 - DNA, 15 bp, Homo sapiens
ctgggacacaactgg

SEQ ID NO: 2063863 - DNA, 15 bp, Homo sapiens
tgggacacaactggg

SEQ ID NO: 2063864 - DNA, 15 bp, Homo sapiens
gggacacaactggga

SEQ ID NO: 2063865 - DNA, 15 bp, Homo sapiens
ggacacaactgggac

SEQ ID NO: 2063866 - DNA, 15 bp, Homo sapiens
gacacaactgggacg

SEQ ID NO: 2063867 - DNA, 15 bp, Homo sapiens
acacaactgggacgg

SEQ ID NO: 2063868 - DNA, 15 bp, Homo sapiens
cacaactgggacggc

SEQ ID NO: 2063869 - DNA, 15 bp, Homo sapiens
acaactgggacggcg

SEQ ID NO: 2063870 - DNA, 15 bp, Homo sapiens
caactgggacggcgc

SEQ ID NO: 2063871 - DNA, 15 bp, Homo sapiens
aactgggacggcgct

SEQ ID NO: 2063872 - DNA, 15 bp, Homo sapiens
actgggacggcgctt

SEQ ID NO: 2063873 - DNA, 15 bp, Homo sapiens
ctgggacggcgcttc

SEQ ID NO: 2063874 - DNA, 15 bp, Homo sapiens
tgggacggcgcttca

SEQ ID NO: 2063875 - DNA, 15 bp, Homo sapiens
gggacggcgcttcaa

SEQ ID NO: 2063876 - DNA, 15 bp, Homo sapiens
ggacggcgcttcaac

SEQ ID NO: 2063877 - DNA, 15 bp, Homo sapiens
gacggcgcttcaacc

SEQ ID NO: 2063878 - DNA, 15 bp, Homo sapiens
acggcgcttcaacct

SEQ ID NO: 2063879 - DNA, 15 bp, Homo sapiens
cggcgcttcaacctc

SEQ ID NO: 2063880 - DNA, 15 bp, Homo sapiens
ggcgcttcaacctct

SEQ ID NO: 2063881 - DNA, 15 bp, Homo sapiens
gcgcttcaacctctg

SEQ ID NO: 2063882 - DNA, 15 bp, Homo sapiens
cgcttcaacctctgc

SEQ ID NO: 2063883 - DNA, 15 bp, Homo sapiens
gcttcaacctctgcc

SEQ ID NO: 2063884 - DNA, 15 bp, Homo sapiens
cttcaacctctgcct

SEQ ID NO: 2063885 - DNA, 15 bp, Homo sapiens
ttcaacctctgcctg

SEQ ID NO: 2063886 - DNA, 15 bp, Homo sapiens
tcaacctctgcctgc

SEQ ID NO: 2063887 - DNA, 15 bp, Homo sapiens
caacctctgcctgca

SEQ ID NO: 2063888 - DNA, 15 bp, Homo sapiens
aacctctgcctgcag

SEQ ID NO: 2063889 - DNA, 15 bp, Homo sapiens
acctctgcctgcagg

SEQ ID NO: 2063890 - DNA, 15 bp, Homo sapiens
cctctgcctgcaggc

SEQ ID NO: 2063891 - DNA, 15 bp, Homo sapiens
ctctgcctgcaggcg

SEQ ID NO: 2063892 - DNA, 15 bp, Homo sapiens
tctgcctgcaggcgt

SEQ ID NO: 2063893 - DNA, 15 bp, Homo sapiens
ctgcctgcaggcgtg

SEQ ID NO: 2063894 - DNA, 15 bp, Homo sapiens
tgcctgcaggcgtgc

SEQ ID NO: 2063895 - DNA, 15 bp, Homo sapiens
gcctgcaggcgtgct

SEQ ID NO: 2063896 - DNA, 15 bp, Homo sapiens
cctgcaggcgtgctt

SEQ ID NO: 2063897 - DNA, 15 bp, Homo sapiens
ctgcaggcgtgcttc

SEQ ID NO: 2063898 - DNA, 15 bp, Homo sapiens
tgcaggcgtgcttct

SEQ ID NO: 2063899 - DNA, 15 bp, Homo sapiens
gcaggcgtgcttctc

SEQ ID NO: 2063900 - DNA, 15 bp, Homo sapiens
caggcgtgcttctcg

SEQ ID NO: 2063901 - DNA, 15 bp, Homo sapiens
aggcgtgcttctcgc

SEQ ID NO: 2063902 - DNA, 15 bp, Homo sapiens
ggcgtgcttctcgcg

SEQ ID NO: 2063903 - DNA, 15 bp, Homo sapiens
gcgtgcttctcgcgc

SEQ ID NO: 2063904 - DNA, 15 bp, Homo sapiens
cgtgcttctcgcgcg

SEQ ID NO: 2063905 - DNA, 15 bp, Homo sapiens
gtgcttctcgcgcgc

SEQ ID NO: 2063906 - DNA, 15 bp, Homo sapiens
tgcttctcgcgcgca

SEQ ID NO: 2063907 - DNA, 15 bp, Homo sapiens
gcttctcgcgcgcac

SEQ ID NO: 2063908 - DNA, 15 bp, Homo sapiens
cttctcgcgcgcacc

SEQ ID NO: 2063909 - DNA, 15 bp, Homo sapiens
ttctcgcgcgcacca

SEQ ID NO: 2063910 - DNA, 15 bp, Homo sapiens
tctcgcgcgcaccag

SEQ ID NO: 2063911 - DNA, 15 bp, Homo sapiens
ctcgcgcgcaccagc

SEQ ID NO: 2063912 - DNA, 15 bp, Homo sapiens
tcgcgcgcaccagca

SEQ ID NO: 2063913 - DNA, 15 bp, Homo sapiens
cgcgcgcaccagcaa

SEQ ID NO: 2063914 - DNA, 15 bp, Homo sapiens
gcgcgcaccagcaag

SEQ ID NO: 2063915 - DNA, 15 bp, Homo sapiens
cgcgcaccagcaagc

SEQ ID NO: 2063916 - DNA, 15 bp, Homo sapiens
gcgcaccagcaagct

SEQ ID NO: 2063917 - DNA, 15 bp, Homo sapiens
cgcaccagcaagctc

SEQ ID NO: 2063918 - DNA, 15 bp, Homo sapiens
gcaccagcaagctct

SEQ ID NO: 2063919 - DNA, 15 bp, Homo sapiens
caccagcaagctctc

SEQ ID NO: 2063920 - DNA, 15 bp, Homo sapiens
accagcaagctctct

SEQ ID NO: 2063921 - DNA, 15 bp, Homo sapiens
ccagcaagctctcta

SEQ ID NO: 2063922 - DNA, 15 bp, Homo sapiens
cagcaagctctctat

SEQ ID NO: 2063923 - DNA, 15 bp, Homo sapiens
agcaagctctctatc

SEQ ID NO: 2063924 - DNA, 15 bp, Homo sapiens
gcaagctctctatcc

SEQ ID NO: 2063925 - DNA, 15 bp, Homo sapiens
caagctctctatcca

SEQ ID NO: 2063926 - DNA, 15 bp, Homo sapiens
aagctctctatccac

SEQ ID NO: 2063927 - DNA, 15 bp, Homo sapiens
agctctctatccacc

SEQ ID NO: 2063928 - DNA, 15 bp, Homo sapiens
gctctctatccacct

SEQ ID NO: 2063929 - DNA, 15 bp, Homo sapiens
ctctctatccacctc

SEQ ID NO: 2063930 - DNA, 15 bp, Homo sapiens
tctctatccacctcg

SEQ ID NO: 2063931 - DNA, 15 bp, Homo sapiens
ctctatccacctcgc

SEQ ID NO: 2063932 - DNA, 15 bp, Homo sapiens
tctatccacctcgcc

SEQ ID NO: 2063933 - DNA, 15 bp, Homo sapiens
ctatccacctcgcct

SEQ ID NO: 2063934 - DNA, 15 bp, Homo sapiens
tatccacctcgcctg

SEQ ID NO: 2063935 - DNA, 15 bp, Homo sapiens
atccacctcgcctgg

SEQ ID NO: 2063936 - DNA, 15 bp, Homo sapiens
tccacctcgcctggg

SEQ ID NO: 2063937 - DNA, 15 bp, Homo sapiens
ccacctcgcctgggc

SEQ ID NO: 2063938 - DNA, 15 bp, Homo sapiens
cacctcgcctgggcc

SEQ ID NO: 2063939 - DNA, 15 bp, Homo sapiens
acctcgcctgggcct

SEQ ID NO: 2063940 - DNA, 15 bp, Homo sapiens
cctcgcctgggcctt

SEQ ID NO: 2063941 - DNA, 15 bp, Homo sapiens
ctcgcctgggccttt

SEQ ID NO: 2063942 - DNA, 15 bp, Homo sapiens
tcgcctgggcctttg

SEQ ID NO: 2063943 - DNA, 15 bp, Homo sapiens
cgcctgggcctttgc

SEQ ID NO: 2063944 - DNA, 15 bp, Homo sapiens
gcctgggcctttgca

SEQ ID NO: 2063945 - DNA, 15 bp, Homo sapiens
cctgggcctttgcag

SEQ ID NO: 2063946 - DNA, 15 bp, Homo sapiens
ctgggcctttgcagc

SEQ ID NO: 2063947 - DNA, 15 bp, Homo sapiens
tgggcctttgcagcg

SEQ ID NO: 2063948 - DNA, 15 bp, Homo sapiens
gggcctttgcagcgc

SEQ ID NO: 2063949 - DNA, 15 bp, Homo sapiens
ggcctttgcagcgcc

SEQ ID NO: 2063950 - DNA, 15 bp, Homo sapiens
gcctttgcagcgccc

SEQ ID NO: 2063951 - DNA, 15 bp, Homo sapiens
cctttgcagcgccct

SEQ ID NO: 2063952 - DNA, 15 bp, Homo sapiens
ctttgcagcgccctg

SEQ ID NO: 2063953 - DNA, 15 bp, Homo sapiens
tttgcagcgccctgc

SEQ ID NO: 2063954 - DNA, 15 bp, Homo sapiens
ttgcagcgccctgcc

SEQ ID NO: 2063955 - DNA, 15 bp, Homo sapiens
tgcagcgccctgccg

SEQ ID NO: 2063956 - DNA, 15 bp, Homo sapiens
gcagcgccctgccgc

SEQ ID NO: 2063957 - DNA, 15 bp, Homo sapiens
gcgccctgccgccca

SEQ ID NO: 2063958 - DNA, 15 bp, Homo sapiens
cgccctgccgcccag

SEQ ID NO: 2063959 - DNA, 15 bp, Homo sapiens
gccctgccgcccagg

SEQ ID NO: 2063960 - DNA, 15 bp, Homo sapiens
ctgccgcccaggctc

SEQ ID NO: 2063961 - DNA, 15 bp, Homo sapiens
tgccgcccaggctcc

SEQ ID NO: 2063962 - DNA, 15 bp, Homo sapiens
gccgcccaggctcca

SEQ ID NO: 2063963 - DNA, 15 bp, Homo sapiens
ccgcccaggctccag

SEQ ID NO: 2063964 - DNA, 15 bp, Homo sapiens
cgcccaggctccagc

SEQ ID NO: 2063965 - DNA, 15 bp, Homo sapiens
gcccaggctccagcg

SEQ ID NO: 2063966 - DNA, 15 bp, Homo sapiens
cccaggctccagcgc

SEQ ID NO: 2063967 - DNA, 15 bp, Homo sapiens
ccaggctccagcgcc

SEQ ID NO: 2063968 - DNA, 15 bp, Homo sapiens
caggctccagcgcct

SEQ ID NO: 2063969 - DNA, 15 bp, Homo sapiens
aggctccagcgcctc

SEQ ID NO: 2063970 - DNA, 15 bp, Homo sapiens
ggctccagcgcctct

SEQ ID NO: 2063971 - DNA, 15 bp, Homo sapiens
gctccagcgcctcta

SEQ ID NO: 2063972 - DNA, 15 bp, Homo sapiens
ctccagcgcctctac

SEQ ID NO: 2063973 - DNA, 15 bp, Homo sapiens
tccagcgcctctact

SEQ ID NO: 2063974 - DNA, 15 bp, Homo sapiens
ccagcgcctctacta

SEQ ID NO: 2063975 - DNA, 15 bp, Homo sapiens
cagcgcctctactac

SEQ ID NO: 2063976 - DNA, 15 bp, Homo sapiens
agcgcctctactacc

SEQ ID NO: 2063977 - DNA, 15 bp, Homo sapiens
gcgcctctactaccc

SEQ ID NO: 2063978 - DNA, 15 bp, Homo sapiens
cgcctctactaccct

SEQ ID NO: 2063979 - DNA, 15 bp, Homo sapiens
gcctctactacccta

SEQ ID NO: 2063980 - DNA, 15 bp, Homo sapiens
cctctactaccctag

SEQ ID NO: 2063981 - DNA, 15 bp, Homo sapiens
ctctactaccctagc

SEQ ID NO: 2063982 - DNA, 15 bp, Homo sapiens
tctactaccctagcc

SEQ ID NO: 2063983 - DNA, 15 bp, Homo sapiens
ctactaccctagccc

SEQ ID NO: 2063984 - DNA, 15 bp, Homo sapiens
tactaccctagcccc

SEQ ID NO: 2063985 - DNA, 15 bp, Homo sapiens
actaccctagcccct

SEQ ID NO: 2063986 - DNA, 15 bp, Homo sapiens
ctaccctagcccctt

SEQ ID NO: 2063987 - DNA, 15 bp, Homo sapiens
taccctagccccttc

SEQ ID NO: 2063988 - DNA, 15 bp, Homo sapiens
accctagccccttct

SEQ ID NO: 2063989 - DNA, 15 bp, Homo sapiens
ccctagccccttctc

SEQ ID NO: 2063990 - DNA, 15 bp, Homo sapiens
cctagccccttctca

SEQ ID NO: 2063991 - DNA, 15 bp, Homo sapiens
ctagccccttctcaa

SEQ ID NO: 2063992 - DNA, 15 bp, Homo sapiens
tagccccttctcaac

SEQ ID NO: 2063993 - DNA, 15 bp, Homo sapiens
agccccttctcaaca

SEQ ID NO: 2063994 - DNA, 15 bp, Homo sapiens
gccccttctcaacac

SEQ ID NO: 2063995 - DNA, 15 bp, Homo sapiens
ccccttctcaacacg

SEQ ID NO: 2063996 - DNA, 15 bp, Homo sapiens
cccttctcaacacgc

SEQ ID NO: 2063997 - DNA, 15 bp, Homo sapiens
ccttctcaacacgcg

SEQ ID NO: 2063998 - DNA, 15 bp, Homo sapiens
cttctcaacacgcgg

SEQ ID NO: 2063999 - DNA, 15 bp, Homo sapiens
ttctcaacacgcggc

SEQ ID NO: 2064000 - DNA, 15 bp, Homo sapiens
tctcaacacgcggct

SEQ ID NO: 2064001 - DNA, 15 bp, Homo sapiens
ctcaacacgcggctc

SEQ ID NO: 2064002 - DNA, 15 bp, Homo sapiens
tcaacacgcggctct

SEQ ID NO: 2064003 - DNA, 15 bp, Homo sapiens
caacacgcggctctg

SEQ ID NO: 2064004 - DNA, 15 bp, Homo sapiens
aacacgcggctctgc

SEQ ID NO: 2064005 - DNA, 15 bp, Homo sapiens
acacgcggctctgcc

SEQ ID NO: 2064006 - DNA, 15 bp, Homo sapiens
cacgcggctctgcct

SEQ ID NO: 2064007 - DNA, 15 bp, Homo sapiens
acgcggctctgcctt

SEQ ID NO: 2064008 - DNA, 15 bp, Homo sapiens
cgcggctctgccttc

SEQ ID NO: 2064009 - DNA, 15 bp, Homo sapiens
gcggctctgccttct

SEQ ID NO: 2064010 - DNA, 15 bp, Homo sapiens
cggctctgccttctt

SEQ ID NO: 2064011 - DNA, 15 bp, Homo sapiens
ggctctgccttcttc

SEQ ID NO: 2064012 - DNA, 15 bp, Homo sapiens
gctctgccttcttcc

SEQ ID NO: 2064013 - DNA, 15 bp, Homo sapiens
ctctgccttcttccc

SEQ ID NO: 2064014 - DNA, 15 bp, Homo sapiens
tctgccttcttcccc

SEQ ID NO: 2064015 - DNA, 15 bp, Homo sapiens
ctgccttcttcccca

SEQ ID NO: 2064016 - DNA, 15 bp, Homo sapiens
tgccttcttccccag

SEQ ID NO: 2064017 - DNA, 15 bp, Homo sapiens
gccttcttccccagt

SEQ ID NO: 2064018 - DNA, 15 bp, Homo sapiens
ccttcttccccagta

SEQ ID NO: 2064019 - DNA, 15 bp, Homo sapiens
cttcttccccagtac

SEQ ID NO: 2064020 - DNA, 15 bp, Homo sapiens
ttcttccccagtacc

SEQ ID NO: 2064021 - DNA, 15 bp, Homo sapiens
tcttccccagtacca

SEQ ID NO: 2064022 - DNA, 15 bp, Homo sapiens
cttccccagtaccac

SEQ ID NO: 2064023 - DNA, 15 bp, Homo sapiens
ccccagtaccactgc

SEQ ID NO: 2064024 - DNA, 15 bp, Homo sapiens
cccagtaccactgca

SEQ ID NO: 2064025 - DNA, 15 bp, Homo sapiens
ccagtaccactgcac

SEQ ID NO: 2064026 - DNA, 15 bp, Homo sapiens
cagtaccactgcact

SEQ ID NO: 2064027 - DNA, 15 bp, Homo sapiens
agtaccactgcactg

SEQ ID NO: 2064028 - DNA, 15 bp, Homo sapiens
gtaccactgcactgc

SEQ ID NO: 2064029 - DNA, 15 bp, Homo sapiens
taccactgcactgcc

SEQ ID NO: 2064030 - DNA, 15 bp, Homo sapiens
accactgcactgccg

SEQ ID NO: 2064031 - DNA, 15 bp, Homo sapiens
ccactgcactgccga

SEQ ID NO: 2064032 - DNA, 15 bp, Homo sapiens
cactgcactgccgaa

SEQ ID NO: 2064033 - DNA, 15 bp, Homo sapiens
actgcactgccgaaa

SEQ ID NO: 2064034 - DNA, 15 bp, Homo sapiens
ctgcactgccgaaaa

SEQ ID NO: 2064035 - DNA, 15 bp, Homo sapiens
tgcactgccgaaaat

SEQ ID NO: 2064036 - DNA, 15 bp, Homo sapiens
gcactgccgaaaata

SEQ ID NO: 2064037 - DNA, 15 bp, Homo sapiens
cactgccgaaaataa

SEQ ID NO: 2064038 - DNA, 15 bp, Homo sapiens
actgccgaaaataag

SEQ ID NO: 2064039 - DNA, 15 bp, Homo sapiens
ctgccgaaaataagc

SEQ ID NO: 2064040 - DNA, 15 bp, Homo sapiens
tgccgaaaataagcc

SEQ ID NO: 2064041 - DNA, 15 bp, Homo sapiens
gccgaaaataagccc

SEQ ID NO: 2064042 - DNA, 15 bp, Homo sapiens
ccgaaaataagcccg

SEQ ID NO: 2064043 - DNA, 15 bp, Homo sapiens
cgaaaataagcccgg

SEQ ID NO: 2064044 - DNA, 15 bp, Homo sapiens
gaaaataagcccgga

SEQ ID NO: 2064045 - DNA, 15 bp, Homo sapiens
aaaataagcccggag

SEQ ID NO: 2064046 - DNA, 15 bp, Homo sapiens
aaataagcccggaga

SEQ ID NO: 2064047 - DNA, 15 bp, Homo sapiens
aataagcccggagac

SEQ ID NO: 2064048 - DNA, 15 bp, Homo sapiens
ataagcccggagact

SEQ ID NO: 2064049 - DNA, 15 bp, Homo sapiens
taagcccggagacta

SEQ ID NO: 2064050 - DNA, 15 bp, Homo sapiens
aagcccggagactaa

SEQ ID NO: 2064051 - DNA, 15 bp, Homo sapiens
agcccggagactaac

SEQ ID NO: 2064052 - DNA, 15 bp, Homo sapiens
gcccggagactaacg

SEQ ID NO: 2064053 - DNA, 15 bp, Homo sapiens
cccggagactaacgc

SEQ ID NO: 2064054 - DNA, 15 bp, Homo sapiens
ccggagactaacgca

SEQ ID NO: 2064055 - DNA, 15 bp, Homo sapiens
cggagactaacgcac

SEQ ID NO: 2064056 - DNA, 15 bp, Homo sapiens
ggagactaacgcacc

SEQ ID NO: 2064057 - DNA, 15 bp, Homo sapiens
gagactaacgcacct

SEQ ID NO: 2064058 - DNA, 15 bp, Homo sapiens
agactaacgcacctt

SEQ ID NO: 2064059 - DNA, 15 bp, Homo sapiens
gactaacgcaccttg

SEQ ID NO: 2064060 - DNA, 15 bp, Homo sapiens
actaacgcaccttgt

SEQ ID NO: 2064061 - DNA, 15 bp, Homo sapiens
ctaacgcaccttgta

SEQ ID NO: 2064062 - DNA, 15 bp, Homo sapiens
taacgcaccttgtag

SEQ ID NO: 2064063 - DNA, 15 bp, Homo sapiens
aacgcaccttgtagg

SEQ ID NO: 2064064 - DNA, 15 bp, Homo sapiens
acgcaccttgtaggg

SEQ ID NO: 2064065 - DNA, 15 bp, Homo sapiens
cgcaccttgtaggga

SEQ ID NO: 2064066 - DNA, 15 bp, Homo sapiens
gcaccttgtagggaa

SEQ ID NO: 2064067 - DNA, 15 bp, Homo sapiens
caccttgtagggaag

SEQ ID NO: 2064068 - DNA, 15 bp, Homo sapiens
accttgtagggaaga

SEQ ID NO: 2064069 - DNA, 15 bp, Homo sapiens
ccttgtagggaagag

SEQ ID NO: 2064070 - DNA, 15 bp, Homo sapiens
cttgtagggaagaga

SEQ ID NO: 2064071 - DNA, 15 bp, Homo sapiens
ttgtagggaagagaa

SEQ ID NO: 2064072 - DNA, 15 bp, Homo sapiens
tgtagggaagagaag

SEQ ID NO: 2064073 - DNA, 15 bp, Homo sapiens
gtagggaagagaagg

SEQ ID NO: 2064074 - DNA, 15 bp, Homo sapiens
tagggaagagaagga

SEQ ID NO: 2064075 - DNA, 15 bp, Homo sapiens
agggaagagaaggac

SEQ ID NO: 2064076 - DNA, 15 bp, Homo sapiens
gggaagagaaggaca

SEQ ID NO: 2064077 - DNA, 15 bp, Homo sapiens
ggaagagaaggacat

SEQ ID NO: 2064078 - DNA, 15 bp, Homo sapiens
gaagagaaggacatc

SEQ ID NO: 2064079 - DNA, 15 bp, Homo sapiens
aagagaaggacatct

SEQ ID NO: 2064080 - DNA, 15 bp, Homo sapiens
agagaaggacatctg

SEQ ID NO: 2064081 - DNA, 15 bp, Homo sapiens
gagaaggacatctgt

SEQ ID NO: 2064082 - DNA, 15 bp, Homo sapiens
agaaggacatctgta

SEQ ID NO: 2064083 - DNA, 15 bp, Homo sapiens
gaaggacatctgtat

SEQ ID NO: 2064084 - DNA, 15 bp, Homo sapiens
aaggacatctgtatc

SEQ ID NO: 2064085 - DNA, 15 bp, Homo sapiens
aggacatctgtatct

SEQ ID NO: 2064086 - DNA, 15 bp, Homo sapiens
ggacatctgtatctc

SEQ ID NO: 2064087 - DNA, 15 bp, Homo sapiens
gacatctgtatctcc

SEQ ID NO: 2064088 - DNA, 15 bp, Homo sapiens
acatctgtatctcca

SEQ ID NO: 2064089 - DNA, 15 bp, Homo sapiens
catctgtatctccaa

SEQ ID NO: 2064090 - DNA, 15 bp, Homo sapiens
atctgtatctccaag

SEQ ID NO: 2064091 - DNA, 15 bp, Homo sapiens
tctgtatctccaagc

SEQ ID NO: 2064092 - DNA, 15 bp, Homo sapiens
ctgtatctccaagct

SEQ ID NO: 2064093 - DNA, 15 bp, Homo sapiens
tgtatctccaagctt

SEQ ID NO: 2064094 - DNA, 15 bp, Homo sapiens
gtatctccaagctta

SEQ ID NO: 2064095 - DNA, 15 bp, Homo sapiens
tatctccaagcttat

SEQ ID NO: 2064096 - DNA, 15 bp, Homo sapiens
atctccaagcttatc

SEQ ID NO: 2064097 - DNA, 15 bp, Homo sapiens
tctccaagcttatcc

SEQ ID NO: 2064098 - DNA, 15 bp, Homo sapiens
ctccaagcttatcca

SEQ ID NO: 2064099 - DNA, 15 bp, Homo sapiens
tccaagcttatccaa

SEQ ID NO: 2064100 - DNA, 15 bp, Homo sapiens
ccaagcttatccaag

SEQ ID NO: 2064101 - DNA, 15 bp, Homo sapiens
caagcttatccaagc

SEQ ID NO: 2064102 - DNA, 15 bp, Homo sapiens
aagcttatccaagca

SEQ ID NO: 2064103 - DNA, 15 bp, Homo sapiens
agcttatccaagcaa

SEQ ID NO: 2064104 - DNA, 15 bp, Homo sapiens
gcttatccaagcaaa

SEQ ID NO: 2064105 - DNA, 15 bp, Homo sapiens
cttatccaagcaaag

SEQ ID NO: 2064106 - DNA, 15 bp, Homo sapiens
ttatccaagcaaagg

SEQ ID NO: 2064107 - DNA, 15 bp, Homo sapiens
tatccaagcaaaggc

SEQ ID NO: 2064108 - DNA, 15 bp, Homo sapiens
atccaagcaaaggcc

SEQ ID NO: 2064109 - DNA, 15 bp, Homo sapiens
tccaagcaaaggcct

SEQ ID NO: 2064110 - DNA, 15 bp, Homo sapiens
ccaagcaaaggcctc

SEQ ID NO: 2064111 - DNA, 15 bp, Homo sapiens
caagcaaaggcctcc

SEQ ID NO: 2064112 - DNA, 15 bp, Homo sapiens
aagcaaaggcctcca

SEQ ID NO: 2064113 - DNA, 15 bp, Homo sapiens
agcaaaggcctccag

SEQ ID NO: 2064114 - DNA, 15 bp, Homo sapiens
gcaaaggcctccaga

SEQ ID NO: 2064115 - DNA, 15 bp, Homo sapiens
caaaggcctccagag

SEQ ID NO: 2064116 - DNA, 15 bp, Homo sapiens
aaaggcctccagagt

SEQ ID NO: 2064117 - DNA, 15 bp, Homo sapiens
aaggcctccagagtc

SEQ ID NO: 2064118 - DNA, 15 bp, Homo sapiens
aggcctccagagtcc

SEQ ID NO: 2064119 - DNA, 15 bp, Homo sapiens
ggcctccagagtccc

SEQ ID NO: 2064120 - DNA, 15 bp, Homo sapiens
gcctccagagtccct

SEQ ID NO: 2064121 - DNA, 15 bp, Homo sapiens
cctccagagtccctc

SEQ ID NO: 2064122 - DNA, 15 bp, Homo sapiens
ctccagagtccctcc

SEQ ID NO: 2064123 - DNA, 15 bp, Homo sapiens
tccagagtccctccc

SEQ ID NO: 2064124 - DNA, 15 bp, Homo sapiens
ccagagtccctccca

SEQ ID NO: 2064125 - DNA, 15 bp, Homo sapiens
cagagtccctcccat

SEQ ID NO: 2064126 - DNA, 15 bp, Homo sapiens
agagtccctcccatg

SEQ ID NO: 2064127 - DNA, 15 bp, Homo sapiens
gagtccctcccatgg

SEQ ID NO: 2064128 - DNA, 15 bp, Homo sapiens
agtccctcccatggc

SEQ ID NO: 2064129 - DNA, 15 bp, Homo sapiens
gtccctcccatggcc

SEQ ID NO: 2064130 - DNA, 15 bp, Homo sapiens
tccctcccatggccc

SEQ ID NO: 2064131 - DNA, 15 bp, Homo sapiens
ccctcccatggcccg

SEQ ID NO: 2064132 - DNA, 15 bp, Homo sapiens
cctcccatggcccga

SEQ ID NO: 2064133 - DNA, 15 bp, Homo sapiens
ctcccatggcccgaa

SEQ ID NO: 2064134 - DNA, 15 bp, Homo sapiens
tcccatggcccgaaa

SEQ ID NO: 2064135 - DNA, 15 bp, Homo sapiens
cccatggcccgaaac

SEQ ID NO: 2064136 - DNA, 15 bp, Homo sapiens
ccatggcccgaaaca

SEQ ID NO: 2064137 - DNA, 15 bp, Homo sapiens
catggcccgaaacac

SEQ ID NO: 2064138 - DNA, 15 bp, Homo sapiens
atggcccgaaacacc

SEQ ID NO: 2064139 - DNA, 15 bp, Homo sapiens
tggcccgaaacacct

SEQ ID NO: 2064140 - DNA, 15 bp, Homo sapiens
ggcccgaaacacctc

SEQ ID NO: 2064141 - DNA, 15 bp, Homo sapiens
gcccgaaacacctcc

SEQ ID NO: 2064142 - DNA, 15 bp, Homo sapiens
cccgaaacacctccc

SEQ ID NO: 2064143 - DNA, 15 bp, Homo sapiens
ccgaaacacctccct

SEQ ID NO: 2064144 - DNA, 15 bp, Homo sapiens
cgaaacacctccctc

SEQ ID NO: 2064145 - DNA, 15 bp, Homo sapiens
gaaacacctccctct

SEQ ID NO: 2064146 - DNA, 15 bp, Homo sapiens
aaacacctccctctg

SEQ ID NO: 2064147 - DNA, 15 bp, Homo sapiens
aacacctccctctga

SEQ ID NO: 2064148 - DNA, 15 bp, Homo sapiens
acacctccctctgac

SEQ ID NO: 2064149 - DNA, 15 bp, Homo sapiens
cacctccctctgacc

SEQ ID NO: 2064150 - DNA, 15 bp, Homo sapiens
acctccctctgaccg

SEQ ID NO: 2064151 - DNA, 15 bp, Homo sapiens
cctccctctgaccga

SEQ ID NO: 2064152 - DNA, 15 bp, Homo sapiens
ctccctctgaccgaa

SEQ ID NO: 2064153 - DNA, 15 bp, Homo sapiens
tccctctgaccgaag

SEQ ID NO: 2064154 - DNA, 15 bp, Homo sapiens
ccctctgaccgaaga

SEQ ID NO: 2064155 - DNA, 15 bp, Homo sapiens
cctctgaccgaagag

SEQ ID NO: 2064156 - DNA, 15 bp, Homo sapiens
ctctgaccgaagagc

SEQ ID NO: 2064157 - DNA, 15 bp, Homo sapiens
tctgaccgaagagcg

SEQ ID NO: 2064158 - DNA, 15 bp, Homo sapiens
ctgaccgaagagcgt

SEQ ID NO: 2064159 - DNA, 15 bp, Homo sapiens
tgaccgaagagcgtc

SEQ ID NO: 2064160 - DNA, 15 bp, Homo sapiens
gaccgaagagcgtcc

SEQ ID NO: 2064161 - DNA, 15 bp, Homo sapiens
accgaagagcgtcct

SEQ ID NO: 2064162 - DNA, 15 bp, Homo sapiens
ccgaagagcgtcctt

SEQ ID NO: 2064163 - DNA, 15 bp, Homo sapiens
cgaagagcgtccttt

SEQ ID NO: 2064164 - DNA, 15 bp, Homo sapiens
gaagagcgtcctttc

SEQ ID NO: 2064165 - DNA, 15 bp, Homo sapiens
aagagcgtcctttct

SEQ ID NO: 2064166 - DNA, 15 bp, Homo sapiens
agagcgtcctttctt

SEQ ID NO: 2064167 - DNA, 15 bp, Homo sapiens
gagcgtcctttcttt

SEQ ID NO: 2064168 - DNA, 15 bp, Homo sapiens
agcgtcctttctttc

SEQ ID NO: 2064169 - DNA, 15 bp, Homo sapiens
gcgtcctttctttcc

SEQ ID NO: 2064170 - DNA, 15 bp, Homo sapiens
cgtcctttctttccg

SEQ ID NO: 2064171 - DNA, 15 bp, Homo sapiens
gtcctttctttccgc

SEQ ID NO: 2064172 - DNA, 15 bp, Homo sapiens
tcctttctttccgcc

SEQ ID NO: 2064173 - DNA, 15 bp, Homo sapiens
cctttctttccgccg

SEQ ID NO: 2064174 - DNA, 15 bp, Homo sapiens
ctttctttccgccgc

SEQ ID NO: 2064175 - DNA, 15 bp, Homo sapiens
tttctttccgccgcc

SEQ ID NO: 2064176 - DNA, 15 bp, Homo sapiens
ttctttccgccgcct

SEQ ID NO: 2064177 - DNA, 15 bp, Homo sapiens
tctttccgccgcctc

SEQ ID NO: 2064178 - DNA, 15 bp, Homo sapiens
ctttccgccgcctcc

SEQ ID NO: 2064179 - DNA, 15 bp, Homo sapiens
tttccgccgcctcct

SEQ ID NO: 2064180 - DNA, 15 bp, Homo sapiens
ttccgccgcctcctg

SEQ ID NO: 2064181 - DNA, 15 bp, Homo sapiens
tccgccgcctcctgg

SEQ ID NO: 2064182 - DNA, 15 bp, Homo sapiens
ccgccgcctcctgga

SEQ ID NO: 2064183 - DNA, 15 bp, Homo sapiens
cgccgcctcctggac

SEQ ID NO: 2064184 - DNA, 15 bp, Homo sapiens
gccgcctcctggact

SEQ ID NO: 2064185 - DNA, 15 bp, Homo sapiens
ccgcctcctggactc

SEQ ID NO: 2064186 - DNA, 15 bp, Homo sapiens
cgcctcctggactca

SEQ ID NO: 2064187 - DNA, 15 bp, Homo sapiens
gcctcctggactcat

SEQ ID NO: 2064188 - DNA, 15 bp, Homo sapiens
cctcctggactcatc

SEQ ID NO: 2064189 - DNA, 15 bp, Homo sapiens
ctcctggactcatcc

SEQ ID NO: 2064190 - DNA, 15 bp, Homo sapiens
tcctggactcatcct

SEQ ID NO: 2064191 - DNA, 15 bp, Homo sapiens
cctggactcatccta

SEQ ID NO: 2064192 - DNA, 15 bp, Homo sapiens
ctggactcatcctaa

SEQ ID NO: 2064193 - DNA, 15 bp, Homo sapiens
tggactcatcctaaa

SEQ ID NO: 2064194 - DNA, 15 bp, Homo sapiens
ggactcatcctaaat

SEQ ID NO: 2064195 - DNA, 15 bp, Homo sapiens
gactcatcctaaata

SEQ ID NO: 2064196 - DNA, 15 bp, Homo sapiens
actcatcctaaatag

SEQ ID NO: 2064197 - DNA, 15 bp, Homo sapiens
ctcatcctaaatagg

SEQ ID NO: 2064198 - DNA, 15 bp, Homo sapiens
tcatcctaaataggg

SEQ ID NO: 2064199 - DNA, 15 bp, Homo sapiens
catcctaaatagggc

SEQ ID NO: 2064200 - DNA, 15 bp, Homo sapiens
atcctaaatagggca

SEQ ID NO: 2064201 - DNA, 15 bp, Homo sapiens
tcctaaatagggcag

SEQ ID NO: 2064202 - DNA, 15 bp, Homo sapiens
cctaaatagggcaga

SEQ ID NO: 2064203 - DNA, 15 bp, Homo sapiens
ctaaatagggcagac

SEQ ID NO: 2064204 - DNA, 15 bp, Homo sapiens
taaatagggcagacc

SEQ ID NO: 2064205 - DNA, 15 bp, Homo sapiens
aaatagggcagaccc

SEQ ID NO: 2064206 - DNA, 15 bp, Homo sapiens
aatagggcagacccg

SEQ ID NO: 2064207 - DNA, 15 bp, Homo sapiens
atagggcagacccgg

SEQ ID NO: 2064208 - DNA, 15 bp, Homo sapiens
tagggcagacccggg

SEQ ID NO: 2064209 - DNA, 15 bp, Homo sapiens
agggcagacccgggc

SEQ ID NO: 2064210 - DNA, 15 bp, Homo sapiens
gggcagacccgggct

SEQ ID NO: 2064211 - DNA, 15 bp, Homo sapiens
ggcagacccgggcta

SEQ ID NO: 2064212 - DNA, 15 bp, Homo sapiens
gcagacccgggctaa

SEQ ID NO: 2064213 - DNA, 15 bp, Homo sapiens
cagacccgggctaaa

SEQ ID NO: 2064214 - DNA, 15 bp, Homo sapiens
agacccgggctaaac

SEQ ID NO: 2064215 - DNA, 15 bp, Homo sapiens
gacccgggctaaacc

SEQ ID NO: 2064216 - DNA, 15 bp, Homo sapiens
acccgggctaaacca

SEQ ID NO: 2064217 - DNA, 15 bp, Homo sapiens
cccgggctaaaccag

SEQ ID NO: 2064218 - DNA, 15 bp, Homo sapiens
ccgggctaaaccagt

SEQ ID NO: 2064219 - DNA, 15 bp, Homo sapiens
cgggctaaaccagtg

SEQ ID NO: 2064220 - DNA, 15 bp, Homo sapiens
gggctaaaccagtga

SEQ ID NO: 2064221 - DNA, 15 bp, Homo sapiens
ggctaaaccagtgat

SEQ ID NO: 2064222 - DNA, 15 bp, Homo sapiens
gctaaaccagtgatt

SEQ ID NO: 2064223 - DNA, 15 bp, Homo sapiens
ctaaaccagtgattt

SEQ ID NO: 2064224 - DNA, 15 bp, Homo sapiens
taaaccagtgatttt

SEQ ID NO: 2064225 - DNA, 15 bp, Homo sapiens
aaaccagtgattttt

SEQ ID NO: 2064226 - DNA, 15 bp, Homo sapiens
aaccagtgatttttt

SEQ ID NO: 2064227 - DNA, 15 bp, Homo sapiens
accagtgattttttt

SEQ ID NO: 2064228 - DNA, 15 bp, Homo sapiens
ccagtgatttttttt

SEQ ID NO: 2064229 - DNA, 15 bp, Homo sapiens
cagtgattttttttt

SEQ ID NO: 2064230 - DNA, 15 bp, Homo sapiens
agtgatttttttttc

SEQ ID NO: 2064231 - DNA, 15 bp, Homo sapiens
gtgatttttttttcc

SEQ ID NO: 2064232 - DNA, 15 bp, Homo sapiens
tgatttttttttcca

SEQ ID NO: 2064233 - DNA, 15 bp, Homo sapiens
gatttttttttccat

SEQ ID NO: 2064234 - DNA, 15 bp, Homo sapiens
atttttttttccatg

SEQ ID NO: 2064235 - DNA, 15 bp, Homo sapiens
tttttttttccatga

SEQ ID NO: 2064236 - DNA, 15 bp, Homo sapiens
ttttttttccatgaa

SEQ ID NO: 2064237 - DNA, 15 bp, Homo sapiens
tttttttccatgaat

SEQ ID NO: 2064238 - DNA, 15 bp, Homo sapiens
ttttttccatgaata

SEQ ID NO: 2064239 - DNA, 15 bp, Homo sapiens
tttttccatgaatac

SEQ ID NO: 2064240 - DNA, 15 bp, Homo sapiens
ttttccatgaatacg

SEQ ID NO: 2064241 - DNA, 15 bp, Homo sapiens
tttccatgaatacga

SEQ ID NO: 2064242 - DNA, 15 bp, Homo sapiens
ttccatgaatacgaa

SEQ ID NO: 2064243 - DNA, 15 bp, Homo sapiens
tccatgaatacgaag

SEQ ID NO: 2064244 - DNA, 15 bp, Homo sapiens
ccatgaatacgaaga

SEQ ID NO: 2064245 - DNA, 15 bp, Homo sapiens
catgaatacgaagaa

SEQ ID NO: 2064246 - DNA, 15 bp, Homo sapiens
atgaatacgaagaac

SEQ ID NO: 2064247 - DNA, 15 bp, Homo sapiens
tgaatacgaagaacc

SEQ ID NO: 2064248 - DNA, 15 bp, Homo sapiens
gaatacgaagaaccc

SEQ ID NO: 2064249 - DNA, 15 bp, Homo sapiens
aatacgaagaacccc

SEQ ID NO: 2064250 - DNA, 15 bp, Homo sapiens
atacgaagaaccccg

SEQ ID NO: 2064251 - DNA, 15 bp, Homo sapiens
tacgaagaaccccga

SEQ ID NO: 2064252 - DNA, 15 bp, Homo sapiens
acgaagaaccccgat

SEQ ID NO: 2064253 - DNA, 15 bp, Homo sapiens
cgaagaaccccgatt

SEQ ID NO: 2064254 - DNA, 15 bp, Homo sapiens
gaagaaccccgattg

SEQ ID NO: 2064255 - DNA, 15 bp, Homo sapiens
aagaaccccgattgc

SEQ ID NO: 2064256 - DNA, 15 bp, Homo sapiens
agaaccccgattgca

SEQ ID NO: 2064257 - DNA, 15 bp, Homo sapiens
gaaccccgattgcac

SEQ ID NO: 2064258 - DNA, 15 bp, Homo sapiens
aaccccgattgcact

SEQ ID NO: 2064259 - DNA, 15 bp, Homo sapiens
accccgattgcactt

SEQ ID NO: 2064260 - DNA, 15 bp, Homo sapiens
ccccgattgcacttt

SEQ ID NO: 2064261 - DNA, 15 bp, Homo sapiens
cccgattgcactttg

SEQ ID NO: 2064262 - DNA, 15 bp, Homo sapiens
ccgattgcactttgc

SEQ ID NO: 2064263 - DNA, 15 bp, Homo sapiens
cgattgcactttgcg

SEQ ID NO: 2064264 - DNA, 15 bp, Homo sapiens
gattgcactttgcga

SEQ ID NO: 2064265 - DNA, 15 bp, Homo sapiens
attgcactttgcgaa

SEQ ID NO: 2064266 - DNA, 15 bp, Homo sapiens
ttgcactttgcgaag

SEQ ID NO: 2064267 - DNA, 15 bp, Homo sapiens
tgcactttgcgaagt

SEQ ID NO: 2064268 - DNA, 15 bp, Homo sapiens
gcactttgcgaagtc

SEQ ID NO: 2064269 - DNA, 15 bp, Homo sapiens
cactttgcgaagtct

SEQ ID NO: 2064270 - DNA, 15 bp, Homo sapiens
actttgcgaagtctg

SEQ ID NO: 2064271 - DNA, 15 bp, Homo sapiens
ctttgcgaagtctgc

SEQ ID NO: 2064272 - DNA, 15 bp, Homo sapiens
tttgcgaagtctgcg

SEQ ID NO: 2064273 - DNA, 15 bp, Homo sapiens
ttgcgaagtctgcgc

SEQ ID NO: 2064274 - DNA, 15 bp, Homo sapiens
tgcgaagtctgcgcg

SEQ ID NO: 2064275 - DNA, 15 bp, Homo sapiens
gcgaagtctgcgcgt

SEQ ID NO: 2064276 - DNA, 15 bp, Homo sapiens
cgaagtctgcgcgta

SEQ ID NO: 2064277 - DNA, 15 bp, Homo sapiens
gaagtctgcgcgtat

SEQ ID NO: 2064278 - DNA, 15 bp, Homo sapiens
aagtctgcgcgtatt

SEQ ID NO: 2064279 - DNA, 15 bp, Homo sapiens
agtctgcgcgtattc

SEQ ID NO: 2064280 - DNA, 15 bp, Homo sapiens
gtctgcgcgtattcc

SEQ ID NO: 2064281 - DNA, 15 bp, Homo sapiens
tctgcgcgtattcct

SEQ ID NO: 2064282 - DNA, 15 bp, Homo sapiens
ctgcgcgtattcctt

SEQ ID NO: 2064283 - DNA, 15 bp, Homo sapiens
tgcgcgtattccttt

SEQ ID NO: 2064284 - DNA, 15 bp, Homo sapiens
gcgcgtattccttta

SEQ ID NO: 2064285 - DNA, 15 bp, Homo sapiens
cgcgtattcctttat

SEQ ID NO: 2064286 - DNA, 15 bp, Homo sapiens
gcgtattcctttatc

SEQ ID NO: 2064287 - DNA, 15 bp, Homo sapiens
cgtattcctttatcc

SEQ ID NO: 2064288 - DNA, 15 bp, Homo sapiens
gtattcctttatccc

SEQ ID NO: 2064289 - DNA, 15 bp, Homo sapiens
tattcctttatcccg

SEQ ID NO: 2064290 - DNA, 15 bp, Homo sapiens
attcctttatcccgc

SEQ ID NO: 2064291 - DNA, 15 bp, Homo sapiens
ttcctttatcccgca

SEQ ID NO: 2064292 - DNA, 15 bp, Homo sapiens
tcctttatcccgcaa

SEQ ID NO: 2064293 - DNA, 15 bp, Homo sapiens
cctttatcccgcaac

SEQ ID NO: 2064294 - DNA, 15 bp, Homo sapiens
ctttatcccgcaact

SEQ ID NO: 2064295 - DNA, 15 bp, Homo sapiens
tttatcccgcaacta

SEQ ID NO: 2064296 - DNA, 15 bp, Homo sapiens
ttatcccgcaactag

SEQ ID NO: 2064297 - DNA, 15 bp, Homo sapiens
tatcccgcaactagc

SEQ ID NO: 2064298 - DNA, 15 bp, Homo sapiens
atcccgcaactagct

SEQ ID NO: 2064299 - DNA, 15 bp, Homo sapiens
tcccgcaactagctt

SEQ ID NO: 2064300 - DNA, 15 bp, Homo sapiens
cccgcaactagcttg

SEQ ID NO: 2064301 - DNA, 15 bp, Homo sapiens
ccgcaactagcttgc

SEQ ID NO: 2064302 - DNA, 15 bp, Homo sapiens
cgcaactagcttgct

SEQ ID NO: 2064303 - DNA, 15 bp, Homo sapiens
gcaactagcttgctc

SEQ ID NO: 2064304 - DNA, 15 bp, Homo sapiens
caactagcttgctcc

SEQ ID NO: 2064305 - DNA, 15 bp, Homo sapiens
aactagcttgctccc

SEQ ID NO: 2064306 - DNA, 15 bp, Homo sapiens
actagcttgctcccg

SEQ ID NO: 2064307 - DNA, 15 bp, Homo sapiens
ctagcttgctcccgg

SEQ ID NO: 2064308 - DNA, 15 bp, Homo sapiens
tagcttgctcccggg

SEQ ID NO: 2064309 - DNA, 15 bp, Homo sapiens
agcttgctcccgggt

SEQ ID NO: 2064310 - DNA, 15 bp, Homo sapiens
gcttgctcccgggtg

SEQ ID NO: 2064311 - DNA, 15 bp, Homo sapiens
cttgctcccgggtgg

SEQ ID NO: 2064312 - DNA, 15 bp, Homo sapiens
ttgctcccgggtgga

SEQ ID NO: 2064313 - DNA, 15 bp, Homo sapiens
tgctcccgggtggag

SEQ ID NO: 2064314 - DNA, 15 bp, Homo sapiens
gctcccgggtggagt

SEQ ID NO: 2064315 - DNA, 15 bp, Homo sapiens
ctcccgggtggagtg

SEQ ID NO: 2064316 - DNA, 15 bp, Homo sapiens
tcccgggtggagtgg

SEQ ID NO: 2064317 - DNA, 15 bp, Homo sapiens
cccgggtggagtggg

SEQ ID NO: 2064318 - DNA, 15 bp, Homo sapiens
ccgggtggagtgggc

SEQ ID NO: 2064319 - DNA, 15 bp, Homo sapiens
cgggtggagtgggca

SEQ ID NO: 2064320 - DNA, 15 bp, Homo sapiens
gggtggagtgggcac

SEQ ID NO: 2064321 - DNA, 15 bp, Homo sapiens
ggtggagtgggcaca

SEQ ID NO: 2064322 - DNA, 15 bp, Homo sapiens
gtggagtgggcacag

SEQ ID NO: 2064323 - DNA, 15 bp, Homo sapiens
tggagtgggcacagt

SEQ ID NO: 2064324 - DNA, 15 bp, Homo sapiens
ggagtgggcacagtg

SEQ ID NO: 2064325 - DNA, 15 bp, Homo sapiens
gagtgggcacagtgg

SEQ ID NO: 2064326 - DNA, 15 bp, Homo sapiens
agtgggcacagtggg

SEQ ID NO: 2064327 - DNA, 15 bp, Homo sapiens
gtgggcacagtgggg

SEQ ID NO: 2064328 - DNA, 15 bp, Homo sapiens
tgggcacagtgggga

SEQ ID NO: 2064329 - DNA, 15 bp, Homo sapiens
ggcacagtggggagc

SEQ ID NO: 2064330 - DNA, 15 bp, Homo sapiens
gcacagtggggagcg

SEQ ID NO: 2064331 - DNA, 15 bp, Homo sapiens
cacagtggggagcgg

SEQ ID NO: 2064332 - DNA, 15 bp, Homo sapiens
acagtggggagcggt

SEQ ID NO: 2064333 - DNA, 15 bp, Homo sapiens
cagtggggagcggtc

SEQ ID NO: 2064334 - DNA, 15 bp, Homo sapiens
agtggggagcggtca

SEQ ID NO: 2064335 - DNA, 15 bp, Homo sapiens
gtggggagcggtcag

SEQ ID NO: 2064336 - DNA, 15 bp, Homo sapiens
tggggagcggtcagg

SEQ ID NO: 2064337 - DNA, 15 bp, Homo sapiens
ggggagcggtcaggg

SEQ ID NO: 2064338 - DNA, 15 bp, Homo sapiens
gggagcggtcagggc

SEQ ID NO: 2064339 - DNA, 15 bp, Homo sapiens
ggagcggtcagggca

SEQ ID NO: 2064340 - DNA, 15 bp, Homo sapiens
gagcggtcagggcag

SEQ ID NO: 2064341 - DNA, 15 bp, Homo sapiens
agcggtcagggcagg

SEQ ID NO: 2064342 - DNA, 15 bp, Homo sapiens
gcggtcagggcaggg

SEQ ID NO: 2064343 - DNA, 15 bp, Homo sapiens
cggtcagggcagggc

SEQ ID NO: 2064344 - DNA, 15 bp, Homo sapiens
ggtcagggcagggca

SEQ ID NO: 2064345 - DNA, 15 bp, Homo sapiens
gtcagggcagggcag

SEQ ID NO: 2064346 - DNA, 15 bp, Homo sapiens
tcagggcagggcagg

SEQ ID NO: 2064347 - DNA, 15 bp, Homo sapiens
cagggcagggcaggg

SEQ ID NO: 2064348 - DNA, 15 bp, Homo sapiens
agggcagggcagggc

SEQ ID NO: 2064349 - DNA, 15 bp, Homo sapiens
gggcagggcagggcc

SEQ ID NO: 2064350 - DNA, 15 bp, Homo sapiens
ggcagggcagggccc

SEQ ID NO: 2064351 - DNA, 15 bp, Homo sapiens
gcagggcagggccca

SEQ ID NO: 2064352 - DNA, 15 bp, Homo sapiens
cagggcagggcccaa

SEQ ID NO: 2064353 - DNA, 15 bp, Homo sapiens
agggcagggcccaac

SEQ ID NO: 2064354 - DNA, 15 bp, Homo sapiens
gggcagggcccaacg

SEQ ID NO: 2064355 - DNA, 15 bp, Homo sapiens
ggcagggcccaacgc

SEQ ID NO: 2064356 - DNA, 15 bp, Homo sapiens
gcagggcccaacgct

SEQ ID NO: 2064357 - DNA, 15 bp, Homo sapiens
cagggcccaacgctg

SEQ ID NO: 2064358 - DNA, 15 bp, Homo sapiens
agggcccaacgctgg

SEQ ID NO: 2064359 - DNA, 15 bp, Homo sapiens
gggcccaacgctggc

SEQ ID NO: 2064360 - DNA, 15 bp, Homo sapiens
ggcccaacgctggcc

SEQ ID NO: 2064361 - DNA, 15 bp, Homo sapiens
gcccaacgctggccc

SEQ ID NO: 2064362 - DNA, 15 bp, Homo sapiens
cccaacgctggcccc

SEQ ID NO: 2064363 - DNA, 15 bp, Homo sapiens
ccaacgctggcccct

SEQ ID NO: 2064364 - DNA, 15 bp, Homo sapiens
caacgctggcccctc

SEQ ID NO: 2064365 - DNA, 15 bp, Homo sapiens
aacgctggcccctcg

SEQ ID NO: 2064366 - DNA, 15 bp, Homo sapiens
acgctggcccctcgc

SEQ ID NO: 2064367 - DNA, 15 bp, Homo sapiens
cgctggcccctcgcg

SEQ ID NO: 2064368 - DNA, 15 bp, Homo sapiens
gctggcccctcgcgg

SEQ ID NO: 2064369 - DNA, 15 bp, Homo sapiens
ctggcccctcgcgga

SEQ ID NO: 2064370 - DNA, 15 bp, Homo sapiens
tggcccctcgcggag

SEQ ID NO: 2064371 - DNA, 15 bp, Homo sapiens
ggcccctcgcggagc

SEQ ID NO: 2064372 - DNA, 15 bp, Homo sapiens
gcccctcgcggagct

SEQ ID NO: 2064373 - DNA, 15 bp, Homo sapiens
cccctcgcggagctt

SEQ ID NO: 2064374 - DNA, 15 bp, Homo sapiens
ccctcgcggagcttt

SEQ ID NO: 2064375 - DNA, 15 bp, Homo sapiens
cctcgcggagctttc

SEQ ID NO: 2064376 - DNA, 15 bp, Homo sapiens
ctcgcggagctttcc

SEQ ID NO: 2064377 - DNA, 15 bp, Homo sapiens
tcgcggagctttccc

SEQ ID NO: 2064378 - DNA, 15 bp, Homo sapiens
cgcggagctttccct

SEQ ID NO: 2064379 - DNA, 15 bp, Homo sapiens
gcggagctttccctg

SEQ ID NO: 2064380 - DNA, 15 bp, Homo sapiens
cggagctttccctgg

SEQ ID NO: 2064381 - DNA, 15 bp, Homo sapiens
ggagctttccctggc

SEQ ID NO: 2064382 - DNA, 15 bp, Homo sapiens
gagctttccctggcg

SEQ ID NO: 2064383 - DNA, 15 bp, Homo sapiens
agctttccctggcgc

SEQ ID NO: 2064384 - DNA, 15 bp, Homo sapiens
gctttccctggcgcg

SEQ ID NO: 2064385 - DNA, 15 bp, Homo sapiens
ctttccctggcgcga

SEQ ID NO: 2064386 - DNA, 15 bp, Homo sapiens
tttccctggcgcgac

SEQ ID NO: 2064387 - DNA, 15 bp, Homo sapiens
ttccctggcgcgacc

SEQ ID NO: 2064388 - DNA, 15 bp, Homo sapiens
tccctggcgcgacct

SEQ ID NO: 2064389 - DNA, 15 bp, Homo sapiens
ccctggcgcgacctc

SEQ ID NO: 2064390 - DNA, 15 bp, Homo sapiens
cctggcgcgacctca

SEQ ID NO: 2064391 - DNA, 15 bp, Homo sapiens
ctggcgcgacctcac

SEQ ID NO: 2064392 - DNA, 15 bp, Homo sapiens
tggcgcgacctcaca

SEQ ID NO: 2064393 - DNA, 15 bp, Homo sapiens
ggcgcgacctcacac

SEQ ID NO: 2064394 - DNA, 15 bp, Homo sapiens
gcgcgacctcacacg

SEQ ID NO: 2064395 - DNA, 15 bp, Homo sapiens
cgcgacctcacacgg

SEQ ID NO: 2064396 - DNA, 15 bp, Homo sapiens
gcgacctcacacggt

SEQ ID NO: 2064397 - DNA, 15 bp, Homo sapiens
cgacctcacacggtc

SEQ ID NO: 2064398 - DNA, 15 bp, Homo sapiens
gacctcacacggtcg

SEQ ID NO: 2064399 - DNA, 15 bp, Homo sapiens
acctcacacggtcgc

SEQ ID NO: 2064400 - DNA, 15 bp, Homo sapiens
cctcacacggtcgct

SEQ ID NO: 2064401 - DNA, 15 bp, Homo sapiens
ctcacacggtcgctg

SEQ ID NO: 2064402 - DNA, 15 bp, Homo sapiens
tcacacggtcgctgc

SEQ ID NO: 2064403 - DNA, 15 bp, Homo sapiens
cacacggtcgctgcc

SEQ ID NO: 2064404 - DNA, 15 bp, Homo sapiens
acacggtcgctgcct

SEQ ID NO: 2064405 - DNA, 15 bp, Homo sapiens
cacggtcgctgcctc

SEQ ID NO: 2064406 - DNA, 15 bp, Homo sapiens
acggtcgctgcctct

SEQ ID NO: 2064407 - DNA, 15 bp, Homo sapiens
cggtcgctgcctcta

SEQ ID NO: 2064408 - DNA, 15 bp, Homo sapiens
ggtcgctgcctctat

SEQ ID NO: 2064409 - DNA, 15 bp, Homo sapiens
gtcgctgcctctatt

SEQ ID NO: 2064410 - DNA, 15 bp, Homo sapiens
tcgctgcctctattc

SEQ ID NO: 2064411 - DNA, 15 bp, Homo sapiens
cgctgcctctattcc

SEQ ID NO: 2064412 - DNA, 15 bp, Homo sapiens
gctgcctctattccg

SEQ ID NO: 2064413 - DNA, 15 bp, Homo sapiens
ctgcctctattccga

SEQ ID NO: 2064414 - DNA, 15 bp, Homo sapiens
tgcctctattccgac

SEQ ID NO: 2064415 - DNA, 15 bp, Homo sapiens
gcctctattccgacc

SEQ ID NO: 2064416 - DNA, 15 bp, Homo sapiens
cctctattccgacca

SEQ ID NO: 2064417 - DNA, 15 bp, Homo sapiens
ctctattccgaccac

SEQ ID NO: 2064418 - DNA, 15 bp, Homo sapiens
tctattccgaccacg

SEQ ID NO: 2064419 - DNA, 15 bp, Homo sapiens
ctattccgaccacgc

SEQ ID NO: 2064420 - DNA, 15 bp, Homo sapiens
tattccgaccacgct

SEQ ID NO: 2064421 - DNA, 15 bp, Homo sapiens
attccgaccacgctc

SEQ ID NO: 2064422 - DNA, 15 bp, Homo sapiens
ttccgaccacgctct

SEQ ID NO: 2064423 - DNA, 15 bp, Homo sapiens
tccgaccacgctctg

SEQ ID NO: 2064424 - DNA, 15 bp, Homo sapiens
ccgaccacgctctgc

SEQ ID NO: 2064425 - DNA, 15 bp, Homo sapiens
cgaccacgctctgct

SEQ ID NO: 2064426 - DNA, 15 bp, Homo sapiens
gaccacgctctgctt

SEQ ID NO: 2064427 - DNA, 15 bp, Homo sapiens
accacgctctgcttc

SEQ ID NO: 2064428 - DNA, 15 bp, Homo sapiens
ccacgctctgcttcg

SEQ ID NO: 2064429 - DNA, 15 bp, Homo sapiens
cacgctctgcttcgc

SEQ ID NO: 2064430 - DNA, 15 bp, Homo sapiens
acgctctgcttcgct

SEQ ID NO: 2064431 - DNA, 15 bp, Homo sapiens
cgctctgcttcgctg

SEQ ID NO: 2064432 - DNA, 15 bp, Homo sapiens
gctctgcttcgctgg

SEQ ID NO: 2064433 - DNA, 15 bp, Homo sapiens
ctctgcttcgctggc

SEQ ID NO: 2064434 - DNA, 15 bp, Homo sapiens
tctgcttcgctggct

SEQ ID NO: 2064435 - DNA, 15 bp, Homo sapiens
ctgcttcgctggctg

SEQ ID NO: 2064436 - DNA, 15 bp, Homo sapiens
tgcttcgctggctgc

SEQ ID NO: 2064437 - DNA, 15 bp, Homo sapiens
gcttcgctggctgcg

SEQ ID NO: 2064438 - DNA, 15 bp, Homo sapiens
cttcgctggctgcgg

SEQ ID NO: 2064439 - DNA, 15 bp, Homo sapiens
ttcgctggctgcggc

SEQ ID NO: 2064440 - DNA, 15 bp, Homo sapiens
tcgctggctgcggct

SEQ ID NO: 2064441 - DNA, 15 bp, Homo sapiens
cgctggctgcggctc

SEQ ID NO: 2064442 - DNA, 15 bp, Homo sapiens
gctggctgcggctcc

SEQ ID NO: 2064443 - DNA, 15 bp, Homo sapiens
ctggctgcggctccg

SEQ ID NO: 2064444 - DNA, 15 bp, Homo sapiens
tggctgcggctccgc

SEQ ID NO: 2064445 - DNA, 15 bp, Homo sapiens
ggctgcggctccgcc

SEQ ID NO: 2064446 - DNA, 15 bp, Homo sapiens
gctgcggctccgcca

SEQ ID NO: 2064447 - DNA, 15 bp, Homo sapiens
ctgcggctccgccag

SEQ ID NO: 2064448 - DNA, 15 bp, Homo sapiens
tgcggctccgccagg

SEQ ID NO: 2064449 - DNA, 15 bp, Homo sapiens
gcggctccgccagga

SEQ ID NO: 2064450 - DNA, 15 bp, Homo sapiens
cggctccgccaggaa

SEQ ID NO: 2064451 - DNA, 15 bp, Homo sapiens
ggctccgccaggaat

SEQ ID NO: 2064452 - DNA, 15 bp, Homo sapiens
gctccgccaggaatc

SEQ ID NO: 2064453 - DNA, 15 bp, Homo sapiens
ctccgccaggaatcc

SEQ ID NO: 2064454 - DNA, 15 bp, Homo sapiens
tccgccaggaatccg

SEQ ID NO: 2064455 - DNA, 15 bp, Homo sapiens
ccgccaggaatccga

SEQ ID NO: 2064456 - DNA, 15 bp, Homo sapiens
cgccaggaatccgag

SEQ ID NO: 2064457 - DNA, 15 bp, Homo sapiens
gccaggaatccgagg

SEQ ID NO: 2064458 - DNA, 15 bp, Homo sapiens
ccaggaatccgaggg

SEQ ID NO: 2064459 - DNA, 15 bp, Homo sapiens
caggaatccgagggg

SEQ ID NO: 2064460 - DNA, 15 bp, Homo sapiens
aggaatccgaggggg

SEQ ID NO: 2064461 - DNA, 15 bp, Homo sapiens
ggaatccgagggggc

SEQ ID NO: 2064462 - DNA, 15 bp, Homo sapiens
gaatccgagggggcg

SEQ ID NO: 2064463 - DNA, 15 bp, Homo sapiens
aatccgagggggcgc

SEQ ID NO: 2064464 - DNA, 15 bp, Homo sapiens
atccgagggggcgca

SEQ ID NO: 2064465 - DNA, 15 bp, Homo sapiens
tccgagggggcgcag

SEQ ID NO: 2064466 - DNA, 15 bp, Homo sapiens
ccgagggggcgcagg

SEQ ID NO: 2064467 - DNA, 15 bp, Homo sapiens
cgagggggcgcaggc

SEQ ID NO: 2064468 - DNA, 15 bp, Homo sapiens
gagggggcgcaggcc

SEQ ID NO: 2064469 - DNA, 15 bp, Homo sapiens
agggggcgcaggccc

SEQ ID NO: 2064470 - DNA, 15 bp, Homo sapiens
gggggcgcaggccca

SEQ ID NO: 2064471 - DNA, 15 bp, Homo sapiens
ggggcgcaggcccag

SEQ ID NO: 2064472 - DNA, 15 bp, Homo sapiens
gggcgcaggcccagg

SEQ ID NO: 2064473 - DNA, 15 bp, Homo sapiens
ggcgcaggcccaggc

SEQ ID NO: 2064474 - DNA, 15 bp, Homo sapiens
gcgcaggcccaggct

SEQ ID NO: 2064475 - DNA, 15 bp, Homo sapiens
cgcaggcccaggctc

SEQ ID NO: 2064476 - DNA, 15 bp, Homo sapiens
gcaggcccaggctcg

SEQ ID NO: 2064477 - DNA, 15 bp, Homo sapiens
caggcccaggctcgg

SEQ ID NO: 2064478 - DNA, 15 bp, Homo sapiens
aggcccaggctcggc

SEQ ID NO: 2064479 - DNA, 15 bp, Homo sapiens
ggcccaggctcggcc

SEQ ID NO: 2064480 - DNA, 15 bp, Homo sapiens
gcccaggctcggccc

SEQ ID NO: 2064481 - DNA, 15 bp, Homo sapiens
cccaggctcggccct

SEQ ID NO: 2064482 - DNA, 15 bp, Homo sapiens
ccaggctcggcccta

SEQ ID NO: 2064483 - DNA, 15 bp, Homo sapiens
caggctcggccctag

SEQ ID NO: 2064484 - DNA, 15 bp, Homo sapiens
aggctcggccctaga

SEQ ID NO: 2064485 - DNA, 15 bp, Homo sapiens
ggctcggccctagat

SEQ ID NO: 2064486 - DNA, 15 bp, Homo sapiens
gctcggccctagatg

SEQ ID NO: 2064487 - DNA, 15 bp, Homo sapiens
ctcggccctagatgc

SEQ ID NO: 2064488 - DNA, 15 bp, Homo sapiens
tcggccctagatgcg

SEQ ID NO: 2064489 - DNA, 15 bp, Homo sapiens
cggccctagatgcgc

SEQ ID NO: 2064490 - DNA, 15 bp, Homo sapiens
ggccctagatgcgcg

SEQ ID NO: 2064491 - DNA, 15 bp, Homo sapiens
gccctagatgcgcgg

SEQ ID NO: 2064492 - DNA, 15 bp, Homo sapiens
ccctagatgcgcgga

SEQ ID NO: 2064493 - DNA, 15 bp, Homo sapiens
cctagatgcgcggaa

SEQ ID NO: 2064494 - DNA, 15 bp, Homo sapiens
ctagatgcgcggaat

SEQ ID NO: 2064495 - DNA, 15 bp, Homo sapiens
tagatgcgcggaatc

SEQ ID NO: 2064496 - DNA, 15 bp, Homo sapiens
agatgcgcggaatcg

SEQ ID NO: 2064497 - DNA, 15 bp, Homo sapiens
gatgcgcggaatcgc

SEQ ID NO: 2064498 - DNA, 15 bp, Homo sapiens
atgcgcggaatcgcc

SEQ ID NO: 2064499 - DNA, 15 bp, Homo sapiens
tgcgcggaatcgcca

SEQ ID NO: 2064500 - DNA, 15 bp, Homo sapiens
gcgcggaatcgccat

SEQ ID NO: 2064501 - DNA, 15 bp, Homo sapiens
cgcggaatcgccatc

SEQ ID NO: 2064502 - DNA, 15 bp, Homo sapiens
gcggaatcgccatca

SEQ ID NO: 2064503 - DNA, 15 bp, Homo sapiens
cggaatcgccatcag

SEQ ID NO: 2064504 - DNA, 15 bp, Homo sapiens
ggaatcgccatcagc

SEQ ID NO: 2064505 - DNA, 15 bp, Homo sapiens
gaatcgccatcagcc

SEQ ID NO: 2064506 - DNA, 15 bp, Homo sapiens
aatcgccatcagcct

SEQ ID NO: 2064507 - DNA, 15 bp, Homo sapiens
atcgccatcagcctt

SEQ ID NO: 2064508 - DNA, 15 bp, Homo sapiens
tcgccatcagccttt

SEQ ID NO: 2064509 - DNA, 15 bp, Homo sapiens
cgccatcagcctttg

SEQ ID NO: 2064510 - DNA, 15 bp, Homo sapiens
gccatcagcctttgc

SEQ ID NO: 2064511 - DNA, 15 bp, Homo sapiens
ccatcagcctttgct

SEQ ID NO: 2064512 - DNA, 15 bp, Homo sapiens
catcagcctttgctt

SEQ ID NO: 2064513 - DNA, 15 bp, Homo sapiens
atcagcctttgctta

SEQ ID NO: 2064514 - DNA, 15 bp, Homo sapiens
tcagcctttgcttac

SEQ ID NO: 2064515 - DNA, 15 bp, Homo sapiens
gcctttgcttacacc

SEQ ID NO: 2064516 - DNA, 15 bp, Homo sapiens
cctttgcttacacca

SEQ ID NO: 2064517 - DNA, 15 bp, Homo sapiens
ctttgcttacaccag

SEQ ID NO: 2064518 - DNA, 15 bp, Homo sapiens
tttgcttacaccagc

SEQ ID NO: 2064519 - DNA, 15 bp, Homo sapiens
ttgcttacaccagcg

SEQ ID NO: 2064520 - DNA, 15 bp, Homo sapiens
tgcttacaccagcgt

SEQ ID NO: 2064521 - DNA, 15 bp, Homo sapiens
gcttacaccagcgtg

SEQ ID NO: 2064522 - DNA, 15 bp, Homo sapiens
cttacaccagcgtgg

SEQ ID NO: 2064523 - DNA, 15 bp, Homo sapiens
ttacaccagcgtggc

SEQ ID NO: 2064524 - DNA, 15 bp, Homo sapiens
tacaccagcgtggcc

SEQ ID NO: 2064525 - DNA, 15 bp, Homo sapiens
acaccagcgtggccg

SEQ ID NO: 2064526 - DNA, 15 bp, Homo sapiens
caccagcgtggccgc

SEQ ID NO: 2064527 - DNA, 15 bp, Homo sapiens
accagcgtggccgca

SEQ ID NO: 2064528 - DNA, 15 bp, Homo sapiens
ccagcgtggccgcag

SEQ ID NO: 2064529 - DNA, 15 bp, Homo sapiens
cagcgtggccgcagg

SEQ ID NO: 2064530 - DNA, 15 bp, Homo sapiens
agcgtggccgcaggg

SEQ ID NO: 2064531 - DNA, 15 bp, Homo sapiens
gcgtggccgcaggga

SEQ ID NO: 2064532 - DNA, 15 bp, Homo sapiens
cgtggccgcagggaa

SEQ ID NO: 2064533 - DNA, 15 bp, Homo sapiens
gtggccgcagggaaa

SEQ ID NO: 2064534 - DNA, 15 bp, Homo sapiens
tggccgcagggaaac

SEQ ID NO: 2064535 - DNA, 15 bp, Homo sapiens
ggccgcagggaaact

SEQ ID NO: 2064536 - DNA, 15 bp, Homo sapiens
gccgcagggaaactc

SEQ ID NO: 2064537 - DNA, 15 bp, Homo sapiens
ccgcagggaaactcc

SEQ ID NO: 2064538 - DNA, 15 bp, Homo sapiens
cgcagggaaactcct

SEQ ID NO: 2064539 - DNA, 15 bp, Homo sapiens
gcagggaaactcctt

SEQ ID NO: 2064540 - DNA, 15 bp, Homo sapiens
cagggaaactccttt

SEQ ID NO: 2064541 - DNA, 15 bp, Homo sapiens
agggaaactcctttc

SEQ ID NO: 2064542 - DNA, 15 bp, Homo sapiens
gggaaactcctttct

SEQ ID NO: 2064543 - DNA, 15 bp, Homo sapiens
ggaaactcctttctc

SEQ ID NO: 2064544 - DNA, 15 bp, Homo sapiens
gaaactcctttctct

SEQ ID NO: 2064545 - DNA, 15 bp, Homo sapiens
aaactcctttctctc

SEQ ID NO: 2064546 - DNA, 15 bp, Homo sapiens
aactcctttctctcc

SEQ ID NO: 2064547 - DNA, 15 bp, Homo sapiens
actcctttctctccc

SEQ ID NO: 2064548 - DNA, 15 bp, Homo sapiens
ctcctttctctccct

SEQ ID NO: 2064549 - DNA, 15 bp, Homo sapiens
tcctttctctccctc

SEQ ID NO: 2064550 - DNA, 15 bp, Homo sapiens
cctttctctccctcc

SEQ ID NO: 2064551 - DNA, 15 bp, Homo sapiens
ctttctctccctcca

SEQ ID NO: 2064552 - DNA, 15 bp, Homo sapiens
tttctctccctccag

SEQ ID NO: 2064553 - DNA, 15 bp, Homo sapiens
ttctctccctccagt

SEQ ID NO: 2064554 - DNA, 15 bp, Homo sapiens
tctctccctccagtg

SEQ ID NO: 2064555 - DNA, 15 bp, Homo sapiens
ctctccctccagtgt

SEQ ID NO: 2064556 - DNA, 15 bp, Homo sapiens
tctccctccagtgtc

SEQ ID NO: 2064557 - DNA, 15 bp, Homo sapiens
ctccctccagtgtca

SEQ ID NO: 2064558 - DNA, 15 bp, Homo sapiens
tccctccagtgtcac

SEQ ID NO: 2064559 - DNA, 15 bp, Homo sapiens
ccctccagtgtcact

SEQ ID NO: 2064560 - DNA, 15 bp, Homo sapiens
cctccagtgtcactt

SEQ ID NO: 2064561 - DNA, 15 bp, Homo sapiens
ctccagtgtcacttt

SEQ ID NO: 2064562 - DNA, 15 bp, Homo sapiens
tccagtgtcactttg

SEQ ID NO: 2064563 - DNA, 15 bp, Homo sapiens
ccagtgtcactttgc

SEQ ID NO: 2064564 - DNA, 15 bp, Homo sapiens
cagtgtcactttgcg

SEQ ID NO: 2064565 - DNA, 15 bp, Homo sapiens
agtgtcactttgcga

SEQ ID NO: 2064566 - DNA, 15 bp, Homo sapiens
gtgtcactttgcgag

SEQ ID NO: 2064567 - DNA, 15 bp, Homo sapiens
tgtcactttgcgaga

SEQ ID NO: 2064568 - DNA, 15 bp, Homo sapiens
gtcactttgcgagac

SEQ ID NO: 2064569 - DNA, 15 bp, Homo sapiens
tcactttgcgagaca

SEQ ID NO: 2064570 - DNA, 15 bp, Homo sapiens
cactttgcgagacaa

SEQ ID NO: 2064571 - DNA, 15 bp, Homo sapiens
actttgcgagacaag

SEQ ID NO: 2064572 - DNA, 15 bp, Homo sapiens
ctttgcgagacaaga

SEQ ID NO: 2064573 - DNA, 15 bp, Homo sapiens
tttgcgagacaagaa

SEQ ID NO: 2064574 - DNA, 15 bp, Homo sapiens
ttgcgagacaagaac

SEQ ID NO: 2064575 - DNA, 15 bp, Homo sapiens
tgcgagacaagaaca

SEQ ID NO: 2064576 - DNA, 15 bp, Homo sapiens
gcgagacaagaacag

SEQ ID NO: 2064577 - DNA, 15 bp, Homo sapiens
cgagacaagaacaga

SEQ ID NO: 2064578 - DNA, 15 bp, Homo sapiens
gagacaagaacagag

SEQ ID NO: 2064579 - DNA, 15 bp, Homo sapiens
agacaagaacagagg

SEQ ID NO: 2064580 - DNA, 15 bp, Homo sapiens
gacaagaacagaggg

SEQ ID NO: 2064581 - DNA, 15 bp, Homo sapiens
acaagaacagagggc

SEQ ID NO: 2064582 - DNA, 15 bp, Homo sapiens
caagaacagagggct

SEQ ID NO: 2064583 - DNA, 15 bp, Homo sapiens
aagaacagagggctc

SEQ ID NO: 2064584 - DNA, 15 bp, Homo sapiens
agaacagagggctca

SEQ ID NO: 2064585 - DNA, 15 bp, Homo sapiens
gaacagagggctcat

SEQ ID NO: 2064586 - DNA, 15 bp, Homo sapiens
aacagagggctcata

SEQ ID NO: 2064587 - DNA, 15 bp, Homo sapiens
acagagggctcatac

SEQ ID NO: 2064588 - DNA, 15 bp, Homo sapiens
cagagggctcataca

SEQ ID NO: 2064589 - DNA, 15 bp, Homo sapiens
agagggctcatacaa

SEQ ID NO: 2064590 - DNA, 15 bp, Homo sapiens
gagggctcatacaaa

SEQ ID NO: 2064591 - DNA, 15 bp, Homo sapiens
agggctcatacaaaa

SEQ ID NO: 2064592 - DNA, 15 bp, Homo sapiens
gggctcatacaaaag

SEQ ID NO: 2064593 - DNA, 15 bp, Homo sapiens
ggctcatacaaaaga

SEQ ID NO: 2064594 - DNA, 15 bp, Homo sapiens
gctcatacaaaagaa

SEQ ID NO: 2064595 - DNA, 15 bp, Homo sapiens
ctcatacaaaagaag

SEQ ID NO: 2064596 - DNA, 15 bp, Homo sapiens
tcatacaaaagaagg

SEQ ID NO: 2064597 - DNA, 15 bp, Homo sapiens
catacaaaagaaggc

SEQ ID NO: 2064598 - DNA, 15 bp, Homo sapiens
atacaaaagaaggct

SEQ ID NO: 2064599 - DNA, 15 bp, Homo sapiens
tacaaaagaaggcta

SEQ ID NO: 2064600 - DNA, 15 bp, Homo sapiens
acaaaagaaggctaa

SEQ ID NO: 2064601 - DNA, 15 bp, Homo sapiens
caaaagaaggctaat

SEQ ID NO: 2064602 - DNA, 15 bp, Homo sapiens
aaaagaaggctaatt

SEQ ID NO: 2064603 - DNA, 15 bp, Homo sapiens
aaagaaggctaattt

SEQ ID NO: 2064604 - DNA, 15 bp, Homo sapiens
aagaaggctaatttg

SEQ ID NO: 2064605 - DNA, 15 bp, Homo sapiens
agaaggctaatttgg

SEQ ID NO: 2064606 - DNA, 15 bp, Homo sapiens
gaaggctaatttggg

SEQ ID NO: 2064607 - DNA, 15 bp, Homo sapiens
aaggctaatttgggg

SEQ ID NO: 2064608 - DNA, 15 bp, Homo sapiens
aggctaatttggggt

SEQ ID NO: 2064609 - DNA, 15 bp, Homo sapiens
ggctaatttggggtc

SEQ ID NO: 2064610 - DNA, 15 bp, Homo sapiens
gctaatttggggtct

SEQ ID NO: 2064611 - DNA, 15 bp, Homo sapiens
ctaatttggggtctg

SEQ ID NO: 2064612 - DNA, 15 bp, Homo sapiens
taatttggggtctgt

SEQ ID NO: 2064613 - DNA, 15 bp, Homo sapiens
aatttggggtctgta

SEQ ID NO: 2064614 - DNA, 15 bp, Homo sapiens
atttggggtctgtag

SEQ ID NO: 2064615 - DNA, 15 bp, Homo sapiens
tttggggtctgtagc

SEQ ID NO: 2064616 - DNA, 15 bp, Homo sapiens
ttggggtctgtagct

SEQ ID NO: 2064617 - DNA, 15 bp, Homo sapiens
tggggtctgtagctt

SEQ ID NO: 2064618 - DNA, 15 bp, Homo sapiens
ggggtctgtagcttg

SEQ ID NO: 2064619 - DNA, 15 bp, Homo sapiens
gggtctgtagcttgg

SEQ ID NO: 2064620 - DNA, 15 bp, Homo sapiens
ggtctgtagcttgga

SEQ ID NO: 2064621 - DNA, 15 bp, Homo sapiens
gtctgtagcttggac

SEQ ID NO: 2064622 - DNA, 15 bp, Homo sapiens
tctgtagcttggacc

SEQ ID NO: 2064623 - DNA, 15 bp, Homo sapiens
ctgtagcttggacca

SEQ ID NO: 2064624 - DNA, 15 bp, Homo sapiens
tgtagcttggaccag

SEQ ID NO: 2064625 - DNA, 15 bp, Homo sapiens
gtagcttggaccagg

SEQ ID NO: 2064626 - DNA, 15 bp, Homo sapiens
tagcttggaccaggt

SEQ ID NO: 2064627 - DNA, 15 bp, Homo sapiens
agcttggaccaggtg

SEQ ID NO: 2064628 - DNA, 15 bp, Homo sapiens
gcttggaccaggtgg

SEQ ID NO: 2064629 - DNA, 15 bp, Homo sapiens
cttggaccaggtgga

SEQ ID NO: 2064630 - DNA, 15 bp, Homo sapiens
ttggaccaggtggaa

SEQ ID NO: 2064631 - DNA, 15 bp, Homo sapiens
tggaccaggtggaac

SEQ ID NO: 2064632 - DNA, 15 bp, Homo sapiens
ggaccaggtggaact

SEQ ID NO: 2064633 - DNA, 15 bp, Homo sapiens
gaccaggtggaactg

SEQ ID NO: 2064634 - DNA, 15 bp, Homo sapiens
accaggtggaactgt

SEQ ID NO: 2064635 - DNA, 15 bp, Homo sapiens
ccaggtggaactgtg

SEQ ID NO: 2064636 - DNA, 15 bp, Homo sapiens
caggtggaactgtga

SEQ ID NO: 2064637 - DNA, 15 bp, Homo sapiens
aggtggaactgtgag

SEQ ID NO: 2064638 - DNA, 15 bp, Homo sapiens
ggtggaactgtgagg

SEQ ID NO: 2064639 - DNA, 15 bp, Homo sapiens
gtggaactgtgagga

SEQ ID NO: 2064640 - DNA, 15 bp, Homo sapiens
tggaactgtgaggag

SEQ ID NO: 2064641 - DNA, 15 bp, Homo sapiens
ggaactgtgaggagg

SEQ ID NO: 2064642 - DNA, 15 bp, Homo sapiens
gaactgtgaggagga

SEQ ID NO: 2064643 - DNA, 15 bp, Homo sapiens
aactgtgaggaggaa

SEQ ID NO: 2064644 - DNA, 15 bp, Homo sapiens
actgtgaggaggaac

SEQ ID NO: 2064645 - DNA, 15 bp, Homo sapiens
ctgtgaggaggaacc

SEQ ID NO: 2064646 - DNA, 15 bp, Homo sapiens
tgtgaggaggaacca

SEQ ID NO: 2064647 - DNA, 15 bp, Homo sapiens
gtgaggaggaaccac

SEQ ID NO: 2064648 - DNA, 15 bp, Homo sapiens
tgaggaggaaccacc

SEQ ID NO: 2064649 - DNA, 15 bp, Homo sapiens
gaggaggaaccacct

SEQ ID NO: 2064650 - DNA, 15 bp, Homo sapiens
aggaggaaccacctg

SEQ ID NO: 2064651 - DNA, 15 bp, Homo sapiens
ggaggaaccacctgt

SEQ ID NO: 2064652 - DNA, 15 bp, Homo sapiens
gaggaaccacctgtc

SEQ ID NO: 2064653 - DNA, 15 bp, Homo sapiens
aggaaccacctgtct

SEQ ID NO: 2064654 - DNA, 15 bp, Homo sapiens
ggaaccacctgtctc

SEQ ID NO: 2064655 - DNA, 15 bp, Homo sapiens
gaaccacctgtctca

SEQ ID NO: 2064656 - DNA, 15 bp, Homo sapiens
aaccacctgtctcac

SEQ ID NO: 2064657 - DNA, 15 bp, Homo sapiens
accacctgtctcacc

SEQ ID NO: 2064658 - DNA, 15 bp, Homo sapiens
ccacctgtctcaccg

SEQ ID NO: 2064659 - DNA, 15 bp, Homo sapiens
cacctgtctcaccgc

SEQ ID NO: 2064660 - DNA, 15 bp, Homo sapiens
acctgtctcaccgcc

SEQ ID NO: 2064661 - DNA, 15 bp, Homo sapiens
cctgtctcaccgccc

SEQ ID NO: 2064662 - DNA, 15 bp, Homo sapiens
ctgtctcaccgcccc

SEQ ID NO: 2064663 - DNA, 15 bp, Homo sapiens
tgtctcaccgcccca

SEQ ID NO: 2064664 - DNA, 15 bp, Homo sapiens
gtctcaccgccccac

SEQ ID NO: 2064665 - DNA, 15 bp, Homo sapiens
tctcaccgccccacc

SEQ ID NO: 2064666 - DNA, 15 bp, Homo sapiens
ctcaccgccccaccc

SEQ ID NO: 2064667 - DNA, 15 bp, Homo sapiens
tcaccgccccacccc

SEQ ID NO: 2064668 - DNA, 15 bp, Homo sapiens
caccgccccaccccc

SEQ ID NO: 2064669 - DNA, 15 bp, Homo sapiens
accgccccacccccc

SEQ ID NO: 2064670 - DNA, 15 bp, Homo sapiens
ccgccccacccccca

SEQ ID NO: 2064671 - DNA, 15 bp, Homo sapiens
cgccccaccccccaa

SEQ ID NO: 2064672 - DNA, 15 bp, Homo sapiens
gccccaccccccaac

SEQ ID NO: 2064673 - DNA, 15 bp, Homo sapiens
ccccaccccccaact

SEQ ID NO: 2064674 - DNA, 15 bp, Homo sapiens
cccaccccccaactg

SEQ ID NO: 2064675 - DNA, 15 bp, Homo sapiens
ccaccccccaactgc

SEQ ID NO: 2064676 - DNA, 15 bp, Homo sapiens
caccccccaactgct

SEQ ID NO: 2064677 - DNA, 15 bp, Homo sapiens
accccccaactgctt

SEQ ID NO: 2064678 - DNA, 15 bp, Homo sapiens
ccccccaactgcttt

SEQ ID NO: 2064679 - DNA, 15 bp, Homo sapiens
cccccaactgctttt

SEQ ID NO: 2064680 - DNA, 15 bp, Homo sapiens
ccccaactgcttttt

SEQ ID NO: 2064681 - DNA, 15 bp, Homo sapiens
cccaactgctttttc

SEQ ID NO: 2064682 - DNA, 15 bp, Homo sapiens
ccaactgctttttct

SEQ ID NO: 2064683 - DNA, 15 bp, Homo sapiens
caactgctttttcta

SEQ ID NO: 2064684 - DNA, 15 bp, Homo sapiens
aactgctttttctaa

SEQ ID NO: 2064685 - DNA, 15 bp, Homo sapiens
actgctttttctaac

SEQ ID NO: 2064686 - DNA, 15 bp, Homo sapiens
ctgctttttctaact

SEQ ID NO: 2064687 - DNA, 15 bp, Homo sapiens
tgctttttctaactc

SEQ ID NO: 2064688 - DNA, 15 bp, Homo sapiens
gctttttctaactcc

SEQ ID NO: 2064689 - DNA, 15 bp, Homo sapiens
ctttttctaactccc

SEQ ID NO: 2064690 - DNA, 15 bp, Homo sapiens
tttttctaactccct

SEQ ID NO: 2064691 - DNA, 15 bp, Homo sapiens
ttttctaactccctt

SEQ ID NO: 2064692 - DNA, 15 bp, Homo sapiens
tttctaactcccttt

SEQ ID NO: 2064693 - DNA, 15 bp, Homo sapiens
ttctaactccctttg

SEQ ID NO: 2064694 - DNA, 15 bp, Homo sapiens
tctaactccctttgt

SEQ ID NO: 2064695 - DNA, 15 bp, Homo sapiens
ctaactccctttgtg

SEQ ID NO: 2064696 - DNA, 15 bp, Homo sapiens
taactccctttgtgg

SEQ ID NO: 2064697 - DNA, 15 bp, Homo sapiens
aactccctttgtggt

SEQ ID NO: 2064698 - DNA, 15 bp, Homo sapiens
actccctttgtggtc

SEQ ID NO: 2064699 - DNA, 15 bp, Homo sapiens
ctccctttgtggtcc

SEQ ID NO: 2064700 - DNA, 15 bp, Homo sapiens
tccctttgtggtcct

SEQ ID NO: 2064701 - DNA, 15 bp, Homo sapiens
ccctttgtggtcctc

SEQ ID NO: 2064702 - DNA, 15 bp, Homo sapiens
cctttgtggtcctcc

SEQ ID NO: 2064703 - DNA, 15 bp, Homo sapiens
ctttgtggtcctcca

SEQ ID NO: 2064704 - DNA, 15 bp, Homo sapiens
tttgtggtcctccac

SEQ ID NO: 2064705 - DNA, 15 bp, Homo sapiens
ttgtggtcctccaca

SEQ ID NO: 2064706 - DNA, 15 bp, Homo sapiens
tgtggtcctccacac

SEQ ID NO: 2064707 - DNA, 15 bp, Homo sapiens
gtggtcctccacacc

SEQ ID NO: 2064708 - DNA, 15 bp, Homo sapiens
tggtcctccacacct

SEQ ID NO: 2064709 - DNA, 15 bp, Homo sapiens
ggtcctccacacctg

SEQ ID NO: 2064710 - DNA, 15 bp, Homo sapiens
gtcctccacacctgt

SEQ ID NO: 2064711 - DNA, 15 bp, Homo sapiens
tcctccacacctgtt

SEQ ID NO: 2064712 - DNA, 15 bp, Homo sapiens
cctccacacctgttt

SEQ ID NO: 2064713 - DNA, 15 bp, Homo sapiens
ctccacacctgttta

SEQ ID NO: 2064714 - DNA, 15 bp, Homo sapiens
tccacacctgtttag

SEQ ID NO: 2064715 - DNA, 15 bp, Homo sapiens
ccacacctgtttagg

SEQ ID NO: 2064716 - DNA, 15 bp, Homo sapiens
cacacctgtttaggg

SEQ ID NO: 2064717 - DNA, 15 bp, Homo sapiens
acacctgtttagggc

SEQ ID NO: 2064718 - DNA, 15 bp, Homo sapiens
cacctgtttagggcg

SEQ ID NO: 2064719 - DNA, 15 bp, Homo sapiens
acctgtttagggcgc

SEQ ID NO: 2064720 - DNA, 15 bp, Homo sapiens
cctgtttagggcgct

SEQ ID NO: 2064721 - DNA, 15 bp, Homo sapiens
ctgtttagggcgctg

SEQ ID NO: 2064722 - DNA, 15 bp, Homo sapiens
tgtttagggcgctga

SEQ ID NO: 2064723 - DNA, 15 bp, Homo sapiens
gtttagggcgctgag

SEQ ID NO: 2064724 - DNA, 15 bp, Homo sapiens
tttagggcgctgagc

SEQ ID NO: 2064725 - DNA, 15 bp, Homo sapiens
ttagggcgctgagcc

SEQ ID NO: 2064726 - DNA, 15 bp, Homo sapiens
tagggcgctgagcca

SEQ ID NO: 2064727 - DNA, 15 bp, Homo sapiens
agggcgctgagccac

SEQ ID NO: 2064728 - DNA, 15 bp, Homo sapiens
gggcgctgagccact

SEQ ID NO: 2064729 - DNA, 15 bp, Homo sapiens
ggcgctgagccactc

SEQ ID NO: 2064730 - DNA, 15 bp, Homo sapiens
gcgctgagccactct

SEQ ID NO: 2064731 - DNA, 15 bp, Homo sapiens
cgctgagccactctg

SEQ ID NO: 2064732 - DNA, 15 bp, Homo sapiens
gctgagccactctgt

SEQ ID NO: 2064733 - DNA, 15 bp, Homo sapiens
ctgagccactctgtc

SEQ ID NO: 2064734 - DNA, 15 bp, Homo sapiens
tgagccactctgtct

SEQ ID NO: 2064735 - DNA, 15 bp, Homo sapiens
gagccactctgtctc

SEQ ID NO: 2064736 - DNA, 15 bp, Homo sapiens
agccactctgtctcc

SEQ ID NO: 2064737 - DNA, 15 bp, Homo sapiens
gccactctgtctcct

SEQ ID NO: 2064738 - DNA, 15 bp, Homo sapiens
ccactctgtctcctg

SEQ ID NO: 2064739 - DNA, 15 bp, Homo sapiens
cactctgtctcctgg

SEQ ID NO: 2064740 - DNA, 15 bp, Homo sapiens
actctgtctcctggt

SEQ ID NO: 2064741 - DNA, 15 bp, Homo sapiens
ctctgtctcctggta

SEQ ID NO: 2064742 - DNA, 15 bp, Homo sapiens
tctgtctcctggtag

SEQ ID NO: 2064743 - DNA, 15 bp, Homo sapiens
ctgtctcctggtagt

SEQ ID NO: 2064744 - DNA, 15 bp, Homo sapiens
tgtctcctggtagtg

SEQ ID NO: 2064745 - DNA, 15 bp, Homo sapiens
gtctcctggtagtgt

SEQ ID NO: 2064746 - DNA, 15 bp, Homo sapiens
tctcctggtagtgtt

SEQ ID NO: 2064747 - DNA, 15 bp, Homo sapiens
ctcctggtagtgtta

SEQ ID NO: 2064748 - DNA, 15 bp, Homo sapiens
tcctggtagtgttat

SEQ ID NO: 2064749 - DNA, 15 bp, Homo sapiens
cctggtagtgttatt

SEQ ID NO: 2064750 - DNA, 15 bp, Homo sapiens
ctggtagtgttattt

SEQ ID NO: 2064751 - DNA, 15 bp, Homo sapiens
tggtagtgttatttt

SEQ ID NO: 2064752 - DNA, 15 bp, Homo sapiens
ggtagtgttattttg

SEQ ID NO: 2064753 - DNA, 15 bp, Homo sapiens
gtagtgttattttgc

SEQ ID NO: 2064754 - DNA, 15 bp, Homo sapiens
tagtgttattttgct

SEQ ID NO: 2064755 - DNA, 15 bp, Homo sapiens
agtgttattttgctc

SEQ ID NO: 2064756 - DNA, 15 bp, Homo sapiens
gtgttattttgctcc

SEQ ID NO: 2064757 - DNA, 15 bp, Homo sapiens
tgttattttgctcca

SEQ ID NO: 2064758 - DNA, 15 bp, Homo sapiens
gttattttgctccaa

SEQ ID NO: 2064759 - DNA, 15 bp, Homo sapiens
ttattttgctccaag

SEQ ID NO: 2064760 - DNA, 15 bp, Homo sapiens
tattttgctccaagt

SEQ ID NO: 2064761 - DNA, 15 bp, Homo sapiens
attttgctccaagtt

SEQ ID NO: 2064762 - DNA, 15 bp, Homo sapiens
ttttgctccaagttt

SEQ ID NO: 2064763 - DNA, 15 bp, Homo sapiens
tttgctccaagtttt

SEQ ID NO: 2064764 - DNA, 15 bp, Homo sapiens
ttgctccaagtttta

SEQ ID NO: 2064765 - DNA, 15 bp, Homo sapiens
tgctccaagttttat

SEQ ID NO: 2064766 - DNA, 15 bp, Homo sapiens
gctccaagttttatc

SEQ ID NO: 2064767 - DNA, 15 bp, Homo sapiens
ctccaagttttatcg

SEQ ID NO: 2064768 - DNA, 15 bp, Homo sapiens
tccaagttttatcgc

SEQ ID NO: 2064769 - DNA, 15 bp, Homo sapiens
ccaagttttatcgca

SEQ ID NO: 2064770 - DNA, 15 bp, Homo sapiens
caagttttatcgcaa

SEQ ID NO: 2064771 - DNA, 15 bp, Homo sapiens
aagttttatcgcaat

SEQ ID NO: 2064772 - DNA, 15 bp, Homo sapiens
agttttatcgcaatt

SEQ ID NO: 2064773 - DNA, 15 bp, Homo sapiens
gttttatcgcaattt

SEQ ID NO: 2064774 - DNA, 15 bp, Homo sapiens
ttttatcgcaatttt

SEQ ID NO: 2064775 - DNA, 15 bp, Homo sapiens
tttatcgcaattttt

SEQ ID NO: 2064776 - DNA, 15 bp, Homo sapiens
ttatcgcaatttttg

SEQ ID NO: 2064777 - DNA, 15 bp, Homo sapiens
tatcgcaatttttga

SEQ ID NO: 2064778 - DNA, 15 bp, Homo sapiens
atcgcaatttttgat

SEQ ID NO: 2064779 - DNA, 15 bp, Homo sapiens
tcgcaatttttgatt

SEQ ID NO: 2064780 - DNA, 15 bp, Homo sapiens
cgcaatttttgattc

SEQ ID NO: 2064781 - DNA, 15 bp, Homo sapiens
gcaatttttgattca

SEQ ID NO: 2064782 - DNA, 15 bp, Homo sapiens
caatttttgattcac

SEQ ID NO: 2064783 - DNA, 15 bp, Homo sapiens
aatttttgattcact

SEQ ID NO: 2064784 - DNA, 15 bp, Homo sapiens
atttttgattcactc

SEQ ID NO: 2064785 - DNA, 15 bp, Homo sapiens
tttttgattcactcg

SEQ ID NO: 2064786 - DNA, 15 bp, Homo sapiens
ttttgattcactcga

SEQ ID NO: 2064787 - DNA, 15 bp, Homo sapiens
tttgattcactcgac

SEQ ID NO: 2064788 - DNA, 15 bp, Homo sapiens
ttgattcactcgaca

SEQ ID NO: 2064789 - DNA, 15 bp, Homo sapiens
tgattcactcgacag

SEQ ID NO: 2064790 - DNA, 15 bp, Homo sapiens
gattcactcgacagt

SEQ ID NO: 2064791 - DNA, 15 bp, Homo sapiens
attcactcgacagta

SEQ ID NO: 2064792 - DNA, 15 bp, Homo sapiens
ttcactcgacagtat

SEQ ID NO: 2064793 - DNA, 15 bp, Homo sapiens
tcactcgacagtatt

SEQ ID NO: 2064794 - DNA, 15 bp, Homo sapiens
cactcgacagtattt

SEQ ID NO: 2064795 - DNA, 15 bp, Homo sapiens
actcgacagtattta

SEQ ID NO: 2064796 - DNA, 15 bp, Homo sapiens
ctcgacagtatttat

SEQ ID NO: 2064797 - DNA, 15 bp, Homo sapiens
tcgacagtatttatt

SEQ ID NO: 2064798 - DNA, 15 bp, Homo sapiens
cgacagtatttattc

SEQ ID NO: 2064799 - DNA, 15 bp, Homo sapiens
gacagtatttattca

SEQ ID NO: 2064800 - DNA, 15 bp, Homo sapiens
acagtatttattcag

SEQ ID NO: 2064801 - DNA, 15 bp, Homo sapiens
cagtatttattcagc

SEQ ID NO: 2064802 - DNA, 15 bp, Homo sapiens
agtatttattcagct

SEQ ID NO: 2064803 - DNA, 15 bp, Homo sapiens
gtatttattcagcta

SEQ ID NO: 2064804 - DNA, 15 bp, Homo sapiens
tatttattcagctag

SEQ ID NO: 2064805 - DNA, 15 bp, Homo sapiens
atttattcagctagg

SEQ ID NO: 2064806 - DNA, 15 bp, Homo sapiens
tttattcagctaggg

SEQ ID NO: 2064807 - DNA, 15 bp, Homo sapiens
ttattcagctagggc

SEQ ID NO: 2064808 - DNA, 15 bp, Homo sapiens
tattcagctagggct

SEQ ID NO: 2064809 - DNA, 15 bp, Homo sapiens
attcagctagggctc

SEQ ID NO: 2064810 - DNA, 15 bp, Homo sapiens
ttcagctagggctct

SEQ ID NO: 2064811 - DNA, 15 bp, Homo sapiens
tcagctagggctctg

SEQ ID NO: 2064812 - DNA, 15 bp, Homo sapiens
cagctagggctctgt

SEQ ID NO: 2064813 - DNA, 15 bp, Homo sapiens
agctagggctctgtg

SEQ ID NO: 2064814 - DNA, 15 bp, Homo sapiens
gctagggctctgtgc

SEQ ID NO: 2064815 - DNA, 15 bp, Homo sapiens
ctagggctctgtgcc

SEQ ID NO: 2064816 - DNA, 15 bp, Homo sapiens
tagggctctgtgcca

SEQ ID NO: 2064817 - DNA, 15 bp, Homo sapiens
agggctctgtgccag

SEQ ID NO: 2064818 - DNA, 15 bp, Homo sapiens
gggctctgtgccagg

SEQ ID NO: 2064819 - DNA, 15 bp, Homo sapiens
gctctgtgccaggga

SEQ ID NO: 2064820 - DNA, 15 bp, Homo sapiens
ctctgtgccagggac

SEQ ID NO: 2064821 - DNA, 15 bp, Homo sapiens
tctgtgccagggact

SEQ ID NO: 2064822 - DNA, 15 bp, Homo sapiens
ctgtgccagggacta

SEQ ID NO: 2064823 - DNA, 15 bp, Homo sapiens
tgtgccagggactac

SEQ ID NO: 2064824 - DNA, 15 bp, Homo sapiens
gtgccagggactacg

SEQ ID NO: 2064825 - DNA, 15 bp, Homo sapiens
tgccagggactacgc

SEQ ID NO: 2064826 - DNA, 15 bp, Homo sapiens
gccagggactacgca

SEQ ID NO: 2064827 - DNA, 15 bp, Homo sapiens
ccagggactacgcaa

SEQ ID NO: 2064828 - DNA, 15 bp, Homo sapiens
cagggactacgcaag

SEQ ID NO: 2064829 - DNA, 15 bp, Homo sapiens
agggactacgcaagg

SEQ ID NO: 2064830 - DNA, 15 bp, Homo sapiens
gggactacgcaaggc

SEQ ID NO: 2064831 - DNA, 15 bp, Homo sapiens
ggactacgcaaggcc

SEQ ID NO: 2064832 - DNA, 15 bp, Homo sapiens
gactacgcaaggcct

SEQ ID NO: 2064833 - DNA, 15 bp, Homo sapiens
actacgcaaggcctg

SEQ ID NO: 2064834 - DNA, 15 bp, Homo sapiens
ctacgcaaggcctga

SEQ ID NO: 2064835 - DNA, 15 bp, Homo sapiens
tacgcaaggcctgaa

SEQ ID NO: 2064836 - DNA, 15 bp, Homo sapiens
acgcaaggcctgaaa

SEQ ID NO: 2064837 - DNA, 15 bp, Homo sapiens
cgcaaggcctgaaaa

SEQ ID NO: 2064838 - DNA, 15 bp, Homo sapiens
gcaaggcctgaaaat

SEQ ID NO: 2064839 - DNA, 15 bp, Homo sapiens
caaggcctgaaaatt

SEQ ID NO: 2064840 - DNA, 15 bp, Homo sapiens
aaggcctgaaaattc

SEQ ID NO: 2064841 - DNA, 15 bp, Homo sapiens
aggcctgaaaattca

SEQ ID NO: 2064842 - DNA, 15 bp, Homo sapiens
ggcctgaaaattcaa

SEQ ID NO: 2064843 - DNA, 15 bp, Homo sapiens
gcctgaaaattcaaa

SEQ ID NO: 2064844 - DNA, 15 bp, Homo sapiens
cctgaaaattcaaac

SEQ ID NO: 2064845 - DNA, 15 bp, Homo sapiens
ctgaaaattcaaact

SEQ ID NO: 2064846 - DNA, 15 bp, Homo sapiens
tgaaaattcaaactt

SEQ ID NO: 2064847 - DNA, 15 bp, Homo sapiens
gaaaattcaaactta

SEQ ID NO: 2064848 - DNA, 15 bp, Homo sapiens
aaaattcaaacttaa

SEQ ID NO: 2064849 - DNA, 15 bp, Homo sapiens
aaattcaaacttaat

SEQ ID NO: 2064850 - DNA, 15 bp, Homo sapiens
aattcaaacttaatc

SEQ ID NO: 2064851 - DNA, 15 bp, Homo sapiens
attcaaacttaatct

SEQ ID NO: 2064852 - DNA, 15 bp, Homo sapiens
ttcaaacttaatcta

SEQ ID NO: 2064853 - DNA, 15 bp, Homo sapiens
tcaaacttaatctag

SEQ ID NO: 2064854 - DNA, 15 bp, Homo sapiens
caaacttaatctaga

SEQ ID NO: 2064855 - DNA, 15 bp, Homo sapiens
aaacttaatctagat

SEQ ID NO: 2064856 - DNA, 15 bp, Homo sapiens
aacttaatctagatg

SEQ ID NO: 2064857 - DNA, 15 bp, Homo sapiens
acttaatctagatgc

SEQ ID NO: 2064858 - DNA, 15 bp, Homo sapiens
cttaatctagatgca

SEQ ID NO: 2064859 - DNA, 15 bp, Homo sapiens
ttaatctagatgcag

SEQ ID NO: 2064860 - DNA, 15 bp, Homo sapiens
taatctagatgcagc

SEQ ID NO: 2064861 - DNA, 15 bp, Homo sapiens
aatctagatgcagct

SEQ ID NO: 2064862 - DNA, 15 bp, Homo sapiens
atctagatgcagctc

SEQ ID NO: 2064863 - DNA, 15 bp, Homo sapiens
tctagatgcagctcc

SEQ ID NO: 2064864 - DNA, 15 bp, Homo sapiens
ctagatgcagctcct

SEQ ID NO: 2064865 - DNA, 15 bp, Homo sapiens
tagatgcagctccta

SEQ ID NO: 2064866 - DNA, 15 bp, Homo sapiens
agatgcagctcctac

SEQ ID NO: 2064867 - DNA, 15 bp, Homo sapiens
gatgcagctcctact

SEQ ID NO: 2064868 - DNA, 15 bp, Homo sapiens
atgcagctcctactc

SEQ ID NO: 2064869 - DNA, 15 bp, Homo sapiens
tgcagctcctactca

SEQ ID NO: 2064870 - DNA, 15 bp, Homo sapiens
gcagctcctactcac

SEQ ID NO: 2064871 - DNA, 15 bp, Homo sapiens
cagctcctactcaca

SEQ ID NO: 2064872 - DNA, 15 bp, Homo sapiens
agctcctactcacac

SEQ ID NO: 2064873 - DNA, 15 bp, Homo sapiens
gctcctactcacacg

SEQ ID NO: 2064874 - DNA, 15 bp, Homo sapiens
ctcctactcacacgg

SEQ ID NO: 2064875 - DNA, 15 bp, Homo sapiens
tcctactcacacgga

SEQ ID NO: 2064876 - DNA, 15 bp, Homo sapiens
cctactcacacggaa

SEQ ID NO: 2064877 - DNA, 15 bp, Homo sapiens
ctactcacacggaac

SEQ ID NO: 2064878 - DNA, 15 bp, Homo sapiens
tactcacacggaact

SEQ ID NO: 2064879 - DNA, 15 bp, Homo sapiens
actcacacggaactt

SEQ ID NO: 2064880 - DNA, 15 bp, Homo sapiens
ctcacacggaactta

SEQ ID NO: 2064881 - DNA, 15 bp, Homo sapiens
tcacacggaacttac

SEQ ID NO: 2064882 - DNA, 15 bp, Homo sapiens
cacacggaacttaca

SEQ ID NO: 2064883 - DNA, 15 bp, Homo sapiens
acacggaacttacac

SEQ ID NO: 2064884 - DNA, 15 bp, Homo sapiens
cacggaacttacaca

SEQ ID NO: 2064885 - DNA, 15 bp, Homo sapiens
acggaacttacacat

SEQ ID NO: 2064886 - DNA, 15 bp, Homo sapiens
cggaacttacacatt

SEQ ID NO: 2064887 - DNA, 15 bp, Homo sapiens
ggaacttacacattc

SEQ ID NO: 2064888 - DNA, 15 bp, Homo sapiens
gaacttacacattca

SEQ ID NO: 2064889 - DNA, 15 bp, Homo sapiens
aacttacacattcac

SEQ ID NO: 2064890 - DNA, 15 bp, Homo sapiens
acttacacattcaca

SEQ ID NO: 2064891 - DNA, 15 bp, Homo sapiens
cttacacattcacaa

SEQ ID NO: 2064892 - DNA, 15 bp, Homo sapiens
ttacacattcacaat

SEQ ID NO: 2064893 - DNA, 15 bp, Homo sapiens
tacacattcacaata

SEQ ID NO: 2064894 - DNA, 15 bp, Homo sapiens
acacattcacaataa

SEQ ID NO: 2064895 - DNA, 15 bp, Homo sapiens
cacattcacaataaa

SEQ ID NO: 2064896 - DNA, 15 bp, Homo sapiens
acattcacaataaat

SEQ ID NO: 2064897 - DNA, 15 bp, Homo sapiens
cattcacaataaatc

SEQ ID NO: 2064898 - DNA, 15 bp, Homo sapiens
attcacaataaatca

SEQ ID NO: 2064899 - DNA, 15 bp, Homo sapiens
ttcacaataaatcac

SEQ ID NO: 2064900 - DNA, 15 bp, Homo sapiens
tcacaataaatcacc

SEQ ID NO: 2064901 - DNA, 15 bp, Homo sapiens
cacaataaatcaccc

SEQ ID NO: 2064902 - DNA, 15 bp, Homo sapiens
acaataaatcaccca

SEQ ID NO: 2064903 - DNA, 15 bp, Homo sapiens
caataaatcacccaa

SEQ ID NO: 2064904 - DNA, 15 bp, Homo sapiens
aataaatcacccaaa

SEQ ID NO: 2064905 - DNA, 15 bp, Homo sapiens
ataaatcacccaaat

SEQ ID NO: 2064906 - DNA, 15 bp, Homo sapiens
taaatcacccaaata

SEQ ID NO: 2064907 - DNA, 15 bp, Homo sapiens
aaatcacccaaataa

SEQ ID NO: 2064908 - DNA, 15 bp, Homo sapiens
aatcacccaaataat

SEQ ID NO: 2064909 - DNA, 15 bp, Homo sapiens
atcacccaaataata

SEQ ID NO: 2064910 - DNA, 15 bp, Homo sapiens
tcacccaaataatat

SEQ ID NO: 2064911 - DNA, 15 bp, Homo sapiens
cacccaaataatatg

SEQ ID NO: 2064912 - DNA, 15 bp, Homo sapiens
acccaaataatatgt

SEQ ID NO: 2064913 - DNA, 15 bp, Homo sapiens
cccaaataatatgta

SEQ ID NO: 2064914 - DNA, 15 bp, Homo sapiens
caaataatatgtagt

SEQ ID NO: 2064915 - DNA, 15 bp, Homo sapiens
aaataatatgtagtt

SEQ ID NO: 2064916 - DNA, 15 bp, Homo sapiens
aataatatgtagtta

SEQ ID NO: 2064917 - DNA, 15 bp, Homo sapiens
ataatatgtagttac

SEQ ID NO: 2064918 - DNA, 15 bp, Homo sapiens
taatatgtagttact

SEQ ID NO: 2064919 - DNA, 15 bp, Homo sapiens
aatatgtagttactt

SEQ ID NO: 2064920 - DNA, 15 bp, Homo sapiens
atatgtagttacttt

SEQ ID NO: 2064921 - DNA, 15 bp, Homo sapiens
tatgtagttactttc

SEQ ID NO: 2064922 - DNA, 15 bp, Homo sapiens
atgtagttactttct

SEQ ID NO: 2064923 - DNA, 15 bp, Homo sapiens
tgtagttactttctg

SEQ ID NO: 2064924 - DNA, 15 bp, Homo sapiens
gtagttactttctga

SEQ ID NO: 2064925 - DNA, 15 bp, Homo sapiens
tagttactttctgac

SEQ ID NO: 2064926 - DNA, 15 bp, Homo sapiens
agttactttctgaca

SEQ ID NO: 2064927 - DNA, 15 bp, Homo sapiens
gttactttctgacag

SEQ ID NO: 2064928 - DNA, 15 bp, Homo sapiens
ttactttctgacaga

SEQ ID NO: 2064929 - DNA, 15 bp, Homo sapiens
tactttctgacagat

SEQ ID NO: 2064930 - DNA, 15 bp, Homo sapiens
actttctgacagatg

SEQ ID NO: 2064931 - DNA, 15 bp, Homo sapiens
ctttctgacagatgt

SEQ ID NO: 2064932 - DNA, 15 bp, Homo sapiens
tttctgacagatgtt

SEQ ID NO: 2064933 - DNA, 15 bp, Homo sapiens
ttctgacagatgtta

SEQ ID NO: 2064934 - DNA, 15 bp, Homo sapiens
tctgacagatgttac

SEQ ID NO: 2064935 - DNA, 15 bp, Homo sapiens
ctgacagatgttact

SEQ ID NO: 2064936 - DNA, 15 bp, Homo sapiens
tgacagatgttactc

SEQ ID NO: 2064937 - DNA, 15 bp, Homo sapiens
gacagatgttactct

SEQ ID NO: 2064938 - DNA, 15 bp, Homo sapiens
acagatgttactcta

SEQ ID NO: 2064939 - DNA, 15 bp, Homo sapiens
cagatgttactctag

SEQ ID NO: 2064940 - DNA, 15 bp, Homo sapiens
agatgttactctagg

SEQ ID NO: 2064941 - DNA, 15 bp, Homo sapiens
gatgttactctagga

SEQ ID NO: 2064942 - DNA, 15 bp, Homo sapiens
atgttactctaggat

SEQ ID NO: 2064943 - DNA, 15 bp, Homo sapiens
tgttactctaggatc

SEQ ID NO: 2064944 - DNA, 15 bp, Homo sapiens
gttactctaggatcc

SEQ ID NO: 2064945 - DNA, 15 bp, Homo sapiens
ttactctaggatcca

SEQ ID NO: 2064946 - DNA, 15 bp, Homo sapiens
tactctaggatccag

SEQ ID NO: 2064947 - DNA, 15 bp, Homo sapiens
actctaggatccagt

SEQ ID NO: 2064948 - DNA, 15 bp, Homo sapiens
ctctaggatccagtg

SEQ ID NO: 2064949 - DNA, 15 bp, Homo sapiens
tctaggatccagtga

SEQ ID NO: 2064950 - DNA, 15 bp, Homo sapiens
ctaggatccagtgag

SEQ ID NO: 2064951 - DNA, 15 bp, Homo sapiens
taggatccagtgaga

SEQ ID NO: 2064952 - DNA, 15 bp, Homo sapiens
aggatccagtgagat

SEQ ID NO: 2064953 - DNA, 15 bp, Homo sapiens
ggatccagtgagata

SEQ ID NO: 2064954 - DNA, 15 bp, Homo sapiens
gatccagtgagatag

SEQ ID NO: 2064955 - DNA, 15 bp, Homo sapiens
atccagtgagataga

SEQ ID NO: 2064956 - DNA, 15 bp, Homo sapiens
tccagtgagatagag

SEQ ID NO: 2064957 - DNA, 15 bp, Homo sapiens
ccagtgagatagaga

SEQ ID NO: 2064958 - DNA, 15 bp, Homo sapiens
cagtgagatagagag

SEQ ID NO: 2064959 - DNA, 15 bp, Homo sapiens
agtgagatagagagg

SEQ ID NO: 2064960 - DNA, 15 bp, Homo sapiens
gtgagatagagaggg

SEQ ID NO: 2064961 - DNA, 15 bp, Homo sapiens
tgagatagagagggt

SEQ ID NO: 2064962 - DNA, 15 bp, Homo sapiens
gagatagagagggtt

SEQ ID NO: 2064963 - DNA, 15 bp, Homo sapiens
agatagagagggttg

SEQ ID NO: 2064964 - DNA, 15 bp, Homo sapiens
gatagagagggttgt

SEQ ID NO: 2064965 - DNA, 15 bp, Homo sapiens
atagagagggttgta

SEQ ID NO: 2064966 - DNA, 15 bp, Homo sapiens
tagagagggttgtaa

SEQ ID NO: 2064967 - DNA, 15 bp, Homo sapiens
agagagggttgtaat

SEQ ID NO: 2064968 - DNA, 15 bp, Homo sapiens
gagagggttgtaatg

SEQ ID NO: 2064969 - DNA, 15 bp, Homo sapiens
agagggttgtaatgg

SEQ ID NO: 2064970 - DNA, 15 bp, Homo sapiens
gagggttgtaatgga

SEQ ID NO: 2064971 - DNA, 15 bp, Homo sapiens
agggttgtaatggag

SEQ ID NO: 2064972 - DNA, 15 bp, Homo sapiens
gggttgtaatggaga

SEQ ID NO: 2064973 - DNA, 15 bp, Homo sapiens
ggttgtaatggagat

SEQ ID NO: 2064974 - DNA, 15 bp, Homo sapiens
gttgtaatggagatt

SEQ ID NO: 2064975 - DNA, 15 bp, Homo sapiens
ttgtaatggagattc

SEQ ID NO: 2064976 - DNA, 15 bp, Homo sapiens
tgtaatggagattcg

SEQ ID NO: 2064977 - DNA, 15 bp, Homo sapiens
gtaatggagattcgt

SEQ ID NO: 2064978 - DNA, 15 bp, Homo sapiens
taatggagattcgtg

SEQ ID NO: 2064979 - DNA, 15 bp, Homo sapiens
aatggagattcgtgt

SEQ ID NO: 2064980 - DNA, 15 bp, Homo sapiens
atggagattcgtgtg

SEQ ID NO: 2064981 - DNA, 15 bp, Homo sapiens
tggagattcgtgtgt

SEQ ID NO: 2064982 - DNA, 15 bp, Homo sapiens
ggagattcgtgtgtg

SEQ ID NO: 2064983 - DNA, 15 bp, Homo sapiens
gagattcgtgtgtgg

SEQ ID NO: 2064984 - DNA, 15 bp, Homo sapiens
agattcgtgtgtggg

SEQ ID NO: 2064985 - DNA, 15 bp, Homo sapiens
gattcgtgtgtgggt

SEQ ID NO: 2064986 - DNA, 15 bp, Homo sapiens
attcgtgtgtgggtt

SEQ ID NO: 2064987 - DNA, 15 bp, Homo sapiens
ttcgtgtgtgggttt

SEQ ID NO: 2064988 - DNA, 15 bp, Homo sapiens
tcgtgtgtgggtttt

SEQ ID NO: 2064989 - DNA, 15 bp, Homo sapiens
cgtgtgtgggttttt

SEQ ID NO: 2064990 - DNA, 15 bp, Homo sapiens
gtgtgtgggtttttg

SEQ ID NO: 2064991 - DNA, 15 bp, Homo sapiens
tgtgtgggtttttgc

SEQ ID NO: 2064992 - DNA, 15 bp, Homo sapiens
gtgtgggtttttgca

SEQ ID NO: 2064993 - DNA, 15 bp, Homo sapiens
tgtgggtttttgcac

SEQ ID NO: 2064994 - DNA, 15 bp, Homo sapiens
gtgggtttttgcacc

SEQ ID NO: 2064995 - DNA, 15 bp, Homo sapiens
tgggtttttgcacca

SEQ ID NO: 2064996 - DNA, 15 bp, Homo sapiens
gggtttttgcaccat

SEQ ID NO: 2064997 - DNA, 15 bp, Homo sapiens
ggtttttgcaccatt

SEQ ID NO: 2064998 - DNA, 15 bp, Homo sapiens
gtttttgcaccattt

SEQ ID NO: 2064999 - DNA, 15 bp, Homo sapiens
tttttgcaccatttc

SEQ ID NO: 2065000 - DNA, 15 bp, Homo sapiens
ttttgcaccatttct

SEQ ID NO: 2065001 - DNA, 15 bp, Homo sapiens
tttgcaccatttctt

SEQ ID NO: 2065002 - DNA, 15 bp, Homo sapiens
ttgcaccatttcttg

SEQ ID NO: 2065003 - DNA, 15 bp, Homo sapiens
tgcaccatttcttga

SEQ ID NO: 2065004 - DNA, 15 bp, Homo sapiens
gcaccatttcttgat

SEQ ID NO: 2065005 - DNA, 15 bp, Homo sapiens
caccatttcttgatc

SEQ ID NO: 2065006 - DNA, 15 bp, Homo sapiens
accatttcttgatct

SEQ ID NO: 2065007 - DNA, 15 bp, Homo sapiens
ccatttcttgatctc

SEQ ID NO: 2065008 - DNA, 15 bp, Homo sapiens
catttcttgatctct

SEQ ID NO: 2065009 - DNA, 15 bp, Homo sapiens
atttcttgatctctc

SEQ ID NO: 2065010 - DNA, 15 bp, Homo sapiens
tttcttgatctctca

SEQ ID NO: 2065011 - DNA, 15 bp, Homo sapiens
ttcttgatctctcag

SEQ ID NO: 2065012 - DNA, 15 bp, Homo sapiens
tcttgatctctcagc

SEQ ID NO: 2065013 - DNA, 15 bp, Homo sapiens
cttgatctctcagca

SEQ ID NO: 2065014 - DNA, 15 bp, Homo sapiens
ttgatctctcagcat

SEQ ID NO: 2065015 - DNA, 15 bp, Homo sapiens
tgatctctcagcatt

SEQ ID NO: 2065016 - DNA, 15 bp, Homo sapiens
gatctctcagcattc

SEQ ID NO: 2065017 - DNA, 15 bp, Homo sapiens
atctctcagcattcc

SEQ ID NO: 2065018 - DNA, 15 bp, Homo sapiens
tctctcagcattcca

SEQ ID NO: 2065019 - DNA, 15 bp, Homo sapiens
ctctcagcattccaa

SEQ ID NO: 2065020 - DNA, 15 bp, Homo sapiens
tctcagcattccaag

SEQ ID NO: 2065021 - DNA, 15 bp, Homo sapiens
ctcagcattccaagg

SEQ ID NO: 2065022 - DNA, 15 bp, Homo sapiens
tcagcattccaaggt

SEQ ID NO: 2065023 - DNA, 15 bp, Homo sapiens
cagcattccaaggtc

SEQ ID NO: 2065024 - DNA, 15 bp, Homo sapiens
agcattccaaggtcg

SEQ ID NO: 2065025 - DNA, 15 bp, Homo sapiens
gcattccaaggtcgt

SEQ ID NO: 2065026 - DNA, 15 bp, Homo sapiens
cattccaaggtcgtg

SEQ ID NO: 2065027 - DNA, 15 bp, Homo sapiens
attccaaggtcgtga

SEQ ID NO: 2065028 - DNA, 15 bp, Homo sapiens
ttccaaggtcgtgag

SEQ ID NO: 2065029 - DNA, 15 bp, Homo sapiens
tccaaggtcgtgaga

SEQ ID NO: 2065030 - DNA, 15 bp, Homo sapiens
ccaaggtcgtgagag

SEQ ID NO: 2065031 - DNA, 15 bp, Homo sapiens
caaggtcgtgagagg

SEQ ID NO: 2065032 - DNA, 15 bp, Homo sapiens
aaggtcgtgagagga

SEQ ID NO: 2065033 - DNA, 15 bp, Homo sapiens
aggtcgtgagaggag

SEQ ID NO: 2065034 - DNA, 15 bp, Homo sapiens
ggtcgtgagaggagt

SEQ ID NO: 2065035 - DNA, 15 bp, Homo sapiens
gtcgtgagaggagtc

SEQ ID NO: 2065036 - DNA, 15 bp, Homo sapiens
tcgtgagaggagtcc

SEQ ID NO: 2065037 - DNA, 15 bp, Homo sapiens
cgtgagaggagtcct

SEQ ID NO: 2065038 - DNA, 15 bp, Homo sapiens
gtgagaggagtcctt

SEQ ID NO: 2065039 - DNA, 15 bp, Homo sapiens
tgagaggagtccttg

SEQ ID NO: 2065040 - DNA, 15 bp, Homo sapiens
gagaggagtccttga

SEQ ID NO: 2065041 - DNA, 15 bp, Homo sapiens
agaggagtccttgag

SEQ ID NO: 2065042 - DNA, 15 bp, Homo sapiens
gaggagtccttgagt

SEQ ID NO: 2065043 - DNA, 15 bp, Homo sapiens
aggagtccttgagtg

SEQ ID NO: 2065044 - DNA, 15 bp, Homo sapiens
ggagtccttgagtgg

SEQ ID NO: 2065045 - DNA, 15 bp, Homo sapiens
gagtccttgagtgga

SEQ ID NO: 2065046 - DNA, 15 bp, Homo sapiens
agtccttgagtggaa

SEQ ID NO: 2065047 - DNA, 15 bp, Homo sapiens
gtccttgagtggaag

SEQ ID NO: 2065048 - DNA, 15 bp, Homo sapiens
tccttgagtggaagt

SEQ ID NO: 2065049 - DNA, 15 bp, Homo sapiens
ccttgagtggaagtc

SEQ ID NO: 2065050 - DNA, 15 bp, Homo sapiens
cttgagtggaagtcc

SEQ ID NO: 2065051 - DNA, 15 bp, Homo sapiens
ttgagtggaagtccg

SEQ ID NO: 2065052 - DNA, 15 bp, Homo sapiens
tgagtggaagtccgt

SEQ ID NO: 2065053 - DNA, 15 bp, Homo sapiens
gagtggaagtccgtc

SEQ ID NO: 2065054 - DNA, 15 bp, Homo sapiens
agtggaagtccgtcc

SEQ ID NO: 2065055 - DNA, 15 bp, Homo sapiens
gtggaagtccgtcct

SEQ ID NO: 2065056 - DNA, 15 bp, Homo sapiens
tggaagtccgtccta

SEQ ID NO: 2065057 - DNA, 15 bp, Homo sapiens
ggaagtccgtcctag

SEQ ID NO: 2065058 - DNA, 15 bp, Homo sapiens
gaagtccgtcctagg

SEQ ID NO: 2065059 - DNA, 15 bp, Homo sapiens
aagtccgtcctaggt

SEQ ID NO: 2065060 - DNA, 15 bp, Homo sapiens
agtccgtcctaggtt

SEQ ID NO: 2065061 - DNA, 15 bp, Homo sapiens
gtccgtcctaggttt

SEQ ID NO: 2065062 - DNA, 15 bp, Homo sapiens
tccgtcctaggtttg

SEQ ID NO: 2065063 - DNA, 15 bp, Homo sapiens
ccgtcctaggtttga

SEQ ID NO: 2065064 - DNA, 15 bp, Homo sapiens
cgtcctaggtttgaa

SEQ ID NO: 2065065 - DNA, 15 bp, Homo sapiens
gtcctaggtttgaac

SEQ ID NO: 2065066 - DNA, 15 bp, Homo sapiens
tcctaggtttgaacc

SEQ ID NO: 2065067 - DNA, 15 bp, Homo sapiens
cctaggtttgaaccc

SEQ ID NO: 2065068 - DNA, 15 bp, Homo sapiens
ctaggtttgaaccct

SEQ ID NO: 2065069 - DNA, 15 bp, Homo sapiens
taggtttgaaccctg

SEQ ID NO: 2065070 - DNA, 15 bp, Homo sapiens
aggtttgaaccctgg

SEQ ID NO: 2065071 - DNA, 15 bp, Homo sapiens
ggtttgaaccctggc

SEQ ID NO: 2065072 - DNA, 15 bp, Homo sapiens
gtttgaaccctggct

SEQ ID NO: 2065073 - DNA, 15 bp, Homo sapiens
tttgaaccctggctt

SEQ ID NO: 2065074 - DNA, 15 bp, Homo sapiens
ttgaaccctggcttt

SEQ ID NO: 2065075 - DNA, 15 bp, Homo sapiens
tgaaccctggctttg

SEQ ID NO: 2065076 - DNA, 15 bp, Homo sapiens
gaaccctggctttgc

SEQ ID NO: 2065077 - DNA, 15 bp, Homo sapiens
aaccctggctttgcc

SEQ ID NO: 2065078 - DNA, 15 bp, Homo sapiens
accctggctttgcct

SEQ ID NO: 2065079 - DNA, 15 bp, Homo sapiens
ccctggctttgcctt

SEQ ID NO: 2065080 - DNA, 15 bp, Homo sapiens
cctggctttgccttt

SEQ ID NO: 2065081 - DNA, 15 bp, Homo sapiens
ctggctttgcctttt

SEQ ID NO: 2065082 - DNA, 15 bp, Homo sapiens
tggctttgccttttt

SEQ ID NO: 2065083 - DNA, 15 bp, Homo sapiens
ggctttgcctttttc

SEQ ID NO: 2065084 - DNA, 15 bp, Homo sapiens
gctttgcctttttcc

SEQ ID NO: 2065085 - DNA, 15 bp, Homo sapiens
ctttgcctttttcca

SEQ ID NO: 2065086 - DNA, 15 bp, Homo sapiens
tttgcctttttccag

SEQ ID NO: 2065087 - DNA, 15 bp, Homo sapiens
ttgcctttttccagc

SEQ ID NO: 2065088 - DNA, 15 bp, Homo sapiens
tgcctttttccagct

SEQ ID NO: 2065089 - DNA, 15 bp, Homo sapiens
gcctttttccagctg

SEQ ID NO: 2065090 - DNA, 15 bp, Homo sapiens
cctttttccagctgt

SEQ ID NO: 2065091 - DNA, 15 bp, Homo sapiens
ctttttccagctgtg

SEQ ID NO: 2065092 - DNA, 15 bp, Homo sapiens
tttttccagctgtgc

SEQ ID NO: 2065093 - DNA, 15 bp, Homo sapiens
ttttccagctgtgca

SEQ ID NO: 2065094 - DNA, 15 bp, Homo sapiens
tttccagctgtgcag

SEQ ID NO: 2065095 - DNA, 15 bp, Homo sapiens
ttccagctgtgcagt

SEQ ID NO: 2065096 - DNA, 15 bp, Homo sapiens
tccagctgtgcagta

SEQ ID NO: 2065097 - DNA, 15 bp, Homo sapiens
ccagctgtgcagtac

SEQ ID NO: 2065098 - DNA, 15 bp, Homo sapiens
cagctgtgcagtacc

SEQ ID NO: 2065099 - DNA, 15 bp, Homo sapiens
agctgtgcagtaccg

SEQ ID NO: 2065100 - DNA, 15 bp, Homo sapiens
gctgtgcagtaccgc

SEQ ID NO: 2065101 - DNA, 15 bp, Homo sapiens
ctgtgcagtaccgct

SEQ ID NO: 2065102 - DNA, 15 bp, Homo sapiens
tgtgcagtaccgctc

SEQ ID NO: 2065103 - DNA, 15 bp, Homo sapiens
gtgcagtaccgctct

SEQ ID NO: 2065104 - DNA, 15 bp, Homo sapiens
tgcagtaccgctctt

SEQ ID NO: 2065105 - DNA, 15 bp, Homo sapiens
gcagtaccgctcttg

SEQ ID NO: 2065106 - DNA, 15 bp, Homo sapiens
cagtaccgctcttgt

SEQ ID NO: 2065107 - DNA, 15 bp, Homo sapiens
agtaccgctcttgtg

SEQ ID NO: 2065108 - DNA, 15 bp, Homo sapiens
gtaccgctcttgtgg

SEQ ID NO: 2065109 - DNA, 15 bp, Homo sapiens
taccgctcttgtggg

SEQ ID NO: 2065110 - DNA, 15 bp, Homo sapiens
accgctcttgtgggc

SEQ ID NO: 2065111 - DNA, 15 bp, Homo sapiens
ccgctcttgtgggct

SEQ ID NO: 2065112 - DNA, 15 bp, Homo sapiens
cgctcttgtgggctc

SEQ ID NO: 2065113 - DNA, 15 bp, Homo sapiens
gctcttgtgggctcc

SEQ ID NO: 2065114 - DNA, 15 bp, Homo sapiens
ctcttgtgggctccc

SEQ ID NO: 2065115 - DNA, 15 bp, Homo sapiens
tcttgtgggctcccg

SEQ ID NO: 2065116 - DNA, 15 bp, Homo sapiens
cttgtgggctcccgc

SEQ ID NO: 2065117 - DNA, 15 bp, Homo sapiens
ttgtgggctcccgcc

SEQ ID NO: 2065118 - DNA, 15 bp, Homo sapiens
tgtgggctcccgcca

SEQ ID NO: 2065119 - DNA, 15 bp, Homo sapiens
gtgggctcccgccac

SEQ ID NO: 2065120 - DNA, 15 bp, Homo sapiens
tgggctcccgccaca

SEQ ID NO: 2065121 - DNA, 15 bp, Homo sapiens
gggctcccgccacac

SEQ ID NO: 2065122 - DNA, 15 bp, Homo sapiens
ggctcccgccacacc

SEQ ID NO: 2065123 - DNA, 15 bp, Homo sapiens
gctcccgccacaccc

SEQ ID NO: 2065124 - DNA, 15 bp, Homo sapiens
ctcccgccacaccct

SEQ ID NO: 2065125 - DNA, 15 bp, Homo sapiens
tcccgccacaccctg

SEQ ID NO: 2065126 - DNA, 15 bp, Homo sapiens
cccgccacaccctgg

SEQ ID NO: 2065127 - DNA, 15 bp, Homo sapiens
ccgccacaccctgga

SEQ ID NO: 2065128 - DNA, 15 bp, Homo sapiens
cgccacaccctggag

SEQ ID NO: 2065129 - DNA, 15 bp, Homo sapiens
gccacaccctggagt

SEQ ID NO: 2065130 - DNA, 15 bp, Homo sapiens
ccacaccctggagtc

SEQ ID NO: 2065131 - DNA, 15 bp, Homo sapiens
cacaccctggagtca

SEQ ID NO: 2065132 - DNA, 15 bp, Homo sapiens
acaccctggagtcac

SEQ ID NO: 2065133 - DNA, 15 bp, Homo sapiens
caccctggagtcact

SEQ ID NO: 2065134 - DNA, 15 bp, Homo sapiens
accctggagtcactc

SEQ ID NO: 2065135 - DNA, 15 bp, Homo sapiens
ccctggagtcactcc

SEQ ID NO: 2065136 - DNA, 15 bp, Homo sapiens
cctggagtcactccc

SEQ ID NO: 2065137 - DNA, 15 bp, Homo sapiens
ctggagtcactccca

SEQ ID NO: 2065138 - DNA, 15 bp, Homo sapiens
tggagtcactcccat

SEQ ID NO: 2065139 - DNA, 15 bp, Homo sapiens
ggagtcactcccatc

SEQ ID NO: 2065140 - DNA, 15 bp, Homo sapiens
gagtcactcccatca

SEQ ID NO: 2065141 - DNA, 15 bp, Homo sapiens
agtcactcccatcac

SEQ ID NO: 2065142 - DNA, 15 bp, Homo sapiens
gtcactcccatcaca

SEQ ID NO: 2065143 - DNA, 15 bp, Homo sapiens
tcactcccatcacag

SEQ ID NO: 2065144 - DNA, 15 bp, Homo sapiens
cactcccatcacagc

SEQ ID NO: 2065145 - DNA, 15 bp, Homo sapiens
actcccatcacagcc

SEQ ID NO: 2065146 - DNA, 15 bp, Homo sapiens
ctcccatcacagcca

SEQ ID NO: 2065147 - DNA, 15 bp, Homo sapiens
tcccatcacagccag

SEQ ID NO: 2065148 - DNA, 15 bp, Homo sapiens
ccatcacagccagag

SEQ ID NO: 2065149 - DNA, 15 bp, Homo sapiens
catcacagccagagt

SEQ ID NO: 2065150 - DNA, 15 bp, Homo sapiens
atcacagccagagta

SEQ ID NO: 2065151 - DNA, 15 bp, Homo sapiens
tcacagccagagtaa

SEQ ID NO: 2065152 - DNA, 15 bp, Homo sapiens
cacagccagagtaaa

SEQ ID NO: 2065153 - DNA, 15 bp, Homo sapiens
acagccagagtaaac

SEQ ID NO: 2065154 - DNA, 15 bp, Homo sapiens
cagccagagtaaacc

SEQ ID NO: 2065155 - DNA, 15 bp, Homo sapiens
agccagagtaaacca

SEQ ID NO: 2065156 - DNA, 15 bp, Homo sapiens
gccagagtaaaccag

SEQ ID NO: 2065157 - DNA, 15 bp, Homo sapiens
ccagagtaaaccagt

SEQ ID NO: 2065158 - DNA, 15 bp, Homo sapiens
cagagtaaaccagtg

SEQ ID NO: 2065159 - DNA, 15 bp, Homo sapiens
agagtaaaccagtgt

SEQ ID NO: 2065160 - DNA, 15 bp, Homo sapiens
gagtaaaccagtgtg

SEQ ID NO: 2065161 - DNA, 15 bp, Homo sapiens
agtaaaccagtgtgt

SEQ ID NO: 2065162 - DNA, 15 bp, Homo sapiens
gtaaaccagtgtgtg

SEQ ID NO: 2065163 - DNA, 15 bp, Homo sapiens
taaaccagtgtgtgt

SEQ ID NO: 2065164 - DNA, 15 bp, Homo sapiens
aaaccagtgtgtgtt

SEQ ID NO: 2065165 - DNA, 15 bp, Homo sapiens
aaccagtgtgtgttt

SEQ ID NO: 2065166 - DNA, 15 bp, Homo sapiens
accagtgtgtgtttt

SEQ ID NO: 2065167 - DNA, 15 bp, Homo sapiens
ccagtgtgtgttttc

SEQ ID NO: 2065168 - DNA, 15 bp, Homo sapiens
cagtgtgtgttttct

SEQ ID NO: 2065169 - DNA, 15 bp, Homo sapiens
agtgtgtgttttctg

SEQ ID NO: 2065170 - DNA, 15 bp, Homo sapiens
gtgtgtgttttctgg

SEQ ID NO: 2065171 - DNA, 15 bp, Homo sapiens
tgtgtgttttctggc

SEQ ID NO: 2065172 - DNA, 15 bp, Homo sapiens
gtgtgttttctggct

SEQ ID NO: 2065173 - DNA, 15 bp, Homo sapiens
tgtgttttctggctt

SEQ ID NO: 2065174 - DNA, 15 bp, Homo sapiens
gtgttttctggcttc

SEQ ID NO: 2065175 - DNA, 15 bp, Homo sapiens
tgttttctggcttcc

SEQ ID NO: 2065176 - DNA, 15 bp, Homo sapiens
gttttctggcttccc

SEQ ID NO: 2065177 - DNA, 15 bp, Homo sapiens
ttttctggcttccct

SEQ ID NO: 2065178 - DNA, 15 bp, Homo sapiens
tttctggcttccctc

SEQ ID NO: 2065179 - DNA, 15 bp, Homo sapiens
ttctggcttccctcc

SEQ ID NO: 2065180 - DNA, 15 bp, Homo sapiens
tctggcttccctcct

SEQ ID NO: 2065181 - DNA, 15 bp, Homo sapiens
ctggcttccctcctt

SEQ ID NO: 2065182 - DNA, 15 bp, Homo sapiens
tggcttccctccttg

SEQ ID NO: 2065183 - DNA, 15 bp, Homo sapiens
ggcttccctccttga

SEQ ID NO: 2065184 - DNA, 15 bp, Homo sapiens
gcttccctccttgag

SEQ ID NO: 2065185 - DNA, 15 bp, Homo sapiens
cttccctccttgagg

SEQ ID NO: 2065186 - DNA, 15 bp, Homo sapiens
ttccctccttgaggg

SEQ ID NO: 2065187 - DNA, 15 bp, Homo sapiens
tccctccttgagggt

SEQ ID NO: 2065188 - DNA, 15 bp, Homo sapiens
ccctccttgagggtg

SEQ ID NO: 2065189 - DNA, 15 bp, Homo sapiens
cctccttgagggtga

SEQ ID NO: 2065190 - DNA, 15 bp, Homo sapiens
ctccttgagggtgag

SEQ ID NO: 2065191 - DNA, 15 bp, Homo sapiens
tccttgagggtgagc

SEQ ID NO: 2065192 - DNA, 15 bp, Homo sapiens
ccttgagggtgagcc

SEQ ID NO: 2065193 - DNA, 15 bp, Homo sapiens
cttgagggtgagccc

SEQ ID NO: 2065194 - DNA, 15 bp, Homo sapiens
ttgagggtgagcccc

SEQ ID NO: 2065195 - DNA, 15 bp, Homo sapiens
tgagggtgagcccct

SEQ ID NO: 2065196 - DNA, 15 bp, Homo sapiens
gagggtgagcccctg

SEQ ID NO: 2065197 - DNA, 15 bp, Homo sapiens
agggtgagcccctgt

SEQ ID NO: 2065198 - DNA, 15 bp, Homo sapiens
gggtgagcccctgtt

SEQ ID NO: 2065199 - DNA, 15 bp, Homo sapiens
ggtgagcccctgttt

SEQ ID NO: 2065200 - DNA, 15 bp, Homo sapiens
gtgagcccctgtttt

SEQ ID NO: 2065201 - DNA, 15 bp, Homo sapiens
tgagcccctgtttta

SEQ ID NO: 2065202 - DNA, 15 bp, Homo sapiens
gagcccctgttttat

SEQ ID NO: 2065203 - DNA, 15 bp, Homo sapiens
agcccctgttttatc

SEQ ID NO: 2065204 - DNA, 15 bp, Homo sapiens
gcccctgttttatct

SEQ ID NO: 2065205 - DNA, 15 bp, Homo sapiens
cccctgttttatcta

SEQ ID NO: 2065206 - DNA, 15 bp, Homo sapiens
ccctgttttatctat

SEQ ID NO: 2065207 - DNA, 15 bp, Homo sapiens
cctgttttatctatc

SEQ ID NO: 2065208 - DNA, 15 bp, Homo sapiens
ctgttttatctatct

SEQ ID NO: 2065209 - DNA, 15 bp, Homo sapiens
tgttttatctatctt

SEQ ID NO: 2065210 - DNA, 15 bp, Homo sapiens
gttttatctatcttt

SEQ ID NO: 2065211 - DNA, 15 bp, Homo sapiens
ttttatctatctttg

SEQ ID NO: 2065212 - DNA, 15 bp, Homo sapiens
tttatctatctttga

SEQ ID NO: 2065213 - DNA, 15 bp, Homo sapiens
ttatctatctttgaa

SEQ ID NO: 2065214 - DNA, 15 bp, Homo sapiens
tatctatctttgaac

SEQ ID NO: 2065215 - DNA, 15 bp, Homo sapiens
atctatctttgaacc

SEQ ID NO: 2065216 - DNA, 15 bp, Homo sapiens
tctatctttgaaccc

SEQ ID NO: 2065217 - DNA, 15 bp, Homo sapiens
ctatctttgaacccc

SEQ ID NO: 2065218 - DNA, 15 bp, Homo sapiens
tatctttgaaccccc

SEQ ID NO: 2065219 - DNA, 15 bp, Homo sapiens
atctttgaacccccc

SEQ ID NO: 2065220 - DNA, 15 bp, Homo sapiens
tctttgaacccccca

SEQ ID NO: 2065221 - DNA, 15 bp, Homo sapiens
ctttgaaccccccag

SEQ ID NO: 2065222 - DNA, 15 bp, Homo sapiens
tttgaaccccccagt

SEQ ID NO: 2065223 - DNA, 15 bp, Homo sapiens
ttgaaccccccagtg

SEQ ID NO: 2065224 - DNA, 15 bp, Homo sapiens
tgaaccccccagtgc

SEQ ID NO: 2065225 - DNA, 15 bp, Homo sapiens
gaaccccccagtgcc

SEQ ID NO: 2065226 - DNA, 15 bp, Homo sapiens
aaccccccagtgcct

SEQ ID NO: 2065227 - DNA, 15 bp, Homo sapiens
accccccagtgcctc

SEQ ID NO: 2065228 - DNA, 15 bp, Homo sapiens
ccccccagtgcctcg

SEQ ID NO: 2065229 - DNA, 15 bp, Homo sapiens
cccccagtgcctcga

SEQ ID NO: 2065230 - DNA, 15 bp, Homo sapiens
ccccagtgcctcgag

SEQ ID NO: 2065231 - DNA, 15 bp, Homo sapiens
cccagtgcctcgaga

SEQ ID NO: 2065232 - DNA, 15 bp, Homo sapiens
ccagtgcctcgagaa

SEQ ID NO: 2065233 - DNA, 15 bp, Homo sapiens
cagtgcctcgagaaa

SEQ ID NO: 2065234 - DNA, 15 bp, Homo sapiens
agtgcctcgagaaac

SEQ ID NO: 2065235 - DNA, 15 bp, Homo sapiens
gtgcctcgagaaacg

SEQ ID NO: 2065236 - DNA, 15 bp, Homo sapiens
tgcctcgagaaacgc

SEQ ID NO: 2065237 - DNA, 15 bp, Homo sapiens
gcctcgagaaacgct

SEQ ID NO: 2065238 - DNA, 15 bp, Homo sapiens
cctcgagaaacgctg

SEQ ID NO: 2065239 - DNA, 15 bp, Homo sapiens
ctcgagaaacgctga

SEQ ID NO: 2065240 - DNA, 15 bp, Homo sapiens
tcgagaaacgctgag

SEQ ID NO: 2065241 - DNA, 15 bp, Homo sapiens
cgagaaacgctgagg

SEQ ID NO: 2065242 - DNA, 15 bp, Homo sapiens
gagaaacgctgagga

SEQ ID NO: 2065243 - DNA, 15 bp, Homo sapiens
agaaacgctgaggaa

SEQ ID NO: 2065244 - DNA, 15 bp, Homo sapiens
gaaacgctgaggaaa

SEQ ID NO: 2065245 - DNA, 15 bp, Homo sapiens
aaacgctgaggaaac

SEQ ID NO: 2065246 - DNA, 15 bp, Homo sapiens
aacgctgaggaaaca

SEQ ID NO: 2065247 - DNA, 15 bp, Homo sapiens
acgctgaggaaacac

SEQ ID NO: 2065248 - DNA, 15 bp, Homo sapiens
cgctgaggaaacaca

SEQ ID NO: 2065249 - DNA, 15 bp, Homo sapiens
gctgaggaaacacag

SEQ ID NO: 2065250 - DNA, 15 bp, Homo sapiens
ctgaggaaacacagc

SEQ ID NO: 2065251 - DNA, 15 bp, Homo sapiens
tgaggaaacacagcc

SEQ ID NO: 2065252 - DNA, 15 bp, Homo sapiens
gaggaaacacagcct

SEQ ID NO: 2065253 - DNA, 15 bp, Homo sapiens
aggaaacacagcctc

SEQ ID NO: 2065254 - DNA, 15 bp, Homo sapiens
ggaaacacagcctcc

SEQ ID NO: 2065255 - DNA, 15 bp, Homo sapiens
gaaacacagcctccg

SEQ ID NO: 2065256 - DNA, 15 bp, Homo sapiens
aaacacagcctccga

SEQ ID NO: 2065257 - DNA, 15 bp, Homo sapiens
aacacagcctccgag

SEQ ID NO: 2065258 - DNA, 15 bp, Homo sapiens
acacagcctccgagc

SEQ ID NO: 2065259 - DNA, 15 bp, Homo sapiens
cacagcctccgagca

SEQ ID NO: 2065260 - DNA, 15 bp, Homo sapiens
acagcctccgagcac

SEQ ID NO: 2065261 - DNA, 15 bp, Homo sapiens
cagcctccgagcacc

SEQ ID NO: 2065262 - DNA, 15 bp, Homo sapiens
agcctccgagcacct

SEQ ID NO: 2065263 - DNA, 15 bp, Homo sapiens
gcctccgagcacctg

SEQ ID NO: 2065264 - DNA, 15 bp, Homo sapiens
cctccgagcacctgt

SEQ ID NO: 2065265 - DNA, 15 bp, Homo sapiens
ctccgagcacctgtt

SEQ ID NO: 2065266 - DNA, 15 bp, Homo sapiens
tccgagcacctgttt

SEQ ID NO: 2065267 - DNA, 15 bp, Homo sapiens
ccgagcacctgtttc

SEQ ID NO: 2065268 - DNA, 15 bp, Homo sapiens
cgagcacctgtttcc

SEQ ID NO: 2065269 - DNA, 15 bp, Homo sapiens
gagcacctgtttcct

SEQ ID NO: 2065270 - DNA, 15 bp, Homo sapiens
agcacctgtttcctg

SEQ ID NO: 2065271 - DNA, 15 bp, Homo sapiens
gcacctgtttcctga

SEQ ID NO: 2065272 - DNA, 15 bp, Homo sapiens
cacctgtttcctgag

SEQ ID NO: 2065273 - DNA, 15 bp, Homo sapiens
acctgtttcctgagc

SEQ ID NO: 2065274 - DNA, 15 bp, Homo sapiens
cctgtttcctgagct

SEQ ID NO: 2065275 - DNA, 15 bp, Homo sapiens
ctgtttcctgagctg

SEQ ID NO: 2065276 - DNA, 15 bp, Homo sapiens
tgtttcctgagctgt

SEQ ID NO: 2065277 - DNA, 15 bp, Homo sapiens
gtttcctgagctgta

SEQ ID NO: 2065278 - DNA, 15 bp, Homo sapiens
tttcctgagctgtaa

SEQ ID NO: 2065279 - DNA, 15 bp, Homo sapiens
ttcctgagctgtaaa

SEQ ID NO: 2065280 - DNA, 15 bp, Homo sapiens
tcctgagctgtaaaa

SEQ ID NO: 2065281 - DNA, 15 bp, Homo sapiens
cctgagctgtaaaaa

SEQ ID NO: 2065282 - DNA, 15 bp, Homo sapiens
ctgagctgtaaaaaa

SEQ ID NO: 2065283 - DNA, 15 bp, Homo sapiens
tgagctgtaaaaaat

SEQ ID NO: 2065284 - DNA, 15 bp, Homo sapiens
gagctgtaaaaaatg

SEQ ID NO: 2065285 - DNA, 15 bp, Homo sapiens
agctgtaaaaaatgg

SEQ ID NO: 2065286 - DNA, 15 bp, Homo sapiens
gctgtaaaaaatggt

SEQ ID NO: 2065287 - DNA, 15 bp, Homo sapiens
ctgtaaaaaatggtc

SEQ ID NO: 2065288 - DNA, 15 bp, Homo sapiens
tgtaaaaaatggtca

SEQ ID NO: 2065289 - DNA, 15 bp, Homo sapiens
gtaaaaaatggtcac

SEQ ID NO: 2065290 - DNA, 15 bp, Homo sapiens
taaaaaatggtcaca

SEQ ID NO: 2065291 - DNA, 15 bp, Homo sapiens
aaaaaatggtcacaa

SEQ ID NO: 2065292 - DNA, 15 bp, Homo sapiens
aaaaatggtcacaac

SEQ ID NO: 2065293 - DNA, 15 bp, Homo sapiens
aaaatggtcacaacc

SEQ ID NO: 2065294 - DNA, 15 bp, Homo sapiens
aaatggtcacaacct

SEQ ID NO: 2065295 - DNA, 15 bp, Homo sapiens
aatggtcacaacctg

SEQ ID NO: 2065296 - DNA, 15 bp, Homo sapiens
atggtcacaacctgc

SEQ ID NO: 2065297 - DNA, 15 bp, Homo sapiens
tggtcacaacctgcc

SEQ ID NO: 2065298 - DNA, 15 bp, Homo sapiens
ggtcacaacctgccc

SEQ ID NO: 2065299 - DNA, 15 bp, Homo sapiens
gtcacaacctgccct

SEQ ID NO: 2065300 - DNA, 15 bp, Homo sapiens
tcacaacctgccctg

SEQ ID NO: 2065301 - DNA, 15 bp, Homo sapiens
cacaacctgccctgt

SEQ ID NO: 2065302 - DNA, 15 bp, Homo sapiens
acaacctgccctgtg

SEQ ID NO: 2065303 - DNA, 15 bp, Homo sapiens
caacctgccctgtgt

SEQ ID NO: 2065304 - DNA, 15 bp, Homo sapiens
aacctgccctgtgta

SEQ ID NO: 2065305 - DNA, 15 bp, Homo sapiens
acctgccctgtgtac

SEQ ID NO: 2065306 - DNA, 15 bp, Homo sapiens
cctgccctgtgtact

SEQ ID NO: 2065307 - DNA, 15 bp, Homo sapiens
ctgccctgtgtactg

SEQ ID NO: 2065308 - DNA, 15 bp, Homo sapiens
tgccctgtgtactgg

SEQ ID NO: 2065309 - DNA, 15 bp, Homo sapiens
gccctgtgtactggc

SEQ ID NO: 2065310 - DNA, 15 bp, Homo sapiens
ccctgtgtactggct

SEQ ID NO: 2065311 - DNA, 15 bp, Homo sapiens
cctgtgtactggctt

SEQ ID NO: 2065312 - DNA, 15 bp, Homo sapiens
ctgtgtactggcttg

SEQ ID NO: 2065313 - DNA, 15 bp, Homo sapiens
tgtgtactggcttgg

SEQ ID NO: 2065314 - DNA, 15 bp, Homo sapiens
gtgtactggcttggt

SEQ ID NO: 2065315 - DNA, 15 bp, Homo sapiens
tgtactggcttggtt

SEQ ID NO: 2065316 - DNA, 15 bp, Homo sapiens
gtactggcttggttt

SEQ ID NO: 2065317 - DNA, 15 bp, Homo sapiens
tactggcttggtttg

SEQ ID NO: 2065318 - DNA, 15 bp, Homo sapiens
actggcttggtttgt

SEQ ID NO: 2065319 - DNA, 15 bp, Homo sapiens
ctggcttggtttgtg

SEQ ID NO: 2065320 - DNA, 15 bp, Homo sapiens
tggcttggtttgtgc

SEQ ID NO: 2065321 - DNA, 15 bp, Homo sapiens
ggcttggtttgtgct

SEQ ID NO: 2065322 - DNA, 15 bp, Homo sapiens
gcttggtttgtgcta

SEQ ID NO: 2065323 - DNA, 15 bp, Homo sapiens
cttggtttgtgctag

SEQ ID NO: 2065324 - DNA, 15 bp, Homo sapiens
ttggtttgtgctagg

SEQ ID NO: 2065325 - DNA, 15 bp, Homo sapiens
tggtttgtgctaggg

SEQ ID NO: 2065326 - DNA, 15 bp, Homo sapiens
ggtttgtgctaggga

SEQ ID NO: 2065327 - DNA, 15 bp, Homo sapiens
gtttgtgctagggat

SEQ ID NO: 2065328 - DNA, 15 bp, Homo sapiens
tttgtgctagggatc

SEQ ID NO: 2065329 - DNA, 15 bp, Homo sapiens
ttgtgctagggatcc

SEQ ID NO: 2065330 - DNA, 15 bp, Homo sapiens
tgtgctagggatcca

SEQ ID NO: 2065331 - DNA, 15 bp, Homo sapiens
gtgctagggatccaa

SEQ ID NO: 2065332 - DNA, 15 bp, Homo sapiens
tgctagggatccaaa

SEQ ID NO: 2065333 - DNA, 15 bp, Homo sapiens
gctagggatccaaac

SEQ ID NO: 2065334 - DNA, 15 bp, Homo sapiens
ctagggatccaaaca

SEQ ID NO: 2065335 - DNA, 15 bp, Homo sapiens
tagggatccaaacaa

SEQ ID NO: 2065336 - DNA, 15 bp, Homo sapiens
agggatccaaacaat

SEQ ID NO: 2065337 - DNA, 15 bp, Homo sapiens
gggatccaaacaatt

SEQ ID NO: 2065338 - DNA, 15 bp, Homo sapiens
ggatccaaacaattc

SEQ ID NO: 2065339 - DNA, 15 bp, Homo sapiens
gatccaaacaattca

SEQ ID NO: 2065340 - DNA, 15 bp, Homo sapiens
atccaaacaattcag

SEQ ID NO: 2065341 - DNA, 15 bp, Homo sapiens
tccaaacaattcagg

SEQ ID NO: 2065342 - DNA, 15 bp, Homo sapiens
ccaaacaattcagga

SEQ ID NO: 2065343 - DNA, 15 bp, Homo sapiens
caaacaattcaggat

SEQ ID NO: 2065344 - DNA, 15 bp, Homo sapiens
aaacaattcaggatg

SEQ ID NO: 2065345 - DNA, 15 bp, Homo sapiens
aacaattcaggatga

SEQ ID NO: 2065346 - DNA, 15 bp, Homo sapiens
acaattcaggatgag

SEQ ID NO: 2065347 - DNA, 15 bp, Homo sapiens
caattcaggatgaga

SEQ ID NO: 2065348 - DNA, 15 bp, Homo sapiens
aattcaggatgagat

SEQ ID NO: 2065349 - DNA, 15 bp, Homo sapiens
attcaggatgagatc

SEQ ID NO: 2065350 - DNA, 15 bp, Homo sapiens
ttcaggatgagatca

SEQ ID NO: 2065351 - DNA, 15 bp, Homo sapiens
tcaggatgagatcat

SEQ ID NO: 2065352 - DNA, 15 bp, Homo sapiens
caggatgagatcatg

SEQ ID NO: 2065353 - DNA, 15 bp, Homo sapiens
aggatgagatcatgt

SEQ ID NO: 2065354 - DNA, 15 bp, Homo sapiens
ggatgagatcatgtg

SEQ ID NO: 2065355 - DNA, 15 bp, Homo sapiens
gatgagatcatgtgc

SEQ ID NO: 2065356 - DNA, 15 bp, Homo sapiens
atgagatcatgtgcc

SEQ ID NO: 2065357 - DNA, 15 bp, Homo sapiens
tgagatcatgtgcct

SEQ ID NO: 2065358 - DNA, 15 bp, Homo sapiens
gagatcatgtgcctg

SEQ ID NO: 2065359 - DNA, 15 bp, Homo sapiens
agatcatgtgcctga

SEQ ID NO: 2065360 - DNA, 15 bp, Homo sapiens
gatcatgtgcctgag

SEQ ID NO: 2065361 - DNA, 15 bp, Homo sapiens
atcatgtgcctgagt

SEQ ID NO: 2065362 - DNA, 15 bp, Homo sapiens
tcatgtgcctgagtt

SEQ ID NO: 2065363 - DNA, 15 bp, Homo sapiens
catgtgcctgagttt

SEQ ID NO: 2065364 - DNA, 15 bp, Homo sapiens
atgtgcctgagtttg

SEQ ID NO: 2065365 - DNA, 15 bp, Homo sapiens
tgtgcctgagtttgt

SEQ ID NO: 2065366 - DNA, 15 bp, Homo sapiens
gtgcctgagtttgta

SEQ ID NO: 2065367 - DNA, 15 bp, Homo sapiens
tgcctgagtttgtag

SEQ ID NO: 2065368 - DNA, 15 bp, Homo sapiens
gcctgagtttgtaga

SEQ ID NO: 2065369 - DNA, 15 bp, Homo sapiens
cctgagtttgtagat

SEQ ID NO: 2065370 - DNA, 15 bp, Homo sapiens
ctgagtttgtagatc

SEQ ID NO: 2065371 - DNA, 15 bp, Homo sapiens
tgagtttgtagatca

SEQ ID NO: 2065372 - DNA, 15 bp, Homo sapiens
gagtttgtagatcac

SEQ ID NO: 2065373 - DNA, 15 bp, Homo sapiens
agtttgtagatcaca

SEQ ID NO: 2065374 - DNA, 15 bp, Homo sapiens
gtttgtagatcacaa

SEQ ID NO: 2065375 - DNA, 15 bp, Homo sapiens
tttgtagatcacaaa

SEQ ID NO: 2065376 - DNA, 15 bp, Homo sapiens
ttgtagatcacaaaa

SEQ ID NO: 2065377 - DNA, 15 bp, Homo sapiens
tgtagatcacaaaag

SEQ ID NO: 2065378 - DNA, 15 bp, Homo sapiens
gtagatcacaaaagt

SEQ ID NO: 2065379 - DNA, 15 bp, Homo sapiens
tagatcacaaaagtc

SEQ ID NO: 2065380 - DNA, 15 bp, Homo sapiens
agatcacaaaagtcg

SEQ ID NO: 2065381 - DNA, 15 bp, Homo sapiens
gatcacaaaagtcgc

SEQ ID NO: 2065382 - DNA, 15 bp, Homo sapiens
atcacaaaagtcgct

SEQ ID NO: 2065383 - DNA, 15 bp, Homo sapiens
tcacaaaagtcgcta

SEQ ID NO: 2065384 - DNA, 15 bp, Homo sapiens
cacaaaagtcgctaa

SEQ ID NO: 2065385 - DNA, 15 bp, Homo sapiens
acaaaagtcgctaat

SEQ ID NO: 2065386 - DNA, 15 bp, Homo sapiens
caaaagtcgctaata

SEQ ID NO: 2065387 - DNA, 15 bp, Homo sapiens
aaaagtcgctaatag

SEQ ID NO: 2065388 - DNA, 15 bp, Homo sapiens
aaagtcgctaataga

SEQ ID NO: 2065389 - DNA, 15 bp, Homo sapiens
aagtcgctaatagaa

SEQ ID NO: 2065390 - DNA, 15 bp, Homo sapiens
agtcgctaatagaag

SEQ ID NO: 2065391 - DNA, 15 bp, Homo sapiens
gtcgctaatagaagg

SEQ ID NO: 2065392 - DNA, 15 bp, Homo sapiens
tcgctaatagaagga

SEQ ID NO: 2065393 - DNA, 15 bp, Homo sapiens
cgctaatagaaggag

SEQ ID NO: 2065394 - DNA, 15 bp, Homo sapiens
gctaatagaaggagt

SEQ ID NO: 2065395 - DNA, 15 bp, Homo sapiens
ctaatagaaggagtt

SEQ ID NO: 2065396 - DNA, 15 bp, Homo sapiens
taatagaaggagtta

SEQ ID NO: 2065397 - DNA, 15 bp, Homo sapiens
aatagaaggagttat

SEQ ID NO: 2065398 - DNA, 15 bp, Homo sapiens
atagaaggagttatt

SEQ ID NO: 2065399 - DNA, 15 bp, Homo sapiens
tagaaggagttattc

SEQ ID NO: 2065400 - DNA, 15 bp, Homo sapiens
agaaggagttattcc

SEQ ID NO: 2065401 - DNA, 15 bp, Homo sapiens
gaaggagttattcct

SEQ ID NO: 2065402 - DNA, 15 bp, Homo sapiens
aaggagttattcctt

SEQ ID NO: 2065403 - DNA, 15 bp, Homo sapiens
aggagttattccttc

SEQ ID NO: 2065404 - DNA, 15 bp, Homo sapiens
ggagttattccttct

SEQ ID NO: 2065405 - DNA, 15 bp, Homo sapiens
gagttattccttctg

SEQ ID NO: 2065406 - DNA, 15 bp, Homo sapiens
agttattccttctga

SEQ ID NO: 2065407 - DNA, 15 bp, Homo sapiens
gttattccttctgat

SEQ ID NO: 2065408 - DNA, 15 bp, Homo sapiens
ttattccttctgatt

SEQ ID NO: 2065409 - DNA, 15 bp, Homo sapiens
tattccttctgattc

SEQ ID NO: 2065410 - DNA, 15 bp, Homo sapiens
attccttctgattct

SEQ ID NO: 2065411 - DNA, 15 bp, Homo sapiens
ttccttctgattctg

SEQ ID NO: 2065412 - DNA, 15 bp, Homo sapiens
tccttctgattctgt

SEQ ID NO: 2065413 - DNA, 15 bp, Homo sapiens
ccttctgattctgta

SEQ ID NO: 2065414 - DNA, 15 bp, Homo sapiens
cttctgattctgtat

SEQ ID NO: 2065415 - DNA, 15 bp, Homo sapiens
ttctgattctgtatt

SEQ ID NO: 2065416 - DNA, 15 bp, Homo sapiens
tctgattctgtattt

SEQ ID NO: 2065417 - DNA, 15 bp, Homo sapiens
ctgattctgtatttt

SEQ ID NO: 2065418 - DNA, 15 bp, Homo sapiens
tgattctgtattttg

SEQ ID NO: 2065419 - DNA, 15 bp, Homo sapiens
gattctgtattttgg

SEQ ID NO: 2065420 - DNA, 15 bp, Homo sapiens
attctgtattttgga

SEQ ID NO: 2065421 - DNA, 15 bp, Homo sapiens
ttctgtattttggat

SEQ ID NO: 2065422 - DNA, 15 bp, Homo sapiens
tctgtattttggatt

SEQ ID NO: 2065423 - DNA, 15 bp, Homo sapiens
ctgtattttggattt

SEQ ID NO: 2065424 - DNA, 15 bp, Homo sapiens
tgtattttggattta

SEQ ID NO: 2065425 - DNA, 15 bp, Homo sapiens
gtattttggatttag

SEQ ID NO: 2065426 - DNA, 15 bp, Homo sapiens
tattttggatttaga

SEQ ID NO: 2065427 - DNA, 15 bp, Homo sapiens
attttggatttagag

SEQ ID NO: 2065428 - DNA, 15 bp, Homo sapiens
ttttggatttagaga

SEQ ID NO: 2065429 - DNA, 15 bp, Homo sapiens
tttggatttagagaa

SEQ ID NO: 2065430 - DNA, 15 bp, Homo sapiens
ttggatttagagaaa

SEQ ID NO: 2065431 - DNA, 15 bp, Homo sapiens
tggatttagagaaac

SEQ ID NO: 2065432 - DNA, 15 bp, Homo sapiens
ggatttagagaaact

SEQ ID NO: 2065433 - DNA, 15 bp, Homo sapiens
gatttagagaaactg

SEQ ID NO: 2065434 - DNA, 15 bp, Homo sapiens
atttagagaaactgt

SEQ ID NO: 2065435 - DNA, 15 bp, Homo sapiens
tttagagaaactgtg

SEQ ID NO: 2065436 - DNA, 15 bp, Homo sapiens
ttagagaaactgtga

SEQ ID NO: 2065437 - DNA, 15 bp, Homo sapiens
tagagaaactgtgac

SEQ ID NO: 2065438 - DNA, 15 bp, Homo sapiens
agagaaactgtgact

SEQ ID NO: 2065439 - DNA, 15 bp, Homo sapiens
gagaaactgtgactc

SEQ ID NO: 2065440 - DNA, 15 bp, Homo sapiens
agaaactgtgactct

SEQ ID NO: 2065441 - DNA, 15 bp, Homo sapiens
gaaactgtgactcta

SEQ ID NO: 2065442 - DNA, 15 bp, Homo sapiens
aaactgtgactctag

SEQ ID NO: 2065443 - DNA, 15 bp, Homo sapiens
aactgtgactctagg

SEQ ID NO: 2065444 - DNA, 15 bp, Homo sapiens
actgtgactctaggc

SEQ ID NO: 2065445 - DNA, 15 bp, Homo sapiens
ctgtgactctaggcc

SEQ ID NO: 2065446 - DNA, 15 bp, Homo sapiens
tgtgactctaggcct

SEQ ID NO: 2065447 - DNA, 15 bp, Homo sapiens
gtgactctaggcctc

SEQ ID NO: 2065448 - DNA, 15 bp, Homo sapiens
tgactctaggcctct

SEQ ID NO: 2065449 - DNA, 15 bp, Homo sapiens
gactctaggcctctg

SEQ ID NO: 2065450 - DNA, 15 bp, Homo sapiens
actctaggcctctga

SEQ ID NO: 2065451 - DNA, 15 bp, Homo sapiens
ctctaggcctctgac

SEQ ID NO: 2065452 - DNA, 15 bp, Homo sapiens
tctaggcctctgacc

SEQ ID NO: 2065453 - DNA, 15 bp, Homo sapiens
ctaggcctctgacct

SEQ ID NO: 2065454 - DNA, 15 bp, Homo sapiens
taggcctctgacctt

SEQ ID NO: 2065455 - DNA, 15 bp, Homo sapiens
aggcctctgaccttc

SEQ ID NO: 2065456 - DNA, 15 bp, Homo sapiens
ggcctctgaccttca

SEQ ID NO: 2065457 - DNA, 15 bp, Homo sapiens
gcctctgaccttcaa

SEQ ID NO: 2065458 - DNA, 15 bp, Homo sapiens
cctctgaccttcaac

SEQ ID NO: 2065459 - DNA, 15 bp, Homo sapiens
ctctgaccttcaaca

SEQ ID NO: 2065460 - DNA, 15 bp, Homo sapiens
tctgaccttcaacaa

SEQ ID NO: 2065461 - DNA, 15 bp, Homo sapiens
ctgaccttcaacaag

SEQ ID NO: 2065462 - DNA, 15 bp, Homo sapiens
tgaccttcaacaaga

SEQ ID NO: 2065463 - DNA, 15 bp, Homo sapiens
gaccttcaacaagaa

SEQ ID NO: 2065464 - DNA, 15 bp, Homo sapiens
accttcaacaagaaa

SEQ ID NO: 2065465 - DNA, 15 bp, Homo sapiens
ccttcaacaagaaac

SEQ ID NO: 2065466 - DNA, 15 bp, Homo sapiens
cttcaacaagaaaca

SEQ ID NO: 2065467 - DNA, 15 bp, Homo sapiens
ttcaacaagaaacac

SEQ ID NO: 2065468 - DNA, 15 bp, Homo sapiens
tcaacaagaaacact

SEQ ID NO: 2065469 - DNA, 15 bp, Homo sapiens
caacaagaaacactt

SEQ ID NO: 2065470 - DNA, 15 bp, Homo sapiens
aacaagaaacacttg

SEQ ID NO: 2065471 - DNA, 15 bp, Homo sapiens
acaagaaacacttgg

SEQ ID NO: 2065472 - DNA, 15 bp, Homo sapiens
caagaaacacttggg

SEQ ID NO: 2065473 - DNA, 15 bp, Homo sapiens
aagaaacacttgggc

SEQ ID NO: 2065474 - DNA, 15 bp, Homo sapiens
agaaacacttgggcc

SEQ ID NO: 2065475 - DNA, 15 bp, Homo sapiens
gaaacacttgggccc

SEQ ID NO: 2065476 - DNA, 15 bp, Homo sapiens
aaacacttgggcccc

SEQ ID NO: 2065477 - DNA, 15 bp, Homo sapiens
aacacttgggcccct

SEQ ID NO: 2065478 - DNA, 15 bp, Homo sapiens
acacttgggcccctc

SEQ ID NO: 2065479 - DNA, 15 bp, Homo sapiens
cacttgggcccctca

SEQ ID NO: 2065480 - DNA, 15 bp, Homo sapiens
acttgggcccctcag

SEQ ID NO: 2065481 - DNA, 15 bp, Homo sapiens
cttgggcccctcagt

SEQ ID NO: 2065482 - DNA, 15 bp, Homo sapiens
ttgggcccctcagtt

SEQ ID NO: 2065483 - DNA, 15 bp, Homo sapiens
tgggcccctcagttg

SEQ ID NO: 2065484 - DNA, 15 bp, Homo sapiens
gggcccctcagttgc

SEQ ID NO: 2065485 - DNA, 15 bp, Homo sapiens
ggcccctcagttgct

SEQ ID NO: 2065486 - DNA, 15 bp, Homo sapiens
gcccctcagttgctc

SEQ ID NO: 2065487 - DNA, 15 bp, Homo sapiens
cccctcagttgctcc

SEQ ID NO: 2065488 - DNA, 15 bp, Homo sapiens
ccctcagttgctccc

SEQ ID NO: 2065489 - DNA, 15 bp, Homo sapiens
cctcagttgctcccg

SEQ ID NO: 2065490 - DNA, 15 bp, Homo sapiens
ctcagttgctcccgc

SEQ ID NO: 2065491 - DNA, 15 bp, Homo sapiens
tcagttgctcccgca

SEQ ID NO: 2065492 - DNA, 15 bp, Homo sapiens
cagttgctcccgcag

SEQ ID NO: 2065493 - DNA, 15 bp, Homo sapiens
agttgctcccgcagt

SEQ ID NO: 2065494 - DNA, 15 bp, Homo sapiens
gttgctcccgcagtc

SEQ ID NO: 2065495 - DNA, 15 bp, Homo sapiens
ttgctcccgcagtct

SEQ ID NO: 2065496 - DNA, 15 bp, Homo sapiens
tgctcccgcagtctc

SEQ ID NO: 2065497 - DNA, 15 bp, Homo sapiens
gctcccgcagtctcc

SEQ ID NO: 2065498 - DNA, 15 bp, Homo sapiens
ctcccgcagtctccc

SEQ ID NO: 2065499 - DNA, 15 bp, Homo sapiens
tcccgcagtctccca

SEQ ID NO: 2065500 - DNA, 15 bp, Homo sapiens
cccgcagtctcccac

SEQ ID NO: 2065501 - DNA, 15 bp, Homo sapiens
ccgcagtctcccaca

SEQ ID NO: 2065502 - DNA, 15 bp, Homo sapiens
cgcagtctcccacag

SEQ ID NO: 2065503 - DNA, 15 bp, Homo sapiens
gcagtctcccacagc

SEQ ID NO: 2065504 - DNA, 15 bp, Homo sapiens
cagtctcccacagct

SEQ ID NO: 2065505 - DNA, 15 bp, Homo sapiens
agtctcccacagcta

SEQ ID NO: 2065506 - DNA, 15 bp, Homo sapiens
gtctcccacagctag

SEQ ID NO: 2065507 - DNA, 15 bp, Homo sapiens
tctcccacagctagg

SEQ ID NO: 2065508 - DNA, 15 bp, Homo sapiens
ctcccacagctaggc

SEQ ID NO: 2065509 - DNA, 15 bp, Homo sapiens
tcccacagctaggca

SEQ ID NO: 2065510 - DNA, 15 bp, Homo sapiens
cccacagctaggcac

SEQ ID NO: 2065511 - DNA, 15 bp, Homo sapiens
ccacagctaggcaca

SEQ ID NO: 2065512 - DNA, 15 bp, Homo sapiens
cacagctaggcacag

SEQ ID NO: 2065513 - DNA, 15 bp, Homo sapiens
acagctaggcacagg

SEQ ID NO: 2065514 - DNA, 15 bp, Homo sapiens
cagctaggcacaggc

SEQ ID NO: 2065515 - DNA, 15 bp, Homo sapiens
agctaggcacaggct

SEQ ID NO: 2065516 - DNA, 15 bp, Homo sapiens
gctaggcacaggctt

SEQ ID NO: 2065517 - DNA, 15 bp, Homo sapiens
ctaggcacaggcttc

SEQ ID NO: 2065518 - DNA, 15 bp, Homo sapiens
taggcacaggcttct

SEQ ID NO: 2065519 - DNA, 15 bp, Homo sapiens
aggcacaggcttcta

SEQ ID NO: 2065520 - DNA, 15 bp, Homo sapiens
ggcacaggcttctaa

SEQ ID NO: 2065521 - DNA, 15 bp, Homo sapiens
gcacaggcttctaag

SEQ ID NO: 2065522 - DNA, 15 bp, Homo sapiens
cacaggcttctaagc

SEQ ID NO: 2065523 - DNA, 15 bp, Homo sapiens
acaggcttctaagcc

SEQ ID NO: 2065524 - DNA, 15 bp, Homo sapiens
caggcttctaagccg

SEQ ID NO: 2065525 - DNA, 15 bp, Homo sapiens
aggcttctaagccgg

SEQ ID NO: 2065526 - DNA, 15 bp, Homo sapiens
ggcttctaagccggg

SEQ ID NO: 2065527 - DNA, 15 bp, Homo sapiens
gcttctaagccgggc

SEQ ID NO: 2065528 - DNA, 15 bp, Homo sapiens
cttctaagccgggct

SEQ ID NO: 2065529 - DNA, 15 bp, Homo sapiens
ttctaagccgggctg

SEQ ID NO: 2065530 - DNA, 15 bp, Homo sapiens
tctaagccgggctga

SEQ ID NO: 2065531 - DNA, 15 bp, Homo sapiens
ctaagccgggctgag

SEQ ID NO: 2065532 - DNA, 15 bp, Homo sapiens
taagccgggctgagc

SEQ ID NO: 2065533 - DNA, 15 bp, Homo sapiens
aagccgggctgagct

SEQ ID NO: 2065534 - DNA, 15 bp, Homo sapiens
agccgggctgagctg

SEQ ID NO: 2065535 - DNA, 15 bp, Homo sapiens
gccgggctgagctgg

SEQ ID NO: 2065536 - DNA, 15 bp, Homo sapiens
ccgggctgagctggg

SEQ ID NO: 2065537 - DNA, 15 bp, Homo sapiens
cgggctgagctgggc

SEQ ID NO: 2065538 - DNA, 15 bp, Homo sapiens
gggctgagctgggct

SEQ ID NO: 2065539 - DNA, 15 bp, Homo sapiens
ggctgagctgggctc

SEQ ID NO: 2065540 - DNA, 15 bp, Homo sapiens
gctgagctgggctcg

SEQ ID NO: 2065541 - DNA, 15 bp, Homo sapiens
ctgagctgggctcgc

SEQ ID NO: 2065542 - DNA, 15 bp, Homo sapiens
tgagctgggctcgcg

SEQ ID NO: 2065543 - DNA, 15 bp, Homo sapiens
gagctgggctcgcga

SEQ ID NO: 2065544 - DNA, 15 bp, Homo sapiens
agctgggctcgcgag

SEQ ID NO: 2065545 - DNA, 15 bp, Homo sapiens
gctgggctcgcgagt

SEQ ID NO: 2065546 - DNA, 15 bp, Homo sapiens
ctgggctcgcgagtg

SEQ ID NO: 2065547 - DNA, 15 bp, Homo sapiens
tgggctcgcgagtgc

SEQ ID NO: 2065548 - DNA, 15 bp, Homo sapiens
gggctcgcgagtgcc

SEQ ID NO: 2065549 - DNA, 15 bp, Homo sapiens
ggctcgcgagtgcca

SEQ ID NO: 2065550 - DNA, 15 bp, Homo sapiens
gctcgcgagtgccat

SEQ ID NO: 2065551 - DNA, 15 bp, Homo sapiens
ctcgcgagtgccatc

SEQ ID NO: 2065552 - DNA, 15 bp, Homo sapiens
tcgcgagtgccatcg

SEQ ID NO: 2065553 - DNA, 15 bp, Homo sapiens
cgcgagtgccatcga

SEQ ID NO: 2065554 - DNA, 15 bp, Homo sapiens
gcgagtgccatcgag

SEQ ID NO: 2065555 - DNA, 15 bp, Homo sapiens
cgagtgccatcgagg

SEQ ID NO: 2065556 - DNA, 15 bp, Homo sapiens
gagtgccatcgaggc

SEQ ID NO: 2065557 - DNA, 15 bp, Homo sapiens
agtgccatcgaggca

SEQ ID NO: 2065558 - DNA, 15 bp, Homo sapiens
gtgccatcgaggcaa

SEQ ID NO: 2065559 - DNA, 15 bp, Homo sapiens
tgccatcgaggcaac

SEQ ID NO: 2065560 - DNA, 15 bp, Homo sapiens
gccatcgaggcaacc

SEQ ID NO: 2065561 - DNA, 15 bp, Homo sapiens
ccatcgaggcaacca

SEQ ID NO: 2065562 - DNA, 15 bp, Homo sapiens
catcgaggcaaccag

SEQ ID NO: 2065563 - DNA, 15 bp, Homo sapiens
atcgaggcaaccagg

SEQ ID NO: 2065564 - DNA, 15 bp, Homo sapiens
tcgaggcaaccaggc

SEQ ID NO: 2065565 - DNA, 15 bp, Homo sapiens
cgaggcaaccaggcg

SEQ ID NO: 2065566 - DNA, 15 bp, Homo sapiens
gaggcaaccaggcgc

SEQ ID NO: 2065567 - DNA, 15 bp, Homo sapiens
aggcaaccaggcgca

SEQ ID NO: 2065568 - DNA, 15 bp, Homo sapiens
ggcaaccaggcgcag

SEQ ID NO: 2065569 - DNA, 15 bp, Homo sapiens
gcaaccaggcgcagg

SEQ ID NO: 2065570 - DNA, 15 bp, Homo sapiens
caaccaggcgcaggg

SEQ ID NO: 2065571 - DNA, 15 bp, Homo sapiens
aaccaggcgcaggga

SEQ ID NO: 2065572 - DNA, 15 bp, Homo sapiens
accaggcgcagggag

SEQ ID NO: 2065573 - DNA, 15 bp, Homo sapiens
ccaggcgcagggagc

SEQ ID NO: 2065574 - DNA, 15 bp, Homo sapiens
caggcgcagggagcg

SEQ ID NO: 2065575 - DNA, 15 bp, Homo sapiens
aggcgcagggagcgg

SEQ ID NO: 2065576 - DNA, 15 bp, Homo sapiens
ggcgcagggagcgga

SEQ ID NO: 2065577 - DNA, 15 bp, Homo sapiens
gcgcagggagcggaa

SEQ ID NO: 2065578 - DNA, 15 bp, Homo sapiens
cgcagggagcggaag

SEQ ID NO: 2065579 - DNA, 15 bp, Homo sapiens
gcagggagcggaagg

SEQ ID NO: 2065580 - DNA, 15 bp, Homo sapiens
cagggagcggaaggc

SEQ ID NO: 2065581 - DNA, 15 bp, Homo sapiens
agggagcggaaggca

SEQ ID NO: 2065582 - DNA, 15 bp, Homo sapiens
gggagcggaaggcag

SEQ ID NO: 2065583 - DNA, 15 bp, Homo sapiens
ggagcggaaggcagg

SEQ ID NO: 2065584 - DNA, 15 bp, Homo sapiens
gagcggaaggcagga

SEQ ID NO: 2065585 - DNA, 15 bp, Homo sapiens
agcggaaggcaggag

SEQ ID NO: 2065586 - DNA, 15 bp, Homo sapiens
gcggaaggcaggagt

SEQ ID NO: 2065587 - DNA, 15 bp, Homo sapiens
cggaaggcaggagtg

SEQ ID NO: 2065588 - DNA, 15 bp, Homo sapiens
ggaaggcaggagtgt

SEQ ID NO: 2065589 - DNA, 15 bp, Homo sapiens
gaaggcaggagtgta

SEQ ID NO: 2065590 - DNA, 15 bp, Homo sapiens
aaggcaggagtgtaa

SEQ ID NO: 2065591 - DNA, 15 bp, Homo sapiens
aggcaggagtgtaac

SEQ ID NO: 2065592 - DNA, 15 bp, Homo sapiens
ggcaggagtgtaact

SEQ ID NO: 2065593 - DNA, 15 bp, Homo sapiens
gcaggagtgtaactg

SEQ ID NO: 2065594 - DNA, 15 bp, Homo sapiens
caggagtgtaactgg

SEQ ID NO: 2065595 - DNA, 15 bp, Homo sapiens
aggagtgtaactggg

SEQ ID NO: 2065596 - DNA, 15 bp, Homo sapiens
ggagtgtaactgggc

SEQ ID NO: 2065597 - DNA, 15 bp, Homo sapiens
gagtgtaactgggcg

SEQ ID NO: 2065598 - DNA, 15 bp, Homo sapiens
agtgtaactgggcgc

SEQ ID NO: 2065599 - DNA, 15 bp, Homo sapiens
gtgtaactgggcgct

SEQ ID NO: 2065600 - DNA, 15 bp, Homo sapiens
tgtaactgggcgctg

SEQ ID NO: 2065601 - DNA, 15 bp, Homo sapiens
gtaactgggcgctgg

SEQ ID NO: 2065602 - DNA, 15 bp, Homo sapiens
taactgggcgctggg

SEQ ID NO: 2065603 - DNA, 15 bp, Homo sapiens
aactgggcgctgggg

SEQ ID NO: 2065604 - DNA, 15 bp, Homo sapiens
actgggcgctggggg

SEQ ID NO: 2065605 - DNA, 15 bp, Homo sapiens
ctgggcgctgggggg

SEQ ID NO: 2065606 - DNA, 15 bp, Homo sapiens
tgggcgctggggggc

SEQ ID NO: 2065607 - DNA, 15 bp, Homo sapiens
gggcgctggggggcg

SEQ ID NO: 2065608 - DNA, 15 bp, Homo sapiens
ggcgctggggggcgc

SEQ ID NO: 2065609 - DNA, 15 bp, Homo sapiens
gcgctggggggcgct

SEQ ID NO: 2065610 - DNA, 15 bp, Homo sapiens
cgctggggggcgctg

SEQ ID NO: 2065611 - DNA, 15 bp, Homo sapiens
gctggggggcgctgc

SEQ ID NO: 2065612 - DNA, 15 bp, Homo sapiens
ctggggggcgctgct

SEQ ID NO: 2065613 - DNA, 15 bp, Homo sapiens
tggggggcgctgctc

SEQ ID NO: 2065614 - DNA, 15 bp, Homo sapiens
ggggggcgctgctcc

SEQ ID NO: 2065615 - DNA, 15 bp, Homo sapiens
gggggcgctgctccg

SEQ ID NO: 2065616 - DNA, 15 bp, Homo sapiens
ggggcgctgctccgc

SEQ ID NO: 2065617 - DNA, 15 bp, Homo sapiens
gggcgctgctccgca

SEQ ID NO: 2065618 - DNA, 15 bp, Homo sapiens
ggcgctgctccgcaa

SEQ ID NO: 2065619 - DNA, 15 bp, Homo sapiens
gcgctgctccgcaac

SEQ ID NO: 2065620 - DNA, 15 bp, Homo sapiens
cgctgctccgcaacc

SEQ ID NO: 2065621 - DNA, 15 bp, Homo sapiens
gctgctccgcaaccc

SEQ ID NO: 2065622 - DNA, 15 bp, Homo sapiens
ctgctccgcaacccc

SEQ ID NO: 2065623 - DNA, 15 bp, Homo sapiens
tgctccgcaacccca

SEQ ID NO: 2065624 - DNA, 15 bp, Homo sapiens
gctccgcaaccccaa

SEQ ID NO: 2065625 - DNA, 15 bp, Homo sapiens
ctccgcaaccccaag

SEQ ID NO: 2065626 - DNA, 15 bp, Homo sapiens
tccgcaaccccaaga

SEQ ID NO: 2065627 - DNA, 15 bp, Homo sapiens
ccgcaaccccaagat

SEQ ID NO: 2065628 - DNA, 15 bp, Homo sapiens
cgcaaccccaagatc

SEQ ID NO: 2065629 - DNA, 15 bp, Homo sapiens
gcaaccccaagatcc

SEQ ID NO: 2065630 - DNA, 15 bp, Homo sapiens
caaccccaagatccg

SEQ ID NO: 2065631 - DNA, 15 bp, Homo sapiens
aaccccaagatccga

SEQ ID NO: 2065632 - DNA, 15 bp, Homo sapiens
accccaagatccgag

SEQ ID NO: 2065633 - DNA, 15 bp, Homo sapiens
ccccaagatccgagg

SEQ ID NO: 2065634 - DNA, 15 bp, Homo sapiens
cccaagatccgagga

SEQ ID NO: 2065635 - DNA, 15 bp, Homo sapiens
ccaagatccgaggaa

SEQ ID NO: 2065636 - DNA, 15 bp, Homo sapiens
caagatccgaggaat

SEQ ID NO: 2065637 - DNA, 15 bp, Homo sapiens
aagatccgaggaatg

SEQ ID NO: 2065638 - DNA, 15 bp, Homo sapiens
agatccgaggaatgc

SEQ ID NO: 2065639 - DNA, 15 bp, Homo sapiens
gatccgaggaatgcc

SEQ ID NO: 2065640 - DNA, 15 bp, Homo sapiens
atccgaggaatgcct

SEQ ID NO: 2065641 - DNA, 15 bp, Homo sapiens
tccgaggaatgcctc

SEQ ID NO: 2065642 - DNA, 15 bp, Homo sapiens
ccgaggaatgcctcc

SEQ ID NO: 2065643 - DNA, 15 bp, Homo sapiens
cgaggaatgcctccg

SEQ ID NO: 2065644 - DNA, 15 bp, Homo sapiens
gaggaatgcctccgg

SEQ ID NO: 2065645 - DNA, 15 bp, Homo sapiens
aggaatgcctccggg

SEQ ID NO: 2065646 - DNA, 15 bp, Homo sapiens
ggaatgcctccgggg

SEQ ID NO: 2065647 - DNA, 15 bp, Homo sapiens
gaatgcctccggggg

SEQ ID NO: 2065648 - DNA, 15 bp, Homo sapiens
aatgcctccggggga

SEQ ID NO: 2065649 - DNA, 15 bp, Homo sapiens
atgcctccgggggat

SEQ ID NO: 2065650 - DNA, 15 bp, Homo sapiens
tgcctccgggggatg

SEQ ID NO: 2065651 - DNA, 15 bp, Homo sapiens
gcctccgggggatga

SEQ ID NO: 2065652 - DNA, 15 bp, Homo sapiens
cctccgggggatgat

SEQ ID NO: 2065653 - DNA, 15 bp, Homo sapiens
ctccgggggatgatt

SEQ ID NO: 2065654 - DNA, 15 bp, Homo sapiens
tccgggggatgattt

SEQ ID NO: 2065655 - DNA, 15 bp, Homo sapiens
ccgggggatgatttc

SEQ ID NO: 2065656 - DNA, 15 bp, Homo sapiens
cgggggatgatttct

SEQ ID NO: 2065657 - DNA, 15 bp, Homo sapiens
gggggatgatttctc

SEQ ID NO: 2065658 - DNA, 15 bp, Homo sapiens
ggggatgatttctct

SEQ ID NO: 2065659 - DNA, 15 bp, Homo sapiens
gggatgatttctctg

SEQ ID NO: 2065660 - DNA, 15 bp, Homo sapiens
ggatgatttctctgg

SEQ ID NO: 2065661 - DNA, 15 bp, Homo sapiens
gatgatttctctgga

SEQ ID NO: 2065662 - DNA, 15 bp, Homo sapiens
atgatttctctggag

SEQ ID NO: 2065663 - DNA, 15 bp, Homo sapiens
tgatttctctggagg

SEQ ID NO: 2065664 - DNA, 15 bp, Homo sapiens
gatttctctggaggg

SEQ ID NO: 2065665 - DNA, 15 bp, Homo sapiens
atttctctggagggg

SEQ ID NO: 2065666 - DNA, 15 bp, Homo sapiens
tttctctggaggggt

SEQ ID NO: 2065667 - DNA, 15 bp, Homo sapiens
ttctctggaggggtc

SEQ ID NO: 2065668 - DNA, 15 bp, Homo sapiens
tctctggaggggtct

SEQ ID NO: 2065669 - DNA, 15 bp, Homo sapiens
ctctggaggggtctc

SEQ ID NO: 2065670 - DNA, 15 bp, Homo sapiens
tctggaggggtctcg

SEQ ID NO: 2065671 - DNA, 15 bp, Homo sapiens
ctggaggggtctcgc

SEQ ID NO: 2065672 - DNA, 15 bp, Homo sapiens
tggaggggtctcgca

SEQ ID NO: 2065673 - DNA, 15 bp, Homo sapiens
ggaggggtctcgcag

SEQ ID NO: 2065674 - DNA, 15 bp, Homo sapiens
gaggggtctcgcagg

SEQ ID NO: 2065675 - DNA, 15 bp, Homo sapiens
aggggtctcgcaggg

SEQ ID NO: 2065676 - DNA, 15 bp, Homo sapiens
ggggtctcgcagggc

SEQ ID NO: 2065677 - DNA, 15 bp, Homo sapiens
gggtctcgcagggcc

SEQ ID NO: 2065678 - DNA, 15 bp, Homo sapiens
ggtctcgcagggccc

SEQ ID NO: 2065679 - DNA, 15 bp, Homo sapiens
gtctcgcagggcccc

SEQ ID NO: 2065680 - DNA, 15 bp, Homo sapiens
tctcgcagggccccc

SEQ ID NO: 2065681 - DNA, 15 bp, Homo sapiens
ctcgcagggccccct

SEQ ID NO: 2065682 - DNA, 15 bp, Homo sapiens
tcgcagggccccctc

SEQ ID NO: 2065683 - DNA, 15 bp, Homo sapiens
cgcagggccccctct

SEQ ID NO: 2065684 - DNA, 15 bp, Homo sapiens
gcagggccccctctg

SEQ ID NO: 2065685 - DNA, 15 bp, Homo sapiens
cagggccccctctgc

SEQ ID NO: 2065686 - DNA, 15 bp, Homo sapiens
agggccccctctgcg

SEQ ID NO: 2065687 - DNA, 15 bp, Homo sapiens
gggccccctctgcgc

SEQ ID NO: 2065688 - DNA, 15 bp, Homo sapiens
ggccccctctgcgct

SEQ ID NO: 2065689 - DNA, 15 bp, Homo sapiens
gccccctctgcgctg

SEQ ID NO: 2065690 - DNA, 15 bp, Homo sapiens
ccccctctgcgctgc

SEQ ID NO: 2065691 - DNA, 15 bp, Homo sapiens
cccctctgcgctgct

SEQ ID NO: 2065692 - DNA, 15 bp, Homo sapiens
ccctctgcgctgctt

SEQ ID NO: 2065693 - DNA, 15 bp, Homo sapiens
cctctgcgctgcttt

SEQ ID NO: 2065694 - DNA, 15 bp, Homo sapiens
ctctgcgctgctttc

SEQ ID NO: 2065695 - DNA, 15 bp, Homo sapiens
tctgcgctgctttct

SEQ ID NO: 2065696 - DNA, 15 bp, Homo sapiens
ctgcgctgctttctc

SEQ ID NO: 2065697 - DNA, 15 bp, Homo sapiens
tgcgctgctttctca

SEQ ID NO: 2065698 - DNA, 15 bp, Homo sapiens
gcgctgctttctcag

SEQ ID NO: 2065699 - DNA, 15 bp, Homo sapiens
cgctgctttctcagg

SEQ ID NO: 2065700 - DNA, 15 bp, Homo sapiens
gctgctttctcaggc

SEQ ID NO: 2065701 - DNA, 15 bp, Homo sapiens
ctgctttctcaggca

SEQ ID NO: 2065702 - DNA, 15 bp, Homo sapiens
tgctttctcaggcac

SEQ ID NO: 2065703 - DNA, 15 bp, Homo sapiens
gctttctcaggcacc

SEQ ID NO: 2065704 - DNA, 15 bp, Homo sapiens
ctttctcaggcacca

SEQ ID NO: 2065705 - DNA, 15 bp, Homo sapiens
tttctcaggcaccag

SEQ ID NO: 2065706 - DNA, 15 bp, Homo sapiens
ttctcaggcaccaga

SEQ ID NO: 2065707 - DNA, 15 bp, Homo sapiens
tctcaggcaccagaa

SEQ ID NO: 2065708 - DNA, 15 bp, Homo sapiens
ctcaggcaccagaac

SEQ ID NO: 2065709 - DNA, 15 bp, Homo sapiens
tcaggcaccagaacc

SEQ ID NO: 2065710 - DNA, 15 bp, Homo sapiens
caggcaccagaaccg

SEQ ID NO: 2065711 - DNA, 15 bp, Homo sapiens
aggcaccagaaccga

SEQ ID NO: 2065712 - DNA, 15 bp, Homo sapiens
ggcaccagaaccgaa

SEQ ID NO: 2065713 - DNA, 15 bp, Homo sapiens
gcaccagaaccgaaa

SEQ ID NO: 2065714 - DNA, 15 bp, Homo sapiens
caccagaaccgaaat

SEQ ID NO: 2065715 - DNA, 15 bp, Homo sapiens
accagaaccgaaatc

SEQ ID NO: 2065716 - DNA, 15 bp, Homo sapiens
ccagaaccgaaatcc

SEQ ID NO: 2065717 - DNA, 15 bp, Homo sapiens
cagaaccgaaatcct

SEQ ID NO: 2065718 - DNA, 15 bp, Homo sapiens
agaaccgaaatcctc

SEQ ID NO: 2065719 - DNA, 15 bp, Homo sapiens
gaaccgaaatcctcg

SEQ ID NO: 2065720 - DNA, 15 bp, Homo sapiens
aaccgaaatcctcgg

SEQ ID NO: 2065721 - DNA, 15 bp, Homo sapiens
accgaaatcctcggg

SEQ ID NO: 2065722 - DNA, 15 bp, Homo sapiens
ccgaaatcctcggga

SEQ ID NO: 2065723 - DNA, 15 bp, Homo sapiens
cgaaatcctcgggag

SEQ ID NO: 2065724 - DNA, 15 bp, Homo sapiens
gaaatcctcgggagg

SEQ ID NO: 2065725 - DNA, 15 bp, Homo sapiens
aaatcctcgggaggg

SEQ ID NO: 2065726 - DNA, 15 bp, Homo sapiens
aatcctcgggaggga

SEQ ID NO: 2065727 - DNA, 15 bp, Homo sapiens
atcctcgggagggac

SEQ ID NO: 2065728 - DNA, 15 bp, Homo sapiens
tcctcgggagggacc

SEQ ID NO: 2065729 - DNA, 15 bp, Homo sapiens
cctcgggagggaccg

SEQ ID NO: 2065730 - DNA, 15 bp, Homo sapiens
ctcgggagggaccgc

SEQ ID NO: 2065731 - DNA, 15 bp, Homo sapiens
tcgggagggaccgcg

SEQ ID NO: 2065732 - DNA, 15 bp, Homo sapiens
cgggagggaccgcgg

SEQ ID NO: 2065733 - DNA, 15 bp, Homo sapiens
gggagggaccgcggg

SEQ ID NO: 2065734 - DNA, 15 bp, Homo sapiens
ggagggaccgcggga

SEQ ID NO: 2065735 - DNA, 15 bp, Homo sapiens
gagggaccgcgggag

SEQ ID NO: 2065736 - DNA, 15 bp, Homo sapiens
agggaccgcgggagc

SEQ ID NO: 2065737 - DNA, 15 bp, Homo sapiens
gggaccgcgggagcc

SEQ ID NO: 2065738 - DNA, 15 bp, Homo sapiens
ggaccgcgggagccc

SEQ ID NO: 2065739 - DNA, 15 bp, Homo sapiens
gaccgcgggagcccg

SEQ ID NO: 2065740 - DNA, 15 bp, Homo sapiens
accgcgggagcccgg

SEQ ID NO: 2065741 - DNA, 15 bp, Homo sapiens
ccgcgggagcccggg

SEQ ID NO: 2065742 - DNA, 15 bp, Homo sapiens
cgcgggagcccgggg

SEQ ID NO: 2065743 - DNA, 15 bp, Homo sapiens
gcgggagcccggggc

SEQ ID NO: 2065744 - DNA, 15 bp, Homo sapiens
cgggagcccggggcg

SEQ ID NO: 2065745 - DNA, 15 bp, Homo sapiens
gggagcccggggcgt

SEQ ID NO: 2065746 - DNA, 15 bp, Homo sapiens
ggagcccggggcgtg

SEQ ID NO: 2065747 - DNA, 15 bp, Homo sapiens
gagcccggggcgtgc

SEQ ID NO: 2065748 - DNA, 15 bp, Homo sapiens
agcccggggcgtgca

SEQ ID NO: 2065749 - DNA, 15 bp, Homo sapiens
gcccggggcgtgcag

SEQ ID NO: 2065750 - DNA, 15 bp, Homo sapiens
cccggggcgtgcaga

SEQ ID NO: 2065751 - DNA, 15 bp, Homo sapiens
ccggggcgtgcagac

SEQ ID NO: 2065752 - DNA, 15 bp, Homo sapiens
cggggcgtgcagaca

SEQ ID NO: 2065753 - DNA, 15 bp, Homo sapiens
ggggcgtgcagacag

SEQ ID NO: 2065754 - DNA, 15 bp, Homo sapiens
gggcgtgcagacagg

SEQ ID NO: 2065755 - DNA, 15 bp, Homo sapiens
ggcgtgcagacaggc

SEQ ID NO: 2065756 - DNA, 15 bp, Homo sapiens
gcgtgcagacaggcg

SEQ ID NO: 2065757 - DNA, 15 bp, Homo sapiens
cgtgcagacaggcgg

SEQ ID NO: 2065758 - DNA, 15 bp, Homo sapiens
gtgcagacaggcggc

SEQ ID NO: 2065759 - DNA, 15 bp, Homo sapiens
tgcagacaggcggct

SEQ ID NO: 2065760 - DNA, 15 bp, Homo sapiens
gcagacaggcggctt

SEQ ID NO: 2065761 - DNA, 15 bp, Homo sapiens
cagacaggcggcttt

SEQ ID NO: 2065762 - DNA, 15 bp, Homo sapiens
agacaggcggctttc

SEQ ID NO: 2065763 - DNA, 15 bp, Homo sapiens
gacaggcggctttca

SEQ ID NO: 2065764 - DNA, 15 bp, Homo sapiens
acaggcggctttcac

SEQ ID NO: 2065765 - DNA, 15 bp, Homo sapiens
caggcggctttcaca

SEQ ID NO: 2065766 - DNA, 15 bp, Homo sapiens
aggcggctttcacag

SEQ ID NO: 2065767 - DNA, 15 bp, Homo sapiens
ggcggctttcacaga

SEQ ID NO: 2065768 - DNA, 15 bp, Homo sapiens
gcggctttcacagac

SEQ ID NO: 2065769 - DNA, 15 bp, Homo sapiens
cggctttcacagacg

SEQ ID NO: 2065770 - DNA, 15 bp, Homo sapiens
ggctttcacagacgc

SEQ ID NO: 2065771 - DNA, 15 bp, Homo sapiens
gctttcacagacgca

SEQ ID NO: 2065772 - DNA, 15 bp, Homo sapiens
ctttcacagacgcag

SEQ ID NO: 2065773 - DNA, 15 bp, Homo sapiens
tttcacagacgcagc

SEQ ID NO: 2065774 - DNA, 15 bp, Homo sapiens
ttcacagacgcagcg

SEQ ID NO: 2065775 - DNA, 15 bp, Homo sapiens
tcacagacgcagcgg

SEQ ID NO: 2065776 - DNA, 15 bp, Homo sapiens
cacagacgcagcggg

SEQ ID NO: 2065777 - DNA, 15 bp, Homo sapiens
acagacgcagcggga

SEQ ID NO: 2065778 - DNA, 15 bp, Homo sapiens
cagacgcagcgggag

SEQ ID NO: 2065779 - DNA, 15 bp, Homo sapiens
agacgcagcgggagg

SEQ ID NO: 2065780 - DNA, 15 bp, Homo sapiens
gacgcagcgggagga

SEQ ID NO: 2065781 - DNA, 15 bp, Homo sapiens
acgcagcgggaggaa

SEQ ID NO: 2065782 - DNA, 15 bp, Homo sapiens
cgcagcgggaggaag

SEQ ID NO: 2065783 - DNA, 15 bp, Homo sapiens
gcagcgggaggaagg

SEQ ID NO: 2065784 - DNA, 15 bp, Homo sapiens
cagcgggaggaagga

SEQ ID NO: 2065785 - DNA, 15 bp, Homo sapiens
agcgggaggaaggat

SEQ ID NO: 2065786 - DNA, 15 bp, Homo sapiens
gcgggaggaaggatc

SEQ ID NO: 2065787 - DNA, 15 bp, Homo sapiens
cgggaggaaggatcc

SEQ ID NO: 2065788 - DNA, 15 bp, Homo sapiens
gggaggaaggatccc

SEQ ID NO: 2065789 - DNA, 15 bp, Homo sapiens
ggaggaaggatccct

SEQ ID NO: 2065790 - DNA, 15 bp, Homo sapiens
gaggaaggatccctc

SEQ ID NO: 2065791 - DNA, 15 bp, Homo sapiens
aggaaggatccctct

SEQ ID NO: 2065792 - DNA, 15 bp, Homo sapiens
ggaaggatccctcta

SEQ ID NO: 2065793 - DNA, 15 bp, Homo sapiens
gaaggatccctctac

SEQ ID NO: 2065794 - DNA, 15 bp, Homo sapiens
aaggatccctctact

SEQ ID NO: 2065795 - DNA, 15 bp, Homo sapiens
aggatccctctactg

SEQ ID NO: 2065796 - DNA, 15 bp, Homo sapiens
ggatccctctactgc

SEQ ID NO: 2065797 - DNA, 15 bp, Homo sapiens
gatccctctactgct

SEQ ID NO: 2065798 - DNA, 15 bp, Homo sapiens
atccctctactgctc

SEQ ID NO: 2065799 - DNA, 15 bp, Homo sapiens
tccctctactgctcc

SEQ ID NO: 2065800 - DNA, 15 bp, Homo sapiens
ccctctactgctccc

SEQ ID NO: 2065801 - DNA, 15 bp, Homo sapiens
cctctactgctccct

SEQ ID NO: 2065802 - DNA, 15 bp, Homo sapiens
ctctactgctccctt

SEQ ID NO: 2065803 - DNA, 15 bp, Homo sapiens
tctactgctcccttt

SEQ ID NO: 2065804 - DNA, 15 bp, Homo sapiens
ctactgctccctttc

SEQ ID NO: 2065805 - DNA, 15 bp, Homo sapiens
tactgctccctttcc

SEQ ID NO: 2065806 - DNA, 15 bp, Homo sapiens
actgctccctttccc

SEQ ID NO: 2065807 - DNA, 15 bp, Homo sapiens
ctgctccctttcccg

SEQ ID NO: 2065808 - DNA, 15 bp, Homo sapiens
tgctccctttcccga

SEQ ID NO: 2065809 - DNA, 15 bp, Homo sapiens
gctccctttcccgat

SEQ ID NO: 2065810 - DNA, 15 bp, Homo sapiens
ctccctttcccgatt

SEQ ID NO: 2065811 - DNA, 15 bp, Homo sapiens
tccctttcccgattt

SEQ ID NO: 2065812 - DNA, 15 bp, Homo sapiens
ccctttcccgatttg

SEQ ID NO: 2065813 - DNA, 15 bp, Homo sapiens
cctttcccgatttga

SEQ ID NO: 2065814 - DNA, 15 bp, Homo sapiens
ctttcccgatttgac

SEQ ID NO: 2065815 - DNA, 15 bp, Homo sapiens
tttcccgatttgacc

SEQ ID NO: 2065816 - DNA, 15 bp, Homo sapiens
ttcccgatttgaccg

SEQ ID NO: 2065817 - DNA, 15 bp, Homo sapiens
tcccgatttgaccgt

SEQ ID NO: 2065818 - DNA, 15 bp, Homo sapiens
cccgatttgaccgtc

SEQ ID NO: 2065819 - DNA, 15 bp, Homo sapiens
ccgatttgaccgtct

SEQ ID NO: 2065820 - DNA, 15 bp, Homo sapiens
cgatttgaccgtcta

SEQ ID NO: 2065821 - DNA, 15 bp, Homo sapiens
gatttgaccgtctag

SEQ ID NO: 2065822 - DNA, 15 bp, Homo sapiens
atttgaccgtctagg

SEQ ID NO: 2065823 - DNA, 15 bp, Homo sapiens
tttgaccgtctaggg

SEQ ID NO: 2065824 - DNA, 15 bp, Homo sapiens
ttgaccgtctagggc

SEQ ID NO: 2065825 - DNA, 15 bp, Homo sapiens
tgaccgtctagggcc

SEQ ID NO: 2065826 - DNA, 15 bp, Homo sapiens
gaccgtctagggcct

SEQ ID NO: 2065827 - DNA, 15 bp, Homo sapiens
accgtctagggcctt

SEQ ID NO: 2065828 - DNA, 15 bp, Homo sapiens
ccgtctagggccttt

SEQ ID NO: 2065829 - DNA, 15 bp, Homo sapiens
cgtctagggcctttg

SEQ ID NO: 2065830 - DNA, 15 bp, Homo sapiens
gtctagggcctttga

SEQ ID NO: 2065831 - DNA, 15 bp, Homo sapiens
tctagggcctttgag

SEQ ID NO: 2065832 - DNA, 15 bp, Homo sapiens
ctagggcctttgaga

SEQ ID NO: 2065833 - DNA, 15 bp, Homo sapiens
tagggcctttgagag

SEQ ID NO: 2065834 - DNA, 15 bp, Homo sapiens
agggcctttgagagg

SEQ ID NO: 2065835 - DNA, 15 bp, Homo sapiens
gggcctttgagagga

SEQ ID NO: 2065836 - DNA, 15 bp, Homo sapiens
ggcctttgagaggac

SEQ ID NO: 2065837 - DNA, 15 bp, Homo sapiens
gcctttgagaggact

SEQ ID NO: 2065838 - DNA, 15 bp, Homo sapiens
cctttgagaggactt

SEQ ID NO: 2065839 - DNA, 15 bp, Homo sapiens
ctttgagaggacttt

SEQ ID NO: 2065840 - DNA, 15 bp, Homo sapiens
tttgagaggactttc

SEQ ID NO: 2065841 - DNA, 15 bp, Homo sapiens
ttgagaggactttcc

SEQ ID NO: 2065842 - DNA, 15 bp, Homo sapiens
tgagaggactttcct

SEQ ID NO: 2065843 - DNA, 15 bp, Homo sapiens
gagaggactttcctt

SEQ ID NO: 2065844 - DNA, 15 bp, Homo sapiens
agaggactttccttt

SEQ ID NO: 2065845 - DNA, 15 bp, Homo sapiens
gaggactttcctttt

SEQ ID NO: 2065846 - DNA, 15 bp, Homo sapiens
aggactttccttttg

SEQ ID NO: 2065847 - DNA, 15 bp, Homo sapiens
ggactttccttttgg

SEQ ID NO: 2065848 - DNA, 15 bp, Homo sapiens
gactttccttttggg

SEQ ID NO: 2065849 - DNA, 15 bp, Homo sapiens
actttccttttggga

SEQ ID NO: 2065850 - DNA, 15 bp, Homo sapiens
ctttccttttgggaa

SEQ ID NO: 2065851 - DNA, 15 bp, Homo sapiens
tttccttttgggaaa

SEQ ID NO: 2065852 - DNA, 15 bp, Homo sapiens
ttccttttgggaaag

SEQ ID NO: 2065853 - DNA, 15 bp, Homo sapiens
tccttttgggaaagc

SEQ ID NO: 2065854 - DNA, 15 bp, Homo sapiens
ccttttgggaaagct

SEQ ID NO: 2065855 - DNA, 15 bp, Homo sapiens
cttttgggaaagctt

SEQ ID NO: 2065856 - DNA, 15 bp, Homo sapiens
ttttgggaaagcttt

SEQ ID NO: 2065857 - DNA, 15 bp, Homo sapiens
tttgggaaagctttt

SEQ ID NO: 2065858 - DNA, 15 bp, Homo sapiens
ttgggaaagcttttc

SEQ ID NO: 2065859 - DNA, 15 bp, Homo sapiens
tgggaaagcttttct

SEQ ID NO: 2065860 - DNA, 15 bp, Homo sapiens
gggaaagcttttctc

SEQ ID NO: 2065861 - DNA, 15 bp, Homo sapiens
ggaaagcttttctca

SEQ ID NO: 2065862 - DNA, 15 bp, Homo sapiens
gaaagcttttctcaa

SEQ ID NO: 2065863 - DNA, 15 bp, Homo sapiens
aaagcttttctcaat

SEQ ID NO: 2065864 - DNA, 15 bp, Homo sapiens
aagcttttctcaatt

SEQ ID NO: 2065865 - DNA, 15 bp, Homo sapiens
agcttttctcaattc

SEQ ID NO: 2065866 - DNA, 15 bp, Homo sapiens
gcttttctcaattcg

SEQ ID NO: 2065867 - DNA, 15 bp, Homo sapiens
cttttctcaattcgt

SEQ ID NO: 2065868 - DNA, 15 bp, Homo sapiens
ttttctcaattcgtg

SEQ ID NO: 2065869 - DNA, 15 bp, Homo sapiens
tttctcaattcgtgg

SEQ ID NO: 2065870 - DNA, 15 bp, Homo sapiens
ttctcaattcgtggc

SEQ ID NO: 2065871 - DNA, 15 bp, Homo sapiens
tctcaattcgtggcc

SEQ ID NO: 2065872 - DNA, 15 bp, Homo sapiens
ctcaattcgtggcct

SEQ ID NO: 2065873 - DNA, 15 bp, Homo sapiens
tcaattcgtggcctg

SEQ ID NO: 2065874 - DNA, 15 bp, Homo sapiens
caattcgtggcctgt

SEQ ID NO: 2065875 - DNA, 15 bp, Homo sapiens
aattcgtggcctgtg

SEQ ID NO: 2065876 - DNA, 15 bp, Homo sapiens
attcgtggcctgtgg

SEQ ID NO: 2065877 - DNA, 15 bp, Homo sapiens
ttcgtggcctgtggg

SEQ ID NO: 2065878 - DNA, 15 bp, Homo sapiens
tcgtggcctgtgggc

SEQ ID NO: 2065879 - DNA, 15 bp, Homo sapiens
cgtggcctgtgggca

SEQ ID NO: 2065880 - DNA, 15 bp, Homo sapiens
gtggcctgtgggcag

SEQ ID NO: 2065881 - DNA, 15 bp, Homo sapiens
tggcctgtgggcagg

SEQ ID NO: 2065882 - DNA, 15 bp, Homo sapiens
ggcctgtgggcaggc

SEQ ID NO: 2065883 - DNA, 15 bp, Homo sapiens
gcctgtgggcaggct

SEQ ID NO: 2065884 - DNA, 15 bp, Homo sapiens
cctgtgggcaggctg

SEQ ID NO: 2065885 - DNA, 15 bp, Homo sapiens
ctgtgggcaggctgg

SEQ ID NO: 2065886 - DNA, 15 bp, Homo sapiens
tgtgggcaggctggg

SEQ ID NO: 2065887 - DNA, 15 bp, Homo sapiens
gtgggcaggctgggg

SEQ ID NO: 2065888 - DNA, 15 bp, Homo sapiens
tgggcaggctggggg

SEQ ID NO: 2065889 - DNA, 15 bp, Homo sapiens
gggcaggctgggggg

SEQ ID NO: 2065890 - DNA, 15 bp, Homo sapiens
ggcaggctggggggt

SEQ ID NO: 2065891 - DNA, 15 bp, Homo sapiens
gcaggctggggggtg

SEQ ID NO: 2065892 - DNA, 15 bp, Homo sapiens
caggctggggggtgg

SEQ ID NO: 2065893 - DNA, 15 bp, Homo sapiens
aggctggggggtggg

SEQ ID NO: 2065894 - DNA, 15 bp, Homo sapiens
ggctggggggtgggg

SEQ ID NO: 2065895 - DNA, 15 bp, Homo sapiens
gctggggggtggggc

SEQ ID NO: 2065896 - DNA, 15 bp, Homo sapiens
ctggggggtggggcg

SEQ ID NO: 2065897 - DNA, 15 bp, Homo sapiens
tggggggtggggcgc

SEQ ID NO: 2065898 - DNA, 15 bp, Homo sapiens
ggggggtggggcgcc

SEQ ID NO: 2065899 - DNA, 15 bp, Homo sapiens
gggggtggggcgcca

SEQ ID NO: 2065900 - DNA, 15 bp, Homo sapiens
ggggtggggcgccaa

SEQ ID NO: 2065901 - DNA, 15 bp, Homo sapiens
gggtggggcgccaag

SEQ ID NO: 2065902 - DNA, 15 bp, Homo sapiens
ggtggggcgccaagt

SEQ ID NO: 2065903 - DNA, 15 bp, Homo sapiens
gtggggcgccaagtc

SEQ ID NO: 2065904 - DNA, 15 bp, Homo sapiens
tggggcgccaagtca

SEQ ID NO: 2065905 - DNA, 15 bp, Homo sapiens
ggggcgccaagtcat

SEQ ID NO: 2065906 - DNA, 15 bp, Homo sapiens
gggcgccaagtcatc

SEQ ID NO: 2065907 - DNA, 15 bp, Homo sapiens
ggcgccaagtcatcc

SEQ ID NO: 2065908 - DNA, 15 bp, Homo sapiens
gcgccaagtcatccg

SEQ ID NO: 2065909 - DNA, 15 bp, Homo sapiens
cgccaagtcatccga

SEQ ID NO: 2065910 - DNA, 15 bp, Homo sapiens
gccaagtcatccgag

SEQ ID NO: 2065911 - DNA, 15 bp, Homo sapiens
ccaagtcatccgagc

SEQ ID NO: 2065912 - DNA, 15 bp, Homo sapiens
caagtcatccgagcg

SEQ ID NO: 2065913 - DNA, 15 bp, Homo sapiens
aagtcatccgagcgc

SEQ ID NO: 2065914 - DNA, 15 bp, Homo sapiens
agtcatccgagcgcg

SEQ ID NO: 2065915 - DNA, 15 bp, Homo sapiens
gtcatccgagcgcgg

SEQ ID NO: 2065916 - DNA, 15 bp, Homo sapiens
tcatccgagcgcggc

SEQ ID NO: 2065917 - DNA, 15 bp, Homo sapiens
catccgagcgcggct

SEQ ID NO: 2065918 - DNA, 15 bp, Homo sapiens
atccgagcgcggctt

SEQ ID NO: 2065919 - DNA, 15 bp, Homo sapiens
tccgagcgcggcttc

SEQ ID NO: 2065920 - DNA, 15 bp, Homo sapiens
ccgagcgcggcttct

SEQ ID NO: 2065921 - DNA, 15 bp, Homo sapiens
cgagcgcggcttctg

SEQ ID NO: 2065922 - DNA, 15 bp, Homo sapiens
gagcgcggcttctgc

SEQ ID NO: 2065923 - DNA, 15 bp, Homo sapiens
agcgcggcttctgct

SEQ ID NO: 2065924 - DNA, 15 bp, Homo sapiens
gcgcggcttctgctt

SEQ ID NO: 2065925 - DNA, 15 bp, Homo sapiens
cgcggcttctgcttc

SEQ ID NO: 2065926 - DNA, 15 bp, Homo sapiens
gcggcttctgcttct

SEQ ID NO: 2065927 - DNA, 15 bp, Homo sapiens
cggcttctgcttctc

SEQ ID NO: 2065928 - DNA, 15 bp, Homo sapiens
ggcttctgcttctcc

SEQ ID NO: 2065929 - DNA, 15 bp, Homo sapiens
gcttctgcttctccc

SEQ ID NO: 2065930 - DNA, 15 bp, Homo sapiens
cttctgcttctccct

SEQ ID NO: 2065931 - DNA, 15 bp, Homo sapiens
ttctgcttctccctt

SEQ ID NO: 2065932 - DNA, 15 bp, Homo sapiens
tctgcttctcccttt

SEQ ID NO: 2065933 - DNA, 15 bp, Homo sapiens
ctgcttctccctttc

SEQ ID NO: 2065934 - DNA, 15 bp, Homo sapiens
tgcttctccctttcc

SEQ ID NO: 2065935 - DNA, 15 bp, Homo sapiens
gcttctccctttccc

SEQ ID NO: 2065936 - DNA, 15 bp, Homo sapiens
cttctccctttccct

SEQ ID NO: 2065937 - DNA, 15 bp, Homo sapiens
ttctccctttccctc

SEQ ID NO: 2065938 - DNA, 15 bp, Homo sapiens
tctccctttccctca

SEQ ID NO: 2065939 - DNA, 15 bp, Homo sapiens
ctccctttccctcac

SEQ ID NO: 2065940 - DNA, 15 bp, Homo sapiens
tccctttccctcaca

SEQ ID NO: 2065941 - DNA, 15 bp, Homo sapiens
ccctttccctcacag

SEQ ID NO: 2065942 - DNA, 15 bp, Homo sapiens
cctttccctcacagg

SEQ ID NO: 2065943 - DNA, 15 bp, Homo sapiens
ctttccctcacaggc

SEQ ID NO: 2065944 - DNA, 15 bp, Homo sapiens
tttccctcacaggca

SEQ ID NO: 2065945 - DNA, 15 bp, Homo sapiens
ttccctcacaggcat

SEQ ID NO: 2065946 - DNA, 15 bp, Homo sapiens
tccctcacaggcatg

SEQ ID NO: 2065947 - DNA, 15 bp, Homo sapiens
ccctcacaggcatgc

SEQ ID NO: 2065948 - DNA, 15 bp, Homo sapiens
cctcacaggcatgct

SEQ ID NO: 2065949 - DNA, 15 bp, Homo sapiens
ctcacaggcatgctc

SEQ ID NO: 2065950 - DNA, 15 bp, Homo sapiens
tcacaggcatgctct

SEQ ID NO: 2065951 - DNA, 15 bp, Homo sapiens
cacaggcatgctcta

SEQ ID NO: 2065952 - DNA, 15 bp, Homo sapiens
acaggcatgctctac

SEQ ID NO: 2065953 - DNA, 15 bp, Homo sapiens
caggcatgctctacg

SEQ ID NO: 2065954 - DNA, 15 bp, Homo sapiens
aggcatgctctacgg

SEQ ID NO: 2065955 - DNA, 15 bp, Homo sapiens
ggcatgctctacgga

SEQ ID NO: 2065956 - DNA, 15 bp, Homo sapiens
gcatgctctacggag

SEQ ID NO: 2065957 - DNA, 15 bp, Homo sapiens
catgctctacggagg

SEQ ID NO: 2065958 - DNA, 15 bp, Homo sapiens
atgctctacggaggg

SEQ ID NO: 2065959 - DNA, 15 bp, Homo sapiens
tgctctacggagggt

SEQ ID NO: 2065960 - DNA, 15 bp, Homo sapiens
gctctacggagggta

SEQ ID NO: 2065961 - DNA, 15 bp, Homo sapiens
ctctacggagggtat

SEQ ID NO: 2065962 - DNA, 15 bp, Homo sapiens
tctacggagggtatg

SEQ ID NO: 2065963 - DNA, 15 bp, Homo sapiens
ctacggagggtatgg

SEQ ID NO: 2065964 - DNA, 15 bp, Homo sapiens
tacggagggtatggg

SEQ ID NO: 2065965 - DNA, 15 bp, Homo sapiens
acggagggtatggga

SEQ ID NO: 2065966 - DNA, 15 bp, Homo sapiens
cggagggtatgggag

SEQ ID NO: 2065967 - DNA, 15 bp, Homo sapiens
ggagggtatgggagg

SEQ ID NO: 2065968 - DNA, 15 bp, Homo sapiens
gagggtatgggaggc

SEQ ID NO: 2065969 - DNA, 15 bp, Homo sapiens
agggtatgggaggcg

SEQ ID NO: 2065970 - DNA, 15 bp, Homo sapiens
gggtatgggaggcga

SEQ ID NO: 2065971 - DNA, 15 bp, Homo sapiens
ggtatgggaggcgag

SEQ ID NO: 2065972 - DNA, 15 bp, Homo sapiens
gtatgggaggcgagg

SEQ ID NO: 2065973 - DNA, 15 bp, Homo sapiens
tatgggaggcgaggg

SEQ ID NO: 2065974 - DNA, 15 bp, Homo sapiens
atgggaggcgagggc

SEQ ID NO: 2065975 - DNA, 15 bp, Homo sapiens
tgggaggcgagggcg

SEQ ID NO: 2065976 - DNA, 15 bp, Homo sapiens
gggaggcgagggcgc

SEQ ID NO: 2065977 - DNA, 15 bp, Homo sapiens
ggaggcgagggcgcg

SEQ ID NO: 2065978 - DNA, 15 bp, Homo sapiens
gaggcgagggcgcgt

SEQ ID NO: 2065979 - DNA, 15 bp, Homo sapiens
aggcgagggcgcgtc

SEQ ID NO: 2065980 - DNA, 15 bp, Homo sapiens
ggcgagggcgcgtct

SEQ ID NO: 2065981 - DNA, 15 bp, Homo sapiens
gcgagggcgcgtcta

SEQ ID NO: 2065982 - DNA, 15 bp, Homo sapiens
cgagggcgcgtctat

SEQ ID NO: 2065983 - DNA, 15 bp, Homo sapiens
gagggcgcgtctatg

SEQ ID NO: 2065984 - DNA, 15 bp, Homo sapiens
agggcgcgtctatga

SEQ ID NO: 2065985 - DNA, 15 bp, Homo sapiens
gggcgcgtctatgag

SEQ ID NO: 2065986 - DNA, 15 bp, Homo sapiens
ggcgcgtctatgagg

SEQ ID NO: 2065987 - DNA, 15 bp, Homo sapiens
gcgcgtctatgaggg

SEQ ID NO: 2065988 - DNA, 15 bp, Homo sapiens
cgcgtctatgagggc

SEQ ID NO: 2065989 - DNA, 15 bp, Homo sapiens
gcgtctatgagggcc

SEQ ID NO: 2065990 - DNA, 15 bp, Homo sapiens
cgtctatgagggcca

SEQ ID NO: 2065991 - DNA, 15 bp, Homo sapiens
gtctatgagggccag

SEQ ID NO: 2065992 - DNA, 15 bp, Homo sapiens
tctatgagggccaga

SEQ ID NO: 2065993 - DNA, 15 bp, Homo sapiens
ctatgagggccagag

SEQ ID NO: 2065994 - DNA, 15 bp, Homo sapiens
tatgagggccagagt

SEQ ID NO: 2065995 - DNA, 15 bp, Homo sapiens
atgagggccagagtc

SEQ ID NO: 2065996 - DNA, 15 bp, Homo sapiens
tgagggccagagtcc

SEQ ID NO: 2065997 - DNA, 15 bp, Homo sapiens
gagggccagagtccg

SEQ ID NO: 2065998 - DNA, 15 bp, Homo sapiens
agggccagagtccgc

SEQ ID NO: 2065999 - DNA, 15 bp, Homo sapiens
gggccagagtccgcg

SEQ ID NO: 2066000 - DNA, 15 bp, Homo sapiens
ggccagagtccgcga

SEQ ID NO: 2066001 - DNA, 15 bp, Homo sapiens
gccagagtccgcgaa

SEQ ID NO: 2066002 - DNA, 15 bp, Homo sapiens
ccagagtccgcgaag

SEQ ID NO: 2066003 - DNA, 15 bp, Homo sapiens
cagagtccgcgaaga

SEQ ID NO: 2066004 - DNA, 15 bp, Homo sapiens
agagtccgcgaagag

SEQ ID NO: 2066005 - DNA, 15 bp, Homo sapiens
gagtccgcgaagaga

SEQ ID NO: 2066006 - DNA, 15 bp, Homo sapiens
agtccgcgaagagag

SEQ ID NO: 2066007 - DNA, 15 bp, Homo sapiens
gtccgcgaagagagt

SEQ ID NO: 2066008 - DNA, 15 bp, Homo sapiens
tccgcgaagagagtc

SEQ ID NO: 2066009 - DNA, 15 bp, Homo sapiens
ccgcgaagagagtcc

SEQ ID NO: 2066010 - DNA, 15 bp, Homo sapiens
cgcgaagagagtccg

SEQ ID NO: 2066011 - DNA, 15 bp, Homo sapiens
gcgaagagagtccgg

SEQ ID NO: 2066012 - DNA, 15 bp, Homo sapiens
cgaagagagtccggc

SEQ ID NO: 2066013 - DNA, 15 bp, Homo sapiens
gaagagagtccggcc

SEQ ID NO: 2066014 - DNA, 15 bp, Homo sapiens
aagagagtccggccc

SEQ ID NO: 2066015 - DNA, 15 bp, Homo sapiens
agagagtccggccct

SEQ ID NO: 2066016 - DNA, 15 bp, Homo sapiens
gagagtccggccctt

SEQ ID NO: 2066017 - DNA, 15 bp, Homo sapiens
agagtccggccctta

SEQ ID NO: 2066018 - DNA, 15 bp, Homo sapiens
gagtccggcccttag

SEQ ID NO: 2066019 - DNA, 15 bp, Homo sapiens
agtccggcccttagg

SEQ ID NO: 2066020 - DNA, 15 bp, Homo sapiens
gtccggcccttaggc

SEQ ID NO: 2066021 - DNA, 15 bp, Homo sapiens
tccggcccttaggcc

SEQ ID NO: 2066022 - DNA, 15 bp, Homo sapiens
ccggcccttaggcct

SEQ ID NO: 2066023 - DNA, 15 bp, Homo sapiens
cggcccttaggcctt

SEQ ID NO: 2066024 - DNA, 15 bp, Homo sapiens
ggcccttaggccttt

SEQ ID NO: 2066025 - DNA, 15 bp, Homo sapiens
gcccttaggcctttg

SEQ ID NO: 2066026 - DNA, 15 bp, Homo sapiens
cccttaggcctttgg

SEQ ID NO: 2066027 - DNA, 15 bp, Homo sapiens
ccttaggcctttggt

SEQ ID NO: 2066028 - DNA, 15 bp, Homo sapiens
cttaggcctttggtg

SEQ ID NO: 2066029 - DNA, 15 bp, Homo sapiens
ttaggcctttggtgt

SEQ ID NO: 2066030 - DNA, 15 bp, Homo sapiens
taggcctttggtgtt

SEQ ID NO: 2066031 - DNA, 15 bp, Homo sapiens
aggcctttggtgttg

SEQ ID NO: 2066032 - DNA, 15 bp, Homo sapiens
ggcctttggtgttga

SEQ ID NO: 2066033 - DNA, 15 bp, Homo sapiens
gcctttggtgttgaa

SEQ ID NO: 2066034 - DNA, 15 bp, Homo sapiens
cctttggtgttgaag

SEQ ID NO: 2066035 - DNA, 15 bp, Homo sapiens
ctttggtgttgaaga

SEQ ID NO: 2066036 - DNA, 15 bp, Homo sapiens
tttggtgttgaagaa

SEQ ID NO: 2066037 - DNA, 15 bp, Homo sapiens
ttggtgttgaagaat

SEQ ID NO: 2066038 - DNA, 15 bp, Homo sapiens
tggtgttgaagaatc

SEQ ID NO: 2066039 - DNA, 15 bp, Homo sapiens
ggtgttgaagaatct

SEQ ID NO: 2066040 - DNA, 15 bp, Homo sapiens
gtgttgaagaatctg

SEQ ID NO: 2066041 - DNA, 15 bp, Homo sapiens
tgttgaagaatctgc

SEQ ID NO: 2066042 - DNA, 15 bp, Homo sapiens
gttgaagaatctgct

SEQ ID NO: 2066043 - DNA, 15 bp, Homo sapiens
ttgaagaatctgctc

SEQ ID NO: 2066044 - DNA, 15 bp, Homo sapiens
tgaagaatctgctcc

SEQ ID NO: 2066045 - DNA, 15 bp, Homo sapiens
gaagaatctgctcct

SEQ ID NO: 2066046 - DNA, 15 bp, Homo sapiens
aagaatctgctcctc

SEQ ID NO: 2066047 - DNA, 15 bp, Homo sapiens
agaatctgctcctct

SEQ ID NO: 2066048 - DNA, 15 bp, Homo sapiens
gaatctgctcctctg

SEQ ID NO: 2066049 - DNA, 15 bp, Homo sapiens
aatctgctcctctgt

SEQ ID NO: 2066050 - DNA, 15 bp, Homo sapiens
atctgctcctctgtc

SEQ ID NO: 2066051 - DNA, 15 bp, Homo sapiens
tctgctcctctgtcg

SEQ ID NO: 2066052 - DNA, 15 bp, Homo sapiens
ctgctcctctgtcgg

SEQ ID NO: 2066053 - DNA, 15 bp, Homo sapiens
tgctcctctgtcggg

SEQ ID NO: 2066054 - DNA, 15 bp, Homo sapiens
gctcctctgtcgggt

SEQ ID NO: 2066055 - DNA, 15 bp, Homo sapiens
ctcctctgtcgggtc

SEQ ID NO: 2066056 - DNA, 15 bp, Homo sapiens
tcctctgtcgggtca

SEQ ID NO: 2066057 - DNA, 15 bp, Homo sapiens
cctctgtcgggtcaa

SEQ ID NO: 2066058 - DNA, 15 bp, Homo sapiens
ctctgtcgggtcaag

SEQ ID NO: 2066059 - DNA, 15 bp, Homo sapiens
tctgtcgggtcaagc

SEQ ID NO: 2066060 - DNA, 15 bp, Homo sapiens
ctgtcgggtcaagcc

SEQ ID NO: 2066061 - DNA, 15 bp, Homo sapiens
tgtcgggtcaagccc

SEQ ID NO: 2066062 - DNA, 15 bp, Homo sapiens
gtcgggtcaagcccc

SEQ ID NO: 2066063 - DNA, 15 bp, Homo sapiens
tcgggtcaagcccca

SEQ ID NO: 2066064 - DNA, 15 bp, Homo sapiens
cgggtcaagccccac

SEQ ID NO: 2066065 - DNA, 15 bp, Homo sapiens
gggtcaagccccact

SEQ ID NO: 2066066 - DNA, 15 bp, Homo sapiens
ggtcaagccccacta

SEQ ID NO: 2066067 - DNA, 15 bp, Homo sapiens
gtcaagccccactag

SEQ ID NO: 2066068 - DNA, 15 bp, Homo sapiens
tcaagccccactaga

SEQ ID NO: 2066069 - DNA, 15 bp, Homo sapiens
caagccccactagaa

SEQ ID NO: 2066070 - DNA, 15 bp, Homo sapiens
aagccccactagaag

SEQ ID NO: 2066071 - DNA, 15 bp, Homo sapiens
agccccactagaagt

SEQ ID NO: 2066072 - DNA, 15 bp, Homo sapiens
gccccactagaagtt

SEQ ID NO: 2066073 - DNA, 15 bp, Homo sapiens
ccccactagaagtta

SEQ ID NO: 2066074 - DNA, 15 bp, Homo sapiens
cccactagaagttaa

SEQ ID NO: 2066075 - DNA, 15 bp, Homo sapiens
ccactagaagttaac

SEQ ID NO: 2066076 - DNA, 15 bp, Homo sapiens
cactagaagttaaca

SEQ ID NO: 2066077 - DNA, 15 bp, Homo sapiens
actagaagttaacac

SEQ ID NO: 2066078 - DNA, 15 bp, Homo sapiens
ctagaagttaacacc

SEQ ID NO: 2066079 - DNA, 15 bp, Homo sapiens
tagaagttaacacct

SEQ ID NO: 2066080 - DNA, 15 bp, Homo sapiens
agaagttaacacctg

SEQ ID NO: 2066081 - DNA, 15 bp, Homo sapiens
gaagttaacacctgt

SEQ ID NO: 2066082 - DNA, 15 bp, Homo sapiens
aagttaacacctgtg

SEQ ID NO: 2066083 - DNA, 15 bp, Homo sapiens
agttaacacctgtgg

SEQ ID NO: 2066084 - DNA, 15 bp, Homo sapiens
gttaacacctgtggt

SEQ ID NO: 2066085 - DNA, 15 bp, Homo sapiens
ttaacacctgtggtc

SEQ ID NO: 2066086 - DNA, 15 bp, Homo sapiens
taacacctgtggtct

SEQ ID NO: 2066087 - DNA, 15 bp, Homo sapiens
aacacctgtggtctc

SEQ ID NO: 2066088 - DNA, 15 bp, Homo sapiens
acacctgtggtctcc

SEQ ID NO: 2066089 - DNA, 15 bp, Homo sapiens
cacctgtggtctcca

SEQ ID NO: 2066090 - DNA, 15 bp, Homo sapiens
acctgtggtctccaa

SEQ ID NO: 2066091 - DNA, 15 bp, Homo sapiens
cctgtggtctccaaa

SEQ ID NO: 2066092 - DNA, 15 bp, Homo sapiens
ctgtggtctccaaac

SEQ ID NO: 2066093 - DNA, 15 bp, Homo sapiens
tgtggtctccaaact

SEQ ID NO: 2066094 - DNA, 15 bp, Homo sapiens
gtggtctccaaactt

SEQ ID NO: 2066095 - DNA, 15 bp, Homo sapiens
tggtctccaaacttg

SEQ ID NO: 2066096 - DNA, 15 bp, Homo sapiens
ggtctccaaacttgc

SEQ ID NO: 2066097 - DNA, 15 bp, Homo sapiens
gtctccaaacttgcc

SEQ ID NO: 2066098 - DNA, 15 bp, Homo sapiens
tctccaaacttgcct

SEQ ID NO: 2066099 - DNA, 15 bp, Homo sapiens
ctccaaacttgccta

SEQ ID NO: 2066100 - DNA, 15 bp, Homo sapiens
tccaaacttgcctat

SEQ ID NO: 2066101 - DNA, 15 bp, Homo sapiens
ccaaacttgcctatt

SEQ ID NO: 2066102 - DNA, 15 bp, Homo sapiens
caaacttgcctattt

SEQ ID NO: 2066103 - DNA, 15 bp, Homo sapiens
aaacttgcctatttt

SEQ ID NO: 2066104 - DNA, 15 bp, Homo sapiens
aacttgcctattttc

SEQ ID NO: 2066105 - DNA, 15 bp, Homo sapiens
acttgcctattttcc

SEQ ID NO: 2066106 - DNA, 15 bp, Homo sapiens
cttgcctattttcct

SEQ ID NO: 2066107 - DNA, 15 bp, Homo sapiens
ttgcctattttcctg

SEQ ID NO: 2066108 - DNA, 15 bp, Homo sapiens
tgcctattttcctgt

SEQ ID NO: 2066109 - DNA, 15 bp, Homo sapiens
gcctattttcctgtc

SEQ ID NO: 2066110 - DNA, 15 bp, Homo sapiens
cctattttcctgtca

SEQ ID NO: 2066111 - DNA, 15 bp, Homo sapiens
ctattttcctgtcac

SEQ ID NO: 2066112 - DNA, 15 bp, Homo sapiens
tattttcctgtcacg

SEQ ID NO: 2066113 - DNA, 15 bp, Homo sapiens
attttcctgtcacgc

SEQ ID NO: 2066114 - DNA, 15 bp, Homo sapiens
ttttcctgtcacgca

SEQ ID NO: 2066115 - DNA, 15 bp, Homo sapiens
tttcctgtcacgcag

SEQ ID NO: 2066116 - DNA, 15 bp, Homo sapiens
ttcctgtcacgcagt

SEQ ID NO: 2066117 - DNA, 15 bp, Homo sapiens
tcctgtcacgcagtt

SEQ ID NO: 2066118 - DNA, 15 bp, Homo sapiens
cctgtcacgcagttc

SEQ ID NO: 2066119 - DNA, 15 bp, Homo sapiens
ctgtcacgcagttca

SEQ ID NO: 2066120 - DNA, 15 bp, Homo sapiens
tgtcacgcagttcaa

SEQ ID NO: 2066121 - DNA, 15 bp, Homo sapiens
gtcacgcagttcaag

SEQ ID NO: 2066122 - DNA, 15 bp, Homo sapiens
tcacgcagttcaagc

SEQ ID NO: 2066123 - DNA, 15 bp, Homo sapiens
cacgcagttcaagcc

SEQ ID NO: 2066124 - DNA, 15 bp, Homo sapiens
acgcagttcaagcca

SEQ ID NO: 2066125 - DNA, 15 bp, Homo sapiens
cgcagttcaagccaa

SEQ ID NO: 2066126 - DNA, 15 bp, Homo sapiens
gcagttcaagccaag

SEQ ID NO: 2066127 - DNA, 15 bp, Homo sapiens
cagttcaagccaaga

SEQ ID NO: 2066128 - DNA, 15 bp, Homo sapiens
agttcaagccaagat

SEQ ID NO: 2066129 - DNA, 15 bp, Homo sapiens
gttcaagccaagatt

SEQ ID NO: 2066130 - DNA, 15 bp, Homo sapiens
ttcaagccaagattc

SEQ ID NO: 2066131 - DNA, 15 bp, Homo sapiens
tcaagccaagattca

SEQ ID NO: 2066132 - DNA, 15 bp, Homo sapiens
caagccaagattcaa

SEQ ID NO: 2066133 - DNA, 15 bp, Homo sapiens
aagccaagattcaac

SEQ ID NO: 2066134 - DNA, 15 bp, Homo sapiens
agccaagattcaact

SEQ ID NO: 2066135 - DNA, 15 bp, Homo sapiens
gccaagattcaactc

SEQ ID NO: 2066136 - DNA, 15 bp, Homo sapiens
ccaagattcaactcg

SEQ ID NO: 2066137 - DNA, 15 bp, Homo sapiens
caagattcaactcgt

SEQ ID NO: 2066138 - DNA, 15 bp, Homo sapiens
aagattcaactcgtc

SEQ ID NO: 2066139 - DNA, 15 bp, Homo sapiens
agattcaactcgtct

SEQ ID NO: 2066140 - DNA, 15 bp, Homo sapiens
gattcaactcgtctt

SEQ ID NO: 2066141 - DNA, 15 bp, Homo sapiens
attcaactcgtcttg

SEQ ID NO: 2066142 - DNA, 15 bp, Homo sapiens
ttcaactcgtcttga

SEQ ID NO: 2066143 - DNA, 15 bp, Homo sapiens
tcaactcgtcttgaa

SEQ ID NO: 2066144 - DNA, 15 bp, Homo sapiens
caactcgtcttgaat

SEQ ID NO: 2066145 - DNA, 15 bp, Homo sapiens
aactcgtcttgaatt

SEQ ID NO: 2066146 - DNA, 15 bp, Homo sapiens
actcgtcttgaattt

SEQ ID NO: 2066147 - DNA, 15 bp, Homo sapiens
ctcgtcttgaatttt

SEQ ID NO: 2066148 - DNA, 15 bp, Homo sapiens
tcgtcttgaattttt

SEQ ID NO: 2066149 - DNA, 15 bp, Homo sapiens
cgtcttgaatttttg

SEQ ID NO: 2066150 - DNA, 15 bp, Homo sapiens
gtcttgaatttttgt

SEQ ID NO: 2066151 - DNA, 15 bp, Homo sapiens
tcttgaatttttgta

SEQ ID NO: 2066152 - DNA, 15 bp, Homo sapiens
cttgaatttttgtat

SEQ ID NO: 2066153 - DNA, 15 bp, Homo sapiens
ttgaatttttgtatt

SEQ ID NO: 2066154 - DNA, 15 bp, Homo sapiens
tgaatttttgtattt

SEQ ID NO: 2066155 - DNA, 15 bp, Homo sapiens
gaatttttgtattta

SEQ ID NO: 2066156 - DNA, 15 bp, Homo sapiens
aatttttgtatttag

SEQ ID NO: 2066157 - DNA, 15 bp, Homo sapiens
atttttgtatttaga

SEQ ID NO: 2066158 - DNA, 15 bp, Homo sapiens
tttttgtatttagag

SEQ ID NO: 2066159 - DNA, 15 bp, Homo sapiens
ttttgtatttagagc

SEQ ID NO: 2066160 - DNA, 15 bp, Homo sapiens
tttgtatttagagcc

SEQ ID NO: 2066161 - DNA, 15 bp, Homo sapiens
ttgtatttagagccc

SEQ ID NO: 2066162 - DNA, 15 bp, Homo sapiens
tgtatttagagcccc

SEQ ID NO: 2066163 - DNA, 15 bp, Homo sapiens
gtatttagagcccct

SEQ ID NO: 2066164 - DNA, 15 bp, Homo sapiens
tatttagagccccta

SEQ ID NO: 2066165 - DNA, 15 bp, Homo sapiens
atttagagcccctac

SEQ ID NO: 2066166 - DNA, 15 bp, Homo sapiens
tttagagcccctacc

SEQ ID NO: 2066167 - DNA, 15 bp, Homo sapiens
ttagagcccctacct

SEQ ID NO: 2066168 - DNA, 15 bp, Homo sapiens
tagagcccctacctt

SEQ ID NO: 2066169 - DNA, 15 bp, Homo sapiens
agagcccctaccttc

SEQ ID NO: 2066170 - DNA, 15 bp, Homo sapiens
gagcccctaccttct

SEQ ID NO: 2066171 - DNA, 15 bp, Homo sapiens
agcccctaccttctc

SEQ ID NO: 2066172 - DNA, 15 bp, Homo sapiens
gcccctaccttctcc

SEQ ID NO: 2066173 - DNA, 15 bp, Homo sapiens
cccctaccttctcca

SEQ ID NO: 2066174 - DNA, 15 bp, Homo sapiens
ccctaccttctccac

SEQ ID NO: 2066175 - DNA, 15 bp, Homo sapiens
cctaccttctccacc

SEQ ID NO: 2066176 - DNA, 15 bp, Homo sapiens
ctaccttctccaccg

SEQ ID NO: 2066177 - DNA, 15 bp, Homo sapiens
taccttctccaccga

SEQ ID NO: 2066178 - DNA, 15 bp, Homo sapiens
accttctccaccgac

SEQ ID NO: 2066179 - DNA, 15 bp, Homo sapiens
ccttctccaccgact

SEQ ID NO: 2066180 - DNA, 15 bp, Homo sapiens
cttctccaccgactc

SEQ ID NO: 2066181 - DNA, 15 bp, Homo sapiens
ttctccaccgactcc

SEQ ID NO: 2066182 - DNA, 15 bp, Homo sapiens
tctccaccgactcca

SEQ ID NO: 2066183 - DNA, 15 bp, Homo sapiens
ctccaccgactccag

SEQ ID NO: 2066184 - DNA, 15 bp, Homo sapiens
tccaccgactccagg

SEQ ID NO: 2066185 - DNA, 15 bp, Homo sapiens
ccaccgactccaggg

SEQ ID NO: 2066186 - DNA, 15 bp, Homo sapiens
caccgactccagggg

SEQ ID NO: 2066187 - DNA, 15 bp, Homo sapiens
accgactccaggggc

SEQ ID NO: 2066188 - DNA, 15 bp, Homo sapiens
ccgactccaggggcg

SEQ ID NO: 2066189 - DNA, 15 bp, Homo sapiens
cgactccaggggcgc

SEQ ID NO: 2066190 - DNA, 15 bp, Homo sapiens
gactccaggggcgcc

SEQ ID NO: 2066191 - DNA, 15 bp, Homo sapiens
actccaggggcgccc

SEQ ID NO: 2066192 - DNA, 15 bp, Homo sapiens
ctccaggggcgccct

SEQ ID NO: 2066193 - DNA, 15 bp, Homo sapiens
tccaggggcgccctc

SEQ ID NO: 2066194 - DNA, 15 bp, Homo sapiens
ccaggggcgccctct

SEQ ID NO: 2066195 - DNA, 15 bp, Homo sapiens
caggggcgccctctg

SEQ ID NO: 2066196 - DNA, 15 bp, Homo sapiens
aggggcgccctctgg

SEQ ID NO: 2066197 - DNA, 15 bp, Homo sapiens
ggggcgccctctggc

SEQ ID NO: 2066198 - DNA, 15 bp, Homo sapiens
gggcgccctctggcg

SEQ ID NO: 2066199 - DNA, 15 bp, Homo sapiens
ggcgccctctggcgg

SEQ ID NO: 2066200 - DNA, 15 bp, Homo sapiens
gcgccctctggcggg

SEQ ID NO: 2066201 - DNA, 15 bp, Homo sapiens
cgccctctggcggga

SEQ ID NO: 2066202 - DNA, 15 bp, Homo sapiens
gccctctggcgggaa

SEQ ID NO: 2066203 - DNA, 15 bp, Homo sapiens
ccctctggcgggaag

SEQ ID NO: 2066204 - DNA, 15 bp, Homo sapiens
cctctggcgggaagg

SEQ ID NO: 2066205 - DNA, 15 bp, Homo sapiens
ctctggcgggaaggg

SEQ ID NO: 2066206 - DNA, 15 bp, Homo sapiens
tctggcgggaagggg

SEQ ID NO: 2066207 - DNA, 15 bp, Homo sapiens
ctggcgggaaggggc

SEQ ID NO: 2066208 - DNA, 15 bp, Homo sapiens
tggcgggaaggggcc

SEQ ID NO: 2066209 - DNA, 15 bp, Homo sapiens
ggcgggaaggggcct

SEQ ID NO: 2066210 - DNA, 15 bp, Homo sapiens
gcgggaaggggcctg

SEQ ID NO: 2066211 - DNA, 15 bp, Homo sapiens
cgggaaggggcctgg

SEQ ID NO: 2066212 - DNA, 15 bp, Homo sapiens
gggaaggggcctggg

SEQ ID NO: 2066213 - DNA, 15 bp, Homo sapiens
ggaaggggcctgggg

SEQ ID NO: 2066214 - DNA, 15 bp, Homo sapiens
gaaggggcctggggt

SEQ ID NO: 2066215 - DNA, 15 bp, Homo sapiens
aaggggcctggggta

SEQ ID NO: 2066216 - DNA, 15 bp, Homo sapiens
aggggcctggggtag

SEQ ID NO: 2066217 - DNA, 15 bp, Homo sapiens
ggggcctggggtagg

SEQ ID NO: 2066218 - DNA, 15 bp, Homo sapiens
gggcctggggtagga

SEQ ID NO: 2066219 - DNA, 15 bp, Homo sapiens
ggcctggggtaggag

SEQ ID NO: 2066220 - DNA, 15 bp, Homo sapiens
gcctggggtaggagg

SEQ ID NO: 2066221 - DNA, 15 bp, Homo sapiens
cctggggtaggaggg

SEQ ID NO: 2066222 - DNA, 15 bp, Homo sapiens
ctggggtaggaggga

SEQ ID NO: 2066223 - DNA, 15 bp, Homo sapiens
tggggtaggagggaa

SEQ ID NO: 2066224 - DNA, 15 bp, Homo sapiens
ggggtaggagggaac

SEQ ID NO: 2066225 - DNA, 15 bp, Homo sapiens
gggtaggagggaacc

SEQ ID NO: 2066226 - DNA, 15 bp, Homo sapiens
ggtaggagggaacct

SEQ ID NO: 2066227 - DNA, 15 bp, Homo sapiens
gtaggagggaacctg

SEQ ID NO: 2066228 - DNA, 15 bp, Homo sapiens
taggagggaacctga

SEQ ID NO: 2066229 - DNA, 15 bp, Homo sapiens
aggagggaacctgag

SEQ ID NO: 2066230 - DNA, 15 bp, Homo sapiens
ggagggaacctgagg

SEQ ID NO: 2066231 - DNA, 15 bp, Homo sapiens
gagggaacctgaggg

SEQ ID NO: 2066232 - DNA, 15 bp, Homo sapiens
agggaacctgaggga

SEQ ID NO: 2066233 - DNA, 15 bp, Homo sapiens
gggaacctgagggag

SEQ ID NO: 2066234 - DNA, 15 bp, Homo sapiens
ggaacctgagggagc

SEQ ID NO: 2066235 - DNA, 15 bp, Homo sapiens
gaacctgagggagcg

SEQ ID NO: 2066236 - DNA, 15 bp, Homo sapiens
aacctgagggagcgg

SEQ ID NO: 2066237 - DNA, 15 bp, Homo sapiens
acctgagggagcggg

SEQ ID NO: 2066238 - DNA, 15 bp, Homo sapiens
cctgagggagcgggt

SEQ ID NO: 2066239 - DNA, 15 bp, Homo sapiens
ctgagggagcgggtt

SEQ ID NO: 2066240 - DNA, 15 bp, Homo sapiens
tgagggagcgggtta

SEQ ID NO: 2066241 - DNA, 15 bp, Homo sapiens
gagggagcgggttac

SEQ ID NO: 2066242 - DNA, 15 bp, Homo sapiens
agggagcgggttaca

SEQ ID NO: 2066243 - DNA, 15 bp, Homo sapiens
gggagcgggttacaa

SEQ ID NO: 2066244 - DNA, 15 bp, Homo sapiens
ggagcgggttacaaa

SEQ ID NO: 2066245 - DNA, 15 bp, Homo sapiens
gagcgggttacaaag

SEQ ID NO: 2066246 - DNA, 15 bp, Homo sapiens
agcgggttacaaagc

SEQ ID NO: 2066247 - DNA, 15 bp, Homo sapiens
gcgggttacaaagca

SEQ ID NO: 2066248 - DNA, 15 bp, Homo sapiens
cgggttacaaagcag

SEQ ID NO: 2066249 - DNA, 15 bp, Homo sapiens
gggttacaaagcaga

SEQ ID NO: 2066250 - DNA, 15 bp, Homo sapiens
ggttacaaagcagag

SEQ ID NO: 2066251 - DNA, 15 bp, Homo sapiens
gttacaaagcagaga

SEQ ID NO: 2066252 - DNA, 15 bp, Homo sapiens
ttacaaagcagagaa

SEQ ID NO: 2066253 - DNA, 15 bp, Homo sapiens
tacaaagcagagaac

SEQ ID NO: 2066254 - DNA, 15 bp, Homo sapiens
acaaagcagagaaca

SEQ ID NO: 2066255 - DNA, 15 bp, Homo sapiens
caaagcagagaacag

SEQ ID NO: 2066256 - DNA, 15 bp, Homo sapiens
aaagcagagaacagc

SEQ ID NO: 2066257 - DNA, 15 bp, Homo sapiens
aagcagagaacagcg

SEQ ID NO: 2066258 - DNA, 15 bp, Homo sapiens
agcagagaacagcgg

SEQ ID NO: 2066259 - DNA, 15 bp, Homo sapiens
gcagagaacagcggg

SEQ ID NO: 2066260 - DNA, 15 bp, Homo sapiens
cagagaacagcggga

SEQ ID NO: 2066261 - DNA, 15 bp, Homo sapiens
agagaacagcgggag

SEQ ID NO: 2066262 - DNA, 15 bp, Homo sapiens
gagaacagcgggagc

SEQ ID NO: 2066263 - DNA, 15 bp, Homo sapiens
agaacagcgggagct

SEQ ID NO: 2066264 - DNA, 15 bp, Homo sapiens
gaacagcgggagctc

SEQ ID NO: 2066265 - DNA, 15 bp, Homo sapiens
aacagcgggagctca

SEQ ID NO: 2066266 - DNA, 15 bp, Homo sapiens
acagcgggagctcag

SEQ ID NO: 2066267 - DNA, 15 bp, Homo sapiens
cagcgggagctcagc

SEQ ID NO: 2066268 - DNA, 15 bp, Homo sapiens
agcgggagctcagca

SEQ ID NO: 2066269 - DNA, 15 bp, Homo sapiens
gcgggagctcagcag

SEQ ID NO: 2066270 - DNA, 15 bp, Homo sapiens
cgggagctcagcagc

SEQ ID NO: 2066271 - DNA, 15 bp, Homo sapiens
gggagctcagcagct

SEQ ID NO: 2066272 - DNA, 15 bp, Homo sapiens
ggagctcagcagctc

SEQ ID NO: 2066273 - DNA, 15 bp, Homo sapiens
gagctcagcagctcc

SEQ ID NO: 2066274 - DNA, 15 bp, Homo sapiens
agctcagcagctccc

SEQ ID NO: 2066275 - DNA, 15 bp, Homo sapiens
gctcagcagctccct

SEQ ID NO: 2066276 - DNA, 15 bp, Homo sapiens
ctcagcagctccctt

SEQ ID NO: 2066277 - DNA, 15 bp, Homo sapiens
tcagcagctcccttt

SEQ ID NO: 2066278 - DNA, 15 bp, Homo sapiens
cagcagctccctttg

SEQ ID NO: 2066279 - DNA, 15 bp, Homo sapiens
agcagctccctttga

SEQ ID NO: 2066280 - DNA, 15 bp, Homo sapiens
gcagctccctttgaa

SEQ ID NO: 2066281 - DNA, 15 bp, Homo sapiens
cagctccctttgaat

SEQ ID NO: 2066282 - DNA, 15 bp, Homo sapiens
agctccctttgaatt

SEQ ID NO: 2066283 - DNA, 15 bp, Homo sapiens
gctccctttgaattg

SEQ ID NO: 2066284 - DNA, 15 bp, Homo sapiens
ctccctttgaattgc

SEQ ID NO: 2066285 - DNA, 15 bp, Homo sapiens
tccctttgaattgcg

SEQ ID NO: 2066286 - DNA, 15 bp, Homo sapiens
ccctttgaattgcga

SEQ ID NO: 2066287 - DNA, 15 bp, Homo sapiens
cctttgaattgcgag

SEQ ID NO: 2066288 - DNA, 15 bp, Homo sapiens
ctttgaattgcgagg

SEQ ID NO: 2066289 - DNA, 15 bp, Homo sapiens
tttgaattgcgagga

SEQ ID NO: 2066290 - DNA, 15 bp, Homo sapiens
ttgaattgcgaggaa

SEQ ID NO: 2066291 - DNA, 15 bp, Homo sapiens
tgaattgcgaggaaa

SEQ ID NO: 2066292 - DNA, 15 bp, Homo sapiens
gaattgcgaggaaac

SEQ ID NO: 2066293 - DNA, 15 bp, Homo sapiens
aattgcgaggaaacc

SEQ ID NO: 2066294 - DNA, 15 bp, Homo sapiens
attgcgaggaaacca

SEQ ID NO: 2066295 - DNA, 15 bp, Homo sapiens
ttgcgaggaaaccaa

SEQ ID NO: 2066296 - DNA, 15 bp, Homo sapiens
tgcgaggaaaccaag

SEQ ID NO: 2066297 - DNA, 15 bp, Homo sapiens
cgaggaaaccaagac

SEQ ID NO: 2066298 - DNA, 15 bp, Homo sapiens
gaggaaaccaagacg

SEQ ID NO: 2066299 - DNA, 15 bp, Homo sapiens
aggaaaccaagacgg

SEQ ID NO: 2066300 - DNA, 15 bp, Homo sapiens
ggaaaccaagacgga

SEQ ID NO: 2066301 - DNA, 15 bp, Homo sapiens
gaaaccaagacggag

SEQ ID NO: 2066302 - DNA, 15 bp, Homo sapiens
aaaccaagacggaga

SEQ ID NO: 2066303 - DNA, 15 bp, Homo sapiens
aaccaagacggagac

SEQ ID NO: 2066304 - DNA, 15 bp, Homo sapiens
accaagacggagacg

SEQ ID NO: 2066305 - DNA, 15 bp, Homo sapiens
ccaagacggagacgg

SEQ ID NO: 2066306 - DNA, 15 bp, Homo sapiens
caagacggagacggg

SEQ ID NO: 2066307 - DNA, 15 bp, Homo sapiens
aagacggagacggga

SEQ ID NO: 2066308 - DNA, 15 bp, Homo sapiens
agacggagacgggag

SEQ ID NO: 2066309 - DNA, 15 bp, Homo sapiens
gacggagacgggagg

SEQ ID NO: 2066310 - DNA, 15 bp, Homo sapiens
acggagacgggaggt

SEQ ID NO: 2066311 - DNA, 15 bp, Homo sapiens
cggagacgggaggta

SEQ ID NO: 2066312 - DNA, 15 bp, Homo sapiens
ggagacgggaggtag

SEQ ID NO: 2066313 - DNA, 15 bp, Homo sapiens
gagacgggaggtagg

SEQ ID NO: 2066314 - DNA, 15 bp, Homo sapiens
agacgggaggtagga

SEQ ID NO: 2066315 - DNA, 15 bp, Homo sapiens
gacgggaggtaggag

SEQ ID NO: 2066316 - DNA, 15 bp, Homo sapiens
acgggaggtaggagc

SEQ ID NO: 2066317 - DNA, 15 bp, Homo sapiens
cgggaggtaggagca

SEQ ID NO: 2066318 - DNA, 15 bp, Homo sapiens
gggaggtaggagcac

SEQ ID NO: 2066319 - DNA, 15 bp, Homo sapiens
ggaggtaggagcacg

SEQ ID NO: 2066320 - DNA, 15 bp, Homo sapiens
gaggtaggagcacgg

SEQ ID NO: 2066321 - DNA, 15 bp, Homo sapiens
aggtaggagcacggg

SEQ ID NO: 2066322 - DNA, 15 bp, Homo sapiens
ggtaggagcacgggc

SEQ ID NO: 2066323 - DNA, 15 bp, Homo sapiens
gtaggagcacgggcc

SEQ ID NO: 2066324 - DNA, 15 bp, Homo sapiens
taggagcacgggcct

SEQ ID NO: 2066325 - DNA, 15 bp, Homo sapiens
aggagcacgggcctg

SEQ ID NO: 2066326 - DNA, 15 bp, Homo sapiens
ggagcacgggcctga

SEQ ID NO: 2066327 - DNA, 15 bp, Homo sapiens
gagcacgggcctgaa

SEQ ID NO: 2066328 - DNA, 15 bp, Homo sapiens
agcacgggcctgaag

SEQ ID NO: 2066329 - DNA, 15 bp, Homo sapiens
gcacgggcctgaagc

SEQ ID NO: 2066330 - DNA, 15 bp, Homo sapiens
cacgggcctgaagcg

SEQ ID NO: 2066331 - DNA, 15 bp, Homo sapiens
acgggcctgaagcgg

SEQ ID NO: 2066332 - DNA, 15 bp, Homo sapiens
cgggcctgaagcggt

SEQ ID NO: 2066333 - DNA, 15 bp, Homo sapiens
gggcctgaagcggtc

SEQ ID NO: 2066334 - DNA, 15 bp, Homo sapiens
ggcctgaagcggtca

SEQ ID NO: 2066335 - DNA, 15 bp, Homo sapiens
gcctgaagcggtcag

SEQ ID NO: 2066336 - DNA, 15 bp, Homo sapiens
cctgaagcggtcagc

SEQ ID NO: 2066337 - DNA, 15 bp, Homo sapiens
ctgaagcggtcagcc

SEQ ID NO: 2066338 - DNA, 15 bp, Homo sapiens
tgaagcggtcagccg

SEQ ID NO: 2066339 - DNA, 15 bp, Homo sapiens
gaagcggtcagccga

SEQ ID NO: 2066340 - DNA, 15 bp, Homo sapiens
aagcggtcagccgac

SEQ ID NO: 2066341 - DNA, 15 bp, Homo sapiens
agcggtcagccgacc

SEQ ID NO: 2066342 - DNA, 15 bp, Homo sapiens
gcggtcagccgaccc

SEQ ID NO: 2066343 - DNA, 15 bp, Homo sapiens
cggtcagccgaccct

SEQ ID NO: 2066344 - DNA, 15 bp, Homo sapiens
ggtcagccgaccctg

SEQ ID NO: 2066345 - DNA, 15 bp, Homo sapiens
gtcagccgaccctgt

SEQ ID NO: 2066346 - DNA, 15 bp, Homo sapiens
tcagccgaccctgtg

SEQ ID NO: 2066347 - DNA, 15 bp, Homo sapiens
cagccgaccctgtga

SEQ ID NO: 2066348 - DNA, 15 bp, Homo sapiens
agccgaccctgtgag

SEQ ID NO: 2066349 - DNA, 15 bp, Homo sapiens
gccgaccctgtgagg

SEQ ID NO: 2066350 - DNA, 15 bp, Homo sapiens
ccgaccctgtgaggc

SEQ ID NO: 2066351 - DNA, 15 bp, Homo sapiens
cgaccctgtgaggcc

SEQ ID NO: 2066352 - DNA, 15 bp, Homo sapiens
gaccctgtgaggccc

SEQ ID NO: 2066353 - DNA, 15 bp, Homo sapiens
accctgtgaggcccg

SEQ ID NO: 2066354 - DNA, 15 bp, Homo sapiens
ccctgtgaggcccgc

SEQ ID NO: 2066355 - DNA, 15 bp, Homo sapiens
cctgtgaggcccgcg

SEQ ID NO: 2066356 - DNA, 15 bp, Homo sapiens
ctgtgaggcccgcgc

SEQ ID NO: 2066357 - DNA, 15 bp, Homo sapiens
tgtgaggcccgcgct

SEQ ID NO: 2066358 - DNA, 15 bp, Homo sapiens
gtgaggcccgcgctg

SEQ ID NO: 2066359 - DNA, 15 bp, Homo sapiens
tgaggcccgcgctgc

SEQ ID NO: 2066360 - DNA, 15 bp, Homo sapiens
gaggcccgcgctgcc

SEQ ID NO: 2066361 - DNA, 15 bp, Homo sapiens
aggcccgcgctgccg

SEQ ID NO: 2066362 - DNA, 15 bp, Homo sapiens
ggcccgcgctgccgt

SEQ ID NO: 2066363 - DNA, 15 bp, Homo sapiens
gcccgcgctgccgtg

SEQ ID NO: 2066364 - DNA, 15 bp, Homo sapiens
cccgcgctgccgtgc

SEQ ID NO: 2066365 - DNA, 15 bp, Homo sapiens
ccgcgctgccgtgct

SEQ ID NO: 2066366 - DNA, 15 bp, Homo sapiens
cgcgctgccgtgcta

SEQ ID NO: 2066367 - DNA, 15 bp, Homo sapiens
gcgctgccgtgctac

SEQ ID NO: 2066368 - DNA, 15 bp, Homo sapiens
cgctgccgtgctacg

SEQ ID NO: 2066369 - DNA, 15 bp, Homo sapiens
gctgccgtgctacgc

SEQ ID NO: 2066370 - DNA, 15 bp, Homo sapiens
ctgccgtgctacgcc

SEQ ID NO: 2066371 - DNA, 15 bp, Homo sapiens
tgccgtgctacgccg

SEQ ID NO: 2066372 - DNA, 15 bp, Homo sapiens
gccgtgctacgccgc

SEQ ID NO: 2066373 - DNA, 15 bp, Homo sapiens
ccgtgctacgccgcg

SEQ ID NO: 2066374 - DNA, 15 bp, Homo sapiens
cgtgctacgccgcga

SEQ ID NO: 2066375 - DNA, 15 bp, Homo sapiens
gtgctacgccgcgaa

SEQ ID NO: 2066376 - DNA, 15 bp, Homo sapiens
tgctacgccgcgaat

SEQ ID NO: 2066377 - DNA, 15 bp, Homo sapiens
gctacgccgcgaatc

SEQ ID NO: 2066378 - DNA, 15 bp, Homo sapiens
ctacgccgcgaatcc

SEQ ID NO: 2066379 - DNA, 15 bp, Homo sapiens
tacgccgcgaatccg

SEQ ID NO: 2066380 - DNA, 15 bp, Homo sapiens
acgccgcgaatccgc

SEQ ID NO: 2066381 - DNA, 15 bp, Homo sapiens
cgccgcgaatccgcc

SEQ ID NO: 2066382 - DNA, 15 bp, Homo sapiens
gccgcgaatccgcca

SEQ ID NO: 2066383 - DNA, 15 bp, Homo sapiens
ccgcgaatccgccag

SEQ ID NO: 2066384 - DNA, 15 bp, Homo sapiens
cgcgaatccgccaga

SEQ ID NO: 2066385 - DNA, 15 bp, Homo sapiens
gcgaatccgccagac

SEQ ID NO: 2066386 - DNA, 15 bp, Homo sapiens
cgaatccgccagacg

SEQ ID NO: 2066387 - DNA, 15 bp, Homo sapiens
gaatccgccagacgc

SEQ ID NO: 2066388 - DNA, 15 bp, Homo sapiens
aatccgccagacgcc

SEQ ID NO: 2066389 - DNA, 15 bp, Homo sapiens
atccgccagacgccc

SEQ ID NO: 2066390 - DNA, 15 bp, Homo sapiens
tccgccagacgcccc

SEQ ID NO: 2066391 - DNA, 15 bp, Homo sapiens
ccgccagacgccccc

SEQ ID NO: 2066392 - DNA, 15 bp, Homo sapiens
cgccagacgcccccg

SEQ ID NO: 2066393 - DNA, 15 bp, Homo sapiens
gccagacgcccccgt

SEQ ID NO: 2066394 - DNA, 15 bp, Homo sapiens
ccagacgcccccgtc

SEQ ID NO: 2066395 - DNA, 15 bp, Homo sapiens
cagacgcccccgtcg

SEQ ID NO: 2066396 - DNA, 15 bp, Homo sapiens
agacgcccccgtcgg

SEQ ID NO: 2066397 - DNA, 15 bp, Homo sapiens
gacgcccccgtcgga

SEQ ID NO: 2066398 - DNA, 15 bp, Homo sapiens
acgcccccgtcggaa

SEQ ID NO: 2066399 - DNA, 15 bp, Homo sapiens
cgcccccgtcggaag

SEQ ID NO: 2066400 - DNA, 15 bp, Homo sapiens
gcccccgtcggaagg

SEQ ID NO: 2066401 - DNA, 15 bp, Homo sapiens
cccccgtcggaaggg

SEQ ID NO: 2066402 - DNA, 15 bp, Homo sapiens
ccccgtcggaagggg

SEQ ID NO: 2066403 - DNA, 15 bp, Homo sapiens
cccgtcggaaggggc

SEQ ID NO: 2066404 - DNA, 15 bp, Homo sapiens
ccgtcggaaggggca

SEQ ID NO: 2066405 - DNA, 15 bp, Homo sapiens
cgtcggaaggggcag

SEQ ID NO: 2066406 - DNA, 15 bp, Homo sapiens
gtcggaaggggcagg

SEQ ID NO: 2066407 - DNA, 15 bp, Homo sapiens
tcggaaggggcaggg

SEQ ID NO: 2066408 - DNA, 15 bp, Homo sapiens
cggaaggggcaggga

SEQ ID NO: 2066409 - DNA, 15 bp, Homo sapiens
ggaaggggcagggac

SEQ ID NO: 2066410 - DNA, 15 bp, Homo sapiens
gaaggggcagggaca

SEQ ID NO: 2066411 - DNA, 15 bp, Homo sapiens
aaggggcagggacac

SEQ ID NO: 2066412 - DNA, 15 bp, Homo sapiens
aggggcagggacacc

SEQ ID NO: 2066413 - DNA, 15 bp, Homo sapiens
ggggcagggacaccc

SEQ ID NO: 2066414 - DNA, 15 bp, Homo sapiens
gggcagggacaccct

SEQ ID NO: 2066415 - DNA, 15 bp, Homo sapiens
ggcagggacaccctc

SEQ ID NO: 2066416 - DNA, 15 bp, Homo sapiens
gcagggacaccctcg

SEQ ID NO: 2066417 - DNA, 15 bp, Homo sapiens
cagggacaccctcgg

SEQ ID NO: 2066418 - DNA, 15 bp, Homo sapiens
agggacaccctcggg

SEQ ID NO: 2066419 - DNA, 15 bp, Homo sapiens
gggacaccctcgggg

SEQ ID NO: 2066420 - DNA, 15 bp, Homo sapiens
ggacaccctcggggg

SEQ ID NO: 2066421 - DNA, 15 bp, Homo sapiens
gacaccctcgggggc

SEQ ID NO: 2066422 - DNA, 15 bp, Homo sapiens
acaccctcgggggcg

SEQ ID NO: 2066423 - DNA, 15 bp, Homo sapiens
caccctcgggggcgc

SEQ ID NO: 2066424 - DNA, 15 bp, Homo sapiens
accctcgggggcgct

SEQ ID NO: 2066425 - DNA, 15 bp, Homo sapiens
ccctcgggggcgctc

SEQ ID NO: 2066426 - DNA, 15 bp, Homo sapiens
cctcgggggcgctct

SEQ ID NO: 2066427 - DNA, 15 bp, Homo sapiens
ctcgggggcgctcta

SEQ ID NO: 2066428 - DNA, 15 bp, Homo sapiens
tcgggggcgctctag

SEQ ID NO: 2066429 - DNA, 15 bp, Homo sapiens
cgggggcgctctagg

SEQ ID NO: 2066430 - DNA, 15 bp, Homo sapiens
gggggcgctctaggg

SEQ ID NO: 2066431 - DNA, 15 bp, Homo sapiens
ggggcgctctagggt

SEQ ID NO: 2066432 - DNA, 15 bp, Homo sapiens
gggcgctctagggtt

SEQ ID NO: 2066433 - DNA, 15 bp, Homo sapiens
ggcgctctagggttc

SEQ ID NO: 2066434 - DNA, 15 bp, Homo sapiens
gcgctctagggttcg

SEQ ID NO: 2066435 - DNA, 15 bp, Homo sapiens
cgctctagggttcgt

SEQ ID NO: 2066436 - DNA, 15 bp, Homo sapiens
gctctagggttcgtg

SEQ ID NO: 2066437 - DNA, 15 bp, Homo sapiens
ctctagggttcgtgc

SEQ ID NO: 2066438 - DNA, 15 bp, Homo sapiens
tctagggttcgtgct

SEQ ID NO: 2066439 - DNA, 15 bp, Homo sapiens
ctagggttcgtgctg

SEQ ID NO: 2066440 - DNA, 15 bp, Homo sapiens
tagggttcgtgctgc

SEQ ID NO: 2066441 - DNA, 15 bp, Homo sapiens
agggttcgtgctgcg

SEQ ID NO: 2066442 - DNA, 15 bp, Homo sapiens
gggttcgtgctgcgc

SEQ ID NO: 2066443 - DNA, 15 bp, Homo sapiens
ggttcgtgctgcgct

SEQ ID NO: 2066444 - DNA, 15 bp, Homo sapiens
gttcgtgctgcgcta

SEQ ID NO: 2066445 - DNA, 15 bp, Homo sapiens
ttcgtgctgcgctaa

SEQ ID NO: 2066446 - DNA, 15 bp, Homo sapiens
tcgtgctgcgctaag

SEQ ID NO: 2066447 - DNA, 15 bp, Homo sapiens
cgtgctgcgctaagg

SEQ ID NO: 2066448 - DNA, 15 bp, Homo sapiens
gtgctgcgctaaggt

SEQ ID NO: 2066449 - DNA, 15 bp, Homo sapiens
tgctgcgctaaggta

SEQ ID NO: 2066450 - DNA, 15 bp, Homo sapiens
gctgcgctaaggtaa

SEQ ID NO: 2066451 - DNA, 15 bp, Homo sapiens
ctgcgctaaggtaag

SEQ ID NO: 2066452 - DNA, 15 bp, Homo sapiens
tgcgctaaggtaagt

SEQ ID NO: 2066453 - DNA, 15 bp, Homo sapiens
gcgctaaggtaagtt

SEQ ID NO: 2066454 - DNA, 15 bp, Homo sapiens
cgctaaggtaagttt

SEQ ID NO: 2066455 - DNA, 15 bp, Homo sapiens
gctaaggtaagtttc

SEQ ID NO: 2066456 - DNA, 15 bp, Homo sapiens
ctaaggtaagtttcg

SEQ ID NO: 2066457 - DNA, 15 bp, Homo sapiens
taaggtaagtttcgc

SEQ ID NO: 2066458 - DNA, 15 bp, Homo sapiens
aaggtaagtttcgca

SEQ ID NO: 2066459 - DNA, 15 bp, Homo sapiens
aggtaagtttcgcag

SEQ ID NO: 2066460 - DNA, 15 bp, Homo sapiens
ggtaagtttcgcagc

SEQ ID NO: 2066461 - DNA, 15 bp, Homo sapiens
gtaagtttcgcagct

SEQ ID NO: 2066462 - DNA, 15 bp, Homo sapiens
taagtttcgcagctg

SEQ ID NO: 2066463 - DNA, 15 bp, Homo sapiens
aagtttcgcagctgc

SEQ ID NO: 2066464 - DNA, 15 bp, Homo sapiens
agtttcgcagctgct

SEQ ID NO: 2066465 - DNA, 15 bp, Homo sapiens
gtttcgcagctgctc

SEQ ID NO: 2066466 - DNA, 15 bp, Homo sapiens
tttcgcagctgctcc

SEQ ID NO: 2066467 - DNA, 15 bp, Homo sapiens
ttcgcagctgctcct

SEQ ID NO: 2066468 - DNA, 15 bp, Homo sapiens
tcgcagctgctcctg

SEQ ID NO: 2066469 - DNA, 15 bp, Homo sapiens
cgcagctgctcctga

SEQ ID NO: 2066470 - DNA, 15 bp, Homo sapiens
gcagctgctcctgat

SEQ ID NO: 2066471 - DNA, 15 bp, Homo sapiens
cagctgctcctgata

SEQ ID NO: 2066472 - DNA, 15 bp, Homo sapiens
agctgctcctgataa

SEQ ID NO: 2066473 - DNA, 15 bp, Homo sapiens
gctgctcctgataat

SEQ ID NO: 2066474 - DNA, 15 bp, Homo sapiens
ctgctcctgataatt

SEQ ID NO: 2066475 - DNA, 15 bp, Homo sapiens
tgctcctgataatta

SEQ ID NO: 2066476 - DNA, 15 bp, Homo sapiens
gctcctgataattaa

SEQ ID NO: 2066477 - DNA, 15 bp, Homo sapiens
ctcctgataattaaa

SEQ ID NO: 2066478 - DNA, 15 bp, Homo sapiens
tcctgataattaaag

SEQ ID NO: 2066479 - DNA, 15 bp, Homo sapiens
cctgataattaaagg

SEQ ID NO: 2066480 - DNA, 15 bp, Homo sapiens
ctgataattaaagga

SEQ ID NO: 2066481 - DNA, 15 bp, Homo sapiens
tgataattaaaggac

SEQ ID NO: 2066482 - DNA, 15 bp, Homo sapiens
gataattaaaggaca

SEQ ID NO: 2066483 - DNA, 15 bp, Homo sapiens
ataattaaaggacag

SEQ ID NO: 2066484 - DNA, 15 bp, Homo sapiens
taattaaaggacaga

SEQ ID NO: 2066485 - DNA, 15 bp, Homo sapiens
aattaaaggacagat

SEQ ID NO: 2066486 - DNA, 15 bp, Homo sapiens
attaaaggacagatt

SEQ ID NO: 2066487 - DNA, 15 bp, Homo sapiens
ttaaaggacagattc

SEQ ID NO: 2066488 - DNA, 15 bp, Homo sapiens
taaaggacagattcc

SEQ ID NO: 2066489 - DNA, 15 bp, Homo sapiens
aaaggacagattccc

SEQ ID NO: 2066490 - DNA, 15 bp, Homo sapiens
aaggacagattcccg

SEQ ID NO: 2066491 - DNA, 15 bp, Homo sapiens
aggacagattcccga

SEQ ID NO: 2066492 - DNA, 15 bp, Homo sapiens
ggacagattcccgaa

SEQ ID NO: 2066493 - DNA, 15 bp, Homo sapiens
gacagattcccgaag

SEQ ID NO: 2066494 - DNA, 15 bp, Homo sapiens
acagattcccgaagc

SEQ ID NO: 2066495 - DNA, 15 bp, Homo sapiens
cagattcccgaagca

SEQ ID NO: 2066496 - DNA, 15 bp, Homo sapiens
agattcccgaagcat

SEQ ID NO: 2066497 - DNA, 15 bp, Homo sapiens
gattcccgaagcatc

SEQ ID NO: 2066498 - DNA, 15 bp, Homo sapiens
attcccgaagcatcc

SEQ ID NO: 2066499 - DNA, 15 bp, Homo sapiens
ttcccgaagcatcct

SEQ ID NO: 2066500 - DNA, 15 bp, Homo sapiens
tcccgaagcatcctt

SEQ ID NO: 2066501 - DNA, 15 bp, Homo sapiens
cccgaagcatccttg

SEQ ID NO: 2066502 - DNA, 15 bp, Homo sapiens
ccgaagcatccttgt

SEQ ID NO: 2066503 - DNA, 15 bp, Homo sapiens
cgaagcatccttgtg

SEQ ID NO: 2066504 - DNA, 15 bp, Homo sapiens
gaagcatccttgtgg

SEQ ID NO: 2066505 - DNA, 15 bp, Homo sapiens
aagcatccttgtggc

SEQ ID NO: 2066506 - DNA, 15 bp, Homo sapiens
agcatccttgtggcg

SEQ ID NO: 2066507 - DNA, 15 bp, Homo sapiens
gcatccttgtggcgg

SEQ ID NO: 2066508 - DNA, 15 bp, Homo sapiens
catccttgtggcggc

SEQ ID NO: 2066509 - DNA, 15 bp, Homo sapiens
atccttgtggcggcg

SEQ ID NO: 2066510 - DNA, 15 bp, Homo sapiens
tccttgtggcggcgc

SEQ ID NO: 2066511 - DNA, 15 bp, Homo sapiens
ccttgtggcggcgcg

SEQ ID NO: 2066512 - DNA, 15 bp, Homo sapiens
cttgtggcggcgcgg

SEQ ID NO: 2066513 - DNA, 15 bp, Homo sapiens
ttgtggcggcgcggc

SEQ ID NO: 2066514 - DNA, 15 bp, Homo sapiens
tgtggcggcgcggct

SEQ ID NO: 2066515 - DNA, 15 bp, Homo sapiens
gtggcggcgcggctg

SEQ ID NO: 2066516 - DNA, 15 bp, Homo sapiens
tggcggcgcggctgt

SEQ ID NO: 2066517 - DNA, 15 bp, Homo sapiens
ggcggcgcggctgtt

SEQ ID NO: 2066518 - DNA, 15 bp, Homo sapiens
gcggcgcggctgttt

SEQ ID NO: 2066519 - DNA, 15 bp, Homo sapiens
cggcgcggctgtttt

SEQ ID NO: 2066520 - DNA, 15 bp, Homo sapiens
ggcgcggctgttttc

SEQ ID NO: 2066521 - DNA, 15 bp, Homo sapiens
gcgcggctgttttcg

SEQ ID NO: 2066522 - DNA, 15 bp, Homo sapiens
cgcggctgttttcgc

SEQ ID NO: 2066523 - DNA, 15 bp, Homo sapiens
gcggctgttttcgcc

SEQ ID NO: 2066524 - DNA, 15 bp, Homo sapiens
cggctgttttcgccc

SEQ ID NO: 2066525 - DNA, 15 bp, Homo sapiens
ggctgttttcgcccc

SEQ ID NO: 2066526 - DNA, 15 bp, Homo sapiens
gctgttttcgcccca

SEQ ID NO: 2066527 - DNA, 15 bp, Homo sapiens
ctgttttcgccccag

SEQ ID NO: 2066528 - DNA, 15 bp, Homo sapiens
tgttttcgccccagg

SEQ ID NO: 2066529 - DNA, 15 bp, Homo sapiens
gttttcgccccagga

SEQ ID NO: 2066530 - DNA, 15 bp, Homo sapiens
ttttcgccccaggac

SEQ ID NO: 2066531 - DNA, 15 bp, Homo sapiens
tttcgccccaggacc

SEQ ID NO: 2066532 - DNA, 15 bp, Homo sapiens
ttcgccccaggacct

SEQ ID NO: 2066533 - DNA, 15 bp, Homo sapiens
tcgccccaggacctg

SEQ ID NO: 2066534 - DNA, 15 bp, Homo sapiens
cgccccaggacctgt

SEQ ID NO: 2066535 - DNA, 15 bp, Homo sapiens
gccccaggacctgtg

SEQ ID NO: 2066536 - DNA, 15 bp, Homo sapiens
ccccaggacctgtgc

SEQ ID NO: 2066537 - DNA, 15 bp, Homo sapiens
cccaggacctgtgca

SEQ ID NO: 2066538 - DNA, 15 bp, Homo sapiens
ccaggacctgtgcag

SEQ ID NO: 2066539 - DNA, 15 bp, Homo sapiens
caggacctgtgcagc

SEQ ID NO: 2066540 - DNA, 15 bp, Homo sapiens
aggacctgtgcagcc

SEQ ID NO: 2066541 - DNA, 15 bp, Homo sapiens
ggacctgtgcagcct

SEQ ID NO: 2066542 - DNA, 15 bp, Homo sapiens
gacctgtgcagcctc

SEQ ID NO: 2066543 - DNA, 15 bp, Homo sapiens
acctgtgcagcctca

SEQ ID NO: 2066544 - DNA, 15 bp, Homo sapiens
cctgtgcagcctcat

SEQ ID NO: 2066545 - DNA, 15 bp, Homo sapiens
ctgtgcagcctcatt

SEQ ID NO: 2066546 - DNA, 15 bp, Homo sapiens
tgtgcagcctcattc

SEQ ID NO: 2066547 - DNA, 15 bp, Homo sapiens
gtgcagcctcattca

SEQ ID NO: 2066548 - DNA, 15 bp, Homo sapiens
tgcagcctcattcag

SEQ ID NO: 2066549 - DNA, 15 bp, Homo sapiens
gcagcctcattcagc

SEQ ID NO: 2066550 - DNA, 15 bp, Homo sapiens
cagcctcattcagct

SEQ ID NO: 2066551 - DNA, 15 bp, Homo sapiens
agcctcattcagctt

SEQ ID NO: 2066552 - DNA, 15 bp, Homo sapiens
gcctcattcagcttt

SEQ ID NO: 2066553 - DNA, 15 bp, Homo sapiens
cctcattcagcttta

SEQ ID NO: 2066554 - DNA, 15 bp, Homo sapiens
ctcattcagctttag

SEQ ID NO: 2066555 - DNA, 15 bp, Homo sapiens
tcattcagctttagg

SEQ ID NO: 2066556 - DNA, 15 bp, Homo sapiens
cattcagctttaggt

SEQ ID NO: 2066557 - DNA, 15 bp, Homo sapiens
attcagctttaggta

SEQ ID NO: 2066558 - DNA, 15 bp, Homo sapiens
ttcagctttaggtag

SEQ ID NO: 2066559 - DNA, 15 bp, Homo sapiens
tcagctttaggtagt

SEQ ID NO: 2066560 - DNA, 15 bp, Homo sapiens
cagctttaggtagtc

SEQ ID NO: 2066561 - DNA, 15 bp, Homo sapiens
agctttaggtagtcg

SEQ ID NO: 2066562 - DNA, 15 bp, Homo sapiens
gctttaggtagtcga

SEQ ID NO: 2066563 - DNA, 15 bp, Homo sapiens
ctttaggtagtcgaa

SEQ ID NO: 2066564 - DNA, 15 bp, Homo sapiens
tttaggtagtcgaaa

SEQ ID NO: 2066565 - DNA, 15 bp, Homo sapiens
ttaggtagtcgaaac

SEQ ID NO: 2066566 - DNA, 15 bp, Homo sapiens
taggtagtcgaaacc

SEQ ID NO: 2066567 - DNA, 15 bp, Homo sapiens
aggtagtcgaaacct

SEQ ID NO: 2066568 - DNA, 15 bp, Homo sapiens
ggtagtcgaaaccta

SEQ ID NO: 2066569 - DNA, 15 bp, Homo sapiens
gtagtcgaaacctat

SEQ ID NO: 2066570 - DNA, 15 bp, Homo sapiens
tagtcgaaacctata

SEQ ID NO: 2066571 - DNA, 15 bp, Homo sapiens
agtcgaaacctatag

SEQ ID NO: 2066572 - DNA, 15 bp, Homo sapiens
gtcgaaacctatagc

SEQ ID NO: 2066573 - DNA, 15 bp, Homo sapiens
tcgaaacctatagct

SEQ ID NO: 2066574 - DNA, 15 bp, Homo sapiens
cgaaacctatagctc

SEQ ID NO: 2066575 - DNA, 15 bp, Homo sapiens
gaaacctatagctct

SEQ ID NO: 2066576 - DNA, 15 bp, Homo sapiens
aaacctatagctctt

SEQ ID NO: 2066577 - DNA, 15 bp, Homo sapiens
aacctatagctcttt

SEQ ID NO: 2066578 - DNA, 15 bp, Homo sapiens
acctatagctctttc

SEQ ID NO: 2066579 - DNA, 15 bp, Homo sapiens
cctatagctctttct

SEQ ID NO: 2066580 - DNA, 15 bp, Homo sapiens
ctatagctctttctg

SEQ ID NO: 2066581 - DNA, 15 bp, Homo sapiens
tatagctctttctgc

SEQ ID NO: 2066582 - DNA, 15 bp, Homo sapiens
atagctctttctgcc

SEQ ID NO: 2066583 - DNA, 15 bp, Homo sapiens
tagctctttctgccc

SEQ ID NO: 2066584 - DNA, 15 bp, Homo sapiens
agctctttctgccct

SEQ ID NO: 2066585 - DNA, 15 bp, Homo sapiens
gctctttctgccctc

SEQ ID NO: 2066586 - DNA, 15 bp, Homo sapiens
ctctttctgccctct

SEQ ID NO: 2066587 - DNA, 15 bp, Homo sapiens
tctttctgccctctg

SEQ ID NO: 2066588 - DNA, 15 bp, Homo sapiens
ctttctgccctctgt

SEQ ID NO: 2066589 - DNA, 15 bp, Homo sapiens
tttctgccctctgtt

SEQ ID NO: 2066590 - DNA, 15 bp, Homo sapiens
ttctgccctctgttc

SEQ ID NO: 2066591 - DNA, 15 bp, Homo sapiens
tctgccctctgttcc

SEQ ID NO: 2066592 - DNA, 15 bp, Homo sapiens
ctgccctctgttccc

SEQ ID NO: 2066593 - DNA, 15 bp, Homo sapiens
tgccctctgttcccc

SEQ ID NO: 2066594 - DNA, 15 bp, Homo sapiens
gccctctgttcccca

SEQ ID NO: 2066595 - DNA, 15 bp, Homo sapiens
ccctctgttccccaa

SEQ ID NO: 2066596 - DNA, 15 bp, Homo sapiens
cctctgttccccaac

SEQ ID NO: 2066597 - DNA, 15 bp, Homo sapiens
ctctgttccccaaca

SEQ ID NO: 2066598 - DNA, 15 bp, Homo sapiens
tctgttccccaacaa

SEQ ID NO: 2066599 - DNA, 15 bp, Homo sapiens
ctgttccccaacaaa

SEQ ID NO: 2066600 - DNA, 15 bp, Homo sapiens
tgttccccaacaaat

SEQ ID NO: 2066601 - DNA, 15 bp, Homo sapiens
gttccccaacaaatc

SEQ ID NO: 2066602 - DNA, 15 bp, Homo sapiens
ttccccaacaaatct

SEQ ID NO: 2066603 - DNA, 15 bp, Homo sapiens
tccccaacaaatctc

SEQ ID NO: 2066604 - DNA, 15 bp, Homo sapiens
ccccaacaaatctca

SEQ ID NO: 2066605 - DNA, 15 bp, Homo sapiens
cccaacaaatctcag

SEQ ID NO: 2066606 - DNA, 15 bp, Homo sapiens
ccaacaaatctcagt

SEQ ID NO: 2066607 - DNA, 15 bp, Homo sapiens
caacaaatctcagtc

SEQ ID NO: 2066608 - DNA, 15 bp, Homo sapiens
aacaaatctcagtcc

SEQ ID NO: 2066609 - DNA, 15 bp, Homo sapiens
acaaatctcagtccc

SEQ ID NO: 2066610 - DNA, 15 bp, Homo sapiens
caaatctcagtccca

SEQ ID NO: 2066611 - DNA, 15 bp, Homo sapiens
aaatctcagtcccaa

SEQ ID NO: 2066612 - DNA, 15 bp, Homo sapiens
aatctcagtcccaac

SEQ ID NO: 2066613 - DNA, 15 bp, Homo sapiens
atctcagtcccaaca

SEQ ID NO: 2066614 - DNA, 15 bp, Homo sapiens
tctcagtcccaacag

SEQ ID NO: 2066615 - DNA, 15 bp, Homo sapiens
ctcagtcccaacagt

SEQ ID NO: 2066616 - DNA, 15 bp, Homo sapiens
tcagtcccaacagtg

SEQ ID NO: 2066617 - DNA, 15 bp, Homo sapiens
cagtcccaacagtgg

SEQ ID NO: 2066618 - DNA, 15 bp, Homo sapiens
agtcccaacagtggg

SEQ ID NO: 2066619 - DNA, 15 bp, Homo sapiens
gtcccaacagtggga

SEQ ID NO: 2066620 - DNA, 15 bp, Homo sapiens
tcccaacagtgggag

SEQ ID NO: 2066621 - DNA, 15 bp, Homo sapiens
cccaacagtgggagc

SEQ ID NO: 2066622 - DNA, 15 bp, Homo sapiens
ccaacagtgggagcc

SEQ ID NO: 2066623 - DNA, 15 bp, Homo sapiens
caacagtgggagccc

SEQ ID NO: 2066624 - DNA, 15 bp, Homo sapiens
aacagtgggagcccg

SEQ ID NO: 2066625 - DNA, 15 bp, Homo sapiens
acagtgggagcccgt

SEQ ID NO: 2066626 - DNA, 15 bp, Homo sapiens
cagtgggagcccgtg

SEQ ID NO: 2066627 - DNA, 15 bp, Homo sapiens
agtgggagcccgtgg

SEQ ID NO: 2066628 - DNA, 15 bp, Homo sapiens
gtgggagcccgtggg

SEQ ID NO: 2066629 - DNA, 15 bp, Homo sapiens
tgggagcccgtgggc

SEQ ID NO: 2066630 - DNA, 15 bp, Homo sapiens
gggagcccgtgggcc

SEQ ID NO: 2066631 - DNA, 15 bp, Homo sapiens
ggagcccgtgggcct

SEQ ID NO: 2066632 - DNA, 15 bp, Homo sapiens
gagcccgtgggcctt

SEQ ID NO: 2066633 - DNA, 15 bp, Homo sapiens
agcccgtgggccttg

SEQ ID NO: 2066634 - DNA, 15 bp, Homo sapiens
gcccgtgggccttgg

SEQ ID NO: 2066635 - DNA, 15 bp, Homo sapiens
cccgtgggccttggg

SEQ ID NO: 2066636 - DNA, 15 bp, Homo sapiens
ccgtgggccttgggt

SEQ ID NO: 2066637 - DNA, 15 bp, Homo sapiens
cgtgggccttgggtg

SEQ ID NO: 2066638 - DNA, 15 bp, Homo sapiens
gtgggccttgggtgt

SEQ ID NO: 2066639 - DNA, 15 bp, Homo sapiens
tgggccttgggtgtt

SEQ ID NO: 2066640 - DNA, 15 bp, Homo sapiens
gggccttgggtgttc

SEQ ID NO: 2066641 - DNA, 15 bp, Homo sapiens
ggccttgggtgttcg

SEQ ID NO: 2066642 - DNA, 15 bp, Homo sapiens
gccttgggtgttcga

SEQ ID NO: 2066643 - DNA, 15 bp, Homo sapiens
ccttgggtgttcgag

SEQ ID NO: 2066644 - DNA, 15 bp, Homo sapiens
cttgggtgttcgagt

SEQ ID NO: 2066645 - DNA, 15 bp, Homo sapiens
ttgggtgttcgagtt

SEQ ID NO: 2066646 - DNA, 15 bp, Homo sapiens
tgggtgttcgagttt

SEQ ID NO: 2066647 - DNA, 15 bp, Homo sapiens
gggtgttcgagtttc

SEQ ID NO: 2066648 - DNA, 15 bp, Homo sapiens
ggtgttcgagtttcc

SEQ ID NO: 2066649 - DNA, 15 bp, Homo sapiens
gtgttcgagtttccc

SEQ ID NO: 2066650 - DNA, 15 bp, Homo sapiens
tgttcgagtttcccg

SEQ ID NO: 2066651 - DNA, 15 bp, Homo sapiens
gttcgagtttcccgc

SEQ ID NO: 2066652 - DNA, 15 bp, Homo sapiens
ttcgagtttcccgcg

SEQ ID NO: 2066653 - DNA, 15 bp, Homo sapiens
tcgagtttcccgcgg

SEQ ID NO: 2066654 - DNA, 15 bp, Homo sapiens
cgagtttcccgcggg

SEQ ID NO: 2066655 - DNA, 15 bp, Homo sapiens
gagtttcccgcgggc

SEQ ID NO: 2066656 - DNA, 15 bp, Homo sapiens
agtttcccgcgggct

SEQ ID NO: 2066657 - DNA, 15 bp, Homo sapiens
gtttcccgcgggctt

SEQ ID NO: 2066658 - DNA, 15 bp, Homo sapiens
tttcccgcgggcttg

SEQ ID NO: 2066659 - DNA, 15 bp, Homo sapiens
ttcccgcgggcttgc

SEQ ID NO: 2066660 - DNA, 15 bp, Homo sapiens
tcccgcgggcttgcc

SEQ ID NO: 2066661 - DNA, 15 bp, Homo sapiens
cccgcgggcttgcca

SEQ ID NO: 2066662 - DNA, 15 bp, Homo sapiens
ccgcgggcttgccag

SEQ ID NO: 2066663 - DNA, 15 bp, Homo sapiens
cgcgggcttgccagc

SEQ ID NO: 2066664 - DNA, 15 bp, Homo sapiens
gcgggcttgccagca

SEQ ID NO: 2066665 - DNA, 15 bp, Homo sapiens
cgggcttgccagcag

SEQ ID NO: 2066666 - DNA, 15 bp, Homo sapiens
gggcttgccagcagc

SEQ ID NO: 2066667 - DNA, 15 bp, Homo sapiens
ggcttgccagcagcg

SEQ ID NO: 2066668 - DNA, 15 bp, Homo sapiens
gcttgccagcagcgc

SEQ ID NO: 2066669 - DNA, 15 bp, Homo sapiens
cttgccagcagcgct

SEQ ID NO: 2066670 - DNA, 15 bp, Homo sapiens
ttgccagcagcgctg

SEQ ID NO: 2066671 - DNA, 15 bp, Homo sapiens
tgccagcagcgctgg

SEQ ID NO: 2066672 - DNA, 15 bp, Homo sapiens
gccagcagcgctggg

SEQ ID NO: 2066673 - DNA, 15 bp, Homo sapiens
ccagcagcgctgggg

SEQ ID NO: 2066674 - DNA, 15 bp, Homo sapiens
cagcagcgctggggt

SEQ ID NO: 2066675 - DNA, 15 bp, Homo sapiens
agcagcgctggggtt

SEQ ID NO: 2066676 - DNA, 15 bp, Homo sapiens
gcagcgctggggttc

SEQ ID NO: 2066677 - DNA, 15 bp, Homo sapiens
cagcgctggggttcc

SEQ ID NO: 2066678 - DNA, 15 bp, Homo sapiens
agcgctggggttccc

SEQ ID NO: 2066679 - DNA, 15 bp, Homo sapiens
gcgctggggttccct

SEQ ID NO: 2066680 - DNA, 15 bp, Homo sapiens
cgctggggttccctc

SEQ ID NO: 2066681 - DNA, 15 bp, Homo sapiens
gctggggttccctcc

SEQ ID NO: 2066682 - DNA, 15 bp, Homo sapiens
ctggggttccctcct

SEQ ID NO: 2066683 - DNA, 15 bp, Homo sapiens
tggggttccctcctc

SEQ ID NO: 2066684 - DNA, 15 bp, Homo sapiens
ggggttccctcctcc

SEQ ID NO: 2066685 - DNA, 15 bp, Homo sapiens
gggttccctcctccg

SEQ ID NO: 2066686 - DNA, 15 bp, Homo sapiens
ggttccctcctccgc

SEQ ID NO: 2066687 - DNA, 15 bp, Homo sapiens
gttccctcctccgct

SEQ ID NO: 2066688 - DNA, 15 bp, Homo sapiens
ttccctcctccgctc

SEQ ID NO: 2066689 - DNA, 15 bp, Homo sapiens
tccctcctccgctcc

SEQ ID NO: 2066690 - DNA, 15 bp, Homo sapiens
ccctcctccgctcct

SEQ ID NO: 2066691 - DNA, 15 bp, Homo sapiens
cctcctccgctcctt

SEQ ID NO: 2066692 - DNA, 15 bp, Homo sapiens
ctcctccgctccttt

SEQ ID NO: 2066693 - DNA, 15 bp, Homo sapiens
tcctccgctcctttc

SEQ ID NO: 2066694 - DNA, 15 bp, Homo sapiens
cctccgctcctttcc

SEQ ID NO: 2066695 - DNA, 15 bp, Homo sapiens
ctccgctcctttcct

SEQ ID NO: 2066696 - DNA, 15 bp, Homo sapiens
tccgctcctttcctc

SEQ ID NO: 2066697 - DNA, 15 bp, Homo sapiens
ccgctcctttcctcc

SEQ ID NO: 2066698 - DNA, 15 bp, Homo sapiens
cgctcctttcctcct

SEQ ID NO: 2066699 - DNA, 15 bp, Homo sapiens
gctcctttcctcctc

SEQ ID NO: 2066700 - DNA, 15 bp, Homo sapiens
ctcctttcctcctct

SEQ ID NO: 2066701 - DNA, 15 bp, Homo sapiens
tcctttcctcctctc

SEQ ID NO: 2066702 - DNA, 15 bp, Homo sapiens
cctttcctcctctcc

SEQ ID NO: 2066703 - DNA, 15 bp, Homo sapiens
ctttcctcctctcca

SEQ ID NO: 2066704 - DNA, 15 bp, Homo sapiens
tttcctcctctccaa

SEQ ID NO: 2066705 - DNA, 15 bp, Homo sapiens
ttcctcctctccaac

SEQ ID NO: 2066706 - DNA, 15 bp, Homo sapiens
tcctcctctccaacc

SEQ ID NO: 2066707 - DNA, 15 bp, Homo sapiens
cctcctctccaacct

SEQ ID NO: 2066708 - DNA, 15 bp, Homo sapiens
ctcctctccaacctc

SEQ ID NO: 2066709 - DNA, 15 bp, Homo sapiens
tcctctccaacctcc

SEQ ID NO: 2066710 - DNA, 15 bp, Homo sapiens
cctctccaacctccc

SEQ ID NO: 2066711 - DNA, 15 bp, Homo sapiens
ctctccaacctccca

SEQ ID NO: 2066712 - DNA, 15 bp, Homo sapiens
tctccaacctcccac

SEQ ID NO: 2066713 - DNA, 15 bp, Homo sapiens
ctccaacctcccacc

SEQ ID NO: 2066714 - DNA, 15 bp, Homo sapiens
tccaacctcccacca

SEQ ID NO: 2066715 - DNA, 15 bp, Homo sapiens
ccaacctcccaccac

SEQ ID NO: 2066716 - DNA, 15 bp, Homo sapiens
caacctcccaccaca

SEQ ID NO: 2066717 - DNA, 15 bp, Homo sapiens
aacctcccaccacag

SEQ ID NO: 2066718 - DNA, 15 bp, Homo sapiens
acctcccaccacagc

SEQ ID NO: 2066719 - DNA, 15 bp, Homo sapiens
ctcccaccacagccc

SEQ ID NO: 2066720 - DNA, 15 bp, Homo sapiens
tcccaccacagcccg

SEQ ID NO: 2066721 - DNA, 15 bp, Homo sapiens
cccaccacagcccgt

SEQ ID NO: 2066722 - DNA, 15 bp, Homo sapiens
ccaccacagcccgtc

SEQ ID NO: 2066723 - DNA, 15 bp, Homo sapiens
caccacagcccgtct

SEQ ID NO: 2066724 - DNA, 15 bp, Homo sapiens
accacagcccgtctc

SEQ ID NO: 2066725 - DNA, 15 bp, Homo sapiens
ccacagcccgtctcc

SEQ ID NO: 2066726 - DNA, 15 bp, Homo sapiens
cacagcccgtctccc

SEQ ID NO: 2066727 - DNA, 15 bp, Homo sapiens
acagcccgtctcccc

SEQ ID NO: 2066728 - DNA, 15 bp, Homo sapiens
cagcccgtctccccc

SEQ ID NO: 2066729 - DNA, 15 bp, Homo sapiens
agcccgtctccccca

SEQ ID NO: 2066730 - DNA, 15 bp, Homo sapiens
gcccgtctcccccac

SEQ ID NO: 2066731 - DNA, 15 bp, Homo sapiens
cccgtctcccccaca

SEQ ID NO: 2066732 - DNA, 15 bp, Homo sapiens
ccgtctcccccacat

SEQ ID NO: 2066733 - DNA, 15 bp, Homo sapiens
cgtctcccccacatc

SEQ ID NO: 2066734 - DNA, 15 bp, Homo sapiens
gtctcccccacatcc

SEQ ID NO: 2066735 - DNA, 15 bp, Homo sapiens
tctcccccacatccc

SEQ ID NO: 2066736 - DNA, 15 bp, Homo sapiens
ctcccccacatcccc

SEQ ID NO: 2066737 - DNA, 15 bp, Homo sapiens
tcccccacatcccca

SEQ ID NO: 2066738 - DNA, 15 bp, Homo sapiens
cccccacatccccaa

SEQ ID NO: 2066739 - DNA, 15 bp, Homo sapiens
ccccacatccccaac

SEQ ID NO: 2066740 - DNA, 15 bp, Homo sapiens
cccacatccccaaca

SEQ ID NO: 2066741 - DNA, 15 bp, Homo sapiens
ccacatccccaacac

SEQ ID NO: 2066742 - DNA, 15 bp, Homo sapiens
cacatccccaacact

SEQ ID NO: 2066743 - DNA, 15 bp, Homo sapiens
acatccccaacactt

SEQ ID NO: 2066744 - DNA, 15 bp, Homo sapiens
catccccaacacttg

SEQ ID NO: 2066745 - DNA, 15 bp, Homo sapiens
atccccaacacttgt

SEQ ID NO: 2066746 - DNA, 15 bp, Homo sapiens
tccccaacacttgtc

SEQ ID NO: 2066747 - DNA, 15 bp, Homo sapiens
ccccaacacttgtcc

SEQ ID NO: 2066748 - DNA, 15 bp, Homo sapiens
cccaacacttgtccc

SEQ ID NO: 2066749 - DNA, 15 bp, Homo sapiens
ccaacacttgtccca

SEQ ID NO: 2066750 - DNA, 15 bp, Homo sapiens
caacacttgtcccag

SEQ ID NO: 2066751 - DNA, 15 bp, Homo sapiens
aacacttgtcccagg

SEQ ID NO: 2066752 - DNA, 15 bp, Homo sapiens
acacttgtcccaggc

SEQ ID NO: 2066753 - DNA, 15 bp, Homo sapiens
cacttgtcccaggca

SEQ ID NO: 2066754 - DNA, 15 bp, Homo sapiens
acttgtcccaggcag

SEQ ID NO: 2066755 - DNA, 15 bp, Homo sapiens
cttgtcccaggcagt

SEQ ID NO: 2066756 - DNA, 15 bp, Homo sapiens
ttgtcccaggcagtt

SEQ ID NO: 2066757 - DNA, 15 bp, Homo sapiens
tgtcccaggcagttt

SEQ ID NO: 2066758 - DNA, 15 bp, Homo sapiens
gtcccaggcagtttc

SEQ ID NO: 2066759 - DNA, 15 bp, Homo sapiens
tcccaggcagtttcc

SEQ ID NO: 2066760 - DNA, 15 bp, Homo sapiens
cccaggcagtttccg

SEQ ID NO: 2066761 - DNA, 15 bp, Homo sapiens
ccaggcagtttccgg

SEQ ID NO: 2066762 - DNA, 15 bp, Homo sapiens
caggcagtttccggt

SEQ ID NO: 2066763 - DNA, 15 bp, Homo sapiens
aggcagtttccggtg

SEQ ID NO: 2066764 - DNA, 15 bp, Homo sapiens
ggcagtttccggtgg

SEQ ID NO: 2066765 - DNA, 15 bp, Homo sapiens
gcagtttccggtggc

SEQ ID NO: 2066766 - DNA, 15 bp, Homo sapiens
cagtttccggtggcc

SEQ ID NO: 2066767 - DNA, 15 bp, Homo sapiens
agtttccggtggccg

SEQ ID NO: 2066768 - DNA, 15 bp, Homo sapiens
gtttccggtggccgc

SEQ ID NO: 2066769 - DNA, 15 bp, Homo sapiens
tttccggtggccgca

SEQ ID NO: 2066770 - DNA, 15 bp, Homo sapiens
ttccggtggccgcag

SEQ ID NO: 2066771 - DNA, 15 bp, Homo sapiens
tccggtggccgcagt

SEQ ID NO: 2066772 - DNA, 15 bp, Homo sapiens
ccggtggccgcagta

SEQ ID NO: 2066773 - DNA, 15 bp, Homo sapiens
cggtggccgcagtat

SEQ ID NO: 2066774 - DNA, 15 bp, Homo sapiens
ggtggccgcagtatc

SEQ ID NO: 2066775 - DNA, 15 bp, Homo sapiens
gtggccgcagtatcg

SEQ ID NO: 2066776 - DNA, 15 bp, Homo sapiens
tggccgcagtatcga

SEQ ID NO: 2066777 - DNA, 15 bp, Homo sapiens
ggccgcagtatcgac

SEQ ID NO: 2066778 - DNA, 15 bp, Homo sapiens
gccgcagtatcgacc

SEQ ID NO: 2066779 - DNA, 15 bp, Homo sapiens
ccgcagtatcgaccc

SEQ ID NO: 2066780 - DNA, 15 bp, Homo sapiens
cgcagtatcgacccc

SEQ ID NO: 2066781 - DNA, 15 bp, Homo sapiens
gcagtatcgacccca

SEQ ID NO: 2066782 - DNA, 15 bp, Homo sapiens
cagtatcgaccccag

SEQ ID NO: 2066783 - DNA, 15 bp, Homo sapiens
agtatcgaccccagg

SEQ ID NO: 2066784 - DNA, 15 bp, Homo sapiens
gtatcgaccccaggc

SEQ ID NO: 2066785 - DNA, 15 bp, Homo sapiens
tatcgaccccaggcc

SEQ ID NO: 2066786 - DNA, 15 bp, Homo sapiens
atcgaccccaggcca

SEQ ID NO: 2066787 - DNA, 15 bp, Homo sapiens
tcgaccccaggccat

SEQ ID NO: 2066788 - DNA, 15 bp, Homo sapiens
cgaccccaggccatt

SEQ ID NO: 2066789 - DNA, 15 bp, Homo sapiens
gaccccaggccattg

SEQ ID NO: 2066790 - DNA, 15 bp, Homo sapiens
accccaggccattgg

SEQ ID NO: 2066791 - DNA, 15 bp, Homo sapiens
ccccaggccattggg

SEQ ID NO: 2066792 - DNA, 15 bp, Homo sapiens
cccaggccattgggg

SEQ ID NO: 2066793 - DNA, 15 bp, Homo sapiens
ccaggccattggggt

SEQ ID NO: 2066794 - DNA, 15 bp, Homo sapiens
caggccattggggtg

SEQ ID NO: 2066795 - DNA, 15 bp, Homo sapiens
aggccattggggtgg

SEQ ID NO: 2066796 - DNA, 15 bp, Homo sapiens
ggccattggggtggg

SEQ ID NO: 2066797 - DNA, 15 bp, Homo sapiens
gccattggggtgggt

SEQ ID NO: 2066798 - DNA, 15 bp, Homo sapiens
ccattggggtgggtg

SEQ ID NO: 2066799 - DNA, 15 bp, Homo sapiens
cattggggtgggtgt

SEQ ID NO: 2066800 - DNA, 15 bp, Homo sapiens
attggggtgggtgtg

SEQ ID NO: 2066801 - DNA, 15 bp, Homo sapiens
ttggggtgggtgtga

SEQ ID NO: 2066802 - DNA, 15 bp, Homo sapiens
tggggtgggtgtgag

SEQ ID NO: 2066803 - DNA, 15 bp, Homo sapiens
ggggtgggtgtgagg

SEQ ID NO: 2066804 - DNA, 15 bp, Homo sapiens
gggtgggtgtgaggg

SEQ ID NO: 2066805 - DNA, 15 bp, Homo sapiens
ggtgggtgtgaggga

SEQ ID NO: 2066806 - DNA, 15 bp, Homo sapiens
gtgggtgtgagggaa

SEQ ID NO: 2066807 - DNA, 15 bp, Homo sapiens
tgggtgtgagggaag

SEQ ID NO: 2066808 - DNA, 15 bp, Homo sapiens
gggtgtgagggaagg

SEQ ID NO: 2066809 - DNA, 15 bp, Homo sapiens
ggtgtgagggaaggg

SEQ ID NO: 2066810 - DNA, 15 bp, Homo sapiens
gtgtgagggaagggt

SEQ ID NO: 2066811 - DNA, 15 bp, Homo sapiens
tgtgagggaagggtg

SEQ ID NO: 2066812 - DNA, 15 bp, Homo sapiens
gtgagggaagggtgg

SEQ ID NO: 2066813 - DNA, 15 bp, Homo sapiens
tgagggaagggtgga

SEQ ID NO: 2066814 - DNA, 15 bp, Homo sapiens
gagggaagggtggag

SEQ ID NO: 2066815 - DNA, 15 bp, Homo sapiens
agggaagggtggagg

SEQ ID NO: 2066816 - DNA, 15 bp, Homo sapiens
gggaagggtggaggg

SEQ ID NO: 2066817 - DNA, 15 bp, Homo sapiens
ggaagggtggagggg

SEQ ID NO: 2066818 - DNA, 15 bp, Homo sapiens
gaagggtggaggggg

SEQ ID NO: 2066819 - DNA, 15 bp, Homo sapiens
aagggtggaggggga

SEQ ID NO: 2066820 - DNA, 15 bp, Homo sapiens
agggtggagggggaa

SEQ ID NO: 2066821 - DNA, 15 bp, Homo sapiens
gggtggagggggaat

SEQ ID NO: 2066822 - DNA, 15 bp, Homo sapiens
ggtggagggggaatc

SEQ ID NO: 2066823 - DNA, 15 bp, Homo sapiens
gtggagggggaatct

SEQ ID NO: 2066824 - DNA, 15 bp, Homo sapiens
tggagggggaatctc

SEQ ID NO: 2066825 - DNA, 15 bp, Homo sapiens
ggagggggaatctcc

SEQ ID NO: 2066826 - DNA, 15 bp, Homo sapiens
gagggggaatctccg

SEQ ID NO: 2066827 - DNA, 15 bp, Homo sapiens
agggggaatctccga

SEQ ID NO: 2066828 - DNA, 15 bp, Homo sapiens
gggggaatctccgag

SEQ ID NO: 2066829 - DNA, 15 bp, Homo sapiens
ggggaatctccgagg

SEQ ID NO: 2066830 - DNA, 15 bp, Homo sapiens
gggaatctccgaggc

SEQ ID NO: 2066831 - DNA, 15 bp, Homo sapiens
ggaatctccgaggcc

SEQ ID NO: 2066832 - DNA, 15 bp, Homo sapiens
gaatctccgaggccc

SEQ ID NO: 2066833 - DNA, 15 bp, Homo sapiens
aatctccgaggccca

SEQ ID NO: 2066834 - DNA, 15 bp, Homo sapiens
atctccgaggcccaa

SEQ ID NO: 2066835 - DNA, 15 bp, Homo sapiens
tctccgaggcccaat

SEQ ID NO: 2066836 - DNA, 15 bp, Homo sapiens
ctccgaggcccaatg

SEQ ID NO: 2066837 - DNA, 15 bp, Homo sapiens
tccgaggcccaatgt

SEQ ID NO: 2066838 - DNA, 15 bp, Homo sapiens
ccgaggcccaatgtt

SEQ ID NO: 2066839 - DNA, 15 bp, Homo sapiens
cgaggcccaatgttt

SEQ ID NO: 2066840 - DNA, 15 bp, Homo sapiens
gaggcccaatgtttt

SEQ ID NO: 2066841 - DNA, 15 bp, Homo sapiens
aggcccaatgttttc

SEQ ID NO: 2066842 - DNA, 15 bp, Homo sapiens
ggcccaatgttttct

SEQ ID NO: 2066843 - DNA, 15 bp, Homo sapiens
gcccaatgttttctg

SEQ ID NO: 2066844 - DNA, 15 bp, Homo sapiens
cccaatgttttctgg

SEQ ID NO: 2066845 - DNA, 15 bp, Homo sapiens
ccaatgttttctggg

SEQ ID NO: 2066846 - DNA, 15 bp, Homo sapiens
caatgttttctggga

SEQ ID NO: 2066847 - DNA, 15 bp, Homo sapiens
aatgttttctgggac

SEQ ID NO: 2066848 - DNA, 15 bp, Homo sapiens
atgttttctgggact

SEQ ID NO: 2066849 - DNA, 15 bp, Homo sapiens
tgttttctgggactt

SEQ ID NO: 2066850 - DNA, 15 bp, Homo sapiens
gttttctgggacttg

SEQ ID NO: 2066851 - DNA, 15 bp, Homo sapiens
ttttctgggacttga

SEQ ID NO: 2066852 - DNA, 15 bp, Homo sapiens
tttctgggacttgag

SEQ ID NO: 2066853 - DNA, 15 bp, Homo sapiens
ttctgggacttgagg

SEQ ID NO: 2066854 - DNA, 15 bp, Homo sapiens
tctgggacttgaggg

SEQ ID NO: 2066855 - DNA, 15 bp, Homo sapiens
ctgggacttgaggga

SEQ ID NO: 2066856 - DNA, 15 bp, Homo sapiens
tgggacttgagggag

SEQ ID NO: 2066857 - DNA, 15 bp, Homo sapiens
gggacttgagggagg

SEQ ID NO: 2066858 - DNA, 15 bp, Homo sapiens
ggacttgagggaggc

SEQ ID NO: 2066859 - DNA, 15 bp, Homo sapiens
gacttgagggaggct

SEQ ID NO: 2066860 - DNA, 15 bp, Homo sapiens
acttgagggaggctg

SEQ ID NO: 2066861 - DNA, 15 bp, Homo sapiens
cttgagggaggctga

SEQ ID NO: 2066862 - DNA, 15 bp, Homo sapiens
ttgagggaggctgaa

SEQ ID NO: 2066863 - DNA, 15 bp, Homo sapiens
tgagggaggctgaat

SEQ ID NO: 2066864 - DNA, 15 bp, Homo sapiens
gagggaggctgaatt

SEQ ID NO: 2066865 - DNA, 15 bp, Homo sapiens
agggaggctgaattc

SEQ ID NO: 2066866 - DNA, 15 bp, Homo sapiens
gggaggctgaattct

SEQ ID NO: 2066867 - DNA, 15 bp, Homo sapiens
ggaggctgaattctc

SEQ ID NO: 2066868 - DNA, 15 bp, Homo sapiens
gaggctgaattctcc

SEQ ID NO: 2066869 - DNA, 15 bp, Homo sapiens
aggctgaattctccc

SEQ ID NO: 2066870 - DNA, 15 bp, Homo sapiens
ggctgaattctccct

SEQ ID NO: 2066871 - DNA, 15 bp, Homo sapiens
gctgaattctccctc

SEQ ID NO: 2066872 - DNA, 15 bp, Homo sapiens
ctgaattctccctcg

SEQ ID NO: 2066873 - DNA, 15 bp, Homo sapiens
tgaattctccctcgc

SEQ ID NO: 2066874 - DNA, 15 bp, Homo sapiens
gaattctccctcgct

SEQ ID NO: 2066875 - DNA, 15 bp, Homo sapiens
aattctccctcgctg

SEQ ID NO: 2066876 - DNA, 15 bp, Homo sapiens
attctccctcgctgc

SEQ ID NO: 2066877 - DNA, 15 bp, Homo sapiens
ttctccctcgctgcc

SEQ ID NO: 2066878 - DNA, 15 bp, Homo sapiens
tctccctcgctgcct

SEQ ID NO: 2066879 - DNA, 15 bp, Homo sapiens
ctccctcgctgccta

SEQ ID NO: 2066880 - DNA, 15 bp, Homo sapiens
tccctcgctgcctag

SEQ ID NO: 2066881 - DNA, 15 bp, Homo sapiens
ccctcgctgcctagg

SEQ ID NO: 2066882 - DNA, 15 bp, Homo sapiens
cctcgctgcctagga

SEQ ID NO: 2066883 - DNA, 15 bp, Homo sapiens
ctcgctgcctaggac

SEQ ID NO: 2066884 - DNA, 15 bp, Homo sapiens
tcgctgcctaggact

SEQ ID NO: 2066885 - DNA, 15 bp, Homo sapiens
cgctgcctaggactt

SEQ ID NO: 2066886 - DNA, 15 bp, Homo sapiens
gctgcctaggacttg

SEQ ID NO: 2066887 - DNA, 15 bp, Homo sapiens
ctgcctaggacttgg

SEQ ID NO: 2066888 - DNA, 15 bp, Homo sapiens
tgcctaggacttggg

SEQ ID NO: 2066889 - DNA, 15 bp, Homo sapiens
gcctaggacttgggg

SEQ ID NO: 2066890 - DNA, 15 bp, Homo sapiens
cctaggacttggggt

SEQ ID NO: 2066891 - DNA, 15 bp, Homo sapiens
ctaggacttggggtc

SEQ ID NO: 2066892 - DNA, 15 bp, Homo sapiens
taggacttggggtct

SEQ ID NO: 2066893 - DNA, 15 bp, Homo sapiens
aggacttggggtctg

SEQ ID NO: 2066894 - DNA, 15 bp, Homo sapiens
ggacttggggtctga

SEQ ID NO: 2066895 - DNA, 15 bp, Homo sapiens
gacttggggtctgaa

SEQ ID NO: 2066896 - DNA, 15 bp, Homo sapiens
acttggggtctgaag

SEQ ID NO: 2066897 - DNA, 15 bp, Homo sapiens
cttggggtctgaagg

SEQ ID NO: 2066898 - DNA, 15 bp, Homo sapiens
ttggggtctgaaggt

SEQ ID NO: 2066899 - DNA, 15 bp, Homo sapiens
tggggtctgaaggtt

SEQ ID NO: 2066900 - DNA, 15 bp, Homo sapiens
ggggtctgaaggttg

SEQ ID NO: 2066901 - DNA, 15 bp, Homo sapiens
gggtctgaaggttgc

SEQ ID NO: 2066902 - DNA, 15 bp, Homo sapiens
ggtctgaaggttgca

SEQ ID NO: 2066903 - DNA, 15 bp, Homo sapiens
gtctgaaggttgcag

SEQ ID NO: 2066904 - DNA, 15 bp, Homo sapiens
tctgaaggttgcaga

SEQ ID NO: 2066905 - DNA, 15 bp, Homo sapiens
ctgaaggttgcagac

SEQ ID NO: 2066906 - DNA, 15 bp, Homo sapiens
tgaaggttgcagacc

SEQ ID NO: 2066907 - DNA, 15 bp, Homo sapiens
gaaggttgcagaccg

SEQ ID NO: 2066908 - DNA, 15 bp, Homo sapiens
aaggttgcagaccga

SEQ ID NO: 2066909 - DNA, 15 bp, Homo sapiens
aggttgcagaccgag

SEQ ID NO: 2066910 - DNA, 15 bp, Homo sapiens
ggttgcagaccgagg

SEQ ID NO: 2066911 - DNA, 15 bp, Homo sapiens
gttgcagaccgaggc

SEQ ID NO: 2066912 - DNA, 15 bp, Homo sapiens
ttgcagaccgaggcg

SEQ ID NO: 2066913 - DNA, 15 bp, Homo sapiens
tgcagaccgaggcga

SEQ ID NO: 2066914 - DNA, 15 bp, Homo sapiens
gcagaccgaggcgat

SEQ ID NO: 2066915 - DNA, 15 bp, Homo sapiens
cagaccgaggcgatc

SEQ ID NO: 2066916 - DNA, 15 bp, Homo sapiens
agaccgaggcgatcc

SEQ ID NO: 2066917 - DNA, 15 bp, Homo sapiens
gaccgaggcgatccg

SEQ ID NO: 2066918 - DNA, 15 bp, Homo sapiens
accgaggcgatccgc

SEQ ID NO: 2066919 - DNA, 15 bp, Homo sapiens
ccgaggcgatccgca

SEQ ID NO: 2066920 - DNA, 15 bp, Homo sapiens
cgaggcgatccgcag

SEQ ID NO: 2066921 - DNA, 15 bp, Homo sapiens
gaggcgatccgcagc

SEQ ID NO: 2066922 - DNA, 15 bp, Homo sapiens
aggcgatccgcagcg

SEQ ID NO: 2066923 - DNA, 15 bp, Homo sapiens
ggcgatccgcagcgc

SEQ ID NO: 2066924 - DNA, 15 bp, Homo sapiens
gcgatccgcagcgcc

SEQ ID NO: 2066925 - DNA, 15 bp, Homo sapiens
cgatccgcagcgccc

SEQ ID NO: 2066926 - DNA, 15 bp, Homo sapiens
gatccgcagcgccct

SEQ ID NO: 2066927 - DNA, 15 bp, Homo sapiens
atccgcagcgccctc

SEQ ID NO: 2066928 - DNA, 15 bp, Homo sapiens
tccgcagcgccctct

SEQ ID NO: 2066929 - DNA, 15 bp, Homo sapiens
ccgcagcgccctctt

SEQ ID NO: 2066930 - DNA, 15 bp, Homo sapiens
cgcagcgccctcttc

SEQ ID NO: 2066931 - DNA, 15 bp, Homo sapiens
gcagcgccctcttcc

SEQ ID NO: 2066932 - DNA, 15 bp, Homo sapiens
cagcgccctcttccg

SEQ ID NO: 2066933 - DNA, 15 bp, Homo sapiens
agcgccctcttccgg

SEQ ID NO: 2066934 - DNA, 15 bp, Homo sapiens
gcgccctcttccggc

SEQ ID NO: 2066935 - DNA, 15 bp, Homo sapiens
cgccctcttccggcg

SEQ ID NO: 2066936 - DNA, 15 bp, Homo sapiens
gccctcttccggcgg

SEQ ID NO: 2066937 - DNA, 15 bp, Homo sapiens
ccctcttccggcggc

SEQ ID NO: 2066938 - DNA, 15 bp, Homo sapiens
cctcttccggcggcc

SEQ ID NO: 2066939 - DNA, 15 bp, Homo sapiens
ctcttccggcggccg

SEQ ID NO: 2066940 - DNA, 15 bp, Homo sapiens
tcttccggcggccgt

SEQ ID NO: 2066941 - DNA, 15 bp, Homo sapiens
cttccggcggccgtc

SEQ ID NO: 2066942 - DNA, 15 bp, Homo sapiens
ttccggcggccgtct

SEQ ID NO: 2066943 - DNA, 15 bp, Homo sapiens
tccggcggccgtctg

SEQ ID NO: 2066944 - DNA, 15 bp, Homo sapiens
ccggcggccgtctgg

SEQ ID NO: 2066945 - DNA, 15 bp, Homo sapiens
cggcggccgtctgga

SEQ ID NO: 2066946 - DNA, 15 bp, Homo sapiens
ggcggccgtctggag

SEQ ID NO: 2066947 - DNA, 15 bp, Homo sapiens
gcggccgtctggaga

SEQ ID NO: 2066948 - DNA, 15 bp, Homo sapiens
cggccgtctggagaa

SEQ ID NO: 2066949 - DNA, 15 bp, Homo sapiens
ggccgtctggagaac

SEQ ID NO: 2066950 - DNA, 15 bp, Homo sapiens
gccgtctggagaact

SEQ ID NO: 2066951 - DNA, 15 bp, Homo sapiens
ccgtctggagaactg

SEQ ID NO: 2066952 - DNA, 15 bp, Homo sapiens
cgtctggagaactgc

SEQ ID NO: 2066953 - DNA, 15 bp, Homo sapiens
gtctggagaactgca

SEQ ID NO: 2066954 - DNA, 15 bp, Homo sapiens
tctggagaactgcag

SEQ ID NO: 2066955 - DNA, 15 bp, Homo sapiens
ctggagaactgcagc

SEQ ID NO: 2066956 - DNA, 15 bp, Homo sapiens
tggagaactgcagct

SEQ ID NO: 2066957 - DNA, 15 bp, Homo sapiens
ggagaactgcagctt

SEQ ID NO: 2066958 - DNA, 15 bp, Homo sapiens
gagaactgcagcttt

SEQ ID NO: 2066959 - DNA, 15 bp, Homo sapiens
agaactgcagcttta

SEQ ID NO: 2066960 - DNA, 15 bp, Homo sapiens
gaactgcagctttag

SEQ ID NO: 2066961 - DNA, 15 bp, Homo sapiens
aactgcagctttaga

SEQ ID NO: 2066962 - DNA, 15 bp, Homo sapiens
actgcagctttagag

SEQ ID NO: 2066963 - DNA, 15 bp, Homo sapiens
ctgcagctttagagc

SEQ ID NO: 2066964 - DNA, 15 bp, Homo sapiens
tgcagctttagagcg

SEQ ID NO: 2066965 - DNA, 15 bp, Homo sapiens
gcagctttagagcgg

SEQ ID NO: 2066966 - DNA, 15 bp, Homo sapiens
cagctttagagcggt

SEQ ID NO: 2066967 - DNA, 15 bp, Homo sapiens
agctttagagcggtc

SEQ ID NO: 2066968 - DNA, 15 bp, Homo sapiens
gctttagagcggtct

SEQ ID NO: 2066969 - DNA, 15 bp, Homo sapiens
ctttagagcggtctc

SEQ ID NO: 2066970 - DNA, 15 bp, Homo sapiens
tttagagcggtctcg

SEQ ID NO: 2066971 - DNA, 15 bp, Homo sapiens
ttagagcggtctcgg

SEQ ID NO: 2066972 - DNA, 15 bp, Homo sapiens
tagagcggtctcggg

SEQ ID NO: 2066973 - DNA, 15 bp, Homo sapiens
agagcggtctcgggg

SEQ ID NO: 2066974 - DNA, 15 bp, Homo sapiens
gagcggtctcgggga

SEQ ID NO: 2066975 - DNA, 15 bp, Homo sapiens
agcggtctcggggaa

SEQ ID NO: 2066976 - DNA, 15 bp, Homo sapiens
gcggtctcggggaag

SEQ ID NO: 2066977 - DNA, 15 bp, Homo sapiens
cggtctcggggaagc

SEQ ID NO: 2066978 - DNA, 15 bp, Homo sapiens
ggtctcggggaagct

SEQ ID NO: 2066979 - DNA, 15 bp, Homo sapiens
gtctcggggaagctt

SEQ ID NO: 2066980 - DNA, 15 bp, Homo sapiens
tctcggggaagcttt

SEQ ID NO: 2066981 - DNA, 15 bp, Homo sapiens
ctcggggaagctttg

SEQ ID NO: 2066982 - DNA, 15 bp, Homo sapiens
tcggggaagctttgc

SEQ ID NO: 2066983 - DNA, 15 bp, Homo sapiens
cggggaagctttgct

SEQ ID NO: 2066984 - DNA, 15 bp, Homo sapiens
ggggaagctttgcta

SEQ ID NO: 2066985 - DNA, 15 bp, Homo sapiens
gggaagctttgctac

SEQ ID NO: 2066986 - DNA, 15 bp, Homo sapiens
ggaagctttgctact

SEQ ID NO: 2066987 - DNA, 15 bp, Homo sapiens
gaagctttgctacta

SEQ ID NO: 2066988 - DNA, 15 bp, Homo sapiens
aagctttgctactag

SEQ ID NO: 2066989 - DNA, 15 bp, Homo sapiens
agctttgctactagt

SEQ ID NO: 2066990 - DNA, 15 bp, Homo sapiens
gctttgctactagtt

SEQ ID NO: 2066991 - DNA, 15 bp, Homo sapiens
ctttgctactagttt

SEQ ID NO: 2066992 - DNA, 15 bp, Homo sapiens
tttgctactagtttc

SEQ ID NO: 2066993 - DNA, 15 bp, Homo sapiens
ttgctactagtttcc

SEQ ID NO: 2066994 - DNA, 15 bp, Homo sapiens
tgctactagtttccg

SEQ ID NO: 2066995 - DNA, 15 bp, Homo sapiens
gctactagtttccgg

SEQ ID NO: 2066996 - DNA, 15 bp, Homo sapiens
ctactagtttccggc

SEQ ID NO: 2066997 - DNA, 15 bp, Homo sapiens
tactagtttccggct

SEQ ID NO: 2066998 - DNA, 15 bp, Homo sapiens
actagtttccggcta

SEQ ID NO: 2066999 - DNA, 15 bp, Homo sapiens
ctagtttccggctag

SEQ ID NO: 2067000 - DNA, 15 bp, Homo sapiens
tagtttccggctagg

SEQ ID NO: 2067001 - DNA, 15 bp, Homo sapiens
agtttccggctaggg

SEQ ID NO: 2067002 - DNA, 15 bp, Homo sapiens
gtttccggctaggga

SEQ ID NO: 2067003 - DNA, 15 bp, Homo sapiens
tttccggctagggaa

SEQ ID NO: 2067004 - DNA, 15 bp, Homo sapiens
ttccggctagggaaa

SEQ ID NO: 2067005 - DNA, 15 bp, Homo sapiens
tccggctagggaaaa

SEQ ID NO: 2067006 - DNA, 15 bp, Homo sapiens
ccggctagggaaaac

SEQ ID NO: 2067007 - DNA, 15 bp, Homo sapiens
cggctagggaaaact

SEQ ID NO: 2067008 - DNA, 15 bp, Homo sapiens
ggctagggaaaactg

SEQ ID NO: 2067009 - DNA, 15 bp, Homo sapiens
gctagggaaaactgg

SEQ ID NO: 2067010 - DNA, 15 bp, Homo sapiens
ctagggaaaactggt

SEQ ID NO: 2067011 - DNA, 15 bp, Homo sapiens
tagggaaaactggtg

SEQ ID NO: 2067012 - DNA, 15 bp, Homo sapiens
agggaaaactggtgg

SEQ ID NO: 2067013 - DNA, 15 bp, Homo sapiens
gggaaaactggtggt

SEQ ID NO: 2067014 - DNA, 15 bp, Homo sapiens
ggaaaactggtggtg

SEQ ID NO: 2067015 - DNA, 15 bp, Homo sapiens
gaaaactggtggtgg

SEQ ID NO: 2067016 - DNA, 15 bp, Homo sapiens
aaaactggtggtggt

SEQ ID NO: 2067017 - DNA, 15 bp, Homo sapiens
aaactggtggtggtc

SEQ ID NO: 2067018 - DNA, 15 bp, Homo sapiens
aactggtggtggtcg

SEQ ID NO: 2067019 - DNA, 15 bp, Homo sapiens
actggtggtggtcgg

SEQ ID NO: 2067020 - DNA, 15 bp, Homo sapiens
ctggtggtggtcgga

SEQ ID NO: 2067021 - DNA, 15 bp, Homo sapiens
tggtggtggtcggag

SEQ ID NO: 2067022 - DNA, 15 bp, Homo sapiens
ggtggtggtcggaga

SEQ ID NO: 2067023 - DNA, 15 bp, Homo sapiens
gtggtggtcggagac

SEQ ID NO: 2067024 - DNA, 15 bp, Homo sapiens
tggtggtcggagact

SEQ ID NO: 2067025 - DNA, 15 bp, Homo sapiens
ggtggtcggagactg

SEQ ID NO: 2067026 - DNA, 15 bp, Homo sapiens
gtggtcggagactgg

SEQ ID NO: 2067027 - DNA, 15 bp, Homo sapiens
tggtcggagactggt

SEQ ID NO: 2067028 - DNA, 15 bp, Homo sapiens
ggtcggagactggta

SEQ ID NO: 2067029 - DNA, 15 bp, Homo sapiens
gtcggagactggtag

SEQ ID NO: 2067030 - DNA, 15 bp, Homo sapiens
tcggagactggtagt

SEQ ID NO: 2067031 - DNA, 15 bp, Homo sapiens
cggagactggtagta

SEQ ID NO: 2067032 - DNA, 15 bp, Homo sapiens
ggagactggtagtac

SEQ ID NO: 2067033 - DNA, 15 bp, Homo sapiens
gagactggtagtaca

SEQ ID NO: 2067034 - DNA, 15 bp, Homo sapiens
agactggtagtacat

SEQ ID NO: 2067035 - DNA, 15 bp, Homo sapiens
gactggtagtacatc

SEQ ID NO: 2067036 - DNA, 15 bp, Homo sapiens
actggtagtacatca

SEQ ID NO: 2067037 - DNA, 15 bp, Homo sapiens
ctggtagtacatcat

SEQ ID NO: 2067038 - DNA, 15 bp, Homo sapiens
tggtagtacatcatc

SEQ ID NO: 2067039 - DNA, 15 bp, Homo sapiens
ggtagtacatcatcc

SEQ ID NO: 2067040 - DNA, 15 bp, Homo sapiens
gtagtacatcatcca

SEQ ID NO: 2067041 - DNA, 15 bp, Homo sapiens
tagtacatcatccac

SEQ ID NO: 2067042 - DNA, 15 bp, Homo sapiens
agtacatcatccacg

SEQ ID NO: 2067043 - DNA, 15 bp, Homo sapiens
gtacatcatccacgc

SEQ ID NO: 2067044 - DNA, 15 bp, Homo sapiens
tacatcatccacgca

SEQ ID NO: 2067045 - DNA, 15 bp, Homo sapiens
acatcatccacgcat

SEQ ID NO: 2067046 - DNA, 15 bp, Homo sapiens
catcatccacgcatt

SEQ ID NO: 2067047 - DNA, 15 bp, Homo sapiens
atcatccacgcattc

SEQ ID NO: 2067048 - DNA, 15 bp, Homo sapiens
tcatccacgcattcg

SEQ ID NO: 2067049 - DNA, 15 bp, Homo sapiens
catccacgcattcgc

SEQ ID NO: 2067050 - DNA, 15 bp, Homo sapiens
atccacgcattcgct

SEQ ID NO: 2067051 - DNA, 15 bp, Homo sapiens
tccacgcattcgctc

SEQ ID NO: 2067052 - DNA, 15 bp, Homo sapiens
ccacgcattcgctca

SEQ ID NO: 2067053 - DNA, 15 bp, Homo sapiens
cacgcattcgctcat

SEQ ID NO: 2067054 - DNA, 15 bp, Homo sapiens
acgcattcgctcatt

SEQ ID NO: 2067055 - DNA, 15 bp, Homo sapiens
cgcattcgctcattc

SEQ ID NO: 2067056 - DNA, 15 bp, Homo sapiens
gcattcgctcattct

SEQ ID NO: 2067057 - DNA, 15 bp, Homo sapiens
cattcgctcattcta

SEQ ID NO: 2067058 - DNA, 15 bp, Homo sapiens
attcgctcattctaa

SEQ ID NO: 2067059 - DNA, 15 bp, Homo sapiens
ttcgctcattctaac

SEQ ID NO: 2067060 - DNA, 15 bp, Homo sapiens
tcgctcattctaact

SEQ ID NO: 2067061 - DNA, 15 bp, Homo sapiens
cgctcattctaactg

SEQ ID NO: 2067062 - DNA, 15 bp, Homo sapiens
gctcattctaactgt

SEQ ID NO: 2067063 - DNA, 15 bp, Homo sapiens
ctcattctaactgtc

SEQ ID NO: 2067064 - DNA, 15 bp, Homo sapiens
tcattctaactgtcc

SEQ ID NO: 2067065 - DNA, 15 bp, Homo sapiens
cattctaactgtccg

SEQ ID NO: 2067066 - DNA, 15 bp, Homo sapiens
attctaactgtccgc

SEQ ID NO: 2067067 - DNA, 15 bp, Homo sapiens
ttctaactgtccgcc

SEQ ID NO: 2067068 - DNA, 15 bp, Homo sapiens
tctaactgtccgccc

SEQ ID NO: 2067069 - DNA, 15 bp, Homo sapiens
ctaactgtccgcccg

SEQ ID NO: 2067070 - DNA, 15 bp, Homo sapiens
taactgtccgcccga

SEQ ID NO: 2067071 - DNA, 15 bp, Homo sapiens
aactgtccgcccgac

SEQ ID NO: 2067072 - DNA, 15 bp, Homo sapiens
actgtccgcccgacc

SEQ ID NO: 2067073 - DNA, 15 bp, Homo sapiens
ctgtccgcccgacca

SEQ ID NO: 2067074 - DNA, 15 bp, Homo sapiens
tgtccgcccgaccat

SEQ ID NO: 2067075 - DNA, 15 bp, Homo sapiens
gtccgcccgaccata

SEQ ID NO: 2067076 - DNA, 15 bp, Homo sapiens
tccgcccgaccatac

SEQ ID NO: 2067077 - DNA, 15 bp, Homo sapiens
ccgcccgaccatacg

SEQ ID NO: 2067078 - DNA, 15 bp, Homo sapiens
cgcccgaccatacgt

SEQ ID NO: 2067079 - DNA, 15 bp, Homo sapiens
gcccgaccatacgtc

SEQ ID NO: 2067080 - DNA, 15 bp, Homo sapiens
cccgaccatacgtca

SEQ ID NO: 2067081 - DNA, 15 bp, Homo sapiens
ccgaccatacgtcag

SEQ ID NO: 2067082 - DNA, 15 bp, Homo sapiens
cgaccatacgtcagg

SEQ ID NO: 2067083 - DNA, 15 bp, Homo sapiens
gaccatacgtcaggc

SEQ ID NO: 2067084 - DNA, 15 bp, Homo sapiens
accatacgtcaggct

SEQ ID NO: 2067085 - DNA, 15 bp, Homo sapiens
ccatacgtcaggctg

SEQ ID NO: 2067086 - DNA, 15 bp, Homo sapiens
catacgtcaggctgt

SEQ ID NO: 2067087 - DNA, 15 bp, Homo sapiens
atacgtcaggctgtc

SEQ ID NO: 2067088 - DNA, 15 bp, Homo sapiens
tacgtcaggctgtct

SEQ ID NO: 2067089 - DNA, 15 bp, Homo sapiens
acgtcaggctgtcta

SEQ ID NO: 2067090 - DNA, 15 bp, Homo sapiens
cgtcaggctgtctat

SEQ ID NO: 2067091 - DNA, 15 bp, Homo sapiens
gtcaggctgtctatc

SEQ ID NO: 2067092 - DNA, 15 bp, Homo sapiens
tcaggctgtctatcg

SEQ ID NO: 2067093 - DNA, 15 bp, Homo sapiens
caggctgtctatcgg

SEQ ID NO: 2067094 - DNA, 15 bp, Homo sapiens
aggctgtctatcggt

SEQ ID NO: 2067095 - DNA, 15 bp, Homo sapiens
ggctgtctatcggtc

SEQ ID NO: 2067096 - DNA, 15 bp, Homo sapiens
gctgtctatcggtcc

SEQ ID NO: 2067097 - DNA, 15 bp, Homo sapiens
ctgtctatcggtcca

SEQ ID NO: 2067098 - DNA, 15 bp, Homo sapiens
tgtctatcggtccac

SEQ ID NO: 2067099 - DNA, 15 bp, Homo sapiens
gtctatcggtccacc

SEQ ID NO: 2067100 - DNA, 15 bp, Homo sapiens
tctatcggtccaccc

SEQ ID NO: 2067101 - DNA, 15 bp, Homo sapiens
ctatcggtccaccca

SEQ ID NO: 2067102 - DNA, 15 bp, Homo sapiens
tatcggtccacccaa

SEQ ID NO: 2067103 - DNA, 15 bp, Homo sapiens
atcggtccacccaaa

SEQ ID NO: 2067104 - DNA, 15 bp, Homo sapiens
tcggtccacccaaag

SEQ ID NO: 2067105 - DNA, 15 bp, Homo sapiens
cggtccacccaaagc

SEQ ID NO: 2067106 - DNA, 15 bp, Homo sapiens
ggtccacccaaagcc

SEQ ID NO: 2067107 - DNA, 15 bp, Homo sapiens
gtccacccaaagcca

SEQ ID NO: 2067108 - DNA, 15 bp, Homo sapiens
tccacccaaagccaa

SEQ ID NO: 2067109 - DNA, 15 bp, Homo sapiens
ccacccaaagccaat

SEQ ID NO: 2067110 - DNA, 15 bp, Homo sapiens
cacccaaagccaata

SEQ ID NO: 2067111 - DNA, 15 bp, Homo sapiens
acccaaagccaatat

SEQ ID NO: 2067112 - DNA, 15 bp, Homo sapiens
cccaaagccaatata

SEQ ID NO: 2067113 - DNA, 15 bp, Homo sapiens
ccaaagccaatataa

SEQ ID NO: 2067114 - DNA, 15 bp, Homo sapiens
caaagccaatataag

SEQ ID NO: 2067115 - DNA, 15 bp, Homo sapiens
aaagccaatataagt

SEQ ID NO: 2067116 - DNA, 15 bp, Homo sapiens
aagccaatataagtt

SEQ ID NO: 2067117 - DNA, 15 bp, Homo sapiens
agccaatataagtta

SEQ ID NO: 2067118 - DNA, 15 bp, Homo sapiens
gccaatataagttat

SEQ ID NO: 2067119 - DNA, 15 bp, Homo sapiens
ccaatataagttatg

SEQ ID NO: 2067120 - DNA, 15 bp, Homo sapiens
caatataagttatga

SEQ ID NO: 2067121 - DNA, 15 bp, Homo sapiens
aatataagttatgat

SEQ ID NO: 2067122 - DNA, 15 bp, Homo sapiens
atataagttatgatt

SEQ ID NO: 2067123 - DNA, 15 bp, Homo sapiens
tataagttatgattg

SEQ ID NO: 2067124 - DNA, 15 bp, Homo sapiens
ataagttatgattga

SEQ ID NO: 2067125 - DNA, 15 bp, Homo sapiens
taagttatgattgac

SEQ ID NO: 2067126 - DNA, 15 bp, Homo sapiens
aagttatgattgact

SEQ ID NO: 2067127 - DNA, 15 bp, Homo sapiens
agttatgattgactc

SEQ ID NO: 2067128 - DNA, 15 bp, Homo sapiens
gttatgattgactct

SEQ ID NO: 2067129 - DNA, 15 bp, Homo sapiens
ttatgattgactctt

SEQ ID NO: 2067130 - DNA, 15 bp, Homo sapiens
tatgattgactcttt

SEQ ID NO: 2067131 - DNA, 15 bp, Homo sapiens
atgattgactctttg

SEQ ID NO: 2067132 - DNA, 15 bp, Homo sapiens
tgattgactctttga

SEQ ID NO: 2067133 - DNA, 15 bp, Homo sapiens
gattgactctttgaa

SEQ ID NO: 2067134 - DNA, 15 bp, Homo sapiens
attgactctttgaat

SEQ ID NO: 2067135 - DNA, 15 bp, Homo sapiens
ttgactctttgaatc

SEQ ID NO: 2067136 - DNA, 15 bp, Homo sapiens
tgactctttgaatca

SEQ ID NO: 2067137 - DNA, 15 bp, Homo sapiens
gactctttgaatcac

SEQ ID NO: 2067138 - DNA, 15 bp, Homo sapiens
actctttgaatcacc

SEQ ID NO: 2067139 - DNA, 15 bp, Homo sapiens
ctctttgaatcaccc

SEQ ID NO: 2067140 - DNA, 15 bp, Homo sapiens
tctttgaatcaccca

SEQ ID NO: 2067141 - DNA, 15 bp, Homo sapiens
ctttgaatcacccag

SEQ ID NO: 2067142 - DNA, 15 bp, Homo sapiens
tttgaatcacccagt

SEQ ID NO: 2067143 - DNA, 15 bp, Homo sapiens
ttgaatcacccagtc

SEQ ID NO: 2067144 - DNA, 15 bp, Homo sapiens
tgaatcacccagtct

SEQ ID NO: 2067145 - DNA, 15 bp, Homo sapiens
gaatcacccagtctc

SEQ ID NO: 2067146 - DNA, 15 bp, Homo sapiens
aatcacccagtctcc

SEQ ID NO: 2067147 - DNA, 15 bp, Homo sapiens
atcacccagtctcct

SEQ ID NO: 2067148 - DNA, 15 bp, Homo sapiens
tcacccagtctcctt

SEQ ID NO: 2067149 - DNA, 15 bp, Homo sapiens
cacccagtctccttg

SEQ ID NO: 2067150 - DNA, 15 bp, Homo sapiens
acccagtctccttgc

SEQ ID NO: 2067151 - DNA, 15 bp, Homo sapiens
cccagtctccttgca

SEQ ID NO: 2067152 - DNA, 15 bp, Homo sapiens
ccagtctccttgcac

SEQ ID NO: 2067153 - DNA, 15 bp, Homo sapiens
cagtctccttgcacc

SEQ ID NO: 2067154 - DNA, 15 bp, Homo sapiens
agtctccttgcacct

SEQ ID NO: 2067155 - DNA, 15 bp, Homo sapiens
gtctccttgcacctg

SEQ ID NO: 2067156 - DNA, 15 bp, Homo sapiens
tctccttgcacctgc

SEQ ID NO: 2067157 - DNA, 15 bp, Homo sapiens
ctccttgcacctgct

SEQ ID NO: 2067158 - DNA, 15 bp, Homo sapiens
tccttgcacctgcta

SEQ ID NO: 2067159 - DNA, 15 bp, Homo sapiens
ccttgcacctgctat

SEQ ID NO: 2067160 - DNA, 15 bp, Homo sapiens
cttgcacctgctatt

SEQ ID NO: 2067161 - DNA, 15 bp, Homo sapiens
ttgcacctgctattt

SEQ ID NO: 2067162 - DNA, 15 bp, Homo sapiens
tgcacctgctatttg

SEQ ID NO: 2067163 - DNA, 15 bp, Homo sapiens
gcacctgctatttga

SEQ ID NO: 2067164 - DNA, 15 bp, Homo sapiens
cacctgctatttgaa

SEQ ID NO: 2067165 - DNA, 15 bp, Homo sapiens
acctgctatttgaaa

SEQ ID NO: 2067166 - DNA, 15 bp, Homo sapiens
cctgctatttgaaag

SEQ ID NO: 2067167 - DNA, 15 bp, Homo sapiens
ctgctatttgaaaga

SEQ ID NO: 2067168 - DNA, 15 bp, Homo sapiens
tgctatttgaaagag

SEQ ID NO: 2067169 - DNA, 15 bp, Homo sapiens
gctatttgaaagagc

SEQ ID NO: 2067170 - DNA, 15 bp, Homo sapiens
ctatttgaaagagcc

SEQ ID NO: 2067171 - DNA, 15 bp, Homo sapiens
tatttgaaagagccc

SEQ ID NO: 2067172 - DNA, 15 bp, Homo sapiens
atttgaaagagccca

SEQ ID NO: 2067173 - DNA, 15 bp, Homo sapiens
tttgaaagagcccag

SEQ ID NO: 2067174 - DNA, 15 bp, Homo sapiens
ttgaaagagcccagg

SEQ ID NO: 2067175 - DNA, 15 bp, Homo sapiens
tgaaagagcccaggt

SEQ ID NO: 2067176 - DNA, 15 bp, Homo sapiens
gaaagagcccaggtg

SEQ ID NO: 2067177 - DNA, 15 bp, Homo sapiens
aaagagcccaggtgt

SEQ ID NO: 2067178 - DNA, 15 bp, Homo sapiens
aagagcccaggtgta

SEQ ID NO: 2067179 - DNA, 15 bp, Homo sapiens
agagcccaggtgtag

SEQ ID NO: 2067180 - DNA, 15 bp, Homo sapiens
gagcccaggtgtaga

SEQ ID NO: 2067181 - DNA, 15 bp, Homo sapiens
agcccaggtgtagat

SEQ ID NO: 2067182 - DNA, 15 bp, Homo sapiens
gcccaggtgtagatc

SEQ ID NO: 2067183 - DNA, 15 bp, Homo sapiens
cccaggtgtagatca

SEQ ID NO: 2067184 - DNA, 15 bp, Homo sapiens
ccaggtgtagatcag

SEQ ID NO: 2067185 - DNA, 15 bp, Homo sapiens
caggtgtagatcagg

SEQ ID NO: 2067186 - DNA, 15 bp, Homo sapiens
aggtgtagatcaggg

SEQ ID NO: 2067187 - DNA, 15 bp, Homo sapiens
ggtgtagatcagggc

SEQ ID NO: 2067188 - DNA, 15 bp, Homo sapiens
gtgtagatcagggct

SEQ ID NO: 2067189 - DNA, 15 bp, Homo sapiens
tgtagatcagggctt

SEQ ID NO: 2067190 - DNA, 15 bp, Homo sapiens
gtagatcagggcttg

SEQ ID NO: 2067191 - DNA, 15 bp, Homo sapiens
tagatcagggcttgg

SEQ ID NO: 2067192 - DNA, 15 bp, Homo sapiens
agatcagggcttgga

SEQ ID NO: 2067193 - DNA, 15 bp, Homo sapiens
gatcagggcttggaa

SEQ ID NO: 2067194 - DNA, 15 bp, Homo sapiens
atcagggcttggaag

SEQ ID NO: 2067195 - DNA, 15 bp, Homo sapiens
tcagggcttggaagc

SEQ ID NO: 2067196 - DNA, 15 bp, Homo sapiens
cagggcttggaagct

SEQ ID NO: 2067197 - DNA, 15 bp, Homo sapiens
agggcttggaagctg

SEQ ID NO: 2067198 - DNA, 15 bp, Homo sapiens
gggcttggaagctgc

SEQ ID NO: 2067199 - DNA, 15 bp, Homo sapiens
ggcttggaagctgct

SEQ ID NO: 2067200 - DNA, 15 bp, Homo sapiens
gcttggaagctgctc

SEQ ID NO: 2067201 - DNA, 15 bp, Homo sapiens
cttggaagctgctct

SEQ ID NO: 2067202 - DNA, 15 bp, Homo sapiens
ttggaagctgctctt

SEQ ID NO: 2067203 - DNA, 15 bp, Homo sapiens
tggaagctgctcttg

SEQ ID NO: 2067204 - DNA, 15 bp, Homo sapiens
ggaagctgctcttgt

SEQ ID NO: 2067205 - DNA, 15 bp, Homo sapiens
gaagctgctcttgta

SEQ ID NO: 2067206 - DNA, 15 bp, Homo sapiens
aagctgctcttgtac

SEQ ID NO: 2067207 - DNA, 15 bp, Homo sapiens
agctgctcttgtacc

SEQ ID NO: 2067208 - DNA, 15 bp, Homo sapiens
gctgctcttgtacct

SEQ ID NO: 2067209 - DNA, 15 bp, Homo sapiens
ctgctcttgtaccta

SEQ ID NO: 2067210 - DNA, 15 bp, Homo sapiens
tgctcttgtacctaa

SEQ ID NO: 2067211 - DNA, 15 bp, Homo sapiens
gctcttgtacctaaa

SEQ ID NO: 2067212 - DNA, 15 bp, Homo sapiens
ctcttgtacctaaaa

SEQ ID NO: 2067213 - DNA, 15 bp, Homo sapiens
tcttgtacctaaaac

SEQ ID NO: 2067214 - DNA, 15 bp, Homo sapiens
cttgtacctaaaacc

SEQ ID NO: 2067215 - DNA, 15 bp, Homo sapiens
ttgtacctaaaaccc

SEQ ID NO: 2067216 - DNA, 15 bp, Homo sapiens
tgtacctaaaaccct

SEQ ID NO: 2067217 - DNA, 15 bp, Homo sapiens
gtacctaaaaccctc

SEQ ID NO: 2067218 - DNA, 15 bp, Homo sapiens
tacctaaaaccctct

SEQ ID NO: 2067219 - DNA, 15 bp, Homo sapiens
acctaaaaccctctt

SEQ ID NO: 2067220 - DNA, 15 bp, Homo sapiens
cctaaaaccctcttt

SEQ ID NO: 2067221 - DNA, 15 bp, Homo sapiens
ctaaaaccctctttt

SEQ ID NO: 2067222 - DNA, 15 bp, Homo sapiens
taaaaccctctttta

SEQ ID NO: 2067223 - DNA, 15 bp, Homo sapiens
aaaaccctcttttaa

SEQ ID NO: 2067224 - DNA, 15 bp, Homo sapiens
aaccctcttttaatt

SEQ ID NO: 2067225 - DNA, 15 bp, Homo sapiens
accctcttttaatta

SEQ ID NO: 2067226 - DNA, 15 bp, Homo sapiens
ccctcttttaattat

SEQ ID NO: 2067227 - DNA, 15 bp, Homo sapiens
cctcttttaattatg

SEQ ID NO: 2067228 - DNA, 15 bp, Homo sapiens
ctcttttaattatgc

SEQ ID NO: 2067229 - DNA, 15 bp, Homo sapiens
tcttttaattatgct

SEQ ID NO: 2067230 - DNA, 15 bp, Homo sapiens
cttttaattatgctt

SEQ ID NO: 2067231 - DNA, 15 bp, Homo sapiens
ttttaattatgcttt

SEQ ID NO: 2067232 - DNA, 15 bp, Homo sapiens
tttaattatgctttg

SEQ ID NO: 2067233 - DNA, 15 bp, Homo sapiens
ttaattatgctttgc

SEQ ID NO: 2067234 - DNA, 15 bp, Homo sapiens
taattatgctttgct

SEQ ID NO: 2067235 - DNA, 15 bp, Homo sapiens
aattatgctttgctt

SEQ ID NO: 2067236 - DNA, 15 bp, Homo sapiens
attatgctttgcttc

SEQ ID NO: 2067237 - DNA, 15 bp, Homo sapiens
ttatgctttgcttcg

SEQ ID NO: 2067238 - DNA, 15 bp, Homo sapiens
tatgctttgcttcgg

SEQ ID NO: 2067239 - DNA, 15 bp, Homo sapiens
atgctttgcttcgga

SEQ ID NO: 2067240 - DNA, 15 bp, Homo sapiens
tgctttgcttcggaa

SEQ ID NO: 2067241 - DNA, 15 bp, Homo sapiens
gctttgcttcggaat

SEQ ID NO: 2067242 - DNA, 15 bp, Homo sapiens
tgcttcggaattttg

SEQ ID NO: 2067243 - DNA, 15 bp, Homo sapiens
gcttcggaattttgt

SEQ ID NO: 2067244 - DNA, 15 bp, Homo sapiens
cttcggaattttgtt

SEQ ID NO: 2067245 - DNA, 15 bp, Homo sapiens
ttcggaattttgtta

SEQ ID NO: 2067246 - DNA, 15 bp, Homo sapiens
tcggaattttgttat

SEQ ID NO: 2067247 - DNA, 15 bp, Homo sapiens
cggaattttgttatg

SEQ ID NO: 2067248 - DNA, 15 bp, Homo sapiens
ggaattttgttatgc

SEQ ID NO: 2067249 - DNA, 15 bp, Homo sapiens
gaattttgttatgcg

SEQ ID NO: 2067250 - DNA, 15 bp, Homo sapiens
aattttgttatgcga

SEQ ID NO: 2067251 - DNA, 15 bp, Homo sapiens
attttgttatgcgaa

SEQ ID NO: 2067252 - DNA, 15 bp, Homo sapiens
ttttgttatgcgaat

SEQ ID NO: 2067253 - DNA, 15 bp, Homo sapiens
tttgttatgcgaatg

SEQ ID NO: 2067254 - DNA, 15 bp, Homo sapiens
ttgttatgcgaatgt

SEQ ID NO: 2067255 - DNA, 15 bp, Homo sapiens
tgttatgcgaatgtc

SEQ ID NO: 2067256 - DNA, 15 bp, Homo sapiens
gttatgcgaatgtcc

SEQ ID NO: 2067257 - DNA, 15 bp, Homo sapiens
ttatgcgaatgtcct

SEQ ID NO: 2067258 - DNA, 15 bp, Homo sapiens
tatgcgaatgtcctg

SEQ ID NO: 2067259 - DNA, 15 bp, Homo sapiens
atgcgaatgtcctgt

SEQ ID NO: 2067260 - DNA, 15 bp, Homo sapiens
tgcgaatgtcctgtc

SEQ ID NO: 2067261 - DNA, 15 bp, Homo sapiens
gcgaatgtcctgtcc

SEQ ID NO: 2067262 - DNA, 15 bp, Homo sapiens
cgaatgtcctgtcca

SEQ ID NO: 2067263 - DNA, 15 bp, Homo sapiens
gaatgtcctgtccaa

SEQ ID NO: 2067264 - DNA, 15 bp, Homo sapiens
aatgtcctgtccaag

SEQ ID NO: 2067265 - DNA, 15 bp, Homo sapiens
atgtcctgtccaagt

SEQ ID NO: 2067266 - DNA, 15 bp, Homo sapiens
tgtcctgtccaagtc

SEQ ID NO: 2067267 - DNA, 15 bp, Homo sapiens
gtcctgtccaagtca

SEQ ID NO: 2067268 - DNA, 15 bp, Homo sapiens
tcctgtccaagtcag

SEQ ID NO: 2067269 - DNA, 15 bp, Homo sapiens
cctgtccaagtcaga

SEQ ID NO: 2067270 - DNA, 15 bp, Homo sapiens
ctgtccaagtcagag

SEQ ID NO: 2067271 - DNA, 15 bp, Homo sapiens
tgtccaagtcagagg

SEQ ID NO: 2067272 - DNA, 15 bp, Homo sapiens
gtccaagtcagaggg

SEQ ID NO: 2067273 - DNA, 15 bp, Homo sapiens
tccaagtcagagggc

SEQ ID NO: 2067274 - DNA, 15 bp, Homo sapiens
ccaagtcagagggca

SEQ ID NO: 2067275 - DNA, 15 bp, Homo sapiens
caagtcagagggcat

SEQ ID NO: 2067276 - DNA, 15 bp, Homo sapiens
aagtcagagggcatt

SEQ ID NO: 2067277 - DNA, 15 bp, Homo sapiens
agtcagagggcattt

SEQ ID NO: 2067278 - DNA, 15 bp, Homo sapiens
gtcagagggcatttg

SEQ ID NO: 2067279 - DNA, 15 bp, Homo sapiens
tcagagggcatttgg

SEQ ID NO: 2067280 - DNA, 15 bp, Homo sapiens
cagagggcatttgga

SEQ ID NO: 2067281 - DNA, 15 bp, Homo sapiens
agagggcatttggag

SEQ ID NO: 2067282 - DNA, 15 bp, Homo sapiens
gagggcatttggagg

SEQ ID NO: 2067283 - DNA, 15 bp, Homo sapiens
agggcatttggaggc

SEQ ID NO: 2067284 - DNA, 15 bp, Homo sapiens
gggcatttggaggca

SEQ ID NO: 2067285 - DNA, 15 bp, Homo sapiens
ggcatttggaggcat

SEQ ID NO: 2067286 - DNA, 15 bp, Homo sapiens
gcatttggaggcata

SEQ ID NO: 2067287 - DNA, 15 bp, Homo sapiens
catttggaggcatat

SEQ ID NO: 2067288 - DNA, 15 bp, Homo sapiens
atttggaggcatatt

SEQ ID NO: 2067289 - DNA, 15 bp, Homo sapiens
tttggaggcatattt

SEQ ID NO: 2067290 - DNA, 15 bp, Homo sapiens
ttggaggcatatttg

SEQ ID NO: 2067291 - DNA, 15 bp, Homo sapiens
tggaggcatatttgg

SEQ ID NO: 2067292 - DNA, 15 bp, Homo sapiens
ggaggcatatttggt

SEQ ID NO: 2067293 - DNA, 15 bp, Homo sapiens
gaggcatatttggtg

SEQ ID NO: 2067294 - DNA, 15 bp, Homo sapiens
aggcatatttggtga

SEQ ID NO: 2067295 - DNA, 15 bp, Homo sapiens
ggcatatttggtgac

SEQ ID NO: 2067296 - DNA, 15 bp, Homo sapiens
gcatatttggtgacc

SEQ ID NO: 2067297 - DNA, 15 bp, Homo sapiens
catatttggtgacca

SEQ ID NO: 2067298 - DNA, 15 bp, Homo sapiens
atatttggtgaccaa

SEQ ID NO: 2067299 - DNA, 15 bp, Homo sapiens
tatttggtgaccaat

SEQ ID NO: 2067300 - DNA, 15 bp, Homo sapiens
atttggtgaccaatg

SEQ ID NO: 2067301 - DNA, 15 bp, Homo sapiens
tttggtgaccaatgg

SEQ ID NO: 2067302 - DNA, 15 bp, Homo sapiens
ttggtgaccaatgga

SEQ ID NO: 2067303 - DNA, 15 bp, Homo sapiens
tggtgaccaatggag

SEQ ID NO: 2067304 - DNA, 15 bp, Homo sapiens
ggtgaccaatggagt

SEQ ID NO: 2067305 - DNA, 15 bp, Homo sapiens
gtgaccaatggagta

SEQ ID NO: 2067306 - DNA, 15 bp, Homo sapiens
tgaccaatggagtag

SEQ ID NO: 2067307 - DNA, 15 bp, Homo sapiens
gaccaatggagtagc

SEQ ID NO: 2067308 - DNA, 15 bp, Homo sapiens
accaatggagtagct

SEQ ID NO: 2067309 - DNA, 15 bp, Homo sapiens
ccaatggagtagctt

SEQ ID NO: 2067310 - DNA, 15 bp, Homo sapiens
caatggagtagcttg

SEQ ID NO: 2067311 - DNA, 15 bp, Homo sapiens
aatggagtagcttgc

SEQ ID NO: 2067312 - DNA, 15 bp, Homo sapiens
atggagtagcttgca

SEQ ID NO: 2067313 - DNA, 15 bp, Homo sapiens
tggagtagcttgcac

SEQ ID NO: 2067314 - DNA, 15 bp, Homo sapiens
ggagtagcttgcact

SEQ ID NO: 2067315 - DNA, 15 bp, Homo sapiens
gagtagcttgcactt

SEQ ID NO: 2067316 - DNA, 15 bp, Homo sapiens
agtagcttgcacttt

SEQ ID NO: 2067317 - DNA, 15 bp, Homo sapiens
gtagcttgcactttc

SEQ ID NO: 2067318 - DNA, 15 bp, Homo sapiens
tagcttgcactttct

SEQ ID NO: 2067319 - DNA, 15 bp, Homo sapiens
agcttgcactttctg

SEQ ID NO: 2067320 - DNA, 15 bp, Homo sapiens
gcttgcactttctgc

SEQ ID NO: 2067321 - DNA, 15 bp, Homo sapiens
cttgcactttctgca

SEQ ID NO: 2067322 - DNA, 15 bp, Homo sapiens
ttgcactttctgcat

SEQ ID NO: 2067323 - DNA, 15 bp, Homo sapiens
tgcactttctgcatg

SEQ ID NO: 2067324 - DNA, 15 bp, Homo sapiens
gcactttctgcatgt

SEQ ID NO: 2067325 - DNA, 15 bp, Homo sapiens
cactttctgcatgtc

SEQ ID NO: 2067326 - DNA, 15 bp, Homo sapiens
actttctgcatgtcc

SEQ ID NO: 2067327 - DNA, 15 bp, Homo sapiens
ctttctgcatgtcct

SEQ ID NO: 2067328 - DNA, 15 bp, Homo sapiens
tttctgcatgtcctt

SEQ ID NO: 2067329 - DNA, 15 bp, Homo sapiens
ttctgcatgtccttt

SEQ ID NO: 2067330 - DNA, 15 bp, Homo sapiens
tctgcatgtcctttc

SEQ ID NO: 2067331 - DNA, 15 bp, Homo sapiens
ctgcatgtcctttct

SEQ ID NO: 2067332 - DNA, 15 bp, Homo sapiens
tgcatgtcctttctg

SEQ ID NO: 2067333 - DNA, 15 bp, Homo sapiens
gcatgtcctttctgg

SEQ ID NO: 2067334 - DNA, 15 bp, Homo sapiens
catgtcctttctgga

SEQ ID NO: 2067335 - DNA, 15 bp, Homo sapiens
atgtcctttctggag

SEQ ID NO: 2067336 - DNA, 15 bp, Homo sapiens
tgtcctttctggagg

SEQ ID NO: 2067337 - DNA, 15 bp, Homo sapiens
gtcctttctggagga

SEQ ID NO: 2067338 - DNA, 15 bp, Homo sapiens
tcctttctggaggag

SEQ ID NO: 2067339 - DNA, 15 bp, Homo sapiens
cctttctggaggagg

SEQ ID NO: 2067340 - DNA, 15 bp, Homo sapiens
ctttctggaggaggc

SEQ ID NO: 2067341 - DNA, 15 bp, Homo sapiens
tttctggaggaggca

SEQ ID NO: 2067342 - DNA, 15 bp, Homo sapiens
ttctggaggaggcag

SEQ ID NO: 2067343 - DNA, 15 bp, Homo sapiens
tctggaggaggcagt

SEQ ID NO: 2067344 - DNA, 15 bp, Homo sapiens
ctggaggaggcagtg

SEQ ID NO: 2067345 - DNA, 15 bp, Homo sapiens
tggaggaggcagtgg

SEQ ID NO: 2067346 - DNA, 15 bp, Homo sapiens
ggaggaggcagtggc

SEQ ID NO: 2067347 - DNA, 15 bp, Homo sapiens
gaggaggcagtggcc

SEQ ID NO: 2067348 - DNA, 15 bp, Homo sapiens
aggaggcagtggccc

SEQ ID NO: 2067349 - DNA, 15 bp, Homo sapiens
ggaggcagtggccct

SEQ ID NO: 2067350 - DNA, 15 bp, Homo sapiens
gaggcagtggcccta

SEQ ID NO: 2067351 - DNA, 15 bp, Homo sapiens
aggcagtggccctat

SEQ ID NO: 2067352 - DNA, 15 bp, Homo sapiens
ggcagtggccctatt

SEQ ID NO: 2067353 - DNA, 15 bp, Homo sapiens
gcagtggccctatta

SEQ ID NO: 2067354 - DNA, 15 bp, Homo sapiens
cagtggccctattag

SEQ ID NO: 2067355 - DNA, 15 bp, Homo sapiens
agtggccctattagc

SEQ ID NO: 2067356 - DNA, 15 bp, Homo sapiens
gtggccctattagct

SEQ ID NO: 2067357 - DNA, 15 bp, Homo sapiens
tggccctattagctt

SEQ ID NO: 2067358 - DNA, 15 bp, Homo sapiens
ggccctattagcttg

SEQ ID NO: 2067359 - DNA, 15 bp, Homo sapiens
gccctattagcttga

SEQ ID NO: 2067360 - DNA, 15 bp, Homo sapiens
ccctattagcttgac

SEQ ID NO: 2067361 - DNA, 15 bp, Homo sapiens
cctattagcttgaca

SEQ ID NO: 2067362 - DNA, 15 bp, Homo sapiens
ctattagcttgacag

SEQ ID NO: 2067363 - DNA, 15 bp, Homo sapiens
tattagcttgacagc

SEQ ID NO: 2067364 - DNA, 15 bp, Homo sapiens
attagcttgacagcc

SEQ ID NO: 2067365 - DNA, 15 bp, Homo sapiens
ttagcttgacagcct

SEQ ID NO: 2067366 - DNA, 15 bp, Homo sapiens
tagcttgacagcctg

SEQ ID NO: 2067367 - DNA, 15 bp, Homo sapiens
agcttgacagcctga

SEQ ID NO: 2067368 - DNA, 15 bp, Homo sapiens
gcttgacagcctgac

SEQ ID NO: 2067369 - DNA, 15 bp, Homo sapiens
cttgacagcctgaca

SEQ ID NO: 2067370 - DNA, 15 bp, Homo sapiens
ttgacagcctgacac

SEQ ID NO: 2067371 - DNA, 15 bp, Homo sapiens
tgacagcctgacaca

SEQ ID NO: 2067372 - DNA, 15 bp, Homo sapiens
gacagcctgacacaa

SEQ ID NO: 2067373 - DNA, 15 bp, Homo sapiens
acagcctgacacaag

SEQ ID NO: 2067374 - DNA, 15 bp, Homo sapiens
cagcctgacacaagg

SEQ ID NO: 2067375 - DNA, 15 bp, Homo sapiens
agcctgacacaaggg

SEQ ID NO: 2067376 - DNA, 15 bp, Homo sapiens
gcctgacacaagggg

SEQ ID NO: 2067377 - DNA, 15 bp, Homo sapiens
cctgacacaaggggg

SEQ ID NO: 2067378 - DNA, 15 bp, Homo sapiens
ctgacacaagggggt

SEQ ID NO: 2067379 - DNA, 15 bp, Homo sapiens
tgacacaagggggtt

SEQ ID NO: 2067380 - DNA, 15 bp, Homo sapiens
gacacaagggggttc

SEQ ID NO: 2067381 - DNA, 15 bp, Homo sapiens
acacaagggggttct

SEQ ID NO: 2067382 - DNA, 15 bp, Homo sapiens
cacaagggggttctg

SEQ ID NO: 2067383 - DNA, 15 bp, Homo sapiens
acaagggggttctgc

SEQ ID NO: 2067384 - DNA, 15 bp, Homo sapiens
caagggggttctgcc

SEQ ID NO: 2067385 - DNA, 15 bp, Homo sapiens
aagggggttctgcct

SEQ ID NO: 2067386 - DNA, 15 bp, Homo sapiens
agggggttctgcctt

SEQ ID NO: 2067387 - DNA, 15 bp, Homo sapiens
gggggttctgccttg

SEQ ID NO: 2067388 - DNA, 15 bp, Homo sapiens
ggggttctgccttgt

SEQ ID NO: 2067389 - DNA, 15 bp, Homo sapiens
gggttctgccttgtg

SEQ ID NO: 2067390 - DNA, 15 bp, Homo sapiens
ggttctgccttgtgt

SEQ ID NO: 2067391 - DNA, 15 bp, Homo sapiens
gttctgccttgtgtt

SEQ ID NO: 2067392 - DNA, 15 bp, Homo sapiens
ttctgccttgtgttg

SEQ ID NO: 2067393 - DNA, 15 bp, Homo sapiens
tctgccttgtgttgc

SEQ ID NO: 2067394 - DNA, 15 bp, Homo sapiens
ctgccttgtgttgca

SEQ ID NO: 2067395 - DNA, 15 bp, Homo sapiens
tgccttgtgttgcag

SEQ ID NO: 2067396 - DNA, 15 bp, Homo sapiens
gccttgtgttgcagc

SEQ ID NO: 2067397 - DNA, 15 bp, Homo sapiens
ccttgtgttgcagca

SEQ ID NO: 2067398 - DNA, 15 bp, Homo sapiens
cttgtgttgcagcag

SEQ ID NO: 2067399 - DNA, 15 bp, Homo sapiens
ttgtgttgcagcagt

SEQ ID NO: 2067400 - DNA, 15 bp, Homo sapiens
tgtgttgcagcagta

SEQ ID NO: 2067401 - DNA, 15 bp, Homo sapiens
gtgttgcagcagtag

SEQ ID NO: 2067402 - DNA, 15 bp, Homo sapiens
tgttgcagcagtagg

SEQ ID NO: 2067403 - DNA, 15 bp, Homo sapiens
gttgcagcagtagga

SEQ ID NO: 2067404 - DNA, 15 bp, Homo sapiens
ttgcagcagtaggag

SEQ ID NO: 2067405 - DNA, 15 bp, Homo sapiens
tgcagcagtaggagc

SEQ ID NO: 2067406 - DNA, 15 bp, Homo sapiens
gcagcagtaggagca

SEQ ID NO: 2067407 - DNA, 15 bp, Homo sapiens
cagcagtaggagcat

SEQ ID NO: 2067408 - DNA, 15 bp, Homo sapiens
agcagtaggagcata

SEQ ID NO: 2067409 - DNA, 15 bp, Homo sapiens
gcagtaggagcataa

SEQ ID NO: 2067410 - DNA, 15 bp, Homo sapiens
cagtaggagcataac

SEQ ID NO: 2067411 - DNA, 15 bp, Homo sapiens
agtaggagcataacc

SEQ ID NO: 2067412 - DNA, 15 bp, Homo sapiens
gtaggagcataacct

SEQ ID NO: 2067413 - DNA, 15 bp, Homo sapiens
taggagcataacctt

SEQ ID NO: 2067414 - DNA, 15 bp, Homo sapiens
aggagcataaccttt

SEQ ID NO: 2067415 - DNA, 15 bp, Homo sapiens
ggagcataaccttta

SEQ ID NO: 2067416 - DNA, 15 bp, Homo sapiens
gagcataacctttag

SEQ ID NO: 2067417 - DNA, 15 bp, Homo sapiens
agcataacctttaga

SEQ ID NO: 2067418 - DNA, 15 bp, Homo sapiens
gcataacctttagaa

SEQ ID NO: 2067419 - DNA, 15 bp, Homo sapiens
cataacctttagaaa

SEQ ID NO: 2067420 - DNA, 15 bp, Homo sapiens
ataacctttagaaaa

SEQ ID NO: 2067421 - DNA, 15 bp, Homo sapiens
taacctttagaaaat

SEQ ID NO: 2067422 - DNA, 15 bp, Homo sapiens
aacctttagaaaata

SEQ ID NO: 2067423 - DNA, 15 bp, Homo sapiens
acctttagaaaatat

SEQ ID NO: 2067424 - DNA, 15 bp, Homo sapiens
cctttagaaaatatt

SEQ ID NO: 2067425 - DNA, 15 bp, Homo sapiens
ctttagaaaatattg

SEQ ID NO: 2067426 - DNA, 15 bp, Homo sapiens
tttagaaaatattgg

SEQ ID NO: 2067427 - DNA, 15 bp, Homo sapiens
ttagaaaatattgga

SEQ ID NO: 2067428 - DNA, 15 bp, Homo sapiens
tagaaaatattggag

SEQ ID NO: 2067429 - DNA, 15 bp, Homo sapiens
agaaaatattggagt

SEQ ID NO: 2067430 - DNA, 15 bp, Homo sapiens
gaaaatattggagta

SEQ ID NO: 2067431 - DNA, 15 bp, Homo sapiens
aaaatattggagtag

SEQ ID NO: 2067432 - DNA, 15 bp, Homo sapiens
aaatattggagtagg

SEQ ID NO: 2067433 - DNA, 15 bp, Homo sapiens
aatattggagtagga

SEQ ID NO: 2067434 - DNA, 15 bp, Homo sapiens
atattggagtaggaa

SEQ ID NO: 2067435 - DNA, 15 bp, Homo sapiens
tattggagtaggaaa

SEQ ID NO: 2067436 - DNA, 15 bp, Homo sapiens
attggagtaggaaaa

SEQ ID NO: 2067437 - DNA, 15 bp, Homo sapiens
ttggagtaggaaaac

SEQ ID NO: 2067438 - DNA, 15 bp, Homo sapiens
tggagtaggaaaact

SEQ ID NO: 2067439 - DNA, 15 bp, Homo sapiens
ggagtaggaaaactt

SEQ ID NO: 2067440 - DNA, 15 bp, Homo sapiens
gagtaggaaaacttc

SEQ ID NO: 2067441 - DNA, 15 bp, Homo sapiens
agtaggaaaacttct

SEQ ID NO: 2067442 - DNA, 15 bp, Homo sapiens
gtaggaaaacttctg

SEQ ID NO: 2067443 - DNA, 15 bp, Homo sapiens
taggaaaacttctgg

SEQ ID NO: 2067444 - DNA, 15 bp, Homo sapiens
aggaaaacttctggg

SEQ ID NO: 2067445 - DNA, 15 bp, Homo sapiens
ggaaaacttctggga

SEQ ID NO: 2067446 - DNA, 15 bp, Homo sapiens
gaaaacttctgggac

SEQ ID NO: 2067447 - DNA, 15 bp, Homo sapiens
aaaacttctgggact

SEQ ID NO: 2067448 - DNA, 15 bp, Homo sapiens
aaacttctgggacta

SEQ ID NO: 2067449 - DNA, 15 bp, Homo sapiens
aacttctgggactag

SEQ ID NO: 2067450 - DNA, 15 bp, Homo sapiens
acttctgggactagc

SEQ ID NO: 2067451 - DNA, 15 bp, Homo sapiens
cttctgggactagct

SEQ ID NO: 2067452 - DNA, 15 bp, Homo sapiens
ttctgggactagcta

SEQ ID NO: 2067453 - DNA, 15 bp, Homo sapiens
tctgggactagctac

SEQ ID NO: 2067454 - DNA, 15 bp, Homo sapiens
ctgggactagctaca

SEQ ID NO: 2067455 - DNA, 15 bp, Homo sapiens
tgggactagctacac

SEQ ID NO: 2067456 - DNA, 15 bp, Homo sapiens
gggactagctacact

SEQ ID NO: 2067457 - DNA, 15 bp, Homo sapiens
ggactagctacactc

SEQ ID NO: 2067458 - DNA, 15 bp, Homo sapiens
gactagctacactcg

SEQ ID NO: 2067459 - DNA, 15 bp, Homo sapiens
actagctacactcga

SEQ ID NO: 2067460 - DNA, 15 bp, Homo sapiens
ctagctacactcgat

SEQ ID NO: 2067461 - DNA, 15 bp, Homo sapiens
tagctacactcgatg

SEQ ID NO: 2067462 - DNA, 15 bp, Homo sapiens
agctacactcgatgg

SEQ ID NO: 2067463 - DNA, 15 bp, Homo sapiens
gctacactcgatggg

SEQ ID NO: 2067464 - DNA, 15 bp, Homo sapiens
ctacactcgatgggt

SEQ ID NO: 2067465 - DNA, 15 bp, Homo sapiens
tacactcgatgggtg

SEQ ID NO: 2067466 - DNA, 15 bp, Homo sapiens
acactcgatgggtgc

SEQ ID NO: 2067467 - DNA, 15 bp, Homo sapiens
cactcgatgggtgcc

SEQ ID NO: 2067468 - DNA, 15 bp, Homo sapiens
actcgatgggtgcct

SEQ ID NO: 2067469 - DNA, 15 bp, Homo sapiens
ctcgatgggtgcctt

SEQ ID NO: 2067470 - DNA, 15 bp, Homo sapiens
tcgatgggtgccttc

SEQ ID NO: 2067471 - DNA, 15 bp, Homo sapiens
cgatgggtgccttcc

SEQ ID NO: 2067472 - DNA, 15 bp, Homo sapiens
gatgggtgccttcca

SEQ ID NO: 2067473 - DNA, 15 bp, Homo sapiens
atgggtgccttccag

SEQ ID NO: 2067474 - DNA, 15 bp, Homo sapiens
tgggtgccttccagc

SEQ ID NO: 2067475 - DNA, 15 bp, Homo sapiens
gggtgccttccagct

SEQ ID NO: 2067476 - DNA, 15 bp, Homo sapiens
ggtgccttccagctc

SEQ ID NO: 2067477 - DNA, 15 bp, Homo sapiens
gtgccttccagctct

SEQ ID NO: 2067478 - DNA, 15 bp, Homo sapiens
tgccttccagctctc

SEQ ID NO: 2067479 - DNA, 15 bp, Homo sapiens
gccttccagctctcc

SEQ ID NO: 2067480 - DNA, 15 bp, Homo sapiens
ccttccagctctcca

SEQ ID NO: 2067481 - DNA, 15 bp, Homo sapiens
cttccagctctccaa

SEQ ID NO: 2067482 - DNA, 15 bp, Homo sapiens
ttccagctctccaat

SEQ ID NO: 2067483 - DNA, 15 bp, Homo sapiens
tccagctctccaatc

SEQ ID NO: 2067484 - DNA, 15 bp, Homo sapiens
ccagctctccaatct

SEQ ID NO: 2067485 - DNA, 15 bp, Homo sapiens
cagctctccaatcta

SEQ ID NO: 2067486 - DNA, 15 bp, Homo sapiens
agctctccaatctac

SEQ ID NO: 2067487 - DNA, 15 bp, Homo sapiens
gctctccaatctacg

SEQ ID NO: 2067488 - DNA, 15 bp, Homo sapiens
ctctccaatctacgg

SEQ ID NO: 2067489 - DNA, 15 bp, Homo sapiens
tctccaatctacggt

SEQ ID NO: 2067490 - DNA, 15 bp, Homo sapiens
ctccaatctacggta

SEQ ID NO: 2067491 - DNA, 15 bp, Homo sapiens
tccaatctacggtac

SEQ ID NO: 2067492 - DNA, 15 bp, Homo sapiens
ccaatctacggtacc

SEQ ID NO: 2067493 - DNA, 15 bp, Homo sapiens
caatctacggtacca

SEQ ID NO: 2067494 - DNA, 15 bp, Homo sapiens
aatctacggtaccaa

SEQ ID NO: 2067495 - DNA, 15 bp, Homo sapiens
atctacggtaccaac

SEQ ID NO: 2067496 - DNA, 15 bp, Homo sapiens
tctacggtaccaact

SEQ ID NO: 2067497 - DNA, 15 bp, Homo sapiens
ctacggtaccaactc

SEQ ID NO: 2067498 - DNA, 15 bp, Homo sapiens
tacggtaccaactca

SEQ ID NO: 2067499 - DNA, 15 bp, Homo sapiens
acggtaccaactcac

SEQ ID NO: 2067500 - DNA, 15 bp, Homo sapiens
cggtaccaactcact

SEQ ID NO: 2067501 - DNA, 15 bp, Homo sapiens
ggtaccaactcactc

SEQ ID NO: 2067502 - DNA, 15 bp, Homo sapiens
gtaccaactcactca

SEQ ID NO: 2067503 - DNA, 15 bp, Homo sapiens
taccaactcactcag

SEQ ID NO: 2067504 - DNA, 15 bp, Homo sapiens
accaactcactcagg

SEQ ID NO: 2067505 - DNA, 15 bp, Homo sapiens
ccaactcactcaggc

SEQ ID NO: 2067506 - DNA, 15 bp, Homo sapiens
caactcactcaggca

SEQ ID NO: 2067507 - DNA, 15 bp, Homo sapiens
aactcactcaggcag

SEQ ID NO: 2067508 - DNA, 15 bp, Homo sapiens
actcactcaggcagg

SEQ ID NO: 2067509 - DNA, 15 bp, Homo sapiens
ctcactcaggcaggc

SEQ ID NO: 2067510 - DNA, 15 bp, Homo sapiens
tcactcaggcaggct

SEQ ID NO: 2067511 - DNA, 15 bp, Homo sapiens
cactcaggcaggctt

SEQ ID NO: 2067512 - DNA, 15 bp, Homo sapiens
actcaggcaggcttt

SEQ ID NO: 2067513 - DNA, 15 bp, Homo sapiens
ctcaggcaggctttc

SEQ ID NO: 2067514 - DNA, 15 bp, Homo sapiens
tcaggcaggctttcc

SEQ ID NO: 2067515 - DNA, 15 bp, Homo sapiens
caggcaggctttccc

SEQ ID NO: 2067516 - DNA, 15 bp, Homo sapiens
aggcaggctttcccc

SEQ ID NO: 2067517 - DNA, 15 bp, Homo sapiens
ggcaggctttccccc

SEQ ID NO: 2067518 - DNA, 15 bp, Homo sapiens
gcaggctttccccca

SEQ ID NO: 2067519 - DNA, 15 bp, Homo sapiens
caggctttcccccaa

SEQ ID NO: 2067520 - DNA, 15 bp, Homo sapiens
aggctttcccccaaa

SEQ ID NO: 2067521 - DNA, 15 bp, Homo sapiens
ggctttcccccaaat

SEQ ID NO: 2067522 - DNA, 15 bp, Homo sapiens
gctttcccccaaatt

SEQ ID NO: 2067523 - DNA, 15 bp, Homo sapiens
ctttcccccaaatta

SEQ ID NO: 2067524 - DNA, 15 bp, Homo sapiens
tttcccccaaattat

SEQ ID NO: 2067525 - DNA, 15 bp, Homo sapiens
ttcccccaaattatt

SEQ ID NO: 2067526 - DNA, 15 bp, Homo sapiens
tcccccaaattattc

SEQ ID NO: 2067527 - DNA, 15 bp, Homo sapiens
cccccaaattattcc

SEQ ID NO: 2067528 - DNA, 15 bp, Homo sapiens
ccccaaattattccc

SEQ ID NO: 2067529 - DNA, 15 bp, Homo sapiens
cccaaattattcccc

SEQ ID NO: 2067530 - DNA, 15 bp, Homo sapiens
ccaaattattccccc

SEQ ID NO: 2067531 - DNA, 15 bp, Homo sapiens
caaattattccccct

SEQ ID NO: 2067532 - DNA, 15 bp, Homo sapiens
aaattattccccctt

SEQ ID NO: 2067533 - DNA, 15 bp, Homo sapiens
aattattcccccttc

SEQ ID NO: 2067534 - DNA, 15 bp, Homo sapiens
attattcccccttct

SEQ ID NO: 2067535 - DNA, 15 bp, Homo sapiens
ttattcccccttctt

SEQ ID NO: 2067536 - DNA, 15 bp, Homo sapiens
tattcccccttcttt

SEQ ID NO: 2067537 - DNA, 15 bp, Homo sapiens
attcccccttctttg

SEQ ID NO: 2067538 - DNA, 15 bp, Homo sapiens
ttcccccttctttgg

SEQ ID NO: 2067539 - DNA, 15 bp, Homo sapiens
tcccccttctttgga

SEQ ID NO: 2067540 - DNA, 15 bp, Homo sapiens
cccccttctttggac

SEQ ID NO: 2067541 - DNA, 15 bp, Homo sapiens
ccccttctttggact

SEQ ID NO: 2067542 - DNA, 15 bp, Homo sapiens
cccttctttggactc

SEQ ID NO: 2067543 - DNA, 15 bp, Homo sapiens
ccttctttggactct

SEQ ID NO: 2067544 - DNA, 15 bp, Homo sapiens
cttctttggactctg

SEQ ID NO: 2067545 - DNA, 15 bp, Homo sapiens
ttctttggactctgg

SEQ ID NO: 2067546 - DNA, 15 bp, Homo sapiens
tctttggactctggt

SEQ ID NO: 2067547 - DNA, 15 bp, Homo sapiens
ctttggactctggtc

SEQ ID NO: 2067548 - DNA, 15 bp, Homo sapiens
tttggactctggtca

SEQ ID NO: 2067549 - DNA, 15 bp, Homo sapiens
ttggactctggtcaa

SEQ ID NO: 2067550 - DNA, 15 bp, Homo sapiens
tggactctggtcaaa

SEQ ID NO: 2067551 - DNA, 15 bp, Homo sapiens
ggactctggtcaaaa

SEQ ID NO: 2067552 - DNA, 15 bp, Homo sapiens
gactctggtcaaaac

SEQ ID NO: 2067553 - DNA, 15 bp, Homo sapiens
actctggtcaaaacc

SEQ ID NO: 2067554 - DNA, 15 bp, Homo sapiens
ctctggtcaaaacca

SEQ ID NO: 2067555 - DNA, 15 bp, Homo sapiens
tctggtcaaaaccag

SEQ ID NO: 2067556 - DNA, 15 bp, Homo sapiens
ctggtcaaaaccaga

SEQ ID NO: 2067557 - DNA, 15 bp, Homo sapiens
tggtcaaaaccagat

SEQ ID NO: 2067558 - DNA, 15 bp, Homo sapiens
ggtcaaaaccagatc

SEQ ID NO: 2067559 - DNA, 15 bp, Homo sapiens
gtcaaaaccagatcc

SEQ ID NO: 2067560 - DNA, 15 bp, Homo sapiens
tcaaaaccagatcct

SEQ ID NO: 2067561 - DNA, 15 bp, Homo sapiens
caaaaccagatcctc

SEQ ID NO: 2067562 - DNA, 15 bp, Homo sapiens
aaaaccagatcctct

SEQ ID NO: 2067563 - DNA, 15 bp, Homo sapiens
aaaccagatcctctc

SEQ ID NO: 2067564 - DNA, 15 bp, Homo sapiens
aaccagatcctctcc

SEQ ID NO: 2067565 - DNA, 15 bp, Homo sapiens
accagatcctctcca

SEQ ID NO: 2067566 - DNA, 15 bp, Homo sapiens
ccagatcctctccac

SEQ ID NO: 2067567 - DNA, 15 bp, Homo sapiens
cagatcctctccacc

SEQ ID NO: 2067568 - DNA, 15 bp, Homo sapiens
agatcctctccaccc

SEQ ID NO: 2067569 - DNA, 15 bp, Homo sapiens
gatcctctccaccct

SEQ ID NO: 2067570 - DNA, 15 bp, Homo sapiens
atcctctccaccctc

SEQ ID NO: 2067571 - DNA, 15 bp, Homo sapiens
tcctctccaccctcc

SEQ ID NO: 2067572 - DNA, 15 bp, Homo sapiens
cctctccaccctccc

SEQ ID NO: 2067573 - DNA, 15 bp, Homo sapiens
ctctccaccctccca

SEQ ID NO: 2067574 - DNA, 15 bp, Homo sapiens
tctccaccctcccaa

SEQ ID NO: 2067575 - DNA, 15 bp, Homo sapiens
ctccaccctcccaaa

SEQ ID NO: 2067576 - DNA, 15 bp, Homo sapiens
tccaccctcccaaac

SEQ ID NO: 2067577 - DNA, 15 bp, Homo sapiens
ccaccctcccaaacc

SEQ ID NO: 2067578 - DNA, 15 bp, Homo sapiens
caccctcccaaaccc

SEQ ID NO: 2067579 - DNA, 15 bp, Homo sapiens
accctcccaaaccca

SEQ ID NO: 2067580 - DNA, 15 bp, Homo sapiens
ccctcccaaacccat

SEQ ID NO: 2067581 - DNA, 15 bp, Homo sapiens
cctcccaaacccatc

SEQ ID NO: 2067582 - DNA, 15 bp, Homo sapiens
ctcccaaacccatcc

SEQ ID NO: 2067583 - DNA, 15 bp, Homo sapiens
tcccaaacccatccc

SEQ ID NO: 2067584 - DNA, 15 bp, Homo sapiens
cccaaacccatccca

SEQ ID NO: 2067585 - DNA, 15 bp, Homo sapiens
ccaaacccatcccag

SEQ ID NO: 2067586 - DNA, 15 bp, Homo sapiens
caaacccatcccagc

SEQ ID NO: 2067587 - DNA, 15 bp, Homo sapiens
aaacccatcccagcc

SEQ ID NO: 2067588 - DNA, 15 bp, Homo sapiens
aacccatcccagcca

SEQ ID NO: 2067589 - DNA, 15 bp, Homo sapiens
acccatcccagccaa

SEQ ID NO: 2067590 - DNA, 15 bp, Homo sapiens
cccatcccagccaat

SEQ ID NO: 2067591 - DNA, 15 bp, Homo sapiens
ccatcccagccaata

SEQ ID NO: 2067592 - DNA, 15 bp, Homo sapiens
catcccagccaatat

SEQ ID NO: 2067593 - DNA, 15 bp, Homo sapiens
atcccagccaatatg

SEQ ID NO: 2067594 - DNA, 15 bp, Homo sapiens
tcccagccaatatgc

SEQ ID NO: 2067595 - DNA, 15 bp, Homo sapiens
cccagccaatatgcc

SEQ ID NO: 2067596 - DNA, 15 bp, Homo sapiens
ccagccaatatgccc

SEQ ID NO: 2067597 - DNA, 15 bp, Homo sapiens
cagccaatatgccca

SEQ ID NO: 2067598 - DNA, 15 bp, Homo sapiens
agccaatatgcccat

SEQ ID NO: 2067599 - DNA, 15 bp, Homo sapiens
gccaatatgcccatg

SEQ ID NO: 2067600 - DNA, 15 bp, Homo sapiens
ccaatatgcccatgt

SEQ ID NO: 2067601 - DNA, 15 bp, Homo sapiens
caatatgcccatgtt

SEQ ID NO: 2067602 - DNA, 15 bp, Homo sapiens
aatatgcccatgtta

SEQ ID NO: 2067603 - DNA, 15 bp, Homo sapiens
atatgcccatgttac

SEQ ID NO: 2067604 - DNA, 15 bp, Homo sapiens
tatgcccatgttact

SEQ ID NO: 2067605 - DNA, 15 bp, Homo sapiens
atgcccatgttactc

SEQ ID NO: 2067606 - DNA, 15 bp, Homo sapiens
tgcccatgttactct

SEQ ID NO: 2067607 - DNA, 15 bp, Homo sapiens
gcccatgttactctg

SEQ ID NO: 2067608 - DNA, 15 bp, Homo sapiens
cccatgttactctgc

SEQ ID NO: 2067609 - DNA, 15 bp, Homo sapiens
ccatgttactctgct

SEQ ID NO: 2067610 - DNA, 15 bp, Homo sapiens
catgttactctgcta

SEQ ID NO: 2067611 - DNA, 15 bp, Homo sapiens
atgttactctgctat

SEQ ID NO: 2067612 - DNA, 15 bp, Homo sapiens
tgttactctgctatt

SEQ ID NO: 2067613 - DNA, 15 bp, Homo sapiens
gttactctgctattc

SEQ ID NO: 2067614 - DNA, 15 bp, Homo sapiens
ttactctgctattct

SEQ ID NO: 2067615 - DNA, 15 bp, Homo sapiens
tactctgctattctt

SEQ ID NO: 2067616 - DNA, 15 bp, Homo sapiens
actctgctattcttt

SEQ ID NO: 2067617 - DNA, 15 bp, Homo sapiens
ctctgctattctttt

SEQ ID NO: 2067618 - DNA, 15 bp, Homo sapiens
tctgctattcttttt

SEQ ID NO: 2067619 - DNA, 15 bp, Homo sapiens
ctgctattctttttc

SEQ ID NO: 2067620 - DNA, 15 bp, Homo sapiens
tgctattctttttca

SEQ ID NO: 2067621 - DNA, 15 bp, Homo sapiens
gctattctttttcac

SEQ ID NO: 2067622 - DNA, 15 bp, Homo sapiens
ctattctttttcact

SEQ ID NO: 2067623 - DNA, 15 bp, Homo sapiens
tattctttttcactt

SEQ ID NO: 2067624 - DNA, 15 bp, Homo sapiens
attctttttcactta

SEQ ID NO: 2067625 - DNA, 15 bp, Homo sapiens
ttctttttcacttag

SEQ ID NO: 2067626 - DNA, 15 bp, Homo sapiens
tctttttcacttagc

SEQ ID NO: 2067627 - DNA, 15 bp, Homo sapiens
ctttttcacttagcc

SEQ ID NO: 2067628 - DNA, 15 bp, Homo sapiens
tttttcacttagcca

SEQ ID NO: 2067629 - DNA, 15 bp, Homo sapiens
ttttcacttagccag

SEQ ID NO: 2067630 - DNA, 15 bp, Homo sapiens
tttcacttagccaga

SEQ ID NO: 2067631 - DNA, 15 bp, Homo sapiens
ttcacttagccagaa

SEQ ID NO: 2067632 - DNA, 15 bp, Homo sapiens
tcacttagccagaaa

SEQ ID NO: 2067633 - DNA, 15 bp, Homo sapiens
cacttagccagaaaa

SEQ ID NO: 2067634 - DNA, 15 bp, Homo sapiens
acttagccagaaaaa

SEQ ID NO: 2067635 - DNA, 15 bp, Homo sapiens
cttagccagaaaaat

SEQ ID NO: 2067636 - DNA, 15 bp, Homo sapiens
ttagccagaaaaatc

SEQ ID NO: 2067637 - DNA, 15 bp, Homo sapiens
tagccagaaaaatca

SEQ ID NO: 2067638 - DNA, 15 bp, Homo sapiens
agccagaaaaatcat

SEQ ID NO: 2067639 - DNA, 15 bp, Homo sapiens
gccagaaaaatcatt

SEQ ID NO: 2067640 - DNA, 15 bp, Homo sapiens
ccagaaaaatcattc

SEQ ID NO: 2067641 - DNA, 15 bp, Homo sapiens
cagaaaaatcattct

SEQ ID NO: 2067642 - DNA, 15 bp, Homo sapiens
agaaaaatcattctt

SEQ ID NO: 2067643 - DNA, 15 bp, Homo sapiens
gaaaaatcattcttt

SEQ ID NO: 2067644 - DNA, 15 bp, Homo sapiens
aaaaatcattctttc

SEQ ID NO: 2067645 - DNA, 15 bp, Homo sapiens
aaaatcattctttcc

SEQ ID NO: 2067646 - DNA, 15 bp, Homo sapiens
aaatcattctttcca

SEQ ID NO: 2067647 - DNA, 15 bp, Homo sapiens
aatcattctttccag

SEQ ID NO: 2067648 - DNA, 15 bp, Homo sapiens
atcattctttccagc

SEQ ID NO: 2067649 - DNA, 15 bp, Homo sapiens
tcattctttccagcc

SEQ ID NO: 2067650 - DNA, 15 bp, Homo sapiens
cattctttccagccc

SEQ ID NO: 2067651 - DNA, 15 bp, Homo sapiens
attctttccagcccc

SEQ ID NO: 2067652 - DNA, 15 bp, Homo sapiens
ttctttccagcccca

SEQ ID NO: 2067653 - DNA, 15 bp, Homo sapiens
tctttccagccccac

SEQ ID NO: 2067654 - DNA, 15 bp, Homo sapiens
ctttccagccccaca

SEQ ID NO: 2067655 - DNA, 15 bp, Homo sapiens
tttccagccccacaa

SEQ ID NO: 2067656 - DNA, 15 bp, Homo sapiens
ttccagccccacaac

SEQ ID NO: 2067657 - DNA, 15 bp, Homo sapiens
tccagccccacaact

SEQ ID NO: 2067658 - DNA, 15 bp, Homo sapiens
ccagccccacaacta

SEQ ID NO: 2067659 - DNA, 15 bp, Homo sapiens
cagccccacaactaa

SEQ ID NO: 2067660 - DNA, 15 bp, Homo sapiens
agccccacaactaag

SEQ ID NO: 2067661 - DNA, 15 bp, Homo sapiens
gccccacaactaagt

SEQ ID NO: 2067662 - DNA, 15 bp, Homo sapiens
ccccacaactaagtc

SEQ ID NO: 2067663 - DNA, 15 bp, Homo sapiens
cccacaactaagtca

SEQ ID NO: 2067664 - DNA, 15 bp, Homo sapiens
ccacaactaagtcat

SEQ ID NO: 2067665 - DNA, 15 bp, Homo sapiens
cacaactaagtcata

SEQ ID NO: 2067666 - DNA, 15 bp, Homo sapiens
acaactaagtcatat

SEQ ID NO: 2067667 - DNA, 15 bp, Homo sapiens
caactaagtcatatc

SEQ ID NO: 2067668 - DNA, 15 bp, Homo sapiens
aactaagtcatatcc

SEQ ID NO: 2067669 - DNA, 15 bp, Homo sapiens
actaagtcatatcct

SEQ ID NO: 2067670 - DNA, 15 bp, Homo sapiens
ctaagtcatatcctt

SEQ ID NO: 2067671 - DNA, 15 bp, Homo sapiens
taagtcatatccttc

SEQ ID NO: 2067672 - DNA, 15 bp, Homo sapiens
aagtcatatccttct

SEQ ID NO: 2067673 - DNA, 15 bp, Homo sapiens
agtcatatccttctc

SEQ ID NO: 2067674 - DNA, 15 bp, Homo sapiens
gtcatatccttctct

SEQ ID NO: 2067675 - DNA, 15 bp, Homo sapiens
tcatatccttctctt

SEQ ID NO: 2067676 - DNA, 15 bp, Homo sapiens
catatccttctcttt

SEQ ID NO: 2067677 - DNA, 15 bp, Homo sapiens
atatccttctcttta

SEQ ID NO: 2067678 - DNA, 15 bp, Homo sapiens
tatccttctctttaa

SEQ ID NO: 2067679 - DNA, 15 bp, Homo sapiens
atccttctctttaaa

SEQ ID NO: 2067680 - DNA, 15 bp, Homo sapiens
tccttctctttaaaa

SEQ ID NO: 2067681 - DNA, 15 bp, Homo sapiens
ccttctctttaaaaa

SEQ ID NO: 2067682 - DNA, 15 bp, Homo sapiens
cttctctttaaaaat

SEQ ID NO: 2067683 - DNA, 15 bp, Homo sapiens
ttctctttaaaaatc

SEQ ID NO: 2067684 - DNA, 15 bp, Homo sapiens
tctctttaaaaatcc

SEQ ID NO: 2067685 - DNA, 15 bp, Homo sapiens
ctctttaaaaatcca

SEQ ID NO: 2067686 - DNA, 15 bp, Homo sapiens
tctttaaaaatccaa

SEQ ID NO: 2067687 - DNA, 15 bp, Homo sapiens
ctttaaaaatccaat

SEQ ID NO: 2067688 - DNA, 15 bp, Homo sapiens
tttaaaaatccaatt

SEQ ID NO: 2067689 - DNA, 15 bp, Homo sapiens
ttaaaaatccaattg

SEQ ID NO: 2067690 - DNA, 15 bp, Homo sapiens
taaaaatccaattgc

SEQ ID NO: 2067691 - DNA, 15 bp, Homo sapiens
aaaaatccaattgcc

SEQ ID NO: 2067692 - DNA, 15 bp, Homo sapiens
aaaatccaattgcct

SEQ ID NO: 2067693 - DNA, 15 bp, Homo sapiens
aaatccaattgcctc

SEQ ID NO: 2067694 - DNA, 15 bp, Homo sapiens
aatccaattgcctct

SEQ ID NO: 2067695 - DNA, 15 bp, Homo sapiens
atccaattgcctctt

SEQ ID NO: 2067696 - DNA, 15 bp, Homo sapiens
tccaattgcctcttc

SEQ ID NO: 2067697 - DNA, 15 bp, Homo sapiens
ccaattgcctcttct

SEQ ID NO: 2067698 - DNA, 15 bp, Homo sapiens
caattgcctcttctg

SEQ ID NO: 2067699 - DNA, 15 bp, Homo sapiens
aattgcctcttctga

SEQ ID NO: 2067700 - DNA, 15 bp, Homo sapiens
attgcctcttctgac

SEQ ID NO: 2067701 - DNA, 15 bp, Homo sapiens
ttgcctcttctgaca

SEQ ID NO: 2067702 - DNA, 15 bp, Homo sapiens
tgcctcttctgacaa

SEQ ID NO: 2067703 - DNA, 15 bp, Homo sapiens
gcctcttctgacaac

SEQ ID NO: 2067704 - DNA, 15 bp, Homo sapiens
cctcttctgacaact

SEQ ID NO: 2067705 - DNA, 15 bp, Homo sapiens
ctcttctgacaacta

SEQ ID NO: 2067706 - DNA, 15 bp, Homo sapiens
tcttctgacaactaa

SEQ ID NO: 2067707 - DNA, 15 bp, Homo sapiens
cttctgacaactaaa

SEQ ID NO: 2067708 - DNA, 15 bp, Homo sapiens
ttctgacaactaaat

SEQ ID NO: 2067709 - DNA, 15 bp, Homo sapiens
tctgacaactaaatg

SEQ ID NO: 2067710 - DNA, 15 bp, Homo sapiens
ctgacaactaaatgc

SEQ ID NO: 2067711 - DNA, 15 bp, Homo sapiens
tgacaactaaatgcc

SEQ ID NO: 2067712 - DNA, 15 bp, Homo sapiens
gacaactaaatgcct

SEQ ID NO: 2067713 - DNA, 15 bp, Homo sapiens
acaactaaatgcctg

SEQ ID NO: 2067714 - DNA, 15 bp, Homo sapiens
caactaaatgcctga

SEQ ID NO: 2067715 - DNA, 15 bp, Homo sapiens
aactaaatgcctgac

SEQ ID NO: 2067716 - DNA, 15 bp, Homo sapiens
actaaatgcctgaca

SEQ ID NO: 2067717 - DNA, 15 bp, Homo sapiens
ctaaatgcctgacac

SEQ ID NO: 2067718 - DNA, 15 bp, Homo sapiens
taaatgcctgacaca

SEQ ID NO: 2067719 - DNA, 15 bp, Homo sapiens
aaatgcctgacacat

SEQ ID NO: 2067720 - DNA, 15 bp, Homo sapiens
aatgcctgacacata

SEQ ID NO: 2067721 - DNA, 15 bp, Homo sapiens
atgcctgacacatag

SEQ ID NO: 2067722 - DNA, 15 bp, Homo sapiens
gcctgacacatagtg

SEQ ID NO: 2067723 - DNA, 15 bp, Homo sapiens
cctgacacatagtgg

SEQ ID NO: 2067724 - DNA, 15 bp, Homo sapiens
ctgacacatagtggg

SEQ ID NO: 2067725 - DNA, 15 bp, Homo sapiens
tgacacatagtggga

SEQ ID NO: 2067726 - DNA, 15 bp, Homo sapiens
gacacatagtgggag

SEQ ID NO: 2067727 - DNA, 15 bp, Homo sapiens
acacatagtgggagc

SEQ ID NO: 2067728 - DNA, 15 bp, Homo sapiens
cacatagtgggagct

SEQ ID NO: 2067729 - DNA, 15 bp, Homo sapiens
acatagtgggagctc

SEQ ID NO: 2067730 - DNA, 15 bp, Homo sapiens
catagtgggagctca

SEQ ID NO: 2067731 - DNA, 15 bp, Homo sapiens
atagtgggagctcaa

SEQ ID NO: 2067732 - DNA, 15 bp, Homo sapiens
tagtgggagctcaat

SEQ ID NO: 2067733 - DNA, 15 bp, Homo sapiens
agtgggagctcaata

SEQ ID NO: 2067734 - DNA, 15 bp, Homo sapiens
gtgggagctcaatat

SEQ ID NO: 2067735 - DNA, 15 bp, Homo sapiens
tgggagctcaatata

SEQ ID NO: 2067736 - DNA, 15 bp, Homo sapiens
gggagctcaatatat

SEQ ID NO: 2067737 - DNA, 15 bp, Homo sapiens
ggagctcaatatatg

SEQ ID NO: 2067738 - DNA, 15 bp, Homo sapiens
gagctcaatatatgt

SEQ ID NO: 2067739 - DNA, 15 bp, Homo sapiens
agctcaatatatgtg

SEQ ID NO: 2067740 - DNA, 15 bp, Homo sapiens
gctcaatatatgtgt

SEQ ID NO: 2067741 - DNA, 15 bp, Homo sapiens
ctcaatatatgtgtg

SEQ ID NO: 2067742 - DNA, 15 bp, Homo sapiens
tcaatatatgtgtgc

SEQ ID NO: 2067743 - DNA, 15 bp, Homo sapiens
caatatatgtgtgca

SEQ ID NO: 2067744 - DNA, 15 bp, Homo sapiens
aatatatgtgtgcag

SEQ ID NO: 2067745 - DNA, 15 bp, Homo sapiens
atatatgtgtgcaga

SEQ ID NO: 2067746 - DNA, 15 bp, Homo sapiens
tatatgtgtgcagaa

SEQ ID NO: 2067747 - DNA, 15 bp, Homo sapiens
atatgtgtgcagaat

SEQ ID NO: 2067748 - DNA, 15 bp, Homo sapiens
tatgtgtgcagaata

SEQ ID NO: 2067749 - DNA, 15 bp, Homo sapiens
atgtgtgcagaataa

SEQ ID NO: 2067750 - DNA, 15 bp, Homo sapiens
tgtgtgcagaataaa

SEQ ID NO: 2067751 - DNA, 15 bp, Homo sapiens
gtgtgcagaataaat

SEQ ID NO: 2067752 - DNA, 15 bp, Homo sapiens
tgtgcagaataaatg

SEQ ID NO: 2067753 - DNA, 15 bp, Homo sapiens
gtgcagaataaatgg

SEQ ID NO: 2067754 - DNA, 15 bp, Homo sapiens
tgcagaataaatgga

SEQ ID NO: 2067755 - DNA, 15 bp, Homo sapiens
gcagaataaatggat

SEQ ID NO: 2067756 - DNA, 15 bp, Homo sapiens
cagaataaatggatg

SEQ ID NO: 2067757 - DNA, 15 bp, Homo sapiens
agaataaatggatga

SEQ ID NO: 2067758 - DNA, 15 bp, Homo sapiens
gaataaatggatgaa

SEQ ID NO: 2067759 - DNA, 15 bp, Homo sapiens
aataaatggatgaat

SEQ ID NO: 2067760 - DNA, 15 bp, Homo sapiens
ataaatggatgaatc

SEQ ID NO: 2067761 - DNA, 15 bp, Homo sapiens
taaatggatgaatct

SEQ ID NO: 2067762 - DNA, 15 bp, Homo sapiens
aaatggatgaatctc

SEQ ID NO: 2067763 - DNA, 15 bp, Homo sapiens
aatggatgaatctct

SEQ ID NO: 2067764 - DNA, 15 bp, Homo sapiens
atggatgaatctcta

SEQ ID NO: 2067765 - DNA, 15 bp, Homo sapiens
tggatgaatctctat

SEQ ID NO: 2067766 - DNA, 15 bp, Homo sapiens
ggatgaatctctatt

SEQ ID NO: 2067767 - DNA, 15 bp, Homo sapiens
gatgaatctctatta

SEQ ID NO: 2067768 - DNA, 15 bp, Homo sapiens
atgaatctctattac

SEQ ID NO: 2067769 - DNA, 15 bp, Homo sapiens
tgaatctctattaca

SEQ ID NO: 2067770 - DNA, 15 bp, Homo sapiens
gaatctctattacac

SEQ ID NO: 2067771 - DNA, 15 bp, Homo sapiens
aatctctattacact

SEQ ID NO: 2067772 - DNA, 15 bp, Homo sapiens
atctctattacactt

SEQ ID NO: 2067773 - DNA, 15 bp, Homo sapiens
tctctattacacttt

SEQ ID NO: 2067774 - DNA, 15 bp, Homo sapiens
ctctattacactttt

SEQ ID NO: 2067775 - DNA, 15 bp, Homo sapiens
tctattacacttttc

SEQ ID NO: 2067776 - DNA, 15 bp, Homo sapiens
ctattacacttttct

SEQ ID NO: 2067777 - DNA, 15 bp, Homo sapiens
tattacacttttctg

SEQ ID NO: 2067778 - DNA, 15 bp, Homo sapiens
attacacttttctgt

SEQ ID NO: 2067779 - DNA, 15 bp, Homo sapiens
ttacacttttctgtt

SEQ ID NO: 2067780 - DNA, 15 bp, Homo sapiens
tacacttttctgtta

SEQ ID NO: 2067781 - DNA, 15 bp, Homo sapiens
acacttttctgttac

SEQ ID NO: 2067782 - DNA, 15 bp, Homo sapiens
cacttttctgttaca

SEQ ID NO: 2067783 - DNA, 15 bp, Homo sapiens
acttttctgttacat

SEQ ID NO: 2067784 - DNA, 15 bp, Homo sapiens
cttttctgttacatt

SEQ ID NO: 2067785 - DNA, 15 bp, Homo sapiens
ttttctgttacattg

SEQ ID NO: 2067786 - DNA, 15 bp, Homo sapiens
tttctgttacattga

SEQ ID NO: 2067787 - DNA, 15 bp, Homo sapiens
ttctgttacattgat

SEQ ID NO: 2067788 - DNA, 15 bp, Homo sapiens
tctgttacattgata

SEQ ID NO: 2067789 - DNA, 15 bp, Homo sapiens
ctgttacattgataa

SEQ ID NO: 2067790 - DNA, 15 bp, Homo sapiens
tgttacattgataag

SEQ ID NO: 2067791 - DNA, 15 bp, Homo sapiens
gttacattgataagc

SEQ ID NO: 2067792 - DNA, 15 bp, Homo sapiens
ttacattgataagca

SEQ ID NO: 2067793 - DNA, 15 bp, Homo sapiens
tacattgataagcaa

SEQ ID NO: 2067794 - DNA, 15 bp, Homo sapiens
acattgataagcaat

SEQ ID NO: 2067795 - DNA, 15 bp, Homo sapiens
cattgataagcaatt

SEQ ID NO: 2067796 - DNA, 15 bp, Homo sapiens
attgataagcaattt

SEQ ID NO: 2067797 - DNA, 15 bp, Homo sapiens
ttgataagcaatttc

SEQ ID NO: 2067798 - DNA, 15 bp, Homo sapiens
tgataagcaatttct

SEQ ID NO: 2067799 - DNA, 15 bp, Homo sapiens
gataagcaatttctt

SEQ ID NO: 2067800 - DNA, 15 bp, Homo sapiens
ataagcaatttctta

SEQ ID NO: 2067801 - DNA, 15 bp, Homo sapiens
taagcaatttcttaa

SEQ ID NO: 2067802 - DNA, 15 bp, Homo sapiens
aagcaatttcttaat

SEQ ID NO: 2067803 - DNA, 15 bp, Homo sapiens
agcaatttcttaatt

SEQ ID NO: 2067804 - DNA, 15 bp, Homo sapiens
gcaatttcttaattg

SEQ ID NO: 2067805 - DNA, 15 bp, Homo sapiens
caatttcttaattga

SEQ ID NO: 2067806 - DNA, 15 bp, Homo sapiens
aatttcttaattgag

SEQ ID NO: 2067807 - DNA, 15 bp, Homo sapiens
atttcttaattgagt

SEQ ID NO: 2067808 - DNA, 15 bp, Homo sapiens
tttcttaattgagtg

SEQ ID NO: 2067809 - DNA, 15 bp, Homo sapiens
ttcttaattgagtga

SEQ ID NO: 2067810 - DNA, 15 bp, Homo sapiens
tcttaattgagtgat

SEQ ID NO: 2067811 - DNA, 15 bp, Homo sapiens
cttaattgagtgatt

SEQ ID NO: 2067812 - DNA, 15 bp, Homo sapiens
ttaattgagtgattt

SEQ ID NO: 2067813 - DNA, 15 bp, Homo sapiens
taattgagtgatttc

SEQ ID NO: 2067814 - DNA, 15 bp, Homo sapiens
aattgagtgatttcc

SEQ ID NO: 2067815 - DNA, 15 bp, Homo sapiens
attgagtgatttcct

SEQ ID NO: 2067816 - DNA, 15 bp, Homo sapiens
ttgagtgatttccta

SEQ ID NO: 2067817 - DNA, 15 bp, Homo sapiens
tgagtgatttcctaa

SEQ ID NO: 2067818 - DNA, 15 bp, Homo sapiens
gagtgatttcctaat

SEQ ID NO: 2067819 - DNA, 15 bp, Homo sapiens
agtgatttcctaatt

SEQ ID NO: 2067820 - DNA, 15 bp, Homo sapiens
gtgatttcctaattg

SEQ ID NO: 2067821 - DNA, 15 bp, Homo sapiens
tgatttcctaattgc

SEQ ID NO: 2067822 - DNA, 15 bp, Homo sapiens
gatttcctaattgcc

SEQ ID NO: 2067823 - DNA, 15 bp, Homo sapiens
atttcctaattgcca

SEQ ID NO: 2067824 - DNA, 15 bp, Homo sapiens
tttcctaattgccat

SEQ ID NO: 2067825 - DNA, 15 bp, Homo sapiens
ttcctaattgccatg

SEQ ID NO: 2067826 - DNA, 15 bp, Homo sapiens
tcctaattgccatgt

SEQ ID NO: 2067827 - DNA, 15 bp, Homo sapiens
cctaattgccatgtg

SEQ ID NO: 2067828 - DNA, 15 bp, Homo sapiens
ctaattgccatgtgt

SEQ ID NO: 2067829 - DNA, 15 bp, Homo sapiens
taattgccatgtgtt

SEQ ID NO: 2067830 - DNA, 15 bp, Homo sapiens
aattgccatgtgttt

SEQ ID NO: 2067831 - DNA, 15 bp, Homo sapiens
attgccatgtgtttg

SEQ ID NO: 2067832 - DNA, 15 bp, Homo sapiens
ttgccatgtgtttgt

SEQ ID NO: 2067833 - DNA, 15 bp, Homo sapiens
tgccatgtgtttgtg

SEQ ID NO: 2067834 - DNA, 15 bp, Homo sapiens
gccatgtgtttgtgt

SEQ ID NO: 2067835 - DNA, 15 bp, Homo sapiens
ccatgtgtttgtgtt

SEQ ID NO: 2067836 - DNA, 15 bp, Homo sapiens
catgtgtttgtgttc

SEQ ID NO: 2067837 - DNA, 15 bp, Homo sapiens
atgtgtttgtgttct

SEQ ID NO: 2067838 - DNA, 15 bp, Homo sapiens
tgtgtttgtgttctt

SEQ ID NO: 2067839 - DNA, 15 bp, Homo sapiens
gtgtttgtgttcttt

SEQ ID NO: 2067840 - DNA, 15 bp, Homo sapiens
tgtttgtgttctttt

SEQ ID NO: 2067841 - DNA, 15 bp, Homo sapiens
gtttgtgttcttttt

SEQ ID NO: 2067842 - DNA, 15 bp, Homo sapiens
tttgtgttcttttta

SEQ ID NO: 2067843 - DNA, 15 bp, Homo sapiens
ttgtgttctttttag

SEQ ID NO: 2067844 - DNA, 15 bp, Homo sapiens
tgtgttctttttagg

SEQ ID NO: 2067845 - DNA, 15 bp, Homo sapiens
gtgttctttttaggc

SEQ ID NO: 2067846 - DNA, 15 bp, Homo sapiens
tgttctttttaggca

SEQ ID NO: 2067847 - DNA, 15 bp, Homo sapiens
gttctttttaggcag

SEQ ID NO: 2067848 - DNA, 15 bp, Homo sapiens
ttctttttaggcaga

SEQ ID NO: 2067849 - DNA, 15 bp, Homo sapiens
tctttttaggcagac

SEQ ID NO: 2067850 - DNA, 15 bp, Homo sapiens
ctttttaggcagacc

SEQ ID NO: 2067851 - DNA, 15 bp, Homo sapiens
tttttaggcagaccg

SEQ ID NO: 2067852 - DNA, 15 bp, Homo sapiens
ttttaggcagaccgt

SEQ ID NO: 2067853 - DNA, 15 bp, Homo sapiens
tttaggcagaccgta

SEQ ID NO: 2067854 - DNA, 15 bp, Homo sapiens
ttaggcagaccgtaa

SEQ ID NO: 2067855 - DNA, 15 bp, Homo sapiens
taggcagaccgtaag

SEQ ID NO: 2067856 - DNA, 15 bp, Homo sapiens
aggcagaccgtaagc

SEQ ID NO: 2067857 - DNA, 15 bp, Homo sapiens
ggcagaccgtaagct

SEQ ID NO: 2067858 - DNA, 15 bp, Homo sapiens
gcagaccgtaagctc

SEQ ID NO: 2067859 - DNA, 15 bp, Homo sapiens
cagaccgtaagctcc

SEQ ID NO: 2067860 - DNA, 15 bp, Homo sapiens
agaccgtaagctcct

SEQ ID NO: 2067861 - DNA, 15 bp, Homo sapiens
gaccgtaagctcctt

SEQ ID NO: 2067862 - DNA, 15 bp, Homo sapiens
accgtaagctcctta

SEQ ID NO: 2067863 - DNA, 15 bp, Homo sapiens
ccgtaagctccttat

SEQ ID NO: 2067864 - DNA, 15 bp, Homo sapiens
cgtaagctccttatt

SEQ ID NO: 2067865 - DNA, 15 bp, Homo sapiens
gtaagctccttattt

SEQ ID NO: 2067866 - DNA, 15 bp, Homo sapiens
taagctccttatttt

SEQ ID NO: 2067867 - DNA, 15 bp, Homo sapiens
aagctccttattttc

SEQ ID NO: 2067868 - DNA, 15 bp, Homo sapiens
agctccttattttct

SEQ ID NO: 2067869 - DNA, 15 bp, Homo sapiens
gctccttattttctg

SEQ ID NO: 2067870 - DNA, 15 bp, Homo sapiens
ctccttattttctgt

SEQ ID NO: 2067871 - DNA, 15 bp, Homo sapiens
tccttattttctgtt

SEQ ID NO: 2067872 - DNA, 15 bp, Homo sapiens
ccttattttctgttt

SEQ ID NO: 2067873 - DNA, 15 bp, Homo sapiens
cttattttctgtttt

SEQ ID NO: 2067874 - DNA, 15 bp, Homo sapiens
ttattttctgttttt

SEQ ID NO: 2067875 - DNA, 15 bp, Homo sapiens
tattttctgtttttt

SEQ ID NO: 2067876 - DNA, 15 bp, Homo sapiens
attttctgttttttg

SEQ ID NO: 2067877 - DNA, 15 bp, Homo sapiens
ttttctgttttttgt

SEQ ID NO: 2067878 - DNA, 15 bp, Homo sapiens
tttctgttttttgtt

SEQ ID NO: 2067879 - DNA, 15 bp, Homo sapiens
ttctgttttttgttg

SEQ ID NO: 2067880 - DNA, 15 bp, Homo sapiens
tctgttttttgttgt

SEQ ID NO: 2067881 - DNA, 15 bp, Homo sapiens
ctgttttttgttgtt

SEQ ID NO: 2067882 - DNA, 15 bp, Homo sapiens
tgttttttgttgttt

SEQ ID NO: 2067883 - DNA, 15 bp, Homo sapiens
gttttttgttgtttt

SEQ ID NO: 2067884 - DNA, 15 bp, Homo sapiens
ttttttgttgttttg

SEQ ID NO: 2067885 - DNA, 15 bp, Homo sapiens
tttttgttgttttgt

SEQ ID NO: 2067886 - DNA, 15 bp, Homo sapiens
ttttgttgttttgtt

SEQ ID NO: 2067887 - DNA, 15 bp, Homo sapiens
tttgttgttttgttt

SEQ ID NO: 2067888 - DNA, 15 bp, Homo sapiens
tgttttgttttttcc

SEQ ID NO: 2067889 - DNA, 15 bp, Homo sapiens
gttttgttttttccc

SEQ ID NO: 2067890 - DNA, 15 bp, Homo sapiens
ttttgttttttcccc

SEQ ID NO: 2067891 - DNA, 15 bp, Homo sapiens
tttgttttttccccc

SEQ ID NO: 2067892 - DNA, 15 bp, Homo sapiens
ttgttttttcccccc

SEQ ID NO: 2067893 - DNA, 15 bp, Homo sapiens
tgttttttcccccca

SEQ ID NO: 2067894 - DNA, 15 bp, Homo sapiens
gttttttccccccaa

SEQ ID NO: 2067895 - DNA, 15 bp, Homo sapiens
ttttttccccccaag

SEQ ID NO: 2067896 - DNA, 15 bp, Homo sapiens
tttttccccccaaga

SEQ ID NO: 2067897 - DNA, 15 bp, Homo sapiens
ttttccccccaagac

SEQ ID NO: 2067898 - DNA, 15 bp, Homo sapiens
tttccccccaagaca

SEQ ID NO: 2067899 - DNA, 15 bp, Homo sapiens
ttccccccaagacag

SEQ ID NO: 2067900 - DNA, 15 bp, Homo sapiens
tccccccaagacagg

SEQ ID NO: 2067901 - DNA, 15 bp, Homo sapiens
ccccccaagacaggg

SEQ ID NO: 2067902 - DNA, 15 bp, Homo sapiens
cccccaagacagggt

SEQ ID NO: 2067903 - DNA, 15 bp, Homo sapiens
ccccaagacagggtc

SEQ ID NO: 2067904 - DNA, 15 bp, Homo sapiens
cccaagacagggtct

SEQ ID NO: 2067905 - DNA, 15 bp, Homo sapiens
ccaagacagggtctc

SEQ ID NO: 2067906 - DNA, 15 bp, Homo sapiens
caagacagggtctct

SEQ ID NO: 2067907 - DNA, 15 bp, Homo sapiens
aagacagggtctctc

SEQ ID NO: 2067908 - DNA, 15 bp, Homo sapiens
gacagggtctctctc

SEQ ID NO: 2067909 - DNA, 15 bp, Homo sapiens
acagggtctctctct

SEQ ID NO: 2067910 - DNA, 15 bp, Homo sapiens
cagggtctctctctg

SEQ ID NO: 2067911 - DNA, 15 bp, Homo sapiens
agggtctctctctgt

SEQ ID NO: 2067912 - DNA, 15 bp, Homo sapiens
gggtctctctctgtt

SEQ ID NO: 2067913 - DNA, 15 bp, Homo sapiens
ggtctctctctgttg

SEQ ID NO: 2067914 - DNA, 15 bp, Homo sapiens
gtctctctctgttgc

SEQ ID NO: 2067915 - DNA, 15 bp, Homo sapiens
tctctctctgttgcc

SEQ ID NO: 2067916 - DNA, 15 bp, Homo sapiens
ctctctctgttgccc

SEQ ID NO: 2067917 - DNA, 15 bp, Homo sapiens
tctctctgttgccca

SEQ ID NO: 2067918 - DNA, 15 bp, Homo sapiens
ctctctgttgcccag

SEQ ID NO: 2067919 - DNA, 15 bp, Homo sapiens
tctgttgcccaggcc

SEQ ID NO: 2067920 - DNA, 15 bp, Homo sapiens
ctgttgcccaggcca

SEQ ID NO: 2067921 - DNA, 15 bp, Homo sapiens
tgttgcccaggccag

SEQ ID NO: 2067922 - DNA, 15 bp, Homo sapiens
gttgcccaggccaga

SEQ ID NO: 2067923 - DNA, 15 bp, Homo sapiens
ttgcccaggccagag

SEQ ID NO: 2067924 - DNA, 15 bp, Homo sapiens
tgcccaggccagagt

SEQ ID NO: 2067925 - DNA, 15 bp, Homo sapiens
gcccaggccagagta

SEQ ID NO: 2067926 - DNA, 15 bp, Homo sapiens
cccaggccagagtat

SEQ ID NO: 2067927 - DNA, 15 bp, Homo sapiens
ccaggccagagtata

SEQ ID NO: 2067928 - DNA, 15 bp, Homo sapiens
caggccagagtatag

SEQ ID NO: 2067929 - DNA, 15 bp, Homo sapiens
aggccagagtatagc

SEQ ID NO: 2067930 - DNA, 15 bp, Homo sapiens
ggccagagtatagcg

SEQ ID NO: 2067931 - DNA, 15 bp, Homo sapiens
gccagagtatagcgg

SEQ ID NO: 2067932 - DNA, 15 bp, Homo sapiens
ccagagtatagcggt

SEQ ID NO: 2067933 - DNA, 15 bp, Homo sapiens
cagagtatagcggtg

SEQ ID NO: 2067934 - DNA, 15 bp, Homo sapiens
agagtatagcggtgt

SEQ ID NO: 2067935 - DNA, 15 bp, Homo sapiens
gagtatagcggtgta

SEQ ID NO: 2067936 - DNA, 15 bp, Homo sapiens
agtatagcggtgtaa

SEQ ID NO: 2067937 - DNA, 15 bp, Homo sapiens
gtatagcggtgtaat

SEQ ID NO: 2067938 - DNA, 15 bp, Homo sapiens
tatagcggtgtaatc

SEQ ID NO: 2067939 - DNA, 15 bp, Homo sapiens
atagcggtgtaatca

SEQ ID NO: 2067940 - DNA, 15 bp, Homo sapiens
tagcggtgtaatcat

SEQ ID NO: 2067941 - DNA, 15 bp, Homo sapiens
agcggtgtaatcata

SEQ ID NO: 2067942 - DNA, 15 bp, Homo sapiens
gcggtgtaatcatag

SEQ ID NO: 2067943 - DNA, 15 bp, Homo sapiens
cggtgtaatcatagc

SEQ ID NO: 2067944 - DNA, 15 bp, Homo sapiens
ggtgtaatcatagct

SEQ ID NO: 2067945 - DNA, 15 bp, Homo sapiens
gtgtaatcatagctc

SEQ ID NO: 2067946 - DNA, 15 bp, Homo sapiens
tgtaatcatagctca

SEQ ID NO: 2067947 - DNA, 15 bp, Homo sapiens
gtaatcatagctcac

SEQ ID NO: 2067948 - DNA, 15 bp, Homo sapiens
taatcatagctcact

SEQ ID NO: 2067949 - DNA, 15 bp, Homo sapiens
aatcatagctcactg

SEQ ID NO: 2067950 - DNA, 15 bp, Homo sapiens
tcatagctcactgcc

SEQ ID NO: 2067951 - DNA, 15 bp, Homo sapiens
catagctcactgcca

SEQ ID NO: 2067952 - DNA, 15 bp, Homo sapiens
atagctcactgccac

SEQ ID NO: 2067953 - DNA, 15 bp, Homo sapiens
tagctcactgccacc

SEQ ID NO: 2067954 - DNA, 15 bp, Homo sapiens
agctcactgccacct

SEQ ID NO: 2067955 - DNA, 15 bp, Homo sapiens
gctcactgccacctc

SEQ ID NO: 2067956 - DNA, 15 bp, Homo sapiens
ctcactgccacctca

SEQ ID NO: 2067957 - DNA, 15 bp, Homo sapiens
tcactgccacctcaa

SEQ ID NO: 2067958 - DNA, 15 bp, Homo sapiens
cactgccacctcaaa

SEQ ID NO: 2067959 - DNA, 15 bp, Homo sapiens
actgccacctcaaac

SEQ ID NO: 2067960 - DNA, 15 bp, Homo sapiens
ctgccacctcaaact

SEQ ID NO: 2067961 - DNA, 15 bp, Homo sapiens
tgccacctcaaactc

SEQ ID NO: 2067962 - DNA, 15 bp, Homo sapiens
gccacctcaaactcc

SEQ ID NO: 2067963 - DNA, 15 bp, Homo sapiens
ccacctcaaactcct

SEQ ID NO: 2067964 - DNA, 15 bp, Homo sapiens
cacctcaaactccta

SEQ ID NO: 2067965 - DNA, 15 bp, Homo sapiens
acctcaaactcctag

SEQ ID NO: 2067966 - DNA, 15 bp, Homo sapiens
cctcaaactcctagg

SEQ ID NO: 2067967 - DNA, 15 bp, Homo sapiens
ctcaaactcctaggc

SEQ ID NO: 2067968 - DNA, 15 bp, Homo sapiens
tcaaactcctaggct

SEQ ID NO: 2067969 - DNA, 15 bp, Homo sapiens
caaactcctaggctc

SEQ ID NO: 2067970 - DNA, 15 bp, Homo sapiens
aaactcctaggctca

SEQ ID NO: 2067971 - DNA, 15 bp, Homo sapiens
aactcctaggctcaa

SEQ ID NO: 2067972 - DNA, 15 bp, Homo sapiens
actcctaggctcaag

SEQ ID NO: 2067973 - DNA, 15 bp, Homo sapiens
ctcctaggctcaagc

SEQ ID NO: 2067974 - DNA, 15 bp, Homo sapiens
tcctaggctcaagca

SEQ ID NO: 2067975 - DNA, 15 bp, Homo sapiens
cctaggctcaagcaa

SEQ ID NO: 2067976 - DNA, 15 bp, Homo sapiens
ctaggctcaagcaat

SEQ ID NO: 2067977 - DNA, 15 bp, Homo sapiens
taggctcaagcaatc

SEQ ID NO: 2067978 - DNA, 15 bp, Homo sapiens
aggctcaagcaatcc

SEQ ID NO: 2067979 - DNA, 15 bp, Homo sapiens
caagcaatcctccct

SEQ ID NO: 2067980 - DNA, 15 bp, Homo sapiens
aagcaatcctccctg

SEQ ID NO: 2067981 - DNA, 15 bp, Homo sapiens
agcaatcctccctgc

SEQ ID NO: 2067982 - DNA, 15 bp, Homo sapiens
gcaatcctccctgct

SEQ ID NO: 2067983 - DNA, 15 bp, Homo sapiens
caatcctccctgctc

SEQ ID NO: 2067984 - DNA, 15 bp, Homo sapiens
aatcctccctgctcg

SEQ ID NO: 2067985 - DNA, 15 bp, Homo sapiens
atcctccctgctcgg

SEQ ID NO: 2067986 - DNA, 15 bp, Homo sapiens
tcctccctgctcggt

SEQ ID NO: 2067987 - DNA, 15 bp, Homo sapiens
cctccctgctcggtc

SEQ ID NO: 2067988 - DNA, 15 bp, Homo sapiens
ctccctgctcggtct

SEQ ID NO: 2067989 - DNA, 15 bp, Homo sapiens
tccctgctcggtctc

SEQ ID NO: 2067990 - DNA, 15 bp, Homo sapiens
ccctgctcggtctcc

SEQ ID NO: 2067991 - DNA, 15 bp, Homo sapiens
cctgctcggtctccc

SEQ ID NO: 2067992 - DNA, 15 bp, Homo sapiens
ctgctcggtctccca

SEQ ID NO: 2067993 - DNA, 15 bp, Homo sapiens
tgctcggtctcccaa

SEQ ID NO: 2067994 - DNA, 15 bp, Homo sapiens
gctcggtctcccaaa

SEQ ID NO: 2067995 - DNA, 15 bp, Homo sapiens
cggtctcccaaagtg

SEQ ID NO: 2067996 - DNA, 15 bp, Homo sapiens
agtgctggaattacg

SEQ ID NO: 2067997 - DNA, 15 bp, Homo sapiens
gtgctggaattacgg

SEQ ID NO: 2067998 - DNA, 15 bp, Homo sapiens
tgctggaattacggg

SEQ ID NO: 2067999 - DNA, 15 bp, Homo sapiens
gctggaattacgggc

SEQ ID NO: 2068000 - DNA, 15 bp, Homo sapiens
ctggaattacgggca

SEQ ID NO: 2068001 - DNA, 15 bp, Homo sapiens
tggaattacgggcat

SEQ ID NO: 2068002 - DNA, 15 bp, Homo sapiens
ggaattacgggcatg

SEQ ID NO: 2068003 - DNA, 15 bp, Homo sapiens
gaattacgggcatga

SEQ ID NO: 2068004 - DNA, 15 bp, Homo sapiens
aattacgggcatgag

SEQ ID NO: 2068005 - DNA, 15 bp, Homo sapiens
acgggcatgagccat

SEQ ID NO: 2068006 - DNA, 15 bp, Homo sapiens
cgggcatgagccatc

SEQ ID NO: 2068007 - DNA, 15 bp, Homo sapiens
gggcatgagccatcg

SEQ ID NO: 2068008 - DNA, 15 bp, Homo sapiens
ggcatgagccatcgt

SEQ ID NO: 2068009 - DNA, 15 bp, Homo sapiens
gcatgagccatcgtg

SEQ ID NO: 2068010 - DNA, 15 bp, Homo sapiens
catgagccatcgtgc

SEQ ID NO: 2068011 - DNA, 15 bp, Homo sapiens
atgagccatcgtgcc

SEQ ID NO: 2068012 - DNA, 15 bp, Homo sapiens
tgagccatcgtgccc

SEQ ID NO: 2068013 - DNA, 15 bp, Homo sapiens
gagccatcgtgcccg

SEQ ID NO: 2068014 - DNA, 15 bp, Homo sapiens
agccatcgtgcccgt

SEQ ID NO: 2068015 - DNA, 15 bp, Homo sapiens
gccatcgtgcccgtc

SEQ ID NO: 2068016 - DNA, 15 bp, Homo sapiens
ccatcgtgcccgtcc

SEQ ID NO: 2068017 - DNA, 15 bp, Homo sapiens
catcgtgcccgtcca

SEQ ID NO: 2068018 - DNA, 15 bp, Homo sapiens
atcgtgcccgtccag

SEQ ID NO: 2068019 - DNA, 15 bp, Homo sapiens
tcgtgcccgtccagc

SEQ ID NO: 2068020 - DNA, 15 bp, Homo sapiens
cgtgcccgtccagct

SEQ ID NO: 2068021 - DNA, 15 bp, Homo sapiens
gtgcccgtccagctc

SEQ ID NO: 2068022 - DNA, 15 bp, Homo sapiens
tgcccgtccagctcc

SEQ ID NO: 2068023 - DNA, 15 bp, Homo sapiens
gcccgtccagctcct

SEQ ID NO: 2068024 - DNA, 15 bp, Homo sapiens
cccgtccagctcctt

SEQ ID NO: 2068025 - DNA, 15 bp, Homo sapiens
ccgtccagctccttg

SEQ ID NO: 2068026 - DNA, 15 bp, Homo sapiens
cgtccagctccttga

SEQ ID NO: 2068027 - DNA, 15 bp, Homo sapiens
gtccagctccttgat

SEQ ID NO: 2068028 - DNA, 15 bp, Homo sapiens
tccagctccttgatt

SEQ ID NO: 2068029 - DNA, 15 bp, Homo sapiens
ccagctccttgattt

SEQ ID NO: 2068030 - DNA, 15 bp, Homo sapiens
cagctccttgatttt

SEQ ID NO: 2068031 - DNA, 15 bp, Homo sapiens
agctccttgatttta

SEQ ID NO: 2068032 - DNA, 15 bp, Homo sapiens
gctccttgattttaa

SEQ ID NO: 2068033 - DNA, 15 bp, Homo sapiens
ctccttgattttaac

SEQ ID NO: 2068034 - DNA, 15 bp, Homo sapiens
tccttgattttaaca

SEQ ID NO: 2068035 - DNA, 15 bp, Homo sapiens
ccttgattttaacag

SEQ ID NO: 2068036 - DNA, 15 bp, Homo sapiens
cttgattttaacagc

SEQ ID NO: 2068037 - DNA, 15 bp, Homo sapiens
ttgattttaacagcc

SEQ ID NO: 2068038 - DNA, 15 bp, Homo sapiens
tgattttaacagcca

SEQ ID NO: 2068039 - DNA, 15 bp, Homo sapiens
gattttaacagccat

SEQ ID NO: 2068040 - DNA, 15 bp, Homo sapiens
attttaacagccatc

SEQ ID NO: 2068041 - DNA, 15 bp, Homo sapiens
ttttaacagccatct

SEQ ID NO: 2068042 - DNA, 15 bp, Homo sapiens
tttaacagccatctc

SEQ ID NO: 2068043 - DNA, 15 bp, Homo sapiens
ttaacagccatctca

SEQ ID NO: 2068044 - DNA, 15 bp, Homo sapiens
taacagccatctcaa

SEQ ID NO: 2068045 - DNA, 15 bp, Homo sapiens
aacagccatctcaaa

SEQ ID NO: 2068046 - DNA, 15 bp, Homo sapiens
acagccatctcaaaa

SEQ ID NO: 2068047 - DNA, 15 bp, Homo sapiens
cagccatctcaaaaa

SEQ ID NO: 2068048 - DNA, 15 bp, Homo sapiens
agccatctcaaaaac

SEQ ID NO: 2068049 - DNA, 15 bp, Homo sapiens
gccatctcaaaaaca

SEQ ID NO: 2068050 - DNA, 15 bp, Homo sapiens
ccatctcaaaaacac

SEQ ID NO: 2068051 - DNA, 15 bp, Homo sapiens
catctcaaaaacact

SEQ ID NO: 2068052 - DNA, 15 bp, Homo sapiens
atctcaaaaacactt

SEQ ID NO: 2068053 - DNA, 15 bp, Homo sapiens
tctcaaaaacactta

SEQ ID NO: 2068054 - DNA, 15 bp, Homo sapiens
ctcaaaaacacttag

SEQ ID NO: 2068055 - DNA, 15 bp, Homo sapiens
tcaaaaacacttaga

SEQ ID NO: 2068056 - DNA, 15 bp, Homo sapiens
caaaaacacttagac

SEQ ID NO: 2068057 - DNA, 15 bp, Homo sapiens
aaaaacacttagaca

SEQ ID NO: 2068058 - DNA, 15 bp, Homo sapiens
aaaacacttagacat

SEQ ID NO: 2068059 - DNA, 15 bp, Homo sapiens
aaacacttagacatg

SEQ ID NO: 2068060 - DNA, 15 bp, Homo sapiens
aacacttagacatgt

SEQ ID NO: 2068061 - DNA, 15 bp, Homo sapiens
acacttagacatgtt

SEQ ID NO: 2068062 - DNA, 15 bp, Homo sapiens
cacttagacatgttc

SEQ ID NO: 2068063 - DNA, 15 bp, Homo sapiens
acttagacatgttcc

SEQ ID NO: 2068064 - DNA, 15 bp, Homo sapiens
cttagacatgttcct

SEQ ID NO: 2068065 - DNA, 15 bp, Homo sapiens
ttagacatgttccta

SEQ ID NO: 2068066 - DNA, 15 bp, Homo sapiens
tagacatgttcctag

SEQ ID NO: 2068067 - DNA, 15 bp, Homo sapiens
agacatgttcctaga

SEQ ID NO: 2068068 - DNA, 15 bp, Homo sapiens
gacatgttcctagaa

SEQ ID NO: 2068069 - DNA, 15 bp, Homo sapiens
acatgttcctagaaa

SEQ ID NO: 2068070 - DNA, 15 bp, Homo sapiens
catgttcctagaaat

SEQ ID NO: 2068071 - DNA, 15 bp, Homo sapiens
atgttcctagaaatg

SEQ ID NO: 2068072 - DNA, 15 bp, Homo sapiens
tgttcctagaaatgt

SEQ ID NO: 2068073 - DNA, 15 bp, Homo sapiens
gttcctagaaatgtg

SEQ ID NO: 2068074 - DNA, 15 bp, Homo sapiens
ttcctagaaatgtgc

SEQ ID NO: 2068075 - DNA, 15 bp, Homo sapiens
tcctagaaatgtgcc

SEQ ID NO: 2068076 - DNA, 15 bp, Homo sapiens
cctagaaatgtgccc

SEQ ID NO: 2068077 - DNA, 15 bp, Homo sapiens
tattcctaccctagg

SEQ ID NO: 2068078 - DNA, 15 bp, Homo sapiens
attcctaccctaggc

SEQ ID NO: 2068079 - DNA, 15 bp, Homo sapiens
ttcctaccctaggct

SEQ ID NO: 2068080 - DNA, 15 bp, Homo sapiens
tcctaccctaggctc

SEQ ID NO: 2068081 - DNA, 15 bp, Homo sapiens
cctaccctaggctct

SEQ ID NO: 2068082 - DNA, 15 bp, Homo sapiens
ctaccctaggctctc

SEQ ID NO: 2068083 - DNA, 15 bp, Homo sapiens
taccctaggctctcc

SEQ ID NO: 2068084 - DNA, 15 bp, Homo sapiens
accctaggctctccc

SEQ ID NO: 2068085 - DNA, 15 bp, Homo sapiens
ccctaggctctccca

SEQ ID NO: 2068086 - DNA, 15 bp, Homo sapiens
cctaggctctcccag

SEQ ID NO: 2068087 - DNA, 15 bp, Homo sapiens
ctaggctctcccagt

SEQ ID NO: 2068088 - DNA, 15 bp, Homo sapiens
taggctctcccagtc

SEQ ID NO: 2068089 - DNA, 15 bp, Homo sapiens
aggctctcccagtct

SEQ ID NO: 2068090 - DNA, 15 bp, Homo sapiens
ggctctcccagtcta

SEQ ID NO: 2068091 - DNA, 15 bp, Homo sapiens
gctctcccagtctag

SEQ ID NO: 2068092 - DNA, 15 bp, Homo sapiens
ctctcccagtctagt

SEQ ID NO: 2068093 - DNA, 15 bp, Homo sapiens
tctcccagtctagtc

SEQ ID NO: 2068094 - DNA, 15 bp, Homo sapiens
ctcccagtctagtcc

SEQ ID NO: 2068095 - DNA, 15 bp, Homo sapiens
tcccagtctagtcca

SEQ ID NO: 2068096 - DNA, 15 bp, Homo sapiens
cccagtctagtccac

SEQ ID NO: 2068097 - DNA, 15 bp, Homo sapiens
ccagtctagtccaca

SEQ ID NO: 2068098 - DNA, 15 bp, Homo sapiens
cagtctagtccacaa

SEQ ID NO: 2068099 - DNA, 15 bp, Homo sapiens
agtctagtccacaat

SEQ ID NO: 2068100 - DNA, 15 bp, Homo sapiens
gtctagtccacaatc

SEQ ID NO: 2068101 - DNA, 15 bp, Homo sapiens
tctagtccacaatcc

SEQ ID NO: 2068102 - DNA, 15 bp, Homo sapiens
ctagtccacaatcct

SEQ ID NO: 2068103 - DNA, 15 bp, Homo sapiens
tagtccacaatcctg

SEQ ID NO: 2068104 - DNA, 15 bp, Homo sapiens
agtccacaatcctgt

SEQ ID NO: 2068105 - DNA, 15 bp, Homo sapiens
gtccacaatcctgtc

SEQ ID NO: 2068106 - DNA, 15 bp, Homo sapiens
tccacaatcctgtcc

SEQ ID NO: 2068107 - DNA, 15 bp, Homo sapiens
ccacaatcctgtcca

SEQ ID NO: 2068108 - DNA, 15 bp, Homo sapiens
cacaatcctgtccac

SEQ ID NO: 2068109 - DNA, 15 bp, Homo sapiens
acaatcctgtccaca

SEQ ID NO: 2068110 - DNA, 15 bp, Homo sapiens
caatcctgtccacag

SEQ ID NO: 2068111 - DNA, 15 bp, Homo sapiens
aatcctgtccacagg

SEQ ID NO: 2068112 - DNA, 15 bp, Homo sapiens
atcctgtccacagga

SEQ ID NO: 2068113 - DNA, 15 bp, Homo sapiens
tcctgtccacaggac

SEQ ID NO: 2068114 - DNA, 15 bp, Homo sapiens
cctgtccacaggaca

SEQ ID NO: 2068115 - DNA, 15 bp, Homo sapiens
ctgtccacaggacat

SEQ ID NO: 2068116 - DNA, 15 bp, Homo sapiens
tgtccacaggacata

SEQ ID NO: 2068117 - DNA, 15 bp, Homo sapiens
gtccacaggacatag

SEQ ID NO: 2068118 - DNA, 15 bp, Homo sapiens
tccacaggacatagt

SEQ ID NO: 2068119 - DNA, 15 bp, Homo sapiens
ccacaggacatagtc

SEQ ID NO: 2068120 - DNA, 15 bp, Homo sapiens
cacaggacatagtcc

SEQ ID NO: 2068121 - DNA, 15 bp, Homo sapiens
acaggacatagtcca

SEQ ID NO: 2068122 - DNA, 15 bp, Homo sapiens
caggacatagtccaa

SEQ ID NO: 2068123 - DNA, 15 bp, Homo sapiens
aggacatagtccaac

SEQ ID NO: 2068124 - DNA, 15 bp, Homo sapiens
ggacatagtccaacc

SEQ ID NO: 2068125 - DNA, 15 bp, Homo sapiens
gacatagtccaacct

SEQ ID NO: 2068126 - DNA, 15 bp, Homo sapiens
acatagtccaaccta

SEQ ID NO: 2068127 - DNA, 15 bp, Homo sapiens
catagtccaacctat

SEQ ID NO: 2068128 - DNA, 15 bp, Homo sapiens
atagtccaacctatc

SEQ ID NO: 2068129 - DNA, 15 bp, Homo sapiens
tagtccaacctatct

SEQ ID NO: 2068130 - DNA, 15 bp, Homo sapiens
agtccaacctatctc

SEQ ID NO: 2068131 - DNA, 15 bp, Homo sapiens
gtccaacctatctct

SEQ ID NO: 2068132 - DNA, 15 bp, Homo sapiens
tccaacctatctctc

SEQ ID NO: 2068133 - DNA, 15 bp, Homo sapiens
ccaacctatctctcc

SEQ ID NO: 2068134 - DNA, 15 bp, Homo sapiens
caacctatctctcca

SEQ ID NO: 2068135 - DNA, 15 bp, Homo sapiens
aacctatctctccaa

SEQ ID NO: 2068136 - DNA, 15 bp, Homo sapiens
acctatctctccaaa

SEQ ID NO: 2068137 - DNA, 15 bp, Homo sapiens
cctatctctccaaac

SEQ ID NO: 2068138 - DNA, 15 bp, Homo sapiens
ctatctctccaaact

SEQ ID NO: 2068139 - DNA, 15 bp, Homo sapiens
tatctctccaaacta

SEQ ID NO: 2068140 - DNA, 15 bp, Homo sapiens
atctctccaaactaa

SEQ ID NO: 2068141 - DNA, 15 bp, Homo sapiens
tctctccaaactaat

SEQ ID NO: 2068142 - DNA, 15 bp, Homo sapiens
ctctccaaactaatt

SEQ ID NO: 2068143 - DNA, 15 bp, Homo sapiens
tctccaaactaattt

SEQ ID NO: 2068144 - DNA, 15 bp, Homo sapiens
ctccaaactaatttc

SEQ ID NO: 2068145 - DNA, 15 bp, Homo sapiens
tccaaactaatttct

SEQ ID NO: 2068146 - DNA, 15 bp, Homo sapiens
ccaaactaatttctt

SEQ ID NO: 2068147 - DNA, 15 bp, Homo sapiens
caaactaatttcttc

SEQ ID NO: 2068148 - DNA, 15 bp, Homo sapiens
aactaatttcttcct

SEQ ID NO: 2068149 - DNA, 15 bp, Homo sapiens
actaatttcttcctg

SEQ ID NO: 2068150 - DNA, 15 bp, Homo sapiens
ctaatttcttcctgc

SEQ ID NO: 2068151 - DNA, 15 bp, Homo sapiens
taatttcttcctgcc

SEQ ID NO: 2068152 - DNA, 15 bp, Homo sapiens
aatttcttcctgcct

SEQ ID NO: 2068153 - DNA, 15 bp, Homo sapiens
atttcttcctgcctc

SEQ ID NO: 2068154 - DNA, 15 bp, Homo sapiens
tttcttcctgcctcc

SEQ ID NO: 2068155 - DNA, 15 bp, Homo sapiens
ttcttcctgcctccc

SEQ ID NO: 2068156 - DNA, 15 bp, Homo sapiens
cttcctgcctccctg

SEQ ID NO: 2068157 - DNA, 15 bp, Homo sapiens
ttcctgcctccctgc

SEQ ID NO: 2068158 - DNA, 15 bp, Homo sapiens
tcctgcctccctgcc

SEQ ID NO: 2068159 - DNA, 15 bp, Homo sapiens
cctgcctccctgcct

SEQ ID NO: 2068160 - DNA, 15 bp, Homo sapiens
ctgcctccctgccta

SEQ ID NO: 2068161 - DNA, 15 bp, Homo sapiens
tgcctccctgcctac

SEQ ID NO: 2068162 - DNA, 15 bp, Homo sapiens
gcctccctgcctacc

SEQ ID NO: 2068163 - DNA, 15 bp, Homo sapiens
cctccctgcctaccc

SEQ ID NO: 2068164 - DNA, 15 bp, Homo sapiens
ctccctgcctacccc

SEQ ID NO: 2068165 - DNA, 15 bp, Homo sapiens
tccctgcctaccccc

SEQ ID NO: 2068166 - DNA, 15 bp, Homo sapiens
ccctgcctaccccct

SEQ ID NO: 2068167 - DNA, 15 bp, Homo sapiens
cctgcctaccccctc

SEQ ID NO: 2068168 - DNA, 15 bp, Homo sapiens
ctgcctaccccctca

SEQ ID NO: 2068169 - DNA, 15 bp, Homo sapiens
tgcctaccccctcat

SEQ ID NO: 2068170 - DNA, 15 bp, Homo sapiens
gcctaccccctcata

SEQ ID NO: 2068171 - DNA, 15 bp, Homo sapiens
cctaccccctcataa

SEQ ID NO: 2068172 - DNA, 15 bp, Homo sapiens
ctaccccctcataac

SEQ ID NO: 2068173 - DNA, 15 bp, Homo sapiens
taccccctcataacc

SEQ ID NO: 2068174 - DNA, 15 bp, Homo sapiens
accccctcataacct

SEQ ID NO: 2068175 - DNA, 15 bp, Homo sapiens
ccccctcataaccta

SEQ ID NO: 2068176 - DNA, 15 bp, Homo sapiens
cccctcataacctac

SEQ ID NO: 2068177 - DNA, 15 bp, Homo sapiens
ccctcataacctact

SEQ ID NO: 2068178 - DNA, 15 bp, Homo sapiens
cctcataacctactt

SEQ ID NO: 2068179 - DNA, 15 bp, Homo sapiens
ctcataacctacttt

SEQ ID NO: 2068180 - DNA, 15 bp, Homo sapiens
tcataacctactttt

SEQ ID NO: 2068181 - DNA, 15 bp, Homo sapiens
cataacctacttttt

SEQ ID NO: 2068182 - DNA, 15 bp, Homo sapiens
ataacctacttttta

SEQ ID NO: 2068183 - DNA, 15 bp, Homo sapiens
taacctactttttag

SEQ ID NO: 2068184 - DNA, 15 bp, Homo sapiens
aacctactttttagc

SEQ ID NO: 2068185 - DNA, 15 bp, Homo sapiens
acctactttttagct

SEQ ID NO: 2068186 - DNA, 15 bp, Homo sapiens
cctactttttagcta

SEQ ID NO: 2068187 - DNA, 15 bp, Homo sapiens
ctactttttagctac

SEQ ID NO: 2068188 - DNA, 15 bp, Homo sapiens
tactttttagctact

SEQ ID NO: 2068189 - DNA, 15 bp, Homo sapiens
actttttagctactc

SEQ ID NO: 2068190 - DNA, 15 bp, Homo sapiens
ctttttagctactct

SEQ ID NO: 2068191 - DNA, 15 bp, Homo sapiens
tttttagctactcta

SEQ ID NO: 2068192 - DNA, 15 bp, Homo sapiens
ttttagctactctaa

SEQ ID NO: 2068193 - DNA, 15 bp, Homo sapiens
tttagctactctaaa

SEQ ID NO: 2068194 - DNA, 15 bp, Homo sapiens
ttagctactctaaac

SEQ ID NO: 2068195 - DNA, 15 bp, Homo sapiens
tagctactctaaact

SEQ ID NO: 2068196 - DNA, 15 bp, Homo sapiens
agctactctaaactt

SEQ ID NO: 2068197 - DNA, 15 bp, Homo sapiens
gctactctaaacttc

SEQ ID NO: 2068198 - DNA, 15 bp, Homo sapiens
ctactctaaacttct

SEQ ID NO: 2068199 - DNA, 15 bp, Homo sapiens
tactctaaacttctc

SEQ ID NO: 2068200 - DNA, 15 bp, Homo sapiens
actctaaacttctca

SEQ ID NO: 2068201 - DNA, 15 bp, Homo sapiens
ctctaaacttctcac

SEQ ID NO: 2068202 - DNA, 15 bp, Homo sapiens
tctaaacttctcact

SEQ ID NO: 2068203 - DNA, 15 bp, Homo sapiens
ctaaacttctcactt

SEQ ID NO: 2068204 - DNA, 15 bp, Homo sapiens
taaacttctcacttt

SEQ ID NO: 2068205 - DNA, 15 bp, Homo sapiens
aaacttctcactttt

SEQ ID NO: 2068206 - DNA, 15 bp, Homo sapiens
aacttctcacttttt

SEQ ID NO: 2068207 - DNA, 15 bp, Homo sapiens
acttctcactttttt

SEQ ID NO: 2068208 - DNA, 15 bp, Homo sapiens
cttctcacttttttc

SEQ ID NO: 2068209 - DNA, 15 bp, Homo sapiens
ttctcacttttttca

SEQ ID NO: 2068210 - DNA, 15 bp, Homo sapiens
tctcacttttttcat

SEQ ID NO: 2068211 - DNA, 15 bp, Homo sapiens
ctcacttttttcatt

SEQ ID NO: 2068212 - DNA, 15 bp, Homo sapiens
tcacttttttcattt

SEQ ID NO: 2068213 - DNA, 15 bp, Homo sapiens
cacttttttcatttt

SEQ ID NO: 2068214 - DNA, 15 bp, Homo sapiens
acttttttcattttg

SEQ ID NO: 2068215 - DNA, 15 bp, Homo sapiens
cttttttcattttgt

SEQ ID NO: 2068216 - DNA, 15 bp, Homo sapiens
ttttttcattttgta

SEQ ID NO: 2068217 - DNA, 15 bp, Homo sapiens
tttttcattttgtac

SEQ ID NO: 2068218 - DNA, 15 bp, Homo sapiens
ttttcattttgtaca

SEQ ID NO: 2068219 - DNA, 15 bp, Homo sapiens
tttcattttgtacaa

SEQ ID NO: 2068220 - DNA, 15 bp, Homo sapiens
ttcattttgtacaac

SEQ ID NO: 2068221 - DNA, 15 bp, Homo sapiens
tcattttgtacaact

SEQ ID NO: 2068222 - DNA, 15 bp, Homo sapiens
cattttgtacaactt

SEQ ID NO: 2068223 - DNA, 15 bp, Homo sapiens
attttgtacaacttt

SEQ ID NO: 2068224 - DNA, 15 bp, Homo sapiens
ttttgtacaacttta

SEQ ID NO: 2068225 - DNA, 15 bp, Homo sapiens
tttgtacaactttat

SEQ ID NO: 2068226 - DNA, 15 bp, Homo sapiens
ttgtacaactttatt

SEQ ID NO: 2068227 - DNA, 15 bp, Homo sapiens
tgtacaactttatta

SEQ ID NO: 2068228 - DNA, 15 bp, Homo sapiens
gtacaactttattaa

SEQ ID NO: 2068229 - DNA, 15 bp, Homo sapiens
tacaactttattaaa

SEQ ID NO: 2068230 - DNA, 15 bp, Homo sapiens
acaactttattaaag

SEQ ID NO: 2068231 - DNA, 15 bp, Homo sapiens
caactttattaaagt

SEQ ID NO: 2068232 - DNA, 15 bp, Homo sapiens
aactttattaaagta

SEQ ID NO: 2068233 - DNA, 15 bp, Homo sapiens
actttattaaagtat

SEQ ID NO: 2068234 - DNA, 15 bp, Homo sapiens
ctttattaaagtata

SEQ ID NO: 2068235 - DNA, 15 bp, Homo sapiens
tttattaaagtataa

SEQ ID NO: 2068236 - DNA, 15 bp, Homo sapiens
ttattaaagtataac

SEQ ID NO: 2068237 - DNA, 15 bp, Homo sapiens
tattaaagtataact

SEQ ID NO: 2068238 - DNA, 15 bp, Homo sapiens
attaaagtataactg

SEQ ID NO: 2068239 - DNA, 15 bp, Homo sapiens
ttaaagtataactga

SEQ ID NO: 2068240 - DNA, 15 bp, Homo sapiens
taaagtataactgag

SEQ ID NO: 2068241 - DNA, 15 bp, Homo sapiens
aaagtataactgaga

SEQ ID NO: 2068242 - DNA, 15 bp, Homo sapiens
aagtataactgagag

SEQ ID NO: 2068243 - DNA, 15 bp, Homo sapiens
agtataactgagaga

SEQ ID NO: 2068244 - DNA, 15 bp, Homo sapiens
gtataactgagagag

SEQ ID NO: 2068245 - DNA, 15 bp, Homo sapiens
tataactgagagaga

SEQ ID NO: 2068246 - DNA, 15 bp, Homo sapiens
ataactgagagagag

SEQ ID NO: 2068247 - DNA, 15 bp, Homo sapiens
taactgagagagaga

SEQ ID NO: 2068248 - DNA, 15 bp, Homo sapiens
aactgagagagagag

SEQ ID NO: 2068249 - DNA, 15 bp, Homo sapiens
actgagagagagagt

SEQ ID NO: 2068250 - DNA, 15 bp, Homo sapiens
ctgagagagagagtg

SEQ ID NO: 2068251 - DNA, 15 bp, Homo sapiens
tgagagagagagtga

SEQ ID NO: 2068252 - DNA, 15 bp, Homo sapiens
gagagagagagtgag

SEQ ID NO: 2068253 - DNA, 15 bp, Homo sapiens
agagagagagtgaga

SEQ ID NO: 2068254 - DNA, 15 bp, Homo sapiens
gagagagagtgagag

SEQ ID NO: 2068255 - DNA, 15 bp, Homo sapiens
agagagagtgagagg

SEQ ID NO: 2068256 - DNA, 15 bp, Homo sapiens
gagagagtgagaggg

SEQ ID NO: 2068257 - DNA, 15 bp, Homo sapiens
agagagtgagaggga

SEQ ID NO: 2068258 - DNA, 15 bp, Homo sapiens
gagagtgagagggag

SEQ ID NO: 2068259 - DNA, 15 bp, Homo sapiens
agagtgagagggagt

SEQ ID NO: 2068260 - DNA, 15 bp, Homo sapiens
gagtgagagggagtt

SEQ ID NO: 2068261 - DNA, 15 bp, Homo sapiens
agtgagagggagttg

SEQ ID NO: 2068262 - DNA, 15 bp, Homo sapiens
gtgagagggagttgt

SEQ ID NO: 2068263 - DNA, 15 bp, Homo sapiens
tgagagggagttgtt

SEQ ID NO: 2068264 - DNA, 15 bp, Homo sapiens
gagagggagttgttg

SEQ ID NO: 2068265 - DNA, 15 bp, Homo sapiens
agagggagttgttgt

SEQ ID NO: 2068266 - DNA, 15 bp, Homo sapiens
gagggagttgttgtg

SEQ ID NO: 2068267 - DNA, 15 bp, Homo sapiens
agggagttgttgtgt

SEQ ID NO: 2068268 - DNA, 15 bp, Homo sapiens
gggagttgttgtgtg

SEQ ID NO: 2068269 - DNA, 15 bp, Homo sapiens
ggagttgttgtgtgt

SEQ ID NO: 2068270 - DNA, 15 bp, Homo sapiens
gagttgttgtgtgtt

SEQ ID NO: 2068271 - DNA, 15 bp, Homo sapiens
agttgttgtgtgttt

SEQ ID NO: 2068272 - DNA, 15 bp, Homo sapiens
gttgttgtgtgtttt

SEQ ID NO: 2068273 - DNA, 15 bp, Homo sapiens
ttgttgtgtgttttt

SEQ ID NO: 2068274 - DNA, 15 bp, Homo sapiens
tgttgtgtgtttttt

SEQ ID NO: 2068275 - DNA, 15 bp, Homo sapiens
gttgtgtgttttttt

SEQ ID NO: 2068276 - DNA, 15 bp, Homo sapiens
ttgtgtgtttttttg

SEQ ID NO: 2068277 - DNA, 15 bp, Homo sapiens
tgtgtgtttttttgt

SEQ ID NO: 2068278 - DNA, 15 bp, Homo sapiens
gtgtgtttttttgtt

SEQ ID NO: 2068279 - DNA, 15 bp, Homo sapiens
tgtgtttttttgttt

SEQ ID NO: 2068280 - DNA, 15 bp, Homo sapiens
gtgtttttttgtttt

SEQ ID NO: 2068281 - DNA, 15 bp, Homo sapiens
tgtttttttgttttg

SEQ ID NO: 2068282 - DNA, 15 bp, Homo sapiens
gtttttttgttttgt

SEQ ID NO: 2068283 - DNA, 15 bp, Homo sapiens
tttttttgttttgtt

SEQ ID NO: 2068284 - DNA, 15 bp, Homo sapiens
tgttttgttttttga

SEQ ID NO: 2068285 - DNA, 15 bp, Homo sapiens
gttttgttttttgag

SEQ ID NO: 2068286 - DNA, 15 bp, Homo sapiens
ttttgttttttgaga

SEQ ID NO: 2068287 - DNA, 15 bp, Homo sapiens
tttgttttttgagat

SEQ ID NO: 2068288 - DNA, 15 bp, Homo sapiens
ttgttttttgagatg

SEQ ID NO: 2068289 - DNA, 15 bp, Homo sapiens
tgttttttgagatgc

SEQ ID NO: 2068290 - DNA, 15 bp, Homo sapiens
gttttttgagatgca

SEQ ID NO: 2068291 - DNA, 15 bp, Homo sapiens
ttttttgagatgcag

SEQ ID NO: 2068292 - DNA, 15 bp, Homo sapiens
tttttgagatgcagt

SEQ ID NO: 2068293 - DNA, 15 bp, Homo sapiens
ttttgagatgcagtc

SEQ ID NO: 2068294 - DNA, 15 bp, Homo sapiens
tttgagatgcagtct

SEQ ID NO: 2068295 - DNA, 15 bp, Homo sapiens
ttgagatgcagtctt

SEQ ID NO: 2068296 - DNA, 15 bp, Homo sapiens
tgagatgcagtcttg

SEQ ID NO: 2068297 - DNA, 15 bp, Homo sapiens
gagatgcagtcttgc

SEQ ID NO: 2068298 - DNA, 15 bp, Homo sapiens
agatgcagtcttgct

SEQ ID NO: 2068299 - DNA, 15 bp, Homo sapiens
gatgcagtcttgctt

SEQ ID NO: 2068300 - DNA, 15 bp, Homo sapiens
atgcagtcttgcttt

SEQ ID NO: 2068301 - DNA, 15 bp, Homo sapiens
tgcagtcttgctttg

SEQ ID NO: 2068302 - DNA, 15 bp, Homo sapiens
gcagtcttgctttgt

SEQ ID NO: 2068303 - DNA, 15 bp, Homo sapiens
cagtcttgctttgtc

SEQ ID NO: 2068304 - DNA, 15 bp, Homo sapiens
agtcttgctttgtca

SEQ ID NO: 2068305 - DNA, 15 bp, Homo sapiens
gtcttgctttgtcac

SEQ ID NO: 2068306 - DNA, 15 bp, Homo sapiens
tcttgctttgtcacc

SEQ ID NO: 2068307 - DNA, 15 bp, Homo sapiens
cttgctttgtcaccc

SEQ ID NO: 2068308 - DNA, 15 bp, Homo sapiens
ttgctttgtcaccca

SEQ ID NO: 2068309 - DNA, 15 bp, Homo sapiens
tgctttgtcacccag

SEQ ID NO: 2068310 - DNA, 15 bp, Homo sapiens
gctttgtcacccaga

SEQ ID NO: 2068311 - DNA, 15 bp, Homo sapiens
ctttgtcacccagac

SEQ ID NO: 2068312 - DNA, 15 bp, Homo sapiens
tttgtcacccagact

SEQ ID NO: 2068313 - DNA, 15 bp, Homo sapiens
ttgtcacccagactg

SEQ ID NO: 2068314 - DNA, 15 bp, Homo sapiens
acccagactggagta

SEQ ID NO: 2068315 - DNA, 15 bp, Homo sapiens
cccagactggagtac

SEQ ID NO: 2068316 - DNA, 15 bp, Homo sapiens
ccagactggagtaca

SEQ ID NO: 2068317 - DNA, 15 bp, Homo sapiens
cagactggagtacag

SEQ ID NO: 2068318 - DNA, 15 bp, Homo sapiens
agactggagtacagt

SEQ ID NO: 2068319 - DNA, 15 bp, Homo sapiens
gactggagtacagtg

SEQ ID NO: 2068320 - DNA, 15 bp, Homo sapiens
actggagtacagtga

SEQ ID NO: 2068321 - DNA, 15 bp, Homo sapiens
ctggagtacagtgac

SEQ ID NO: 2068322 - DNA, 15 bp, Homo sapiens
tggagtacagtgacc

SEQ ID NO: 2068323 - DNA, 15 bp, Homo sapiens
ggagtacagtgacca

SEQ ID NO: 2068324 - DNA, 15 bp, Homo sapiens
gagtacagtgaccag

SEQ ID NO: 2068325 - DNA, 15 bp, Homo sapiens
agtacagtgaccaga

SEQ ID NO: 2068326 - DNA, 15 bp, Homo sapiens
gtacagtgaccagat

SEQ ID NO: 2068327 - DNA, 15 bp, Homo sapiens
tacagtgaccagatc

SEQ ID NO: 2068328 - DNA, 15 bp, Homo sapiens
acagtgaccagatca

SEQ ID NO: 2068329 - DNA, 15 bp, Homo sapiens
cagtgaccagatcat

SEQ ID NO: 2068330 - DNA, 15 bp, Homo sapiens
agtgaccagatcata

SEQ ID NO: 2068331 - DNA, 15 bp, Homo sapiens
gtgaccagatcataa

SEQ ID NO: 2068332 - DNA, 15 bp, Homo sapiens
tgaccagatcataag

SEQ ID NO: 2068333 - DNA, 15 bp, Homo sapiens
gaccagatcataagt

SEQ ID NO: 2068334 - DNA, 15 bp, Homo sapiens
accagatcataagtc

SEQ ID NO: 2068335 - DNA, 15 bp, Homo sapiens
ccagatcataagtcc

SEQ ID NO: 2068336 - DNA, 15 bp, Homo sapiens
cagatcataagtccc

SEQ ID NO: 2068337 - DNA, 15 bp, Homo sapiens
agatcataagtccct

SEQ ID NO: 2068338 - DNA, 15 bp, Homo sapiens
gatcataagtccctg

SEQ ID NO: 2068339 - DNA, 15 bp, Homo sapiens
atcataagtccctgc

SEQ ID NO: 2068340 - DNA, 15 bp, Homo sapiens
tcataagtccctgca

SEQ ID NO: 2068341 - DNA, 15 bp, Homo sapiens
cataagtccctgcag

SEQ ID NO: 2068342 - DNA, 15 bp, Homo sapiens
ataagtccctgcagc

SEQ ID NO: 2068343 - DNA, 15 bp, Homo sapiens
taagtccctgcagcc

SEQ ID NO: 2068344 - DNA, 15 bp, Homo sapiens
aagtccctgcagcct

SEQ ID NO: 2068345 - DNA, 15 bp, Homo sapiens
agtccctgcagcctt

SEQ ID NO: 2068346 - DNA, 15 bp, Homo sapiens
gtccctgcagccttg

SEQ ID NO: 2068347 - DNA, 15 bp, Homo sapiens
tccctgcagccttga

SEQ ID NO: 2068348 - DNA, 15 bp, Homo sapiens
ccctgcagccttgaa

SEQ ID NO: 2068349 - DNA, 15 bp, Homo sapiens
cctgcagccttgaac

SEQ ID NO: 2068350 - DNA, 15 bp, Homo sapiens
tgcagccttgaacta

SEQ ID NO: 2068351 - DNA, 15 bp, Homo sapiens
gcagccttgaactac

SEQ ID NO: 2068352 - DNA, 15 bp, Homo sapiens
cagccttgaactact

SEQ ID NO: 2068353 - DNA, 15 bp, Homo sapiens
agccttgaactactg

SEQ ID NO: 2068354 - DNA, 15 bp, Homo sapiens
gccttgaactactgg

SEQ ID NO: 2068355 - DNA, 15 bp, Homo sapiens
ccttgaactactggg

SEQ ID NO: 2068356 - DNA, 15 bp, Homo sapiens
cttgaactactgggc

SEQ ID NO: 2068357 - DNA, 15 bp, Homo sapiens
ttgaactactgggct

SEQ ID NO: 2068358 - DNA, 15 bp, Homo sapiens
tgaactactgggctc

SEQ ID NO: 2068359 - DNA, 15 bp, Homo sapiens
gaactactgggctca

SEQ ID NO: 2068360 - DNA, 15 bp, Homo sapiens
aactactgggctcaa

SEQ ID NO: 2068361 - DNA, 15 bp, Homo sapiens
actactgggctcaag

SEQ ID NO: 2068362 - DNA, 15 bp, Homo sapiens
ctactgggctcaaga

SEQ ID NO: 2068363 - DNA, 15 bp, Homo sapiens
tactgggctcaagag

SEQ ID NO: 2068364 - DNA, 15 bp, Homo sapiens
actgggctcaagaga

SEQ ID NO: 2068365 - DNA, 15 bp, Homo sapiens
ctgggctcaagagat

SEQ ID NO: 2068366 - DNA, 15 bp, Homo sapiens
tgggctcaagagatc

SEQ ID NO: 2068367 - DNA, 15 bp, Homo sapiens
gggctcaagagatcc

SEQ ID NO: 2068368 - DNA, 15 bp, Homo sapiens
ggctcaagagatcct

SEQ ID NO: 2068369 - DNA, 15 bp, Homo sapiens
gctcaagagatcctc

SEQ ID NO: 2068370 - DNA, 15 bp, Homo sapiens
ctcaagagatcctcc

SEQ ID NO: 2068371 - DNA, 15 bp, Homo sapiens
tcaagagatcctcct

SEQ ID NO: 2068372 - DNA, 15 bp, Homo sapiens
caagagatcctcctt

SEQ ID NO: 2068373 - DNA, 15 bp, Homo sapiens
aagagatcctccttc

SEQ ID NO: 2068374 - DNA, 15 bp, Homo sapiens
agagatcctccttcc

SEQ ID NO: 2068375 - DNA, 15 bp, Homo sapiens
gagatcctccttccc

SEQ ID NO: 2068376 - DNA, 15 bp, Homo sapiens
agatcctccttcccc

SEQ ID NO: 2068377 - DNA, 15 bp, Homo sapiens
gatcctccttcccca

SEQ ID NO: 2068378 - DNA, 15 bp, Homo sapiens
atcctccttccccag

SEQ ID NO: 2068379 - DNA, 15 bp, Homo sapiens
tcctccttccccagc

SEQ ID NO: 2068380 - DNA, 15 bp, Homo sapiens
cctccttccccagcc

SEQ ID NO: 2068381 - DNA, 15 bp, Homo sapiens
ctccttccccagcct

SEQ ID NO: 2068382 - DNA, 15 bp, Homo sapiens
tccttccccagcctc

SEQ ID NO: 2068383 - DNA, 15 bp, Homo sapiens
ccttccccagcctcc

SEQ ID NO: 2068384 - DNA, 15 bp, Homo sapiens
cttccccagcctcct

SEQ ID NO: 2068385 - DNA, 15 bp, Homo sapiens
ttccccagcctcctg

SEQ ID NO: 2068386 - DNA, 15 bp, Homo sapiens
ccccagcctcctgaa

SEQ ID NO: 2068387 - DNA, 15 bp, Homo sapiens
cccagcctcctgaat

SEQ ID NO: 2068388 - DNA, 15 bp, Homo sapiens
ccagcctcctgaatg

SEQ ID NO: 2068389 - DNA, 15 bp, Homo sapiens
cagcctcctgaatgg

SEQ ID NO: 2068390 - DNA, 15 bp, Homo sapiens
agcctcctgaatggt

SEQ ID NO: 2068391 - DNA, 15 bp, Homo sapiens
gcctcctgaatggtg

SEQ ID NO: 2068392 - DNA, 15 bp, Homo sapiens
cctcctgaatggtgg

SEQ ID NO: 2068393 - DNA, 15 bp, Homo sapiens
ctcctgaatggtggg

SEQ ID NO: 2068394 - DNA, 15 bp, Homo sapiens
tcctgaatggtggga

SEQ ID NO: 2068395 - DNA, 15 bp, Homo sapiens
cctgaatggtgggac

SEQ ID NO: 2068396 - DNA, 15 bp, Homo sapiens
ctgaatggtgggact

SEQ ID NO: 2068397 - DNA, 15 bp, Homo sapiens
tgaatggtgggacta

SEQ ID NO: 2068398 - DNA, 15 bp, Homo sapiens
gaatggtgggactac

SEQ ID NO: 2068399 - DNA, 15 bp, Homo sapiens
aatggtgggactaca

SEQ ID NO: 2068400 - DNA, 15 bp, Homo sapiens
atggtgggactacag

SEQ ID NO: 2068401 - DNA, 15 bp, Homo sapiens
tggtgggactacagg

SEQ ID NO: 2068402 - DNA, 15 bp, Homo sapiens
ggtgggactacaggt

SEQ ID NO: 2068403 - DNA, 15 bp, Homo sapiens
gtgggactacaggtg

SEQ ID NO: 2068404 - DNA, 15 bp, Homo sapiens
ctacaggtgcacaca

SEQ ID NO: 2068405 - DNA, 15 bp, Homo sapiens
tacaggtgcacacaa

SEQ ID NO: 2068406 - DNA, 15 bp, Homo sapiens
acaggtgcacacaac

SEQ ID NO: 2068407 - DNA, 15 bp, Homo sapiens
caggtgcacacaacc

SEQ ID NO: 2068408 - DNA, 15 bp, Homo sapiens
aggtgcacacaacca

SEQ ID NO: 2068409 - DNA, 15 bp, Homo sapiens
ggtgcacacaaccat

SEQ ID NO: 2068410 - DNA, 15 bp, Homo sapiens
gtgcacacaaccatg

SEQ ID NO: 2068411 - DNA, 15 bp, Homo sapiens
tgcacacaaccatgc

SEQ ID NO: 2068412 - DNA, 15 bp, Homo sapiens
gcacacaaccatgca

SEQ ID NO: 2068413 - DNA, 15 bp, Homo sapiens
cacacaaccatgcac

SEQ ID NO: 2068414 - DNA, 15 bp, Homo sapiens
acacaaccatgcaca

SEQ ID NO: 2068415 - DNA, 15 bp, Homo sapiens
cacaaccatgcacag

SEQ ID NO: 2068416 - DNA, 15 bp, Homo sapiens
acaaccatgcacagt

SEQ ID NO: 2068417 - DNA, 15 bp, Homo sapiens
caaccatgcacagtc

SEQ ID NO: 2068418 - DNA, 15 bp, Homo sapiens
aaccatgcacagtcc

SEQ ID NO: 2068419 - DNA, 15 bp, Homo sapiens
accatgcacagtcca

SEQ ID NO: 2068420 - DNA, 15 bp, Homo sapiens
ccatgcacagtccag

SEQ ID NO: 2068421 - DNA, 15 bp, Homo sapiens
catgcacagtccagt

SEQ ID NO: 2068422 - DNA, 15 bp, Homo sapiens
atgcacagtccagtt

SEQ ID NO: 2068423 - DNA, 15 bp, Homo sapiens
tgcacagtccagttt

SEQ ID NO: 2068424 - DNA, 15 bp, Homo sapiens
gcacagtccagttta

SEQ ID NO: 2068425 - DNA, 15 bp, Homo sapiens
cacagtccagtttaa

SEQ ID NO: 2068426 - DNA, 15 bp, Homo sapiens
acagtccagtttaaa

SEQ ID NO: 2068427 - DNA, 15 bp, Homo sapiens
cagtccagtttaaaa

SEQ ID NO: 2068428 - DNA, 15 bp, Homo sapiens
agtccagtttaaaat

SEQ ID NO: 2068429 - DNA, 15 bp, Homo sapiens
gtccagtttaaaatt

SEQ ID NO: 2068430 - DNA, 15 bp, Homo sapiens
tccagtttaaaattt

SEQ ID NO: 2068431 - DNA, 15 bp, Homo sapiens
ccagtttaaaatttt

SEQ ID NO: 2068432 - DNA, 15 bp, Homo sapiens
cagtttaaaattttt

SEQ ID NO: 2068433 - DNA, 15 bp, Homo sapiens
agtttaaaatttttt

SEQ ID NO: 2068434 - DNA, 15 bp, Homo sapiens
gtttaaaattttttt

SEQ ID NO: 2068435 - DNA, 15 bp, Homo sapiens
tttaaaatttttttt

SEQ ID NO: 2068436 - DNA, 15 bp, Homo sapiens
ttaaaattttttttt

SEQ ID NO: 2068437 - DNA, 15 bp, Homo sapiens
taaaatttttttttt

SEQ ID NO: 2068438 - DNA, 15 bp, Homo sapiens
aattttttttttttg

SEQ ID NO: 2068439 - DNA, 15 bp, Homo sapiens
attttttttttttgt

SEQ ID NO: 2068440 - DNA, 15 bp, Homo sapiens
tttttttgtagagac

SEQ ID NO: 2068441 - DNA, 15 bp, Homo sapiens
gtctcactatgttgt

SEQ ID NO: 2068442 - DNA, 15 bp, Homo sapiens
tctcactatgttgtt

SEQ ID NO: 2068443 - DNA, 15 bp, Homo sapiens
ctcactatgttgttc

SEQ ID NO: 2068444 - DNA, 15 bp, Homo sapiens
tcactatgttgttca

SEQ ID NO: 2068445 - DNA, 15 bp, Homo sapiens
cactatgttgttcag

SEQ ID NO: 2068446 - DNA, 15 bp, Homo sapiens
actatgttgttcagg

SEQ ID NO: 2068447 - DNA, 15 bp, Homo sapiens
ctatgttgttcaggc

SEQ ID NO: 2068448 - DNA, 15 bp, Homo sapiens
tatgttgttcaggct

SEQ ID NO: 2068449 - DNA, 15 bp, Homo sapiens
atgttgttcaggctg

SEQ ID NO: 2068450 - DNA, 15 bp, Homo sapiens
tgttgttcaggctgg

SEQ ID NO: 2068451 - DNA, 15 bp, Homo sapiens
gttgttcaggctggt

SEQ ID NO: 2068452 - DNA, 15 bp, Homo sapiens
ttgttcaggctggtt

SEQ ID NO: 2068453 - DNA, 15 bp, Homo sapiens
tgttcaggctggttt

SEQ ID NO: 2068454 - DNA, 15 bp, Homo sapiens
gttcaggctggtttc

SEQ ID NO: 2068455 - DNA, 15 bp, Homo sapiens
ttcaggctggtttca

SEQ ID NO: 2068456 - DNA, 15 bp, Homo sapiens
tcaggctggtttcaa

SEQ ID NO: 2068457 - DNA, 15 bp, Homo sapiens
caggctggtttcaaa

SEQ ID NO: 2068458 - DNA, 15 bp, Homo sapiens
aggctggtttcaaac

SEQ ID NO: 2068459 - DNA, 15 bp, Homo sapiens
gctggtttcaaactt

SEQ ID NO: 2068460 - DNA, 15 bp, Homo sapiens
ctggtttcaaacttc

SEQ ID NO: 2068461 - DNA, 15 bp, Homo sapiens
tggtttcaaacttct

SEQ ID NO: 2068462 - DNA, 15 bp, Homo sapiens
ggtttcaaacttcta

SEQ ID NO: 2068463 - DNA, 15 bp, Homo sapiens
gtttcaaacttctag

SEQ ID NO: 2068464 - DNA, 15 bp, Homo sapiens
tttcaaacttctagc

SEQ ID NO: 2068465 - DNA, 15 bp, Homo sapiens
ttcaaacttctagcc

SEQ ID NO: 2068466 - DNA, 15 bp, Homo sapiens
tcaaacttctagcct

SEQ ID NO: 2068467 - DNA, 15 bp, Homo sapiens
caaacttctagcctc

SEQ ID NO: 2068468 - DNA, 15 bp, Homo sapiens
aaacttctagcctca

SEQ ID NO: 2068469 - DNA, 15 bp, Homo sapiens
aacttctagcctcaa

SEQ ID NO: 2068470 - DNA, 15 bp, Homo sapiens
acttctagcctcaag

SEQ ID NO: 2068471 - DNA, 15 bp, Homo sapiens
cttctagcctcaagc

SEQ ID NO: 2068472 - DNA, 15 bp, Homo sapiens
ttctagcctcaagca

SEQ ID NO: 2068473 - DNA, 15 bp, Homo sapiens
tctagcctcaagcaa

SEQ ID NO: 2068474 - DNA, 15 bp, Homo sapiens
ctagcctcaagcaat

SEQ ID NO: 2068475 - DNA, 15 bp, Homo sapiens
tagcctcaagcaatc

SEQ ID NO: 2068476 - DNA, 15 bp, Homo sapiens
agcctcaagcaatcc

SEQ ID NO: 2068477 - DNA, 15 bp, Homo sapiens
tcagcctcctaaagc

SEQ ID NO: 2068478 - DNA, 15 bp, Homo sapiens
cagcctcctaaagca

SEQ ID NO: 2068479 - DNA, 15 bp, Homo sapiens
agcctcctaaagcac

SEQ ID NO: 2068480 - DNA, 15 bp, Homo sapiens
gcctcctaaagcact

SEQ ID NO: 2068481 - DNA, 15 bp, Homo sapiens
cctcctaaagcactg

SEQ ID NO: 2068482 - DNA, 15 bp, Homo sapiens
ctcctaaagcactgg

SEQ ID NO: 2068483 - DNA, 15 bp, Homo sapiens
tcctaaagcactggg

SEQ ID NO: 2068484 - DNA, 15 bp, Homo sapiens
cctaaagcactggga

SEQ ID NO: 2068485 - DNA, 15 bp, Homo sapiens
ctaaagcactgggat

SEQ ID NO: 2068486 - DNA, 15 bp, Homo sapiens
taaagcactgggatt

SEQ ID NO: 2068487 - DNA, 15 bp, Homo sapiens
gcactgggattacac

SEQ ID NO: 2068488 - DNA, 15 bp, Homo sapiens
cactgggattacacg

SEQ ID NO: 2068489 - DNA, 15 bp, Homo sapiens
actgggattacacgt

SEQ ID NO: 2068490 - DNA, 15 bp, Homo sapiens
ctgggattacacgtg

SEQ ID NO: 2068491 - DNA, 15 bp, Homo sapiens
tgggattacacgtgt

SEQ ID NO: 2068492 - DNA, 15 bp, Homo sapiens
gggattacacgtgtg

SEQ ID NO: 2068493 - DNA, 15 bp, Homo sapiens
ggattacacgtgtga

SEQ ID NO: 2068494 - DNA, 15 bp, Homo sapiens
gattacacgtgtgaa

SEQ ID NO: 2068495 - DNA, 15 bp, Homo sapiens
attacacgtgtgaat

SEQ ID NO: 2068496 - DNA, 15 bp, Homo sapiens
ttacacgtgtgaatt

SEQ ID NO: 2068497 - DNA, 15 bp, Homo sapiens
tacacgtgtgaatta

SEQ ID NO: 2068498 - DNA, 15 bp, Homo sapiens
acacgtgtgaattac

SEQ ID NO: 2068499 - DNA, 15 bp, Homo sapiens
cacgtgtgaattact

SEQ ID NO: 2068500 - DNA, 15 bp, Homo sapiens
acgtgtgaattactg

SEQ ID NO: 2068501 - DNA, 15 bp, Homo sapiens
cgtgtgaattactgt

SEQ ID NO: 2068502 - DNA, 15 bp, Homo sapiens
gtgtgaattactgtg

SEQ ID NO: 2068503 - DNA, 15 bp, Homo sapiens
tgtgaattactgtgc

SEQ ID NO: 2068504 - DNA, 15 bp, Homo sapiens
gtgaattactgtgcc

SEQ ID NO: 2068505 - DNA, 15 bp, Homo sapiens
tgaattactgtgccc

SEQ ID NO: 2068506 - DNA, 15 bp, Homo sapiens
gaattactgtgccca

SEQ ID NO: 2068507 - DNA, 15 bp, Homo sapiens
aattactgtgcccag

SEQ ID NO: 2068508 - DNA, 15 bp, Homo sapiens
attactgtgcccagc

SEQ ID NO: 2068509 - DNA, 15 bp, Homo sapiens
ttactgtgcccagct

SEQ ID NO: 2068510 - DNA, 15 bp, Homo sapiens
tactgtgcccagctt

SEQ ID NO: 2068511 - DNA, 15 bp, Homo sapiens
actgtgcccagcttg

SEQ ID NO: 2068512 - DNA, 15 bp, Homo sapiens
ctgtgcccagcttga

SEQ ID NO: 2068513 - DNA, 15 bp, Homo sapiens
tgtgcccagcttgat

SEQ ID NO: 2068514 - DNA, 15 bp, Homo sapiens
gtgcccagcttgatt

SEQ ID NO: 2068515 - DNA, 15 bp, Homo sapiens
tgcccagcttgattt

SEQ ID NO: 2068516 - DNA, 15 bp, Homo sapiens
gcccagcttgatttt

SEQ ID NO: 2068517 - DNA, 15 bp, Homo sapiens
cccagcttgattttc

SEQ ID NO: 2068518 - DNA, 15 bp, Homo sapiens
ccagcttgattttct

SEQ ID NO: 2068519 - DNA, 15 bp, Homo sapiens
cagcttgattttcta

SEQ ID NO: 2068520 - DNA, 15 bp, Homo sapiens
agcttgattttctat

SEQ ID NO: 2068521 - DNA, 15 bp, Homo sapiens
gcttgattttctata

SEQ ID NO: 2068522 - DNA, 15 bp, Homo sapiens
cttgattttctatat

SEQ ID NO: 2068523 - DNA, 15 bp, Homo sapiens
ttgattttctatatt

SEQ ID NO: 2068524 - DNA, 15 bp, Homo sapiens
tgattttctatattg

SEQ ID NO: 2068525 - DNA, 15 bp, Homo sapiens
gattttctatattgt

SEQ ID NO: 2068526 - DNA, 15 bp, Homo sapiens
attttctatattgtt

SEQ ID NO: 2068527 - DNA, 15 bp, Homo sapiens
ttttctatattgttt

SEQ ID NO: 2068528 - DNA, 15 bp, Homo sapiens
tttctatattgtttt

SEQ ID NO: 2068529 - DNA, 15 bp, Homo sapiens
ttctatattgttttt

SEQ ID NO: 2068530 - DNA, 15 bp, Homo sapiens
tctatattgtttttc

SEQ ID NO: 2068531 - DNA, 15 bp, Homo sapiens
ctatattgtttttct

SEQ ID NO: 2068532 - DNA, 15 bp, Homo sapiens
tatattgtttttctg

SEQ ID NO: 2068533 - DNA, 15 bp, Homo sapiens
atattgtttttctgt

SEQ ID NO: 2068534 - DNA, 15 bp, Homo sapiens
tattgtttttctgtt

SEQ ID NO: 2068535 - DNA, 15 bp, Homo sapiens
attgtttttctgttt

SEQ ID NO: 2068536 - DNA, 15 bp, Homo sapiens
ttgtttttctgtttt

SEQ ID NO: 2068537 - DNA, 15 bp, Homo sapiens
tgtttttctgttttt

SEQ ID NO: 2068538 - DNA, 15 bp, Homo sapiens
gtttttctgtttttc

SEQ ID NO: 2068539 - DNA, 15 bp, Homo sapiens
tttttctgtttttca

SEQ ID NO: 2068540 - DNA, 15 bp, Homo sapiens
ttttctgtttttcat

SEQ ID NO: 2068541 - DNA, 15 bp, Homo sapiens
tttctgtttttcatt

SEQ ID NO: 2068542 - DNA, 15 bp, Homo sapiens
ttctgtttttcattt

SEQ ID NO: 2068543 - DNA, 15 bp, Homo sapiens
tctgtttttcatttc

SEQ ID NO: 2068544 - DNA, 15 bp, Homo sapiens
ctgtttttcatttca

SEQ ID NO: 2068545 - DNA, 15 bp, Homo sapiens
gtttttcatttcaat

SEQ ID NO: 2068546 - DNA, 15 bp, Homo sapiens
tttttcatttcaatg

SEQ ID NO: 2068547 - DNA, 15 bp, Homo sapiens
ttttcatttcaatga

SEQ ID NO: 2068548 - DNA, 15 bp, Homo sapiens
tttcatttcaatgat

SEQ ID NO: 2068549 - DNA, 15 bp, Homo sapiens
ttcatttcaatgatt

SEQ ID NO: 2068550 - DNA, 15 bp, Homo sapiens
tcatttcaatgattt

SEQ ID NO: 2068551 - DNA, 15 bp, Homo sapiens
catttcaatgatttc

SEQ ID NO: 2068552 - DNA, 15 bp, Homo sapiens
atttcaatgatttct

SEQ ID NO: 2068553 - DNA, 15 bp, Homo sapiens
tttcaatgatttctg

SEQ ID NO: 2068554 - DNA, 15 bp, Homo sapiens
ttcaatgatttctgg

SEQ ID NO: 2068555 - DNA, 15 bp, Homo sapiens
tcaatgatttctggt

SEQ ID NO: 2068556 - DNA, 15 bp, Homo sapiens
caatgatttctggtc

SEQ ID NO: 2068557 - DNA, 15 bp, Homo sapiens
aatgatttctggtct

SEQ ID NO: 2068558 - DNA, 15 bp, Homo sapiens
atgatttctggtctc

SEQ ID NO: 2068559 - DNA, 15 bp, Homo sapiens
tgatttctggtctca

SEQ ID NO: 2068560 - DNA, 15 bp, Homo sapiens
gatttctggtctcat

SEQ ID NO: 2068561 - DNA, 15 bp, Homo sapiens
atttctggtctcatt

SEQ ID NO: 2068562 - DNA, 15 bp, Homo sapiens
tttctggtctcattt

SEQ ID NO: 2068563 - DNA, 15 bp, Homo sapiens
ttctggtctcatttc

SEQ ID NO: 2068564 - DNA, 15 bp, Homo sapiens
tctggtctcatttct

SEQ ID NO: 2068565 - DNA, 15 bp, Homo sapiens
ctggtctcatttctg

SEQ ID NO: 2068566 - DNA, 15 bp, Homo sapiens
tggtctcatttctgt

SEQ ID NO: 2068567 - DNA, 15 bp, Homo sapiens
ggtctcatttctgtt

SEQ ID NO: 2068568 - DNA, 15 bp, Homo sapiens
gtctcatttctgttt

SEQ ID NO: 2068569 - DNA, 15 bp, Homo sapiens
tctcatttctgtttc

SEQ ID NO: 2068570 - DNA, 15 bp, Homo sapiens
ctcatttctgtttct

SEQ ID NO: 2068571 - DNA, 15 bp, Homo sapiens
tcatttctgtttctt

SEQ ID NO: 2068572 - DNA, 15 bp, Homo sapiens
catttctgtttcttt

SEQ ID NO: 2068573 - DNA, 15 bp, Homo sapiens
atttctgtttctttt

SEQ ID NO: 2068574 - DNA, 15 bp, Homo sapiens
tttctgtttctttta

SEQ ID NO: 2068575 - DNA, 15 bp, Homo sapiens
ttctgtttcttttat

SEQ ID NO: 2068576 - DNA, 15 bp, Homo sapiens
tctgtttcttttatt

SEQ ID NO: 2068577 - DNA, 15 bp, Homo sapiens
ctgtttcttttattc

SEQ ID NO: 2068578 - DNA, 15 bp, Homo sapiens
tgtttcttttattct

SEQ ID NO: 2068579 - DNA, 15 bp, Homo sapiens
gtttcttttattcta

SEQ ID NO: 2068580 - DNA, 15 bp, Homo sapiens
tttcttttattctac

SEQ ID NO: 2068581 - DNA, 15 bp, Homo sapiens
ttcttttattctact

SEQ ID NO: 2068582 - DNA, 15 bp, Homo sapiens
tcttttattctacta

SEQ ID NO: 2068583 - DNA, 15 bp, Homo sapiens
cttttattctactaa

SEQ ID NO: 2068584 - DNA, 15 bp, Homo sapiens
ttttattctactaac

SEQ ID NO: 2068585 - DNA, 15 bp, Homo sapiens
tttattctactaaca

SEQ ID NO: 2068586 - DNA, 15 bp, Homo sapiens
ttattctactaacat

SEQ ID NO: 2068587 - DNA, 15 bp, Homo sapiens
tattctactaacatt

SEQ ID NO: 2068588 - DNA, 15 bp, Homo sapiens
attctactaacattg

SEQ ID NO: 2068589 - DNA, 15 bp, Homo sapiens
ttctactaacattgt

SEQ ID NO: 2068590 - DNA, 15 bp, Homo sapiens
tctactaacattgtg

SEQ ID NO: 2068591 - DNA, 15 bp, Homo sapiens
ctactaacattgtgt

SEQ ID NO: 2068592 - DNA, 15 bp, Homo sapiens
tactaacattgtgtt

SEQ ID NO: 2068593 - DNA, 15 bp, Homo sapiens
actaacattgtgttt

SEQ ID NO: 2068594 - DNA, 15 bp, Homo sapiens
ctaacattgtgttta

SEQ ID NO: 2068595 - DNA, 15 bp, Homo sapiens
taacattgtgtttaa

SEQ ID NO: 2068596 - DNA, 15 bp, Homo sapiens
aacattgtgtttaat

SEQ ID NO: 2068597 - DNA, 15 bp, Homo sapiens
acattgtgtttaatt

SEQ ID NO: 2068598 - DNA, 15 bp, Homo sapiens
cattgtgtttaattt

SEQ ID NO: 2068599 - DNA, 15 bp, Homo sapiens
attgtgtttaatttg

SEQ ID NO: 2068600 - DNA, 15 bp, Homo sapiens
ttgtgtttaatttgc

SEQ ID NO: 2068601 - DNA, 15 bp, Homo sapiens
tgtgtttaatttgct

SEQ ID NO: 2068602 - DNA, 15 bp, Homo sapiens
gtgtttaatttgctc

SEQ ID NO: 2068603 - DNA, 15 bp, Homo sapiens
tgtttaatttgctct

SEQ ID NO: 2068604 - DNA, 15 bp, Homo sapiens
gtttaatttgctctt

SEQ ID NO: 2068605 - DNA, 15 bp, Homo sapiens
tttaatttgctcttc

SEQ ID NO: 2068606 - DNA, 15 bp, Homo sapiens
ttaatttgctcttct

SEQ ID NO: 2068607 - DNA, 15 bp, Homo sapiens
aatttgctcttcttt

SEQ ID NO: 2068608 - DNA, 15 bp, Homo sapiens
atttgctcttctttt

SEQ ID NO: 2068609 - DNA, 15 bp, Homo sapiens
tttgctcttcttttt

SEQ ID NO: 2068610 - DNA, 15 bp, Homo sapiens
ttgctcttctttttc

SEQ ID NO: 2068611 - DNA, 15 bp, Homo sapiens
tgctcttctttttct

SEQ ID NO: 2068612 - DNA, 15 bp, Homo sapiens
gctcttctttttcta

SEQ ID NO: 2068613 - DNA, 15 bp, Homo sapiens
ctcttctttttctag

SEQ ID NO: 2068614 - DNA, 15 bp, Homo sapiens
tcttctttttctagt

SEQ ID NO: 2068615 - DNA, 15 bp, Homo sapiens
cttctttttctagtt

SEQ ID NO: 2068616 - DNA, 15 bp, Homo sapiens
ttctttttctagttt

SEQ ID NO: 2068617 - DNA, 15 bp, Homo sapiens
tctttttctagtttc

SEQ ID NO: 2068618 - DNA, 15 bp, Homo sapiens
ctttttctagtttct

SEQ ID NO: 2068619 - DNA, 15 bp, Homo sapiens
tttttctagtttctt

SEQ ID NO: 2068620 - DNA, 15 bp, Homo sapiens
ttttctagtttctta

SEQ ID NO: 2068621 - DNA, 15 bp, Homo sapiens
tttctagtttcttaa

SEQ ID NO: 2068622 - DNA, 15 bp, Homo sapiens
ttctagtttcttaac

SEQ ID NO: 2068623 - DNA, 15 bp, Homo sapiens
tctagtttcttaaca

SEQ ID NO: 2068624 - DNA, 15 bp, Homo sapiens
ctagtttcttaacat

SEQ ID NO: 2068625 - DNA, 15 bp, Homo sapiens
tagtttcttaacata

SEQ ID NO: 2068626 - DNA, 15 bp, Homo sapiens
agtttcttaacatat

SEQ ID NO: 2068627 - DNA, 15 bp, Homo sapiens
gtttcttaacatata

SEQ ID NO: 2068628 - DNA, 15 bp, Homo sapiens
tttcttaacatataa

SEQ ID NO: 2068629 - DNA, 15 bp, Homo sapiens
ttcttaacatataag

SEQ ID NO: 2068630 - DNA, 15 bp, Homo sapiens
tcttaacatataagc

SEQ ID NO: 2068631 - DNA, 15 bp, Homo sapiens
cttaacatataagct

SEQ ID NO: 2068632 - DNA, 15 bp, Homo sapiens
ttaacatataagctg

SEQ ID NO: 2068633 - DNA, 15 bp, Homo sapiens
taacatataagctga

SEQ ID NO: 2068634 - DNA, 15 bp, Homo sapiens
aacatataagctgag

SEQ ID NO: 2068635 - DNA, 15 bp, Homo sapiens
acatataagctgagg

SEQ ID NO: 2068636 - DNA, 15 bp, Homo sapiens
catataagctgaggt

SEQ ID NO: 2068637 - DNA, 15 bp, Homo sapiens
atataagctgaggtc

SEQ ID NO: 2068638 - DNA, 15 bp, Homo sapiens
tataagctgaggtca

SEQ ID NO: 2068639 - DNA, 15 bp, Homo sapiens
ataagctgaggtcat

SEQ ID NO: 2068640 - DNA, 15 bp, Homo sapiens
taagctgaggtcatt

SEQ ID NO: 2068641 - DNA, 15 bp, Homo sapiens
aagctgaggtcattg

SEQ ID NO: 2068642 - DNA, 15 bp, Homo sapiens
agctgaggtcattga

SEQ ID NO: 2068643 - DNA, 15 bp, Homo sapiens
gctgaggtcattgat

SEQ ID NO: 2068644 - DNA, 15 bp, Homo sapiens
ctgaggtcattgatt

SEQ ID NO: 2068645 - DNA, 15 bp, Homo sapiens
tgaggtcattgattt

SEQ ID NO: 2068646 - DNA, 15 bp, Homo sapiens
gaggtcattgatttg

SEQ ID NO: 2068647 - DNA, 15 bp, Homo sapiens
aggtcattgatttga

SEQ ID NO: 2068648 - DNA, 15 bp, Homo sapiens
ggtcattgatttgag

SEQ ID NO: 2068649 - DNA, 15 bp, Homo sapiens
gtcattgatttgagg

SEQ ID NO: 2068650 - DNA, 15 bp, Homo sapiens
tcattgatttgaggc

SEQ ID NO: 2068651 - DNA, 15 bp, Homo sapiens
cattgatttgaggct

SEQ ID NO: 2068652 - DNA, 15 bp, Homo sapiens
attgatttgaggcta

SEQ ID NO: 2068653 - DNA, 15 bp, Homo sapiens
ttgatttgaggctac

SEQ ID NO: 2068654 - DNA, 15 bp, Homo sapiens
tgatttgaggctaca

SEQ ID NO: 2068655 - DNA, 15 bp, Homo sapiens
gatttgaggctacac

SEQ ID NO: 2068656 - DNA, 15 bp, Homo sapiens
atttgaggctacact

SEQ ID NO: 2068657 - DNA, 15 bp, Homo sapiens
tttgaggctacacta

SEQ ID NO: 2068658 - DNA, 15 bp, Homo sapiens
ttgaggctacactag

SEQ ID NO: 2068659 - DNA, 15 bp, Homo sapiens
tgaggctacactagc

SEQ ID NO: 2068660 - DNA, 15 bp, Homo sapiens
gaggctacactagct

SEQ ID NO: 2068661 - DNA, 15 bp, Homo sapiens
aggctacactagctt

SEQ ID NO: 2068662 - DNA, 15 bp, Homo sapiens
ggctacactagcttc

SEQ ID NO: 2068663 - DNA, 15 bp, Homo sapiens
gctacactagcttcc

SEQ ID NO: 2068664 - DNA, 15 bp, Homo sapiens
ctacactagcttcct

SEQ ID NO: 2068665 - DNA, 15 bp, Homo sapiens
tacactagcttccta

SEQ ID NO: 2068666 - DNA, 15 bp, Homo sapiens
acactagcttcctat

SEQ ID NO: 2068667 - DNA, 15 bp, Homo sapiens
cactagcttcctatg

SEQ ID NO: 2068668 - DNA, 15 bp, Homo sapiens
actagcttcctatgg

SEQ ID NO: 2068669 - DNA, 15 bp, Homo sapiens
ctagcttcctatggc

SEQ ID NO: 2068670 - DNA, 15 bp, Homo sapiens
tagcttcctatggct

SEQ ID NO: 2068671 - DNA, 15 bp, Homo sapiens
agcttcctatggctg

SEQ ID NO: 2068672 - DNA, 15 bp, Homo sapiens
gcttcctatggctgt

SEQ ID NO: 2068673 - DNA, 15 bp, Homo sapiens
cttcctatggctgtt

SEQ ID NO: 2068674 - DNA, 15 bp, Homo sapiens
ttcctatggctgttg

SEQ ID NO: 2068675 - DNA, 15 bp, Homo sapiens
tcctatggctgttgt

SEQ ID NO: 2068676 - DNA, 15 bp, Homo sapiens
cctatggctgttgta

SEQ ID NO: 2068677 - DNA, 15 bp, Homo sapiens
ctatggctgttgtaa

SEQ ID NO: 2068678 - DNA, 15 bp, Homo sapiens
tatggctgttgtaac

SEQ ID NO: 2068679 - DNA, 15 bp, Homo sapiens
atggctgttgtaaca

SEQ ID NO: 2068680 - DNA, 15 bp, Homo sapiens
tggctgttgtaacaa

SEQ ID NO: 2068681 - DNA, 15 bp, Homo sapiens
ggctgttgtaacaaa

SEQ ID NO: 2068682 - DNA, 15 bp, Homo sapiens
gctgttgtaacaaat

SEQ ID NO: 2068683 - DNA, 15 bp, Homo sapiens
ctgttgtaacaaatt

SEQ ID NO: 2068684 - DNA, 15 bp, Homo sapiens
tgttgtaacaaatta

SEQ ID NO: 2068685 - DNA, 15 bp, Homo sapiens
gttgtaacaaattac

SEQ ID NO: 2068686 - DNA, 15 bp, Homo sapiens
ttgtaacaaattacc

SEQ ID NO: 2068687 - DNA, 15 bp, Homo sapiens
aattaccacaaactc

SEQ ID NO: 2068688 - DNA, 15 bp, Homo sapiens
attaccacaaactca

SEQ ID NO: 2068689 - DNA, 15 bp, Homo sapiens
ttaccacaaactcag

SEQ ID NO: 2068690 - DNA, 15 bp, Homo sapiens
taccacaaactcaga

SEQ ID NO: 2068691 - DNA, 15 bp, Homo sapiens
accacaaactcagag

SEQ ID NO: 2068692 - DNA, 15 bp, Homo sapiens
ccacaaactcagagg

SEQ ID NO: 2068693 - DNA, 15 bp, Homo sapiens
cacaaactcagaggc

SEQ ID NO: 2068694 - DNA, 15 bp, Homo sapiens
acaaactcagaggct

SEQ ID NO: 2068695 - DNA, 15 bp, Homo sapiens
caaactcagaggctt

SEQ ID NO: 2068696 - DNA, 15 bp, Homo sapiens
aaactcagaggctta

SEQ ID NO: 2068697 - DNA, 15 bp, Homo sapiens
aactcagaggcttaa

SEQ ID NO: 2068698 - DNA, 15 bp, Homo sapiens
actcagaggcttaaa

SEQ ID NO: 2068699 - DNA, 15 bp, Homo sapiens
ctcagaggcttaaag

SEQ ID NO: 2068700 - DNA, 15 bp, Homo sapiens
tcagaggcttaaaga

SEQ ID NO: 2068701 - DNA, 15 bp, Homo sapiens
cagaggcttaaagat

SEQ ID NO: 2068702 - DNA, 15 bp, Homo sapiens
agaggcttaaagatc

SEQ ID NO: 2068703 - DNA, 15 bp, Homo sapiens
gaggcttaaagatca

SEQ ID NO: 2068704 - DNA, 15 bp, Homo sapiens
aggcttaaagatcag

SEQ ID NO: 2068705 - DNA, 15 bp, Homo sapiens
ggcttaaagatcagg

SEQ ID NO: 2068706 - DNA, 15 bp, Homo sapiens
gcttaaagatcagga

SEQ ID NO: 2068707 - DNA, 15 bp, Homo sapiens
cttaaagatcaggaa

SEQ ID NO: 2068708 - DNA, 15 bp, Homo sapiens
ttaaagatcaggaat

SEQ ID NO: 2068709 - DNA, 15 bp, Homo sapiens
taaagatcaggaatg

SEQ ID NO: 2068710 - DNA, 15 bp, Homo sapiens
aaagatcaggaatgt

SEQ ID NO: 2068711 - DNA, 15 bp, Homo sapiens
aagatcaggaatgta

SEQ ID NO: 2068712 - DNA, 15 bp, Homo sapiens
agatcaggaatgtat

SEQ ID NO: 2068713 - DNA, 15 bp, Homo sapiens
gatcaggaatgtatt

SEQ ID NO: 2068714 - DNA, 15 bp, Homo sapiens
atcaggaatgtattc

SEQ ID NO: 2068715 - DNA, 15 bp, Homo sapiens
tcaggaatgtattct

SEQ ID NO: 2068716 - DNA, 15 bp, Homo sapiens
caggaatgtattctc

SEQ ID NO: 2068717 - DNA, 15 bp, Homo sapiens
aggaatgtattctct

SEQ ID NO: 2068718 - DNA, 15 bp, Homo sapiens
ggaatgtattctctc

SEQ ID NO: 2068719 - DNA, 15 bp, Homo sapiens
gaatgtattctctca

SEQ ID NO: 2068720 - DNA, 15 bp, Homo sapiens
aatgtattctctcac

SEQ ID NO: 2068721 - DNA, 15 bp, Homo sapiens
atgtattctctcaca

SEQ ID NO: 2068722 - DNA, 15 bp, Homo sapiens
tgtattctctcacag

SEQ ID NO: 2068723 - DNA, 15 bp, Homo sapiens
gtattctctcacagt

SEQ ID NO: 2068724 - DNA, 15 bp, Homo sapiens
tattctctcacagtt

SEQ ID NO: 2068725 - DNA, 15 bp, Homo sapiens
attctctcacagtta

SEQ ID NO: 2068726 - DNA, 15 bp, Homo sapiens
ttctctcacagttat

SEQ ID NO: 2068727 - DNA, 15 bp, Homo sapiens
tctctcacagttatg

SEQ ID NO: 2068728 - DNA, 15 bp, Homo sapiens
ctctcacagttatgg

SEQ ID NO: 2068729 - DNA, 15 bp, Homo sapiens
tctcacagttatggg

SEQ ID NO: 2068730 - DNA, 15 bp, Homo sapiens
ctcacagttatggga

SEQ ID NO: 2068731 - DNA, 15 bp, Homo sapiens
tcacagttatgggag

SEQ ID NO: 2068732 - DNA, 15 bp, Homo sapiens
cacagttatgggagc

SEQ ID NO: 2068733 - DNA, 15 bp, Homo sapiens
acagttatgggagct

SEQ ID NO: 2068734 - DNA, 15 bp, Homo sapiens
cagttatgggagcta

SEQ ID NO: 2068735 - DNA, 15 bp, Homo sapiens
agttatgggagctag

SEQ ID NO: 2068736 - DNA, 15 bp, Homo sapiens
gttatgggagctaga

SEQ ID NO: 2068737 - DNA, 15 bp, Homo sapiens
ttatgggagctagaa

SEQ ID NO: 2068738 - DNA, 15 bp, Homo sapiens
tatgggagctagaag

SEQ ID NO: 2068739 - DNA, 15 bp, Homo sapiens
atgggagctagaagt

SEQ ID NO: 2068740 - DNA, 15 bp, Homo sapiens
tgggagctagaagtc

SEQ ID NO: 2068741 - DNA, 15 bp, Homo sapiens
gggagctagaagtct

SEQ ID NO: 2068742 - DNA, 15 bp, Homo sapiens
ggagctagaagtctg

SEQ ID NO: 2068743 - DNA, 15 bp, Homo sapiens
gagctagaagtctga

SEQ ID NO: 2068744 - DNA, 15 bp, Homo sapiens
agctagaagtctgaa

SEQ ID NO: 2068745 - DNA, 15 bp, Homo sapiens
gctagaagtctgaaa

SEQ ID NO: 2068746 - DNA, 15 bp, Homo sapiens
ctagaagtctgaaat

SEQ ID NO: 2068747 - DNA, 15 bp, Homo sapiens
tagaagtctgaaatc

SEQ ID NO: 2068748 - DNA, 15 bp, Homo sapiens
agaagtctgaaatca

SEQ ID NO: 2068749 - DNA, 15 bp, Homo sapiens
gaagtctgaaatcaa

SEQ ID NO: 2068750 - DNA, 15 bp, Homo sapiens
aagtctgaaatcaag

SEQ ID NO: 2068751 - DNA, 15 bp, Homo sapiens
agtctgaaatcaagg

SEQ ID NO: 2068752 - DNA, 15 bp, Homo sapiens
gtctgaaatcaaggt

SEQ ID NO: 2068753 - DNA, 15 bp, Homo sapiens
tctgaaatcaaggtg

SEQ ID NO: 2068754 - DNA, 15 bp, Homo sapiens
ctgaaatcaaggtgt

SEQ ID NO: 2068755 - DNA, 15 bp, Homo sapiens
tgaaatcaaggtgtc

SEQ ID NO: 2068756 - DNA, 15 bp, Homo sapiens
gaaatcaaggtgtcc

SEQ ID NO: 2068757 - DNA, 15 bp, Homo sapiens
aaatcaaggtgtccg

SEQ ID NO: 2068758 - DNA, 15 bp, Homo sapiens
aatcaaggtgtccgc

SEQ ID NO: 2068759 - DNA, 15 bp, Homo sapiens
atcaaggtgtccgca

SEQ ID NO: 2068760 - DNA, 15 bp, Homo sapiens
tcaaggtgtccgcag

SEQ ID NO: 2068761 - DNA, 15 bp, Homo sapiens
caaggtgtccgcaga
